United States Patent Application Publication US 2004/0214272 A1 - sequence listing, part 50

SEQ ID NO: 245054 - protein, 108 aa, Zea mays
  unsure (1)..(108): unsure at all Xaa locations
  Clone ID: MRT4577_155078C.1.pep
AYYQQQQFLPFXRLTAVYFTDYCXQQLPFSQLVAAYVQQFIPFEHLQALXSXAYRRQQQLAPFSXLXDVSPXALVAQRQLVQLGVHSALKSGTLLHVQQWLPYKLRRL

SEQ ID NO: 245055 - protein, 75 aa, Zea mays
  unsure (1)..(75): unsure at all Xaa locations
  Clone ID: MRT4577_155079C.1.pep
VMPGPLESTLPRELTRFLPPPSAFGGVCLGALTVLADFMGAIGSGNGLLLPVPFIYPGFXPFQKERAPQLGFFGF

SEQ ID NO: 245056 - protein, 133 aa, Zea mays
  Clone ID: MRT4577_15507C.1.pep
MGGSPARAPPPFGLGLPGLQNAQPPPPQQQNGGGGVMAAGLWRTTSFPGPGGDKGGGGGSGDGITRGFFGLGAFFPRDILGLAGLGSLGMGALPPRASMGFFQPQQQHSQPQGPPHQQNNNEPWPGMGQPKLA

SEQ ID NO: 245057 - protein, 68 aa, Zea mays
  Clone ID: MRT4577_155080C.1.pep
SDKLLIQNLYEMLKTDRFDRKNNVIDGCFKQHHALMIAGLPPLVKVIHPNNVHRDTSHTHPCDSFAFA

SEQ ID NO: 245058 - protein, 48 aa, Zea mays
  Clone ID: MRT4577_155081C.1.pep
SLILRSPTMVGSLVELGGPNYCALEFHGCLSCLGTQRSGAQSSALGPL

SEQ ID NO: 245059 - protein, 151 aa, Zea mays
  unsure (1)..(151): unsure at all Xaa locations
  Clone ID: MRT4577_155082C.1.pep
IYQVTRQRKNKGEWCHLFKVEVLSIELITAYGTEPKVKIEEYQKAKPDIIAHSAPNVISRLRAGGDKVTQALKSLCWRSKAIQVEEAAVIGVDCLGFDLRVCSGTQVQTLRLAFPTKATXSEFSAEKQIHELLFARNTHEEGQSPQARQKS

SEQ ID NO: 245060 - protein, 137 aa, Zea mays
  Clone ID: MRT4577_155083C.1.pep
QSYHYHLGMELLNQSDGAGEALLKMLWHHPDAVLCCSFKEKPMFTFANKAGLDMLETSLVALQDLTLDKIFDESGRKALFSDISKLMEQGYAYLPSGVCMSGMGRHVSFDQAVAWKVLGEDSNIHCLAFCFVNWSFV

SEQ ID NO: 245061 - protein, 62 aa, Zea mays
  Clone ID: MRT4577_155084C.1.pep
GFEETNQPGPIREKQTPGLFLIISCKALGSFSLPQACIQPPLPQGLGIKLSFASVKKKKNPP

SEQ ID NO: 245062 - protein, 840 aa, Zea mays
  unsure (1)..(840): unsure at all Xaa locations
  Clone ID: MRT4577_155085C.1.pep
MAAAVAMRGGSSDSGGFDKVPGMDSGKYVRYTPEQVEVLERLYIDCPKPSSSRRQQLLRECPILSNIEPKQIKVWFQNRRCRDKQRKESSRLQAVNRKLTAMNKLLMEENERLQKQVSQLVHENAHMRQQLQNTSLANDTSCESNVTTPPNPIRDASNPSGLLAIAEETFTEFLSKATGTAIDWVQMPGMKPGPDSVGIVAISHGCRGVAARACGLVNLEPTKVIEILKDRPSWFRDCRSLEVFTMFPAGNGGTIELIYMQMYAPTTLVPARDFWTLRYTTTMEDGSLVVCERSLTGSGGGPNAASAQQFVRAEMLPSGYLVRPCEGGGSIVHIVDHLDLEAWSVPEVLRPLYESSRVVAQKMTTVALRHLRQIAQETSGEVVYALGRQPAVLRTFSQRLSRGFNDAISGFNDDGWSVMGGDGIEDVVVACNSTKKIRNTSNAGITFGAPGGIICAKASMLLQSVPPAVLVRFLREHRSEWADYNIDVYLASSLKTSACSLPGLRPMRFSGGQMIMPLAHTVENEEILEVVRLEGQPLTHDEALLSRDIHLLQLCTGIDEKSVGSSFQLVFAPIDEHFPDDAPLISSGFRVIPLDMKTDGVSSGRTLDLASSLDVGSAAPQASGDAPPDDCNLRSVLTIAFQFPYEMHLQDSVATMARQYVRSVVSAVQRVSMAISPSQSGLNAGQRMLSGFPEAVTPTIWVWQSYHYHLXAGEALLKMLWHHPNAVLCCSFKEKPMFTFFKEKPMFTFANKAGLDMLETSFIALQDLTLDKIFAESGRKAIFSDISKLMEQGYAYLPSGVCMSGMGRHVSFDQAVAWKVLGEDSSVHCLGLCFVNWSFV

SEQ ID NO: 245063 - protein, 298 aa, Zea mays
  Clone ID: MRT4577_155086C.1.pep
SSSFRDIHLLQLCTGIDEKSVGSSFQLVFAPIDEHFPDDAPLISSGFRVIPLDVKTDGVSSGRTLDLASSLDVGSAAPQASGDASPDDCNLRSVLTIAFQFPYEMHLQDSVAAMARQYVRSVISAVQRVSMAISPSQSGLNAGHRMLSGFPEAATLARWVCQSYHYHLGMELLNQSDGAGEALLKMLWHHPDAVLCCSFKEKPMFTFANKAGLDMLETSLVALQDLTLDKIFDESGRKALFSDISKLMEQGYAYLPSGVCMSGMGRHVSFDQAVAWKVLGEDSNIHCLAFCFVNWSFV

SEQ ID NO: 245064 - protein, 193 aa, Zea mays
  Clone ID: MRT4577_155087C.1.pep
FGRESLVFSTGHLLQQGHSHRPHSLSSSWECTHPSHGGSSLPIFPQPTFPIDAAAPVSCTLVAPAPSHGPVRPPVSYLPTPYLPHDTFPPSLSSQPWTPLAVSSLQPSPSPSPSMLSSRPGLHQQLAQHRAPSSPAWRPASVARPPRPAASSSFPLAMNVVDPLLQFLHVVWSSTAHVTCSWLWETSEPLLTT

SEQ ID NO: 245065 - protein, 73 aa, Zea mays
  Clone ID: MRT4577_155088C.1.pep
MGTMVAAVALRGGSSDSGGFDKVPGMDSGKYVRYTPEQVEVLERLYIDCPKPSSSRRQQLLRECPILSNIEPK

SEQ ID NO: 245066 - protein, 60 aa, Zea mays
  Clone ID: MRT4577_155089C.1.pep
RVRLVTRSRFFNVAVKRKFWWLKFKGNNLVLVSNHLSVCQRPSQVFNNIPIRVGQSIIKC

SEQ ID NO: 245067 - protein, 454 aa, Zea mays
  Clone ID: MRT4577_15508C.1.pep
MASTAARRLRELQAQTGNKTCVDCAQRNPQWASVSYGVFMCLECSGKHRGLGVHISFVRSVTMDSWTEAQLRKMEAGGNDRLNAFLTARGVPKETPHVAKYNSNAAAAYRDRIAALAEGKPWTDPPVVKETPGSGAPAPARKPPVHTSAASGGGGWDDWDDDFRPDMRRNQSVGSFAAAGAQSGRQPPRSKSTQDMYTRQQLEASAANKEDFFARRMAENESKPDGIPPSQGGKYVGFGSSPPPSANRNGGAAQGDVMQVVSQGFGRLSLVAASAAQSAASAVQVGTKEIQSKMRDGGYDQKVNETVSVVANKTAEIGSRTWGIMRGVMALASQKVEEYAKEGGVGGWGEDWQHSEQKSEPYQRFEHETNGNSWNSSQNSSSKNNSSSWDDWDDPGKKDEPAKPHQSSDSWAGWDDGKDDGFDSPSYNNHSTSNKGSNQNGTSGGTFWTEGGFR

SEQ ID NO: 245068 - protein, 789 aa, Zea mays
  unsure (1)..(789): unsure at all Xaa locations
  Clone ID: MRT4577_155090C.1.pep
WFQNRRCRDKQRKESSRLQAVNRKLTAMNKLLMEENERLQKQVSQLVHENAHMRQQLQNTSLANDTSCESNVTTPPNPIRDASNPSGLLAIAEETFTEFLSKATGTAIDWVQMPGMKPGPDSVGIVAISHGCRGVAARACGLVNLEPTKGIEILKDRPSWFRDCRSLEVFTRFPAGNGGTIELIYMQMYAPTTLVPARDFWTLRYTTTMEDGSLVVCERSLSGSGGGPNAASTQQFVRAEMLPSGYLVRPCEGGGSIVHIVDHLDLEAWSVPEVLRPLYESSRVVAQKMTTVALRHLRQIAQETSGEVVYALGRQPAVLRTFSQRLSRGFNDAISGFNDDGWSVMGGDGIEDVVIACNSTKKIRNTSNAGITFGAPGGIICAKASMLLQSVPPAVLVRFLREHRSEWADYNIDAYLASSLKTSACSLPGLRPMRFSEGQMIMPLAHTVENEEILEVVRLEGQPLTHDEALLSRDIHLLQLCTGIDEKSVGSSFQLVFAPIDEHFPDDAPLISSGFRVIPLDVKTDGVSSGRTLDLASSLDVGSAAPQASGDASPDDCNLRSVLTIAFQFPYEMHLQDSVAAMARQYVRSVISAVQRVSMAISPSQSGLNAGHRMLSGFPEAATLARWVCQSYPYHLGVELLNQSDEAGEALLKMLWHHPHAVVCCSFKVPEELYSSPQYSNLLKHRQIPLXEKPMFTFANKAGLDMLETSLIALQDLTLDKIFDESGRKAIFSDISKLMEQGYAYLPSGVCMSGMGRHVSFDQAVAWKVLGEDSSVHCLAFCFVNWSFV

SEQ ID NO: 245069 - protein, 56 aa, Zea mays
  unsure (1)..(56): unsure at all Xaa locations
  Clone ID: MRT4577_155091C.1.pep
GGKVAGSGPIYNKDDWFPPGEVYVGGTPGLLIWALPPPGILGGGALLVXNTSALSG

SEQ ID NO: 245070 - protein, 658 aa, Zea mays
  unsure (1)..(658): unsure at all Xaa locations
  Clone ID: MRT4577_155092C.1.pep
SVLVXYDQQLQREVEIYRVKLPGELKIGEGKPENQNHALIFTRGDAVQTIDMNQDNYFEEALKMRNLLEEFNRYYGIRKPKILGVREHVFTGSVSSLAWFMSAQETSFVTLGQRVLADPLKVRMHYGHPDVFDRLWFLGRGGISKASRIINISEDIFAGFNCTLRGGNVTHHEYIQVGKGRDVGLNQVSMFEAKVASGNGEQTLSRDVYRLGHRLDFFRMLSFFYTTRPFYFNTMMVVLTVYAFVWGRFYLALSGLEDYINKNTSSSNNAALGAVLNQQFVIQLGLFTALPMIIENSLEHGFLTAVWDFMKMQLQFASVFYTFSMGTKTHYYGRTILHGGAKYRATGRGFVVEHKKFAENYRLYARSHFIKAIELGVILTLYASYGSASGNTLVYILLTLSSWFLVSSWILAPFIFNPSGFDWLKNFNDFEDFLNWIWFRGGISVQSDQSWEKWWEDETDHLRTTGLWGCILEIILDLRFFFFQYAIVYRLHIADNSRSILVYLLSWTCILLAFVALVTVAYFRDRYSAKKHIRYRLVQAIIVGSTVAAIVVLLEFTKFQFVDTFTSLLAFLPTGWGIISIALVFKPYLRRSEMVWKTVVTVARLYDILFGVIVMAPVAVLSWLPGLQEMQTRILFNEAFSRGLHISQIITGKKAHVF

SEQ ID NO: 245071 - protein, 72 aa, Zea mays
  Clone ID: MRT4577_155093C.1.pep
KKSLTDRPVHIKPIYTVGQAWMKLAARAKRTNHPVCARPYCSFYRVRWFATASARIGTRSRSPIRHGNIFHY

SEQ ID NO: 245072 - protein, 46 aa, Zea mays
  Clone ID: MRT4577_155094C.1.pep
GNLCDGPAASAAANPSSASCRPQELAQAAVLPACWRPSRLTPAFLS

SEQ ID NO: 245073 - protein, 64 aa, Zea mays
  Clone ID: MRT4577_155095C.1.pep
AQPSHVCQHLYSQRPLYLRCLQQRIGLAILHQTSPLANPYQAPCFHLQPRLSGHPPMVSANSSP

SEQ ID NO: 245074 - protein, 60 aa, Zea mays
  Clone ID: MRT4577_155096C.1.pep
KTLAYSPTLRSLSPVTMISGECSIIKCSSSPSTQAPTHSTIFFDNSTIYTPSLSTTYIKF

SEQ ID NO: 245075 - protein, 143 aa, Zea mays
  Clone ID: MRT4577_155097C.1.pep
MLRHCKEALGVAIMLAFARPTKMSPCCPCITPPLLLPTAMTTGVLRPEGFLLLLLLQATVALAVPQQQVLQLQDTVLIDDVVQEAAEEWYHGRHRRTGVAYPLSLPGSLSGVEAHRGAVPPAAFRGTACAGSASSPCRPASPR

SEQ ID NO: 245076 - protein, 28 aa, Zea mays
  Clone ID: MRT4577_155098C.1.pep
MHISVEMLLCSNKISIDLIGGNFKNYSG

SEQ ID NO: 245077 - protein, 46 aa, Zea mays
  Clone ID: MRT4577_155099C.1.pep
CRCGGTLCSMHRYADSHECTFDYKKAGREQIAKQNPVVIAKKINKI

SEQ ID NO: 245078 - protein, 53 aa, Zea mays
  Clone ID: MRT4577_15509C.1.pep
CISRISVENLLSHWTIQAPAYCCSTSHHHTIGLGKNIEILKLTGSGHKSNKAN

SEQ ID NO: 245079 - protein, 100 aa, Zea mays
  Clone ID: MRT4577_1550C.1.pep
ELILCITSLNMSNLFEIAYDKDITVDKAFSSDFRAVNFRRRLRDVLEDDYNNLITQCNNTVISDEDDRTLWLLGNKGFSVKKKKKKKKKKKKKEKKKIKK

SEQ ID NO: 245080 - protein, 71 aa, Zea mays
  unsure (1)..(71): unsure at all Xaa locations
  Clone ID: MRT4577_155100C.1.pep
RDNINTRSMSYHLFFPSRFSRMIHYDIAIVVFELGYEFMSLDFKLINSRVVDLDKLEADLXKFDNRPFFLC

SEQ ID NO: 245081 - protein, 407 aa, Zea mays
  Clone ID: MRT4577_155101C.1.pep
MWQTRSLLLLVAVVVAAALPDGAVAAAAGRCTTSTPVKTYDKCIALPTQGATLAWTYDARNATLDAAFTGSFISPSGWVAWGVNADAPAMTGARVLAAFADPSTGALLALPFLLSPDVKLQASPLVSRPLDIPLLASSASLVSPARTVRDGARVTVAATIRLSPNRTRVHFVWNRGLYVQGYSPTIHPTDASDLASHATVDILTTATEASPIASAALQWLHGSLNALSWGLLLPVGAAVARYLRPCASTGPAWFYAHAAMQATGYTLGAAGFALGLVMGSASPGVTYKLHRGLGIAAATAGSLQTLAMFFRPKTTNRYRKYWKSYHHLVGYGCVVVGVVNVFQGFEVMGLGASYWKLGYCLALATLMGACVALEVNAWVVFCRRQQEEKLMRREVEDVVVKDRAAAF

SEQ ID NO: 245082 - protein, 84 aa, Zea mays
  unsure (1)..(84): unsure at all Xaa locations
  Clone ID: MRT4577_155102C.1.pep
KKKKTKKIKKGRTYLKKSKPANTYIRLSPLFNSILPXLFSLAPLFKPGETRKFISFYLTLTLLPPFKTFANSPLYPLFPIFLFI

SEQ ID NO: 245083 - protein, 74 aa, Zea mays
  Clone ID: MRT4577_155103C.1.pep
MISNSTSVVEVFSRINSKFDLMYAKRAFVHWYVGEGMEEGEFSEAREDLAALEKDYEEVAAEGGGDDGEEDEEY

SEQ ID NO: 245084 - protein, 122 aa, Zea mays
  unsure (1)..(122): unsure at all Xaa locations
  Clone ID: MRT4577_155104C.1.pep
VSRXGKGRLRSSXASVGWTVXXATLPERYASTRXFCRAGPVRXLARRLWRHLXGXXRHEPLHIEPVNWRDDPXESLKGRLGRVRGLICXAAPRMPHHIRHPCDXSFLNSLMWRRIGRMEMMP

SEQ ID NO: 245085 - protein, 92 aa, Zea mays
  Clone ID: MRT4577_155105C.1.pep
PAGIIIVVYRGSSCAPLRLPPRRRQARTRHSSGDHNERGRSIIDDAIRILRHGLRRGPAADLPEPGGQRCRVPHRAHHQHRVSGIWMGEPEM

SEQ ID NO: 245086 - protein, 47 aa, Zea mays
  Clone ID: MRT4577_155106C.1.pep
GARGIQSYDSFTTRLTPTDTSYNPFCYKKSKHYFIIITSTPGQQGLN

SEQ ID NO: 245087 - protein, 67 aa, Zea mays
  Clone ID: MRT4577_155107C.1.pep
YICIVLYAQVVLTIIIWAGRVENLAQTLLSLIEMHTILCRSFQKKDLLMQCWMMHSQAGAFPPGKKI

SEQ ID NO: 245088 - protein, 60 aa, Zea mays
  Clone ID: MRT4577_155108C.1.pep
PAAAGPDVILPGRRAFFSAGALLYLSRGHSRVPYALWRSDTDTAVILQCAGPATHVMIRI

SEQ ID NO: 245089 - protein, 140 aa, Zea mays
  Clone ID: MRT4577_155109C.1.pep
EARRFSAASSRLRYAPAPPSLQRPERLRRLIPVCFWFLPHKGIDVVLFAPDDAKATQTADPNRKKIKLHAGHHPRPRRPPDDSKAGSPCSRAGHHPQEEDQAPASTSFHLLSLPLPYLSKGTNLSASSVDSDFSLLLVLQ

SEQ ID NO: 245090 - protein, 108 aa, Zea mays
  unsure (1)..(108): unsure at all Xaa locations
  Clone ID: MRT4577_15510C.1.pep
ASTFPMGATSWRGGTKSNMAPFAPPPVFSFAPQLPFSLVGATARRRRRKVXLATAAPPSTSAPPYIHTRPHLARPLDCPQRARTNCSALLIQDSAYSTLGATASRYSL

SEQ ID NO: 245091 - protein, 79 aa, Zea mays
  unsure (1)..(79): unsure at all Xaa locations
  Clone ID: MRT4577_155110C.1.pep
NIVFFRRHQQMCPFSPRVGGNIKAFRQQHQLPPFHPHNGATIVAFXQHQQLGPLSQQVLGNPPPLWQSPPMGGAIFPIF

SEQ ID NO: 245092 - protein, 90 aa, Zea mays
  Clone ID: MRT4577_155111C.1.pep
SVPLKTYLPDGDIDVNAFSNSEELKEIWANLVRDALEREEKDENAEFHVKEVQYIQAEVKIIKCLVENIVVDISFNQVGGLCTLCFLEEI

SEQ ID NO: 245093 - protein, 63 aa, Zea mays
  Clone ID: MRT4577_155112C.1.pep
APLVPDDHHANGLESSPFMKSVSTHESKRTLPSFDVRHRPCPATEAPVHGPPCTGCCTVIGGM

SEQ ID NO: 245094 - protein, 104 aa, Zea mays
  Clone ID: MRT4577_155114C.1.pep
QKKKTKNKTKNKKKKKKKKKKKKKKKKKFFLFSLPPFGRFLRISTTPGGRWGLLLGGPIGPIVGRITFHWPFFYNFFTLKNPAITHLNPLLGHPPFLACCGFQE

SEQ ID NO: 245095 - protein, 56 aa, Zea mays
  Clone ID: MRT4577_155115C.1.pep
LLFRPGCGYGRGCAQLWLWRRRLAGGFCPVPVGGLRPCLPVGGGFSRVGPPAFCGS

SEQ ID NO: 245096 - protein, 90 aa, Zea mays
  Clone ID: MRT4577_155116C.1.pep
MFPPSSYTARSWERFYPSRFRAGNNSRAGDLDFWRPPFFFFFRSTFIQRNKCGSCQVARSGLLRLQHVSHSLIHRGGEIVNVASWSAECV

SEQ ID NO: 245097 - protein, 177 aa, Zea mays
  Clone ID: MRT4577_155117C.1.pep
RGLFFFFFSANNLPDAFTNYKGVIKSFIPARNAPERVEVPNKTTQNPTNKRGRSKATNKDSPPLKKRKTVNAHQQQVDETQCGIDTQPSSNAHIVEEVISENPRTMDMGNPDVSLRVDELATNYIETGETFDRKATVVDSYFSEQVADILNDLDPKSMVECRKRSDWNQWKEAKPGR

SEQ ID NO: 245098 - protein, 59 aa, Zea mays
  Clone ID: MRT4577_155118C.1.pep
WVGGGFFFFFFFFFFFFFFFFFFFFFFFFFFFFWATKQGPTPPTKKLPLQGGGGENPRP

SEQ ID NO: 245099 - protein, 83 aa, Zea mays
  Clone ID: MRT4577_155119C.1.pep
PSVRHSSSHHNLSSYPFLNNRYNTFLSCLHTISTTSHLLPHFLPSSKNYHSISSNHILNYLKYLHKHPTTSYNTTTPNHYIFN

SEQ ID NO: 245100 - protein, 52 aa, Zea mays
  Clone ID: MRT4577_15511C.1.pep
MGVATWLTHEKKKKKKKKKKKKKKKKKKKKKKKKKKGRSQLKNNSLVAFKQT

SEQ ID NO: 245101 - protein, 93 aa, Zea mays
  Clone ID: MRT4577_155120C.1.pep
SIFRLPVCVSSYIVIQLPVMVCSDYEMIMITDGDVVSSPGHLARFWHTTVLCIIGCVTDDTMLAMSPAVLRHHPSIILSIPHLLWTKSTLKGP

SEQ ID NO: 245102 - protein, 79 aa, Zea mays
  Clone ID: MRT4577_155121C.1.pep
KKPNNGKKVRDYKPPRKTGTKPYQHMGGSGKKKALQVGKKESAIRWPPAGKKEVAVKKVSGGFLGGDPRWGAPKKRAKT

SEQ ID NO: 245103 - protein, 50 aa, Zea mays
  Clone ID: MRT4577_155122C.1.pep
KGPFSRGLILDHQPLFFLWQQRLYNRKTQFTERGVQEIKHATLMKFNQGA

SEQ ID NO: 245104 - protein, 112 aa, Zea mays
  unsure (1)..(112): unsure at all Xaa locations
  Clone ID: MRT4577_155123C.1.pep
KPGAKKQGIGAKKGAKKKKQRGKNRQKWQKKKGKKQKQPPLKTPQKKRSNRAKPPPPKGIKRHKKGRNNXNQAVQKLKKTKRKGIKKNTAKAKKSKFNKGKKMGNARDLNNH

SEQ ID NO: 245105 - protein, 476 aa, Zea mays
  Clone ID: MRT4577_155124C.1.pep
MGASLGSAASKNRQQEHGGEAPRPDPCKKTRLSTPLCTIHGHSRLIPGLPDEVSLQILARMPRMGYLKAKMVSRSWKAAVTGAELYRLRKELGVAEEWLYILTKAAAGGQKLVWHALDPVSNQWQRLPLMPGIECRSGGVYGLGLRDLVSVGVGIFDVIRGWLGQKELSGGVPPFCGCAVGAAGGCLYVLGGFSGASASKRVWRYDPSANSWREVSPMRAGRAFCKASLLNDKLYVVGGVSKGENGLIAPLRSAEVFDPATGAWAELPDMLFSKSQAMPTAIADLLKPVAAGVTSYGGKLHVPQSFYSWPFAVDVGGEVFDPETNSWEQMPAGMGEGWPARQAGTRLSAVVEGDLYALEPATSSSGGCEIKMYDAQEDAWKVAVSQVRAGAFDESDSPCLLAAFLGKLHLVVKDMGSRISVVQMDSLMKPVDSPALSAATTCRTPDVSSEQTHVWKAIASKNIAAAELVSCQVLSI

SEQ ID NO: 245106 - protein, 105 aa, Zea mays
  unsure (1)..(105): unsure at all Xaa locations
  Clone ID: MRT4577_155125C.1.pep
MGASLGSAASKDRQQEHGGEAPRPDPCKKTRLSSPLCTIHGSHGHPRLIPGLPDEVSLQILARMPRMXYLKAKMVSRSWKAXVTGAELYRLRKELGVAEEWLYIL

SEQ ID NO: 245107 - protein, 227 aa, Zea mays
  Clone ID: MRT4577_155126C.1.pep
MQSLEESAELLRERCLKFHKGCRKYTEGLGEAYDGDIAFASSLETFGGGHNDPISVAFGGPVMTKFTIALREIGTYKEVLRSQVEHMLNDKLLQFVDIDLHEMKDARKRFDKATLLYDQAREKYLSLKKGTRTDVATAVEDELHSARSLFEQARFNLVTALSNIEAKKRFEFLEAVSGTMDAHLRYFKQGYELLHQMEPYINQVLAFAQQSRERSNYEQAALLERMQ

SEQ ID NO: 245108 - protein, 229 aa, Zea mays
  Clone ID: MRT4577_155127C.1.pep
MATTAAAAPDLSLHISPPSPPDDARSSDMLFSKQTLCLGLVQTTTAAAAHDQDGQCDDVQQQQRLHQPSQIQRFKKTSSSSAPLLSAGGGTTRSGNGNSGGGKRSSRAPRMRWTTALHAHFVHAVELLGGHERATPKSVLELMNVKDLTLAHVKSHLQMYRTVKGTTADRSCAAGHVQMRDMGFLHRGCELNGFEAFSNGTSNATANNRDGGPAEARISKTLPPPRRSS

SEQ ID NO: 245109 - protein, 80 aa, Zea mays
  Clone ID: MRT4577_155128C.1.pep
VFTNYMYNKSRMVNVLEIYKIGNVGHTSANVSINMFPHIMNNYFPYAAFQTKTNECYACHDTSWVTTHMFIVNRFLSIIL

SEQ ID NO: 245110 - protein, 106 aa, Zea mays
  Clone ID: MRT4577_155129C.1.pep
PPVFPPRRGPSGSSSEFGGPRCPVVNGLLPPPGFPLWAPVRWYPRVLFFGGAGPFLLLPPGVRVLLVHFFFCNPPLRLAFLAPAFFWPGRLLSLLPGLVFHVLLWG

SEQ ID NO: 245111 - protein, 91 aa, Zea mays
  unsure (1)..(91): unsure at all Xaa locations
  Clone ID: MRT4577_15512C.1.pep
AELYTQFIXAGPGXTAELYADRAQAHIKLGSYTEAVADANKAIELDPSMHKAYLRKGSACIKLEEYQTAKAALEVGSSYASGDSRFTRLMK

SEQ ID NO: 245112 - protein, 84 aa, Zea mays
  Clone ID: MRT4577_155130C.1.pep
SSLFGKDITGAVAGPDSTPYDPKTLLPYRHAPIPPRPARPSYAPPQSSNPFEVGSSYSKRSARALCMSACFFSVGGFFHAWHRR

SEQ ID NO: 245113 - protein, 68 aa, Zea mays
  Clone ID: MRT4577_155131C.1.pep
MEDQRRASARRCRPPAARPRPAGQCAASASRLPRHGHQQQQTVILERRCGKPLVVDGGGGAFAVKWQE

SEQ ID NO: 245114 - protein, 157 aa, Zea mays
  Clone ID: MRT4577_155132C.1.pep
MGFVSFVGRVLFVAAFLLSAYQEFNEFGTDGGPAAKALQPKFNVFVKNISAQLGVAVPHIELKHVIAATIGLKGLGSLLFILSSSLGAYLLLFYLALITPIIHDFYNYDMEKAEFAQLFGKFTQDVALIGALLFFLGMKNSIPKRQGKKKAAKAKTN

SEQ ID NO: 245115 - protein, 47 aa, Zea mays
  Clone ID: MRT4577_155133C.1.pep
PGSFRQVDQQGAGDVNVGHAQSSNASLAPMVPPPPQASASPDLTLKL

SEQ ID NO: 245116 - protein, 50 aa, Zea mays
  unsure (1)..(50): unsure at all Xaa locations
  Clone ID: MRT4577_155134C.1.pep
XVHMXLQMRXDKDRQXYXXXECXXIXXXXXXXICXLXXEPNSEXTXAYGX

SEQ ID NO: 245117 - protein, 47 aa, Zea mays
  unsure (1)..(47): unsure at all Xaa locations
  Clone ID: MRT4577_155135C.1.pep
LPPLVPIHGAFLWRRSWRAIACDXGDGSCCCCRRSYERGSGSWCVLR

SEQ ID NO: 245118 - protein, 113 aa, Zea mays
  Clone ID: MRT4577_155136C.1.pep
PPFFFCLFPGIPLSPLNILYLPYSPPLSSPFIFPACILYGLVPEFPFLPPPPFYHPSPQFPPYSLYFYLLPPLNPSLFSGKNPRARLNPLPIKNTLILTLLLSLTISKTSILK

SEQ ID NO: 245119 - protein, 57 aa, Zea mays
  unsure (1)..(57): unsure at all Xaa locations
  Clone ID: MRT4577_155137C.1.pep
RRSGVTSGWLVRACRVPPSGVLQCHGVDQVWWQHKASSEEXETNSGTPPAGNKQARV

SEQ ID NO: 245120 - protein, 27 aa, Zea mays
  Clone ID: MRT4577_155138C.1.pep
MGIGEHFKGVKLHWASNIAFLDYFKKV

SEQ ID NO: 245121 - protein, 408 aa, Zea mays
  Clone ID: MRT4577_155139C.1.pep
MDAKGIQQLAEAASRSRPGGAYVDEEEEDTYVPRKAELAAGTMAPVSISAVPFLPTAAEGETKLRASFVREEDERPKVPHDRFSDEVPVVSLEGIDGARRAEIRARVAAACEDWGIFQVVDHGVDAALVADMARLARDFFALPPEDKLRFDMSGGKKGGFIVSSHLQGEAVQDWREIVTYFSYPVKARDYSRWPDKPAAWRAVVERYSEQLMALACRLLGVLSEAMGLDTEALARACVDMDQKVVVNFYPRCPQPDLTLGLKRHTDPGTITLLLQDLVGGLQATRDGGRTWITVQPVEGAFVVNLGDHGHLLSNGRFKNADHQAVVNSECSRLSIATFQNPAPDATVYPLAVRDGEAPILDHPITFAEMYRRKMARDIELARLKKQAKADKSANKEFADSKPLDAILA

SEQ ID NO: 245122 - protein, 84 aa, Zea mays
  Clone ID: MRT4577_15513C.1.pep
GQSPGFNLGFPIDNGLHFVHKTKPNWGGLTATKRGETVLNHPWGHHRGRKDKTQESFWIWGYAVHIPFHFLLGRNGCIFWWWNT

SEQ ID NO: 245123 - protein, 236 aa, Zea mays
  unsure (1)..(236): unsure at all Xaa locations
  Clone ID: MRT4577_155140C.1.pep
MGRSPCCEKAHTNKGAWTKEEDDRLIAYIKAHGEGCWRSLPKAAGLLRCGKSCRLRWINYLRPDLKRGNFSDEEDELIIKLHSLLGNKWSLIAGRLPGRTDNEIKNYWNTHIRRKLTSRGIDPVTHRAINSDHAASNITISFEAAAQRDDKGAVFRRDAEPTKAAAAAITHVDHHHRSNPHHQMDXXPGKPLKCPDLNLDLCISPPSHEGPMVDTKPVVKEEAGAGXVGVVGLCFS

SEQ ID NO: 245124 - protein, 117 aa, Zea mays
  Clone ID: MRT4577_155141C.1.pep
PFHRLFFTTLATHLSLVTYLALSNLLTTNYQYSIFTIATNTWLPTHLLLPINPFVSYSPALAHLCSPTFIQLTILYDYFVQEPLHYLNQCLLNHLNQYHAMIEQHHTCRSKLKRHGT

SEQ ID NO: 245125 - protein, 99 aa, Zea mays
  Clone ID: MRT4577_155142C.1.pep
QGRLVIEQTQGTLNSSELLLLTQKQNPNQAPNPSICNPVAVIQLLEKNTRPEIRNKKFKSTNKREHAMKLVQSKLQSTSKTSPMLPLHHFSNQGQSSSF

SEQ ID NO: 245126 - protein, 176 aa, Zea mays
  unsure (1)..(176): unsure at all Xaa locations
  Clone ID: MRT4577_155143C.1.pep
DWVVTXPCPIEPVAPVREANEADVTWQTRXRDFAPIKMXYDLEHKKWVTANKKCLAVIKNTIVPTIVGLVPECEPVTEYLDKINSQFTGSSKTYATQLIKQLMTERYSGGGSGIREHILRMSNMAXKLKPMDLALKDEFLIHIIFASLAKEFDTFVVNYNIQPEKWDLEKLIAMCV

SEQ ID NO: 245127 - protein, 74 aa, Zea mays
  Clone ID: MRT4577_155144C.1.pep
LSKTYNGCIVVVVIVKLLTVILFQKFCILHSKKKKKKKKKKKKKKKKKKKKKKKKKKKKKKKGRHPQNFKTRSF

SEQ ID NO: 245128 - protein, 70 aa, Zea mays
  Clone ID: MRT4577_155145C.1.pep
PQCQLRNPVKDWSGLSKKSRGFTEAFPKPKKGLFLLKRTWKDLQKRDLFLYNPNPFFKSWPRFQDLCKQV

SEQ ID NO: 245129 - protein, 65 aa, Zea mays
  Clone ID: MRT4577_155146C.1.pep
VKGASHASPPCYLSPSAHQLQSLQLVEPNQPPENAHFCTHDCFRAAWTHYTSQHPKPDAHSYQHS

SEQ ID NO: 245130 - protein, 103 aa, Zea mays
  Clone ID: MRT4577_155147C.1.pep
GGCNLPHFFSAGLWLQFCFSNPVNFDLFKFFNWGHPLFGPFHDSLLCKHFQRALVNFVRVIGLCPFEIVFLLCKKKSGRRCGFSRKKKKKTPKKKKKKKEKLL

SEQ ID NO: 245131 - protein, 69 aa, Zea mays
  Clone ID: MRT4577_155148C.1.pep
ILSTKETAFTNSILITSVPSWTHNTTMFHTQLVDRYTQIDSLAANLCDVVTHIPTVDKVAIANANLQHP

SEQ ID NO: 245132 - protein, 158 aa, Zea mays
  Clone ID: MRT4577_155149C.1.pep
MASASAPEVVVVFDFDRTIIDWDSDDWVITKLGAADAFQRLRPTMRWNPLMDRMMAELHARGKTPEDIRDCLRSAPLDTHVVSAVKTAAALGCDLKVVSDANTFFIETVLAHHGVLGCFSEIVTNPASVDADGRLRISPFHDPASAPHGCSLCPDNMC

SEQ ID NO: 245133 - protein, 74 aa, Zea mays
  Clone ID: MRT4577_15514C.1.pep
MISPEDPCKCFVKRVIRMHGYSVTYLVDPGISDCFFRTAVVPQDHVWVHGDNIFASHDSRRFGSPPYWLITRKI

SEQ ID NO: 245134 - protein, 199 aa, Zea mays
  unsure (1)..(199): unsure at all Xaa locations
  Clone ID: MRT4577_155150C.1.pep
MASASAPAVVVVFDFDRTIIDWDSDDWVITKLGAADAFQRLRPTMRWNPLMDRMMAELHARGKTPEDIRDCLRSAPLDTHVVSAVKTAAALGXHHHTMPTTFSPAAAALAFGTDRPMFFDAGNGMAAAAPVCRCDLKVVSDANTFFIETVLAHHGVLGCFSEIXHNPASVDADGRLRISPFHDPASAXPHGCSLCPDNM

SEQ ID NO: 245135 - protein, 116 aa, Zea mays
  Clone ID: MRT4577_155151C.1.pep
GGSNTFICRVFHKCWATSGSSYESFLLDLLSLQDTVLEVVPVSRISREVSGSWQCSQVSLPSVKLHLSGAVKWVEYAEPVHWVLTSVAVGAVEGRHLEGGRHDERQSGESCAATLS

SEQ ID NO: 245136 - protein, 298 aa, Zea mays
  Clone ID: MRT4577_155152C.1.pep
MELHLCLRLHVRLTPAAKPPPAPAVLPVPASRRLRMGGSYGVALRRHTRRSNRAIHTSLADGEQGVAVDAVKERSVSVILLSGGQGKRMGASMPKQYLPLLGLPIALHSLKTFCQLKEVKEVVVVCDPDYIDVFEGSIKNLQLPLKFARPGKERQDSVFNGLQEIDGDSELVCVHDSARPLVSSEDVKKVLEDAAVHGAAVLGVPVKATIKEANSDSFVMKTLDRKTLWEMQTPQVMKPNLLKDGFELVKRDNHEVTDDVSIVEYLKHPVYITEGSYTNIKVTTPDDLLLAERLMNEK

SEQ ID NO: 245137 - protein, 94 aa, Zea mays
  Clone ID: MRT4577_155153C.1.pep
RPSSANPPLSCRAPRFPTRHPALRVSLPTLPLAYHAAPPSASVAREPMISMDPPAILPAFPRKTNTPSTLHTGGLVGSYSSSAVPAGVAAVGTR

SEQ ID NO: 245138 - protein, 84 aa, Zea mays
  Clone ID: MRT4577_155154C.1.pep
FLPSLFPSSLSGGKKLTARFNFKFFTVLFLASTLASAGDPKLWAVFAKKTPFKWDPFALCWWWPLKGPFLNFFFSNPLGLVNGN

SEQ ID NO: 245139 - protein, 319 aa, Zea mays
  unsure (1)..(319): unsure at all Xaa locations
  Clone ID: MRT4577_155155C.1.pep
MELRLCLRLHARLPPATTPPPFQAAAVLPASRRLRTGGSYGVALRRHTRRSSPAICASITDGEQGVAVKERSVSVILLSGGQGKRMGANMPKQYLPLLGLPIALYSLKTFCQLKEVKEVVVVCDPDYSDVFEGSIDNLQIPLKFARPGKERQDSVFNGLQEIDGDSELVCVHDSARPLVSSEDVKKVLEDAAVHGAAVLGVPVKATIKEANSDSFVIKTLDRKTLWEMQTPQVMKPNLLKDGFELVKRLALALSSEQMXYDTVILGFELVKRDNHEVTDDVSIVEYLKHPVYITEGSYTNIKVTTPDDLLLAERLMNEK

SEQ ID NO: 245140 - protein, 110 aa, Zea mays
  Clone ID: MRT4577_155156C.1.pep
MIKLMTDGSASITRFNYAAVIEAAFGFAALKISPLDVSTKILELMAESVNWLIQWHKSGYSDPGNSGGFSGSSSSQTSVEDASRMGNLAVNMFIKLAEALRKTSLVRREE

SEQ ID NO: 245141 - protein, 71 aa, Zea mays
  Clone ID: MRT4577_155157C.1.pep
PTFILSIFSHKLLSSYTNLSSSNYYLSYQLHNEKLLLFTYLKKNKKIPSFLYNPTLLTRPFNNIPPSILSS

SEQ ID NO: 245142 - protein, 88 aa, Zea mays
  Clone ID: MRT4577_155158C.1.pep
APYEIILARECANIGEARFYFFAHILWIFRSISLLKTGVLQLSSPNNFSNSYWRLGQLRQLHTLTSLQLAVSEDLQFRTSGLQLGLWK

SEQ ID NO: 245143 - protein, 42 aa, Zea mays
  Clone ID: MRT4577_155159C.1.pep
LMITAIILLSRYFVCMPHFPDLNLTESAKCSFILFTFNCLAQ

SEQ ID NO: 245144 - protein, 38 aa, Zea mays
  Clone ID: MRT4577_15515C.1.pep
PLLQDQVDTGSPRSWVPPRGYISRWLPILYLMQARGPS

SEQ ID NO: 245145 - protein, 82 aa, Zea mays
  unsure (1)..(82): unsure at all Xaa locations
  Clone ID: MRT4577_155160C.1.pep
MVLDGPEQMELEEGKXGSGLRQYYLXRMEELQLIVNDKSQNLRRLQAQRNELNAKVRLLREELQLLQEQGSYVGEVVRAXEK

SEQ ID NO: 245146 - protein, 62 aa, Zea mays
  Clone ID: MRT4577_155161C.1.pep
RCQFCVSLCAVMDYLCTLCFMGCLCTRRLEVLRFYVVFNLWIVGLKFVYCGCCKGCHFIFTM

SEQ ID NO: 245147 - protein, 56 aa, Zea mays
  Clone ID: MRT4577_155162C.1.pep
SLSRPGLVVQRISSCVHYIHRGQLIVLLQFGSVLITSLEIWGLFFFSPLKFLTVHC

SEQ ID NO: 245148 - protein, 66 aa, Zea mays
  unsure (1)..(66): unsure at all Xaa locations
  Clone ID: MRT4577_155163C.1.pep
LIKEMCKYKISIVKMSNKRYKIKDVLFVYDGKGVIKNVNLRMFTCYDGIFTNMYMYEKDPPXDFRD

SEQ ID NO: 245149 - protein, 131 aa, Zea mays
  unsure (1)..(131): unsure at all Xaa locations
  Clone ID: MRT4577_155164C.1.pep
PRGTSSTPGLLTRGGDDCHGKLKIESSTVPGLIXEIPERASVGSLKKTVVREVTSDLGGRLRVGVLXHGKKVRDDNKSXIHAGIGQEDMLDNLGSSLEPSWTRNPQVPATGDINYPEAIGTAEPPSRIGPA

SEQ ID NO: 245150 - protein, 63 aa, Zea mays
  unsure (1)..(63): unsure at all Xaa locations
  Clone ID: MRT4577_155165C.1.pep
MXEQSERTVGRAHGRELGENRGANKEPATRAEGHGYAHRELGTGAATKQTRPNGENKQGGELE

SEQ ID NO: 245151 - protein, 76 aa, Zea mays
  Clone ID: MRT4577_155166C.1.pep
MTLDQNHAMPMQPPALQPGRKKRPRRSRDGPTSVAAVIQRWAERNKHLEYEESEEAKRPRKAPAKGSKKGCMKGKG

SEQ ID NO: 245152 - protein, 346 aa, Zea mays
  Clone ID: MRT4577_155167C.1.pep
EPSGHLWSGHDAGSEPCHADAAPGPAARKSIWSRGQCCGAWFHQNSRKKRPRRSRDGPTSVAAVIQRWAERNKHLEYEESEEAKRPRKAPAKGSKKGCMKGKGGPDNTQCGYRGVRQRTWGKWVAEIREPNRVDRLWLGTFPTAEDAARAYDEAARAMYGDLARTNFPGQDATTSAQAALASTSAQAAPTAVEALQTGTSCESTTTSNHSDIASTSHKLEASDISSYLKEKCPAGSCGIQDGTPIVADKEVFGPLEPITNLPDGGDGFDIGEMLRMMESDPHNAGGADAGMGQPWYLDELDSSVLESMLQPEPEPEPEPFLMSEEPDMFLAGFESAGFVEGLERLN

SEQ ID NO: 245153 - protein, 39 aa, Zea mays
  Clone ID: MRT4577_155168C.1.pep
LACLRWGVTGPIIQIKVVMYKVVIGSEHMFSYSVDVTQY

SEQ ID NO: 245154 - protein, 71 aa, Zea mays
  Clone ID: MRT4577_155169C.1.pep
SVTGVSAGQSLRKLILSVMFACFLLRLNGGGVSSSIWTPQQSKHSAEGQMGQKKLSMNKNMQSDGGRGRFP

SEQ ID NO: 245155 - protein, 87 aa, Zea mays
  Clone ID: MRT4577_15516C.1.pep
TRCGGPMVASTSKVFSQPKMSTVIQATVLDQVLWGKQIDPCRDSSVHQRVLEGQGFKDVDVKVQSRQETAQYLSKNRLLLLGGRRKQ

SEQ ID NO: 245156 - protein, 66 aa, Zea mays
  unsure (1)..(66): unsure at all Xaa locations
  Clone ID: MRT4577_155170C.1.pep
YLASPGKETWDPQKGPPLFFFIFLFIIFFFFFFFFFNFFLYFIFITFFFIFFFFFIFFFXFLFFFF

SEQ ID NO: 245157 - protein, 63 aa, Zea mays
  Clone ID: MRT4577_155171C.1.pep
ETLGGPVCVTWAKPMKLCGRRLQNLGRVTWALSLLRGPSPCTIHIFMYWVLPTVFYESTYTHM

SEQ ID NO: 245158 - protein, 161 aa, Zea mays
  unsure (1)..(161): unsure at all Xaa locations
  Clone ID: MRT4577_155172C.1.pep
MSKDKHHKHEHHLGCCCGCMAPCLLALVLIVCFVSLXVWYLWLRPSKPSFYLQDLQVRRPISLGDPSLTXSXHVTLASRNHNDRVIIXYKRLYVFVTYXEMSSTXVPVTLPPQYHDHRDFNVMPPVLAAEYVSDDAYCRQHHGTMTGAAILLRAAWIKVGQ

SEQ ID NO: 245159 - protein, 130 aa, Zea mays
  unsure (1)..(130): unsure at all Xaa locations
  Clone ID: MRT4577_155173C.1.pep
MWIFGKTMXGNSITLEVXSSDTIDNVKANIQDKEGMPPNQQRMIFAAKQLKDGRTLAHYNIKKETTLHLVLKLRVVIIETSLXALCRKYNQDKMICXRKCYVRLHPTADNXRTTKXDHRNQLMGKNKIKN

SEQ ID NO: 245160 - protein, 210 aa, Zea mays
  Clone ID: MRT4577_155174C.1.pep
MVRLPYVTALTTLFSYGLLFAFGQLRDFFRRILDARKPSNLKGYAPICLGLEDFYTRRLYLRIQDCFGRPIASAPDAWFDVVERYSNDCNKTLHRTTATTKCLNLGSYNYLGFAAADEYCTPRVIESLKKYSASTCSVRVDGGNTKLHTELEELVARFVGKPAAILFGMGYVTNSAIIPALVGKGSLIISDSLNHNSIVNGARRQQRRQH

SEQ ID NO: 245161 - protein, 62 aa, Zea mays
  Clone ID: MRT4577_155175C.1.pep
SLGFLSDYFGPFPVGGPSFHRASPVTPRRQQQIKAATGANSHRGRNSKLTQTGKISCSTWGA

SEQ ID NO: 245162 - protein, 69 aa, Zea mays
  Clone ID: MRT4577_155176C.1.pep
VFHYFFIGSPLGFTSGISSFSDLRINSPSYKFICTINACRGIMSPTDRRKNGQTALASLNKFRGPPKET

SEQ ID NO: 245163 - protein, 135 aa, Zea mays
  Clone ID: MRT4577_155177C.1.pep
MMDIGKAIGSGAAKKATSRSSKAGLQCPVVRIARFLKGAKYAERVRAGAPVYLAAVLEYLAAEDLELAANAARDNKNTRIVPRHIQLAVRNDEELSRLLGTATIGSAGVPPNIHNLLLPKNAVGTSAKAADGDED

SEQ ID NO: 245164 - protein, 54 aa, Zea mays
  unsure (1)..(54): unsure at all Xaa locations
  Clone ID: MRT4577_155178C.1.pep
LRGGIQIFVNTFTGKTIPLXVESSDPIYNVKVKIQDKEGPPPSQQRFIFPGNQL

SEQ ID NO: 245165 - protein, 42 aa, Zea mays
  Clone ID: MRT4577_155179C.1.pep
MAGFIDRGKNHFDISKDNSFMDDKSSIIIVLEFLLDSDAVND

SEQ ID NO: 245166 - protein, 90 aa, Zea mays
  Clone ID: MRT4577_15517C.1.pep
KRGQKGPPPNRTRGPPGFSPHPPPPNGPLSGRGGNTCPPRLGFPPSLTGKKNFTKLARVLFLPTNPPPLGGGFFPFFSPPRRNWGFWVKI

SEQ ID NO: 245167 - protein, 63 aa, Zea mays
  Clone ID: MRT4577_155180C.1.pep
QPTVTQRNQPVKLASQPARPTSFSLQPLHTLWWTGPPWVFIRVCMLFSGGSMHFFLAPPPGKR

SEQ ID NO: 245168 - protein, 414 aa, Zea mays
  unsure (1)..(414): unsure at all Xaa locations
  Clone ID: MRT4577_155181C.1.pep
MASHRHFLRLLEDPFSPFPPPPPSSSSCPFLLDGVSDYPSPFPAASPFPDLDDLLLPPAPALDPFLAFTPTPLILRDLTNRVAALEVAVAXRAPPPRXPATRKRTYVTEAGGRKVKWTSVEKPRAGERTLKWEAEIKSPDDDGFDRKWKWEAKGGSSAASARKLKWGAAVKGKGCLEPWSQAYTWEEDFTASDSDKEEEERAADKNKAKKITMNKNEKKEVKAVKKEKKCPFATVKIEEISEDNDAGCVAIKKAFAKGNGXKGKRKELSPQDAALLIQMTYRAHLAHRSQVLRCLRDLAVAKAKLKELRSLFYNISYRHRIAHDHEERQRFSEKIIVLLITVDALEGPDYMVRTAKKSMLEELEAMLEVVDPQPPXGKQRSLSRRKFDLPEGGAIPDEKTAAVNKAIRIIEEGK

SEQ ID NO: 245169 - protein, 224 aa, Zea mays
  unsure (1)..(224): unsure at all Xaa locations
  Clone ID: MRT4577_155182C.1.pep
LTTISYDCKEAPVIHEWTYDAMCHDLLEMDGNKYIYEVSKMGSEPEKKESLLEDHDPLWLELRHAHIADASERLYEKMNNFVAKNKAAQLSXDGGEVSTRDLQKIVQALPQYSDQVEKLTLHIEIAGKMNRCIREYGLRDIGQLEQDLVFGDAGANEVISILRSKQDMSPENKMRLLIIYAIVYPEKFEGDKGEKVMHLAKLPHDDMDILNGLGYLNGSNTKKS

SEQ ID NO: 245170 - protein, 91 aa, Zea mays
  Clone ID: MRT4577_155183C.1.pep
VKNPPPGFFNPPPAEGGGAPKKQKTPPPVLGKTPRGAPPRGPPFFFFFLFCFLKSTHKLKKNKFFFFVFFFFFFFFAFFRVLKWRTPLFCK

SEQ ID NO: 245171 - protein, 232 aa, Zea mays
  unsure (1)..(232): unsure at all Xaa locations
  Clone ID: MRT4577_155184C.1.pep
MVVAAAAALYLAXSPCPSSSSSSTTAAXALLRAPXPRRTARARPLRFLSCSTSAPPLFAAVASMDSPPQGYRTNVGICLADPSLTKIFSASRIDIPSAWQMPQGGIDAGEEPRAAAFRELREETGVTSAEIVAEAPVWLTYDFPPDVRTKLNARWGTDWKGQAQKWFLFRLTGNDDEINLNGDGSEKPEFGEWTWMTPKEVIEKAVDFKKPVYEEALKHFAPYLQSDPAASS

SEQ ID NO: 245172 - protein, 317 aa, Zea mays
  Clone ID: MRT4577_155185C.1.pep
MASLTMPPMPAWPRQDAIDLHKAFRGFGCDSTTVTNILAHRDATQRALIQQEYRAVFNQDLARRIASELSGHHKRAMLLWILDPATRDATILKQALTGDITNLRAATEIVCSRTPSQLQIMRQTYRARFGCYVEHDVTERTSGDHQRLLLAYLAIPRAEGHEVDPSTVTLDARDLYKAGERRLGTDERAFIRIFSQRSWAHMAAVARAYHHMYDRPLERAVKSETSGNFGFGLLTVLRCADSPARYFAKELHRAMKGLGTSDSVLIRVVVTRAEIDMQYIKAEYHSMYKRSLADAIHAETSGNYRTFLLSLVGRDRT

SEQ ID NO: 245173 - protein, 219 aa, Zea mays
  unsure (1)..(219): unsure at all Xaa locations
  Clone ID: MRT4577_155186C.1.pep
SLSPSSSSSSTXRPAPSSALRLPRRTASAWLPRFPSCSTSAPPPFAAVASMDAPPQGYRTNVGICLADPSLTKIFSASRIDIPSAWQMPQGGIDAGEEPRAAAFRELREETGVTSAEIVAEAPVWLTYDFPTVVRTKLNARWGTDWKGQAQKWFLFRLTGNDDEINLNGDGSEKPEFGEWTWMTPQEVIEKAVDFKKPVYEEALKHFAPYLQSDPAASS

SEQ ID NO: 245174 - protein, 33 aa, Zea mays
  Clone ID: MRT4577_155187C.1.pep
DLNLDHLNPLSHITQTTKHYIFSSYIYLLNDHL

SEQ ID NO: 245175 - protein, 213 aa, Zea mays
  unsure (1)..(213): unsure at all Xaa locations
  Clone ID: MRT4577_155188C.1.pep
SPCSSSSSTTAAPXRLPRRTARARPLRFLSCSTSAPPLFAAVASMDSPPQGYRTNVGICLADPSLTKIFSASRIDIPSAWQMPQGGIDAGEEPRAAAFRELREETGVTSAEIVAEAPVWLTYDFPPDVRTKLNARWGTDWKGQAQKWFLFRLTGNDDEINLNGDGSEKPEFGEWTWMTPKEVIEKAVDFKKPVYEEALKHFAPYLQSDPAASS

SEQ ID NO: 245176 - protein, 124 aa, Zea mays
  unsure (1)..(124): unsure at all Xaa locations
  Clone ID: MRT4577_155189C.1.pep
PKGRGGSPGXENAVGFPPGGRGSQGGLPRGTFKAPPSPPGNFPLGVPKTPPEPGGVFGVFKGVHPSDPALGAKAPKVVKIPGVWSPPLELFGCLPARCPPPLLVFGRGFVSPGNLWRPQGESCL

SEQ ID NO: 245177 - protein, 356 aa, Zea mays
  Clone ID: MRT4577_15518C.1.pep
MDLNECERRGPAGPDPLSRQGSIYSLTFDEFQNTLGGMGGGLGKDFGSMNMDELLRSIWTAEESQAMASASASASASVSALGAAVDGGAALQRQGSLALPRTLSVKTVDEVWRDFVREAPPGTAGGEEPQPNRQPTLGEMTLEEFLVRAGVVRDNPAAAAAAVPAQPVAPRPIQAVSNGASIFFGNFGGANDAGAGAMVFAPVGIGDQAMGNGLMPGVAGMAGGAVTVSPVDTSVAQLDSMGKSDEDLSSPMAPVPYPFEGVIRGRRSGAGVEKVVERRQRRMIKNRESAARSRARKQAYTMELEAEVQKLKEQNAELQKKQEQIMEMQQNQVPELVSNPYAQKKRCLRRTLTGPW

SEQ ID NO: 245178 - protein, 212 aa, Zea mays
  Clone ID: MRT4577_155190C.1.pep
ALPVLGLIGLRNKGLPRRTASAWLPRFPSCSTSAPPPFAAVASMDAPPQGYRTNVGICLADPSLTKIFSASRIDIPSAWQMPQGGIDAGEEPRAAAFRELREETGVTSAEIVAEAPVWLTYDFPTDVRTKLNARWGTDWKGQAQKWFLFRLTGNDDEINLNGDGSEKPEFGEWTWMTPQEVIEKAVDFKEPVYEEALKHFAPYLQSDPAASS

SEQ ID NO: 245179 - protein, 96 aa, Zea mays
  Clone ID: MRT4577_155191C.1.pep
HVNSLAFFIFILNSLKNFFFGNQKKALSCSRVGRGLTNLLSGRGQLITGYSTYNTQRESDRQRGPSIGYCGPGAGFPQLPGADGHGGPDPATSVLL

SEQ ID NO: 245180 - protein, 65 aa, Zea mays
  Clone ID: MRT4577_155192C.1.pep
KKLHGHFLGCALDIIASPPPTPFFFFFFKKKPLVEVSPTMFSYPNTKRFWRFPSKKHLPPQGPPI

SEQ ID NO: 245181 - protein, 37 aa, Zea mays
  Clone ID: MRT4577_155193C.1.pep
ARCPPPEQSKIHSDTSGYMYDVMIRILKKQLLERPVD

SEQ ID NO: 245182 - protein, 103 aa, Zea mays
  Clone ID: MRT4577_155194C.1.pep
NGKGTNEDTNLYTGHTPLRGEHSAPLFGVIKNRKGLFENTRLETHKTLCGIQNRKSYRPHNPSGGTKRHPFKEKNTPVGDTKNAPYIEQSARAFVITQGKIFT

SEQ ID NO: 245183 - protein, 102 aa, Zea mays
  Clone ID: MRT4577_155195C.1.pep
GCRKRNDESIFEEPLEELIQFQTAPQDVLTLSYPSFITRVNCDEGAYGSISLSTGSGEPATALAVAPILMLTLQVVFRCASETARAPARNRVPVPPMLPVKV

SEQ ID NO: 245184 - protein, 213 aa, Zea mays
  Clone ID: MRT4577_155196C.1.pep
LRGRPDGGVGKAVNMFNVKQVDKKMVKTRAFQEACIYSVVDELAKHLAQWSYSVAFIEMSFLPLVQLRNFCKTIKADRFRKEMKDLIRQVEANVEFISAKRAGITFPPNDPAVDSFLQAEKEVRSSPLSEYVATLHQRAQNRIDSLDETSVIVGAESSTFSKRLSEAQKQQEEHDDSEEPIAFSKNLLAEKKKTKAAKEKSKKRARDDDDVPA

SEQ ID NO: 245185 - protein, 139 aa, Zea mays
  unsure (1)..(139): unsure at all Xaa locations
  Clone ID: MRT4577_155197C.1.pep
VSLLHGTYNERGLQLAENPTLQPYRIQQASTGGMLPLSPXSASNIDQTXHQLPLVHVLPQNIKAQQLQHLVLTNLAGYSQQQEFLPLNQLTALNSAAYXQQQQLPFNQLPADYPNQSLXINQLAESNSAAYLQQQQLLP

SEQ ID NO: 245186 - protein, 99 aa, Zea mays
  Clone ID: MRT4577_155198C.1.pep
EGGNRDDCLREICQDLDELNGWARAVKVNLFGPVDVDPSPQGLFWVVACLLLPICVFDCKVALCAVVSAVFILGYRQTHASNSMDCGSMDAVTPVQVLF

SEQ ID NO: 245187 - protein, 61 aa, Zea mays
  Clone ID: MRT4577_155199C.1.pep
SLGPKKQEATQGRPRAKTRHALALGGKKQHSAKTKEPLEGFFYGSLKALGGGQPQRGRLNP

SEQ ID NO: 245188 - protein, 165 aa, Zea mays
  Clone ID: MRT4577_15519C.1.pep
MDLKDGERRGAAGPEPGPLSRQGSIYSLTFDEFQNTLGGTGGGLGKDFGSMNMDELLRSIWTAEESQAMASASASAAGAAGDGGAALQRQGSLTLPRTLSVKTVDEVWRDFAREGTAGGPESQPNRQPTLGEMTLEDFLVRAGVVRDNPAAAAAVPAQPVATRPS

SEQ ID NO: 245189 - protein, 82 aa, Zea mays
  unsure (1)..(82): unsure at all Xaa locations
  Clone ID: MRT4577_1551C.1.pep
PTGTNGCENQRVPPYRTQHGIXTVTSDLXPKFLHXNTSSLQKVPLVHXLKQNKRAQLLQQLMLENLGGYYQKHEXLXFNQLA

SEQ ID NO: 245190 - protein, 86 aa, Zea mays
  unsure (1)..(86): unsure at all Xaa locations
  Clone ID: MRT4577_155200C.1.pep
MAPTVWSLLMLLGLYAGAATAAIEAQWXQDGIALLLASYLSPAVSSVXENPAVEAYRIQQANASGISPVXPLVLERPXALLQDLPL

SEQ ID NO: 245191 - protein, 71 aa, Zea mays
  Clone ID: MRT4577_155201C.1.pep
YRLYLSGIFVEEHVKLEFWWASRTHTAPHLYFLYINPQYVGMFRDPWFSYLIHGCRYRNQLVVSEGQAGAV

SEQ ID NO: 245192 - protein, 70 aa, Zea mays
  Clone ID: MRT4577_155202C.1.pep
IRKAHSNLVRTKRGLNLVSGWTDQGQLMLGRIHCLDYNFLIEPKAQVKTACARLGTAKLIREEVRGNFDT

SEQ ID NO: 245193 - protein, 38 aa, Zea mays
  Clone ID: MRT4577_155203C.1.pep
LYAQQQQPTNRRHIDGRLARQFTQPLQASCRLKQARWV

SEQ ID NO: 245194 - protein, 101 aa, Zea mays
  Clone ID: MRT4577_155204C.1.pep
PDSLLSQFSAGDAGEEADPAADGGSCGSLLCRLLLVWLHVWKGVRAARAWWHHRRPPQQQAHQYPCRSRCSFEAIVGYGILLFLLCRIKSKWWSSLSCGSC

SEQ ID NO: 245195 - protein, 62 aa, Zea mays
  Clone ID: MRT4577_155205C.1.pep
RTIQTAKFAAAKEGNTLPGASRAERAGAWQPAAGAAGQRERGAREFPETESCLGFLLSLHLA

SEQ ID NO: 245196 - protein, 107 aa, Zea mays
  Clone ID: MRT4577_155206C.1.pep
NCTGRHKNIIECITHGADEVVGGGCPKASGSENVVLGRHERRWPEACTGSGTPNVHKAAVARLGGHRHRVPFAEPPPRVPLENRRLSPSQELPPPRASRGPSPLVHR

SEQ ID NO: 245197 - protein, 103 aa, Zea mays
  Clone ID: MRT4577_155207C.1.pep
PDSLLSQFSAGDAGEEADPAADGGSCGSLLCRLLLVPPQSPAPLRILAGSEHPRSPVPCLLCCRYGFMFGRESARRELGGIIDDLRSNKPTNTPAGPDAHSKP

SEQ ID NO: 245198 - protein, 63 aa, Zea mays
  Clone ID: MRT4577_155208C.1.pep
FGPKVKDVFLAPLRGVLMGGFGLYGWDYNVSSLWRCLSDHKGVLIECHTCVFIGLCKRGCDSC

SEQ ID NO: 245199 - protein, 129 aa, Zea mays
  unsure (1)..(129): unsure at all Xaa locations
  Clone ID: MRT4577_155209C.1.pep
MDSEDDTRDSADEDFYSGGEAGLALSDDGDADYDFADRDSDDSDDLISHRQQQNYSVLSETDIKQHQADDMNRVSTVLSISKSEACALLRSYNWSVSKVHDEWXVDEARVRTAVGLPEKQNEMPNEREL

SEQ ID NO: 245200 - protein, 62 aa, Zea mays
  Clone ID: MRT4577_15520C.1.pep
NAYINHLYYSLFRNLFLENSCRLVHLTYLSSLGRYTSSCLRLFGTYQALGTYIIFHSRNTSP

SEQ ID NO: 245201 - protein, 176 aa, Zea mays
  unsure (1)..(176): unsure at all Xaa locations
  Clone ID: MRT4577_155210C.1.pep
MPANLLPGDGRDAFHRVXSGRGGSPLPWTAKIGPGGLSPKNMGQDLAQETAQDCNGLRANVPLTVHNRQTTVARPPSCAAIVITALKDPKRDRNNVDNIMLSAHICLYDDVHIAKTMRNRYMVXELAGSDMDILGTWDYLGCTVESQDHKDLHIWIDDGEVKIPAACKLDVEGDLH

SEQ ID NO: 245202 - protein, 241 aa, Zea mays
  unsure (1)..(241): unsure at all Xaa locations
  Clone ID: MRT4577_155211C.1.pep
PARGPQDPRPXPTTPTPEQRGRPWRSGRAGAAARATAAVTTAAGRSSPSGPPPSSSWEASSPSWCSPSAWCSRPRPRPTTPCCSGSRWRPPTRRPTPPSPSTSPPRCRSGTPTCTGPSSXRARXPSPSTAPASTTPRPCRGSSTRRGRRXTLSVRVGGVGKPIKLTRPGVGEFRAEXNDTGSLRRGDAAGHGAPVQGPVRQVPARRRLPAPAAARRTPTSPPPRSSGPSALSSGPRSPGSC

SEQ ID NO: 245203 - protein, 90 aa, Zea mays
  unsure (1)..(90): unsure at all Xaa locations
  Clone ID: MRT4577_155212C.1.pep
SEAVGAAARPDPAAPASVAARAPPGERGAVSGDPSSEVNRVGGGISNGHGDDRAAAAAEKAEKARKRXVRSELRRRLAGELDQVRVLSKR

SEQ ID NO: 245204 - protein, 197 aa, Zea mays
  Clone ID: MRT4577_155213C.1.pep
NGKAVSGTGSDEVDCGEVVDGIELNFDAAPLPPEWQRCLDIKSGQIHYYNTRTQKRTWKDPRGEPEYRAAAEEEEEEDSANCAPPGLDLELNLTFEPRRAVAHEKKRPKPPAANKATHDRRRQPAEEAEDSSSGSSREMVAGVCMRCHMLVMMCRASPACPNCKFLHAPSRPVAPEPEPEPPVPLLKLGLQLLCCRD

SEQ ID NO: 245205 - protein, 42 aa, Zea mays
  Clone ID: MRT4577_155214C.1.pep
CLDRRPLPPHLLQFSRCVYWASFCVRNTLSHNPFCTEWCPFF

SEQ ID NO: 245206 - protein, 47 aa, Zea mays
  Clone ID: MRT4577_155215C.1.pep
MADQLTDDQIAEFKEAFSLFDKDGDGKVPFPPPLTPLFVFLRIGSQW

SEQ ID NO: 245207 - protein, 120 aa, Zea mays
  Clone ID: MRT4577_155216C.1.pep
VVLNAATSGTGSGSEGSARSRISCQAFVKEDLRCEIDGHHRSAAASIGHDGSAWAQSESCADFEPEEVAGIIEDFDEPGSLAPAGLFVGGTEYMEIQGEPGVVSRGKRGTGGITIRRGGR

SEQ ID NO: 245208 - protein, 124 aa, Zea mays
  Clone ID: MRT4577_155217C.1.pep
MAAAVVDPQQSVVMRVANLPLVSSTYDLVSSAYVSTKDQYPYLRSVCEMAEKGVKTVTSAAMTSALPIIQKLEPQIAVANTYACKGLDRMEERLPILNQPTSDIVASATGAVTVAKDVASTTMA

SEQ ID NO: 245209 - protein, 88 aa, Zea mays
  Clone ID: MRT4577_155218C.1.pep
DSLRELVPCSTGRIPGRRVLVYGDQGDVRFRRSPADALISSQDRRLRTGSTLNSVTVSGRVFQNMKVTGDLSWAGARLHREGDTTLTC

SEQ ID NO: 245210 - protein, 245 aa, Zea mays
  unsure (1)..(245): unsure at all Xaa locations
  Clone ID: MRT4577_155219C.1.pep
MDSSSSSSSLSQQPEFDYLFKLLLIGDSGVGKSSLLLRFTADSFEDLSPTIGVDFKVKMVTIGGKKLKLAIWDTAGQERFRTLTSSYYRGAQGVIMVYDVTRRETFTNLSDIWAKEIDLYSTNQDCIKMLVGNKVDKVINSKLCLHLLSLVSDRAAPVVFYRPFHFXESERAVTKKEGIEFAREYGCLFLECSAKTKVNVEQCFEELVLKILDTPSLLADASSGAKKNIFKQKPPEADAAASSCC

SEQ ID NO: 245211 - protein, 95 aa, Zea mays
  Clone ID: MRT4577_15521C.1.pep
RITLILSTVKYLHLVGQTQPAADHLLVHRRDPAAGNAALYLHVGLGRHARPAACTACRCLSSGCWCREDGANTGSIGWLGSDVEPAPRAVKPYVG

SEQ ID NO: 245212 - protein, 215 aa, Zea mays
  Clone ID: MRT4577_155220C.1.pep
MDSSSSSSSLSQQPEFDYLFKLLLIGDSGVGKSSLLLRFTADSFEDLSPTIGVDFKVKMVTIGGKKLKLAIWDTAGQERFRTLTSSYYRGAQGVIMVYDVTRRETFTNLSDIWAKEIDLYSTNQDCIKMLVGNKVDKESERAVTKKEGIEFAREYGCLFLECSAKTKVNVEQCFEELVLKILDTPSLLADASSGAKKNIFKQKPPEADAAASSCC

SEQ ID NO: 245213 - protein, 73 aa, Zea mays
  Clone ID: MRT4577_155221C.1.pep
TTVAFKFVYFQMTFILRMMNNKSRLSVSENRDQDSTNTTQILMFSGSLLPVMFLSGLLGCGAGILAWTNALGV

SEQ ID NO: 245214 - protein, 104 aa, Zea mays
  Clone ID: MRT4577_155222C.1.pep
ITGDHLPPPLPVWRCLLHPTTSRLKRPKKKKPRSARSSPAHAGSNRRRNLKLQAWPPAIRSIHHNLAKWKSECSRIAKKKPNKPTGLRRLRGGGPRGGIYVVTS

SEQ ID NO: 245215 - protein, 136 aa, Zea mays
  Clone ID: MRT4577_155223C.1.pep
TSHELVTASSKRLILRYLFLTGNRRMNTPGHGAQRTCGGACISSTNSKIFGRQTAAESSPARTSTHGETFRYESVDYGDEPTVPDPATLQRTGAAANTQLPYRHRNSCPGAIPVRLPNPATQGAPWLGPQKQLLQA

SEQ ID NO: 245216 - protein, 88 aa, Zea mays
  Clone ID: MRT4577_155224C.1.pep
GAGKFPPLVTPQESLESKVNKTKAPVKFHLKKGLCMGVAVGNWGMNKKKIFQKGQKRGNFPGGLLKKNWQNVKCLSLKSPMGKGARLF

SEQ ID NO: 245217 - protein, 165 aa, Zea mays
  Clone ID: MRT4577_155225C.1.pep
QGWEDGLGSLLGSCCGAGRAVACLRLLLCAGGSLGPALWARHHSPRIRTGKSHRAWRSGQVNFLRRFGGRRSWNLLTKCMLLRMSAVRRGQGYSFCDCRFSSEVTCHLKSKLVPSQVPGQEQVPQDEALGGCCDEFVRGLGRRLPVNFGLLDRCLLIMYLFIYFV

SEQ ID NO: 245218 - protein, 40 aa, Zea mays
  Clone ID: MRT4577_155226C.1.pep
VQGQSHGFTCRHIGHVPWEARVRKLALPRRHADHVGVRRA

SEQ ID NO: 245219 - protein, 111 aa, Zea mays
  unsure (1)..(111): unsure at all Xaa locations
  Clone ID: MRT4577_155227C.1.pep
PPLPVALLPPGDASXFDEFFSGATTTTTCTHTHSCDPPGPSAAMHTHTCLHTHTQVLGSGGEDDGSAKPRRPLGNREAVRKYREKKKARASFLEGGVKKLRAANQQLVRRL

SEQ ID NO: 245220 - protein, 94 aa, Zea mays
  Clone ID: MRT4577_155228C.1.pep
KYPVEGGSMMDYSAPQTHIHLLRRHNTADRWTIYVGVELLFWMHNTSLSGCYNPTQIKVKRYDFLFNLLQRGLNKDHYTSTILPAKRMSLNRTM

SEQ ID NO: 245221 - protein, 42 aa, Zea mays
  Clone ID: MRT4577_155229C.1.pep
LITTKKKQEKSPKKLGLHTINNPHLYICLNPSSYHFSNSPYH

SEQ ID NO: 245222 - protein, 148 aa, Zea mays
  unsure (1)..(148): unsure at all Xaa locations
  Clone ID: MRT4577_15522C.1.pep
KNGALQAFLVKHINNWVTRAYCDKXTQDLPKSIVCNVHGVNPKFLKIGEEITVNRGSGEPPFSKGAYFLGKMVXAKGYRELIDLMAKHKSDLEGFKLDVYGSGEDSQEVQSTARRLDLSLNFFKGRDHADNSLHGYKVFINPSINDVC

SEQ ID NO: 245223 - protein, 85 aa, Zea mays
  unsure (1)..(85): unsure at all Xaa locations
  Clone ID: MRT4577_155230C.1.pep
MTRPNGSTIYMGNLPGDIRKREEDDLLYKYALIEXIDIKIPPTPPGFALVEGEDARNAQDXIXGHDGFNSDDHRQRKRKAHGGRG

SEQ ID NO: 245224 - protein, 137 aa, Zea mays
  unsure (1)..(137): unsure at all Xaa locations
  Clone ID: MRT4577_155231C.1.pep
XFRRTPQAGLKNKLSRNVPFDVERLFPRLQKKKKKNFFLLLFILPRRVPVWGCSFETKLLGGVIPDPTRRAVAGSISIAQIYWGPPPPHGGPLPEEPPVCFRLPNINFYFLGFIQLYSTIPFGNSENWFCYSNAFFF

SEQ ID NO: 245225 - protein, 79 aa, Zea mays
  Clone ID: MRT4577_155232C.1.pep
NSLFRLAISYIIYLKFIFRLAISSVYPSLYLYSNFNLRIAQCTVQNSVLDDHMSELLDTVLWFASKQEPIGLSGRKYNM

SEQ ID NO: 245226 - protein, 152 aa, Zea mays
  unsure (1)..(152): unsure at all Xaa locations
  Clone ID: MRT4577_155233C.1.pep
SEPFISAPCTGETCCLRFPGQLNSALRXKVALNLFPLPRLXHFFMXGLEPLTSRALPALPALTFHELTHSYVGMPRTMLCADGPPHGRYLTVSSISRAMMSTQDVDXHIINVQNKNSNYLLDVIPNAVESFVRDIPTKGTDMESTLIESSSF

SEQ ID NO: 245227 - protein, 75 aa, Zea mays
  Clone ID: MRT4577_155234C.1.pep
GLLTLSASFVLIDGAVIQVCPVAGRLGHARFLDSVLCANRVMCAHQNRPVDKQTKASGLAADPLCGCDVFPHVWR

SEQ ID NO: 245228 - protein, 40 aa, Zea mays
  Clone ID: MRT4577_155235C.1.pep
LASLHTIRSRSRVITSIGRACQSIINLLYSLVPCLNYSNP

SEQ ID NO: 245229 - protein, 128 aa, Zea mays
  Clone ID: MRT4577_155236C.1.pep
YRIRNHWFSFMLVCQEMLYHIALAESLIFSVRQVIFFLAHYQHDLWNPLCKGYDQLKEISLRHISRSPLRTVSTEEGSNILPPCISGSTQYSADNFSYGRSRHNRGIGEKRDLDPKLYMRRRIILVEA

SEQ ID NO: 245230 - protein, 35 aa, Zea mays
  Clone ID: MRT4577_155237C.1.pep
GEKMDSCKMIRTYCMNPSSHPGWTRVRTYCMNPSS

SEQ ID NO: 245231 - protein, 64 aa, Zea mays
  Clone ID: MRT4577_155238C.1.pep
KKRGPQRGEKQGEAPPRAKTPRRGAAKNQQKASANKGLAPNTVWAQLTSAHPQLEATTLLSKSL

SEQ ID NO: 245232 - protein, 49 aa, Zea mays
  Clone ID: MRT4577_155239C.1.pep
LNVLINPMERMGIMIRSYETAPDQVTSSVWPLCERIRMISVSVSERHGA

SEQ ID NO: 245233 - protein, 41 aa, Zea mays
  Clone ID: MRT4577_15523C.1.pep
IKNQKKKKKKKKKKKKKKKKKKKKKKKKNKKIKKKKNKKKK

SEQ ID NO: 245234 - protein, 207 aa, Zea mays
  Clone ID: MRT4577_155240C.1.pep
MCFNSRTHHITEGKPAKFEERRPTTEAIMAAPLCSSVSVSLMLLLLVLSASASAASAADGKLIHLHFYFHEVDAGTPNATVVNVASLHKNASTFGDLNVFDNALREGADPASRLIGRAQGIGVHASLDESGGLTAIDFAFSDYGEYSGSTLATTGHFTVSAPSERSIVGGTGKLRFARGYLTSRLLSSTDTSIVVVFDMYFTLAHWH

SEQ ID NO: 245235 - protein, 202 aa, Zea mays
  Clone ID: MRT4577_155241C.1.pep
NQELDKLLGNIPYLNGGFFDVHQLEIKYENIQIPDDAFEQLFVFFGNWDWHLDNRITKNQNEINPDILGYIFEKYINQKQMGAYYTKEDITEYISKNTIIPFLFDATKKECEVTFRADGEIWSLLKENPNRYIYDAVLKGVDVDLPLEIAAGINDVSQRQDWNQSASDEFALPTETWREHIVRRQRCLDIREKLKSGEMTSI

SEQ ID NO: 245236 - protein, 169 aa, Zea mays
  Clone ID: MRT4577_155242C.1.pep
MAAPLCSSVSLMLLLLVLSASADGKLIHLHFYFHEVDAGTPNATVVNVASLHKNASTFGDLNVFDNALREGADPASRLIGRAQGIGVHASLDESGGLTAIDFAFSDYGEYSGSTLATTGHFTVSAPSERSIVGGTGKLRFARGYLTSRLLSSTDTSIVVVFDMYFTLAH

SEQ ID NO: 245237 - protein, 69 aa, Zea mays
  Clone ID: MRT4577_155243C.1.pep
GHHRYEQLCVVPGTGDSGIALRSMAGSGRFVQAVGVRVLHRHLIGGMLLQGHLSAGVIAHGILCRDHHK

SEQ ID NO: 245238 - protein, 66 aa, Zea mays
  Clone ID: MRT4577_155244C.1.pep
SPDVRRRRDQPKAILPTHPLKIATKTQHPERFIFKDTHFLGVLGLAGLCYLLGARPQDVPYEHCLF

SEQ ID NO: 245239 - protein, 55 aa, Zea mays
  Clone ID: MRT4577_155245C.1.pep
RIQFILPFLLNLIFFLLVHQIKFNWPVFNNVCTGKTLAFSKLIRFEKNPFFSSLS

SEQ ID NO: 245240 - protein, 197 aa, Zea mays
  unsure (1)..(197): unsure at all Xaa locations
  Clone ID: MRT4577_155246C.1.pep
ISHLEQVFELLSADDWKVKLSKCKFAXQQVAYLGHVVNSKGVSTDPVKIEAIANXPEPSCVKELRSFLGLADYYHKFIRHFGIICQPLTALLKKGVLYIWTSDHTCAFHTLKTALTQAPVLSLLDFASLFFIETDASAVGVSAVLMQHCHPLAFPSKVLGPKSRGLSTYEKEYLTVILPVQQWRYYHENAIRRSRTR

SEQ ID NO: 245241 - protein, 75 aa, Zea mays
  Clone ID: MRT4577_155247C.1.pep
MAAATMGVVRVLCGAEKERVVGAHKAPGACPRCGGAVVAVDVESERRVLGLPLCLKSKRKYSCTRCLRRLVTLCG

SEQ ID NO: 245242 - protein, 665 aa, Zea mays
  Clone ID: MRT4577_155248C.1.pep
MNTEKITKEIMEGLSEDSDDSDSYDVESGDKDSEDWPWRPSHAIFGKSTIKQSHIDTMRGRYFRDMSLVRVGGDNIIPAPEENEVVVYRSFLKAGLRFPLSKFVVEVLKIFHIFLHQITPEAIIRMGIFVWAVRSQGLEPSAKFRERFHEPNDDWFKCIEATSDELLGTYAKAEDNALSVAFGGRGKKRLNRVFDAISFVYPDYHYPLRGQGKNRKTTASATTTEPKGKKMKVLTHRPRYIEPAVVPEFGEGTSSAAKARQTAPIVQSVEEATVVPKRRRMASVLDAVMETIKALTPAPIKKVAEAAKGQAEDETEPSAHAEAKAVAPEDKADQQTSDTSMTARQGIAEKAKSPTLEAPAEAVDYIYRHASGKKISEEEIMEARHYTQKLKYPKGALVFNDSNEDDFPYCLPDNKEISVCREIAKSMGFPKLEEGLSVLSKDDLADSLAYNSIKGLILSNALRAQKNVEDEGYTMALNNLRSEVIELRNEGLEKDKILISLVNKVKEDEANYNAQAEAQKTEIEDLRRQLTVANERYALAQANQEIELRESKERCFEKSLDCVKRLKTSFAKVGAYSSEENFIRGDPKGVVEWISGEAEAFEEILNDRGDICVFSGAWGISAILEKAGCDHVKAIAQTEVVFSIEDTKDPSVEVTLMGGKFYNDV

SEQ ID NO: 245243 - protein, 96 aa, Zea mays
  Clone ID: MRT4577_155249C.1.pep
SSINLYSYSIRKTTPTPYFHDARALSPPTAPNIGKCAGERPLDESHTIKYPHRGHTDKSQERNSTTPRATNRVYTFNLPPHARGRPQPTTSAAGLF

SEQ ID NO: 245244 - protein, 115 aa, Zea mays
  Clone ID: MRT4577_15524C.1.pep
RRRWRRASFTSCLARCPPPRGAAAGSTRSTAACRRRWTTRAPATAYKRHDSRDRRRLQHEQRRRHTAPGRPTPYYQNNKANGDSCRIHLNRRTSPPGTQVLQGDLTLPSQACMEP

SEQ ID NO: 245245 - protein, 431 aa, Zea mays
  unsure (1)..(431): unsure at all Xaa locations
  Clone ID: MRT4577_155250C.1.pep
ARLVEMQDELKCIQEEKDAALTQLKXIETSVQNLENEVTRLKWEFSVQLENNSTLDKQLEEAMLKVSSLHENLEKAQAEAACQLDGMSTKTKDLEETINQLSSQKTKLEKDVKIMIEACTENMSCLAGFEDRVTQKISDQEAGLKVLHQSLGGAVGSCQRLQYAYDEVSTRASHLEILKRSQMEQIDQLEQKNTETVEKHRLLEEEKLSANKENIKLQKHVQDLEVQLQLAKQKLKVTEAESKCKEERYEASVEALRAEICHLEQLVQQFSGRVSLLEGTLMQVKGHAESVVCKWADKLDELETICSQNFVLFIDRSSACSDELKILRKKVHDHLNEQKELANANNELAIRFKEKEMVVSEMVKSAAEAQTKMLQLQKTVDEKEDELAARVQEKREAIKQLSDTIVYHKNYSDDLVRYIRSQSRPRLPFCL

SEQ ID NO: 245246 - protein, 221 aa, Zea mays
  Clone ID: MRT4577_155251C.1.pep
MADALLPRRFLAPLSVVSGASSSASSSPPCLWVLSSPGSPRRPRLAAGHPQPRPRRFTRHKTYAAERGEQLKWWEKNAGPNMIDIHSTVEFLDALRDAGDNLVIVEFYGTWCASCRALFPRLCRTALENPDILFLKVNFDENKPMCKRLNVKVLPFFHFYRGADGLLEAFSCSLAKFQKLKDAIAMHNTARCSIGPPVGVGDVDLLDNASPQEKPAEASPR

SEQ ID NO: 245247 - protein, 37 aa, Zea mays
  Clone ID: MRT4577_155252C.1.pep
RVLHRVVNSPFIIASASSALAKASLFFSSRPAASSGA

SEQ ID NO: 245248 - protein, 111 aa, Zea mays
  unsure (1)..(111): unsure at all Xaa locations
  Clone ID: MRT4577_155253C.1.pep
TGXPPPPPLSIXPFSNTXKETIFLSINHPIPPLLLLTPYFLHLSPSPPFFFHLNHNFSSFSQNTTLPYFNTYDITNIINYFYHPIHSSPTFLFLSLYQIHLHPILTLCRHP

SEQ ID NO: 245249 - protein, 71 aa, Zea mays
  Clone ID: MRT4577_155254C.1.pep
SRSQQQSAVVDMPSFSKTSPSFEFGILWQIFPASLPLSKVQWPPHWIIGHPQSRPPQTSVHIIGTKGEFFF

SEQ ID NO: 245250 - protein, 97 aa, Zea mays
  Clone ID: MRT4577_155255C.1.pep
ENPAFVLGFPSCPTGGGGPPLVKEGRRVFFFCGRIKNVFLSRSRVGLVGPPSGFIWPPFTAHRWGWPVKPLCRLKKCGPRPGPTSFCFECVVSNFVP

SEQ ID NO: 245251 - protein, 65 aa, Zea mays
  Clone ID: MRT4577_155256C.1.pep
KSSKEKRARAWELKAFPWIVWPPNGCPNKTPFFGLVVPSSKRYPRFSPLIRPLFFKSVWPQAQGF

SEQ ID NO: 245252 - protein, 91 aa, Zea mays
  Clone ID: MRT4577_155257C.1.pep
RRYKPEKLVCLEGVQIISLFTIYYCQLIKSHEQVAATQDVIPISHQHRCLACLRPFGWEPYLSQMHSGPNVQNLAPGMDTWPKQFGGFHPN

SEQ ID NO: 245253 - protein, 103 aa, Zea mays
  Clone ID: MRT4577_155258C.1.pep
HDSPKSKKRKALKDEYMKRIVEAFETRTASSIKTKSDPVREEIASQLKTVIDDGNAEGSDEHFFATQLLIEKRYRDVFATLKTKEGRVSWLRRAYEMIDRSNK

SEQ ID NO: 245254 - protein, 79 aa, Zea mays
  Clone ID: MRT4577_155259C.1.pep
LQKSKHQTLLAHKFIEFHGGGGTIPNNISFYVKTRGELVVLLRHQFYVTALNRNTLNCDVIPVVHLDRFLRTGNYSKDE

SEQ ID NO: 245255 - protein, 75 aa, Zea mays
  Clone ID: MRT4577_15525C.1.pep
QNLLLKPKKNPPTFFQTEFQIHRKNKREKIYLPNFFQKAQKFNLQIFWRGTFWFHFPLHKFWQHPEPFFYGTFQK

SEQ ID NO: 245256 - protein, 123 aa, Zea mays
  Clone ID: MRT4577_155260C.1.pep
ETGWPVSGDKENLAVASTNNAKTYWDEVGCGMLFDKVNTYWYILQDAGKTTPSPSFGLVGSELSTTPLYNLTCPAVSASTSATSSAASTASQGSATGTSTATGTPGAASGTSTPLGTPGSATT

SEQ ID NO: 245257 - protein, 79 aa, Zea mays
  Clone ID: MRT4577_155261C.1.pep
FLPKIVNIIHIFYYMNLNIKTLCLGTFIPSPWQKIIIPEQLRLQLQDCVNSKGVLFTIYRHRTQPVGIFFHAPYKRLQS

SEQ ID NO: 245258 - protein, 76 aa, Zea mays
  Clone ID: MRT4577_155262C.1.pep
AVVTTQSTFFFFFFFFFYFFFFWQDNKICMIAMAACKRRQCCTFRGRSRSKPIMVTRGRDASFSLEFPRTLRCYHC

SEQ ID NO: 245259 - protein, 95 aa, Zea mays
  unsure (1)..(95): unsure at all Xaa locations
  Clone ID: MRT4577_155263C.1.pep
MVAPDHVERCTIPGAVSKMVNVPNTKKTYCKNKECKKHTLHKVTQYKKGKDSLVCPGXRPYDRMQSGYGGQTXPVFHKMAMSTKNFVLKLLFQSC

SEQ ID NO: 245260 - protein, 38 aa, Zea mays
  Clone ID: MRT4577_155264C.1.pep
AEAPALPPRIYRLVPLVRVYPTDLDKVRLQAVLKAYTV

SEQ ID NO: 245261 - protein, 118 aa, Zea mays
  Clone ID: MRT4577_155265C.1.pep
RVSIQASTVTSCQSEHSEFAAISRDHDNIDYSWYPLSCHRSFLVTLGRCDAPGMGIGVGTNYPCVSLWSNERDRHESAVGLRTKRAVLCRDHLQRGAHRQLRHQRRPHSRNHQRLRSQ

SEQ ID NO: 245262 - protein, 48 aa, Zea mays
  Clone ID: MRT4577_155266C.1.pep
PFLKLYPNTNRLKRDSTASQYPPYNLQNPYKTLHKTTQYSQIFEKKPM

SEQ ID NO: 245263 - protein, 185 aa, Zea mays
  Clone ID: MRT4577_155267C.1.pep
GKSGGAVIPQLMILSGGSLENQTPLLGEILLVIPPPCLGGKRPLNLHFFSREKKNLDKKNFLKTQPVKAVPKIVGSETVSPQNSLVSAPFENGAAPKLSQKSENPPPEKPAQQSQRFPPPKNLHRSPFLEPPKFFFWEILKKAGIVPKIKRPCFSCVVAAFLFLNSPGADAVFFFPKVTAVYAVY

SEQ ID NO: 245264 - protein, 44 aa, Zea mays
  Clone ID: MRT4577_155268C.1.pep
KMYGMLYSSKAFSSEMGFNFIIFAFFFEIENFYSGCAKFQITEF

SEQ ID NO: 245265 - protein, 67 aa, Zea mays
  Clone ID: MRT4577_155269C.1.pep
EGGFIWLGVNRPSGLGLGGQKDFTRQLKRALELKIKVPYWKAWRALKHWLRSKVPLKSSFLSRWSKG

SEQ ID NO: 245266 - protein, 406 aa, Zea mays
  unsure (1)..(406): unsure at all Xaa locations
  Clone ID: MRT4577_15526C.1.pep
LQFSKERRSIIPAGDTSQFIPSREADIAILEEPEHLNWYHHGKRWTDKFNHVVGVVHTNYLEYIKREKNGALQAFLVKHINNWVTRAYCXGTLYSLVVLLITRMPMNTPNVIHXXVLRLSAATQDLPKSIVCNVHGVNPKFLKIGEEITANRGSGEPPFSKGAYFLGKMVWAKGYRELIDLMAKHKSDLEGFKLDVYGSGEDSQEVQSTARRLDLSLNFFKGRDHADNSLHGYKVFINPSISDVLCTATAEALAMGKFVICAEHPSNEFFMSFPNCLTYKTSEEFVARVKEAMDREPQPLTPEQRYNLSWEAATERFMEYSDLDKVLNNEAAQPGQGRKRKNKRTSQPNLSDIMDGGLALAHRCLTGNEVLRLATGAIPGTRDYDKQHCVDMGLLPPQVQHPVYGW

SEQ ID NO: 245267 - protein, 66 aa, Zea mays
  Clone ID: MRT4577_155270C.1.pep
SYSNKTVVPINLQWPKKLVTNMLETTKTVFPLPMYKCSQKKFPWAPFNCHQNFEPFSGLTTIKKQK

SEQ ID NO: 245268 - protein, 80 aa, Zea mays
  Clone ID: MRT4577_155271C.1.pep
WAHHGHVQNTTYSHWRTRVTPYSFWMQPHYHVCYRKGDTHRGGAGRTHNGEHSELGGPRGKLGGPPWPAKNPGWPSSLET

SEQ ID NO: 245269 - protein, 96 aa, Zea mays
  Clone ID: MRT4577_155272C.1.pep
MATFCVLSNVANSTQLYRSRASLGKPMKGLGLSMGRERAQLSIECQAASSISGDRVPDMEKQKLMNLLLLRAILLPTVGMVDPYGAFFVPDGFGNA

SEQ ID NO: 245270 - protein, 195 aa, Zea mays
  Clone ID: MRT4577_155273C.1.pep
MAGKKRKAEAARLEETDRALYGAFRGAANSLSQLYTLGMGAQKASFHAGERHAMEKLYEWILRQHENGLRLTVADVASHIQHEIQYGGDNASASPRSQYPSQSTAPTMHIPNTSNQQPSPSLFASGNPGLTQSKNSMVFSSALSSPIRRSLQPYHLEQDGDAGYFANGASRDVNPTASNDSSMDMHSDSPAHDSY

SEQ ID NO: 245271 - protein, 101 aa, Zea mays
  Clone ID: MRT4577_155274C.1.pep
MKPTTRCVHPRAVTSMMVEEQRRLLFFWTSVEYLPFDGFRGLDLGSGLVISKASSKISEHLPSSSTCIYQLNLPMYTSFAMMLSRLQKITQEHVSNSFGEI

SEQ ID NO: 245272 - protein, 195 aa, Zea mays
  Clone ID: MRT4577_155275C.1.pep
MAGKKRKAEAARLEETDRALYGAFRGAANSLSQLYTLGMGAQKASFHAGERHAMEKLYEWILRQHENGLRLTVADVASHIQHEIQYGGDNASASPRSQYPSQSTAPTMHIPNTSNQQPSPSLFAPGNPGLTQSKNSMVFSSALSSPIRRSLQPYHLEQDGDAGYFANGASRDVNPTASNDSSMDMHSDSPAHDSY

SEQ ID NO: 245273 - protein, 128 aa, Zea mays
  Clone ID: MRT4577_155276C.1.pep
MAGKKRKAEAARLEETDRALYGAFRGAANSLSQLYTLGMGAQKASFHAGERHAMEKLYEWILRQHENGLRLTVADVASHIQVSLQSFLDMFLYKLTIQTQVKNLHILPFHRSWLVLNCVLLTCCLNEQ

SEQ ID NO: 245274 - protein, 56 aa, Zea mays
  Clone ID: MRT4577_155277C.1.pep
MVKHGGLGRAGKVKRQTPKVQKEEKLKQATGRAKKRAQFNRRMNLGKKKGLNSQAA

SEQ ID NO: 245275 - protein, 98 aa, Zea mays
  Clone ID: MRT4577_155278C.1.pep
SSLALMTACVARGANAQRSLAYSCLQLSCSGSYHRLLLTQTVVDSRKNARSGELASSRARTYYSYQVRVLCLVARNHVIQPGSRALSLRVGILGNCVL

SEQ ID NO: 245276 - protein, 64 aa, Zea mays
  Clone ID: MRT4577_155279C.1.pep
PLRFSFSSRHTVSLRMVVHYTEWAPVLSSAQSTMFMGASAASPMLEEYLRLIFRLHEENRVGRP

SEQ ID NO: 245277 - protein, 235 aa, Zea mays
  unsure (1)..(235): unsure at all Xaa locations
  Clone ID: MRT4577_15527C.1.pep
VGYRELXDLMAKHKSDLEGFKLYVYXSGEDSQEVQSTARRLDLSLNYFXKGRDHADNSLHGYEVFKNPSISDVLCTTTAEALAMGKFVICAEHPSNEFFXSFPNCLTYKTSEEFVARVKEAMDREPXPLTPEQRYNLSWXAATERFMEYSDLDKVLNNEAAQPKQGRKRKNKKTSQHNLSDIMDGGLALAHRCLTGNEVLRLATEAIPGTRDYYKQHCVDISLLPPXSXHPVYGW

SEQ ID NO: 245278 - protein, 67 aa, Zea mays
  Clone ID: MRT4577_155280C.1.pep
VPRGFTNSIVQRHKIPPSIWPLPWLWWLHRPPPAANTRVAGSNAVRGMGLHLRSHLKNRSDPNSQIP

SEQ ID NO: 245279 - protein, 126 aa, Zea mays
  Clone ID: MRT4577_155281C.1.pep
SSTPCSVRLAVGDFSTLQICAARPAYAHSSSIGFWRVRVYRRVVEPVIYCSNPTSPARSRHNLIVVPRVIKKSQELGEDEAHSVVFTKYANKSSSVILVYAKSPSHEDTLVLATHHQLDKINPMGI

SEQ ID NO: 245280 - protein, 75 aa, Zea mays
  Clone ID: MRT4577_155282C.1.pep
TPGLPTLLPQAASWLIDGGIAFQPEKSSLFAHKLCVLARSKWSMKPCLVGNELLFVVMYIAVYTVIRGVSFLDVI

SEQ ID NO: 245281 - protein, 82 aa, Zea mays
  unsure (1)..(82): unsure at all Xaa locations
  Clone ID: MRT4577_155283C.1.pep
PTVSAIQETSRSTAAVDERYTQSHSLITVLYYXFARHKLIWTSITCPSSPKYAITTYTKSQRLXLSEHTALTVSNTLAIAIC

SEQ ID NO: 245282 - protein, 115 aa, Zea mays
  Clone ID: MRT4577_155284C.1.pep
RAHAEEEKAKDVPAGLDKDESDEGSEEEVVFEEDGNDIRLYMSKRAMYFGQPMARHVFGPSRARHVSVVGRHGPTRPVVCVMLGSLVWHNVLAQAQPVFLFYSTYLCILEITIIV

SEQ ID NO: 245283 - protein, 251 aa, Zea mays
  unsure (1)..(251): unsure at all Xaa locations
  Clone ID: MRT4577_155285C.1.pep
SLTTPASRTSGTQSPSLLPPSVFTVHAEIVMELPVEHGLLLDNLLDLAHAPFTHTSTFAKGWSVPXMYALYAYLPYHFFNSSGSSADCVXSLVKFLTPASGLQGYWDPYPIDMEFRPPCMVLSTIGISKPGKLQGKSTRQCSTHLHQLHVCLPSSRNKTRLLYRMSLDFAPWLKHVPLMHLLWSHFAEKVLNEDLRLVLGQQEGMIDGANVWNWPVSYDKLGIRYRLWRDAVERGADDRLPFSSTQAESLS

SEQ ID NO: 245284 - protein, 77 aa, Zea mays
  Clone ID: MRT4577_155286C.1.pep
EFINRIVVNGDSYVVVYRVVGEGRLCMVGLYKFMLVVLDVYLSVCLIVNSPFMLFYCYFLFFFFFFFFIFFFFFFFF

SEQ ID NO: 245285 - protein, 430 aa, Zea mays
  unsure (1)..(430): unsure at all Xaa locations
  Clone ID: MRT4577_155287C.1.pep
MNTVASLPLAPRLLIKPSLACFSRKDVGRYGGIKVYAVLREDGAEFARNNNLEALFQVDDPGPRAPVKKFLDVNEALEVVRFDIQYCDWRARQDLLTIMLLHSKVVEVLNPLAREFKSIGTLRKELAELQQELEKAHNQQVHLSEARVSSALDKLAHMETLVSAPSTAEPPTSSSLAATASSTARVRAKNKQPRRRLDVSGPVKPYNPSLKNFWYPVXPSLLPPSGFTVHAEIVMELPVEHGLLLDNLLDLAHAPFTHTSTFAKGWSVPSLVKFLTPASGLQGYWDPYPIDMEFRPPCMVLSTIGISKPGKLQGKSTRQCSTHLHQLHVCLPSSRNKTRLLYRMSLDFAPWLKHVPLMHLLWSHFAEKVLNEDLRLVLGQQERMIDGANVWNWPVSYDKLGIRYRLWRDAVERGADDRLPFSSTQAESLS

SEQ ID NO: 245286 - protein, 266 aa, Zea mays
  unsure (1)..(266): unsure at all Xaa locations
  Clone ID: MRT4577_155288C.1.pep
MEYVCCELRLIKSCLSLTTPMPMLGRCVQDVGRYGGIKVYAVLREDGAEFARNNNLEALFQVDDPGPRVPVKKFLDVNEALEVVRFDIQYCDWRARQDLPTIMLLHSKVVEVLNPLAREFKSIGTLRKELAELQQELEKAHNQQVHLSEARVSSALDKLAHMETLVSASSTAEPPTSSSLAATATATANSTARVRAKNKQPRRRLDVSGPVKPXNPSLKNFWYPSAFSSDLKAPDTMVPIDCFEEQWVIFPGKRRRAGCVQNTCAH

SEQ ID NO: 245287 - protein, 162 aa, Zea mays
  Clone ID: MRT4577_155289C.1.pep
ELYSVSPYLQRTLPGLFVLNERVVLLGRWRWGFFSYIPVGATNVGSIKLNFDAELRTNSLTTDTAADRAAAEAAKRGEAYTGFAEATYYNASPALRGHPLQRGEEMGGFQLGSTIVLVFEAPMGVRKTFDEGWDGGREGGWSWNIQQGQKVKVGEKLGHIKL

SEQ ID NO: 245288 - protein, 505 aa, Zea mays
  Clone ID: MRT4577_15528C.1.pep
DELDLRIASVLQSSGYHADDGFWSEPTKSEVSDDKRHVAIVTTASLPWMTGTAVNPLFRAAYLAKGTRQDVTLVVPWLCKSDQELVYPNSMTFSSPEEQETYIRSWLEERLGFESNFKISFYPGKFSKERRSIIPAGDTSQFIPSREADIAILEEPEHLNWYHHGKRWTDKFNHVVGVVHTNYLEYIKREKNGALQAFLVKHINNWVTRAYCDKVLRLSAATQDLPKSIVCNVHGVNPKFLKIGEEITANRGSGEPPFSKGAYFLGKMVWAKGYRELIDLMAKHKSDLEGFKLDVYGSGEDSQEVQSTARRLDLSLNFFKGRDHADNSLHGYKVFINPSISDVLCTATAEALAMGKFVICAEHPSNEFFMSFPNCLTYKTSEEFVARVKEAMDREPQPLTPEQRYNLSWEAATERFMEYSDLDKVLNNEAAQPGQGRKRKNKRTSQPNLSDIMDGGLALAHRCLTGNEVLRLATGAIPGTRDYDKQHCVDMGLLPPQVQHPVYGW

SEQ ID NO: 245289 - protein, 41 aa, Zea mays
  Clone ID: MRT4577_155290C.1.pep
LFSNPTKTFINLQHSLSLITLITHLLPHITILCFQHPFKHP

SEQ ID NO: 245290 - protein, 57 aa, Zea mays
  Clone ID: MRT4577_155291C.1.pep
EKRRKRCKRGGDATTGYSQLELGSAACGIVVAAADEERGEAGGSQSAATALPSRRRT

SEQ ID NO: 245291 - protein, 92 aa, Zea mays
  unsure (1)..(92): unsure at all Xaa locations
  Clone ID: MRT4577_155292C.1.pep
CVSTRFTQSPPGGGPSIGRRGTGHPAPGNLVFHMFYLGFGHSSGFRVFSISFGGDGGLFWVFFSFFFFFFFFFFFFFFFFFFSQGPAGXSSG

SEQ ID NO: 245292 - protein, 108 aa, Zea mays
  unsure (1)..(108): unsure at all Xaa locations
  Clone ID: MRT4577_155293C.1.pep
LTAVTRKLLLPHHLQAPALVKHECTDYILTSACTRXPPNTALPHASTSFMGPXYTLLNPCLXGTRXFISTTLLSHSTFVLPFPALPLSFIFIAHHLNPSXLKDSRHVL

SEQ ID NO: 245293 - protein, 450 aa, Zea mays
  Clone ID: MRT4577_155294C.1.pep
MEQLVGVHHHHHSLSPRAPRTPTRPQPQPQPHPLLHHLPSNRFRDLHSQIHNHIHPAVPAASRVLRATPPFFLILLAAVYLLASVTIFSAPTPLLRLRLASPRPLILPKPAPPPPPPAPELFDLDGGSVRVRLTNVGAAVTSFLVPDKNGVLADVVLGFDSLDPYLNGTSPYFGCIVGRVANRIKDGKFTLNGVQYNLSINNPPNTLHGGFKGFDKTIWEVAEYNKGDKPSITFKYYSKDGEEGYPGDVSVTARYSLLPSATLKLEMEAIPLNKATPISLAQHTYWNLAGHSSGDVLSHSVQIWGSQITPVDQTSIPTGELMPVTGTPFDFLTGTRIGSRIDQVPGGYDHNYMVDSGEVRSGLRHVAHVADPSSSRALDIWADAPGVQFYTGNSLGGVVGKGGAVYGKHAGLCLETQGFPNAVNQPSFPSVVFGPGERYSHTMLFELSTE

SEQ ID NO: 245294 - protein, 54 aa, Zea mays
  Clone ID: MRT4577_155295C.1.pep
MSTGSAGVFLHRGNQALMDDSAVPIGFSMTSYTTGNQFQSRITFGRPTGFSSEQ

SEQ ID NO: 245295 - protein, 85 aa, Zea mays
  Clone ID: MRT4577_155296C.1.pep
PGPNEIFWVCKAPPEFLPSPSFHPPKIFMFEKPMGVYYFLIQGPSQVFSLMSAIFGRETEAFFFLAECYVNPPGCVIKKNSFLSS

SEQ ID NO: 245296 - protein, 37 aa, Zea mays
  Clone ID: MRT4577_155297C.1.pep
FHFRRDDARPHYNLVQAWLAWQPFLLYWVCVVKLTLL

SEQ ID NO: 245297 - protein, 93 aa, Zea mays
  Clone ID: MRT4577_155298C.1.pep
MEIRAPPTSLRLAPPPASASFRRTPLRTFFLNGSVSLKVVQVRQSNVNRFKCNSIQSNLFDRLTRVARSYANAVLSSFEDPSRLHPSMMIFHS

SEQ ID NO: 245298 - protein, 162 aa, Zea mays
  Clone ID: MRT4577_155299C.1.pep
AAFVIAQIVATLIAVWADFGFAHIRGIGWGWAGVIWLYSVVTFVPLDLFKFAIRYVLAGKAWNNLLQNKTAFTTKKNYGGEERMAQWATTQRSLHGLPVTEPEAGGRRSGSFVELSEVAEQARRRAEFARLREKNTLRGQLESSARLRGVDLNAIKSPFYSV

SEQ ID NO: 245299 - protein, 83 aa, Zea mays
  Clone ID: MRT4577_15529C.1.pep
ASPWSLVSFRLLQQPSHFSTLVSSGESNVCMLTLHIHGVSRGPSSWRSIVWFVLGSDFAIWAYNQGCLPACLSLFTQCNPRFC

SEQ ID NO: 245300 - protein, 87 aa, Zea mays
  unsure (1)..(87): unsure at all Xaa locations
  Clone ID: MRT4577_1552C.1.pep
GCYNHNCSGFGQTTNKIAIVAAITSDSGDNGRQFDITLMLCKDPKHWHWLLELFPDLNARYWPAHLFRHLDQHXANMVQVRRDVDNT

SEQ ID NO: 245301 - protein, 271 aa, Zea mays
  unsure (1)..(271): unsure at all Xaa locations
  Clone ID: MRT4577_155300C.1.pep
MEIRAPPTSLRLAPPPASASFRRTPLRTFFLNGSVSLKVVQVRQSNVNRFKCNSIQSNLFDRLTRVARSYANAVLSSFEDPEKILEQAVLEMNDDLTKMRQATAQVLASQKRLENKYKAAEQASADWYRRAQLALQKGDEDLAREALKRRKSYDDNASSLRSQLDQQKGVVENLISNTRVLESKIAEAKQKKDTLKARAQSAKTATKVSEMLGNVNTSSALSAFEKWEEKVMAMESQAEALGPLATDDLXEGKFALLETSSXVDDDLSQLK

SEQ ID NO: 245302 - protein, 81 aa, Zea mays
  Clone ID: MRT4577_155301C.1.pep
ILHNIHPTCVPISDLNYTGPNSSLYLGRVKGKTVPLLTTTWIGKPLPFSNLYGLGQIPLYPPCLLTQRLYGKCIPPCFEIK

SEQ ID NO: 245303 - protein, 316 aa, Zea mays
  Clone ID: MRT4577_155302C.1.pep
MEIRAPPTSLRLAPPPASASFRRTPLRTSFLRGSVSLKVVQVRQSNVNRFKCNSIRSNLFDRLTRVVRSYANAVLSSFEDPEKILDQAVLEMNDDLTKMRQATAQVLASQKRLENKYKAAEQASADWYRRAQLALQKGDEDLAREALKRRKSYADNASSLRSQLDQQKGVVENLISNTRLLESKIAEAKQKKDTLKARAQSAKTATKVSEMLGNVNTSSALSAFEKMEEKVMAMESQAEALGQLATDDLEGKFALLENSSVDDDLSQLKKELSGSSLKGELPSGRRAASNSGAGRPFPDLEIESELNELRRKAKEY

SEQ ID NO: 245304 - protein, 316 aa, Zea mays
  Clone ID: MRT4577_155303C.1.pep
MEIRAPPTSLRLAPPPAAASFRRTPLRTSFLRGSVSLKVVQVRQSNVNRFKCNSIRSNLFDRLTRVVRSYANAVLSSFEDPEKILDQAVLEMNDDLTKMRQATAQVLASQKRLENKSKAAEQASADWYRRAQLALQKGDEDLAREALKRRKSYADNASSLRSQLDQQKGVVENLISNTRLLESKIAEAKQKKDTLKARAQSAKTATKVSEMLGNVNTSSALSAFEKMEEKVMAMESQAEALGQLATDDLEGKFALLETSSVDDDLSQLKKELSGSSLKGELPPGRTAVSNSGAGRPFPDLEIESELNELRRKAKEY

SEQ ID NO: 245305 - protein, 70 aa, Zea mays
  Clone ID: MRT4577_155304C.1.pep
GGPTSTSRATLGSSSPALTGSLALASCSTVLAGREVIKSAQALRTQPRAASQPGGWCTPRARVLGELALA

SEQ ID NO: 245306 - protein, 128 aa, Zea mays
  unsure (1)..(128): unsure at all Xaa locations
  Clone ID: MRT4577_155305C.1.pep
PGGGPATRGFALAASLAASCLGGIPSLXLPALLIRPVPPSLPVAVLAAPRPSPXPAPPALSPXPXPPFLPAALPPPGPPRSPSPCPPXLLLFPPPPPPPPPPPPPGPPXPPPPSPPRLPPPPPSPARI

SEQ ID NO: 245307 - protein, 220 aa, Zea mays
  Clone ID: MRT4577_155306C.1.pep
MFLTRTEYDRGVNTFSPEGRLFQVEYAIEAIKLGSTAIGLKTKDGVVLAVEKRVTSPLLEPSSVEKIMEIDEHVGCAMSGLIADARTLVEHARVETQNHRFSYGEPMTVESTTQAICDLALRFGEGEEESMSRPFGVSLLIAGHDENGPSLYYTDPSGTFWQCNAKAIGSGSEGADSSLQEQFNKELTLQEAETIALSILKQVMEEKVTPNNVDIARVAP

SEQ ID NO: 245308 - protein, 83 aa, Zea mays
  unsure (1)..(83): unsure at all Xaa locations
  Clone ID: MRT4577_155307C.1.pep
HGQEGIMFFWSXKPNTMAPFLKGLIRRFLASKISNPSPPPPNRNASHWDLQTLNALDQSKTPPGVDNGLSTSEKYNPESIPGL

SEQ ID NO: 245309 - protein, 72 aa, Zea mays
  Clone ID: MRT4577_155308C.1.pep
TSTSASSASPPPSCAASSSRAPTASSSRGSRLACAPTSASSRTFSAPKRTCSPPSSSPWSSSTTTSRSSCFP

SEQ ID NO: 245310 - protein, 79 aa, Zea mays
  Clone ID: MRT4577_155309C.1.pep
GASPRAGLGPLLQLGWGVFFLGNGQFFFRRGVRWPLNRHNRLYNIRIRIVCSGKKKKKKKFKKEKKKKKKKKKKKKKNE

SEQ ID NO: 245311 - protein, 71 aa, Zea mays
  unsure (1)..(71): unsure at all Xaa locations
  Clone ID: MRT4577_15530C.1.pep
PVINLFTIIQLKLSNFIYHITPAPXIVKTQKHKTPLRIKMNKNLXXSFTTPTILGLPTVILIILXPAMLFP

SEQ ID NO: 245312 - protein, 117 aa, Zea mays
  Clone ID: MRT4577_155310C.1.pep
RSHRRLILEAAVLFSGLAVARASPGTWWVPGWAIRKNRFPSCRWSVTSRTWGMGPGFPWPELKRKCCRRLAAIPAYCRGTGLSILMDGAIPPGPDAQLKGRLKDLPACPRKVQRGFA

SEQ ID NO: 245313 - protein, 80 aa, Zea mays
  Clone ID: MRT4577_155311C.1.pep
SPRAYATTSSARGLASMGIHVDTSIRSQMVPIQQSDFIANQPNFVGYQGVDINSSSERIVMYDKLDAYHILTSVSCHAMM

SEQ ID NO: 245314 - protein, 156 aa, Zea mays
  Clone ID: MRT4577_155312C.1.pep
MAQGTSLVRARAGELLSPMASALLSEHPLPTSSLASPAELLLGRALLMPVAPIPIQISCPFSSAAALLRGFLVALVVGLQPGVRSPIRDAVETRGEKTPAALAAIIFVLGKTVERLCVSNSQLAVMSRSAPYPFNKMPSHVDNPCGKSRLVQVESM

SEQ ID NO: 245315 - protein, 101 aa, Zea mays
  Clone ID: MRT4577_155313C.1.pep
PRARPREHLAFLDPLRNHPHRDRVPPLEKIRGGGSFNCPLVVKAPHFQVGVGPGQGNRLKACLGDLRPQVDNTPVHSQGGLFFHPPRTAGECPSRCPCWGV

SEQ ID NO: 245316 - protein, 121 aa, Zea mays
  Clone ID: MRT4577_155314C.1.pep
LTRGQHPGPENGNHRGCSSAPTSPCSASAVGRSPAGRSALCGSLSAVRGPRPPAALLCLPPPTPCSDAGCGAVCSLDISLTLCQPLLPQPLFSRPRDPDQRRRLRVVSHAATHMAISALPS

SEQ ID NO: 245317 - protein, 62 aa, Zea mays
  Clone ID: MRT4577_155315C.1.pep
VKRQLRIGIDPRCPVPHQFGHMRDNSQAQHLHALGWTNSCPAPSSPVPNKPPLRLMQTVSQT

SEQ ID NO: 245318 - protein, 84 aa, Zea mays
  Clone ID: MRT4577_155316C.1.pep
EALNRKYFGIRDQPASAGAYNISCSLVQSLLAHHTTSVTGAYFKLIALAHINAPSSKLQPSPQVKRNTSRIGNLEWFRGYDGRF

SEQ ID NO: 245319 - protein, 71 aa, Zea mays
  unsure (1)..(71): unsure at all Xaa locations
  Clone ID: MRT4577_155317C.1.pep
KVNTSDNTKATFXHNFCLPVLKITRDFQCMTHTSYLSGILVPFYMFFAFPDRITGIYELWYFLFQTPVKMT

SEQ ID NO: 245320 - protein, 207 aa, Zea mays
  unsure (1)..(207): unsure at all Xaa locations
  Clone ID: MRT4577_155318C.1.pep
MYMHPSKLLILTVVVTGAAAAHDHPSASTPAAQFWQQALPGTPMPEAIADLVQKGIDHSPLVERYPSAPGLSACGAWSNLCTRSVAAGTGIFFHEAELRPGSAMALSFPAEVDTPILPHAVAAAAPFANLTAVFATFGVAGGSAEAEHVRDTLRWCEAPPRPXGERVAACATSLESTVRSATRMLGAAGGDGGGAAATSARLRAGLP

SEQ ID NO: 245321 - protein, 121 aa, Zea mays
  Clone ID: MRT4577_155319C.1.pep
MSPFHLISPLTSLPFPRLHRPRHERGTAARPLRLAYCDDKGKFVMVPEAVAALQLVKGPVGVVYSTVPAKKSRCVLGVHTTPGDTHAVHQKFRIIIRKLMSSRYYVSFASQLEYMASAFTS

SEQ ID NO: 245322 - protein, 80 aa, Zea mays
  Clone ID: MRT4577_15531C.1.pep
HHEALMHSEARVHATQTDQIYSTAKQAINTSVTKGTCTTDESSSGMDCACNEHGSCNASVMECSDDSGSENEIFRVKRRS

SEQ ID NO: 245323 - protein, 42 aa, Zea mays
  Clone ID: MRT4577_155320C.1.pep
AFSSLLKIVPGVKVFPSSKGCYFYPKVIPLVHSSSKDTNFVD

SEQ ID NO: 245324 - protein, 53 aa, Zea mays
  Clone ID: MRT4577_155321C.1.pep
PNFKHKIPDQILLLILQPQCYATCKKRGRLECLLRASANLSFNPFFLECFTSL

SEQ ID NO: 245325 - protein, 105 aa, Zea mays
  Clone ID: MRT4577_155322C.1.pep
RTRGRTRGRTRGRTRGSLRAFISSMSASSFARLQHKRFIWQNLIWAQGTICPTLEILLQRGTHTHALAPIVPYSMENSVADAMYNKIIVFVFDQVVDTTPWKSWW

SEQ ID NO: 245326 - protein, 142 aa, Zea mays
  unsure (1)..(142): unsure at all Xaa locations
  Clone ID: MRT4577_155323C.1.pep
GRENNLSHFGXTSPSAASHFLSRLFRLPWLSSSLRAFISSMSASSFARLQHKRFIWQNLIWAQGTICPTLEILLQRGPQIVRDFANESLPDCLILFRGTHTHALAPIVPYSMENSVADAMYNKIIVFVFDQVVDTTPWKSWW

SEQ ID NO: 245327 - protein, 130 aa, Zea mays
  Clone ID: MRT4577_155324C.1.pep
GAPNLDRCFYLFFWAFPKHGKGGGPKILNFASINKSNFFRDWLKICCFSQNLLSGPAGSDKTDFGSGGALIFLPTIQSKVPFFLKSKTSHMNKFFFFAPFADAWENIKFFQARAKGTGSCFKTGANLGLN

SEQ ID NO: 245328 - protein, 62 aa, Zea mays
  unsure (1)..(62): unsure at all Xaa locations
  Clone ID: MRT4577_155325C.1.pep
RMFLDILXWKKVKMWGRIEVFIKLERGXVGVEXVXMWGGMVFYKKILGRRRPFCRIRGWWGC

SEQ ID NO: 245329 - protein, 131 aa, Zea mays
  unsure (1)..(131): unsure at all Xaa locations
  Clone ID: MRT4577_155326C.1.pep
FHRVGGNPCPGKKPSEIVPHWSKGNFVVVPGKTTSPLKDCGSPTLWGWFKKPLLDLFPKKPVPPKPKPDLKPKPEPKPKNPPPSPTXGSSTPFSHPPSRQLFSKKHMFVPFPKPPGSHLFFGPFPKKPVPP

SEQ ID NO: 245330 - protein, 120 aa, Zea mays
  Clone ID: MRT4577_155327C.1.pep
FPFNQLFTLNPVVFLQQQFFPFSQVGFAYFKQKQFFPFNQLAALTPAVFLQQQILLPFSQLVAATRVSFLTQQQLFPFSQRFGGNPPPLFQLQQLLPFVHLVLTDRGAPSPQPILGGAPF

SEQ ID NO: 245331 - protein, 52 aa, Zea mays
  Clone ID: MRT4577_155328C.1.pep
GKPFVPFLPLVYFGTGQFFLAVNRAALTGHLHFALKMGGPQRSNVFFQRKRG

SEQ ID NO: 245332 - protein, 119 aa, Zea mays
  Clone ID: MRT4577_155329C.1.pep
KPLLNPNQRGGKKKNHYSAPPPRLKSVSLGKTGIQVFPNGPNLGMGSPGKNLCGKANGAQKNKMGGKNLKGPTLLLKATGGPLGGLNPFSPPVLVLGGEPPKNPWAPPLFLNGLGPKNF

SEQ ID NO: 245333 - protein, 129 aa, Zea mays
  unsure (1)..(129): unsure at all Xaa locations
  Clone ID: MRT4577_15532C.1.pep
RRIXYRAPAPRQTLYFFFFFSLNMPTFISSWGKYSLPGGHTIPRKPTKGFSIIHNLLRPLISCSGVHSTNTRKTIPTPSSFQPNGRPPMFDSNVHAKLGNSTHMTNQTSLSFNREAGSKNKIESILGTI

SEQ ID NO: 245334 - protein, 52 aa, Zea mays
  Clone ID: MRT4577_155330C.1.pep
YSINQGQAWCSSESVSLSHQVTGSKQPPRICGGKLASVYPFPRPPHSCGGSL

SEQ ID NO: 245335 - protein, 50 aa, Zea mays
  Clone ID: MRT4577_155331C.1.pep
TPLVPQQRLGNIPCSPPDKDPVIKKGKFHCISVTSLKKKKSGIKFGSNNT

SEQ ID NO: 245336 - protein, 66 aa, Zea mays
  unsure (1)..(66): unsure at all Xaa locations
  Clone ID: MRT4577_155332C.1.pep
DWGRRSYCQCFKLVGFGTLVLGIVLLRRVFVFSYQGLXEPLLFMKKKKKKKGRPPCCIGSSLRTRA

SEQ ID NO: 245337 - protein, 61 aa, Zea mays
  unsure (1)..(61): unsure at all Xaa locations
  Clone ID: MRT4577_155333C.1.pep
FPSPLAKNPLLFNAPKNSPEPFNPFGKAPXXPPTTPQPFVRSKGRKFQKARGRRNTPGFKV

SEQ ID NO: 245338 - protein, 297 aa, Zea mays
  Clone ID: MRT4577_155334C.1.pep
LNRAAEKRYEKAQAKPAGRENGRLARGGGGGGNGGHLLPLAFRAAAGLLEAGAPAQPRGRPPPPPADPDPNSGDARHRDGAPRAARHRVQPARGLARPLLARAAASAETAGPPRLRRRGAEGGGAAGGGGAEARQLVGCAVPLFRPYVAQLPWHGGARAWLSKLFPRYGHYCGPNWSSGKEAGSVLWDRRPVDHLDFCCYCHDMAYDTHDQAQLLRADLAFLRCLEGSRHTPARDGIAAAAIYRAMCIFGLKTILIPYRTNLVRLQTGPNYADFFADFVKRVASSSGRPTGGEKQRL

SEQ ID NO: 245339 - protein, 114 aa, Zea mays
  Clone ID: MRT4577_155335C.1.pep
KPQSLNFESVATITQLDTHTQEDSISLAISGLKKNSSYLYRQSLRSHPPKAPTNSARSTTFTCRTRRANSFTASASRRRSACPTTTRPSSRNRRRNPRSWAPSAAARGSSGTGS

SEQ ID NO: 245340 - protein, 92 aa, Zea mays
  unsure (1)..(92): unsure at all Xaa locations
  Clone ID: MRT4577_155336C.1.pep
PQSELRPKGTDIMRGLPCHLGVRGLHGLRLGLGIGDGGLPELRLRHCNSGTFALGPSSSGLLWLAAAAVFDLAAAALAGLGAVLLAATAFAX

SEQ ID NO: 245341 - protein, 77 aa, Zea mays
  Clone ID: MRT4577_155337C.1.pep
MENGAYAVDKPTLCNKPSPSFRLRSGSLNALRLHRVFELFDRNGDRVITLHEMVSVLDALGLGADRSRLEAVAVGDI

SEQ ID NO: 245342 - protein, 74 aa, Zea mays
  Clone ID: MRT4577_155338C.1.pep
VFTYSNARGFDNIMKCNSAKKFINIFTIRSVIRRCEELVWCRLNPVVRHSLSASESEQASLYCIQSEPLVSLSM

SEQ ID NO: 245343 - protein, 51 aa, Zea mays
  Clone ID: MRT4577_155339C.1.pep
HGPCARMTRTNREMVQIFVCYFTNKIYVTNIVHQISLLSIFCSMACSTGPA

SEQ ID NO: 245344 - protein, 34 aa, Zea mays
  unsure (1)..(34): unsure at all Xaa locations
  Clone ID: MRT4577_15533C.1.pep
KRSTCGCVCKCAIHXQVGGNGNYGTVSAGVRAFF

SEQ ID NO: 245345 - protein, 89 aa, Zea mays
  unsure (1)..(89): unsure at all Xaa locations
  Clone ID: MRT4577_155340C.1.pep
PKGGPRWDPKVTSQCPPALQAPGGCDNPCPVFKTDQYCCPGRGGNNWGPPDYSKFFKGLCPGAYSYPKGDAPSPYPCPGGTKXKVVFCP

SEQ ID NO: 245346 - protein, 114 aa, Zea mays
  Clone ID: MRT4577_155341C.1.pep
GIKKGPLSNFALMGGLFQDEVKGSGPNDNLFGPLPRRGPAPIFPAFPPKIGALLNLAVWGGFPPTQPLFVFMAEKELFFFVGGGVLGYLFPLMFIKIKIFGCQPRGTFLFVDLN

SEQ ID NO: 245347 - protein, 59 aa, Zea mays
  Clone ID: MRT4577_155342C.1.pep
MLTCILQCMHDQCIPSCFCRHSFITEPRSFLLRWLIINHIYYPLSLADINEFLPTLPPA

SEQ ID NO: 245348 - protein, 117 aa, Zea mays
  unsure (1)..(117): unsure at all Xaa locations
  Clone ID: MRT4577_155343C.1.pep
ANWVYGAKNSWGGALAAAVLKGLEAPSAPISAILAKMENNGFDYXMVKGWGALIPSFGGVLRGSLGLNVRKRVVGLLVGVAFAPVCLMSTKLICWHTPYCNWAPKAVKKFCCCPVLL

SEQ ID NO: 245349 - protein, 115 aa, Zea mays
  unsure (1)..(115): unsure at all Xaa locations
  Clone ID: MRT4577_155344C.1.pep
NQLLKNNTKKLILNYANQLCERLPTPNGKSTFYSHQISKMPNFAFPIPNKTFPLTPNQYIFKLDQPGQTICISGFMPFYVPPPRGPLXKLGNVFMGPPPPFFYFGKNRIGFPKSP

SEQ ID NO: 245350 - protein, 139 aa, Zea mays
  Clone ID: MRT4577_155345C.1.pep
AELYLQWCDEATVGEITHARYGSPYPWPLNHILAYQKQWEVKRKMKAIGWGKKTLDQVLEDVDQCCQALSQRLGTQPYFFNKQPTELDALVFGHLYTILTTQLTNDELSEKVKNYSNLLAFCRRIEQHYFEDRGKGRLS

SEQ ID NO: 245351 - protein, 66 aa, Zea mays
  unsure (1)..(66): unsure at all Xaa locations
  Clone ID: MRT4577_155346C.1.pep
RKIAARYISNAMRLVPEGKGTPLKHRAPVRAYVFALFNENVNGGLVYNRXYGLFKSAGTPASELSF

SEQ ID NO: 245352 - protein, 62 aa, Zea mays
  Clone ID: MRT4577_155347C.1.pep
VAILKIEKKPRPRVGARVVGQHRAQRVLIGVVAAGRVHGPVHPRAGEEEHARTGHGRAAPPR

SEQ ID NO: 245353 - protein, 106 aa, Zea mays
  unsure (1)..(106): unsure at all Xaa locations
  Clone ID: MRT4577_155348C.1.pep
KSLVPLITRPTLLDHKTLSRVARISGLIAARNRTDRMRSGGESNAPRLRERRWAGAGGIRESKATLAGSVRVERGXGTPVPERALASVEEEAIKVRRRERMVRRRV

SEQ ID NO: 245354 - protein, 367 aa, Zea mays
  Clone ID: MRT4577_155349C.1.pep
LVPLRSATTGSKVLLTTRMKLVAEVLNAGYLVSLDGLRSSDCWLLLKEVALGGETMDFPPELQEVAGTLVAMVKGSPLAAKAIGQMARSTRSTRKWRTLVNTEISNDIIISSIQLSYKHLPGHLQRCFAYCSIFPSPWRFSRSQLVNMWIALGFIQSSAEGKGLEELGQKYFDDLLSRSFFGTANKDQQTYYFLDDLMHILAQHFSAHDCMKINEGIPVVIPPTVRHLSVSTDYLPQLKSKYRLGRLQTLLVLRSSSLSSGHFPRKLLAKFKNLRVLDLSGSDIVELPESINQLVHLHYLAICSITNKLPKTIYMLKHLEVCDIPIFLFHDDHPRGVGKSATVKRLKTCCGKQARSVKSLIDVQGLL

SEQ ID NO: 245355 - protein, 221 aa, Zea mays
  unsure (1)..(221): unsure at all Xaa locations
  Clone ID: MRT4577_15534C.1.pep
KRDKTVGRLEKKDPEAGESSGGLLGRKGCTYQIXMATEDLRVITQGATANLSCSIAVPYCGSFEVIRYRLEQIYESVEPAAEESDVPALIVHGRVTVRLDSESYVTLQWLSDPISDMVSDSVVAMILNVGREGPKVVPVEGAVKTKEETAQKVVYALMASLFGDVKVVEEGRLVISVDGNVAHLDGRSGYVECENATLKERIKTAFRRIQGAVRPIPLASS

SEQ ID NO: 245356 - protein, 85 aa, Zea mays
  Clone ID: MRT4577_155350C.1.pep
LISRLFFGPQSGFRNPFWLGFFAAPPAKVLRFFFPVQALWCPVALPGSLWFGPLQCPLGPLPHSFFFFSVGRVSGLFGSFCVTCF

SEQ ID NO: 245357 - protein, 64 aa, Zea mays
  Clone ID: MRT4577_155351C.1.pep
SLIVIKTSCDSCMCWKSIMLCRSKFFKVTAFINIGQWIEFKLVYKRFMKSDASESTLRFPRLNV

SEQ ID NO: 245358 - protein, 83 aa, Zea mays
  Clone ID: MRT4577_155352C.1.pep
LATFPCGCLGRGGSTRQLQRRKQRACPIYLSDHRILVQTFLLSHNYINMGGVPFPFCNINTENLQQRFGRQGSKIWNNFTCGT

SEQ ID NO: 245359 - protein, 450 aa, Zea mays
  unsure (1)..(450): unsure at all Xaa locations
  Clone ID: MRT4577_155353C.1.pep
MWNGYVNNDDRALLKVIKYSSPTSAGAECVDLDCSWVEQWVHRAGPRKEIYYEPEEVKAAIVTCGGLCPGLNDVIRQVLIXEVSRHFCISNPKFLTFMSNINMNKIVFTLETYGVKNIVGIPFGYRGFFEKGLKEMPLSRGLVENINLNGGSFLGVSRGGAKTSEIVDSIQARRIDMLFVLGGNGTHAGANAIHEECRKRKLKVSVVAVPKTIDNDILLMDKTFGFDTAVEEAQRAINSAYIEARSAYHGIGLVKLMGRSSGFIAMHASLSSGQVDVCLIPEVPFTLDGEFGVLRQLEHLLKSKGFCVVCVAEAAGQXAKIHSCLDLLQESGATDASGNVILSDIGVHMQQKIKMHFKDIGVPADVKYIDPTYMVRACRANASDAILCTVLGQNAVHGAFAGFSGITSCICNTHYVYLPITEVITAPKRVNPNSRMWHRCLTSTGQPDFH

SEQ ID NO: 245360 - protein, 104 aa, Zea mays
  Clone ID: MRT4577_155354C.1.pep
FHATAHANGHAYEDARARPAEPKTPRSRARRRRPTRTRPRTKPRRPTSRRRTSSGTAGTSRRTPSPPSRSTRPRTGRRAARTTAARRPRGSRATDGRRRRSTTT

SEQ ID NO: 245361 - protein, 126 aa, Zea mays
  Clone ID: MRT4577_155355C.1.pep
MWNGYVNNGERALLKVIKYSSPTSAGAECVDLDCSWVEQWVHRAGPRKEIYYEPEEVKAAIVTCGGLCPGLNDVIRQIVFTLETYGVKNIVGIPFGYRGFFEKGLKEMPLSRGLVENINLNGGSFL

SEQ ID NO: 245362 - protein, 312 aa, Zea mays
  unsure (1)..(312): unsure at all Xaa locations
  Clone ID: MRT4577_155356C.1.pep
KLKVSVVAVPKTIDNDILLMDKTFGFDTAVEEAQRAINSAYIEARSAYHGIGLVKLMGRSSGFIAMHASLSSGQVDVCLIPEVXNVAFTMFKTAICFPLTCKHXEAYKLQYEXVPFTLDGEFGVLRQLEHLLKSKGFCVVCVAEAAGQVXKIHXSGLYLLLFHVYSGNTDKMQKTYSLTRFLLPFVTGXLQESGATDASGNVILSDIGVHMQQKIKMHFKDIGVPADVKYIDPTYMVRACRANASDAILCTVLGQNAVHGAFAGFSGITSCICNTHYVYLPITEVITAPKRVNPNSRMWHRCLTSTGQPDFH

SEQ ID NO: 245363 - protein, 96 aa, Zea mays
  Clone ID: MRT4577_155357C.1.pep
YQHVSFCSERHTARSPISDPRSPRRSKMQIFVKTLTGKTITLEVESSDTIDNVKANIQDKARIPPEYQRLIFAAKQIEDGCTFADSYSITRSPYSF

SEQ ID NO: 245364 - protein, 150 aa, Zea mays
  unsure (1)..(150): unsure at all Xaa locations
  Clone ID: MRT4577_155358C.1.pep
AHPSCPRRCAWTRHQXPPGAXRRPKXPEGGPAPPAKRRRPTKRPTTRHKSGHKPTGGGGRKPXXRPRPREGGGPXARRAPERPHRRGRREPRQEQRRXGAANTRQAPRTSRRRRDTHAGAGQGRXXAPPPKRKPETAERXGEAARRKGQA

SEQ ID NO: 245365 - protein, 69 aa, Zea mays
  Clone ID: MRT4577_155359C.1.pep
RSIGKNHWPTMNYSFAYNGQNPEPVLYHYAKQHKTTCSWVQPTIAFLTAGTNRRHAKEPCTRVTTYHEN

SEQ ID NO: 245366 - protein, 241 aa, Zea mays
  unsure (1)..(241): unsure at all Xaa locations
  Clone ID: MRT4577_15535C.1.pep
MWWGFLYVLDKFLMRCKLLLDDNDMQDHTTADHNKNCLDKAFAVIDIMNSALLLVVQNNETDHINILKMCDMLFSQLCLRIPSTNAMQVRGLQSLGQLFGYTSKNIDSHLETLASHQSVGNKNLCQSETLQDMGMDQSGQPTLFCEASMATLLRGLAIAPIQLXARVPTSLFFWPLIQPEGAASDDIALGIAVGSTGRGNLPGSTSDIRAALLLLLIGKCTADQEALKEVEGNGVLQGPSG

SEQ ID NO: 245367 - protein, 74 aa, Zea mays
  Clone ID: MRT4577_155360C.1.pep
LAHSGRRYGGQTPLRPTIYPSITHYAQTSNSAHRKTLTDPNNLAAKLTLQHTIGTIRSEWSREPYNTYDQVRQQ

SEQ ID NO: 245368 - protein, 60 aa, Zea mays
  Clone ID: MRT4577_155361C.1.pep
RPQASLPAMLRSQGCIHECERLQLGLVNLGVLGRGCSPSCHIAPHHGTCAFRSRGGFSWR

SEQ ID NO: 245369 - protein, 318 aa, Zea mays
  Clone ID: MRT4577_155362C.1.pep
MKNRMIIGFVEMGDGMIFKLGHRRLLHKSTIQNVAPILDLAIADYHGEKQDQMFACCGMSPEGSLRVLRNGVNVDRLLKTEAIYQGVTGLWTLRMKATDAYHSFLVLSFVEETRILSVGLSFNDISDAVGFQPDVCTLACGLVADNLLVQIYSKGVKVCLPTVYAHPEGAPLTSPICTDWYPAITISVGAVGHNIVVVATSNPCCLYVLGVRSSSSYQYELYATHHVQLQYEVSCISIPQEDCIHDNVSFSCGEGDDICKNPPPKVNVCKFAVIGTHRPSVEIISLEPGEALRVLTIGTVSVNNALGAPMSGCIPENV

SEQ ID NO: 245370 - protein, 72 aa, Zea mays
  Clone ID: MRT4577_155363C.1.pep
GRSRASSWASTRAMSSPSASCLCARPTAGESTKGWMAGPIKSVLVYKRSTLVQHPYCKMKRKKDMPKTCHQK

SEQ ID NO: 245371 - protein, 80 aa, Zea mays
  Clone ID: MRT4577_155364C.1.pep
APSCWGRRRTTRRRRRNSCNPSVLSACAHALFGRTDTLGCCAMMNAHEASLCQYKLEHVNRAYDNGPAEQRFTLTWGLHK

SEQ ID NO: 245372 - protein, 44 aa, Zea mays
  Clone ID: MRT4577_155365C.1.pep
MAAPPRRSLLVLLSGSLVFASLVALTTAIYEDQVGHADWHQKYI

SEQ ID NO: 245373 - protein, 95 aa, Zea mays
  Clone ID: MRT4577_155366C.1.pep
YPRGRAPWTSSCRQPSWQSRFRASVHPCIILKASKLLIIMEEDPHAHVMKILIRLLGLLFFSVFSLTNIIMRKMMTEIKLVMPVAMQSVFRFTPC

SEQ ID NO: 245374 - protein, 320 aa, Zea mays
  unsure (1)..(320): unsure at all Xaa locations
  Clone ID: MRT4577_155367C.1.pep
MAAEPKILELSNGKITARISNWGATITSLLVPDAXRKGMSPYFGCIVGRVANRIKDGKFTLNGLEYSLPVNNGPNSLHGGLKGFDKVVWDVVEHKDGECPSITFQYHSKDGEEGYPGDVTIRATYSLPEATTLRLDMEATPENKATPISLAQHTYWNLAGHARGDILNHSLQIWGKHITPVDENTIPTGEVMPVDGTPFDFTTERRIGERIDGVPGGYDHNYVLDCGDEKDGLKRAARLKDPSSLRTLDLWTDAPGMQLYTANYVDGIGGKAGAVYAKHAGVCLETQGFPNAINQPEFPSVVVRPGEKYKHTMLFEFSGC

SEQ ID NO: 245375 - protein, 58 aa, Zea mays
  Clone ID: MRT4577_155368C.1.pep
KNLMAAGIIDPPKLVKFCLEHPASVAKTFLTSNVVVVKIKKPKVAPVANPMDNSGYGN

SEQ ID NO: 245376 - protein, 336 aa, Zea mays
  Clone ID: MRT4577_155369C.1.pep
MAAEPKILELSNGKITARISNWGATITSLLVPDAQGSVADVVLGFDGLDPYVKGMSPYFGCIVGRVANRIKDGKFTLNGLEYSLPVNNGPNSLHGGLKGFDKVVWDVVEHKDGECPSITFQYHSKDGEEGYPGDVTIRATYSLPEATTLRLDMEATPENKATPISLAQHTYWNLAGHACGDILNHSLQIWGKHITPVDENTIPTGEIMPVDGTPFDFTTERRIGERIDGVPGGYDHNYVLDCGDEKDGLKRAARLKDPSSLRTLDLWTDAPGMQLYTANYVDGIGGKAGAVYAKHAGVCLETQGFPNAINQPEFPSVVVRPGEKYKHTMLFEFSGC

SEQ ID NO: 245377 - protein, 105 aa, Zea mays
  unsure (1)..(105): unsure at all Xaa locations
  Clone ID: MRT4577_15536C.1.pep
GGWVKTGAPIETYHXFLASLPENDHRYAVDDFDFVAGGNVQESQIFFLAWSPXACRLRDKILFSQWKDRLKAQLSGFHFEIQAAXPSEVAIEVFRERGPLSWFSF

SEQ ID NO: 245378 - protein, 131 aa, Zea mays
  Clone ID: MRT4577_155370C.1.pep
GPERKGIHLRPLPTSREGKNRYVWSSVWNVNSSMFIVWKSPDSGCRRRHGRKEFQRLQEHAASLSTLPSQFSDLLIIIIVIIHSFLLCQVSTGAPDPFISRRWIDNAAVCRSCSYSPSLCGIDGRQQPLYL

SEQ ID NO: 245379 - protein, 89 aa, Zea mays
  Clone ID: MRT4577_155371C.1.pep
CSGVLLPPLHLVVASAAGSSAGFAARGSSASPRGGIVHRVIAALPVVATWVPACMVRAQWHQVSYGLPAWVLVTPLAVKISPAPWCWSW

SEQ ID NO: 245380 - protein, 175 aa, Zea mays
  unsure (1)..(175): unsure at all Xaa locations
  Clone ID: MRT4577_155372C.1.pep
MEKNIAHCPVGGNGEIENGASSSQNPESLEHSVLLSTSQTMPNNLGIRKNYKRAANRGKKGSQGLTGQAYTLMSSNSDVRVLRSTSSSKTTSTEHVQAPVQPAAKRRKMSRASNKSSTDEFSQIRKQVRYILNRMNYEQSLIEAYASRGWKNQSLDKXRPEKELDXSQSEIXRCK

SEQ ID NO: 245381 - protein, 64 aa, Zea mays
  Clone ID: MRT4577_155373C.1.pep
VSSTRPTTYSRAHARPQPITSPPPDPLPPARTLPQELPLALEREIGTGRSPIRVPHRLSLFVLE

SEQ ID NO: 245382 - protein, 719 aa, Zea mays
  Clone ID: MRT4577_155374C.1.pep
MEKNIAHCPVEGNGEIENGASSSQNPESLEHSVLLSTSQTMPNNLGIRKNYKRAANRGKKGSQGLTGQAYTLMSSNSDVRVLRSTSSSKTTSTEHVQAPVQPAAKRRKMSRASNKSSTDEFSQIRKRVRYILNRMNYEQSLIEAYASEGWKNQSLDKIRPEKELERAKSEILRCKLRIREVFRNIDSLLSKGKIDETLFDSEGEISCEDIFCSTCGSNDATLGNDIILCDGACDRGFHQNCLNPPLRTEDIPMGDEGWLCPACDCKIDCIDLINELHGSNISIEDSWEKVFPDAAAMANDSKQDDAFDLPSDDSDDNDFDPNMPEEHVVGKDEESSEEDEDGGSDSDDSDFLTCSDDSEPLIDKKVDDLRLPSEDSEDDDYDPAGPDSDKDVEKKSSSDESDFTSDSDDFCKEISKSGHDEVSSPLLPDAKVGDMEKITAQAKTTSSADDPMETEIDQGVVLPDSRRRQAERLDYKKLYDEAYGEASSDSSDDEEWSGKNTPIIKSNEEGEANSPAGKGSRVVHHNDELTTQSTKKSLHSIHGSVDEKPGDLTSNGSNSTARKGHFGPVINQKLHEHFKTQPYPSRSVKESLAEELGLTFRQVNKWFETRRHSARVASSRKGISLDKHSPQNTNSQVTASMEPKEPEGTVVEESNVCLNGGTTISKEAVSSKVGSRTPGSDVGGSKVDSAEDQNPGPDLAEKARQKAIQQELRKKKMGR

SEQ ID NO: 245383 - protein, 90 aa, Zea mays
  Clone ID: MRT4577_155375C.1.pep
MLRLSERNMKVLLAAALIAGSVFFLLLPGPSAADEKKKGPKVTVKVYFDLRIGDEDVGRVIFGLFGKTVPKTVDNFVALATGEKGFGYKN

SEQ ID NO: 245384 - protein, 610 aa, Zea mays
  unsure (1)..(610): unsure at all Xaa locations
  Clone ID: MRT4577_155376C.1.pep
KSSIAQQQLAQPKPPVKISVPPDSELNAYAGGYENLSAGILPDEQIEFESLCSSFDGHQNVGRRILNDFSRASADLAATAADLKVRLQIYKVRLLLLTRNLKVAKRELKVLMNMARGRDSSTELLLKSQLEYARGNYRKAVKLLSTPHNRAEPAMLAIFYNNLGCILHRQRSYHTSIWCFSKALKYTLSLRSEKPMKLSTLSQDKSCLISYNCGVQHLMCGKPLLAASCFREAMPLFYKRPLFWLRFSECSLLALEKGLLCANGASSCNDEIEVIVVGSGQWRQLIVNHVSLRSNLDSAGVTSGEHKNLVSLGFARQCLQNALLLLDATEKENWXSHLIQRIGTKEPXHGYKSSGQKNTTSTDSKTPSGPTLANVNGEQKGTSLNATLQSSLAFYDEIRRKEYIKIRQAVLANLAFVELCLDNPLKTLTYAKSVLQVTDCSRMYAFLSHVYAAEALCTLNRTEDAAENLSVYIRDGNHVELPYSVENSEKALVEKDSDGEDLVAPAVTKLATEEPEQLRPEEARGVLYINLGMIAARQGEVEKANYMVSRGLAMLPNNPRAVLASVYVDLLQGKSQEAVVKLRRCRNVRFRPASIAASSQQSSLEKPPLS

SEQ ID NO: 245385 - protein, 59 aa, Zea mays
  Clone ID: MRT4577_155377C.1.pep
PELLASVEPRSRLVRKAESNSLSNLSPELGFQSFLTNSSLATYVRTARRPTEASDGVQD

SEQ ID NO: 245386 - protein, 131 aa, Zea mays
  Clone ID: MRT4577_155378C.1.pep
KFFRPPKVPPPQGGAPQARKVLQWKPQVGFPGLVEIMVVPPLWLPQKEKVLVDSGARGPHPPPLKPPRCFFLFWGSGSNCSPPPWWVSGVKVSLSSPPFFSWLEIRVVSGWSSRGVLLFSAPPLGLYRMDE

SEQ ID NO: 245387 - protein, 59 aa, Zea mays
  Clone ID: MRT4577_155379C.1.pep
AICSCYLSIEPIIAVKQLLKIQNKRVGANRTHLIYSKSDYQREHVESSYENVFKLTRPW

SEQ ID NO: 245388 - protein, 85 aa, Zea mays
  Clone ID: MRT4577_15537C.1.pep
MQQPSGLRPWPMGHRACAPFTRLVRAAAACRRFNHGVLAVAVLLQVEEGCGLATADDIAAAVHHVLCIIDAEATEQQLLAAAGPQ

SEQ ID NO: 245389 - protein, 108 aa, Zea mays
  Clone ID: MRT4577_155380C.1.pep
SLRRRCPNLTPLTLAPAPPPPQPCCAASPPSPRGHSSNRPPATPRPFRRRASSRGREYRPGTHGGSSPPSRGEARLRTFFSALFKGGASSCIHWTHHPDDTGLLRRWP

SEQ ID NO: 245390 - protein, 289 aa, Zea mays
  Clone ID: MRT4577_155381C.1.pep
RVPPPGFSTALPSQEFPSGISSHDGSIALPRFPWAFSSQISAQELSKPPSRLPSPFSSSGFSSLDGPNSSSRFPSAFPSGFSSQNGPNPSSGFPFSSGFSSQDGSNQSYGSTNPENLLRNTVLGGSSNHYQSQFGRHSSDMEFDDPAILAVGKGLMPGIGDSGLEMKNTPAFQAQLQPASSDPRFHLHIQPNVQSHQNMGFADHMQDGLNHMNDNRFLGQNHGPLSPYVQIPQQPRNSQVTNGHWDGWSDSRQGNSTPMSDMSRILYPSEVNKLHMLGSNDIYNRAFGM

SEQ ID NO: 245391 - protein, 125 aa, Zea mays
  Clone ID: MRT4577_155382C.1.pep
EWGRALTKALYLPHKPKNCPRLAPFSSPFKKPDQVSASNKIVSVAQKSRGLSRGTLEPMDEGRFKPVKRPAAFVHPLHRSRSLARFFRMWIIPVWALPIGGSLLVIPSFSLSKGEPLRDLGFLKV

SEQ ID NO: 245392 - protein, 144 aa, Zea mays
  Clone ID: MRT4577_155383C.1.pep
DAWGNAKLVSTKQEISKDTRKNIGTSPSPNGSAVVKKQMPKESKKEVATERRSPPKLHRSSPTPARTSPTKLSPAAKQNGNSGPVSSVSTVKKRVSETISWDSLPTSLINSGKAVVRRKNIALIVAAEAQREAAAAAYLVKGLG

SEQ ID NO: 245393 - protein, 41 aa, Zea mays
  Clone ID: MRT4577_155384C.1.pep
QVLADYLLSPPVSLSIVCKGFFPVRTGHAIPWFKKLFVACF

SEQ ID NO: 245394 - protein, 62 aa, Zea mays
  unsure (1)..(62): unsure at all Xaa locations
  Clone ID: MRT4577_155385C.1.pep
FKVIRAHQKRFFLDLGTNNWGHYFSLFQVAAPHPSSISXPLSGFNPFHEMVGPFVNIKKPRL

SEQ ID NO: 245395 - protein, 77 aa, Zea mays
  unsure (1)..(77): unsure at all Xaa locations
  Clone ID: MRT4577_155386C.1.pep
LHLELLLLGFFYILEKTWAGXTLTREVESSHTIDNVKAKSNNKEGIPPNQQRLIYXAKQLEDGRTLAYYNIQNESTS

SEQ ID NO: 245396 - protein, 64 aa, Zea mays
  unsure (1)..(64): unsure at all Xaa locations
  Clone ID: MRT4577_155387C.1.pep
SLPRPSRAGPFSLGTPTLXHSCRNGASLPRHYPASLQRVRFHSGGGLLLPRARSARMSIPTGLA

SEQ ID NO: 245397 - protein, 257 aa, Zea mays
  Clone ID: MRT4577_155388C.1.pep
LAVRPTRRVPGAHGMERRGKGGGKGPCCPSLYTKPRSFSKHVRGVVRIEHRHLLLRRTAPNLRPAGRRKGTAFSIRGIKFTSRREARGAKPKNPGFNSSEALELDGTGRTERQCAAKAPPPRAAPGEARRHSETSSPRDRTQISTPPSFRRTAAPGSRRGGGAFRRRDADPTAATAGGGELLNQDRGAPPPLLLTDTASCNRGPGPLCAAGEEEVALLRFASSVFLVLPAPARLVCPPETRRLGVLSFNPTSASCRI

SEQ ID NO: 245398 - protein, 212 aa, Zea mays
  unsure (1)..(212): unsure at all Xaa locations
  Clone ID: MRT4577_155389C.1.pep
MAAAAAAAAAEPSSADSRRYVVGYALAPKKQNSFIKPSLISRAAARGVDLVPVDDARPLADQGPFDLVIHKLYGHDWRAQLQAFSARYPSVPXVDPPHAIDRLHNRISMLQVVSELDVPLSDAASASADGEGHRHTFGIPSQVVVYDAAALADSGLLAALRFPLIAKPLVADGSAKLHKMSLVYHREGLRKLRPPLVLQEFVNHGGVIFKVY

SEQ ID NO: 245399 - protein, 71 aa, Zea mays
  Clone ID: MRT4577_15538C.1.pep
IYIHIYQKKGYTFIVAAANFTIYINLIYLRTNHLSKVSMAAIWSCPFKHLVWRFYQNSLPLTIRLSTSTIF

SEQ ID NO: 245400 - protein, 375 aa, Zea mays
  Clone ID: MRT4577_155390C.1.pep
MAELQDDHRPELIGLGKMAAEDSLSSLVSSEDEPDLDPVHSKETQLNPGSVSASTVSYRRQTSKERAIGLAPEFAFFKADKDEHSEDDDEEPCPDSQDWPGSFVTVVRMYEAREAKLRARELNSLKLNKSAKRHLSECSWLSEDDFEKLLGNAALKACRELTSASIKTVGEYCQELTSLDLRNLNRLRDSALWHLRGCRLLRKLRLPRNAFSVDDGSIESNLLEVGEHSSAAPREYSGVWEAPEAEVEGAEGGKVEDIDEEAHGGSKISYLVISCPILSPEDFFNILSSGVWSFQVTDFISLNSLLAQGVHPSSVGASLQGEKSTTLYREWGCLGEGTIEASHFVFCTDENNIRGKVNGCSLCVAKGKKKSHFDD

SEQ ID NO: 245401 - protein, 70 aa, Zea mays
  Clone ID: MRT4577_155391C.1.pep
RFPDDLRASVPLRALTPFERSSVVGCRQDHNAYEHNGYAQPPARRRPVLAREQGDRARSAPMYLPGKHGK

SEQ ID NO: 245402 - protein, 406 aa, Zea mays
  Clone ID: MRT4577_155392C.1.pep
MGSKSGVRLQCAEAKSATDWSCCFLALPPAAPSGVDGDGGFNLSWNLRKSFHPPAGLFASMGQQVGVGFPGTSSRSPSPETPRDPYMKYVSPEVVETPPSGEGVALRDKGKKKAVKLRIKVVNHHLKRLISGALAGTVSRTAVAPLETIRTHLMVGSNGNSSTEVFQSIMKHEGWTGLFRGNFVNVIRVAPSKAIELFAFDTANKFLTPKSGEERKIPVPPSLVAGAFAGVSSTLCTYPLELIKTRLTIQRGVYDNFLDAFVKIVRDEGPTELYRGLTPSLIGVVPYAATNYFAYDTLKKVYKKMFKTNEIGNVPTLLIGSAAGAISSSATFPLEVARKHMQVGAVGGRKVYKNMLHALLSILEDEGVGGLYKGLGPSCMKLMPAAGISFMCYEACKKILIEEEDE

SEQ ID NO: 245403 - protein, 177 aa, Zea mays
  unsure (1)..(177): unsure at all Xaa locations
  Clone ID: MRT4577_155393C.1.pep
GKKKPPRGPNTQTPPPRGLAVSXAAGPPGFPPGKGPVGPPPLMWGGPPLGPPRLSPFXPARFLWGILRGYHFPPGNTFSPXPPPFFPPPIGKTGSPPGPGPEFPGGPPGPIFSTPPLGNLKNPPGRKMXFLFPFWPPPPFIPPPHXGPXGAKPPPPVRGPPPGPPLFFSPGKRGAFF

SEQ ID NO: 245404 - protein, 78 aa, Zea mays
  Clone ID: MRT4577_155394C.1.pep
GGGKKGPARIWVKKGLNTTIPPLVLKVFRRGTTPLPRYKGGGGTLGGGPWNYWGGGAQTPWILTPLGPLAPRVGLARS

SEQ ID NO: 245405 - protein, 120 aa, Zea mays
  Clone ID: MRT4577_155395C.1.pep
EIAPLFLPQDACFRFFSTPHLLKILRRQLPFCSTSCFSACLEFGGGREHHPVDSRKRLSRWAVRAACDCNAPRPNRRRIGAAASWPCHRQHHPVLMAMAGLTSRGTSASPSTRRRDSSPA

SEQ ID NO: 245406 - protein, 147 aa, Zea mays
  unsure (1)..(147): unsure at all Xaa locations
  Clone ID: MRT4577_155396C.1.pep
SARAGLMIRLRKAKWFPRTLQDAQAGIGIIAFRYADLQRATRNFSERLGGGSFGSVFKGCYLGDPVTLXMKRLDGAHQGEKXFTAEVNSVGIIQHINLVRLIGFCCEDDKRLLVYEYMPNHSLDLHLFKANGTVLDWNLRYQIAIGV

SEQ ID NO: 245407 - protein, 114 aa, Zea mays
  unsure (1)..(114): unsure at all Xaa locations
  Clone ID: MRT4577_155397C.1.pep
HAASRGRRLYSPHLVSSAGFDMTKRTEKAGIVGTYGTRYGANLRKXQIRKMEVSNTSKFFWEVCGKVSLKKKTVGIWGCKDCWKVKARCAYTMNTCNAVTVKSTIRRLKDPTVA

SEQ ID NO: 245408 - protein, 93 aa, Zea mays
  Clone ID: MRT4577_155398C.1.pep
DLYRSVLLLRSLVGNELLVVLQVLLGHVRVLVSPVDAQGVRTVGVIQRCRRSGDLKVGIGRDESGWRESPRAARALPVIDRSRTSAMNVVRIP

SEQ ID NO: 245409 - protein, 124 aa, Zea mays
  unsure (1)..(124): unsure at all Xaa locations
  Clone ID: MRT4577_155399C.1.pep
MNRTHTDTRGRPGLIPPAGPTHCVKLTVSCIEKTGRGLGLREPVCWTFPRPRSTARAWSTDDVVFVDAMRDDIWRKLVXHYAVDVRISSSDLALYCTGNCICLVVRDASCSLADVNGLGRCPLL

SEQ ID NO: 245410 - protein, 89 aa, Zea mays
  Clone ID: MRT4577_15539C.1.pep
LGFFFFFFFFFSFFFFFRVISAKSLQNHCLKINKKLFFLDYMLRSILGTRDMICFSTKFYHGLIIGMELIYTYRFFGLIMMKFLWGVDF

SEQ ID NO: 245411 - protein, 912 aa, Zea mays
  Clone ID: MRT4577_1553C.1.pep
MAGRVQDFITLRIGSLWLDVPLGPLHASDSAGSLRTTAASPAMIGLEQEVNSKPHDGFIPVVSKAAKRRARRMAARSRASASQEHPNKVHKVASSSSGPPGFSKPRVNKSVGHKTEARFRHTTLGEWPVCIKQAPPTKFVQSRASSTSTPKETTPTLTPPNMLGVRSSKLVPSILGTPPTKTVTTTNPISPNEEVVLVDQHQHPPCNKGKAAMVEKEVLQPSMDKGKEVVMEYNTSSFKNESHTRPQLRVEAPEFIPSPVYNPGLIEHGRVLRWQGIGPTNDDIRKGHVDPTATLSDPISSEIMVSKPYVQDSMSPKRRRRHRRNNRRTRANLIVVDSAVLTDAHRSFIMDMILTQHQESCRRIQDAARRAMQASLERTICQDLNKLLPGVSMSRDDINGEIMRRAEAFAQWPEYQEWVKRNPQRKKYVKQAVNVRASRAANKRRELALPADSLVSRVGCTSNLTSNHARPIHERLVGRSRRSTSSRAPFSTQKRTSSNPFEVLSAMPVGITEKYSDASQSSSASTHFKRKKPRKQIPSGHRPITRSLSGCRSDDSNAISNDDLCSLLNNEDGPSRVEQVLTANDGHSVEQQMAQLMATLQQKEDELVALREQMAREQVANHNHNNDRDASTSHNQQRSEPALTLEAIQRMISEGVRAQYMQTHYSMRPGYVKPYPPEVDMVPFPNNYRQPQFTACQDTSHNGALLLRQFVQTLSGPAFTWYRVRPITFEELASKATDIENYMQHISRQARPYNKPVMERNGPRDKVPSKPKQMQAMEATVVPRKLQTGGVIERNQHRGDASAPRRPTLSERQNQTYSFPVEEVDDLFIGLRELGLIELPKPKRPEEASKFKEPNFCHYHRILGHTLKDCFVVKNIIQKLIDEGTINADLLRSMKKGKKVATSNVATFQNDL

SEQ ID NO: 245412 - protein, 151 aa, Zea mays
  unsure (1)..(151): unsure at all Xaa locations
  Clone ID: MRT4577_155400C.1.pep
RRGLRRNILPGRRAFLSADALLDDKRVLHTICMEDERFWCSINHSDDLRLLDLGSGARGLRWNSRRKLMNRKVPGEESWYRKLATHGGQLFSYMNDRISAYRGPEYVLTSTLHRSHGGAIRDXFIRGDRVFALHNEENVYDAWETPAPGSI

SEQ ID NO: 245413 - protein, 55 aa, Zea mays
  Clone ID: MRT4577_155401C.1.pep
YRLCLPYRALYWYHQPSAQKDTKSDATPNHAEDARSRDAQAAVIGPTWLSRSHAR

SEQ ID NO: 245414 - protein, 79 aa, Zea mays
  Clone ID: MRT4577_155402C.1.pep
TPKGVAPTNFFFKQISKTIFKGAGKFLGGGPLLFPPQKMHPLQGKKFSQTMKTQKFPLKQLKTPRAKLLLKLKTKNPFY

SEQ ID NO: 245415 - protein, 58 aa, Zea mays
  Clone ID: MRT4577_155403C.1.pep
VSMRSPSHPNSFCLHRMIVMAPPPGNSLPSQLVVLQINCVPPRFCMQRTCYAFLENNN

SEQ ID NO: 245416 - protein, 326 aa, Zea mays
  unsure (1)..(326): unsure at all Xaa locations
  Clone ID: MRT4577_155404C.1.pep
PRGGGHAAFGATGRIAISIIQXVELYDSFNVYLLLEGQNLSILFSNALRSAWFLIMNSHVLFTILTTIIVMPTTWLHYLSCLSYLSAGGVFASILGVICLFCVGVVDNVGFENKGTALNLPGIPIAIGLYGYCYSGHGVFPNIYSSLKKRNQFPSILFTCIGLSTILFAGAAVMGYKMFGEATQSQFTLNLPENLVVSKIAVWTTVANPITKYALTITPLTMSLEELLPPNQQKYSNIVMLRSALVVSTLLIALSVPFFGLVMALVGSLLTMLVTYILPCACFLAILRRKVSWHQVAVCSFIIVVGVCCACVGTYSSLSKIIQNYT

SEQ ID NO: 245417 - protein, 107 aa, Zea mays
  unsure (1)..(107): unsure at all Xaa locations
  Clone ID: MRT4577_155405C.1.pep
IWDESGEDPPCCRSVSGSSVRAHIYYLGVSMHAEDWSSCKIVMESSQLQCQMALNGGLAPSEPSGXVLRPQDPCSFQHGRNRACSSFIASPIGRGTLTSFGIAVPSG

SEQ ID NO: 245418 - protein, 148 aa, Zea mays
  Clone ID: MRT4577_155406C.1.pep
GVVSGGSATGADHFSKKRRVPKMDFFVDEPKVEEQQVPFLQTVGAETPVMSPIRLLSAEPFEKMELALVSLESFLQRATAHTSAAQGMLYAAGVAEPSPALALGEMLSAPMDTEIDLQPSACQNPFASTSGQDRTRGRTRGWTRGSAR

SEQ ID NO: 245419 - protein, 126 aa, Zea mays
  Clone ID: MRT4577_155407C.1.pep
MDSKLGVQHGHHHHSHNGVSKPPVARRRQSGGGGGGGKGVKVVYISSPMKLTASAEEFRAIVQELTGRDSNVADHDLDGGGAYHVGAPSSSSSSSSSYSSLGRVSPAVAEAAGARARPATPPGAPP

SEQ ID NO: 245420 - protein, 65 aa, Zea mays
  Clone ID: MRT4577_155408C.1.pep
LLLAPMGCLFLSPLVFRILTVHLFCSFFFSYKEWYFSSSLFHSPVLRLCLLAFNMLSFCTPTVNK

SEQ ID NO: 245421 - protein, 61 aa, Zea mays
  Clone ID: MRT4577_155409C.1.pep
LFIIIFFLLFLLSFRLSIAFFFSLFRLLVVKVLFIITVKKISSSSFYINESKLVLFVLFLF

SEQ ID NO: 245422 - protein, 50 aa, Zea mays
  Clone ID: MRT4577_15540C.1.pep
HASAHASADAWVSRYGDGDGPAPNPPGWCGTALPLPVLCGYLRARRRLLS

SEQ ID NO: 245423 - protein, 90 aa, Zea mays
  Clone ID: MRT4577_155410C.1.pep
SSGPYFSKLCLKILELIDRVGDSDTKVKVAAISSLETLAKESLISGYSTACTIMTKLCEHWFLINYTGALESDDKTYHTHNMKQCYAHKF

SEQ ID NO: 245424 - protein, 87 aa, Zea mays
  Clone ID: MRT4577_155411C.1.pep
VKTSHRLGVRPVIEMGANLYTKNALHFSSTIGVNSKFPLFFFFFFPPPPHAEIYKIYFYTFLYNLYSTNFIFIFFFYFFFPSFFSRL

SEQ ID NO: 245425 - protein, 87 aa, Zea mays
  unsure (1)..(87): unsure at all Xaa locations
  Clone ID: MRT4577_155412C.1.pep
PAGSGSILTCPVLTCTPRETCSVLSLNYLHRSPARSYLLLFPPAARRXNSRSRVNLDDVILKAPSFRSPTYSSSSRQSCASRAVIAV

SEQ ID NO: 245426 - protein, 124 aa, Zea mays
  unsure (1)..(124): unsure at all Xaa locations
  Clone ID: MRT4577_155413C.1.pep
WKYFKVVTVAARKELGGVETKAKCKFCHRSYLYHQGGITTTLNRHLDKCTQYLNKLAQAKKNLAQGSLSFTXXDGGPVVVNPTEYDHEHTRVLIAKMIIVHEYAFRMAEHKWFNILMKWMNNNY

SEQ ID NO: 245427 - protein, 27 aa, Zea mays
  Clone ID: MRT4577_155414C.1.pep
YLHNFLFFFFFFFFFFFFFFFFFFFFF

SEQ ID NO: 245428 - protein, 165 aa, Zea mays
  Clone ID: MRT4577_155415C.1.pep
MARQPAGGDDVDLDLRLVHHQSASGGMGRLQHHHLPPVAADDPDRSFSCTYCRRKFFSSQALGGHQNAHKLERSLAKRSRELSSAVAVVSAAISSSSAAAAAAPRAAASELCSWYPTAQAGGPGDQAAAAAVVSWIADGGRRYAYRVQQAAAASDADDIDLSLRL

SEQ ID NO: 245429 - protein, 52 aa, Zea mays
  Clone ID: MRT4577_155416C.1.pep
FRGCFLFFLCCFYHLTLQTLSIYVVYGGLFNKTGRIHPYPPGSFFSCSLFWL

SEQ ID NO: 245430 - protein, 96 aa, Zea mays
  unsure (1)..(96): unsure at all Xaa locations
  Clone ID: MRT4577_155417C.1.pep
KTSRRFYYRQVRPNVLAXTYNINGGSYELNVSGSRGPRRMKXVMHSIPTSRLEAVGTVTSQLDRILARSTEETFCSICFSKASVVDRAMCLTSSRF

SEQ ID NO: 245431 - protein, 202 aa, Zea mays
  Clone ID: MRT4577_155418C.1.pep
GIGTVPVGRVETGVIKPGMVVTFGPTGLTTEVKSVEMHHEALQEALPGDNVGFNVKNVAVKDLKRGFVASNSKDDPAKEAASFTSQVIIMNHPGQIGNGYAPVLDCHTSHIAVKFAELITKIDRRSGKELEKEPKFLKNGDAGMVKMIPTKPMVVETFSAYPPLGRFAVRDMRQTVAVGVIKSVEKKDPTGAKVTKAAAKKK

SEQ ID NO: 245432 - protein, 196 aa, Zea mays
  unsure (1)..(196): unsure at all Xaa locations
  Clone ID: MRT4577_155419C.1.pep
VGRVETGVIKPGMVVTFGPTGLTTEVKSVEMHHEALQEALPGDNVGFNVKNVAVKDLKRGFVASNSKDDPAKEAASFTSQVIIMNHPGQIGXGYAPVLDCHTSHIAVKFAELITKIDRRSGKELEKEPKFLKNGDAGMVKMIPTKPMVVETFSQYPPLGRFAVRDMRQTVAVGVIKSVEKKDPTGAKVTKAAIKKK

SEQ ID NO: 245433 - protein, 418 aa, Zea mays
  Clone ID: MRT4577_15541C.1.pep
MKVDLAAQTSQTSTPLPPSPEAASASPPAEDAPLLPDAGVRRRAACGRFAQRSGSFRREVGRAAAETFLLTRLTLILLRYLGIGYRWIRQFLALCCYTLLLMPGFIQVVYYYFFSSQVHRSVVYGDQPRNRLDLYMPTSTTGLKPVVAFVTGGAWIIGYKGWGALLGRRLAERGIIVACIDYRNFPQGTIGDMVEDASQGIAFVCKNITSYGGDPSRIYLVGQSAGAHIAACALLNQAIRESGEGDTSSWSVSQLKAYFGISGGYNLLNLVDHFHRRGLYRSIFLSIMEGEVSLQKFSPQMMIMESSARSAVSLLPRIILFHGTSDYSIPPAESQAFADALQQQGARADLFLYEGKTHTDLFLQDPLRGGRDKMLEEIARVIHSEDPDAAAQHLVVVPVARRLVPEFMLKLAGRVSPF

SEQ ID NO: 245434 - protein, 198 aa, Zea mays
  Clone ID: MRT4577_155420C.1.pep
MTPTATVCLMSRTANLPRGGYCENVSTTMGLVGIIFTIPASPFFRNLGSFSSSLPDRLSILVMSSANSKDDPAKEAASFTSQVIIMNHPGQIGNGYAPVLDCHTSHIAVKFAELITKIDRRSGKELEKEPKFLKNGDAGMVKMIPTKPMVVETFSQYPPLGRFAVRDMRQTVAVGVIKSVEKKDPTGAKVTKAAAKKK

SEQ ID NO: 245435 - protein, 202 aa, Zea mays
  Clone ID: MRT4577_155421C.1.pep
KLGIAKAGAGSHHFFLAAALVTFGPTGLTTEVKSVEMHHEALQEALPGDNVGFNVKNVAVKDLKRGFVASNSKDDPAKEAASFTSQVIIMNHPGQIGNGYAPVLDCHTSHIAVKFAELITKIDRRSGKELEKEPKFLKNGDAGMVKMIPTKPMVVETFSAYPPLGRFAVRDMRQTVAVGVIKSVEKKDPTGAKVTKAAAKKK

SEQ ID NO: 245436 - protein, 41 aa, Zea mays
  Clone ID: MRT4577_155422C.1.pep
PYRFTHILANDEKEGTSIEDALPVIFSKGRTRWRIDRGKEA

SEQ ID NO: 245437 - protein, 66 aa, Zea mays
  Clone ID: MRT4577_155423C.1.pep
ASKFEPYFARHSSVISQIHARSNQALFRQCRGGRRPRRRPRPRQGRGSGSVGGATTPGKGAVPLVP

SEQ ID NO: 245438 - protein, 283 aa, Zea mays
  Clone ID: MRT4577_155424C.1.pep
GRVGEIVKEVSFYLKKVGYNADKIGFGPISGFEGDNMIERATNLDWYKGPTLLEALDQITEPKRPSDKPLRLPLQDVYKIGGIGTVPVGRVETGVIKPGMVVTFGPTGLTTEVKSVEMHHEALQEALPGDNVGFNVKNVAVKDLKRGFVASNSKDDPAKEAASFTSQVIIMNHPGQIGNGYAPVLDCHTSHIAVKFAELITKIDRRSGKELEKEPKFLKNGDAGMVKMIPTKPMVVETFSAYPPLGRFAVRDMRQTVAVGVIKSVEKKDPTGAKVTKAAAKKK

SEQ ID NO: 245439 - protein, 96 aa, Zea mays
  Clone ID: MRT4577_155425C.1.pep
KACIYLISVGSRGTDRRARSKHLAPTSQCRHDTKAVPQLPLLPHVTPLCVTKHAKKPLGWHWLYHSTVTWICKQELRQHRCRSCLFSTLTQCIGPY

SEQ ID NO: 245440 - protein, 120 aa, Zea mays
  Clone ID: MRT4577_155426C.1.pep
KCGINTQIQCSTRPPSTVRVLPLQYITGMNSMNLDLDTKINSRKNELDSFSDKGLIILGDKLGRILLSPYSCLGLALFSGLAGWKSPYSDCFCSRSGRHKQCRAPINAEPIMDAGSWPGC

SEQ ID NO: 245441 - protein, 35 aa, Zea mays
  unsure (1)..(35): unsure at all Xaa locations
  Clone ID: MRT4577_155427C.1.pep
XVKPFSSLYYVLGLNFVRITAYTPIXXFFEKNQPP

SEQ ID NO: 245442 - protein, 50 aa, Zea mays
  Clone ID: MRT4577_155428C.1.pep
DRGVTTQDDDGPGLNKILPLSQIFCLTAWENPSQTDVNLRNSRKYNRISR

SEQ ID NO: 245443 - protein, 54 aa, Zea mays
  Clone ID: MRT4577_155429C.1.pep
MNPGHSPPKSTSWEQYGHAGPSGHKPVLLAGGQTGKQVGGIFISPLQNWDPFRP

SEQ ID NO: 245444 - protein, 84 aa, Zea mays
  Clone ID: MRT4577_15542C.1.pep
MEKGGKKKKGATPKGARHCRIGTCRFGPPSADHQGGQERPHQNEGFLGSFGSTIHGGAALTFKNHADAQAMHFPWATGAGDKGG

SEQ ID NO: 245445 - protein, 45 aa, Zea mays
  Clone ID: MRT4577_155430C.1.pep
DMNTIISWWLDHCLPYWSKRKPRWAYIASGTLRVTGGPSLIGRDQ

SEQ ID NO: 245446 - protein, 244 aa, Zea mays
  unsure (1)..(244): unsure at all Xaa locations
  Clone ID: MRT4577_155431C.1.pep
MEQLDYKFHEKYTALKKRKLLDEGLERKREAELNELYDAMKDWVSELRKDNAELNEKLVEKQDELEKARQEFLEDIRTRDAEILKLKQLLDEKAEKNNSTATGFPCLAPEAVLENSTPLSPKRKTPFSHGKQLECSRRHTRISGNRTTEIRSAHMLSLLLQSLVRMKISVXDGTEIFSVSVSHEASGYSFILTWLETSDEWSYKLSSLGTLERIAVDWMRQDIRFSMKMCRMFFERISSIITKG

SEQ ID NO: 245447 - protein, 92 aa, Zea mays
  Clone ID: MRT4577_155432C.1.pep
SPTRPPTRPIFSCFSQDAQKVGKIQVTAFQSEDELQDESHVHDCMADYRLSEALLSKVTCDVVTEELNVNRCSEYLYFTCSIVLRSLYESLS

SEQ ID NO: 245448 - protein, 79 aa, Zea mays
  Clone ID: MRT4577_155433C.1.pep
DERHGLQAVVLDGGTGALLRDAVLELVLVHGLELTGHLVVVVPQAEDRHSDLLVVRNVFAPPPFPEKGPRCLRSSRKIR

SEQ ID NO: 245449 - protein, 149 aa, Zea mays
  unsure (1)..(149): unsure at all Xaa locations
  Clone ID: MRT4577_155434C.1.pep
MAAAPDMDEQDAAIEGGQLVVPLLGSRSASTATGSPSQDASPLRRLYAGHALARWGARMWEFSVGLYMIRIWPRSLLFTAIYGVVESPSVXVFGPTVGTLVDNLTYLQVLGIWLLVQSLSFIVAGASVTALLVYDDLKAXSFPVFMALV

SEQ ID NO: 245450 - protein, 73 aa, Zea mays
  Clone ID: MRT4577_155435C.1.pep
TNSDTPVIERPPLSLNITCDESERHSFLALFNTKMRNTAQIKQLIWPRCAGRVRIFHAPSSQAMARALTFFWP

SEQ ID NO: 245451 - protein, 83 aa, Zea mays
  Clone ID: MRT4577_155436C.1.pep
PRQQGLHPLPVPNPLVAAFLRPCLQLLPHVQLSSMNRAGPPSVVLGAILLVYIFSCTNLGAPVQELEPYNKKTPNKIFSIEDY

SEQ ID NO: 245452 - protein, 45 aa, Zea mays
  Clone ID: MRT4577_155437C.1.pep
SGNKACYLYCIERFDILEDCFSIHQFVGRVIDINLSKFEVFCSTV

SEQ ID NO: 245453 - protein, 143 aa, Zea mays
  Clone ID: MRT4577_155438C.1.pep
AAFFFFFFFARILSSYTARAMAWHGGGGRSHASTEPATSKRRRKKERMRMHAYRRRLLLPMDRVNRMSSLTHCHTGDVEIVPSLVSNHCYRHLSLSATLLFGRSWDVASPPTTSVPACRCAGKEYNNLRHVGDPAGLEDPNRP

SEQ ID NO: 245454 - protein, 93 aa, Zea mays
  unsure (1)..(93): unsure at all Xaa locations
  Clone ID: MRT4577_155439C.1.pep
MNVLIDALALLALAESAGFRTSESCGCHTPXIHVPPTLYXPTPIYLPPQHQTESWQYPTQPPQISPCHQLGSCGVGSVSSPFLGQSVXFLTHQ

SEQ ID NO: 245455 - protein, 77 aa, Zea mays
  Clone ID: MRT4577_15543C.1.pep
IIQSIYLFLFNQTPFFIQGTGGSTMLPDLLANKKTGSYSRAPTHRFVIKQRFSQRKIKGRGCLKALSGENSWTKLLK

SEQ ID NO: 245456 - protein, 189 aa, Zea mays
  unsure (1)..(189): unsure at all Xaa locations
  Clone ID: MRT4577_155440C.1.pep
PPPRRKGEEPWLAASLRPANFLPGLAIGFLLGLLLDLSSXEAQVXXXXXXXXXXXXXXQLQAGVGDXFASGGEELKMVLVVRQDLKMGSGNSAPECAHAATGLYAELLSSNRGLLRQWEQLGQAKIVLTCKNQQEMNRLKETAEHRGIPTFIVADAGRTQVLAGSKTVLAIGPGRKADIDSVTGKLRLL

SEQ ID NO: 245457 - protein, 202 aa, Zea mays
  Clone ID: MRT4577_155441C.1.pep
MAPPPRRNPPHQNPTRRKGEEPWLAASLRPANFLPGLAIGFLLGLLLDLSSSWRPKSSPAPAPAAAPARASSSKRASGTSFASGGEELKMVLVVRQDLKMGAGKIASQCAHAATGLYAELLSSNRGLLRQWEQLGQAKIVLTCKNQQEMNRLKETAEHRGIPTFIVADAGRTQVLAGSKTVLAIGPGRKADIDSVTGKLRLL

SEQ ID NO: 245458 - protein, 76 aa, Zea mays
  Clone ID: MRT4577_155442C.1.pep
ACGFAGQPQTVEWFFPPPPPIVNGFCRFCVPSLRTIAPFTVCAKYVCITQNISTHTYDAHHDNDEEERIVSRCIGG

SEQ ID NO: 245459 - protein, 41 aa, Zea mays
  Clone ID: MRT4577_155443C.1.pep
QTCYPPIITPCHFTGSSRTMITLPPMTMGDTASLNPDKPVN

SEQ ID NO: 245460 - protein, 102 aa, Zea mays
  Clone ID: MRT4577_155444C.1.pep
NLGLKFKNAPWNKKTFFFINTQQLKWWGGALLTPGGAVFGTHFLGQMETPSLKNPAVLPFFLHTGMQFPLWGGPPLKGLVPGTQRGGSPPKGRGNKNMVSGG

SEQ ID NO: 245461 - protein, 157 aa, Zea mays
  Clone ID: MRT4577_155445C.1.pep
GEKNYKKKKKKKKKIKKKKKKKKKKKKKKKKKKKKKNRFQELENWMEERKGDFRDNNKGTKTGNLGFGTPPLFMFGLFQFPINRNLGFGNPTLVLPWGPHGRLGPPPVTGGPYPRGNGSGFFGGTRMGPRFMEGAKSNPLINPPPNPEMVTPGESRL

SEQ ID NO: 245462 - protein, 127 aa, Zea mays
  Clone ID: MRT4577_155446C.1.pep
TQLRKYKSRVTVQVGQQIEDSRFKGISWCRQLKIPDLKESAVPVQNTQEFKTSTVKSKTTKLKTFLQATNLRCAVFSLPRRNCAENLFISQDYTKLFWENYKISHFINKVPSKIETIFFIRMCCKNT

SEQ ID NO: 245463 - protein, 81 aa, Zea mays
  Clone ID: MRT4577_155447C.1.pep
SSNLGSTTRPLTERNTKAPKAQTHQLPLDNGDEILGSFTAVAETDARQRRRRGLIAGPHQACRKVLRHARPRSTAFLTAAS

SEQ ID NO: 245464 - protein, 79 aa, Zea mays
  Clone ID: MRT4577_155448C.1.pep
NLGPGAREVPLVLKKRGFSPPVGGGFLAGKPRKNKIQCWPQAPGWMDGTSTPRDCLPPLKFNLAGFIFSEKGNVFFFPR

SEQ ID NO: 245465 - protein, 124 aa, Zea mays
  Clone ID: MRT4577_155449C.1.pep
MAITPTQFAKKTAQSANWSDAKRRVLSSYREWIRAAPEVQTMYNMPMPVSAIRTRMRQEFERQRFVNKLSVVDVLLFKSHAEYQETMNFWKQTNHIMAYFKEENFRGDKRLPSSFMTGFLEGRN

SEQ ID NO: 245466 - protein, 70 aa, Zea mays
  Clone ID: MRT4577_15544C.1.pep
KKPLRVRLLCTLPKQTLKSNLIHLFCFGTRTVSTRGGFFIHSRRRSHSPALSLGYFWEGGGGESLKLFYF

SEQ ID NO: 245467 - protein, 47 aa, Zea mays
  Clone ID: MRT4577_155450C.1.pep
IFRCRQVVSCGAPATSTTKSIVPLAQTQAIASPYFKESRMAWVVRRL

SEQ ID NO: 245468 - protein, 69 aa, Zea mays
  Clone ID: MRT4577_155452C.1.pep
SPQKTKDMGGLHPGVELTHGITVKDNDAIGDYGKHYVVAMWLMLSKTIVTVRAVCKGLPVYTNSEWCEN

SEQ ID NO: 245469 - protein, 578 aa, Zea mays
  Clone ID: MRT4577_155453C.1.pep
MSYPIHCSVRVNAISGVTLSRSPLLGANYRTCTRLSSERRRSAPSPAAGRRHARQGRAPSARGRDVLRRPGSTPDEAEAGAASLDPEAEAGAASGSGGGGGRGEPGSGGGGGTGPRRGNLEQAKPYPRSGGLEVGGGEEEVGSAQGSAKGNRKRRRSKEVEASSEESSTARSARPFRRFRMDGTHNSKGDSSQSQGQAGWNPYQPPPPPAWNPYMFPMQPQPGGWYPQPIHHPPHNVSIFPPPSGPNIVSVDHTEANVVLGADEVDVLHPEDSVPSILKRGRTKLGNFSPQEDVNLVKAWLEVSCDPVIGNGQKGDRFWKRVVERYNFRRGANSERSLRSLQSRWTNNIKPEVGKFAGYYAEALRQNPSGMSDADKTSLAATNFAEVEGHAFGFMHCWDRMKDEPKWGNPTQLGTEAHLEGDGLEEDSNRVHGDADKSAGKRPVGRDRAKAANKKSKSVSGDTSSSEYASRMQDLSIQKINIMQEESVRKGERFQQLATIDEKRYQEMRSHNQSVLDIEQEKVRIMREKHDREEKKEDERILSINLDSCTPSLRMYYEALQEDIMAKLAARRQGRHAP

SEQ ID NO: 245470 - protein, 87 aa, Zea mays
  Clone ID: MRT4577_155454C.1.pep
MVGGGNEFRFFLSCDISHPLAFRVLHAEHILLTDQKVPELFVECKLYIDGIQFGLPVKTRLEPSGPKYCWNELITLSTKYRDLTSLS

SEQ ID NO: 245471 - protein, 84 aa, Zea mays
  Clone ID: MRT4577_155455C.1.pep
TKKKSGVSGPCFNNPLVGLGFLTRHSKIKYGSFLFSGGWVGKSLYGQPSLGVVIGLRMLGPHLCMLFYGAHVTSSVLKKKKKKK

SEQ ID NO: 245472 - protein, 56 aa, Zea mays
  Clone ID: MRT4577_155456C.1.pep
YKLCMTCDGGTKKTTFTKRNNTGKFEKTYEPTMGVKNHTSNFTTNCSKTKIYCWYT

SEQ ID NO: 245473 - protein, 57 aa, Zea mays
  Clone ID: MRT4577_155457C.1.pep
KPGHARACARQSWYHIRLGSFTLMLQQLLISLWSPHAPKTSLPGASSLRSMWAPQGD

SEQ ID NO: 245474 - protein, 45 aa, Zea mays
  Clone ID: MRT4577_155458C.1.pep
CLGTTLFFFHLNWSFRGLVTLTLPPMGMRDTLLLNHRRLKTQLAS

SEQ ID NO: 245475 - protein, 34 aa, Zea mays
  Clone ID: MRT4577_155459C.1.pep
THTGGGATRSIHNTCLLREDRPAGDLTCESALSH

SEQ ID NO: 245476 - protein, 71 aa, Zea mays
  Clone ID: MRT4577_15545C.1.pep
LYQDSTRGLTSQLTQILVRDGVPCSARGSVRSEFYRRTLKPFIVGGVYRIVSRPWPKNGTLLVQCLHHMAC

SEQ ID NO: 245477 - protein, 149 aa, Zea mays
  unsure (1)..(149): unsure at all Xaa locations
  Clone ID: MRT4577_155460C.1.pep
MASKRILKELKDLQKDPPTSCSAGPAGEDMFHWQATIMGPPDSPYAGGVFLVNIHFPPDYPFKPPKVSFKTKVFHPNINSNGSICLDILKEQWSPALTISKVLLSICSLLTDSNPDDPLXVPEIAHMYKTDRPKYESTARSWTQKYAMG

SEQ ID NO: 245478 - protein, 75 aa, Zea mays
  Clone ID: MRT4577_155461C.1.pep
KNNSGPKTGLITGSFPDFPVFYLPVKLLSHLSKSWKPRREPRRQPTQKLRGVDPHTASISIFQTNRGPRRKHNFT

SEQ ID NO: 245479 - protein, 269 aa, Zea mays
  unsure (1)..(269): unsure at all Xaa locations
  Clone ID: MRT4577_155462C.1.pep
PPRSRPARRNEFPVSSQPPQTRSSLPRPQTLVLYRRIAEVKEKERRRTLEEILYALVVQKFVEAGVSLVPALSRSTDPSGRVDQWAETVEENLQRLHSHEAYEMIENHLTLILGQRQGDATIAAISKLRVGQVYAASVMYGYFLKRVDQRFQLERTMKGLPWGSEEEDSALNQVMMTDLMPSAQTSSSHPEMGSWTAPAFSTGGPSQSIKPCRLRSYVMSFDSDTLQRYATVRSKEALGIIEXHTGALFGSQRCDPPEAPLIFQDEHIG

SEQ ID NO: 245480 - protein, 59 aa, Zea mays
  unsure (1)..(59): unsure at all Xaa locations
  Clone ID: MRT4577_155463C.1.pep
ANPRVLFYSDRCCAPADPIAMELYANVVPKTVENFHALCTXEXGVGKFWKPLHYKGSTF

SEQ ID NO: 245481 - protein, 370 aa, Zea mays
  Clone ID: MRT4577_155464C.1.pep
LVTSRSRSTRRRSSVVRASWSPSESLPPSSSIAPLRMESPAGQLLSQILHTHPHLLSAAAEQQLEQLQTDREADKEKDKESDAGDKLAPTGGDLVLYRRIAEVKEKERRRTLEEILYALVVQKFVEAGVSLVPALSRSTDPSGRVDQWAETVEEKLQRLHSHEAYEMIENHLTLILGQRQGDATIAAISKLRVGQVYAASVMYGYFLKRVDQRFQLEKTMKGLPWGSEEEDSALNQVMMTDLMPSAQTSSSHPEMGSWTAPAFSTGGPSQSIKPCRLRSYVMSFDSDTLQRYATVRSKEAFGIIEKHTEALFGKPEIVITPEGTLDSSKDEHIRISFAGLRRLILEAVTFGSFLWDVESFVDSRYHFVTS

SEQ ID NO: 245482 - protein, 385 aa, Zea mays
  unsure (1)..(385): unsure at all Xaa locations
  Clone ID: MRT4577_155465C.1.pep
PETQLRLRLRQGSRAXQQLTSRSTRRRSSVVRASWSPSESLPPSSSIAPLRMESPAGQLLSQILHTHPHLLSAAAEQQLEQLQTDREADKEKDKESDAGDKLAPTGGDLVLYRRIAEVKEKERRRTLEEILYALVVQKFVEAGVSLVPALSRSTDPSGRVDQWAETVEEKLQRLHSHEAYEMIENHLTLILGQRQGDATIAAISKLRVGQVYAASVMYGYFLKRVDQRFQLEKTMKGLPWGSEEEDSALNQVMMTDLMPSAQTSSSHPEMGSWTAPAFSTGGPSQSIKPCRLRSYVMSFDSDTLQRYATVRSKEAFGIIEKHTEALFGKPEIVITPEGTLDSSKDEHIRISFAGLRRLILEAVTFGSFLWDVERFVDSRYHFVTS

SEQ ID NO: 245483 - protein, 50 aa, Zea mays
  Clone ID: MRT4577_155466C.1.pep
LVLCCLTRYNHIKGLSDKPLAHYSCDSTFLNYLADKHLMGRLFESTTPFT

SEQ ID NO: 245484 - protein, 87 aa, Zea mays
  Clone ID: MRT4577_155467C.1.pep
HSFVFIGVAHSCELSICVWKHNSPGGWTGDPFFGLTWKSKTPVEVTNLWGTLRLNGGFLKKKIGAFLRRALKKGHPKFAELNSLPLL

SEQ ID NO: 245485 - protein, 41 aa, Zea mays
  Clone ID: MRT4577_155468C.1.pep
AAQPPPQPLWGVRGHSALVVIHEIWEIPSIHLSPSIYVIMQ

SEQ ID NO: 245486 - protein, 60 aa, Zea mays
  Clone ID: MRT4577_155469C.1.pep
LKLLYTFHYLYAKPVIPSYKGLLITSGLHFPYDPHNSLSTLLPCPLLLSFPLSSNHLNLK

SEQ ID NO: 245487 - protein, 38 aa, Zea mays
  Clone ID: MRT4577_15546C.1.pep
CLTWIDYLITTISIKMKSTPNFSNYFKKGSFQFLKIYP

SEQ ID NO: 245488 - protein, 231 aa, Zea mays
  Clone ID: MRT4577_155470C.1.pep
MQLKPLPPQSLIRRRLPSPPHETAAAAAATEQHQILSPLLVHCRSKAVKMNAHLSFEDGWKVLEQGIVTCSKILEGSTGTRPTVAEYMNCYDCAYRMAVQTTSYCEEMYNGYKATLAESVRALVCPHLMHQRDGYLLRQLAKMWSNYCIMVKCVSGFFNYLDRCFVEQRKLPCLEDTAATSFFSTVFSFFSHEVSDALLTSIRQERDGINVDMDILMGIMRGICRSEVKSF

SEQ ID NO: 245489 - protein, 122 aa, Zea mays
  Clone ID: MRT4577_155471C.1.pep
SALFDRQQEYVKRQTRFVSRKPAKTIVATIEVVAESMSLKVHSQNYKLRLEGASWNRTSQFAVVLEVFQVAPSLFMVDVRKVAGDTLEYHRFYKNLCSRLDSIIWRPIEVSAKSKLLRTTTC

SEQ ID NO: 245490 - protein, 104 aa, Zea mays
  Clone ID: MRT4577_155472C.1.pep
AGETQTYRVSNIPPEWKTKPGVKNPRQKSSNSGKNGQFYYWPPFRITPAQLTSYVFPSVFWHYFFPAKNKLSLFSPVQKFLKPCFPTFKQSFLGFFFLIKQWVF

SEQ ID NO: 245491 - protein, 86 aa, Zea mays
  Clone ID: MRT4577_155473C.1.pep
ALFRVPIVRNSSHHLALKDLLQLMDVANSLSCQHCVKSSVARSSSTMPVGVLHLGSVKDFLPVGLFQVVMSFAKLNRLCPVSRVLS

SEQ ID NO: 245492 - protein, 41 aa, Zea mays
  Clone ID: MRT4577_155474C.1.pep
HVLLPYYHFDVPLVGDESLFQITGDRTWLLHVHVVMRVVQF

SEQ ID NO: 245493 - protein, 95 aa, Zea mays
  Clone ID: MRT4577_155475C.1.pep
EFSYKDTCARISCTHRKLCIHAAALEGCALLRALAPHTTGPAFSGYTKTIRCHSTLLRLCCAIYHRGHHSTDFYASSHAMCILLLFTNLSLQLMS

SEQ ID NO: 245494 - protein, 97 aa, Zea mays
  Clone ID: MRT4577_155476C.1.pep
REQSSFAIIFTNWGNQRDKSGKKGKKKDEKDFCRAGHGIGGSPMVKQPRAHSQAQPACLPTLSLQKFNHHPTRWRGQPTTLLQILSPPPFPPSARWP

SEQ ID NO: 245495 - protein, 65 aa, Zea mays
  Clone ID: MRT4577_155477C.1.pep
IVKPRLGVTLHKVVVAGALYLLFSGMEGVLRVTGAQIDLASMVFIPVAFLDTALCWWIFISLTQT

SEQ ID NO: 245496 - protein, 66 aa, Zea mays
  Clone ID: MRT4577_155478C.1.pep
LFYIEHFNSQFSVWFNVNVPLFIILSFLFLWCLVYFLFLFIFFFFFYFYFFFFFFFFFFFFSFFFF

SEQ ID NO: 245497 - protein, 546 aa, Zea mays
  Clone ID: MRT4577_155479C.1.pep
KDPNNVQDYVQRHLLSLSVWEELRFWDGYFEYLMENCSNKSANYVTLVTAQLILMATHMAGLGLPDIDSWNMIEKIAERNNLGYKQLIKLRALLTHLQQLRIGYWGVATGKSQPLQSYGMASPHAIDVIDESQQPAEASGLGRSWVQSMFSRDRSLRASSFNRASDGNAVAATGKTEISAAQKKTQTNMRTLRGHTGAITALHCVTRKEVWDLVGDREDAGFFISGSTDCTVKIWDPSLRGSELRATLKGHTRAIRTISSDRGKIVSGADDQSVIVWDKQTFKLLEELKGHEAPVSSVRMLSGERVLIASHDGTVKMWDVRTDTCVVTVGRCQSAVLCMEYDDSTGILAAAGRDITAHVWDIRSSKQMFKLQGHTKWIRSMRMTGETIITGSDDWTARVWSLNRGTCDAVLACHAGPVLCVEYSPSDKGIITGSADGLIRFWENEGGIKCVKNLTLHTASVLSISASDHWLAIGAADNSMSLFHRPQERFGGFSNAGSKVAGWQLYRTPQKTAAVVRCIASDLDRKRICSGGRNGLLRLWDATTSI

SEQ ID NO: 245498 - protein, 81 aa, Zea mays
  Clone ID: MRT4577_15547C.1.pep
AKEIWEIADCPCTNSGTYHLVQALRPFFKVPQPRFRWNVLPERMLSITISNPGRSINLLAHRKKHFMWPPARRINYLLLEK

SEQ ID NO: 245499 - protein, 55 aa, Zea mays
  Clone ID: MRT4577_155480C.1.pep
LLRTSDMVCLDSFFYSGARALCPTWRYLVQAYGASHVGTCALVLLDHHRVAKSLY

SEQ ID NO: 245500 - protein, 83 aa, Zea mays
  Clone ID: MRT4577_155481C.1.pep
KKKKPRGPKRGPARKRGSAPSTTEAAVFGKTLQSLAFFFNNYKDWFPKFFAGKFSGGIGNDIPLKFKDPGCVKKKKKGQPLAI

SEQ ID NO: 245501 - protein, 223 aa, Zea mays
  Clone ID: MRT4577_155482C.1.pep
MADIQLGCYTIKSHGAKVARLHMYDWIILLLLAVIDGLLNIIEPFHRFIGKDMMTDLRYPLKGNTVPFWAVPLIGIVLPCVIFGGIYFKKKNIYDLHHGILGILYSVLITAVITDAIKDGVGRPRPDFFWRCFPDGKDLYDNVTTGVLCHGEKSVIKEGHKSFPSGHSSWSFAGLGFLTWYLTGKIAVFDRKGHISKLCIIVLPLLTAALVAVSRVDDYWHHW

SEQ ID NO: 245502 - protein, 35 aa, Zea mays
  Clone ID: MRT4577_155483C.1.pep
HTYHHKLSFNKDLPEFRSGITITYLATNYINELFY

SEQ ID NO: 245503 - protein, 284 aa, Zea mays
  unsure (1)..(284): unsure at all Xaa locations
  Clone ID: MRT4577_155484C.1.pep
DFLSDKNIRFQVGHATVSPSPPVPLRVAPGTPARSRASSVGDADRRWLGRGTREMLVYTGLVQVVLWFGAMPLGFLPPVLASSCRWLPFLSSSSSPWWRKGGGAGSGEIPLNKLAGLSDLELKLLLPYFSSSCHGGGLEEEEERGFGCSILSACPWSPSSAANGWGSWCREHQEFLATAPLYLLVERRPLGVLATTSGSCISSWPPSHMGGSLSGSLSWYFHGLPPVVCRRCCSHSFTPSGFVPGGGGIGPGSKTAKRTRLLFIFXVWGPICKMSGLXCNFLFL

SEQ ID NO: 245504 - protein, 100 aa, Zea mays
  Clone ID: MRT4577_155485C.1.pep
MNPYLENNFLLRLMEEMEEEEEELKMATHLHLRRCHARNERRHDGSIPGRVRIHHDHMSGDTRIRADYFGAQPVYTDAQFRRRFRMRRHVKGKCAFGPFL

SEQ ID NO: 245505 - protein, 32 aa, Zea mays
  Clone ID: MRT4577_155486C.1.pep
INKTTKKKKKKKKKKKKKKKKKKKKKKKKKKK

SEQ ID NO: 245506 - protein, 119 aa, Zea mays
  unsure (1)..(119): unsure at all Xaa locations
  Clone ID: MRT4577_155487C.1.pep
SSLTPRSVRKCAPTTGGEKKXHRYRPGNCCTPXIRTYQKSTELLIMKLPFQRLIREIAQXFKTDLAFXQSHAVLALQEAAEAYLAGLFEDTNLCAIHAKRVTIMPNDIQLARRIRGERA

SEQ ID NO: 245507 - protein, 367 aa, Zea mays
  unsure (1)..(367): unsure at all Xaa locations
  Clone ID: MRT4577_155488C.1.pep
MAPLPASLTPCLWLFLCLLAAPCPAARAARFACNATAPRASTCQALVSYAPPNGTATPTLAAVRALFQLRSHRALLAANGLPLSTXRPRRPRPCRXVRLPCLCSGGAGATFQRPTYRVRAGDTLDAVARGVFAGLVTYQDIAAANNVSDPNRVAVGQQLWIPVPCSCDPVGGQPVVHFTYVVPAGGSVSGIAEEFGTTEETILTLNKMPDAKSLLAGQVLDVPLRACGSAISSTAIDRNLLVPNGSYILTANNCVKCGCSSSTWQLDCQPTQGLSSSFCPAXPSAETCSSATXSSTSSCESTACSYAGYTNSTSFAILANVTTSNVCNAGMTPTAQPAHSSALRLEPVWLRWTELFALSLLTLSCFV

SEQ ID NO: 245508 - protein, 61 aa, Zea mays
  Clone ID: MRT4577_155489C.1.pep
RLTQSSQRERIHSTQEHMYVGAVGNRHVRPGVEVVDNLSRSPCGRSGVPTFYSWLSFECTP

SEQ ID NO: 245509 - protein, 60 aa, Zea mays
  Clone ID: MRT4577_15548C.1.pep
SRSPASSSSSRISSSCLFNATASWYATSIPLTKTKCKKQKKQPAYIAIREQLASDLKIFH

SEQ ID NO: 245510 - protein, 46 aa, Zea mays
  Clone ID: MRT4577_155490C.1.pep
YPFMAYARHLKVFFSPVSARHHFSPFQFAHLMLCVNHHEFVSVLHA

SEQ ID NO: 245511 - protein, 91 aa, Zea mays
  unsure (1)..(91): unsure at all Xaa locations
  Clone ID: MRT4577_155491C.1.pep
LAIPLKHRKAESSTTLAIYLFGTQLLWADVTIXSLSLMKLPGIKTLSRRERQQLSRTSAXDIFMLIPFAVFIVLAFMEFLLTVLLNLFPNM

SEQ ID NO: 245512 - protein, 185 aa, Zea mays
  Clone ID: MRT4577_155492C.1.pep
MGLFTVTKKATTPFDGQKPGTSGLRKKVTVFQQPHYLQNFVQSTFNALPVDQVRGATIVVSGDGRYFSKDAVQIITKMAAANGVRRVWVGQNSLMSTPAVSAVIRERVGADDFGIKYNMGNGGPAPESVTDKIFSNTTTISEYLISEDLPDVDISVVGVTSFSGPEGPFDVDVFDSSVDYIKLMK

SEQ ID NO: 245513 - protein, 210 aa, Zea mays
  unsure (1)..(210): unsure at all Xaa locations
  Clone ID: MRT4577_155493C.1.pep
VNVMDAGMRSICGEEXYGTGSDHIRAKDGIWAVLAWLSIIAFKNKDNLGGDKLVSVEDIVRQHWATYGRHYYTRYDYENVDAGAAKELMANLVSMQSSLSDVNKLIKEIRSDVSEVVAADEFEYKDPVDGSVSKHQGIRYLFGDGSRLVFRLSGTGSVGATIRVYIEQYEKDSSKIGRDSQDALAPLVDVALKLSKMQEYTGRSAPTVIT

SEQ ID NO: 245514 - protein, 59 aa, Zea mays
  Clone ID: MRT4577_155494C.1.pep
AARSVYRATAIPYGHSDLTWRVIPCPTGISWLIRRLPAKIHRGGGDSIPNHDMRPKRRS

SEQ ID NO: 245515 - protein, 589 aa, Zea mays
  unsure (1)..(589): unsure at all Xaa locations
  Clone ID: MRT4577_155495C.1.pep
MGLFTVTKKATTPFEGQKPGTSGLRKKVTVFQQPHYLQNFVQSTFNALPADQVKGATIVVSGDGRYFSKDAVQIITKMAAANGVRRVWVGQNSLMSTPAVSAVIRERVGADGSKATGAFILTASHNPGGPKEDFGIKYNMGNGGPAPESVTDKIFSNTTTISEYLISEDLPDVXQCQPAKYFLCFFDSFSGPEGPFDVDVFDSSVNYIKLMKTIFDFEAIKKLLTSPKFTFCYDALHGVAGAYAKHIFVEELGADESSLLNCVPKEDFGGGHPDPNLTYAKELVERMGLGKSSSNVEPPEFGAAADGDADRNMILGKRFFVTPSDSVAIIAANAVQSIPYFASGLKGVARSMPTSAALDVVAKNLNLKFFEVPTGWKFFGNLMDAGMCSICGEESFGTGSDHIREKDGIWAGLAWLSIIAFKNKDNLGGDKLVTVEDIVRQHWATYGRHYYTRYDYENVDAGAAKELMANLVSMQSSLSDVNKLVKEIRSDVSEVVAADEFEYKDPVDGSVSKHQGIRYLFGDGSRLVFRLSGTGSVGATIRVYIEQYERDSSKTGRDSQDALAPLVDVALKLSKMQEYTGRSAPTVIT

SEQ ID NO: 245516 - protein, 71 aa, Zea mays
  unsure (1)..(71): unsure at all Xaa locations
  Clone ID: MRT4577_155496C.1.pep
RCQRVGCFECRVVYESSYVVFKIGKSREVGVLVVYGEVVGSLWTSDSVVMYRGMKKRGWVGLNKKLCHASX

SEQ ID NO: 245517 - protein, 65 aa, Zea mays
  Clone ID: MRT4577_155497C.1.pep
FCFCLDCRHTTYILDQEREKKRRVGKCPCRGTYTAHRSRNTRTKYHAQTASVTTGEIQRRASKPP

SEQ ID NO: 245518 - protein, 69 aa, Zea mays
  Clone ID: MRT4577_155498C.1.pep
LSGTGVSNGNDQGAPAISWLSFRPLQVYITKSKHVCRICRALNKSHSLRTLTKDGCAVHWEKRVIHCEH

SEQ ID NO: 245519 - protein, 34 aa, Zea mays
  Clone ID: MRT4577_155499C.1.pep
WFGTCSFQLLIMQFCVDICMNCCCSNFIWVPVSF

SEQ ID NO: 245520 - protein, 90 aa, Zea mays
  unsure (1)..(90): unsure at all Xaa locations
  Clone ID: MRT4577_15549C.1.pep
PGAGPEGCXPAEHTGEGRGSWXICDHXSSGADAADELTGTHQEAATEGLPNGKAGSVTKWAVLAVLCCLGXAGTTAXSVWGLLXSGCQQA

SEQ ID NO: 245521 - protein, 191 aa, Zea mays
  Clone ID: MRT4577_1554C.1.pep
MRSLVACGCDMDGWVLHSSSNKLLRVLALEECTPPSMDIGHLGKLLHLRYLGLHGTRIKTLPEEIGSLKFLQALDLEDTKISRLPQAVCLLTQLMYLRGATGVTTVPDGFLGQVTSLEELHICLPTKDDEYSQKKFMQDLGKQGEIRMLVLYGNRIELDPWMQSSLVQSLGGLYKLQTLVVRHYADGVAAA

SEQ ID NO: 245522 - protein, 28 aa, Zea mays
  Clone ID: MRT4577_155500C.1.pep
KALGILVPGEPLRFNPNGVLVILKAQNP

SEQ ID NO: 245523 - protein, 113 aa, Zea mays
  unsure (1)..(113): unsure at all Xaa locations
  Clone ID: MRT4577_155501C.1.pep
DVQHLELADLAGYSXQQQCLRFNQLXAALELVVPYWQQQQLPFSQLPGWYPQHYFALNQLEXLNSPDYLQQQELLAFSQLAWAGSATCLIQPREVPIYQLSATNAGTFLQLQQ

SEQ ID NO: 245524 - protein, 626 aa, Zea mays
  Clone ID: MRT4577_155502C.1.pep
MMRGHTWLALLVVVVLALADAAAGRFVVEKNSIQVTSPDELKGKYECAIGNFGVPQYGGTLHGLVEYPKSNRKACQSFDISFKPKQAGGRPTFVLVDRGECFFTTKAWNAQNAGAAAVLVVDDKSEPLITMDNPEEGKEHLENITIPSVLITKKLGENLKKSAENGDMLSVLLDWRESLPHPDERVEYEFWTNSNDECGPKCDMQMDFVRSFRGTAQILEKKGYTQFTPHYITWYCPEAFVDSKQCKSQCINHGRYCAPDPDQDFSQGYDGRNVVVQNLHQICVFKIANETGKPWLWWDYVHDFALRCPMKDKKYNNDCAHDVIKSLGLDIENINKCVGDPEADEENEILKAEQDAQIGHGKRGDVTILPTLVINNKQYRGKLDKVAVLKAICSGFEETTEPAICLSEEIQTNECLENNGGCWLDKANNVTACKDTFRGRVCECPIVRGVKFVGDGYTHCEASGVGRCEISNGGCWQETKDGKTISACSNEISEGCKCPVGFKGDGEKSCEDIDECQEKLYCQCKGCSCKNTWGSYECSCGDDNMLYMREHDTCISKEGTATTVGWSFLWVIFFGLVFAGVGAYAVYKYRLRSYMDSEIRAIMAQYMPLDNQEGANQHQVVHANDI

SEQ ID NO: 245525 - protein, 136 aa, Zea mays
  unsure (1)..(136): unsure at all Xaa locations
  Clone ID: MRT4577_155503C.1.pep
MGECISYHIGQAGIPVGNACWELYCLEHGIQADGXMPGDKTIGGGDDAFNTFLSETGAGKHVPXADSADREXTGIDEVRTGTYRQLLHPEQIISGKDDACYNLARGXHYTIDTGSDDPCLERIRKLADNCTGLQGF

SEQ ID NO: 245526 - protein, 48 aa, Zea mays
  Clone ID: MRT4577_155504C.1.pep
MMHLLLKSSPSFHQSYMDSEIRAIMAQYMPLDNQEGANQHQVVHANDI

SEQ ID NO: 245527 - protein, 629 aa, Zea mays
  Clone ID: MRT4577_155505C.1.pep
MMRGQAWLALLVVVALALADAAAGRFVVEKNSLEVTSPDELKGKYECAIGNFGVPQYGGTLHGWVEYPKSNRKACQSFDQFDISFKPKQAGGRPIFVLVDRGECFFTTKAWNAQNAGAAAVLVVDDKSEPLITMDNPEEGKEHLENITIPSVLITKKLGENLKKSAENGDMLSVLLDWRESLPHPDERVEYEFWTNSNDECGPKCDMQMDFVRSFRGTAQILEKKGYTQFTPHYITWYCPEAFVDSKQCKSQCINHGRYCAPDPDQDFSQGYDGRNVVVQNLHQICVFKIANETGKPWLWWDYVHDFALRCPMKDKKYNNDCAHDVIKSLGLDIENINKCVGDPEADVENEILKAEQDAQIGHGKRGDVTILPTLVINNKQYRGKLDKVAVLKAICSGFEETTEPAICLSEEIQTNECLENNGGCWLDKANNVTACKDTFRGRVCECPIVRGVKFVGDGYTHCEASGIGRCEINNGGCWQETKDGKTISACSNEISEGCKCPMGFKGDGEKSCEDIDECQEKLYCQCKGCSCKNTWGSYECSCGDDNMLYMREHDTCISKEGTATTVGWSFLWVIFFGLVFAGVGAYAVYKYRLRSYMDSEIRAIMAQYMPLDNQEGANQHQVVHANDI

SEQ ID NO: 245528 - protein, 102 aa, Zea mays
  Clone ID: MRT4577_155506C.1.pep
CFCRRALLAQCFLLGLLICALRGRRVRLFFVVGQFAFGPPVLVWSVAAVCSLCSLFCLWYSAVSICAHWSVAPPASAAEVFVSFLISTSAVFPPPCALKTVG

SEQ ID NO: 245529 - protein, 69 aa, Zea mays
  unsure (1)..(69): unsure at all Xaa locations
  Clone ID: MRT4577_155507C.1.pep
WVVGMQGGKWSLSTTQDSALMEGVSRYTGQVDPRSWRSIYMSVANVGMWNVRSXFSDRQFLGQQFYLRV

SEQ ID NO: 245530 - protein, 91 aa, Zea mays
  unsure (1)..(91): unsure at all Xaa locations
  Clone ID: MRT4577_155508C.1.pep
ASPRGQKKTWKKLPPHLPNNVNLLRSTKMCLLKLWLEFXRXRQKQREKFFREILELKPFDPIWEVLPPTLINQNNPKPFYFLKILYKTNPP

SEQ ID NO: 245531 - protein, 61 aa, Zea mays
  unsure (1)..(61): unsure at all Xaa locations
  Clone ID: MRT4577_155509C.1.pep
EIGNCSNLTMLGLTETCIFGPLXGRLENLDTLAIYTELLSAPIPPEFGELVPCATAGGCPT

SEQ ID NO: 245532 - protein, 54 aa, Zea mays
  Clone ID: MRT4577_15550C.1.pep
VKVALGGFWSPVRGSVDVGAVHAFAQDLYLCGMWPRIIVVCSVGASGVPVGIHR

SEQ ID NO: 245533 - protein, 62 aa, Zea mays
  Clone ID: MRT4577_155510C.1.pep
PPDEKGTRRNQLLHGSTVLTEHVLSATDRHARPPALSGSLGPGEDNERTPSDRPFVSVAAGS

SEQ ID NO: 245534 - protein, 50 aa, Zea mays
  Clone ID: MRT4577_155511C.1.pep
RSERLAKSPALRIEESWRYCCLPGANSVPCGALLNGGSVLLCLHSPVKLF

SEQ ID NO: 245535 - protein, 73 aa, Zea mays
  unsure (1)..(73): unsure at all Xaa locations
  Clone ID: MRT4577_155512C.1.pep
HARARTLACFLAIAPPXFLSFFYFTPRGGNKTTNASSPTKRPEKTLHIPPVLKKKQGLNRPNKRCELKFRPWP

SEQ ID NO: 245536 - protein, 345 aa, Zea mays
  Clone ID: MRT4577_155513C.1.pep
MARNLTENRTRNTLIVIVVFGLCSFFYLLGAWQKSGSGGGDRIQNWVNEQTKCAQLPNLSFETHHSASNLPNDTGSSKIEPFKPCDEQYTDYTPCEEQKRAMTFPRDNMIYRERHCPPDKEKLYCLIPAPKGYVAPFRWPKGRDFVPYANVPHKSLTVEKAIQNWVHYEGNVFRFPGGGTQFPQGADKYIEQLASVIPIAEGKVRTALDTGCGVASLGAYLLNKNVLTMSFAPRDNHEAQVQFALERGVPAYIGVLGSIKLPFPSRVFDMAHCSRCLIPWSGNDGMYMMEVDRVLRPGGFWVLSGPPIGWKIHYKGWQRSKEDLRNEQRKKKKKKKQVLCVVTTA

SEQ ID NO: 245537 - protein, 154 aa, Zea mays
  Clone ID: MRT4577_155514C.1.pep
MEGRGMSIIKDGAKAKIVTDKGENATKVRIGKTPFSNRDGKDDISKGRHKITSWKDLEITKVREVKGKNTPKDRVRTRLATRQRKKGINKSGIGKTSLLKWNGRGGFKMQVQYKHHGKDQGMTRVKVITDKHNQGCILDKICEASKKGKQSMVK

SEQ ID NO: 245538 - protein, 133 aa, Zea mays
  unsure (1)..(133): unsure at all Xaa locations
  Clone ID: MRT4577_155515C.1.pep
MCYCYAHAGFRSCYDGSCPSTMINFVLLISRQGKVRLTKWYSPYTQKERTKXLEIIHHFVEILDRYFGSVCELDLIFNFHKAYYILDEILIAGELQESSKKNVARLIATQDSLVEAAKEEASSISNIIAQATK

SEQ ID NO: 245539 - protein, 62 aa, Zea mays
  Clone ID: MRT4577_155516C.1.pep
PLRTATRRRRRRPLLRPCSRCRCLRTCSVEVGHVGRYRLAQAPPDPALLPDAACRARLLRGA

SEQ ID NO: 245540 - protein, 60 aa, Zea mays
  Clone ID: MRT4577_155517C.1.pep
IEIINKRGKIPPEYIWRSEQEPTKYNPMSTLIVSFQEIFLKKTERGQSKEKPNIYNGHIT

SEQ ID NO: 245541 - protein, 133 aa, Zea mays
  unsure (1)..(133): unsure at all Xaa locations
  Clone ID: MRT4577_155518C.1.pep
MINFVLLSPDSRQGKXRLTKWYSPYTQKERTXRYASLYFCMCIDADDNELEVLEIIHHFVEILDRYFGSVCELDLIFNFHKAYYILDEILIAGELQESSKKNVARLIATQDSLVEAAKEEASSISNIIVQATK

SEQ ID NO: 245542 - protein, 121 aa, Zea mays
  Clone ID: MRT4577_155519C.1.pep
LGPASKKRATLFLRYDAAFYQNRPFFAPRRRHQNFVFWCTIFNMLSVTSLATSFYFIWGGVPPSHGLEPFHGSLVVQPATVAPEVALVDGRCKKKRLGALLRTQSTGCRSAYAGRKKQKQC

SEQ ID NO: 245543 - protein, 39 aa, Zea mays
  unsure (1)..(39): unsure at all Xaa locations
  Clone ID: MRT4577_15551C.1.pep
XIGGCLHYVFLLDIHVCSAFSYGRWVIHLTRQIRQIHTT

SEQ ID NO: 245544 - protein, 161 aa, Zea mays
  unsure (1)..(161): unsure at all Xaa locations
  Clone ID: MRT4577_155520C.1.pep
MINFVXLISRQGKVRLTKWYSPYTQKERTKVIRELSGLVLTRGPKLCNFVEWRGYKVVYRRYASLYFCMRIDADDNELEVLEIIHHFVEILDRYFGSVCELDLIFNFHKAYYILDEILIAGELQESSKKNVARLIATQDSLVEAAKEEASSISNIIAQATK

SEQ ID NO: 245545 - protein, 49 aa, Zea mays
  Clone ID: MRT4577_155521C.1.pep
LEIFFFFFFFFFFFFFFFFFFFFFFFFLTPGLKNGVMTNRATGSKKNGG

SEQ ID NO: 245546 - protein, 66 aa, Zea mays
  unsure (1)..(66): unsure at all Xaa locations
  Clone ID: MRT4577_155522C.1.pep
KQKLQEVNNWPGELNLXSPPLYVLTTHTLDKEQXILVLNNPITSRTXTIQQHKDPLLVKDSSRATN

SEQ ID NO: 245547 - protein, 111 aa, Zea mays
  Clone ID: MRT4577_155523C.1.pep
GSHHAFVYKSEASSPRQSTHVKLPKGKFPIASRDHNISFKTFDASYVLTNKSGKVVAKYVGGKHKGSKTCVWVPKVLVSNVKGPKTVWVPKNKAHGRGLSDSRTVPSSRFL

SEQ ID NO: 245548 - protein, 129 aa, Zea mays
  Clone ID: MRT4577_155524C.1.pep
FVEKGRCCLSWNVDVDCLTYAIGRPPSAASSLRVVYDLESATAYRALLVLFSSSAAVEPRTVPDLNGITYGGGETTIITNYLRWWDLTKNCKRLLLNPIYPKSPPRARGGRRRPRMTSILQAHKSAQRS

SEQ ID NO: 245549 - protein, 130 aa, Zea mays
  Clone ID: MRT4577_155525C.1.pep
SPSPGLIHPTPRRQATASRRPCSCSTDNHTLTQRPRSPGQRRSIIDGRGSTRNEEARRLPALANGHLTVSGGAKAAHAQRKLGLGASSSRGGAAQGPAEDGRAVRCVVRGGAGLLHEELEQHAHAPAPLH

SEQ ID NO: 245550 - protein, 103 aa, Zea mays
  Clone ID: MRT4577_155526C.1.pep
FPFKQNGAPLPIPIHPGIIKALIIPPKPFLKDHPLLVPMERELPGPLPKKFGHLKSISKVFQGFSWWNPYPFYFPPFKWHFWRPPSFPPQIFGLVLFLNQKPP

SEQ ID NO: 245551 - protein, 72 aa, Zea mays
  Clone ID: MRT4577_155527C.1.pep
TVVTPLLTLQLCILVRYSSICSLDTQMLTQMLNPTSNTYATNYTTDSSSLPSALPDAEPAVDLPLGRAKSRA

SEQ ID NO: 245552 - protein, 52 aa, Zea mays
  Clone ID: MRT4577_155528C.1.pep
NAHADVLIPGDKARYRLIGGDSNQHASMDPLATDYDCLVQRLLMSTSREDTP

SEQ ID NO: 245553 - protein, 124 aa, Zea mays
  Clone ID: MRT4577_155529C.1.pep
PWCPAAISGCDPHACSCGLSQCTIVVDFSEPLDNSNDSKMIMHEELKGNWHHPAQCTVFYILDHSRVHELLSQVEDKLYGLAETNHRAYDLRNIGTIAGVPPKHTGDAQDSSKYQESRDALQAL

SEQ ID NO: 245554 - protein, 189 aa, Zea mays
  unsure (1)..(189): unsure at all Xaa locations
  Clone ID: MRT4577_15552C.1.pep
MRQIFVKTLTVKTITLHVEAHGTXLDNDKAKIHDMESIPPDQQRPIFGGKHVEDRRTLADYNIHKESTLHLVLRLMGGMQIFEKTLTGKTITLEGEPSDTIDNVKAMIQDKEGIPPDQQRLIFAGKQLEDGRTLADYNIQKESTLHLVLRLMGGMQIFVKTLTGKTITLEVESSDTIDNGKAKIQDKEG

SEQ ID NO: 245555 - protein, 114 aa, Zea mays
  Clone ID: MRT4577_155530C.1.pep
PFLISRTRFLLRGYVCNTLNLAKTKFPMAALRLLKVKILTLADCRISHSVFTLGGMEVKEARLLQPLSLLPSLPPLFETIPEAPALPSLIRVAGTKGAPRSAGARVLGARAAKL

SEQ ID NO: 245556 - protein, 191 aa, Zea mays
  unsure (1)..(191): unsure at all Xaa locations
  Clone ID: MRT4577_155531C.1.pep
VRLQDPVRNSRVDPRVREAATERAKATPRPTPVNSATAALPSKVKEKGKTKTANKTVNSVSHPGSGKTVVHLLSGKSPKKSAEPLANTVLASETEEEGNAQALGPTAKSGTVSAGQGSSSSEDSSISSDETDVEVKSPAKPAEAKASAAPAKDPAARTXPGPTRLGNVAPTPAKXGRARRAAAAAAXTXAA

SEQ ID NO: 245557 - protein, 34 aa, Zea mays
  Clone ID: MRT4577_155532C.1.pep
PPAIIFGTNAHKSKQLTRNTLIIFLLFHKEINDK

SEQ ID NO: 245558 - protein, 117 aa, Zea mays
  Clone ID: MRT4577_155533C.1.pep
VLAADGAWKLCDFGSVSTNHKCFDKPEEMGIEEDNIRKHTTPSYRAPEMWDLYSREVISEKVDIWALGCLLYRICYFKSAFDGESKLQILNGNYRIPELPKYSSSITTLIKDMLNSS

SEQ ID NO: 245559 - protein, 170 aa, Zea mays
  unsure (1)..(170): unsure at all Xaa locations
  Clone ID: MRT4577_155534C.1.pep
KXSAGGKEEEEELAPRNNNTRSINGIIREFGTGLAPRHPQLQLHPPPPSITPSIAPPRKRVAYEAFQAKAAAAAVKAKDDEEEAMEMARRRGSSGRPVAQLSAVLRDFGEGVMRLERRRMEVQWEIERGWQEADARHARMLQDAQRQLRDTVAGACAFPPKKARRDHGDS

SEQ ID NO: 245560 - protein, 147 aa, Zea mays
  Clone ID: MRT4577_155535C.1.pep
AARGILYMEKDFAPRGPSRSSRRACKKLRRFRRTRVVQGRTGVATTIVPQSILVDAGVCWSGRWAHPCQMAQSAPAIKETDGDNNRGPWLRIPARPPPEALGRNLQQQPRRFAAVCTPRQGSHRWAEVREARAKIDDRENGCAGPGR

SEQ ID NO: 245561 - protein, 129 aa, Zea mays
  Clone ID: MRT4577_155536C.1.pep
MAAASLRKGNARLPPEVNRALFVRNLPFNISSEEMYDIFGKYGAIRQIRLGNAKDTRGTAYVVYEDIYDAKNAVDHLSGFNVANRYLIVLYSQLNRMSKKTDIKKKEDEITRLQEKYGVGSKTPSANDA

SEQ ID NO: 245562 - protein, 45 aa, Zea mays
  Clone ID: MRT4577_155537C.1.pep
VFFIRESHSCVKNRLTKTWFRCWSFIEYIFSHLQLLNTLIVQLCP

SEQ ID NO: 245563 - protein, 72 aa, Zea mays
  Clone ID: MRT4577_155538C.1.pep
QQDLSWKHITRGGNFYYNTTTLYNRDAKTNQKQESLHMEGVRNHLNQENSRLGTLSSHNTVKQKTKTYKHES

SEQ ID NO: 245564 - protein, 70 aa, Zea mays
  unsure (1)..(70): unsure at all Xaa locations
  Clone ID: MRT4577_155539C.1.pep
NYVCPXNXNSNSFYSHLSTFIYFLQLKNTHIFFYSSLNHFHHLHSKIXSLPTIFIQNTLTIYLYHPXLYF

SEQ ID NO: 245565 - protein, 45 aa, Zea mays
  Clone ID: MRT4577_15553C.1.pep
QRRLRLISHTYQQNFTFPVLFISNYCHPSIMVYQIVAVSKPSIPT

SEQ ID NO: 245566 - protein, 159 aa, Zea mays
  unsure (1)..(159): unsure at all Xaa locations
  Clone ID: MRT4577_155540C.1.pep
ALLQQFPLAHLLAQHLRAQQLQQLVXANLXXYSQQQQFFPFTPLAALTSAFYSQPPTXPFTQLPVASPPQFFPFTPLAALTSPAYSQQPTLXPFTQLAGVTPAPFFTHPQLSPFSQHAAPNXGPLLQPPQLXPLKXTPPPPLAVFSPHPLIGGPSFSFL

SEQ ID NO: 245567 - protein, 123 aa, Zea mays
  unsure (1)..(123): unsure at all Xaa locations
  Clone ID: MRT4577_155541C.1.pep
FLNYHSQEKSIGHNQVLLDAPKKVGIQGAXDLLRDPTKGVHEVQERLYKHSSDISGVPHFVINNKVXLSGAHPPKYFIRVFSKASKTCSLMAFLWEKKSVDPIVFRNFKVVILAQKTVWVFAF

SEQ ID NO: 245568 - protein, 482 aa, Zea mays
  Clone ID: MRT4577_155542C.1.pep
MKGCSERLLLLLLLASSLLLSVVVAAQQTCPADLDSKCDGGAPDDWEGEFFPGVPKIKYEGPTSKNPLAYKWYNKEEVILGKKMKDWMRFSVAFWHTFRGTGADPFGAPTKVWPWEDGTNSLAMAKRRMRAHFEFMEKLGVDKWCFHDRDIAPDGKTLEETNANLDEIVELAKQLQGETNIKPLWGTAQLFMHPRYMHGAATSPEVKVYAYAAAQVKKALEVTHYLGGENYVFWGGREGYQTLLNTDMKRELDHLANFLQAAVDYKKKIGFNGTLLIEPKPQEPTKHQYDWDVATTFAFLQKYGLTGEFKINVECNHATLSGHSCHHELETARINGLLGNIDANTGDPQVGWDTDQFMTDIAEATLVMSSVVKNGGLAPGGFNFDAKLRRESTDVEDMFLAHISGMDTLARGLRNVAKLIGDGSLDDLVRKRYQSFDSEIGALIEAGKGDFETLEKKVLEWGEPTVASGKQELAEILFQSAL

SEQ ID NO: 245569 - protein, 67 aa, Zea mays
  Clone ID: MRT4577_155543C.1.pep
IPEAHPPFFFMTSYTPSHARDPHTYIFRLQIYIHISRVDLDSKTSSKILQDYGFIQPHFGEKLTPFF

SEQ ID NO: 245570 - protein, 270 aa, Zea mays
  unsure (1)..(270): unsure at all Xaa locations
  Clone ID: MRT4577_155544C.1.pep
AHLANFLQAAVDYKKKIGFNGTLLIEPKPQEPTKHQYDWDVATTFAFLQKYGLTXYKFSYFWNVNTLSASFCEXACVSLTVCSKSTPFYCLTXIGEFKINVRPGHATLSGHSCHHELETARINGLLGNIDANTGDPQVGWDTDQFMTDIAEATLVMSTVVKNGGLAPGGFNFDAKLRRESTDVEDLFLAHISGMDTLARGLRNAAKLIEDGSLDALVRKRYQSFDSEIGALIEAGKGDFEALEKKVLEWGEPTVPSGKQELAEILFHSAL

SEQ ID NO: 245571 - protein, 560 aa, Zea mays
  Clone ID: MRT4577_155545C.1.pep
MIAGPNKLPPEPPHRICFIAFISSHIFILEKKTLFNHPPSSAALSSALFQVQQRLGTRRHRRLPRERVSWSTKAGMKGCSERLLFLLLLLLASSSLLSAVIAAQQTCPADLDSKCDGGASDDDWEGEFFPGVPKIKYEGPTSKNPLAYKWYNKEEVILGKKMKDWMRFSVAFWHTFRGTGADPFGAPTKTWPWEDGTNSLAMAKRRMRAHFEFMEKLGVDKWCFHDRDIAPDGKTLEETNSNLDEIVQLAKQLQGETNIKPLWGTAQLFMHPRYMHGAATSPEVKVYAYAAAQVKKALEVTHYLGGENYVFWGGREGYQTLLNTDIKRELDHLANFLQAAVDYKKKIGFNGTLLIEPKPQEPTKHQYDWDVATTFAFLQKYGLTGEFKINVECNHATLSGHSCHHELETARINGLLGNIDANTGDPQVGWDTDQFMTDIAEATLVMSSVVKNGGLAPGGFNFDAKLRRESTDVEDMFLAHISGMDTLARGLRNVAKLIEDGSLDDLVRKRYQSFDSEIGALIEAGKGDFETLEKKVLEWGEPTVASGKQELAEILFQSAL

SEQ ID NO: 245572 - protein, 221 aa, Zea mays
  Clone ID: MRT4577_155546C.1.pep
MCAPNNKVCLQAVKLGRPPRRDENFIQTHTRKNGVPTEQAKPIIDQLNDVLGVYPELKDRSIQEGDAFSIVCGPKEPKGYVRVLGLGPTPQDIGTPELKSYTATRLQMEILARTKVQSEKAALEERVLELQTQIEQRAQPDRASEEPMSHRGSTSFQHKVMRNKFAAEDEEDNEEYCASEDEELDDEDDQIFHQMQGANSPRSTRHFAEASHSKHDDLVGK

SEQ ID NO: 245573 - protein, 189 aa, Zea mays
  Clone ID: MRT4577_155547C.1.pep
MAAVPEDLRCKRSDGKQWRCSAPSMPDKTVCEKHYVQAKKRSASSALRASLRRSSASSLAPVFPFSSSPSSAARLRAADEDPPMAVARPLYGRVAGEAVYVAEPVPAPARREVAYEGLPRGNAAGGRTAAGLVGRGPLWFPGGGSEGIRSCHQCRKAGGVIWCTSCDRRGYCARCISRWYVALECSSSQ

SEQ ID NO: 245574 - protein, 122 aa, Zea mays
  Clone ID: MRT4577_155548C.1.pep
SGTGWSHGARRRRRGGSPGAWAHGGVVRTPGLSLWGVHHEWGELALFDTVRQAYENLIDCCISNSQSHRNGWICIFSAAFQFCCHVTMKYSSELLHTPKICKPSRRSKYFLLLHCRQPLSGV

SEQ ID NO: 245575 - protein, 76 aa, Zea mays
  Clone ID: MRT4577_155549C.1.pep
VLRSSPVIHLYFSFNLYYLLYFTNFLKYNSPIYRTSPTILHIQLPYTLQLSYLICIHQFLSLKSIEYLYYHNTHYY

SEQ ID NO: 245576 - protein, 87 aa, Zea mays
  Clone ID: MRT4577_15554C.1.pep
LPLVLRLRGGIQIFVKTLTGKTITLEVESSPPLAPVKAKIPAKKGIPPDQQGFIFFGKQLEDGPPLAGFNIQKESPLPLVLPPPGGQ

SEQ ID NO: 245577 - protein, 153 aa, Zea mays
  unsure (1)..(153): unsure at all Xaa locations
  Clone ID: MRT4577_155550C.1.pep
LVWPPLSSTFVQVPGHHRQAQPPTTATARSPVARHRQPPAAERRRPGATGRRSARPEPQAAARSPAVLSSCSPTSSATTSLSCHWCIAYGGTKHEAGTALLARKSQVHCITCKKVTSSFQSGSLNFGGLXHLGLKAPXPKGAHNIGTEXLTLS

SEQ ID NO: 245578 - protein, 150 aa, Zea mays
  unsure (1)..(150): unsure at all Xaa locations
  Clone ID: MRT4577_155551C.1.pep
GRLSIQITRFLMMTVFMMGQAVPYKHWRTPGHHIGFIVMNGITFFFANFRLNATTFIVXPVXIFPDRLRSTCHGISAVSGKLSPINGSFQFMYLAQNRDPAKTDHEYPTGISVSNXMILLAGSNMMGLAYTFLVPEYKGKSLKEMSVENH

SEQ ID NO: 245579 - protein, 87 aa, Zea mays
  Clone ID: MRT4577_155552C.1.pep
EYPVRPHPSETLPEAPSPSSPHKVQKASSRVGVFLASVIRLNFHNCFLNGCNGSVLLKASDRQPEKNAKPNLTLQGFDLIKRIKHRL

SEQ ID NO: 245580 - protein, 107 aa, Zea mays
  unsure (1)..(107): unsure at all Xaa locations
  Clone ID: MRT4577_155553C.1.pep
TACTRTRALNTVLEPFRITKTSPRGALYISWGPKLXRPTISGKTIRTNPSMYQPGPIAPLXNYYVLKPLAHLAVTIVWFSQHVRIWTDLLPKHNSITLIMALRNRLR

SEQ ID NO: 245581 - protein, 65 aa, Zea mays
  Clone ID: MRT4577_155554C.1.pep
TLDGVHVNVYLLVLFVEYADMLSHTVVYTLIAHKWLLRESGLRGELDRPPHGCESTSKVCALNMA

SEQ ID NO: 245582 - protein, 92 aa, Zea mays
  Clone ID: MRT4577_155555C.1.pep
LTDDSCWWISLSRYRFTHTSSWPFLSLCEFTASGLCCCAEGYSSCVPLTLSSCAAFLLGGHIATESDYLSVGISIFWHCNIAGRDQGLSCSA

SEQ ID NO: 245583 - protein, 287 aa, Zea mays
  Clone ID: MRT4577_155556C.1.pep
MAAENYWRYADARQQQQAMVAAAAAAAGMAPAATVAAAQTVGSAAAAMNQQAAAAAMAQQAAAAPPLKRARPDFGDVSGGQDMTGYYPRETDRSGYHSLRENDTLGASYDRYLRNGMASVGANDTSRAAGMGAGLAAGMTAGMGAGMAAGMAGYGVDGQRMMGVVGMDSRGMGYGGRPEPPLPPDASSTLYIEGLPANCTRREVSHIFRPFVGFREVRLVNKESRHPGGDPHVLCFVDFDNPAQATIALEALQGYKFDEHERDSAHLRLQFSRFPGPRSAGGPRGRR

SEQ ID NO: 245584 - protein, 55 aa, Zea mays
  Clone ID: MRT4577_155557C.1.pep
RPCRQPPRIICSWCEVTSTVDLSSLVPYAVGHGPLHVGGKQRSHPIHQTLVTSEQ

SEQ ID NO: 245585 - protein, 75 aa, Zea mays
  Clone ID: MRT4577_155558C.1.pep
GAVGVINRCIPPINPTDPECFHMYVHNNIFFSFAVDSDYEDISKDHKPDCQNGSSRSTKVSSPDVITKPDANHGK

SEQ ID NO: 245586 - protein, 67 aa, Zea mays
  Clone ID: MRT4577_155559C.1.pep
AGRERLPRSSPSPRRDARSPPPLVPSPPRPLSVTLRWPRPLYLTQSLNITTLPQIHAYLYSQNHIAP

SEQ ID NO: 245587 - protein, 84 aa, Zea mays
  Clone ID: MRT4577_15555C.1.pep
SRSRGLPLLLCLPSLVHHNTTSHRLLVVMSCHSIHFTDPTICSARSSPSCNPTRTLLLNTPPRHQCLPGESYSARTKVLTYLDP

SEQ ID NO: 245588 - protein, 118 aa, Zea mays
  Clone ID: MRT4577_155560C.1.pep
MEKYNSKTQLAPLRDTPFALRGALGSSSSYLEQARGYTSSPLAALRPKMSSTTGNRLLHSSCPLSSPVANRPLSPHLPLKKPQFSATFSISHRIFGVALGVAIVSVPLATKFSLMFGV

SEQ ID NO: 245589 - protein, 118 aa, Zea mays; identical to SEQ ID NO: 245588
  Clone ID: MRT4577_155561C.1.pep

SEQ ID NO: 245590 - protein, 118 aa, Zea mays
  Clone ID: MRT4577_155562C.1.pep
MEKYNSNTQFAPLRETPFALRGALGSSSSYLEQARGYTSSPVAALRPKMSSTPGNRLLHTSCPLSSAVANRPLSPHLPLKKPQFSATFSISHRIFGVALGVAIISVPLATKFSLMFGV

SEQ ID NO: 245591 - protein, 117 aa, Zea mays
  Clone ID: MRT4577_155563C.1.pep
MEKYNSNTQFAPLRETPFALRGALGSSSSYLEQARGYTSSPVAALRPKMSTPGNRLLHTSCPLSSAVANRPLSPHLPLKKPQFSATFSISHRIFGVALGVAIISVPLATKFSLMFGV

SEQ ID NO: 245592 - protein, 59 aa, Zea mays
  Clone ID: MRT4577_155564C.1.pep
SQLNELIKRTLCTYARRATVHITGINVDNKQAANACALTHERTVQRCSSFQATAPIGTI

SEQ ID NO: 245593 - protein, 55 aa, Zea mays
  Clone ID: MRT4577_155565C.1.pep
VLLLVSYQILHMIPTQLPEPMDSTSYLHRLRMHASHLARHYAFSLIVTVQCAHVV

SEQ ID NO: 245594 - protein, 206 aa, Zea mays
  Clone ID: MRT4577_155566C.1.pep
MDFGHAGREHGYVSGSGGRITAGLLPLLMIGRAHIPLFFFCARRLGWLSVGFPPALHPDRFRFVQIFCIASKEASPSPPGSYCAGCAAMEKYNSKTQLAPLRDTPFALRGALGSSSSYLEQARGYTSSPLAALRPKMSSTTGNRLLHSSCPLSSPVANRPLSPHLPLKKPQFSATFSISHRIFGVALGVAIVSVPLATKFSLMFGV

SEQ ID NO: 245595 - protein, 39 aa, Zea mays
  unsure (1)..(39): unsure at all Xaa locations
  Clone ID: MRT4577_155567C.1.pep
SQLFHYIYILKLXFYXXCFIPPPPPDFITISHRKQLSLY

SEQ ID NO: 245596 - protein, 45 aa, Zea mays
  Clone ID: MRT4577_155568C.1.pep
PFAMAIIWKKLGPSSLKAPRKAMESPMVSRSISGHALCRPATFRE

SEQ ID NO: 245597 - protein, 218 aa, Zea mays
  Clone ID: MRT4577_155569C.1.pep
LTHASGERCLNNFRKLSPQIAGSIYAPKVYWNLSTSRILTMEFMDAKEVTDVSGIKSIGVHPVDVSNLVSKAFAEMIFKHGFVHCDPHAANMMVRPMPQDSRKLFGWKRPQLVLLDHGLYKELDYNTRISYASLWKALVFADAKAIKENSAKLGAGEDLHALFAGVLTMRPWKRVIDPSPDHLVLGKNTDYSELQVHMSYNCIPNSHPWYHRKCNDAN

SEQ ID NO: 245598 - protein, 74 aa, Zea mays
  Clone ID: MRT4577_15556C.1.pep
SIYAIHFKTFILRKPGGFHQRVFSLRGNCRCRSVVIFRVKCRCNAVLREFGSWLRKNTGADTRGLYVESFWFPP

SEQ ID NO: 245599 - protein, 86 aa, Zea mays
  Clone ID: MRT4577_155570C.1.pep
KKNFFRTGNPGGHPGPKETKNRPPGSPFGGPPGPKGPKKNNLSQNPNRSTREKRPPGGKRGKTGGRGGKTPPTRGGGEKCTRDAEP

SEQ ID NO: 245600 - protein, 52 aa, Zea mays
  Clone ID: MRT4577_155571C.1.pep
MLKHEASLKRDDKVQYQLHVAEMEAVSVAMPPVYVNHGNDGGPAVKDIHMEN

SEQ ID NO: 245601 - protein, 90 aa, Zea mays
  Clone ID: MRT4577_155572C.1.pep
MMVWCRLKHEASLKRDDKVQYQLHVAEMEAVSVAMPPVYVNHGNDGGPAVKDIHMENFSVTIDLIQEATLTIVFGRHYGEYVLFDRFQYV

SEQ ID NO: 245602 - protein, 114 aa, Zea mays
  unsure (1)..(114): unsure at all Xaa locations
  Clone ID: MRT4577_155573C.1.pep
IADDLARVPPPDSPCSRCHDPAENXLCLICKDVMCSRFINKHMLCHHEEETGHCLALSFSDLSVWCFSCDSYLDVQAILELRPSCTFVEVWRTPFQSLEVLDFSTGESGSSSRT

SEQ ID NO: 245603 - protein, 129 aa, Zea mays
  unsure (1)..(129): unsure at all Xaa locations
  Clone ID: MRT4577_155574C.1.pep
IADDLARVPPPDSPCSRCHDPAENXLCLICKDVMCSRFINKHMLCHHEEETGHCLALSFRWAADQTSDHWTTNLXDLSVWCFSCDSYLDVQAILELRPSCTFVEVWRTPFQSLEVLDFSTGESGSSSRT

SEQ ID NO: 245604 - protein, 160 aa, Zea mays
  unsure (1)..(160): unsure at all Xaa locations
  Clone ID: MRT4577_155575C.1.pep
TYTKEIMVAMSYFNDRPIIPSLTNASSHCERTAEHAHAWTHGRSMFASGMTFAPAAYVRPTTXPAQXHNAYINTGLELLLEISVADLVXYDLLLDVSKALADQATLDNLQLGYLLLPFTSSLLISEHIAAFVAVAAYELGVDTRLPQLLELRQHADDCLH

SEQ ID NO: 245605 - protein, 67 aa, Zea mays
  Clone ID: MRT4577_155576C.1.pep
SAPGLPFSLRIGNATHTKSNLKHFSIAKSLYDNGINCHSNGMLGLVNQTIFDWVMYHKLVYYFFSNT

SEQ ID NO: 245606 - protein, 69 aa, Zea mays
  Clone ID: MRT4577_155577C.1.pep
APFLFFRLSLLSKSLMTEGQCRTILHYFCPCYCWPFKFSIYVEEWTTNPKAKTIACSISLHCRARDTHT

SEQ ID NO: 245607 - protein, 75 aa, Zea mays
  unsure (1)..(75): unsure at all Xaa locations
  Clone ID: MRT4577_155578C.1.pep
TLSSSEFICKSYNFIKKILYMKKKNGYLKPLYLYPTRIFECLPDSSRSIFDPIFDLNPKLYYLGTSVXRREYKSX

SEQ ID NO: 245608 - protein, 1020 aa, Zea mays
  Clone ID: MRT4577_155579C.1.pep
MAPKRKTANSSAAVIPAIDPNSQLPFAGNHMSVISEVELLRLVSIGVLPPRELCSWRSCHGTTVPTEDTHESVVYTPFLLRGLGLPISPFFRGILDFYHINLTHLNPNSILQISIFVHLCEAYLGLLPHFGLWKYLYHCRPGMAGGQHQLVGGASLEMRRGRKTEYLEIPLKDSIKGWRLEWFIMDNYGNSLPSRSGRQADVRTPSWTESPTDQEVAEAGVLLTEVGLLKERGLTAEAVVTDFVFKNIQPLKDRAYPAYLYRGLADSTRVTNRRIPSVDLVSRLEMILRGKVSNVGAPVAYSAWNLPSPKAFTLFVSNPPMTDSNLGLRVRPSAEEVRSLVASLGEIPDDERQIYFEVPLNPSDADINDMLDLLAEDSSDTVPDGTLAVVPLPEVNATLDVSKPVSTRPRRPSRTSQPEPSADEQKKKRRRLRRVSSFDEDASTLAPAAEEMTATGLADVDPNGCAQTVVDPNGCAACVATVEDEEEDDEIPLTRKNSQQFIASGESSGVPSPALSALIGLQELSMANFDQALEDMVPENLLLEPADVDATETYAAVPDAGLRSSRASSTLEHDLEGRNDDLDRPDPAEVAEGPSTLEVVTAESLDPLNSADMCPAPEGVAGEDSAQVRSVGHYPAPEGVAGGDPAQVGSANLVPAPEGVRAGSPSCTSMDVHVGSPPHSGGMVVAQAPDQGVALEGSVPTGLVLGSAECTELVPAGLLQAASGGGPTPDYQLISPDLGIPSFFSNLQALVNGLASQLKSQGASTPEVASSLERWNPVLLHRRVSELEATNAGHCPFFFFFVLARMTRQITVIEEKHFQDQAEMARRCADFEEKYSQSQIELSQVSAALDDANALSSSLHAQLDSEKEEKRILVASRDNLDRLYRDSSNSLTILERSHRFTMEELDNQRRQLQESSDEVARLTQLLSAKDATIKELRASKKTTARELETAQLAAKTAEETAATFKAQRDKAMDKAIRAGRILMRRPGVVVPEDIKADVHATPDSSIRPSSSVVPEKDIGK

SEQ ID NO: 245609 - protein, 112 aa, Zea mays
  unsure (1)..(112): unsure at all Xaa locations
  Clone ID: MRT4577_15557C.1.pep
MGGALLLALLLAAVPLSLGGGGGGAHPGYSDDDESACTVDAGAELLRRLEERGPGGRSIIDITHAVVPDLPAFATGAVAXPMLRLRESMADGSEYNLSELRMECHTGTHVDA

SEQ ID NO: 245610 - protein, 52 aa, Zea mays
  unsure (1)..(52): unsure at all Xaa locations
  Clone ID: MRT4577_155580C.1.pep
EGFLFHKNESTFSFFHILVGFCLDEALCHTXGFRGLAAICSGLDVVPAWGGG

SEQ ID NO: 245611 - protein, 942 aa, Zea mays
  Clone ID: MRT4577_155581C.1.pep
MAPKRKTANLSAAVIPAIDPNSQLPFAGNHMSVISEVELLRLVSIGVLPPRELCSWWVCHGTTVPTEYTHESVVYTPFLLRGLGLPISPFFRGLLDFYHINLTHLNPNSILQISIFVHLCEAYLGVLPHFGLWKYLYHCRPGMAGGQHQLVGGASLEMRRGRKTEYLEIPLKDSIKGWRLEWFIVDNYGNSLPSRSGRQPDVRTPSWTEFPTDQEVAEAGVLLSEVGLLKERGLTAEVVVTDFVFKNIQPLKDRAYPAYLYRGLADSTRVTDRRIPSVDLVSRLEMILRGKVSNVGAPVAYSAWNLPSPKAFTLFVSNPPVTDSNLGLRVRPSDEEVSTLVASLGEIPDDERQVYFEVPLNPSDADINDMLDLLAEDSSDAAPDEMTATGLADIEPNGCAPPAADPNEDAVCAVTVEDEEEENETPLTRKNSRQFIASGGSSGVPSPALSALIGLQELSLTNFDQTLEDMVPEDLLSEPVDVDATEICAAVPDAGLRSSRASSTLERDLEGQDADLDCPGPTEVAEGLSTLEVVTAESLGPKNGADTCPAPEDVARNDLARAKSVSHCPAPEGVAGDYPARVGSADCYPAPEGARAGSPSCTSMDVHAGSPPHSGYMVVAQIPNQGVALEGSVPADLAFGSVEGTELIPTDPLQAASDGGLVPDYQLISPDLGIPSFFSNLQALVNGMASQLRLQGASVPEVASSLACWNPVTLQRRVSELEATNAGMTRQIAVLEEKHSQDQAEMAQRCADFEEKYSQSQTELNQVSAALDDANALSSSLHARLDSEKEEKRILAASRDNLDRLYRDSSNSLTILERSHRFTMEELDNQRCRLQESVDEMTSLRRLLSAKDATIKELRTSKKTIAQELETARLAAKVAEETAATLKAQRDKAMDKAIRAGRILMRRPGVVVPEDIRADVIAAPDSSSRPSSSVAPEKDIAK

SEQ ID NO: 245612 - protein, 115 aa, Zea mays
  Clone ID: MRT4577_155582C.1.pep
AGSSPATPSGAGQWLTLFTQAKSSPATSSGAERVSALFKGSKLSAVTTSKVDGPSATSMGPEQSNSASRPSRSCSKVDEARDDLNPASGTAAQVSVASTSTGSDSKSSVTISSRV

SEQ ID NO: 245613 - protein, 181 aa, Zea mays
  Clone ID: MRT4577_155583C.1.pep
MPGPEVELRQNRVKRIWFEFKLSQNVFKEEKCILAASRDNLDRLYRDSSNSLIILERSHRFTMEELDNQRCKLQESADEVTRLKQLISAKDATIKELRASKKSIAQELEAARLAAKVAEETAATLKAQRDKAMDKAIRAGRILMRRPGVVVPEDIKADVNAAPDSLSRPSSSVAPEKDIAK

SEQ ID NO: 245614 - protein, 995 aa, Zea mays
  Clone ID: MRT4577_155584C.1.pep
MAPKRKTANSSAAVIPAIDPNSQLPFAGNHMFVISEVELLRLVSIGVLPPRELCSWRSCHGTTVPTEDTHESVVYTPFLLRGLGLPISPFFRGILDFYHINLTHLNPNSILQISIFVHLCEAYLGVLPHFGLWKYLYHCRPGMAGGQDQLVGGASLEMRRGRKTEYLEIPLKDSIKGWRLEWFIMDNYGNSLPSRSGRQADVRTPSWTESPTDQEVAEAGVLLTEVGLLKERGLTAEAVVTDFVFKNIQPLKDRAYPAYLYRGLADSTRVTNRRIPSVDLVSRLEMILRGKVSNVGALVAYSAWNLPSPKDFTLFASNPPVTDSNLGLRVRPSAEEVRSLVASLGEIPDDERQIYFEVPLNPSDADINDMLDLLAEDSSDTAPDGTLAVVPLPEVDATLDASKPVSTRPRRPGRTSQPEPSADEQKKKRRRLRRVSSFDEDTSTLAPAIEEMSATGLADIDPNGCAPPAADPNEGVVCAVAVEDEEEENETPLTRKNSRQFVASGGSSGVPSPALSALIGLQELSMANFDQALEDMVPENLLLEPADVDATETCAGVPDAGLRSSRASSTLEHDLEGRNDDLDHPDPAEVAEGPSTLEVVTAESLDPLNSADMCPAPEGVAGEDSAQVRSVGHYPAPEGVAGGDPAQVGSANLDPAPEGARAGSPSCTSMDVHVGSPPHSGGMVVAQTPDQGVALEGSVPTGLVLGSAECTELVPAGLLQPASGGGLTPDYQLISPDLGIPSFFSNLQGASTPEVASSLERWNPVLLHRRVSELEATNAGMTRQIIVLEEKHFQDQAEMARRCADFEEKYSQSQIELSQVSAALDDANALSSSLHVQLNSEKEEKCILAASRDNLDRLYRDSSSSLTILERSHRFTMEELDNQRRQLQESSDEVARLTQLLSAKDATIKELRASKKTIARELETAQQAVKVAEEAAVTFKAQRDKALDKAIRAGRILMRRPGVVVPEDIRADVVAAPDSSNRPSSSVVPERDIGK

SEQ ID NO: 245615 - protein, 123 aa, Zea mays
  Clone ID: MRT4577_155585C.1.pep
EGKVSVTSNPVRTSTSPSATSRRMRSTPSCASPYSETAGSSPFRGIVTLSLEHAEHEAAARGGAPCEQRAAHDEARERGRRVGSPHTGNSSLAYANWRTPTGLGDAVGLRQMPSTVVDVRSLP

SEQ ID NO: 245616 - protein, 178 aa, Zea mays
  unsure (1)..(178): unsure at all Xaa locations
  Clone ID: MRT4577_155586C.1.pep
PSASLPVAAGTTAPAAASRRSRVPTRSRAAAGGGAASVRSPPRCPSPRRSWLCPSSPRATPRRRRVPPRWXVRAGSVASEAVLALAAWMAWAEGGLHARPAATLLPYAARLGAALAWAPLVLGRHAAARAGLACCAAMAVGAVACARGFGAVNPVAGDLAKPAVAWAVILAVVNYKML

SEQ ID NO: 245617 - protein, 282 aa, Zea mays
  unsure (1)..(282): unsure at all Xaa locations
  Clone ID: MRT4577_155587C.1.pep
LKDFGVTYREVPLVADGGLDCDALACSIRPETGCAFIQRSCGYSWRKSLSVADIHKAIGLIKMQNPNCMVMVDNCYGEFVEISEPAMVAAPTIAGSXLIKNPGGTIAPCGGYVAGKEHLVEAAAARLSAPGLGVEFGSTPGHVMRALFQGLFLGPQMVGEAVKGGLLIAEVMSAKGYKVEPLPRVPRHDIVQAVELGSRERLIAFCEVVQQTCPVGSFIKPTAGETPGYASEVIFADGTFIDGSTSELSCDGPLRDPYAVFCQGGTHWTQWALVLGNVLKVI

SEQ ID NO: 245618 - protein, 951 aa, Zea mays
  Clone ID: MRT4577_155588C.1.pep
MAPKRKTASSSAAVIPPIDPNSQLPFAGNHMSIISEAELHHLVSIGVLPPRELCSWRTCRGTTVPTEDTHESVVYAPFLLRGLGLPISPFFCGLLDFYHINLTHLNPNSILQISIFVHLCEAFLGVLSHFGLWKYLYHCRPGMAGGQHQLVGGASLEMRRGWKTEYLEIPLKDSIKGWRLEWFIVDNYGNSLPSRSGRQPDVRTSSWTESPTDQEVVEAGVLLAEVGLLKERGKVSNVGAPVAYSAWNLPPPKAFTLFVSNPPVTDGNLGPRLRPSAEEVSTLVASLGEIPDDERQVYFEVPLNPSDADINDMLDLLAEDSSDAAPVGMLAVVPLPEVDTTLDVPKSAITRPRRPSRTSQPEPSADEQKKKRRRLRRVSSFDEDAGTLVPAAEDVPATGLTDADPNGRAPSVADPNGCAACVVTVEDEEEENEAPLTRKNSRQFIASGGSSGVPSPALSALIGLQELSLANFDQTLEDMVPEDLLSEPVDDDATETCAAVPDAGLRSSRASSTLERDLEGQDADLDCPDPMEVAKGPSSLEVVTAESLDPKNGADTCPAPEDVAGDDLARVKSVSHCPAPEGAAGDDPAQVGSANYDPAPEGAQAGSPSCTSMDVHAGSPPHSGCMVVAQTLDQGVALEGSIPADRAFGSVEGTELIPTGPLQAASGGGLAPGYQLIPPDLGIPSFFSNLQALVDGMASQLRLQGASVPEVASSLACWNPVSLHRRVPELEATNAEMTRQIAILEEKHSRDQAEMIQRCADFEEKYSQSQTELNQVSAALDDANALSSSLHARLDFEKEEKRILLASRDNLDRLYRDSSNSLTILERSHRFTMEELDNQCCRLQESADEVTRLKQLISAKDATIKELRASKKSVAQELEAARLAAKVAKETAATLKTQRDKAMDKAIRAGRILMRRPGVVVPEDIKADVNAAPDSSRRPTSSVAPEKYIAK

SEQ ID NO: 245619 - protein, 422 aa, Zea mays
  Clone ID: MRT4577_155589C.1.pep
MATVAMDISKPTPVASGDEAAAAAKGRSGGGGEGLRQYYLQHIHDLQLQIRQKTHNLNRLEAQRNDLNSRVRMLREELQLLQEPGSYVGEVVKVMGKSKVLVKVHPEGKYVVDIDKSIDITKITPSTRVALRNDSYMLHLILPSKVDPLVNLMKVEKVPDSTYDMIGGLDQQIKEIKEVIELPIKHPELFESLGIAQPKGVLLYGPPGTGKTLLARAVAHHTDCTFIRVSGSELVQKYIGEGSRMVRELFVMAREHAPSIIFMDEIDSIGSARMESGTGNGDSEVQRTMLELLNQLDGFEASNKIKVLMATNRIDILDQALLRPGRIDRKIEFPNPNEDSRFDILKIHSRKMNLMRGIDLKKIAEKMNGASGAELKAVCTEAGMFALRERRVHVTQEDFEMAVAKVMKKDTEKNMSLRKLWK

SEQ ID NO: 245620 - protein, 144 aa, Zea mays
  Clone ID: MRT4577_15558C.1.pep
GKTIPLEVELSDPIDNVKAKIQGKEGIPPDQQRLIFSGKQLEDGRTLADYNIQKESPLHLVLRLRGGMQIFVKTLAGKTITLEVESSDTIDNVKAKIQDKKGIPPDQQRLIFFGKQLEDGRTLADFNIQKESPFPLVLRLPGGQ

SEQ ID NO: 245621 - protein, 839 aa, Zea mays
  Clone ID: MRT4577_155590C.1.pep
MAPKRKTANSSAAVIPAIDPNSQLPFAGNHMSVISEAELLRLVSIGVLPPRELCSWRICHGTTVPTEDTHESVVYAPFLLRGLGLPISPFFRGLLDFYHINLTHLNPNSIMQISIFVHLCEAYLGVLPHFGLWKYLYHCRPGMAGGQHQLVGGASLEMRRGRKTEYLEIPLKDSIKGWRLEWFIVDNYGNSLPSRSGRQPDVRTPSWTESPTDQEVAEAGVLLTEVGLLKERGLTAEAVVTDFVFKNIQPLKDRAYLAYLYRGLADSTRVTNRRIPSVDLVSRLEMILRGKVSNVGAPVAYSAWNLPPPKAFTLFVSNPPVTDGNLGLRVRPSAEEVSTLVASLGEIPDDERDADINDMLDLLAEDSSDAAPDGTLAVVPLPEVDTTLDVPRPVSTRPRRPSRTSQPEPSADEQKKKRRRLRRVSSFDEDAGALAPAAEEVPATGLSDADPNGCAQTAAEPNGCAPSVVEPNGGAACVVTVEDEEEENEAPLTRKNSRQFIASGGSSGVPSPALSAFIGLQELSLANFDQTLEDMVPEDLLSEPVDDDATETCAALPDAGLRSSRASSTLEHDLEGRDADLDCSGPMEVAEGLSTLEVVTAESLDPKNSADTCPAPENVAGEDLARVKSISHCPAPEGVAGDDPAQVGNADCDPAPEGARARSPSCTSMDVHAGSPPHSGGMVVAQTLDQGVALEGSVPADLAFGSVEGTELIPTGLLQAASGGGLASGYQLISPDLGIPSFFSNLQAFVDGMASQLRSQGAFIPEVASSLEHWNPVSLHRRVSELEATNAGMTRQIAVLEEKHSRDQAEMAQRCADFEEKYSQSQTELNQVSAALDDA

SEQ ID NO: 245622 - protein, 83 aa, Zea mays
  unsure (1)..(83): unsure at all Xaa locations
  Clone ID: MRT4577_155591C.1.pep
CRSLLEPHDYIGLCAVVASPTPSSSSCSSSSNPGGEARGLRLTLRLGLPGSESPEREVXVPAGLTLGPLSPSTTKAASKRAFP

SEQ ID NO: 245623 - protein, 80 aa, Zea mays
  Clone ID: MRT4577_155592C.1.pep
EQSCLHIFYLVTTTYLFFSVALFNDQSGYHDMILSGRHIISIHLRAHFLVSASANRAWRRWGNSPIWSVSGMTFLSTSSA

SEQ ID NO: 245624 - protein, 119 aa, Zea mays
  unsure (1)..(119): unsure at all Xaa locations
  Clone ID: MRT4577_155593C.1.pep
MEELDNQRRRLQESADEVTRLTQLISAKDATIKGLRASKKSIAQELEAAQLAARVAEETAVTLKAQRDKAMDKAIRAGRILMRRPGVVVPEDIRADVNAAPNSLNRPSSSVVPETDXWK

SEQ ID NO: 245625 - protein, 776 aa, Zea mays
  Clone ID: MRT4577_155594C.1.pep
MGKSNKRKREPTPPSEDFGDSEYSEEEFSSESEGSPAPVSPPASSDDSDDSQGIVAEVWTYIRAVERSRLEGSDESEYSSDEEDSDGGEDEDDDDGDDDDGGDGDGDGNGSGGGSGGGDGSKGSTRGGGSKGSTRGGSSKGSTRGFGNNRRVMTGHFLKRYLAREYPIRAVLLAAFAFRALVLAFPLPNPLCHSPPTLLAGEIEMAPKRKTASSSAVVIPPIDPNSQLPFAGASLEMRRGRKTEYLEIPLKDSIKGWRLEWFIVDNYGNSLPSRSGRQPDVRTPSWTESPTDQEVAEAGVLLTEVGLLKERGLTAEAVVADFVFKNIQPLKDRAYPAYLYRGLADSTRVTNRRIPSVDLVSRLEMILRGKVSNVGAPVAYSAWNLPPPKAFTLFVSNPPVTDGNLGLRVRPSAEEVSTLVASLGEIPDDERQVHFEVPLNPSDADINAMLDLLAEDSSDAAPAGTLAVVPLPEVDTTLDVQKPVSTRLRRPSRTNQPEPSADEQKKKRRRLRRVSSFDEDAGTSVPAIEEVPATGLTDADPNGCTQTATDPSVGAPSVADPNGGAACVVTVEDEEEENEAPLTRKNSRQFIASGESSGVPSPALSALIGLQELSLANFDQTLEDMVPEDLLSEPVDDDATEACATVPDAGLRSSRASLTLERDLEGRDADLDCPGPMEVAEGPSTLEVVTAESLDLKNGADTCPAPEGVAGDDLAWVKSVSHCPAPEGATGDDPAQVGSANYDPAPEGAQAGSPSCTSMDVHAGSPPQAFILLLHK

SEQ ID NO: 245626 - protein, 85 aa, Zea mays
  Clone ID: MRT4577_155595C.1.pep
GMKPSRKIRNTAFSKYHSLSDQSAAGRVNGRRGNPGRRGRAPPPGSLLGRRRGGSTMPLAKSRLSPAKGRFRPVPLRRQHGRVGR

SEQ ID NO: 245627 - protein, 77 aa, Zea mays
  Clone ID: MRT4577_155596C.1.pep
MWTKKVATQVALVLLLLLIAQEAAVPGAEAKVCRQRSAGFKGPCVSDKNCAQVCLQEGWGGGNCDGPFRRCKCIRQC

SEQ ID NO: 245628 - protein, 87 aa, Zea mays
  Clone ID: MRT4577_155597C.1.pep
KKKKKQRRKRKNATKGGKKEGTKKKKKIKNRDDRRRGRSENHRAAAGRSGRGVAAAALRGLLYRHSPKALSAAHPSSALGLDLPQAQ

SEQ ID NO: 245629 - protein, 873 aa, Zea mays
  Clone ID: MRT4577_155598C.1.pep
MSVISEVELLRLVSIGVLPPRELCSWRACHGTTVPTEDTHESVVYTPFLLRGLGLPISPFFRGILDFYHINLTHLNPNSILQISIFVHLCESYLGVLPHFGLWKYLYHCRPGMAGGQHQLVGGASLEMRRGRKTEYLEIPLKDSIKGWRLEWFIMDNYGNSLPSRSGRQPDVRTPSWTESPTDQEVAEAGVLLTEVGLLKERGLTAEAVVTYFVFKNIQPLKDRAYPAYLYRGLADSTRVTNRRIPSVDLVSRLEMILRGKVSNVGAPVAYSAWNLPSPKDFTLFVSNPPVTDSNLGLRVRPSAEEVRSLVASLGEIPDDERQVYFEVPLNPSDADINDMLDLLAEDSSDTTPDGTLAVVPLPKVDATLDVSKPVNTRPRRPSRTSQPEPSADEQKKKRRRLRRVSSFDEDASTLAPAAEEMTATGLADIDPNGCAPPAADPNEDAVCAVAVEDEEEENETPLTRKNSRQFVASGGSSGVPSLALSALIGLQELSMANFDQALEDMVPENLLLEPADVDATETCAAVPDAGLRSSRASSTLEHDLEGRDDDLDRPDPMEVAEGPSTLEVVTAESLDPLNSADMCPAPKGVAGEDSAQVRSVGHYLAPEGVAGGDPARVGSANLDPAPEGVRARSPSCTSMDVHVGSPPHSGGMMVAQTPDQGVALEGSIPTGLALSSAECTELVPAGLLQAASSGGLAPGHQLISPDLGIPSLFSNLQALVDGMVGQLKSQGASIPEVASSLERWNPVLLRGRVSELEATNAGMTRQITVLEEKHSQDQAEMARRCADFEDVIPGLQRREVEALTTQNPSRPPISPPPPRCSPPVWFSVVWLRSQLEFGGRKKEGEREEPKVVDFRIVLRDLPKLPVLDTCWE

SEQ ID NO: 245630 - protein, 36 aa, Zea mays
  Clone ID: MRT4577_155599C.1.pep
FVLSAYLSHSLEPILYTSIDITELKLIIRLHSIIYI

SEQ ID NO: 245631 - protein, 270 aa, Zea mays
  Clone ID: MRT4577_15559C.1.pep
MGGALILALLLAAVPLSLGGGAHPGYSDADESACTVDAGAELLRRLEERGPGGRSIIDITHAVVPDLPAFATGAVAGPMLRLRESMADGSEYNLSELRMECHTGTHVDAPGHINQAHFAAGLDVDTLDLHVLNGPALLVDVPRNTNITAEAMEFLNIPRGVRRVLFRTLNTDRKLMWRKGGDMSYVGFTEDGAQWLVDNTDIKLVGVDSLSVASFDHLISAHVVFFKTPDIIPVESLNLDDIEAGIYMLHCLPLRLVGAEGAPTRCILIK

SEQ ID NO: 245632 - protein, 125 aa, Zea mays
  Clone ID: MRT4577_1555C.1.pep
GGKAAPPTKQEDAPGPRERTTEARRRKRPRQRDHHNAEKERKTPPPDQQEPATTTPTAPPPEKTQPSRNEKRTDPNPGKKQTPTHQNKKKPKHPHPPKKEIKKKKKACPPPRPRKGDYADCLTLA

SEQ ID NO: 245633 - protein, 48 aa, Zea mays
  Clone ID: MRT4577_155600C.1.pep
ICTMTDGSRGEVPVVRTVLRVKVIGSSVHRTQGLVPPACSLTRLRTSG

SEQ ID NO: 245634 - protein, 208 aa, Zea mays
  unsure (1)..(208): unsure at all Xaa locations
  Clone ID: MRT4577_155601C.1.pep
GGPSGGEELDLFMTHYVLLLCSXRVRPRVRQHVRVHAMEAVMGCWELEQSLQSLTGASPGEGTGATMSDDEDNQVDSEANMFDGNDGSDGMGFGPLMLTEGERSLVERVRQELKNELKQGYKEKLVDIREEIMRKRRAGKLPGDTASVLKAWWQAHSKWPYPTEDDKARLVQETGLQLKQINNWFINQRKRNWHSNPTSSGEKTKKKR

SEQ ID NO: 245635 - protein, 292 aa, Zea mays
  Clone ID: MRT4577_155602C.1.pep
SSGARHMAAVEIGCEPIVRKHVRGIFMNKAVVSTSPTSEGNTIIDPYHQLSGVKWLREKPLSKFVDAQWLLIQKAEEEKLLKVTVKLPEDAKKKLMSEARENYLSDCVSKSAQLWDEQRKMILDDAFFNFLLPSMEKEARSLLMTKAKHWLHMEYGKQLWNKVTVAPWKKKDADKKDADIDLDDESELRVMACCWGPGKPATTFVMLDSSGELVDVLYAGSISNRSQGVAEQQRKKNDQQRVLKFMTDHQPHVVCVGASNYNCRQLKDDLYEVIFKIVEDHPRDVNAQKKKK

SEQ ID NO: 245636 - protein, 123 aa, Zea mays
  unsure (1)..(123): unsure at all Xaa locations
  Clone ID: MRT4577_155603C.1.pep
LVDIREEXMRKRRAGKLPGDTASVLKAWWQAHSKWPYPTEDDKARLVQETGLQLKQINNWFINQRKRNWHSNPTSSAEKTKKKXGDDGPEQSWEKLEMSTILYYGEVHSPSLRRQEGKVSWVT

SEQ ID NO: 245637 - protein, 212 aa, Zea mays
  unsure (1)..(212): unsure at all Xaa locations
  Clone ID: MRT4577_155604C.1.pep
KEQLQQHVRVHAMEAVMGCWELEQSLQSLTGASPGEGTGGTMSDDEDNQVDSEANMFDGNDGSDGMGFGPLILTEGERSLVERVRKELKNELKQGYKEKLVDIREEIMRKRRAGKLPGDTASVLKAWWQAHSKWPYPTEDDKARLVQETGLQLKQINNWFINQRKRNWHSNPTSSAEKTKKKXGDDGPEQSWQKARDVHYTLLWRSTFSLTS

SEQ ID NO: 245638 - protein, 48 aa, Zea mays
  Clone ID: MRT4577_155605C.1.pep
LHRLTNQNPQAHYVLLLGLHLRDALHGTHLSSNYRRTVPVAAGVFISS

SEQ ID NO: 245639 - protein, 86 aa, Zea mays
  Clone ID: MRT4577_155606C.1.pep
QKHFFFNPPKGPTFRFQHNFVFNTHKLCPNPPFLKDFFLKKLFLPNRRPPFFIFPLCHFWFLGKTTFSHFFPPNQPNSFFCFLGFF

SEQ ID NO: 245640 - protein, 92 aa, Zea mays
  Clone ID: MRT4577_155607C.1.pep
SGLPLHGERLPVLEIQRLPRWTTQVFLPERSACTTATTRINYTSMLHAQMDFSSHGEEEARVQGGAHRRERGRVGHQRVSRTPRRMPLGGQR

SEQ ID NO: 245641 - protein, 220 aa, Zea mays
  Clone ID: MRT4577_155608C.1.pep
YTISKKRHVELLIKRPRVEKEPVSLHNSLHSNRFSKASRENLGQEIIHQFQGPVQAPLGIQLRHGSFGVAQIPLPLASVSSKDTSDTCIEDGELCDTSSVKKRMDKVAGANGLEGVSIECANLLNNGIDVFMKQLIGSCIELVRARSRHGKLRHETLKQQLCRKLINGVSVHNHVPGQSSVIPPETNSISMQDLKAVIELNPCLLGINASLLHEKINSYD

SEQ ID NO: 245642 - protein, 75 aa, Zea mays
  unsure (1)..(75): unsure at all Xaa locations
  Clone ID: MRT4577_155609C.1.pep
SFFSSRLTSRYRTTAAFFKDLQVFQQXXSRKRDELHQKFLNTTPAYTTVTRSASCLPNSCSWKDSCTIIKFHRRS

SEQ ID NO: 245643 - protein, 90 aa, Zea mays
  Clone ID: MRT4577_15560C.1.pep
ESPLPLVLRLPGGMQIFVKPLTGKTITLEVESSDPIGNVKAKIQDKEGIPPDQQGFIFAGKQLEDGRPLADFNIQKESPLPLVLRLRGGQ

SEQ ID NO: 245644 - protein, 139 aa, Zea mays
  Clone ID: MRT4577_155610C.1.pep
GPGGSSGRWGRACVPGLLSHDIVQPVVGVGAAPLVWGTRHARGRHPGPPLCHRWAALWAATSRAFSRLVLQHVRARLVELYVSWSPAGLLPWEPSRAARCSWRSPWGPQCSLGSSAPPALPRLQTPAARPGPRRHPRGR

SEQ ID NO: 245645 - protein, 270 aa, Zea mays
  Clone ID: MRT4577_155611C.1.pep
MVRKRTATMASFLEKFVDAVEWDAEDISGRLGLVLHAAFLFAGFQPYGRQPRAGYLLKKQSRKRGGSACLSRLYTAPELAQREGADAAVLMLCVQGSNVALLVFITTDGDDTPEDVYLEHLDLEIVRPLLSRSLGGVEPWASRICKSLANGVCWCFLDKLCRRNGLALSGFSSLHDDLKAVVLEKLTDGKDLARVECVSSHLRLLVAERDHELWRTLYKALPAGRRRGWWWPLRWFIPNAESSDEEALDFASTWKDKYVEAMRRPYPYRM

SEQ ID NO: 245646 - protein, 102 aa, Zea mays
  Clone ID: MRT4577_155612C.1.pep
EKLVHLKVQAGPFKFANVKQGGRKGLSHADSSGRHHRGDSARAPIRNHRHLGGHGLLPSTRIFFQIFPNLNPSNRIGKWLEINRSQEFGVFFFFLGGSFWFR

SEQ ID NO: 245647 - protein, 75 aa, Zea mays
  Clone ID: MRT4577_155613C.1.pep
VLGYCLLPMILLSSFAVIFSLQGMVGIILTAGIIGWCSFSASKIFISALAMEGQQLLVAYPCALLYGVFALISVF

SEQ ID NO: 245648 - protein, 263 aa, Zea mays
  Clone ID: MRT4577_155614C.1.pep
MTKKLISISTMAGKQGCKEQSNDRRIQASIQGDAKSVVVGFGGRLVTREQEQEDAIIVAALRHVVSGYSTPPPEVVVTVAGGEACGTCGIDGCLGCDFFGAPELAQEAVSCGTGQVATTASVGGGAAAAALRPRRRRNRNMYRGVRQRPWGKWAAEIRDPRRAARVWLGTFDTAEEAARAYDCAAVEFRGPRAKLNFPGHEALFQGHGDTAAAADTETLTPSPGEWQLGGGAGDELWEGLQDLMKQDEVDRWLAPVFGAASSF

SEQ ID NO: 245649 - protein, 149 aa, Zea mays
  Clone ID: MRT4577_155615C.1.pep
MADSLTEEQVSEFKEAFSLFDKDGDGQITTKELGTVMRSLGQNPSESELQDMINEVDADNNGTIDFPEFLTMMARKMKDTDSEEEIREAFKVFDRDNNGFISAAELRHVMTSIGEKLTDDEVDEMIREADQDGDGRIDYNEFVQLMMQK

SEQ ID NO: 245650 - protein, 513 aa, Zea mays
  Clone ID: MRT4577_155616C.1.pep
LLRQEQNTKSSVKTETKILTVQEASLLSQLNQLNHNSQIIIDSGGPHDPKLSRPASGAGAGNEHISPPDHGQTAEETDAREDYPAMAITTPAEDGYSWRKYGQKQVKHSEYPRSYFKCTHPNCLVKKKVERSHEGHITEIIYKGAHNHPKPTQSRRPGVQPVHPFGDSAQADAADNLGSQANAVDANQPRRAGVQDGMDATSSPSVPIERCDSPASMQVDSAARFGSPEGADVTSVSDEVGGDDRVTRGSMSQGGADAEGDELECKRRKLESYAIDMSTASRAVREPRVVIQTTSEVDILDDGYRWRKYGQKVVKGNPNPRSYYKCTYPGCVVRKHVERASHDLKSVITTYEGRHNHEVPAARNSGHPGTAAATGAGGPRRLEHPSLRDGLMGHLGGCGVPFGLPPPRDPLAPMGNYPTYASSIPLGGAGPTSLPSLPVPAGTLSAVDGLKLPMLAPSSLQQHPLLRHRQAMQAAGLVAPKDDVKVEGNVAGGAAPSVYQQMMCSGLRLRQQM

SEQ ID NO: 245651 - protein, 1008 aa, Zea mays
  Clone ID: MRT4577_155617C.1.pep
MAPKRKTANSSAAVIPAIDPNSQLPFAGNHMSVISEAELLRLVSIGVLPPRELCSWRACHGTTVPTEDTHESVVYTPFLLRGLGLPISPFFRGLLDFYHINLTHLNPNSILQISIFVHLCEAYLGVLPHFGLWNYLYHCRPGMAGGQHQLVGGASLEMRRGRKTEYLEIPLKDSIKGWRLEWFIMDNYGNSLPSRSGRQADVRTPSWTESPTDQEVAEAGVLLTEVGLLKERGLTAEAVVTDFVFKNIQPLKDRAYPAYLYRGLADSTRVTNRRIPSVDLVSRLEMILRGKVSNVGAPVAYSAWNLPSPKDFTLFVSNPPVTDSNLGLRVRPSAEEVSSLVASLGEIPDDERQIYFEVPLNPSDADINDMLDLLAEDSSDAAPDGTLAVVPLPEVDATLDVPKPVNTRPRRPSRTSQPEPSADEQKKKRRRLRRVSSFDEDASTLAPAAEEMTATGLADIDPNGCAPPAADPNEDAVCAVAVEDEEEENETPLTRKNSRQFVASGGSSGVPSPALSALIGLQELSMANFDQALEDMVPENLLLEPVDVDATETCAAVPDAGLRSSRASSTLEHDLEGRDADLDRPDPMEVAEGPSTLEVVTAESLDPLNSADMCPAPEGVAGEDSARVRSVGHCPAPEGVAGDDPAQVGSANFDPAPEGVRAGSPSCTSMDVHAGSPPHSGGMVVAQTPDQGVALEGSIPTGLALGSAECTELVPAGLLQAASGGGLAPGYQLISPDLGIPSLFSNLQALVDGMVGQLKSQGASIPEVASSLERWNPVLLRRRVSELEATNAGMTRQITVLEEKHSQDQAEMARRCADFEEKYSQSQIELSQVSAALDDANALSSSLHAQLDSEKEEKRILAASRDNLDRLYRDSSNSLTILERSHRFTMEELDNQRRQLQESSDEVTRLTQLLSAKDATIKGLRASKKSIAQELETAQQAVKVAEEAAVTFKAQRDKALDKAIRAGRILMRRPGVVVPEDIRADVNAAPDSSNRPSSSVVPEKDIGK

SEQ ID NO: 245652 - protein, 63 aa, Zea mays
  Clone ID: MRT4577_155618C.1.pep
YMYTTFVSLVSCMPRLCYMHCAASYRTHLMDVPFMLLTSSSLHFTPPLFQHVLCALDSRNAKD

SEQ ID NO: 245653 - protein, 39 aa, Zea mays
  Clone ID: MRT4577_155619C.1.pep
SPVHPRVRTSLIDCYLLPTKNSYTQVLRCLAFKAFFILL

SEQ ID NO: 245654 - protein, 143 aa, Zea mays
  unsure (1)..(143): unsure at all Xaa locations
  Clone ID: MRT4577_15561C.1.pep
MCDPLVDPRCRFFVKTLTGQTITLEVETSDTIDNGKAKIQDMEGIPPDQQRLIFAGKQLEDGRTLADYNIQKESTLHLVLRLRGGMQIFVKTLTGKTITLEVESSDTIDNVKAKIQDKEGIPXPDQQRAXIFAGKXQLEDRAP

SEQ ID NO: 245655 - protein, 99 aa, Zea mays
  unsure (1)..(99): unsure at all Xaa locations
  Clone ID: MRT4577_155620C.1.pep
GEIDPTIRLVGPTSLVSMIDTAXMALESELGCQYNVHMLIDYGQVTRRVDTQYGQWSXRSRXTIGAILRAREFPLWIVDVGFGDEPWNMMHLFADNIPA

SEQ ID NO: 245656 - protein, 120 aa, Zea mays
  unsure (1)..(120): unsure at all Xaa locations
  Clone ID: MRT4577_155621C.1.pep
LPYFFLKPAGRSLCCPGCRLSSLAPALPWPDRPLARAGSSSSPMAGLLYTATATPCSFPSASAPPSSCTSSSKDLTPHGVWPCLLHGLQQPCAHXPWKTSPLPASGKPHLFPARARCGAP

SEQ ID NO: 245657 - protein, 116 aa, Zea mays
  Clone ID: MRT4577_155622C.1.pep
DHQDRFTRKRLTREVLIHQNSNDLKYQILDRGHFAQKPLALLSAALVWGVAHRFKIYYNATGCDQINRIQRCFFFVEKLSTCLCGNLVVELQWWLSRPDLQDPDYTDKLMDLETWG

SEQ ID NO: 245658 - protein, 50 aa, Zea mays
  Clone ID: MRT4577_155623C.1.pep
SLRPPTELLASSSSSSCSWRCLPSAGNKDECPCYRDMTTGHGNRTRPKCP

SEQ ID NO: 245659 - protein, 40 aa, Zea mays
  Clone ID: MRT4577_155624C.1.pep
TLRTPVRENQPPNDLPVTVLAERNASNSIHFTGTYVSLGG

SEQ ID NO: 245660 - protein, 96 aa, Zea mays
  Clone ID: MRT4577_155625C.1.pep
MKPAATARVAGLLFFLVLLLALPSLRVSMAGSGFCDGKCAVRCSKASRHDDCLKYCGICCATCNCVPSGTAGNKDECPCYRDMTTGHGNRTRPKCP

SEQ ID NO: 245661 - protein, 96 aa, Zea mays; identical to SEQ ID NO: 245660
  Clone ID: MRT4577_155626C.1.pep

SEQ ID NO: 245662 - protein, 96 aa, Zea mays; identical to SEQ ID NO: 245660
  Clone ID: MRT4577_155627C.1.pep

SEQ ID NO: 245663 - protein, 220 aa, Zea mays
  Clone ID: MRT4577_155628C.1.pep
MAEREVFLEDVRHRLEQAQAVQKRFYDNKHRAVAYNVGDWVLLRLRNRPVASMSLAQKGKLQPRFFGPYCITEIINDVAVRLALPPKAKIHDVFHVGLLKKWVGAPPTSTPELPELLHGKVIPEPERVVRFRLARGIKEVLVRWKGQPASAATWEDWEDFSAKHPSFQLEDELPVEGGRDVMWGLPYNRRRRARDGRRAAERAAASATSAAEKESQEISG

SEQ ID NO: 245664 - protein, 150 aa, Zea mays
  Clone ID: MRT4577_155629C.1.pep
WKQKKIKNPNYQGKWKAPMIDNPDFKDDPYIYAFDSLKYIGIELWQVKSGTLFDNIIITDDPALAKTFAEETWGKHKEAEKAAFDEAEKKKEEEDAAKGGDDEDDDLEDEEDDEKADEDKADSDAEDSKDSDDEKQHDELCHYEVLFFFP

SEQ ID NO: 245665 - protein, 51 aa, Zea mays
  Clone ID: MRT4577_15562C.1.pep
KSGTIPYQTITWETGPFTGDRREADNLFLSPCRVNIRRAHFAPNTTVYLTA

SEQ ID NO: 245666 - protein, 53 aa, Zea mays
  Clone ID: MRT4577_155630C.1.pep
MAIRKGSSYAKGGDDEDDDLEDEEDDEKADEDKADSDAEDSKDSDDEKQHDEL

SEQ ID NO: 245667 - protein, 421 aa, Zea mays
  Clone ID: MRT4577_155631C.1.pep
MAIRKGSSYAVAALLALASVAAVAGEVFFQEKFEDGWESRWVKSEWKKDENMAGEWNHTSGKWNGDAEDKGIQTSEDYRFYAISAEYPEFSNKDKTLVLQFSVKHEQKLDCGGGYVKLLGGDVDQKKFGGDTSYSIMFGPDICGYSTKKVHTILTKDGKNHLIKKDVPCETDQLTHVYTLIIRPDATYSILIDNEEKQTGSIYEHWDILPPKKIKDPEAKKPEDWDDKEYIPDPEDKKPEGYDDIPKEIPDPDAKKPEDWDDEEDGEWTAPTIPNPEYKGPWKQKKIKNPNYQGKWKAPMIDNPDFKDDPYIYAFDSLKYIGIELWQVKSGTLFDNFIITDDPALAKTFAEETWGKHKEAEKAAFDAAEKKKEEEEAAKGGDDEDDDLEDEEDDEKADEDKADSDAEDSKDDSDDEKHDEL

SEQ ID NO: 245668 - protein, 448 aa, Zea mays
  unsure (1)..(448): unsure at all Xaa locations
  Clone ID: MRT4577_155632C.1.pep
MAIRKGSSYAVAALLALASVAAVAGEVFFQEKFEDGWESRWVKSEWKKDENMAGEWNHTSGKWNGDAEDKGIQTSEDYRFYAISAEYPEFSNKDKTLVLQFSVKHEQKLDCGGGYVKLLGGGDVDQKKFGGDTSYSIMFGPDICGYSTKKVHTILTKDGKNHLIKKDVPCETDQLTHVYTLIIRPDATYSILIDNEDKQTGSIYEHWDILPPKKIKDPEAKKPEDWDDKEYIPDPEDKKPEGYDDIPKEIPDPDAKKPEDWDDEEDGEWTAPTIPNPEYKGPWKQKVWQFLLTYKLTAIHILISDSMLFHLXKIKNPNYQGKWKAPMIDNPDFKDDPYIYAFDSLKYIGIELWQVKSGTLFDNIIITDDPALAKTFAEETWGKHKEAEKAAFDEAEKKKEEEDAAKGGDDEDDDLEDEEDDEKADEDKADSDAEDSKDSDDEKQHDEL

SEQ ID NO: 245669 - protein, 68 aa, Zea mays
  unsure (1)..(68): unsure at all Xaa locations
  Clone ID: MRT4577_155633C.1.pep
GLSIGLSPAGMRRVREKALRPLFVTEHWVPLLSRVSXIISRSSSSATYGCASAVNSLWVIVYSESYLV

SEQ ID NO: 245670 - protein, 421 aa, Zea mays
  Clone ID: MRT4577_155634C.1.pep
MAIRKGSSYAVAALLALASVAAVAGEVFFQEKFEDGWESRWVKSEWKKDENMAGEWNHTSGKWNGDAEDKGIQTSEDYRFYAISAEYPEFSNKDKTLVLQFSVKHEQKLDCGGGYVKLLGGDVDQKKFGGDTSYSIMFGPDICGYSTKKVHTILTKDGKNHLIKKDVPCETDQLTHVYTLIIRPDATYSILIDNEEKQTGSIYEHWDILPPKKIKDPDAKKPEDWDDKEYIPDPEDKKPEGYDDIPKEIPDPDAKKPEDWDDEEDGEWTAPTIPNPEYKGPWKQKKIKNPNYQGKWKAPMIDNPDFKDDPYIYAFDSLKYIGIELWQVKSGTLFDNIIITDDPALAKTFAEETWGKHKEAEKAAFDEAEKKKEEEDAAKGGDDEDDDLEDEEDDEKADEDKADSDAEDSKDSDDEKQHDEL

SEQ ID NO: 245671 - protein, 422 aa, Zea mays
  Clone ID: MRT4577_155635C.1.pep
MAIRKGSSYAVAALLALASVAAVAGEVFFQEKFEDGWESRWVKSEWKKDENMAGEWNHTSGKWNGDAEDKGIQTSEDYRFYAISAEYPEFSNKDKTLVLQFSVKHEQKLDCGGGYVKLLGGGDVDQKKFGGDTSYSIMFGPDICGYSTKKVHTILTKDGKNHLIKKDVPCETDQLTHVYTLIIRPDATYSILIDNEDKQTGSIYEHWDILPPKKIKDPEAKKPEDWDDKEYIPDPEDKKPEGYDDIPKEIPDPDAKKPEDWDDEEDGEWTAPTIPNPEYKGPWKQKKIKNPNYQGKWKAPMIDNPDFKDDPYIYAFDSLKYIGIELWQVKSGTLFDNIIITDDPALAKTFAEETWGKHKEAEKAAFDEAEKKKEEEDAAKGGDDEDDDLEDEEDDEKADEDKADSDAEDSKDSDDEKQHDEL

SEQ ID NO: 245672 - protein, 125 aa, Zea mays
  unsure (1)..(125): unsure at all Xaa locations
  Clone ID: MRT4577_155636C.1.pep
TSSAAPGAWTKVVQLRRWTARAPXARGPSIEPDVQRARGLGLGTWVRRGQLGTPTGTETATGNCVVGVTASLCWSCPWPRRCARPAPARRHMCCRKALPACGGVHERGEIHAAAEVASIKGHISV

SEQ ID NO: 245673 - protein, 79 aa, Zea mays
  Clone ID: MRT4577_155637C.1.pep
MSLVLQNMFQATIETSFLVLEYSISQLINNRHVLAKLQKEVRTATPDRRIVIEEDLNPIPFLEGTIKESIRIQPAAPFL

SEQ ID NO: 245674 - protein, 74 aa, Zea mays
  Clone ID: MRT4577_155638C.1.pep
TKPPKGQGGVSGSFFFKHTPKPKGHGRGGGFYSKKNPLAKEKMQGGTNMPGELKMGKKGQTGGPHQRGKKKGTF

SEQ ID NO: 245675 - protein, 113 aa, Zea mays
  unsure (1)..(113): unsure at all Xaa locations
  Clone ID: MRT4577_155639C.1.pep
MGRKTLNPAPSVATGATSDSFPATQHPGLGAASGDRRRAAAAKVSPPRAIGTAMPVPDFETSDFKKEKVSQAAHEEHIARGGREXIPLIPEASKGTKQTGAPGWGSQAPAQAQ

SEQ ID NO: 245676 - protein, 239 aa, Zea mays
  Clone ID: MRT4577_15563C.1.pep
MFKKPVDVKTIQRLSGADKKKLRRTAKGRFPQASDADLDAILPPKAEITVAKYPNHVLVYGIEGEFPMIFNTDARGHELFPTVYALWKVPHLLPAFTLKGGEVSRFVIGGADLMFPGISIPPEGFPSFEAGQPWAVKVPGNPAAIAVGSTTMSSTEALKAGLRGKALKILHYYRDMLWDSADGCYVPNEGFFDDIVVEDPNPVSTSQAPDSAEEPEVTNDGSVSAEDAGVDISDNHGTN

SEQ ID NO: 245677 - protein, 82 aa, Zea mays
  Clone ID: MRT4577_155640C.1.pep
SVKPRSLFGAVFLKLLSENDQAFDILYCITFKLMDQQWLDMHATYMDFNTVMKSTRRQLERELLIEDIQRIEDMPSYRLLAR

SEQ ID NO: 245678 - protein, 211 aa, Zea mays
  unsure (1)..(211): unsure at all Xaa locations
  Clone ID: MRT4577_155641C.1.pep
MDGSAGSFVAVRRLSGSDRAAAFHHSSSGASPRLASDLDSSSFVFLHSGCCCSRLTPRDDAYGYGLCCPYAVAAAEVVTGSTAWIGRGLSCVCAQRRDSDARLSFDLTPVQEECLQRLQXRIEVQYDSANREHQEALQXLWCASFPGTELRXLISEQWXXEMGWQGKXPSTDFRNXFQELLXQQNGDRAIWEYHFAVAGVXYTFMLIQMLD

SEQ ID NO: 245679 - protein, 266 aa, Zea mays
  Clone ID: MRT4577_155642C.1.pep
MDGSAGSFVAVRRLSGSDRAAAFHHSSSAEVVTGSTAWIGRGLSCVCAQRRDSDARLSFDLTPVQEECLQRLQNRIEVQYDSANREHQEALQSLWCASFPGTELRGLISEQWKEMGWQGKDPSTDFRGGGFISLENLLYFARNYPKSFQELLRKQNGDRAIWEYPFAVAGVNITFMLIQMLDLQSVKPRSLFGAVFLKLLSENDQAFDILYCITFKLMDQQWLDMHATYMDFNTVMKSTRRQLERELLIEDIQRIEDMPSYRLLAR

SEQ ID NO: 245680 - protein, 37 aa, Zea mays
  Clone ID: MRT4577_155643C.1.pep
PKTRTHSLVQRHLMNRLSVSSSTTLYMVYMDSLYAIL

SEQ ID NO: 245681 - protein, 102 aa, Zea mays
  Clone ID: MRT4577_155644C.1.pep
MRVVLVALALLALAASATSTHTSGGCGCQPPPPVHLPSTVHLPPAGHLATPEHNPPTDHLPAAGHLPPSEHVPPVADPAPSVSEAPMQPGGDTLRLDTVPGA

SEQ ID NO: 245682 - protein, 266 aa, Zea mays; identical to SEQ ID NO: 245679
  Clone ID: MRT4577_155645C.1.pep

SEQ ID NO: 245683 - protein, 93 aa, Zea mays
  Clone ID: MRT4577_155646C.1.pep
MQGNGTLTLQKQITLFSKTQARMSWARCKLRSMVSRSLFLVSAGGNDFSAFSEMGMGEQDAPAYISSMVSTYVQHIDVRVRRDHASNLSLHIN

SEQ ID NO: 245684 - protein, 75 aa, Zea mays
  Clone ID: MRT4577_155647C.1.pep
SAGVLRGIKFPARLIVPMVRPWYLLNQLATCVCRSNGLHWVMTGEVQGFQLIPRSDRRVPKHQHRQCRTTVSVLL

SEQ ID NO: 245685 - protein, 52 aa, Zea mays
  unsure (1)..(52): unsure at all Xaa locations
  Clone ID: MRT4577_155648C.1.pep
GLRGDRSRISXHPPFRFCVIKAELTLGVTGKQRPLTRERSPASAAEYGAWGC

SEQ ID NO: 245686 - protein, 61 aa, Zea mays
  Clone ID: MRT4577_155649C.1.pep
RKIMPSDYIIGPRQEIAKAQNFFNPLKKNPSVMPKKNKRVASPIVKSDQSPMSIFNAFPHC

SEQ ID NO: 245687 - protein, 171 aa, Zea mays
  unsure (1)..(171): unsure at all Xaa locations
  Clone ID: MRT4577_15564C.1.pep
MQIFAKTLTGKTVTLEVESSDTIDNVKAKIHXKEGIPPDQQRLIFAGKQLEDGRTLADYNIQKESTLHLGLRLTGGMHILAKTLTGKTITLEVESSDTIDNVKAKIQDTEGIPPYQQRLICAGKQLEDGRTLADYNIEKESTLHLALRVMSGMHIFAKTLTGKTITLEGES

SEQ ID NO: 245688 - protein, 58 aa, Zea mays
  Clone ID: MRT4577_155650C.1.pep
MAKSKNHTAHNQSYKAHKNGIKKPKRHRQTSTKGMDPKFLRNLRYSRKGNKKSGEAEE

SEQ ID NO: 245689 - protein, 90 aa, Zea mays
  Clone ID: MRT4577_155651C.1.pep
APWASEDLALYLVPFQCWWSGGTESNRCCVVSVSHVSISYSCLNMVVILTPSYCLGLSRTRNVTFFGDLFSDHISLWLLFHCTMQHTFLH

SEQ ID NO: 245690 - protein, 323 aa, Zea mays
  Clone ID: MRT4577_155652C.1.pep
MDSATVALASPASDDRRFWDRLRTRVDTILEDRRGLPPAAAAGAPMRGVESERGKRLREDSLMLVRGLDSVAESLAQLSDTLTAAQKGVSALATCSSQARGCEGGACPCPEEVKAEEEEPRAKRMCGGSTEDSPRNGLDSNSPAAGEETAAGPDGLGKGNVQASAEIAQSTNLKRARSLAVSMASRAAALARELKNIKSELHFMQERCGLLEEENKRLREGCDNGVAPEEDDLVRLQLEALLAEKSRLAQENANLTRENQGLMQLVEYHQLASQDLDESYEDVMQGIRLDFSSPLGKISDDEEGERDDEVPVTPAEVPCSPDE

SEQ ID NO: 245691 - protein, 97 aa, Zea mays
  Clone ID: MRT4577_155653C.1.pep
QSLGPFYFAAPSRRRGQGGARSAVTARALSAYIYGPAAPLLHGAETAVVDSNAPSPSSSPALVPSSLHPRPTMSARRLLIVESALSSSDACSTLELC

SEQ ID NO: 245692 - protein, 115 aa, Zea mays
  Clone ID: MRT4577_155654C.1.pep
GGPGVFFASFPTQLKKKRWLGPEKKRPFFFPPFFFGGPAPFFLLNGGALKGGQGPFSLAFFCGKTAPFFFFCLGGPPPGIIILGPIIKKRGGFLKPFLFLVKGNFLGYNYYKKLL

SEQ ID NO: 245693 - protein, 92 aa, Zea mays
  Clone ID: MRT4577_155655C.1.pep
LPAKVSNNRVHLTLRNSLISRITSVAIVFCSNTQNLVHVNSLPRDPDTNQSDCLERGLIVNKHESKFLDSELPSIAYQTNTACTANLLYRVS

SEQ ID NO: 245694 - protein, 164 aa, Zea mays
  unsure (1)..(164): unsure at all Xaa locations
  Clone ID: MRT4577_155656C.1.pep
KSLNKASYKISKQSSSTSTMRAPCPPPSAPRPPPTSLPTTRLPSXPVYNIDKSDFRDVVXKLTGSPSHXAAAASVHSRRAPLMAPPPPPPPLPXDDDTLRLHRIRPPPRTGEGGTPPLRALERDGASSPSRVVERLGRRRVWAGKGWSWREVWSGGVCLVPKPN

SEQ ID NO: 245695 - protein, 113 aa, Zea mays
  Clone ID: MRT4577_155657C.1.pep
GTQKARPAEVGKNLPEEPGKIPRINLAWFFKRLSAKAVSPVPTFPPHQARKAPTQTPMFVWKEGGPPKEPDVDQEGDGLGHRSSEGDSRRKGWAGSGIQMNPCPARGWDRWGA

SEQ ID NO: 245696 - protein, 42 aa, Zea mays
  Clone ID: MRT4577_155658C.1.pep
MARAKEDEQIMGIDLESCNLAKRSFYDAMQHDILEIWVATTK

SEQ ID NO: 245697 - protein, 249 aa, Zea mays
  unsure (1)..(249): unsure at all Xaa locations
  Clone ID: MRT4577_155659C.1.pep
MSMPQSFLLLPSFLPPPPLVRLASRPPSSPSLTALRFHRVDAKLSPPLLAASHSPPGGFRGYCDSGGSDGGSGGDGGRGMDSPGPGDGWWWERWLQALHPEFLLLFLLLQSGAASALAEALSTSGDDAGDVWEVRGGKRTRLMPDPTWTSYLIAGDDGTKREDGDEKVGSISKDLAALQRQLGRSWRRYAEVAVHLLLPDGYPHSVSSDYLNYSLWARVQGVASQISGVLFTQALLYAXGLGKGAIPTA

SEQ ID NO: 245698 - protein, 48 aa, Zea mays
  Clone ID: MRT4577_15565C.1.pep
KASSIQKKDMGPIDSCVAALAPMDIYQPHIDPPSSRCFLSSHNTRLHL

SEQ ID NO: 245699 - protein, 61 aa, Zea mays
  Clone ID: MRT4577_155660C.1.pep
QTCFIFTTYTAVLKHFIVVIQSLILLFDHCIIYKNYEYAYSCIIITCCLLCQPLQRLLLIC

SEQ ID NO: 245700 - protein, 69 aa, Zea mays
  Clone ID: MRT4577_155661C.1.pep
PGMEVPKITGPPRMGPTFGPIMISGQKGGPLALKALGRPNPVGGPTPKVSPALPKEFVIGSKDHKVVDP

SEQ ID NO: 245701 - protein, 87 aa, Zea mays
  unsure (1)..(87): unsure at all Xaa locations
  Clone ID: MRT4577_155662C.1.pep
AAPPPSTPAFCPRPPASRXCGYSYRVKPAVYRPPTQMPKTKHLYPIPPAAEGRPLKPPPRRFPVVPRPAEAHGGCLNQRRLGARVVC

SEQ ID NO: 245702 - protein, 80 aa, Zea mays
  unsure (1)..(80): unsure at all Xaa locations
  Clone ID: MRT4577_155663C.1.pep
MEFQDYQTVVTVTVQGKYHRHKKVDTERMHNNHLPEDXTIDTSAYLLYEKHEDKRDLEHTHRHMHTVVASVSEHDDDSRY

SEQ ID NO: 245703 - protein, 65 aa, Zea mays
  Clone ID: MRT4577_155664C.1.pep
TEGARFRSRDEEVVARIIGVDLTAVNGIRFGRRRGGRAGVVGAGTWTAVRHWGIGSELRGGGEER

SEQ ID NO: 245704 - protein, 209 aa, Zea mays
  Clone ID: MRT4577_155665C.1.pep
DISLSLTQFLLSEFVPGAGFVLGLVDMIWGIFGPSQWDAFLVQIEQLINQRIEEFARNQAISRLEGLSNLYQIYAESFREWEADPTNPALREEMRIQFNDMNSALTTAIPLFAVQNYQVPLLSVYVQAANLHLSVLRDVSVFGQRWGFDAATINSRYNDLTRLIGNYTDHAVRWYNTGLERVWGPKSRDWIRYNQFRRELTLAVFVLEV

SEQ ID NO: 245705 - protein, 220 aa, Zea mays
  Clone ID: MRT4577_155666C.1.pep
MYNGIGLQTARGSGTNGYVQTNKFFIKPRSTSGGGPGGPHRPPLPDATGADGGGLGGMRKPNKEILEHDRKRQVELNLLVLRDALEEQGYTEDEIEERVEEARKAAEAEAAAVAAAEEAGSVSGAGRPPLPGRGFTDTQSHHVAARKEKQLETLRAALGLNVEDAKKGDVESDVESGELVPGKYYEELVTVGENNSKDSKNAKKSKKKKKKKSYGRSRSR

SEQ ID NO: 245706 - protein, 89 aa, Zea mays
  Clone ID: MRT4577_155667C.1.pep
RRAWTRDGVLRPDLMTPIMVRAAAADAKSEMTTDLYTRRALTTNACRRTKLVTKRNNYRLPGPTAWGSHFTRSKRMDLRVTGTQKSGPC

SEQ ID NO: 245707 - protein, 76 aa, Zea mays
  Clone ID: MRT4577_155668C.1.pep
PKNVKCGQKNKLQCIYIYSKLKCFSQTKSASSLAFMTLERSDPPEVGAAVGAAAAAGGPPIGELRRGIGGEHVPVR

SEQ ID NO: 245708 - protein, 54 aa, Zea mays
  Clone ID: MRT4577_155669C.1.pep
SFSARSPCWSLPLASFQDHTKADTSLWNVQIPGICIDSLFSEGLYAREVGRKRH

SEQ ID NO: 245709 - protein, 109 aa, Zea mays
  unsure (1)..(109): unsure at all Xaa locations
  Clone ID: MRT4577_15566C.1.pep
FDGKQLXDGRTLADFNIQKESTLHLVLRLRGGMQIFVKTLTGKTITLQVESSDTIDNVKAKIQDKEGIPPDHQSLILAGKQMEDGSTLSDYNIQKESTLRLVLRLRGGQ

SEQ ID NO: 245710 - protein, 97 aa, Zea mays
  Clone ID: MRT4577_155670C.1.pep
TLELQEKRGDVKVPSHLFQSGAVLVESSSNERANLWPAFSIRFLAITSKVNHGRMELESTTSSRPPQCNAATREAPPSGRERRIADDRISVFSRPGR

SEQ ID NO: 245711 - protein, 47 aa, Zea mays
  Clone ID: MRT4577_155671C.1.pep
MIYFTCRITIWDCPVLKKNCQEPDGESWPKISHVRWKSFLQIPHWLP

SEQ ID NO: 245712 - protein, 200 aa, Zea mays
  unsure (1)..(200): unsure at all Xaa locations
  Clone ID: MRT4577_155672C.1.pep
YHAMNKLVERAYRKLKGGRIGSSHKAGVSKSANKAAKQLALAFAKRTLVRCHKFDETGLXGLKSGRHSSGGSGRSGERKNKTKPKQKLAQLSTSGNVLGRVVEPFSSPTVQEPPEPASEKKTQHPTRGASSSAAQRLTVDAGLPVLPGLDDILDVPEGLDGQGNDISSWFTDGLDDSLQDIDLSGALEIPDDDLTQLGFM

SEQ ID NO: 245713 - protein, 87 aa, Zea mays
  Clone ID: MRT4577_155673C.1.pep
EPFRHLHYIMCAPIWSAHTTDIASLCTERTSRACQGHTNCQCHHDTIHCLPRSSTLRRLGLATDRVSRRGHWVLLDQKHIGLLHLFL

SEQ ID NO: 245714 - protein, 40 aa, Zea mays
  Clone ID: MRT4577_155674C.1.pep
FLSYRIVLHRITRSHAFNIVSFYKVAYEFIITAFSFEQQL

SEQ ID NO: 245715 - protein, 88 aa, Zea mays
  unsure (1)..(88): unsure at all Xaa locations
  Clone ID: MRT4577_155675C.1.pep
CATAYDGCISGDSWPXEGLSLAVERYSKTLERVDPGATVSDTYGLENTAHGRLQEAAAIVTYRVXPTKTGLQDGYXSPIFPLDILAER

SEQ ID NO: 245716 - protein, 101 aa, Zea mays
  Clone ID: MRT4577_155676C.1.pep
KRIQILGKGSHPSHELQPHPQIINIPRHARGRNIKGGPPPVQGSSSFFSSTPPSRASTRVGGTLNLRRATSGGGGRTTTARWGVRRLRRHSSLAGRRLKDT

SEQ ID NO: 245717 - protein, 116 aa, Zea mays
  unsure (1)..(116): unsure at all Xaa locations
  Clone ID: MRT4577_155677C.1.pep
EKGKFTFNVGICDKIFDELLKSSNIKINHHIPSAGELKRRAYCKWHNSFSHATDDCNIFQXXVQSTINGGQLKFQKSASEHRTLPINMISFDDEKVLIWPSVTDKGKGKEIIIGDP

SEQ ID NO: 245718 - protein, 79 aa, Zea mays
  Clone ID: MRT4577_155678C.1.pep
RLLWGTLARPQVPVRYSGRDPRVRPRVRAIVRFHVSPRDHFSRTRADGKKVIDRGSHFLMADTEDLEISFEARCRTRNS

SEQ ID NO: 245719 - protein, 125 aa, Zea mays
  unsure (1)..(125): unsure at all Xaa locations
  Clone ID: MRT4577_155679C.1.pep
PRCRVXXVXVRXGLXGXRVXAAXXGXPGPXRRXLRXXRXXGRRAXLPPXLAXXXXGXPAPRWRPPRRAPXXXPAPRRRXAXRGXPGXSRGGXRAXRGPGRXRXRRRGCRAXDXRAPGRRTLGXPG

SEQ ID NO: 245720 - protein, 56 aa, Zea mays
  Clone ID: MRT4577_15567C.1.pep
KHKYLQNQTSYTSEFNFDMCKTWKTKAYFITPGSWQKGKLKFCLYKYITGNSNHNA

SEQ ID NO: 245721 - protein, 176 aa, Zea mays
  unsure (1)..(176): unsure at all Xaa locations
  Clone ID: MRT4577_155680C.1.pep
HAPITLALHALSLRALLALLGSATNAIMIPQCSLAPSAMITHILPPGTTMGYEHPAXQAYKLQHALAASALXNILAPXLQQHSSAHXLTIHTIAXQQQHALSHLYEVNPIDYWQQQLLAYNPLALANVAAYLQQQQLQQLLHTAXNYAMVNPMDYLQHQQLVSXSPSXLGNAPTYL

SEQ ID NO: 245722 - protein, 184 aa, Zea mays
  Clone ID: MRT4577_155681C.1.pep
RRRSGTPGYCVSKVFLEKEACRFAAEHGISLVTVCPVITVGAAPAPKVRTSIIDSLSMLSGDERGLAVLKGIEKTSGAVQLVHVDDLCRAELFLAEAAAADGRYICCGLNTTVLELARFLAHKYPQYGVKTNLDGDEQQLLEKPRVKVSSEKLVREGFEYRHNTLDEIYDNVVEYGKALGILPY

SEQ ID NO: 245723 - protein, 92 aa, Zea mays
  unsure (1)..(92): unsure at all Xaa locations
  Clone ID: MRT4577_155682C.1.pep
MNMVIDLVVCLALSASSASAMQMPCPCPGLQGLXGAGAGLTTMMGAGGLXPLRDYLRQPMXSPLAAAPTPGVGQSTACSAVRHKAAAEMRMM

SEQ ID NO: 245724 - protein, 129 aa, Zea mays
  Clone ID: MRT4577_155683C.1.pep
LPLARPEFLCSAMAAVELPARAYLPPMARPPRSDLAPVRRRFSLRRAPSSFPQRRRAQPWSPCACVFSARRRFSLLRASISSAVKLLPRAHMATYRRCSSLHHRNFWCRLPWNPARQHKHLACVFPVTP

SEQ ID NO: 245725 - protein, 314 aa, Zea mays
  unsure (1)..(314): unsure at all Xaa locations
  Clone ID: MRT4577_155684C.1.pep
MCLYFTVAVGDDMDKNSHLKGLQQLGPLTVLRADMDEEGSFDDAVAGCDYAFLVAAPVNLSAQDPEKEQIEPSVRGTLNAMRSCAKAGTVRRVILTSSVAGVYIRPDLLQLRGDGHVLDEESWSDVEYLRANRPPTWGYCVSKVLLEKEACRFAGEHGISLVTVCPVITVGRGAGAQGPXSIIDSLSMLSGDERGLAVLKGIEKTSGAVQLVHVDDLCRAELFLAEAAAADGRYICCGLNTTVLELARFLAHKYPQYGVKTNLDGDEQQLLEKPRVRVSSEKLVREGFEYRHNTLDEIYDNVVEYGKALGILPY

SEQ ID NO: 245726 - protein, 70 aa, Zea mays
  unsure (1)..(70): unsure at all Xaa locations
  Clone ID: MRT4577_155685C.1.pep
PTRPPEAMDEDQVDEITXICAPHFGLWTKHPRRTVTDADIRKYHALAQTLQHSQRFGREFRFSDQPATAG

SEQ ID NO: 245727 - protein, 52 aa, Zea mays
  Clone ID: MRT4577_155686C.1.pep
YNPVKEPSRGQSYQTPYIVHYRMLSVRSSSIIKLLANYSFVLMDLHYPNIYI

SEQ ID NO: 245728 - protein, 58 aa, Zea mays
  Clone ID: MRT4577_155687C.1.pep
YCTVLLVPTHTSNQLITHALPRHLLDEGQKFVVHKNETFYYKHRFLLQLVSLFSQLVD

SEQ ID NO: 245729 - protein, 342 aa, Zea mays
  Clone ID: MRT4577_155688C.1.pep
MAAPKKTMRALRYDKYGGGAEGLKHVEVPVPSPSKGEVLLKLEAASINPIDWKIQKGMVRPFLPRKFPFIPVGDMSGEVVELGSGVTDFKPGDKVISITFPNGGGLAEYAVAPASLTVARPPEVSAAEGASLPTAASTALQQLKAAGVSSFDGGSGSGADSDGPKNVLVTAASGGVGHYAVQLAKLAGLRVTATCGARNLGLVAGLGADEVLDYKTPEGARLLSPSGTRYDAVAHCATGTPWSVFAPVLADRATVVDVTPGVAAAAKSFLQKVTFSRKRLVPLVLIPKKEEMEWLVEMTRQGKLRTVVDSRYSLSRAQEAWAKSIDGHATGKIVVEMGGAAE

SEQ ID NO: 245730 - protein, 61 aa, Zea mays
  Clone ID: MRT4577_155689C.1.pep
EHHLHALFVISTPSVPSIGRFDFSRQITFGMHLDMHYVWIHRKTIYLEKPKHFIICNRGII

SEQ ID NO: 245731 - protein, 137 aa, Zea mays
  unsure (1)..(137): unsure at all Xaa locations
  Clone ID: MRT4577_15568C.1.pep
QIFVKTLTGKTITLEVESLDRIDNVKAKIQDKEGIPPDQHRLIFDGKQLEDGRTLPDYYIQKESTLHLVLLLTGVMQIFVKTLTGKTINLQVESSDTIDNVKAXIQDMQGIXSDQQRLIFAGKHLEDSRTLFDYNIH

SEQ ID NO: 245732 - protein, 60 aa, Zea mays
  Clone ID: MRT4577_155690C.1.pep
VYPTDKSIQKGEPFEAHYSPFYQQRLPRYYLLHAHVALTASATKAFIKPQCRLASRLIVT

SEQ ID NO: 245733 - protein, 67 aa, Zea mays
  unsure (1)..(67): unsure at all Xaa locations
  Clone ID: MRT4577_155691C.1.pep
QNCCLYYRVTCLYTSGYRVSXRGVSLGGKVSGEGVDHMLYIFCNMKNPMRYSVAAQLVPSSTKPTFL

SEQ ID NO: 245734 - protein, 79 aa, Zea mays
  Clone ID: MRT4577_155692C.1.pep
ACPITPHAPPQPRQGPPKQSNPGGKGDRPSHSSNHVLQRSFQSSGRQVLRCRLWCWVGGNLLGSSSRKLLHQVIDSPKT

SEQ ID NO: 245735 - protein, 86 aa, Zea mays
  unsure (1)..(86): unsure at all Xaa locations
  Clone ID: MRT4577_155693C.1.pep
TAWTIKLIHPHTYTKSPAQTFRGRGGAXPIXLPXXGXXPRAPAPPPRSXGPXPAPPPPPPPLSALPPPRPPPPPPPXPXPXPPPPP

SEQ ID NO: 245736 - protein, 95 aa, Zea mays
  Clone ID: MRT4577_155694C.1.pep
MTSKVLSTQIAKNVLSYVDDIIVKIMKQDNHIADLQETFANIRKAGLKLNPEKCVFEVKKENFLGCLVSTKGIEANPSKIEAILRMEPLKTRKGA

SEQ ID NO: 245737 - protein, 243 aa, Zea mays
  unsure (1)..(243): unsure at all Xaa locations
  Clone ID: MRT4577_155695C.1.pep
MASSTSTLEIEARDVVKIMLQFCKENSLHQTFQTLQNECQVAQLKLPRKKLEDLYEQIVLEMAELRELDTARAILRQTQVMGVMKQEEPERYLRLEHLLVRTYFDPNEAYQESTKEKRRAQIAQAIASEVSVVPPARLMALITQALKWQQHQGLLPPGTQFDLFRGTAAMKQDEEEAYPTTLSHQIKFGKKTHPECARFSPDGQYLVSCSVDGIIEVWDYVSGKLKKDPQYXADESFMMHXDA

SEQ ID NO: 245738 - protein, 116 aa, Zea mays
  Clone ID: MRT4577_155696C.1.pep
KKGYSDGNHQGPGQGRGPRSGKGLGPRGPPNPLGFCEGYCLSSSPWKTAFVFPPLAQAATRPGGGASGLASLTVKNLFRGFYRNLPTPAPPASNPDRPRSPAPAPKVATRRTAKKV

SEQ ID NO: 245739 - protein, 1106 aa, Zea mays
  unsure (1)..(1106): unsure at all Xaa locations
  Clone ID: MRT4577_155697C.1.pep
MPPWDRFAKLCRLRFGPPERGSRIAELGRLPFLPTVQEYSDRFLTLLCRARDISPLQKTELYMGGLPKHLRVDVEMRAPQDLQTAMYLARAFERRAAAMPPPQPRGARPPQRSQAPNRALPAAPAVSPAGAAVAGEGNPPMRQFRRLTPIEEQERRRQELFNCDEPYVRGHMCQQLFYLEVGDFIDDAVREGAVEQSADFLEAPVAAXTLLVVSLHALTGIRTDKTLLLSVIIKGERLLALLDTGSTHNFLNGDTMRRLELPMEGVDFLETLGTIQWNFRELTLSFLHQGRRICWQGVRTSRTPGPQQLVVAVSXTPXQPLMDVLLRQHGAIFDEPTGLPPARPYDHHIHLLPGTAPVVVRPYRXAYLGHVISKGGVAMDADKVATVASWPLPRFARGLRGFLGLAGYRKFIKDFDLIAAPLTRLLRRDAFAWDNDATAAFDALKHALSTGPVLQMSDFSKLFIVDCDASGVGFGAVLHQGVGPLAYFSKPFAARHLKLAAYERELIGLVQVVHHWRPYLWGRHFAVRTDHYILKFLLDQHLSTVPQHQRISKLFGFDFSVEYRPGHLNTVPDALSRRDAEKSMSAPLEGAGVASRAISRPTFALLDDIKRATAVAPDGQHLLQQLRNDQLAASWRLSDGLLLHGTRVFVPDHGDLRHEVLLLAHSTEHEGVQKTLHRLRSDFYIPCDRALVWADISMDFIEGLPKVAGKSVILTVVDHFSKYAHFIALGHPYTASSVARAFFDSIVRLHGLPLSIVSDRDPVFTDHVWRDLFKMAGVTLKMSTAFHPQTDGQSEVVNKIIVMYLWCVTGDRPRAWVDWLSWAEYCYNTSYHTALRATPFEVVYGRPPPPMLAYTPGTPRTEAADAMLRSRDQILAEACQRLLQAQQLAKKYYDAGQREVEFQVGDWVWLRLGLEKKLELDELARARSSSARLGPARRSERARAEPVFVAREKSEPARLGSSLHVGAKGKLGPRYAGPFSVQEKIRSVAYRLQLPEGARIHDVFHVSLLKPHRGDPPAAPSTLEPVMDGRLLPVPAKVLRAQLRRGTWQVLVHWRGLAEDDTTWEDLDEFRATYPDLQLXDELFAKAGRDVMYGKANVRRRQPIRG

SEQ ID NO: 245740 - protein, 75 aa, Zea mays
  unsure (1)..(75): unsure at all Xaa locations
  Clone ID: MRT4577_155698C.1.pep
MVDLVKKKGQVEFRAYKRGPPFGQLFGFGKIKAFPPLGDKDXPFFFQGSGVGSKIISGGVFLEKLGLFFYLGAPL

SEQ ID NO: 245741 - protein, 97 aa, Zea mays
  unsure (1)..(97): unsure at all Xaa locations
  Clone ID: MRT4577_155699C.1.pep
QTQDTEVVESRPAGDGTFQKWAAVXVVHSGQGLRYTCHVQHEGLPKPLTLRWEPSSQSTIPIVGIIAGLVLFGAVITGAVVAAVMWRRKSSDRKGGS

SEQ ID NO: 245742 - protein, 94 aa, Zea mays
  Clone ID: MRT4577_15569C.1.pep
SSNSAQTLSTQWYPTQRALTPQGGNKKAQGDINTSPKAPYYQLARDQMLLQPQKQARRQTQTPPKAGHGALHHDENRCIHRRLRQKTGAQSTQP

SEQ ID NO: 245743 - protein, 73 aa, Zea mays
  Clone ID: MRT4577_1556C.1.pep
DLPLTFTSAEASRLAAGLRYCSGLLQFCSAMCEVCLIVMVTPRCTGQVSRFQSHVCTNTLVTWFLVLLAVQMV

SEQ ID NO: 245744 - protein, 109 aa, Zea mays
  Clone ID: MRT4577_155700C.1.pep
GKMDYSRLIKGYDKMTPAERVKAKMKFQLSETAAKDSTLATATVGWERFQFNKDAPLDEDNGYVGVANDHASMVKNIGKSFRLSTVEVLSMQKGSWRDRAQKLRKYLNT

SEQ ID NO: 245745 - protein, 36 aa, Zea mays
  Clone ID: MRT4577_155701C.1.pep
KRCLVLVKCFKIQLSRNLDVNPYNLCIPFLRSWYAL

SEQ ID NO: 245746 - protein, 345 aa, Zea mays
  Clone ID: MRT4577_155702C.1.pep
MEEEKAAAYYDELNRKGEGARRFKQGLGFSSSSATAFPSKPTASSFLSGFVRAGAAPGPAKQPLPHSRTPSSPHHRSSSPPLSRPRIRSRSRSRSPSRSSRRQSRSRSRSRERRRRSRSRERDRRASCRRSRSRGSRSPSRRSGRSLHLEARRERHGDQRRRHDDGHQSSKGRSDRDGGKMDYSRLIKGYDKMTPAERVKAKMKFQLSETAAKDSTLGTATVGWERFQFNKDAPLDEDNDDVEVANDDASLVKNIGKSFRLSAVESKREDKIRDAHDEAIFGVPTTSFVDVEIGGDELKTNHEDGKVEDTESDEPSSSLISDKVLAMQKGSWRDRAQKLRKNLNT

SEQ ID NO: 245747 - protein, 61 aa, Zea mays
  Clone ID: MRT4577_155703C.1.pep
FKNNGGVTTPFRTQNHKNNFDTHAHCLSRIVIQHNCPITEFNYQTNNSIVSPSPLLNFTTP

SEQ ID NO: 245748 - protein, 476 aa, Zea mays
  unsure (1)..(476): unsure at all Xaa locations
  Clone ID: MRT4577_155704C.1.pep
MDPSVSVCRLHPGVAVTGFCPACLRDRLSGLHPPSAADLRRCKSFSYARSAAAVEPQRRSCDLFRHGQPIAAAVPEEEEDQQEHGRSHSHQSKKSSSLGGLLGKKLQQWRRKNKKEPEMEVPSSWDARLGPVPALGRLPATMLSLPVEEDDDSMAAPAVPRSDGQIPVEEDYCYYYDNANNINAAAAVPGGSEQTRDYYLDSSSSSRRRRSVDRSTTSGRNSFSDANSSEAACRMMMMMNAAANGNARVSPAGIAAAESLHHYHESHHXPSPERACPSSVLXKKMSSSRRPIISAPATXGSNGVPASKPNKKGIKGWSIWGLISKKSSSSRKHSAAGGGAVAGGGGEYEYPWPELRARGYNGQMLRCNSSISARSSFSGTGTGSGRRSVSGVDMRDKYNSNNGGLRTRRDEVLLERHLSTRSSSYSRSGHHDLDPAAMAPPQMGMQLSSRPPNIPRRSSSNSKHELGKTRRSTLGL

SEQ ID NO: 245749 - protein, 119 aa, Zea mays
  Clone ID: MRT4577_155705C.1.pep
LWLLFHGNTTTVFDLRKRCPPPWNAFWAGGGIFYKRRKRNAKYARAHRGGSIQPKINNEEPSPGRNLDIHMCGFYFFLDVFPPVPRFCFGVFYLTLRGIGLAPQSLRDLGLGIYRLALV

SEQ ID NO: 245750 - protein, 159 aa, Zea mays
  unsure (1)..(159): unsure at all Xaa locations
  Clone ID: MRT4577_155706C.1.pep
VFGVAASRSLVYTPLLTGSSGNYVINVKSIRVNGEKLSVEGPLAVELSTVVPYTILESSIYKVFAEAYAKAAGEATSVPPVAPFGLCFTSDVDFPAVDLALQSEMVRWRIHGKNLMVDVGXGVRCSGIVDGGSSRVNPIVMGGLQLEGFILDFDLGNSM

SEQ ID NO: 245751 - protein, 125 aa, Zea mays
  unsure (1)..(125): unsure at all Xaa locations
  Clone ID: MRT4577_155707C.1.pep
GRRSIKLLADRLTLSVRAAGVAPRMSTLLDPSHVAECFYCETPRRGLLRRPRLAPKICPLVLSPNRIGEDIGQETARSGMPPLSGRSSAQNRHDQVSDLILRRDAHHLGAHGTLERQDXTSYEHE

SEQ ID NO: 245752 - protein, 89 aa, Zea mays
  Clone ID: MRT4577_155708C.1.pep
GSAKKKKKKKKKKKKKKKKKKKKKKIKKKKKKKKKEIYELKVIARRPVVPTCWSQGVGPTQRCGNVNRPKVTTCHPELAGTRKVVYNFP

SEQ ID NO: 245753 - protein, 105 aa, Zea mays
  unsure (1)..(105): unsure at all Xaa locations
  Clone ID: MRT4577_155709C.1.pep
VALXRGTKXAVPAEYVRSTLDLLVLRGRPCVALANLFLVSDNRRAEFHRLDLGWGVPAYGGPAVALFGLSFFVQAGNGDDVAVLMALPRPAMDHFASEVETLLKA

SEQ ID NO: 245754 - protein, 95 aa, Zea mays
  Clone ID: MRT4577_15570C.1.pep
LSEHRLHGSHHDSDAHHATATGGKEDDALDSVDAVYAEQHSATVLITAWLHAKGEPSAASVSCASVCYRKPTITTLGTSTALAKAQTTASSPQPA

SEQ ID NO: 245755 - protein, 72 aa, Zea mays
  Clone ID: MRT4577_155710C.1.pep
MAASAAAATRLSGGRLTLSALALLADCTYTSWEQLSTGFYSHYSHGVHDTNRSQLQAAIAREQRMGASILRL

SEQ ID NO: 245756 - protein, 51 aa, Zea mays
  Clone ID: MRT4577_155711C.1.pep
PSWSWVIKQNLHLPCRGIYTKTAINDGSIRSRFPASYLFERASKSKFLCKR

SEQ ID NO: 245757 - protein, 160 aa, Zea mays
  Clone ID: MRT4577_155712C.1.pep
MARSCSMTATAPPPLVGAGVRLLAVVVAILVVAGGGGRCHGALLKAHFYRHSCPAAEAVVRDIVLARVAADPAKLPAKLLRLFFHDCFVRGCDASVLIDSTPGNTAEKDAAPNGSLGGFDVIDTVKAVLEAVCPGTVSCADIVALAARDAVSFQFGRACS

SEQ ID NO: 245758 - protein, 82 aa, Zea mays
  Clone ID: MRT4577_155713C.1.pep
TFSFYFDGHSFIVRSFNFILLSFFPSFPFYFRSSSLLSTISLAASTPSSPSADIRSPGSSASMSRPMLTSARLTYLSTNTCD

SEQ ID NO: 245759 - protein, 167 aa, Zea mays
  unsure (1)..(167): unsure at all Xaa locations
  Clone ID: MRT4577_155714C.1.pep
MARSCSMTATAPPPLVGAGVRLLAVVVAILVVAGGGGRCHGALLKAHFYRHSCPAAEAVVRDIVLARVAADPAKLPAKLLRLFFHDCFVRVRTYGTCMRVHDGIITDVPWYGTRTYXGCDASVLIDSTPGNTAEKDAAPNGSLGGFDVIDTVKAVLEAVCPGPVSCA

SEQ ID NO: 245760 - protein, 84 aa, Zea mays
  Clone ID: MRT4577_155715C.1.pep
LWSQICRHAIGSDGSRKSTTNSTAFVLEYGVRFEAARPVGMGTSTTCPMNTASLFVLGPPTSIPNRSLSRSLSISFPPEQAEAP

SEQ ID NO: 245761 - protein, 60 aa, Zea mays
  Clone ID: MRT4577_155716C.1.pep
SSSGSCSKTSSTLDPCSEDRYGFGLIYIQKLYFQREETVPHLFLRCSYSRRCWHLIRVTP

SEQ ID NO: 245762 - protein, 53 aa, Zea mays
  Clone ID: MRT4577_155717C.1.pep
SSTCLISPYDDKVRFVFGFHVFSFGLQQPSGLDLGFLKSFSCHEHHMVKVSTI

SEQ ID NO: 245763 - protein, 69 aa, Zea mays
  unsure (1)..(69): unsure at all Xaa locations
  Clone ID: MRT4577_155718C.1.pep
XLFFFFFFLFRGGVFFVLGQSKGELLNRVILLFKDTLGKFLTNYMYHFMRLEMLLTPHFLQHEQLIATA

SEQ ID NO: 245764 - protein, 58 aa, Zea mays
  Clone ID: MRT4577_155719C.1.pep
LPVLHRPQSPPNRLNKKIEVLTLIIVTIFMKMNVITIINVRTNIKLHEVIVVLVLLEN

SEQ ID NO: 245765 - protein, 171 aa, Zea mays
  unsure (1)..(171): unsure at all Xaa locations
  Clone ID: MRT4577_15571C.1.pep
MTGKTSIIEAXSCDTIDNAKAXKIQDKEGIPPDQQRIIFAGKQVEDGRTLADYNMQKESTLHLEIRLRGGMQIFDKTLTGKTITLEVEASDTIDKRKAKIQDKEGIPPDQQRLIFAGKQLEDGRTLADYNIQKESTLHLVLRLRGGMQIFGKTLAGKTITLEVESCDTIEH

SEQ ID NO: 245766 - protein, 106 aa, Zea mays
  unsure (1)..(106): unsure at all Xaa locations
  Clone ID: MRT4577_155720C.1.pep
MLRRPRLSAEVLQIPALMRQWPSPTLILVTTLVLVTGTSHEDELLLCMDDSNLEDNLNEIRKTNSHLXIIGKLTAYTKEEDDAEGEDDYADNVEEXDGDVFYQQTV

SEQ ID NO: 245767 - protein, 49 aa, Zea mays
  unsure (1)..(49): unsure at all Xaa locations
  Clone ID: MRT4577_155721C.1.pep
QPPSTKAHAKRIXYSKPTPXLAGXGHPLVNGFCPTAXRGPRAADAWXRT

SEQ ID NO: 245768 - protein, 139 aa, Zea mays
  unsure (1)..(139): unsure at all Xaa locations
  Clone ID: MRT4577_155722C.1.pep
GGGEKKGKKKAQKRVGXLQVFFFKVXKQGPPPMGIFSRAVSLLNSFFKGIFXKGAGGAPKVGGVNKKPPLPSRGIQTPGGLVLPGGVAKPPVFGGTKAVPQFPRHWGGWGVPGFFKRVFFWVLFPVPPPTRLVARLPVF

SEQ ID NO: 245769 - protein, 118 aa, Zea mays
  Clone ID: MRT4577_155723C.1.pep
TRACYTTQRKSTPFLRGGGDKLATPIGGLEILKHGCARLMRRLIGPEHGLAVGKDPIFLYIQAPQELSEVLLIANLQEHWARLDALLILAFRGISCQPQKLGVGGFSNGIQVNRGKGS

SEQ ID NO: 245770 - protein, 80 aa, Zea mays
  unsure (1)..(80): unsure at all Xaa locations
  Clone ID: MRT4577_155724C.1.pep
TKKNLFPKVNPPRLAQTKCSPGAPVYPRQNPIVICLLKKKKKKKKKKKKKKKKKKKKXKGRPPTSELVDPGINSGPVPAG

SEQ ID NO: 245771 - protein, 74 aa, Zea mays
  Clone ID: MRT4577_155725C.1.pep
GQANIHRNFSRGQNSINRSSMKSTVVILLRDQTGVVNRVSEWTAPFGPRSVIKCERGFANVDKGRRIIFILLLQ

SEQ ID NO: 245772 - protein, 114 aa, Zea mays
  unsure (1)..(114): unsure at all Xaa locations
  Clone ID: MRT4577_155726C.1.pep
FSARDNGIGTAKVGPVGDDVLRVAPFSTAGCLCYIGATAGTGXKDVHAGDEVXLKRGTSISKHFTEYGTASNRDDTEKTRYYIPHNESCAVFEEYFASSIEVFSNFKVNREKTI

SEQ ID NO: 245773 - protein, 110 aa, Zea mays
  Clone ID: MRT4577_155727C.1.pep
SRNKHFSPRYEQGRLPEQERTSRGIICLSTGNNVEYFLKEVQLHIFLYVHLVLDNLNLYHVHQDVNLQLLQLHNNNHLLYLHLHLLLSRELQLRLVGHGLTMTERPPADG

SEQ ID NO: 245774 - protein, 129 aa, Zea mays
  Clone ID: MRT4577_155728C.1.pep
KRLNRVFLGKRRPLPLAVEGCTHGWGLWWAQQGASSVEWLFAPLGGGGLRRGTVGPIAQAKDRLRRGRLFEGPPSPAFCTGGHRFPRVFGSWERETYTGPYQAPGTVFFGIRASFVIGDEDGLHFPHKK

SEQ ID NO: 245775 - protein, 107 aa, Zea mays
  Clone ID: MRT4577_155729C.1.pep
GIWPQAGRKRGAQGPPPMGPPPGWDPPPKKYGPGSRVFRVWANPPGLIRKNGVLFFRQGFPNNPKGLGFPQDPLKGPFASVGNFPPQKKGALLKRPNLWALAFCSEP

SEQ ID NO: 245776 - protein, 143 aa, Zea mays
  Clone ID: MRT4577_15572C.1.pep
LGFGPWGGPRPFGNRGHKVFFAAFANPFGRGLSPFGANFPPLGSGVLGPFNKRIVFWNGTSPGFGGAARNLVLGWLAGPGPPLSARFKVGNSQLNQMPRRAFWGISFEFLVLKFSLNCVVSLCGTIRSLDPYPRCLVHTPRFF

SEQ ID NO: 245777 - protein, 99 aa, Zea mays
  Clone ID: MRT4577_155730C.1.pep
EIRKWNVGRVLVGYFISLLFLSKQMEEEMICADRKIHISRSHLEHTDRFIRIECWVFMLFCDRMERILDRRGWELCLHHVLVEGSVIGRSQIVPIFYFK

SEQ ID NO: 245778 - protein, 76 aa, Zea mays
  Clone ID: MRT4577_155731C.1.pep
VSRASSSDIARVGSVIVHERLSAALAPRSGHCHESFSKRWHLVRGWTGSLTVLVQPPVSSVAVACFWGRVPGPNIL

SEQ ID NO: 245779 - protein, 728 aa, Zea mays
  unsure (1)..(728): unsure at all Xaa locations
  Clone ID: MRT4577_155732C.1.pep
MAAGSIRVTMEVGADGVALITIANPPVNALHPIIIAGLKDKYAEAMRRDDVKAIVLTGAGGKFCGGFDINVFTKVHQTGDVSLMPDVSVELVSNMMEEGKKPSVAAIQGLALGGGLELTMGCHARISTPEAQLGLPELTLGIIPGFGGTQRLPRXLVGLPKAIEMMLQSKFIAAKEGKERGLIDALCSPDELIKTSRLWALEIANCRKPWMRSLGRTDRLGSLSEARAVLNAARQQAMKVAPNMPQHQACLDVMEEGILYGGQAGVLKEARVFKELVVAPTSKALVHVFFAQRSTTKVPGVTDVQLKPRPIRKVAVIGGGLMGSGIATSLLVSNISVVLKEVNPQFLQRGEKMIAGNLEGLIKKGSLTKDRMHKAMSLFKGALDYSDFKDVDMVIEAVIEKIPLKQSIFSDIEKICPKHCILATNTSTIDLNVVGEKTNSQDRIIGAHFFSPAHIMPLLEIVRTEKTSPQAILDLITVGKIIKKVPVVVGNCTGFAVNRTFFPYTQASHLLVSLGIDVFRIDRVISSFGMPMGPFQLQDVAGYGVALAVKDIYADAFGERNLGSNLVGLMVKDGRQGKVNAKGYYIYEKGAKPKPDPSVKHVIEEYRKQANTMPGGKPVTLMDQDILEMIFFPVVNEACRVMDENVVIRASDLDIASVLGMGFPKYRGGLVFWADTVGAPYIHSKLSKWAEMYGPFFKPSSYLEQRAKSGVPLSAPGTSQQGSARSRM

SEQ ID NO: 245780 - protein, 48 aa, Zea mays
  Clone ID: MRT4577_155733C.1.pep
VSTNPQARYMVLEVVRCFSSWFSIHRLWVTYDTTVNYYGGNTCSRVMV

SEQ ID NO: 245781 - protein, 727 aa, Zea mays
  Clone ID: MRT4577_155734C.1.pep
MAAGSIRVTMEVGADGVALITIANPPVNALHPIIIAGLKDKYAEALRRDDVKAIVLTGAGGKFCGGFDINVFTKVHQTGDVSLMPDVSVELVSNMMEEGKKPSVAAIQGLALGGGLELTMGCHARISTPEAQLGLPELTLGIIPGFGGTQRLPRLVGLPKAIEMMLQSKFITAKEGNERGLIDALCSPDELIKTSRLWALEIANCRKPWMRSLGRTDRLGPLSEARAVLNAARQQAMKIAPNMPQNQACLDVMEEGILCGGQAGVLKEAMVFKELVIAPTSKALVHVFFAQRSTTKVPGVTDVQLKPRPIRKVAVIGGGLMGSGIATSLLVSNISVVLKEVNPQFLQRGEKTIAGNLEGLVKRGSLTKDRMHKAMALLKGALDYSDFKDVDMVIEAVIEKIPLKQSIFADIEKICPKHCILATNTSTIDLNVVGKKTNSQDRIIGAHFFSPAHIMPLLEIVRTEKTSPQAILDLITIGKIIKKVPIVVGNCTGFAVNRTFFPYTQGSHLLVSLGIDVFRIDRVISTFGMPMGPFQLQDVAGYGVALAVKDIYADAFGERNLDSDLVDLMVKDGRQGKVNGKGYYIYEKGGKPKPDPSVKHVIEEYRKHANTMPGGKPVTLTDQDILEMIFFPVVNEACRVMDENVVIRASDLDIASVLGMGFPKYRGGLVFWADTVGAPYIHSKLSKWAEIYGPFFKPSSYLEQRAKSGVPLSAPGASQQGSARSRM

SEQ ID NO: 245782 - protein, 245 aa, Zea mays
  unsure (1)..(245): unsure at all Xaa locations
  Clone ID: MRT4577_155735C.1.pep
MHLEEEHTKGKSDKQLSEAKPANNASCSRVSASIEKTTKSVTQLDLMPDSLSQADLTVLQELPEDVKADLFSALPLHRSGDPACSTSNVSESKSPNVXELKIDLXDGGTDDLKTPRSFLPPGSSQKWIEQFRVSSCLILNVIAEQHTDSSCQRPLSSVLEPVASFLPLCPTQVVKNGMKLIHXLSELLRHYIQLKVEYDIEELYKCFCLLKRFSSASEFFLDLHDSILPFLQDSISQHYGGTLQF

SEQ ID NO: 245783 - protein, 131 aa, Zea mays
  unsure (1)..(131): unsure at all Xaa locations
  Clone ID: MRT4577_155736C.1.pep
NQPSAWRPWRRPRSRGRGVPRSXXRRAXPXXGGGARARGRGGXPXRRSXSAGAARXGPPPXTXRRARGGPGRRARXPRTXGTATSAXPTRTATPTPTPATGTKPTERATQTHHPGAREGGERTKAEKGTAT

SEQ ID NO: 245784 - protein, 241 aa, Zea mays
  Clone ID: MRT4577_155737C.1.pep
RREGAGEPIKYMGCGDCETTSRSMTIAGATDSFVTLQRIAKQLFSALHLDVKEVRGIGLSLSKLEHADLGRGASQGHMLESWLASPAAKLKKQQSEILGNVNVAGTSGLKDLRSGPSHTAEANLRNDRSTVFHNVELPPLSQLDLEVLKNLPPEIMSEMNEMYKGELQSLVDTLNSDKGKENSSKSLALPAVIRKSVPADAKLQGYRDHRDSMHLEEEHTKVSCVTGNKVALELFKQSAST

SEQ ID NO: 245785 - protein, 54 aa, Zea mays
  Clone ID: MRT4577_155738C.1.pep
SRAPPPLKPLFGVLFWPQNLKGGPKKKKKKKKKKKKKKKKKKKKKKKTKKKKKK

SEQ ID NO: 245786 - protein, 52 aa, Zea mays
  Clone ID: MRT4577_155739C.1.pep
VNIFCQVHDHTSVPCHLTLTYIAVLRLVICLGVHTFIQRVLSNSHVHSSSFY

SEQ ID NO: 245787 - protein, 251 aa, Zea mays
  unsure (1)..(251): unsure at all Xaa locations
  Clone ID: MRT4577_15573C.1.pep
ISVRRSPRRSKMYIFIKTLTGKTITLEAESSDTIDYAWGKIQDKEGIPPDQKRIIFAGKXLEDGRRLADYNIQNERTLHLALRLTGSMQIFFKTLTAKTITFDGESSDTIDNVEVKIQDKEGIPPDQQGVIFAGKQIEDTRTLADYNIQKESTLHLVLRLMSVMQIFEKTLTGKTITLEVESSDTIDNVKAKIQDKEGIPPDQQRLIFAGKQLEDGRTLADYNIQKESTLHLVLRLRGGMQIFVKTLTGKT

SEQ ID NO: 245788 - protein, 150 aa, Zea mays
  unsure (1)..(150): unsure at all Xaa locations
  Clone ID: MRT4577_155740C.1.pep
GVHLTPSSSPAHPTSSAVVQHLQPGGQGLGAGSGRCGIADAGDICTAYWTETMTDATNTXPRGGIHQYKXRFQIRDYXEEPPTVLYXTRITYTCMNHETGLVEPSCVXMLGMQDSTHTLADILSGLRRXMCTPPYRRLNQTDEGNEDQRV

SEQ ID NO: 245789 - protein, 210 aa, Zea mays
  Clone ID: MRT4577_155741C.1.pep
MPPKSKAAAAAAAEPVSVEDLFTALHRHIEAGEFPQAVKVADQVLAASPGDEDAVRCKVVAHIKSDATDKALAAIRAAERLPIDLSYYKAYCYYRQNKLQEALDILNGQEETAAVLQLESQIYYRLGRMNDCMSSYEKLQKFKVDSIDLKINIIAALVAGGRASEVQVAMKAQKVDLTTRALRDTRSFELAYNSACTLIENKKYSEAKEQ

SEQ ID NO: 245790 - protein, 115 aa, Zea mays
  Clone ID: MRT4577_155742C.1.pep
EERVKRHKHAHLQGGQYNRKWYLGKNGDADREIHGHTVDNVLQIRSPRFHFLGGFYINVEGTGYPAPNFVNIDTGVHSLTLYGPRKHIVHPESRDLRPLAGQNNKGEVLSHKGNQ

SEQ ID NO: 245791 - protein, 77 aa, Zea mays
  Clone ID: MRT4577_155743C.1.pep
CDKTVHLINLLTADGVTYHMTCFKCSHCKGILYMSSYYCMDGALNCTTHFEQIFVDTDSFSKIFTPSGQSSDMGVLA

SEQ ID NO: 245792 - protein, 107 aa, Zea mays
  Clone ID: MRT4577_155744C.1.pep
KFSSERKNPFTSCPSKKTGSLGSPNPAKTGETPRWIGDPQYGQTNISGSYFLDPLKRKLGYGSETICFVKCKKTQIPSINPFSLRKTFENIILVLGRIKSVSLIDKK

SEQ ID NO: 245793 - protein, 169 aa, Zea mays
  unsure (1)..(169): unsure at all Xaa locations
  Clone ID: MRT4577_155745C.1.pep
LPESPAQRLAQPVPAAQAVASQVHVGDKIIVSNLPEDVNEQQIKELFHTTVGTVRSVNLSYNAQGKSKGIATILFQKAESATAAYQQYNKRLIDGKRPMKVEIIVDPSRAGRTPTGPAASLTQRVAPAAPSATVAAAGGXSRSRRSSSWCRRTRTPRRRRTWRTRRGEK

SEQ ID NO: 245794 - protein, 71 aa, Zea mays
  Clone ID: MRT4577_155746C.1.pep
RIKFYFRLVETYKFFFRFTKFNLSVRVFKTFATGKPLAFPNLFALKNFPFSPVGLLTKRPAPFDFPKIFQP

SEQ ID NO: 245795 - protein, 401 aa, Zea mays
  unsure (1)..(401): unsure at all Xaa locations
  Clone ID: MRT4577_155747C.1.pep
MATTSVAASSPHPHLSRPRRRNSSATSRASIRGCLLPIRCSSASSSQPPATGGEEGESGRRRLSKQSSWEDRDVEGDDYLYRLGKEADNLNITVGARSGIVDELFVGNFLGKDSDIVFDYRQKATRTFEYLQGDYYIAPAFLDKVACHIVKNYIAHLLNNIKVPLILGIWGGKGQGKTFQTELIFRAMGVEPVIMSAGELESEKAGEPGRLIRDRYRTASQVIQNQGKMSCLMINDLDAGVGRFGNTHMTVNNQIAVGTLMNLADNPTRVSIGQKWRESDVTHRVPIIVTGNEVSTLYAPLIRDGRMEKFYWQPNREDIISIVHGMYIKDGLSVEEVSRIVDAFSDQALDFYGALRSRTYDQAILEWVKEIGGHEQLNEKLLSRRXGEELPRLLPKANTGA

SEQ ID NO: 245796 - protein, 65 aa, Zea mays
  Clone ID: MRT4577_155748C.1.pep
KKKKKSRTGTKTLSFCRRQATHGPAVMIPIYPNGGFLSYRKGGELLDVCCLPPWRWASFFFFGGA

SEQ ID NO: 245797 - protein, 39 aa, Zea mays
  Clone ID: MRT4577_155749C.1.pep
VKLSGYCYICISLWLSWLWYPHLRYRSGSLTYIRRVVDE

SEQ ID NO: 245798 - protein, 90 aa, Zea mays
  Clone ID: MRT4577_15574C.1.pep
HAGTERPGPWDGPGGFGPVFKTAEGSPWPSARGLLSPLDVFAALASFAAWNKARRSNGALGCPPSEDVLWDRLVAGTSTCWIQAGPFSFY

SEQ ID NO: 245799 - protein, 95 aa, Zea mays
  unsure (1)..(95): unsure at all Xaa locations
  Clone ID: MRT4577_155750C.1.pep
QILWXDGTRYKLQEIHGIGNSMEGDANANDPXKECVICLSEPRXDIIVLPCRYXCMCSECAKVLRYQTTXCPCSPIYRQPVESRLEIKVNNKSED

SEQ ID NO: 245800 - protein, 107 aa, Zea mays
  Clone ID: MRT4577_155751C.1.pep
RGRPGRDLQKYAFYLGKAPGSATDIAVGANGLVWILNTNSFPNQYSVFDSIRQAWIDAPIDDYLAKNPSVSFSNSSGQRVAVAPNGDLLGVKANGELFRIRFNWGDN

SEQ ID NO: 245801 - protein, 126 aa, Zea mays
  Clone ID: MRT4577_155752C.1.pep
MQQGDGTEAQVTWDDQQNINRFGRLNNRLHELADEIRLAKEANENLEDAGNELILSDEDVVRFQIGEVFAHMPVDDVEARLEQMKEDAAKKLEKLEEEKESILAQMAELKKILYGKFGDAINLEED

SEQ ID NO: 245802 - protein, 138 aa, Zea mays
  Clone ID: MRT4577_155753C.1.pep
SPARKVLDGLLLHRAGMGAGRGDWEDMVRRMFPPGTTIPEPLPDMDYSFALTYNGPDVSYELPRIQPVCVPAIPTAEPGWGPLGLGSGVVPVAPVVGPAAARARANPPAASRAGAADRRAAGVAPAGSSRGEGGGAGG

SEQ ID NO: 245803 - protein, 154 aa, Zea mays
  unsure (1)..(154): unsure at all Xaa locations
  Clone ID: MRT4577_155754C.1.pep
KQGPVHSDHGKRSRAGLRKLEGEQEXPGWGITVCCATMETSKGSRAPQGRSWGLDTWLEEARRAEEAPAPGRKTRMALGAVRAEASQTRGASREQARRATQRKIKLRSTELELRTGARRREGRDAGQEQGGNSGAGSRAQEEQRPSSVSCAQGS

SEQ ID NO: 245804 - protein, 127 aa, Zea mays
  Clone ID: MRT4577_155755C.1.pep
VFDSEDINQTVRSYSANKHHAYDFTRLGLNEAQGSVEATCRSDKVDPKALDILMQQPEPCISEKQKDSVSNQLSMMMERNRQKSEVSSQLPHHRSIQENVACTLFRNYLEYTAALAIEHELVNILLD

SEQ ID NO: 245805 - protein, 127 aa, Zea mays
  Clone ID: MRT4577_155756C.1.pep
MYASSIFVAMTIAFSQVSASGVGMNTIAPRNDYSNNGGGAPAGGPAGAPSPADAADDLPGTPADASPADAADAPSATPAGPVPTPGAPAPGGAVASPPGAPAPGGPPAPLVPGDMSSGKACAPPPLL

SEQ ID NO: 245806 - protein, 47 aa, Zea mays
  Clone ID: MRT4577_155757C.1.pep
NPRPPEKKSGCWPFFKFKILGSRLFNSLSPFFFSVLLWNSVTKKGLF

SEQ ID NO: 245807 - protein, 54 aa, Zea mays
  Clone ID: MRT4577_155758C.1.pep
TDNYSSVDEVTTVLTEAALARANLIPGMAFTNSNDWSGRHTFRRAAAHATYGCM

SEQ ID NO: 245808 - protein, 51 aa, Zea mays
  Clone ID: MRT4577_155759C.1.pep
SLLKTKLPTNCGGPWVVLFAPILTPSAATIVFTGGKRVCKDYLGSLPFVSS

SEQ ID NO: 245809 - protein, 92 aa, Zea mays
  Clone ID: MRT4577_15575C.1.pep
MGLPKWFRCPGGGEGEECPRKNMLPAGRETGTPTGVGSEWGRGSKGPRGGKKGAPWLVGRARWFTPHFSVMVENFRGGVNPPQPQVWGKNIF

SEQ ID NO: 245810 - protein, 82 aa, Zea mays
  Clone ID: MRT4577_155760C.1.pep
RVSSVSSKSPILKEARIEVSSRARLQSAMPRKTFARSYQPIRSTSVSGQPVRSSTIHRPISAVTISKPMGKSRPIQNSRPKF

SEQ ID NO: 245811 - protein, 40 aa, Zea mays
  Clone ID: MRT4577_155762C.1.pep
SSMIGHAADAKHALYRTNTRVDLAILTRTIHQAHSPLEHT

SEQ ID NO: 245812 - protein, 178 aa, Zea mays
  Clone ID: MRT4577_155763C.1.pep
IDGSKSSERNSVQGDELDLSCQDILQTETGGGHSSTVVEEDSGSKDPTASDGQEILIEETEPNQQSKHALTGSFEKVPDIESVGSSAEKSVGTGDDLLQSGKGACHSEIPVDIIAQLQLDPTSGTADHPAISKGADNFEGQHYHTTDESIGAIPSTFEPAVGAKVVSVDVTADLTEDV

SEQ ID NO: 245813 - protein, 69 aa, Zea mays
  unsure (1)..(69): unsure at all Xaa locations
  Clone ID: MRT4577_155764C.1.pep
AQLPAPSGPRSHSSQSLPVKMRACSAAISSQERRVRTRAGDGWRRRERSALEGRFFLSXTQHAVARGLG

SEQ ID NO: 245814 - protein, 136 aa, Zea mays
  Clone ID: MRT4577_155765C.1.pep
SCNPAVQQQTQSHLSSPQEQFLSRVTSMIGAVLPTPGAGRTRMSREPRSKEKLRRSRRLAGLSADSAHIRPGRPKKNVLKALKISDGSDLLSQKALDAYTKLFLEPLNQEQVRALAALFGWTVPDLEAPAPLQLGC

SEQ ID NO: 245815 - protein, 253 aa, Zea mays
  Clone ID: MRT4577_155766C.1.pep
MRSKCAMAISSSTSRTQDLVPLLCLLLMAAAAPQHSCASPPLPVTLPGCPDKCGNISIPYPFGTKEGCFKPDFEVLCNDSFHPPRAFIQMAGAKITVDDTYYKTNEDGMPDNDIGSSEWPIELVDVSVSEGKARVLGAFSYDCKMNDTYHAVRRQEIDLGYWMPFSMSDADDVLMGIGSNVVAKQTSGPQCQSYLLYQLSTRKTDDPVNGSCSGQGCCSANLRSGGMAATEVTIQKTPTTAASTATVSPARTP

SEQ ID NO: 245816 - protein, 90 aa, Zea mays
  Clone ID: MRT4577_155767C.1.pep
PHGGWPQGRGYGFLQKAEAFRGQLKLWPPSLKACFLFIPLFSHVCQPFFRASFSVPQPPLFGGFLFFRIFKFSSLWGPPYLQLLHVQLPG

SEQ ID NO: 245817 - protein, 104 aa, Zea mays
  Clone ID: MRT4577_155768C.1.pep
MTPSAPQGRHHPPYLLLGEAVVYWDPFHKKPCFTDRSTVPPFSARLPYADTPTPAPSVGGSGGSFRWLWLRKRRLLGPGSRAVSGLIRDRRRSGTCSDFHFTCG

SEQ ID NO: 245818 - protein, 643 aa, Zea mays
  unsure (1)..(643): unsure at all Xaa locations
  Clone ID: MRT4577_155769C.1.pep
MSGSSGPLPYSMRDVGAGGAYNNAKFRHRSRLKMVLQSLATNRSKYHCGKFTVGKFLSLLMVSGLLYLFMHKGSEGIVSSELHGKEVQNKNVRRSPSIRTFWRKPPRLPPRLPPNEIYKNNSLLQQSPSEWTSRQKKVKEAFEHAWSGYQKYAMGYDELMPLSHRGTDGLGGLGATIVDSLDTAIIMGADDVVSEASKWIEDNLMKRISEKGQVNLFETTIRVXGGLLSAYHLSXDHPGAVDYFHIEGDTEGGPDGGNKSSKYINGIVIKPLDRXQSSTPRDCGITICFVXITEDSKYREWGWQIFQAFEKYTKVDSGGYTSLDDVTSLPPSTRDKMETFFLGETLKYLYLLFDENNTLPLXVCVQYRGPSSSSYAVCRTGFTFCVVSQVYSXLYHGEKYRSVTNILDNIVGGTXKLRIPCMTVLGGKLMVLXISMPDLRIWGFYLYLLEGHTTXYSVLSVVXIPNXILKSAXLYQEDLAKTCVEMYFVTSTGLAPEIAYFHIEGDTEGGADGGNKSSKYINDIVIKPLDRHNLLRPETVESLFVLYRITEDSKYREWGWQIFQAFEKYTKVDSGGYTSLDDVTSLPPSTRDKMETFFLGETLKYLYLLFDENNTLPLDKYVFNTEAHPLPVMRSAEQASHSV

SEQ ID NO: 245819 - protein, 113 aa, Zea mays
  Clone ID: MRT4577_15576C.1.pep
ARRPAGRPSTGRPALRAPRREAAASSGAPPKRRRATWGPPAGPPPRTPSIQRLDPPREPPGVPHAPSSSDGPIATLSASPPPRHFPTCDRARGKSILPDVFKVGGVQYALVFY

SEQ ID NO: 245820 - protein, 91 aa, Zea mays
  Clone ID: MRT4577_155770C.1.pep
GGVTVEVRGSNGAFYKGFIKDVHEDSLTVVFENNWQPERQVPFNEVRLAKPPDIKKEISEGDEVEVYSRANDQEPCGWWLAKVRMMKGEFL

SEQ ID NO: 245821 - protein, 440 aa, Zea mays
  unsure (1)..(440): unsure at all Xaa locations
  Clone ID: MRT4577_155771C.1.pep
QPNEKISEXGQVNLFETTIRVLGGLLSAYHLSGGDHPGAGDSGVTVTYKKANPERLLEVSKDLADRLLLAFTSSPTAIPLSDVILRDHTAHAAPDGLSSTSEASTLQLEFSYLSKVLGDPKYDRAAMKVLEHIHTLPKVEGLVPIYINPSSGQFSGENIRLGSRGDSYYEYLLKVWVQQEEYRHSSLKYLFEMYTEAMRGVKHLLVRKTVPNGLVFVGELPFGRNGGFSPKMDHLVCFLPGTLALGATKGITKRKALETNLLTDEDIENLQLAEDLAKTCVEMYFVTSTGLAPEIAYFHIEGDTEGGPDGGNKSSKYINDIVIKPLDRHNLLRPETVESLFVLYRITEDSKYREWGWQIFQAFEKYTKVDSGGYTSLDDVTSLPPSTRDKMETFFLGETLKYLYLLFDENNTLPLDKYVFNTEAHPLPVMRSAEQASHSV

SEQ ID NO: 245822 - protein, 46 aa, Zea mays
  Clone ID: MRT4577_155772C.1.pep
NPCEVMSFSMMLSSICSVFHYVWFPQPMYFISLCPSHHYACSNVSL

SEQ ID NO: 245823 - protein, 79 aa, Zea mays
  Clone ID: MRT4577_155773C.1.pep
TLQQALPVYICLDSGAGLVGREEQLDLELAGGVHRSLADSVAAYRCLMAHVYDRHDTRMAEGATVNRVACRAFDDLLWE

SEQ ID NO: 245824 - protein, 354 aa, Zea mays
  Clone ID: MRT4577_155774C.1.pep
MATINAQSLIQVSEIQNLNMPYIGAPAQRDGLEADHTPQEAARISSIGSDDDTQLRHRSKRKRRRSKLGRGQEKPGSSSRQASLVSAQGAEVRRPVIPSCVLEFNSDMGREEVALRRALFVTVVGTRLKLKVSGVEVLEEVARNFGIDAGSMTIHQAMPEDFLLLLPDEETADRVLNGRRAFRGPLFSLAFKRWTRFAQASTTSMSGLVDIEIRGIPPHAWSLSTAEVILSGACLISELHPDTVRKADLSSFVVRVWCFHLEGLNWNMDLHITEPGVSSQGKRLLTYKISVIVVPAEGQSTSMEPPPTNAADDMQPEEDDDRGNPDFHSQLSGNNLVQKRSVHLRLGPQQPVME

SEQ ID NO: 245825 - protein, 58 aa, Zea mays
  Clone ID: MRT4577_155775C.1.pep
QIIGIETTSSMLKGNLGDFHALRISYYLVMHCYYSCFLPVNHARPSSSVLAHPWVLRR

SEQ ID NO: 245826 - protein, 71 aa, Zea mays
  Clone ID: MRT4577_155776C.1.pep
TVFTIQSPAPKAPQCPPCHPKLSSPNFNSHGNSGRPHLIPGAGKTSGKATLSLSMRIAGTGPRLLIRRTST

SEQ ID NO: 245827 - protein, 35 aa, Zea mays
  Clone ID: MRT4577_155777C.1.pep
LTSTGVTVPHTCSRTPKKIHRVRLLLHWYSRLEPN

SEQ ID NO: 245828 - protein, 163 aa, Zea mays
  Clone ID: MRT4577_155778C.1.pep
FRTGHGAFSACQLVCVRSLIGVPGLSPLSLPGCIFCAFGSDLFSPWAHLFSCLRPAFSLLPLGYPGPPPGPGWDFPGCPSGLGGSIRGPGWGFVCPLCGPFFPGWGTLFSCFGPPLCFRSYPALFLVGSVGPLPPFFFAFRNFLPVPSLLCLGGLHHFLAQIS

SEQ ID NO: 245829 - protein, 139 aa, Zea mays
  Clone ID: MRT4577_155779C.1.pep
FLGVFFFFFCFFCFEYFFFFWWFNLFEKREIFFFSKEEKNLFFGVNPWGDGTGRPFFFFFFQGPLRWGPHGGPHPPSLFFGPTRTKKREEKKKVETGTFFPFKIATQRGEKRKVISKKKKRSPSEDNGICALSRPWMIF

SEQ ID NO: 245830 - protein, 87 aa, Zea mays
  Clone ID: MRT4577_15577C.1.pep
MASKHLVLSACLVLMRTASVATDVNYCSKKDYSVKVSRVQIVPDTVEQGKPATFKISASTDTTIDKGNLVIEVRYFIFDVHSDTRDI

SEQ ID NO: 245831 - protein, 66 aa, Zea mays
  Clone ID: MRT4577_155780C.1.pep
RPILTQSPSRIGKDRIRIGYPRLGPPPPVPAGFISCSPYAHRLPTSFTSISCRIGERILSVAASCG

SEQ ID NO: 245832 - protein, 107 aa, Zea mays
  Clone ID: MRT4577_155781C.1.pep
MERLAITGGGGGCRRLGRAVACASFLLDKGCAYMVFATTVAALQACFVGLLGVDALQWSKLCNIYTRFCEQAAAGMVCSLLAAAVMAVLSAFSARDLFRRPCSPEYR

SEQ ID NO: 245833 - protein, 190 aa, Zea mays
  Clone ID: MRT4577_155782C.1.pep
GRPGREVSTDSSPSSSSPSSVLQALRYSTYLGSQLGDSSAGSSNTIDGIMNGVIKEKLKIIPKDVRWVEVSNAVYYALVNDFMKPRIDEIDELLSYGVNVTVYNGQLDVICSTDGAEAWVQKLKWDGLRTFLSLPRQPLYCGPGKGTKAFVRSYKNLHFYWILGAGHFVPADQPCIALSMIGSITQSPAS

SEQ ID NO: 245834 - protein, 55 aa, Zea mays
  Clone ID: MRT4577_155783C.1.pep
AAMAHHDIHGAGSDRQFHALQECLHRSTCMTCLFYQRRVWCQIPPTLKLTRISSR

SEQ ID NO: 245835 - protein, 98 aa, Zea mays
  unsure (1)..(98): unsure at all Xaa locations
  Clone ID: MRT4577_155784C.1.pep
FMCHTQQRGWHTLHNVVXGGAGRMGAYLDAVDRRLXCKVALFHGRDDELVPVGCTLAAGARVRRARVTVYERKDHITIVVGQERLFAAELEAIWSADQ

SEQ ID NO: 245836 - protein, 63 aa, Zea mays
  Clone ID: MRT4577_155785C.1.pep
YEPACCVPLLPINRLVRLQLTASRRMRRTETYPRSAIEMHVPGSTSPETAPGSTCPQSTRTSR

SEQ ID NO: 245837 - protein, 133 aa, Zea mays
  Clone ID: MRT4577_155786C.1.pep
HWDPRGRPGKAFNEVRATHVHTTRTTTTNQSAAPRTQEQSDGVAHHDDVLRHQGGGRPLAPLPPSTSAGPARTTDDKNPPRYHQQMALPQATHDARGWYATCSACRTRHRRSFPTHIKCPELDTQHSENMMHL

SEQ ID NO: 245838 - protein, 113 aa, Zea mays
  unsure (1)..(113): unsure at all Xaa locations
  Clone ID: MRT4577_155787C.1.pep
NHNFSKKKKKKKKKKKKKKKKKATPGQSGLPAEFKHINKRRKKNLRGSPXTASEPGKREKEKERRKREEKEKEREEEKRKREREEKERKEREREEEKRREEEKKRARKEQEKQ

SEQ ID NO: 245839 - protein, 46 aa, Zea mays
  Clone ID: MRT4577_155788C.1.pep
EQCNGSMEHLLLKITYAFCCCVYWVSFRLPMNKRVIQDIIFLLQWG

SEQ ID NO: 245840 - protein, 221 aa, Zea mays
  Clone ID: MRT4577_155789C.1.pep
MADKEPVVERPEAGEEEEDASAAAAAGEEEDTGAQVAPIVRLEEVAVTTGEEDEDVLLDMKAKLYRFDKDGNQWKERGTGAVKLLKHKQTGKVRLVMRQAKTLKICANHLVASTTKMQEHAGSDKSCVWHAADFADGELKEEMFAIRFGSVENCKKFKELVEEIAESLTKNEGKEGEDGGSTAGLLAKLTVSEGKSEGSGKSESTDSGKVTETKADTAPAE

SEQ ID NO: 245841 - protein, 63 aa, Zea mays
  Clone ID: MRT4577_15578C.1.pep
FLVFYFFFFPTRYISNLSCSDHMNHVFCSAFHILRDKPYSVMSASPNGLPTQCKKLIFDRFTY

SEQ ID NO: 245842 - protein, 105 aa, Zea mays
  Clone ID: MRT4577_155790C.1.pep
VILLGRVGHRVQVVRHLYDDHDGLPPEHLLGDLDQLGAAEQLSVVGCVLQSGRPMLASRVVLYACAVSVHVRVWCSGRLPWREGNRRGAGTREKSRVRGDGLEPN

SEQ ID NO: 245843 - protein, 102 aa, Zea mays
  Clone ID: MRT4577_155791C.1.pep
PTRPDKSCVWHASDFADGELKEEMFAIRFGSVENCKKFKELVEEIAESLTENEDKEGQDGSSTAGLLEKLTVSEGKSEESGKSESTDSGKVTETKADAAPAE

SEQ ID NO: 245844 - protein, 45 aa, Zea mays
  Clone ID: MRT4577_155792C.1.pep
ISGSQVILFPLLANSVTKSPYKKGDLLHYNNSIVDFNSMFSRIKM

SEQ ID NO: 245845 - protein, 97 aa, Zea mays
  Clone ID: MRT4577_155793C.1.pep
HEALAGSLPPKSDWGRARCVRPDGVRRFSSAEVCIDEQATQESEVQQVETAEQELVEGQEQVPQDEARGGCCDEFVRGLGRRLPVNFGLLDRCLLIM

SEQ ID NO: 245846 - protein, 100 aa, Zea mays
  unsure (1)..(100): unsure at all Xaa locations
  Clone ID: MRT4577_155794C.1.pep
SEGLFFGQWSLVWMCFCVHAVWMGWCIVDALRFGGVGPDSGWCMCVILNRLCVVDFAVSFCSVLWWRCVFXRFVCAIKFRKPPCCFPGFLLKVCIKIFFE

SEQ ID NO: 245847 - protein, 86 aa, Zea mays
  Clone ID: MRT4577_155795C.1.pep
GPRKTLLGFLNKDKGNWGPIPWGVFPHLFPKTVLPPQRVLFGPMFFPQSSSEKKIFGLKLLVNNPKGPFLEIWVLKQIQKGGVDPL

SEQ ID NO: 245848 - protein, 45 aa, Zea mays
  Clone ID: MRT4577_155796C.1.pep
PTRPPTLPTRQILCTSPEKYCLGESIVHTFITSKHTHYTLNPPVS

SEQ ID NO: 245849 - protein, 78 aa, Zea mays
  Clone ID: MRT4577_155797C.1.pep
LVAIMAFFCRFCLSFFGSFFLFFSLFLVFFFFCSPKHVFIVLNATLHYIIKTSIHAGVRVQLQAPDPLKEYLTRHVSS

SEQ ID NO: 245850 - protein, 105 aa, Zea mays
  unsure (1)..(105): unsure at all Xaa locations
  Clone ID: MRT4577_155798C.1.pep
STTRAPTRVPTRRFDFHFQDGSQPGRVHLDMTGQNVTECTGGSSNVTFDNLRDRYHTHCDPRLNTYHSLELSLILSXKLKKRMMRRSYLAPVLGGSILSLTNFGS

SEQ ID NO: 245851 - protein, 112 aa, Zea mays
  unsure (1)..(112): unsure at all Xaa locations
  Clone ID: MRT4577_155799C.1.pep
GLVLGSCLVRXSVSRALSAGPVLVLGLAGSPLRLPSSPLPSALRCPLFCGASCFSGSAAPPPCSRPGCGPVGVLCACLRAPAPVASLLLAPAGGASFVSPLWSRSAGPGLSP

SEQ ID NO: 245852 - protein, 103 aa, Zea mays
  Clone ID: MRT4577_15579C.1.pep
FNAALEKEIKRLNGSDALPASVLQYIDLYTPLLDMIQRPDAYGFNVTNRGCCGTGVFEVTLTCNRYTAEPCRDPSKFLFWDTYHLTERGYDLLMAQIINRYGV

SEQ ID NO: 245853 - protein, 2391 aa, Zea mays
  unsure (1)..(2391): unsure at all Xaa locations
  Clone ID: MRT4577_1557C.1.pep
MMVPTHYVQDSLSPKRHRRHRRNNRRARANLIVVDSAALTNAHRSFIVDMILTQHQESCRRIQDAARRAMQASLERTICQDLNKLLPGVSMSGENINGEIMRSAEAFAQWPEYQVWVKRNPQRKKYVKLVAIVRAFRAASRRSVLELPSKCLAKRVGCTMNLTCNHARRIHERFVGRSRRSTLSRVPFLTQKSVSSNPFEVLSSLPVGITEKYFDSSLSSSASDHFKLKNSRKQIPSGHRPITRSLSGCRSDDSNAISNDDLCSPLNNEDGPSRVEQVLAANDGHSVDQQMAQLMATLQQKEEELVALREQMAREQVANHSHNNDRDASTIHNQQRSEPALTLEAIQRMISEGVRAQYMQTHYSMRPGYVKPYPPEVDMVPFPNNYRQPQFSKFNGTGSPHEHVAHFLAACQDTSHNGALLLWQFVQTLSGPAFTWYSKLAPGSVRTWEQMQDAFLERFYSTQRTVGITELTQTLQRANERAADFINRWRNLSLHCPQPITEPEAVRMCMNNLSPDMAIYLQGVRPITFEELASKATDIENYMQHISRQARPYNKPVMERNGPRYKVPSKPKQMQAMEATVVPRKLQTGGVIERNQHRGDASAPRRPTLSERQNQTYSFPVEEVDDIFIGLRELGLIELPKPKRPEEASKFKEPNFCHYHRILGHTLKDCFVVKNIIQKLIDEGTINADLLKSMKKGKKVATSNVTTFRNDLVSHTTLNMSPNYDQYMYDQFMMISNPENVNVTMPGYPKQQVESKHESKALRRWIHTPRGGTSTPQRSRKRRQQFSRRLALRRVMEKGEGPCISLNVEKHEHNPMEEYDTFAIGVFEDDDEPLYFPEEEVPEVDGIQLRSSRQLPSSSQPRNPQNENVTPRNVTGHVSNVSVKYDVVAHLKKIPAMLSVYDALCLSPDLRKAFVTALSFPEDYRAEVSQVEAELAQTQNMTFADRDLLLGNKKHNRPLLMLGEIDDLVINCIMIDGGSAINLLPLRTLKRIGYSAGDLSQSNVIIHGFNQSSQEALGTISLVLKLEKLVTYVNFHVIDAATSYNALIGRPWLHENKVVPSTLHQCIKYKDTSGDIVRIFADKKPFTVAETFYADAKFYFEPVDKISKPKTISSSVQDLPDRDTGKSSVNQKRYQYIPSDQRKKGDPIFRVINKAHNYKGTTFPTPLPPLVQYRINQAKIEKHNKNKXLHKSCYXRDDEILPIALYDNRVLYMMRQMDYDTSIGPSLCDGRGQLAPFEKMMSQAQLDALHEDQALKETKYGLGYEVHMTSIEPIDATTASPQMEDGNQSTVDELEEINIGTPDDPRPIFISEYLSIKSKKEYHKFLSANRDVFAWSYEEMPGLDPMVAVHKLVVNKDACPIKQGQRRYRPELLPKIEAEVDKLIAADFIREVKYPKWVSSIVPVQKKNGQIRICVDFRDLNKACPKDDFPIPISEILIDATMGYEIFSFMDGFSGYNQIKMAPEDEELTTFRTPKGIYCYKVMPFGLKNAGATYQRAMTIILEGLLYDIVECYIDDIVVKSKHEQEHLENLAIVFKRLRQHKLKMNPMKCAFGVASGKFLGFIVTKRGIEIDPAKIKAIVNMPQPRNLHELKSLQGHLAYIRRFISNLSRRCKPFSRLMKKGVPFQWDQACQNAFEDIKQYLTNPPVLCAPIKGQPLILYTAAMPTSLGALLAQNNDTGKEVSLYYLSRTLLEAECNYPDIEKICLALVFAAQKLRHYMLEHTVQLVSRADPLRYILSKMTLSGRLAKWAMLLSQFDIVFVPQKAIKGQGLANFLAAHPIPDDFPIDDDLPDEEVFAIEIPDHIWQMYFDGASRKSGAGAGVVFVTPDDGIIPYSFTLTSAVSNNAAEYEALIIGLEIALSMGISTLHVYGDSQLIVNQLLGVYTIKKQGLIPYFRKAKTLISMFADLKVQHVVRNKNEKADALASLAASMSLNPHDTMDVHVEERRVLPILEEEEDISSIFATNIETCEIEMGDWRTPFLEYLLHGYLPLNSNERSRLRKRSINYTCINDTLYRRSSDGMLLRCLAGDEVIEALKEVHAGVCGAHQSGPKLHYQLKHLGYYWPTMFDDCMKFAKKCHECQIHGNFIHQPHEPLHPTNMSWPFEMWGMDVVGPIHPPSSKGHRFILAATDYFSKWAEAVALKEVKAENVENFIRTNLIYRFGVPSRMISDNGSNFRSKQIERMCAKFKIKHSFSTGYNPSANGQAEAFNKVLCKLLKKMVSHNKRHWHEKLLESLWAYRVTTRTATGMTPYSLVYGGEVVLPLEVQIASLRVAIQEKLTEEEATKLRLKELDNLEEKRLHALQNLEAYQARMSRAFDKRLKRRSFKXGDLVLAVIRPMNITHRIKGKFEPKWEGPYVVKDVYSSGAYRIISADGEYCPPPINGKFLKHYYA

SEQ ID NO: 245854 - protein, 102 aa, Zea mays
  unsure (1)..(102): unsure at all Xaa locations
  Clone ID: MRT4577_155800C.1.pep
INLWGRFPXPHLXNAYVXLQTWKRQAIFSDPNNLTADWVGPGVCNYTGVYCAPLPSRGPPPPESPYPFGQLHHNHGDISAFLPTELGLLADLALLHLNFNQF

SEQ ID NO: 245855 - protein, 244 aa, Zea mays
  unsure (1)..(244): unsure at all Xaa locations
  Clone ID: MRT4577_155801C.1.pep
MASEAAKVPVPESVNFKRKRGEVWAAAKKQKVADEKKKDAENTKVIYARAKEYAGEYEAQDKELVQLKREARMKGGFYVSPEAKLLFVVRIRGINAMHPKTKKILQLLRLRQIFNGVFLKVNKATINMLRRVEPYVAYGYPNLKSVRELIYKRGYGKLNKQRIPLTNNKVIEEGLGKHNIICIEDLVHGILTVGPHFKEANNFLWPFKLKAPLGGLKKKRXHYVEGGDAXHRENYIXQLXRRMN

SEQ ID NO: 245856 - protein, 157 aa, Zea mays
  Clone ID: MRT4577_155802C.1.pep
MGDRHQHGPGSGVEDPATLLRRVQTRAPNSTQVVGFLTLLVSGAVLLLLTGVTLTGAVVALVFLGPIALLTSPIWVPVAVVISAIVAAALSACAFAAAALPVATWMYRYFTGRHPVGADRVDYARSRIADTASHVKDYAREYGGYLRTRAKDAAPGA

SEQ ID NO: 245857 - protein, 88 aa, Zea mays
  Clone ID: MRT4577_155803C.1.pep
GKTNSTCTASGAAWAAAGRRQRRGSKAATERERRREGRVERAGMSESTTRALPSSISSPLAHAATATPTPTLATREDPAGWLARFPAG

SEQ ID NO: 245858 - protein, 55 aa, Zea mays
  Clone ID: MRT4577_155804C.1.pep
DPLFSLRYLLPAMQFLYVVINHSKTSMLSCFLSMTGRSGTSKLNYIMSNLLGSII

SEQ ID NO: 245859 - protein, 83 aa, Zea mays
  unsure (1)..(83): unsure at all Xaa locations
  Clone ID: MRT4577_155805C.1.pep
LXXASXTRRASGTHQLLLDVTXGCRXAXPMXXQXXGXAGERATHRALIXLNVTRXXXXXPXXEVGRXRXXPFAXXKAPGRMXW

SEQ ID NO: 245860 - protein, 68 aa, Zea mays
  Clone ID: MRT4577_155806C.1.pep
NISVVRHYFECLYKKHSYVSCVSVIYLTIFRGLFYEMHYFISHRLCGVTAKAWLLLPIWFPDPPTCDC

SEQ ID NO: 245861 - protein, 59 aa, Zea mays
  Clone ID: MRT4577_155807C.1.pep
VSVCRRLHVYAKLNMNVLLLLFFVCLCKTECRLHVYAKLNEKFMQGYAIAKKKKKKGAA

SEQ ID NO: 245862 - protein, 75 aa, Zea mays
  unsure (1)..(75): unsure at all Xaa locations
  Clone ID: MRT4577_155808C.1.pep
HQSHHVLAHNWXVKKGGAFTGEISAEMLVNLADPWGILEHSERKDLLGQSNEFPXDKVAFARTPXLKVIASVRET

SEQ ID NO: 245863 - protein, 170 aa, Zea mays
  unsure (1)..(170): unsure at all Xaa locations
  Clone ID: MRT4577_155809C.1.pep
RPGFVSWHPQRACSVQATNYDVPPRAQEEDIEEDRLHEPTARESTEGNGPGKQVATNAESKSEPTNARSRRTPLIHRAGNVALRVIRKHCNSTLLLSRRVPCLRLWREIAHDFKTELRXRCSSPLELQQDGEGYLGVVLXDIILCCIDFKCDFIMPDDIQLCRRSRVLRK

SEQ ID NO: 245864 - protein, 104 aa, Zea mays
  Clone ID: MRT4577_155810C.1.pep
SWGWGEGPNYPSPKKPMFFWRNASVCPGLPPPAEDFEKRGISVALPGGNHPPFVTRQVRETNQWLFPPFFEGRVGPPYPPILWGRGQPGRFFFSPLNGQFGEGH

SEQ ID NO: 245865 - protein, 45 aa, Zea mays
  Clone ID: MRT4577_155811C.1.pep
SHTTRAVDLASHVNCPSVATKTAKPRGLWCQGSDLWVDWPCRGRR

SEQ ID NO: 245866 - protein, 48 aa, Zea mays
  Clone ID: MRT4577_155812C.1.pep
FYSKKPTIIYDSITHKIFTARNQLLFMILLHIRLFQLSHMLNPKHFGL

SEQ ID NO: 245867 - protein, 159 aa, Zea mays
  unsure (1)..(159): unsure at all Xaa locations
  Clone ID: MRT4577_155813C.1.pep
KRGKKQGPGQETGNQTQRTAPPXGRPKRRPRAQTKEERDHRAGAKPKXGLPGEKPEGGGDDKGPRGGGGXEKKTEKRPPPDQRGPATPPPXTTGKPRDPRGPKHEKEQTGRPPPGKSPKKGXNPRGPPPPKDNAGGGXCPQTRRKKPSSPASGGSPPPQ

SEQ ID NO: 245868 - protein, 80 aa, Zea mays
  Clone ID: MRT4577_155814C.1.pep
FFLFVVVEKFGVFSSTTIEHLVVYLLENHKMKYLHCLLENHKFNTICGLTFFVFLYHIYAYTSSISVHFGMCCIHLCILI

SEQ ID NO: 245869 - protein, 75 aa, Zea mays
  Clone ID: MRT4577_155815C.1.pep
VRIQPGSKLVRSPLIAGPSQLFPLAPYMGVPNCIQHGHLKLPLLFPLQIHRCLFVCQRVAVVFKLSCSCVGAPAP

SEQ ID NO: 245870 - protein, 104 aa, Zea mays
  Clone ID: MRT4577_155816C.1.pep
RSTRLLLSFSRKHLHVIAMEEATDFLSCLLGYDAAYAARTAKSIFIHPINPWRRVAAAQGHILSTGSHGDLQRLVANRQTWRVPPYGATPPCYGTGVASAGCLR

SEQ ID NO: 245871 - protein, 155 aa, Zea mays
  unsure (1)..(155): unsure at all Xaa locations
  Clone ID: MRT4577_155817C.1.pep
IRLEPTLCDFYARFCFRLVGGLPNFAKDDQTITLKXLLLNKCHEDFERGEREQVEANIAYQEGGAKQSEGGREENRIRAQRRMLXNIALSGELYKKRMLTARIMPECINELLGEYQNPDQANLEALRRFMSTIGAMIDHPMTCVHMDFYFVLIHK

SEQ ID NO: 245872 - protein, 166 aa, Zea mays
  unsure (1)..(166): unsure at all Xaa locations
  Clone ID: MRT4577_155818C.1.pep
MHFQSINISFVVNWPGAVEVICNLILELTFFCVWTLLHNKVLTANNLQKRHXQCNPVCCLCNSALETVSHLCKDYPFSREVWDKILTLGNCXLPERXIQASVSLYGWWRNIRGLCNRQSRRNFDGLLIYFWWSLWLERNNRIFRNQQKNAKQIASLVKELVGAFLS

SEQ ID NO: 245873 - protein, 66 aa, Zea mays
  Clone ID: MRT4577_155819C.1.pep
PRLCPVFTPVGSAYAHGICRSSMPSCTHREHGRTRVCRVAYHEDRGLYYQRAGGGVQAPATPCHPQ

SEQ ID NO: 245874 - protein, 71 aa, Zea mays
  Clone ID: MRT4577_15581C.1.pep
YFDGFNNLRFLTKNCNGCFQHNVPDYFRDERSYQNVLHFLLLDRELESPCVTLFLYQGRKFEHLRSTGLGS

SEQ ID NO: 245875 - protein, 197 aa, Zea mays
  Clone ID: MRT4577_155820C.1.pep
SPEDSRSSPWKISGNAIAHSAQSFSRFEFDRIFGEECRTAQVYQARIKHIVDNVVRGVNGTGFAYGQTNSGKTFTMRGAANEPGIIPLAVHDLFQRIQEHMDREFLVRMSYMEIYNEDINDLLVPEYRKLQIHESIEKGIFVAGLREEIVTCAEQVMDFMSFGESHRHIGETDMNLYSSRSHTIFPMVIESREKAMT

SEQ ID NO: 245876 - protein, 181 aa, Zea mays
  unsure (1)..(181): unsure at all Xaa locations
  Clone ID: MRT4577_155821C.1.pep
TPSPTYPPPPPXSXXPLIXPXPYLNLPPPLFTTYXPNPLSHXTXTXYPPPIQLPIFKSIXSPYXISXLXIPXPLFPFYTNXISPSLIFPTSNLKPPTSLTFIPNTLNTIPXXSTPXISTIXILPTTNSLNLLNNXXPPPITTSLXPXPYTXPFSFFPITXSTLPXHNNXXTPPPPTPPSPS

SEQ ID NO: 245877 - protein, 92 aa, Zea mays
  Clone ID: MRT4577_155822C.1.pep
KVFPLNSPPYFFLPNGFRGPLGFFLEKSFPPSSPKVGQYFPPCKNLVGKNFLSAFFCKQGAPVGGFKPLTPFLGQQLPPRNLKVLSRGRAGP

SEQ ID NO: 245878 - protein, 63 aa, Zea mays
  Clone ID: MRT4577_155823C.1.pep
KLPSPCFQLHTYVHVSPNSNSTALSYYNLHTGKTFPFPNLITLHLITIPQSDLHCQKPQPNPP

SEQ ID NO: 245879 - protein, 95 aa, Zea mays
  unsure (1)..(95): unsure at all Xaa locations
  Clone ID: MRT4577_155824C.1.pep
MVTKRNVGXTLCKADFEGKKVFVRADLNVPLDDAQKITDDTRIRAFVPTIKFLLEKGAKVILATPPTAACRLGHTLILLAKSMVHRKMRTAMPVI

SEQ ID NO: 245880 - protein, 90 aa, Zea mays
  unsure (1)..(90): unsure at all Xaa locations
  Clone ID: MRT4577_155825C.1.pep
KMVLRTNSGQIRGVCLNSWPYCVGGCLRAKLGVLCPLPHQIFISPLRLEKSLCHNCQCGSPHIVKMKGLGWFHKKKKKKQNPXKLNIKTK

SEQ ID NO: 245881 - protein, 104 aa, Zea mays
  Clone ID: MRT4577_155826C.1.pep
SGGGPMAQEVFLGPGDGGFVFEPTQFPVRAGGPLPFKNNAGFPPKFVFYKKKVPRGVDPPKFSRGGFPNAPGGAFPVPPPGRGPSGFFCEPPPGAGMVGKIPVP

SEQ ID NO: 245882 - protein, 69 aa, Zea mays
  Clone ID: MRT4577_155827C.1.pep
CNRRPCVVVLATRPIPRAEGSSVPFRSRWQELLCRRCMCPVRADGAPARAAARMPLAASPTNLDLHLDS

SEQ ID NO: 245883 - protein, 162 aa, Zea mays
  Clone ID: MRT4577_155828C.1.pep
PLVRPFAGVGARDELALPVAHALATHSEIHLRTDRTYGLRASADKHRAARSGVVEVSIMGPRAPGDGLCLDLLGAALAVVGHVTGPPRRPSLLSAAAGVGTAPPSPPSLCPSVCCFLLIVAASRSTASSSPAAAAEPGGGSGAIAPTRGECSVGGDSLRGLG

SEQ ID NO: 245884 - protein, 88 aa, Zea mays
  unsure (1)..(88): unsure at all Xaa locations
  Clone ID: MRT4577_155829C.1.pep
TGGEKAPLLAAAVNHSADHARLKSHLLGAPRGSLSRHHLPPPSPRSRPPICKPNYTTRSATEGTRNVFQMLNPSEMXHRDWFPSDFSF

SEQ ID NO: 245885 - protein, 57 aa, Zea mays
  unsure (1)..(57): unsure at all Xaa locations
  Clone ID: MRT4577_15582C.1.pep
SPXLNPRXGSPRNRAPPPRRRPPTPGRGHGVVRGSTMSAGSEQLILVQKLERVYRSE

SEQ ID NO: 245886 - protein, 197 aa, Zea mays
  unsure (1)..(197): unsure at all Xaa locations
  Clone ID: MRT4577_155830C.1.pep
RGHCSIKDCHVEPCPESKIPVGIKAGHSNKYLKMANNTKELEVCEQANKLGAINSTLSNQSKEAFIDWARYDDSRDHFCELDDERSPAAQYVDLLLNPERYTGYKGTSAWRVWNSIYEENCFKPRSVYRPLNXPLAPSRGEDDGESFYTWLEGLCLEKRVFYKLISGLHASINLHLCANYLLEETXGKPSWGPNIKE

SEQ ID NO: 245887 - protein, 118 aa, Zea mays
  unsure (1)..(118): unsure at all Xaa locations
  Clone ID: MRT4577_155831C.1.pep
AYQLSKYISNYTINILSPVHSRIFTLLALLAISPSSPTSTIIPQYSQQHLSPFTTSLYQHPTILSYILHXSILSCILPSLPLTLQQPYTLLQQPYLIHLNLQQISTHQLLQHLLPTIN

SEQ ID NO: 245888 - protein, 55 aa, Zea mays
  Clone ID: MRT4577_155832C.1.pep
MYGWQLSLQKKKKKKKKKKKKKKKKKKKKKKKKKKKKRTNNLKRSKANIHKHATS

SEQ ID NO: 245889 - protein, 42 aa, Zea mays
  Clone ID: MRT4577_155833C.1.pep
GSLTVETINRPFVCVDLRILISFDFLFVIYRFFCVIIEFVVI

SEQ ID NO: 245890 - protein, 100 aa, Zea mays
  Clone ID: MRT4577_155834C.1.pep
YMSVKRKLCGKSCSRGPRDLFVYSAMLAKGTGPCSSFPNVAIARHGAGSSDGWAVFRGKRSGQACSGGVRSKAAVVVLTADAASRSRSPSFDSSPGRPRG

SEQ ID NO: 245891 - protein, 456 aa, Zea mays
  Clone ID: MRT4577_155835C.1.pep
MPPTPNPKNLAASLPILTLGGGASGGGRPPSKFESATVDLPTSVILLAAVDRGSDEMAPPDPEDGSREEKRTKASKLQEQGEGEEEATGLPSDVPRGHFAVYVGERRRRFVVPITLLDRPEFRYLLRRAKEEFGFTSAGGALVLPCEEVAFCSLTSALACARPRPAPPSDRDPLGTSDITAEETAAWFPDTLDDPLEKDLYTQLWYSTIADAAPQHEGTFPGPTSHPSPPLPPVGSSNVESSWAGDICSTFCDNNQVPRTSTGIRGKDAALQSNVPSGAGAHDGTSSSALLAAADVEKKGPNQRKDACVARADPTLQQGASPLNTEIQVPLIIVNVGRSTEIHFSMGNFLFCLMGDMSYTLHHHEVVGKHLSIVQVNEKTSIARIYLANALHMIIEMTDEQMIAFIVHRVTASAVFLTAFPSLPRKYVKALLHTWARGRGAMPLVSFMFLRDLSFK

SEQ ID NO: 245892 - protein, 58 aa, Zea mays
  Clone ID: MRT4577_155836C.1.pep
PSRNAMIASHTSCSDRAISIYLSLSVLQLASCDRSCAKQNLPYVRFISSDGGRTWPLG

SEQ ID NO: 245893 - protein, 80 aa, Zea mays
  Clone ID: MRT4577_155837C.1.pep
PRVRPRVREKVPQSTPMSIPSSLEAVTATPRSIKELPKLNSNVKQSVMASKLPNAGHVAQNLTNNAPPTDYPETASSATS

SEQ ID NO: 245894 - protein, 143 aa, Zea mays
  Clone ID: MRT4577_155838C.1.pep
PPRLGRDTAPCLPGGRRIRPPESRRFPSACYLLVLTLALLVVSAAAKSSRRPISDNEIRQKKEACYTDVENGLWGWVCRYSPTEKENCVLRCLSPECYDLIYGGDPLEEGELDYVRGQEYKYCMHKSSLGESLDGVKGSFSYS

SEQ ID NO: 245895 - protein, 103 aa, Zea mays
  Clone ID: MRT4577_155839C.1.pep
SLSIPSRLPNSVAQDNEIRQKKEACYTDVENGLWGWVCRYSPTEKENCVLRCLSPECYDLIYGGDPLEEGELDYVRSQEYKYCMHKSSLGESLDGVKGSFSYS

SEQ ID NO: 245896 - protein, 95 aa, Zea mays
  Clone ID: MRT4577_15583C.1.pep
RSWYLKNSLLSSYFDLRRISAPTNHWSHMSSHVSRAFHSAGFAAISRPFGWCQSPRATQALCCWDCDAGGVTLGGGALGMHIILASLQTSIHCSV

SEQ ID NO: 245897 - protein, 80 aa, Zea mays
  Clone ID: MRT4577_155840C.1.pep
SQFAEQRGQISGDLCIEGWRQQKCSSPCRSDFHLFCDGLEQAATLSLICDNLLPMCLNKSIHRAVISQSFFGGLISPVLC

SEQ ID NO: 245898 - protein, 60 aa, Zea mays
  Clone ID: MRT4577_155841C.1.pep
ASVSLSWKQRPQQFPMVIKWVGGPVSPSKCGRHPAHSRCFTMVRLRGRAIKLGLLGSPPS

SEQ ID NO: 245899 - protein, 55 aa, Zea mays
  Clone ID: MRT4577_155842C.1.pep
SATNDNGLPFSPDRSDAVKTAYSDFPEIKHRDVPQLLAHNLNGKHEPRDYRAAPD

SEQ ID NO: 245900 - protein, 208 aa, Zea mays
  unsure (1)..(208): unsure at all Xaa locations
  Clone ID: MRT4577_155843C.1.pep
MMVKNPSSNGVLTATAFSDSKTRPERGVGGEAAGRPYRGVRMRSWGSWVSEIRAPNQKRRIWLGSYATPEAAARAYDAALLCLKGSNAVLNFPAASSSXLILLHIRXSSHQRADSRGHPDDDPAAAGGDMSPRSIQRAAAAAAAAIDDDAGMGASAADDRCSSSAGATTPTSASLSTQGSTADHVGQEQHATTTAAASTGSPPEGKEE

SEQ ID NO: 245901 - protein, 66 aa, Zea mays
  Clone ID: MRT4577_155844C.1.pep
VREDMHLAGHRVLSLIHQHGPALKVSWRHSLTLLVDACFRCNPAADAAYTVLSLSIDRSSLHCKQL

SEQ ID NO: 245902 - protein, 158 aa, Zea mays
  Clone ID: MRT4577_155845C.1.pep
MRPPPKPASGGGATQLASRPTSNRPGGGVLRLRLRLLQAPAVVALAAALAVSSAATPPPAPAPAPLCNLPPTLSGSDGGGRQGEANRIRHPKSERAARCTSKCVSTCVLGGYGAPGVAGPFNIRRPLVVFKDTFRSRQYCLVECSDICNLLKDGEDDQ

SEQ ID NO: 245903 - protein, 65 aa, Zea mays
  Clone ID: MRT4577_155846C.1.pep
GTYTAHENRPRYPRSFTLSLTLGDPWPPGLTPAKGQRRGDSPRAARRGTIDGETNGGPLLDGVPR

SEQ ID NO: 245904 - protein, 62 aa, Zea mays
  Clone ID: MRT4577_155847C.1.pep
CLYLVIFVHARIVEQYEMHEVDIECLGKDEKSPIMHITRSGRRGYASVPTFLDPVMFASSYW

SEQ ID NO: 245905 - protein, 96 aa, Zea mays
  unsure (1)..(96): unsure at all Xaa locations
  Clone ID: MRT4577_155848C.1.pep
PTSERYVRRGPVXTAYGSRPPRSERMEFLGPAYYGKYGPAAIGGVRRLRNAAMNSAVCLRKDGDRRENVPSFQVFSRSRLGREDSTPYWRPQCRRP

SEQ ID NO: 245906 - protein, 159 aa, Zea mays
  unsure (1)..(159): unsure at all Xaa locations
  Clone ID: MRT4577_155849C.1.pep
MDVSGTGAGAKGKKGAAGRKAGGPRKKSVTRSVKAGLQFPVGRIGRYLKKGRYAQRVGTGAPVYLAAVLEYLAAELLELAGNAAKDNKKSRIIPRHLLLAVRNDEELGKLLAGVTIAHGGVIPKINPVLLPKRTAEXGGLXEPKSPKKATKSPKKTTKA

SEQ ID NO: 245907 - protein, 53 aa, Zea mays
  Clone ID: MRT4577_15584C.1.pep
THTRSLSWRRPSVVLKDGEYSSSYHYLAPKRHNVGHPRRSSSLCASLSIEPIR

SEQ ID NO: 245908 - protein, 97 aa, Zea mays
  unsure (1)..(97): unsure at all Xaa locations
  Clone ID: MRT4577_155850C.1.pep
NSARGKKYSSTVATIFTGLASAAFLGHTLTINFLLGISVVFISMHQXTDLLLLLVDLCCIVCHVSYYLLSXFFSPLAKVKDDKPADLIELEDTQNHR

SEQ ID NO: 245909 - protein, 201 aa, Zea mays
  Clone ID: MRT4577_155851C.1.pep
GRVGGNRMNVGTARGGAMAFKLDTLLKLADVKGTDGKTTLLHFVVQEMVRSQKPPARAAEGPDIVTGLAAELNNVRKTATVDLDVLTTSVSSLSSGLSRIKALVGTDQLLAGDERGQRFVAFMAPFVSQAEEVIRELEDDERRVLAHVRDITEYYHGDVGKEEASPLRIFVIVRDFLAMLDRVSKEVRGARGCHGSNQTLP

SEQ ID NO: 245910 - protein, 97 aa, Zea mays
  Clone ID: MRT4577_155852C.1.pep
SFHNADPAQHHALFPTLLLAVRRLPFPGVHRTRALPGPDVLTPLARRLEGLAYAATSHPVLEPLFGAHSHLFYFFQGRMRLVAARRATVLFGGHCFA

SEQ ID NO: 245911 - protein, 148 aa, Zea mays
  unsure (1)..(148): unsure at all Xaa locations
  Clone ID: MRT4577_155853C.1.pep
ASGGKGGFSSQRHHGKSQSHVAFENTSTNVAASQMRNALNRRADTVTDPAEGRYFETEMDNFFALFRRYLNDKAKGTAIDWNRIAPPKADQVVSYDDLANTXRLSXYFFFLAVVNLNGGLGTSMGCLGPKSVIQVPQRMSFLDLSMRQ

SEQ ID NO: 245912 - protein, 87 aa, Zea mays
  unsure (1)..(87): unsure at all Xaa locations
  Clone ID: MRT4577_155854C.1.pep
TEESKTGTMSPKLGSLVSLNVLNVTYNQISGLISTTVXKLSSLYELNLAQNYLSGLIPSDIGKLQELQSLLDLSXNNLSRHIPERSH

SEQ ID NO: 245913 - protein, 314 aa, Zea mays
  Clone ID: MRT4577_155855C.1.pep
NLHPVQNPTAAMVRRLFLHHARRRLHSGTASSIPLSTPIFAIFGANTGVGKTLVSAGLATALLSSPSPAVSSVAYLKPLQTGYPVDSDASFVFSRTPALLRAFPPCRATHLIASCRTFFQSPAVEAKAESLHESQEKVVTYGAGAAEQTKVLACCTAYAWREPVSPHLAAEREGMAAGDDEVKGCVEQWLLEEGIGEGGEVWKILETAGGVASPSASGTLQCDLYRPFRLPAILVGDGRLGGISSTLSAYETLLLRGYDVSAVILEDRELSNDKFLLSYLRNRVHVLILPQIPEDPLDDLTDWFSESSSIFIFL

SEQ ID NO: 245914 - protein, 62 aa, Zea mays
  Clone ID: MRT4577_155856C.1.pep
IRQLFGGFTQTPSYSKTPQGTIPGRPIHITIPNFTRAHYAEIILGANHTIIDDGRKEHHTTK

SEQ ID NO: 245915 - protein, 117 aa, Zea mays
  Clone ID: MRT4577_155857C.1.pep
GFWVFLKFFFFFFFFFFFFFFFFFFFFFFFFFFFFFLQKKKRQPLHFPMGGGGQNPFPFLKHLYFILFKKKKREKKPNLRTKNPFFSKKPPRKKKPIPTHCFNLKRRGWQKSNPPHP

SEQ ID NO: 245916 - protein, 100 aa, Zea mays
  Clone ID: MRT4577_155858C.1.pep
LASSVDVRPSCSASEGVLPAFSAGPWPRHGLQGGVQADLPPGSALGARSWPEAEEVGEVHLMLHAVRAVHSWALVGMRKTPTSCVGAHGALLPRYLSHES

SEQ ID NO: 245917 - protein, 81 aa, Zea mays
  unsure (1)..(81): unsure at all Xaa locations
  Clone ID: MRT4577_155859C.1.pep
WNADGSDDDAEHXESXTQEPLIYGETEEHFTXCDERVERHDDMDPQQSGLTGIDDDGAENPCAWQHRGTARACTGLDVVHQ

SEQ ID NO: 245918 - protein, 50 aa, Zea mays
  Clone ID: MRT4577_15585C.1.pep
YLIEYYTSIQNTYTMIIITIHYPYLGMGSRWLIEALNSPKYVSHVGFDGP

SEQ ID NO: 245919 - protein, 86 aa, Zea mays
  Clone ID: MRT4577_155860C.1.pep
LGAASKAGMPYQDHCTNRITEQEARLTKQYWRCQAAPATSSCRSLKDTFSSSAIGICVCPGSHASSYSHSSPASSSTPTKPSSTLS

SEQ ID NO: 245920 - protein, 96 aa, Zea mays
  Clone ID: MRT4577_155861C.1.pep
MRGEVGGGSCAGEEIQRPELPILQYAFTETSTVSRRSSPNIRQRPSGGAHPTNSIRSQRRLSRRRTPSLSSLLAAMAHVVGFPLVMNRGGVGQGWS

SEQ ID NO: 245921 - protein, 98 aa, Zea mays
  Clone ID: MRT4577_155862C.1.pep
MYVVFSSAPSNETLAPTNRHKNTKVREAQSRAKDSTAHKRGTQKNNHRNHAQQSRIQTHGKGAGCNSSKTTNHLQKHQVNPKHKQRGEQETPYSNPES

SEQ ID NO: 245922 - protein, 53 aa, Zea mays
  Clone ID: MRT4577_155863C.1.pep
LRSRTHKLWSSLMITWISLNIINILLLITLRKSGSRALHVITDILILYRLLAE

SEQ ID NO: 245923 - protein, 78 aa, Zea mays
  Clone ID: MRT4577_155864C.1.pep
TNKMKSLSFILLSLLLIAPIWSQRSLPSKCKCVPLAVCSRSPNFQPRSTFNKNQCPRHQVCCPFPQIVDSVEEDESEV

SEQ ID NO: 245924 - protein, 73 aa, Zea mays
  Clone ID: MRT4577_155865C.1.pep
RSLSISESATSSSGFVREVTESGDTACASCAVDGVGGGVDGMMRPETAAGSPEKEASRPSRSMSGKRSMSMGT

SEQ ID NO: 245925 - protein, 104 aa, Zea mays
  unsure (1)..(104): unsure at all Xaa locations
  Clone ID: MRT4577_155866C.1.pep
MVDAMVVSTILAGSXSKGVPQLGRRVTSFAVLCSIKRINTEMPYGIGGGITVDVNVNGKNGKGKGMVKFVYKYGANFDGYIPIYNEDHWSDNGDVNVDVNSGLK

SEQ ID NO: 245926 - protein, 96 aa, Zea mays
  Clone ID: MRT4577_155867C.1.pep
STGSLAVASLVQIAGPVCLHDKDGSHGSYAAWIGHSAHYGDLPLCEPGDPHHPSPRRRLLFPLSRAGEAERVGQRQESEFESPRSRKKEESFPWLP

SEQ ID NO: 245927 - protein, 83 aa, Zea mays
  Clone ID: MRT4577_155868C.1.pep
LRNNQQEFLPSAQWNEFSCSAALVIIPLGGDCESTMRSGTSTSPIPLPGMICLSTILKSSRLSLTAMLIIFRFRESGPTSRVG

SEQ ID NO: 245928 - protein, 191 aa, Zea mays
  Clone ID: MRT4577_155869C.1.pep
MGFNPPVPQQDSNWEIRVAVQVSLLLQVFLIFVGPMRKRSSSPFPRFVVWSCYLLADWVADLALGLLLNNMGNIGGGGSSSSSSSFGLKRGGTGATAGNNDASSSSSPIIFAFWTPFLLLHLGGPDTITAYSLEDNELWLRHLIGLLFELFSACVIFFCSLRGNPMIPATVLMFVVGVIKYAERTYSLYSG

SEQ ID NO: 245929 - protein, 207 aa, Zea mays
  unsure (1)..(207): unsure at all Xaa locations
  Clone ID: MRT4577_15586C.1.pep
ITSSSLLLLGTTHSPVSDLRSLRRSKMLIFVKTLTGKTITLEVXASDTIDNVRAKIQDKEGIPPDQQRIIFAGKQLXDGRTLADYXSQKESTLHLVLRLRGCMQIFVKTLTVKTITLEAESSDTIDNVKGKIQDKEGIPPEQQRLIYAGKQLEDGRTLDDYNSQKESTLHLVLRLRRGMQIFVKTLTGKTITLEVESSDTMDNDQDE

SEQ ID NO: 245930 - protein, 797 aa, Zea mays
  unsure (1)..(797): unsure at all Xaa locations
  Clone ID: MRT4577_155870C.1.pep
MKTYEEKICQGIENSATAVGKTLLRKLLNSIKLLRSILENSGQSADTVQMVLEEGTDSLSEIARSVVMTAHLMPSLANVSVNDESPFLFSNMWKVIVDSEEPLDCQEGEFAKRLVWELPDSSLDRQLAPGQSARRKLALGESASRRVRDNQLPEPTGQFSRGLNTSNASSGHTRRDTFRQRKPNTSRPPSMHVDDYVARERNIDGASSASNIVNSTPRGTLSGRPPSIHVDEFMARQRERQNHAPAPTGDAPQAKSQTTSLDDSLRTKPENLRQPKTDLDDDQEIEIVFDEESGSDDKLPFPQPDDSLQSPPVIIGENSPGPVIDETENQENERVPFFQRATSIPKDDENLGIGISSQTAMLSEANSSLELKHSVSSPGKNSFRDHAEESNYDSIGVSGRPSLQADHQQLSRRHEKRSPRKFSETSLSNGFHGREHRHSNNHPPLPPMPPPISSVSMQNTDSVNRQSSSFSARDRPTPNPSGYPTQSFDSSMPSAFTGLQGQTQYMLAGAGSSSANELPNVEAKLLWNTFPANRIPLETFSSGLPARPMPPLTPYSAVATQHATMNSGSPANLYSQGSVVQPSPTASIISDSNLAMNSASGSMLASNLLPSXHHNFXSRPSMPTPFFGTPLQQVQFSSGLPQNISNPQPPVSIQPRPPPPPPPPQQPHPSQTLQQLGAIQLPHQDQQHSYPHSAILPQVTLQFPNQLPIPQVQLYHQSQQESGQTLRQVGEQSQLQNQGMQADSFSQQQQDSGINLNQFFSSPEAIQSLLSDREKLCQLLEQNPKLMQMLQDRIGQL

SEQ ID NO: 245931 - protein, 75 aa, Zea mays
  Clone ID: MRT4577_155871C.1.pep
KVFPDPIGPTAGIEFRKNTQADPPKGKPAFSRAKGFLGGEPKIPLGEGLPLMVSGFPKGIFGDQDAAAPPGNQQG

SEQ ID NO: 245932 - protein, 140 aa, Zea mays
  Clone ID: MRT4577_155872C.1.pep
YSRFQATPFKRSLSFLKSIAEFSRIPVVVTNQVRSQSNDDGYHFSFEVDRKDGSNCAERFDSHLVAALGIQWAHAVTVRLVFESHSGHRFIKVAKSPMSPAVAFPFAVESSGITLLSDESIDVTGPDITSIRCQGQNVLA

SEQ ID NO: 245933 - protein, 192 aa, Zea mays
  unsure (1)..(192): unsure at all Xaa locations
  Clone ID: MRT4577_155873C.1.pep
MGGNDYGPDIDIDXLETTDSCVGEWKHYRYKIIVNYQGTDTTPSCVNFTDFERLIXDAGKNRARMKPINSVFDDKRLIHXQAYVMEYVHSDIMLGPCQVISGAGEKPMIAAQHKGEEKHLVCEEISSMDLIKMREIAEADLGSTIKNAVVTVPDYFNDSQRQATKDXAXMIAGLNVLRIINEPTAAAIAYGL

SEQ ID NO: 245934 - protein, 80 aa, Zea mays
  Clone ID: MRT4577_155874C.1.pep
IEWGELGHGCEGLIGRFGSSNKKNITILKNVNGILKPSRMTLLLGPPSSGKSTLMRALAGKLDKNLKVSGSITYCGHPLS

SEQ ID NO: 245935 - protein, 103 aa, Zea mays
  unsure (1)..(103): unsure at all Xaa locations
  Clone ID: MRT4577_155875C.1.pep
VSELRNRSPSXEWRMVLVDLRNHGRSAGIKGSXPPHNISTAAKDLADLVKARGWPWPDVVVGHSMGGKVALDFAESCSRGVYGDSANLPKQVRGATISFFGKI

SEQ ID NO: 245936 - protein, 161 aa, Zea mays
  unsure (1)..(161): unsure at all Xaa locations
  Clone ID: MRT4577_155876C.1.pep
MCKHGVPWDGVTMSTTLVGLCRTKLIDEAATLAEMLVRGRGIDGLGVVGWNALIDGYCXLGXMAATLVMVERMTAQGLALDVXGYNTLSAGFCHSGDADVLWEVAERMKADGVEPSVGTHTALIGECCKMKQIEGGVHSVRGYGQGMSRKMRLFGGNLLPI

SEQ ID NO: 245937 - protein, 168 aa, Zea mays
  unsure (1)..(168): unsure at all Xaa locations
  Clone ID: MRT4577_155877C.1.pep
IRHEELVSSFFFIFFYFFFFFFFFFFFFFFFFFFFFVFFFLGEGKKKKQEREGKKKPPRGGKKNPRKKKTPKXGPPKKPGAPPPPKKKLGGQKPKPPKRDPSPLNAPTGEKHPPPVWAPGGGEKKKNQGEAGGPPKGFPGPPGNFGPFPGPIFPPAGEKPPPVFPGGA

SEQ ID NO: 245938 - protein, 48 aa, Zea mays
  Clone ID: MRT4577_155878C.1.pep
GGVSRPRSAGFKGVCMSDPNWAQVCFQEGYGGGKFGGIMGQCKCLREC

SEQ ID NO: 245939 - protein, 74 aa, Zea mays
  Clone ID: MRT4577_155879C.1.pep
SVKSMACNRTSESSSPVSFATTGAPLASSLSVNRAVTPPQPICWHTYSRITMLPSVTKPAAIALQGMGNSPTLL

SEQ ID NO: 245940 - protein, 79 aa, Zea mays
  Clone ID: MRT4577_15587C.1.pep
QKNWFSPLKVSDLLPLTSYAFSFFYCHINLFTWPFFNTFSFGKTLVLPNYIAFKTIPFSPITLILKNPFPIDIPNILAP

SEQ ID NO: 245941 - protein, 66 aa, Zea mays
  Clone ID: MRT4577_155880C.1.pep
FFFSGWPFCFFPLKRKGVGLTTPKWTLTYSVGGGNVTFKTIFLWRFPEMEKDWKFLTTRKRVKLPV

SEQ ID NO: 245942 - protein, 83 aa, Zea mays
  unsure (1)..(83): unsure at all Xaa locations
  Clone ID: MRT4577_155881C.1.pep
VRFLSKMFHPNVYADGSICLDILQNRWSPTYDVSTIXTSIQSLLDEPNPNSPANSQAAQLYQENKREYEKRVSTIVEQSWNDS

SEQ ID NO: 245943 - protein, 238 aa, Zea mays
  Clone ID: MRT4577_155882C.1.pep
FATISLSDDCCIAPLSLCNDCWAAAALRQSPGVDTFVGIFTGDEHAPGSSHKYWKIFIGNSSYVPCLYWRFFRVMIDANSSFSGGAQLQPSTSMNTYSFMPAPSSPISFSSNNISGSSVIDGSIVQQSPPQDQAQKQRSSSLTSHPIIEAGGALHAPKKLRIDVRQDELQQQLIQRLLHGQGSLHLQGQQNPQLQALIQQHNLAHMQQRQQQLLQSFAQTQPSQIGIPHQPQLPPSLA

SEQ ID NO: 245944 - protein, 112 aa, Zea mays
  Clone ID: MRT4577_155883C.1.pep
AASPSVLAALSEPANALSLPTWAVHVSSVAEWVTAMWLVWDYGEKTGLKGWKGLSWGMVPLLGGAMCACTWHFFYNSESLEVRYFLWVKSAVSCLLFADMIIKRICPQFLCS

SEQ ID NO: 245945 - protein, 118 aa, Zea mays
  unsure (1)..(118): unsure at all Xaa locations
  Clone ID: MRT4577_155884C.1.pep
PAGMASAXVPLAASPGTAASVETAGLAALHASSFILSVTWRGSQMIFYSHTVLMQKSRWAPCGSPRTSSSSSNVRFFRASGGGLKVQCSLWPPAQMQWNHATQGQSCEELVPNRHPTS

SEQ ID NO: 245946 - protein, 165 aa, Zea mays
  Clone ID: MRT4577_155885C.1.pep
KKKKKKKKKKKKKKKKKKKKKKKKKKIKKKKKKKKKKRAPGWPRGFRAGPWEVPTFSFWGAFLDLAELRAEGVPWEKLFSAHFPPLLPAGMLKGKPRGALRGALTNFFGFGLLAGFPLENLDGQLLFLIRPPPGKGRFVFGPPGCFFFYQVKGERVFRLYPPGPE

SEQ ID NO: 245947 - protein, 88 aa, Zea mays
  Clone ID: MRT4577_155886C.1.pep
PNPFFYKKGWPFFQKAPPPRASSLGLALKAVFVSKPQGEKQTPKGFPGKFFSPLAVFSPPPKIKSPPGAQKFFPPPKNGLGGVPPQLP

SEQ ID NO: 245948 - protein, 51 aa, Zea mays
  Clone ID: MRT4577_155887C.1.pep
GLVGKKKKKKKKKKKKKKKKGKKKKKNKKKKKKRMNIFKVSFFTYSYLLTY

SEQ ID NO: 245949 - protein, 65 aa, Zea mays
  Clone ID: MRT4577_155888C.1.pep
SLVWLHLYPPKNIFYRFIGGWVKKITFFHKNKPPNMDWGGTRAHFPTNLNFPVFPSTQILLENIL

SEQ ID NO: 245950 - protein, 68 aa, Zea mays
  Clone ID: MRT4577_155889C.1.pep
FQLTMCESGNQRPCAALLHGEFKLFYFAQLILSLWKIPTYENLVWSIMAIHLYHCLVCLLSSGLGSLG

SEQ ID NO: 245951 - protein, 45 aa, Zea mays
  Clone ID: MRT4577_15588C.1.pep
KEGIPPDQQGLIFAGNQLEDGRPLADYNIQKEGPPPLVLPHPGGQ

SEQ ID NO: 245952 - protein, 107 aa, Zea mays
  Clone ID: MRT4577_155890C.1.pep
PVQPGARGGRPLRGRAPVPFGRREARGRCGHFLMKGPRSRSLRWGDVRGPMPGGQHRVGAPTLTWPVDAASALTGAENLPWEGGVPSTIVFEEPNAYYFFFYSTEGG

SEQ ID NO: 245953 - protein, 97 aa, Zea mays
  unsure (1)..(97): unsure at all Xaa locations
  Clone ID: MRT4577_155891C.1.pep
IPXFIGXRXVGIISFLLXSXXYAXADANTAAIQAILYNRIGDXGXILALAXFXXHSNSXXPXQIAXLNANPSLTXXLGLXLAAAGXXXIXLHPDPSA

SEQ ID NO: 245954 - protein, 47 aa, Zea mays
  Clone ID: MRT4577_155892C.1.pep
IGVKGVEVRKPEQLLGIDSLIIPCGESTTMAKLANYHNLAAAALDCW

SEQ ID NO: 245955 - protein, 82 aa, Zea mays
  unsure (1)..(82): unsure at all Xaa locations
  Clone ID: MRT4577_155893C.1.pep
XXXRDLPSTFFLSKKKETARILSSNRKNEGNARSRRSHLLSRYQFTPRSTKLLMHGDRASKRGRQALSHSLPVLEVNDDDAD

SEQ ID NO: 245956 - protein, 268 aa, Zea mays
  Clone ID: MRT4577_155894C.1.pep
MDEEEEEDEKEEQDVQYCVAEMTKPGQRLIIARGGKGGLGNAFVMKEMRPSKANRHEKIARLSTGQPGTESILILSLKGMADVGLVGLPNAGKSTLLSALSRAHPEIADYEFTTLRPNIGSLIYEDYFSVKVADIPGLIKGAHENRGLGHAFLRHIERTKVIAYVLDLAATLNGRKGVPPWEQLHDLVAELEHYQEGMTRRPSLIVANKIDEEGAEEMCQELKRRVQGVPIFPVCAILQEGVPDLRVGLRNLMDDSDPQGKNFEKNDC

SEQ ID NO: 245957 - protein, 39 aa, Zea mays
  Clone ID: MRT4577_155895C.1.pep
ARCWLRSSLLPFCMDMMLASVWSSSQRSALFKLARRVSS

SEQ ID NO: 245958 - protein, 139 aa, Zea mays
  Clone ID: MRT4577_155896C.1.pep
VKVADIPGLIKGAHENRGLGHAFWRHIERTKVIAYVLDLAATLNGRKGIPPWEQLHDLVTELEHYQKGMTRRPSLIVANKIDEEGAEEMYEELKRRVQGVPIFPVCAILQEGVPDLRVGLRNLMDDSDPQGVDFEENDC

SEQ ID NO: 245959 - protein, 67 aa, Zea mays
  Clone ID: MRT4577_155897C.1.pep
SVAGAKLRVIKSPLRRMKQILILSVSRLLIRLLNTRLSARRNEYYRVTTVAQIDDARRILNVPRLLN

SEQ ID NO: 245960 - protein, 79 aa, Zea mays
  Clone ID: MRT4577_155898C.1.pep
CNVTSTMLNSASFFPHPIELVAAGSCQLLFSNHTHMLGSSVCAISKSKVASCNFLVFKYNFVVTKGVILYYCCSPEHVL

SEQ ID NO: 245961 - protein, 76 aa, Zea mays
  Clone ID: MRT4577_155899C.1.pep
FGSSPRPPPRFLTPEPPTRPRGRLPTRGGAPGQRTPGVAEVPDTTPEVAPLVRHAGTTSNPTLGGRPPHYHPITQP

SEQ ID NO: 245962 - protein, 121 aa, Zea mays
  Clone ID: MRT4577_15589C.1.pep
LRMQVRDASTFNGEHLPPSMPRPRKHTTERANQRPGKIAKGRRRRRPFHSTWAFHRRRGGGPSIDGAWRRLRRRDFLGRVIDGASVGLRAEGGRGEWEGGRESSDCGRGRKGNAGERAGVA

SEQ ID NO: 245963 - protein, 130 aa, Zea mays
  Clone ID: MRT4577_1558C.1.pep
GVVPMGPAPELRPRARSVFDVLPPAIGAAVPAPVTVPGPSAPPVLVPAHEQSLGKTSSRSPMSPGVLVHPATAPSGGHPSQGTGAAFPSYPAGETFPGAAASACPRLMYNESGRHPVSLRYVIAVYNRHK

SEQ ID NO: 245964 - protein, 57 aa, Zea mays
  Clone ID: MRT4577_155900C.1.pep
RRRRSTLTGKPLFYHPCWIAGLFGLIIDGPGGGRPGHADEAGEAREAGGEKRHAAAA

SEQ ID NO: 245965 - protein, 96 aa, Zea mays
  Clone ID: MRT4577_155901C.1.pep
KGGIESILIYLPPNMLTCVLSTLPEKLKFNLQVTKDIIKAQLEEPVKLHNTNTPVGYRYWSTELGIRISFSKFCCLVARGIEIWNQRPNSLELDYN

SEQ ID NO: 245966 - protein, 446 aa, Zea mays
  Clone ID: MRT4577_155902C.1.pep
MAAAAGDGAGEARARALLQQHRPFATPPGEYHHFGAPSAATDEMVEAVVLRTPLKRKHNDRTENEAAESNDWMSPGYANAGSSPVPTPPSGKGLKASTKPKATKGQKSGPQTPLGFGSPGNPSTPVGGCRYDSSLGLLTKKFLNLLKGAPGGIVDLNNAAETLEVQKRRIYDITNVLEGIGLIEKKLKNNIRWKGVDDSRPGEVSDDMSILQADIDALTLQERNLDERISEMRDRLRGLTEDENNQKWLYVTEEDIKSLPCFQNQTLIAIKAPHGTTLEVPDPDEVNDYPQRRYRIVLRSTMGPIDVYLVSQFEEMSGMETPPRPTQTISMDSLENPRTPLAADCNKVTGMESNIHGGLILPSDAPSSSQDISGMMKIVPSELDADTDYWLLSDNTGVSMTNMWETGPDEWDGIEKFNAEDFLEVGTPQQQDKPADVVDDDPSCII

SEQ ID NO: 245967 - protein, 237 aa, Zea mays
  unsure (1)..(237): unsure at all Xaa locations
  Clone ID: MRT4577_155903C.1.pep
IGYLEAGRDGFRHSLPDGVMKLTDLIIAAKVXMLCVSSVIVEYACTAALKHPGDLVIXVLEIPPPXALQALXMERLSVLXLEXDIVSEAXDLFVTTXTDNKDLLMADHMNNMQNNGLVCHIEPFDDQNDMLGLDTYSGCRCIIIQPHTDRCAFPETHADVVVLADGRLXNLGXATGHPSFVMCCSFATLAIAQLELWKEKRSALYXEEGGMCSPRTLHDNVAALHLNKLGAKMTKLT

SEQ ID NO: 245968 - protein, 176 aa, Zea mays
  unsure (1)..(176): unsure at all Xaa locations
  Clone ID: MRT4577_155904C.1.pep
IAEFIATLLFLYMTVATLIGYKHQTDALALGDDELCGSVGVLDIFWDFSGMIFCLDYCNVGISGGHINPAGTLGLFLGRKVSLESALLYILAQCXLGAICGVWLXLEFQNAYFDRYLGXGACSVMYGYLCDNGLVAYIIGSFLLGYTXFSVMDRNRNGRDYYDACLGPLHIGLKVV

SEQ ID NO: 245969 - protein, 84 aa, Zea mays
  Clone ID: MRT4577_155905C.1.pep
KHSWFRPVAFLSKSGPHLTGLSERAPVPGGFSGTPSWGAPINPTFTLCIPLGPPPHCPVALPPGHVGFFSSLIPTLGGSSRVSI

SEQ ID NO: 245970 - protein, 476 aa, Zea mays
  unsure (1)..(476): unsure at all Xaa locations
  Clone ID: MRT4577_155906C.1.pep
MASSSTYLADDGFAAPRLFSQGVSYTYDDVIFLPAYIGFPADAVDLSTRLSRRIPLSIPCVASPMDTVSEAAMAAAMASLGAAAVVHCNTDPHAQAAIVRAAKSRRLPFVSSVPFFSPSSAPTLNDFAGSEYALVTERGDSLSRLVGVAVAADAVSREXPVSVSHALDGLDYAPLVSDDGEVVDLITVKDVERIRSYPKLGKPSLGVDGKFVVAASIGTREDGKGRLERLVKAGANAIVIDSSQGNSIYQLDMIKFAKKMYPEVDFIGGNAVTIAQAQNLIQAGADGLRVGMGSGSICTTQEVCAVGRGQATSVYKVSSYANDHNVPVIADGGISNSGHIVKALSLGASTVMMGSFLAGSYEAPGTYEYKDGRRVKKYRDMGSLEAMTKGSDVKYLGDTFKLKVAHGVVGAVADKGSVLRFIPYTMQAVGQGXGADSLRSAHDLLRSETLRLEVRTGAAQAEGGIHGLVSYVKKAF

SEQ ID NO: 245971 - protein, 110 aa, Zea mays
  Clone ID: MRT4577_155907C.1.pep
KICIHIHHIILNFLACHFHFVSLADPFVYSRRGISIYSPTFIILLGVTLFPCGYIISSLATNYDSHLFSLSLSLALLPLFRRMCRAVYGAYPLYGLFPYLRLNAISFLFP

SEQ ID NO: 245972 - protein, 238 aa, Zea mays
  unsure (1)..(238): unsure at all Xaa locations
  Clone ID: MRT4577_155908C.1.pep
MASNSTYLAADGFAAPRLFSQGVSYTYDDVIFLPAYIGFPADAVDLSTRLSRRIPLSIPCVASPMDTVSESAMAAAMASLGAAAVVHCNTDPHAQAAIVRAAKSRRLPFVSSVPFFSPYSAPTLNDFAGSEYALVTERGDSLSRLVGVAVAADAVSREVPVSISEYMRPTPRSASAAFDFEEAATFLADEGLDYAPLVSNDXEVXDLITAKDVERIRSYPXLXKPSLXANXKXVVAAS

SEQ ID NO: 245973 - protein, 83 aa, Zea mays
  unsure (1)..(83): unsure at all Xaa locations
  Clone ID: MRT4577_155909C.1.pep
GDTLKLKVXQGVXGAVHDKGSVLRFIPYTMQAVKQGLQDLGADSVQSAHDLLRSETLRLEVRTGAAQAEGGIHGLVSYVKKAF

SEQ ID NO: 245974 - protein, 109 aa, Zea mays
  Clone ID: MRT4577_15590C.1.pep
FSGKQLEDGRTLSDFNIQKESPLPLVLPLRGGMQIFVKTLTGKTITLEVERSDPIDNVKAKIQDKKGIPPDQQGFIFFGKQLEDGRPLADFNIQKESPLPLVLPPPGGQ

SEQ ID NO: 245975 - protein, 182 aa, Zea mays
  Clone ID: MRT4577_155910C.1.pep
ALSSSHRVLPSISCARPPFSCDVGHRISSPSIHRCSARAPFPYTLVVGAACRAPLLPPRPSSRSIQATAPSSLYVVAPTPSSVSSSLVRGSLCSLDSAPCASVCSLQRPAHRSPRHSCSFVYRWRRIPGFDGVKRGPCALLARCSVEDFNQRTSFESNCVVVNRFTIHVIGSKFDAYIGSRY

SEQ ID NO: 245976 - protein, 222 aa, Zea mays
  Clone ID: MRT4577_155912C.1.pep
MAAPWLLACSLLLLSLATFHGAEGAIGVNYGMIANNLPAPEQVVSMYKAKNISYVRLFHPDTTVLNALRGSGIGVILGTLNEDLPRLASDPSFAASWVATNVQPFAGAVQFRYINAGNEVIPGDAAARVLPVMQNLESALRSAGVTGVPVTTAVATSVLGASYPPSQGAFSEAAASVMAPIVSYLSSKGAPLLVNVYPYFAYSSSGGKVALVYALMTADAGA

SEQ ID NO: 245977 - protein, 128 aa, Zea mays
  unsure (1)..(128): unsure at all Xaa locations
  Clone ID: MRT4577_155913C.1.pep
RQLPDSSPETNEPRIESIVQMAHRSDVDSFAELTGCPVLSSEDSPRVMNSVRASCEPSVTDXKLDHSTXRTLEEHCGSLAQNGMKDMLTFIIIRNSEVRSGPMSKVAAQACANIPSNPWSPIHMGFCA

SEQ ID NO: 245978 - protein, 57 aa, Zea mays
  Clone ID: MRT4577_155914C.1.pep
SMFSSAIAFFKHSKPYLKLCLSMKAMRIFPVLGHDLPVNAPNTSSLFLLSQCIMLSH

SEQ ID NO: 245979 - protein, 103 aa, Zea mays
  Clone ID: MRT4577_155916C.1.pep
MSRGRARRPVPGSGTRAGALEVLLLLAYDVLLAAYPAAAVEAEAGDEEAVDYGASLSKSLLYFEAQRSGRLPHNQRVPRRCHSGLTDGLQHGVDLVGGYYDAG

SEQ ID NO: 245980 - protein, 76 aa, Zea mays
  unsure (1)..(76): unsure at all Xaa locations
  Clone ID: MRT4577_155917C.1.pep
FGFFFSKKLTRPFMTTDYMNYIYNYYTVHKHXAWKHLTLXDCKTLVLGEKSDPLFGITNPEGIPRGKAGSFYVQES

SEQ ID NO: 245981 - protein, 155 aa, Zea mays
  unsure (1)..(155): unsure at all Xaa locations
  Clone ID: MRT4577_155918C.1.pep
GCFGLGAFFPSFXAXPSCLSCLAFGFCCGLSXXALLCLVAXXRVRXLXXCSAPGCXXXLXGXVXXXWLXFPXLRXXFFLAVXCFLCVSXWCPRRVPWLWVAGGGWXLCVGCVXPXGXXXXVXXWCCAGARSCRCCPLPLXXXXPRXPPYFLYRVR

SEQ ID NO: 245982 - protein, 73 aa, Zea mays
  Clone ID: MRT4577_155919C.1.pep
MATNILSVLFLIALDVSSTNSFIIPQCSLAPSTIIPQFLPPFTSMSFEHLSIQANIHQQSLSSNFLQQPIIQL

SEQ ID NO: 245983 - protein, 84 aa, Zea mays
  Clone ID: MRT4577_15591C.1.pep
ILRRHQGLFKGLPSPLFVSPLGGEVRRVSFDNPGWGPPVPFRFKQFFWGPRAPAPVFFLNSEKNQKRGPGFGSPPFFFFRPCCC

SEQ ID NO: 245984 - protein, 85 aa, Zea mays
  Clone ID: MRT4577_155920C.1.pep
KKNPPEPPRKKKFPPVGQKSLAPLPPPCQDHPEKANLIFPLPQANIKTPLPPNTQTPFFSPLAYSFIQLAQKFFRTLKRTFNSPQ

SEQ ID NO: 245985 - protein, 163 aa, Zea mays
  unsure (1)..(163): unsure at all Xaa locations
  Clone ID: MRT4577_155921C.1.pep
RKTSKCDAAEESCQAKCHLEKRLQAEILAHQGVRKKIEGLKLEAKRKDDEIGQYKEHIAELVLHSEAQSLLFQEKYNEMEHMVSRQRFGPHESYSETVPKTEKPSGRARGSSSPFRCISSIIQQMNSERDQEILVARQRIEXLEGLVSCKQKXVCLLTSRLAA

SEQ ID NO: 245986 - protein, 68 aa, Zea mays
  Clone ID: MRT4577_155922C.1.pep
CRMDPRIRMNNHIFYFFLRNIAQPGEINRGSVTLITQGCIWTIGPSRCYPLNTSTSTGRSINTRKWRS

SEQ ID NO: 245987 - protein, 124 aa, Zea mays
  unsure (1)..(124): unsure at all Xaa locations
  Clone ID: MRT4577_155923C.1.pep
VSFRLRFYLRGALERSAWSGEATLSRLVGALIAFKPLYSVLKLASREVIIRXYLNLFHAYDEGNLSWLAATEAEPATMSIAKRAIPEATSIEEANQIVCGNWLNVIEEHRLKYLGSSQVTWTLA

SEQ ID NO: 245988 - protein, 67 aa, Zea mays
  Clone ID: MRT4577_155924C.1.pep
MAKFNVVQKKRRALIADKKRQLHGDPLTGKLKIKDQPLSLSGKRRRKLFKKWRRDHKDALQNGLVHM

SEQ ID NO: 245989 - protein, 343 aa, Zea mays
  unsure (1)..(343): unsure at all Xaa locations
  Clone ID: MRT4577_155925C.1.pep
MAAILARAGVIATAGKGFSGRRRGNGIVVAAVTKTGAAVPQEGALERPAWSGETTLSRLVGALIAFKPLYAVLKLASREVIIRTAEKSNIPWREMTKEVLESDVYEVFERIQDPNLVYPDYYLNPFHAYDEGNLSWLAAAEAEPATMSIAKRAIPEATSIEEANQIVRGNWLNVIEEHHLKYSGNCQVNDILDIGCSVGVSTRYLAEKFPSAQAVGLDLSPYFLAVAAQKEEKLSRPKPIRWVHANGEATGLSSDSFDLVSLAYVXAITGLVKEAFRVLRPGGTIALTDNSPKXKVLEELSPVLFTLMKSTEPFPGQFLEFNMLQFNMYCELVLFFCSISYGL

SEQ ID NO: 245990 - protein, 242 aa, Zea mays
  unsure (1)..(242): unsure at all Xaa locations
  Clone ID: MRT4577_155926C.1.pep
MAAILARAGVIATAGKGFSGRRRGNGIVVAAVTKTGAAVPQEGALERPAWSGETTLSRLVGALIAFKPLYAVLKLASREVIIRTAEKSNIPWREMTKEVLESDVYEVFERIRDPNLVYPDCQLTSPFLSFPSVPLINFSIIFDQKIPYXSKVNWSTXANASFLLIXYLNPFHAYDEGNLSWLAAAEAEPATMSIAKRAIPEATSIEEANQIVRGNWLNVIEEHHLKYSXNCQVNDILDIGCS

SEQ ID NO: 245991 - protein, 71 aa, Zea mays
  Clone ID: MRT4577_155927C.1.pep
VGVSTRYLAEKFPSAQAVGLDLSPYCLAVAAQKEEKLSRPKPIRWVHANGEATGLSSDSFDLVSLAYVHER

SEQ ID NO: 245992 - protein, 72 aa, Zea mays
  Clone ID: MRT4577_155928C.1.pep
IPEACIYVWLPRFRRMSRHPRFSHAVIFFSFSLCSPIWNTQGNATSTVNNFLAHSLSHTTGTIFTPAKTFLP

SEQ ID NO: 245993 - protein, 81 aa, Zea mays
  Clone ID: MRT4577_155929C.1.pep
GLPVVRLPSDELVSAMAPHAELVGVEDEVPEAPDGVVPVCRSMAEYAHQDQNLSQLQSRVTVARSRHLTSVLAKIGWLAQQ

SEQ ID NO: 245994 - protein, 125 aa, Zea mays
  Clone ID: MRT4577_15592C.1.pep
NKNKTQRQKVKSLFVLLLKRTVKVLDLAVKSKTDSKPPSSCVCKFGTRAPSMASTCHLPLTARPSIDDVGVDLPLTVRGGGCGGEISWGESSTARAWDCGQIAGGESGKEEERAGIAGGGERGPG

SEQ ID NO: 245995 - protein, 33 aa, Zea mays
  Clone ID: MRT4577_155930C.1.pep
QLILTRVALFREQISRDVSILPKMLICFETWYH

SEQ ID NO: 245996 - protein, 92 aa, Zea mays
  Clone ID: MRT4577_155931C.1.pep
FLCSCFYVLIDYARAFACSVVPRVYARRLLPGILYYGLGRIDLRIWLASSFLCLGSGKCVFVPCFSPIFFQTPPYIRRPPVVSCEPRIIPAG

SEQ ID NO: 245997 - protein, 60 aa, Zea mays
  Clone ID: MRT4577_155932C.1.pep
IVRRERHLLIKLNYFRESCILSVFYLITCCHRSRVLLVYLLIPCLKNTHCGFYSFNYFFI

SEQ ID NO: 245998 - protein, 88 aa, Zea mays
  Clone ID: MRT4577_155933C.1.pep
CGDGKRAPRAHIHIVHTSDAKTSLLLMKDALHRPQVCLCETCPHNLAFSVPTRFRCEIRWWNTLCCHTWCHITEKIFGKLQMMDTPTR

SEQ ID NO: 245999 - protein, 82 aa, Zea mays
  Clone ID: MRT4577_155934C.1.pep
APPAFAFWLSVFSLGSSLAFYFFSPWVGFFVWFPPVLVFPLWGVFWSLPVPAPTFWGAPSGPGKTFQTISYFEGKRIFMCNN

SEQ ID NO: 246000 - protein, 182 aa, Zea mays
  unsure (1)..(182): unsure at all Xaa locations
  Clone ID: MRT4577_155935C.1.pep
MAPKILVILVFLAVASPAALAAFDVIEMLADKPTYSTFLKLLQDTKVAGEANQLRSATLLVVPDKLAKPLASLPADKVRPAVENHVLLSYFDPIKLDEMKTRTAILPTLLSVTDKKLGVLNYTRADDGQMYFGAPGAPXWAKLVKVVAARPYSVSIMEISEPILPAALPSPRRGARPPRQGW

SEQ ID NO: 246001 - protein, 212 aa, Zea mays
  unsure (1)..(212): unsure at all Xaa locations
  Clone ID: MRT4577_155936C.1.pep
MRERISIHIGQADIQDANSCWXLYXLEHGIQADGQMPXDKTIGEGDDAFNTFFRETGAEKHVPRAVFADLEPTVIDDVRTGTYRQIFHPENVISVKEDGANNFARAHYTIGKEIADLRLDPIKKVVDNWTDLXGLLAINAVAGGTSSELGSLLLERLTVDYCKKAKLEFTVYPSLRDTTAVDEAYNSVLSAPSLLEHTDVAILLDNEGIYDI

SEQ ID NO: 246002 - protein, 173 aa, Zea mays
  unsure (1)..(173): unsure at all Xaa locations
  Clone ID: MRT4577_155937C.1.pep
MEPRVGNKFRLGRKIGSGSFGEIYLGTNIQTNEEVAIKLENVKTKHPQLLYESKIYRILQGGTGIPNVRWFGVEGDYNVLVMDLLGPSLEDLFNFCSRKLSLKTVPMPRPRLINRVEFVHSKSFLHRDIKPDNFLMGLGRRANQVYVIDFGLAKXYRDTSTHQHIPYRENKNL

SEQ ID NO: 246003 - protein, 124 aa, Zea mays
  Clone ID: MRT4577_155938C.1.pep
LAPMALKGKKGAQISRFRELSPLQGLFEFFFKLKGLALEALPRFFPGVLCPPLPKGVFCFFFPPGGEFFGGGAPFGFFIYLTQLPAPPRGFNFSGRPPPGNPLFFWPPPPGGAPPFFDFGRPYK

SEQ ID NO: 246004 - protein, 112 aa, Zea mays
  Clone ID: MRT4577_155939C.1.pep
SWQLVIFNPNRSHPGGEGLGAGPGLCTPERGTPEAQALGPWLHPAARGRSPPAARHGRAPLRRLSGHGPRLHSAPRALLLGQRAQAGPPSVRARPPALVSGVAPPPQGASAD

SEQ ID NO: 246005 - protein, 50 aa, Zea mays
  Clone ID: MRT4577_15593C.1.pep
AKIQDKKGIPPDQQGLIFAGKKLENGGPLADYNIQKESTLPLVLRLRGGQ

SEQ ID NO: 246006 - protein, 61 aa, Zea mays
  Clone ID: MRT4577_155940C.1.pep
PTRPPPPQVVPNVPNAQKVMLATWMTSRSSRNMTSSSSFLVANPQSAACEGLASTFRISAL

SEQ ID NO: 246007 - protein, 105 aa, Zea mays
  unsure (1)..(105): unsure at all Xaa locations
  Clone ID: MRT4577_155941C.1.pep
MVRRPPRFYRQRKNXXYPKSRYCRGVPDPKIRIYDVGMKRKGVDHFPYCVHLVSWEKENVSTEALKATLIVCNKYMTNSAXKDASHLTVXVHPLHVLRINNMLSC

SEQ ID NO: 246008 - protein, 94 aa, Zea mays
  Clone ID: MRT4577_155942C.1.pep
RRRQVSIARTSQSFVGFSPHWFVCLDHPFTESLRAEFHQMFSAYLKEVLQPLKEEASIIELWLARVANHLEHAETHGEHAFVSDLPELFGPVLL

SEQ ID NO: 246009 - protein, 48 aa, Zea mays
  Clone ID: MRT4577_155943C.1.pep
PSSLSADVSDLVLVLMPVRLINCQYIVLVLASTITRARRVLIHLDEMC

SEQ ID NO: 246010 - protein, 126 aa, Zea mays
  unsure (1)..(126): unsure at all Xaa locations
  Clone ID: MRT4577_155944C.1.pep
FLKAGRGPCVPVICWFRTDNGAVPVWHWLNLPRLVEDELKDAVALGRPVSVACEEITVLIVYESGXNASNHSRNTPMNVILADLDIVYAIXHDEPYWIISNSWSGKWSNKTLLHMNVGKNMCVGTT

SEQ ID NO: 246011 - protein, 498 aa, Zea mays
  unsure (1)..(498): unsure at all Xaa locations
  Clone ID: MRT4577_155945C.1.pep
MASSGAAANLWVLLGLGIAGVLLAARRLRRPARPDHGAFVARLELLPPPQPPPPQAPHPLTGLCFAIADALHVSGYITSFGSLEWAKTHDAEVLTSSVVSALVDGGAICVGKTVIDEMAYSIHGENRYFDTPTNPAAPDRVPGGCSSGSAVAVAGGMVDFALGIDSIGGVRIPGAYCGVLAFRPSHAVVSNSGVIPVAPSLDTIGWFAKDPSVLHRVGHLLLRLPYAGIRQPRIFYIADDCFELSKIPARRLTQVVTKSVEKLFGRQVRHVNLENYLSSRISSLGNYSNGHKNGDSKFPLLLALCNSMISLHKREFKDKHMXEWINSVKPAVDARIVSDLSEDGDSDIDGCQNVRKEARSALSGLLKDDGILVIPTALGCPPKLNAKELSSESYNSQTLRLLSLASMSGCCQVSIPLGTHDKCPISVSLIARHGGDRFLLDTTQTMYTTIQEQVEILAKSSVSSKQAMNEEAAEAAKEKGNAAFKEKQWQKAVNFYTE

SEQ ID NO: 246012 - protein, 68 aa, Zea mays
  unsure (1)..(68): unsure at all Xaa locations
  Clone ID: MRT4577_155946C.1.pep
ANILPAGPLSGGSINPARSFGPPVPAGDFPGNWVXWGGPLVGGALPGLVYGEVFIGGPPHQVGAQDYP

SEQ ID NO: 246013 - protein, 42 aa, Zea mays
  Clone ID: MRT4577_155947C.1.pep
FRKSFASFYDLNNSLIQIDTIMFLLGYMLVSCITSIQFILKI

SEQ ID NO: 246014 - protein, 145 aa, Zea mays
  unsure (1)..(145): unsure at all Xaa locations
  Clone ID: MRT4577_155948C.1.pep
VTTHDLSSGLKILTRDEDGGSPCDITXVAPRCLESITIRCRKGLYXIAFSYRYHRGELHSASPCGGNGXSXEGTQTIPLEASQYAKRVHCSLRPLTCXRVVXCITSCXGVTXNYTAYSPFRHVMDRTHXSLSVVHDGVVSLITLV

SEQ ID NO: 246015 - protein, 250 aa, Zea mays
  Clone ID: MRT4577_155949C.1.pep
WPGPPQSGEETTREIQVVREAYCRETAAPAYVIPEEPRAVVDLVGSYIYGFCSYFITHLLLLVLFPAIITQVAFPTLVKHACDDERVRGHFARIEWFETPDVVRAGGLPGQYLWESGGPEYLGEPRFANAAGPSLLVFEDAWPMDESAWAALGVVLDPARRREQAPAHVPRRRPRPARHGGPRGAAQAAAGVVLVLLQSVRLRWRPWWRGEISEHLERTFLDARVLGTLLRANFDARFWRKASAAIVSCE

SEQ ID NO: 246016 - protein, 253 aa, Zea mays
  Clone ID: MRT4577_15594C.1.pep
MGMAAKEHFVLVHGEGHGAWCWFKLRWLLEGAGYHVTCIDLAGGGVDPTDPNTIRSFQQYDKPLIDLISTLPEGEKVILIGHGAGGLSVIHAMHEFVDRISQAFFVAATMLPFGFQADEDKKDGLPTLPENEIELTLGAGADDPPTTIALRPEFQRDRLSQQSPEEESVLASMLMRPWPATAISTASFEGDDERLNRIKRTFIKMERDHMLDPQQQDSMIKKWPPSEVLVIDTDHSPFFSAPEQLFNLIVKSL

SEQ ID NO: 246017 - protein, 76 aa, Zea mays
  Clone ID: MRT4577_155950C.1.pep
YHLETFLHDLLFILAAIRISYTITCVFKSAGHCALSTAFPLVPIVKPGFTTPSGNCKTGFTVRKETPRFGALRVSK

SEQ ID NO: 246018 - protein, 112 aa, Zea mays
  unsure (1)..(112): unsure at all Xaa locations
  Clone ID: MRT4577_155951C.1.pep
MELAVFPYYGRPVVIFMTVHLILQDESLHMLVLRMGXHFCDEVMPRKYKRSVFCTPAAPFRMTHLPHVYQALLXCHMKMQCPDCGSVPDEHASEFAXGTLCSPRWKPCCRTG

SEQ ID NO: 246019 - protein, 455 aa, Zea mays
  unsure (1)..(455): unsure at all Xaa locations
  Clone ID: MRT4577_155952C.1.pep
MAPPSPQPPLVRVLDRIRVSPPPADSEQEPALPLTFFDVAWLFTGPVERLFFFRHPEPASTLPLLRSSLSLALRRFYPLAGTIRXPRALPLLXYTHGTDALTMVVAESNSPDDFDSLVARSRRDLDRIRPLVPQLPPPGEDGAFALAAVQATVFRGRGLCLGVSVHHAACDDASTMHFVRTWAATCRLGLENDDGSEDAVLPPRPVLDRSVVADPDDLRGKTLAGMARLAPPPSPPPPQQEEKTPMVMASFLLGREQIDRIKEGAAAKASSFVAASALAWVCLLKCGSVGVAGARRSHMLFSAECRSRLTPPLPAEYFGNCLRPCFVEAATADLLSGETEDGVAAAASAIGSAIQEMEQGVLEGAEGWLGRVLSVLPERPMSVGGSPRHGVYETTDFGWGRPARVEMVSVEKTPGTVALADSPEGDGGIELGVVLPPDAMDAFASCFAHAVGANV

SEQ ID NO: 246020 - protein, 47 aa, Zea mays
  Clone ID: MRT4577_155954C.1.pep
QCEVFVSRYLASSHLFVLHAIRICLHRLKSLPNYHHPRMEQLVPRVN

SEQ ID NO: 246021 - protein, 87 aa, Zea mays
  Clone ID: MRT4577_155955C.1.pep
KRKKKEKKITPPREIQTLGGKPHVLRGPPPKPLGQRVVVVTAQKRLSQGVLGRPSPGGGPNPEGGGLAHGGKPPNKRALRVGVREQG

SEQ ID NO: 246022 - protein, 126 aa, Zea mays
  unsure (1)..(126): unsure at all Xaa locations
  Clone ID: MRT4577_155956C.1.pep
MHEWEVKKKKKKKKKKKKKKKKKKKKKKKKTPATTPPFFWFFFSPFQSKNSGAMGGGNGQKSKMAPKRNPEKNKGGKGSQLEANKKAMNIQGKIXMQTLICTTSEAKCKKHAEARNPKNNLYKCFP

SEQ ID NO: 246023 - protein, 63 aa, Zea mays
  Clone ID: MRT4577_155957C.1.pep
SFCLAVLELKEQGVSEDDVMAVADVIILFYNPIVHFYQTPLNRKLNSGPQKKKKTQKGKPDKK

SEQ ID NO: 246024 - protein, 58 aa, Zea mays
  Clone ID: MRT4577_155958C.1.pep
KGFQALRLAWLQNICSTCSGNFKESFGYCNVKMSNFVVSMRQRCVGILMLCFLCHVLV

SEQ ID NO: 246025 - protein, 51 aa, Zea mays
  Clone ID: MRT4577_155959C.1.pep
LASSIIASTAVAALPSRILTDNTVPLPADIIDTKTSDDTILSSCHLLASSH

SEQ ID NO: 246026 - protein, 533 aa, Zea mays
  Clone ID: MRT4577_15595C.1.pep
MQIFVKTLTGKTITLEVESSDTIDNVKAKIQDKEGIPPDQQRLIFAGKQLEDGRTLADYNIQKESTLHLVLRLRGGMQIFVKTLTGKTITLEVESSDTIDNVKAKIQDKEGIPPDQQRLIFAGKQLEDGRTLADYNIQKESTLHLVLRLRGGMQIFVKTLTGKTITLEVESSDTIDNVKAKIQDKEGIPPDQQRLIFAGKQLEDGRTLADYNIQKESTLHLVLRLRGGMQIFVKTLTGKTITLEVESSDTIDNVKAKIQDKEGIPPDQQRLIFAGKQLEDGRTLADYNIQKESTLHLVLRLRGGMQIFVKTLTGKTITLEVESSDTIDNVKAKIQDKEGIPPDQQRLIFAGKQLEDGRTLADYNIQKESTLHLVLRLRGGMQIFVKTLTGKTITLEVESSDTIDNVKAKIQDKEGIPPDQQRLIFAGKQLEDGRTLADYNIQKESTLHLVLRLRGGMQIFVKTLTGKTITLEVESSDTIDNVKAKIQDKEGIPPDQQRLIFAGKQLEDGRTLADYNIQKESTLHLVLRLRGGQ

SEQ ID NO: 246027 - protein, 36 aa, Zea mays
  unsure (1)..(36): unsure at all Xaa locations
  Clone ID: MRT4577_155960C.1.pep
GSCDFKCRVFTAYIKXVDDEPSSTPWGSNMRFGAAD

SEQ ID NO: 246028 - protein, 67 aa, Zea mays
  unsure (1)..(67): unsure at all Xaa locations
  Clone ID: MRT4577_155961C.1.pep
SSRNCPNFVNTQCQFCLKKIVSFLTLLSSKQVSWRLVSRPWVLCRCHTEQTYRXXRCSLSGRCLWHW

SEQ ID NO: 246029 - protein, 92 aa, Zea mays
  Clone ID: MRT4577_155962C.1.pep
MPRLLLPLVLLLPIALTIILLILFPSSPSPRSPPPQSLPCGAALSDAADGLWVPTPSPAPSPLFSSSCPFHHNSCNLLRTVGPSSRCSSWAP

SEQ ID NO: 246030 - protein, 81 aa, Zea mays
  Clone ID: MRT4577_155963C.1.pep
ISFEVDTCVYIEYAFSHCASRRIYKSGVSGQRCDGSSTAPPCTGWVEMMAPVFSRAAWRCIWFMIQNDLIHAWGLDMQLGY

SEQ ID NO: 246031 - protein, 60 aa, Zea mays
  unsure (1)..(60): unsure at all Xaa locations
  Clone ID: MRT4577_155964C.1.pep
PRDTPKKGPPASFILFCVALIEEFIIVVMLVVCLFVFFFFFFFFFFFFFFFFFFXKRTRG

SEQ ID NO: 246032 - protein, 53 aa, Zea mays
  Clone ID: MRT4577_155965C.1.pep
RKNIYYKLEFVSCVPQHQVLHTQQVRNHAILLSSWQPPALNHCLEPRTKPPLA

SEQ ID NO: 246033 - protein, 227 aa, Zea mays
  Clone ID: MRT4577_155966C.1.pep
MARQPWSNNGHRNSPSNSLDGGVPGPMPLVPFQEELAVGCEEIRRIAADNTLVLEDILGLRQELAVIEDEIHILAKQTIPRLRVDNEMEYRDIIQGGMKLEEQMHALKLIKEEVLVLSSEKMELEALCKELSVKVQSLYRELEQIQSENKQIPAIREGLHDIQEEISRARMAYEHEKRAKVELLEESQAIESDFINIKMEAQRLRTELEKRRSGVFKHHAFGSYYKR

SEQ ID NO: 246034 - protein, 87 aa, Zea mays
  Clone ID: MRT4577_155967C.1.pep
SDTSRGHGECIHIAASHRVQSSDTRNKERLFMFMCSLLSVVVRTSRILQVLLFGSVIHERDSCSLSSNSYECMRWVSGLALMGRLEV

SEQ ID NO: 246035 - protein, 38 aa, Zea mays
  Clone ID: MRT4577_155968C.1.pep
FGSRGVTFDVTTVATRRRTDTVQKLCPGGKLAFLLYGT

SEQ ID NO: 246036 - protein, 53 aa, Zea mays
  Clone ID: MRT4577_155969C.1.pep
PFLCKDIVHSDCYLMISLPLSSQSSRLQFFSSVGIHSTLKVLLAYSPSDACML

SEQ ID NO: 246037 - protein, 58 aa, Zea mays
  Clone ID: MRT4577_15596C.1.pep
MLFIRCSFLGYNHSLDRMSHLYNITGVLYKINNYIIRRERSSHPKLNGTRRPRSLTNS

SEQ ID NO: 246038 - protein, 188 aa, Zea mays
  Clone ID: MRT4577_155970C.1.pep
MGIDLVAGGRNKRTKRVAPKSDDVYLKLLVKLYRFLVRRTKSKFNAVILKRLFMSKTNRPPLSMRRLSNFMKGKEEKNIAVVVGTITDDMRIQEVPAMKVAALRFTETARARIVNAGGECLTFDQLALRAPTGENTILLRGPKNAREAVRHFGKAPGVPHSHTKPYVRSKGRKFEKARGRRNSRGFKV

SEQ ID NO: 246039 - protein, 81 aa, Zea mays
  Clone ID: MRT4577_155971C.1.pep
TCRTNQLALLAGHVHTTTQTFPTYAGQSPDGNTPHHDGHANARAQHLGRLFNPYPLTHLYIPKLVHHPLLNNYDNIDSQFG

SEQ ID NO: 246040 - protein, 331 aa, Zea mays
  Clone ID: MRT4577_155972C.1.pep
MADGGNCGPGGGNASAPVCSFVRKPPKNIRKRPAAPAGSDDDDDGGGGALAAARSKKGPPSSTAGKLVFSTAGASSEAPRFQYESSRTIQSTDTRATATLETETEFDRDARSIRERQLKQAEESLKKNPSAVAASASASTAGEVYKGIHGYTDYKAGFRREHTVSSEKAGGSHGPLRASAHIRLSQRFDYQPDICKDYKETGYCGYGDSCKFMHDRGDYKSGWQLEKEYEEAEKARKRRIAMGGGGESDDEAADDEDEEEALPFACFICREPFVDPVVTKCKHYFCEHCALKHHSKNKKCYVCNKPTLGIFNAAQEIRKKMAQDKKQQQQE

SEQ ID NO: 246041 - protein, 129 aa, Zea mays
  Clone ID: MRT4577_155973C.1.pep
MAAAVSTVGAINRAPLSLNGSGSGAVSAPASTFLGKKVVTVSRFAQSNKKSNGSFKVLAVKEDKQTDGDRWRGLAYDTSDDQQDITRGKGMVDSVFQAPMGTGTHHAVLSSYEYVSQGLRQYNLDNMMD

SEQ ID NO: 246042 - protein, 136 aa, Zea mays
  Clone ID: MRT4577_155974C.1.pep
QGPCSVPQVPSGDFPKVQEIKIIFCNPPVLFNADMGLLAHFAACVGLFFMSPSPLCVPPPLSLGCFLLPVCFAQYPCFPVFFPSPAFYLTPCPGECPMGGRPVSFHVFPPVGPQGSKGGSALFVFPAASLSPGSKI

SEQ ID NO: 246043 - protein, 115 aa, Zea mays
  unsure (1)..(115): unsure at all Xaa locations
  Clone ID: MRT4577_155975C.1.pep
VPFYFPLRRGLRVCGAPRPXRRRWVPVPSGALAHARSAEVSGGVPARWVLSGCVGVLAPLRGLAVSPADSAGVFAWAVSLVRSPLRALAARLFLLARPVCSSPSSLVRLPAGNLI

SEQ ID NO: 246044 - protein, 105 aa, Zea mays
  unsure (1)..(105): unsure at all Xaa locations
  Clone ID: MRT4577_155976C.1.pep
MATFSALSTAANATQSXRGRASLRNPGNGLGPSMGRERPQRRIACQPDSRISADRVPDMEKRELMNLLLLDAIAVPTSIMHGPHAAFFIPAALQGNAGPPEPTSK

SEQ ID NO: 246045 - protein, 145 aa, Zea mays
  unsure (1)..(145): unsure at all Xaa locations
  Clone ID: MRT4577_155977C.1.pep
QTPLPPKKNPPPKXGQNRKRQTRPPRGRXHPQTKRPKTREQPKGSKPAAPKQKNNKPGPAGRGKGQIPTHGGPEQGDPSREPSGGEKGAKRGPGKKGKPQKIPQKXNEPKEKREKPGGPKGGANQKKGGGPHGPXPKEKPDGPAG

SEQ ID NO: 246046 - protein, 56 aa, Zea mays
  Clone ID: MRT4577_155979C.1.pep
ERGTLWLCCRHRGEAGIESFIARMNAMLTDDMCFSNDRVGIYMLHASEDIQQLNYL

SEQ ID NO: 246047 - protein, 129 aa, Zea mays
  unsure (1)..(129): unsure at all Xaa locations
  Clone ID: MRT4577_15597C.1.pep
WVPRGRPVVFGRGARHAPPPATPALSPXPRSPPPAIPALXPPSHSPRPQSARNPTLAPSMTRPXISPPQPPPXAPSMEGPPPRRLWKVAPSMEGLPPPPAPPFRCEHPLLRLPFAVSIPCCYVFPGARH

SEQ ID NO: 246048 - protein, 300 aa, Zea mays
  Clone ID: MRT4577_155980C.1.pep
MDVDCVSLPDAPAGDVDGGAARPWPKAVTNGGVHELLECPVCTNSMFPPIHQCPNGHTLCSTCKARVHNRCPTCRQELGDIRCLALEKVAESLELPCRYYSLGCPEIMPYYSKIKHEAQCGLRPYNCPYAGSECGAAGDIPSLVSHLRDDHKVDMHSGCTFNHRYVKSNPREVENATWMLTVFHCFGHYFCLHFEAFQLGMAPVYMAFLRFMGDENEAKNYSYSLEVGANGRKMVWEGTPRSVRDSHRKVRDSHDGLIIQRNMALFFSGGDRKELKLRITGRIWKEQQTPDGACTPNLCS

SEQ ID NO: 246049 - protein, 121 aa, Zea mays
  Clone ID: MRT4577_155981C.1.pep
RRFMLGGRVNDAPRSDPHGRLIEELEMSFSDAEEPLEQHAMGSKRVHGNVLDKHPQILSDKSAHPCEESLSSFESGHLKSEQTPHQESRAIGAIGNGNQGNERIGDNNNTGDSVHGSEHIG

SEQ ID NO: 246050 - protein, 85 aa, Zea mays
  Clone ID: MRT4577_155982C.1.pep
MASRANTMPGKSVVLSLVTLLVVLISAAESYDGRYAVSHSAMARRSRLGTRHARHHRSHKNRVRNWIIGFVVGSLAGVISGMVLS

SEQ ID NO: 246051 - protein, 124 aa, Zea mays
  Clone ID: MRT4577_155983C.1.pep
THASKSPTHLWLCTWAFLLWSWATYLALWLALHLALALAAQRLRLRLTVPLSTMPAAHALLMASASTAIFTGTMLSAVADIRDTPWTWRRRSRSSPLRTLLCFPARTRSSGRSFFWAYAYYLAR

SEQ ID NO: 246052 - protein, 127 aa, Zea mays
  unsure (1)..(127): unsure at all Xaa locations
  Clone ID: MRT4577_155984C.1.pep
MLSRQDYTLMWSSLDTIDNVMAKINDHDCIPSIPLTTSSVAVKTSLCDGRTXADYNIPVRRRTRPLVGLRLRGXGCRFFVKTLAGKTITLAVVSSDTIDSVTALIQGMDGIAPSFSGCGLLWRAAGG

SEQ ID NO: 246053 - protein, 90 aa, Zea mays
  Clone ID: MRT4577_155985C.1.pep
IKAFASRRFGQGGCKVGCPGLILELGSRFATGSIFYFSLLLYLRPGALVGLFRLNMPGFFMPSSWIYDTIMVGLKKNQKEKPNRKKNPPK

SEQ ID NO: 246054 - protein, 100 aa, Zea mays
  Clone ID: MRT4577_155986C.1.pep
VPRPFLEFFFFFFFFFFFFFFFFFFLWGEKRTAIKGQPVKTLGAALSVLARPNTVLSKNNRGSCLYFYPNKRALCNTNMIHGKKALHTAKKLHDFTWGRI

SEQ ID NO: 246055 - protein, 188 aa, Zea mays
  Clone ID: MRT4577_155987C.1.pep
LNSMVLANNSENVLLPLNEPVHGTKRRSQIQTFLDHHGGPGVQHMALASDDVLRTLREMQARSAMGGFEFMAPPTSDYYDGVRRRAGDVLTEAQIKECQELGVLVDRDDQGVLLQIFTKPVGDRPTLFLEIIQRIGCMEKDEKGQEYQKGGCGGFGKGNFSQLFKSIEDYEKSLEAKQAAAAAAAQGS

SEQ ID NO: 246056 - protein, 119 aa, Zea mays
  unsure (1)..(119): unsure at all Xaa locations
  Clone ID: MRT4577_155988C.1.pep
QGTHKRGQQQTATPTTKRESPNGRAKQGPAATSEAGRRPXTTERPTTTPSAXAPXRPPRPAXARPRRAPRRPPAAGXRGRPXXTPPAPPPARXPRPPAGXXTPPAPXGPGPDRNRQADQ

SEQ ID NO: 246057 - protein, 78 aa, Zea mays
  Clone ID: MRT4577_155989C.1.pep
TRLDHLQGQLIFSQGEPLQSSGGGWPSSSARAWLDPLVAIHQHQPSTMSGQVGFGHLVGGAGSGFMGFLAPPAQRLQL

SEQ ID NO: 246058 - protein, 305 aa, Zea mays
  Clone ID: MRT4577_15598C.1.pep
MQIFVKTLTGKTITLEVESSDTIDNVKAKIQDKEGIPPDQQRLIFAGKQLEDGRTLADYNIQKESTLHLVLRLRGGMQIFVKTLTGKTITLEVESSDTIDNVKAKIQDKEGIPPDQQRLIFAGKQLEDGRTLADYNIQKESTLHLVLRLRGGMQIFVKTLTGKTITLEVESSDTIDNVKAKIQDKEGIPPDQQRLIFAGKQLEDGRTLADYNIQKESTLHLVLRLRGGMQIFVKTLTGKTITLEVESSDTIDNVKAKIQDKEGIPPDQQRLIFAGKQLEDGRTLADYNIQKESTLHLVLRLRGGQ

SEQ ID NO: 246059 - protein, 50 aa, Zea mays
  Clone ID: MRT4577_155990C.1.pep
LACLKRLGESLLKRHSQWKNRRVLSRSKTTRQVSTCNSRSMCGASAIIRL

SEQ ID NO: 246060 - protein, 77 aa, Zea mays
  unsure (1)..(77): unsure at all Xaa locations
  Clone ID: MRT4577_155991C.1.pep
XRVGFFLQVIYYFFFLIFFKFNVFFLLFFFFFHTPPKSFFVFKKFFGLKNRIYNILPVGLIKILTPTKIFIKISPLV

SEQ ID NO: 246061 - protein, 122 aa, Zea mays
  Clone ID: MRT4577_155992C.1.pep
MDGASKEPLRKDYYKVLEVDYDASDDTIKLSYRRLALMWHPDKHKGDNDVTAKFQEINEAYKVLSDPAKRLEYDVSGCYEIDQYTLREYLAKFKGMILTCNGLGIDHPSSKWARHLRELKPH

SEQ ID NO: 246062 - protein, 85 aa, Zea mays
  unsure (1)..(85): unsure at all Xaa locations
  Clone ID: MRT4577_155993C.1.pep
ACSARHASLLLCWLTPVGCQXTTSCCHPCCRGRPPAPDRDRRSVGGAARAAGRQQPRPCLXRRWGQGAQLAGRAEPRVVPKGFVF

SEQ ID NO: 246063 - protein, 202 aa, Zea mays
  unsure (1)..(202): unsure at all Xaa locations
  Clone ID: MRT4577_155994C.1.pep
EQVTSCKLWRQVXESFKPPETCTTVSWTFRNFYEKALLEYEKHKIETGEFQVASSALPDRFGSESQVGGSHVSGSGRARRESATRAMQGWHSQRLLGNGEIADPIIKDKGPIVLKKDKTPKSSGSAKRKRIPSLEDDMVIPYKSDKLQNDSMVIDMGPPADWVKINVRKTVSICISPLSVVKSYSSMLFLICLLFPHSSQFR

SEQ ID NO: 246064 - protein, 75 aa, Zea mays
  Clone ID: MRT4577_155995C.1.pep
FPGMFFWETRPFPPPGGIQRKSLMRTESLTPNFLGCKTIRQHQMFTCPRTTDLRLSPLYFLAVRITIPLPMNASS

SEQ ID NO: 246065 - protein, 68 aa, Zea mays
  Clone ID: MRT4577_155996C.1.pep
GTPSFDKGFGGYKFTQRFLTPNCPKPNFFMFKRNNSQILIRLFLFFVGIMLLNKSIGMSTVLSHHLQD

SEQ ID NO: 246066 - protein, 82 aa, Zea mays
  unsure (1)..(82): unsure at all Xaa locations
  Clone ID: MRT4577_155997C.1.pep
NRGAGGVIIVYNVTGSDSVTNVHRWVQLFDGCVPDSVLQVLVGNCSDLVSERKVHAAXARVLAQRLGLKFLKASARNSPGVQ

SEQ ID NO: 246067 - protein, 76 aa, Zea mays
  Clone ID: MRT4577_155998C.1.pep
FTCYNSGPSQKPKEGCEQKSLRPGSLLGAIINHPTPLCSPTQATIYYICAHFQKHICSEKRYKKCAALCATLSPPC

SEQ ID NO: 246068 - protein, 90 aa, Zea mays
  Clone ID: MRT4577_155999C.1.pep
CRHFIYIFWELCYLMSSKIRVGLSKTGLVLSTATHLCSFKSYYSFIIVGFMLGIKDALPHVKSHLNMRRRHSAWVQKWSGSGLVCIISKL

SEQ ID NO: 246069 - protein, 80 aa, Zea mays
  unsure (1)..(80): unsure at all Xaa locations
  Clone ID: MRT4577_15599C.1.pep
SSPAMNIFGAEGDAVGVGELVNAGGEPAAAGLARRYVLDVCPLHQTPADPGRPRQQLLGSRREGGCGGEGNGGQVRRSGX

SEQ ID NO: 246070 - protein, 61 aa, Zea mays
  Clone ID: MRT4577_1559C.1.pep
TRSPTRGWDLPKFAKMGDKDWYGVYHKDRKCPTVLMANRATDAGYWKATAKDNDVYNPFAA

SEQ ID NO: 246071 - protein, 546 aa, Zea mays
  Clone ID: MRT4577_155C.1.pep
MRLRLRLRPRASSGANTVTLLDYGAGNVRSVRNAIRYLGFDIRDVQSPEDIVAAERLVFPGVGAFGSAMDVLNRTGMADALREYIQRDRPFLGICLGLQLLFDSSEENGPVSGLGVIPGVVRRFDSSNGLIVPHIGWNALQITKDTPLLQGADGQHVYFVHSYRVLPSDANRNWISSICNYGDSFISSISMGNIQAVQFHPEKSGATGLSILKEFLRPNSLGTKVPARRKASKLAKRVIACLDVRSNDKGDLVVTKGDQYDVRDHTSSKEVRNLGKPVDLASQYYIDGADEVSFLNITGFRDFPLGDLPMLEVLRCASEKVFVPLTVGGGIRDFTDANGRYYSSLEVASEYFRSGADKISIGSDAVYAAEAFLQTGVKTGKSSLEQISRVYGNQAVVVSIDPRRVYVKSQEDVPFKTVKVSTKGPSGEEYAWYQCTVNGGRDSRAIGAYELAKAVEELGAGEILLNCIDCDGQGCGFDIDLVKMVSDAVTIPVIASSGAGAVQHFSEIFEKTNASAALAAGIFHRKEVPILAVKEHLVNAGVEVRV

SEQ ID NO: 246072 - protein, 162 aa, Zea mays
  unsure (1)..(162): unsure at all Xaa locations
  Clone ID: MRT4577_156000C.1.pep
FIQQSSAVLQQLPMVHLLAHNIRAHQIQQFVLATLTAYSQQHQFLPFNQLFALNYVSYLQQQLLPFIQIDVAYPQQFLPFNQLAALNSPAYLQQXQLVPFSQLAGVSTTAFLTQPQLFPFYQHAAPNAGTLXQLQLLLPLQPSLTLYRSPSQVVSTQQILIM

SEQ ID NO: 246073 - protein, 309 aa, Zea mays
  Clone ID: MRT4577_156001C.1.pep
GRDATPDRPRLLARGMKGGGVIRAAGGGAGGAGLLRTRLRLPVVLLSCSLFFLAGFFGSLLFTQDPEEADMPVPRERLLEAAWPEMPYGESGEAAPSLIPYQILSWQPRALYFPQFATSEQCENIVKTAKERLKPSTLALRKGETAESTKGIRTSSGTFLSANEDPTETLAEIEKKIARATMLPRNHGEPFNVLRYNIGQRYASHYDAFDPAQYGPQKNQRVASFLLYLTDVEEGGETMFPYENSENMDIGYDYEKCIGLKVKPRKGDGLLFYSLMVNGTIDRTSLHGSCPVIKGEKWVATKWIRDNIV

SEQ ID NO: 246074 - protein, 343 aa, Zea mays
  Clone ID: MRT4577_156002C.1.pep
MPVPRERLLEAAWPEMPYGESGEAAPSLIPYQVMSHSDSISAWGGCLFRHTFGVTGIEFAGQLSAYNFHGLLVLRVGNFVWHFKISRHPDSRGKCRRCGCCGTFSQPHQSQLYICFCHHLPNVVQQIIGYIEDNFLILSWQPRALYFPQFATSEQCENIVKTAKERLKPSTLALRKGETAESTKGIRTSSGTFLSANEDPTETLAEIEKKIARATMLPRNHGEPFNVLRYNIGQRYASHYDAFDPAQYGPQKNQRVASFLLYLTDVEEGGETMFPYENSENMDIGYDYEKCIGLKVKPRKGDGLLFYSLMVNGTIDRTSLHGSCPVIKGEKWVATKWIRDNIV

SEQ ID NO: 246075 - protein, 102 aa, Zea mays
  Clone ID: MRT4577_156003C.1.pep
ILRGHLAAVYPQVHNRALLGHVVHHCAHWANWVRYPLWEIGDPVAPAYLPTSFHMRVWCTQYRPWARCRLGDPVVNFRPSLVGVLAQGILLMKCHVTFVFVC

SEQ ID NO: 246076 - protein, 64 aa, Zea mays
  Clone ID: MRT4577_156004C.1.pep
TFSSGHSNGPEPCLEKLFFHWKGLLHGERTLLWGRCNNCCWSLLGLFHNDCLGSQHHSSHGGVF

SEQ ID NO: 246077 - protein, 351 aa, Zea mays
  Clone ID: MRT4577_156005C.1.pep
AYGKITGDYALQERVDVQTGIRLILNLCLSDGFDMFPTLLVTDGSCMIDRRMGIHGHPLEIQALFYSALRCAREMIGVTDGSKNLIRAINNRLSALSFHIREYYWVDMKKINEIYRYKTEEYSHDAINKFNIYPEQIPSWLADWIPVKGGYLIGNLQPAHMDFRFFSLGNLWAIVSSLATQRQAEGILNLIEAKWDDIVANMPLKICYPALEYEEWRIITGSDPKNTPWSYHNGGSWPTLLWQFTLACIKMGRRDLARRAVEVAEKRLSDDKWPEYYDTRTGRFIGKQSRLYQTWSIAGYLSSKMLLDCPEMASILVCDEDFELLEGCACSLNKNARTKCSRRAAKSQVLV

SEQ ID NO: 246078 - protein, 151 aa, Zea mays
  Clone ID: MRT4577_156006C.1.pep
TCFLIPLLRCWSSATCCLRALADRLALCSRDHAGAAALQLYLTGFRVLRPSRADLHSSLDRRRMHAFLSSRSDLSVPRCRVVSVIPSSSSSVPCVTANSSSVLALVSSPSFYGFGVVEFHLAVTTSWSFGASANCCPTALSCGAPYSLVPT

SEQ ID NO: 246079 - protein, 94 aa, Zea mays
  unsure (1)..(94): unsure at all Xaa locations
  Clone ID: MRT4577_156007C.1.pep
RGRSRSASRRTTPPRLLDAARGSSFRRLLGGAHLVAACXAAAEVDRGLRREESPERRRETGPGGGREERRPIVLRPAGGFFFFFFFFFFFFCPA

SEQ ID NO: 246080 - protein, 154 aa, Zea mays
  Clone ID: MRT4577_156008C.1.pep
HWVPRGRPGTYCLRALADRLALRSRDHASAAALQLYLAGFRVLRPSRADLHSSLDRWRTRAFLSSRSDRRRSVSHTVMPSQSSPALPRPYRVLQQARLRSWRSSPHHRFTDSTSSSFTSLLQRPGLLELRQIIVLLRCRVVLPTPYLVSSQNKE

SEQ ID NO: 246081 - protein, 110 aa, Zea mays
  Clone ID: MRT4577_156009C.1.pep
RKCRVLSFLVPAVSIKWNCKRFKLTTTSRERENQRMMATYMHELDEHCEYRINVQSYRYLMFTTVQCGRAHRYTKRACDFREALAPVTLCYLCLQSTFLTFVASCMIESS

SEQ ID NO: 246082 - protein, 457 aa, Zea mays
  Clone ID: MRT4577_15600C.1.pep
MQIFVKTLTGKTITLEVESSDTIDNVKAKIQDKEGIPPDQQRLIFAGKQLEDGRTLADYNIQKESTLHLVLRLRGGMQIFVKTLTGKTITLEVESSDTIDNVKAKIQDKEGIPPDQQRLIFAGKQLEDGRTLADYNIQKESTLHLVLRLRGGMQIFVKTLTGKTITLEVESSDTIDNVKAKIQDKEGIPPDQQRLIFAGKQLEDGRTLADYNIQKESTLHLVLRLRGGMQIFVKTLTGKTITLEVESSDTIDNVKAKIQDKEGIPPDQQRLIFAGKQLEDGRTLADYNIQKESTLHLVLRLRGGMQIFVKTLTGKTITLEVESSDTIDNVKAKIQDKEGIPPDQQRLIFAGKQLEDGRTLADYNIQKESTLHLVLRLRGGMQIFVKTLTGKTITLEVESSDTIDNVKAKIQDKEGIPPDQQRLIFAGKQLEDGRTLADYNIQKESTLHLVLRLRGGQ

SEQ ID NO: 246083 - protein, 148 aa, Zea mays
  Clone ID: MRT4577_156010C.1.pep
RPGRETRAGPGNSRTSRAHRHSHTGTQRNHRLASQSYSQSRTHPSRRPHPLPVSPSPPSPAASGRGNPTCVNLHGEPSLPRFSAVAYRSGFPPWPHVVSLEESQRGACSAWLEESFLADQLRFDPRSCLNVELSYSVADPSTARRHLW

SEQ ID NO: 246084 - protein, 76 aa, Zea mays
  unsure (1)..(76): unsure at all Xaa locations
  Clone ID: MRT4577_156011C.1.pep
PCGVLADGVASAHKNIYTCPTKCSSFLLVRLETSPPGFRAASGTRRVTTSMVSRSVASQRTTVEMETQRKIIPGRX

SEQ ID NO: 246085 - protein, 74 aa, Zea mays
  Clone ID: MRT4577_156012C.1.pep
HCTVSRLRSKRQILHQNSLHRATTVIKHRTPDKSCTYKSWTCWTMADYSFGTALYVTASASNLYKWLHYPATNQ

SEQ ID NO: 246086 - protein, 155 aa, Zea mays
  Clone ID: MRT4577_156013C.1.pep
KKGHRTFPPLVHATILFFFLRPPPGGGGGAHRTGAHHLRRRGRANLGGYSEQRQFLPFNQLAALNSASYLPQQQLPFNQLAAAYPQQFLPFDPLAALNSPAYLLPGLLLPFSQLAGGSPAALLTHPLLVPFSQRAAPNAGSLLQLQLLVRFSRLA

SEQ ID NO: 246087 - protein, 31 aa, Zea mays
  Clone ID: MRT4577_156014C.1.pep
LASRRQLLTFWGSWAFESLNLGFALGALVLD

SEQ ID NO: 246088 - protein, 85 aa, Zea mays
  unsure (1)..(85): unsure at all Xaa locations
  Clone ID: MRT4577_156015C.1.pep
DAWRDAWVILATFPLLVLANFDQQLXMKGFAGDTAKAHARSSMVAGEAVSNIRTVAAFNAQSKILSLFSHELRVPEQQILRRSQT

SEQ ID NO: 246089 - protein, 110 aa, Zea mays
  Clone ID: MRT4577_156016C.1.pep
MGPPDPGPPPPPPERPWPGPPKNWGPWGGPGRPGPGVKSGPEDPELAPGPRFGPGLIKGFFKKGGKKPPNVGTRMKKCFFNPPFFPARGKAFQSSKGGKRTKFSPPGFGG

SEQ ID NO: 246090 - protein, 52 aa, Zea mays
  Clone ID: MRT4577_156017C.1.pep
ELGAYPVERNNKQTCVKLYKENTNSLKNGYYKGNNLPLSPNLLYVSQLIIRP

SEQ ID NO: 246091 - protein, 104 aa, Zea mays
  Clone ID: MRT4577_156018C.1.pep
VIASTHPAYAQPAYCLEPGCTRPNNQTGGYCARPCKKWTKKFPAGKFVRTNEDLQDKGLRKGNTGQSRCGVHGLMATSFLFFIKLSFSLTGPGLITLFFFGHQN

SEQ ID NO: 246092 - protein, 57 aa, Zea mays
  Clone ID: MRT4577_156019C.1.pep
NGPLFFPSQGAGSIEKARVPPGVLKYKAPIRGPGTFPFKKKAGINGYCPLQSPHTYS

SEQ ID NO: 246093 - protein, 479 aa, Zea mays
  Clone ID: MRT4577_15601C.1.pep
LFFCSERTHSPVPDLRSPRRSKMQIFVKTLTGKTITLEVESSDTIDNVKAKIQDKEGIPPDQQRLIFAGKQLEDGRTLADYNIQKESTLHLVLRLRGGMQIFVKTLTGKTITLEVESSDTIDNVKAKIQDKEGIPPDQQRLIFAGKQLEDGRTLADYNIQKESTLHLVLRLRGGMQIFVKTLTGKTITLEVESSDTIDNVKAKIQDKEGIPPDQQRLIFAGKQLEDGRTLADYNIQKESTLHLVLRLRGGMQIFVKTLTGKTITLEVESSDTIDNVKAKIQDKEGIPPDQQRLIFAGKQLEDGRTLADYNIQKESTLHLVLRLRGGMQIFVKTLTGKTITLEVESSDTIDNVKAKIQDKEGIPPDQQRLIFAGKQLEDGRTLADYNIQKESTLHLVLRLRGGMQIFVKTLTGKTITLEVESSDTIDNVKAKIQDKEGIPPDQQRLIFAGKQLEDGRTLADYNIQKESTLHLVLRLRGGQ

SEQ ID NO: 246094 - protein, 76 aa, Zea mays
  unsure (1)..(76): unsure at all Xaa locations
  Clone ID: MRT4577_156020C.1.pep
PGTTDRCIQFIDPLASSSWDMFADEKTFITPVQCKILLRQFKADTXYTVTHALSAQVANKMNNNWLPPPWALAAMA

SEQ ID NO: 246095 - protein, 77 aa, Zea mays
  Clone ID: MRT4577_156021C.1.pep
SAWPNFYSLGWGGGNHLICSSVLTVGFFVARAALLLPVIKTPSLDPRDSGAVLCADRFIMPPTMNGSPLLLMIFNHL

SEQ ID NO: 246096 - protein, 105 aa, Zea mays
  Clone ID: MRT4577_156022C.1.pep
RAHVVTTCHHNQENYSTKHACYYTVFFVTLNTTKNIDAQNITTRLHDNSLEIKEPLKKLKIYNHYKDRRACCHIHSMLAMCRTKPRQLPSSSSTKSAGIFRAYKC

SEQ ID NO: 246097 - protein, 118 aa, Zea mays
  unsure (1)..(118): unsure at all Xaa locations
  Clone ID: MRT4577_156023C.1.pep
STKYLLDKHLPRGRKLPPKPCLXRXNXLRRPLLKQYRNCVCMDPKSFFNAYVPCPLGQTMIPRXQYLHLPTLRDPLSSLIXKKCCHISDLEAISLWRPKITRHCNRHRASRTKYPSCL

SEQ ID NO: 246098 - protein, 38 aa, Zea mays
  Clone ID: MRT4577_156024C.1.pep
RRRPWTVTGTRIKVGALRTTQCNVCVSGTLAGAAGTGR

SEQ ID NO: 246099 - protein, 81 aa, Zea mays
  Clone ID: MRT4577_156025C.1.pep
DPELLSKQERRSEDEDQEWISSQVVLLRQVWSHKPKKDGCYETRRLKNWEDKSFFDQNKNKRNFQRRLKNNYNNPPTTKTI

SEQ ID NO: 246100 - protein, 305 aa, Zea mays
  unsure (1)..(305): unsure at all Xaa locations
  Clone ID: MRT4577_156026C.1.pep
APLNLSDRLXQVLWWALGSIEIFFSNHCPLWYGYGGGLKFLERFSYINSIVYPWTSIPLLAYCTLPAICLLTGKFITPEXPFIQSLILLYCGVEPVEDHDTLRLLSFSLPXLNNVASLWFMSLFICIFATSILEMRWSGVGIDDWWRNEQFWVIGGVSSHLFAVFQGLLKVIAGVDTSFTVTSKGGDDEEFSELYTFKWTTLLIPPTTLLLLNFIGVVAGISNAINNGYESWGPLFGKLFFAFWVIVHLYPFLKGLVGRQNRTPTIVIVWSILLASIFSLLWVRIDPFLAKDDGPLLEECGLDCN

SEQ ID NO: 246101 - protein, 49 aa, Zea mays
  unsure (1)..(49): unsure at all Xaa locations
  Clone ID: MRT4577_156027C.1.pep
DTSSGQRRDTPXQVTPTVEEVFRSIYRSWSWSCQDFYHGGRDPGPAGLE

SEQ ID NO: 246102 - protein, 634 aa, Zea mays
  Clone ID: MRT4577_156028C.1.pep
REYEDFKVRINALVAKAQKVPEEGWTMQDGTPWPGNNVRDHPGMIQVFLGQSGGHDVEGNELPRLVYVSREKRPGYNHHKKAGAMNALVRVSAVLTNAPYLLNLDCDHYINNSKAIKEAMCFMMDPLLGKKVCYVQFPQRFDGIDRHDRYANRNVVFFDINMKGLDGIQGPIYVGTGCVFRRQALYGYDAPKTKKPPSRTCNCWPKWCICCCCFGNRKTKKKTKTSKPKFEKIKKLFKKKENQAPAYALGEIDEAAPGAENEKASIVNQQKLEKKFGQSSVFVASTLLENGGTLKSASPASLLKEVIHVISCGYEDKTGWGKDIGWIYGSVTEDILTGFKMHCHGWRSIYCIPKRAAFKGSAPLNLSDRLHQVLRWALGSIEIFFSNHCPLWYGYGGGLKFLERFSYINSIVYPWTSIPLLAYCTLPAICLLTGKFITPELNNVASLWFMSLFICIFATSILEMRWSGVGIDDWWRNEQFWVIGGVSSHLFAVFQGLLKVIAGVDTSFTVTSKGGDDEEFSELYTFKWTTLLIPPTTLLLLNFIGVVAGISNAINNGYESWGPLFGKLFFAFWVIVHLYPFLKGLVGRQNRTPTIVIVWSILLASIFSLLWVRIDPFLAKDDGPLLEECGLDCN

SEQ ID NO: 246103 - protein, 92 aa, Zea mays
  unsure (1)..(92): unsure at all Xaa locations
  Clone ID: MRT4577_156029C.1.pep
IGVVAGXISNAINNGYESWGPLFGKLFFAFWVIVHLYPFLKGLVGRQNRTPTIVIVWSILLASIFSLLWVRIDPFLAKDDGPLLEECGLDCN

SEQ ID NO: 246104 - protein, 538 aa, Zea mays
  unsure (1)..(538): unsure at all Xaa locations
  Clone ID: MRT4577_15602C.1.pep
MQIFVKTLTGKTITLEVESSDTIDNVKAKIQDKEGIPPDQQRLIFAGKQLEDGRTLADYNIQKESTLHLVLRLRGGMQIFVKTLTGKTITLEVXESSDTIDNVKAKIQDKXEGIPPDQQRLIFAGKQLEDGRTXLADYNIQKEXSTLHLVLRLRGGMQIFVKTLTGKTITLEVESSDTIDNVKAKIQDKEGIPPDQQRLIFAGKQLEDGRTLADYNIQKESTLHLVLRLRGGMQIFVKTLTGKTITLEVESSDTIDNVKAKIQDKEGIPPDQQRLIFAGKQLEDGRTLADYNIQKESTLHLVLRLRGGMQIFVKTLTGKTITLEVESSDTIDNVKAKIQDKEGIPPDQQRLIFAGKQLEDGRTLADYNIQKESTLHLVLRLRGGMQIFVKTLTGKTITLEVESSDTIDNVKAKIQDKEGIPPDQQRLIFAGKQLEDGRTLADYNIQKESTLHLVXLRLRGGMQIFVKTLTGKTITLEVESSDTIDNVKAKIQDKEGIPPDQQRLIFAGKQLEDGRTLADYNIQKESTLHLVLRLRGGQ

SEQ ID NO: 246105 - protein, 44 aa, Zea mays
  Clone ID: MRT4577_156030C.1.pep
GRFFFFFFEIIILLFKSKSQILAQSITSQTVVRPYIYMVLVLIQ

SEQ ID NO: 246106 - protein, 73 aa, Zea mays
  unsure (1)..(73): unsure at all Xaa locations
  Clone ID: MRT4577_156031C.1.pep
MAALRAVKALCGAEKEWVVGTHKAPGACPRCGGAVVAVDVESERRILGLPLCLKSKRKYSCTKCLXRLVTLYG

SEQ ID NO: 246107 - protein, 123 aa, Zea mays
  Clone ID: MRT4577_156032C.1.pep
GRAMAHAVVEDRCLPGGLALCQHQPVVWKMPSATTERSWSARCIIDRETARSRTYRLGYSISSQSCMLEAIYNMTMKELDGRYMHAVYHLPSCRGLLQLRRRIKRTCEITKKVMTTWRFSLLD

SEQ ID NO: 246108 - protein, 43 aa, Zea mays
  Clone ID: MRT4577_156033C.1.pep
IITPQMFEAIINPYTIVISLCTLLVTGVSIHRFKARYPVSGVH

SEQ ID NO: 246109 - protein, 101 aa, Zea mays
  unsure (1)..(101): unsure at all Xaa locations
  Clone ID: MRT4577_156034C.1.pep
GRFFFXFLGQQTMWPLEIWTGQKRTLRLTPPPSEHKIQETKILGELCIGGVARYCGLELKDGSPNNLLLARTSLWAPCGSQDAIELAPAVDSILSSRISLI

SEQ ID NO: 246110 - protein, 472 aa, Zea mays
  unsure (1)..(472): unsure at all Xaa locations
  Clone ID: MRT4577_156035C.1.pep
IGYLEAGRPGSTLTLRGTRAQRPVREKDPTPPTTPANHPPASHGRRHRYRGLRQGAAPPPRVPVPGRVGLLARAPVRTPGVRRPSLPGXLDVPNLKKRGGGTRSWIRVEAVTASVQTLEIDKATMMRRCELPARDLRLLDPLFVYPSTVLGRERAIVVNLEQIRCVITADEVLLLNSLDSYVLQYAAELQRRLLQRAEGDQLPFEFRALELALEAACSFLDAQAAELEIEAYPLLDELTSKISTLNLERVRRLKSRLVALTRRVQKVRDEIEQLMDDDGDMAEMYLTEKKMRMESSVFGDQSLLGYNSAGAAGASVSAPVSPVSSPTESRKLEKAFSLCRSRHDSTKSSDNTTTDHIQELEMLLEAYFVVIDSTLNKLTSLKEYIDDTEDFINIQLDNVRNQLIQFELLLTTATFVVAIFGVVAGIFGMNFETSVFEIENAFQWVLVITSVTGVFIFCSFLWFFKYKRLMPL

SEQ ID NO: 246111 - protein, 39 aa, Zea mays
  Clone ID: MRT4577_156036C.1.pep
GKFLKAGETQPSRWTWALSTEITQGGPYQRGHQMEILRP

SEQ ID NO: 246112 - protein, 103 aa, Zea mays
  unsure (1)..(103): unsure at all Xaa locations
  Clone ID: MRT4577_156037C.1.pep
VMQGVHFGTRDMVXCRAHLVKQVVVVVRELRFLEGLFRWERHTVLDQVRRGLXHVSACSXTVVHLLLVMNGGLWQEVNCLFGHRRVSYRHQSLFYRGALNDVM

SEQ ID NO: 246113 - protein, 97 aa, Zea mays
  Clone ID: MRT4577_156038C.1.pep
LRSPTYQQFYQDHPFVHVYVFFPNDDNEGMNHMMKYVRMITHESVSAAAVCLDRNLTPLINYHLIHVVHVDTSTTFTGGRRCLYTSLNVSLTLIFRC

SEQ ID NO: 246114 - protein, 66 aa, Zea mays
  Clone ID: MRT4577_156039C.1.pep
HVDALMFNPKAAIWVCYVQMLLLLYFQVLYMTCPDKYIERQYTCHVYPTRKLASRTMQHFCTVMQY

SEQ ID NO: 246115 - protein, 31 aa, Zea mays
  unsure (1)..(31): unsure at all Xaa locations
  Clone ID: MRT4577_15603C.1.pep
MDGSSVPSSVHINTCVALNKKGKXSYLCYKK

SEQ ID NO: 246116 - protein, 99 aa, Zea mays
  Clone ID: MRT4577_156040C.1.pep
QRLQRRKQSNRESARRSRSRKEDHLNELEAQVAEVRVENSSLLTRLAAVNHKLNETAGDNTVLKADVENLLPNVNMGEDSAKRPTGMNPLYPGETDMAS

SEQ ID NO: 246117 - protein, 113 aa, Zea mays
  Clone ID: MRT4577_156041C.1.pep
TSRNIFQGRDGTGREGSSGREREKITQNDTESVVHSLCFRVLRNQQGFLSFSSCQWSRGSSPTPMESDTRRGSKRDTWKTLTRVPFATTINSFYIKKRKEKNKRADAGSTGNA

SEQ ID NO: 246118 - protein, 59 aa, Zea mays
  Clone ID: MRT4577_156042C.1.pep
HVALKQERSKGSDVAVASPADVSSEDDEVPAPSDVYLHRDSAGLISGDIGHSTRRIRLR

SEQ ID NO: 246119 - protein, 105 aa, Zea mays
  Clone ID: MRT4577_156043C.1.pep
PPPNPRAKKRPPSPNQPIKRFLPPPPPGVRRQIMPPSKTVNAPQTLGCPFTWMGKSNPPFRGPPPPKVFLRAPGLGPPPPPRMGFPMGGGFLKRGPPGLIFSFFF

SEQ ID NO: 246120 - protein, 55 aa, Zea mays
  Clone ID: MRT4577_156044C.1.pep
PVGHCDSNIQSNGLMGSSMIRSNLSPLGYYWFATASKWGCLSRQHDMVFCSWLVF

SEQ ID NO: 246121 - protein, 107 aa, Zea mays
  unsure (1)..(107): unsure at all Xaa locations
  Clone ID: MRT4577_156045C.1.pep
FVVGLLQGSVNGKQDLPTGSGMGLFMGGTRGPVAKANSPNSMHSIAPASFLLPAPSAXNXILLPAPKPSSQLISPTLSXNLPPLQTPASRPXEPEPFEFKSSVQRFS

SEQ ID NO: 246122 - protein, 91 aa, Zea mays
  unsure (1)..(91): unsure at all Xaa locations
  Clone ID: MRT4577_156046C.1.pep
XKKLKKKKKKKKKKKKKKKKKKKKKKKKKKKKKKKKTLGQKPHLSKESQGQKKLWGKNRNPGKPWAKLGEPGLKVCPGPPLAPGNRPPGGK

SEQ ID NO: 246123 - protein, 183 aa, Zea mays
  Clone ID: MRT4577_156047C.1.pep
MALGRRTQNRTVAGLSPFPPFVLFDDIQDVNNLPQVKSVFARVVVKFPRRRNSQHYILQDITGSKIEAISNGNNVQRFDALLTQGCTYTLYRVAFCLNREELQFRNIGHGLELGLITHTIVDPFTKPIQFPPFPKYLMPFHEVYQQPHKTFVDVIGIVLHLEPLKHIGGRPYREAVLMDSRWH

SEQ ID NO: 246124 - protein, 130 aa, Zea mays
  Clone ID: MRT4577_156048C.1.pep
AHPTLAFHASINKSFGKGSLLSVLRQFARLKNDKQAISVGFVGYPNVGKSSVINTLRSKSVCKVAPIPGETKVWQYITLTKKIFLIDCPGVVYQNNDSETDIVLKGVVCIFSCAICKCFFFTWVVLEDPT

SEQ ID NO: 246125 - protein, 99 aa, Zea mays
  Clone ID: MRT4577_156049C.1.pep
GSKIEAISNGNNVQRFDALLTQGCTYTLYRVAFCLNREELQFRNIGHGLELGLITHTIVDPFTKPIQFPPFPKYLMPFHEVYQQPHKTFIGNNPSFHIV

SEQ ID NO: 246126 - protein, 611 aa, Zea mays
  unsure (1)..(611): unsure at all Xaa locations
  Clone ID: MRT4577_15604C.1.pep
MQIFVKTLTGKTITLEVESSDTIDNVKAKIQDKEGIPPDQQRLIFAGKQLEDGRTLADYNIQKESTLHLVLRLRGGMQIFVKTLTGKTITLEVESSDTIDNVKAKIQDKEGIPPDQQRLIFAGKQLEDGRTLADYNIQKESTLHLVLRLRGGMQIFVKTLTGKTITLEVESSDTIDNVKAKIQDKEGIPPDQQRLXFAGKQLEDGRTLADYNIQKESTLHLVLRLRGXGMQIFVKTXLTGKTITFEVESSDTIDNVKAKIQDKEGIPPDQQRLIFAGKQLEDGRTLADYNIQKESTLHLVLRLRGGMQIFVKTLTGKTITLEVESSDTIDNVKAKIQDKEGIPPDQQRLIFAGKQLEDGRTLADYNIQKESTLHLVLRLRGGMQIFVKTLTGKTITLEVESSDTIDNVKAKIQDKEGIPPDQQRLIFAGKQLEDGRTLADYNIQKESTLHLVLRLRGGMQIFVKTLTGKTITLEVESSDTIDNVKAKIQDKEGIPPDQQRLIFAGKQLEDGRTLADYNIQKESTLHLVLRLRGGMQIFVKTLTGKTITLEVESSDTIDNVKAKIQDKEGIPPDQQRLIFAGKQLEDGRTLADYNIQKESTLHLVLRLRGGQ

SEQ ID NO: 246127 - protein, 114 aa, Zea mays
  Clone ID: MRT4577_156050C.1.pep
METTLRAQPIGESLMPSVETVSSKVFVSQNSSNDTFFNNVGILTSSTKIKTLKERALQELTAEKQGSTALHQEVDELNKKLAKTQREFEEFKKQQEENNLLLKHILHSNNAGAA

SEQ ID NO: 246128 - protein, 100 aa, Zea mays
  Clone ID: MRT4577_156051C.1.pep
MSHHLHRPSTASACSPSSVIMSCSNGMCNCRSSCSCCSSCNCISTDVDTAAASSIKTMVFAVLNMKASACGFDAANEGGGCDCNTCDCGTSCGCSCCSCN

SEQ ID NO: 246129 - protein, 64 aa, Zea mays
  Clone ID: MRT4577_156052C.1.pep
QLEFPFGKFGRLPRFHKGQLEVFFWGNAVRKDPIIHYKGPSVHLSPQISSCKVLFGSGELLRLV

SEQ ID NO: 246130 - protein, 69 aa, Zea mays
  Clone ID: MRT4577_156053C.1.pep
MATVAMDILKPTPAAFGDQATAAAKGRSGRWGQGLPQFYLQDIHDLELQIRPKTHNLNRLEGQGNDLNF

SEQ ID NO: 246131 - protein, 159 aa, Zea mays
  unsure (1)..(159): unsure at all Xaa locations
  Clone ID: MRT4577_156054C.1.pep
ALATLSGAKTGRSPXAPRVVXAXVAARALWWGXGSPXFXLXXPPFLAXXXXAVAFLXSLXXVFVXRXFLXWXPXXRFXVRFFSAGAFPSLFLXXXCFXAPXXXLXXFGPPAFXFFXAGXFPCXRFXXFLXXXPXXXFXLAXXXLXFLGXXXAGGXXXGC

SEQ ID NO: 246132 - protein, 89 aa, Zea mays
  Clone ID: MRT4577_156055C.1.pep
MEGKSRLPEVTIVPAARPLAGDGTIDAAKAAAAPGKEPISPGTPSSADAGRRGKERRAVEAVPLPGWKLDALCQESCPSPTMRARFPYF

SEQ ID NO: 246133 - protein, 278 aa, Zea mays
  Clone ID: MRT4577_156056C.1.pep
SKKDFEHHMAVLGRLRHPNIVPLNAYYYARDEKLLVYEYMPNGSLFSVLHGNRGPGRTPLEWAARLRIAAGAARGLAYIHHSGRRGSGTPKLAHGNIKSTNILLDRFGVARLADCGLAQLGSSPAAAAARSAGYRAPEAPPPPRPWASHRGDVYAFGVVLLELLTGRFPGSELPNGGVVVELPRWVQSVVREEWTSEVFDLELMKDKGIEEEMVAMLQLALSCTAAAPEQRPKVGYVVKMVDEVRACGETASPSHESMDESSGVSDSPAVSEGGALSQ

SEQ ID NO: 246134 - protein, 79 aa, Zea mays
  Clone ID: MRT4577_156057C.1.pep
PREAVRGMSFGRGLSSEGLSQKTLLLLGSPISRVGWGRIGGMPRNIFWRAFNSGRKNVSTMVELFSGAIKNQLNNHKTY

SEQ ID NO: 246135 - protein, 78 aa, Zea mays
  Clone ID: MRT4577_156058C.1.pep
WDPIGHPRLIILLPCLPLNYLGRFAIALYSFGFYITLCSCSNYTAILFIVHDKIIILIGTWRNTCHHNGGMGCPWLTN

SEQ ID NO: 246136 - protein, 131 aa, Zea mays
  Clone ID: MRT4577_156059C.1.pep
MSWQTYVDEHLMCEIEGHHLTSAAIVGHDGAVWAQSTAFPQFKTEEMTNIMKDFDEPGFLAPTGLFLGPTKYMVIQGEPGAVIRGKKGSGGITVKKTGQAMVVGIYDEPMTPGQCNMVVERLGDYLVEQGL

SEQ ID NO: 246137 - protein, 120 aa, Zea mays
  Clone ID: MRT4577_15605C.1.pep
PQTTAPMTMPPPRPFHSRAPFANHPATPAARNSGMGAQGPRITPLSFGPPWRTPPINLTSPCQWCGKVSSLKPKRMIQLPPPPNRVSRTPFWLHPPPTNLLVKKKKKALGPPEPYTVRAL

SEQ ID NO: 246138 - protein, 55 aa, Zea mays
  unsure (1)..(55): unsure at all Xaa locations
  Clone ID: MRT4577_156060C.1.pep
MAAKGDGXAIXIDLXTTYSCVGVWXXDRVEIIGNDQXNXTTXXYVXFTDSEXXIG

SEQ ID NO: 246139 - protein, 131 aa, Zea mays; identical to SEQ ID NO: 246136
  Clone ID: MRT4577_156061C.1.pep

SEQ ID NO: 246140 - protein, 40 aa, Zea mays
  unsure (1)..(40): unsure at all Xaa locations
  Clone ID: MRT4577_156062C.1.pep
TNICTPDNALPNNAGGXCRPPLHHCDLSQTIFRQIAQYKG

SEQ ID NO: 246141 - protein, 94 aa, Zea mays
  unsure (1)..(94): unsure at all Xaa locations
  Clone ID: MRT4577_156063C.1.pep
MALKPFLKGLKGLEKGPSTSCQACPCCEGFVQLPGTIKGXPPDSQYLEGXFLEKIHFPPDFPFKASKVFFKNKGFHSNLNXIGGLCLDFLKEQW

SEQ ID NO: 246142 - protein, 97 aa, Zea mays
  unsure (1)..(97): unsure at all Xaa locations
  Clone ID: MRT4577_156064C.1.pep
XDTPGQGRRRKXQXPXHGXXRGKPKPKGTRAXSKTRPHQKGGXXSPKTKQENXRKTEKAEXXDGPGKKXHSXXXTXXGTAKEXRXSPXXXXQGAEQT

SEQ ID NO: 246143 - protein, 69 aa, Zea mays
  Clone ID: MRT4577_156065C.1.pep
KMNLLMKKMTNKKKQTQDPKKWKTLNIQKMKLYKYYMKKKFNIIKELSMDMEGKKRHQHKPVCNICIRR

SEQ ID NO: 246144 - protein, 111 aa, Zea mays
  Clone ID: MRT4577_156066C.1.pep
SHDLCSDGHKFLVIYIHTDIRRGGVSSPNRAARATVDRALLLARSDQRSCRHRKQPTSDYYNCTCTSTYDIVKQVVIEAHTNDYRIYSSLTRQHFHKWFMQSCDGSLLLHA

SEQ ID NO: 246145 - protein, 290 aa, Zea mays
  Clone ID: MRT4577_156067C.1.pep
MLMHYDVDRSEDRQSEEVQSAYRRDSDIGEEMIISSEEQNDENEWSWVNQDRDGGPLAESVSSLHMTQQVLENEIQKLSELGKELEAEESTSGNKDQDVIVLPYAEVDMLKLNEKMEHLEQKVKEVSNTIREKDLMLSKLQILIGTADRATVEEAAASIDQLETELEHHLQEILEAEIQYLVMLKARQNWQVRAEDQMALEEHRAFAAGDNTRMLLKLRETESKIVMLKEQVDKLEVREKDLYRTTEVLKMQSRTFKVSLFGLVQLIMMCLSLKMFFAQVSAPFDEVVPT

SEQ ID NO: 246146 - protein, 100 aa, Zea mays
  Clone ID: MRT4577_156068C.1.pep
PKGFCCWFPLNTGEGGGPFYVAKKGLTVQLCNCFQPIHYPNSNVFTRGGRVCKKEDFFPILSKNFDRALYKGKGAGGFPFDPRRVLNALPGPPKNRAFLF

SEQ ID NO: 246147 - protein, 45 aa, Zea mays
  Clone ID: MRT4577_156069C.1.pep
RRGGGLEKKRVPRYTYYSSLNTKSRHRLLPYVLKPRSQTLSYNSN

SEQ ID NO: 246148 - protein, 343 aa, Zea mays
  unsure (1)..(343): unsure at all Xaa locations
  Clone ID: MRT4577_15606C.1.pep
YTRINQKKKLMHSDVLSQAIWPHSGHYRPTEENFQEFQSFLKDNNVDLTDVKXGLFGDTPRFKKKTCCMQHFKLFRPQCXMSPDEDDEEFWSRLRSISSDCCAVADKPEEDQQAAAQETSNSCQAPQVTESTTPDEVSPSPSQQEETSKSLSPTATVTRQDSSEEAVEDAETSTTSHRALFEDGQEEDHAAAATAADDNTAVPREKILQRISSKKETKSYQLGKQVSFKWTTGAGPRIVCVRDYPSELQLRALEQVHLSPRSGGAAAAAGAGRAASSRFASPQRCGSPVAARGRREPLASAGCGRAASSRFASPQRSSSPMARARCEQLTPREAFRTHLMARG

SEQ ID NO: 246149 - protein, 128 aa, Zea mays
  unsure (1)..(128): unsure at all Xaa locations
  Clone ID: MRT4577_156070C.1.pep
GNVPLNAVQLLWVNLIVDTLGALALATEPPTNHLMERPPVGRREPLIINIMWRNLIIMALFQVSVLLXNFKGISLLQLKNDDPAHADKVKNTFIFNTFVFCQLNLRFLFPCLEEVMIIVRSRLNVGHS

SEQ ID NO: 246150 - protein, 89 aa, Zea mays
  Clone ID: MRT4577_156071C.1.pep
RALPLPRSLSVAVAGTYVLFFLAYGFLSAWKVVDLSLLDLFSFCKNHSRLRCGYSDLVVISGFDQRKHWPRSGFWSLTVSPFVFLFCTI

SEQ ID NO: 246151 - protein, 180 aa, Zea mays
  unsure (1)..(180): unsure at all Xaa locations
  Clone ID: MRT4577_156072C.1.pep
GSEQSGCPLIRDVKSALSLPQCTAPLIINVVAAVSSGNVPLNDVQLLWVNLIMDTLGALALATEPPTNHLMERTPVGRREPLIINIMWRNLIIMALFQVSVLLTLNFKGISLLQLKNDDPAHADKVKNTFIFNTFVFCQVFXQFNSCKPDELNVFKGISENHLFIGIIAITVVLQVESLE

SEQ ID NO: 246152 - protein, 95 aa, Zea mays
  Clone ID: MRT4577_156073C.1.pep
ISRFSSASIIFLVHCTMGSFITSLRILFSLVHCLIIHRITGPGTQSKRQKNYRGRAGHSLQVSHCLFSDSTTNDLTSIKFILVIHCIILLLSFAI

SEQ ID NO: 246153 - protein, 59 aa, Zea mays
  Clone ID: MRT4577_156074C.1.pep
FTRARELLPCGPVCSFQPLGLSHGRVGGTAFSTGRSQCQVLALCGKSQVTRDAPCPACL

SEQ ID NO: 246154 - protein, 584 aa, Zea mays
  unsure (1)..(584): unsure at all Xaa locations
  Clone ID: MRT4577_156075C.1.pep
YNAQMLSADVTSLIVEGIAQNTSGSIFEPEQGGQEPEVTGSPTEKAILSWGLKLGMKFSETRSKSSILHVFPFNSEXKKRGGVAVYLAGSEVHIHWXKGAAEIILDSCTSWVDTGGSKHSMTPEKAAEFKKFIEDMAAASLRCVAFAYRTHEMDDVPDEDRREEWQLPEDNLIMLGIVGIKDPCRPGVRDSVRLCQAAGIKVRMVTGDNLQTARAIALECGILDDPNVSEPVIIEGKTFRALSDLEREDAAEKISVXMGRSSPNDKLLLVKALRARGHVVAVTGDGTNDAPALHEADIGLSMGIQGTEVAKESSDIIILDDNFASVVRVVRWGRSVYANIQKFIQFQLTVNVAALIINVVAAVSSGNVPLNAVQLLWVNLIMDTLGALALATEPPTNHLMERPPVGRREPLVTNIMWRNLIIMAMFQVSVLLSLNFKGISLLQLKNDDPAHADKVKNTFIFNTFVLCQVFNEFNSRKPDELNIFKGISGNHLFIGIIVITVILQALIVEFLGKFASTVRLSWQLWLVSIGLAFFSWPLAFVGKLIPIPKRPLGEFFACCCNCKGSKQGPDDATSNGKEDNKLEP

SEQ ID NO: 246155 - protein, 187 aa, Zea mays
  unsure (1)..(187): unsure at all Xaa locations
  Clone ID: MRT4577_156076C.1.pep
MTMDMSCCACVQMHMWGHGREYRXGPESLKGTQAATLALLKLPCYCCAPGCRNSVGHPRARPLKDFRTLRTHYRRKHGGDKRFGCRRCAKPFAVKGDWRTHEKNCGKRWFCACGSDFKHKRSLNDHARSFGGGGHLYVTPPGHQQAAVPPLLKPKERIVIRFDQAAAPWNGAHAPICMTDRLTAPHV

SEQ ID NO: 246156 - protein, 82 aa, Zea mays
  Clone ID: MRT4577_156077C.1.pep
LPSAKPGRDNGCERSKRPRAESAILPAVRSWTETEATRRGLRACSRSGKAGLPASACFRPHGNRNRHAVVERSQLSGQCGTR

SEQ ID NO: 246157 - protein, 67 aa, Zea mays
  Clone ID: MRT4577_156078C.1.pep
PFNKLMPVRCGCNGKTHIDRLTTKKILLLRGKEMELGSSSRGVSKQPHTTPSRGSSSTPVERACLTI

SEQ ID NO: 246158 - protein, 112 aa, Zea mays
  unsure (1)..(112): unsure at all Xaa locations
  Clone ID: MRT4577_156079C.1.pep
KGPARRGGSTXVVFPPGARPRGSAGSNFLGGEGVQGLKIGGNLIKLTAMGVNLEDAAVPALAKKGGGKTAEKLASDAAFFRKVVRGDLKKFTRGTMILPLTGNQYAEKVTEN

SEQ ID NO: 246159 - protein, 113 aa, Zea mays
  unsure (1)..(113): unsure at all Xaa locations
  Clone ID: MRT4577_15607C.1.pep
LPLVRAGGXXLPXGLVXPCCGWLPRRARGLXXLXXAXGVWGRRPCVSVVLSACCCCCXXCXXXVFGPXWXXXVXXSPPGRWFWSVXCVLRGGLLFVCLFGXXFAXWSPVFXVL

SEQ ID NO: 246160 - protein, 94 aa, Zea mays
  Clone ID: MRT4577_156080C.1.pep
SFTTGRACGVSYPTPLSPGSGPQIPSFMSLRTAPGKLRSRTIAGQRRGVMILGSGFTLCSGCSIYSSHFVSGIGAVEAAPTWHSGPKNSTKRTH

SEQ ID NO: 246161 - protein, 107 aa, Zea mays
  Clone ID: MRT4577_156081C.1.pep
DCVCNRIPASRVPLSGSHAGKSLECPALPMLCLMCVHTSVSISGRTAGHDSLGQIKILVASSLQLVRISSRQPTVWHSSIRGGHDLVEMYSTPLKCLLIAMYPRQRS

SEQ ID NO: 246162 - protein, 104 aa, Zea mays
  unsure (1)..(104): unsure at all Xaa locations
  Clone ID: MRT4577_156082C.1.pep
QSYLTGDLLCDYSCDTAGLSADXRRSAKNRDLDVIHYGWAMLGALGCVFHELIGRNGVKFGEATWFKGGSQIFNEGRLDYLGNSSLIHAQSILAIWAXQVALMG

SEQ ID NO: 246163 - protein, 61 aa, Zea mays
  Clone ID: MRT4577_156083C.1.pep
CRIRSCLRVSQKTCAWYIICLDWACQTTMLTVQLRQHLLPLLPKQPIQVYPPDGTCNGCQL

SEQ ID NO: 246164 - protein, 94 aa, Zea mays
  unsure (1)..(94): unsure at all Xaa locations
  Clone ID: MRT4577_156084C.1.pep
PXFFFFFFFFFFFFYVPFTFEDNSIAIYRGLNGLFIFKSAPFSANMPKLFCLTDSALGQPSDLWRVSLFDIRPKVPAHPIDFLNTGKLCIKRTF

SEQ ID NO: 246165 - protein, 505 aa, Zea mays
  Clone ID: MRT4577_156085C.1.pep
PRGRPGPSASARSLAAGRPPDAQTAASKSPSTVPPSARALLLRAQPHHAAAWLTARGCFCRPLASLPLNTRAAPLDVGRTRDALPSPFLSATSAAGGATLLTWVNTVRSSSSGAGSQSSVADEPEAAEWALQDFYILRKDVELALERVNEVRQSAGLQQLEEDIASLENKSSDSSLWDDPSKAQGILVSLTEVKDKVKLLNDFKLQIEEAETIVKLTEELDSIDTGLLEEASKIIKALNKALDNFEMTQLLSGPYDKEGAVINISAGAGGTDAQDWADMLLRMYVRWGEKQRYKTRVVEKSPGEEAGIKSATVELEGRYAYGYLSGEKGTHRIVRQSPFNAKGLRQTSFAGVEVMPLLPEESMAVDIPEEDLEISFTRAGGKGGQNVNKVETAVRMVHIPTGIAVRCSEERSQLANKIKALSRLKAKLLVIALEQRASEIKQIRGDIVKAEWGQQIRNYVFHPYKLVKDVRTGCETSDITGVMDGELDPFIRAYLKYKLTAAATS

SEQ ID NO: 246166 - protein, 77 aa, Zea mays
  unsure (1)..(77): unsure at all Xaa locations
  Clone ID: MRT4577_156086C.1.pep
FCLPSPTAPLLQFXLSXXTKKKNKMEXFLTGSCRGLRPXFXGSCLGARTRGRGDRPHDDVRASGTPQPRRRSLATRE

SEQ ID NO: 246167 - protein, 67 aa, Zea mays
  Clone ID: MRT4577_156087C.1.pep
MGSCPELRLVVLQLLLLLLMCRVPPVGGRSGAGAVHRGGGYPHPRVGVYTLHPLVEQPLQWRREPGS

SEQ ID NO: 246168 - protein, 43 aa, Zea mays
  Clone ID: MRT4577_156088C.1.pep
IKLQGEGPPETAFNGGMRMVDSPRAIQDCKYTESRCQSSAAIA

SEQ ID NO: 246169 - protein, 72 aa, Zea mays
  Clone ID: MRT4577_156089C.1.pep
RAAARAGTCKKKKKKKKKKKKKKKKKKKKKKKKKKPTQKKKKKKKSPLGPDPPLGAIFWNFPSPWGPFGPSF

SEQ ID NO: 246170 - protein, 28 aa, Zea mays
  unsure (1)..(28): unsure at all Xaa locations
  Clone ID: MRT4577_15608C.1.pep
XEDHSRCRSIIRIFLXPRNVYENACPTQ

SEQ ID NO: 246171 - protein, 64 aa, Zea mays
  Clone ID: MRT4577_156090C.1.pep
KWVSHTEDTVVRVRGKKGSYRTCNISENCPVTALQEDQEHKEAKYFGCHCWYTIVLSMLLVGLN

SEQ ID NO: 246172 - protein, 110 aa, Zea mays
  Clone ID: MRT4577_156091C.1.pep
YPGPPWVEVDLKERTLKMPGPAVFLVQPASPVQSRGFTRAQVLAQKLVHPDPGVCPPPPLGSVNVAQSERVVSPCPKVWNPPLVFGPPPANAIQVDPCARSLGSLVGPEL

SEQ ID NO: 246173 - protein, 71 aa, Zea mays
  unsure (1)..(71): unsure at all Xaa locations
  Clone ID: MRT4577_156092C.1.pep
DGGEIIIGDIIICPFGPILENPLLMGIGLMALHKRRQKDLKKLGELFSQTGVREFKILKEFXARVAFQVYP

SEQ ID NO: 246174 - protein, 68 aa, Zea mays
  Clone ID: MRT4577_156093C.1.pep
GSLTYGAGDWRLSLIIWPVLYSVPPESLIKTLDTKAQHSLLGGEAVAMPAGQCALIPRRGGMGALCSR

SEQ ID NO: 246175 - protein, 40 aa, Zea mays
  Clone ID: MRT4577_156094C.1.pep
RVHPPAIKSYGGELCKKILGPDPPLQRGLSGVLNGAQKPF

SEQ ID NO: 246176 - protein, 142 aa, Zea mays
  unsure (1)..(142): unsure at all Xaa locations
  Clone ID: MRT4577_156095C.1.pep
RTPSSSTNFFFFSFFFQNTPSKGYFSKSKKNNNSPHPYPPHTPSIIYHLLPDITTHTLIYLYYTNLFRLSITNSSIPHSSNYYISYITLYHNYFTIQHITIYSPNXFNAYYSSTKPIINLNFHFYNIIIQWFFPSIIPFYLN

SEQ ID NO: 246177 - protein, 124 aa, Zea mays
  Clone ID: MRT4577_156096C.1.pep
VASAAALISPAAVVRSWLLLAWVSTVAGNLSLLGSAANLIVCEQARRAQRNAYDLTFWNHIVFGVPSTLIVTAIGIPLIGRSTSDRSSYILHYMHNCMPRSYMHVLLSLICYIIAPAPDRSDTY

SEQ ID NO: 246178 - protein, 474 aa, Zea mays
  Clone ID: MRT4577_156097C.1.pep
MDKFLVPAPPHCGEEPAPPPRRHRWRRIIAELDGRIDSRFQHRDSRLLLDSFTEVGAFDHKYYIHGEERCRTYVDRIISASTINFHPVREGVSAIEFDRKGIYIASVTLSGCLTVHDFETLYCSKYGPPCSMPDESSNYVLHISNRIPLNAVRWNPGNQDEIACTSNQSDNVFLFDIGYVSSTPTEVLHKGKSKFPSLYSESCKSLTDITFTSDDKSRIFASGLDGAVYMWDRRSSKTHCLELVASPEAQFNTVKLTVDNRTVFGATKNGTIHVWDLRGGRASAAFQSHNEVQQLMSVKLSTLLGKIASLKEQSNIVSSPILSIDFNPSCSYQLAFHLDDGWSGVLNVNNLNVTHLHCPPPAWLEGTDLVLQKQLRKPTWLLTSSIYAVGSSSYDGIYLLDFHPDTSSACHVDYKEETRVSGENQPAGNKFVPLSQRVLSCAAHPLSHTIIAGTQFSSLLMLSQKYKSIRNTEP

SEQ ID NO: 246179 - protein, 63 aa, Zea mays
  Clone ID: MRT4577_156098C.1.pep
RYRPPPSPPPPRRTCASWASVACSTSDTTDLPLAPTKKTHMKKLIVKPQPDSVATLRLPDTER

SEQ ID NO: 246180 - protein, 49 aa, Zea mays
  Clone ID: MRT4577_156099C.1.pep
LWFQCCFNFFPASGSNGSSYINMVCGALRNPVPKTLVPCPVKKAKRIWL

SEQ ID NO: 246181 - protein, 104 aa, Zea mays
  Clone ID: MRT4577_15609C.1.pep
DCRSVFPTEQFFCFLNQFHMKWGVFFPLCKEFKRFKVASLKGEQEVLRRWWAPSRLSVVFPGVARPTGQSRFFSLRLEALQVSGFALGQWNWQVSVCFPMLEVW

SEQ ID NO: 246182 - protein, 789 aa, Zea mays
  Clone ID: MRT4577_1560C.1.pep
MARRRLGKEKVDEGDVAAGERDLGYQSPEGVLKDVFTGDSDSSDDNDRRKKLYVMYDGSWELTSRRNIKSLRREMPSPAGVLTMWGDRAAVLAAVEKLHALAAETARLDDGGRDPSTSGTKAPTKVPKVQPSGEDGGPVKAIQMPGIPREVIEHHLKIHPNAKPVHHPVWLANLVIVPKANGKLRMCIDYTSLNKACPKDPYPLPRIDQIVDSTSGMRNALSTFVRVMSKTFGDLIRDRIEIYVDDIMVKTKRGLTLVEDLTLVFDKLRATRTKLNPDKKLRHYFQAHRVMVVTSFPLRAILHNSNTTGNIAKWAVELAEFQLDFQPHHAVKSQVLANFIMEWTPPPSAPGGPDPDSDPTPAEPRVPVFTEPHWTLFFDGSARQQGGGAGVVLVDPSGDQVKYMVHLEFKATNNMAEYEALIFGLSVALSLEIHQLLVKGDSQLIIKQVRGECSCNKPRLAAYLLHVRKLEKDFMALELQHVPRADNSAANELSMRALTWAPVPEGVFKRRLLRPTAQPAEPGEGERIVRLAKRYAVVEGDLYRCGANGILMRCITQEEGHELLTEIHGGECGSHSSSRTLVGKAFRHGFYWPTALQDAAEMVKSSKPFAVWGVDILGPFPRAVGGYHFLFVAIDKFTKWPEATPMVNITQGAAVAFLRLIVCRFGVQSCIITDNETQFTSRLFQEYCEGISTQLCFASVAHPKSNGQVERANIEILRGLKTRTYDCLKKHGANWVNELLSVLWGNRTTPSRAIEETPFFLVYGAEACLPPEIIMGSPRVQAFDESMPE

SEQ ID NO: 246183 - protein, 38 aa, Zea mays
  Clone ID: MRT4577_156100C.1.pep
AGVSTLLSDLRMLPHVCHCVVVESMYVCRSMHEPIRLE

SEQ ID NO: 246184 - protein, 150 aa, Zea mays
  Clone ID: MRT4577_156101C.1.pep
AVPRTHTPLVYYYPAPAQGGAALGTGSFAPDRLRAALAVALVPFYPLAGRLGVGPDGRLQIECNSNGALFVVANADLTGADVFDDYEPSAEVRNTFVPVADSGDATSSPMAMFQVTFLKCGGVVLGTAIHHAAMDGVGAFQFMQTWSGVA

SEQ ID NO: 246185 - protein, 64 aa, Zea mays
  Clone ID: MRT4577_156102C.1.pep
ECIGGGGAASLIAICLSLVKRSAGDLIQYPHLAAYEPFDVYFKPVSLLRAHGDSTALSFRVVGL

SEQ ID NO: 246186 - protein, 182 aa, Zea mays
  unsure (1)..(182): unsure at all Xaa locations
  Clone ID: MRT4577_156103C.1.pep
MKGSIKNTHTLPTTTYTGGSQEGEPFGSSNFSVSSFLICMLHNQRKARRPSSIKNNSITMLPNHPRLLAIISFSSPHAHFLICRAGRNVAAGMTGGLAYILDEDDTLVPKVNKEIVKMQRVNAPAGQMQLKGLIEAYVDKTGSEKGIAIXREWEAYLPLFWXLVPXSEEDSPEXCAEFERVL

SEQ ID NO: 246187 - protein, 94 aa, Zea mays
  Clone ID: MRT4577_156104C.1.pep
KTCRQGVLEQVLIWTNEAFDAARFSLVNPVCSQLISCIKTVSYLRLSSAMVERLRRRHAVGSIEPRHRSALLHRQIRRPLTGARSVYWNGDPRV

SEQ ID NO: 246188 - protein, 92 aa, Zea mays
  unsure (1)..(92): unsure at all Xaa locations
  Clone ID: MRT4577_156105C.1.pep
IVPSYCSRWIXKKKKKKKKKKKKKKKKKKKKKKKKKKKKKKKKKKKKKKKKKKKKKKGGPFLKDQIFKPRVGKKKFFFFLGQNKITGPCFKI

SEQ ID NO: 246189 - protein, 470 aa, Zea mays
  Clone ID: MRT4577_156106C.1.pep
MAGTEVEDPPAAALEVPAKRGLLRYNSPLAQVSLLGLICFCCPGMFNALSGLGGGGQVDPTIADNANTALYACFAVFGVLGGAAHNLLGPRATLLAGALTYPLYAGSFLYYNHRPGSQVFPVTAGALLGAGAGFLWAAQGAVMTSYPPPNRRGTYISLFWCLFNLGGVLGGLLPFALNYNRGDKKGSVSDGTYIAFMAFMLVGAALTVLVLPPARIVRDDGTRATRVTFSSPATEGAEILKLFANWKMLLALPAAWASNFFYTYQFNNVNSGLFTLRTRGLNNVFYWGAQMIGSAGIGYFLDFGFASRRKRGLFGVAAVAAVGTAIWGGGLANQLSYNAVPVPDPIDFKDGHRYAGPFLLYFSYGLLDAMFQSLIYWIIGALANDSQILSRYVGFYKGVQSAGAAVAWQVDRRHTPLMSQLIVNWGLMTISYPLLALLVFLAVKDESYSVSSVEDGREKDSKLSAPTSFH

SEQ ID NO: 246190 - protein, 42 aa, Zea mays
  Clone ID: MRT4577_156107C.1.pep
FLRMGIALNTLPLVMSKVLGHKHVKGKTTKFVLYMYPISEGF

SEQ ID NO: 246191 - protein, 88 aa, Zea mays
  unsure (1)..(88): unsure at all Xaa locations
  Clone ID: MRT4577_156108C.1.pep
MATADRVXDTLLSSFPTHHPRPFSSVSLGTNPVLPVYLRARCRGGPRIASRLRVHRVRAAADQLSTTNPEVASGEKKITWSSRAAPPL

SEQ ID NO: 246192 - protein, 84 aa, Zea mays
  Clone ID: MRT4577_156109C.1.pep
WSGVGRVAQSQTPFLLSLFLSIYLSLAAIYTRDGNGYVMDSLLVGTLMGTILYRSGRRVRVCNIHTRIPMNNLYLSKKKKKKRP

SEQ ID NO: 246193 - protein, 56 aa, Zea mays
  Clone ID: MRT4577_15610C.1.pep
PLYSPSEVNTSQSHDNKWTWPSGSPQKWVLCCSALSAAEKGIVSELAKIAGVPIST

SEQ ID NO: 246194 - protein, 71 aa, Zea mays
  unsure (1)..(71): unsure at all Xaa locations
  Clone ID: MRT4577_156110C.1.pep
ADELAGWKLVAGDVFREPSHPVLLCVLVGDGVRILGMGVVTXVFAXVGFMSPRAARAGHACCACTSPSVAR

SEQ ID NO: 246195 - protein, 118 aa, Zea mays
  Clone ID: MRT4577_156111C.1.pep
PKKKKKKKKKGKRKKKKKKGKKRGGKKGGKKKGGRRQRGAKDNETQATGRRRAEGKPGKTPGGGEPKRQEGQTPGASKRKGEEAQTGRASRHKTQRGRQRGGARKGPKEGGRGGGQGN

SEQ ID NO: 246196 - protein, 69 aa, Zea mays
  Clone ID: MRT4577_156112C.1.pep
SAMRIIDSVNRERRTLRRKFHNRFLRIRLTYHSQRVQHVGNRRLRTSLGRVPGYPKRQIDCNSVLNTQR

SEQ ID NO: 246197 - protein, 185 aa, Zea mays
  unsure (1)..(185): unsure at all Xaa locations
  Clone ID: MRT4577_156113C.1.pep
EAQRQPGQFRSSGHQPERRLRGTPVPSSPIVPTSXTPAPSSGPPPSPLASRPPPTRRPPPYYFPSCPPPRPXTPXPPCPPPRPSSRWPCPWRRPPRPWRSPSPPAXPRMPPPPRGLTGASSGTLSCLDAWSSSAAFCAAAWARCSRLFCMDAMALADSNLTHYLVSTRSMATPPVHFLVPACASA

SEQ ID NO: 246198 - protein, 88 aa, Zea mays
  Clone ID: MRT4577_156114C.1.pep
MDVRSVKAVEGLLQQMQLSEAERSLVQIGGMKRSNTVVHQALGKLLSEKLAHLDAIERALETVWCPIRGTECKSLGHNKFLFTFNQAT

SEQ ID NO: 246199 - protein, 181 aa, Zea mays
  Clone ID: MRT4577_156115C.1.pep
AAYEGLFIGSVEFEPFEQIWKTWAPPKCRFFLWLVAHKKCWTADRLEKRGLDHPEKCPLCEQERETIDHLLVNCVFSRECWFLLLRQFGLQGLAPQPTNINFMEWWHQANEAIQGSFRDGLNSLIMLGAWILWNHRNRCIFDGLSPNVANFLIHVGDERRLWETAGAKGLTSLVASLSHVA

SEQ ID NO: 246200 - protein, 222 aa, Zea mays
  Clone ID: MRT4577_156116C.1.pep
MSTGRTEEAAGSAETACVTGAGGYIASWLVKLLLSRGYTVHGTVRDLSDNKTAHLKRLENASENLKLFKADVLDYDAMAAAVAGCQGVFHVATPVPSGKITDPEREMLGPAVTGTINALKAASAANARRVVVVSSMVAVEINPKDWPKDKIKDENCWSDKEFCRNEENWYSVAKISSEEAALEYAKQTGAGADAQHEPVPFLKGGLNEGQALEQRPRQVFCR

SEQ ID NO: 246201 - protein, 345 aa, Zea mays
  Clone ID: MRT4577_156117C.1.pep
MSTGRTEEAAGSAETACVTGAGGYIASWLVKLLLSRGYTVHGTVRDLSDNKTAHLKRLENASENLKLFKADVLDYDAMAGAVAGCQGVFHVATPVPSGKITDPEREMLGPAVTGTINALKAASAANARRVVVVSSMVAVEINPKDWPRDKIKDENCWSDKEFCRNEENWYSVAKISSEEAALEYAKQTGLDVVTVNPAVVFGPLLQPTLNTSCQFLVYFLKGGPDRMRDKLWHIVDVRDTADALLLVYETPQASGRHICAPHFISARDLLELLKTMYPDDYPFISKESIYDMEHPAPMTSDKLKKLGWKVRPLKETIAETVEFCQHAGFLEDVEGFRFPPLYNII

SEQ ID NO: 246202 - protein, 67 aa, Zea mays
  Clone ID: MRT4577_156118C.1.pep
TFIHIIIVIDTGTSFTIILHGLLQFLVSSNVQCMSYSYRHPPLHRPHHLIPQPCMHQHPCHVVFYVH

SEQ ID NO: 246203 - protein, 106 aa, Zea mays
  Clone ID: MRT4577_156119C.1.pep
ADAALEMLAAKRPLPHRGRLLAAVMEAGPLLQNLLVAGQLPRWRNPPTVRAPDTLPLGASRAAGYADDAVTLAASGCTKRPMAAALPVLPAASCSPGFIAKRQRLH

SEQ ID NO: 246204 - protein, 51 aa, Zea mays
  Clone ID: MRT4577_15611C.1.pep
CVSSPPPCRTLMYLVCESCCCAEMSLCLTRIELASLNNYWCVMRIFMFPNK

SEQ ID NO: 246205 - protein, 43 aa, Zea mays
  Clone ID: MRT4577_156120C.1.pep
VNVTYTTANNGMTSLKIWTLTISTYVLCASMRPTATDWVQEND

SEQ ID NO: 246206 - protein, 69 aa, Zea mays
  unsure (1)..(69): unsure at all Xaa locations
  Clone ID: MRT4577_156121C.1.pep
MADSKATSAVTLRTRKFMTNRLLARKQFVLEVIHPGRANVSXAEMKERIVKAYDVKDPYNFFDFTFLSH

SEQ ID NO: 246207 - protein, 113 aa, Zea mays
  Clone ID: MRT4577_156122C.1.pep
AGHGEHYGLNVSSLLTLAREAAARRGEVDCARPAAIRSRSTQRERETAYSGAQKHAMPRRQPGCMLMPPLSVFDSTERDTWRKAAEQQGDWTSSKHASRVVSTGKPTAEINLT

SEQ ID NO: 246208 - protein, 80 aa, Zea mays
  Clone ID: MRT4577_156123C.1.pep
ETQIWIKKQRNTDLDQEAANRDLNCKKTSKPYELAEAAQAARTRTPSTTNYDVHSPNWGDGKPTHPPSAMWAIDLGHKPS

SEQ ID NO: 246209 - protein, 53 aa, Zea mays
  unsure (1)..(53): unsure at all Xaa locations
  Clone ID: MRT4577_156124C.1.pep
PTRSTASTGHNLNXNYXCNFKSNVIVPKYFRSITFKLFNFNPHFNTQSPFTFP

SEQ ID NO: 246210 - protein, 77 aa, Zea mays
  Clone ID: MRT4577_156125C.1.pep
TFSPTGPSDSPIRRVSVSVVEHTHTLVNCISGRGIFRPTKQGYCRSQKKKKKKKKKKKKKKKKILKKKKKKGRQLAI

SEQ ID NO: 246211 - protein, 104 aa, Zea mays
  Clone ID: MRT4577_156126C.1.pep
FFFGFFFWFWVFFFWGFFFFFFFFFFFKTPIFFLLLKTGNLKKKGWVKHNYIYNGGPTQKNIVLFVPPLNSAPFFFGKKNPWPAHLWGIKFQPEIITPPCFGSE

SEQ ID NO: 246212 - protein, 126 aa, Zea mays
  Clone ID: MRT4577_156127C.1.pep
GKPKPTAPRLADAGTGSDSPDGKGAAPSPAPAPALTPSTSPADGRSKSKSGGMLRKTMEAKPEGLVKGQRRQQVLEVQAVTGPNPRIARWSAQPWSRRGIGAAQPHGLVWVPKAAVAGPSSSGEDK

SEQ ID NO: 246213 - protein, 169 aa, Zea mays
  unsure (1)..(169): unsure at all Xaa locations
  Clone ID: MRT4577_156128C.1.pep
GRGTEETLPSSSRSAVASLRSLSLLLPLFLIHGKVVEGHGWPHWKEQENNGFVLPXGMKEVFNHAHAKVRNVIERSFGVLKMKFRILLNMQRFSEDKQTRIIVACMALHNFIRESRIADREFEACDADENYNPMPSSAASTWPEDEPLVEDVNMNAFRDDLAHALFHGV

SEQ ID NO: 246214 - protein, 181 aa, Zea mays
  Clone ID: MRT4577_156129C.1.pep
GSPCYLAFTDLPLPNRTVTSRRPGAVVLRLIAARQWWRAADRIEQRMDGGGGLGGLRWTAEEASTIGGIATVSLLHSFIPTHWLPFSIVARAQRWPLSRTLLVSQYPPPFRVPRSPHLLRLPLVTVHRLGASRSGYLLILRGWVKASSQLMVQECAIRVLLWLGCSRWLVPLDGSGFAWCH

SEQ ID NO: 246215 - protein, 82 aa, Zea mays
  Clone ID: MRT4577_15612C.1.pep
PATNVSIHSVGTLLGRVRTLGKRPCVCPGVSAMGHNKEPCPGQSVLAFVLRWGRIDAPCLCKLLKAQRFFLFDPQRRLVLCC

SEQ ID NO: 246216 - protein, 81 aa, Zea mays
  Clone ID: MRT4577_156130C.1.pep
PSLRLFDPLLAMDSAGVLQLILGVTLDALVLLQDSVELRAHRARPSFAERASLRSCRHLLKTFARGILHTCGNSPHLKRCT

SEQ ID NO: 246217 - protein, 174 aa, Zea mays
  Clone ID: MRT4577_156131C.1.pep
LPLGAPQRGRLLRVFHHVRQLLPHFSPTTADERRIKSLPSAQYLAGAGAGASSRGSGASRECAVCLLEFADGDELRTLPLCAHAFHADCIDVWLRAHASCPLCRAAVALPPPVPSPPQRAARRTRPSLDDLLFFHPVPQPLTAAAEIAPASPDQQLAAGARDFLLKRRTRGRTG

SEQ ID NO: 246218 - protein, 136 aa, Zea mays
  unsure (1)..(136): unsure at all Xaa locations
  Clone ID: MRT4577_156132C.1.pep
LDVYRNSPYFLTCLCTLQVEAIPYQDRQEDRYNKSPQLLEYNPVYKKTPLLVHNGKPLCQSMLIVEYIDDIWSHNSLLPADPYXRTLAKFXVKYADDDMFSASIAFFLNNNEXEREKSIQKIWQHLKVVENQRFGD

SEQ ID NO: 246219 - protein, 76 aa, Zea mays
  Clone ID: MRT4577_156133C.1.pep
KDNRSNFKAQFGDFATSVDGVFAAGDCKRGQSLVVWAITEGRQAAAAVDKYLSRYDQNAAGDITPSGAGLVQPVAA

SEQ ID NO: 246220 - protein, 62 aa, Zea mays
  Clone ID: MRT4577_156134C.1.pep
RISSSRRCEKASDTANEPIGADEELKSPIPNYCFYVPKSKVLILIETIVTYGRGTLHYPEFY

SEQ ID NO: 246221 - protein, 361 aa, Zea mays
  unsure (1)..(361): unsure at all Xaa locations
  Clone ID: MRT4577_156135C.1.pep
MSVAAALGRADELRALDDTLAGVRGLVASGAKQVPRIFRVPYPEELLHHEQPPAAATVPMIDLSGDRAAVIDAVRGAAAGWGFFQVTGHAVPEQVMSAAVAAMRAFHEADGGEGSDKARLYSRGPGRAVKYHCNFDLYQSPVANWRDTVYLRMAPDPPAADDLPEICRDALFEYAKQVKDLGQRLFGLLSESLGLKPSYLTDIECDQGQIILGHYYPPCPQPELAIGTSRHSDSGFLTILLQDKVGGLQILHDGQWVDVAPTPGAFIVNIGDLLQLVSNDKFSSVEHRVVAKNAEPRVSIACXXSTHFHPASTRTXXPIKELLSEENPPLYRETLVREYVARYYSVGLDGKQKTALADFRL

SEQ ID NO: 246222 - protein, 165 aa, Zea mays
  unsure (1)..(165): unsure at all Xaa locations
  Clone ID: MRT4577_156136C.1.pep
MTQTNGAAAPGPKLNGNTFLFTSESVGEGHPDKIADQVSDAILDACLREDPLSKVACETATKTGMIMVFGEITTKARLDYQKTIRDAIKDIGYDDSAKGFDYKTCNVLVAIEQQSPDIAQGLHYDEALENLGAGDQGIMFGYATDETPELLALTLXLXHKLNSAM

SEQ ID NO: 246223 - protein, 69 aa, Zea mays
  Clone ID: MRT4577_156137C.1.pep
PRVRERWCRRCVPWCTAWHWTTFTHHGPLPAASATLSLAPVPAALGLLPSHHACASDSCCALTLPVPPI

SEQ ID NO: 246224 - protein, 385 aa, Zea mays
  unsure (1)..(385): unsure at all Xaa locations
  Clone ID: MRT4577_156138C.1.pep
MSVAAALGRADELRALDDTLAGVRGLVASGAKQVPRIFRVPYPEELLHHEQPPAAATVPVIDLSGDRAAVIDAVRGAAAGWGFFQVTGHAVPEQVMSAAVAAMRAFHEADGGEGSDKARLYSREPGRAVKYHCNFDLYQSPVANWRDTVYLRMAPDPPAADELPEICRLTNKVASSTYIEILIVGERLPIXRDALFEYAKQVKDLGHRLFGLLSESLGLNPSYLTDIECDQGQIILGHYYPPCPQPELAIGTSRHSDSGFLTILLQDKVGGLQILHDGQWVDVAPTPGAFIVNIGDLLQLVSNDKFSSVEHRVVAKNAEPRVSIACFFSTHFHPASTRTYGPIKELLSEENPPLYRETLVREYVARYYSVGLDGKQKTALADFRL

SEQ ID NO: 246225 - protein, 129 aa, Zea mays
  unsure (1)..(129): unsure at all Xaa locations
  Clone ID: MRT4577_156139C.1.pep
VIQGSVYSFTXRGAFVSNVTKCISCAKLSLECKRLGSGKLXRSINRVPIGSGTYTMXLKYSQEEYMSEVVLVKILCKDWSQVQSYTIRAVVMLPRMVGISDNMRPANPLVYLKNVPLPICASLLKQLDS

SEQ ID NO: 246226 - protein, 50 aa, Zea mays
  Clone ID: MRT4577_15613C.1.pep
VVIIDVKKKKKKKKKKKKGKKNKKKERKKKKEKKNKKIKKKKGAAPQRVQ

SEQ ID NO: 246227 - protein, 65 aa, Zea mays
  Clone ID: MRT4577_156140C.1.pep
FLTIASSLEIGSSLRICRGIIRQSLPACVLSTPRPYGLSHSQDIAPWLTLALMDLSEPSQYCMVL

SEQ ID NO: 246228 - protein, 68 aa, Zea mays
  Clone ID: MRT4577_156141C.1.pep
RPPTRPPSVRGRVGGPVNIGPGPGGVIDVGSQCLLCSNYYFLSVEYWVFTFSIDSFYILVVGGGCFML

SEQ ID NO: 246229 - protein, 30 aa, Zea mays
  Clone ID: MRT4577_156142C.1.pep
LQMVGLQDLTFNRVDLVLNNNLPINLNLNF

SEQ ID NO: 246230 - protein, 101 aa, Zea mays
  Clone ID: MRT4577_156143C.1.pep
NHKKHVFWCSIYTGGKRWLNLMQTSLLKLRKSKTFCFSENLLILTEGNQKGLFACKGWALPTNAPLSGTSQGGGYGGEKNNWGILAPILFVGPFKMNKGLI

SEQ ID NO: 246231 - protein, 85 aa, Zea mays
  Clone ID: MRT4577_156144C.1.pep
VSFSHNSSALRYCSGLSSGAFLSLCVLPMEDASLILLPEVGTRFRCSRRPAVCGGPFCFVWWWLQKTSNDPAPGRSAWPVKRKAG

SEQ ID NO: 246232 - protein, 106 aa, Zea mays
  Clone ID: MRT4577_156145C.1.pep
FSASLYARYSARCSLGIDTLYYFSCNRLVSQVISSLTASLRFDGALNVDVNEFQTNLVPYPRIHFMLSSYAPVISSSIVVHDQLSVVEIASGAFEPASMMVKCDPR

SEQ ID NO: 246233 - protein, 106 aa, Zea mays
  unsure (1)..(106): unsure at all Xaa locations
  Clone ID: MRT4577_156146C.1.pep
LLSSSPLAVGNAPPFFFPQLLFQLVPALVQLAVPPPVASLPQLFPFPPLFLSPSAASLQQRLLLVPPLVVANPLVAAFLLXSCLLPPPQFSFVFPVXLSRQLTPSL

SEQ ID NO: 246234 - protein, 87 aa, Zea mays
  Clone ID: MRT4577_156147C.1.pep
FFFFFFFFGFFFFGFFFFFFFKAKDFSPFIWALINWVLQGGNTVDTSYGRSRCFKTENHWSGLLLQENILWSTGPLLFLHAPTRASF

SEQ ID NO: 246235 - protein, 62 aa, Zea mays
  Clone ID: MRT4577_156148C.1.pep
PAGEPLAPVELIIYGKLVSPIICVGQFNHQNQLGKRCKPISLSISPFLVIDANTNQNKYRSA

SEQ ID NO: 246236 - protein, 68 aa, Zea mays
  Clone ID: MRT4577_156149C.1.pep
KGSKYSLLQKGKNYGWPIRVMKKVGESNSGDIFFIQDPSVSWLSKIPKGSWSLWKKISSHKKGKKTFT

SEQ ID NO: 246237 - protein, 217 aa, Zea mays
  Clone ID: MRT4577_15614C.1.pep
FFSRAGKVRDVRLIMDRNSRRSKGVGYIEFYDAMSVPMAIALSGQLLLGQQVMVKPSEAEKNLVQSNASSGAASGGARKLYVGNLHSNINEDQLRQVFEPFGQVELVQLPLDPLSGLCKGFGFVQFARLEDAKAAQSLNGQLEIAGRVIKVSAVTDQAGMQVSGATGDLDDEEAGGLALNASSRALLMQKLDRSGITTRIQPPLQQHCFHIYLAYQV

SEQ ID NO: 246238 - protein, 359 aa, Zea mays
  Clone ID: MRT4577_156150C.1.pep
VQLTRQYHQALDASVAKNFPENGIIACMSHNTDALYCSKQTAVVRASDDFYPRDPASHTIHIASVAYNSVFLGEFMLPDWDMFHSLHQAGDYHGSARAISGGPVYVSDAPGKHNFELLKKIVLPDGSILRARLPGRPTKDCLFTDPARDGVSLLKIWNMNKFTGVLGVYNCQGAAWNSVEKKNTFHQTGTEALTCGVKGGDVHLISEAATDAEWDGDCAVYRHADGDLVVLPHDAALPVSLKVLEHDILTVSPIKELAPGFRFAPIGLVDMFNSGGAVEGLTYHLLGGDGSTLGSEAVALACMEVKGCGRFGAYSSVRPRKSTLGSAQIELKYDSSSGLLILQLDAMPKERVHKIVIEL

SEQ ID NO: 246239 - protein, 80 aa, Zea mays
  Clone ID: MRT4577_156151C.1.pep
MSTADEDIPNSVVAASTAGPSPPAPVAKAVRLFGVDLLTAPATAAAPAEAVAVAGCKRARDLGSPPQAAFKKQLVELALV

SEQ ID NO: 246240 - protein, 195 aa, Zea mays
  unsure (1)..(195): unsure at all Xaa locations
  Clone ID: MRT4577_156152C.1.pep
PRRPNXNKFTGVLGVYNCQGAAWNSVEKKNTFHQTGTEALTCGVKGGDVHLISEAATDAEWDGDCAVYRHADGDLVVLPHGAALPVSLKVLEHDILTVSPIXSVSQCPFSXQQMLRNCTCLCSLQELAPGFRFAPIGLVDMFNSGGAVEGLTYHLLGGDGSTLGSEAVALACMEVKGCGRFGAYSSVRPRKSTLG

SEQ ID NO: 246241 - protein, 65 aa, Zea mays
  unsure (1)..(65): unsure at all Xaa locations
  Clone ID: MRT4577_156153C.1.pep
RNQYLPLRQKEVIDFLGPTTVLVPLRVKEACLSWIQITKCWLAFVCKCHSVPLESGSHCIXLMYI

SEQ ID NO: 246242 - protein, 37 aa, Zea mays
  Clone ID: MRT4577_156154C.1.pep
GACGYRSLTEIPCGSTKVRDRALEVLMGTAIRLKSRA

SEQ ID NO: 246243 - protein, 96 aa, Zea mays
  unsure (1)..(96): unsure at all Xaa locations
  Clone ID: MRT4577_156155C.1.pep
CSEAHDPMLXEPKHLVTIMPLFMENIKALDGIHNDVYIGDKEFENHXSSLXMLAEDCNHSDYIKLVKALCSEHNVDLRSVAYTXTLGEWDGLCMIY

SEQ ID NO: 246244 - protein, 114 aa, Zea mays
  Clone ID: MRT4577_156156C.1.pep
PLHPGILPCAFRRRARTRDSVSHLSPAGQSQRTDTARDHPATPRLSHLRPAVSGRASSARSRGHVPWPKPRRRGFTRSASQRSYSRFRPKQHTESDRQNTRARTNAPIQWEQRI

SEQ ID NO: 246245 - protein, 76 aa, Zea mays
  Clone ID: MRT4577_156157C.1.pep
GTTAYTFFLTKLCLEKKFPGEVHKGQKWGSQKKWFDHQNYIFKHPLRHLFFCKSHLGRATLKCLILNPPRINYSGK

SEQ ID NO: 246246 - protein, 89 aa, Zea mays
  Clone ID: MRT4577_156158C.1.pep
ESTLFFFYVHKEAEGATFFFFFFSISGRRKPLFFFFFSISLRTKLFFFFFFFFFYFFCRNSKTYILLDGRNYSLGTAGRTHGNEANDNY

SEQ ID NO: 246247 - protein, 52 aa, Zea mays
  Clone ID: MRT4577_156159C.1.pep
NLLTANCAPSWQYQRGESINEEQYYSIKDAPDLRACIANTQSRIIAARVIVR

SEQ ID NO: 246248 - protein, 42 aa, Zea mays
  unsure (1)..(42): unsure at all Xaa locations
  Clone ID: MRT4577_15615C.1.pep
PPPPFFLFLNQCVIQVIARDSLKPCACSEHERWETLAVNXIQ

SEQ ID NO: 246249 - protein, 71 aa, Zea mays
  Clone ID: MRT4577_156160C.1.pep
GLAWLEETIYCIRLIRIYMLHVSVCHLCVVKYLVYVKNWTFHCIKFVLFCVEASVPGIMLVGGRAGNDMSP

SEQ ID NO: 246250 - protein, 135 aa, Zea mays
  unsure (1)..(135): unsure at all Xaa locations
  Clone ID: MRT4577_156161C.1.pep
GRGPPGTLTPTGKKPTDSKKRGSPPGQGRXEKTFGGKKKNSPPPNSGGQKPSPGGGGPPPRGPPRXNPPPQGSGSTGEPRGPLLPERGAPPXGGRAPQRKEGTRGFWGELLGKLLRGPGKPLSLPGRQKGGGARG

SEQ ID NO: 246251 - protein, 39 aa, Zea mays
  Clone ID: MRT4577_156162C.1.pep
MAKIKIGINGFGRIRRLVAKVALQNDDVELITMNDPFIN

SEQ ID NO: 246252 - protein, 93 aa, Zea mays
  Clone ID: MRT4577_156163C.1.pep
ALLLLQPTGEKGIASKGIKLGNAKAFPIRALKNGGHTIYSRGPERTTKASHSRGREVGTSKTAAPSFFFFFLFFFFFFFFVFEFFFFFFFFFF

SEQ ID NO: 246253 - protein, 90 aa, Zea mays
  Clone ID: MRT4577_156164C.1.pep
APPRGIRHRLLLFLSRGGERSAAPSLDLEAATKLQAHAPLEMGPMRTRIRNWTMGPTGSPRGGCGSRSPSALMSSASVSRSSGSSTEQGF

SEQ ID NO: 246254 - protein, 447 aa, Zea mays
  Clone ID: MRT4577_156165C.1.pep
VAALPKAACLCVDEDACAHVGCRPAVAFMAQVLFAASTFDVAELTNLFQRRLLDVLDKVEVDNLPLVLSVANLCSKSCVKLLERCLDVVVRSNLDMISLEKKLPPDVEKEIVDARVSLGLVSPEDKGFPNIHVRRIHRALDSDDVELVRMLLKEGKTNLDDAYALHYAVEHCDSKITTELLDLALADVNHRNPRGYTVLHIAAMRREPKIIVSLLTKGARPSDLTFDDRKAVQISKRLTKHGDYFGPTEDGKPSPKDRLCIEVLEQAERRDPQLGEASVSLAIEGDSARGRLLYLENRVALARILFPMEARVAMDIAQVDGTLEFTLVSSVNLPAEIQRTVDLNDTPFTMKEEHLARMRALSKTVEVGKRFFPRCSKVLDTIMDDEAEMASLGRDTSAEKKRRFHDLQDLVQKAFSEDKEENDRSAARSPSSSSTTTTSIGAVRPRR

SEQ ID NO: 246255 - protein, 53 aa, Zea mays
  Clone ID: MRT4577_156166C.1.pep
MESNKMASDEQSVKPSLRGKNITGMHRFVKLRRKREQKKKRTKGVSNQKHAHA

SEQ ID NO: 246256 - protein, 70 aa, Zea mays
  Clone ID: MRT4577_156167C.1.pep
LALSWRRGLHGHIQQRSGMKSQVCAPGSHFTATRYREGYVQTTTRRSRHMSFSANTHKTPAGGSQTCSDT

SEQ ID NO: 246257 - protein, 87 aa, Zea mays
  unsure (1)..(87): unsure at all Xaa locations
  Clone ID: MRT4577_156168C.1.pep
CPSRIATSTLACATAGPPCGPVRPLRLPHWPWVLRPSSFPREEYALTHLVQKPVPSPCVVVRHPTSDLVDAPLSSYPRSXGLCGEGG

SEQ ID NO: 246258 - protein, 83 aa, Zea mays
  Clone ID: MRT4577_156169C.1.pep
NYSTPSSCTSSCTTYRACTSSTCTCPCASSLRTRPSCTSTACPRLASSTGPSSHVTSASPSCPSTACSHLTAFPLASITCSPC

SEQ ID NO: 246259 - protein, 112 aa, Zea mays
  unsure (1)..(112): unsure at all Xaa locations
  Clone ID: MRT4577_15616C.1.pep
QAFRFFVFKPFFEFFLGPLVPXXRMAFFESSTEKPWTTPKKSIKAVPFNHPKTLAPKGXNQHKVVLIGTTIGNPLKTTXGPSLNILINLMVVKSLVFVPFFATNGGILLKCL

SEQ ID NO: 246260 - protein, 109 aa, Zea mays
  unsure (1)..(109): unsure at all Xaa locations
  Clone ID: MRT4577_156170C.1.pep
SHHKLAFDRSSPTLKARDEFKQLSAASLTVGGLKLPASTSTALAKVTKVEEAMAEEPDKEXDPRAXEDATAEDPKDHGAADAAIEEGKTEEPQADVATAETLDKEGKNS

SEQ ID NO: 246261 - protein, 261 aa, Zea mays
  Clone ID: MRT4577_156171C.1.pep
MGLYTARNSFPYPRNEPAARPPNRLAMTTAAAVEPAPLVRARACAASASFPPPRRRRAAGAIRASPVPGRTEAAAELPAPLQPNARRRGRDPLWHGGGFSLGVDLGDARTGLAIGRGITFPRPLTVLRLRGQKLELALLDVARQQEADELIIGLPVSADGSETPQSNKVRSVVGRLAVQAAQRGLRVYLQDEYGTSTDALDYMISRGVKKSARDTKSDAYAAVMILKRYFTSSGRGAKIVLPRQPELQDKLMVQSRQDAEV

SEQ ID NO: 246262 - protein, 52 aa, Zea mays
  Clone ID: MRT4577_156172C.1.pep
SSLVHLKCCVFAGALVLWSLSTAGTHLDLFFQYDLLMAHVRRSYRASLLHLL

SEQ ID NO: 246263 - protein, 85 aa, Zea mays
  Clone ID: MRT4577_156173C.1.pep
DPVAMQSISMVRCYPPHVTMPALNRSYMRPLFHKVITNRSSLACHCTLVQRGHFCMNRAWSLLYDVECPRHNVCLDVPLLRVDST

SEQ ID NO: 246264 - protein, 216 aa, Zea mays
  unsure (1)..(216): unsure at all Xaa locations
  Clone ID: MRT4577_156174C.1.pep
AAAVEPAPLVRARTCAASASFPPPRRRRAAGAIRASPVPGRTEAAAELPAPLQPNARRRGRDPLWHGGGFSLGVDLGDARTGLAIGRGITFPRPLTVXLSHSAPPPKVNLTKLRXLEWHQVLRLRGQKLELALLDVARQQEADELIIGLPVSADGRETPQSNKVRSVVGRLAVQAAQRGLRVYLQDEYGTSTDALDYMISRGVKKSARDTKSDAYA

SEQ ID NO: 246265 - protein, 61 aa, Zea mays
  Clone ID: MRT4577_156175C.1.pep
HPLQVKHACTVSSDLSSSRSASYKKQPSFAGELKTGDTRVRRARMHEYATKQLAARWPHAG

SEQ ID NO: 246266 - protein, 61 aa, Zea mays
  Clone ID: MRT4577_156176C.1.pep
KKKSMLRKMNYFNYMILEWFIMLHFILQSYASQVVSMCIQIKQSIVQRNNFQGHAFCELSP

SEQ ID NO: 246267 - protein, 213 aa, Zea mays
  Clone ID: MRT4577_156177C.1.pep
RLSVRPRVRYPKGKTEHEDKLQEEQLLSDQKQCAEHIMLVDLGRNDVGKVSISGSVKVEKLMNIERYSHVMHISSTVSGELDDRLESWDALRAALPVGTVSGAPKVKAMELIDQLEVTRRGPYSGGLGGISFDGDMLIALALRTIVFSTAPSHNTMYSYKSSDRRREWVAHLQAGAGIVADSIPDDEQKECENKAAALARAIDLAESAFVDKE

SEQ ID NO: 246268 - protein, 56 aa, Zea mays
  Clone ID: MRT4577_156178C.1.pep
LTHKEVFGHIVKYHENALLWYEYFSKSLLKLSKLPMLKEIKGEISNKSSVVNHRLP

SEQ ID NO: 246269 - protein, 47 aa, Zea mays
  Clone ID: MRT4577_156179C.1.pep
IPNIRPFCLSSSIRLYIFLNTAMIRPVIELLPPVTEDPPKVRQLRQA

SEQ ID NO: 246270 - protein, 51 aa, Zea mays
  Clone ID: MRT4577_15617C.1.pep
PSQEKKIVVFHSAQIKLRLLCSIANLGEKPNKPSDKVPNSPHAFFFFHHFG

SEQ ID NO: 246271 - protein, 115 aa, Zea mays
  Clone ID: MRT4577_156180C.1.pep
PSSLHQAEGNYSSHGAPAPRWSVSHGSTELPQHLGICVAWCPVVGLNMDDPPPPPCVACVASIVDVRFDGTMDVLCPAGRHQHFLAAVWPESVRPLICVLQSLPPPRKKKKKKRP

SEQ ID NO: 246272 - protein, 104 aa, Zea mays
  Clone ID: MRT4577_156181C.1.pep
KQINHFIDNQKTRRGVHDPRGGGGGVKTRTTTTTRTPFSAAGATSYIHTPGGTLHRDTHDTSWTYARQTKQIIFWGRNHVSSADLTKKVAQGGGGKGGPGKGYR

SEQ ID NO: 246273 - protein, 233 aa, Zea mays
  unsure (1)..(233): unsure at all Xaa locations
  Clone ID: MRT4577_156182C.1.pep
LNLSPLVFPIEQADGADGFEDNDLAAPPEPLSRDNGASFRRNPSSADSSSGVFGSLKAVLLKSKLNLLIPCGFLAVLVDCLSQNKAWVFPLSLLGIIPLAERLGFATEQLGLYTGRTAGGLLNATFGNATELVISIHALRSGKLRVVQQSLLGSILSNTLLVLGCAFFGGGLTCGRTEQVVRKEDAVLNSGLLLMAVMGLVSPAMLYYTHTEANLXESALALSRXSSCVMLFA

SEQ ID NO: 246274 - protein, 34 aa, Zea mays
  Clone ID: MRT4577_156183C.1.pep
RIFSLQPGSTHADFLITWSSPLINVLTSDRPARR

SEQ ID NO: 246275 - protein, 250 aa, Zea mays
  unsure (1)..(250): unsure at all Xaa locations
  Clone ID: MRT4577_156184C.1.pep
TSTSNGGASPSPPSXALRGHRRLLSTPAASSNNRLSPEAVLYNIHSLSKDPSQALAVFRRSVAAGQPVGSAAYNLMLRTLASHPSAQRHFWPFLREMQEAGHSVDQGTYLAALASFKKASLTADYASLTAHYDKFRKGAKSATAAAEAVRDHDAAGLDSRLSAIGLLPLTETSVTTVLRELREHPIKALAFFRWAGRQQGYTHSSVXYNAMARVLGREESVPEFWDLIRETKAAGMHVDIDTYPQLXRNF

SEQ ID NO: 246276 - protein, 112 aa, Zea mays
  unsure (1)..(112): unsure at all Xaa locations
  Clone ID: MRT4577_156185C.1.pep
GDEHHFXSKADSGASKTYPHHAATARKNGFIAINNRPCMVVKVSTSKTANHAHTKCHFVAIYISIGNNLEDNDSLSHICDIPHVNLSAYHLIDISXKXFMSLLTSNGNTNDD

SEQ ID NO: 246277 - protein, 55 aa, Zea mays
  Clone ID: MRT4577_156186C.1.pep
KQVQAKYVTISSYRLNRSSQGCLTTIFDKPGFWTQHAYTWMPRSTKALQMLHTYT

SEQ ID NO: 246278 - protein, 73 aa, Zea mays
  Clone ID: MRT4577_156187C.1.pep
LLRTASLTLHTGAPSDRTAADHRSRPNELHNYPLAKHEQRMKTPRDPDQIYGATDHPCGRRHGCPHALDYYHR

SEQ ID NO: 246279 - protein, 40 aa, Zea mays
  unsure (1)..(40): unsure at all Xaa locations
  Clone ID: MRT4577_156188C.1.pep
IHLXXSPNHTSASNPVRFSQPASLARXSISXXSAXPQLXX

SEQ ID NO: 246280 - protein, 120 aa, Zea mays
  unsure (1)..(120): unsure at all Xaa locations
  Clone ID: MRT4577_156189C.1.pep
MCQATMGISLDSMHIRRDSEEXQKDWHDIHRKDELARQPINTWLSSNHDSVRRDRXPGGXVQWRDLLLDTDNYSCPSESVTRKTLILDVNNNASICVVVLTQNRVPAVTVSNDAVPYLLP

SEQ ID NO: 246281 - protein, 83 aa, Zea mays
  unsure (1)..(83): unsure at all Xaa locations
  Clone ID: MRT4577_15618C.1.pep
LLLWNTSLQPLVKLTETNVDLACHIRILVRYLNYTTQQXCTHLFLRSNMVNDEYDTVIYFRIRWRCLVSRQNLSMNLSLLRLT

SEQ ID NO: 246282 - protein, 129 aa, Zea mays
  Clone ID: MRT4577_156190C.1.pep
YADKGLGTKIIIPALCCESTPMIIWLAMTSRRRSSSCRWRCRRSVCTWRKYLPMSQAFRDAAVIGVALVSYRPPILDHAILSDPQIAELLRGRGRRGRFHIHRDPSPRRSPAGQYKKTRRLDIGIQKER

SEQ ID NO: 246283 - protein, 308 aa, Zea mays
  Clone ID: MRT4577_156191C.1.pep
MQMLCDVCAAAPAAVICCADEAALCSACDRRVHRANKLAHKHRRIPLAQPSGDESDADAKPLCDVCKERRGLVFCVEDRAILCPDCDDPIHSANDLTAKHTRFLLVGAKLSAALVDAQAPHSPDDDDNDCGRGNGAAAEPDAVPAVCAQGSCAAKASSLESGGGGGGGSGSGSSISEYLTNICPGWRVDDLLFDDSAFSAASKADSCDDGHEQVPSLDADLFDVVAGAGWPGKRGSAWSGVGALGFDKVPASVVVVPTAAKQQQGCVRERTWDSDSDSDVFAVPELPQPPQAKKARPAPAPAPTFWCF

SEQ ID NO: 246284 - protein, 104 aa, Zea mays
  Clone ID: MRT4577_156192C.1.pep
PAGPGYPGASHFATHSDLPNIQPLDILVAPSHTQWCLSSPSSASLPALSLPLPLAIRSPRHITYCPKAIPALGSDTAKSSNTVVCARDATTESTSHSPKPNPTH

SEQ ID NO: 246285 - protein, 34 aa, Zea mays
  Clone ID: MRT4577_156193C.1.pep
ITCMEVILLSLRERPFYIFGSYINSPEILGAVIC

SEQ ID NO: 246286 - protein, 45 aa, Zea mays
  Clone ID: MRT4577_156194C.1.pep
LKKKIIHFPCNLGRVTYLNAKIQCLRTNSRRLPLIQLPFRSPATV

SEQ ID NO: 246287 - protein, 70 aa, Zea mays
  Clone ID: MRT4577_156195C.1.pep
SRAALFFFFFYRFHFFMNDFFRRGGDCTWTTNLFCLGRKSPTFMEADGTGGPGYITLNPLTLFIKKRKGP

SEQ ID NO: 246288 - protein, 247 aa, Zea mays
  Clone ID: MRT4577_156196C.1.pep
MAIKQSISFTLRVLADLSLLLFCVLLAPVCSATPATAPAVLLQVKSGLTDPGGVLSGWSLEADVCSWHGITCLPGEVSPGIVTGLNLSGHGLSGVIPPAMSGLVSIESIDLSSNSLTGPIPPELGALENLRTLLLFSNSLTGTIPPELGLLKNLKVLRIGDNGLHGEIPPHLGNCSELETLGLAYCHLNGTIPAELGNLKLLQKLALDNNALTGGIPEQIAGCVTMRFLSVSDNMLQGNIPSFVGSF

SEQ ID NO: 246289 - protein, 105 aa, Zea mays
  unsure (1)..(105): unsure at all Xaa locations
  Clone ID: MRT4577_156197C.1.pep
KEEGEKKAQQQQAKRRHRQRATRRERQQQHRREQRDQXKEGRQQQSQHQEQEGKVQHWKPAQQHPQDQKKHKQQPQQQQXQKKKKHXQXGRRRGRRRRGNQAGGR

SEQ ID NO: 246290 - protein, 183 aa, Zea mays
  Clone ID: MRT4577_156198C.1.pep
MTSCAGDATVACRDDARRLGDAACVIVYPLLDKAAEVHIPVAGDEAPAVPVPVLTSKSPGRLATAVREALSVSLGVAFPTTPLVSSSEARGEARSILGLALPMILTGLLLYLRSMISMLFLGRLGGLALAGGSLAIGFANITGYSVLSGLAMGMEPICGQAFGAGNFPLLGVTTQRTVLLLVA

SEQ ID NO: 246291 - protein, 38 aa, Zea mays
  Clone ID: MRT4577_156199C.1.pep
QDSAASLVPAHGNLRLIAMRISSGALDGHGSRRRSRSL

SEQ ID NO: 246292 - protein, 49 aa, Zea mays
  unsure (1)..(49): unsure at all Xaa locations
  Clone ID: MRT4577_15619C.1.pep
SYRVCIIIYCVIRLLIIDYMLLERYFLSAFLLSXXHSVFGQFFLMPCCR

SEQ ID NO: 246293 - protein, 1420 aa, Zea mays
  unsure (1)..(1420): unsure at all Xaa locations
  Clone ID: MRT4577_1561C.1.pep
MAHSGSARPGPRSFRRQHEASASVRSPSVKAAPTEDPRAELNRRCAGEDAPISLERPDDLRTELNRRRVGEDARVFLERAHERRLNFEGRNLDQDFAPLAPQTPRGARTHTGVPLVGVGCAALADHLRAATWPPMFRPHLPEKYDGVRDEKMLEKLATHDVETVTMLFALADKCARAAEGRAWHSAPQTGVTQMGGSGPATQSGSKKKKNRGHERPQSAAPVVAATTGGPERAQQAPTTTGRQQWLMPCPSQQSQQRIGVPRDHQAREARPSCPFSGVGPQPMYPLGSITLPVTFGTEENFRTENVQFNVAEVNLPFNAIIGRLALYRFMAIAHYGYLVLKMSSPAGVLTVRGDCAAAVAAVEKLHALAAESARPDDGGRDPSASGTKAPSKVPKMPGIPREVIEHHLKIHPDTKPIQMSREDRKHTAFVTVDGPYYYVVMPYGLRNALPTFVLAMSKTFGDLIRDKIEIYVDDIVIKTKRGSTLVEGLTLVFDNLRATRTKLNPDNRFISRLAERALPFFKLLRKSDPFSWTEEAEQAFQELKQHLVSLPVLVAPEPGELLYLYIAAVAEAMSMVLVVERTERHSKGSQEVPLGEGGGPTATDPEGLGPTVGVRTIQRLVYYVSEVLHEAKARYLETHKLLHAVLVASRKLRHYFQAHRVVVVTSFPLRAILHNSNTTGNIAKWAAELAEFQLDFQPCHAVKSQVLADFIVEWTPPPSAPGGPDPDSDPTPTEPRVPVFTEPHWMLFFDGSAHQQGGGVGVVLVDPSGDQVKYMVHLEFKATNNMVEYEALIFGLSAALSLGICQLLVKGDSQLIIKQIRGECSCNEPRLAAYLLHVRKLEKDFTALELQHVPQANNSVADELSTRASTWAPMLEGVFERRLLRPTAQPAEPGEGGXLAPRRXVPVALHLQNPPRIVCATGGPAYPLAPQPXLRVVXAWISEIQDYLKENILPEDHVSAERIVRLAKRYAVVEGDLYRCGANDILMRCITQEEGRELLTEIHGGECGSHSSSRTLVGKAFRHGFYWLIALQDATEMVKSCKACQLHAKQIHTHTPAQALQMIPPSWPFAVWGVDILGPFPRAVGGYRFLFVAIDKFTKWPEATPVVNITQGAVVAFLRSNGQAERANAEILRRLKTHTYDCLKKHGANWVNELPSVLWGNRTTPSRATGETPFFLLRREDVNFIDERRWRAAIRNARYNQALRRYHQRFMHSRELRVGDLVLKRVLNREGLYKLSLGWEGPFKVTEICRPGCVRLATTEGVPLPNPWNIEHLPKVVYRSKSQSRLPPGGQVTNSFLGILVSSLDTSSLHPRGPSTREKLVTLHTARTNNIQISDVKLTVLRSILQNQKIITSAFKRNPSLISAGTSYSASAGSRWKRAATVSTASWTLSRAASSVAATGPSSTGAKDMAGSWLRKHVST

SEQ ID NO: 246294 - protein, 46 aa, Zea mays
  Clone ID: MRT4577_156200C.1.pep
LSTRAPSSLNLGIRRCSPVYLVCEFAGIQYSSPRQRPSLTIKTSSS

SEQ ID NO: 246295 - protein, 56 aa, Zea mays
  Clone ID: MRT4577_156201C.1.pep
CDHNRTQHTIRHHIVQHLKPITTELTLINSVTLTDYFEVKKSVSQPALMNFTSPAD

SEQ ID NO: 246296 - protein, 40 aa, Zea mays
  Clone ID: MRT4577_156202C.1.pep
LKLGHTCLYSRMPAVEGLPSAILERRGRIEEHGLGHAHGP

SEQ ID NO: 246297 - protein, 71 aa, Zea mays
  Clone ID: MRT4577_156203C.1.pep
LLLNVAKILSNLLYLVNILYARLASIDSSVACELEFPPDLFGDKETPPIPLNSLVTKGAVQENSFHLQGLV

SEQ ID NO: 246298 - protein, 78 aa, Zea mays
  unsure (1)..(78): unsure at all Xaa locations
  Clone ID: MRT4577_156204C.1.pep
MSIGGPRSNMLASFTSQAVEVPVELVAAGSRTPSPKTNASHLVWRLLTTSNLDASVQIXDHSHLVYSHTNQALLRPRS

SEQ ID NO: 246299 - protein, 165 aa, Zea mays
  Clone ID: MRT4577_156205C.1.pep
ECPASKHLDVVVVGTLPTGVDLEATIDIDTGLSLIICPDCRDVRVFAATTKFGSNEGKKYFKCPRKTYGHGTCTRYWFEEEYVVFFHYNGYLPLTSSIVAAASTIEIPKIVGRIVSLEQNLNEVKDKVGNNREGMGSCICLVCGCVNVTLFLLLAIVLLVVVVLK

SEQ ID NO: 246300 - protein, 221 aa, Zea mays
  Clone ID: MRT4577_156206C.1.pep
MKLDVPARQQSSQDAEQSGKTVAAAVLGTEAWSQPKLPLLLRDANTDDALVPPLNFAMVDDGIFRSGLPDAANFRFLLSLNLRSIVYLCPEPYPEENARFLRTNGIRLHQFAVEGSKSGPTVLDTMSAQEPFVHIPEETIREALKVVLDVRNQPVLIHCKRGKHRTGCVVGCLRKLQKWCLSSVFDEYLHFAAAKARTTDQRFMELFDASSLMHLTAASQY

SEQ ID NO: 246301 - protein, 98 aa, Zea mays
  Clone ID: MRT4577_156207C.1.pep
LGPPGPEGGGPPRGPPFGGSILPPFPRAFSRRRGFCRGAPPSPRGWGPLDKGPPPAGPGILLRPLPARDPGLNLGSWGSRPPVVFGGICPKAKCPPFF

SEQ ID NO: 246302 - protein, 148 aa, Zea mays
  Clone ID: MRT4577_156208C.1.pep
KKKKKKKKKKKKKKKEKKKKKKKGWTYVGRSDSYGPLLASPYFHLLAAFLQPPDRSYPAVALLNPLGEPPDFPSWTSLFAPPPFPRCGPNRRPFRKGAPPLWPTLSALWGALSRGGSGAFAKGVTPTCPGPFASFLAPVPFFSRHALR

SEQ ID NO: 246303 - protein, 114 aa, Zea mays
  Clone ID: MRT4577_156209C.1.pep
MSTMKFCRECNNILYPKEDREQKVLLYACRNCDHQEVADNNCVYRNVVHHSAGEFTQVLQDVAGDPTLPRTKSVRCSSCGHGEAVFFQATARGEEGMTLFFVCCNPSCGNRWRE

SEQ ID NO: 246304 - protein, 86 aa, Zea mays
  Clone ID: MRT4577_15620C.1.pep
MEAAAASAAAVGGSGAGLTRWQAAALAALAGWVWAASFYDLTRRARALVQPWVTRRVHAETPAILRFQKLEHKLLDNFFSVLSCVV

SEQ ID NO: 246305 - protein, 67 aa, Zea mays
  Clone ID: MRT4577_156210C.1.pep
MICLVLTIFANLFPAACTGAHERTFLAVKPDGVQRRLVGEIVRRFERKGFKLVALKLVPASESARRE

SEQ ID NO: 246306 - protein, 65 aa, Zea mays
  Clone ID: MRT4577_156211C.1.pep
RLTAYCTLTMKVCPKIHKISLILKNRQDFILCTRQSHLYLTTKQIIHRLQVCPFFSSASNKREWA

SEQ ID NO: 246307 - protein, 105 aa, Zea mays
  unsure (1)..(105): unsure at all Xaa locations
  Clone ID: MRT4577_156212C.1.pep
LNFPNHYKTVFFRAFIDRFNCKAFALGGCQNILKQIXTXXXPIXXXPXPTTTNYTPEEREGLRSVLQTFLFAFDIAFSDQLSTSDSNIRLGTVFCCHELSITYET

SEQ ID NO: 246308 - protein, 59 aa, Zea mays
  unsure (1)..(59): unsure at all Xaa locations
  Clone ID: MRT4577_156213C.1.pep
XNSVQGFLINFFYRTCSLXRFSDLPGHXLXNTSFSHLPIPNTLKPFPHIHHILILPQII

SEQ ID NO: 246309 - protein, 2265 aa, Zea mays
  unsure (1)..(2265): unsure at all Xaa locations
  Clone ID: MRT4577_156214C.1.pep
HSQSVRQGLAGIIDLPSEAPSEVDISHGSEDPXXPTDSYQMNGIINETHNGRHASVSKVVEFCAALGGKTPIHSILVANNGMAAAKFMRSVRTWANDTFGSEKAIQLIAMATPEDMRINAEHIRIADQFVEVPGGTNNNNYANVQLIVGMAXXLGVSAVWPGWGHASENPELPDALTAKGIXXLGPPASSMNALGDKVGSALIAQAAGVPTLAWSGSHVEVPLECCLDAIPEEMYRKACVTTTEEAVASCQVVGYPAMIKASXXXXXXXXRKVHNDDEVRALFKQVQGEVPGSPIFVMRLASQSRHLEVQLLCDQYGNVAALHSRDCSVQRRHQKIIEEGPVTVAPRETVKALEQAARRLAKAVGYVGAATVEYLYSMETGDYYFLELNPRLQVEHPVTEWIAEVNLPAAQVAVGMGIPLWQIPEIRRFYGMDYGGGYDIWRKTAALATPFNFDEVDSQWPKGHCVAVRITSEDPDDGFKPTGGKVKEISFKSKPNVWAYFSVKSGGGIHEFADSQFGHAFAYGLSRPAAITNMSLALKEIQIRGEIHSNVDYTVDLLNASDFRENKIHTGWLDTRIAMRVQAERPPWYISVVGGALYKTVTTNAATVSEYVSYLTKGQIPPKHISLVNSTVNLNIEGSKYTIETVRTGHGSYRLRMNDSTVEANVQSLCDGGLLMQLDGNSHVIYAEEEAGGTRLQIDGKTCLLQNDHDPSKLLAETPCKLLRFLVADGAHVDADVPYAEVEVMKMCMPLLSPASGVIHCMMSEGQALQAGDLIARLDLDDPSAVKRAEPFDGIFPQMELPVAVSSQVHKRYAASLNAARMVLAGYEHNINEVVQDLVCCLDNPELPFLQWDELMSVLATRLPRNLKSELEDKYKEYKLNFYHGKNEDFPSKLLRDIIEENLSYGSEKEKATNERLVEPLMNLLKSYEGGRESHAHFVVKSLFEEYLTVEELFSDGIQSDVIETLRHQHSKDLQKVVDIVLSHQGVRNKAKLVTALMEKLVYPNPGGYRDLLVRFSSLNHKRYYKLALKASELLEQTKLSELRASVARSLSDLGMHKGEMSIKDNMEDLVSAPLPVEDALISLFDYSDRTVQQKVIETYISRLYQPHLVKDSIQMKFKESGAITFWEFYEGHVDTRNGHGAIIGGKRWGAMVVLKSLESASTAIVAALKDSAQFNSSEGNMMHIALLSAENESNISGISDDQAQHKMEKLSKILKDTSVASDLQAAGLKVISCIVQRDEARMPMRHTFLWLDDKSCYEEEQILRHVEPPLSTLLELDKLKVKGYNEMKYTPSRDRQWHIYTLRNTENPKMLHRVFFRTIVRQPNAGNKFTSAQISDAEVGCPEESLSFTSNSILRSLMTAIEELELHAIRTGHSHMYLCILKEQKLLDLIPFSGSTIVDVGQDEATACSLLKSMALKIHELVGARMHHLSVCQWEVKLKLDCDGPASGTWRVVTTNVTGHTCTIDIYREVEEIESQKLVYHSATSSAGPLHGVALNNPYQPLSVIDLKRCSARNNRTTYCYDFPLAFETALQKSWQSNGSTVSEGNENSKSYVKATELVFAEKHGSWGTPIIPMERPAGLNDIGMVAWIMEMSTPEFPNGRQIIVVANDITFRAGSFGPREDAFFETVTNLACERKLPLIYLAANSGARIGIADEVKSCFRVGWSDEGSPERGFQYIYLTEEDYARISSSVIAHKLELDSGEIRWIIDSVVGKEDGLGVENIHGSAAIASAYSRAYEETFTLTFVTGRTVGIGAYLARLGIRCIQRLDQPIILTGFSALNKLLGREVYSSHMQLGGPKIMATNGVVHLTVSDDLEGVSNILRWLSYVPANIGGPLPITKPLDPPDRPVAYIPENTCDPRAAIRGVDDSQGKWLGGMFDKDSFVETFEGWAKTVVTGRAKLGGIPVGVIAVETQTMMQLIPADPGQLDSHERSVPRAGQVWFPDSATKTAQALLDFNREGLPLFILANWRGFSGGQRDLFEGILQAGSAIVENLRTYNQPAFVYIPMAGELRGGAWVVIDSKINPDRIECYAERTAKGNVLEPQGLIEIKFRSEELQDCMGRLDPELINLKAKLQDAKHGNGSLPDIESLQKSIEARTKQLLPLYTQIAVRFAELHDTSLRMAAKGVIKKVVDWEESRSFFYKRLRRRISEDLLAKEIRRIIGDNFTHQSAMELINEWYLASQATTGSTAGWDDDDAFVAWKDSPENYKGHIQKLRAQKVSQSLSDLADSSSDLQAFSQGLSTLLDKMDPSQRVKFVQEVKKVLG

SEQ ID NO: 246310 - protein, 2624 aa, Zea mays
  unsure (1)..(2624): unsure at all Xaa locations
  Clone ID: MRT4577_156215C.1.pep
MSQLGLAAAASKALPLLPNRQRSSAGTTFSSSSLSRPLNRRKSHTRSLRDGGDGVSDAKKHSQSVRQGLAGIIDLPSEAPSEVDISHGSEDPRGPTDSYQMNGIINETHNGRHASVSKVVEFCAALGGKTPIHSILVANNGMAAAKFMRSVRTWANDTFGSEKAIQLIAMATPEDMRINAEHIRIADQFVEVPGGTNNNNYANVQLIVGMAQKLGVSAVWPGWGHASENPELPDALTAKGIVFLGPPASSMNALGDKVGSALIAQAAGVPTLAWSGSHVEVPLECCLDAIPEEMYRKACVTTTEEAVASCQVVGYPAMIKASWGGGGKGIRKVHNDDEVRALFKQVQGEVPGSPIFVMRLASQSRHLEVQLLCDQYGNVAALHSRDCSVQRRHQKIIEEGPVTVAPRETVKALEQAARRLAKAVGYVGAATVEYLYSMETGDYYFLELNPRLQVEHPVTEWIAEVNLPAAQVAVGMGIPLWQIPEIRRFYGMDYGGGYDIWRKTAALATPFNFDEVDSQWPKGHCVAVRITSEDPDDGFKPTGGKVKEISFKSKPNVWAYFSVKSGGGIHEFADSQFGHAFAYGLSRPAAITNMSLALKEIQIRGEIHSNVDYTVDLLNASDFRENKIHTGWLDTRIAMRVQAERPPWYISVVGGALYKTVTTNAATVSEYVSYLTKGHIPPKHISLVNSTVNLNIEGSKYTIETVRTGHGSYRLRMNDSTVEANVQSLCDGGLLMQLDGNSHVIYAEEEAGGTRLQINGKTCLLQNDHDPSKLLAETPCKLLRFLVADGAHVGADVPYAEVEVMKMCMPLLSPASGVIHCMMSEGQALQAGDLIARLDLDDPSAVKRAEPFDGMFPLMDLPVAASSQVHKRYAASLNAARMVLAGYEHNINEVVQDLVCCLDNPELPFLQWDELMSVLATRLPRNLKSELEDKYKEYKLNFYHGKNEDFPSKLLRDIIEENLSYGSEKEKATNERLVEPLMNLLKSYEGGRESHAHFVVKSLFEEYLTVEELFSDGIQSDVIETLRHQHSKDLQKVVDIVLSHQGVRNKAKLVTALMEKLVYPNPGGYRDLLVRFSSLNHKRYYKLALKASELLEQTKLSELRASVARSLSDLGMHKGEMSIKDNMEDLVSAPLPVEDALISLFDYSRHAVQQKVIVTYISRLYQPHLVKDSIQMKFKESGAIVFWEFSEGHVDTRNGHGAILGGKRWGAMVVLKSLESASTAIMAALKDSVQYNNSEGNTMHIVLLNAETESNISGTSDDQAQHKMEKLSKILKDTSVASDLQAAGLKVISCIVQRDEARMPMRHTFLWLDDKSCYEEEQILRHVEPPLSTLLELDKLKVKGYNEMKYTPSRDRQWHIYTLRNTENPKMLHRVFFRTIVRQPNAGNKFTSAQISDAEVGCPEESLSFTSNSILRSLMTAIEELELHAIRTGHSHMYLCILKEQKLLDLIPFSGSTIVDVGQDEATACSLLKSMALKIHELVGARMHHLSVCQWEVKLKLDCDGPASGTWRVVTTNVTSHTCTIDIYREVEDTESQKLLYHSATSSAGPMHGVALNNPYQPLSVIDLKRCSARNNRTTYCYDFPLAFETALQKSWQSNCSSVPEGSENSKSYVKSTELVFAEKHGSWGTPIIPMERPAGLNDIGMVAWILEMSTPEFPNGRQIIVVANDITFRAGSFGPREDAFFEAVTNLACERKLPLIYLAANSGARIGIADEVKSCFRVGWSDERSPERGFQYIYLTEEDYARISSSVIAHKLQLDNGEIRWIIDSVVGKEDGLGVENIHGSAAIASAYSRAYEETFTLTFVTGRTVGIGAYLARLGIRCIQRLDQPIILTGFSALNKLLGREVYLPGRPLEIKKVVDWEESRSFFYKRLRRRISEDLLAKEIRRIIGDNFTHQSAMELINEWYLASQATTGSTAGWDDDDAFVAWKDSPENYKGYIQELRAQKVSQSLSDLADSSSDLQAFSQGLSTLLDKMDPSQRVKXFRKSRRFLDDDMIPTHPTQYAHATCYFSSTYIEGYCLALXSCLXKSIIIFLKLXSDVVLWLMNLDVCVLPGVSPKVYTDRVKVRKSTSELVLVLQWLRQXLFHCSSEMYYQRRCNFRVYNADASKQLSGSLNFEXXYVSVGTCDVPLHEINVAELGHLLGREVYSSHMQLGGPKIMATNGVVHLTVPDDLEGVSNILRWLSYVPANIGGPLPITKPLDPPDRPVAYIPENTCDPRAAICGVDDSQGKWLGGMFDKDSFVETFEGWAKTVVTGRAKLGGIPVGVIAVETQTMMQIIPADPGQLDSHERSVPRAGQVWFPDSATKTAQALLDFNREGLPLFILANWRGFSGGQRDLFEGILQAGSTIVENLRTYNQPAFVYIPMAGELRGGAWVVVDSKINPDRIECYAERTAKGNVLEPQGLIEIKFRSEELQDCMGRLDPELINLKAKLQDVNHGNGSLPDIEGIRKSIEARTKQLLPLYTQIAIRFAELHDTSLRMAAKGVIKKVVDWEESRSFFYKRLRRRIAEDVLAKEIRQIVGDKFTHQLAMELIKEWYLASQATTGSTGWDDDDAFVAWKDSPENYKGHIQKLRAQKVSHSLSDLADSSSDLQAFSQGLSTLLDKMDPSQRAKFVQEVKKVLD

SEQ ID NO: 246311 - protein, 28 aa, Zea mays
  Clone ID: MRT4577_156216C.1.pep
GKFKHGHGKFKHGKHGHGMFGGKFKKWK

SEQ ID NO: 246312 - protein, 72 aa, Zea mays
  Clone ID: MRT4577_156217C.1.pep
MAKGMLAELMNHPETLRKVVEEIDATVGTQKDRKRGRPDAAVVPTWRYTRGRCVCTRRRPSRTYSRRRRCWC

SEQ ID NO: 246313 - protein, 153 aa, Zea mays
  unsure (1)..(153): unsure at all Xaa locations
  Clone ID: MRT4577_156218C.1.pep
MAHHHLLPLLLLLLLPLFASAAATGDEAHLSAVIGDTGLAFAKDVLIGEAVRSLTPLRLPGAEKAFRVPFLGGIRAAVSNITLFHLDVGDNSVVRLGDSALVVVASGITANISMAWSYSYYSWYFPVEISDRGTASILVXGMEVGITMEIKNY

SEQ ID NO: 246314 - protein, 62 aa, Zea mays
  unsure (1)..(62): unsure at all Xaa locations
  Clone ID: MRT4577_156219C.1.pep
FLSPFHPNSWFPTTILHLGRSLINQGRSCYXLTLFNSISIIYNYHFPSKTKYLFYYTITKDN

SEQ ID NO: 246315 - protein, 221 aa, Zea mays
  unsure (1)..(221): unsure at all Xaa locations
  Clone ID: MRT4577_15621C.1.pep
KKKKKKKKIAHKLSTVKNADQIAVVDGGSIAEIGTHDELINKGGPYSRLVKLQKMVSYIDQETDQFRASSAARTSASRLSMSRASPMPLTPGVSKETESYVSPPAPSFSRLLAMNAPEWKQALIGSISALVYGSLQPIYALTIGGMIAAFFVQDHNEMNAIISRYALIFCSLSLVSIAVNLLQHYNFAYMGEHLVRRIRVQVXLEKILTFEAAWXFDEDTN

SEQ ID NO: 246316 - protein, 117 aa, Zea mays
  Clone ID: MRT4577_156220C.1.pep
RMTSSLSSGSSALASGLHGAPSSTTAQGGGQTAGEVSLLLGAADNVFKQEGETAYLASKRNIKQRLVAFYMYHPESPFEFPDKTSIASSKFCSIYEPKLKPIFLDSVLLPFHCNRVC

SEQ ID NO: 246317 - protein, 193 aa, Zea mays
  unsure (1)..(193): unsure at all Xaa locations
  Clone ID: MRT4577_156221C.1.pep
MQMAAATTDAPVAAAPHPHPHAHGPRVPHGHGHPHPHHHMPQPRWVVLPYPPPPPXMVAAPPPPTPQYVKHFAPQASVTPPPPSAGSGGNGGDENRTIWVGDLQYWMDENYLHSCFGPSGEVVTIKVIRNRHSGVSEGYGFVEFCSHASAEKALQNFAGHVMPNTDRAFKLNWASYSVGEKRSELASDHSIFV

SEQ ID NO: 246318 - protein, 41 aa, Zea mays
  Clone ID: MRT4577_156222C.1.pep
QIPLSHARMLCRKNDTILITVLNPEQFSIICVLLIISRASR

SEQ ID NO: 246319 - protein, 65 aa, Zea mays
  Clone ID: MRT4577_156223C.1.pep
SPPPPFPPPRSPVGFAPPPCPPPQPLLPPPPCVFPPPLALLPPPPLGVFLFLPSRRFSNNSSFLR

SEQ ID NO: 246320 - protein, 112 aa, Zea mays
  Clone ID: MRT4577_156224C.1.pep
ILQSFDCLNLKFDWDLKPKTEKWKRRKGRFPGCGPASLPISSSVWGTCRPNLPSRSVSISVLWGSGQFSLSPPWTSCPKSEELDRQTIYAGRGTAPSSIKSRSNPPRTERRR

SEQ ID NO: 246321 - protein, 169 aa, Zea mays
  Clone ID: MRT4577_156225C.1.pep
EQSAIYKFLSTMKLNISLHDRRHLSGLDSTEFGYELCTHASAHASADEEVRNATGYSNVMVAEHPLKLSSSYAMLKGNSNNRGLHGEPLATSYHKKFLGTVDYLWHTHGIECSRVLDTLPISVLKRTRGLPTREIGSDHLPIVAEFAFTESVEDDSDEDDESEQDDESE

SEQ ID NO: 246322 - protein, 103 aa, Zea mays
  Clone ID: MRT4577_156226C.1.pep
MCFGRRSGCSEICVKLFKVWVLESEVQDLDDPRMSKMRKKVVTWGKDTFKVDKELFFVRVKISDLQGALSVGFPIEIRVSPVGMSALTSHLDRMKHLTFVRRF

SEQ ID NO: 246323 - protein, 102 aa, Zea mays
  Clone ID: MRT4577_156227C.1.pep
LLWSGRYLVLLRRSAWWLPSFQQSVGLSLSAVIAMPAGWLVGVFVFGLPGLCLWGLLLSLLVGAEMLPRCVGSVGANRLAGYVDASAVGTGAVGRRRGIPAG

SEQ ID NO: 246324 - protein, 72 aa, Zea mays
  unsure (1)..(72): unsure at all Xaa locations
  Clone ID: MRT4577_156228C.1.pep
TVPCQVHHXDYLMCHRQPTTRIVVGAINTPKHLHSSHPSFLNFTFNTRAIAFTPRHIPKIKSSPSLKINSIA

SEQ ID NO: 246325 - protein, 86 aa, Zea mays
  unsure (1)..(86): unsure at all Xaa locations
  Clone ID: MRT4577_156229C.1.pep
MYSPLPPGAFIIPSPPLPPEPDFPPPPXPPPPPPPDLPPPLLPPTPPPPLPPPPPPLLPPKPPPPLPPPPPPPLPPPPPPLPPISL

SEQ ID NO: 246326 - protein, 154 aa, Zea mays
  unsure (1)..(154): unsure at all Xaa locations
  Clone ID: MRT4577_15622C.1.pep
AEIFDILASEKEEESKTKPVNVGVDDDNTKATVESPQQEYCVISSQKRFWVLYAFLRKKPYKNTMXLLXSCNTKKGHAQLLNFLGIEXLEIQGKQKHHTQTTTYFXFCKAQKAILLCTNVRAQALDFPAHDYIMQYDPSQEPKDHHPQNSVVPA

SEQ ID NO: 246327 - protein, 45 aa, Zea mays
  unsure (1)..(45): unsure at all Xaa locations
  Clone ID: MRT4577_156230C.1.pep
CCYGCFPIGXRLLMFYMFXDHAIYLXSRGXXIYAILKRDVVEILY

SEQ ID NO: 246328 - protein, 117 aa, Zea mays
  unsure (1)..(117): unsure at all Xaa locations
  Clone ID: MRT4577_156231C.1.pep
HELSSSLTEKAKAPEVSLSLPTDIETSNTFATEAESKIVPTTAISEDRMGLDARPNTTTAFNESLDTTTTVISNCRISVIYCKKSAACTRGTXQKLTDITTTRGFCTMISXSYSGAA

SEQ ID NO: 246329 - protein, 122 aa, Zea mays
  Clone ID: MRT4577_156232C.1.pep
KKKKKKKKKKKKKKKKKKKKKKKKKLKKKKVCPLADLGRDPPRGGFCCFPSPWGGVGLAFMGPISPFRGGGSISLGGGFTTLGAGKTLAFPTLIAWGGIPFSPGGGLEKGPGPFAFPFIWAA

SEQ ID NO: 246330 - protein, 75 aa, Zea mays
  unsure (1)..(75): unsure at all Xaa locations
  Clone ID: MRT4577_156233C.1.pep
NTHQLYCTQSGNNKSYARRITHPHLGRLYGPLSRSLDRSGLCRTSYLRGACSNWWRTWTRLVXLHLSTARSSHKW

SEQ ID NO: 246331 - protein, 37 aa, Zea mays
  Clone ID: MRT4577_156234C.1.pep
RKFTGIDKGNIRSAPQNTKHLHHQVSVPREHLYTNDY

SEQ ID NO: 246332 - protein, 112 aa, Zea mays
  Clone ID: MRT4577_156235C.1.pep
MGMWKVVCVTDASAYIASWIVRLLLDRGYTVRATVRDTEPTSVDLFKNFHYSKNNGFTEFVQKAIDDMEGIMSEPVQDGHEPKLANEAVSQVVKINYFSSCCRCLFGLQEYL

SEQ ID NO: 246333 - protein, 34 aa, Zea mays
  Clone ID: MRT4577_156236C.1.pep
CLSGTNVSLRQRCLLRHVVVQLEWERVVVGGAIY

SEQ ID NO: 246334 - protein, 102 aa, Zea mays
  Clone ID: MRT4577_156237C.1.pep
NAHGSLSHSIFNNKKEPFFPYITPTPKHEGSTPQRAYPQKELATSPKPPTPPGGVWYPLPGGGGRRYRGHAWDPSRGWFWRSPHKCVPHTVSRRTWSRSPGC

SEQ ID NO: 246335 - protein, 96 aa, Zea mays
  Clone ID: MRT4577_156238C.1.pep
INPYPSAHRPTPHPASLPRASPQLRRALHHPPEPPECRPPQPTRPSHPSPAPTARPASPESHKVSRAPDQTQPHQKHRIGLAGIRPPAGAREPGKP

SEQ ID NO: 246336 - protein, 66 aa, Zea mays
  Clone ID: MRT4577_156239C.1.pep
HNSSDDALCCRICIISKTDCASESSSWPFPSRSNSTSALASTSYLKKCETTCADYFSWPKKDSETL

SEQ ID NO: 246337 - protein, 457 aa, Zea mays
  Clone ID: MRT4577_15623C.1.pep
MQIFVKTLTGKTITLEAESSDTIDNVKAKIQDKEGIPPDQQRLIFAGKQLEDGRTLADYNIQKESTLHLVLRLRGGMQIFVKTLTGKTITLEVESSDTIDNVKAKIQDKEGIPPDQQRLIFAGKQLEDGRTLADYNIQKESTLHLVLRLRGGMQIFVKTLTGKTITLEVESSDTIDNVKAKIQDKEGIPPDQQRLIFAGKQLEDGRTLADYNIQKESTLHLVLRLRGGMQIFVKTLTGKTITLEVESSDTIDNVKAKIQDKEGIPPDQQRLIFAGKQLEDGRTLADYNIQKESTLHLVLRLRGGMQIFVKTLTGKTITLEVESSDTIDNVKAKIQDKEGIPPDQQRLIFAGKQLEDGRTLADYNIQKESTLHLVLRLRGGMQIFVKTLTGKTITLEVESSDTIDNVKAKIQDKEGIPPDQQRLIFAGKQLEDGRTLADYNIQKESTLHLVLRLRGGQ

SEQ ID NO: 246338 - protein, 52 aa, Zea mays
  Clone ID: MRT4577_156240C.1.pep
KGYGNPPQNKQYHQENIQTRLYTKPILDALTITTQAFEPVDAQTNKVATSPT

SEQ ID NO: 246339 - protein, 89 aa, Zea mays
  unsure (1)..(89): unsure at all Xaa locations
  Clone ID: MRT4577_156241C.1.pep
QQQPDRNGKKMFAVLMLLALATSATNTHTXAKCXQDPMASVYPPYPAXMIASVYEKPAVQPXTLEQVTAASNIPSSAQVREQVQVLSSA

SEQ ID NO: 246340 - protein, 100 aa, Zea mays
  Clone ID: MRT4577_156242C.1.pep
KKIKIKGAGPFFEVSRFFYTGAGWGKPCFFPGPLNFFTLVPPFSSVGFWVNRCGSPRFYSFCCPSLFGQWGALCKGPLPSAFPKFSPPLMAMVPPLLAPS

SEQ ID NO: 246341 - protein, 221 aa, Zea mays
  unsure (1)..(221): unsure at all Xaa locations
  Clone ID: MRT4577_156243C.1.pep
TGDQENSCRRVARRGGITLPATTGQGYDLRSRGPPTLGNTALDSSTPQVLGSTPRGSEFQAVVKKIPSFVPRQSTGLRLSPGHDRSHVGFDAAVYGWGRGFGGFLDLREKVFFLIQWLGAVLIQWLGAVLPPQVEFFFRIWKTWAPPNTKFFMWLVAHRKVWTIDRLQKRGMDHSERYPLCDQDHETLDHKLXIGCVFAREFWFKLLFQVNLQXLAPQYDD

SEQ ID NO: 246342 - protein, 120 aa, Zea mays
  unsure (1)..(120): unsure at all Xaa locations
  Clone ID: MRT4577_156244C.1.pep
FSILSRINASAIRESPANGIQSTPIPLEPDKPDPIAPNGDKKPAXKKPAAEDNAEKTTAGYKPKSEKRLPASKSSGKDGGEKNGKKKAKKSVXTYKIYIFKVLKHVHPDIRISSKGISIM

SEQ ID NO: 246343 - protein, 48 aa, Zea mays
  Clone ID: MRT4577_156245C.1.pep
WTHACGFFSSIPFKRLSTSSLVGAAAAEISVFLIDKEDPQNIEGWREL

SEQ ID NO: 246344 - protein, 79 aa, Zea mays
  Clone ID: MRT4577_156246C.1.pep
CGLFVFVGSPKYLSFFSKGPLSGTPPPHKKGAMPSGTVYGIRDHNFSSRSRRILGGLFSLEIASGPSDGRIDCLKKTKP

SEQ ID NO: 246345 - protein, 110 aa, Zea mays
  Clone ID: MRT4577_156247C.1.pep
LGDVKSFFKRKKTETLNRPRQSKHPASILGLGAFFPNCPPWVPPPWDWENPLGTCLQAPPPKTVPQLPKEKPPPVGDSVPCFFIPRFFLRKEAFLFGVCPPPNTEEGKNF

SEQ ID NO: 246346 - protein, 90 aa, Zea mays
  Clone ID: MRT4577_156248C.1.pep
LDFPLNGAGQDRNGKFTPTKGFTNFIQLRKGNFSRGGFIFIPGGERSPNRWGSGTVKKKKGCLSIGEETPKQSIWENPLGKSGPYPLFGG

SEQ ID NO: 246347 - protein, 84 aa, Zea mays
  Clone ID: MRT4577_156249C.1.pep
PVPPPRFFPHPPPWGCMPPCGDSRFFIFPVCLNELIICFTAVPITSQFGDSPPLSAKERELCPVGHFFGPGFSPAQSMFYLIGP

SEQ ID NO: 246348 - protein, 107 aa, Zea mays
  Clone ID: MRT4577_15624C.1.pep
FCLRGGVEGDLEVPGEGGVRVVVPLPRALVSRVGKKGRWVWFFFVPLVLRCFCVVLCCVVFPWSIASFVASSFWFCVNCFFFLPRCCNCCYSCCIESDDQIKILKNP

SEQ ID NO: 246349 - protein, 67 aa, Zea mays
  Clone ID: MRT4577_156250C.1.pep
TQNMASFLSGTICFIPSKWGAKTFFDQATNCNMGEHKTQKGPLLQSPVLKPNTNRQLPYHPLGNGNG

SEQ ID NO: 246350 - protein, 68 aa, Zea mays
  Clone ID: MRT4577_156251C.1.pep
HASGRHGSAGTAPLAALYLYLYLHLRTSAVFRGRFGTAGLRWRSSSSATCVCGLICDLAVAGRIGCCL

SEQ ID NO: 246351 - protein, 184 aa, Zea mays
  Clone ID: MRT4577_156252C.1.pep
MRAITGGVVSSQPCPLHKAALFLKRFTESAASHLPSSDCCNYLRNAADATTQLSRFRKELGGSHKQGAANSDAHYYDDPVKGNRNHEDQESKGDMAIAADDSNRDSAAEAKLDVASGKKGNKKKKKKHKQEECTEVVKEKKITDGDLDREKKRKKKRDRGDNYDNAPEQVEHINKKQKKHLGIS

SEQ ID NO: 246352 - protein, 117 aa, Zea mays
  unsure (1)..(117): unsure at all Xaa locations
  Clone ID: MRT4577_156253C.1.pep
VNVWAIVRDQKAWPEXLEFRPDRFLLDGLNAGVYVKGREFELIPLGAGWRIXLGLRWGLRMVKLMMATMVHVLDWDMADGMKEDKLDMEEAXGLTLERAVPLMVRTAIRLLRSDYEE

SEQ ID NO: 246353 - protein, 316 aa, Zea mays
  Clone ID: MRT4577_156254C.1.pep
MRAITGGVVSSQPCPLHKAALFLKRFTESAASHLPSSDCCNYLRNAADATTQLSRFRKELGGSHKQGAANSDAHYYDDPVKGNRNHEDQESKGDMAIAADDSNRDSAAEAKLDVASGKKGNKKKNGDPLEDRAVARANSHIPPSPEIATEKRKKNHPNKEIIVDVKQEPNSHILPSPEIATEKRKKKSRPNKEIIVDVKQEPSFVVEEELVSEKKSKKKKEKDHVKLEENVNEVEEKIVNDSAAEQRVAITERERKKKKHKQEECTEVVKEKKITDGDLDREKKRKKKRDRGDNYDNAPEQVEHINKKQKKHLGIS

SEQ ID NO: 246354 - protein, 75 aa, Zea mays
  Clone ID: MRT4577_156255C.1.pep
GVRVRLTQLEHILKTDFYTIHCYFRGAFTICQIIHNLAPIEGHGFSPHPTIHPKVGFDTNLPCLLLIGSKDFRLF

SEQ ID NO: 246355 - protein, 43 aa, Zea mays
  Clone ID: MRT4577_156256C.1.pep
PLEVFFFFFFFFFFFFFFFFFFFFFFFFFFKKTTLFMIGKCSG

SEQ ID NO: 246356 - protein, 184 aa, Zea mays
  Clone ID: MRT4577_156257C.1.pep
PRVRELKTTVAMQATHTGEGAQCRRGYFMLVRPTEVIGGSRRCIRARRSIHYRIGAHRVESVWRFFTSGRIVAAFRPTLDRSCYASIAEMEEEEEELQLARYMVNRRRRALNERRHGGSIPGRVRIHRDHMSGDARIRADYFGAYPVYTDAQFRSLVRPWIRSCIGRNEPRSVMAVLKSTVELS

SEQ ID NO: 246357 - protein, 55 aa, Zea mays
  Clone ID: MRT4577_156258C.1.pep
QDSILSRAMVLPVVLHTVPLILSVEHDAQVGALIRAPPRLSHDYSPRCSYLSWGS

SEQ ID NO: 246358 - protein, 39 aa, Zea mays
  Clone ID: MRT4577_156259C.1.pep
FLSSKANIKYGGLITHNLWAINISYYPQNVFHFTNFLNF

SEQ ID NO: 246359 - protein, 216 aa, Zea mays
  unsure (1)..(216): unsure at all Xaa locations
  Clone ID: MRT4577_15625C.1.pep
GPQRERCSPISSRLYLQPDYLFSLPIMVVSDAATSCFTPIFAYESYLKSHLCNCSAKFLRSTVKHDLTTVKVLLXETDLPNRLRTSAMIYYRLMRAITVVSDMTELNISNLVKYCRLPMDKXYXGDDVHILVVNNDLLSALYYACTETITFDDDHLLIPFMITTVLKCIIVLQIFLATSAYIIRSWCIQPSVYITMPVTRRIRSQTVYLTTSCCSS

SEQ ID NO: 246360 - protein, 45 aa, Zea mays
  Clone ID: MRT4577_156260C.1.pep
MATKVICFLVLASLLLAVAFPVSALRQEEKKGGGGGGGGGSVRES

SEQ ID NO: 246361 - protein, 82 aa, Zea mays
  unsure (1)..(82): unsure at all Xaa locations
  Clone ID: MRT4577_156261C.1.pep
DGRGRRPARTPEGEEKRGRDAREGQDGTRGRGRVWAGASGSLVPWGPVPRLPGDPLASHRRXFPPDPELTCPGLGQDQDPRE

SEQ ID NO: 246362 - protein, 87 aa, Zea mays
  unsure (1)..(87): unsure at all Xaa locations
  Clone ID: MRT4577_156262C.1.pep
EVELVGEARPHVLPPVHQPGDELRRPGPDHAEHGDAVGDRDEAEFQRTPRPSAAXPPRMAQNTSPCMVSRVSXGRPXEVDGIDKLDI

SEQ ID NO: 246363 - protein, 188 aa, Zea mays
  Clone ID: MRT4577_156263C.1.pep
KKKKKKKKKKKKKKKKKKKKKKKKKKKKKKKKKKKKKKGRAFLEGPKFPSPCLQLFSFFLGGGEGNSRPVFLHRRAWKTPGFPQFIPFAALPLFPSWRITEKAPPVPLSQHLPTLIGNWAPPFSGPLTPGGGGVPPRVPVPFASPLAPVLLVFFLSFFPTFAGFPRQALNGGLLLGFRFRVLRPLAPK

SEQ ID NO: 246364 - protein, 58 aa, Zea mays
  Clone ID: MRT4577_156264C.1.pep
LFFSGLCEPFYHLWLQSSGLPSSSCSWSPSPQCAHDTPIFLSYTAFMVARGAGEAAVT

SEQ ID NO: 246365 - protein, 291 aa, Zea mays
  Clone ID: MRT4577_156265C.1.pep
RGRPGLPCSFSCAARPCHLHGCVLFGRPICSSPAPKPSARSPSRPSQPPLPSPAEAPYARSSPIELRPVRSVLLFSNRAPDLESSRALHCPAPSHGALSCSLMAEATWSQVRSAGSVFPSAARRASPSSRTKLPAPGMACPLPRACCSSFSLSWSFSAFSPAAPLSISSRLLFVFFLRAVLSSMDAAAAALEFSLHALSFNSVAVPTVGLCVHALDTVKRCVGFCPRARPTVTSLCFSRRYSPSPSPVRAIKFTWLTCGPLFLRACAQLAPWLNSAQFASCSPVEFFASRA

SEQ ID NO: 246366 - protein, 138 aa, Zea mays
  unsure (1)..(138): unsure at all Xaa locations
  Clone ID: MRT4577_156266C.1.pep
VIVQVLDDSTGPTVKDLVELECKFWANNGKNVKYEVRNNRTGYMAGALKQGMLYQYFQHXDFAAVFDADFQPEPDFLVRTVPYLIHTPRIALVQARWEFXLLTGISGRFCXNPKEFLMTRIQKMTLDYHFKVEQEAGS

SEQ ID NO: 246367 - protein, 81 aa, Zea mays
  Clone ID: MRT4577_156267C.1.pep
LSHSTQSVGSGDFIPHALFHSTLVTVGSFAACSRLASDLLLLLRCLAILIACIVMTLFHLYPNYLPYLDLFNRLHPLCFLV

SEQ ID NO: 246368 - protein, 115 aa, Zea mays
  Clone ID: MRT4577_156268C.1.pep
ETPPRSDQTPRFVAPPKPPVLLPELVLGRCCPWSYAESRRRGNYDEQFAAPWLRILRSKAPGLHGVRWRIPAVLLRRPASTVDDGQVRRGGGFAQQGCMAWMGRRGKERGVDRAI

SEQ ID NO: 246369 - protein, 62 aa, Zea mays
  Clone ID: MRT4577_156269C.1.pep
SFLLPDVFLFFAHILLLCPGRELILTSTSTLLIIIMLIPFITFIPFIRTHLIINHHYPSFPL

SEQ ID NO: 246370 - protein, 94 aa, Zea mays
  Clone ID: MRT4577_15626C.1.pep
ALRMFYWTRCYLKSISSLRCKSGASAVGRLRSFLLNGRVISLVQCRNSSRRIIGSSACCWTLTVLLGIVEFSRAGMRFRQGTARVTCRYGSTRW

SEQ ID NO: 246371 - protein, 94 aa, Zea mays
  unsure (1)..(94): unsure at all Xaa locations
  Clone ID: MRT4577_156270C.1.pep
GSLGKGRHRGFGLQVSNKGVLSNVGSSTCHWFSKPTISCCHFXXLNNQGTQIRKPPSCFWVKLQPLALFEKKKKKDGRARGTETQDADACMQRS

SEQ ID NO: 246372 - protein, 215 aa, Zea mays
  unsure (1)..(215): unsure at all Xaa locations
  Clone ID: MRT4577_156271C.1.pep
PLQPGTVLCFGSLEFMSLDGSYDMVLLPSQHGNNDGRRLARRRRTRRRLPPAAEVEHPGLPRYPPHRRRRRGNRGXAEGGTLSAVGPERVDDAGTSTGNMSGVVLAPETTAGVASQQRTNSKRADDTSTLTKDLLDVSLVPXVPFRFSFDPPSDPASVSAFSRAYPDLPGYHMWSTWDRLTTVSTSGPTGSEEEDDPDVSWDFSGLRDPGAMRDF

SEQ ID NO: 246373 - protein, 104 aa, Zea mays
  Clone ID: MRT4577_156272C.1.pep
VSVPLWCGPPSGFFRVSFSALPVFFGMSSFFLVLSGWLSPGAFFCFVFSFSFVGASPFLLLAGVFFFFAPLGGLPPTSLLNPPCLGVLRLVDASSPGVFLGPVP

SEQ ID NO: 246374 - protein, 187 aa, Zea mays
  Clone ID: MRT4577_156273C.1.pep
MGTNGHVDLNKGVATPCFGNWYPKGSTFDLIGYADSDYVGCKVDRKSTSGTCQFLGMSLVSWSSKKQTSVAQSTAEAEYVAAGQCCAQLLWMRQTLRDFGYNLSKVPLLCDNESVIRLADNPVEHSRTKHIDIRHHFLRDHQQKGDIEVFYISTENQLADIFTKPLDEKTFCRLRSELNILDSRNLD

SEQ ID NO: 246375 - protein, 86 aa, Zea mays
  unsure (1)..(86): unsure at all Xaa locations
  Clone ID: MRT4577_156274C.1.pep
MATKXVPLRTLLALSACVANATSFPECLQATIACLLSPYLTSMIASGCENPAVXPYWLQQAIAARNIPLSPLCQQSSALCLVQSLV

SEQ ID NO: 246376 - protein, 43 aa, Zea mays
  Clone ID: MRT4577_156275C.1.pep
SDISRPAIHGSIQMRRCHQLVGKFELGSKVGCHRICRESGFHQ

SEQ ID NO: 246377 - protein, 64 aa, Zea mays
  Clone ID: MRT4577_156276C.1.pep
IDIMIVIACVIMATVCGAILMGNILISIMDNFLRKDRPYFNVHQVTVRKLVSVNVQSVTEGVGG

SEQ ID NO: 246378 - protein, 36 aa, Zea mays
  Clone ID: MRT4577_156277C.1.pep
GNNEQPGIPFGTRATRVDGDSQRRISVVSPSYFSNG

SEQ ID NO: 246379 - protein, 263 aa, Zea mays
  Clone ID: MRT4577_156278C.1.pep
MLEEAIPALLSAVHGWFTPAVLFVVLNIVIGTIAVTSKAAASATGGDEEEVAASGAGWEPHRRLARVPSMAFERLKSFNGRFATAEPVPAETGVVDLGYNKQPHTAEMEKEGPVVVEGAVDPEPEPEPQHAAHMERSRSEADAEAKLPLLPSRLHKSASDKSAFAHFGAEEVEETVRAVEARRPATTRENRGRRLPVAEPEPASESSESESESEEEEASGGEVDARADDFINQFRHQLKLQRIDSFIRHRETVRRGQAAAQGV

SEQ ID NO: 246380 - protein, 153 aa, Zea mays
  unsure (1)..(153): unsure at all Xaa locations
  Clone ID: MRT4577_156279C.1.pep
YFNCTLTVACALLVGGEYLNNXGLVKNILVXLGTYFQVQDXDYXHCVCGPEFIXGKIGTDIEXDYKCFWLVMHALEHPDEMHXNILLDCYGQSDSACVALVMDXHXELKLDEVFHACYTESYNMLIVYIEAHSNKEVQSVNKSLLDNIYTRDK

SEQ ID NO: 246381 - protein, 41 aa, Zea mays
  Clone ID: MRT4577_15627C.1.pep
LSSAVTNEDLMRSTTARGRYGGRRARQDKIAGVRRSGGIES

SEQ ID NO: 246382 - protein, 153 aa, Zea mays
  unsure (1)..(153): unsure at all Xaa locations
  Clone ID: MRT4577_156280C.1.pep
TPXPRTPRGSXSKASMSEPPXHXXQLCAIPQCSPSRARTQPPRRCPKRAXVCEPXHSPXTPQEPKXGDXAQLXXPRAAPSARXPQEPPWPXXAAGGSSLGFRPAAQAPGAPPXRSDEPXXGXXVPFEAPCPHGPXXTSXHWPAXAAAGAAGGR

SEQ ID NO: 246383 - protein, 151 aa, Zea mays
  unsure (1)..(151): unsure at all Xaa locations
  Clone ID: MRT4577_156282C.1.pep
LAAYFFAFSATRAVGRKGSMLTEGLSLLVSAALNGAGQDIGVLIVXASVLGVGAGWANHDXPVHLSXRAPAAFRGMLNSGCQLMITIGILXAELSQLGTNEIKAGYGGPVSLALVAAPGVIIALGFIMGQGTNKSLLERRHLVETHLVVGR

SEQ ID NO: 246384 - protein, 191 aa, Zea mays
  unsure (1)..(191): unsure at all Xaa locations
  Clone ID: MRT4577_156284C.1.pep
NSARGRKRDDGGHGDLLQGTTTKCTACDKTVYLVDKLTADNRIYHKACFRCHHCKGTLKXNYNSFEGVLYCRPHFDQLFKRTGSLDKSFEXNATKVSSAFAGTREKCVGCSKTVYPTERVTVNNTMYHKSCFKCCHGGCTISPSNYIAHEGKLYCKHHHIQLIKEKGNFSQLENDHEKTSQAGSLEEDEQE

SEQ ID NO: 246385 - protein, 75 aa, Zea mays
  Clone ID: MRT4577_156285C.1.pep
MGLRYLEYSVSAEESTLLEMLGPEHPVIRDPDSVHRSGWDKVAEYYLGKQDVRIDVDRFAPTLAQAMDHLRHRHQ

SEQ ID NO: 246386 - protein, 88 aa, Zea mays
  Clone ID: MRT4577_156286C.1.pep
AGRELRSLERACASRLLDSWLKPFKLSDDRLDKFKELHKTRLQITEKPKHNRRPKWTTERSIKVTSKYEFTDKMHLADSSPGDGIICH

SEQ ID NO: 246387 - protein, 89 aa, Zea mays
  unsure (1)..(89): unsure at all Xaa locations
  Clone ID: MRT4577_156287C.1.pep
FEPSSLDNRLSIQVTVNNTMYHKSCFKCCHGGCTISPSNYIAHEGKLYCKHHHIQLIKEXRGTSASLRMTTRRHHRLGHXWRSCVFREQ

SEQ ID NO: 246388 - protein, 141 aa, Zea mays
  Clone ID: MRT4577_156288C.1.pep
MEATRKALEDLQAEHRAGVQRIAEWADEASTALVPLGMCPIPVSELPMSIFDALPVLDSAADRVWRLDQILGVRLEAEGSKLCWAVVQYVLTCFRSHDLAISLAPMIDGPVAATEDAARESVQDAVEMVAARFQRDPTDAK

SEQ ID NO: 246389 - protein, 176 aa, Zea mays
  unsure (1)..(176): unsure at all Xaa locations
  Clone ID: MRT4577_156289C.1.pep
LHIIWQNATKVSSAFAGTREKCVGCSKTVYPTERVXSVFNHLNHSSGSLSLLHLTTGXIQVTVNNTMYHKSCFKCCHGGCTISPSNYIAHEGKLYCKHHHIQLIKEXRGTSASLRMTTRRHHRLGHWFHHFHWSEDASSPGSYGLLKLPSPGSRLAHAHLLDPSPIGFPLIPTAPA

SEQ ID NO: 246390 - protein, 56 aa, Zea mays
  Clone ID: MRT4577_15628C.1.pep
RIGNQLLLAPLSNLVLSVISAPRVYKIMGLRWVYENVGASFNMSFSVSYFGFVASR

SEQ ID NO: 246391 - protein, 136 aa, Zea mays
  unsure (1)..(136): unsure at all Xaa locations
  Clone ID: MRT4577_156290C.1.pep
LHIIWQNATKVSSAFAGTREKCVGCSKTVYPTERVXSVFNHLNHSSGSLSLLHLTTGXIQVTVNNTMYHKSCFKCCHGGCTISPSNYIAHEGKLYCKHHHIQLIKEXRGTSASLRMTTRRHHRLGHWRRMNKSIDH

SEQ ID NO: 246392 - protein, 66 aa, Zea mays
  Clone ID: MRT4577_156291C.1.pep
ENTFLRFYMFNPRVGKMEGGGPPLSVKIGEKEREFLPIYWGGGGKKPPNGPAGETHNFQEQRGKGF

SEQ ID NO: 246393 - protein, 198 aa, Zea mays
  unsure (1)..(198): unsure at all Xaa locations
  Clone ID: MRT4577_156292C.1.pep
MATSFQGTTTKCTACDKTVYLVDKLTADNRVYHKACFRCHHCKGTLKLANYNSFDGVLYCRPHFDQLFKRTGSLDKSFQGTPKVVKPERNVGNENATKVSSAFAGTREKCVGCSKTVYPIERVTVNNTMYHKCCFKCCHGGCTISPSNYIAHEGKLYCKHHHVQLIKEKXGTSASSRMTTRRHRRLGRWRTTKKKSIN

SEQ ID NO: 246394 - protein, 62 aa, Zea mays
  Clone ID: MRT4577_156293C.1.pep
STCHAERSDATGAESPRAAKQDTAVSIAFRTCREHRRDLSRSTECQTEDPYDPHAPGLDYSS

SEQ ID NO: 246395 - protein, 203 aa, Zea mays
  unsure (1)..(203): unsure at all Xaa locations
  Clone ID: MRT4577_156294C.1.pep
MATSFQGTTTKCTACDKTVYLVDKLTADNRIYHKACFRCHHCKGTLKLANYNSFEGVLYCRPHFDQLFKRTGSLDKSFEGTPKVVKPERNVGNENATKVSSAFAGTREKCVGCSKTVYPTERVTVNNTMYHKSCFKCCHGGCTISPSNYXPLVRNVVRXWWCKHHHIQLIKEXRGTSASLRMTTRRHHRXLGHWRRMNKSIDH

SEQ ID NO: 246396 - protein, 81 aa, Zea mays
  Clone ID: MRT4577_156295C.1.pep
TASTFSRMSVHYRMRGLLSISGSISTRKLLLTWHKDYFNAPNCYPQNDADIVKMLKGPVLVNGSYIGRYCSYKGYSICCCL

SEQ ID NO: 246397 - protein, 34 aa, Zea mays
  unsure (1)..(34): unsure at all Xaa locations
  Clone ID: MRT4577_156296C.1.pep
XXXNREHYLIHSIIIKESPGYINGKTGEGGIYRF

SEQ ID NO: 246398 - protein, 125 aa, Zea mays
  Clone ID: MRT4577_156297C.1.pep
LRGPGAPWIDRDVAARCAESAAVHDVKGTTRVVVPSPFQTTRGTSRQRIRSAYARRTTGTSVAATCAQGCSGGRCRPPSLAVAGACGGQLDDWCTPIRPILFFRLIRDEASEIAVIVGEATELGP

SEQ ID NO: 246399 - protein, 81 aa, Zea mays
  unsure (1)..(81): unsure at all Xaa locations
  Clone ID: MRT4577_156298C.1.pep
AKMEVSTNHXLTPIKQDTNGVVLPYYGYSINWNYGILPYTWEDPTSANSEVEGASGDNDPVDVNAIGVRTANTQHRLMTLT

SEQ ID NO: 246400 - protein, 91 aa, Zea mays
  Clone ID: MRT4577_156299C.1.pep
PTRPEEQVAQLLARIEEGNQEKWRMMDTMQATIENMESSVKSVLSEQGDLQKWRSEEEANVSKVVEAVKAIQSKVDQAILKKAVILPTNES

SEQ ID NO: 246401 - protein, 143 aa, Zea mays
  Clone ID: MRT4577_15629C.1.pep
MGSSLSPSSVAALTTAAHGHRHRYHLSSSSSSDYYEDDGFEFTPLLPRPRRRHSARTERPRTVAQAAATTAAQPQPPQLRARRGAPSVVAATPAAPPTPRKQQVRWHDMAFGSARVPAAMDMGEIRRRLRARQLALAGGAAGN

SEQ ID NO: 246402 - protein, 119 aa, Zea mays
  Clone ID: MRT4577_1562C.1.pep
MEALITELRAKLNALDQTLEAQQVQQVEAIERMKKWQQELEDKANDIALAEENLKEKGTSLDRRETDLTRQEKDLAFREEMLERWGMLLVEHELEAEEKERKLEERIRWFEAAQAAPGP

SEQ ID NO: 246403 - protein, 119 aa, Zea mays
  Clone ID: MRT4577_156300C.1.pep
VGHSHMPWDITYCDQLSINVLLLLLFETRGTAALAETAGPGPVIVSRGDKDAVRTILRLLQRDLVLHLHPKQREVKKRLHDQVRGPRLILLVGPGEAGRDLRSRPYHRLVKALDYSKDL

SEQ ID NO: 246404 - protein, 59 aa, Zea mays
  Clone ID: MRT4577_156301C.1.pep
FNRLINNRFFGLTLKIYFHLLFSKKNYFSFFLQKKKISFGLFKIRFKIIFFFLITNNRQ

SEQ ID NO: 246405 - protein, 96 aa, Zea mays
  Clone ID: MRT4577_156302C.1.pep
AVVTTQSSGNQQTSDPGTCYCCEYYGIPCRQISTNESETTKQKNRILFSGIKSQWSPQEQLIADSRIPNALSVDELPSIPKKKKKKKKSTLRCYHC

SEQ ID NO: 246406 - protein, 143 aa, Zea mays
  unsure (1)..(143): unsure at all Xaa locations
  Clone ID: MRT4577_156303C.1.pep
NLNLHLNKVKKGGKKPLVFNRGRGPXPPNGTPVEPQPRGAQGPGNPPPPTQTQXPQPSRITPSSXRGPPGRXHGKPXITGPERGGPRPFFGPARQGRGLQQAARKXPGGXGGKRGPEKQPGGGGQGPXPKPGRWNPPGPRDGK

SEQ ID NO: 246407 - protein, 44 aa, Zea mays
  Clone ID: MRT4577_156304C.1.pep
TTSLLYNEGPCVRILAQPIPKKDCTDGCCYVTRGPSYSRCCLSY

SEQ ID NO: 246408 - protein, 247 aa, Zea mays
  unsure (1)..(247): unsure at all Xaa locations
  Clone ID: MRT4577_156305C.1.pep
MKVIEKILEAAGDGRTAFSFEYFPPKTEEGVENLFERMDRMVAHGPSFCDITWGAGGSTADLTLEIANRMQNMVCVETMMHLTCTNMPVEKIDHALETIKSNGIQNVLALRGDPPHGQDKFVQVEGGFACALDLVQHIRAKYGDYFGITVAXYPGEGGATLEAYSNDLAYLKRKVDAGADLIVTQLFYDTDIFXLKFVNDCRQIGITCPIVPGIMPINNYXGFLRXMTGFXQTKIPXSEITXAALDP

SEQ ID NO: 246409 - protein, 53 aa, Zea mays
  Clone ID: MRT4577_156306C.1.pep
AALSLSCYPLSFAVMRHLMAAAFVATLRDPAVAFLSAVHCPILSLRPRVRLCA

SEQ ID NO: 246410 - protein, 468 aa, Zea mays
  unsure (1)..(468): unsure at all Xaa locations
  Clone ID: MRT4577_156307C.1.pep
RLSRRSTADLTLEIANRMQNMVCVETMMHLTCTNMPVEKIDHALETIKSNGIQNVLALRGDPPHGQDKFVQVEGGFACALDLVQHIRAKYGDYFGITVAGYPEAHPDAIQGEGGATLEAYSNDLAYLKRKVLSTFLILFTFLNLKMIEYIFVGMNQIIRKRYDVVSHDTLYVLLLTLYIFRSMLVLTLLLHNFSMIPTSFSSLXNDXTKVSRPLPWRPATNVFRVKEDVRPIFWANRPKSYLKRTLGWDQYPHGRWGDSRNPSYGALTDHQRFTNFCQGKLTSSPWSELDGLQPETKIIDDQLVNINQKGFLTINSQPAVNGEKSDSPTVGWGGPGGYVYQKAYLEFFCAKEKLDQLIEKIKAFPSLTYIAVNKDGETFSNISPNAVNAVTWGVFPGKEIIQPTVVDHASFMVWKDEAFEIWTRGWGCMFPEGDSSRELLEKVRKTYYLVSLVDNDYVQGDLFAAFKI

SEQ ID NO: 246411 - protein, 92 aa, Zea mays
  unsure (1)..(92): unsure at all Xaa locations
  Clone ID: MRT4577_156308C.1.pep
KRSAATGRDKKGGPTRPPRGGGGKKTRAPGEGRAPGKKKRRRGLGSEDKIXTSQGLARSNPVGPRARWEGVGPWKSPSHLIVLGSYFGHITI

SEQ ID NO: 246412 - protein, 147 aa, Zea mays
  unsure (1)..(147): unsure at all Xaa locations
  Clone ID: MRT4577_156309C.1.pep
MKVIEKILEAAGDGRTAFSFEYFPPKTEEGVENLFERMDRMVAHGPXEIANRMQNMVCVETMMHLTCTNMPVEKIDHALETIKSNGIQNVLALRGDPPHGQDKFVQVEGGFACALDLVQHIRAKYGDYFGITVAGYPEAHPDAIQGE

SEQ ID NO: 246413 - protein, 126 aa, Zea mays
  Clone ID: MRT4577_15630C.1.pep
RWLRPSALLFLVASAPLWARSPARALGFDLESGHTKWVSEKIKVNPRAVEKNQMGGPDPNSPEAQLPESPRISQRGTSPNGNSMPPTCMSTTTNKKKPPPRTWPLCLGGEKKKEMETRPMPFGLLG

SEQ ID NO: 246414 - protein, 132 aa, Zea mays
  Clone ID: MRT4577_156310C.1.pep
MADAQAPSPARFTARELAAAEQLIHLSESSSSSYAALPRGSVASASSTSSPRSVNAPPPPATPPPAGLLAAPAEDDEDDLDQQEVRGRPRRNRRYRLIAEIYAASEPKPIVGGARRRKVDRPSTDGAPEARK

SEQ ID NO: 246415 - protein, 571 aa, Zea mays
  unsure (1)..(571): unsure at all Xaa locations
  Clone ID: MRT4577_156311C.1.pep
MKVIEKILEAAGDGRTAFSFEYFPPXCDITWGAGGSTADLTLEIANRMQNMVCVETMMHLTCTNMPVEKIDHALETIKSNGIQNVLALRGDPPHGQDKFVQVEGGFACALDLVQHIRAKYGDYFGITVAGYPEAHPDAIQGEGGATLEAYSNDLAYLKRKVDAGADLIVTQLFYDTDIFLKFVNDCRQIGITCPIVPGIMPINNYKGFLRMTGFCKTKIPSEITAALDPIKDNEEAVRQYGIHLGTEMCKKILATGIKTLHLYTLNMDKSAIGILMNLGLIEESKVSRPLPWRPATNVFRVKEDVRPIFWANRPKSYLKRTLGWDQYPHGRWGDSRNPSYGALTDHQFTRPRGRGKKLQEEWAVPLKSVEDISERFTNFCQGKLTSSPWSELDGLQPETKIIDDQLVNINQKGFLTINSQPAVNGEKSDSPTVGWGGPGGYVYQKAYLEFFCAKEKLDQLIEKIKAFPSLTYIAVNKDGETFSNISPNAVNAVTWGVFPGKEIIQPTVVDHASFMVWKDEAFEIWTRGWGCMFPEGDSSRELLEKVQKTYYLVSLVDNDYVQGDLFAAFKI

SEQ ID NO: 246416 - protein, 593 aa, Zea mays
  Clone ID: MRT4577_156312C.1.pep
MKVIEKILEAAGDGRTAFSFEYFPPKTEEGVENLFERMDRMVAHGPSFCDITWGAGGSTADLTLEIANRMQNMVCVETMMHLTCTNMPVEKIDHALETIKSNGIQNVLALRGDPPHGQDKFVQVEGGFACALDLVQHIRAKYGDYFGITVAGYPEAHPDAIQGEGGATLEAYSNDLAYLKRKVDAGADLIVTQLFYDTDIFLKFVNDCRQIGITCPIVPGIMPINNYKGFLRMTGFCKTKIPSEITAALDPIKDNEEAVRQYGIHLGTEMCKKILATGIKTLHLYTLNMDKSAIGILMNLGLIEESKVSRPLPWRPATNVFRVKEDVRPIFWANRPKSYLKRTLGWDQYPHGRWGDSRNPSYGALTDHQFTRPRGRGKKLQEEWAVPLKSVEDISERFTNFCQGKLTSSPWSELDGLQPETKIIDDQLVNINQKGFLTINSQPAVNGEKSDSPTVGWGGPGGYVYQKAYLEFFCAKEKLDQLIEKIKAFPSLTYIAVNKDGETFSNISPNAVNAVTWGVFPGKEIIQPTVVDHASFMVWKDEAFEIWTRGWGCMFPEGDSSRELLEKVQKTYYLVSLVDNDYVQGDLFAAFKI

SEQ ID NO: 246417 - protein, 39 aa, Zea mays
  Clone ID: MRT4577_156313C.1.pep
RINQLLQKSVRHQTVIAQVVRDLGAEDSRPGRCAGVKVR

SEQ ID NO: 246418 - protein, 60 aa, Zea mays
  Clone ID: MRT4577_156314C.1.pep
MALPASSSTLSRFLSSRRIQPTDVTALATWGIFAGSAAIYLVQPFDWIKKTFFEKPEPEA

SEQ ID NO: 246419 - protein, 60 aa, Zea mays
  Clone ID: MRT4577_156315C.1.pep
FLDLPPPQKKFCLPPISPLLSPKCSGLSRGVGPHNHLNERGRKKSRLQKSTFFCPGGHKH

SEQ ID NO: 246420 - protein, 198 aa, Zea mays
  unsure (1)..(198): unsure at all Xaa locations
  Clone ID: MRT4577_156316C.1.pep
TVHCVQPTGFEDSTHPDYVCRLNRSLYGLKQAPRAWYSRFASHLIQLEFVEAMSDTSLFVYHKGADMIYLLLYVDDIVLTASSMPLLRRTITAHQQEFSLKDLGPLHHFLGMHVQQSASGIXSQRQYMIEILERAGMSDCKPCTTPVDINXKLSADGDPVSNPTEFHSLAGALQYLTFTSPDIVNVVQQVCLHMHDPQ

SEQ ID NO: 246421 - protein, 96 aa, Zea mays
  Clone ID: MRT4577_156317C.1.pep
ILLAIQVVKMILKIHDVISRSTDLMKPKGRRKKKQAQVVMLDESLVGSLADVLIGLPLVQGGSLNLISCRAPFCEGDCLYCPILHRGIRMDVLSRP

SEQ ID NO: 246422 - protein, 42 aa, Zea mays
  Clone ID: MRT4577_156318C.1.pep
IFIAALQQTDTTEHLTMPTSSKGLFALYYILFFLNIFIQYSR

SEQ ID NO: 246423 - protein, 148 aa, Zea mays
  Clone ID: MRT4577_156319C.1.pep
MEDDSPLTKTMKGAVTGLAAGTIWGTVVATWYDVPRVERHVALPGLIRTLKMCGTYGATFATIGGLYIGVEQLVQSQRKKRDFVNGAVGAFVAGASVCGYRGKSIQSALIGGSCLAFTSAVLDIGGNTTRVDNGKEYYAYTTEKKPAN

SEQ ID NO: 246424 - protein, 143 aa, Zea mays
  Clone ID: MRT4577_15631C.1.pep
AALHVLDSRVAGGKANKGAVVLQGWWAQEECLVLAGPSRPCCMVLVWLIGRYLKTGRDAQRVDTVSPVYIATRLTPRAGCWSWTKTQRRTTRRLAIVPIHYILAIPNDYDAMYATVLRHHQRTADVCTTSIRLFLPRRCRIMR

SEQ ID NO: 246425 - protein, 107 aa, Zea mays
  Clone ID: MRT4577_156320C.1.pep
GVGTNWFSAKTPKNIFLFYNNPRGAQKGPPQRDDRRPPKGGAPPPRDGPGCQPQKKPPAESLQEGANKKKTGDTLRGPNCPPGPGGSFREGPGKSPFFWAQKNFFPR

SEQ ID NO: 246426 - protein, 148 aa, Zea mays; identical to SEQ ID NO: 246423
  Clone ID: MRT4577_156321C.1.pep

SEQ ID NO: 246427 - protein, 76 aa, Zea mays
  unsure (1)..(76): unsure at all Xaa locations
  Clone ID: MRT4577_156322C.1.pep
GRERLSIQEQTWDSCLVLIIGLTGETKMRXQXILVXTLXVLAILAALGEGSSSWPCCNNCGACNKKQPPECQCNDV

SEQ ID NO: 246428 - protein, 168 aa, Zea mays
  Clone ID: MRT4577_156323C.1.pep
MQEQPASSRPSSSERSSSSAHHMDMEVKEGMESDEEIRRVPELGLELPGASTSGREVGPGAAGADRALAQSSTAQASARRRVRSPADKEHKRLKRLLRNRVSAQQARERKKAYLTDLEVKVKDLEKKNSEMEERLSTLQNENQMLRQILKNTTVSRRGSGSTASGEGQ

SEQ ID NO: 246429 - protein, 397 aa, Zea mays
  unsure (1)..(397): unsure at all Xaa locations
  Clone ID: MRT4577_156324C.1.pep
MAETVDDKISYFQAVTGISNTDLCTEILAAHNWDLQLAVSSITANPSSPSAPVSTSSRDPAPSAPLADAEFVAPPPPADFVAEFERECGAGRGPRFVAEGFADALQRAQREFKLLFVYLHSPDHPDTPAFCGGCLCAEPVAAFIDENFVAXWGGSIXRRTEGFKMSNSLNASRFPVFVLVVMASTNQRIVLLQXQVEGPKSPEEMITILQRVXVEECATSLVAARIEAEERLNNQRLREEQDAAYRAALEADQARERERLEELKRREREAAEAEKKRKEEEEAVARASQEAAEKEAALARRRQEKAMALGAEPEKGPGVTRVLIRFPTGERRERRFYSSATVASLYDYVDSLDCMKAEKYTLVSNFPRVTYGPEKQSLTLEEAGLHLQASLFIEIEQ

SEQ ID NO: 246430 - protein, 114 aa, Zea mays
  unsure (1)..(114): unsure at all Xaa locations
  Clone ID: MRT4577_156325C.1.pep
GPGAAGADRALAQSSTAQASARRRVRSHADKEHKRLKRLLRNRVSAQQARERKKAYLTDLEVKVRDLEKKNSEMEERLXSTLQNENQMLRQILKNTAVNRRGSGSTASGEGHGQ

SEQ ID NO: 246431 - protein, 73 aa, Zea mays
  Clone ID: MRT4577_156326C.1.pep
LHVKHVRNTLPHIQVFIGHGPVKNTPCPRALINNHCKGSSKCPPRRGQAITSDSPAVQCMFRVLLRTPKRGGI

SEQ ID NO: 246432 - protein, 97 aa, Zea mays
  unsure (1)..(97): unsure at all Xaa locations
  Clone ID: MRT4577_156327C.1.pep
MAETVDDKISYFQAVTGISDTDLCTEILAAHNWDLQLAVSSITAPSPSXGSGDRLLELPPSAAEAADFVAEFERECGAGRGPRFVAEGFADALQRAQ

SEQ ID NO: 246433 - protein, 70 aa, Zea mays
  Clone ID: MRT4577_156328C.1.pep
ACDHPPDIETVDTRPKSTRRGEDKMVRTTQTFRKSTATTARPKQLSTNSSSKSAPTSGGVKKSNTIRTST

SEQ ID NO: 246434 - protein, 94 aa, Zea mays
  Clone ID: MRT4577_156329C.1.pep
PGRAGRRRWRRPRAAAAEPACTGPLHTAAAAAGSAPCPGTCAASCRSRRAWPPPSSSSPSGFPAAQSAAHGARRHRPFPADPFSRSSALPVAAG

SEQ ID NO: 246435 - protein, 74 aa, Zea mays
  unsure (1)..(74): unsure at all Xaa locations
  Clone ID: MRT4577_15632C.1.pep
HYRXAMTSHARVPVSSGIRLRGKARPCLGYRPWSLPQPSSCLSHSRSIHLDPTAPGHAGGPSSACRLLILHRSR

SEQ ID NO: 246436 - protein, 101 aa, Zea mays
  Clone ID: MRT4577_156330C.1.pep
EPNVGTWCYHDFTLRVDTLGPPHALRFGSRAMWAHVGTWCYHGFTLRVDTLGPPHALRLGGRTLWPPVGPHLALSQLLRCGPQRPQSQLLRLTSTRPRPRC

SEQ ID NO: 246437 - protein, 203 aa, Zea mays
  Clone ID: MRT4577_156331C.1.pep
MEDDSPLTKTMKGAVTGLAAGTIWGTVVATWYDVPRVERHVALPGLIRTLKMCGTYGATFATIGGLYIGVEQLVQSQRKKRDFVNGAVGAFVAGASVCGYRGKSIQSALIGGSCLAFTSAVLDIGGNTTRVDNGKEYYAYTTEKKPAEPAQEARLRQRGRRRVRCRSLCLRLQRKEYSVSPHRRLLSGFHICCAGHWRQYDQS

SEQ ID NO: 246438 - protein, 93 aa, Zea mays
  Clone ID: MRT4577_156332C.1.pep
NINNIYITLGLSACQRGENEDDARVITIQREQCNVTVHLFIGMGRRPGKSTFISLGTIYNINKNYYGVCGLYPFQALSYLSFINMFSVKSFGF

SEQ ID NO: 246439 - protein, 269 aa, Zea mays
  Clone ID: MRT4577_156333C.1.pep
MAETVDDKVSYFQAVTGISNTDLCTEILAAHNWDLQLAVSTITANPSSPSASASTSSRDPAPSAPLAVDAEFVAPPPPMPLPLPPQQQPGIAWKLVTLPFHVVSGGVGLVAGTFRLGAWVAGGVLSRSLSLLGLAGQAGSGDRLLELPPSAAEAADFVAEFEREFGAGRGPRFVAEGFADALKRAQREFKLLFVYLHSPDHPDTPAFCGGCLCAEPVAAFIDENFVAWGGSIRRTEGFKMSNSLNASRFPFCAVVMASTNQRIVLLQQV

SEQ ID NO: 246440 - protein, 466 aa, Zea mays
  Clone ID: MRT4577_156334C.1.pep
MAETVDDKISYFQAVTGISDTDLCTEILAAHNWDLQLAVSSITANPSSPSAPVSTSSRDPAPSAPLADAEFVAPPPPMPPPPQQQPGIAWKLVTLPFYVVSGGVSLVAGTFRLGAWVAGGVLSRSLSLLGLAGQAGSGDRLLELPPSAAEAADFVAEFEREFGAGRGPRFVAEGFADALQRAQREFKLLFVYLHSPDHPDTPAFCGGCLCAEPVAAFIDENFVAWGGSIRRTEGFKMSNSLNASRFPFCAVVMASTNQRIVLLQQVEGPKSPEEMITVLQRVVEECATSLVAARIEAEERLNNQRLREEQDAAYRAALEADQARERERLEELERREREAAEAEKKRKEEEEAVARASQEAAEKEAALARRRQEKAMALGAEPEKGPGVTRVLIRFPTGERRERRFYSSATVASLYDYVDSLDCMKAEKYTLVSNFPRVTYGPEKQSLTLEEAGLHPQASLFIEIEQ

SEQ ID NO: 246441 - protein, 80 aa, Zea mays
  unsure (1)..(80): unsure at all Xaa locations
  Clone ID: MRT4577_156335C.1.pep
GTSRPAVFAXLLQKRNAKDLPLSAVSDGGAAPVAVAAPAGGAAAAAAPAVXEEKMEEAKEDSDDDMGFSCSTEETPSPSH

SEQ ID NO: 246442 - protein, 49 aa, Zea mays
  unsure (1)..(49): unsure at all Xaa locations
  Clone ID: MRT4577_156336C.1.pep
LLIFVSVDSQHAIVTCWTGCTGGCFXYIIALYVNYTCISVELALRYGSR

SEQ ID NO: 246443 - protein, 175 aa, Zea mays
  unsure (1)..(175): unsure at all Xaa locations
  Clone ID: MRT4577_156337C.1.pep
NHQHLFQGHAEQHXPLQLQLCHQAQSKXSRQRPCPCRCPRPCASVATLLLTPTPSXLKDRQEFLRQQGSPLVMPFLHSRLMQPSSFRVWQQQCCHDXLRQIEPQYIRQAIYDMVQSIIQEEHHRLPCEXLCGSHQATXKCGGNXLNNSTKPTINVKNAQEKTKKKKACTCPGGRL

SEQ ID NO: 246444 - protein, 49 aa, Zea mays
  Clone ID: MRT4577_156338C.1.pep
MVFDNNVLALLLMKKKKKKKKKKKKKKKEKKKKLKKKKTKKKPNLKNNN

SEQ ID NO: 246445 - protein, 286 aa, Zea mays
  Clone ID: MRT4577_156339C.1.pep
SARDQYLAVFIKARKLELAGNGKCDAPAHDDLLSRFMRKGSYSDESLQHVALNFILAGRDTSSVALSWFFWLVSTHPDVERQIVLELCAALAASRGSHDPALWLASPLTFEELDRLVYLKAALSETLRLYPSVPEDSKHVVADDYLPDGTFVPAGSSVTYSIYSAGRMKTVWGEDCLEFRPERWLSADGTRFEPHDSYRFVAFNAGPRICLGKDLAYLQMKNIAGSVLLRHRLAVARGHRVEQKMSLTLFMKHGLRMEVHPRDLAPVIDELRGAGAARPAMAPCCA

SEQ ID NO: 246446 - protein, 60 aa, Zea mays
  Clone ID: MRT4577_15633C.1.pep
IAPVAPFLPPTILDLVNIPISDYGRVGLGFKALSTNFPIPVQDQDVVLAQKKKKKKGGPF

SEQ ID NO: 246447 - protein, 95 aa, Zea mays
  unsure (1)..(95): unsure at all Xaa locations
  Clone ID: MRT4577_156340C.1.pep
YIVKAHGSLGQCWLNRRLILVAGLGTITESESFTSFYAHADXLHXEDQYDFTDRDSTGLARHIDHTQKHALSPELASEFVMDADAVIFTEQVEKA

SEQ ID NO: 246448 - protein, 83 aa, Zea mays
  unsure (1)..(83): unsure at all Xaa locations
  Clone ID: MRT4577_156341C.1.pep
PPKDGKVFQLEHVFFKGSKVGFLFIPDMLKNAPXLFKRLEAKIRGKGSAFGFGGGRPVSMGARAASGRGGGPFGQGSAPPFRR

SEQ ID NO: 246449 - protein, 170 aa, Zea mays
  unsure (1)..(170): unsure at all Xaa locations
  Clone ID: MRT4577_156342C.1.pep
IPGALHVSGPLFEQIKHRSAYPLHGYFSPVPTEISNCTTRGLHPRRPRPPWDHEESCLSAMQLXKKEIMPMTLHTAIXLGLMEVLKKEPGGGLAMLAPNEVVMWMPCDLIDPTVAQFMKYRVLGLVYLYDGLQPQKDDSLCQLEQLYFAPLLCKWVTPNHDHVNMEDLLL

SEQ ID NO: 246450 - protein, 51 aa, Zea mays
  Clone ID: MRT4577_156343C.1.pep
LIKYRECSFDNLVTRFMMARCIKSIRAHENTSVQLCSLCNIAAGPCSQCIY

SEQ ID NO: 246451 - protein, 161 aa, Zea mays
  Clone ID: MRT4577_156344C.1.pep
RRSRGSSRRATARRPAWTGSPSPARTRTCPSGRPGRYAGGGRQASTSGDVYSFGIVVLEMVTGKRPTDPTFKDGLDIVNFVSSNFPHQISRVVDPRLSEECKEFARDKVEPENAAYQCLLCLLQVALSCTHPSPSERVSIKEVANKLHATQMAYEGGKEKK

SEQ ID NO: 246452 - protein, 142 aa, Zea mays
  Clone ID: MRT4577_156345C.1.pep
MGKLWTILTHLHSLAGPTVMLLYPLYASVRAMESPSKLDDEQWLAYWILYSFVTLMEMLLESLIYWIPIWYELKLLFIAWLVLPNFRGAAFIYDKFVREQLRKHGLTAAGSVKSSSPSSKDKDKPKNKFLAFVTPKKDHEAY

SEQ ID NO: 246453 - protein, 152 aa, Zea mays
  Clone ID: MRT4577_156346C.1.pep
MCLCFSAWVWVVPAYLPGRPLDGRPGRYAGGGRQASTSGDVYSFGIVVLEMVTGKRPTDPTFKDGLDIVNFVSSNFPHQISRVVDPRLSEECKEFARDKVEPENAAYQCLLCLLQVALSCTHPSPSERVSIKEVANKLHATQMAYEGGKEKK

SEQ ID NO: 246454 - protein, 83 aa, Zea mays
  Clone ID: MRT4577_156347C.1.pep
LLLWGLCKQTAFARYGNIGYRLLKCDYRTLPWLGRKPFNFGKVFHLPKRVQLTVTHIHAPKGMNTGFVGEKHTSLKSVKRNFV

SEQ ID NO: 246455 - protein, 270 aa, Zea mays
  Clone ID: MRT4577_156348C.1.pep
GLLVGLIFKLPLYADLYLLTLSLSLSLLIFCTAVHRFLVFSPMRSSPSALLPVAPSLVHARSSLCLPWPRRFGAIFTRPGSCTQSSSPTATLSSLHLSCARPAPVPGRDPWPPRPALGCCSPVLQLVGRAPAPRPSPAEAPPSRFPWPSVRPELLLLSSLLLSSSGCASLLSAFLPTLSLLWTWMLRRSGSPSSATPIGSLEPASLSSPSACHWSLLLPRPPSSRRTRPFPARPCARPAPCACHSSNSGVNAPCSCCLECSSISPSWPSS

SEQ ID NO: 246456 - protein, 26 aa, Zea mays
  Clone ID: MRT4577_156349C.1.pep
CCSMKSPAARQSSIYVHDQLLDLQYT

SEQ ID NO: 246457 - protein, 125 aa, Zea mays
  Clone ID: MRT4577_15634C.1.pep
THASAHASAHVKYITYYEDAESLPGWRTAVWELDKANHRNIVRTPVLMRELWLEMWHDLHPDSKSKFVTKAFRGPLRNEDCRWDYGKARCGFPEHCEYRYTFGDVHLGMSCRLRNTSANLLQQYL

SEQ ID NO: 246458 - protein, 94 aa, Zea mays
  Clone ID: MRT4577_156350C.1.pep
GHLAVLNLDSYSQQQLLAADPFALANVAAYQQQQQLQQLMPMLRQLAMVNPAVYLQLLSSNPLAEFNAPTYLQQQSLQQIVPALTHLALTNHAS

SEQ ID NO: 246459 - protein, 42 aa, Zea mays
  Clone ID: MRT4577_156351C.1.pep
FFLEISYLCISVFVTVTHCYVRYVTGEIDQPLLRCCHISWNE

SEQ ID NO: 246460 - protein, 49 aa, Zea mays
  Clone ID: MRT4577_156352C.1.pep
IGQYEHAKRNYVVMRFLSPSEPIRRSMAICSLSPSHDSSSLAIESSNDC

SEQ ID NO: 246461 - protein, 54 aa, Zea mays
  Clone ID: MRT4577_156353C.1.pep
HRTEFLVTANKKSTTPVSKVPDLLHQPNHLHQHHTPFIRLPIAPHVNTEHFYHI

SEQ ID NO: 246462 - protein, 397 aa, Zea mays
  Clone ID: MRT4577_156354C.1.pep
MAGKSARVTLPILIVVDRSIDRPAGQPSSWPLAPIGSSAGQGKAAVRTTMAQGSRSAAVPAAASFFALLAVAPLLLCCAPAAAELARLEHPAKDGGSLSLLVVGDWGRKGTFNQSRVAHQMGRVGEQLSIDFVISTGDNFYENGLTGTDDEAFEQSFTDIYTAKSLQKPWYLVLGNHDYRGDALAQLSPVLRKIDSRFICIKSFVVNAEIVEFFFVDTTPFQLKYWTHPKDDHYDWRGVAPRENYINNLLKDLDGAMKTSTAAWKVAVGHHTMRSVSDHGDTKELLQLLLPVLQANGVDFYINGHDHCLEHISSRDSPIQYFTSGGGSKAWRGVQNPTEDDLKFFYDGQGFMSLQLDRSQAKFTFYDVDGKALYSYTRSSLMETGHHLQASGYINEE

SEQ ID NO: 246463 - protein, 348 aa, Zea mays
  Clone ID: MRT4577_156355C.1.pep
MAQGSRSAAVPAAASFFALLAVAPLLLCCAPAAAELARLEHPAKDGGSLSLLVVGDWGRKGAFNQSRVAHQMGRVGEQLSIDFVISTGDNFYENGLTGTDDEAFEQSFTDIYTAKSLQKPWYLVLGNHDYRGDALAQLSPVLRKIDSRFICMKSFVVNAEIVEFFFVDTTPFQLKYWTHPKDDHYDWRGVAPREKYINNLLKDLDGAIKRSTAAWKVAVGHHTMRSVSDHGDTKELLQLLLPVLQANGVDFYINGHDHCLEHISSKDSPIQYFTSGGGSKAWRGVQNPTEDDLKFFYDGQGFMSLQLDRSQAKFTFYDVDGKALYSYTRSSLMETGHHLQASGYVNEE

SEQ ID NO: 246464 - protein, 399 aa, Zea mays
  Clone ID: MRT4577_156357C.1.pep
MAQGSRSAAVPAAASFFALLAVAAPLLLCCAPAAAELARLEHPPKDGGSLSLLVVGDWGRKGTFNQSRKKKKKKAAGECCAPAAAELARLEHPAKDGGSLSLLVVGDWGRKGTFNQSRVAHQMGRVGEQLSIDFVISTGDNFYENGLTGTDDEAFEQSFTDIYTAKSLQKPWYLVLGNHDYRGDALAQLSPVLRKIDSRFICIKSFVVNAEIVEFFFVDTTPFQLKYWTHPKDDHYDWRGVAPRENYINNLLKDLDGAMKTSTAAWKVAVGHHTMRSVSDHGDTKELLQLLLPVLQANGVDFYINGHDHCLEHISSRDSPIQYFTSGGGSKAWRGVQNPTEDDLKFFYDGQGFMSLQLDRSQAKFTFYDVDGKALYSYTRSSLMETGHHLQASGYVNEE

SEQ ID NO: 246465 - protein, 75 aa, Zea mays
  Clone ID: MRT4577_156359C.1.pep
QLGIRARVLDSAQTHFIYLFRCDNRYITVKTTRYTLQIVPWDLQNTISSHMPHCRSTTPDPLMFTITSLSLYQNK

SEQ ID NO: 246466 - protein, 104 aa, Zea mays
  Clone ID: MRT4577_156360C.1.pep
FFLTPQFFPTPPFFKPLADYLLFVIPLNKYSLQILGTKIWTLLIGRPVLFFYLLFFFFFSFSFLLFVIKLLFPPLSVFFFLFLFLVTLCSVRVTGRAGRTLRSG

SEQ ID NO: 246467 - protein, 96 aa, Zea mays
  unsure (1)..(96): unsure at all Xaa locations
  Clone ID: MRT4577_156361C.1.pep
SFRRLQSFRFYFIFLIRFFIFSLCFFFFKXFYIFFFNFFFLYFHCSFFLXFNFFILYIFLFINFYXILHFFEFSFFYIFLTFFNFLIFFIFFKIFI

SEQ ID NO: 246468 - protein, 58 aa, Zea mays
  Clone ID: MRT4577_156362C.1.pep
SLTTRHRVWCRAVCLWISFLPFSFYFFLWRQKLGIRQYEGWSPLLPMPVANPGFCLFV

SEQ ID NO: 246469 - protein, 51 aa, Zea mays
  Clone ID: MRT4577_156364C.1.pep
KTTFLFALSCTHFSTLPLSSSKMFNYSSRPPGTQKQTEKLLSFSAILKKVR

SEQ ID NO: 246470 - protein, 104 aa, Zea mays
  Clone ID: MRT4577_156365C.1.pep
HQQAQVHRFSSVVQVQCITSSLLHLIHKKLQGVRSTTQFTKYKRNRITKQFTEYKSNCITKHIVQHLMQPTKSNTNRQHPRRSPPCAQQRRQATQTRQPFFQRP

SEQ ID NO: 246471 - protein, 179 aa, Zea mays
  Clone ID: MRT4577_156366C.1.pep
MGNCQAAEAAAVIIQHPGGKVDRLYWSTTAAEVMRNNPGHYVALVILRVPADNKPAAAGDAAASSGPGSGGAKITRVKLLKPKDTLLLGQVYRLITAQEVTKAVRARKNEKMQRCEAIRQQHEQLRRGDGAHQSSSSQDGKQDKDRHRGRGRHWRPVLQSISESASQSSSSIVSESATS

SEQ ID NO: 246472 - protein, 106 aa, Zea mays
  Clone ID: MRT4577_156367C.1.pep
YLETATVPLDAGGQLPAAAGAVVTRTYADDAARGYYAIQVKLSLALGGGLHWCHSSCTLYFFAPLPSSSPRRGAPNIFDGDDCWTTCKKSVLHDEKPDKAMQIKEQ

SEQ ID NO: 246473 - protein, 67 aa, Zea mays
  Clone ID: MRT4577_156368C.1.pep
PRVRPRVRTVYNCCCSCTSGPEEKYPGKAFKGTLKSHLYGSDNPSLNWKQRLEVCIGATRGLHYLHT

SEQ ID NO: 246474 - protein, 100 aa, Zea mays
  Clone ID: MRT4577_156369C.1.pep
QTGKLWFFFFFKNQKIPMFGSQVGLVFYWSTPTTRWIDNNHIHGRRSMGTTVGGGALGAGTATGGGGGLPGLRRGLKKIGGGLFFRGHPEDKGGPRGGAC

SEQ ID NO: 246475 - protein, 79 aa, Zea mays
  Clone ID: MRT4577_15636C.1.pep
IHLKGPKGIASEEDPDKPGTLSDPFQANLGIIGKSMDGDSLHSFDISSEAHEDEACGTSWWRQVVLDGLEGKDKIPLKD

SEQ ID NO: 246476 - protein, 91 aa, Zea mays
  Clone ID: MRT4577_156370C.1.pep
TYRSSMSSECHIHLIVGQKLRIACAHELSAIRRLTALFSPARICFLCRIVRSVAIHHHMLYSSTVLSIEYVHDHVVVLRKLCSSHCSGMMI

SEQ ID NO: 246477 - protein, 89 aa, Zea mays
  Clone ID: MRT4577_156371C.1.pep
MVRAAIAGVMTAARFQELVDWMEERKVAFRDDAKWTEMVNLGLGSPRLIMSGLLPFAIDRDLGFENPSLVLRGENRRIRTDISSSCILP

SEQ ID NO: 246478 - protein, 155 aa, Zea mays
  Clone ID: MRT4577_156372C.1.pep
RNLHPHPMNISVQAFQWSQPYRCETFSTPTISASSHVICSHPFPAVTDSTELSSKTKVHGLLPKHASIRDPVRKPVRPARARARALGINGSKSIQFNPATTDSTQPGGEGEVFFFSLRVRLGEGEEWTVAAAVATGGEGGAGRGGGRGIRLDEEE

SEQ ID NO: 246479 - protein, 86 aa, Zea mays
  Clone ID: MRT4577_156373C.1.pep
IRNCLLVRRRLYDHFTRLTSCPTLVFTSPSSLESKAIVAKARTCRARPYILEANNDPFVAAEYVTYVFEYQTLHDRRLRGDCAQSE

SEQ ID NO: 246480 - protein, 260 aa, Zea mays
  unsure (1)..(260): unsure at all Xaa locations
  Clone ID: MRT4577_156374C.1.pep
MEAMTGGKFLQKFRLYETRSKFYLIGRDKSRIHWRVLKIDRSEFTELGVEEDPTIYTENECQELLRRIHEGNRLTGGLKFVTKCYGIVGFVKFLGPYYMVIITRRRKIGTICGHEIYSVGKSEMIAIPSVTVWPNMAYSRDENRYKHLLCSVDLSKDFFFSYSYNIMHSLQKNITEKNIGQVYETMCVWNEFMTRAIRDHLMNTCWTVALVHGXFKQSRFSVSGKDFWLTLIARRSRHFAGTRFLKXRGVNXKGRVANDV

SEQ ID NO: 246481 - protein, 781 aa, Zea mays
  unsure (1)..(781): unsure at all Xaa locations
  Clone ID: MRT4577_156375C.1.pep
MEAMTGGKFLQKFRLYETRSKXFYLIGRDKSRIHWRVLKIDRLESTELGVDEDPTIYTESECQELLWRIHEGNMLTGGLKFVTKCYGIVGFVKFLGPYYMFIITSRRKIGTICGHEIYSVGKSEMIFFYFCTMKKFVVSPLNFCRYKRLLCSVDLSKDFFFSYSYNIMRSLQKNITQKNTGQAVYEPMCVWNEFLTRAIRNHLKNTCWTVALVHGFFKQSKLSVSGKDFWLTLIARRSRHFAGTRFLKRGVNEKGRVANDVETEQIVFEDTSDGIPTQMASAVQHRGSIPLVWFQETSRLNIRPDIILKPDVDYKATRLHFENLALRYGNPIIILNLIKTHEKKPRESLLRAEFAKAIHYINKSLPDDKRLKFLHMDLSKLSRRKGTNVLALLTKVASDVLDLTEFLHCEISTSTKPDDTSSGERTAAKPHDDRSSSDQTECAAKLAPLLLQKGVLRTNCIDCLDRTNVAQFAYGLAALGRQLHALGLTEAQKIELHDPLADDLMDFYEWMGDTLAIQYGGSAAHNKIFCEQRGQWKAATQSQEFLRTIQRYYNNAYTDHDKQDAINMFLGHFQPQQGKPALWKLDSDQHYNIGRQGTLKEEIGRSFIKRSLSDGNILLENNLPVTSCNNETNNTELLPMQQLDDIREPTDSAPEISICEPNPCSSVNYGRVPGRHSISEERQSYLKRLGYPELHSSNFLDLDLLSSSGNSCDEEVFERSSLINSPMDVVSVESSTSYSEQGHTDEGRDDMDLSRSSSQVSDVRDYSDRFAHWVADGGMLW

SEQ ID NO: 246482 - protein, 62 aa, Zea mays
  Clone ID: MRT4577_156376C.1.pep
CAKIKYKQELKHRLICKDICPSSIHLLSNFCLWLVCSQQVSRHFIGSLWVVFGNTDHLLLMP

SEQ ID NO: 246483 - protein, 49 aa, Zea mays
  Clone ID: MRT4577_156377C.1.pep
KICFLLHAHKFSMTKMCVERNWIGLHGNKNMILMLYSSINIGPLQQSRS

SEQ ID NO: 246484 - protein, 124 aa, Zea mays
  Clone ID: MRT4577_156378C.1.pep
LALRVILSKARPLANSLFVINSNRVAIVLSALFLKHLFIIYLVSVHSQMVAEWSDVFLRDIVSFTASCSQYVGIAGYFHLALETRHRYRCDPCGLIGSVTPVFDRPCRPKYGQVSWFPLVLECC

SEQ ID NO: 246485 - protein, 85 aa, Zea mays
  Clone ID: MRT4577_156379C.1.pep
SRVRNKVNREHELGSKGIIIQVIPQEIIITSVLASEPTPELDACSITRPLPVEMAIFQRFNECVFVLLISGQMLSPQVVPTLFFL

SEQ ID NO: 246486 - protein, 105 aa, Zea mays
  Clone ID: MRT4577_156380C.1.pep
MVKICCIGAGYVGGPTMPVIVLKCPDIEAAVVDISKPRIEACNSDTLPIYEPALDDVVKQSRGRNLFFSTDVEKHVAEADIIFRSANTPPKTPGLGAGMAADPTY

SEQ ID NO: 246487 - protein, 47 aa, Zea mays
  Clone ID: MRT4577_156381C.1.pep
LCPFRPKKGCKWPNAPCAQLGSQFVGFKANFYAFGRLSKQDWYFGPE

SEQ ID NO: 246488 - protein, 227 aa, Zea mays
  unsure (1)..(227): unsure at all Xaa locations
  Clone ID: MRT4577_156382C.1.pep
SSPPLSLSLDPPAAALLATIINPFSPAPPPPXPPPFGXPGPPIRCRPFPPFXFPLCPIWSPLLLPSSSPLASVAPXTSPPSXLPPSPLLSLPPXPFXXLWLPXFPLXXSLPPSXPXXSVXPXFPSSSPPSXLSFLXPSSPXXPPPFSXPFFPPSPFPPRSPSPPFPXLPPPPPXPSXLPXPPPFLLFPSXPPPXPPPSPLPSPFPLFLPSPSLVFSSPPPPPSPPLP

SEQ ID NO: 246489 - protein, 136 aa, Zea mays
  unsure (1)..(136): unsure at all Xaa locations
  Clone ID: MRT4577_156383C.1.pep
NAPKCSHRKQETHNXLPLGIRLXSQIGLLKXLVRTIAHLFNAHIAVVLCIPVVCICFRCTLQYCLLQCTNRTCVPLLTXVYAGITLFRRSELETACXGFSNIIGTLPGFTLFKGLSHVXRNSCXVYIGGYAGXWSL

SEQ ID NO: 246490 - protein, 144 aa, Zea mays
  Clone ID: MRT4577_156384C.1.pep
LQLHVPVVCTACCDWVKPWGNPCFFPFLNPSAFSYPFCSCSKRPQRGPPLLPLVPTFNGELERRPCYPASLTALVCRGLLRRLPATFPIPLPPPYCPFFPFFFLPFSGFPRDFLIRVLLWGSLLGAFRGFYPKYFFKILFGVWG

SEQ ID NO: 246491 - protein, 50 aa, Zea mays
  Clone ID: MRT4577_156385C.1.pep
TFFCKKKKKKKKKKKKKKKKKKKKKKKKKKKKKKKKKKKNKGGPSKIFNP

SEQ ID NO: 246492 - protein, 123 aa, Zea mays
  Clone ID: MRT4577_156386C.1.pep
NELRSRFIQTPKGEGFNTKLIRKDKNYGGLNSRTGQTEIHPFPPKKRGGNFFKKIIWGGSIKGEGLPLPTYLVFLGLGFPDRLEKRGGLGLFPLRFLGRFMKLGKPLGANAFGGHLGVRRLRA

SEQ ID NO: 246493 - protein, 141 aa, Zea mays
  unsure (1)..(141): unsure at all Xaa locations
  Clone ID: MRT4577_156387C.1.pep
FTLGDIRPTFRLVGPTCFVPMIDTAIGIVXELGGHXNVHMLFDHGQFTLRVDSQYGQWSXRSGIHIGAIFRARELPLXIALAGTGDEPWVVVYQFDDNISVGKFDYFECAIFTEIMAQWIATDRMDAKCELSALLDIAYTV

SEQ ID NO: 246494 - protein, 64 aa, Zea mays
  Clone ID: MRT4577_156388C.1.pep
EKAAEYENGVKGAAKGLLNKLHDLQFDVGESMEDDAYGDSAYDKGGATDATFLSSFHGLNDIKC

SEQ ID NO: 246495 - protein, 48 aa, Zea mays
  Clone ID: MRT4577_156389C.1.pep
KKKKKKKKKKKKKKKKKKKKNFKKKKKKKKKKKKKNFFNFFPLARSKG

SEQ ID NO: 246496 - protein, 704 aa, Zea mays
  Clone ID: MRT4577_15638C.1.pep
MEGPPLPWQASLGTSGRRMNGVFLQLLVAAGRRRLPHLARLSPHRRRREGQSGGGFGFLSPKFNSSPNLIADVATTDHRGTLSLSRVSRVLACYSRQPAAAIVSVLGPRTSHVMGTVQLHSSAGAHADRRTRVFPAHKPAPRNVVVINEDDDGDVIIMEHAVARESASAAAALGSEARKGGGSSGDVINIDDDEDEKYGTRGDKAGPSMSRASGSPVAMTPGRGSPRNRYGFDCSYDSSESNLTKGWDSDTDDGSDCEILDDTTGTAWEMWETAASRKKPPHGVDECEDGGATAFTSCAGLETQPGKYSEHLFGVECHPKESMSWSYSVASKYGSQNSSDSTKESPGHAQSSSGTEKDVHGPSVPNTEECSTGDFSSTNGKESAKNRNDSGKDIPTECHLNDNISRSFSDARKEGLQNNTGRSKDHHDQFSAPNVKECSMVGSEKASRGVQLPRPDESSAYNFAPANRFFFSGILSVDRNDGSPPIFVSTPEKVDEKIPEDVYSQKDPSPPEASYNTNFYSAQDNGLAKGKDLLQDPKELGQFASVIGEREKHKESVEYKRAAEEEWASRHRQLQIQAEEAKKLRKRKKAEAQRLLDTQKSQRTRGQEVRESQRKNEEAIQLKERYRATVGKELEDIERRHCDMTSILHALGISVEGGEVKAFKQALLKFHPDRVSRNDIYQQVKAEETFKFISRLKEKLPRLS

SEQ ID NO: 246497 - protein, 48 aa, Zea mays
  Clone ID: MRT4577_156390C.1.pep
TTRKKPNSMPASRIAGGPRPAATHVDNGRELTATRRRHVSREKTEERS

SEQ ID NO: 246498 - protein, 220 aa, Zea mays
  Clone ID: MRT4577_156391C.1.pep
MAERWRSRARRDPDLDEDASPPSRQPRHSGGDEEDDELGNEDLSLEIVARAQRKRRGESAGGVPVFADLLSVSSADEEGAVVELDEADEPRRKQKKKQRRKQRKKHRKETTEAAAGAAVEVDENAVCSTEEGPIGTAESVLTENGADAPASDNMVLRKLLRIPRYFDPGETLLETCFNCSEEGHVAANCPLEKRKKPCFVCGLFGHNAKQCTQGQDCFIW

SEQ ID NO: 246499 - protein, 75 aa, Zea mays
  Clone ID: MRT4577_156392C.1.pep
FPRVACIYGGDRVSLQKVPNSDCYAVNNCLPRRPPIPSLIKKNHETLPFNGTKDRACECQISAQLSILLLTICLF

SEQ ID NO: 246500 - protein, 119 aa, Zea mays
  Clone ID: MRT4577_156393C.1.pep
LAPGAYARSGGRDRERAREIDRSSREARRWASNEDSRPGPSHRWWKCQPSWWQHASGPHSPRRRLGFSWGRFLAALQAGRDRAALVPRPPGLLPHQPGAPATQGSRGQGPSVVPVPRGA

SEQ ID NO: 246501 - protein, 111 aa, Zea mays
  unsure (1)..(111): unsure at all Xaa locations
  Clone ID: MRT4577_156394C.1.pep
MDECTGTGPYIARDQAKAGCWRVPRPHPQTSLRYIDAHNAADDAGVHXLRLGLNRFADLTNDEYLATYXISARTRPQRERKLGARYQAGDNEDLTESVDWRCKGAVRRGQG

SEQ ID NO: 246502 - protein, 177 aa, Zea mays
  unsure (1)..(177): unsure at all Xaa locations
  Clone ID: MRT4577_156395C.1.pep
MSKKRKHLDPANSLKDSEQVVASDFIRGDDLDDLLSKLIRSVEIAKASRGGLPEKIWMKQQFAIGVNDVTRVLERMPHSVTAHPAQMSNEAPTVSGRRQAPLVPLQAVLVAADCNPKWLTKHIPTLASTRQVPVLCVKDNKGGSVRLGHVXDVRTALAIGVRPKIAFSTDLMSPERQ

SEQ ID NO: 246503 - protein, 167 aa, Zea mays
  Clone ID: MRT4577_156396C.1.pep
MSKKRKHLDPANSLKDSEQVVASDFIRGDDLDDLLSKLIRSVEIAKASRGGLPEKIWMKQQFAIGVNDVTRVLERMPHSVTAHPAQMSSGAPTVSGRRQAPLVPLQAVLVAADCNPKWLTKHIPTLASTRQVPVLCVKDNKGGSVRLGHVVNVRTALAIGVKAKDSV

SEQ ID NO: 246504 - protein, 80 aa, Zea mays
  Clone ID: MRT4577_156397C.1.pep
TVCATRSPGRAHLLPHRPTDRTPGLVTREGGSAELTGGRDGVCGFGRARRRLQAREGAGRGHPKHELGAVMLKATDGPGG

SEQ ID NO: 246505 - protein, 36 aa, Zea mays
  Clone ID: MRT4577_156398C.1.pep
NEANLLKQLNWYFIGSFTYYTSLFFIVSVTLRPRVR

SEQ ID NO: 246506 - protein, 97 aa, Zea mays
  Clone ID: MRT4577_156399C.1.pep
PHPSPCQFQGTLGVGSTPILGQWVEFFRHQCSPRGTPYCFPKCQLFRQQCFHQLRQVEPQPRYQAIFGLVLQSILQQPTPCPYVAAGGVPPLKNYVL

SEQ ID NO: 246507 - protein, 122 aa, Zea mays
  Clone ID: MRT4577_15639C.1.pep
AGPLSRDLDRRLPDLVVAYSIDESEAAHPAHLLLDRIRGHELGLASRREGCKMHMHHRWCCACGACECTLASYRTRLVYTVPITSNATHDATCELPVESMPPRYHNACVYASNQKKKKKRGG

SEQ ID NO: 246508 - protein, 124 aa, Zea mays
  Clone ID: MRT4577_1563C.1.pep
AGRSGKPQPIPPPDDGAKSILLSIMTGPSALMLQSHLRMYIGLTTMTSRQGRYATQGRQLFPITQAPRIRHAERIWRLELPSKPITRYIYYSSLYIHISMCVTASRVLPGRYHKHRGRLGLRHS

SEQ ID NO: 246509 - protein, 70 aa, Zea mays
  Clone ID: MRT4577_156400C.1.pep
GAGRFHGLLLPPGGGHLRCAAAHAGVRDAPPGEGRRLLLLLLLARGRGRVLPVRVGHSGRGPVRLKLSRR

SEQ ID NO: 246510 - protein, 94 aa, Zea mays
  Clone ID: MRT4577_156401C.1.pep
SMHRSVSTPLWYATILDLHLVVLRIEADERACEHCGSYIEMSLHAFLLCSPFSISTLFVCRGILLCILSFVGVWGDPLLYLLCFSLFFIFYLFS

SEQ ID NO: 246511 - protein, 95 aa, Zea mays
  Clone ID: MRT4577_156402C.1.pep
GPDHSVLPKKLYRQLAESDYTCRSASPALDSMFQVTIGGGGSSRKILYACMVGRLYLSLFLDQQPFSCKLEGRVVVVEATLTVTASAPLGFAGIW

SEQ ID NO: 246512 - protein, 285 aa, Zea mays
  unsure (1)..(285): unsure at all Xaa locations
  Clone ID: MRT4577_156403C.1.pep
MELSLLNPAATHRHRGGLAGLPLARGSVGRFRVCASAGGTAPPKSSGGRKRGKTEIQETLLTPRVYTTDFDEMERLFNGEINKEVNQAEVDALLQEFKTDYNQTHFVRNPEFKAAADRMEGPLRQIFVEVLERSCTAEVSGFLLYKELGRRLKXLPAPFFVHFLDRLVGVCADALLFPLQKTNPVVXEIFSLMSRDEARHAGXHLPYLFSSIRGEIQLKVSCDLHSLFRFLNXGLSDFNLALXPGFLTKARXKYTFFKPKFIFYATYLSEKIGYWXRYITIFRHL

SEQ ID NO: 246513 - protein, 224 aa, Zea mays
  unsure (1)..(224): unsure at all Xaa locations
  Clone ID: MRT4577_156404C.1.pep
MASAMELSFLNPAGTHXTAGASPACPSRGAXVRFRVSASAGATAPPKSWGPKKRGKTEIQETLLTPRFYTTDFDEMERLFNAEINKQLNQAEFDALLQEFKTDYNQTHLVRNPEFKAAADRMEGPLRQIFVEFLERSCTAEFSGFLLYKELGRRLKKTNPVGAEIFSLMXRDEARHAGFLXKGLSDFNLALDLGFLTKARKYTXFFKPRFIFYATYLSEKXIGY

SEQ ID NO: 246514 - protein, 74 aa, Zea mays
  Clone ID: MRT4577_156405C.1.pep
VRCGGIYKKKKAAHPNQRTLSPPSQRASPAGTFPIHSANTRRLTLTRTRMPIQLALATVMCYPQDYYFPTHRLL

SEQ ID NO: 246515 - protein, 70 aa, Zea mays
  Clone ID: MRT4577_156406C.1.pep
QPNQGNKPLVSLFFIGPWNFYIHKTPTKPQLINRGKPLLIGGLKNYGGWALIETFAPPPRRETQGCRQLY

SEQ ID NO: 246516 - protein, 53 aa, Zea mays
  Clone ID: MRT4577_156407C.1.pep
VPSTLSTTSSPVASRCLRLQFQQRPPTTISISSSLPSPLCSYSTVRSSWRSKP

SEQ ID NO: 246517 - protein, 67 aa, Zea mays
  Clone ID: MRT4577_156408C.1.pep
AVVLGLLELSTTQEHFLLGGAIQGVGCVSISQCTPPNHSPTGGNTMSQKSSWCASRTTTFFLLRGRT

SEQ ID NO: 246518 - protein, 60 aa, Zea mays
  Clone ID: MRT4577_156409C.1.pep
RSILSYSLMPPRTSSIETSIINGRVADLHTHDWQNPIHFHPCLLRGHTSFFRWLIIHDVS

SEQ ID NO: 246519 - protein, 160 aa, Zea mays
  Clone ID: MRT4577_15640C.1.pep
LSPPPPRDISTSPPPPWSPASLQATASASRPPPPPPGTTTSSATATPTPRWPLRPSASVSRAAAAVPAPGDDASPKFLGVETKTIKKIVPLGLMFFCILFNYTILRDTKDVLVVTAKGSSAEIIPFLKTWVNLPMAVGFMLLYTKLADVLSKEALFYAVI

SEQ ID NO: 246520 - protein, 95 aa, Zea mays
  Clone ID: MRT4577_156410C.1.pep
WVRNRHDPCKNNRVELGPCQPARGSARPGTILYRAGLRLLPLVPGPAGPIPVVRGNCRWYSNNHKLDVAFRYNRKKYRIELSLRTMQPYREEDSQ

SEQ ID NO: 246521 - protein, 217 aa, Zea mays
  Clone ID: MRT4577_156411C.1.pep
MAGAGDKVDYVFKVVLIGDSAVGKSQILARFARNEFSLDSKATIGVEFQTRTLVIDHRSVKAQIWDTAGQERYRAVTSAYYRGALGALLVYDITRRQSFDHIPRWLDELRAHADKNIVIMLVGNKSDLEEQRAVSTEDAKEFAEKENLFFLETSALQATNVESAFQTVLTEIFKIHSKKNMVSEPKSNGAAPAMPGTKVLVPGPAQEIPKSKCCSSM

SEQ ID NO: 246522 - protein, 40 aa, Zea mays
  Clone ID: MRT4577_156412C.1.pep
WNNALISSSVYVCRQNHVFILLLCVHAHFLCNALLVIYCE

SEQ ID NO: 246523 - protein, 99 aa, Zea mays
  Clone ID: MRT4577_156413C.1.pep
AASDGDSPSASYSPAWFPPPGPHGEGCNDATDNNDSPLFPLSNNQSNQGKKETALKDYTGSLAIISEIEPKDAIMQLLMQETYSRSECSKFIKIIQERV

SEQ ID NO: 246524 - protein, 100 aa, Zea mays
  unsure (1)..(100): unsure at all Xaa locations
  Clone ID: MRT4577_156414C.1.pep
YPIRKYGEDLDSPTNLRDSDPASGKTVLPNKHSVRLAVAFGLISSEPGTPILVKKNVRVCKHXDRGLKLISKYSRRKIVVGDTKIYHIFSDGSCCCGDYW

SEQ ID NO: 246525 - protein, 104 aa, Zea mays
  unsure (1)..(104): unsure at all Xaa locations
  Clone ID: MRT4577_156415C.1.pep
MAAAALLRRSPAARALLSPALSSRLVASKPHSSSPTQPPPGXWGASSARTFSISRWDPVSPSSMPHLXSARGGLAGCGPLVLGALLMLASVRAPSLPFRRRCRR

SEQ ID NO: 246526 - protein, 64 aa, Zea mays
  Clone ID: MRT4577_156416C.1.pep
QRVERTVLAAVLAVAGGRRTPWTARHCCRAKLFIWLSNCMSYWVSYRIRLYMPTWTPVCSGSVT

SEQ ID NO: 246527 - protein, 43 aa, Zea mays
  Clone ID: MRT4577_156417C.1.pep
HHTKHINKIHNNNLHVATKSWKQESLNSELRLPSYGFLKLFST

SEQ ID NO: 246528 - protein, 235 aa, Zea mays
  unsure (1)..(235): unsure at all Xaa locations
  Clone ID: MRT4577_156418C.1.pep
MKFAAAATILAASAAVAAPTASKITDVEILNYALTLEHLENYFYSHYLEQFSAQDFEAAGFPDWVRGRISQIAGHEAQHVELLSGALGDAATKPCTYKFPVTDVKSFTALATIIENVGVSAYLGAASSITDPAYLTVAGSILTTEARHQXLDRXTVQKGAAWSGPEDTPLTFDSVYSIAAAFITECPSTNPALPVKAFPALTIAADGTVTSSVDVEGKFIAVYAGLVANTFPIKG

SEQ ID NO: 246529 - protein, 38 aa, Zea mays
  unsure (1)..(38): unsure at all Xaa locations
  Clone ID: MRT4577_156419C.1.pep
RVRFVCNYMGILMXIYMRCNXMDCMMVIXRNICNEWRW

SEQ ID NO: 246530 - protein, 50 aa, Zea mays
  Clone ID: MRT4577_15641C.1.pep
ILLLFGFIKGLLVEVTRVGLLHWWELHYVSDLVAAALLCMGTCRAKAFIG

SEQ ID NO: 246531 - protein, 66 aa, Zea mays
  unsure (1)..(66): unsure at all Xaa locations
  Clone ID: MRT4577_156420C.1.pep
SXTFYSTLALSIKRLTLHTDRAMATASEFLTPKRQHPAISKCWLYQKTVRMLRAYKWGMPRCIWKS

SEQ ID NO: 246532 - protein, 54 aa, Zea mays
  Clone ID: MRT4577_156421C.1.pep
RSIKHTHRCRGPNTTQKTDVGIFLLCLRLSLGGSGIAGLANVASCVTDPYGGWA

SEQ ID NO: 246533 - protein, 77 aa, Zea mays
  unsure (1)..(77): unsure at all Xaa locations
  Clone ID: MRT4577_156422C.1.pep
DAWASSTFISWVRFLSKANFQAWLKKSPRCAPSALGLRCSVRHREGGHSSPAKFFYKVTXKKKNFIKKLTKKKKEKN

SEQ ID NO: 246534 - protein, 107 aa, Zea mays
  Clone ID: MRT4577_156423C.1.pep
LTPGFKLFRETNTVDSGSAAGSKDYVHVRIQQHNGRKSLTTSHRLKKEFRYSKIITDLTTEFCCNDTVCHDPELGQVIHLQGDQRKNAYNIILQAGIANTEHIEIHG

SEQ ID NO: 246535 - protein, 92 aa, Zea mays
  Clone ID: MRT4577_156424C.1.pep
AAAAPSSRRRIAGAVAGICAFLCLSRVPANSRTRAGTQTARGRRGPVPAWVRPFQVAPIRDGTAAALTAGPTFLGRCLRRRPFPLLRSLGHG

SEQ ID NO: 246536 - protein, 218 aa, Zea mays
  unsure (1)..(218): unsure at all Xaa locations
  Clone ID: MRT4577_156425C.1.pep
MLQRNLLCHPQMNSMGCHQHTPSLCFAPYALRLHDCQTRQQFWPTAFCDSDAYYLEQCYCWTQQRGWSLPTCLYFGRYPLPRPAGQTQTRQQNPPLSPPPPVAFPAPRPRPPSTSXPPXSPSSPSSSPPSSAPPPPLSPPPSAAPPRGATTSSXPPXPAWGAAAWRMRASPLRPPHPLHAPPPRLCRLGGACGASASTFCARAPWLLLRDRPRPASRY

SEQ ID NO: 246537 - protein, 1151 aa, Zea mays
  Clone ID: MRT4577_156426C.1.pep
MASARKVRNANKRYAKINEDWQDKDTPSVPKSKVRKKKLSDMLGSQWSKDELERFYGAYRKYGKDWRKVAGTIRDRTSDMVKALYNMNKAYLSLPEGTATAAGLIAMMTDHYNILDGSNSDRESSDSPKASRRLQKRGRAKLQSVSKTSDTHFTDLLQPQPASSSYGCLSLWKKKRSGDLFVGNRPRAVGKRTPRVPVASMYHRDDRGAPNRQAKPDANDGDDEGAHVAALALAEVHQRGGSPQISHTPRRSGDHMFLSPAKSSGRKNADSEMGSSKLHGFQLDADYPEGSLGSREAETGDYTKGTSYLIANKGSPSSKPQKKVKRPQKRRKKAVRRTDDQFEDDREACSGTEEGCSMKKAKEEPELETLGTKTAWPSSTSNKRSRQLFFDDESLARPALHTLADLSVNILQPSSVVESESSAQIKDEKRDNDSDGKPGIPAAAVSVYEQKDNSKSTSKKLKRQPEMASTDMVTRKKGKLAKDTHPDGSTTSEVKQQACTCGVKTEKKKKSSMGKILKDEKKMPKDVEKTEVSPEEEKTSSNKTMDIAETTTQVATTLHADLMAKGKSRRKLGIQKSLTQECKPAEGAGDSGSDKLSYSLSNIIDLKDKLSHCLSSRLLRRWCMFEWFYSAIDYPWFAKSEFVEYLNHVKLGHVPRLTHVEWGVIRSSLGKPRRLSKQFLHEEREKLAQYRDSVRQHYTELLSGVREGLPTDLARPLAVGQRVIACHPRTRELHDGNVLTVDHNQCRVQFDRPELGVELVKDIDCMPLHPLENFPESLRHQSAINGYYSHLSEAKYEDQMKELASGGAARSTSNLNGTDATFYTPSGHPMSTLMKQAKANTAVNEVAVATQQSMYNQPCTLSQIQEREADIRALGELSRALDKKEALLVELRHMNEEVSGKQKDGEIIKDLEHFRKQYAMVLVQLRDSNDQVAAALLSLRQRNTYHGNSGQSKSMENGIALAGAPDPYNLFSYINPESGSQVIEVIETSKSRAKMMVDVAIQAMCKVSEGENAFSKIGEALDHLNSRGTGSGSSILGIRRIPPDSGQSNASYHDDCTAAPAANSSSRLPNGCDSEAQFPKELISSCVAMMLMIKNCTEKQYHPAEVAHILDSALSSVQPCSSQNIPIFREIEMCMGIIKNQMLALIPTPSG

SEQ ID NO: 246538 - protein, 215 aa, Zea mays
  unsure (1)..(215): unsure at all Xaa locations
  Clone ID: MRT4577_156427C.1.pep
MFWRMTGLSAASPVDTILDKENFTLEELLDEDEIIQECKALNTRLINFLRDKAQVSQLLRYIVEEVPEDSEKKQSFKFPFIACEIFTCEIDIILRTLVEDVELMDLLFSFIKPDHPHSTLLAGYFSKVVICLMLRKTAPLMNYVQEHPDIVVQLVDLIGITSIMEVLVRLIGADETIYLNFADTLHWLENTDVLXEMIVDKFSSSDSPEVHANAA

SEQ ID NO: 246539 - protein, 68 aa, Zea mays
  Clone ID: MRT4577_156428C.1.pep
TQIGSRNLEAASDYLRIQSWHSNSQWQLSSPHYIPGTIGPTTESEPPTKLNPRLGLIHPRLNPSPAIT

SEQ ID NO: 246540 - protein, 62 aa, Zea mays
  unsure (1)..(62): unsure at all Xaa locations
  Clone ID: MRT4577_156429C.1.pep
MAAASMGITSRALVGKAAAGTRDVFGEGRITMRSTRAKPKPAASGSRWYGADRVVXLGPLSG

SEQ ID NO: 246541 - protein, 176 aa, Zea mays
  unsure (1)..(176): unsure at all Xaa locations
  Clone ID: MRT4577_15642C.1.pep
MAADGGGGVDWESLAEATSGAIGSLVSTTVLYPLDTCKTKFQAELQTHQGAQNYFKRLYLEKSGAKSIGTTANLLVAAAAGACTVIVTQPLDTAASRMQTSVFGKSKGLRETLAEGTWMEAFDGLGISIILTCNPSIQYTAFDQFKERILHRQXQNAGSAEDNSGVALSAFSAFLL

SEQ ID NO: 246542 - protein, 504 aa, Zea mays
  Clone ID: MRT4577_156430C.1.pep
MAAEPPAYLLLLPLIAIPLIVFLVLSRRRDDQRRFPPAPWALPVIGHLHHLAGAPPHRALRDLARRHGPLMTLRFCELRVVVASSPDAAREILRTHDVDFASRPIGPMLQLVFRGAEGLIFAPYGDGWRQLRKICTLELLSARRVHSFRPVREDEVGRLLGSVASAAAAGLPVNLSERITAFVADAAVRAIIGSRSEHRDEFLRLLMDGLKIIPGLSLPDLFPSSRLAMLVSSVPGKIERRRKGLLDIVDPIILEHQEKRAAGGIDEDEDLLDVLLRLQKDMDSQYPLTTDNIKSVLIDMFGASSETSATTLKWTMAELMRNPAVMRKAQDEVRGALAGHDEVAEDSLVNLRYLQLVIKETLRLHPPAPLLLPRECRSPCQVLGYDVPRGTMVLVNAWAIGRDPALWDAPEDFVPERFEESGRDFKGMDFEFIPFGAGRRMCPGMAFGLAHIELALAALLFHFDWKLPEGVVAEEIDMAEAVAITAPPRSDLVVLPVTRLPVSI

SEQ ID NO: 246543 - protein, 115 aa, Zea mays
  Clone ID: MRT4577_156431C.1.pep
RGGPFAVQACPTAGKEDRFGPHRNNPRRAEGVPGARRFKWGPAGFYPSPHGKRRPLNCSSTRPGRKGPCRNTPLAGARPRDHPFFFSLVLFSADGSFFFFFFFFFFFLFFVFFFF

SEQ ID NO: 246544 - protein, 87 aa, Zea mays
  Clone ID: MRT4577_156432C.1.pep
RRNIGSASGVRLLGSPPPPRLLTVTARCGVNLVVSRRREARGFLLLPPPCVALRTRRDKRGGAVLPPSLPGREAEGKAQSATLFGFF

SEQ ID NO: 246545 - protein, 131 aa, Zea mays
  Clone ID: MRT4577_156433C.1.pep
NCVEKAPQKRPDIDMVINNLKDRKTHRFKSTWTSSFRQDGRMYGSYMPYSNRYLNKLMSGSICTETKFYRREKLPNVGEEFLIGRKEEKQKIVASLLQSMTQHITILPIYGIGGIGKTTIAKLIYYDKNFN

SEQ ID NO: 246546 - protein, 88 aa, Zea mays
  Clone ID: MRT4577_156434C.1.pep
SKKSSGWCRPQLKSYFDLKPNTPLITMAGFFAYLFESPGHHQRRLPCPSSATMTVALIQACSQGHNPLSEGDSSTFPLPEQPTPYWHA

SEQ ID NO: 246547 - protein, 122 aa, Zea mays
  Clone ID: MRT4577_156435C.1.pep
RARALFLSPYAPWGGGPPVRGSKCWGGGEKYPSRRARWRLLLKKTRTSRFFSIWGGGPPCVSSPQQCPGRPRSFMGLIKCASFGLVVVMGLGSSFCGVAPCVSVLHQVLRLSTLQNGRLGTG

SEQ ID NO: 246548 - protein, 217 aa, Zea mays
  unsure (1)..(217): unsure at all Xaa locations
  Clone ID: MRT4577_156436C.1.pep
MREKDACWEYGDKLDGNRVRCRFCQKVINGGISRFKFHLSQIPSKGVNPCVRVTDDVREKVIALIEAKESHRELELLKRKRVAELSVLPKRTRELPSQPSSPGLPTSPAIIPAFEPSQLLGLEVPAPVLRLSGAATKPRPASGLEVERCIAEFFFENKLDYSIADSISYRHMMDTLLXQEFQGPSADVLRTXGFKVKSEVLQRTQRSKRMGNYRLYY

SEQ ID NO: 246549 - protein, 185 aa, Zea mays
  unsure (1)..(185): unsure at all Xaa locations
  Clone ID: MRT4577_156437C.1.pep
MSWWWTGAIGAVKKRQDEQAGGAEPSYQSVALVVGSTGIVGTSLLDILPLSDTPAGPWKVYAVSRRPLPPWSPAPSPAVTHLHLDLADSAAVAEALQPLTDITHVFFVAWTSRPTEAENREANSAMLRNVLSVVVPNCPALVHVCLQTGRKHYVGPFEAIXGRRXDPPFTEDMPRLDCPNFYYDM

SEQ ID NO: 246550 - protein, 95 aa, Zea mays
  Clone ID: MRT4577_156438C.1.pep
YFLFSIQSLHGHLNIYHEYSQLPQISHCFPSYALLRKLCLHMSHHCQLLRLESAMKHAALCEAHALQLCYFSSHVRRVACSTHVFHRSSLCVRLK

SEQ ID NO: 246551 - protein, 73 aa, Zea mays
  Clone ID: MRT4577_156439C.1.pep
VKVLHVLKWRGLPSQRVANCRLTMFSKIQIPISFMFVKSWKRKGLIAEILFQGNPRMPLYSTQKKKKKKKKKI

SEQ ID NO: 246552 - protein, 59 aa, Zea mays
  Clone ID: MRT4577_15643C.1.pep
SHPLHIPLTAVKTLNKEHPNMNGSLLQHTSDSSFYLLHLILIQHHSYGHLTIQTILSYS

SEQ ID NO: 246553 - protein, 537 aa, Zea mays
  Clone ID: MRT4577_156440C.1.pep
MGAAAAGGHALRAVGDVVSFPATVAAFVEALLQGWAEARAGLLVPLLRAAVLLCTAMSLIVLAEKVFLGAVSSVAKLRRRRPGRVCRCDPDEEAAAASQAYPMVLVQIPMYNEREVYQLSIEAACRLTWPVDRLIVQVLDDSTDSVIKELVKGECERWATEEGINVKYETRKDRAGYKAGNLKEGMRHAYVRACEFVAMFDADFQPPPDFLVRTVPFLVHNPSLALVQTRWKFVNANDCLLTRMQEMSMDYHFKVEQEAGSSLCNFFGYNGTAGVWRTQAIVESGGWEDRTTAEDMDLALRAGLLGWEFVYVGSIKVKSELPSTLKAYRSQQHRWSCGPALLFKKMFWQILAAERVSVWKKWYMVYDFFIARRIVGTFYTFFFFSVLIPLNILLPEAQIPVWELIYIPIAITLLNSVGTPRSIHLVILWVLFENVMALHRFKAILIGFLEADRANEWIVTQKLGNLQKLKSIARLTGSYRFKDRFHFLEVFIGLFLLASACFDYLYRDDYVYLFVLPQSIMYFAIGFQFIGLNVSED

SEQ ID NO: 246554 - protein, 52 aa, Zea mays
  Clone ID: MRT4577_156441C.1.pep
RTLWNGALLSFYEAQSVMRHRRSRERLLDGCIASKERVCVPLCTRTSCEETM

SEQ ID NO: 246555 - protein, 69 aa, Zea mays
  Clone ID: MRT4577_156442C.1.pep
GDKKEKMKAGERGMKSKSTKGGHNRVSPEKAKLNPRQPEDFNLQNKRGMALYYCVINILSPKVSAPFFF

SEQ ID NO: 246556 - protein, 77 aa, Zea mays
  Clone ID: MRT4577_156443C.1.pep
PIHAPSASGFASINERLDIVVGCARGSHCCWCVVRWPPPPAGAGSSQYLVIYVGSVAIHAQSEYSAMQSPVFYSIKQ

SEQ ID NO: 246557 - protein, 80 aa, Zea mays
  unsure (1)..(80): unsure at all Xaa locations
  Clone ID: MRT4577_156444C.1.pep
APHARMEGTQVHSWQDVXSESXDLFITTSGNKETIMVDHMRKMKNNASACXNIGHLDNEHDVLGLETYPDVKRMTTKPQT

SEQ ID NO: 246558 - protein, 90 aa, Zea mays
  Clone ID: MRT4577_156445C.1.pep
AANLAFGAHCESSTLVIPYCDGLSVSYILWVENASDVICNWLAAIRHDGLAGQMVYICFYFCGISFLICIADRGMDLVLDILGVPTCTEM

SEQ ID NO: 246559 - protein, 110 aa, Zea mays
  unsure (1)..(110): unsure at all Xaa locations
  Clone ID: MRT4577_156446C.1.pep
CCVYTPAPVTEGTVVIHAAEHLENYAKTKEAMVEELIKACTNSGAKVTASAXAVGDMRLHFVERNKVTXMKMSSKLELRRVXRTTVAGEIEKLSRPYADQLGYGDSVSAD

SEQ ID NO: 246560 - protein, 77 aa, Zea mays
  Clone ID: MRT4577_156447C.1.pep
RSAGLELTPVSATARRTDGALGVSRATLLLTGNVVSTVYRLCAAPFLGRSRRKERSDNALRTVRTDDHTSYHWIPLC

SEQ ID NO: 246561 - protein, 66 aa, Zea mays
  unsure (1)..(66): unsure at all Xaa locations
  Clone ID: MRT4577_156448C.1.pep
GEVKEEKPLAPSTLLFVLPCRQENVKGTPSPTGSYEGGVYLIYFFFGFFFFFFFFFFFFFSXXRPS

SEQ ID NO: 246562 - protein, 60 aa, Zea mays
  Clone ID: MRT4577_156449C.1.pep
MTIIMPTYLGTYIVYTRYASNALEALPNGHITDDRTSDFIRLHYRQSVVRPRMTTAHMCC

SEQ ID NO: 246563 - protein, 335 aa, Zea mays
  Clone ID: MRT4577_15644C.1.pep
MAADGGGGVDWESLAEATSGAIGSLVSTTVLYPLDTCKTKFQAELQTHQGAQKYRNLSDVFWEAIRKKQFLSLYQGLNTKNIQSFVSSFFYFYGYSYFKRLYLEKSGAKSIGTTANLLVAAAAGACTVIVTQPLDTAASRMQTSVFGKSKGLRETLAEGTWMEAFDGLGISIILTCNPSIQYTAFDQFKQRILHRQRRQNAGSAQDGPGVALSAFSAFLLGAVSKSIATVLTYPLIRCKVMIQAADPDEDDDDEPGRPSKSRTPKTMLGALHAIWSKEGIPGFFKGLNAQILKTVLSSALLLMIKEKISKFTWVSLLALRRYLFVSQKRIKSATV

SEQ ID NO: 246564 - protein, 105 aa, Zea mays
  unsure (1)..(105): unsure at all Xaa locations
  Clone ID: MRT4577_156450C.1.pep
ASRRSKKPKNSKMTQPELTTSKPMLTPGIDIRAHSHNGDFFVPNRLTWLSAYNNIADVIDRSNXACVRQQXVRFIQHTKTDKGRTKKITEPNPMKGPTHIYYQLE

SEQ ID NO: 246565 - protein, 213 aa, Zea mays
  unsure (1)..(213): unsure at all Xaa locations
  Clone ID: MRT4577_156451C.1.pep
MASLLRMKAVTGLSGLSRVAASRVALSHSATLCQRGAIDPQRRLFSNSGFLNGSYIVSVPPMAESITEGTLSSLSKKVGEAVEQDEEIASIETDKIDVLVNASEPGAIAEYFAEEGDTVVVGQDLARIVTGEDAGSAKKSEGGEQKPAKXSPRRKNPSLPSNPPXEEKKSSPAQDAPKPSKPAESKPASKESKSAAPAQSSAPNRGERVEKMS

SEQ ID NO: 246566 - protein, 117 aa, Zea mays
  unsure (1)..(117): unsure at all Xaa locations
  Clone ID: MRT4577_156452C.1.pep
AASVFSEQXMGKTLVSRTQGSRNAIRXGLKHRVFEGSLADLQGDEDQAYRKIKLRAEDVQGRNVLTNFWGMNSTTDKLRSLVKKWHTLIEAHVDVKTTDNYMLRSFCXWFTKERPNQ

SEQ ID NO: 246567 - protein, 86 aa, Zea mays
  unsure (1)..(86): unsure at all Xaa locations
  Clone ID: MRT4577_156453C.1.pep
MDRATMSSNAASTVLNKGKQKQAKDELDRQKHAEKKRLLLEKALGNSAAIISELEKMKRGKKEEQXRLDDEGAAIAEADALDVLIR

SEQ ID NO: 246568 - protein, 114 aa, Zea mays
  unsure (1)..(114): unsure at all Xaa locations
  Clone ID: MRT4577_156454C.1.pep
GWSNTRRRRVCPTVSPCPRSSGVSALMPXXPSRTVTLACSHLARALPPWLLVCGAPCVSIAWGAGALRALTGRQAKRWWGATRRRAAVSVYLVRTTLCRDLRTADGFALLSWSY

SEQ ID NO: 246569 - protein, 95 aa, Zea mays
  unsure (1)..(95): unsure at all Xaa locations
  Clone ID: MRT4577_156455C.1.pep
MVLMIHSVASDDAGAYDDNAEEPVTRNVDPDLHDNYQXLIAKDHXLIYVQRLGKXYNDDYKHAYQISVLKVNLHLARQLHMIDPXSDHGITKLFD

SEQ ID NO: 246570 - protein, 42 aa, Zea mays
  Clone ID: MRT4577_156456C.1.pep
GTQRAALGDGSVYYRGQISHSGALHVVRRLATHYIILSQWDD

SEQ ID NO: 246571 - protein, 69 aa, Zea mays
  Clone ID: MRT4577_156457C.1.pep
IWFRVQTFPAPNKQFYLPETGTLTGLAWYHWIIINPTVVSRSAALYLVLPHQCATHKYGWVQENILAFF

SEQ ID NO: 246572 - protein, 55 aa, Zea mays
  unsure (1)..(55): unsure at all Xaa locations
  Clone ID: MRT4577_156458C.1.pep
KGIYILQKSGGDGXCGTYNIRDNNEKYICTCNLEHLVSVSAKNTKMSSKISRARS

SEQ ID NO: 246573 - protein, 112 aa, Zea mays
  Clone ID: MRT4577_156459C.1.pep
ALAQQSLSYYRLLQLAAGEREELDLELSLQPCSDLAAEAAPSGFFVCTYCDRKFYSSQALGGHQNAHKYERTLAKRRRENVDFMRAHGARQDDPYDAYGHHEMMRFTLVEAR

SEQ ID NO: 246574 - protein, 335 aa, Zea mays
  Clone ID: MRT4577_15645C.1.pep
MAGDAGSGVDWESLAEATSGAIGSLVSTTVLYPLDTCKTKFQAELQTHQGAQKYRNLSDVFWEAIRKKQFLSLYQGLNTKNIQSFVSSFFYFYGYSYFKRLYLEKSGAKSIGTTANLLVAAAAGACTVIVTQPLDTAASRMQTSVFGKSKGLRETLAEGTWMEAFDGLGISIILTCNPSIQYTAFDQFKQRILHRQRRKNAGSAEDNSGVALSAFSAFLLGAVSKSIATVLTYPLIRCKVMIQAADPDEDDDDEPERPSKSRTPKTMLGALHAIWSKEGIPGFFKGLNAQILKAVLSSALLLMIKEKISKFTWVSLLALRRYLFVSQKRIKSVTV

SEQ ID NO: 246575 - protein, 260 aa, Zea mays
  Clone ID: MRT4577_156460C.1.pep
MERPAQAPTQLPPGFRFHPTDEELVVLYLRRKALARPLPAAVIPVVHDVAGLDPWDLPGASEGEGYFFSLRRAPATGRGSRRRRAGSGYWKATGKEEPVFLQCGGGGVGGKRQLLVGGKTALAFHRSEPSPPSSSRTGWVMHEYRLAAASRGVAEQRKKNASHGCCDAEPGEWVVCRVFLKKGARRSRPGRDGNHSRALRHRASAAPPQLREGVGGRQPLLFPAPQSPSSSCVTGVTDLSDEEDEVSSGSITRVAPQREA

SEQ ID NO: 246576 - protein, 80 aa, Zea mays
  Clone ID: MRT4577_156461C.1.pep
PAGSGTHTPETTESPPRTNHEHPPGTHHSYRAVVAGAVSGTSVLNEPHNALHAAASSMFSMRLSEAYHYSLCMHQLLDML

SEQ ID NO: 246577 - protein, 202 aa, Zea mays
  Clone ID: MRT4577_156462C.1.pep
MGFDKNKLTESLQKRLQNEATVAYYLLLDNKLRTTSGYLGAEYQESMDSSFSQVSPETPSSASEARQYGSPGFGLRHHFAAERKWALGLQSRAHPREIITEVLKALQELNVCWKKIGHYNMKCRWSPGFVETMMHNNNGFGVESAIIEADGLSDKSTHIVKFEIQLYKTRDEKYLLDLQRVSGPQLLFLDLCSAFLTQLRVL

SEQ ID NO: 246578 - protein, 122 aa, Zea mays
  Clone ID: MRT4577_156463C.1.pep
TQVAPEAFWRRARLPGRHAKRHSHHPPAGRGTWRLAPRAARRGGPNQGLTANRAGRMTWRATSSRWSRCNGPERERTFGPNDPSSDRSRPQTATPGQAALPAEFMHIIKRMTRIPQGLPYYQ

SEQ ID NO: 246579 - protein, 60 aa, Zea mays
  Clone ID: MRT4577_156464C.1.pep
LTISSTISMKNTNPSSVQQYTLFLTCLQIRSALPITSLPQLNLNPSVLDKITMLPLKLVQ

SEQ ID NO: 246580 - protein, 105 aa, Zea mays
  unsure (1)..(105): unsure at all Xaa locations
  Clone ID: MRT4577_156465C.1.pep
LENVRNLVHSKIQKESTLQLVLRXLRXGMNIFVKSLTDKXITLQVXSVCTMENVKYKIQIKEGIPTVQXGLLFIGKXMHDGSTLADFYIXKKNTLHLVISLHGGQ

SEQ ID NO: 246581 - protein, 402 aa, Zea mays
  Clone ID: MRT4577_156466C.1.pep
IRHQAHFRTHGETILDEAIAFARSRLEMMLPYVKGPLLAHEVRSSLEIPLPRRVRIYESKYYIHAYDTSGTLHEKVLQLAKLNSNVLQLHHQQELKILTRWWEDMQIGSKLPFARDRIVECFLWILGVYYEPCHSRARIILTMVIAIVTLLDDIFDSFATPQECEILTNCIESWDPKGAQDLPGCMKFALEKILDSYQTITNMLHREDKYRMTYLRHFTEDLVRIFNMEVKMLQKGYIPDSVEEHLKVSLRTGGCPILSCACFVGMDDIATKDFFDWISSVPKMVRALSIILRLADDLHSYEREQLIPHVASTIDTYMKKHNVSIEVAQENIHKLKEESWKDLNSEWLNPCNDVYPKQLLERIFNLARTMEFMYNQEDNFTNCHNLKDTIRCLLVEPYTIHI

SEQ ID NO: 246582 - protein, 152 aa, Zea mays
  unsure (1)..(152): unsure at all Xaa locations
  Clone ID: MRT4577_156467C.1.pep
TSVPAETIVDGGARSCSLLSDTLIRITDLXGRDDRLRLPGXMQATTSXRNDAAAYPVIVVAPELPQRXHDLGITVLHINLHATQRNETKTPVPAAQSALRTLAHSEMKIPPIEHVTPRPTDITRRKGGHYTKAGVCVSSAVNLPSLGRGAIM

SEQ ID NO: 246583 - protein, 67 aa, Zea mays
  Clone ID: MRT4577_156468C.1.pep
GRAGLFCACLLLQVSTRGYGRSVLALLSSLELDDIQAALWNVRGHLRVSGRTCYRGSYLMNANLVDI

SEQ ID NO: 246584 - protein, 72 aa, Zea mays
  unsure (1)..(72): unsure at all Xaa locations
  Clone ID: MRT4577_156469C.1.pep
KSFYGRTQTKTRVHPIWPRKKMLINCQRPAPIKIMERSDSTKTSSPIKLGVLHLDWPRLKMLNCHKTSSNKX

SEQ ID NO: 246585 - protein, 593 aa, Zea mays
  unsure (1)..(593): unsure at all Xaa locations
  Clone ID: MRT4577_15646C.1.pep
HGPYLCPKHTRCHSCGSGVPGSGHSTRWFLGYTCCDACGRLFVKGNYCPICLKVYRDSEVIPMVCCDVCEKWVHIECDGISEEKYQQFQADQNLQYTCAACRGECSQIRDTEDAIRELWKRRDVADHELMATLRAAAALPSLEDVSPPYQNSDDEKLGAYALKNESRNTLKFSLKSNSSKPPPDTPEQEKIVFKSSGSNKKPSKKKSGQANKTVDGHDEIFLERRHAVKSSNSCLGDQTIDDNHDMSPFKNDDNAYISSSTRSSEKNLKSPSMKAVTNNADMIPKVKIKGSKVSSLHYKDGEENTSKTDTGKATKLVIHLGSRHKTRSGSPKSELSNYQREQDLGSIHGRKIDVTSQLKGSRSEVKERSVMKLVRETGVQQRNSLLGDLGTSKKHATGKRSNALISGMENGNETGTRNRPFAQKQSHSSQVDENQGTADSPDNLKPSLLKLKFKRPHYEQLNTQASQPEEPTSWVSQQEEQLNVAKGQRSKRKRPSMEKADGLDGITPAKRHQQSXRDEVMDANWILRKLGKDAIGKRIEVHLTSDGKWHQGMVSNVMGGTLCIRLDNGRSENVELGKQAIRLIASRSKGGKR

SEQ ID NO: 246586 - protein, 45 aa, Zea mays
  Clone ID: MRT4577_156470C.1.pep
YIRWRVNSSIKLCIKSQTPQTLISIISCHSKLRHLIVFHYTVQVH

SEQ ID NO: 246587 - protein, 44 aa, Zea mays
  Clone ID: MRT4577_156471C.1.pep
YHNSNKHHDHHRRLLIALCVERLINPYHHSKLQIEHPFSKSPNL

SEQ ID NO: 246588 - protein, 131 aa, Zea mays
  Clone ID: MRT4577_156472C.1.pep
MASIAGSSALSFARPVKAINTNSLAFSPARKGNTFLRLRPMPMRSVSCAAKKDTTDKVCEIVKKQLALPDHTEVCGESKFSELGADSLDTVEIVMSLEEHFDISVEESGAQTIATVEDAADLIDKLVAGKA

SEQ ID NO: 246589 - protein, 234 aa, Zea mays
  unsure (1)..(234): unsure at all Xaa locations
  Clone ID: MRT4577_156473C.1.pep
LGPSRPGGIVLYSGDGVTHVVPIYEGFALPHAISRVDMAGRDLTDYLMKILAERGYTFSTTAEREIVRDIKEKLCYVALDFEQEIQTASQSSSLEKSYELPDGQVITIGNERFRAPEALFQPSVLGLESGGIHVTTFNSIMKCDVDVRKDLYGNIVMSGGTTMYPGISDRMQKEITALAPSSMKVKIIAPPERKYSVWIGGSILASLSTFQQMWIXSKQEYDESGPSIVHRKCF

SEQ ID NO: 246590 - protein, 131 aa, Zea mays
  Clone ID: MRT4577_156474C.1.pep
MASIAGSSALSFARPVKAINTNSLAFSPARKGNTFLRLQPMPMRSVSCAAKKDTTDKVCEIVKKQLALPDHTEVCGESKFSELGADSLDTVEIVMSLEEHFDISVEESSAQTIATVEDAADLIDKLVAGKA

SEQ ID NO: 246591 - protein, 240 aa, Zea mays
  Clone ID: MRT4577_156475C.1.pep
MRSAASSTVAIVCALDSSTLMSKCSSRPITISTVSSESAPSSENFDSPQTSVWSGRASCFFTISQTLSTVSFLAAQETDLIGTGCRRRNVLPFLTGEKAREFELIALTGMAKERAEDPAMEAMCVKAINTNSLAFSPLRKGNTFLRLQPMPMRSVSCAAKKDTTDKVCEIVKKQLALPDHTEVCGESKFSELGADSLDTVEIVMSLEEHFDISVEESSAQTIATVEDAADLIDKLVAGKA

SEQ ID NO: 246592 - protein, 179 aa, Zea mays
  Clone ID: MRT4577_156476C.1.pep
LSGPDGPIIAAFPNSIDTHPPKTLLFAKYFIEYFSIGVGISLNAGEEYKLPNLRPTYRNGNSKRNSIQATHSIQKYCYDTGIILNYDSLPYYSSLLPCGFTPLLKVKATLRSYKGSVSEPGHHTGVNLSRNLSDWKGDSQRSLKKDGLRGMSNCSFELSFSARRIQVISKGATHKTVCL

SEQ ID NO: 246593 - protein, 63 aa, Zea mays
  Clone ID: MRT4577_156477C.1.pep
YQARRDPAGKKSLWLTYRFINDHRLRPLPRPELVIAVFACASMQTATDVQVLYEAQHICCTHR

SEQ ID NO: 246594 - protein, 35 aa, Zea mays
  Clone ID: MRT4577_156478C.1.pep
WLHVPPRDRPMMSSAPNVCSAPTCTFSCSSMTKYD

SEQ ID NO: 246595 - protein, 85 aa, Zea mays
  Clone ID: MRT4577_156479C.1.pep
IFLFLTPCPQTGNVGGPLETPKFLFFRALWAPRGFFLKKLCFRLFPLFGGGVYFKPLQKSGGPGYPCFPLFGFSLFPTFGLLATP

SEQ ID NO: 246596 - protein, 95 aa, Zea mays
  Clone ID: MRT4577_15647C.1.pep
NRYGPWMDTNLAVPLDATRCKVVFDYFLNESLLDDQDFIDRSLKDSEQVQIEDIALCEGVQRGLESPAYGVGRYAPSVEMAMHHFHCLLHANLSG

SEQ ID NO: 246597 - protein, 85 aa, Zea mays
  Clone ID: MRT4577_156480C.1.pep
VLNDRYLALVAIRAFYKVDARRCHGQARWLLIQAPTLVAYIEILIFLSVFEWSKAVYGSCGDEMGPLGKLYGLFRKYDRAKSFDI

SEQ ID NO: 246598 - protein, 43 aa, Zea mays
  Clone ID: MRT4577_156481C.1.pep
PPRIFPFFFFFFFFFFFFFFFFFFFFFFFFWATQKGYRFPFLI

SEQ ID NO: 246599 - protein, 50 aa, Zea mays
  Clone ID: MRT4577_156482C.1.pep
QAAAETHMTISEHLSATSLYGKPSLSSKNSNNSSYTHCLCLNLQRTLRNL

SEQ ID NO: 246600 - protein, 76 aa, Zea mays
  Clone ID: MRT4577_156483C.1.pep
TYLLGRNAAWRWRRMEDTLNRTMGIYHACCKGNKERKRVHSRTVWDGLCGLENRLHDIGSRDRDMDFWSGSSNELD

SEQ ID NO: 246601 - protein, 60 aa, Zea mays
  Clone ID: MRT4577_156484C.1.pep
SPILYIPVRRAAQKAPCQSRHSPARSRRHSGLKQPSHLCRLASYDSTYAITAHDNALTCK

SEQ ID NO: 246602 - protein, 101 aa, Zea mays
  unsure (1)..(101): unsure at all Xaa locations
  Clone ID: MRT4577_156485C.1.pep
ARARTLEIGLEVSGSSGFYVANQLKDQQGVMPGHRGSNLKRDLHRFIPTAAAFXGGLCIGALTVLAVFMGTMGSGTGILLAVTIIFHCFVTFDKEMTSTLA

SEQ ID NO: 246603 - protein, 67 aa, Zea mays
  unsure (1)..(67): unsure at all Xaa locations
  Clone ID: MRT4577_156486C.1.pep
DYETLRATSERTXDDDIASIHTECQTDERRDEVRMGYPRGGRGQVLTAALTLKKTVPWYVRADTTPR

SEQ ID NO: 246604 - protein, 85 aa, Zea mays
  unsure (1)..(85): unsure at all Xaa locations
  Clone ID: MRT4577_156487C.1.pep
GVSYIHGSXSSAQLVMESYIIMVLYGCVVVGMILMNEAPLMAGGESKKKTFLAVGGLGMFVLFFSFLLSVFRSKAHGYPYSLLFS

SEQ ID NO: 246605 - protein, 113 aa, Zea mays
  unsure (1)..(113): unsure at all Xaa locations
  Clone ID: MRT4577_156488C.1.pep
MEILFKTLTGKTINLEVEFSXIIDNVKAKTQDNEGIPPDLQRITFGGQQLEDGGTLADYNLLKESTLHLDLRLMGGIHTFVTTLTAKTITLQVXSSDTIHKVKDHLPPHDGIP

SEQ ID NO: 246606 - protein, 92 aa, Zea mays
  Clone ID: MRT4577_156489C.1.pep
RQTCRGGLQTEELCFFFFHTHTTQYLCMGASSALLIIVQPPPQAWLIIIIFMVVDRCDQHLQGLHFEPLPQLQPGGGFPDFGGGFINTGAGF

SEQ ID NO: 246607 - protein, 54 aa, Zea mays
  Clone ID: MRT4577_15648C.1.pep
LEPSPEGKRRRQYRAGHIGKTARCQTNQEITNIYAGQTHDIGIRTQITGGTRRI

SEQ ID NO: 246608 - protein, 63 aa, Zea mays
  Clone ID: MRT4577_156490C.1.pep
AGHTSVYTKSRYTHPLRASAFWPFSPRPTSPLRRSVRFLNSSPSRTFSSLRSPRRNPEEESVA

SEQ ID NO: 246609 - protein, 48 aa, Zea mays
  Clone ID: MRT4577_156491C.1.pep
VKRGGSHYPCEWLLPNFRGPGTCCIAEMYYTGHAWHMIRLSCAGTAPA

SEQ ID NO: 246610 - protein, 53 aa, Zea mays
  Clone ID: MRT4577_156492C.1.pep
TSSYSTCPASTCASPGVYGMSVVSDGRVSLILWSGRVRFFKSQMCPDEKGYRI

SEQ ID NO: 246611 - protein, 349 aa, Zea mays
  unsure (1)..(349): unsure at all Xaa locations
  Clone ID: MRT4577_156493C.1.pep
MEALRAWRASSNLIGFAASRAAASASRPLGLRIRCCSAAAATTNPPAQPQDRRRRSASSSASTSDRDSIRAIRLKKVEELRGKGYEPYAYRWDRTHTTKALQEQYTHLMNGEVCEXTCRCPLAGRIVARRXFGKLVFMTVKDDAGTVQLYCEKDSLTEDQFEQLKAFIXDIGDILGXASGSIKKTEKDKYHGLTDVDKRYRQRYVDMIANPKVADVFRTRAKVVSEIRKTMESFGFIEVETPVLQGAAGGAEARPFITYHNSLQRDLYLRIATELHLKRMLVGGLEKVYEIGRIFRNEGISTRHNPEFTTIEVGVPPLKICLYKWITFILASMNDSMYEAYSDYESMMN

SEQ ID NO: 246612 - protein, 77 aa, Zea mays
  Clone ID: MRT4577_156494C.1.pep
CPIMVKGGSTTEAVVGHTAGSAVDGRYTDGHGLPLTARSLTGWLPRHEAQSDYTTSHAALHGGDTQIHYLPQSCLIL

SEQ ID NO: 246613 - protein, 583 aa, Zea mays
  Clone ID: MRT4577_156495C.1.pep
MEALRAWRASSNLIGFAASRAAASASRPLGLRIRCCSAAAATTNPPAQPQDRRRRSASSSASTSDRDSIRAIRLKKVEELRGKGYEPYAYRWDRTHTTKALQEQYTHLMNGEVCEDVSVSVAGRIVARRAFGKLVFMTVRDDAGTVQLYCEKDSLTEDQFEQLKAFIDIGDILGASGSIKKTEKGELSVYVKNFEILTKSLLPLPDKYHGLTDVDKRYRQRYVDMIANPKVADVFRTRAKVVSEIRKTMESFGFIEVETPVLQGAAGGAEARPFITYHNSLQRDLYLRIATELHLKRMLVGGLEKVYEIGRIFRNEGISTRHNSEFTTIEMYEAYSDYESMMNMAEEIVTRCAMATHGKLKVDYEGTEISLERPWRRETMHSLVKEATGIDFNSFGQDVESAKRAVRGLPGFVVGNSESTSLQACSSVGHVLNEVFETFVESTLVQPTFVLDYPVEISPLAKPHRSHVGLTERFELFICGREIGNAFSELTDPIDQRSRFENQIKQHNAKRAAMAKEVKSTEGEGDDDYSYEVSLDEDFLTSLEYGMPPASGMGLGIDRLVMLLTNSSSIRDVIAFPVLKIQQ

SEQ ID NO: 246614 - protein, 269 aa, Zea mays
  Clone ID: MRT4577_156496C.1.pep
MGHRDLGPFLRQSFSSRDKTEERTGRASMASSRCFENPPALEPASGGGEVVDDFGGQKAYVSGSAGSKAAVVLISDAFGFEAPNLRKIADKVASLGYFVVVPDFLHGDPYDPSNNAHSNPGTWIQSHNPQTAFEEAKPVIAAIKEKGVSSIGAAGYCWGAKVVVELAKVHEIQAAVLAHPSLLSVDDIKEVKCPISILGAEIDRSAPPELLKQFQQVLSANPEVDHFVKVFPGVAHGWAVRYSDDDAAAVTSAEEALRDMSHWFNKYLN

SEQ ID NO: 246615 - protein, 86 aa, Zea mays
  unsure (1)..(86): unsure at all Xaa locations
  Clone ID: MRT4577_156497C.1.pep
LTCDQHGSRHLAPLHCVRQVRXXRPQPQANNKARTKAALRSWYIAGTNMGTAHRLVAVRGERVQRLVVHAHPTRSGSATRSSPGAR

SEQ ID NO: 246616 - protein, 90 aa, Zea mays
  Clone ID: MRT4577_156498C.1.pep
KSKQERTTWRRHGAWRTALSLLVFATLALLDADTVACLYPVLELAEPTMMAVLPPVVGAVAGYLFMEFPNNRHGVGYQPTPDTLDLQYKY

SEQ ID NO: 246617 - protein, 107 aa, Zea mays
  unsure (1)..(107): unsure at all Xaa locations
  Clone ID: MRT4577_156499C.1.pep
QQPLTLFQXLPWVHWGGQNITAQQLQHLVLANLAAYSQXQHHILPFNQLGALNSAAYLQQQLPFRQLVAAYTQQYVSFNQLAXXLNSAAYLQQQQLLPFMQLSDVSP

SEQ ID NO: 246618 - protein, 108 aa, Zea mays
  Clone ID: MRT4577_15649C.1.pep
TTPSPTSTSTSWNTQNLLGSGLLYHTITILTTLLISTFKVKHVANCTQVYNISKNTYDQKISIRHLPLLMITSPNITQKLINISIQHHTLLPITCLMNLTVYMIIRNL

SEQ ID NO: 246619 - protein, 226 aa, Zea mays
  Clone ID: MRT4577_1564C.1.pep
RTLVPACSSPAQGRGLQPFLLPAPPCFFPPCCFSSGIKSRRAQPLLTVAGALISVELLLCHGRRQFLPAQLPAPRSLSSRSFSSPRSASVSPCSRTAARSAYHRKLATPLDACFLSARRPCACSLGSPLPWPYAAELQAPTRIFLPRLPSHELAPASASCSPWRLASSFLRTGSLLQLPRASELAPAPASPMAGDTPVLCAARTLSLPLWRAVLCSCVPQSSSLVA

SEQ ID NO: 246620 - protein, 99 aa, Zea mays
  Clone ID: MRT4577_156500C.1.pep
MYLFCMAQTRSRFARCPVSGSGRRGGATMAGSGPVAPTHSALSGKAASPNDAAVAAPAHPKVKLKESGRVDRSLPFKRRRKVVRVQQHGGCRAGHRRGW

SEQ ID NO: 246621 - protein, 55 aa, Zea mays
  Clone ID: MRT4577_156501C.1.pep
VYRHDEFFSTALSFPNLMVSRHFTLGLIYPPLSHVSSETAIITAPGSIIFPLGHK

SEQ ID NO: 246622 - protein, 139 aa, Zea mays
  unsure (1)..(139): unsure at all Xaa locations
  Clone ID: MRT4577_156502C.1.pep
YLGMMMAVQGAFADRSSALLTVQTFLSELPSLQTRVEKLEAASSKVFGGDKSRIRKIEELKEPIKVTEDAKNVAIKGYERIKENNXSEVERLDRERRADFMNMMKGFVVNQVGYAEKMGNVWAKVAEETSQYDREKQSS

SEQ ID NO: 246623 - protein, 64 aa, Zea mays
  unsure (1)..(64): unsure at all Xaa locations
  Clone ID: MRT4577_156503C.1.pep
KKKXXKKNLCFIFLFFFFLGERKKYSFFSRQTNCVLTKISSSWYSVDFWCGTTCCRTHTHHRLH

SEQ ID NO: 246624 - protein, 102 aa, Zea mays
  unsure (1)..(102): unsure at all Xaa locations
  Clone ID: MRT4577_156504C.1.pep
MAAADVEYRRLVSGLAXATTNXSLENAFGSYGEILDYKVITDRKTGRGTYFRLYTLYYKNSMLDAILNMNRLELDGQDITVNAGPEMCLRSCCGSYCRCRGC

SEQ ID NO: 246625 - protein, 139 aa, Zea mays
  Clone ID: MRT4577_156505C.1.pep
DAWALIKDMHMNWSSSARVLSDSVQKIPNNELISSIARFQNYIVFCDTDGQRVLKHDLDTKTTSTIQFSDCEVLGLPYWSVCNLERVSTWGYSSGQLQEHAQQVDVLPGRCNITVYVDIPVGTELAAPLVDNCIWRQVR

SEQ ID NO: 246626 - protein, 101 aa, Zea mays
  Clone ID: MRT4577_156506C.1.pep
DSFHLNREKKAIGKTKKWGDPTWGREHWNSCFHGPEPPVMDLAKKLSKLVNEHQTGGMIHGTRTIYNLSKLFRTPFVLWIQGMSWFTLSTASRTAATPSWN

SEQ ID NO: 246627 - protein, 81 aa, Zea mays
  Clone ID: MRT4577_156507C.1.pep
MADIALLVTEQFDKKLKRGAPGEDIGGGAGEYRRNFGAVAKVWSSWVESAAAASGVRFSVAVHLEPKTALALAAADGLFSA

SEQ ID NO: 246628 - protein, 82 aa, Zea mays
  Clone ID: MRT4577_156508C.1.pep
MADIALLVTEQFDKKLKRGAPGEDIAGGGEYRRNFGAVAKVWSSWVESACTYNTMRGSPVYSFFASPALIDMRICLIVFSLS

SEQ ID NO: 246629 - protein, 138 aa, Zea mays
  Clone ID: MRT4577_156509C.1.pep
KKKKIRGLLNKMFLLYIPLLAIFLLFFLSLNSIFWLFFSPFLLLNPCLYLTYFLCLIISFLPFCFYQLSGPLPFCSFLICLLHFFYVLYLLSLSSCSVLFILPVAFVVFLPPHSCSPFTFCPLAPYLPLFPFCFYFPF

SEQ ID NO: 246630 - protein, 73 aa, Zea mays
  unsure (1)..(73): unsure at all Xaa locations
  Clone ID: MRT4577_15650C.1.pep
PIPCTIVHLSILYNLVLTNNSVSGEIPKVFGSLKKLTQLDLSDNHLSGNISEELVXRLSRLTXLDLSHNELSG

SEQ ID NO: 246631 - protein, 57 aa, Zea mays
  Clone ID: MRT4577_156510C.1.pep
SKHALVVLSLLLKHNSEVNSNQTPTNPPNNTECKQENNSAYQCTASQIMLDRGAHIQ

SEQ ID NO: 246632 - protein, 51 aa, Zea mays
  unsure (1)..(51): unsure at all Xaa locations
  Clone ID: MRT4577_156511C.1.pep
GFFXXXXXXGQITEYFVILFNVLYIFYQNTFDLHFSQIIDFLLFLFWFGLI

SEQ ID NO: 246633 - protein, 185 aa, Zea mays
  unsure (1)..(185): unsure at all Xaa locations
  Clone ID: MRT4577_156512C.1.pep
FLGISVFNILXGGDGQLDLAREADRLFWSMRRAGVPPSVVTYNTMHRVYFVVLLXXXAFWGGGLIPXTSXRNGGGGGGGKPNEETYNTMITIYGKSLEDEKAGRLVQEMQAIGVQPDAITYSTILSIWVKAGKLDRAAFFFVKQTPTCSEIDPGLDHTXGGAXERAGLVLQAKRLFRDLKDPGGI

SEQ ID NO: 246634 - protein, 225 aa, Zea mays
  Clone ID: MRT4577_156513C.1.pep
MEDYFSRFLNLGWQLRQYLTELIENLVRTINRIPQRLGVQFSASHGGSLTGTTVYFHERASTLSVNTTTTTEKQTANGTSEGAIFRKGLSSIYERSCVRSSYLLHGFMLVRRLAFSVRDLWNLFSSEVHAKLTRILHRFWTTLQGSCEDIGWLQRTRASLRSVDGTGRFKEILHEIRNGVHCPPDTLIYLFIPGLFSNHSPLYFTNTKRFFSKMGLACHIAKIHS

SEQ ID NO: 246635 - protein, 89 aa, Zea mays
  Clone ID: MRT4577_156514C.1.pep
KRAGGGGLRKQVSVASLPCSRFVVDASISKNRASPIGPGATAVGGLYSVVGSTLSRRRKRLLVELRSCGRIYASQSQRRWTAFGLSWTA

SEQ ID NO: 246636 - protein, 125 aa, Zea mays
  Clone ID: MRT4577_156515C.1.pep
QFNKDGGHIVLERSLGSWWIIGYAISGINTIGSAIALGASTVDAFVRSLVFHSLEAAPFYVQQVQTRHDWHLLIPFFELGSINMVPKDLGPLFKCEVELLVRIRASPCVEGTCLYNGSNSASTSH

SEQ ID NO: 246637 - protein, 154 aa, Zea mays
  unsure (1)..(154): unsure at all Xaa locations
  Clone ID: MRT4577_156516C.1.pep
MPTAPSVELVETKVDKDKAERSKTEEVTKMPEILSPSTEATAPKTQESSATTPKRRRMANVLDVVLETAKTLNPAPTRKITEASKAQPEAETKQAEVEATIIQTETKAGPSEPTEIELVEIEEKAIEEKATEQISSEKVATYAPEAXKESIDYI

SEQ ID NO: 246638 - protein, 69 aa, Zea mays
  Clone ID: MRT4577_156517C.1.pep
TWDAPKILLFSPEPEKGNNTAPYSFLKQGISCTSFFYNLETSKDPTNNHGLGGFSATTRSFSWILGPTG

SEQ ID NO: 246639 - protein, 70 aa, Zea mays
  unsure (1)..(70): unsure at all Xaa locations
  Clone ID: MRT4577_156518C.1.pep
PPPXPXAVXSAGLXXGVPAXXXXLSSPXXXARGPSRRGWXXGRARPXLLPARARPRRRXGGKLCRXXVVV

SEQ ID NO: 246640 - protein, 73 aa, Zea mays
  Clone ID: MRT4577_156519C.1.pep
APHQSTVSRSACSVRFLEPVLPGKSCRIDCSCTTTMVFTHIFVCVSVPCMAESDHVIYKEGECASGIHACPRC

SEQ ID NO: 246641 - protein, 104 aa, Zea mays
  unsure (1)..(104): unsure at all Xaa locations
  Clone ID: MRT4577_15651C.1.pep
IRFEPSSETALSSKRQYWMSMGELKDLKKHLTGRQEDDYILMSSXPYGANSVFVQMKDSSQREHVGYELLKEVTGKNKNSVPHIENLIYQPTRARVYSKTDLHL

SEQ ID NO: 246642 - protein, 227 aa, Zea mays
  Clone ID: MRT4577_156520C.1.pep
MAMMMRALAAAAILATAFAVSARAEPPQCGANSTTALCPYCLCCSKWGFCGSTEAYCGNGCQSQCDRCNATVASIVTRELFDELLLHRNDLRCPAQGFYTYDSFIAAAGADASDGFGTTGAVDIRKREVAAFLAEPAHRTSGGWDGAPNGTYAWGFCYKPAGAQNVTDPVAFFETAIASWMTASARPPKPSCHDVVTEQWTPSDADKAAGRLRGFGVIANIINGDAE

SEQ ID NO: 246643 - protein, 52 aa, Zea mays
  Clone ID: MRT4577_156521C.1.pep
QRRVLGVCVRVFTILTLNQNTTDQKTIYISYGMGFIFYTAVYLINVVFFYLL

SEQ ID NO: 246644 - protein, 219 aa, Zea mays
  unsure (1)..(219): unsure at all Xaa locations
  Clone ID: MRT4577_156522C.1.pep
PGPPPMPRRRKKKPSWPKPRXPPGGPPKNPKTPXPLPPGFPPSPPXPGPPGGNRDPPGCQGKKGLXWANSWPKYPVPPRVQLGNQPPRGPPPGGPGPAPKVPFPGGVLPGAGPWGSKRNQPWAWGFGFGFLFPKVCFKGVPLAKARVLFKVVRGPASKGSSLCRPGSVRVLFWFQVKNPGRLGCWVRGLLNYNPRPVVKKKKKKKKKKKKKKKKKLEGG

SEQ ID NO: 246645 - protein, 80 aa, Zea mays
  Clone ID: MRT4577_156523C.1.pep
KCQPIIPDPQLINPKYFHPLEKKHNTHSQKNRSAKGDPLEKKHSKQTQKLRLRRLVRQHRHLKNPRKAGAILVQEGRTPA

SEQ ID NO: 246646 - protein, 90 aa, Zea mays
  unsure (1)..(90): unsure at all Xaa locations
  Clone ID: MRT4577_156524C.1.pep
RILGVIXPTXTXRFTXTMXXVRTGPRKHXTKGQXFXTXHNXSLXDIWRXTRPGFFSKXTGKYIGGXKLEXGLGNXYXSXGGXPANKIHGT

SEQ ID NO: 246647 - protein, 149 aa, Zea mays
  Clone ID: MRT4577_156525C.1.pep
EQLRSGILQQKSFIHNQQQLQQQIQMLTPQQQQQLMLHAQQNMSSPTSSDVDNRRLRMMLNRNAVLGRDGQTNSGSDIIPNIGSPSQSGGDIDMLIKKLAQQQQLLQQQSNSQQLPQQHQLQQPAVSSQQSQSSNQHLQQEKPGIGSMP

SEQ ID NO: 246648 - protein, 69 aa, Zea mays
  unsure (1)..(69): unsure at all Xaa locations
  Clone ID: MRT4577_156526C.1.pep
LCLADYPKAFSDLKVXELINGRLAMFFMFGFFVQAIVTGKVPLLYLADHIVDPVNNNAWSYATILVPGN

SEQ ID NO: 246649 - protein, 71 aa, Zea mays
  Clone ID: MRT4577_156527C.1.pep
AWPALPQPCGAPAFAVCAAADTSSGQNSAGEHLPAVRSGHPMTSAADLSGVRNKGGRTWRLGSEPRLAERR

SEQ ID NO: 246650 - protein, 62 aa, Zea mays
  unsure (1)..(62): unsure at all Xaa locations
  Clone ID: MRT4577_156528C.1.pep
LSXHMESMIQMITCKKLMDGGHSLKMCGSSITVSDHGYIHYSIHTTYTHSKWVPSNYFPLYS

SEQ ID NO: 246651 - protein, 74 aa, Zea mays
  Clone ID: MRT4577_156529C.1.pep
HRIRQRSIADSTVVDGDSFACCRARRFLFLVLVRFPARLRALSACLVLIPIASSILPVIVVRRRPRLALYHYGL

SEQ ID NO: 246652 - protein, 157 aa, Zea mays
  unsure (1)..(157): unsure at all Xaa locations
  Clone ID: MRT4577_15652C.1.pep
ASRKGXTRSMDISTDSVANEFLDMLAIEHIPFGQPSDSDPESPRERLWKQFEKEALASDKAILGLDFDDGIEGPICENVVEDFDLSAMIHEAELELQNGSQPIDTKFRAKSLEDEETEALMRQFGLNEKSFQSSPPESRSGFGSPINLPPSRIGTRS

SEQ ID NO: 246653 - protein, 100 aa, Zea mays
  unsure (1)..(100): unsure at all Xaa locations
  Clone ID: MRT4577_156530C.1.pep
ASTTNGKNILNSAYQQTHSKGSAFPIFLFFLLNTIVQLVYFAXMTDSVDYDKTLXYFQHDKFNVSFFFXSHFLXDLPNNYLNHIILYYNEYNLFTNILYT

SEQ ID NO: 246654 - protein, 93 aa, Zea mays
  unsure (1)..(93): unsure at all Xaa locations
  Clone ID: MRT4577_156531C.1.pep
EQQRKRSFKRARGKRCRGVRFLCTWQYTYNGHQNKICDXMFDAVLHTCLAQDPNSKVVCXTCSNTNKVVVFREITTNASEDYHKIVRVTCLLI

SEQ ID NO: 246655 - protein, 114 aa, Zea mays
  Clone ID: MRT4577_156532C.1.pep
MAGRSFLIRSPKEEESNAAVREAVLLGAKNAAIAGTVVAVPTLVGCRVLPWAKANLNYTAQALIISAEASSRNKQPEILLVCLTACIAGFFITADKTILRNARQNTIGKLDKST

SEQ ID NO: 246656 - protein, 54 aa, Zea mays
  Clone ID: MRT4577_156533C.1.pep
KIKMKSEGKKEKYLPFIHSVLCYNDVNLIWLEMANYVPAGAGPVDSDSTEPFFC

SEQ ID NO: 246657 - protein, 76 aa, Zea mays
  Clone ID: MRT4577_156534C.1.pep
WTSTSMVGSYFFSTAPVRCLSTNVVLPVPPSRKISSVEAMEFSGPVMRAAPFRSHATGAARDIQAFGQDRLLSLLC

SEQ ID NO: 246658 - protein, 97 aa, Zea mays
  Clone ID: MRT4577_156535C.1.pep
MASRSFLIRSPKEEESNAAVREAVLLGAKNGAIAGTVVAVPTLVGCRVLPWAKANLNYTAQALIISAACISGFFITADKTILRNARQNTIGKLDKST

SEQ ID NO: 246659 - protein, 97 aa, Zea mays
  Clone ID: MRT4577_156536C.1.pep
MAGRSFLIRSPKEEESDAAVREAVLLGAKNAAIAGTVVAVPTLVGCRVLPWAKANLNYTAQALIISAACIAGFFITADKTILRNARQNTIGKLDKST

SEQ ID NO: 246660 - protein, 98 aa, Zea mays
  unsure (1)..(98): unsure at all Xaa locations
  Clone ID: MRT4577_156537C.1.pep
MAGRSFLIRSPKEEESNAAVREAVLLGAKNAAIAGTVVAVPTLVGCRVLPWAKXANLNYTAQALIISAACIAGFFITADKTILRNARQNTIGKLDKST

SEQ ID NO: 246661 - protein, 75 aa, Zea mays
  unsure (1)..(75): unsure at all Xaa locations
  Clone ID: MRT4577_156538C.1.pep
LTYIFFFFXXPRRGFFNHAGVPKDETGDAQTCDRCSCKSIRVTTSRHNAGPHTTLINIVHRTQRISLTRESGADL

SEQ ID NO: 246662 - protein, 494 aa, Zea mays
  Clone ID: MRT4577_156539C.1.pep
MAMAARLLRATEVASRFLSASHGFVQRAAYTAGGIVDVGQPTPQSHPELLADGEITPGITNEEYISRRKKLLEVLPEKSLAIIASADQQMMTDVVPYPFRQNGDYLYITGCTQPGGVAVLSEETGFCMFMPDTNKEDLVWQGETAGVEAAVDFFKADKAFPLSQMQKILPELIEQSKGVYHNVNTTSSYKNLDAFRRASLNNKVKDLTNYTDELRWVKSKSEIKLMRESASIVSQSLLQTMLMSRTHREESQLAAKIEYECKMRGAQRMAFHPVVGGGANGSIIHYSRNDRKIRTGDLLLMDVGCEYHGYLSDLTRTWPPCGRFSPAQEELYSLILETNKECIKLCKPGTSINEIHNHSVKLLIKGFQELRILEKGKSIQYNYLNPTAIGHSLGMDIHDSMTLPKDKPLEPGVVITIEPGVYIPAAPVLNERAPSRYRGMGIRIEDEVLITDDGHEVLTASVPKEVSHLTTLMNMGRGGSAADAHGHELRAACS

SEQ ID NO: 246663 - protein, 169 aa, Zea mays
  unsure (1)..(169): unsure at all Xaa locations
  Clone ID: MRT4577_15653C.1.pep
RGTAETPKDGAPRRSNPPRRFGPTAPRGPPRHPPAQRLLQAQPHPSGRLPTPEQLQTDHPAPAPGLQRHPXRMPQAAARGGHRPWIRRRTAARAESSDPPPPSRASSMIEDEGEASEKGGWLRGGGRGGWGCGWGGRGGEGPVRRRTRRDDGVGMPRRRRRSSSGLGGP

SEQ ID NO: 246664 - protein, 478 aa, Zea mays
  unsure (1)..(478): unsure at all Xaa locations
  Clone ID: MRT4577_156540C.1.pep
MAMAARLLRATEVASRFLSASHGFVQRAAYTAGGIVDVGQPTPQSHPELLADGEITPGITNEEYISRRKKLLXRQNGDYLYITGCTQPGGVAVLSEETGFCMFMPDTNKEDLVWQGETAGVEAAVDFFKADKAFPLSQMQKILPELIEQSKGVYHNVNTTSSYKNLDAFRRASLNNKVKDLTNYTDELRWVKSKSEIKLMRESASIVSQSLLQTMLMSRTHREESQLAAKIEYECKMRGAQRMAFHPVVGGGANGSIIHYSRNDRKIRTGDLLLMDVGCEYHGYLSDLTRTWPPCGRFSPAQEELYSLILETNKECIKLCKPGTSINEIHNHSTXPKKIYQMQVKLLIKGFQELRILEKGKSIQYNYLNPTAIGHSLGMDIHDSMTLPKDKPLEPGVVITIEPGVYIPAAPVLNERAPSRYRGMGIRIEDEVLITDDGHEVLTASVPKEVSHLTTLMNMGSGGSAADAHGHELRAACS

SEQ ID NO: 246665 - protein, 89 aa, Zea mays
  Clone ID: MRT4577_156541C.1.pep
NPLTGLLKKLHTAPPSGPMAWSPPGFRFKGRARPSTFKGPPGVPSVKPYFLEKGRNPLFFPYFMWRGQGGPPLIIWPGPSVPLVCSFPP

SEQ ID NO: 246666 - protein, 101 aa, Zea mays
  unsure (1)..(101): unsure at all Xaa locations
  Clone ID: MRT4577_156542C.1.pep
QHLPFSQIGIAYRQQYQPTNRRAAMSSLAYXQQQQVLPFSQLAGVSPDALLQQAQLLPFNQHDAPNAGTVWHLQQLLPFNQLALTNTAVFWQQPSIGGVLC

SEQ ID NO: 246667 - protein, 183 aa, Zea mays
  unsure (1)..(183): unsure at all Xaa locations
  Clone ID: MRT4577_156543C.1.pep
PRDIRLGDFGLAKPLKADDLASSVVGTPNYMCPELLTDIPYGFKSDIWSLGCCMYEMAAHRPAFKAFDMAGLISKINRSSIGPLPTFYSSSMKTLIKSMLRKSPEHRPTXLLSKEIYLPCNCNTCLSRTFIRFLEYLLHFCLQASEIIKNPYLQPYVNQYRPFANILHPGRSPTNQKRNKTDL

SEQ ID NO: 246668 - protein, 99 aa, Zea mays
  unsure (1)..(99): unsure at all Xaa locations
  Clone ID: MRT4577_156544C.1.pep
SKEHSALQNQCIYEEVIEACALHVDILAMTRGDMSHIGEKGTNLSGGQRARLALARALYHNSDVYLFDDILSAVDSQVASCILEKAIMGAXLMQKTRLL

SEQ ID NO: 246669 - protein, 108 aa, Zea mays
  unsure (1)..(108): unsure at all Xaa locations
  Clone ID: MRT4577_156545C.1.pep
MRDIKGDILWCMIFTDDVVLVDESREGVNRKLELXSXTLESKGFRISRTKTEYMRCDCGTTISEDGDVSLGDQVVPKKDTFRYLGSMLQRDGDIDEDVSHRIKMGWMK

SEQ ID NO: 246670 - protein, 167 aa, Zea mays
  unsure (1)..(167): unsure at all Xaa locations
  Clone ID: MRT4577_156546C.1.pep
PVVPRPEVQSFFFFFFFFFFFYFFFFFFLRAISISPGGAPRGAGGGTKRGGGKGKGGGGEKKKGGQKGKQGRGRKQKEPKXKKKKKRANKKKKEGANRQKKKKKTRRARSKKDPPKKKKKAARKKEKKPPHGGGRGWARTPPPRQPNQRTEGGGSGEPEKLVFTQER

SEQ ID NO: 246671 - protein, 137 aa, Zea mays
  unsure (1)..(137): unsure at all Xaa locations
  Clone ID: MRT4577_156547C.1.pep
SAPLKAIDFGLSVFIEEGKVYKDVVGSAYYVAPEVLRRNYGREIDVWSAGVILYILLCGSPXFWEETQKGIFDAILADELDLVSSPWPSISESAKDLIRKMLNKDPQRRITASQALEHPWLKGGAPDRPIDSAVLSR

SEQ ID NO: 246672 - protein, 92 aa, Zea mays
  Clone ID: MRT4577_156548C.1.pep
NKNNNKNKKKANKKNTSPLSLPIMSYQFKLYHNSYRFSIYMPKSMRDASDYNFYIFLLPRLATTYLPLFKEFFVNRFEVSLVLPEFTSVTLS

SEQ ID NO: 246673 - protein, 84 aa, Zea mays
  unsure (1)..(84): unsure at all Xaa locations
  Clone ID: MRT4577_156549C.1.pep
RGPXHPTPPAHADRYFSSAGREEDVGPTSSNTIDGIMNGVIKEKLKIIPKDVRWVEVSNAIYYTLVNDFMKPRIDDASKLLYMN

SEQ ID NO: 246674 - protein, 70 aa, Zea mays
  Clone ID: MRT4577_15654C.1.pep
GPFFFFFLFDYLILPLHPTQKKRVLRGCKSNFLRKFPKPGIRRDKQETNGFERGIGYAFLSFFFFFFSAC

SEQ ID NO: 246675 - protein, 49 aa, Zea mays
  Clone ID: MRT4577_156550C.1.pep
ARNSARATETTTFFIRRPWPDGGGSYMTGPLGSPQETRISEAGDLWLSC

SEQ ID NO: 246676 - protein, 39 aa, Zea mays
  Clone ID: MRT4577_156551C.1.pep
KEFEDLPNHYAETNAVFSSDEQLIFSGTSIEKDGDIGGL

SEQ ID NO: 246677 - protein, 89 aa, Zea mays
  Clone ID: MRT4577_156552C.1.pep
MPRVVCGSGPGGLGPTPTKGEERGRGEMPHRARPMTGLLVFMGVNLALFNTITPVYDFVCFLPHWERRREHRRRELEGLQAKGSVETTN

SEQ ID NO: 246678 - protein, 62 aa, Zea mays
  Clone ID: MRT4577_156553C.1.pep
KISFIRDQTKNTGPNQHYHAKHTVWKQGKSMPKPYTSTPQSLLTTYLSTYETHTTHPERRQP

SEQ ID NO: 246679 - protein, 89 aa, Zea mays
  unsure (1)..(89): unsure at all Xaa locations
  Clone ID: MRT4577_156554C.1.pep
SGGEEXXEXXPXNGERTGSSPXXETGGXAARXXXXKGGGGGGXXFFLXKGTPGRVRAPSARTLPHHEAPSTSXVVWECRPXRAVNSVQG

SEQ ID NO: 246680 - protein, 56 aa, Zea mays
  Clone ID: MRT4577_156555C.1.pep
IEELKNDASYFRRRGKPPHHRAVLRRPRPPPTPFCPYYRPPLPLSIFHHPIPTSYY

SEQ ID NO: 246681 - protein, 108 aa, Zea mays
  unsure (1)..(108): unsure at all Xaa locations
  Clone ID: MRT4577_156556C.1.pep
PSRPIATVCMFLAGKLKXTPRASEDVILLSYEIIHKXDPAAVQRIKQKEVYEQQKELILLGERVVLVTLGFDLNVNHPYKPLVEAIKIFKVAQNALAQVAWNFVNDGG

SEQ ID NO: 246682 - protein, 64 aa, Zea mays
  Clone ID: MRT4577_156557C.1.pep
IILCHVRLVTMLQVIPRLDQWVCMNCDSAPQDVIQNTGMLTCRRCTINGVCRVPLEWKLPCFIL

SEQ ID NO: 246683 - protein, 487 aa, Zea mays
  Clone ID: MRT4577_156558C.1.pep
MDIMQTSDSSHHGIVENSPYRIPYDRHAEGGQLGASWYFSRKEIEENSLSRRDGIDLKKESYLRKSYCTFLQDLGMRLKVPQVTIATAIVFCHRFFLRQSHAKNDRRTIATVCMFLAGKVEETPRPLKDVILLSYEIIHKKDPAAVQRIKQKEVYEQQKELILLGERVVLVTLGFDLNVNHPYKPLVEAIKIFKVAQNALAQVAWNFVNDGLRTSLCLQFKPHHIAAGAIFLAAKFLKVKLPSDGEKVWWQEFDVTPWQLEEVSNQMLELYEQNRVQPPPSQGNDTEGSSASVANQRVPGKVPGVADEPPAHDHNQAPRPSSQQNMLDHRGYDHPHPDKQNYRIPPNDARDGTANSNEGPNVSSSMMDAMKKVNKDKVKAALEKRRKSKGDFSRKVDVMDDDDLIERELEHGVELAAEDEKVKQERKQSWPHLAHHQSTNRENTEEGELSMDSQEYRSPEHDNRKRKDVREYRNYDRDERDLKRLRS

SEQ ID NO: 246684 - protein, 171 aa, Zea mays
  Clone ID: MRT4577_156559C.1.pep
CRHYHPPSSLILRRLLMSSWRGFHVLGRCPSITMSSSSVLSSHHVSQYSLSCGHASPKYFFLSPDSQLESLTSSRSGTLLCSASWFTCLFAPSWTFYSSVLISAGVSLSLPASRERVSVRSFASRWWRGLGGGRRSGRGDGGVPGKGIHQALRWICRRRGGRPSTMGWARE

SEQ ID NO: 246685 - protein, 114 aa, Zea mays
  Clone ID: MRT4577_15655C.1.pep
VLVLVIFLTRDPLIRKDLPLRDTQRWHFTGCPPVSLHSRTRFADLKIALRPIFIMAGASICLGCWPQFLCIVADVEILYSYMPHVYREKRNVLHLSRCCLPCACEAWGGVYACV

SEQ ID NO: 246686 - protein, 69 aa, Zea mays
  unsure (1)..(69): unsure at all Xaa locations
  Clone ID: MRT4577_156560C.1.pep
HALQSLVRAARERKVWKLPKDARXSVVFRCWXTHYRWXYRTVVVKVRLAAMTGLDPKQIINWFINHRKR

SEQ ID NO: 246687 - protein, 95 aa, Zea mays
  unsure (1)..(95): unsure at all Xaa locations
  Clone ID: MRT4577_156561C.1.pep
LLAPPRTNRRDPPLRFVPPTVGEKASRAAANAFIYFDASNAFKLDENTGNMNDFSGKTRLXLALPDAGLDATFMIWXIMXSLCRTLEKLQLRKRM

SEQ ID NO: 246688 - protein, 76 aa, Zea mays
  unsure (1)..(76): unsure at all Xaa locations
  Clone ID: MRT4577_156562C.1.pep
HFSTHFYNKNSEKTGVFCYLLEQXQNKLNHQSTKHNSQLLTNTPNLRYYPTISKPPNQIFMATILLFQTGKKTSQL

SEQ ID NO: 246689 - protein, 205 aa, Zea mays
  unsure (1)..(205): unsure at all Xaa locations
  Clone ID: MRT4577_156563C.1.pep
YLPSHQPYPQPASLVPWRRPRQDGGSTARTEKDVNPHXIGKAYSAHLKRSAKMKIPEXSDIVKTATSXELPPYDTDXHYITTASIARNIYLRRCISVGGFQKIYGGRQRNGSRPPHFCKSRGAGARNILQELHIMGIVHAHPKGARLITNQRRRDLHQVPATLPVEARAQPSLLSKGSCVRPEKTELYMLFSIQHVRDSKLYPRV

SEQ ID NO: 246690 - protein, 47 aa, Zea mays
  Clone ID: MRT4577_156564C.1.pep
FSLMFCPPVLCVLLSGLGSCFSSSYDGSIPSTIPPLFTGLSLFNWLV

SEQ ID NO: 246691 - protein, 96 aa, Zea mays
  Clone ID: MRT4577_156565C.1.pep
NHHFSKSHKQKLKGPQLCRGGIFYVAAKKDTFPVWGGDSASYFPGGGRENQGSLPCFKGTTPPNCLDDRLVTGGRHCTFWAPPGILGSSSYASWAG

SEQ ID NO: 246692 - protein, 60 aa, Zea mays
  Clone ID: MRT4577_156566C.1.pep
VHAFGGDCGLPERVRALQTPGLGLATNLYLQGLSGILPAGVPGEAHLSTTTSTCAWSIPA

SEQ ID NO: 246693 - protein, 303 aa, Zea mays
  Clone ID: MRT4577_156567C.1.pep
MRSSCLNFVRYSMKLRHESRRTETNGDNHRDVKEKEAERSVRGDRGLNKFPYISYKILDVSPKGQPLALEEALPKFWNALEFLVRDNVDITIRQWRDVSDDVKNQMWNKLLTRNWRPEMNTKFAKKGMNPTKNYKISMTTPQMQIILVAQPPSSTDRTTVPRSIAPTGNKKVATGLAIPGRKFHGSDIPEEYCRVEVTTVVHGSEDDMLNILGNEVFPSHHRSALRNILTDEFRSLTLPGMWDLRPDMWDPSLFSPRIRGNRADSRLPDPRALVFPSSTSPTNPAVSSRLPADTLGMALLQLC

SEQ ID NO: 246694 - protein, 76 aa, Zea mays
  unsure (1)..(76): unsure at all Xaa locations
  Clone ID: MRT4577_156568C.1.pep
PGRPKPSVQPSRFTKEVRLGKGKNGQLEGXAKKAGRVLTPKRQPWVPKPGLLVRGPTMETEPPIQYDVGKDLKGGY

SEQ ID NO: 246695 - protein, 69 aa, Zea mays
  Clone ID: MRT4577_156569C.1.pep
KKKKMATKKKATYFFLKETKTYLLPTPNKVFIWGIPFGKIRKKNPKTFYQWGKIISFTMEPPPTMLNKH

SEQ ID NO: 246696 - protein, 101 aa, Zea mays
  Clone ID: MRT4577_15656C.1.pep
MTAPPREPISRRHARGYGEDGALIVHLRICGLDWPKRTPVARFNRGGWISKGRAKIGTMILFRCIESGPSDRDLTARESGVATRPSSRERGSGCSGIQSDG

SEQ ID NO: 246697 - protein, 259 aa, Zea mays
  unsure (1)..(259): unsure at all Xaa locations
  Clone ID: MRT4577_156570C.1.pep
VQFDLNAPRDLPLPGPKESLAAAITSSPHAADPRRPHALAVVSGLAANGYLASLLVARYARLGEPDAARGVFDAAASSPYATPPKPLLYNAMLRGYLSLGLPREAVALLRAMLASGSCAPDRHTYHLAATACARAPDLGLGRRFEAAAAACGLAASDLLVATALIGMXCRARGHGRRRRVDGMPCRDAVAWNAVIGGYARAGHLSEAVELFGMMRSAVGACPTEATLESLVSGYAVFGSWKGHGMMHAAVIKSGFQRSS

SEQ ID NO: 246698 - protein, 181 aa, Zea mays
  unsure (1)..(181): unsure at all Xaa locations
  Clone ID: MRT4577_156571C.1.pep
HLYHPQHILYRQKEQFSDGVGYNWIDGLKSFTEQQVTDEMMNNAAQMFPYNTPVNKEAYYYRMIFERLFPQXRYSASPAYTTMCVCTCRESVRPNREIDCLXDSARETVPWGPSIACSTPAAIEWVEQWKASNDPSGRFISSHDSAATDHTXAVSRRWPTAAATXANGTVNGKDVAVAIAV

SEQ ID NO: 246699 - protein, 111 aa, Zea mays
  Clone ID: MRT4577_156572C.1.pep
PAGNSYISFLRLLPEIAVKMLPSFLLSSLLCLSTVSALPNPILAERAACDCTGTRDGGSNSKEYICRDARLGPLKLPRKLPLSTFVESYNRFGGQTPAEGLQRCTDDSGGY

SEQ ID NO: 246700 - protein, 76 aa, Zea mays
  unsure (1)..(76): unsure at all Xaa locations
  Clone ID: MRT4577_156573C.1.pep
NSGNNAKXFFFFFYIIIFFLLIFFFFFFFFFFFFLANQKACNTRYRTNNDSSLGWNNKTYQDSSNHVLSMKQQLLN

SEQ ID NO: 246701 - protein, 49 aa, Zea mays
  unsure (1)..(49): unsure at all Xaa locations
  Clone ID: MRT4577_156574C.1.pep
THASGTMGSSHSXLKPATSNTHXGPGTFYNTIVSHTFPKLNRACYNIDT

SEQ ID NO: 246702 - protein, 67 aa, Zea mays
  Clone ID: MRT4577_156575C.1.pep
GLPLSSLKKRVSKRVPFCERLPCVPHRSFHVVGEKYNFVNWAPSKRGRRVWTPTIPSTAGRPGGSSG

SEQ ID NO: 246703 - protein, 214 aa, Zea mays
  unsure (1)..(214): unsure at all Xaa locations
  Clone ID: MRT4577_156576C.1.pep
SFFFFFFFFFFFFFLGGGGFFFFFFSFCVLFFPFVGNGHHLLNIATPSSIKKPPTPREKSPPPTPPGGAGPPPXKKPKPIFCIQRKIYEIQGPGLKPKTPERHGKPPPPQPGRPQPTKGGKKPKRGNKPPDHPSXPGRPTAAPQKPRAGPKTHPPNPNEVKPXPPPPRAGGAPPGPPPPNREPGPRKEPPXLIPSPPPKKQPPPRADSPQILGG

SEQ ID NO: 246704 - protein, 71 aa, Zea mays
  Clone ID: MRT4577_156577C.1.pep
EGIFSEKRLGFMGVSLLAPEKHCRGGYDSAPIQLNRGNADPVLKEGPQQIPSLLAGSQLKCKTVLFLRACN

SEQ ID NO: 246705 - protein, 58 aa, Zea mays
  Clone ID: MRT4577_156578C.1.pep
IGHNYLLLARSTIHLKAVEVYTSQDHPSISAPDHYLCVCTPLESLPSESPCQLRRRFP

SEQ ID NO: 246706 - protein, 131 aa, Zea mays
  Clone ID: MRT4577_156579C.1.pep
SHSSWEHTCPTGQPPSPSMRPLRDNLHPNMPHTPSLVQREPLPRTKVPPGTHRSKALHGRHTQITTNHQDHAARGRRRSALDLRAGLAAQLHVIIIYHQHRSPLRFVTYFWQWTGTQCHTIPDSSSSATLI

SEQ ID NO: 246707 - protein, 143 aa, Zea mays
  Clone ID: MRT4577_15657C.1.pep
KAKKDSHKMSPPFFLFPSLQNVNQSAKAAELLNLAMHNRYSTKTNPLLLLVHSQNPIRHHCCSNNNNKKQSTTAQTEDLPSHLKLLCCSAGRHPTRLRRRRHNLRLLLEVPPSSARMISSSSSGPPPSCRCRSRTLCCRTPCS

SEQ ID NO: 246708 - protein, 185 aa, Zea mays
  unsure (1)..(185): unsure at all Xaa locations
  Clone ID: MRT4577_156580C.1.pep
MSILRIHAREIFDSRGNPTVEVDLYTAKGLFRAAVPSGASTGIYEALELRDNDKTRFMGKGVSQAVEHINKTIAPALVSKKVNVVEQEKIDKLMIEMDGTENKSKFGANAILGVSLAVCKAGAVEKGVPLYRHIADLAGNPEVILPVPAFNVINGGSHAGNKLAMQEFMILPVXAXSFREAMRIG

SEQ ID NO: 246709 - protein, 130 aa, Zea mays
  unsure (1)..(130): unsure at all Xaa locations
  Clone ID: MRT4577_156581C.1.pep
KKEETGPPPPRRGRPREAGVAGVCEKVVATVGEDGSMAHAGRNSCXDCEAVHALRMGXVXXXXIALTKRTDGYCCKKRSSCSRARTRSLRRELRGWREQPECRRVSAEASXCSPAPPPPATGKNAKLQXR

SEQ ID NO: 246710 - protein, 188 aa, Zea mays
  unsure (1)..(188): unsure at all Xaa locations
  Clone ID: MRT4577_156582C.1.pep
MGNCCVTPNGAADAGGGKKPKEPKQKKGKKPNPFSIEYNRSTPASAPRLVVLREPTGRDIAERYELGAELGRGEFGVTYLCTDRASGEALACKSISKKKLRTPVDVEDVRREVGIMRHLPKHPNIVTLRDTYEDDNAVHLVMELCEGGELFDRIVARXHYTERAAXLXTRTIVEVVXMCHXHGXMHRI

SEQ ID NO: 246711 - protein, 60 aa, Zea mays
  Clone ID: MRT4577_156583C.1.pep
RARDDQRHPSRQKPRRPRNLRTPSTPIYYTIQTLLLEPTTPHTDHQPWMRRQLWSTRMEP

SEQ ID NO: 246712 - protein, 213 aa, Zea mays
  Clone ID: MRT4577_156584C.1.pep
MMPPRLSALSTASAVARSVIRPFSTTAPAAAPREPSSAGAHNHRLANLNNSNNRASGYRPQRGDAASRLIERYKMRNTSYTIEKTAQMDFLKNQKMSNDFLRQMPRRWEAGDVYSPHDLSPVEMQKWRKRSVKNNDVIDALGISPLDMYKNFSLIEYFTSSSGMINHSNLTRLRPVNQRKVAKMIRRVQGMGIYPSVHAHPEMLREDFFSRNK

SEQ ID NO: 246713 - protein, 94 aa, Zea mays
  Clone ID: MRT4577_156585C.1.pep
VSFMYHKSTPCEDQQHGLVCLKSLDKVSNPHNVFDLRRVSNNNHNGWARPFWNDRGFQHVKGKAFHCICILSTSCQRVFIYFLKTPLSKPTRPR

SEQ ID NO: 246714 - protein, 62 aa, Zea mays
  Clone ID: MRT4577_156586C.1.pep
YTALWSYEGTLILYDLRPCLKAWGERMCFFELRSYRLHSSKRTFVQASGHRIQLYTGWIAYR

SEQ ID NO: 246715 - protein, 85 aa, Zea mays
  Clone ID: MRT4577_156587C.1.pep
RQYSRATIGLQCSRGIQNMAYLKYEKKHPCGSLGGQRPRDSTLHRSRSAVSMALAAISGDRCPATPDPLPQPRDRPSTMNTGTKK

SEQ ID NO: 246716 - protein, 142 aa, Zea mays
  Clone ID: MRT4577_156588C.1.pep
MSNLLPHLHSGGAGDQAILPEEERPVIIRFVHNWNKTCMQMDEVLAPVAETIKNFAVIYLVDITKVPDFNTMYELYAPAHGVRPRVRKHIMIDLGTGNNNKINWALKDKQEFIDIVETVYRGARKGRGLVIAPKDYSTKYRY

SEQ ID NO: 246717 - protein, 121 aa, Zea mays
  Clone ID: MRT4577_156589C.1.pep
QLMTSLAGGPDLPHGLELRTPLAGPHSTCRFLVCLPPENQEHAVSTGFVLHERQPSMAFCPVFLQSIRWCSVPPLVPRVFGLFGGPRNDLVGCPENHRTTQGNSYHLKKGDKTIKTRAATD

SEQ ID NO: 246718 - protein, 77 aa, Zea mays
  Clone ID: MRT4577_15658C.1.pep
KASSISWFQVEFNYGPRMSRPQDVVKHDLLRKVMLMDEPEDGQTEQVSEQKLIARRHLTNTNLVLFQELELCCCGWC

SEQ ID NO: 246719 - protein, 173 aa, Zea mays
  Clone ID: MRT4577_156590C.1.pep
MPFGSPISSSSSPEGEQPGGGGASSSRRWKKMSYLLPHLHSGWAVDQAILAEEERLVIIRFGHDWDETCMQMDEVLAAVAETIKNFAVIYLVDITEVPDFNTMYELYDPSTVMFFFRNKHIMIDLGTGNNNKINWALKDKQEFIDIVETVYRGARKGRGLVIAPKDYSTKYRY

SEQ ID NO: 246720 - protein, 151 aa, Zea mays
  unsure (1)..(151): unsure at all Xaa locations
  Clone ID: MRT4577_156591C.1.pep
EAPEGGATAEEKHHHHXXHHRKPEEEGAPGEXDHEKKEKHHKHTEKXGEPGATAAGAHAQHEKHKAKKDPENEHGHRXKEEEAADAAAGTAGNANHEHHEKKDAKKHAHNDADAAPTEHPATTPTTASRPGQDPGHRHPHGRTNRARRTTA

SEQ ID NO: 246721 - protein, 103 aa, Zea mays
  unsure (1)..(103): unsure at all Xaa locations
  Clone ID: MRT4577_156592C.1.pep
GGGRTHATAAEGAAADDAEDPQNRQEXPGGEDNEXEXNAEXHXRRHEQRNGGGXGDTNEHAXRQTGEKANQRRARRHQQQDPKEEHGDTKSNDQTPAENRRTN

SEQ ID NO: 246722 - protein, 79 aa, Zea mays
  unsure (1)..(79): unsure at all Xaa locations
  Clone ID: MRT4577_156593C.1.pep
MGAHKCAAELWRRKQSDKMRWXQGVRGWEYRQKPGQGRHSRHTRHDKATRMRCRGKQECGGYRERGKRPGTKKTETKGI

SEQ ID NO: 246723 - protein, 81 aa, Zea mays
  Clone ID: MRT4577_156594C.1.pep
APDYRTQQQGTEPSTSKPSRRPPASISDDTSRTHTCSLSTLKRETGMMKVTYMSSHEFEESARGSFFLDTWSMSIDQRKDA

SEQ ID NO: 246724 - protein, 80 aa, Zea mays
  Clone ID: MRT4577_156595C.1.pep
VKDHKHEDRLHRGSFDFVPLVVSLRNKYTLGYCCSPRVVDRPQRGSVRYIGMHPFSLAASNPRFPTVCRPLSNQLPHTQT

SEQ ID NO: 246725 - protein, 160 aa, Zea mays
  Clone ID: MRT4577_156596C.1.pep
MGKDKKGRGSSRRTGDKREHEPSPPSEDFGDSEYSEEEFSSEYEGLSVYASPPASSDDSDNSQGIAAEVWTYIRSIERAGLEGSDESEVSSDEENSFGSSEEGSGGDDDDEGDGSGEGVGGDGGNNGRKGGSGGSGGGRSDDDGKGGNDSSKASGKAPLA

SEQ ID NO: 246726 - protein, 114 aa, Zea mays
  unsure (1)..(114): unsure at all Xaa locations
  Clone ID: MRT4577_156597C.1.pep
KKTLDKHAFSTLYRNTRNAGVVLDTGPKLAHNTIKLRRGLTPSECASTKPSQDDLRQTKEEEMDDHCSHVPVRHLIFMHHGIQQKLEKGNRVDDGNDFLRITADLAEXNLTSYQ

SEQ ID NO: 246727 - protein, 87 aa, Zea mays
  Clone ID: MRT4577_156598C.1.pep
HSCGSSPVCSHLEVAPLAKPRFPLRAGVVKYRVAVLPVACSQNLCTKALFISLQSLLPCCPKGHRGHQSTLTGLEKPAPLIKLLSGW

SEQ ID NO: 246728 - protein, 76 aa, Zea mays
  Clone ID: MRT4577_156599C.1.pep
FARAPMRLPPAQESKIWNCQVGGPSFVHVDSSASLTSLASRQFSAALLFRSFSLASWGAKPSLISCPFFFPSSLES

SEQ ID NO: 246729 - protein, 66 aa, Zea mays
  Clone ID: MRT4577_15659C.1.pep
VNEAMRSPLLNTRPNSWEGTPRTNGRLYPYLYNVILRTYRSAYAHSNNISTPAGLGNKYTTCAKLS

SEQ ID NO: 246730 - protein, 53 aa, Zea mays
  Clone ID: MRT4577_1565C.1.pep
LCSCSIACWLLRMQAVLVGTISLCARPCLSSLLLLRCALHTFSVLRSPPSYYS

SEQ ID NO: 246731 - protein, 108 aa, Zea mays
  Clone ID: MRT4577_156600C.1.pep
CMPCWLSHHQLSILAKSSFTFVLIPIIPNVHTTVCPCPSVICSSSPILYFVCWRLQRPHSGTYLLRPRLFLVSNCSFPSPPCPLGSVVGPLCGDHPLSCFLSSSINFP

SEQ ID NO: 246732 - protein, 139 aa, Zea mays
  unsure (1)..(139): unsure at all Xaa locations
  Clone ID: MRT4577_156601C.1.pep
QNAINTEMYHEIMHALKTDSKDVSIITVLPGNSDYYSSEHDLTNFTDIPPGGVADXATHNAVLLREFVGCFIDFPKPLTAVVNGPAVGISVTLLGLFDAVYASDRATFHTPFSQLGQSPEGCSSYTFPQIMGPAKAQRC

SEQ ID NO: 246733 - protein, 81 aa, Zea mays
  unsure (1)..(81): unsure at all Xaa locations
  Clone ID: MRT4577_156602C.1.pep
CSVVFAIVSSIFTLDYFYNMIIFLSFLFPLLHYIDYIYIVVLVFYYPFIFLSLYXFFYFIFFYLFLFIIFFIYFYLFFYFY

SEQ ID NO: 246734 - protein, 40 aa, Zea mays
  Clone ID: MRT4577_156603C.1.pep
NERIPWYVRRSAGLGLALLVRAPAPLYIGPGAASALADAE

SEQ ID NO: 246735 - protein, 158 aa, Zea mays
  unsure (1)..(158): unsure at all Xaa locations
  Clone ID: MRT4577_156604C.1.pep
NIANPFFYKDPRRLLGGAFFALSTNVAGINXSGFARNSNPDADPHKHDTLRAYALKCKFYNALDHNNDAHPLRHLVSMYGHNYXNAGIVHKRFKXLIKEXLQLDSYTYPKGLYKTLCINRILDINCYEHTTNQIMSAYKCFCTLNDDQRMHTFAFAHA

SEQ ID NO: 246736 - protein, 52 aa, Zea mays
  Clone ID: MRT4577_156605C.1.pep
GHADGWDWDTYHLTLIFINLTTTTKNTFNFIATLAPIATTTHPPIIGRTLPT

SEQ ID NO: 246737 - protein, 94 aa, Zea mays
  Clone ID: MRT4577_156606C.1.pep
HQKEQCIKFWEEAPRQTKQGRGRQGDPCPHTNGLSQPATVYLGGGGRPLGKLGLHGERGGGAGTHEFPPENLGGHGQGEKPLGGGRLFNHLFGP

SEQ ID NO: 246738 - protein, 103 aa, Zea mays
  unsure (1)..(103): unsure at all Xaa locations
  Clone ID: MRT4577_156607C.1.pep
RRGGGRRAAAGRRRQARARAEAPANAQRTQTHTSPAPREQPAAGEKSRGTGAGKDRHNTRXAPEGRXXQGEDAXKAEKTAGGTANGXRGADTDSGDTQKKAPD

SEQ ID NO: 246739 - protein, 264 aa, Zea mays
  unsure (1)..(264): unsure at all Xaa locations
  Clone ID: MRT4577_156608C.1.pep
MEVKKEATKATLPPGFRFRPTDEELIVHYLRRRALASPLPAAVDIPDVRILAHDPSDLLPPGGLAGFGEQERYFFTCKEAKYVKGRRANRATGAGYWKATGKEKPVAVAVRGVQGQSQSQSQAVLVGMKRSLVFYRGKPPTGSKTEWVMHEYRLAGAXRAVPPPPRXADGDGVARAPAEGWVLCRVFRKKGSAAVARRPGDRSDGEGDESACGGGGGGGRGFIDFFARADAAGRRRRAPSPAVSSRWLADASPQPEQEATSRGP

SEQ ID NO: 246740 - protein, 201 aa, Zea mays
  unsure (1)..(201): unsure at all Xaa locations
  Clone ID: MRT4577_156609C.1.pep
LAGFGEQERYFFTCKEAKYVKGRRANRATGAGYWKATGKEKPVAVAVRGVQGQSQSQSQAVLVGMKRSLVFYRGKPPTGSKTEWVMHEYRLAGAXRAVPPPPRXADGDGVARAPAEGWVLCRVFRKKGSAAVARRPGDRSDGEGDESACGGGGGGGRGFIDFFARADAAGRRRRAPSPAVSSRWLADASPQPEQEATSRGP

SEQ ID NO: 246741 - protein, 90 aa, Zea mays
  Clone ID: MRT4577_15660C.1.pep
PAAWCCTNSSGDTFRLSSKFNPGYSTSSRTLHAHSPLYSRLFQFRRARTIESGPLHTPYERNRAALTEDLFSFYPTPQAPHSAYVYWTCD

SEQ ID NO: 246742 - protein, 123 aa, Zea mays
  Clone ID: MRT4577_156610C.1.pep
LTIGPLSRVAKRNSLCSYLLYWTPHWPLQMQPKLPSFSTLLDRFMPALLDRFTPASRPALDTSRASAGDLLLRLGRRVRNPPARHGGRQSAAPSPGGVGAREEVDEPAPASSSAAARALVAHS

SEQ ID NO: 246743 - protein, 300 aa, Zea mays
  unsure (1)..(300): unsure at all Xaa locations
  Clone ID: MRT4577_156611C.1.pep
MEVKKEATKATLPPGFRFRPTDEELIVHYLRRRALASPLPAAVDIPDVRILAHDPSDLLPPGEXERVSRHSRDPSHLHLRLGLIGFVAGLGGGGAVVVAGFGEQERYFFTCKEAKYVKGRRANRATGAGYWKATGKEKPVAVAVHRGVQGQSQGQAVLVGMKRSLVFYRGKPPTGSKTEWVMHEYRLAGAGLAPCRRRHADADADADAVARAPAEGWVLCRVFRKKGSAAAAAVARRPGDRSDGEGDESAGGGGGRGFIDFFARADAAGRRRRAPSPAVSSRWLADASPQPEQEATSRGP

SEQ ID NO: 246744 - protein, 49 aa, Zea mays
  Clone ID: MRT4577_156612C.1.pep
IRLEAIPRWIFSASPVGSPGPASDTTGSTATNSPWTCTCSSSCHLGSSS

SEQ ID NO: 246745 - protein, 131 aa, Zea mays; identical to SEQ ID NO: 198326
  Clone ID: MRT4577_156613C.1.pep

SEQ ID NO: 246746 - protein, 204 aa, Zea mays
  Clone ID: MRT4577_156614C.1.pep
MAEILLGITGKDFTIIAASKAAMRGATILKTTDDKTRALNKHTLLAFSGEAGDTVQFAEYIQRNAQLYSMRNESDLSPSALAHFVRGELATSLRSRKPYNVNLLMGGVDPITGKPSLYWLDYLASLAEVPYAAHGYAQYYCLSILDKHHHPDITLHQGIKILTMCIDELKRRLPLDFKGMVVKAVKADGIVDIEFDDDKVVKCA

SEQ ID NO: 246747 - protein, 105 aa, Zea mays
  Clone ID: MRT4577_156615C.1.pep
VSDDEKEEGRRRRRARDPDDEPDDRRGKRDRDKDRRRHRRRSPSSESGSSPDGRRHRRRRRDEGSRRRDDRRRKEDEGDQRRKSPVKELTPSLASPPAVLSEMIP

SEQ ID NO: 246748 - protein, 115 aa, Zea mays
  Clone ID: MRT4577_156616C.1.pep
GAFFFFFFAARLYIFGISGLKFLCVARNTELRCVCAIIRNYRQSGENEEKELYIAGAPHQSSGSASEGVGTTISSLPSWPGAVGCRRDAPSDSCRAPRRVGGRVGGRVGGRVRRP

SEQ ID NO: 246749 - protein, 112 aa, Zea mays
  Clone ID: MRT4577_156617C.1.pep
RVTGWDAKRAAWLRTRGLDGAAVAGRVVMVTGSQPEPCKGPGGDHALLRFLKNKLDYCRLHGIELLYNTALLEPSMVAYWAKIPSVRAAMLAHPDAEWVWWVDADAVFTDMD

SEQ ID NO: 246750 - protein, 41 aa, Zea mays
  Clone ID: MRT4577_156618C.1.pep
DNMGKNPKQQFRNCSPKRQTTSIYTQVILNRTHTIRYSQHW

SEQ ID NO: 246751 - protein, 87 aa, Zea mays
  unsure (1)..(87): unsure at all Xaa locations
  Clone ID: MRT4577_156619C.1.pep
XXQGAANRRSYSTFVSVSSPFTEPYGSYAQPVESANTERGTRIDSLRFPGCPGGEEVMRHKLNGRQRTQLERCDWYAHYLQRLTDSN

SEQ ID NO: 246752 - protein, 61 aa, Zea mays
  Clone ID: MRT4577_15661C.1.pep
GLGYFGGWDAKTFFSGRGAQPENKGTACWCTTHIICLKKRPWVKNKKKDGTGTSYSAGTTK

SEQ ID NO: 246753 - protein, 55 aa, Zea mays
  Clone ID: MRT4577_156620C.1.pep
KIQFSSSNIQHRKITACSPKQQLINCSSYTIQELPCFRDLNYSNTLSFVRVKLIK

SEQ ID NO: 246754 - protein, 104 aa, Zea mays
  Clone ID: MRT4577_156621C.1.pep
KASNRAWSVPAATVVATSSSVPAGPPPLTPGSEPSALAPATTGRTPAIGMPTSRGAPSSSYNAALDIRAVTEERAVYLIEYIVSDEATFRAEFVMVNELSHRSR

SEQ ID NO: 246755 - protein, 112 aa, Zea mays
  Clone ID: MRT4577_156622C.1.pep
MAPSQPKSGLFVGINKGHVVTKRELPPRPSDRKGKGTKRVLFVRNLIREVAGFAPYEKRITELLKVGKDKRALKVAKRKLGTHKRAKKKREEMSSVLRKMRSGGGGAADKKK

SEQ ID NO: 246756 - protein, 426 aa, Zea mays
  Clone ID: MRT4577_156623C.1.pep
MVVPVPPPPVLASHVAVRAAASAISHGRRVLLNGDHPPQVAALGRGDWVKLICGASFEDAADVRNLSLVYTLAGVDCIDCAADASVVGAVNEGIEVAASIVPTVQRPWLMISVNDDCRDLHFRKAEFDPDDCPLDCSKPCEKVCPADAISLKHSMVDGERTLSDPLRGKYEGGVITERCYGCGRCLPVCPYDRIRAVSYVRDPTMTAELLKRDDVDAIEIHTTGKGTDMFNTLWDNLSGSINNVKLVAVSLPDIGESTVDLMNTIYTIMEPHFKGYNLWQLDGRPMSGDIGRGATRETVSFAAHVASMSERPPGFYQLAGGTNSYTVDYLKKAGLFQSSNWNSGTATSEMASSHQALIGGIAYGGYARKIVGRVLRKIPEQFGRVHIEDHPDHLLEALQEAMSLVGPVKGYIPSHSKPFMKQVDRQ

SEQ ID NO: 246757 - protein, 76 aa, Zea mays
  unsure (1)..(76): unsure at all Xaa locations
  Clone ID: MRT4577_156624C.1.pep
CSSRASASATSHCCLLLHHREQSXKHTSTRPTAHTSGLQANYFLIRISLSYHRNIKVMSLMLDYYNISMSDGDINT

SEQ ID NO: 246758 - protein, 331 aa, Zea mays
  Clone ID: MRT4577_156625C.1.pep
MVIWSCSSCLHGFIPRAAWRRHYPLLSPRPPASPPPIHHFSSARRSTKKSAPKAPMGSSIPAAKALIDSSREPFYVIRKGDVIGVYKNLSDCQAQASKSVLHPSVTVYKGYSLRKETEEYLAARGFRNAVCSIGAADASDELFGDLVPCPFQQPDENTQSILKMSQGQEMETRSSEHPKVADLEPLPDSELSCILEFDGACKGNPGKSGAGVIIRRLDGSVIAVLREGLGIMTNNAAEYRALILGLNYASKKGFKYIRCQGDSKLVCNQVQGAWRARSDNMSILCDIAKELKETFLTFQINHVLREFNSDADVQANFGCQLAVDEVQELSV

SEQ ID NO: 246759 - protein, 154 aa, Zea mays
  Clone ID: MRT4577_156626C.1.pep
RKCKFFMWLVVHDRCWTADRLAKRGMDHPVCCPLCDQADETINHLLVECSFAKQFWFLFLRSGDFQVLCPSTGDGCFDSWWEKSAEVVGKPLSGGFNSLVILGAWSIWKHRNRCVFDGCSPNVEVALSAAREELMCWRLAGAKTLSFFHLEELS

SEQ ID NO: 246760 - protein, 63 aa, Zea mays
  Clone ID: MRT4577_156627C.1.pep
MRPSLMRSTFQLLRRRSYSSASGQPERKVAILGSAGCIWQTLSLFMNLNPLVSFLLLYDISGT

SEQ ID NO: 246761 - protein, 72 aa, Zea mays
  Clone ID: MRT4577_156628C.1.pep
IMTYHRGISPYTSNQTLLHDAFTPPSRTPFPLDIHVYLSTPRIICTLDLGFPSHGYFTHMNSTTILHITRYF

SEQ ID NO: 246762 - protein, 187 aa, Zea mays
  Clone ID: MRT4577_156629C.1.pep
LFISHARPLQALSAERPHPNIFCAYVFLSILGQFAMHLFFLMSAVNLASKYMPEECIEPDSEFHPNLVNTVSYMVNMMIQVATFAVNYMGHPFNQSISENKPFKYALYSAVVFFTVITSDMFRDLNDYMKLEPLPEGMRGKLLLWAMLMFCGCYGWERFLRWAFPGKMPAWEKRQKQAVANLDKKQA

SEQ ID NO: 246763 - protein, 66 aa, Zea mays
  Clone ID: MRT4577_15662C.1.pep
HYRSIWSTYNTQEGIALQIKSGSHRTITLLWQIHDGSDKEPTPFVCDLDSLGPRNLTHAHWQVKCS

SEQ ID NO: 246764 - protein, 44 aa, Zea mays
  Clone ID: MRT4577_156630C.1.pep
LFNLHGNLRPDRVSSGCLQGWSTVIICSDKKALSLHFPCQYQYF

SEQ ID NO: 246765 - protein, 91 aa, Zea mays
  Clone ID: MRT4577_156631C.1.pep
IHKQHHQKNPKHYIHNTCKMVNFSSLSHNIQPLLPHSILNPPTLPSFPILYPFPYGPYNSTSFLHLLQLQPPQIPLLPTLKRLSTLPPFPN

SEQ ID NO: 246766 - protein, 76 aa, Zea mays
  Clone ID: MRT4577_156632C.1.pep
VVGLYRWDGRHIAFLRTVKFSVSLLMLPPFILLLYCRGQFCISSVEQSVVNVVLCSVLLHCLLHYRCTCNMGPFPS

SEQ ID NO: 246767 - protein, 46 aa, Zea mays
  Clone ID: MRT4577_156633C.1.pep
HAYADSWSRDLLLFKHHYKGIEDLTCYHLKHPTFIPLLPANFLMPI

SEQ ID NO: 246768 - protein, 64 aa, Zea mays
  Clone ID: MRT4577_156634C.1.pep
EGLYCQFGMQHLKVTCFESLTRSFFYLRFSKNALTRVQTIHEMQLQSHAKEDPGCIQGSLVKWC

SEQ ID NO: 246769 - protein, 51 aa, Zea mays
  Clone ID: MRT4577_156635C.1.pep
KHWTKAQSLLKNRVLIRFKNMGKPFELETINQKKGPYKDTHLGAKKSMKML

SEQ ID NO: 246770 - protein, 67 aa, Zea mays
  Clone ID: MRT4577_156636C.1.pep
GPSSPLRSYGAAKYNISKRYGGAPLGGFLALGSNEPPVLTVNGSFVWFYGGPSGQQKVMLSVPGCVK

SEQ ID NO: 246771 - protein, 101 aa, Zea mays
  unsure (1)..(101): unsure at all Xaa locations
  Clone ID: MRT4577_156637C.1.pep
ENHWETHVNTQVKHLPLHTCFNSXEDSKKAPTKQFSKQNGKLNAQWNAPLSAALIAVTLMVTRTVTSTLATALSPFFFSFFPTFVGFSREFPNQALNLGFP

SEQ ID NO: 246772 - protein, 55 aa, Zea mays
  unsure (1)..(55): unsure at all Xaa locations
  Clone ID: MRT4577_156638C.1.pep
FLIPCGGFSVRKINFIRSCKGHLIIXLNGNPLPMPMSMQLRDHCIISSNSKHGVT

SEQ ID NO: 246773 - protein, 123 aa, Zea mays
  Clone ID: MRT4577_156639C.1.pep
PYGFSASSHIRSVSVSTLYPAGDLRSTRIGRSQSHSFVALCEDSAGSMEESFMHAASSLRDVLPPSRGRVGAGSVRGSGSRVASRTGGRWGGRHGVLAGGEADMRSLLVFVIDILSPAGLEVP

SEQ ID NO: 246774 - protein, 125 aa, Zea mays
  Clone ID: MRT4577_15663C.1.pep
KIYAGQKQIGVFQHSSFLAGGATIAAGRFTAENGVIKSIWAYSGHYKPSAENLLNFMNFLEGNGVDLKEVEVRSSTREDYNEDPVPNDSQKFASATMEPTNLPQLVPPLNTTQGNESDNAPKIKL

SEQ ID NO: 246775 - protein, 51 aa, Zea mays
  unsure (1)..(51): unsure at all Xaa locations
  Clone ID: MRT4577_156640C.1.pep
XNRGDRGVRDHSARMIRYLLMKILTLAQAAGPIVSCHTISADCQDSEDAHD

SEQ ID NO: 246776 - protein, 125 aa, Zea mays
  unsure (1)..(125): unsure at all Xaa locations
  Clone ID: MRT4577_156641C.1.pep
FGLVYVLGLGSTPSKQPPSMSPSIRTSPTVSRLSIRVLDILPETAYDRRLVLSELASPALLLALILSSMRGIFSRLVGTYRMFPSCRPTPCLSLLRRKSISDVSFLLLLYXPRRAPQNEPRCPYK

SEQ ID NO: 246777 - protein, 42 aa, Zea mays
  Clone ID: MRT4577_156642C.1.pep
CLWMESPSEGQYGSCRSVSGTKFICTKNQPFGHIDSNDPSEA

SEQ ID NO: 246778 - protein, 58 aa, Zea mays
  Clone ID: MRT4577_156643C.1.pep
SVISHVNCELSVLSSKLKNFGYYEEHGGRFTSISEGVYVGMDTRRPSVVLVHQVHGLL

SEQ ID NO: 246779 - protein, 259 aa, Zea mays
  Clone ID: MRT4577_156644C.1.pep
MASHIVGYPRMGPKRELKFALESFWDGKSSAEDLEKVATDLRASIWKQMADAGIKYIPSNTFSYYDQVLDTTAMLGAVPDRYSWTGGEINLSTYFSMARGNATVPAMEMTKWFDTNYHFIVPELAPSTKFSYSSHKAINEYKEAKALGVDTVPVLVGPVSYLLLSKAAKGVEKSFSPLSLLSSILPVYKEVIAELKAAGASWIQFDEPTLVKDLESHQLSAFSAAYAELESALSGLNVLGETYFADVPADSYKTLTSLS

SEQ ID NO: 246780 - protein, 52 aa, Zea mays
  Clone ID: MRT4577_156645C.1.pep
STPQADELYFTREEPTCSRKRKMTRSKLMRRNHTNEGSRIRPKPLFSECAAV

SEQ ID NO: 246781 - protein, 73 aa, Zea mays
  Clone ID: MRT4577_156646C.1.pep
FSSLISLAQIFMRCQILWASFFTRIEVVTFSFFPTHTIYLVAVSSVWCGHCDFEISFWLLHNWHSWLFCPSFA

SEQ ID NO: 246782 - protein, 145 aa, Zea mays
  Clone ID: MRT4577_156647C.1.pep
IAASTKSAAIFSGVSTTICEKMYAYGRNLGLSFQVVDDILDFTQSAEQLGKPAASDLAKGNLTAPVIFALQSEPELREIIDFEFSDTDSLAAAIELVHRSGGIQRAYELAKEKGDLAIQNLQCLPRSDFRSALEKMVEYNLERIE

SEQ ID NO: 246783 - protein, 73 aa, Zea mays
  Clone ID: MRT4577_156648C.1.pep
ATVPLLPANLAPESLPTMAYRSAVLLPALLLAEAVDLASDGDGDGKRPEEHARHRVPRMPGQALNTSFAQFDG

SEQ ID NO: 246784 - protein, 71 aa, Zea mays
  Clone ID: MRT4577_156649C.1.pep
VTPCAWLVGKEPKLMACMRGSSRPGPKDDDLASDVVPTTRCCGGRHEGWSYPVYVRQASTSLSSLYLSVKN

SEQ ID NO: 246785 - protein, 41 aa, Zea mays
  Clone ID: MRT4577_15664C.1.pep
ASALHLVMGKSPLHQVQQITSLDFFRIRFVLQILIRASMQS

SEQ ID NO: 246786 - protein, 140 aa, Zea mays
  unsure (1)..(140): unsure at all Xaa locations
  Clone ID: MRT4577_156650C.1.pep
MKVTTQLKPMASSSTSPSPSRLPRSASGKAPTSPPSSSNASRRHHQQPPRASASTPATPAPSRHHLRSLSISCMTIRTDDDSPPPAXTPQDKAATAKPLSYYSSMLSPRKLMQRASRAFRRSKSSRRRKSKDHLIVGVGG

SEQ ID NO: 246787 - protein, 73 aa, Zea mays
  Clone ID: MRT4577_156651C.1.pep
CCRRAATKAICLVQVMTQGYKVSHPGNMLALYRSYSVVKLLVTLAGALPNHIRTLLECYCWDDHWSAMWMVCK

SEQ ID NO: 246788 - protein, 100 aa, Zea mays
  unsure (1)..(100): unsure at all Xaa locations
  Clone ID: MRT4577_156653C.1.pep
RVPKYSQFLYDVCKFYLGWGTQSYGAPLNFLHKPVIFSSLIRSELFTFKKGLVKIETQGIFIWHTFIDMFLKKSYSXNPLTGYSPNSFSLTVYFPKMVTF

SEQ ID NO: 246789 - protein, 59 aa, Zea mays
  Clone ID: MRT4577_156654C.1.pep
TGARALFPASVVCSFLEDSFSSTRYLSQQSQAPNMMEGDYVVTCSSPIIFTTIASCNNK

SEQ ID NO: 246790 - protein, 78 aa, Zea mays
  Clone ID: MRT4577_156655C.1.pep
QDALCFLADPQEQQPLVLDFSFLECTAFECFGFSTVSSSLEQFASSLCSIMLLSSCLLVGSSPYSVQPRNFLAPTSIF

SEQ ID NO: 246791 - protein, 43 aa, Zea mays
  Clone ID: MRT4577_156656C.1.pep
PTHKGTLAQDSFCSTTHNHIALGSIPIIETKTIQVRRHEYHDC

SEQ ID NO: 246792 - protein, 228 aa, Zea mays
  unsure (1)..(228): unsure at all Xaa locations
  Clone ID: MRT4577_156657C.1.pep
SRPAGPFALLLEKXNPWISENIVYVAGDRVVTDPLCKPFSMGRNLICVYSKKHMNDFPELIEMKRRSNTRSLKEMALLLRGGSQLIWIAPSGGRDRPNPSSGEWYPAPFDSSAVDNMRRLLEHAGVPGHIYPLSLLCYEVMPPPQQVEKEIGEQRVISFHGAGLSVTEEINYGDITAHTKNADEGRELFTNTLYNSVVNQYNVLKSAIFRDRGAAVSNNVISLSQPWR

SEQ ID NO: 246793 - protein, 99 aa, Zea mays
  Clone ID: MRT4577_156658C.1.pep
TSSIMVEPVIVMQMLAKKSATVGWSRVIGDFAHTDPQLLLPQVAQQCAAGWAPRNPSGCILFARTSICAVEVVNVFLSCFVIMYIRRLESLLAPHFLEI

SEQ ID NO: 246794 - protein, 68 aa, Zea mays
  Clone ID: MRT4577_156659C.1.pep
PTRTKSTSKFATVRIHGIAWSFLGMICALVYCTVGIYGGHINPAVTFRLFLARKLCLTNAVLYMIMQC

SEQ ID NO: 246795 - protein, 166 aa, Zea mays
  unsure (1)..(166): unsure at all Xaa locations
  Clone ID: MRT4577_15665C.1.pep
MAASSLHHTTSFLGXGPARPRRRRGCRQDVITMRRTVPTDPQTLWHRPYRPTNLGPFSXXTPTNMTAMLLADYMRPHLRDRLGRNEDLRCSIRRAYSVMHSRGRMXLGRVACPLPLILVNIDLPFAEDARVLYGAQMFSQRLLQYLVNPQLTLAHRILYIWAGQTE

SEQ ID NO: 246796 - protein, 51 aa, Zea mays
  Clone ID: MRT4577_156660C.1.pep
GVLRILLIVQTLYPSLVTYSFIDYHLIVSSGFYQSLKFLHTLFYSYIFTLF

SEQ ID NO: 246797 - protein, 45 aa, Zea mays
  Clone ID: MRT4577_156661C.1.pep
PLYTTSLSNLLHIYHNPYSFQPSTLLYNIHLHTNFFQIHPFILTT

SEQ ID NO: 246798 - protein, 47 aa, Zea mays
  unsure (1)..(47): unsure at all Xaa locations
  Clone ID: MRT4577_156662C.1.pep
PPPGPPPPXTGREPAPPYPGSPPGGQQQNRKNPGFSPPPPYPVCGRS

SEQ ID NO: 246799 - protein, 49 aa, Zea mays
  Clone ID: MRT4577_156663C.1.pep
TFAKGSCFYGGKCPFALGEIKLCKPPPALNPRPVFSPIAFGHCTPKLGP

SEQ ID NO: 246800 - protein, 61 aa, Zea mays
  unsure (1)..(61): unsure at all Xaa locations
  Clone ID: MRT4577_156664C.1.pep
STHTDYGSQSPSPLSTSPMLPPPLPPPKPPSTSPARTLSSMLATPGLSRNXVTDTLNADTE

SEQ ID NO: 246801 - protein, 122 aa, Zea mays
  Clone ID: MRT4577_156665C.1.pep
VNNCQYGKKAIAVEINWSWQRFNDISGEAMHEMLALRQEVFVVEQGCLYLDADGLDKQSWHLFGRTNDQQLVAYARLNFPNTRYPEPSFGRVLTSKAIRGMGAGRKIVAACIQKSLREYPNL

SEQ ID NO: 246802 - protein, 56 aa, Zea mays
  Clone ID: MRT4577_156666C.1.pep
PSPPGWFSQAPPRMGLVVKTQFWGGVGGSSCKVDGPFFWLTWKPFGFHSAVVVFLP

SEQ ID NO: 246803 - protein, 238 aa, Zea mays
  Clone ID: MRT4577_156667C.1.pep
MRILAYGLPSDAVDEYIQIGESTARECLHHFCRAIIACFSVWYLRTPTQDDITRIMHNSESRGFPGMLGSIDCMHWEWRNCPTAWRGQFCGRNGRASMILEAVASYDLWIWHAFFGMPGTNNDVNVLHRSPVFDPITTGRMPPVNYTVNGHAYNFGYYLADEIMTACIIMHNMIVEDEGPFAANIDFGDNSSRIDSSQIIAEGRVEWVINHFDLRRQERSCSLQNDLVEHLWNHRGSM

SEQ ID NO: 246804 - protein, 300 aa, Zea mays
  Clone ID: MRT4577_156668C.1.pep
MRILAYGLPSDAVDEYIQIGESTARECLHHFCRAIIACFSAWYLRTPTQDDITRIMHNSESRGFPGMLGSIDCMHWEWRNCPTAWRGQFCGRNGWASMILEAVASYDLWIWHAFFGMPGTNNDVNVLHRSPVFDPITTGRMPPVNYTVNGHAYNFGYYLADGIYPNWPTFVKAIRHPYEEKKVYFTQMQESCRKDIERAFGVLQARWAVLRGPAYGWDRNRLTEIMTACIIMHNMIVEDEGPFAANIDFGDNSSRIDASQIIAEGRAEWVINHFDLRRQDRSCSLQNDLVEHLWGRRGSM

SEQ ID NO: 246805 - protein, 72 aa, Zea mays
  Clone ID: MRT4577_156669C.1.pep
ASHKEATTLAGTAETTIGIVPYTTIFYPIHFLDTRSIIAFSCIRSNDPFSDSPCLVDLLHLFNIESSSRSVF

SEQ ID NO: 246806 - protein, 91 aa, Zea mays
  unsure (1)..(91): unsure at all Xaa locations
  Clone ID: MRT4577_156670C.1.pep
FDPPFVRVLSPVLSGGYVLGGGAICMELLTKQGWSSAYSIXSVIMQISATLVKGKARVQFGANKSQYSLTRAQQSYKSLVQIHESNGWYTP

SEQ ID NO: 246807 - protein, 91 aa, Zea mays
  Clone ID: MRT4577_156671C.1.pep
MREILHIQGGQCGNQIGAKFWEVVCDEHGIDPTARYTANSDLHLERANGPYNVASCGRFDPRAVLIHPDACQNEQLSLSVAPVFFFFPPPP

SEQ ID NO: 246808 - protein, 54 aa, Zea mays
  unsure (1)..(54): unsure at all Xaa locations
  Clone ID: MRT4577_156672C.1.pep
VEPSYQSVALVGGSTGIVGTSLLDMLQLSDTPDGPWKVYAVXAARSRPGPRRPP

SEQ ID NO: 246809 - protein, 75 aa, Zea mays
  Clone ID: MRT4577_156673C.1.pep
PPSSQLYKHRPLQLSRTFVPLPPPHLSFSPPLRLHPLRSACARAQIYGFVRANMSSPHGGLDDQIERLMHRKPAR

SEQ ID NO: 246810 - protein, 64 aa, Zea mays
  Clone ID: MRT4577_156674C.1.pep
KPPLPIQSLTPSVLPRIRPHNSKLQFSDIQTIELKLYLISISCLIWYSTQFNSILSNIDIQAEY

SEQ ID NO: 246811 - protein, 74 aa, Zea mays
  Clone ID: MRT4577_156675C.1.pep
MSCALCSRSESVRNSHLLSSSLNSIRSSSASSSSAASSAQNPKTKTSKRRKKNLFDVSQFLPNCGIGYHMAKTH

SEQ ID NO: 246812 - protein, 60 aa, Zea mays
  Clone ID: MRT4577_156676C.1.pep
VDTIFAWIICSGNGIFFCRAKPVYKKFPLYIFWGFSKKFVSKRIFFKRVKFSYYLKNRPT

SEQ ID NO: 246813 - protein, 54 aa, Zea mays
  Clone ID: MRT4577_156677C.1.pep
YASMAWQVIRVSLRSNLEQSRRLSAATKRDASSSHRSPRRVMERLSRESNHTAV

SEQ ID NO: 246814 - protein, 76 aa, Zea mays
  Clone ID: MRT4577_156678C.1.pep
SGRTAFKLFLCLPDRADPDPLVPPPPPPSRCGRLKKRSRGFFFLKNQWVGEDGAQTKSLCCFKLKKKGGGFSLSFR

SEQ ID NO: 246815 - protein, 139 aa, Zea mays
  Clone ID: MRT4577_156679C.1.pep
MSPFEALYGRKCRTPLYWNQTGERQFFGPELIQEEEEQVCIIRENLRVAQTRQNSYADNRRRPLEFEEGDHVYLKVSPLHGMRRFKVKGKLSPRFIGPFRIFRRVREMAYQLKLPDHLSDGHNVFHVSQLKKCLHVPEE

SEQ ID NO: 246816 - protein, 62 aa, Zea mays
  Clone ID: MRT4577_15667C.1.pep
MLLLVTDDIICRYLIVIDDIWDISVWKMIRCALPDNNIGYIIVTTTRISDVAEKVGGAYKLK

SEQ ID NO: 246817 - protein, 59 aa, Zea mays
  Clone ID: MRT4577_156680C.1.pep
MAKIKIGINGFGRIGKLVARVALHSDYVDLDVVNDPFISTDFMTYMFKFYTVHGQWKHH

SEQ ID NO: 246818 - protein, 432 aa, Zea mays
  Clone ID: MRT4577_156681C.1.pep
MLGRRHSRHPPLEALAGAAGPTKTKRAGTPFARNILGITWVAEGTCVLNTRRWALRRLNLGIVAHTEGVTIDVEPTLEQEIRKGQIGDAKIQEIKDLITEGRGPEFTEDEQGTIWFKDRICVPEIDSLRETILKEAHDSNYSIHPGSTKMYQDLKQKYWWYGLKRDVAAHVTMCYVCQRVKAEHQRPARLLHPLKIPEWKWEEIGMDFITGLTHTPKGYDFIWVIVDRLTKVAHFIPTNGQTERTNQVLEDMLRACALQHGGSWDKSLPYVEFSYNNSYQASLKMSPFEALYGRKCRTTLYWDQTGERQFFGPELIQEAEEQVCIIRENLRVAQTRQKSYVDNRRRPLEFEEGDHVYLKVSPLHGMKRFEVKGKLSPRFIRHFRIFRRVGEMAYQLELPDNLSDVYDVFHVSQLKMCLRVPEEQLPMEELSV

SEQ ID NO: 246819 - protein, 97 aa, Zea mays
  Clone ID: MRT4577_156682C.1.pep
RAAARAGTRGCVHDSFSSPPQPLDRSALIHHSQLMCLVTTTAILQPHHGQGSWRLSRPCCARSLFLTEFPEEDDKIQEVVSEEESASVPAHQVMGAI

SEQ ID NO: 246820 - protein, 222 aa, Zea mays
  Clone ID: MRT4577_156683C.1.pep
LGTSRPAGENFRGPDSNVLKIQLFPQIYNHLHGLKLLQPLVQDFTQGSILSDLSSLNASLHNPRDGVINTTLFISYLSDYIVEISNENVLGPVSILASIGGLYAFSVAFFLCLMAQCEGRIKKLRDEDTRMLKILSKQRAQRNWNKVRKFVMYTWGPSNLDPTDRSGKWPEGSVMDSIHGSFHKIRKPTRRGTSNGSKPKEPADMAVEIERVGETQQPSSSR

SEQ ID NO: 246821 - protein, 63 aa, Zea mays
  Clone ID: MRT4577_156684C.1.pep
TCGRSSVCVLHLITRICSVVPPLVFPYLHSGLFWVSMQCSLSVSTCALSVSAPMRRGQRMLKR

SEQ ID NO: 246822 - protein, 77 aa, Zea mays
  Clone ID: MRT4577_156685C.1.pep
HTLLAADFSGYLLKAGQRWSVCCAGSGRGRGLCLRRVTRGSHSIVGLWRSFLAVSTCLLPHAAARIGASVAHARTIE

SEQ ID NO: 246823 - protein, 124 aa, Zea mays
  Clone ID: MRT4577_156686C.1.pep
GAKFGDWGEVSTSVNTGIPALTQWSRAKTFVAVKRLKTFLPNNQLDSSIHLLNRHWSKLLFRNYFLNFILFWEFCEEQGTGTTRPRQPPTNLGHGEDVNCCYGHHWQEDGVQVSEGRSLVTGER

SEQ ID NO: 246824 - protein, 94 aa, Zea mays
  Clone ID: MRT4577_156687C.1.pep
LRVRCSSCVHDSFSSPPQPLDRSALVHHSQLLCLVTTTAILQPHHGQGSWRLSWPCCARSLFLTEHLEEDDKIQEVVSEEESASVPAHQVMGAI

SEQ ID NO: 246825 - protein, 50 aa, Zea mays
  Clone ID: MRT4577_156688C.1.pep
MAKIRRRLSRSCGARSLFLTEFPEEEDEIQEVVSEDESASVPAHQVMGAI

SEQ ID NO: 246826 - protein, 89 aa, Zea mays
  Clone ID: MRT4577_156689C.1.pep
MGQSPEYEVYFRKSYPTKEKDSQGYAGFRNQGEAFSKNQLRYFCRKSLLKITLNAKDNLYPQDLSRAKHFCKSYFDTSPEVSIKVWISR

SEQ ID NO: 246827 - protein, 109 aa, Zea mays
  Clone ID: MRT4577_15668C.1.pep
ASTDAWVKACAGGWAHACVHERSDGAWVRRRLRRRLHGPERVRRVPQRRARRPRPVGAARPRLRGVTHRRPCRARDGRPGGQLLLVPRPQLRLLAGLRLHGRHVRPLRR

SEQ ID NO: 246828 - protein, 76 aa, Zea mays
  unsure (1)..(76): unsure at all Xaa locations
  Clone ID: MRT4577_156690C.1.pep
DYFEYFGPDFRLHISRSNMTSQNTPEYMEEXKQRLFEICDVTHALVFNEAIRRCCHEAVVWDGKTYRDSIGTTTVL

SEQ ID NO: 246829 - protein, 73 aa, Zea mays
  Clone ID: MRT4577_156691C.1.pep
TPVRWLPSLDEQALKQTPLQKPLLEFYHLLLGILNFGAHKESTGESVSCSVNAEAVHGSGLRWHNSVLSSTSL

SEQ ID NO: 246830 - protein, 84 aa, Zea mays
  Clone ID: MRT4577_156692C.1.pep
PKLQLVRGSSCIHAGSSSSPQPPVQFTLVHHSQLLCLVTTTAILQPHHGQGSWRLSRYCCARSLFLTEHLEEVVFEGGVYSSGY

SEQ ID NO: 246831 - protein, 111 aa, Zea mays
  unsure (1)..(111): unsure at all Xaa locations
  Clone ID: MRT4577_156693C.1.pep
DVPGSYXLAVGGTTLYRFYFYFLNGRDNYLYSRVQRYFSTXERVSSPPGPXYLACYPRDGAELHCKTFLQLLDMVKAENRDPSTGTVXTRTSLTCGYDVCSYLEPSIVRAH

SEQ ID NO: 246832 - protein, 70 aa, Zea mays
  Clone ID: MRT4577_156694C.1.pep
NPMGLTKGFGFRREARKSRPPQKKLEGGLPFEKWGFTKCFTRGDNRGIKKTPAFAFKGRLGTLFFQGIFF

SEQ ID NO: 246833 - protein, 88 aa, Zea mays
  Clone ID: MRT4577_156695C.1.pep
LDIIYAYTVALEIKKKKEQQHKQLGVTKLAAYSDQQQTKGDNPLGATNLGAYLAHLHLTFRPVTCWLSGANSSIHPTSNNELSCLFKG

SEQ ID NO: 246834 - protein, 104 aa, Zea mays
  unsure (1)..(104): unsure at all Xaa locations
  Clone ID: MRT4577_156696C.1.pep
GAVDSSDLLLADFVLDDXXXRXRXRERRYRSQEASTSDGARSVSXPLKKKHPAQYKGRMTLDVCTTCLMAITCFHIHCYHNSISGGFTSTALISGQKLPDMTPT

SEQ ID NO: 246835 - protein, 154 aa, Zea mays
  Clone ID: MRT4577_156697C.1.pep
AAVCSAPNPQRCSVNVRQGSATASGGSEKLEPGNQQPANRKRELGPVRSEAIAVRGRVVVGIHETKKKLAIGYSTSRNRAAPFGFRLSPSLFSPLLWYFFSPSLNKERAAASLEWKVGIVVTTMIVVMLADGCLPSLLACLLAPYLMNGQCARA

SEQ ID NO: 246836 - protein, 193 aa, Zea mays
  Clone ID: MRT4577_156698C.1.pep
VRGNWLNVIEEHHLKYSGNCQVNDILDIGCSVGVSTRYLAEKFPSAQAVGLDLSPYFLAVAAQKEEKLSRPKPIRWVHANGEATGLSSDSFDLVSLAYVCHECPARAITGLVKEAFRVLRPGGTIALTDNSPKSKVLQELSPVLFTLMKSTEPFLDEYYMLDLEETMRKVGFVNVCSVLTDPRHRTVTATVPY

SEQ ID NO: 246837 - protein, 45 aa, Zea mays
  Clone ID: MRT4577_156699C.1.pep
RRRRTSEGILRVESLRDVSGAAHAICDDDKLSSSYVHEFFLKKCP

SEQ ID NO: 246838 - protein, 115 aa, Zea mays
  unsure (1)..(115): unsure at all Xaa locations
  Clone ID: MRT4577_15669C.1.pep
IPSHALLPKLVFSTTSDLFLCLKTQKKVLGQTIYYSSKYTIKHLLLLQQVNNTPPARRYNSNTTTDXHGDGATXTLKHXHXFQPHKPPPSXSLXXXLLXKTTXXTLIXXIXLLIL

SEQ ID NO: 246839 - protein, 86 aa, Zea mays
  Clone ID: MRT4577_1566C.1.pep
IGTRVPLTCPRRFHRTKITRRGYEDGRAVRTGRKGLCAGRRRLSQDDHTVDKRLEGTLQRVGVNTITAIQAVNIFTDDLFYPLLEP

SEQ ID NO: 246840 - protein, 179 aa, Zea mays
  unsure (1)..(179): unsure at all Xaa locations
  Clone ID: MRT4577_156700C.1.pep
MRTDSMALELHSGDRYKNAFHALIAAKNRSLPXEWTKRFXDAPARNKTPECRKMNPLGKLPDKYTPDAPVIESNXIVLYVARXKDDNLVCFTTAHIAQDHXDHCMYFDGNHGDPDVAWKLHAXLADITYAHTTDETAIASLSTSLGGLRXHLAMNTXCVRHSATLTDIELTCNLYHVIA

SEQ ID NO: 246841 - protein, 119 aa, Zea mays
  unsure (1)..(119): unsure at all Xaa locations
  Clone ID: MRT4577_156701C.1.pep
MAPLLAAAXNHAAALPGLRSHLXVGPNNESFSRHHLAPSSPQSSKGRCNLSFTTRSAIVCTQNGVHMLSPSEIPQRYWFPSRCTFGDATSEYQIVGAGNEDGKAESNWNHLRHNRPERI

SEQ ID NO: 246842 - protein, 124 aa, Zea mays
  Clone ID: MRT4577_156702C.1.pep
PTPQKTGEPISPGSTTGEERDRGRLPQERRRRRKKRPYASDPLPGETDGLRALDVAAGRREALPHGGYRPQRSGHNRRAGDGKGGQARGALTLPVRRPRLRCPLHTPEGCAPVRNPCRGLTCLL

SEQ ID NO: 246843 - protein, 161 aa, Zea mays
  unsure (1)..(161): unsure at all Xaa locations
  Clone ID: MRT4577_156703C.1.pep
AKKKKKKKKKKKKKKKKKKKKKKKGAGRSKRIQNLQGACFSIGSTFHIGAPDIDFTASLVYNELDWXETPGFTQLNRLKPRXPLAKWRNTKXAXTDRPSXQLGRLNGEWDTPCHPALSLERPLIPHIKTGKFAGPLTPALFFCFPPFAATLAVFPLNLLNG

SEQ ID NO: 246844 - protein, 61 aa, Zea mays
  Clone ID: MRT4577_156704C.1.pep
KVFWRATINTKTCEQEQALTEADSYKLIFLLMLTGQSLYCLPHLGLEANSERNVLRHWALL

SEQ ID NO: 246845 - protein, 43 aa, Zea mays
  Clone ID: MRT4577_156705C.1.pep
LFDYGVQEEESPSCSKDSHVLPVLVDKVALAILHHRIQRCCNA

SEQ ID NO: 246846 - protein, 127 aa, Zea mays
  unsure (1)..(127): unsure at all Xaa locations
  Clone ID: MRT4577_156706C.1.pep
MASGRRRDKDASLNEYEEQRLATIAENKKRLEALNIPTLSNMNQHGGTTKRTKRIHNTSDVATEGHNLRARPQKNCVGNGNEQINEDLGCESIGDFLCDNEDSRNSXEKKKKGRGVTRLDEIFAREA

SEQ ID NO: 246847 - protein, 80 aa, Zea mays
  Clone ID: MRT4577_156707C.1.pep
HTQKKDELYEKWSADDIPTTILPATTIPVALKGRTSLHASQSHRVVVAKLQHRPTCYLLVFKPLAPAGSLVRGTTKKRGS

SEQ ID NO: 246848 - protein, 112 aa, Zea mays
  Clone ID: MRT4577_156708C.1.pep
NFRGDPPVRFVQFGLSNSSLELPFMDDYLQLQQGSVSCRVRARRGCATHPRSIAERERRTRISKRLKKLQDLVPNMDKQTNTLDMLDLAVDYIKELKDQVEVRTYRLVCKQK

SEQ ID NO: 246849 - protein, 43 aa, Zea mays
  Clone ID: MRT4577_156709C.1.pep
QFCETALKTLLLWDPSLKPQVSLPLPQIFLIHDHTCGLQSCPY

SEQ ID NO: 246850 - protein, 133 aa, Zea mays
  unsure (1)..(133): unsure at all Xaa locations
  Clone ID: MRT4577_15670C.1.pep
MRFTSLTSRPNSNPGSREMALAKAKDIPASRSPPPLQKTSCPFCSPVKHVCQNLRPSYKDIQLHNQRDGAELPNALSNWTGXTTVPHSLSCNGKHIGDCDDTXLALINDDKLTPLLTEAGXSSTSASKTTITA

SEQ ID NO: 246851 - protein, 99 aa, Zea mays
  Clone ID: MRT4577_156710C.1.pep
GATHPCASISAPRTLDEEAFCVSSTEHYSVWEVEFKQLRRPIPGKPSVCKTTWTDEDGRQAAITAVLTNKRQRHGLDQGRLKTWGNGPCGTGDCSWGCA

SEQ ID NO: 246852 - protein, 547 aa, Zea mays
  Clone ID: MRT4577_156711C.1.pep
ITEEVKELTGGTLLSRDKESIVFYRGKDFLPPAVSLAIEKRRKLGSSTIYKAKPGIEESMPTQNDSVLKVSSDVSVHVREEGTSVTENRAESLNTVAKDVETRLSQAIAEKAKAEKLIEELEKASPLSKAEVRETISEDERYMLRKVGLKMKQFLLLGRRGVFDGTIENMHLHWKYRELVKIICKEHRLEDVEYAARTLEAESGGILVAVEKVSKGHAIIVYRGKNYKRPSKLRPKTLLSKRDALKRSLENQRCKSLKVHVLKLSKNIDYLRDQMNSSYYHKDMHDPSVNSVTLQQQDEEMPEVAPMSSEPEVEKWTSVEIDRALDLTKSGVPVEDMQSKVCFNKLEDDSSATAGPCLTGSSIAASSYNLIRHQNQRSSTVTSSPDGRYEGAPSKVVDAPKLDAESLSVSPLRAAPLSNQERLVLRKQALQMKKRPVLSIGRNNAITGVAKTIKTHFKKHPLAIVNIKNRADGTPIQQLISELEEATGSVLVSRETNKVILYRGWGAEVAQKSSRESSTDEGEKEVISPQLLEAIRLECGLLPADSG

SEQ ID NO: 246853 - protein, 195 aa, Zea mays
  unsure (1)..(195): unsure at all Xaa locations
  Clone ID: MRT4577_156712C.1.pep
SLLSHCWESCLPWCDSSXTWASDSSYRRSLSAYCVFLGGSLIAWKTINRXMVSCSSVEAELRDMALMTTEVTWLRWLLEDFGVSICMSTPLLSDSTGAISIARGPMKHELTKHISIDAHYTRAXRFRMVLFLFDVSSELQLADSFTKAQHRAQHRFYISKLSVFVFLIHLEFEGVLEIYVLVYISPLYKGFYAYL

SEQ ID NO: 246854 - protein, 172 aa, Zea mays
  unsure (1)..(172): unsure at all Xaa locations
  Clone ID: MRT4577_156713C.1.pep
WTLGLKLRPKTLLSKRDALKRSLENQRCKSLKVHVLKLSKNIDYLRDQMNSSYYHKDMHDPSVNSVTXTAARRSKHXNLNVVQPPLSLFHEYLIICLFQYKXKEMPEVAPMSSEPEVEKWTSVEIDRALDLTKSGVPVEDMQSKVCFNKLEDDSSATAGPCLTGSSIAAFIL

SEQ ID NO: 246855 - protein, 57 aa, Zea mays
  Clone ID: MRT4577_156714C.1.pep
AWPNHHDGTCLGSQFCFFVKVYPVLKASKNGPIVATLPQKFARSIVYFGACNSLLVA

SEQ ID NO: 246856 - protein, 89 aa, Zea mays
  Clone ID: MRT4577_156715C.1.pep
VPMEVYVLESCASSDSSKNSYMRIGYLGHNSVIYVYYLIDPQNGRSFSLLSSWSIKSAISPLQLFSGIAYVSNHSYSPTIRPWFRFQPE

SEQ ID NO: 246857 - protein, 52 aa, Zea mays
  Clone ID: MRT4577_156716C.1.pep
TNKVILYRGWGAEVAQKSSRESSTDEGEKEVISPQLLEAIRLECGLLPADSG

SEQ ID NO: 246858 - protein, 54 aa, Zea mays
  Clone ID: MRT4577_156717C.1.pep
GGKVLLQGPERTIFIFWQKCQGVLKGLIPSIIGVFGIKHGSCFCFTQGFVKKMD

SEQ ID NO: 246859 - protein, 56 aa, Zea mays
  unsure (1)..(56): unsure at all Xaa locations
  Clone ID: MRT4577_156718C.1.pep
KXXKKIWRNYGGVPRCVPRSRPEASITSDVRPPEISWPWRRASERGRCTTPMITRT

SEQ ID NO: 246860 - protein, 218 aa, Zea mays
  unsure (1)..(218): unsure at all Xaa locations
  Clone ID: MRT4577_156719C.1.pep
PAISDSVKDLIRRMLRSPPADRLSAHQVLCHPWICENGVAPDRALDPAVLTRLKQFSAMNRLKKMALRVISQSLSEEELAGLKEMFKAMDTDGSGAITFDELKEGLKRHGSKDLRESEIRDLMDAADVDKSGSIDYDEFIAATVHMSKLEREEHLLAAFAYFDKDGSGYITVDELEQACREHNMADVGLDDIITEVDQDNDGRIDXREFVAMMKXGII

SEQ ID NO: 246861 - protein, 231 aa, Zea mays
  Clone ID: MRT4577_15671C.1.pep
MALAAAIVVVFLLPGLLLTAMAATPYPHGRGGDALVGASKKYEGSSNLVDLRYHMGPVLSAAPLRLYVLWYGRWDPAHQAPVRDFLLSLSDTSLPRPSVADWWATAALYADQTLANVTRRVDLAGEAADESASLGRSLSRLDIQRVLASAVAAGRLPADTRGGAYLVLTAPGVGVQDFCRAVCGFHYFTFPSLVGHTLPYAWVGHSGGRCADVCAYPFALPSYMARSGMAA

SEQ ID NO: 246862 - protein, 156 aa, Zea mays
  Clone ID: MRT4577_156720C.1.pep
LITYNSLMDMYAKCSESWEAEKILNQLKCSQTMKPDVVSYNTVINGFCKQGLVKEAQRVLSEMVADGMAPCAVTYHTLVGGYSSLEMFSEAREVIGYMVQHGLKPMELTYRRVVESYCRAKRFEEARGFLSEVSETDLDFDKKALEAYIEDAQFGR

SEQ ID NO: 246863 - protein, 75 aa, Zea mays
  unsure (1)..(75): unsure at all Xaa locations
  Clone ID: MRT4577_156721C.1.pep
VDIYDIHFNSYLNSYTYPFPCGYLFHITLDXLXLXKDITLFPSSSLFLTXFYNSEYFSYSDPTHNPSPTPFSFPL

SEQ ID NO: 246864 - protein, 64 aa, Zea mays
  Clone ID: MRT4577_156722C.1.pep
RTSSSSKFRVQDPLEGLVGASLTTYPSFPPHVKFPIRASTVQKEQQAETVKRSLAQGARNSGTN

SEQ ID NO: 246865 - protein, 119 aa, Zea mays
  unsure (1)..(119): unsure at all Xaa locations
  Clone ID: MRT4577_156723C.1.pep
SPGQAQGNPPPGGQNGPPKSRPQRPPGAXEPPGPAPSGGPAQGPDQPIGEEXQKNQRGVHKGXAKGKRPQRQPRAKPVGPPAPXQQSRLLMPGTPLRSPPPNQRLCTPKQKKKKKKQKQ

SEQ ID NO: 246866 - protein, 96 aa, Zea mays
  Clone ID: MRT4577_156724C.1.pep
GRATSMSWCSSFSLISTTFLCSVSSSSLGASRSEPLLAPRQGATILIQMDGGCGCGLCLPRVWWRSLWVSFNIERDSGWVEYVPSQVVFSQLGSGR

SEQ ID NO: 246867 - protein, 69 aa, Zea mays
  Clone ID: MRT4577_156725C.1.pep
IVKSHGVCLEGIRFVLSVGLDVSCNTNKVVLGVVHATGDEPYIPSSHPFVLRAAGGKANCDGSKKTENM

SEQ ID NO: 246868 - protein, 237 aa, Zea mays
  unsure (1)..(237): unsure at all Xaa locations
  Clone ID: MRT4577_156726C.1.pep
MVTVREEMRKGPWTEQEDIQLVCTVRLFGDHRWDFIAQVSGLXLENYNLGLNRTGKSCRLRWVNYLHPGLKHGRMSPQEERIIIELHARWGNRWSRIARRLPGRTDNEIKNYWRTHMRKKAQERKMGMPSPSSSSSSLTYQTCLLDTIPVIGMGSGDTHNGSCVTSTLENTQSVMDGYPMDQIWKEIEAPHAPNLLSIAEGKEKTCSSSPCHLPSPVMWDYKCPEIFWKMGDQEIMM

SEQ ID NO: 246869 - protein, 189 aa, Zea mays
  unsure (1)..(189): unsure at all Xaa locations
  Clone ID: MRT4577_156729C.1.pep
RXRPNASEKKKKKKKKKKKKKKKKKKKKKKKKKKKKKKKRKKKKKEKRKKKKKKGKEKKQRKGGGKPRGGGAXTQPRKGKNRGGTKQKRGAEQPPXPRGRKRKKARRDGPAKQQNNQKGKGDAQERRAKSEREETHSGTATRASPEGRGPQAGEKAGAPRRAGHGKAEKGGQKKGRRATRSPNPKKEGG

SEQ ID NO: 246870 - protein, 58 aa, Zea mays
  Clone ID: MRT4577_15672C.1.pep
KKIGTTVVDPKIPFSIAMLSKKPLILLKMEWCLGKKKKKKNQKKKKKKKGRRSRSDAW

SEQ ID NO: 246871 - protein, 868 aa, Zea mays
  Clone ID: MRT4577_156730C.1.pep
MSGEKMTEQKKMTAETKLTEETKLFEEKKAADPFIARFIESMSKTNTEKITKEILESLSEDTDDSDSYDVESGDEDSEDRPWRPSHAVFGKSTIKQSHLDNMRGRYFRDMSIMRVGGDNIVPAPKENEVVIYRSFFKAGVRFPLSKFVVEVLKIYQIFLHQITPEAIMRMGIFVWAVRSQGLEPSAKCFCSMHELLYETKATGKAQYHNNFGCYGFIARPNASHPVPTFRKRWPGAWMEEWFYVKNDLKAREDIKEIIQRPIWSRFGLRRPKVEIDDAVEACQRAFSTVCAFIGTRDLIQEHISFRVWPLVESWDMPKETTDDSSDGGLVRLKYTFRFREKFDEPDDDWLKCIEATSDELLGAYSKAKDNALSAAFEGRGKKRLNKVFDAIGFKYPDYRYPLRGQGKKRKTATSATTVVSKGKKVKVLTHRPRYIEPAVVPEFVEGASSTAEARQAAPIAQSVEEPTVMPKTPIVEPVEAKVDKAEEPKVEEIMKIPEILSPPTEAKLLKVQKASAATPKWRRMANMLDAVLETTKALSPAPSKKIAEAAKAQAEAEAGQAEAEAGPSMPSEMKAITPEDEVDQQTSDAVMTGWQDTTEKAKSPAPKAAVEDANYIYRHASGKKLSEEEIAKSMGFPKLEDGLSILSKDDLADSLAYKSIKGLILSNALRAQKNTKDESCIMALNNLRSEANREISEYWKNYLEKNIEELRESKERCFEKSSDCVKKLKTSFAKVGAYSAEENFIRGDPEGIVEWISGEVEAFEEILSDRGDVCTFFGAWGISAILEKAGCDHIKAIAQAEAAFSVDYTKDPSAKATLMGGNFYNDVWVNGGRELAHEIIKKSEKDTHDAREEAKRAEEAAERERRID

SEQ ID NO: 246872 - protein, 62 aa, Zea mays
  unsure (1)..(62): unsure at all Xaa locations
  Clone ID: MRT4577_156731C.1.pep
QYSCVVNEARGLVRAVLPRGYAPQLRVQTQPPSSASPMKGNGPQAGQIAREKXPVKRWARKK

SEQ ID NO: 246873 - protein, 85 aa, Zea mays
  Clone ID: MRT4577_156732C.1.pep
ASARSRRPWHHRRRPGRRAWAAPPRCTFLRRRPRSSPPPPVNRLKKKACSTTTSGPRSKENHLLKTAPFLTRWGTRAKAPPPPRP

SEQ ID NO: 246874 - protein, 148 aa, Zea mays
  Clone ID: MRT4577_156733C.1.pep
MQRQQSGLRPRRRCSASRVASLERFECGSWSPPLPPPHVAAQHDAVDCHATEVAKTSCADDDAEAPVKMAFVFDGEPPAAKKGILKNSASSRLDSARASTSSQRHVRFSTVAAADASSSSSCPSSPCITPRLARARAEFHAFLEAQSA

SEQ ID NO: 246875 - protein, 54 aa, Zea mays
  Clone ID: MRT4577_156734C.1.pep
FYSKSKQLLPSPSAQGITIEQTCNAPAYVITQMHADTDVAGQCSEHHSTTRHRV

SEQ ID NO: 246876 - protein, 71 aa, Zea mays
  Clone ID: MRT4577_156735C.1.pep
WKPVFNINPVIFGLNFLFTQPNDGGPFNPEAAVVLCANPKMFWALVKKPMVGGYVGPPYFQKWACLYVGVG

SEQ ID NO: 246877 - protein, 97 aa, Zea mays
  Clone ID: MRT4577_156736C.1.pep
PSFFCFSGHGRTRGVITHGTRSSTAIIPRRPVRSHVTGPIITPCTNYVYWVPGQENLRESFFAYNRATSSLYYSYTPAMLRATAKALDMYRTGGLAE

SEQ ID NO: 246878 - protein, 236 aa, Zea mays
  Clone ID: MRT4577_156737C.1.pep
MGGDMPSHRRPDRRTPSAWEASFLEDRQLSLATLEFGLPFELASSQEFLAYGADGKPMSAVYSSKEFGLLPIPEGPRYGSIESYILPHLPLGDAAALRDAGAGGARFRIANLPRLEAKLAARNKLLGVTREMVQFHGSLQQLLPQLVHHRAKVAGLLNADADTELGKPAARLEHFQTEEMQDMMSRWEQDLQRARAAATAARRRLILAHTPPSSSQIMVMGEDVHDTLLMLAPELH

SEQ ID NO: 246879 - protein, 82 aa, Zea mays
  Clone ID: MRT4577_156738C.1.pep
FFPCGQPVQPSVRVPRCLSGRSPGPSRSWLVSVSVLALLMLEYRSLASWFPRARIRVGGLWCYPQPSLPIGRLFSSTCRICL

SEQ ID NO: 246880 - protein, 79 aa, Zea mays
  unsure (1)..(79): unsure at all Xaa locations
  Clone ID: MRT4577_156739C.1.pep
KRCGLSDTSAGERGLSXTQSPAGSPPSGGSSNADHRALTARFAGLVTSLGLAMRSVMAWRGVXQCLPYPTVRWRAHTMR

SEQ ID NO: 246881 - protein, 87 aa, Zea mays
  Clone ID: MRT4577_15673C.1.pep
CFVLELFLLQKLQVSTNLHYGNRGENKSDLENRTLECYKGYRGEKSSGAKVAMLKGEIEGGLGLMRRAGLLALNTMQNSTGIAPPMQ

SEQ ID NO: 246882 - protein, 45 aa, Zea mays
  Clone ID: MRT4577_156740C.1.pep
CDDQKHTILIKVFQIQLQKITWKRDFSLVNYKLLMSANIVTEKLT

SEQ ID NO: 246883 - protein, 302 aa, Zea mays
  Clone ID: MRT4577_156741C.1.pep
MVAMAAVQQKQQQQRRDAEAELNLPPGFRFHPTDEELVAHYLCARAAGRRPPVSIIAEVDLYRFDPWDLPERALFGRREWYFFTPRDRKYPNGSRPNRAAGSGYWKATGADKPVEHGGRTAGIKKALVFYHGKPPRGVKTEWIMHEYRLAEAGGARAKKSGAGTLRLDDWVLCRLYNKKNEWEKMQQQKEKEKEKKAMESEASLSHSHSDTRTPESEIDDDPFPELGSLPAFDDMGAAPAPAGVVLPKEEVEDFGDLGGDDWLAGINLDDLQMPGDAADFYGSMLVSPMAAKMEPDGGFPFF

SEQ ID NO: 246884 - protein, 129 aa, Zea mays
  Clone ID: MRT4577_156742C.1.pep
ARGRLYNKKNEWEKMQQQKEKAMESEAALSHSHSDTRTPESEIDDDPFPELGSLPSFDDMGPGAAPAPAGVVLPKEEVEDFGDLGGDDWLAGINLDDLQMPGDAADFYGSMLVSPMAAKMEPDGGFPFF

SEQ ID NO: 246885 - protein, 135 aa, Zea mays
  Clone ID: MRT4577_156743C.1.pep
MPDLSGITAEDAGPQLITSETSAGEEAAAVVQPQPSADAARRKRKRRRQQEQLSASASFFERLVQRLMEHQESLHRQFLEAMERRERDRAARDEAWRRQEADKFAREAAARAQDRASAAAREAAIIAYLEKISGE

SEQ ID NO: 246886 - protein, 46 aa, Zea mays
  Clone ID: MRT4577_156744C.1.pep
LLLVALGGDQSTRVPTNILQRIVIVMCTVKFFCHSGPTVQSFKGLS

SEQ ID NO: 246887 - protein, 300 aa, Zea mays
  Clone ID: MRT4577_156745C.1.pep
MVAMAAVQQQQQQQRRDAEAELNLPPGFRFHPTDEELVAHYLCARAAGRRPPVSIIAEVDLYRFDPWDLPERALFGRREWYFFTPRDRKYPNGSRPNRAAGSGYWKATGADKPVEHGGRTAGIKKALVFYHGKPPRGVKTEWIMHEYRLAGDAKKSGAGTLRLDDWVLCRLYNKKNEWEKMQQQKEKEKKAMESEASLSLSHSHSDTRTPESEIDDDPFPELGSLPAFDDMGPGAAPAPAGVVLPKEEVEDFGDLGGDDWLAGINLDDLQMPGDAADFYGSMLVSPMAAKMEPDGGFPFF

SEQ ID NO: 246888 - protein, 80 aa, Zea mays
  Clone ID: MRT4577_156746C.1.pep
MSSMNCKCYCSSSWSCVMSCYCIIHNLQTYFESSLKTMVLTVHTTTASTTGFEAGTDVRACHCNTCKCGTSCGCFCCICN

SEQ ID NO: 246889 - protein, 301 aa, Zea mays
  Clone ID: MRT4577_156747C.1.pep
MVAMAAVQQQRRDAEAELNLPPGFRFHPTDEELVAHYLCARAAGRRPPVSIIAEVDLYRFDPWDLPERALFGRREWYFFTPRDRKYPNGSRPNRAAGSGYWKATGADKPVEHGGRTAGIKKALVFYHGKPPRGVKTEWIMHEYRLAEAGGARAKKSGAGTLRLDDWVLCRLYNKKNEWEKMQQQKEKEKEKKAMESEASLSHSHSDTRTPESEIDDDTFPELGSLPAFDDMGPAPAAAATAGVVLPKEEVEDFGDLGGDDWLAGINLDDLQMPGDAADFYGSMLVSPMAAKMEPDGGFPFF

SEQ ID NO: 246890 - protein, 128 aa, Zea mays
  Clone ID: MRT4577_156748C.1.pep
ELPRLRAVGTFQPDFFVFGTNSLCAFALNLAVFLLVGKTSALTMNVAGVVKDWLLIAFSWSVIRDTVTPINLFGYGIAFLGVGYYNHVKLQALKAKEAQKKATQADEEAGSLLQERDGHSDRKSDNQA

SEQ ID NO: 246891 - protein, 300 aa, Zea mays
  Clone ID: MRT4577_156749C.1.pep
MVAMAAVQQQQQQQRRDAEAELNLPPGFRFHPTDEELVAHYLCARAAGRRPPVSIIAEVDLYRFDPWDLPERALFGRREWYFFTPRDRKYPNGSRPNRAAGSGYWKATGADKPVEHEGRTAGIKKALVFYHGKPPRGVKTEWIMHEYRLAEAGGARAKKSGAGTLRLDDWVLCRLYNKKNEWEKMQQQKEKEKKAMESEASLSHSHSDTRTPESEIDDDPFPELGSLPAFDDMGAAPAPAGVVLPKEEVEDFGDLGGDDWLAGINLDDLQMPGDAADFYGSMLVSPMAAKMEPDGGFPFF

SEQ ID NO: 246892 - protein, 75 aa, Zea mays
  Clone ID: MRT4577_15674C.1.pep
FLIRSKSHYESSSLGVGTGSQEGGGSHSLTLLGVVGIGEKAEGRVSRRGCAPPSRRSRRSRRRAGCVEPPPRPGP

SEQ ID NO: 246893 - protein, 103 aa, Zea mays
  unsure (1)..(103): unsure at all Xaa locations
  Clone ID: MRT4577_156750C.1.pep
LGAPEGHLMQGAKTGVRSAVAFKEVCAGCLHIFNSGSEEQIRSIYGLGNMHLLCWRTLSCYLFIDTSDPQEGGHSSLPLFAHCLHLFVXTSRLGDFRCTPADG

SEQ ID NO: 246894 - protein, 45 aa, Zea mays
  Clone ID: MRT4577_156751C.1.pep
APGVQLAHGDVCVGDLAARMHEHLGLIPHGVERGDVADRHQVKSN

SEQ ID NO: 246895 - protein, 357 aa, Zea mays
  Clone ID: MRT4577_156752C.1.pep
MGRDGGGGVAGGMSDSVLRKVLLSYFYVAVWIFLSFSVIVYNKYILDPKMYNWPFPISLTMVHMGFCSSLAVALVRVLRVVDLPTSPSMTPQFYTSSVVPIGALYAMSLWFSNSAYIYLSVSFIQMLKALMPVAVYSIGVLFKKETFRSSSMLNMLSISFGVAIAAYGEARFDVRGVALQLAAVAFEATRLVLIQILLTSKGISLNPITSLYYVAPCCFCFLLVPWAFVELPRLRAVGTFQPDFFVFGTNSLCAFALNLAVFLLVGKTSALTMNVAGVVKDWLLIAFSWSVIRDTVTPINLFGYGIAFLGVGYYNHVKLQALKAKEAQKKATQADEEAGSLLQERDGHSDRKSDNQA

SEQ ID NO: 246896 - protein, 100 aa, Zea mays
  Clone ID: MRT4577_156753C.1.pep
RGFFALRPRRGQAGGRHQSHEDQGRQLQVQLEVLIHWVFCSLFWSEFSSESLRWILLAECWPCTGAYVQCTPANLVGVHLGRRVQVVVYNCCSSRPTFRV

SEQ ID NO: 246897 - protein, 357 aa, Zea mays; identical to SEQ ID NO: 246895
  Clone ID: MRT4577_156754C.1.pep

SEQ ID NO: 246898 - protein, 90 aa, Zea mays
  Clone ID: MRT4577_156755C.1.pep
VVGRGLVVLGAPLDLEELLEGVLRLPRQRRRGGGGGGEEPPRERSRQGEHRGGAGSRDRADTGEERARARALVYSSVSRAAAAAAASGQG

SEQ ID NO: 246899 - protein, 92 aa, Zea mays
  Clone ID: MRT4577_156756C.1.pep
DAWAALTMNVAGVVKDWLLIAFSWSVIRDTVTPINLFGYGIAFLGVAYYNHVKLQALKAKEAQKKAAQADEEVGSLLQERDGHGDHKSDNQA

SEQ ID NO: 246900 - protein, 38 aa, Zea mays
  Clone ID: MRT4577_156757C.1.pep
YITTRDIFFLLNPLYQYYFLLHQFCTSRFIEYTTAISL

SEQ ID NO: 246901 - protein, 381 aa, Zea mays
  unsure (1)..(381): unsure at all Xaa locations
  Clone ID: MRT4577_156758C.1.pep
MGAGDDDTKPAAMEVTSTSSPPSLPSPAAPPPSLLRSVLLSYAYVGIWMSLSFSVIVYNKYILDPKLYNWPFPISLTMIHMAFCALLATTLVRVLRVVDVPSSSAPHQQQQAMTPRLYASSVLPIGALYALSLWFSNSAYIYLSVSFIQMLKALMPVAVKLLXVALRTDAFRVLSMLNMLSISFGVAIAAYGEARFDVRGVALQLAAVAFEATRLVLIQILLTSKGISLNPITSLYYVAPCCFCFLLVPWAFVELPRLRAVGTFQPDFFVFGTNSLCAFALNLAVFLLVGKTSALTMNVAGVVKDWLLIAFSWSVIRDTVTPINLFGYGIAFLGVGYYNHVKLQALKAKEAQKKATQADEEAGSLLQERDGHSDRKSDNQA

SEQ ID NO: 246902 - protein, 357 aa, Zea mays
  Clone ID: MRT4577_156759C.1.pep
MGRDGGGGVAGGMSDSVLRKVLLSYFYVAVWIFLSFSVIVYNKYILDPKMYNWPFPISLTMVHMGFCSSLAVALVRVLRVVDLPTSPSMTPQFYTSSVVPIGALYAMSLWFSNSAYIYLSVSFIQMLKALMPVAVYSIGVLFKKETFRSSSMLNMLSISFGVAIAAYGEARFDVRGVALQLAAVAFEATRLVLIQILLTSKGISLNPITSLYYVAPCCFCFLLVPWAFVELPRLRAVGTFQPDLFVFGTNSLCAFALNLAVFLLVGKTSALTMNVAGVVKDWLLIAFSWSVIRDTVTPINLFGYGIAFLGVGYYNHVKLQALKAKEAQKKATQADEEAGSLLQERDGHSDRKSDNQA

SEQ ID NO: 246903 - protein, 109 aa, Zea mays
  unsure (1)..(109): unsure at all Xaa locations
  Clone ID: MRT4577_15675C.1.pep
PPNYSPKLIREAGGYEVIKAAIDKLGKRPKEHIXAYGEGNEPPLPGRPETADINPFKWGVGNRGXSIRVGPDPEREGKGFFEDPRPGSNMDPYVVPGMIAETPLLWNGN

SEQ ID NO: 246904 - protein, 133 aa, Zea mays
  Clone ID: MRT4577_156760C.1.pep
GGGFSQLPLGPLFDVGPPRPMPPPPLFGLAPPHPFLASGPFPVSNQVAPPPPVPMAALGPPPPPFPLFFLPNPFGPPPQPPPGVAPSANPFLYPGFGGFPPVNGMPPPAPPSWGAPPPFSQSKNLCQVCLPIP

SEQ ID NO: 246905 - protein, 357 aa, Zea mays
  unsure (1)..(357): unsure at all Xaa locations
  Clone ID: MRT4577_156761C.1.pep
MGRDGGGGVAGGMSDSVLRKVLLSYFYVAVWIFLSFSVIVYNKYILDPKMYNWPFPISLTMVHMGFCSSLAVALVRVLRVVELPTSPSMTPQFYTSSVVPIGALYAMSLWFSNSAYIYLSVSFIQMLKALMPVAVYSIGVLFKKETFRSSSMLNMLSISFGVAIAAYGEARFDVRGVALQLAAVAFEATRLVLIQILLTSKGISLNPITSLYYVAPXCFCFLLVPWAFVELPRLRAVGTFQPDFFVFGTNSLCAFALNLAVFLLVGKTSALTMNVAGVVKDWLLIAFSWSVIRDTVTPINLFGYGIAFLGVGYYNHVKLQALKAKEAQKKATQADEEAGSLLQERDGHSDRKSDNQA

SEQ ID NO: 246906 - protein, 392 aa, Zea mays
  Clone ID: MRT4577_156762C.1.pep
MRRHQRLLLPLLLHHHHQEVQQGGSGSGGGGGGGDMGRDGGGGVAGGMSDSVLRRGGLSYFYVAVWIFLSFSVIVYNKYILDPKMYNWPFPISLTMVHMGFCSSLAVALVRVLRVVDLPTSPSMTPQFYTSSVVPIGALYAMSLWFSNSAYIYLSVSFIQMLKALMPVAVYSIGVLFKKETFRSSSMLNMLSISFGVAIAAYGEARFDVRGVALQLAAVAFEATRLVLIQILLTSKGISLNPITSLYYVAPCCFCFLLVPWAFVELPRLRAVGTFQPDFFVFGTNSLCAFALNLAVFLLVGKTSALTMNVAGVVKDWLLIAFSWSVIRDTVTPINLFGYGIAFLGVGYYNHVKLQALKAKEAQKKATQADEEAGSLLQERDGHSDRKSDNQA

SEQ ID NO: 246907 - protein, 72 aa, Zea mays
  Clone ID: MRT4577_156764C.1.pep
NMNGKELDGRNITVNQAQSRDGDGDGGGYGGGRGGGGYGGGRRDGGYGGGGGYGGRRGGGGGYGGGGGGWRD

SEQ ID NO: 246908 - protein, 71 aa, Zea mays
  Clone ID: MRT4577_156765C.1.pep
MADHHRGATVGGGGYGDLQRGGGMHGEAQHQQKQGAMMTVVKGATVGTFGGWMLVVGGLILARSANVLTGA

SEQ ID NO: 246909 - protein, 111 aa, Zea mays
  unsure (1)..(111): unsure at all Xaa locations
  Clone ID: MRT4577_156766C.1.pep
VSFLPRRRTESGCYPPISSRIRSARNGGTLPRPPVPVPRRRVCRLLRPRPLWLPLFSPAVGXXXXPXXLLYXPXXPHKXXXQXXXXXXLLPLLQXXXXPLXXXPTPYLXXP

SEQ ID NO: 246910 - protein, 71 aa, Zea mays
  Clone ID: MRT4577_156767C.1.pep
KDQVYSSQKHTKIPLPEQMVRGGGGGELKICNHVALECALWGGGYTRTSEQTNSGYLATDEHQSIYRLVLL

SEQ ID NO: 246911 - protein, 89 aa, Zea mays
  Clone ID: MRT4577_156768C.1.pep
MQVITDRETGRSRGFGFVTFSSENSMLDAIENMNGKELDGRNITVNQAQSRGGGGGGGGYGGGRGGGGGYGGGRRDGGYGGGGGGGWRD

SEQ ID NO: 246912 - protein, 61 aa, Zea mays
  Clone ID: MRT4577_156769C.1.pep
GGVFFFLLQNALVKLLFINGTLISYNTTRQHDAMGLTASIGLFSLKAQHSWRGACGHNGHM

SEQ ID NO: 246913 - protein, 92 aa, Zea mays
  unsure (1)..(92): unsure at all Xaa locations
  Clone ID: MRT4577_15676C.1.pep
PSLVVLAFIALVSSVSCTQTGVCCCGXQLSHEQQLYPLQHXHSQLQHHXPPRQHYLQXSNXQHQVYMHPQKHQQQQHFDVQLQQHLPTCFVK

SEQ ID NO: 246914 - protein, 133 aa, Zea mays
  Clone ID: MRT4577_156770C.1.pep
MAAADVEYRCFVGGLAWATSNESLENAFASYGEILDSKVITDRETGRSRGFGFVTFSSENSMLDAIENMNGKELDGRNITVNQAQSRGGGGGGGGYGGGRGGGGGYGGGRRDGGYGGGGGYGAGRLVFRFLPL

SEQ ID NO: 246915 - protein, 205 aa, Zea mays
  unsure (1)..(205): unsure at all Xaa locations
  Clone ID: MRT4577_156771C.1.pep
MAAADVEYRCFVGGLAWATSNESLENAFASYGEILDSKVXSSSLGFIPRSVCAVGARSGSWFNRSASFWYRSAFARIEHDVFMXMQVITDRETGRSRGFGFVTFSSENSMLDAIENMNGKELDGRNITVNQAQSRGGGGGGGGYGGGRGGGGYGGGRRDGGYGGGGGYGGRREGGGGGYGGGGGYGGRREGGGGGYGGGGGGWRD

SEQ ID NO: 246916 - protein, 54 aa, Zea mays
  Clone ID: MRT4577_156773C.1.pep
LATAVTVLFSPAVTPSAGGNPASDSAAGSGVKLRAGVSGGVALAVVSAIASSLF

SEQ ID NO: 246917 - protein, 63 aa, Zea mays
  Clone ID: MRT4577_156774C.1.pep
RNSALKEATYRETLLGDKLPSHHRATWLTYWQSVTQWITNNVKSYFRNLKSHLGLEGIEVEMN

SEQ ID NO: 246918 - protein, 198 aa, Zea mays
  Clone ID: MRT4577_156776C.1.pep
MFSGTQQKCKVCTKTVYPMDQLSTDGVVFHRSCFKCQHCKSTLSLSNYSSFEGVPYCKTHFEQLFKETGSYNKSFQSQSPAKITPEKLAPELTRSPSKAARMFSGTQDKCATCGKTAYPLEKVTVEEKSYHKSCFKCSHGGCAITPSNYAALEGILYCKHHFSQLFKEKGSYNHLIKCASVKRAAEAQPEQPASDSSS

SEQ ID NO: 246919 - protein, 123 aa, Zea mays
  Clone ID: MRT4577_156777C.1.pep
MAAADVEYRCFVGGLAWATSNESLENAFASYGEILDSKVITDRETGRSRGFGFVTFSSENSMLDAIENMNGKELDGRNITVNQAQSRGGGGGGGGYGGGRGGGGGYGGGRRDGGYGGGGGWRD

SEQ ID NO: 246920 - protein, 62 aa, Zea mays
  Clone ID: MRT4577_156778C.1.pep
IYVKFMCDMYVSYVEAGSPTVHILAADVCARGRHPVIPEKGHNRSNVTGWAIARVSQTQLGS

SEQ ID NO: 246921 - protein, 46 aa, Zea mays
  Clone ID: MRT4577_156779C.1.pep
QLPEVGVTSCLRFPGQLNSNLSKMMATEDNVPRTVLWETSLLNCRP

SEQ ID NO: 246922 - protein, 323 aa, Zea mays
  unsure (1)..(323): unsure at all Xaa locations
  Clone ID: MRT4577_15677C.1.pep
EESDGGKAGVGSRGEERDLILRSAQATMAEDATSSHPSRYVKLTKDQDAPAEDIRPGELNQPVHVPQLEGRRCSECGQVLPESYEPPADEPWTTGIFGCTDDPETCXNLVSLLDWXGHGGLLILLATTHADSKYSFSPKCLIKCLLCLALVXLPVNICMESLGRTGLFCPCVLFGRNVEAVREDIPWTTPCVCHAVFVEGGITLAILTAIFHGVDPRTSFLIGEGLVFSWWLCATYTGIFRQGLQRKYHLKNSPCDPCMVHCCLHWCANCQEHRERTGRLAENNAVPMTVVNPPPVQEMSMLEEVEEKGAEKSEHDDVEVIPL

SEQ ID NO: 246923 - protein, 60 aa, Zea mays
  Clone ID: MRT4577_156780C.1.pep
EKATTRGPHFRWLGVCHKGLGQKKVRLVRSFPTRQVWFFPTRTGQCGLSRLEKFFPLLWV

SEQ ID NO: 246924 - protein, 75 aa, Zea mays
  Clone ID: MRT4577_156781C.1.pep
FLEDIRTDCSCPLLSLGLILLYPHHNLLSNGFTHGNDWIVPSIHDGVVKTLTHVVRTAFFINSTFHVGLSLISLK

SEQ ID NO: 246925 - protein, 69 aa, Zea mays
  Clone ID: MRT4577_156782C.1.pep
LMGPPASSNSAPGIPPPASGVPTRSPGAFPHRLQPVRYHHNPFFPPTCLNNNGSSFPKWSGTVVPIVSC

SEQ ID NO: 246926 - protein, 71 aa, Zea mays
  Clone ID: MRT4577_156783C.1.pep
MIIPVRCFTCGKVIGNKWDLYLDLLQADYSEGDALDALELFRYCCRRMLMTHVDLIEKLLNYNTLEKTETS

SEQ ID NO: 246927 - protein, 85 aa, Zea mays
  unsure (1)..(85): unsure at all Xaa locations
  Clone ID: MRT4577_156784C.1.pep
QAPKRPPGGKPTXAGTGPGTEDKTRARQEAXPSRREXPXXNXXXRSQRXAPEARAXXGXXDPTGATQRAGPQPKXEXAGGPGERA

SEQ ID NO: 246928 - protein, 119 aa, Zea mays
  unsure (1)..(119): unsure at all Xaa locations
  Clone ID: MRT4577_156785C.1.pep
MDPEDVRKSLEPTEPVEENTGSTTAEVHFYDDSVLRGGSIKTREHGRLLXSFDDTICLASPAEHLXSVVRIHVGNQVGSNVIGCSGLHNXGHILEVSDSLVDAAVVGEEIEVGGEISVP

SEQ ID NO: 246929 - protein, 71 aa, Zea mays; identical to SEQ ID NO: 246926
  Clone ID: MRT4577_156786C.1.pep

SEQ ID NO: 246930 - protein, 71 aa, Zea mays; identical to SEQ ID NO: 246926
  Clone ID: MRT4577_156787C.1.pep

SEQ ID NO: 246931 - protein, 71 aa, Zea mays; identical to SEQ ID NO: 246926
  Clone ID: MRT4577_156788C.1.pep

SEQ ID NO: 246932 - protein, 128 aa, Zea mays
  Clone ID: MRT4577_156789C.1.pep
MYSCTHTHKNGARSPQLGDRAGGGFVRPPAGQPSKLDERLHLPLRYSSNDTAAAAAKMIIPVRCFTCGKVIGNKWDLYLDLLQADYSEGDALDALELFRYCCRRMLMTHVDLIEKLLNYNTLEKTETS

SEQ ID NO: 246933 - protein, 119 aa, Zea mays
  Clone ID: MRT4577_15678C.1.pep
MATRPGGAGATTAGRKIDEGVGIGLEGVGVTELERVSARTSSAMGAEEEHQGDGWRAGKSEGDKPQEEGSFLAEHWGAARTSRGVATMAGRGEGGTAMGRGEHLGGRERHGWEWRTAGV

SEQ ID NO: 246934 - protein, 499 aa, Zea mays
  Clone ID: MRT4577_156790C.1.pep
MEGAGKDGNPLRNYRIGKTLGIGSFGKVKIAEHISTGHKVAIKILNRRKIRGMEMEEKVKREIKILRLFMHPHIIRLYEVIDTPADIYVVMEYVKCGELFDYIVEKGRLQEEEARRFFQQIISGVEYCHRNMVVHRDLKPENLLLDSKCNVKIADFGLSNVMRDGHFLKTSCGSPNYAAPEVISGKLYAGPEVDVWSCGVILYALLCGTLPFDDENIPNLFKKIKGGIYTLPSHLSGAARDLIPRMLVVDPMKRITIREIREHDWFKILLPRYLTVPPPDSAQQVKKVDEETLREVLGMGYDKNLLVESIQKRLQNEATVAYYLLLDNRLRTTSGYLGAECQEAMDSSFSNIASYETPSSARGNRQQIFMESPVGLRPHLPAERKWALGLQSRAHPKEIMSEVLKALQELNVYWKKIGHYNMKCRWSPGFPAQIHNNHNFSAGSIETDSLSERLSLIKFEIQLYKTRDEKYLLDLQRVSGPQLLFLDLCAAFLTQLRVL

SEQ ID NO: 246935 - protein, 70 aa, Zea mays
  Clone ID: MRT4577_156791C.1.pep
SRACIAATPQLFVFSLNINWFISPHFLVRQQHAISCTPNIASSCDHQDQVLIAIEQMPRHADRGQCVASP

SEQ ID NO: 246936 - protein, 155 aa, Zea mays
  unsure (1)..(155): unsure at all Xaa locations
  Clone ID: MRT4577_156794C.1.pep
HNVIPSVEERLMFSGKQYGEGHTLADYNIXKERTLLLVIXTKITMRGGGGTLTXKHITFYVDSYDTILKVKDQYPGHXGIPTNTGGIIFDGKLFRDGGTLCXYNIQKESILQLELHIXGGMQIFVKNLTGKNIKLEVETYYTIVNVKFMIHDKEG

SEQ ID NO: 246937 - protein, 270 aa, Zea mays
  Clone ID: MRT4577_156795C.1.pep
TARSSTAVTSPLTRPSPVAPRAFFSSSPPHAPSLPASGYIPRREYGLVPMVIEHTSRGERAYDIFSRLLKERIVCIHGPITDDTASLVVAQLLFLESENPAKPVHLYINSPGGVVTAGLAIYDTMQYIRSPVTTLCIGQAASMASLLLAAGASGERRALPNARVMIHQPSGGASGQASDIAIHAKEILKVRDRLNKIYAKHTGQAIDRIEQCMERDMFMDPEEAHEWGLIDEVIEHRPVSLVSDAVGSDPPNLGGGGTEVNKGTDEPSPA

SEQ ID NO: 246938 - protein, 79 aa, Zea mays
  unsure (1)..(79): unsure at all Xaa locations
  Clone ID: MRT4577_156796C.1.pep
IRLESCCYFLSDLRSTVDSWASVFAPIRPXVERTNIGSTIFCVALATWTTTFDSGGERIFGPVWNELEMNKDDRHVRRV

SEQ ID NO: 246939 - protein, 62 aa, Zea mays
  Clone ID: MRT4577_156797C.1.pep
VHQLAGPLPSQPYSSPRPRRRGGGSGTGTASCPYSLSSLGRWQPPPPPRVARGADGGGACRG

SEQ ID NO: 246940 - protein, 90 aa, Zea mays
  Clone ID: MRT4577_156798C.1.pep
DRRKTLLQISSGHVNKPKVNGVVDTKVKASLTTNRILEKNRFKEHLRRETCVARLCIFMTILYFIKCKSNYISLWRPYIEPRPSIEMYES

SEQ ID NO: 246941 - protein, 69 aa, Zea mays
  Clone ID: MRT4577_156799C.1.pep
RAHTFIARQSWFIPDKTQRPLRYNIKKRLGNHNGAANRSTIHSKVKGLAVSQSYSGPRNLERSHSYGHL

SEQ ID NO: 246942 - protein, 61 aa, Zea mays
  Clone ID: MRT4577_15679C.1.pep
FSSFFFFFFFLTDTFLLNVSHDHKLALIRCMDIGVVMSFQFYATNFKDLIGLGSDPIPIHF

SEQ ID NO: 246943 - protein, 73 aa, Zea mays
  Clone ID: MRT4577_1567C.1.pep
SPRTTFEHDAVERAFGTQTSTQTCCAHFLRVMAQEVDMVGGSDVLTMHNDYNKIKTQKGGRPPDLVCPKKKNA

SEQ ID NO: 246944 - protein, 121 aa, Zea mays
  unsure (1)..(121): unsure at all Xaa locations
  Clone ID: MRT4577_156800C.1.pep
PKGNKGTGPGPPVEVIKGGEPVPQMPXQRGGGFGLLPSQLDRLMKTRSLAFGWTGLANASAPDLGFRRTQPLFARVSHSIYCFVFAALFSQDMVLQGLKHIAPLPPLYSNPGSCSVSKPSC

SEQ ID NO: 246945 - protein, 38 aa, Zea mays
  Clone ID: MRT4577_156801C.1.pep
ISSLYWHSQDFQFKFPDSILCKIINEYKFHTEYSFVHF

SEQ ID NO: 246946 - protein, 81 aa, Zea mays
  unsure (1)..(81): unsure at all Xaa locations
  Clone ID: MRT4577_156802C.1.pep
FXYGPKXFCPKRREAXVXFRKGXLAXXLAFQKEXXXKQXSXXFFFNGVSCLTKGINSTVWRNLALXXXAEXLTLXXIERAV

SEQ ID NO: 246947 - protein, 67 aa, Zea mays
  Clone ID: MRT4577_156803C.1.pep
LCAWVMADTTLWVMGSYDELKPCAGSTNGGVMSFLISILSSAVEGCRSLWLVDRSACMTAPRREIDS

SEQ ID NO: 246948 - protein, 157 aa, Zea mays
  Clone ID: MRT4577_156804C.1.pep
RTIACRCRNITRSNQPSGATSNEVGWNGDLERRPAPEKPSRARLGWKPSAGAGQSVGNSMARELGRPEKRRDGAGRSAADHGGGQLRAMEMGTRHAGELWPSLELQRSSSGREAAQGAGYRASKGGSRPGLDRRGCAIRLRRDLGDNRHPGRPRGTQ

SEQ ID NO: 246949 - protein, 243 aa, Zea mays
  Clone ID: MRT4577_156805C.1.pep
MSSSAAMEAIDELVQLSESMRQAASLLADDDPSDETASRRPSTFLNAVALGNVGAGKSAVLNSLIGHPVLPTGENGATRAPIVVDLARDPGLSSKSIVLQIDSKSQQVSASALRHSLQDRLSKGASSGSGRSRSDEIYLKLRTSTAPPLKLIDLPGIDQRVMDDSTISEYAGHNDALLIVVIPAMQAADVASSRALRLAKDIDPDGTRTIGVLSKIDQAAADAKTVSCVQSILSIRVPHEQQL

SEQ ID NO: 246950 - protein, 118 aa, Zea mays
  Clone ID: MRT4577_156806C.1.pep
YSKPCRSLVHSVSTKQGKIKHPECLCIQALVLAAHSNKSTEAHRSTFVSSSCSDQASSPSPDPSCASTTAKPTTAAAAPTAAAHRTMPPPPNHDPPLPGGLMVLNRQKACSRRRVARV

SEQ ID NO: 246951 - protein, 64 aa, Zea mays
  unsure (1)..(64): unsure at all Xaa locations
  Clone ID: MRT4577_156807C.1.pep
LTSTWRASHILALDPIMQIFKFIHQHPLRRNTRLTASRXRLSLTSASRDQLAHHTKPNKGNDDD

SEQ ID NO: 246952 - protein, 117 aa, Zea mays
  unsure (1)..(117): unsure at all Xaa locations
  Clone ID: MRT4577_156808C.1.pep
GGGAPPQQEGGGGGPPPPSPPPEEPHPPAQGAPPPPAGPXLLSGETPPPPCAVQGHRPPPPPPGPNKXSGPGLTVWTPCFRAGPPGMICTPPPPPPFMPGQRMCSAPVLGAKPPCFC

SEQ ID NO: 246953 - protein, 106 aa, Zea mays
  Clone ID: MRT4577_156809C.1.pep
MRRTPAKGMTEDQGASRDGACCRKGAKERQPWVMARELDWCMHGWRKRAGTVQFGKVAAWASSSRQGVEGKFAMGEERAQGRAEEDELGRGEQGRPEKACGHAMAE

SEQ ID NO: 246954 - protein, 133 aa, Zea mays
  Clone ID: MRT4577_15680C.1.pep
ADGVRVVTPEARPGSLGMRPQVTTSRTTETLASGVSLGPGGRTSAERVQKPDLGPLPMVRLRYDSDWADDERDTGLSLPERDSRERGFGRTEAMLPGRDLYVSMRDPFKKEMFGRDVAATNKEGGQDRLWRSP

SEQ ID NO: 246955 - protein, 53 aa, Zea mays
  Clone ID: MRT4577_156810C.1.pep
VGVRGQGSDRGVFDQHRGLQVVASGKGRRFVASGVNIVDINIRYSSKHSPIHQ

SEQ ID NO: 246956 - protein, 91 aa, Zea mays
  Clone ID: MRT4577_156811C.1.pep
VWLQSTIALLFSLAALRIVFTGHNIARAVAYRGATAVYGFISPWLDMLVSDMLSVWAITLSILLCGYSLYFPISIYNPAVSAAIAAGGGWG

SEQ ID NO: 246957 - protein, 106 aa, Zea mays
  Clone ID: MRT4577_156812C.1.pep
TPPKSILVRKVPSPPPPENYFLALFGWAPRFGFQTSTQGGSLPTRGPTWGAKIKKLKVFGGEKFKGAPIPGFGACLLIKGPLLFSNGLFPLAIGGGKNALILFPRA

SEQ ID NO: 246958 - protein, 119 aa, Zea mays
  unsure (1)..(119): unsure at all Xaa locations
  Clone ID: MRT4577_156813C.1.pep
LNQLSTRDTTTYWAKQLLAYNQLANGYSYEHQXLLPLNQSDAQNRGDYLQXRHLLPASQVAAASRADLLTQXQLLPFYQQFAANPAALLQLQQLLPFVQLALTNPADSYQQHIIGGALF

SEQ ID NO: 246959 - protein, 106 aa, Zea mays
  Clone ID: MRT4577_156814C.1.pep
LRTSSPHAEGAASAQYGLARQTSITEAAGSANAPARPQGLADHGRLADGITQWPCRSVSVTKDHHKHTATMATMSMPSRKPHISVRSTDRYLQSREPGSTSAIRQR

SEQ ID NO: 246960 - protein, 116 aa, Zea mays
  Clone ID: MRT4577_156815C.1.pep
SGRVGNGRDRVDSVENSFNARDCDSNCSHGQPFFNFDDSHSYIHPFIQKKISHHWDITFNQNKEALNHYIQESSYPSLEKVPTDSSVEVEGTADTTATGQVLKARSLKILEHSPDD

SEQ ID NO: 246961 - protein, 85 aa, Zea mays
  Clone ID: MRT4577_156816C.1.pep
LGQGYPKGWGSYPKGQEGFKGFGGGFTKIKKRVVPMKRGPRPQNQNGPAGFPFPLFFPPPSHTKGDPPGFSAKGISNRISLLVLF

SEQ ID NO: 246962 - protein, 93 aa, Zea mays
  Clone ID: MRT4577_156817C.1.pep
SPRVRVHPALLRPRYVVYPHLVNVPFVRCESKLRFFSAARASRAERENVSRSLNRSVTCLHQRGQTCPSATPPAVAVARQRSSASLSGRAHSE

SEQ ID NO: 246963 - protein, 84 aa, Zea mays
  Clone ID: MRT4577_156818C.1.pep
IRAQDMLSLLHILNLLILSFCYIKFIDEHFNPLIHKFFMFTDYYKHYWLPSNNHLLAHYIYKAVLIQPYERRSFNDPSEIYHSF

SEQ ID NO: 246964 - protein, 67 aa, Zea mays
  Clone ID: MRT4577_156819C.1.pep
QIESLLLLKKRHYLVENLTFSNSLVDSRLSSKVDTPCQLCDPPSGAMKLTGSITSPLVIAVLNMGSK

SEQ ID NO: 246965 - protein, 72 aa, Zea mays
  unsure (1)..(72): unsure at all Xaa locations
  Clone ID: MRT4577_15681C.1.pep
FSNSTCLVPVISKXCIKMCSINSVLRLTQNFSFSSVYTLPGISTFLRSLASSLRFRYPKLVQQGTRLLKYLY

SEQ ID NO: 246966 - protein, 130 aa, Zea mays
  unsure (1)..(130): unsure at all Xaa locations
  Clone ID: MRT4577_156820C.1.pep
RHCLLYDPARDGASLLMIWNLNKRGGVAGVFNCQGVGWCRVTNRTLVHDASSSTLTGTVRAEDAYFITSVAGDXGVWDGHSWVYAHRTRELMRLPXSASLPVTLCPFQYDVSHVWPIHAVLSELSIDRLS

SEQ ID NO: 246967 - protein, 130 aa, Zea mays
  Clone ID: MRT4577_156821C.1.pep
RTRGRQTTRASSRLLHQQRRPPVAARSSRTEPSEEASNGARVPLQRLRRQQGEEAAAQEGAAQGADSQDSAGQPRGARRSRRSQQGAQLREMSKLLCFCYLTKPHPDVWCVVLHAGIVQTHVCLPLCLVW

SEQ ID NO: 246968 - protein, 98 aa, Zea mays
  Clone ID: MRT4577_156822C.1.pep
VKGPLRIISYQEFEDVYNAGDQNQAVNLGAARQKWVPIHLAGPESITGLLLLHEDGVRIYHGPSTLAGMDTVHRQFPVQRHCSLRSRRHGTRQPGGCT

SEQ ID NO: 246969 - protein, 80 aa, Zea mays
  Clone ID: MRT4577_156823C.1.pep
TGPIKKKNPFYKMTSLLFKNSPQIPKKPKWAVKIGVEKKGEKKIFFKNPKKGLVWFLMGPKNTLLGPQKTKCPNPIWICL

SEQ ID NO: 246970 - protein, 413 aa, Zea mays
  unsure (1)..(413): unsure at all Xaa locations
  Clone ID: MRT4577_156824C.1.pep
MADTGRDAFPDEAEPAFTLDEYMEDIEAVELEADLVLGGDEGKECTYAGGYLKRQAVFSCLTCVPDGVAGVCTACSLACHDGHEIVELWTKRKFRCDCGNSKFGGHLCKLCPEKDSENSANTYNHNFKGSYCTCGRPYPDPEAKEQVEMIQCSICEDWFHGDHIGLNSIEEIPRDEEGEPLYEELICHKCSSVCHFLKLYPDTIWASGKPNLAVETDASDSNVMKKPSGHADPEKHENGALVDNTVGEKTLGGXKDSTKAIAVPEEANLGSSSGNNCKLGVDVNTMPAITDKSEPFFMSKGWRETLCRCETCFNFYAQRGIAYLIDKEDSIEEYEKIAKQKREMKLEQQQGAETNFLNSLNHVQKIEMISGINDMKNEFQSFLESFDASKPVTSDDIHSFFENLAKKKKQRLS

SEQ ID NO: 246971 - protein, 108 aa, Zea mays
  Clone ID: MRT4577_156825C.1.pep
EEKAPGIGIAVLLEAGLAGRPSHDAGRGDHAWRSQAAPQEQQRHGGRHRREQGQAGVHDVAGLQLPIDCGTEDNTGISGLVCNHAMYSFYHSFDSYFGNSACFRGKGA

SEQ ID NO: 246972 - protein, 86 aa, Zea mays
  unsure (1)..(86): unsure at all Xaa locations
  Clone ID: MRT4577_156826C.1.pep
MSLTHRRGTCASRAAARSFDSLAIKPGISTPGNAASQAYSGTHRGERWPANNEQAQRDYLGSHTYDTGDIEGXYHTEXVKLANSKK

SEQ ID NO: 246973 - protein, 189 aa, Zea mays
  Clone ID: MRT4577_156827C.1.pep
MYSSSCHVMSEKPNGSKAVTLLLRLSTLVLSLISAVVMATATSDCTIYGHGGAAKVTIMFKNYRPFVFLVVLNIAAAVLEAAAIYLQVVKGDDGDEAPKLPRIILVVLDVVVLALVNAATGAVVAAVIAYGPEIDACTVAGGGRFREQVRRSELLSIAASISAVSAAVAKDVPLPFSVWPLSSESGDYY

SEQ ID NO: 246974 - protein, 93 aa, Zea mays
  Clone ID: MRT4577_156828C.1.pep
RAKFWMLQNAVLTAPLPILFAGAHRRVTSALRLRHLAAGPPADMEGTSGVAAGDAARQDLSSASPFACARSLLCTASAGRSVAIAMDHLSILM

SEQ ID NO: 246975 - protein, 71 aa, Zea mays
  Clone ID: MRT4577_156829C.1.pep
TRPPPAVSYCVHDGAIIPASICLSPFYLYQLNSCTCTSWSGSKASSSYCSVHLKASSSHYSRSSRPVVRSR

SEQ ID NO: 246976 - protein, 101 aa, Zea mays
  Clone ID: MRT4577_15682C.1.pep
KKKKVFLKLPKIGHFKRAHFEKKKNPPPPKKFLTKGGNTKGLKQCYPPKKNHLPKFLGGGGGGPFSFFYPPVRGPGGYPENFGPDPGGVPFFPIRERLKTW

SEQ ID NO: 246977 - protein, 63 aa, Zea mays
  unsure (1)..(63): unsure at all Xaa locations
  Clone ID: MRT4577_156830C.1.pep
QFESXLKNFFCRSWLRGRCLTRFSLFFRIFRFTPRITFVLTLRLHGWRNLFFGEAYXXHXPPH

SEQ ID NO: 246978 - protein, 86 aa, Zea mays
  unsure (1)..(86): unsure at all Xaa locations
  Clone ID: MRT4577_156831C.1.pep
GKAGKRRRCGCRTYFLVLVLVGLTEEAREHGVKESLEAHSPYSFLRGGERSLGVLASMRGVIXXCAAPPLQKNPPRWRRVLGTVLA

SEQ ID NO: 246979 - protein, 354 aa, Zea mays
  Clone ID: MRT4577_156832C.1.pep
WLNRLIGRTKTVSVDWPYPFVENHLFVLTLTAGLEGYHVNVDGRHVTSFPYRTGFVLEDATGLSLNGDLDVQSVFAGTLPTTHPSFSPQKHLELLPSWQAPPLPDEPVEIFIGILSAGNHFAERMAARKTWMSAAQKSSNVVARFFVALHGRNEVNVELKKEAEFFTDIHIVPFMDSPTRPVLKTIAICEYGVHVVSARYIMKCDDDTFVRLDSVMAEVKKIQNGESLYIGNMNYHHKPLRDGKWAVTYEEWPEEDYPIYANGPGYVISSDIAGSILSEFLKHKLRLFKMEDVSMGMWVERFNNTRLVKYVHSIKFCQFGCIDDYYTAHYQSPRQMLCLWDKLQAGKAQCCNMR

SEQ ID NO: 246980 - protein, 51 aa, Zea mays
  Clone ID: MRT4577_156833C.1.pep
QAFFFFFFLTGRDIHYNERKVIIRLVLFLNNQSSAMACLLPCWVPRTRQGC

SEQ ID NO: 246981 - protein, 612 aa, Zea mays
  Clone ID: MRT4577_156834C.1.pep
SVTKDRVAKKKRDERRLRRAQGARGRPAAAAEYGDATTTIDPTCAQAVAQAFPHTFGQPLVSFVAPAAGAGAVEERHPIRVGVVFSGRQSPGGHNVVWGLHDALKAYNPQSLLYGFVGGTEGLFANKTLEITDDVLASYKNQGGFDLLGRSIDQIRTTKQVNAAMTTCHSLNLDGLVIIGGVTSNSDAAQLAETLIQNNCKTKVVGVPVSLNGDLKNQFVETTVGFDTVCKVNSQLVSNVCLDAISAGKYYYFVRLMGRKASHVAFECALQSHPNMLILGEEVALSKLTLMEIISKICDGVQARAELGKYHGVLVIPEGLIESIPEMYALIQEINILHNSNVPVAEMSSQLSPWAAALFQFLPPFIRRELLLHQESDNSAQLSQIDTEQLLAHLVETEMIKRTKEGRYKGRKFSSVCHFFGYQARGSTPSNFDCDYAYALGRISLHMIAVGLTGYMATVANLKDPVDKWRCAAAPLTAMMSVKRHLRGPGAIPIGRPSIHPSPIDLKGKAYELLREKASSFLLDDFYRTPGGIQFEGPGSDAKPITLTIENQDYMGDIEILKEYLGKVRTMVKPGCSREILKAAISSMVSVTDVLTVMSHPLNAELPLYHFK

SEQ ID NO: 246982 - protein, 59 aa, Zea mays
  Clone ID: MRT4577_156835C.1.pep
QPFGHTFPRTPGNSQTRGFVESWFKQFDWLEYSVQKDAAYCFYCFLFKPPRTNNCNDLG

SEQ ID NO: 246983 - protein, 77 aa, Zea mays
  Clone ID: MRT4577_156836C.1.pep
STRTCRCLVKKKKKKKKKKKKKKKKKKKKKKKKKKKKKKKKKKKPNKKKKKKKKKKKKKKKGGAPSPFKKKKKKIFF

SEQ ID NO: 246984 - protein, 204 aa, Zea mays
  unsure (1)..(204): unsure at all Xaa locations
  Clone ID: MRT4577_156837C.1.pep
MNADFGAPKAFPHTFGQPLVSFVAPAAGAGAVEERHPIRVGVVFSGRQSPGGHNVVWGLHDALKAYNPQSLLYGFVGGTEGLFANKTLEITDDVLASYKNQGGFDLLGRSIDQIRTTKQVNAAMTTCHSLNLDGLVIIGGVTSNSDAAQLAETLIQNNCKTKVVGVPVSLNGDLKNQFVXTTVGFDTVCNGYSQLXSHVCLDAI

SEQ ID NO: 246985 - protein, 618 aa, Zea mays
  Clone ID: MRT4577_156838C.1.pep
MNADFGAPKELAGGLQQRRALYQPRLPPCLQGPTVRAEYGDATTTIDPTCAQAVAQAFPHTFGQPLVSFVAPAAGAGAVEERHPIRVGVVFSGRQSPGGHNVVWGLHDALKAYNPQSLLYGFVGGTEGLFANKTLEITDDVLASYKNQGGFDLLGRSIDQIRTTKQVNAAMTTCHSLNLDGLVIIGGVTSNSDAAQLAETLIQNNCKTKVVGVPVSLNGDLKNQFVETTVGFDTVCKVNSQLVSNVCLDAISAGKYYYFVRLMGRKASHVAFECALQSHPNMLILGEEVALSKLTLMEIISKICDGVQARAKLGKYHGVLVIPEGLIESIPEMYALIQEINILHNSNVPVAEMSSQLSPWAAALFQFLPPFIRRELLLHQESDNSAQLSQIDTEQLLAHLVETEMIKRTKEGRYKGRKFSSVCHFFGYQARGSTPSNFDCDYAYALGRISLHMIAVGLTGYMATVANLKDPVEKWRCAAAPLTAMMSVKRHLRGPGAIPIGRPSIHPSPIDLKGKAYELLREKASSFLLDDFYRTPGGIQFEGPGSDAKPITLTIENQDYMGDIEILKEYLGKVRTMVKPGCSREILKAAISSMVSVTDVLTVMSHPLNAELPLYHFK

SEQ ID NO: 246986 - protein, 102 aa, Zea mays
  unsure (1)..(102): unsure at all Xaa locations
  Clone ID: MRT4577_156839C.1.pep
MAALLSMLLVGVALVQLGMHPSAATMDEDIELIWGASHTYFFMDGETESLALSLDDQQGSCFRSKAMFLYGTISMEIKLVEGNSAGVVATAYTIXESPWSYH

SEQ ID NO: 246987 - protein, 39 aa, Zea mays
  Clone ID: MRT4577_15683C.1.pep
SFFFFFFFFFFFFFFFFFFFFFFLFKPWSKNVLTLGLGG

SEQ ID NO: 246988 - protein, 97 aa, Zea mays
  unsure (1)..(97): unsure at all Xaa locations
  Clone ID: MRT4577_156840C.1.pep
DPTCLIRNGRSELLLQIFQQLCCEDLMFCAVFCRYMNDGVFNEILWYLLNCMRXDWAAMPNSRSXSWKNLYIQXDRHDMVEYVRNTPTDMKEYYIQM

SEQ ID NO: 246989 - protein, 118 aa, Zea mays
  Clone ID: MRT4577_156841C.1.pep
LSSQFVHSIICVDQYVLPSLVIPSGWKRSRHQDSELGRLGVSTARRHETRARWSIHGVVRDSRSRSGRPAGVRKEQSSLAAAPPWMDRRDSRPRYEVTRAKYDRRQCSSRDPTTRGPD

SEQ ID NO: 246990 - protein, 115 aa, Zea mays
  unsure (1)..(115): unsure at all Xaa locations
  Clone ID: MRT4577_156842C.1.pep
PDSRQPPRFRVSAIWSHSRPPLLPVXLLPPPAVLQATAFSPMQPPPPVQPPPSPLLSRSAPPVRPPPAPPPWACYCSLVVRPPCPALPLSARRPVPLSGCWCSLGVALLPRLPLP

SEQ ID NO: 246991 - protein, 86 aa, Zea mays
  Clone ID: MRT4577_156843C.1.pep
LASMDCGNKKAASGVSALLIVQLLLATTTATDRLLQADTCTVIGLHIIAREFGHAVRGILSGETCVFLPCYTAAMDRQCIGQILMM

SEQ ID NO: 246992 - protein, 90 aa, Zea mays
  Clone ID: MRT4577_156844C.1.pep
PDPPLPGAWSVFCLSRGVGVFFFSAGRAGFPTVLRSVRSSPGGGVGSPPPRRGVCPRELQLILSPPLWAGPHSTQAAATPRNGTSEKTTH

SEQ ID NO: 246993 - protein, 92 aa, Zea mays
  Clone ID: MRT4577_156845C.1.pep
FFHLPLRRTVVGDRPRVPVVALRCVSTASRDTSSSLFLGTAPEPAQLLSPGLHSLNPPPRAHTPRNRLFLQGIPRRITLWDGLQSDWRKHLL

SEQ ID NO: 246994 - protein, 47 aa, Zea mays
  Clone ID: MRT4577_156846C.1.pep
FGAGQGKFFCFGKVFLRRTKILVLDRATESMDFATDAILQKVIRQKF

SEQ ID NO: 246995 - protein, 194 aa, Zea mays
  Clone ID: MRT4577_156847C.1.pep
MGQAFRKLFDAFFGNKEMRVVMLGLDAAGKTTILYKLHIGEVLSTVPTIGFNVEKVQYKNVVFTVWDVGGQEKLRPLWRHYFNNTDALIYVVDSLDRERIGRARAEFQAIINDPFMLNSVLLVFANKQDMRGAMTPMEVCEGLGLYDLTNRIWHIQGTCALKGDGLYEGLDWLATTLDEMRASGRLTSASSSAS

SEQ ID NO: 246996 - protein, 44 aa, Zea mays
  Clone ID: MRT4577_156848C.1.pep
ADQGPKTSQFYMTTTLGNMIDTTSPKLFNKKQGSFGNSLAGEHV

SEQ ID NO: 246997 - protein, 88 aa, Zea mays
  Clone ID: MRT4577_156849C.1.pep
MAAADSTKLSLAFVLLLSALVVLGEVGGSMAADCSTLRCIQGGYITCDNYPGKQLDGCDCVCAPDNGRNCVLHLQSGSTYNCSRSNKG

SEQ ID NO: 246998 - protein, 101 aa, Zea mays
  unsure (1)..(101): unsure at all Xaa locations
  Clone ID: MRT4577_15684C.1.pep
RPLFVVFFFVCFVFFSLFLVGGSAGVGVAALLVPAGLVPLPWPPVSCGPSSPVLLRPCRWVARGSLPGGGWGSARGFFSPRRCFAPVGGKAKVVEVXLASL

SEQ ID NO: 246999 - protein, 103 aa, Zea mays
  Clone ID: MRT4577_156850C.1.pep
FQDNLNKSTYSSLMGLLRSNVICAGLDGMDLEEQHYHAEEVGHVPRQPEHVHLRSPSFTFPPPPIFFTNKRSSSLLFLSRAPGSRRRVAVFPALSRRRRGRGS

SEQ ID NO: 247000 - protein, 131 aa, Zea mays
  Clone ID: MRT4577_156851C.1.pep
CKNTSKVPSKRDMYISWSMTPQFPTYALSPSTSASSMHLHSPRAQLSAKHATAYVVVREGSTRAARRPAASPVCEASSLSRLLPWTPKWRPDCNWSSGSATGDGAQLHWHGDEADESKKKRRFIFGSSYLV

SEQ ID NO: 247001 - protein, 69 aa, Zea mays
  Clone ID: MRT4577_156852C.1.pep
KIVQGRRAAGTPRLHEALFFTGIYLVSAGTGGHKPALESFGADQFDEAHAAERVRKMSFFNCIGRMEKE

SEQ ID NO: 247002 - protein, 54 aa, Zea mays
  Clone ID: MRT4577_156853C.1.pep
QIQTSVLVSQQHLMNLYVPGHTNVFKHKYSNSLPCPTVVKKVVANLSCNSRELT

SEQ ID NO: 247003 - protein, 83 aa, Zea mays
  Clone ID: MRT4577_156854C.1.pep
RTRERKEACHLLEGGRENFQACNKKGLFPISRLVITGAPSQIHQWLPRGSKTGVVFFGETLAKPLLFFTSEPFVWRNGGSTAP

SEQ ID NO: 247004 - protein, 105 aa, Zea mays
  Clone ID: MRT4577_156855C.1.pep
QIQKSLNYSLNFFDMKKFTSNTNVHRIQEAPYNTTNLISVHDPQTSVFFSITTVLGDRCIHILDWLDPSSRKSCYVLKTEFFVNYYYYYRLALQTLLLFVVTDES

SEQ ID NO: 247005 - protein, 70 aa, Zea mays
  Clone ID: MRT4577_156856C.1.pep
QSMWVKGTSPGWIPITPNWGAQWKKNWGLFTQGFSFPVPSPAGQTLYIKNFVPGWWALGMTFPPNAQFDY

SEQ ID NO: 247006 - protein, 38 aa, Zea mays
  Clone ID: MRT4577_156857C.1.pep
GLIPVAPHTMFPNNNKVFIASRFHRKSSYFIARPPSPT

SEQ ID NO: 247007 - protein, 184 aa, Zea mays
  Clone ID: MRT4577_156858C.1.pep
MAMGKLEERTRAFWTNRWLVFVGAMWMQSMAGTTYIFGAISPVVKARLGYDQPQVAALGVAKNVGGCLGLLAGALSATWPPWALLAIGAAQNFLGYGWLWLVVSGNAPALPLWLMCVVIFIGTNGQTYFITASLVTSIQNFPKSRGPTVGILKGFMGLTSAILTQVYTVMHTPDHAALILMVAV

SEQ ID NO: 247008 - protein, 132 aa, Zea mays
  Clone ID: MRT4577_156859C.1.pep
MASSSSSTPAAVREMQKDLEVQANALSKIQKDIAKNHQVRKQYTIQVGENELVLKELELLSDGANVYKLIGPVLVKQDLAEAKANVKKRIEYISAELKRMDRALKDLEEKQNSKKESIFKLQQRMQAVQAKA

SEQ ID NO: 247009 - protein, 52 aa, Zea mays
  Clone ID: MRT4577_15685C.1.pep
YLHCSFTANTELATVSQWRQPYMHRNDSPNALCLWLWYNQNRVIANLAGPPT

SEQ ID NO: 247010 - protein, 87 aa, Zea mays
  unsure (1)..(87): unsure at all Xaa locations
  Clone ID: MRT4577_156860C.1.pep
KFSLPRPQGGKNAITKTPFLGGDQLPQRVFPPXLXKSSKGDNFLGVGDIFSPSGDKKGSLNPPVGKARAMLSGKRNPNANPFSRKKH

SEQ ID NO: 247011 - protein, 82 aa, Zea mays
  Clone ID: MRT4577_156861C.1.pep
MSSDPLSELQLCLQQISTLMYTSVGVLQRDAPTQGHKPEFLQMQRQLALDLATAVRKFNKIVQEDLPTHFKGYDPEGGGWPA

SEQ ID NO: 247012 - protein, 53 aa, Zea mays
  Clone ID: MRT4577_156862C.1.pep
VCVCVCLDRVWSFPSVRIKGGCVEFYQVGCGSGVWCKCKRCLRLPVKFMVPKG

SEQ ID NO: 247013 - protein, 78 aa, Zea mays
  unsure (1)..(78): unsure at all Xaa locations
  Clone ID: MRT4577_156863C.1.pep
PVRFCGGCSCSFSCPLCLPVRTVVSLLWALSFWCLGAPAWCFFGLPSWWCPCHVVLGWVGGPPPIYQSSFXLRRGLNR

SEQ ID NO: 247014 - protein, 56 aa, Zea mays
  Clone ID: MRT4577_156864C.1.pep
FRLANFWKGQSFGAFWYLTNLVKGEFLQRDLNWGSPGFSKLYVFKIRAIYLNLGTI

SEQ ID NO: 247015 - protein, 106 aa, Zea mays
  unsure (1)..(106): unsure at all Xaa locations
  Clone ID: MRT4577_156865C.1.pep
QEAPGDCPVAGKPGGRSCGRRGGLVRLRGRWAAAGVEFEEKFLKTRDDLARLRSDGSLMFQXVPMXEIDGMKLVQTKPILNYIVXXSXXXWXDLXERAIVGMALAG

SEQ ID NO: 247016 - protein, 82 aa, Zea mays
  unsure (1)..(82): unsure at all Xaa locations
  Clone ID: MRT4577_156866C.1.pep
VKPSRNKKGSPRKVPFXKGFKQGRPPPLRGLLKASQKGPGEKRAFKLSSQLVKPPKGGGGPLPKKEALHKMARAKKVFAHFC

SEQ ID NO: 247017 - protein, 131 aa, Zea mays
  Clone ID: MRT4577_156867C.1.pep
RYVLFWALFHSRKGPPFLAQRPFAVGPPCSIPPQFAPNRGLCFWFPPGEPFFCCAVYLDWGHWFFVFVSLFPFVFLSLGLFFCFFLFPLFLLVGSFPFFFLFAFFCVFLFKKKKKKGPHAQKKKKKKKKKK

SEQ ID NO: 247018 - protein, 61 aa, Zea mays
  Clone ID: MRT4577_156868C.1.pep
MPTAVPTPKAVVHQRFGAKARYTVEEVREDVGGCPGLVPHTRNVYRFALVLLVSICMFLSG

SEQ ID NO: 247019 - protein, 461 aa, Zea mays
  Clone ID: MRT4577_156869C.1.pep
MVTNQDADAAAPGAGATVDPMRLASRWRSRPEWNCASAELEAEPSELNTVNSSGLFSVVSTDKLSVKYLGSHHHGHDVGVVQADRPAPTRRAVYYFEMGVRNAGYKGQTSIGFTSESFKMRRQPGWETNSCGYHGDDGHLYRGQGKGESFGPKFTSGDIIGAGINYLSQEFFFTKNGTLVGAIPKEIKGPLYPTIAVHSYGEELTVNFGKEPFCFDVEGYILEDKMKQQSVSDKLNLETDISHWIVRSYLLHYGYQDTLNAFDMANATDPPTNRQNGHAEPPETYGLSHRKLLRQLIMSGDIDSTFKRLGEWYPQVIKDEKSVICLLLHSQRFIEYIRAEQLEDAVHYGRANLASFLTHEAFEWLLKDSVALLAYEKPAESCLGYLMGSPQREFVADAVNAAVLSTNPTMKDPESCLYSCLERLLRQLTVCSLERRAFNNDQGDAFLLHKEMQNYERSRRS

SEQ ID NO: 247020 - protein, 114 aa, Zea mays
  unsure (1)..(114): unsure at all Xaa locations
  Clone ID: MRT4577_15686C.1.pep
SRTITTGQGGGGHNMLVDIPNHGKPAXAGRTKXPGAPTLGLYSXVTYXQDRTGRTVECCSINLTTPRRGRDYDPXKRPGAPSMLRKPXAPNYPKREHNCADGTPTVGTTDLSNR

SEQ ID NO: 247021 - protein, 73 aa, Zea mays
  unsure (1)..(73): unsure at all Xaa locations
  Clone ID: MRT4577_156870C.1.pep
MLNLVLRFXGGMQIFLNAMSSKTSSLDVXSSDTIDNVKAKIHDKVGIPPNQQQVIIFGXQLDESRNFSDYNIH

SEQ ID NO: 247022 - protein, 472 aa, Zea mays
  unsure (1)..(472): unsure at all Xaa locations
  Clone ID: MRT4577_156871C.1.pep
MVTNQDAEAASAAAPGPGATVDPMRLASRWRSQTEWDRAVPELEAEPEPSELNTVNSSGLFSVVSTDKLSVKYLGSHHHGHDVGVVQADRPAPTRRAVYYFEMAASNAGYKGQTSIGFTSESFKMRRQPGWESNSCGYHGDDGHLYRGLGKGEPFGPKFTSGDIIGAGINYLSQEFFFTKNGAPVGAIPKEIKGPLYPTIAVHSQGEELTVNFGKEPFCFDIEGYILEEKMKQQSVSDKLNLETDISHWIVRSYLLHYGYQDTLNAFDMANATDPPTNRQNGHAEPPETYGLSHRKLLRQXFYLIKLIMSGDIDSTFKRLGEWYPQVIKDEKSVICLLLHSQRFIEYIRAKQLEDAVHYGRANLASFLTHEAFEWLLKDSVALLAYEKPAESCLGYLMGSPQREFVADAVNAAVLSTNPTMKDPESCLYSCLERLLRQLTVCSLERRAFNNDQGDAFLLHKEMQNYERSRRS

SEQ ID NO: 247023 - protein, 287 aa, Zea mays
  Clone ID: MRT4577_156872C.1.pep
KNGAPVGAIPKEIKGPLYPTIAVHSQGEELTVNFGKEPFCFDIEGYILEEKMKQQSVSDKLNLETDISHWIVRSYLLHYGYQDTLNAFDMANATDPPTNRQNGHAEPPETYGLSHRKLLRQLIMSGDIDSTFKRLGEWYPQVIKDEKSVICLLLHSQRFIEYIRAEQLEDAVHYGRANLASFLTHEAFEWLLKDSVALLAYEKPAESCLGYLMGSPQREFVADAVNAAVLSTNPTMKDPESCLYSCLERLLRQLTVCSLERRAFNNDQGDAFLLHKEMQNYERSRRS

SEQ ID NO: 247024 - protein, 207 aa, Zea mays
  unsure (1)..(207): unsure at all Xaa locations
  Clone ID: MRT4577_156874C.1.pep
AQDVQPQERGRAPXVFVKAQVGNQILKTSVAAPTPTLSPRWNEDLVFVVAEPFEEQLVLTVEDRVSPRKDDLLGRAVLPLTLFDKRLDHRPFVQSRWFDLEKFGVGAAIEGETRRELRFASRVHVRACLEGAYHVMDESTMYISDTRPTARQLWKPPVGVFEIGILGAAGLQPMKTRDGRGTTXAYCVAKXGQNWVRTRTMIGQFRP

SEQ ID NO: 247025 - protein, 136 aa, Zea mays
  Clone ID: MRT4577_156875C.1.pep
YSLFFFFFFFGFFFFFFGFFSFFFFFFFFGKKPIPLPKNKLTRPKGKQIPFPPFLSCKRGKSKKAPNKKKKGPRLPKLNSSPKNSNPPKQNLERKKPGFAKAGPGPHNFFLAQPLAPLPPGGSFFPTGPLGPPGNS

SEQ ID NO: 247026 - protein, 150 aa, Zea mays
  Clone ID: MRT4577_156876C.1.pep
QFSAAREVDVKGGKKAIVVFVPVPQLKAYHKIQQRLTRELEKKFSDRHVLFIAQRRILGKPSRRSRVQQPRPRSRTLTAVHDSILEDLVFPTEITGKRVRVATDGSKLVKCFLDSKDATSLEYKLDSFSSVYRKLTGKDVTFMFKDADGI

SEQ ID NO: 247027 - protein, 86 aa, Zea mays
  unsure (1)..(86): unsure at all Xaa locations
  Clone ID: MRT4577_156877C.1.pep
CGKKKKDTFFPKKKKMAKVPPGSNGPPKREKWYAPRDGXGNTGGGNGGVXXXGFXGXREKKKXFKIGGWGEEIFDXXFXLKXFCLD

SEQ ID NO: 247028 - protein, 97 aa, Zea mays
  unsure (1)..(97): unsure at all Xaa locations
  Clone ID: MRT4577_156878C.1.pep
ETIRKKKKKKKKKRKKKIKKKRKKEKKKKKKKKNKKKKXKSEKRKENKRRKKKKKRRKKKKKKXKRKKKNKNKRKEKREKKKGGTRKGRRIGGTWGR

SEQ ID NO: 247029 - protein, 131 aa, Zea mays
  unsure (1)..(131): unsure at all Xaa locations
  Clone ID: MRT4577_156879C.1.pep
MSHRKVEHPRHGFLGFLTRKGFSRHRGKGKXFPRDDPKKPWHLTGFLGYKAGMTHIDREGEKPGSKLHKKETCEAGTIXETPPLGIGGLVAYVKTPGGLRTLNFVWAQHVNEQVRRKFYKNWCKSKKKAFT

SEQ ID NO: 247030 - protein, 640 aa, Zea mays
  unsure (1)..(640): unsure at all Xaa locations
  Clone ID: MRT4577_15687C.1.pep
MDPKGKRIMINDKEKETLNIDEPKGDKPTDSGSNNKRKHGKKKRDEYNKVSGLDNAKQIWDTVKISHEGNNVTMITKMELVEGELGKSAMKRGEDPTETYNRLKTLMNKVHQNVARGNSWQIXSGPMMVKEASXVALKATTNTEMLPNKVAHVEATRLNEEEMALVIKRFKTALKGCKDYPNKNKSRGKRSCFKCEKKGKKEKKKLYRKTKGEAHIGTKWDSYSSSSNPDDEGLAASAFNKSSLFPNEHHTCLTAKRKKNRLLEKQEDLLYEEHDKVVEVKKSLALEVKNNEMLAFELSSCHSLITSLKSLNDDLNARIEKNCKNEVEKVKFARDAFTIGRHLFIKDELGFQKGTNNHKSQKDLNFTKEKGRHLWLIGENMFTSYVKNKDSHDMIIFGDVNQGKDKSETQETLKHFLRQHILRRKAYRVFNKSSGLVEVSSDVVFDETNGSQRDQVDLDNIDEHEALMAAMRTMGIGDVRPQEQQVQDQSFSSTMVQPTTHDEEQEELNNFKRNEVWSLVPHPKQNIMGTKWVFHNKQEEYGVVTRNKARLVAKGYAQVAGVDFEETFALVARLESIHILLAYVAHHSFKLFQMDVKSAFLNGPIKEEVYVEQPXGFEDDRYPDHVYKFSKVLYGLKQAL

SEQ ID NO: 247031 - protein, 48 aa, Zea mays
  Clone ID: MRT4577_156880C.1.pep
SVLSISHFYSNDGCLSPVTRSTQASAHGVGRRPREEIQQGGAYTVVGR

SEQ ID NO: 247032 - protein, 179 aa, Zea mays
  unsure (1)..(179): unsure at all Xaa locations
  Clone ID: MRT4577_156881C.1.pep
MPPPQSGMTLCRLPKATLGLPLSLPSLLYRPSLSLAARRTKAVSARASSSSPSPDSSFGSRMEDSVKKTVADNPVVIYSKSWCSYSMEVKSLFKRIGVQPHVIELDNLGXVLVQLTANPFQEXGPQLQKVLERLTGQSTVPNVFIGGKHVGGCTDTVKLYRKGELASMLSDLDINIDNS

SEQ ID NO: 247033 - protein, 92 aa, Zea mays
  Clone ID: MRT4577_156882C.1.pep
TQSQNMLELIKRGGLHRLRLQESTFKKGGPLSQRGSTMGQEKLAILGPKMPLLKSLPNFPALSFEPTHPFFFPLGPHCVGTGWSARSSYLSP

SEQ ID NO: 247034 - protein, 167 aa, Zea mays
  Clone ID: MRT4577_156883C.1.pep
MPPPQSGMTLCRLPKATLGLPLSLPSLLYRPSLSLAARRTKAVSARASSSSPSPDSSFGSRMEDSVKKTVADNPVVIYSKSWCSYSMEVKSLFKRIGVQPHVIELDNLGAQGPQLQKVLERLTGQSTVPNVFIGGKHVGGCTDTVKLYRKGELASMLSDLDINIDNS

SEQ ID NO: 247035 - protein, 63 aa, Zea mays
  Clone ID: MRT4577_156884C.1.pep
KKLKHGRIPKPKFAFKPYPSWKKSRFYLDPPPGSFFRIKFQTRGLRANPQIWWDPFANFIGPG

SEQ ID NO: 247036 - protein, 131 aa, Zea mays
  Clone ID: MRT4577_156885C.1.pep
MDAVQEVLPEVRHRLCLYRIMKDVAENLKEHAEFKTINKALKKVTYGSLKIPEFEMEWKKIIEEHGLGGNECLSSLYEHRQLWAPAYLRDKFWAGMSISQRGESISSYYDGFVYPKTSLKQFFSKYEMILE

SEQ ID NO: 247037 - protein, 144 aa, Zea mays
  unsure (1)..(144): unsure at all Xaa locations
  Clone ID: MRT4577_156886C.1.pep
SPTRSPTRPRTRGLAVACPGLVELDLSNGVDLGDAAAAEVARAMALRRLSLARWKPLTERXXGCVVXGCTEXMEMSIKWCLGITDLGIQLLALKCTKLTRLYLSYTMITNASLPSIMKLPILHXLTLVGCIATDDDALGSPERE

SEQ ID NO: 247038 - protein, 113 aa, Zea mays
  Clone ID: MRT4577_156887C.1.pep
RTAETHKNSAHTRQPEGDRLKTPSRDGSLKLPEEERKLPPGPKQERYLVGNAPPALILESDQCMLQPAEDHWHMPPFPEPPHPPLTNSMTAFCPLPARTYNRITAATLNSLWP

SEQ ID NO: 247039 - protein, 47 aa, Zea mays
  Clone ID: MRT4577_156888C.1.pep
SAFSIISVAAVLGLVQTICRLYAPGDIGTLLSPSGSLVMSTPRSYPT

SEQ ID NO: 247040 - protein, 103 aa, Zea mays
  Clone ID: MRT4577_156889C.1.pep
DPGAAQRRPPPPRNSSSPRPPPAEVSAPRPPCGAGLDATAEPMVPVGSTCAPVGPRRGAAPLAVMHTTRPRPQGSREGICGRIGPRSRNLTTPAPRGRGSPVK

SEQ ID NO: 247041 - protein, 36 aa, Zea mays
  Clone ID: MRT4577_15688C.1.pep
MAGMAPEGSQLDAKHYDPNLQELLSTGETDELFTRY

SEQ ID NO: 247042 - protein, 141 aa, Zea mays
  unsure (1)..(141): unsure at all Xaa locations
  Clone ID: MRT4577_156890C.1.pep
FPEGRAVLLTLSLXXISISFQLETPXEGEIHVVRRIXNXYIHSTINHNDVMVSFHQYPDQYKTVDMVXHIHSSIHRLTAFSKNLASIYNNISFHPSYFFNTVNDLIIFYYYDFYSFPHNYFSYYPTPTLFFNTIINLSIIF

SEQ ID NO: 247043 - protein, 82 aa, Zea mays
  Clone ID: MRT4577_156891C.1.pep
KGGPGLFLRGGGLVADQKIKKRGGRGSKTKRTPGLLRGQVFTYKKKTARAKKESFKNPLGEKRPLGDWGTGFFKKGKKLPKG

SEQ ID NO: 247044 - protein, 261 aa, Zea mays
  Clone ID: MRT4577_156892C.1.pep
MSFSSMSKQQVLDAGDGEGEEVMELIPGLPEEVAEKCLLHLPFLYHRLFRTVSSTWNRFLTDALAKPLLFPHAAGAGTAATGSVPFLFALAFDPMSRRLQCQALDRFSRKWLLLPPVPGGAAAGSFAVVGLPRRGQIYVIGGVEEGGDKAVTSVAVYSAARNGWEEAAAMRTPRGYMAAGEVGGRVVVAGEDGEAEVFDPDAGRWSPAAPRRGAAVAWYDAAAAGGKLFVTEGWAWSFERAPCGAVFYFVTVFCCEMVRGM

SEQ ID NO: 247045 - protein, 161 aa, Zea mays
  Clone ID: MRT4577_156893C.1.pep
MSFSSMSKQQVLDAGDGEGEEVVELIPGLPEEVAEKCLLHLPFLYHRLFRTVSSTWNRFLTDSPAKPLLFTPAEGAGAGAGSAAMGSLSLSLPFLFAFAFDPVSRRLQCQALDPFSRRWLLLPPVPGGAAAGSFAGVGLPRRGEIYVIGGVEEGSDKAVTS

SEQ ID NO: 247046 - protein, 60 aa, Zea mays
  unsure (1)..(60): unsure at all Xaa locations
  Clone ID: MRT4577_156894C.1.pep
GIGRERHHACERRGRNYLWHYSVTPSDEDTQWRVVSRKTPCLGFLPXXEXHQTSXXHLHL

SEQ ID NO: 247047 - protein, 99 aa, Zea mays
  Clone ID: MRT4577_156895C.1.pep
VIELSHREVHHRDAVAGGRRRRQSPRRNYVAQGFRRVLEDARDELAAGVHQTFHPQISVVERMQLAPALVAVAAVVLGGGRWSHFRRPLAVISRPSNRD

SEQ ID NO: 247048 - protein, 28 aa, Zea mays
  Clone ID: MRT4577_156896C.1.pep
AISGSLNSPRIWLPLSLLLYTYLLSNIH

SEQ ID NO: 247049 - protein, 39 aa, Zea mays
  unsure (1)..(39): unsure at all Xaa locations
  Clone ID: MRT4577_156897C.1.pep
MTSPDIASLSWGHMKVKGSNITYKDCTVXPRGSRTWDWR

SEQ ID NO: 247050 - protein, 154 aa, Zea mays
  unsure (1)..(154): unsure at all Xaa locations
  Clone ID: MRT4577_156898C.1.pep
CTVGDESKVISQVLFPKNYILSKIFRKDVPPLXSEFDPLPQNAHGCNRDTTXTSFLXNQRTMKKRKITESTSQRSEVYVDTDQCELQFCERVKLATGTAEQDHVNGSGSSRRRQAECGAVSVVGVRPRDPVHGVCQAPGGEVAAPSPSSPCRGT

SEQ ID NO: 247051 - protein, 228 aa, Zea mays
  unsure (1)..(228): unsure at all Xaa locations
  Clone ID: MRT4577_156899C.1.pep
MGLFILSETSAGYVLLKSKDKKLLGGDTKDSSSIAEQLKLKKFAKFGSAVDALEQAAALHDGKVTPMLSSLLDELKDETKATLAVADPKLSNAIAQLPGLSLKTVSDSSTQDVFRAIRENLSSLLPDLLPSEEAATRLGLAHSLSRHKLRFSPDKVDTMIIQSIASLDVLDKQLNTYAMRVKEWYGWHFPELAKILNDNLAYSRVVLKMGFRXNARNSDLSDILPEEN

SEQ ID NO: 247052 - protein, 111 aa, Zea mays
  Clone ID: MRT4577_15689C.1.pep
PDGAGFGDTMAPAGGSSVTPAGSPVTENSTAAYGSDIIFVDIAGAVADPAQLFYTSGSGSDELQLHLSRSAVADRRPLFALLHDPLAIYLFVRLAYIGLIHRSGCVILSIS

SEQ ID NO: 247053 - protein, 141 aa, Zea mays
  unsure (1)..(141): unsure at all Xaa locations
  Clone ID: MRT4577_1568C.1.pep
RQHTNHNNLPTSPKIFSLVMLFLLSARATTTTIFQKCSQAPITFLLPPYLSPTFYYVCENPILQPYTIQQAITAGILPLSPFFLQHSSYLLHQLPLFHLFTHNIMSQQLQQLFLTNHSPYIXQHHFLPSNQLPSYNFYFIF

SEQ ID NO: 247054 - protein, 96 aa, Zea mays
  Clone ID: MRT4577_156900C.1.pep
NAAVLRQVKTWPRFGAALQPRARKHTPCVLCELQPIPRTGAHQPPPIPAVARTSLRQSPNWSAHQFLPSPASAVASEAKGRIGGGCWTWPRAGVVA

SEQ ID NO: 247055 - protein, 773 aa, Zea mays
  Clone ID: MRT4577_156901C.1.pep
AHSSGSSSPPAPVHHLLPPRGPNQPLLVSTYLCNNLLAYYASVGVSRGCFREARCLFDDIPYARRNAFTWNSLLSLYAKSGRLPDAHVVFAEMPDRDAVSWTIMIVGLNRSGRFWDAVKTFLDMVSEGFAPSQFTLTNVLSSCAAMEACGVGRKVHPFVVKLGLSSCVPVANSVLYMYGKCGDAETARAVFERMQVRSVSSWNVMVSLYTHQGRMELAVSMFENMVERSIVSWNTIIAGYNQNGLDGMALKFFSRMLSASSMEPDAFTVTSVLSACANLRMLKMGKQMHSYILRTGMPCSSQIMNALISTYAKSGSVETARRIMDQAVVADLNVISFTALLEGYVKLGDTKQAREIFDIMNNRDVIAWTAMIVGYHQNGQNDEAMELFRSMILIGPEPNSHTLAAVLSACASLAYLDYGKQIHCKAIRSLQEQSVSVSNAIITVYARSGSVPLARRVFDQICWRKETITWTSMIVAMAQHGLGEQAVVLFEEMVRVGVKPDHITYVGVLSACAHAGFVDKGKRYYEQMQNEHGIVPQMSHYACMVDLHARAGLLTEAHEFIQRMPVAPDTVVWGSLLAACRVRKNADLAELAAGKLLSIDPHNSGAYSALANVYSACGRWNDAARIWKLRKDKGVKKETGFSWTHVRGKVHVFGADDVLHPQRDSIYRKAAEMWEEIKKAGFVPDLNSVLHDVDDELKEELLSRHSEKLAIAFGLISTPEKTTLRIMKNLRVCNDCHTAIKFISKFVDREIIVRDATRFHHFRDGYCSCKDYW

SEQ ID NO: 247056 - protein, 55 aa, Zea mays
  Clone ID: MRT4577_156902C.1.pep
ARGRVVGNYGHISVLVFLRGRSGHARMTDAQGLDLASVVASEPCGLSSIRWNNSR

SEQ ID NO: 247057 - protein, 394 aa, Zea mays
  Clone ID: MRT4577_156903C.1.pep
WDPRGRPGNHYFHEANSIPQLTAFSFCPLVFGPRGCDSKSEVSFSNTENIVSGWNKDVMVLFSNSWCGFCQRAELVVRELHRSFKSFSSYSDSVSRNAQDVHNEEKSEEYVMKGFPAIYMIDCTSNECHHLLKSAGMEELYPALLLFPAENKSAIAYEGGMSVSHLIEFLESHVSNSRYLLEYKGFMWKKRMTPQHDAPQAIQFKVSDKGSGNVGSELPSHPGVVTGSILTATKKLGTAVPFDNAKGLIVSADSHEGFHGLIIHKRLSWGVFKDLESSMEPIKHAPLFYGGPVLGQGYPLVSLSKVSLGGDMQVIPGVYYGNKVAPTRVVPRIKLGEQSVNGLWFFLGYSGGGNPPLFYELTKGAWLVRVKPIEHLGWPKSLKGFVAPPPHLFF

SEQ ID NO: 247058 - protein, 1153 aa, Zea mays
  unsure (1)..(1153): unsure at all Xaa locations
  Clone ID: MRT4577_156904C.1.pep
LPPEIAKFGLITEXRSLLPSLDVVNEGNQDTWFXSHIXMGCKTCSVIAKDGDDLRSIVQSHHNLGIKEVSADESSREAIFPRNRPSVVLFIDRLSHSSKVRDESKLVLKLLRQYVQNNYPFHVSNGVPSSSTSKARSKAVPSLRNTGISDAYSQTARLSAWASKLMALGDKMSVMVVNDGDSISYKSSSQGSGANPVYDVLTKLLDKARPGHKPKKTRISLVSRDVGLKMLSDHSEIKVVKSLSVEESEYKRTDDASATTANSNDDITEAFVDENTAKETEYINDGQVPSILEKSSATYPDEHDTAREFNDTEIEDKSISEASDMSVDLKEDAPNNADSSSEVGGMLHKHIMEKTVTEAFQILEHDERNLYTDQEESVSSNEQVDGSSFLSKKISKTEDAIYENTFGLSEGLEESDRRCPHHATCSSSCVPVRDDTDFTDQVTSSISDYRFAGAFYFSDGGYRLLRTLTGGSRIPSLVIIDPVEQKHYIFPEESEYSYASLQNYLDSFRNRSLPSYYRGTSSAISSKEFPRPPFVNHDFHEANSIPQLTAFSFCPLVFGPRGCDSKSEVSFSNTENIVSGWNKDVMVLFSNSWCGFCQRAELVVRELHRSFKSFSSYSDSVSRNAQDVHNEEKSEEYVMKGFPAIYMIDCTSNECHHLLKSAGMEELYPALLLFPAENKSAIAYEGGMSVSHLIEFLESHVSNSRYLLEYKGXDKHLVTALVLLKIFEFAYSSVMCVSLHFTTLLFLRSCVNLLIHESTKYQPCSCAVYLFGIPAXLPFLXTGSCLAVDYVVLDVPRRSPNLKCHHTKDMCCLVRHMWFGLIYNLXRIGYGLCNADTTLPPTSQLCLIMPADSLLLFSSHNFVLSTQLADLTFSPLCSVCCQPVCSQPTCYLCCXQTQLRKCKMLKIRTKRIVFCLTLXRLHCNLITLAVRLPGPNQTALVKMSHACSEAYFLLGTQDXWKKRMTPQHDAPQAIQFKVSDKGSGNVGSELPSHPGVVTGSILTATKKLGTAVPFDNAKVLIVSADSHEGFHGLIINKRLSWGVFKDLDSSMEPIKHAPLFYGGPVVVQGYHLVSLSRVSLEGYMQVIPGVYYGNIVATSRVVTRIKLGEQSVNGLWFFLGYSGWGYNQLFDELTEGAWLVSVKPIEHLDWPKS

SEQ ID NO: 247059 - protein, 110 aa, Zea mays
  Clone ID: MRT4577_156905C.1.pep
LSRKFAEARFPEVGRTEAGAGAGAVYIKRLIVSRDRTPSIQRWRGSPWIGPVAPTETGQRHALAVTVGHGLRRGLVLGEGEATFAASGLRRSRQAGGRREAAAGFHRQQR

SEQ ID NO: 247060 - protein, 116 aa, Zea mays
  unsure (1)..(116): unsure at all Xaa locations
  Clone ID: MRT4577_156906C.1.pep
RGRKHACVELVSSKIHPXHFNPSTTITHQLPPAYLQSLCSLLFTHSFKRNNFPSKHTSSYNLTTCPIPSINDTQNYIKTNWCKLIFSTSLMKTATYPLHPSLNNQQPYYFYSNIQT

SEQ ID NO: 247061 - protein, 178 aa, Zea mays
  unsure (1)..(178): unsure at all Xaa locations
  Clone ID: MRT4577_156907C.1.pep
GSPLRRSPKKKKKKKKKKKKKKKKKKKKKKKKKKKKTSPGPDQLTSFFKLKQGSLGGKREQLTGLGGKGGDPPRGAKKFRGGQPIGTGGEGTDEKDXKGPPGGAVFEPGEVKAGAFNRGGIAEFGATFLFLKISIPTGRGGPKAPPKGAPGGIQGIAGAFGGRIFALGKGTGGISGGK

SEQ ID NO: 247062 - protein, 87 aa, Zea mays
  Clone ID: MRT4577_156908C.1.pep
ELGQAPQPHSPKESQFSLFIRISCGKGFNIHGCPKKICHSLVGGWQPPPGNGQPGFAEPSHLLGLLEELMCGKTQKIFSNQRGIACS

SEQ ID NO: 247063 - protein, 145 aa, Zea mays
  unsure (1)..(145): unsure at all Xaa locations
  Clone ID: MRT4577_156909C.1.pep
HQLVLANPAAYLXHEQFHPFIQLDALTSVSYLHHQQQPFSQLSSAYPELCLPFIQLTAXMKSPVYXQHEQLVAFIQLAGVSLATFLPHLQLLPLFQHDALIAGALLQCHHELPFNTYMFLSKHRASDLSPRQYTSSCVGARSFSD

SEQ ID NO: 247064 - protein, 74 aa, Zea mays
  Clone ID: MRT4577_15690C.1.pep
LDRSEELGPAPSFSLPRRGGAELRMERPALQSGRSAYRARRVQEPLREETRYRPCEEKGKKREREGWLLRPFDG

SEQ ID NO: 247065 - protein, 82 aa, Zea mays
  Clone ID: MRT4577_156910C.1.pep
ETTINKRVFGLRKKKKKKKKKKKKKKKKKKKKKKKKKKKKKKKKKKKKKKKKKKKKKKKKKGGALLKKPIFTPRVGKIKFFF

SEQ ID NO: 247066 - protein, 64 aa, Zea mays
  unsure (1)..(64): unsure at all Xaa locations
  Clone ID: MRT4577_156912C.1.pep
MSDAAVDTSSEITTKDLKEKKEVVEEAENGRDAPANGNAENEENGEQEADNEVDEEEXKGGEEE

SEQ ID NO: 247067 - protein, 65 aa, Zea mays
  Clone ID: MRT4577_156913C.1.pep
AAFFFFFLSTSQREQNEGTVHLFIDIGRSLCKFTFMPFIFTIDSWINQQGLNSLFPFRSVPFSAT

SEQ ID NO: 247068 - protein, 51 aa, Zea mays
  Clone ID: MRT4577_156914C.1.pep
RITLSQGLNCKSVTLVVCSNFLLGFESLAPVSQVSFQEWWVGLIRFIKNVS

SEQ ID NO: 247069 - protein, 37 aa, Zea mays
  Clone ID: MRT4577_156915C.1.pep
EGMRKMISSDIYRQISDLGCLDHMSSSASVLSLYYAP

SEQ ID NO: 247070 - protein, 662 aa, Zea mays
  Clone ID: MRT4577_156916C.1.pep
MARVRSTTRVTCDGEEAETTETAPISEVMRQSGLVVIEGATDEDAPAAEAEQADIEEDDADEEEEDYSTLMPSKPSHLDFGKSTISKADMPMMVKLGYFGEAEKKLIREETTPTPKKDEVTKARQDGLHENFGCYNFAYRKDMKTPVVSYRTKWPTGWKNEWFYVKVDEKKREKLKMLVLSPPSLSYGLTRPLCRMVLGSPCREAVSEFRVVAEQIETRDLVQEYLAYKVFPTLSEWNMPKLKGTKEKNELVRLPYKFKFEKQFKGPCQECLRTQPKRRLNRVMDALNFEYPDYEQLNKGAEGQKRKKIVSVLSRQVARMVKEDEEILKRRKLSPEPKVAAPKKRKSAAPKPKTTKIEEDAPSTPSTTDVEEILKVMTKSLPIKLSPLGPHLTKLLQKKEEFSAAKKSDGPKRRRIITVIEAIEETPPPASALKTPAGEDATATEGTPAEAANVKADTAEATNLESMFFDIDKMLLNMAVEEAATAAEGTLATVPRKGKEIAEDTSEEKDFNFQNIIGQKLSKAEKEELRDYASCGYQPGALLFGGIDDQILGCLRDRTGAKSMLLSKALRMQQDLEDKKHEVIIEGLESKIRDHEAALEKKDFELQSMEGLLAKAQAKIARLNSELLAKTESFEQEKQKFNAKFEAEVEKSSNLQKTLKEL

SEQ ID NO: 247071 - protein, 66 aa, Zea mays
  Clone ID: MRT4577_156917C.1.pep
GAALDKEEEARIIVVRHGAPPTALPAALRGIQVPLDINVLVANVLVMAAAAAAAIVQIFTFAVADP

SEQ ID NO: 247072 - protein, 165 aa, Zea mays
  unsure (1)..(165): unsure at all Xaa locations
  Clone ID: MRT4577_156918C.1.pep
RDPAAHASAHAAGRAAAGGEPPNRASRGGSERAKPGGGTXTQGRAXXTXGKRXRGTGQARERXGXTSQGGHRDEEQXXRXXTXXKXXEKEPRXQRXXXXXPXAAXXGEXEKXXGXXSGDGXXXRXXXNSXQXGXXTXXQDXXXXQXXKXTXSGKXXPTKXGSNGT

SEQ ID NO: 247073 - protein, 95 aa, Zea mays
  Clone ID: MRT4577_156919C.1.pep
VPTKRVLVVVVPSVVVTFIRFFRSFFSLEGSTMCQLLSFVLTALFHLSVVGSSIPLCSGVLDYGSLLCGEAFARYGIERALSWQCTMAQAVLDRF

SEQ ID NO: 247074 - protein, 174 aa, Zea mays
  Clone ID: MRT4577_15691C.1.pep
IEDRDAYSSRYISEYGGTYNMNPKISDFGIARGNQQEANTNRVAGTYGYMFPEYAINGPFSVMYDTYGLGVIVLEIICGLQITSTHSTSFPGLLAYTWSLWNGGRAMDLVDSYLLESCSTSEALRCIHLGLLSVQDSPHSRPSLSLEILLETGTSRPSPWPNFVLDGMRSATGH

SEQ ID NO: 247075 - protein, 111 aa, Zea mays
  Clone ID: MRT4577_156920C.1.pep
YMSRYRRWCRCSSRGSRAAASLWGSPRTMPSPTVMPPAAYSSHGAAPCAVSRSACHRRLYTTTQGSSRPETRRSLSSSTAVCSTVRRRLHHHHRHPTSSQPTVRQPTATTS

SEQ ID NO: 247076 - protein, 168 aa, Zea mays
  unsure (1)..(168): unsure at all Xaa locations
  Clone ID: MRT4577_156921C.1.pep
MEAVPLLLLLLLLLSSPLAPAPANGLLSPKGVNYEVQALMTIKNYLKDPHGVLKNWDQDSVDPCSWTMVTCSQENLVTGLEAPSQNLSGLLSPSIGNLTNLEIVLLQNNNINGRIPAEIGRLTKLRTLDLSSNHFSGESPXSVSRLRDLQYLRLNNNTLXGAFPFGVG

SEQ ID NO: 247077 - protein, 158 aa, Zea mays
  unsure (1)..(158): unsure at all Xaa locations
  Clone ID: MRT4577_156922C.1.pep
MGSSPGSTAADKTRPSNKCQRPLAVAAMESTFIMIKPDGVQRGLIGEIISRFEKKGFYLKALKLVNVHNDAAWRHRTVFIQFSIXEMGIIMKDFDQPGHLLPTVLVLYPTNYMVIQGECDAVMRGKKASCPITVKKTGXSSAVVIYVELMTPVECTLL

SEQ ID NO: 247078 - protein, 116 aa, Zea mays
  Clone ID: MRT4577_156923C.1.pep
LPPSSFFNTRNWNSPRNTTLILFGIRIGLTRKQIIPIHMSTFLPPYLSKMRNWNSPRNSHLTPLGYMIGLIRKQTIPMHIWTWCAMPLLENVELRIFPRGSPRVYLLACKPVYPVS

SEQ ID NO: 247079 - protein, 104 aa, Zea mays
  Clone ID: MRT4577_156924C.1.pep
RLRLGQPRRRRRPRRPVLIDRIRRRTGLGRSGHGRGTNACCFIAIGGSTTTSNDAAAAKTQSLLLPLSLAFFFFPFYLLLWRVSTNSHVMDRCLISHRHPRLVP

SEQ ID NO: 247080 - protein, 69 aa, Zea mays
  Clone ID: MRT4577_156925C.1.pep
TVSCHVGDSGTPPSIHRQYMRSSSFQWFNEADMFISVQRSLIQGQSSWITLTLASVPRVTLEWTNNVTN

SEQ ID NO: 247081 - protein, 229 aa, Zea mays
  Clone ID: MRT4577_156926C.1.pep
MLYNHDLKPVEPERRQWGAWNFVGFWVADSFNINTWMISSANIVDGLSWWQSWICVWLGYSIAACFVCMTGRIGATYHISFPVVNRASFGIWGALWPVFNRAAMASIWYGVQGWIGGTCVRLMIRAIWNNWRNADTPGGGGIANGIPNSGTNTVAFVSFFLFWAGSLPFIYPPVHKIRHLFTVKAFFAPTAGIAFFIWAIVRAKGLGPIVKQPNEAKGSELGWLMVKGI

SEQ ID NO: 247082 - protein, 136 aa, Zea mays
  unsure (1)..(136): unsure at all Xaa locations
  Clone ID: MRT4577_156927C.1.pep
MPGWGXSGGGNWGRGPIGXIEEQQNGSGXGRGIGNGMVAPPPPMLPXGGMLGQGFDPGYGAMGTMGGGFGNFPVGPSAGPFPGMMQPFPPVVAPHINPAFFGRGANGAGGVGMWPDSGMGAWSVEEQSNLWDDAVS

SEQ ID NO: 247083 - protein, 45 aa, Zea mays
  unsure (1)..(45): unsure at all Xaa locations
  Clone ID: MRT4577_156928C.1.pep
IELMVLLRVVLVAEQLQLVDASLMDGXLRPIIVPVHSACRCHLRH

SEQ ID NO: 247084 - protein, 81 aa, Zea mays
  unsure (1)..(81): unsure at all Xaa locations
  Clone ID: MRT4577_156929C.1.pep
ACFRSFFCWRQGEGAFNXLPSGSCXWVKKKTAIDVGGRAPPQNKTDQGGWFLCYAAAYLLFPNKFVGKAFLVHINSISTLT

SEQ ID NO: 247085 - protein, 52 aa, Zea mays
  Clone ID: MRT4577_15692C.1.pep
PKKIPSVTVVFNQSPTPTTRITPPQASNSNTTSNFSLPRFPSVTEPLRRNRL

SEQ ID NO: 247086 - protein, 46 aa, Zea mays
  Clone ID: MRT4577_156930C.1.pep
IPQCWLFLHRLLTATFWWAMPRSRRCSCASTVSSMATPASASRFWM

SEQ ID NO: 247087 - protein, 201 aa, Zea mays
  Clone ID: MRT4577_156931C.1.pep
MATADRVAATFLSSFPTHHPRPFSSVSLVTNPVLPVSLRAAVTGGPRLASRLRVHRVGAAVAQLPTTNPEVASGEKKIRWSSRAVRSFAMAELEARKMRYPTTGTEGLLMGILVEGTSGAAKLLRANGTTLLKVHEEAANVLGKSEMFYFSPMRSFAMAELEARKMRYPTTGTEGLLMGILVEGTSGAAKLLRANGTTTSP

SEQ ID NO: 247088 - protein, 182 aa, Zea mays
  Clone ID: MRT4577_156932C.1.pep
MSYYNDPSSSWPAPGRQPSWEQPQPPSRSGASSTVNREEANAFANQFEEVERASENLNKSGIGKGFGPPPMYNNRRESMPPMGAPGPVPDYNQPRMGGPQRHHSVSEYDGARPHSASNVQGYYQNQRFAPRPNDADQMQQAKRRMAAQRERELRNYHQEQQYHRNGFWVQIRPLDESQCECD

SEQ ID NO: 247089 - protein, 64 aa, Zea mays
  Clone ID: MRT4577_156933C.1.pep
VIWVESDLNRSSKDSSFWISKKMLLDVALSISHGVIACTAAKPHTLCGDCLHVIKRVMSNWGSS

SEQ ID NO: 247090 - protein, 228 aa, Zea mays
  Clone ID: MRT4577_156934C.1.pep
TQPARSISFLYPSQKGRNPPETISGHGDRSPPGCRHLPLVPFPLHSPPRPFLRLPRDSLCPTRLPTTHPEVVSGEKKIRWSSRAVRSFAMAELEARKMRYPTTGTEGLLMGILVEGTSGAAKLLRANGITLLKVREEAANVLGKSEMFYFSPMHPPLTEAAQRALDWAVNEKLKSGEDGEVNANHLLLGIWSDDESAGHKILYSLGFDDVKASLLAKTTDEEAAMSPR

SEQ ID NO: 247091 - protein, 229 aa, Zea mays
  Clone ID: MRT4577_156935C.1.pep
MATAAHRVAATFLSSFPTHHPGPFSSVSLGTNPVLSVSLRAAVTGGPRLASRLRVRRVGAAVAQLPTTNPEVASGEKKIRWSSRAVRSFAMAELEARKMRYPTTGTEGLLMGILVEGTSGAAKLLRANGITLLKVREEAANVLGKSEMFYFSPMHPPLTEAAQRALDWAVNEKLKSGEDGEVNANHLLLGIWSDDESAGHKILYSLGFDDVKASLLAKTADEEAAMSPR

SEQ ID NO: 247092 - protein, 229 aa, Zea mays
  Clone ID: MRT4577_156936C.1.pep
VNNSRPGDRRPGRRHLPLLFPHSPSPPLFLRFPRDKPCPTRLRVHRVGAAVAQLPTTNPEVASGEKKIRWSSRAVRSFAMAELEARKMRYPTTGTEGLLMGILVEGTSGAAKLLRANGTTLLKVREEAANVLGKSEMFYFSPMHPPLTEAAQRALDWAVNEKLKSGEDGEVTANHLLLGIWSDKESAGHKILYSLGFDDEKASLLAKTAGEEAAMSPREQGEHLIYSST

SEQ ID NO: 247093 - protein, 239 aa, Zea mays
  Clone ID: MRT4577_156937C.1.pep
MATADRVAATFLSSFPTHHPRPFSSVSLVTNPVLPVSLRAAVTGGPRLASRLRVHRVGAAVAQLPTTNPEVASGEKKIRWSSRAVRSFAMAELEARKMRYPTTGTEGLLMGILVEGTSGAAKLLRANGTTLLKVREEAANVLGKSEMFYFSPMHPPLTEAAQRALDWAVNEKLKSGEDGEVTANHLLLGIWSDKESAGHKILYSLGFDDEKASLLAKTAGEEAAMSLREQGEHLIYSST

SEQ ID NO: 247094 - protein, 49 aa, Zea mays
  Clone ID: MRT4577_156938C.1.pep
THKGLITPIIQAQTYNGQPAPSDMLTELWRNHAPHRLRSPNVSVNRQRR

SEQ ID NO: 247095 - protein, 557 aa, Zea mays
  unsure (1)..(557): unsure at all Xaa locations
  Clone ID: MRT4577_156939C.1.pep
EXDELLARVLVSGFIDGEMKVYRPDVARVGVDSQSRAAQVVSVERRTDQLLLMGREDVIGWLHQLKGREQQVSQEISYLXRELLMVAAAGRSPGSVGVDPDVLALRDRNRDILLLKLAASVESRDKVLVERSRLLILESRFGLGSNFNMEDARASLEASFANEAEIVFTTVSSSGRKLFSRLTHGFDMVVIDEAAQASEVGVLPPLALGAARCVLVGDPQQLPATVISKAAGTLLYSRSLFERFQQAGCPTILLSVQYRMHPQIREFPSKYFYQGRLTDSESVVKLPDEAYYRDALMAPYIFYDMSHGRESHRGGSSSYQNIHEAQFALRLYEHLQKFLKANGAKKVSVGIITPYKLQLKCLQREFKDVMNTEEGKDIYINTVDAFQGQERDIIIMSCVRASNHGVGFVADIRRMNVALTRARRALWVVGNANALMQSEDWASLIADAKARKCFMDLDSIPKDFLPMRVPSNTPGRNSSNNIRRTGGGPRPRRLDMFSEPRAGMNMRPDEYERLNSVPRNGSYRNLDDFVHPGDRSRDNMQFGHPRRPNASNGRREV

SEQ ID NO: 247096 - protein, 56 aa, Zea mays
  Clone ID: MRT4577_15693C.1.pep
CHFSLCPIKKKKKKKKKKKKKKKKKKKKKKKKKKKKKKKKKKKKKKKKKKKKKFFF

SEQ ID NO: 247097 - protein, 51 aa, Zea mays
  Clone ID: MRT4577_156940C.1.pep
SLPFRPALNDVRDQAVTKQHLNSKVFAYGPTQEGQTRLEELLALPHILFND

SEQ ID NO: 247098 - protein, 39 aa, Zea mays
  Clone ID: MRT4577_156941C.1.pep
SLHDTSGTMDSSFWSSRADRGGMHVTVYLDPGQTDHLHA

SEQ ID NO: 247099 - protein, 159 aa, Zea mays
  unsure (1)..(159): unsure at all Xaa locations
  Clone ID: MRT4577_156942C.1.pep
XGWRRSWRIGWMDQRKREREGGVQRRARGTSTDGEQLDRSLWCLLLGRLSLLAAGWESQGGDWKRLQLLLAFLAQLLHAAAQTEAATACAASSPSLFTTTIISSCSSSSLLSVTGHTSSPLLLRSLRFFHYCYLFVCAAQQRCVPLSPPFLSLSLSCSS

SEQ ID NO: 247100 - protein, 75 aa, Zea mays
  Clone ID: MRT4577_156943C.1.pep
MRRPWAKPEDPSLLEDPRIKAIAAKHNRTTAQVLIRFPMQRNLVVIPKSVTPERIAENFKVFDFELSSQDMTTLL

SEQ ID NO: 247101 - protein, 83 aa, Zea mays
  Clone ID: MRT4577_156945C.1.pep
MGLIVAVTVPAPAGVRVLGRGAARVTPTPWTVVVGPRRFSERMSVETTDATSTIDVGGLDDHALEATNSKTGVAVMLGGGAGT

SEQ ID NO: 247102 - protein, 62 aa, Zea mays
  Clone ID: MRT4577_156946C.1.pep
FFFFFFWQKGEKILFDGTGEYWARLYLFTLNIEFVNIYFYLNTRCIRTYYGGFLFVRGFGSG

SEQ ID NO: 247103 - protein, 85 aa, Zea mays
  Clone ID: MRT4577_156947C.1.pep
ISLVQKTTKRLHDKTYNPKYVDHKCNQGTMYIESHVDFFHLAPIDPSKDPSFNWVVYSLKSHLLRMRGEWFQIKGTLVQCTCIVM

SEQ ID NO: 247104 - protein, 287 aa, Zea mays
  Clone ID: MRT4577_156948C.1.pep
PRWDGWGRFMEPITSKIPLMVIEGNHEIEPQGHGGEVTFASYLARFAVPSKESGSNTKFYYSFNAGGIHFIMLGAYIDYNRTGVQYSWLEKDLQRVDRRVTPWVVAAWHPPWYNSYSSHYQEFECMRQEMEELLYEYQVDIVFSGHVHAYERMNRVFNYTLDPCGPIYIGIGDGGNIEKIDMDHADDPGKCPSPSDNHPEFGGLCHLNFTSGPAKGKFCWDRQPEWSAYRESSFGHGILEVLNSTYALWTWHRNQDAYAENSVGDQIYIVRQPDKCLLQPASASSLN

SEQ ID NO: 247105 - protein, 121 aa, Zea mays
  Clone ID: MRT4577_156949C.1.pep
MDSASSLVDDTSGSGGGACTDKLRALAAAAASASGPPPERMGSGASAVVDAAEPGAEADSGSAPASVAAVAAGVGGKLPSSRYKGVVPQPNGRWGAQIYERHLRVWLGTFAGEADAARAYD

SEQ ID NO: 247106 - protein, 164 aa, Zea mays
  unsure (1)..(164): unsure at all Xaa locations
  Clone ID: MRT4577_15694C.1.pep
TVTKQKKKMFTSNEKRPKREAYEKSPKKRQXQTKKANKSKKFLKLKTREQTSKFPFKKNQQFQXKLKHINLKKVEPKNKKXKQKVRXKNFKKQKRGXKKMEQMEHSKKQRTTAKKKSKPRGKAIKRYKNIQRKKLIKIKTKKKKHKFKKGNFHTKKKKKNFRKK

SEQ ID NO: 247107 - protein, 566 aa, Zea mays
  unsure (1)..(566): unsure at all Xaa locations
  Clone ID: MRT4577_156950C.1.pep
MATPTSTVTRGGNRHWHCTQVLPLLLLVPLCFALLVESGGIPTTLDGPFPPATRAFDRALRQGSNDVPLTDPRLAPRVQPPAPEQIALAASADADSLWVSWVTGRARVGSSNLAPLDPAAAGSEVWYGERSAADAASYPHVVTGSAEVYSQLYPYPGLLNYTSGAIHHVRLRGLRPATRYYYRCGDXPPRRXLSDEHSFTTLPATGAGCYPRRVAVVGDLGLTGNSTATVDHLARNDPSLVLMVGDMTYANQYLTTGGKGVPCFSCSFPKAPIRESYQPRWDGWGRFMEPITSKIPLMVIEGNHEIEPQGHGGEVTFASYLARFAVPSKESGSNTKFYYSFNAGGIHFIMLGAYIDYNRTGVQYSWLEKDLQRVDRRATPWVVAAWHPPWYNSYSSHYQEFECMRQEMEELLYEYQVDIVFSGHVHAYERMDRVFNYTLDPCGPIYIGIGDGGNIEKIDMDHADDPGKCPSPSDNHPEFGGLCHLNFTSGPAKGKFCWDRQPEWSAYRESSFGHGILEVLNSTYALWTWHRNQDAYAENSVGDQIYIVRQPDKCLLQPASASSLNW

SEQ ID NO: 247108 - protein, 147 aa, Zea mays
  unsure (1)..(147): unsure at all Xaa locations
  Clone ID: MRT4577_156951C.1.pep
KNQETGIPVPKGGTRNPKQNGGNXKKQGPPGGQKPPPKPXKKPGANHEKQNPPPKPPPXFKPKGTAPGGAHQNGGGGAQPPQPERSWGGVPKQGXNPLGGGPRGGPPPLEGLENVHAPNNLAKKTCLPQSQGXNGPNKKPEPLGGGP

SEQ ID NO: 247109 - protein, 99 aa, Zea mays
  Clone ID: MRT4577_156952C.1.pep
AATVTKVATEESECSEGLRPEEARGVLYINLAMTAAVQGKVEQANYMVSRGLAMLPNNPRAVLASVYIDLLQGKSQEAVVKLRHCRNVRFRPGSIAASS

SEQ ID NO: 247110 - protein, 88 aa, Zea mays
  unsure (1)..(88): unsure at all Xaa locations
  Clone ID: MRT4577_156953C.1.pep
VVSISLHAFSPLCYLYFPLCFVLSLITFVFLFHFYYFSPYIILHFNFYIFIDIIIQLMYTWYFFSFXDRTLFFAPRTPFLGRYNIVFQ

SEQ ID NO: 247111 - protein, 159 aa, Zea mays
  unsure (1)..(159): unsure at all Xaa locations
  Clone ID: MRT4577_156954C.1.pep
MVSSATGEGGKVKKGAAVRKVLGTTNKSLPRPVNAALHIHIGRIRCYLKNGRYPHDGFTGAHVYLNAVYEYLTDNVLDVSFNADSDDNNTRIILRLELLGXQNDDYLGIMSLTQSITQSLVLSNIKPVLLPKKTTHKVSXGXSKKLKTSDKVVKIPKKG

SEQ ID NO: 247112 - protein, 34 aa, Zea mays
  Clone ID: MRT4577_156955C.1.pep
MRTTSQLDRSIDLDLCPKLCSALVLQTYAGQSDA

SEQ ID NO: 247113 - protein, 154 aa, Zea mays
  Clone ID: MRT4577_156956C.1.pep
VGTVAGPPFFKALGEKIGQDKLAVQGVDYSASIAGIMQMGDKAGSEKMASLVTEAVKKCPKTKIVMSGYSQGAMLVHNAARALPAETTAKVAAVLNFGDPFQRQAIQGVPADRVKIICHAGDGVCAGTAAITPDHLTYSKDAGAAADFVASKVQ

SEQ ID NO: 247114 - protein, 79 aa, Zea mays
  unsure (1)..(79): unsure at all Xaa locations
  Clone ID: MRT4577_156957C.1.pep
IVYSYHSSPVYLISTSSTCPCASCKPLHVAFYSSQVRPRVLQRRRSMHLPACMHGCIHTQEGSXSPLVANAPAPNGSRR

SEQ ID NO: 247115 - protein, 71 aa, Zea mays
  Clone ID: MRT4577_156958C.1.pep
EGGLPFSILRGVLFLGGGGAPSGFSAGGVSPGNFWGGKGMGFFPVFGDKRPAVPSGGGWGFLKGSGAPGFF

SEQ ID NO: 247116 - protein, 92 aa, Zea mays
  unsure (1)..(92): unsure at all Xaa locations
  Clone ID: MRT4577_156959C.1.pep
PAREGYGLTETTAGFCRAVGEEESARVGSVGRLSWGAQVKVVDPETGAALPPGVAGELWVRGPFVMKGYLGDDDSTSEILDSQGWLXTGDLC

SEQ ID NO: 247117 - protein, 51 aa, Zea mays
  Clone ID: MRT4577_15695C.1.pep
VLAVNYNVHHWFLYYRKGYKLSWKLVAPVNSQVRMSVNTSSHSWNHAMIFS

SEQ ID NO: 247118 - protein, 93 aa, Zea mays
  Clone ID: MRT4577_156960C.1.pep
STFTGFLSGSVFFVPVVSEKQVHWLVAYIPQEQCISYAQAHHGVVHSSLRACSDGADRPTEPLHAPLLVPSLTPQKNGEPYSSSRITSFPRVH

SEQ ID NO: 247119 - protein, 68 aa, Zea mays
  Clone ID: MRT4577_156961C.1.pep
QDLTKARICRIYIEDNDRPGKRSEFPSTFEWTSLLLRANSNSICAGITFLHSFPSFPQTCFVVDNGLS

SEQ ID NO: 247120 - protein, 54 aa, Zea mays
  Clone ID: MRT4577_156962C.1.pep
HSNLPFQDLIRKHPRGTRKTVNGNPHQGKIIAQRSPTIWQTLPTHKMPFPCAGP

SEQ ID NO: 247121 - protein, 95 aa, Zea mays
  Clone ID: MRT4577_156963C.1.pep
IKSLKLNFPSAASSLQDLSAAGGSPLHPTLVSRSNIPGSPEADVHLRNLNGASSPRSLANQNSHVHANRPGHEVSTSQTSENANGSAPDVSRVSL

SEQ ID NO: 247122 - protein, 42 aa, Zea mays
  Clone ID: MRT4577_156964C.1.pep
ELLPPLGWGREEPVSGVGGVENWLEGHRDTSNEACYPLPESP

SEQ ID NO: 247123 - protein, 176 aa, Zea mays
  Clone ID: MRT4577_156965C.1.pep
LATTTCCLSQRQRESHGHRERHDDDGRVRQADRRGAVPSGGSGGGVQKPLRRRPGPQGAPVRGDAVGARRAGHRQADRARPGPADSRARPLAPGQVQGLAGAHFYAAIMASATSSAGGVAWIGLKGNSHTNWNKICNIYSKFCRHIGSSVFLGLIASVVLVLLTILNAHSLYRRSR

SEQ ID NO: 247124 - protein, 147 aa, Zea mays
  Clone ID: MRT4577_156966C.1.pep
VVPVPIGYGDDVGGARLAPAAIPNRVLLADTNGLACIGAMPSGHLAFANWWSKHLVLINPITGARQSVQVEEPRRSLVLAAASGGDSFISVGTDELTLWRRAGDGGGEEWSRWTVPAAATHGIINIAWAAVCGGCFYILDDDGHVFV

SEQ ID NO: 247125 - protein, 81 aa, Zea mays
  unsure (1)..(81): unsure at all Xaa locations
  Clone ID: MRT4577_156967C.1.pep
FGDFKPTSHWASCHINGAIDNNNHLRRLAPDTIDLVYYPHLMRNHLDRYXYALXLTLHNKQCNYLSHTQDIKRSTKLVKRT

SEQ ID NO: 247126 - protein, 203 aa, Zea mays
  Clone ID: MRT4577_156968C.1.pep
MATVNATTTTAGSGKQTDAAPSPPAAAAAACRSLSGADLALRVLLFAVTLSGLVVLATAKQTVRVPVPQIPGLVLSLPAKFKDSPALIYLLVALCVTCFYSLLSTAFTSLKLLSGSSPSRTLFLLVLFDVFYAAIMASATGSAGGVAWIGLKGNSHTNWNKICNIYSKFCRHIGSSVFLGLIASVVLVLLTILNAHSLYRRSR

SEQ ID NO: 247127 - protein, 67 aa, Zea mays
  Clone ID: MRT4577_156969C.1.pep
DSPLHHPLIALEVKERDVRSRFELPILKRTIDLCMLPTAAETHSSNHHRAASPPPVDLCKHVTTILI

SEQ ID NO: 247128 - protein, 62 aa, Zea mays
  Clone ID: MRT4577_15696C.1.pep
PPPKKRDQPLSRSLSQRSLRHEALTEHIQETRRVAAARGRRPLRLRVSAASSYVHPARRACK

SEQ ID NO: 247129 - protein, 68 aa, Zea mays
  Clone ID: MRT4577_156970C.1.pep
RLLHQTLLVLDILIHCNLTCFDMDTVAFHTGLHWSRRTIGGHTIHANRSYEGVGCCTANLPLFTSTAH

SEQ ID NO: 247130 - protein, 282 aa, Zea mays
  Clone ID: MRT4577_156971C.1.pep
RKHPTVEDGKVSSNGVSTATSTEKEDSKTDKTAAAEQTVEPEATGSNGKAELAKNPPVSPAKKAKDVHTNEPSGTNADSPRAADSISNDGASDSPVRGDKANNRHSWGPSFDHGDDNDSLWNFGDKDGENGDSDLFFGPGGLPPIRTGGSTSASAFVKEQKPMFDSVPGTPMEKPFFDSVPGTPLQKSVFDYSVPSTPMQNSSFDYSVPSTPMQKSLFDSSVPSTPMQRSLFDSSVPSTPMQKSLFDSSVQAHQWGIHSMTLSRAPQCRSLFDSGPRQSGIS

SEQ ID NO: 247131 - protein, 61 aa, Zea mays
  Clone ID: MRT4577_156972C.1.pep
DQYVFPTDTLGGNNRVGRLEYHGEACIALRTHTYGSIFFCFIGLWFFFFFFFFQAHKSAQR

SEQ ID NO: 247132 - protein, 83 aa, Zea mays
  Clone ID: MRT4577_156973C.1.pep
MGLKKGFLQEGSPVSVMGVFPKKDKVLKIGPPTKALSTGCQWGKWVFPTHPYGVVLKFEKTSKIFFKPVLPAVEGEFPKKGPV

SEQ ID NO: 247133 - protein, 54 aa, Zea mays
  Clone ID: MRT4577_156974C.1.pep
IKNIAQINWWFYKIKFHGLRTVRDDTRPALGLLIIRLQLLLMRQRTWLTEMHMK

SEQ ID NO: 247134 - protein, 205 aa, Zea mays
  unsure (1)..(205): unsure at all Xaa locations
  Clone ID: MRT4577_156975C.1.pep
MEKKKVAIPLVCHGHSRPVVDLFYSPVTPDGYFLISASKDTNPMLRNGETGDWIGTFQGHKGAVWSCCLDRNALRAASASADFSAKVWDALTGDELHSFEHKHIVRACAFSEDTHLLLTGGMEKILRVYDMNRPDAAPRELDKSXPGSVRTAAWLHSDXTILSSCXDMGGSKXLWNVRTGKIXQTLEXKXSVPSAEXSQDGSSSL

SEQ ID NO: 247135 - protein, 534 aa, Zea mays
  Clone ID: MRT4577_156976C.1.pep
MAVVYYLLLAGLIACSHALAAGTPALGDDRGRPWPASLAALALDGKLRTDSNATAAASTDFGNITSALPAAVLYPSSTADLVALLSAANSTPGWPYTIAFRGRGHSLMGQAFAPGGVVVNMASLGDAAAPPRINVSADGRYVDAGGEQVWIDVLRASLARGVAPRSWTDYLYLTVGGTLSNAGISGQAFRHGPQISNVLEMDVITGHGEMVTCSKQLNADLFDAVLGGLGQFGVITRARIAVEPAPARARWVRLVYTDFAAFSADQERLTAPRPGGGGASFGPMSYVEGSVFVNQSLATDLANTGFFTDADVARIVALAGERNATTVYSIEATLNYDNATAAAAAVDQELASVLGTLSYVEGFAFQRDVAYAAFLDRVHGEEVALNKLGLWRVPHPWLNMFVPRSRIADFDRGVFKGILQGTDIVGPLIVYPLNKSMWDDGMSAATPSEDVFYAVSLLFSSVAPNDLARLQEQNRRILRFCDLAGIQYKTYLARHTDRSDWVRHFGAAKWNRFVEMKNKYDPKRLLSPGQDIFN

SEQ ID NO: 247136 - protein, 116 aa, Zea mays
  unsure (1)..(116): unsure at all Xaa locations
  Clone ID: MRT4577_156977C.1.pep
GPPXASPXCRPWXGLARRXXXRPRGGSXRCPPALRPLRXAXVRVRGRGRAPRGVRPSAGRRLRRRGGPAPLAGGGGWSRPCXXAPXWXXLPLPPSXXLCSRGXXWVVFPCSGSAYA

SEQ ID NO: 247137 - protein, 340 aa, Zea mays
  Clone ID: MRT4577_156978C.1.pep
MEKKKVAIPLVCHGHSRPVVDLFYSPVTPDGYFLISASKDTNPMLRNGETGDWIGTFQGHKGAVWSCCLDRNALRAASASADFSAKVWDALTGDELHSFEHKHIVRACAFSEDTHLLLTGGMEKILRVYDMNRPDAAPRELDKSPGSVRTAAWLHSDQTILSSCTDMGGVRLWDVRTGKIVQTLETKASVTSAEVSQDGRFITTADGSSVKFWDANHFGLVKSYDMPCNVESASLEPKSGSKFVAGGEDLWVHVFDFFTGEEIACNKGHHGPVHCVRFAPCGESYASGSEDGTIRIWQLSPANADDNEVANANGKTTAGVNEVTTKIEGFHIPKEGQTEG

SEQ ID NO: 247138 - protein, 37 aa, Zea mays
  Clone ID: MRT4577_156979C.1.pep
GCNHPALSTVPGPLKNSRPRVRSSRIPSFVGVPRRML

SEQ ID NO: 247139 - protein, 133 aa, Zea mays
  Clone ID: MRT4577_15697C.1.pep
ASYSFGCGAAWAEHAQSQRVAPWNAPDPGGGSTGGYLLNVSQQAALGGQSQFFSQRGPLQSSNQPSERGWPETVEADNPMQQQHGGPTIGFAPGTGFSGIRIPTRIQGGEEHNGGSGNGDKPPPPSVSSASRQ

SEQ ID NO: 247140 - protein, 341 aa, Zea mays
  Clone ID: MRT4577_156980C.1.pep
MEKKKVAIPLVCHGHSRPVVDLFYSPVTPDGYFLISASKDTNPMLRNGETGDWIGTFQGHKGAVWSCCLDRNALRAASASADFSAKVWDALTGDELHSFEHKHIVRACAFSEDTHLLLTGGMEKTLRVYDINRPDAAPRELDKSPGSVRTAAWLHSDQTILSSCTDMGGVRLWDVRTGKIVQTLETKASITSAEVSQDGRFITTADGSSVKFWDANHFGLVKSYDMPCNVESASLEPKSGSKFVAGGEDLWVHVFDFFTGEEIACNKGHHGPVHCVRFAPGGESYASGSEDGTIRIWQLSPVNADDDEAANANGKANAAVNEVTTKLEGGFHIPKEGQAGG

SEQ ID NO: 247141 - protein, 81 aa, Zea mays
  Clone ID: MRT4577_156981C.1.pep
YLLRRTTARTIAGTSTRTRAAHHGRDQCGACRKELRTNQAHGGHRASDKRGKGGSVPEPEPTPSAHANKERRAENGPNGPR

SEQ ID NO: 247142 - protein, 107 aa, Zea mays
  unsure (1)..(107): unsure at all Xaa locations
  Clone ID: MRT4577_156982C.1.pep
PPPPPPPPHPPAPPPPNPPNPPPPPPLPPRPPPPXPPTPPPPPRRPPAAPPPPPRPPALPPMPTFPPPLVPGPLSIQFKLSWPHTSAETLTHITVRLNTTAGPFILV

SEQ ID NO: 247143 - protein, 75 aa, Zea mays
  Clone ID: MRT4577_156983C.1.pep
GERVHALLAWRDARATVIALVVVAALTVVTYAVPFRALVSVTGVYVMRHPLLRRKEPSALMSFFRRLPSDAEVML

SEQ ID NO: 247144 - protein, 44 aa, Zea mays
  Clone ID: MRT4577_156984C.1.pep
HHVPGLDLARPVFTPVGRPPRGPHLVRASVLLLRNRRHHRLASA

SEQ ID NO: 247145 - protein, 78 aa, Zea mays
  unsure (1)..(78): unsure at all Xaa locations
  Clone ID: MRT4577_156985C.1.pep
MGGFVKTHKINAYCKRSQINGNRRXAETTXYRVRIRLINHDKNQYNTPLYIFVEQFTNKDIYDQTISASIAIDTGSSI

SEQ ID NO: 247146 - protein, 52 aa, Zea mays
  Clone ID: MRT4577_156986C.1.pep
WYHLLTYGCSRRLNMHCTLSSVNCWSKLHLCKPIRVGFNLLNLCKPMPPLGN

SEQ ID NO: 247147 - protein, 54 aa, Zea mays
  unsure (1)..(54): unsure at all Xaa locations
  Clone ID: MRT4577_156987C.1.pep
LKEDKIRGGSTRWFINCKIQAYHSRQYSTIQYCLGHGRNGXTDDAIDVLADMVS

SEQ ID NO: 247148 - protein, 104 aa, Zea mays
  unsure (1)..(104): unsure at all Xaa locations
  Clone ID: MRT4577_156988C.1.pep
PLPGLPGPPFSGEGYMGPGFCVLGARKIRFLPGQVFGALFVEPPPPPPLRFLIILCKPIPCLQLVIHSSFLKPKKKKKKKKKKKKKTKKKKKKKNPXXWVVXXX

SEQ ID NO: 247149 - protein, 119 aa, Zea mays
  unsure (1)..(119): unsure at all Xaa locations
  Clone ID: MRT4577_156989C.1.pep
IGNPRTPVQGGKGQGGXKANGPAPPPGTEKTITPPGQGRKSWGGGRGTKSQTPPRPKTPTPRGGKGKERPRPGPKNPTPRGRNGPPPGGGWDGQKKTSPRPPPWPKPKKVPGRGGTGCP

SEQ ID NO: 247150 - protein, 105 aa, Zea mays
  unsure (1)..(105): unsure at all Xaa locations
  Clone ID: MRT4577_15698C.1.pep
DGGYRQPKASVLGDYWAPPVAIVWGQHKGASLPCDARRLSXMVVITMCETAEAYVGSTIKNAGGTVPGYWNDXQRQPTKDAGVIAGLNVLGSINEPTAAXFAYGL

SEQ ID NO: 247151 - protein, 255 aa, Zea mays
  unsure (1)..(255): unsure at all Xaa locations
  Clone ID: MRT4577_156990C.1.pep
MLGGRPLFVLFGSSIVQYSFSNGGWGAALADIYARKADVLLRGYIGWNTRRAVQVMDKVFPKDSAVQPSLVIVYFGGNDSIDAHCSGLGPHVPLDEYIGNMRKIAEHLKSLSEKTRVLFLSCPPLNEEMLRXNQSXILSEIVRTNETCRLYSDACVALCKEMELKVVDLWHAMQKREDWMTACFTDGLHLSEEGSNVVVEEILKVLKEAEWEPCLHWKAMPTEFAEDSPFDLVSSSGDATVNPSEWTVHRRIPWD

SEQ ID NO: 247152 - protein, 184 aa, Zea mays
  Clone ID: MRT4577_156991C.1.pep
VYFGGNDSIDAHCSGLGPHVPLDEYIGNMRKIAEHLKSLSEKTRVLFLSCPPLNEEMLRNSTSSTILSEIVRTNETCRLYSDACVALCKEMHLKVVDLWHAMQKREDWKTACFTDGLHLSEEGSNIVVEEILKVLKEAEWEPSLHWKAMPTEFAEDSPFDLVSSSGDATVNPSEWTIHRKIQWN

SEQ ID NO: 247153 - protein, 296 aa, Zea mays
  Clone ID: MRT4577_156992C.1.pep
VGERAVRALDVCNAARDGVDQARRWERLAGLAASALLAPAEGQVHEGQLWRARKALSDLSLLLADDAAAASAGAGGGLASFLASHRNRSFGRARASPSRASPSAHLRSLSWSVSRTWSAARQLQAIGAGLAAPRATEASCGFAAPAYAMGCLLHLAAWALVAAVPCPDRAAALQAHHLPAAPPRAAFPWAPPLLALQERLAEEGRRKDRRSSCGLLREIHALDKCAQRLAEAIDAAPVPLTGEREAELREAAAELAAACSAIKDGLDPLERQVRELFHRIVRSRMAGLDPPMANAD

SEQ ID NO: 247154 - protein, 114 aa, Zea mays
  Clone ID: MRT4577_156993C.1.pep
EVKLLFRSCFSSISRGSLDDLKGYIMLFISFATQIYSCTFRIKICHTIRKWLKLYYLNAASGRVENIPASTRTFSEILSDLQRSKISIKDWSLSDLTIGLYLIYLSQASSKNSE

SEQ ID NO: 247155 - protein, 253 aa, Zea mays
  unsure (1)..(253): unsure at all Xaa locations
  Clone ID: MRT4577_156994C.1.pep
RAKYNKISERDGKFVYSVNVLRGATGRGKSRKAGGLTIIQLPKLHEEYGSVQEAQSRVAAFALYQFFADLPLRQLLTEPYSSLILRWQEGELSSTSRVLDTEDRRRSGFVDMLLNIDADTIPSSEIENSDTDVISMDXLGILKAANXNEKRQTTMTSCMGLKSAERAESAILKKQLEDKRKLPNYLKMLEARASLPIARQRQHFLQLLKENDVVVVSGETGCGKTTQVPVTNFFEFFPTICHAPPHGFLLDAN

SEQ ID NO: 247156 - protein, 63 aa, Zea mays
  unsure (1)..(63): unsure at all Xaa locations
  Clone ID: MRT4577_156995C.1.pep
EGQENQQDMGXSERQRPQPGKMXEKEEGGARQHTXPNXRNEDGENKAAPRDKNNXQSLKGXPD

SEQ ID NO: 247157 - protein, 124 aa, Zea mays
  Clone ID: MRT4577_156996C.1.pep
GRFIRALSVSCPRGGSCRPLRVCSEVINQTRCVLMMSAQDRLPPVLTISLAIRLVAVSVGTELMVTEDGTVYRLTSSRSSPCALSRPSCRRTIWRCTPQVRPLCHWTWKDGVGASLATILWSVI

SEQ ID NO: 247158 - protein, 98 aa, Zea mays
  Clone ID: MRT4577_156997C.1.pep
GEVYWIAHDIFRLPWTLRHVLEQVRKFLDRTTSEIVVLDFHRFPIGFKSPNSSETKFRFQNMFNLVKEILGPHIVKSTSSLYNVKVSSIMDKQSSKVI

SEQ ID NO: 247159 - protein, 41 aa, Zea mays
  Clone ID: MRT4577_156998C.1.pep
RKNKPKGILWNILHQALFKYPWLQLSRQQPLTRNKNKTTSY

SEQ ID NO: 247160 - protein, 46 aa, Zea mays
  Clone ID: MRT4577_156999C.1.pep
KRHCVERFCFHNSMKMVIVRVVCLGLSASNASSKHISLPLRRAVWL

SEQ ID NO: 247161 - protein, 51 aa, Zea mays
  Clone ID: MRT4577_15699C.1.pep
AKNKFAITCKNVIYVYLNQFLVFSLHHGLWVPQPSRAPEGKWREEDTGLVV

SEQ ID NO: 247162 - protein, 42 aa, Zea mays
  Clone ID: MRT4577_1569C.1.pep
ILNAGTTVCSGPVYPGLQERQGSCSGCTIIHDLCYAPAHGVA

SEQ ID NO: 247163 - protein, 59 aa, Zea mays
  Clone ID: MRT4577_156C.1.pep
CELAGAVHGLDLGEPHVNSGGSCSDLHLRGCCPCPWWPGCFTGGRLCTTHLRCLAASLT

SEQ ID NO: 247164 - protein, 243 aa, Zea mays
  Clone ID: MRT4577_157000C.1.pep
MLPPVTAPTHPPPPWESTTTTRPPPPPPPPSGAESEVPPKKRKLEGVGFQRSPYYTIRETVANLRVRFLQVCQGTDSEKKDTAVGILNEMKSVMELSKKTRLDLSASAEPVKPLNKHAARAPEDKRVGKVLSAEKSLVPPTSLGLAGHFVHNTGGGVPLKPDNSDTAAHGLPVKIRKWPGLSKITGFTKRQGGLPQGSYVIGGSPIGWNFLVWPGSKAVYYGLTKAEWLARQSANRNSNMLSQ

SEQ ID NO: 247165 - protein, 108 aa, Zea mays
  unsure (1)..(108): unsure at all Xaa locations
  Clone ID: MRT4577_157001C.1.pep
YRMKIEVPGMYVILTDQVCQGTDSEKKDTAVGILNEMKSVMELSKKTRLDLSASAEPVKPLNKHAARAPEDKRVGKVLSAEKSLVPPTSXGLAGHFVHNTGGGCTTQA

SEQ ID NO: 247166 - protein, 42 aa, Zea mays
  Clone ID: MRT4577_157002C.1.pep
CAVMCLNSSSYPLLNRRHNMDTWPIQFTVPKFSIYLLSSIYC

SEQ ID NO: 247167 - protein, 234 aa, Zea mays
  unsure (1)..(234): unsure at all Xaa locations
  Clone ID: MRT4577_157003C.1.pep
MATTEPAAVRLVGSFASPFVHRAEVALRLKGVPYELILEDLANKSELLLAHNPVHKLVPVLLHGDRAISESLVILEYVDEAFDGPPLLPAEPHARADARFWAHFIDQKFARPFWMSFWTDDEERREAMAKEAKENLALLEAQLRGQRFFGGEAIGFVDIAACALAHWVGVIEEAAGVVLVGGEEFPALREWADAYINDATVKXKQCLRSRDELVDYFSSRKEMYLLRARATPRS

SEQ ID NO: 247168 - protein, 73 aa, Zea mays
  unsure (1)..(73): unsure at all Xaa locations
  Clone ID: MRT4577_157004C.1.pep
PPILYITIYPRRINYIFMLXNTTIIQFKSIFINNNIIQFQHHAPSPAKIQPHLTLYTRTTLTILQLKNSNIII

SEQ ID NO: 247169 - protein, 649 aa, Zea mays
  Clone ID: MRT4577_157005C.1.pep
AGRSGIPSKEGPHRQLSPSNRIIRSTSGNDNVNSRSPFDNIQQKKLAAHGANAARRSFKDFLSTLTRTKESISRATRLAMECAKFGIAGEAIDIIVEHLEKESNLYKRVDLFFLVDSITQCSRNQKGGAGDVYPSLIQAVLPRILYAAAPPGNSAWENRKQCLKVLKLWLERKTLSEYIIRHHIREIETINEASFGSSRRPSRTERALNDPLRDNEGMLVDEYGSNAGFQLPNLICTKVLEEEEENSSEGKSLSFEAVTPEQDAPYNDDNEESQMPVEKHHHILEEVDGELEMEDVAPPSDIEATTKCQPEQSDTNRAPSDQRPSDAGPPLPVDRPPSPPPLPSSPPPVPVPQSAQMQPKLQMASDPMAPHPQRATYSVQSQQQHSIAEHPGNMNSSVAPLPPPPFNSSGYGGQQNQIPPPPPMAPLNPPGPHGSFPAPPAPYHGNNYHRPPTTSMPNEGYHQQPPPPPPPPNQFPSVPPEHQHRPHHWGNNCPPYPERYRYNGHDRGNHRHDRRHHGHDRQHHYDDRGYHYDDRGYHYDDRGHYFDDRRHHFDDRGHHFDERAIRGPMHNDAADQGRYSFPPGPPRIPDHFEAPPAPMHYGRPSDPPPRPCAGWSRPPRISDNYSPSRHSVEPPVSHTAGGHGGWRPR

SEQ ID NO: 247170 - protein, 94 aa, Zea mays
  Clone ID: MRT4577_157006C.1.pep
PASAPRPEQPNTAPTTAPPPPPAPPPRRPVQPFPSHPLRAQPPSSPPLGSCAGEWVTHPPPPPPSPSFPPPPHRPPTTPTTPIPSLPTPSWSRK

SEQ ID NO: 247171 - protein, 69 aa, Zea mays
  Clone ID: MRT4577_157007C.1.pep
YASTTIYCTWNAPSAFSLNSSAHWLYILGLSKQWHALSNSSMASLLEEQHGISMQMAKAWARTNKLPLL

SEQ ID NO: 247172 - protein, 99 aa, Zea mays
  Clone ID: MRT4577_157008C.1.pep
ASLSAAALSFFFFCFFFFFFTSALPYLQNQFQELRTQDFRNFFTWVTKGTNKKTPRGGKNTRDPIMVLWPLNQKGNRPRDQMNPGPSPMEPMTRPTTRN

SEQ ID NO: 247173 - protein, 80 aa, Zea mays
  Clone ID: MRT4577_157009C.1.pep
PCPFRVGLLRVRHWPLHHKAQRLHNYFPFPVLFACKNTQPLVLHSILARTQQQPKKKQCSLLRVKRFPPIPFQTVRTLPS

SEQ ID NO: 247174 - protein, 102 aa, Zea mays
  Clone ID: MRT4577_15700C.1.pep
QVACDRGSSLCCRPTLALLWRCTGSGLQLPGVIGLVMFLDSGEHTRTQAEIHSYARIHRGTVDIVHHMQNDHVLADIVRMPDREASATSEVPTHLPMMYPTS

SEQ ID NO: 247175 - protein, 71 aa, Zea mays
  Clone ID: MRT4577_157010C.1.pep
RREYFGILKQALNGLRCEDHYMLFLWTHFFCLELVAVLVLTCILSVVLGFFVCPMTWNFHRVPLLVKNSSR

SEQ ID NO: 247176 - protein, 119 aa, Zea mays
  unsure (1)..(119): unsure at all Xaa locations
  Clone ID: MRT4577_157011C.1.pep
MQRTRNSNRRRGGGAGCHSLLATMVRGLKKHXKRLNALKNWMLDKIXGAFAXKPFSGPHKLRECLTVILIIRNRLKYALNYREVICILMQRHVLVDCXVRTDKTYSAGIMDVISIPNTM

SEQ ID NO: 247177 - protein, 132 aa, Zea mays
  Clone ID: MRT4577_157012C.1.pep
MFATAVRWAAKKGKPKMAPIELTAPPEQAQSITRAIFDAVREHGPLTVSDVWDHVKDVGLRGLASKRQMKIMLRWMRERQKLKLICDHDGPHKQFLYTTWFTNPRNAPQRPNPKPNVKADKLPTFPSPSKQL

SEQ ID NO: 247178 - protein, 105 aa, Zea mays
  Clone ID: MRT4577_157013C.1.pep
AQWHRIGVLLMLQLLSIWRQLVSHDCHAHGCASLAAIVRIDCVGNMHAASAQYVALHEPFCAKELASVFFIGGGTFTDGHHVDDVQECPLEGNHTVVVGNVNSNP

SEQ ID NO: 247179 - protein, 102 aa, Zea mays
  Clone ID: MRT4577_157014C.1.pep
VRDVAEGKVVPLDCTLLIRLSAAPLVCYRTADDDIHVSVPFDLLDDDDPWIRTTDITPSGAIGRCGAYRITFSPRFWPKMERALTYMRDRRVAILDCVGRWG

SEQ ID NO: 247180 - protein, 92 aa, Zea mays
  Clone ID: MRT4577_157015C.1.pep
KGPPFFFSLLHRYLAVCQGSYDLHIFNVLCLLVFIFVFFFRTINSWTRLCKHHMRSPSTLKNIQKTNLNIKTHPLKGYSMSVSTHPEFISQR

SEQ ID NO: 247181 - protein, 45 aa, Zea mays
  Clone ID: MRT4577_157016C.1.pep
MTKTEGPNTDHEEYLQAYVRRFLRLRAQAPTVPNEIVIEGMIKGL

SEQ ID NO: 247182 - protein, 147 aa, Zea mays
  Clone ID: MRT4577_157017C.1.pep
LHLRRCPQVMRLSSADYQTRLKELVIESCDALSSLRELQGLVSLTKLIVANCSKLELLPGMDSFCALGILIIEDCRLLRSLPERGLPVSLRTFVLDGCHQALDEQFQKGEGPDWNKVAALPGCMRYEHMADVEDESVWHSFYNLYYF

SEQ ID NO: 247183 - protein, 95 aa, Zea mays
  Clone ID: MRT4577_157018C.1.pep
RQQPDKKVLISNPLISHLQKQRPKSPKRTVPPTYGRKKKGGLEEGNGPILIPNFNFLTSKQLENQLDLGHNFNYTKRGRLLRGGEGTKTFLDLGP

SEQ ID NO: 247184 - protein, 61 aa, Zea mays
  unsure (1)..(61): unsure at all Xaa locations
  Clone ID: MRT4577_157019C.1.pep
TIHSHRTMGLFFTKKKLASLCALHIKHQHACTCMKKDAYCGRPPTVXXLSHETEPRRTSRT

SEQ ID NO: 247185 - protein, 68 aa, Zea mays
  Clone ID: MRT4577_15701C.1.pep
HPTKAAIPRMCSRYKAYVIMLLANLFMCNIVKAGKVNSCMWQCTRTSGPPSFIGCSHYVTCNLFLPRI

SEQ ID NO: 247186 - protein, 128 aa, Zea mays
  unsure (1)..(128): unsure at all Xaa locations
  Clone ID: MRT4577_157020C.1.pep
LLHITLLSWLVTLLGFMRGMVLHTYGGILAILIPALXIFMIXLFTKNAMNWFAHPYLAFLMCVPTSLIVLLLTRLTWGLSLQAHFWGAFXGLYSLISMAYTLAGLSGRFLTFVNTMSMLLGRFISRIY

SEQ ID NO: 247187 - protein, 158 aa, Zea mays
  Clone ID: MRT4577_157021C.1.pep
MGFIMGFAENLILRFMEGPGKGDQVWREHVFKNKERCERPKAGWSLPLGPFGFWAFGRFKLQLFWDPQINQAPGRWGPFDGLIGRPFGLPPFFLTPVSIFAQKVFLGINKKLFPPQMNVGPSFFVWKKVFPNYPIFCFRLARKDKLWTFIFQVVFLYY

SEQ ID NO: 247188 - protein, 67 aa, Zea mays
  unsure (1)..(67): unsure at all Xaa locations
  Clone ID: MRT4577_157022C.1.pep
IYTMVIGGFCRAGSMSEALRVRDEMVGFGMPADVGTYNXTRWNGPGNSQRLLDAEKLLNEMXEKGVT

SEQ ID NO: 247189 - protein, 51 aa, Zea mays
  Clone ID: MRT4577_157024C.1.pep
KRGTITGVSLFGAVFWTNFPIPPAWSRTPLDWFFRLSSEQTCMLVGSPPSF

SEQ ID NO: 247190 - protein, 89 aa, Zea mays
  Clone ID: MRT4577_157025C.1.pep
IIFSGKVFALNLNQYIDRSSRWKNTERSVTVHIKQVADRKLGMEAEEIVSDTQRKPWRHEMHGRRKLQSMYRRAHGRIRDSERLVVAKG

SEQ ID NO: 247191 - protein, 55 aa, Zea mays
  Clone ID: MRT4577_157026C.1.pep
WYLHHDVLCLSRVALRVRGCTTYARHDGLVWMVVFSEVGVDVSNSKIALLFCGGS

SEQ ID NO: 247192 - protein, 104 aa, Zea mays
  unsure (1)..(104): unsure at all Xaa locations
  Clone ID: MRT4577_157027C.1.pep
FALLARGALFXELRNACIMPQCSLAPSAIIPQFLRPVTSMGSEHLAAQAYRLQQALAESVLQQPINQLEQQSLAHLTIQSMAAQEQQQLLPSLSQLHVGNPGAY

SEQ ID NO: 247193 - protein, 71 aa, Zea mays
  unsure (1)..(71): unsure at all Xaa locations
  Clone ID: MRT4577_157028C.1.pep
WAAQHIFASLMLXLGLSCSAATGDIFPECSQAPIASLLPPYLSPAVSSVCENPILQPYRIQQAIAAGILPL

SEQ ID NO: 247194 - protein, 95 aa, Zea mays
  Clone ID: MRT4577_157029C.1.pep
QRATATVTPAGCAPTGPLREATRAYARRPQRQDVRDRRASRRRSLGTSRRCCSSHHQGGLVAVRPPVHVLLWLPRRRSPGLCCAAWGVVLYNTTH

SEQ ID NO: 247195 - protein, 109 aa, Zea mays
  unsure (1)..(109): unsure at all Xaa locations
  Clone ID: MRT4577_15702C.1.pep
ALRWCGCRVRGGAPPAAASSVGALSSVVVSRGCVLGGGVRCPVCWAAVPVAAVAGLLPCLRLCXSSCVLPWLGSRGSCPVCRCGLPAGVSACAGSVRAAVGGGGCPSGC

SEQ ID NO: 247196 - protein, 56 aa, Zea mays
  Clone ID: MRT4577_157030C.1.pep
IQKLRSPPNKAKLQNKQGIKILSGFSKRKNYSPQNVNGDHFLCIKGGPKFWLGFLK

SEQ ID NO: 247197 - protein, 836 aa, Zea mays
  unsure (1)..(836): unsure at all Xaa locations
  Clone ID: MRT4577_157031C.1.pep
MKERKPASSSSALVRILAVCASQAKDYGRCIAAKVPEIEHNMCSKEFLALRACMQTVVKXTRLXSIFIGSLILISXVIAADFXLFYFSVILKSRTSFSWLXISRAXTQETKKMLGNQIQGGLGTSGALSHAYVQHPPLRCDIPDTQGLFYDDANKFLIAPTADRILYWKTILPTPSGPPNSDPVNEGPVLSVRYSLDHKVIGIQRSRHEIEFRNRETGETCSKKCRADSETVLGFFWTDCPTCDVILVKTSGLDLLAYEPQPHAFHLVESKKFNVSWYLYTHESRLILLASGMQCTMFTGYQFSAGGIVKIPKFEMMMSKSEANNKPVLAADDVYIVTVYGRIYCLQLDRVSMSLNLYRFYRDAVVQQCTLPTYSSRIAVSAVDNIIMVHQIDAKVVMLYDVSLDSYAPVSAPLPLLLRGLPINSRQVSQTADSQSSAYGGTIYGEGWNFLIPDLICDAENGLLWKLHLDLAAIAASSSDAPSILEFLQRRKSDPSMVKTLCLAIVRTIILERRSVPTVAKAMDVVLDSYTRLMKMGGAFPGVRRIHEQNQQSGSQPIDGSHVVSQESSPGTTVSPAVNPDHGSEAVDIYVQSNPGVEHTIDRGLLNINISSDSVDNTSDAVDKRQQAVGEASRPLSSGTMTQHGQHAGTVAISPIEMFQSVFTLVEDEMMGDPAYLIAVIIEFLRSVSKAGLKAPHNLYVMTATLLARSNRYAEIALFVSNKILEPCKELAMQLMELGLQHPPTRKLGMDMLRERGLHHDYVTAMLQDGYYLEALRYARKYKVITVQPALFLEKALAKNSAHNLAAVLSFFCEFTPSFKATSDFVRYRHILSEMV

SEQ ID NO: 247198 - protein, 48 aa, Zea mays
  unsure (1)..(48): unsure at all Xaa locations
  Clone ID: MRT4577_157032C.1.pep
VLVYVFGRAPITYFASHQLEAVCLGLVLLVAMGLVRNPLKKGPIRSVX

SEQ ID NO: 247199 - protein, 220 aa, Zea mays
  unsure (1)..(220): unsure at all Xaa locations
  Clone ID: MRT4577_157033C.1.pep
PASGTHAGTVAISPIEMFQSVFTLVEDEMMGDPAYLIAVIIEFLRSVSKAGLKAPHNLYVMTATLLARSNRYAEIALFVSNKILEPCKELAMQLMELGLQHPPTRKLGMDMLRERGLHHDYVTAMLQDGYYLEALRYARKYKVLGFALIRSSPFHLAYADDXRGFAQVITVQPALFLEKALAKNSAHNLAAVLSFFCEFTPSFKATSDFVRYRHILSEMV

SEQ ID NO: 247200 - protein, 235 aa, Zea mays
  unsure (1)..(235): unsure at all Xaa locations
  Clone ID: MRT4577_157034C.1.pep
MKERKPASSSSALVRILAVCASQAKDYGRCIAAKVPEIEHNMCSKEFLALRACMQTVVKXTRLXSIFIGSLILISXVIAADFXILKSRTSFSWLXSVEPKHARDKXMLGNQIQGGLGTSGALSHAYVQHPPLRCDIPDTQGLFYDDANKFLIAPTADRILYWKTILPTPSGPPNSDPVNEGPVLSVRYSLDHKVIGIQRSRHEIEFRNRETGETCSKKCRAGSETVLGFFWTDCP

SEQ ID NO: 247201 - protein, 124 aa, Zea mays
  Clone ID: MRT4577_157035C.1.pep
GRVGGRVGGRVGGRVGGRVGYIVTVYGRIYCLQLDRVSMSLNLYRFYRDAVVQQCTLPTYSSRIAVSAVDNIIMVHQIDAKVVMLYDVSLDSYAPVSAPLPLLLRGLPINSRQVSQTADSQSSA

SEQ ID NO: 247202 - protein, 106 aa, Zea mays
  unsure (1)..(106): unsure at all Xaa locations
  Clone ID: MRT4577_157036C.1.pep
LCYSRYIKLSRLATTFTTGKTGENPAISXLVAYAPYPHLAKWRKGQEASTFRPFQQFERLMGQWXXPCIKPLSGGGYVDTDHYTCQLASALSFGFFAFFPCFFAGF

SEQ ID NO: 247203 - protein, 333 aa, Zea mays
  Clone ID: MRT4577_157037C.1.pep
MSQMALDREANTNFITNVEENSKDELVGQDQECAEESNICNQVAESMAFHEKETQGETEEMEEQKNIPRHYEVEDNNETNELSPTFASCQNNFSLQVEKGIQIYNLDTPPQDEVLIDPPDKGKTVDSELSPNIKAEDAVTIEEEKLGQSSSFKIRDLNLVGSPEVADMRGDPRLGQSFTAGCSVDLQDNQQIDLGTALGNNPNNTDTCTPFLLGNKAVQVIDIEDDSPIEAGACDTSKSKGEMVYSSMEGSMNPLANNDALHGIPDGYSLAISDYLGADMSCYQSIQTELQGGMNLNGSEGITVMDDSIYSSLGDIGFMEVWDQQPQDYEKFF

SEQ ID NO: 247204 - protein, 56 aa, Zea mays
  Clone ID: MRT4577_157038C.1.pep
HLHSFNHNPPHPIFPPLNSNQPQLPIISINPSSNPLLNYHLHSIITILQLTFLTTL

SEQ ID NO: 247205 - protein, 94 aa, Zea mays
  Clone ID: MRT4577_157039C.1.pep
GFERTLGKVHLKKTGLLPASGMWRGAHRSRMYRYPVETGGVHKGGGSSMVRQCPDNAYPMMGPPGCVWVGFPQEPHPVSARVPQGAFSVCGANQ

SEQ ID NO: 247206 - protein, 75 aa, Zea mays
  unsure (1)..(75): unsure at all Xaa locations
  Clone ID: MRT4577_15703C.1.pep
KEVFVEVGHNAHACLLGAASXHGTDRSMNLTISYHVRTGRWPTGIDGALGGWGRETLAMPALDAGGGEPSPGIGR

SEQ ID NO: 247207 - protein, 90 aa, Zea mays
  unsure (1)..(90): unsure at all Xaa locations
  Clone ID: MRT4577_157040C.1.pep
THLLTAFRTLPAYAQYDQPLPFSQLFGVSSMLHLXTITLYNQLPIYQHAAPNAGTLLQLQQATVHSYQLASDNXPTAXYYQQPIIAGALF

SEQ ID NO: 247208 - protein, 99 aa, Zea mays
  unsure (1)..(99): unsure at all Xaa locations
  Clone ID: MRT4577_157041C.1.pep
GDSGRAISLLGEKDGALDTGSVYTTNGCMSTGPHYNPASKEHGAPXDENRHAGDLGNVTAGADGVANINVTDSQIPLTGPNSIIGRAVRRYADPDDIGK

SEQ ID NO: 247209 - protein, 75 aa, Zea mays
  unsure (1)..(75): unsure at all Xaa locations
  Clone ID: MRT4577_157042C.1.pep
XDMCSVEKPMRLHSMQLVLSELHPDVCPAEGLLSGRKRTQRSKGAQVNWQYGSVCFGQEIEEKEVVLNPVVHTFV

SEQ ID NO: 247210 - protein, 147 aa, Zea mays
  Clone ID: MRT4577_157043C.1.pep
KKYMRLYYQSKSFESPVGVLTCQFGARPGNRGVGYIYVNILRIHHICRRRQSCLSHMQMGSTRYMMFMVRMCDLVCPRRGTRRSTRSQPRRGVGSRGRSLCSRTSSRRIPRQAESNGDSASSASGSSAVRVPGLRMTPFGVGTQTRA

SEQ ID NO: 247211 - protein, 84 aa, Zea mays
  Clone ID: MRT4577_157044C.1.pep
FPFFSGRFFTWPSFDQQGHKSAPSSSAKVGHVLTTTMGGPKTVWPWSPKAFMDRSTFRRVGVRAPPFVQYPNVYIVIRGPGQKH

SEQ ID NO: 247212 - protein, 139 aa, Zea mays
  unsure (1)..(139): unsure at all Xaa locations
  Clone ID: MRT4577_157045C.1.pep
LPRLPPPPPPNPPPLPXTPLPTPPPLPKPPPWPPSSPPPPPPPPPPPKPPPCPIPRPPPDPPPPPMPDPAPNPLPRPPPNPPPPPNPPPAPNPPPWLVPPPSPPPPPKPPPAPPPNPIPPPKPNRQRRPPTPWPPNFGM

SEQ ID NO: 247213 - protein, 59 aa, Zea mays
  Clone ID: MRT4577_157046C.1.pep
CLCCHIVKSRRDRPTAECRSLARGFTNGGAHHLPSRTLLCAQHGRREPYLLDLPGGRGH

SEQ ID NO: 247214 - protein, 493 aa, Zea mays
  unsure (1)..(493): unsure at all Xaa locations
  Clone ID: MRT4577_157047C.1.pep
MEHKDGGTASAGGLPAGSSLCSGSPLLDAPILRRLYAGQILARWGARMWEFSVALYMIRIWPDSLLFAAIYGVVETSSLVVLGPVVGTLVGRATYLQVLGIWLLSQSISLIVAGTSVTTLLMYANLRATSFPAFMALVAVTNVSGALAALSALAGTILIEREWVVVISSGHPPSVRTGINSVVRRIDLGCSLLAPVLSALVISLASTQASAAVLALSTAASAGLQYCLFVSVYNGVPALAAPRQPRASDAERPPPVPMTVAPAEAEPTQALDWRARLADKLSVASGWESWVVYARQDVALPGVALAFLYFTVLSFGTLMTATLDWKGIPAYVISLARGFSAIVGIGATLLYPLVHSRVSTLRTGLWSIWMQWCCLLLCVASVWAATGVASAWMLMAGVAASRLGLWTFDLAVMQLMQDGVPDHERCVVSGVQNALQSVFDLLTYVVAIVISDPKDFSKMIVLSFSLVTCAAVMYTVHAYRAQKXVHLFHLDMT

SEQ ID NO: 247215 - protein, 43 aa, Zea mays
  Clone ID: MRT4577_157048C.1.pep
FRVFSGLLCKTQCQIQCLIDVVVHPVIGLAIYIKKKQPKKKIR

SEQ ID NO: 247216 - protein, 83 aa, Zea mays
  Clone ID: MRT4577_157049C.1.pep
NAQGSFVPILGLYQGNLEKTSLGLKLAVWAGDKEQDRELLQKYPLLFRKKMEFEKPLVEKIGRLLEKNFFKGFLGWQGRIIFE

SEQ ID NO: 247217 - protein, 46 aa, Zea mays
  unsure (1)..(46): unsure at all Xaa locations
  Clone ID: MRT4577_15704C.1.pep
AGWVPPHVYLARRQARASVVEGAGRTLKGXDMSXVRDAVWSRTGFD

SEQ ID NO: 247218 - protein, 38 aa, Zea mays
  Clone ID: MRT4577_157050C.1.pep
CFLPCHAQIQTASIWCLGDQRHHNNGMLGDPHPDCALS

SEQ ID NO: 247219 - protein, 142 aa, Zea mays
  Clone ID: MRT4577_157051C.1.pep
KNNSLCALPPSTQNQHLYYDACHASAPNMAKAFKMSHLTSFSCILFPSFVSRHALEARRRLPNVQCAKIQIPGTSQLGRYQFDGSSTSSNKLWHPVSLNTLIRNLQAQKPCSLVSLRADASTQQSNETDRNLHTITKTKPCV

SEQ ID NO: 247220 - protein, 52 aa, Zea mays
  Clone ID: MRT4577_157052C.1.pep
LREGKRKGKSCNEAERTSTDHMILHSTTIYSTLGVIFYQVQVELISIHNGYD

SEQ ID NO: 247221 - protein, 161 aa, Zea mays
  Clone ID: MRT4577_157053C.1.pep
KFVARLCVALRCSPVQFAARRETRNAVQFAAAPVMKRRTRSQTTRSRAQGHNGRENPGMKKTIPCAISHPAHKTNIFITMPAMRAHPTWQRPSRCHISLLFHVSFSPLLSRTLPCLQLGTDRRDQHLSDLIIIEISSNNYQYKEISSSRGAERRSNNPSTL

SEQ ID NO: 247222 - protein, 68 aa, Zea mays
  Clone ID: MRT4577_157054C.1.pep
NSQAGRFSRIAGRPNTDACWGSLLELYSTPKSHILPARPPVPVYSSFLSSALHLLFLLLHLNRILSYS

SEQ ID NO: 247223 - protein, 141 aa, Zea mays
  Clone ID: MRT4577_157055C.1.pep
NEKPNNTKQGMGTQRAEEPRDEKTIPRAISHPAHKTNIFIMMPAMRAHPTWQRPSRCHISQLFNHALEARRRLPFVQSVKIQIPPERHSSEGRQISIRRIRNLQAQKQAALSRFELMRQLINQTKQIGTCTSSQNKTMRFE

SEQ ID NO: 247224 - protein, 82 aa, Zea mays
  Clone ID: MRT4577_157056C.1.pep
SSYTNTMMRQQVFIWLSSRSSCGDDDVSFKLTTIKMTATIGLAFEATANNTQLIHIFKSLSSMVNRRPPCEKRWVKNALQSE

SEQ ID NO: 247225 - protein, 58 aa, Zea mays
  Clone ID: MRT4577_157057C.1.pep
GPNHPFPQKLSPSTSRGPPGGGGGGPPRGRGTPRYPSPLNGGTSYRELGRGPLTLLPQ

SEQ ID NO: 247226 - protein, 72 aa, Zea mays
  Clone ID: MRT4577_157058C.1.pep
HASAHASVHVKHLSGREENCRLKVENEMLKEENNRLIRQEQSNAPAPAPCPRCINDAVHLLLEKEVERLKAA

SEQ ID NO: 247227 - protein, 91 aa, Zea mays
  Clone ID: MRT4577_157059C.1.pep
GFSFYASSPVLLQIERIFSSRGVLQIERGYIATQHTSLNDTSSSPHEDLLLSHMKTCCLIMVFVYEDQLPVSTRWTEYLYDVKVNCSASSV

SEQ ID NO: 247228 - protein, 105 aa, Zea mays
  unsure (1)..(105): unsure at all Xaa locations
  Clone ID: MRT4577_15705C.1.pep
LWTSDSHPSELVSSIPHLADGGDVRSLLLPGLMISWTHDERELEGGLEVDGLWAAGSWAXSSVELEPYQITDINFESCEVENSNLWRRLSESASKVECAMLLAES

SEQ ID NO: 247229 - protein, 125 aa, Zea mays
  unsure (1)..(125): unsure at all Xaa locations
  Clone ID: MRT4577_157060C.1.pep
DIWGLLFIAGYDDHGPHLYQVDPYRAYLSCEAXTLGKNXYNAHTLLENRXTQDIELDDAIHTXGITYVSKTYLRGKYAPNTIXLRIIRSXDYEFKILSYRRNHGFVRKMWSKLIEDDTKTLHQYH

SEQ ID NO: 247230 - protein, 164 aa, Zea mays
  Clone ID: MRT4577_157061C.1.pep
KCLDPVCTLCVALRCSPVQFAARRETRNAVQFAAAPVMKRRTRSQTSRSRAQGHNGRENPGMKKTIPCAISHPAHKTNIFITMPAMRAHPTWQRPSRCHISLLFHVSFSPLLSRTLPCLQLGTDRRDQHLSDLIIIEISSNNYQYKEISSSRGAERRSSNPAAL

SEQ ID NO: 247231 - protein, 117 aa, Zea mays
  Clone ID: MRT4577_157062C.1.pep
TAYAWRSIGVEVCGARSFERLMVISVTCQLFFFFFMFRSDLYLACCVALRCSPVQFAARRETRRSVQFEAAPVMKRRTRSQTTRSRARGHKGRENPGIKKQFPVRSPTQHTKPTSLL

SEQ ID NO: 247232 - protein, 144 aa, Zea mays
  Clone ID: MRT4577_157063C.1.pep
KPVDASQMSSPLRSRSPGTSQLGRYQFDGSSTSSNKLWHPVSLNTLIRNLQAQKPCSLVSSRCVNSSIKRNRSEPAHHHKNKTMRLEQSNNRARLTVVRSDQASDPKDRRRLRSRREEDFISQEERDDFCSQGKGPGAEAGRRC

SEQ ID NO: 247233 - protein, 301 aa, Zea mays
  Clone ID: MRT4577_157064C.1.pep
MAGIIIKMLVLCAGWEIARGIVFSSLGSPALCVPVPCFVLFGFSFYASSPVLLQIERIFSSRCVLQIERGYIATQHNTQASNARPMVAVIFIVVSLNDTSSSPHEDLLLSHMKTCCLIMVFVYEDQLPVPTRWTEYLYDVKVNCSASSINKCLWISKNAFFGRHGTPPKGTTAWSPPPKPSDDGSGAKQREMGGDDDGAPCPGPVVGRVLQAPKLREFTLAELRAATRGFKPEMVLREGSFGRPYKGWVDERTRPWHQGECFPPPSVAAFVFATFFSSTVSTIPVFRCAVFSLDTVSALPV

SEQ ID NO: 247234 - protein, 92 aa, Zea mays
  Clone ID: MRT4577_157065C.1.pep
FPMYVMQSSSLCSWAYQDSCACIAGKVSARLLRHATPVKSSPGLALEEDEEGMANELVESDTLSKRLELDCLALRPQRAFPDIRMRSRHELN

SEQ ID NO: 247235 - protein, 132 aa, Zea mays
  Clone ID: MRT4577_157066C.1.pep
QGCPRDRPRWERTERWPRPPSRRGRPAAGRSPSWDSKAPWEMDAGRSSQPGGEARDAWNSTVRRAQMSRSRGAAPMAAEGLGWELLPASRESAEGHGHGKELEGEGSREESLGAGLPRGRRSDCLSSLVKPP

SEQ ID NO: 247236 - protein, 57 aa, Zea mays
  Clone ID: MRT4577_157067C.1.pep
SLLPLFFFLFSLPPQGLWGVKDLLRAQNIHTLFRVGATDTYFKRAPYFVNLAPIIIT

SEQ ID NO: 247237 - protein, 133 aa, Zea mays
  Clone ID: MRT4577_157068C.1.pep
PNGYLASNRGRLSSSQQPWPNHPLHDGQRRRCPISCGRHHGRPSPPPCSRLANSIPGSTCRGYQGEFHGSVRTLDEVMAEAPRSSRQYTQARPPRSLPRERSEAPRSGTDMALGAFVWARSSRIPSLRTRACD

SEQ ID NO: 247238 - protein, 83 aa, Zea mays
  Clone ID: MRT4577_157069C.1.pep
TLTCSTNIPFLTQLKLLSSSSITASTKGRKTPMMVMVVAVLHHHLHKRLWNTIGGSISLGAQMAPLRPLEIPNHCLISCPHLL

SEQ ID NO: 247239 - protein, 165 aa, Zea mays
  Clone ID: MRT4577_15706C.1.pep
RPGATPSPASAWKDALPLDVGQPSLRARLVYFSSRGWQRRPISVAARADDFLDARRTRVGRRWTGFGQRGSWAPAVSNPTKSQILILRTVKQKTLIFGGDFLNPHQKLSVNCLYTFQCQDSIQSILSDPCDPCIPCTLYMKDCKQACLIVSYVTCRMLNGNNTGS

SEQ ID NO: 247240 - protein, 121 aa, Zea mays
  unsure (1)..(121): unsure at all Xaa locations
  Clone ID: MRT4577_157070C.1.pep
PPLSALGGNDKSGLRKPVFTKADSVQVXTNGDTLTVKVISSTPWPSRWRTAAPGCASVQRAVHRRMCLGXDHTGVTVFTARNYNCDLLKPDATSILSSADMYMFNRXMWIATNLWGRIEAT

SEQ ID NO: 247241 - protein, 342 aa, Zea mays
  unsure (1)..(342): unsure at all Xaa locations
  Clone ID: MRT4577_157071C.1.pep
MAAKARVSLTAVLAAAAWACLSVVAASAFDVPTVAFEEGFSPLFGDGNLVRSSDDRSVRLLLDRRSGSGFISSDYYLHGFFSASIKLPKDYTAGVVVAFYLSNGDVYEKTHDELDFEFLGSRWGGQWRVQTNVYGNGSTSRGREERYLLPFDPTVEAHSYSILWAPTHIIFYVDDXPIREVIRHPDMGGDFPAKPMAVYATIWDGSAWATDGGKYKVNYKHAPFASDFSGLVIVGSRADDPVLRDQEDLLGLVTADYYAAVMTPRERAAMRAFRARRMTYTVCYDAVRYADGPFPECDNSDEERESFSAWGESKTVVVRPRARGRRPRGRKVGAGARRHGTC

SEQ ID NO: 247242 - protein, 49 aa, Zea mays
  Clone ID: MRT4577_157072C.1.pep
CRRLGSSCSSGRLNVSGRSVCYLDGSQLFVLRSATPKTVSPPLRPSANL

SEQ ID NO: 247243 - protein, 345 aa, Zea mays
  Clone ID: MRT4577_157073C.1.pep
MAAKARVSLTAVLAAAAWACLSVVAASAFDVPTVAFEEGFSPLFGDGNLVRSSDDRSVRLLLDRRSGSGFISSDYYLHGFFSASIKLPKDYTAGVVVAFYLSNGDVYEKTHDELDFEFLGSRWGGQWRVQTNVYGNGSTSRGREERYLLPFDPTVEAHSYSILWAPTHIIFYVDDTPIREVIRHPDMGGDFPAKPMAVYATIWDGSAWATDGGKYKVNYKYAPFASDFSELAVVGSRADPVLRVPRRDGAAHQDLLALMTADYAVVTPRKRAAMRAFRARQMTYTVCYDAVRYADGPFPECDNSDEERESFSAWGESKTVVMRPRARGRRRGRKAGRGRAGVSSS

SEQ ID NO: 247244 - protein, 62 aa, Zea mays
  Clone ID: MRT4577_157074C.1.pep
ASLPFFGTLSQLGCHLRASMKVSTTFFDDTLPSRPHWRQSLPATLLFYTSNSQCNHLMTLIN

SEQ ID NO: 247245 - protein, 92 aa, Zea mays
  Clone ID: MRT4577_157075C.1.pep
GVNIGQFISRKNNSTIWLVTLAPKAKKPLIPFQAENGLPPKRGYLNLNKPQFRKVEGGPFGGNKKKLFIPNKFFDKEGGKQGPLTRVFHLGT

SEQ ID NO: 247246 - protein, 86 aa, Zea mays
  Clone ID: MRT4577_157076C.1.pep
LFPFNQLAALNPAVFFHQQILIPFCQVGAASRASFLTQHQLLPFFHRFGGNPATLFQLQQLLPFVPLVLANPAASSQQPPIGGALF

SEQ ID NO: 247247 - protein, 52 aa, Zea mays
  Clone ID: MRT4577_157077C.1.pep
HRLMEERLATERLTVNVRHCMGAKAVADQAIIALGPMAAWLRSKYELAACLL

SEQ ID NO: 247248 - protein, 152 aa, Zea mays
  Clone ID: MRT4577_157078C.1.pep
MACSTGLCFLASIPPLSASCSSGSSCFLMIKRVSSAPSLSRWTIQYKQLGHTIYRRSHVLAFASADAPQGKRSSGENVVMVDPLEAKRLAAKQMQEIRAKEKLKRRRQAEAINGALAVIGLTAGLLVEAQTGKDILGQLAGYLTAISSLFGQ

SEQ ID NO: 247249 - protein, 486 aa, Zea mays
  Clone ID: MRT4577_157079C.1.pep
MAARLAAAVLLCACAVGPATALGVNWGTQATHPLPPKAVVQVLRDNGIKKVKLFDADPAAMRALAGTGIEVMVAIPNAMLAGLAADAGQARNWVKHNVRRYDFDGGVTIKYVAVGNEPFLESYNGSFINVTLPALKNVQNALNDAGIGDRIKATVPLNADVYNSPRSNPVPSAGRFRADIAGLMADMVRFLARNGAPFTVNIYPFLSLYLNEHFPLDYAFFDGGAAPVDDHGVLYTNVFDANFDTLVAALGAVGHGDMPVVVGEVGWPTDGDRHAKASYAQRFYAGLLRRLAANTGTPARPGQRPAEVYLFGLVDEDAKSVAPGNFERHWGVLRYDGQPKFAMDLTGQGRDTTLVPARGVAYLSRTWCALNPRAKDLGRLGANVDYACTFADCTPLGYGSTCGGMDVAGNASYAFNAYYQAQNQKDEACDFQGLALPTETDPSTATCNFTIQIQTGAAAMASLGRSAGAAALVLASASLQLLALLW

SEQ ID NO: 247250 - protein, 80 aa, Zea mays
  unsure (1)..(80): unsure at all Xaa locations
  Clone ID: MRT4577_15707C.1.pep
CCVHPCLVRWEFLVFSLPPLSHGPFSIHVIYVFFVSYPPHLPFFLSLFSLYNNFFTPLGFPKAIVRFRTAQPXSPTMSPS

SEQ ID NO: 247251 - protein, 57 aa, Zea mays
  Clone ID: MRT4577_157080C.1.pep
MHHKAKEAQRRRQAEAINGALAVIGLTAGLLVEAQTGKGILGQLAGYLTAISSLFGQ

SEQ ID NO: 247252 - protein, 51 aa, Zea mays
  Clone ID: MRT4577_157081C.1.pep
QHEIQAVGPGSLQTSTIIHINKFCICTMYLCMKIKRAHGENCNVTVTTSWI

SEQ ID NO: 247253 - protein, 55 aa, Zea mays
  Clone ID: MRT4577_157082C.1.pep
RRRQAEAINGALAVIGLTAGLLVEAQTGKGILGQVHKPNVVEIQFLIYTNFYHNQ

SEQ ID NO: 247254 - protein, 35 aa, Zea mays
  Clone ID: MRT4577_157083C.1.pep
VDNLGIFSILCSSTSYHLHAVLSYVIDITAHWMDL

SEQ ID NO: 247255 - protein, 43 aa, Zea mays
  Clone ID: MRT4577_157084C.1.pep
CSCLVRPIKNTSQKSRAPVRPVPASAPGQSSSALPALDLPGGT

SEQ ID NO: 247256 - protein, 45 aa, Zea mays
  Clone ID: MRT4577_157085C.1.pep
LWCSLLNDLNQLTQAYSFSFCCPLTPTGVHLSESHSSTCPGRTDQ

SEQ ID NO: 247257 - protein, 121 aa, Zea mays
  unsure (1)..(121): unsure at all Xaa locations
  Clone ID: MRT4577_157086C.1.pep
MGASMISSSARGGGPQGLPPLGRRASSFAGVGSKKKIKTDKPYGXGGGLNXVTSNANGKKGXGKGGYQFVDKNGANVDGYSPIYNEDDGSPTGDVYVGGTTGLLIWAATLAGILGGGDLLV

SEQ ID NO: 247258 - protein, 204 aa, Zea mays
  Clone ID: MRT4577_157087C.1.pep
MATEIQGYYDDGTAVVSFDVHNIDTTLTNLGSVVEWWLGETYRLHHRGHIAGLDVEWRPARVPGPVPVAVLQICVDHRCLVFQILQADYIPDALSRFLADRRFTFVGVGISGDVAKLRAGYRLGVASAVDLRVLAADTLEVPELLRAGLQTLVWEVMGVQMVKPHHVRVSAWDTPTLSEDQLKYACADAFASFEVGRRLYEGDY

SEQ ID NO: 247259 - protein, 66 aa, Zea mays
  unsure (1)..(66): unsure at all Xaa locations
  Clone ID: MRT4577_157088C.1.pep
FIKTVPRCGAQNGHCPFYGKDVYFVGLCCHIXAEHAVRLRAGSCRTPPRRAAPSPRPSRRPRRRSP

SEQ ID NO: 247260 - protein, 109 aa, Zea mays
  Clone ID: MRT4577_157089C.1.pep
ISRTDMRIEDRMTEQHEHGHRCATVTGSANCQRLWNAHPMPLGSTKRLVQHWIKPHDDDRLLACATLLLEPRGSLTASRWPDANDDARDDRTDDSDTHSEYNAINNRGG

SEQ ID NO: 247261 - protein, 104 aa, Zea mays
  Clone ID: MRT4577_15708C.1.pep
RHTTCYAQWLIINLNGSAEKGVARPARLALEGSASLCSILISSISLTSILHAIYRIIRFHHVIELGINIQASMPTRSNYCWQRVSNNNQLTDCTNHGWYIYTYQ

SEQ ID NO: 247262 - protein, 529 aa, Zea mays
  Clone ID: MRT4577_157090C.1.pep
MRIPRRKGGAGPLAVGVPSRRAQVAAVFALAALLGVSVLYDNAHIAASLRRHGGPRTYAKLSSFEGATAVPSIAKEEAAAAVARATESVPVHGADRADSPPHERQEEIEERASKPGATAGSSLQDAPLIEEVVQGGSGGHDGDGDGDGGAQAQEQPPAPGTCDLYKGRWVYDESRAPLYKESDCSFLTEQVTCMRNGRRDDDYQKWRWQPDGCDLPRFEAKLLLEKLRNKRLMFVGDSLNRNQWESMVCLVQSEAPWDKKSLVKNGSLNVFHLQEYNATVEFYWSPFLVESNSDDPDIHSISDRMIKPTSIAKHAANWEGVDYLIFNTYIWWMNTPQMKTLHGGSFSRKHVKYDEIERVEAYRKVLKTWSRWVEAHVDPKRTTVLFMSVSPVHMQSEGWGSPNAVKCFSETQPAISYNKKLEVGTDWDLFATAQRVTRSMKKVPVHFVNITALSEIRKDAHTSVHTLRQGKLLTPEQKANPRKFADCIHWCLPGVPDTWNEFVYGHIVSSTPPPQQQQQQKITEDEPHR

SEQ ID NO: 247263 - protein, 67 aa, Zea mays
  Clone ID: MRT4577_157091C.1.pep
FFFFFFFFFFLGGCKNYLSHFYFQELCITGHLKQPLRGREKQITTPGQLIWALQNQVFRSGNTNQKF

SEQ ID NO: 247264 - protein, 423 aa, Zea mays
  unsure (1)..(423): unsure at all Xaa locations
  Clone ID: MRT4577_157092C.1.pep
MRIPRRKGVAGPLAVGVPSRRAQVAAVFALATLLGVSVLYDAAHIAASLRRHGGPVRYAKLSSSDGAASVSGVAREEVATVETLAPPARAPVDGADRADPPPHERQQEAEAGAAKPGASLQQDAPLTEEVVEGGSGGHGGGGSQEQEQDQAQGTCDLYKGRWVYDESRAPLYKESECSFLTEQVTCTRNGRRDDDYQKWRWQPDGCDLPRFEAKLLLEKLRNKRLMFVGDSLNRNQWESMVCLVQSEAPWDKKSLVKNGSLNVFHLQEYNATVEFYWAPFLVESNSDDPDIHSISDRMIKPTSIAKHAANWEGVDYLIFNTYIWWMNTPQMKTARXGSFSRKHVKYDEIERVEAYRKVLKTWSRWVEAHIDPKRSTVLFMSVSPVHMQSEGWGSPNAVKCFSETQPAINYTKKLEVGTDWDLF

SEQ ID NO: 247265 - protein, 418 aa, Zea mays
  Clone ID: MRT4577_157093C.1.pep
HGGPTAYAKLSSSDGAASVSGVAREEVAAVETLAPPARAVGSDGADRTDPPPHEQQEEAEEGAAKPGASLQQDAPLYKESECSFLTEQVTCTRNGRRDDDYQKWRWQPDGCDLPRFEAKLLLEKLRNKRLMFVGDSLNRNQWESMVCLVQSEAPWDKKSLVKNGSLNVFHLQEYNATVEFYWAPFLVESNSDDPDIHSISDRMIKPTSIAKHAANWEGVDYLIFNTYIWWMNTPQMKTVHGGSFSRKHVKYDEIERVEAYRKVLKTWSRWVEAHIDPKRSTVLFMSVSPVHMQSEGWGSPNAVKCFSETQPAINYTKKLEVGTDWDLFAAAQRVTRSMEKVPVRFVDVTALSEIRKDAHTSVHTLRQGKLLTPEQKANPRKFADCIHWCLPGVPDTWNQFVYGHIVSSPPPPQDQPHR

SEQ ID NO: 247266 - protein, 149 aa, Zea mays
  Clone ID: MRT4577_157094C.1.pep
VSDHRRHIHCLALIYSRSEGWGSPNAVKCFSETQPAISYNKKLEVGTDWDLFATAQRVTRSMKKVPVHFVNITALSEIRKDAHTSVHTLRQGKLLTPEQKANPRKFADCIHWCLPGVPDTWNEFVYGHIVSSTPPPQQQQKITEDEPHR

SEQ ID NO: 247267 - protein, 448 aa, Zea mays
  unsure (1)..(448): unsure at all Xaa locations
  Clone ID: MRT4577_157095C.1.pep
SFNLILEGSITKSHRNLDLVTISAGAKGPRQPWHDLHCRIDGPAAYDVLTNFEQRWRKATKWRDRFSHWXLGXRISWILSPSPNVPNNHPSLWVSKEEDHENWHVQVFPRVRSGSLKGFPSDCKAASKLNLVCRKNLVIDKSIHTAYVRAIRSAQHFIYIENQYFLGSSYAWPSYVNSGADNLVPIELALKIASKIKAGERFAVYVVIPMWPEGVPTAASVQEILFFQAQTMEMMYKIIADELKATDNKDMHPEDYLNFFCLGNREEPPSNGSPESEKSTDKSAAALASKYRRFMIYVHAKGMIVDDEYVILGSANINQRSLAGSRDTEIAMGAYQPHYAWSTKNGHPHGQVYGYRTSLWAEHLGTVDDRFKDPSSLECVRFVNQIAVENWQRFTAEEMSTLQGHLLKYPVKVEADGKISPLSDQECFPDVGGKILGAPTSLPDSLTM

SEQ ID NO: 247268 - protein, 91 aa, Zea mays
  Clone ID: MRT4577_157096C.1.pep
MMNTRACGSGSGGRNDQTMMGFSEHPKPAASGQAQPSPPSSPSERPPAGRGRRRAQEPGRFLGVRRRPWGRYAAEIRDPTTKERHWLGTFD

SEQ ID NO: 247269 - protein, 137 aa, Zea mays
  unsure (1)..(137): unsure at all Xaa locations
  Clone ID: MRT4577_157097C.1.pep
MALSRGTSSATLRTRKFMTNRLLSRKLFALEAIHPGRANGSNAXLKDRLAKMYEAKDPNTIFVFKFRTHFAGGQTTVFSLIYDNLXTDKNIEPLYRLIKNDLATIADNSLQHVMDRHNRNMNIRDVNKTKGDDANNK

SEQ ID NO: 247270 - protein, 74 aa, Zea mays
  unsure (1)..(74): unsure at all Xaa locations
  Clone ID: MRT4577_157098C.1.pep
TKYSKISIXXTXNKXIIFHXNHPXXLXSYHPTTITSLISHYKITXLNSKXSPSXXXKIXIXLXXXXHLLKTXPS

SEQ ID NO: 247271 - protein, 75 aa, Zea mays
  Clone ID: MRT4577_157099C.1.pep
AWLVTPKQSIIHGLKIVSARALQSTSPAFEESIYGAEPQRSKVSYAPGECLSLVADCLFLSKVKIRTLRKRKKAS

SEQ ID NO: 247272 - protein, 449 aa, Zea mays
  Clone ID: MRT4577_15709C.1.pep
LGSSRPAGSFRSQRFPPRINQTLNPALAPPPARPPAMSLPHPVPRETVASAVASLTMWMKKRTAQTRPNLLADERDDLVVLQLSLRRIPASSSARPRLLPLPHPVIGHDGASVCVISDDRPKSRSPSASDLLHASKSLHRLPVSDVIPLSTLRTDYRPYESRRRLAASHDLFIADRAILPLLPRVLGKAFYATKKAPIGVDFSRVGWPEQVRKVLGSAFLYLRSGTCSGIKVGRLDMEEEVIVDNVMAAVEEAVEKVPKKWANVRALHLKAVDSVALPIYQVVPELGMKIEVPEIIGSGEVIDAAEAETCGKKIDKKGDAGARGREVFANVSAKRKRNKKGQVEDDVAMQEEVQVEIEKKKRKSIVISANDSQMAGKKGEKKGKRGLENKVNEASLDNKKVKMGKTEQRKKKSMNGDGEVGTEEMQGDKKIKVEKSDVKIKKLRTRIRV

SEQ ID NO: 247273 - protein, 180 aa, Zea mays
  unsure (1)..(180): unsure at all Xaa locations
  Clone ID: MRT4577_1570C.1.pep
MQGNPAMAHRVVLLLFLVLSVAVAAAVDADDPLIHQVVPGGDDNDLDLNAEFHLLSFLLRFGQCYKDAYKHAYQLSCLMANLNRALRHQLLDPLVDHGVTNFFDLTPEQIRRTYLRLYMCLRALLRELVEXVHEAPDLATDVLTDDFHCEDHCADHRVKNHGXSESCCSFSSSVALYGAL

SEQ ID NO: 247274 - protein, 160 aa, Zea mays
  unsure (1)..(160): unsure at all Xaa locations
  Clone ID: MRT4577_157100C.1.pep
KEEPSSINRATLATKIFSLLMLLSSFCMXANATIFPQCSQAIMAYLLPPYLPSMIAPEYENPALEPYMLQQAIAASNIPLSPLFQQSSPLSKVQPLIQTITAHXLQKLVLPVINQVXLANISXPYSQTQQFLTFNQLSTXTVLAYLQQQLLPFSQLTTGY

SEQ ID NO: 247275 - protein, 34 aa, Zea mays
  Clone ID: MRT4577_157101C.1.pep
SKLDRCVVTVKFPVVASLLFRRARKKKKKGPPPQ

SEQ ID NO: 247276 - protein, 47 aa, Zea mays
  Clone ID: MRT4577_157102C.1.pep
CVEPVAPKERAHLHYVRCATLCVFPKRDTWHANSINEEVLCAGDEAI

SEQ ID NO: 247277 - protein, 240 aa, Zea mays
  Clone ID: MRT4577_157103C.1.pep
MVGVPGVSGNIFQEIDGRQFDSPILGSRKQKGGFGKGKGKANFATERERREQFNVKYGALRSLFPNPTKNDRASIVGDAIEYINELNRTVKELKILLEKKRNSADRRKILKLDEEAADDGESSSMQPVSDDQNNQMNGTIRSSWVQRRSKECDVDVRIVDDEINIKFTEKKRANSLLCAAKVLEEFHLELIHVVGGIIGDHHIFMFNTKIPKGSSVYACAVAKKLLEAVEIKKQAYNIFN

SEQ ID NO: 247278 - protein, 110 aa, Zea mays
  unsure (1)..(110): unsure at all Xaa locations
  Clone ID: MRT4577_157104C.1.pep
SSIAKKTNQRRIHALHVPSKSITSPPRCKHRTPLRIRTSPAENEVIRPLSPPHPSPFTTLNTSGNTTAPTPFAYQQPSDHLSNGPFYNXTESEHRQGSSRTPSIKESQPQ

SEQ ID NO: 247279 - protein, 51 aa, Zea mays
  Clone ID: MRT4577_157105C.1.pep
ADDTVGGVALAWDVEVYEFSAFVLHCGKDLRFGGRGGEGSGQMYRKRVNSQ

SEQ ID NO: 247280 - protein, 34 aa, Zea mays
  Clone ID: MRT4577_157106C.1.pep
SSRVHAWHETWVWWSLQAALSLVYPSQHCVQAIL

SEQ ID NO: 247281 - protein, 158 aa, Zea mays
  unsure (1)..(158): unsure at all Xaa locations
  Clone ID: MRT4577_157107C.1.pep
NSARGTGFGSSGVERTARARRWLLRSAKLFRRLFSYKEMLIFMVGLDAAGETTILYKLKRGEIVTTIPTIGFNGETAEYKNISFXAWDVGGQDKIRPLWRHYLHNTQGLIFGVDSNDRDRFAEARDDLLRMLNEVKHFTTTILLCCCFLSIRFCVARF

SEQ ID NO: 247282 - protein, 123 aa, Zea mays
  Clone ID: MRT4577_157108C.1.pep
EVSHFDSSDLRQPPHNEHVVPLAKVVIMLHEPSRMVECLKHGINLVDGEVGLHHRRQTIEHLLEHSGAVAGRLASWPAGGVAWAAGGGIDHLADSGWLLGRGPYRRGLEAGARWSTNHQARCG

SEQ ID NO: 247283 - protein, 70 aa, Zea mays
  unsure (1)..(70): unsure at all Xaa locations
  Clone ID: MRT4577_157109C.1.pep
LTMKFMYLAFLLLYEIYXQFLLGGADASPRQVIDTEGKKVRAGVDYYIRPVLTTPCDGRGSCVVGSAMFS

SEQ ID NO: 247284 - protein, 110 aa, Zea mays
  Clone ID: MRT4577_15710C.1.pep
ELQDRHGASEKVQRKAKRKHAPRKHGCLNEPFGKIDQNFGKKVIYRKNINAMKRKWAARTRDPQQTRIDPGAGPSNRKKTGGAQLGGIQVRVQPGEEPKPAGPVKKAPKG

SEQ ID NO: 247285 - protein, 123 aa, Zea mays
  Clone ID: MRT4577_157110C.1.pep
KKPSPGPQWDFPLFGRVGVFFFKLVPQVFPFLNRPFFPPPFFWGAPPFGPPRLSSFSLGFFFFLNFLADPFFPLVSGFFFFPPFLLFRSLIGNVGGLPLPVPDFSGGPPVSPYLFPTVWRLSR

SEQ ID NO: 247286 - protein, 122 aa, Zea mays
  Clone ID: MRT4577_157111C.1.pep
MVNFIEAQKPLLSRLMKMAGLRPIEMELEPGTTMHVWAPKHHVGKKGTTISPLEPTAAKKKKKNRKSPESRPNVVLIHGFAAEGNVTWQFNFGVLVSRYNLYIPDLMFFGKSSTSSADRSPD

SEQ ID NO: 247287 - protein, 67 aa, Zea mays
  Clone ID: MRT4577_157112C.1.pep
RLSKGTFWLRCFLLHPGWFFFWLLFGLHNICKNFGLSNRQRYFLAFPKNKGDDLCPPPPWGYALIFD

SEQ ID NO: 247288 - protein, 268 aa, Zea mays
  unsure (1)..(268): unsure at all Xaa locations
  Clone ID: MRT4577_157114C.1.pep
AESSVLLSPHQTTTRALRRFLLLVLLGPRRCRPSQSINGAASATGSALITETNQEDAVTAQLKNGVRGLMLDTYDFDNDVWLCHSFQGKCYNFTAFQPAINVFKEIQTFLDANPSQVVTIFLEDYTAVGSLPRVFNASGLTKYWFPVAKMPKSGGDWPLLKDMISQNQRLLVFTSKRAKEASEGIAYEWNYVVENQYGDEGMVAGKCXHRAESPXMDSXGQSLVLMNFFTTNPXQTGACGEQFGALDSMLKTCHDAFSNRWXNYIAGD

SEQ ID NO: 247289 - protein, 451 aa, Zea mays
  unsure (1)..(451): unsure at all Xaa locations
  Clone ID: MRT4577_157115C.1.pep
EAGRAQSSPNTTRALRRFLLLVLLGPRRCRPSQSINGACPSPATAAALLGRPALVAVCAPGSGGAXVGDACSSSSGGGCGSGLHCSPCGAGGGSICTRASPVDPATHGTGLPFNNYSWLTTHNSYALAGAASATGSALITETNQEDAVTAQLKNGVRGLMLDTYDFDNDVWLCHSFQGKCYNFTAFQPAINVFKEIQTFLDANPSQVVTIFLEDYTAVGSLPRVFNASGLTKYWFPVAKMPKSGGDWPLLKDMISQNQRLLVFTSKRAKEASEGIAYEWNYVVENQYGDEGMVAGKCPNRAESPAMDSKGQSLVLMNFFTTNPSQTGACGNNSAPLDSMLKTCHDASGNRWPNYIAVDFYMRSDGGGAPLATDIANGHMVCGCDNIAYCKANSTFGTCVIPPPPPPSPPKASTPGSRGSTAGGDASAGTMALSSQWSFLLGLASLLLLSRS

SEQ ID NO: 247290 - protein, 41 aa, Zea mays
  Clone ID: MRT4577_157116C.1.pep
NKQHKLYKLLLTIEPHRQPRCFSYLCSLLFLYVLANTYNHT

SEQ ID NO: 247291 - protein, 147 aa, Zea mays
  Clone ID: MRT4577_157117C.1.pep
MASKRIQKELKDLQKDPPTSCSAGPVGEDMLHWQATIMGPSDSPYSGGVFLVTIHFPPDYPFKPPKVAFRTKVFHPNINSNGSICLDILKDQWSPALTISKVLLSICSLLCDPNPDDPLVPEIAHMYKTDRHKYESTARTWTQRYAM

SEQ ID NO: 247292 - protein, 88 aa, Zea mays
  Clone ID: MRT4577_157118C.1.pep
QHVEAQRSEASGYANDSIGSEGNNDVVDQSSTAVMDSNSSNHRHVLRSDVKNSGVFSHSRAWKPKTNSHPQDISDGKIAVDGHVDSHG

SEQ ID NO: 247293 - protein, 69 aa, Zea mays
  Clone ID: MRT4577_157119C.1.pep
SVFCLFHLALSIVQWFSSGCSHAHGLCTVHLASSLEISLNSFSSDVFLLITFNMGVCSSSTIDSISQSL

SEQ ID NO: 247294 - protein, 30 aa, Zea mays
  Clone ID: MRT4577_15711C.1.pep
LREQYHEYEDLGMLDHLDWICQALELAVRS

SEQ ID NO: 247295 - protein, 59 aa, Zea mays
  Clone ID: MRT4577_157120C.1.pep
GVWPTITTRILWSTYYTCRTVGQGSSHESNPGGNRLTEVESYLWTKNTETGGRTRFRWI

SEQ ID NO: 247296 - protein, 71 aa, Zea mays
  Clone ID: MRT4577_157121C.1.pep
GQQMKQMGMGGACSQTQKKEMGATHSTSFGGGMFSNPKKGNGCQPQNKLLWVSSLFPTFLPVLISCPVGRG

SEQ ID NO: 247297 - protein, 71 aa, Zea mays
  Clone ID: MRT4577_157122C.1.pep
FQFPRAPSKKSWEVANDEANPWSPPRSAATTLEELMVLSRRLRCGQAFPVDVGKKRLPSVELMKKLFIVCF

SEQ ID NO: 247298 - protein, 668 aa, Zea mays
  unsure (1)..(668): unsure at all Xaa locations
  Clone ID: MRT4577_157124C.1.pep
MGKGGQDEGNRRRDGSAASGPDRPAPVFPAWARTPSECLAELGVSADRGLSSEEAAARLQRHGPNELERHAPPSVWKLVLEQFNDTLVRILLLAAVVSFVLALYDGAEGGEVGLTAFVEPLVIFLILIVNAVVGVWQESNAEKALEALKEIQSEHATVRRDGRWSHGLPARDLVPGDIVELRVGDKVPADMRVLQLISSTLRVEQGSLTGETASVNKTSHKIELEDTDIQGKECMVFAGTTVVNGSAVCVVTGTGMATEIGKIHAQIQEASQEEDDTPLKKKLNEFGEALTAIIGVICALVWLINLKYFLSWEYVDGWPTNFKFSFEKCTYYFEIAVALAVAAIPEGLPAVITTCLALGTRKMAQKNALVRKLPSVETLGCTTVICSDKTGTLTTNQMSAVKLVAIGRWPDTLRSFKVDGTTYDPTDGKIHDWPSLSMDENLQMIGKIAAVCNDASIAHSEHQYVATGMPTEAALKVLVEKMGLPGGYTPSLDSSDLLRCCQWWNNAAKRVATLEFDRTRKSMGVIVKANSGKNLLLVKGAVENLLERCTHIQLLDGSVVLLDDGAKALILSTLRDMSASALRCLGFAYKDELSEFXQHMMVKNMXHKYLLDPSYYSSIESNMIFCGFVGLRDPPREEVHKAIEDCRAAGIRVMVITGDNKETAEAIC

SEQ ID NO: 247299 - protein, 115 aa, Zea mays
  Clone ID: MRT4577_157126C.1.pep
LTSPYDIPYKHFHACSVLYKLKRGTDSDARDKRQHTLFLYIWFLSSLQCSLQAQIGKLESNTTSQFTHDEFTNLVAFDSKQDTGLNLHARLWRGMLVATILKVLKNNDSIEAMLA

SEQ ID NO: 247300 - protein, 51 aa, Zea mays
  Clone ID: MRT4577_157127C.1.pep
LCQDNTYKESFYMLIKCSLKVFTSSTLNDRSRCIEDQGYQLRLSRDTLSNH

SEQ ID NO: 247301 - protein, 113 aa, Zea mays
  unsure (1)..(113): unsure at all Xaa locations
  Clone ID: MRT4577_157128C.1.pep
CCFLSVGFSGCFRLSXARWAXVVSGCGLARPVLLGALVLGRGLLVGGFCCXPLLAFGGLFLLPVVLVGFRPVFGLLGWGAVVSVLFSFVPSVRXPPCGLLVRXLCGPLRFFCA

SEQ ID NO: 247302 - protein, 243 aa, Zea mays
  unsure (1)..(243): unsure at all Xaa locations
  Clone ID: MRT4577_157129C.1.pep
MTLSGGASSGSSHGTRSLGSEGDMVHRMELMRKRRMESNRESAKRSRQRKQQHLDDLNSQVDKLRTTKQQLMXALNMTSMHYAQQAAQNSVLRTQMMELQSRLCALREIICHMYAXNNECPSSNCHGRCCYLPYFWRNCVELWQLQHANGRPLVAPVLLGSSYVRGGRGQDKQRHAYICIPCFLCHNSQVVCTSFDLMYKRVCAINWAHACGLKPTLLLLPLICSCVKKHMATGNLCFVHNYC

SEQ ID NO: 247303 - protein, 74 aa, Zea mays
  Clone ID: MRT4577_15712C.1.pep
GRASALPGWCCRGVKSLKSGGGTSGDPQGGCRCLKSFANRVKRVKMGPVAPIPGKWGVSVGFPISMSPGCNKIS

SEQ ID NO: 247304 - protein, 294 aa, Zea mays
  Clone ID: MRT4577_157130C.1.pep
MGFAGRVSILLFFLVAGTVANDQIFTTSGLPFGRSSREPRYRVEFHPVDSPFHPENGQESVPMASHEGKRYKCFLPVEETKTMKSMLPQNATNIIIESERRIKPKEPDELLEVLKDQCFYRHEGWWSYEFCYYGKIRQVHVEDGKVIQEFVLGEFDDDATAAYHENSTSELADDDHHVKDISKRYHVHLYTNGTVCDLTDIPRETEVRFVCSEPTVLISSVKEISSCRYVVTIQSPMLCKNPLFQEEKRTLSIHCNELPARAESSAEDDSLPKEAQISIIPDQDELHDFPAYAT

SEQ ID NO: 247305 - protein, 106 aa, Zea mays
  Clone ID: MRT4577_157131C.1.pep
MTLSGGASSGSSHGTRSLGSEGDMVHRMELMRKRRMESNRESAKRSRQRKQQHLDDLNSQVNLTQSKSQMKKTRLVLQDMLKQANSDNARCPLISQGPPPNKIDSK

SEQ ID NO: 247306 - protein, 90 aa, Zea mays
  unsure (1)..(90): unsure at all Xaa locations
  Clone ID: MRT4577_157132C.1.pep
HRKWRGNAYAVATAARVGGTLSFSQAENWFVRSLWTVHMKFRDVLSCLXKLARDCIKPRDPTFSGEHPKAREDRFWPHFKDAIGRWIFHS

SEQ ID NO: 247307 - protein, 114 aa, Zea mays
  unsure (1)..(114): unsure at all Xaa locations
  Clone ID: MRT4577_157133C.1.pep
KGRVMXVEKDLRVKGYNNIFAIGDITDIPEIKQGYLAQKHALLVAKNLKLLIKGSPPSKLATYSTGFPLAIVSLGRKEGLAQLPYLTLTGCIPGMLKSKDLFVGKTRKQMGLNA

SEQ ID NO: 247308 - protein, 151 aa, Zea mays
  Clone ID: MRT4577_157134C.1.pep
IIVIQEFVLGEFDDDATAAYHENITSELVDDDHHVKDISQRYHVHLYTNGTVCDLTDIPRETEVRFVCSEPTVLISSVKEISSCRYVVTIQSPMLCKNPLFQEEKRTLSIHCNELPARAESSAEDDSLPKEAQISIIPDQDELHDFPAYAT

SEQ ID NO: 247309 - protein, 268 aa, Zea mays
  Clone ID: MRT4577_157135C.1.pep
SPGLPFGRSSREPRYRVEFHPVDSPFHPDNGQESVPMASHEGKRYKCFLPVEETKTMKSMLPQNATNIIIESERRIKPKEPDELLEVLKDQCCYRHEGWWSYEFCYYGKIRQVHVEDGKVIQEFVLGEFDDDATAAYHENSTSELTDDDHHVKDISKRYHVHLYTNGTVCDLTDIPRETEVRFVCSEPTVLISSVKEISSCKYVVTIQSPMLCKNPLFQQEKRTLPIHCNELPAKAESGAEDGLLPKEAQISIIPDQDELHGFPAYAT

SEQ ID NO: 247310 - protein, 89 aa, Zea mays
  Clone ID: MRT4577_157136C.1.pep
MVPSNAESQSVVVIGAGIGGLTTAALLAQQGYRVKVYEQAAIVGGCASTFRRRGFIFDVGATQVAGLEPGGIHHRIFRQLQVDLPEASL

SEQ ID NO: 247311 - protein, 295 aa, Zea mays
  unsure (1)..(295): unsure at all Xaa locations
  Clone ID: MRT4577_157137C.1.pep
MGFAGWVSMLLFLLVAGAVANDQIFTTSGVPFGRSSREPSYRVEFHPVDSPFHPENGQESVPMASHDGKRYKCFLPVEETKTMKSMLPQNATNVIIESERRIKPKEPDELLEVLKDQCFYRHEGLWXSYEFCYHGKIRQVHVDDDKVIQEFVLGEFDDDATAAYHENITSELVDDDHHVKDISQRYHVHLYTNGTVCDLTDIPRETEVRFVCSEPTVLISSVKEISSCRYVVTIQSPMLCKNPLFQEEKRTLSIHCNELPARAESSAEDDSLPKEAQISIIPDQDELHDFPAYAT

SEQ ID NO: 247312 - protein, 72 aa, Zea mays
  unsure (1)..(72): unsure at all Xaa locations
  Clone ID: MRT4577_157138C.1.pep
GRYAERDIVQFVPFRDYVDRSGHQVFSMARLAKDVLAEIPEQLLSYXMRTRDIQPRPPPPANPSPIPAPEQP

SEQ ID NO: 247313 - protein, 86 aa, Zea mays
  unsure (1)..(86): unsure at all Xaa locations
  Clone ID: MRT4577_157139C.1.pep
AQHTDDDVRPASADSMPLRFCRRCPPLKKLCIVDKPLPSMLVETYNCSLLSTIVSRITMGGSVSVNKPLNLQKPPKGVSXVPLRKN

SEQ ID NO: 247314 - protein, 138 aa, Zea mays
  unsure (1)..(138): unsure at all Xaa locations
  Clone ID: MRT4577_15713C.1.pep
HTNRRSSGGRAVVDIFNEDYMDFDVESEDDPPEAGAEEEVDNDLDNHEDALDGVVCGEGDDKAQQKTKPARISTKYVTTHVLAPIPWTLTMNATMNAELMGELDGETNPIKIAITDLIPFTIPLNITQYXIPEDSYED

SEQ ID NO: 247315 - protein, 56 aa, Zea mays
  unsure (1)..(56): unsure at all Xaa locations
  Clone ID: MRT4577_157140C.1.pep
RRPFLSSSFLFAFFIFFXARSVYCRKDSQFHFMRTCFICLMKHMIIRQQIKHDGVQ

SEQ ID NO: 247316 - protein, 106 aa, Zea mays
  Clone ID: MRT4577_157141C.1.pep
MVSKPVVLVFLLVVLIITSQFEWKQQLVNELESTARNQKHVSSREELVKDQIIFTQEKMIQRLNNFVQNLQQQLVQCRGNNRTVNRSGTSLTSYISEIQMPQMMDD

SEQ ID NO: 247317 - protein, 227 aa, Zea mays
  Clone ID: MRT4577_157142C.1.pep
MPKLFLISDHALFIVLCRVAVGRKLRLYIVFYSMYGHVESLARRAAAGAGAVDGLEAVLRRVPETLPPEVLEKMQAPVKDPAVPVIASAAELQEADGVLFGFPTRYGAMAAQMKAFFDSTGSLWEAQKLAGKPAGFFVSTGTQGGGQETTAWTAITQLAHHGMLFVPIGYTFGSGMFDMDGIRGGSPYGAGVFAGDGSRQPSETELALAEHQGKYMASIVKKLALHA

SEQ ID NO: 247318 - protein, 64 aa, Zea mays
  Clone ID: MRT4577_157143C.1.pep
IKLPIELTSINRDQLHCPYMLDMRHHAHLRRNIVHTFRSNHSKVSLVTNNAAQPSNKGIPFFPD

SEQ ID NO: 247319 - protein, 86 aa, Zea mays
  Clone ID: MRT4577_157144C.1.pep
VRKELGIEENAKVLVFNFGGQVGHLSYRWFGKLMEYVSIFSCGNVMWLLVKMNSIQTIHKSCFSPASQINCFSNRQQLPNRAYRFF

SEQ ID NO: 247320 - protein, 49 aa, Zea mays
  Clone ID: MRT4577_157145C.1.pep
SFAHPTILPLTSHMKALCSVFIAKRVHILRGFSFLLNYRHHRIWNFEAF

SEQ ID NO: 247321 - protein, 129 aa, Zea mays
  Clone ID: MRT4577_157146C.1.pep
ATFTVLPADLRFGAPRLVFESIAEAETTRLEDIHVLEEQRLNTVIQSDRYQQTMRRYHDKAIRHRSIAVRDLVLRRILTGEGRHKLSPLWEGPFIVSAVTRPGSYRLTQMDGMEAGNSWNIEHLRKFYP

SEQ ID NO: 247322 - protein, 121 aa, Zea mays
  unsure (1)..(121): unsure at all Xaa locations
  Clone ID: MRT4577_157147C.1.pep
LLKLLGCCSCSGVPASCAETYTCYVAITGLQGQRVRILXLXRRLKHTGPDWTDLYHHEDNFLAHXRLADGSPLYVDQPVFNKDSTDVVVANGEIXNHRNGLRQLTGPHIIKTGSHCEVIIP

SEQ ID NO: 247323 - protein, 80 aa, Zea mays
  Clone ID: MRT4577_157148C.1.pep
DAHRRFCDVRALHTIMGSVVTKGLLPLVGLLLVGFNVMGPCSVLPPMKQPPVLLEQPHLLGRLLDVTHLAQAPSRTTMVT

SEQ ID NO: 247324 - protein, 61 aa, Zea mays
  Clone ID: MRT4577_157149C.1.pep
CRHLVLMLGDLDSGMPSALRYARNLSSLLATNRHRCVLTSVYDVAIIRVAQFAIKAAVLKY

SEQ ID NO: 247325 - protein, 87 aa, Zea mays
  Clone ID: MRT4577_15714C.1.pep
KCRSYSISRSLALSPSIGDQHITCGGICLQICVGCPIVRPMSLNLVHSSSVCISLEGADVSTPRIETHVPRIICREHLDPSTSVNGD

SEQ ID NO: 247326 - protein, 37 aa, Zea mays
  Clone ID: MRT4577_157150C.1.pep
DCLRPIRPYEVYNSWPRFNVKWKTASQLNLKHTFLSA

SEQ ID NO: 247327 - protein, 37 aa, Zea mays
  Clone ID: MRT4577_157151C.1.pep
PGRLLNHLGDDWNTNYAHILSALRTTSASSLATNTHQ

SEQ ID NO: 247328 - protein, 90 aa, Zea mays
  Clone ID: MRT4577_157152C.1.pep
GSDTVTAQHCYPLIFTRSLTVTSAHRSLPSPEPSASTVSLPSAFYGSLSDFPEEDRSCSFIKPSPQFSVCTYVANLNTMRSLPCKVKERV

SEQ ID NO: 247329 - protein, 134 aa, Zea mays
  Clone ID: MRT4577_157153C.1.pep
RFRYVMGSPLDADGNAGRSSAGEGSSDRRAPRAGLLGDVSRYDSLNVIRRERGIIDQIEVGDARSANGMAADGTGARLNDLTTLELQGERDVLMSGLGSNLGKDGLRRNVEGLAAPREAGLPYETRRRRRGKRV

SEQ ID NO: 247330 - protein, 132 aa, Zea mays
  unsure (1)..(132): unsure at all Xaa locations
  Clone ID: MRT4577_157154C.1.pep
PLQLRSASFTLFTVASLQQHTXGXSRQDLVRETCFGKIYAADRPTGSKLSVLKLDGDAARTPVPEFLEAVRGVAGLRHPNVEQLVGCCVEHGQRLLVYRQCSDRALDGELRLEHGASTSGADENETLRCAAR

SEQ ID NO: 247331 - protein, 292 aa, Zea mays
  unsure (1)..(292): unsure at all Xaa locations
  Clone ID: MRT4577_157155C.1.pep
TKNKKKKSHKSYKPNSKSGRRNEKGSLESTKKSALPSPFRICPENFQTKFPSFSLAARPSISLERDGPDHGTGVRTETPTSDLTEAFDSSQSSPSLACSVLGSFLAALNKFIADRYSWNHSVSEYHVYEFFKIWNCSRERANFLVHEFFTTHYFQDGIHPIPGARDALQTLSSFCSLSVVTSRQDVIKNHTLEWIEKYYPGLFEQIHFGNHFALAGQSRXSCRSFGAQVLIDDNPRYALECANDGMRVLLFDYESSYPWCKTGADELHPLVTKVHNWEEVEEKLLSWVVPDS

SEQ ID NO: 247332 - protein, 365 aa, Zea mays
  unsure (1)..(365): unsure at all Xaa locations
  Clone ID: MRT4577_157156C.1.pep
MLSRGAVRLLLYRLRPPPLRLSWNPSGAMPPPPPSAAANRSCLCRFAYSTARVERGRTLPGKAVFLDLGAGRRFTPSGALSLRGCLGWRDGGGDGEFRRRVDGEAAGMKAQVLTTQRQLMRDPEVLPLEEAATGKSMXNVNGXACRRGKPLGFPEQAAAKMVVAVDVDEVLGSFLAALNKFIADRYSWNHSVSEYHVYEFFKIWNCSRERANFLVHEFFTTHYFQDGIHPIPGARDALQTLSSFCSLSVVTSRQDVIKNHTLEWIEKYYPGLFEQIHFGNHFALEGQSRPKSEICRSFGAQVLIDDNPRYALECANDGMRVLLFDYESSYPWCKTGADELHPLVTKVHNWEEVEEKLLSWVVPDS

SEQ ID NO: 247333 - protein, 134 aa, Zea mays
  Clone ID: MRT4577_157157C.1.pep
DYNDIIKHPMDLGTIKKKLDSGSYASPSDFAADVRLTFNNAITYNPRGHVVHDLAIQLNKMFESRWRTVEKKLATAATKPHVEVDKADSKRRKTPPVERSNLSIDRVRPTEIVKPKMTKEERETLGDCLTSLAE

SEQ ID NO: 247334 - protein, 53 aa, Zea mays
  Clone ID: MRT4577_157158C.1.pep
PQVLIRRLDCARTRGDRHYHQGLRTSDSPNLGVCKKSNLLTSISVDRVQNDLG

SEQ ID NO: 247335 - protein, 180 aa, Zea mays
  Clone ID: MRT4577_157159C.1.pep
VPSSGRGKHVERASNDLKSVITTYEGKHNHEVPAARNSGNGHPSSGSTPAPPQGSGGLHRRLEPPQVSIPRLSAAAAAAAAAAAYGSLSLRFPPQLSAAPGGFSFGMLRPTGMAPSLGGFLPAQMPGRGLPMQGCAGLVLPRGEAKVVSPEQQSGLPGGTGMPRQPTSSKSSSLWPGGLR

SEQ ID NO: 247336 - protein, 105 aa, Zea mays
  Clone ID: MRT4577_15715C.1.pep
PDGGWRTKSHPRQTITQDDGLLAGAVVHGRLPAVRVQGVHQTRTHDVHLTIQSTLCCNIGGTYQDFFKSYVRSRRCNTWRSVGTMTPAKSATKTQGFHPHPSSTI

SEQ ID NO: 247337 - protein, 76 aa, Zea mays
  Clone ID: MRT4577_157160C.1.pep
FGSFTRVSPRSNHLYPLLIPQLYGPGNTIAPAFLSKILRNNPLSFRSKPYRAHLHVKRMVVFALFHNVHYCAPNKT

SEQ ID NO: 247338 - protein, 68 aa, Zea mays
  Clone ID: MRT4577_157161C.1.pep
SYHSYPQNHNRQLYSTYAETNIQQRSALQDLPHCPPSYPNAQKVHEFVVRHYKHLVQENSADDTSERR

SEQ ID NO: 247339 - protein, 103 aa, Zea mays
  Clone ID: MRT4577_157162C.1.pep
TNQTKGGGEDNCCCVGARRYSTRTTCLFFLYFPHPISILLLYFQLMHIFTHTTIKMTNIMTLHYMIESDQKTWATASLIPTLFNLPNKEDPAIPNLKTEGTVG

SEQ ID NO: 247340 - protein, 92 aa, Zea mays
  Clone ID: MRT4577_157163C.1.pep
GPLTDSAVLRAQLCSVRSSDNLLEILIEPPAWSFQQHVLTGEKHPLLLRCLVDQSVFPSSIRSVIVTASERFILLRGLTIGPHLDLKVSVSY

SEQ ID NO: 247341 - protein, 31 aa, Zea mays
  Clone ID: MRT4577_157164C.1.pep
QQIICAHGIRNCTVPYPALCKGMIMANYLFL

SEQ ID NO: 247342 - protein, 67 aa, Zea mays
  Clone ID: MRT4577_157165C.1.pep
ISPPCLFFFVEGGGLLLNGGEFPPRALPAWFLDPGFLSRREWNCHVQGGSLSYNRWPLWFFDSPRKC

SEQ ID NO: 247343 - protein, 409 aa, Zea mays
  Clone ID: MRT4577_157166C.1.pep
MRGLLACATLARRAAASSAPARVRHLAGAAEAAEAELKRTALYDFHVAHGGKMVPFAGWSMPIQYRDSIMDSTVNCRANGSLFDVAHMCGLSLKGRGAIPFLESLVVADVAALRDGTGTLTVFTNEQGGAIDDSVIAKVTDHHIYLVVNAGCRDKDLAHIEAHMEAFNKKGGDVKWHIHDDRSLLALQGPLAAPTLQLLTKEDLSKMYFSDFKMIDINGYACFLTRTGYTGEDGFEISVPSENAVDLAEAILERSEGKVRLTGLGARDSLRLEAGLCLYGNDMEQHITPVEAGLSWAIGKRRRAEGGFLGADVILKQLQEGPKIRRVGMVTQGPPARSHSELVSGSGERIGEVTSGGFSPCLKKNIAMGYVKSGMHKAGTELKVVVRGKSYDAVVTKMPFVPTKYYKPS

SEQ ID NO: 247344 - protein, 143 aa, Zea mays
  Clone ID: MRT4577_157167C.1.pep
MGLRRLMRCCCCIAKHADDGDKIDFGGGNVHVVTSKEDWDQRIAEANKDGKTVVANFSASWCGPCRVIAPVYAEMSQTYPQLMFLTIDVDDLMEFSSSWDIRATPTFFFLKNEQQVDKLVGANKPELEKKVAAVADAAGSKTV

SEQ ID NO: 247345 - protein, 249 aa, Zea mays
  Clone ID: MRT4577_157168C.1.pep
CKCKQGPLAAPTLQLLTKEDLSKMYFSDFKMIDINGYACFLTRTGYHFDSLSPLFEQYCKDCLISYFSYTGEDGFEISVPSENAVDLAEAILERSEGKVRLTGLGARDSLRLEAGLCLYGNDMEQHITPVEAGLSWAIGKRRRAEGGFLGADVILKQLQEGPKIRRVGMVTQGPPARSHSELVSGSGERIGEVTSGGFSPCLKKNIAMGYVKSGMHKAGTELKVVVRGKSYDAVVTKMPFVPTKYYKPS

SEQ ID NO: 247346 - protein, 139 aa, Zea mays
  unsure (1)..(139): unsure at all Xaa locations
  Clone ID: MRT4577_157169C.1.pep
PKGGGGSPGFKKAFPFPXGGKGSNKELPKETFKYPPSPPGNIRFWVPKTPPEPRRVLGVFERGYPFAPPLGAKAPQFFKIPGVWSPPPELLGGLISRCPPPVLVFWRVFFSPGKLLKPTGGILFLMAFLTQIRAGPFFP

SEQ ID NO: 247347 - protein, 120 aa, Zea mays
  Clone ID: MRT4577_15716C.1.pep
MGVYTFVCRSAGGGEWTAKQHSGEIEASAATPYELQRRLVASASAADSASGVQSSFSMVTPSSAVFQVIVGGGAMMVSGGGGGGASAAASGGAAAEAPKEEKKEEEKEESDDDMGFSLFD

SEQ ID NO: 247348 - protein, 143 aa, Zea mays; identical to SEQ ID NO: 247344
  Clone ID: MRT4577_157170C.1.pep

SEQ ID NO: 247349 - protein, 63 aa, Zea mays
  Clone ID: MRT4577_157171C.1.pep
VLGSVSLKTGSIPFFLIERGSFCHYVQKKKKKKKKQKKATPTQRATPATKKKKKKSSPLLPLL

SEQ ID NO: 247350 - protein, 64 aa, Zea mays
  unsure (1)..(64): unsure at all Xaa locations
  Clone ID: MRT4577_157172C.1.pep
FGRCCGRYISDGSSKLQLRLEKHESPVNGVEDENADSLIPQAILDFVLXAGFPGSGSADYLDYM

SEQ ID NO: 247351 - protein, 111 aa, Zea mays
  unsure (1)..(111): unsure at all Xaa locations
  Clone ID: MRT4577_157173C.1.pep
LEAAGQCLIYSLCFIVAEFIVICYFKKKKKKKKKRTTEKTPRTFTLALPAPRVSLRRRRCLSPRTRRAAAPAPAPATTGSSTAASSTTSPAGGXLGGGGGPPFFFFPPPPP

SEQ ID NO: 247352 - protein, 57 aa, Zea mays
  Clone ID: MRT4577_157174C.1.pep
HRSGFLGSPPPPGSFSFGRRPFPPSFLQCYVPASSPLLWRFEVNTLFGAAPPPHILV

SEQ ID NO: 247353 - protein, 72 aa, Zea mays
  Clone ID: MRT4577_157175C.1.pep
IYPNLLPGWRRKSSRRKRSISLKKNRNQARPLKEARFCPSTLISSQHSFYATYPLTICPYLQVVITIGPQLG

SEQ ID NO: 247354 - protein, 104 aa, Zea mays
  Clone ID: MRT4577_157176C.1.pep
MASSLLHCPDKLPFLDVEAILHMKEGLGETSYAQNSSLQKRGMDTLRSLITSTATDVYVSQMPERFTVADLGCSSGPNALCLAEDIVGSIGRACGRSSRPPTES

SEQ ID NO: 247355 - protein, 87 aa, Zea mays
  Clone ID: MRT4577_157177C.1.pep
PAPSPALLQLAHGGVRYSPAIFSLPRTIRSKSPRNPQEKALSSSRLVEVVRVATTAQEKMKPWKETSWSSKTTMNSRRGLAATPSRL

SEQ ID NO: 247356 - protein, 137 aa, Zea mays
  unsure (1)..(137): unsure at all Xaa locations
  Clone ID: MRT4577_157178C.1.pep
MASSLLHCPDKLPFLDVEAILHMKEGLGETSYAQNSSLQVSGSPPFCSRRPFGFCHQINXQQLRSLSKRDHRVYVRSCCXRGMDTLRSLITSTATDVYVSQMPERFTVADLGCSSGPNALCLAEDIVGSIGRACGRS

SEQ ID NO: 247357 - protein, 81 aa, Zea mays
  Clone ID: MRT4577_157179C.1.pep
GRCCHAIGEQRRAATKGYPTTRLLGRGTGIVLSVGMGTLVIEMLATVEPVVDPVHHRLQIHRMLPASPATGYRPTPSALLT

SEQ ID NO: 247358 - protein, 47 aa, Zea mays
  Clone ID: MRT4577_15717C.1.pep
SRLSCRSRMKLEQGHPGELAIGAARPWTQHARDEQPARIKRSQGRSG

SEQ ID NO: 247359 - protein, 111 aa, Zea mays
  Clone ID: MRT4577_157180C.1.pep
RPGQEQSSPNPKASCSSHSQTRTQPPRLPSQECIRQLCRSVAPSTSGLSRLISVGPSSSSPLRTSDTELRIFYSALPSIARSSPAPCSNVCLGVVRPVPPCRGAPPLPARA

SEQ ID NO: 247360 - protein, 44 aa, Zea mays
  Clone ID: MRT4577_157181C.1.pep
CLTPIHMVFYSVIIHITSELYASPTNYRQPKWRNSLGILKCFYV

SEQ ID NO: 247361 - protein, 82 aa, Zea mays
  unsure (1)..(82): unsure at all Xaa locations
  Clone ID: MRT4577_157182C.1.pep
LLGGVGVCPLPPXVFXLXPXKXKKLVSPPLSKNEGPLRAAVVRLQAQLGRGWMPGGFPVCGWCLLDXLLSVSVVPACLAPPR

SEQ ID NO: 247362 - protein, 213 aa, Zea mays
  unsure (1)..(213): unsure at all Xaa locations
  Clone ID: MRT4577_157183C.1.pep
IPSRPASVAHDAEKKPAAKKPAEEDPAAEEAPGEKKPEEEKRLPAGXLLPREAGXGTRGKKDGKNSVASYNIFFLEVLKEVHPVIVFSSEVMFMMNFFIDDFFEKLADDADLLGCYNKNTIISSREIQSFGRLLLAGEVEQHAFYEGTEGVTKISSYYAGPPLVGGFSAVITFVAVSRCCWLLAFMDVYYPAGTAVLSDRTVMVIIPPRFFFF

SEQ ID NO: 247363 - protein, 46 aa, Zea mays
  Clone ID: MRT4577_157184C.1.pep
RYPRVWRRPVVLKRRQRAAAVDAGRHEHGLRCHMCRPPTLRTTKLN

SEQ ID NO: 247364 - protein, 60 aa, Zea mays
  Clone ID: MRT4577_157185C.1.pep
MTNEVFRITWLSGEAEGNGPRKVLVRIYSRGVEVFFDRANEVRTFECMSRQRPRRGVKGK

SEQ ID NO: 247365 - protein, 77 aa, Zea mays
  Clone ID: MRT4577_157186C.1.pep
KLLANRPVVFGNKLSNLNVSASLVQASFKKHPAGKLPAPQKACLVAKTTPQNVAVGRHNALRLQKLLNGKVAGVLET

SEQ ID NO: 247366 - protein, 63 aa, Zea mays
  Clone ID: MRT4577_157187C.1.pep
PMQNISPKLYIYKGGHMSRVIGNFKWRFGGQTFNRGFKPGANFIKNASTLTSMLKETGWVSSF

SEQ ID NO: 247367 - protein, 46 aa, Zea mays
  Clone ID: MRT4577_157188C.1.pep
GGLTTIYSGSHTITNKYLIPYILKYNNLSLSYAITIIYDTNNHYLP

SEQ ID NO: 247368 - protein, 58 aa, Zea mays
  Clone ID: MRT4577_157189C.1.pep
LLNQISPPPWFVFSPVLFPLVFFGVKKKKKKKKKKKKKKKKKKKKKKKKKKKKKKKAA

SEQ ID NO: 247369 - protein, 143 aa, Zea mays
  Clone ID: MRT4577_15718C.1.pep
KRILPSLFFIHETISIILSPDVLTGGRARRHLGLRASMGLRASLSIKSGPIVRQALSSVPIDHRQPTPIFSGACHGRRRTTPIFSGDCHVPWSTTNCPDLFWCLSTRPDLLSRGATVNCLSSKRRSAAGGERRSAGKVVLLLV

SEQ ID NO: 247370 - protein, 45 aa, Zea mays
  Clone ID: MRT4577_157190C.1.pep
FYGHLFILMQKKLGMTLAIPLRFRATTNKDGSSKRIKIRRPATGS

SEQ ID NO: 247371 - protein, 61 aa, Zea mays
  Clone ID: MRT4577_157191C.1.pep
QTSLTKKAFFGITTLKPPCSGLFIAYNQPLFATILKSLLVLRATYVLTFGALSHKTLLIRK

SEQ ID NO: 247372 - protein, 45 aa, Zea mays
  Clone ID: MRT4577_157192C.1.pep
DSSLILVSGSTSKSTVADVNPDSKGIFYHEFMGQVGSLEGCLRQM

SEQ ID NO: 247373 - protein, 36 aa, Zea mays
  Clone ID: MRT4577_157193C.1.pep
YYRLVSNKFHQSASSGSPPDPIPHHSQLSCAPRNLS

SEQ ID NO: 247374 - protein, 94 aa, Zea mays
  Clone ID: MRT4577_157194C.1.pep
VEDSIRAFGLKVAGVPSEGLLQWSACRLRASTPVGAWFPYSILVITGTFVVDIHGSEDQSSVMWRDCVLVRKRILSYDRGQPLDVLREEKVWSW

SEQ ID NO: 247375 - protein, 106 aa, Zea mays
  Clone ID: MRT4577_157195C.1.pep
PRVRCIPVFFHPGSAYRQYTAHLPKDPNSYSVLIMHTDVTGRNVSIEDTLSNISPAAVKAMREEVIRLIPRLVYADPRSRRVDFTDAFDLATEAVINRVAKRRRGR

SEQ ID NO: 247376 - protein, 525 aa, Zea mays
  Clone ID: MRT4577_157196C.1.pep
MENPRPQAPALTPPMAPLPVPIHPPIAPIPVPPPRVPAPAPAAAASMASTPTPSTGDGGEAEYEVSDDHRAARERHERAVQELLQRRRAYAMAVPTNDSAVRARLRRLGEPITLFGEREMERRDRLRALMVRLEADGQVDRLLRAQEDDQAARIGEEEEEEQIEYPFFTEGSQELLKARLDIARYSLPRAKARIERAKRRHEDPDEDPEAEAELVVKQAGEFVLECSEIGDDRPLTGCSFSRDASMLATSSWSGIVKVWSMPQITKVATLKGHTERATDVVFSPADDCLATASADRTAKLWKPDGSLLMSFDGHLDRLARLAFHPSGKYLGTASFDKTWRLWDINTGKELLLQEGHSRSVYGVSFHPDGSLAASCGLDAYARVWDLRSGRLFFTLKGHVKPVLGVSFSPNGYLVATGSEDNFCRIWDLRKRQMLYSIPAHKSIISHVKFEPQEGYYLATSSYDTKAALWSARDYKPIKSLVGHESKVTSLDISGDGQKIVTVSLDRTIKIWSCRSSTQDNEMELD

SEQ ID NO: 247377 - protein, 299 aa, Zea mays
  Clone ID: MRT4577_157197C.1.pep
MVDYVLVLLLPFQEITICLSTLCSSWSGIVKVWSMPQITKVATLKGHTERATDVVFSPADDCLATASADRTAKLWKPDGSLLMSFDGHLDRLARLAFHPSGKYLGTASFDKTWRLWDINTGKELLLQEGHSRSVYGVSFHPDGSLAASCGLDAYARVWDLRSGRLFFTLKGHVKPVLGVSFSPNGYLVATGSEDNFCRIWDLRKRQMLYSIPAHKSIISYVKFEPQEGYYLATSSYDTKAALWSARDYKPIKSLVGHESKVTSLDISGDGQKIVTVSLDRTIKIWSCRSSTQDNEMELD

SEQ ID NO: 247378 - protein, 263 aa, Zea mays
  unsure (1)..(263): unsure at all Xaa locations
  Clone ID: MRT4577_157198C.1.pep
MSGQQCLRRLPAAMRSVRALRASPRCTPTARSYSALTKANSSGLLGQASRRPAQLSSQRLCALEQIRTYADTIVKVPEMAESITEGTLKQWSKQVGDFVEQDEEIATIETDKIDVAVNAPEAGIIKEFLVNEEDTVTVGQEIVKLEPGAAPEGGKKEASQEPKEPASQDQETSSQPEGQQEQSQPEAPKEESKPAPPKQQEQPKQESKPEPKKDSKPKEEPKPATPGSREERRVKMNRMRLRIAERLXQSQNTAXSLTTFTKS

SEQ ID NO: 247379 - protein, 514 aa, Zea mays
  Clone ID: MRT4577_157199C.1.pep
MAQRWRSRARWDSDLDEDGSPPFRKPRRGGSDEEDDEVGNEDLSLEIIARAQRKRRWASCGGVTGFANLLSVSSGDDEDAVVELAEADEPRRKQKKRQHWKQRKRQRKEATAAAGAAVDEEEKAVCSTQEEPIGTAESVLTENGADAPASDNMVLRKLLRIPRYFDPGETLLETCFNCSEEGHVAANCPLEKRKKPCFVCGLFGHNAKQCTQGQDCFICKKGGHMAKDCPDKHRRNDHQSTLCLKCGEIGHDMFGCTNDYPPDDIEKIRCYVCNQKGHLCCSDFSDDCPKQISCYNCAQSGHSGLGCAKRRETSAVTTPTLCFKCGEEGHFARGCTKNAKSDRSKGKSSSHIQRKEKWKKASSSARSAPYDARKTSKRKSPHLEERVGTPRHKPKSRGGWTGGDDLPLKKYKSNGWGSPSTPKKSYANHQFLSGCDYLTPQPSRRHNYHGTMSSPNHQFLSGCDYFTPESSRGHSHGTMSPNWNYSPSARKHGFSSSRFAAAAASNTHVRFGRN

SEQ ID NO: 247380 - protein, 81 aa, Zea mays
  Clone ID: MRT4577_15719C.1.pep
NVIEPSFRSNYHILSEGYALLSPKGCISPLGPKCPGLCPAPLPKYINVQMSNPGDVFLEFPFLLNKNFLDFGVGLTKNALI

SEQ ID NO: 247381 - protein, 174 aa, Zea mays
  unsure (1)..(174): unsure at all Xaa locations
  Clone ID: MRT4577_1571C.1.pep
PRRPRGRPPPGXRPPQQQPQPGQXPXQPPQXSPGQQXRTGGXGSXGSPXRGQXXEGRRHQXSPAATPXGXPQXQAXQQQGXHQNRQXEPXHRXQATXXXXXQXXRQQQPQGEXAAXXAAQXAQQRTAKXXRQXQQPXPGXGNAXAGGGXXGNKGREPSGSAANGGAPTGSTDEE

SEQ ID NO: 247382 - protein, 45 aa, Zea mays
  Clone ID: MRT4577_157200C.1.pep
TKLPGITGATYAYGAIYCTSPYIIQTPAHLIKHGGPYKEVGGFIR

SEQ ID NO: 247383 - protein, 344 aa, Zea mays
  Clone ID: MRT4577_157201C.1.pep
HCVTSTCDQRIPRYFDPGETLLETCFNCSEEGHVAANCPMEKRKKPCFVCGLFGHNAKQCTQGQDCFICKKGGHMAKDCPDKHKRNDHQSTLCIRCGETGHDMFGCANDYPPDDIEKIRCYVCNQKGHLCCSDFFDNSLEQVSCYNCAQSGHSGLGCAKQRREASAVTTPTLCFKCGEEGHFARGCTKNAKSDGPKGWSSPHSQRKGRWKNDGKSPSHIRRKEKWKKDSSARSAPHDACTTSKSNSPSFEERMGASNHKSKWRGGWTGDDDLPSKKYKPNGWGSPATPKRSYTNHQYLSGGGDYFTPQSSRRHNHGTASPGARKHRFSSSIFAASNTHVRFKRS

SEQ ID NO: 247384 - protein, 79 aa, Zea mays
  Clone ID: MRT4577_157202C.1.pep
TVRRLRSSAVTSSESAVFASFSIFLPPSSPAPGAVGRGAVIWAWGAGERRRAGEGGSIHRRGGEGRVREKRTRQTGQAT

SEQ ID NO: 247385 - protein, 45 aa, Zea mays
  unsure (1)..(45): unsure at all Xaa locations
  Clone ID: MRT4577_157203C.1.pep
NVGFLGIVGHLPSRLDFQTXKLPSLDPHMTEEPIYHKLGSDGIVN

SEQ ID NO: 247386 - protein, 379 aa, Zea mays
  Clone ID: MRT4577_157204C.1.pep
MARRGAAAKGTWRPRRKPSRAQADVDGDGDAVHRGAEGGRPPPKGHTNATGSGGFFCCYLLRSLCPRSKGRTYIGFTVNPRRRIRQHNGEIVSGAWRTRRGRPWEMVLCIYGFPSNVAALQFEWAWQHPTESLAVRKAAAEFKSLGGIGNKVKLAYTMLNLPSWESLNLTVNFFSSKNTKFTTGCPSLPSQMKAVVCAMEDLQCQPDGPSSEEDDNDIRDESQDNGEEPPDSPIRDGFSYSDYCFQQPSSDQAQPMDEQTISAGSGVEDDFVDEFASSMERSEILGTRRGLNGPRTSPLCSLGACSNDDGLEEEAGLMSPLLMPNASSDAGDGRHSINGNHVVDLVTPTPLGRLRRRDCISSICPKIIDLTSSPIVIQL

SEQ ID NO: 247387 - protein, 127 aa, Zea mays
  Clone ID: MRT4577_157205C.1.pep
WLAGLSLSAPPSAARRRWAIPRSPKASGWATAACEVEALAAGLLPRGCSRLCGVLLLVHGLDLTGGQPDRGVPSALQCRDTASASRTEAGQGMQHQSGRNQLDPVFFMRIVDFIRMPLWKLQVLPLL

SEQ ID NO: 247388 - protein, 148 aa, Zea mays
  Clone ID: MRT4577_157206C.1.pep
KSKQTGLSRGPFIKIPISEIPYPWGGGQTPKARPPRLNKPQNIKPVLGPLWGSKKKGGPPFFFFFFFFFPPKPFFLYHERGAPPQRAPNYWSLPFWDGPPFKGGGPFSSKQVWPGPPPFLLFPFFFGSYGTWEKLPGLKPPFFGSPCP

SEQ ID NO: 247389 - protein, 55 aa, Zea mays
  Clone ID: MRT4577_157207C.1.pep
RGLYINPLIFESLMCSLGSPLYLPDKYIYIAVSEFRSYNIFQRVPTCAESAGDVS

SEQ ID NO: 247390 - protein, 60 aa, Zea mays
  Clone ID: MRT4577_157208C.1.pep
KISKIVRIIDNIIKIKFISNRNKIYIRKEFLNIPPPPPIYENKVKKNIILNECIGLKKDK

SEQ ID NO: 247391 - protein, 86 aa, Zea mays
  Clone ID: MRT4577_157209C.1.pep
PLVRPHVRQNQSSLCVLPYCGCMHTSIYKTNFQLRSLCSPAALTETQKKLDLSVGDAITTPCTAGEPALSYARGAEHGHADCTHCS

SEQ ID NO: 247392 - protein, 176 aa, Zea mays
  Clone ID: MRT4577_15720C.1.pep
RYGLKLALVDELGERPELELRPQDCTAVMKVCIRLRRYAAVESLFSWFRGAIGSPTVVMYTTVIHSRCRDGRHREALSLVWEMEQAGCLLDLPAYRVIVKLCVALHDPGRALRYLSRMKEAGFIPTGDMYDSLIEGYLADGRLAKCRQLIRDAESAGVKLDRRLLSRLSETGGRHP

SEQ ID NO: 247393 - protein, 120 aa, Zea mays
  Clone ID: MRT4577_157210C.1.pep
MASSSSSLLLVLVAVAALFVLGSCGGALTFTIGKDSSSTKLSLVTNVAISEVSVKEKGALDWSDDLKESPAKTFTLDSKEPIKGPISVRFAVKGGGYRVVDDVIPADFKPNSVYQTGEQI

SEQ ID NO: 247394 - protein, 101 aa, Zea mays
  Clone ID: MRT4577_157211C.1.pep
FRFRLRFKACRRQLLNGTPCYARSGFGYPSFHPSGRFLPFWSFGGLALLLLMVALFSGFFLRSSFLRPCIASLSPSLWLSRTPTALFSLVTALGVDSNIEH

SEQ ID NO: 247395 - protein, 44 aa, Zea mays
  unsure (1)..(44): unsure at all Xaa locations
  Clone ID: MRT4577_157212C.1.pep
FSFFFPLLHLXQXNNRGCQDIITQGTTFAFCKRNKCLHNLHKAH

SEQ ID NO: 247396 - protein, 160 aa, Zea mays
  unsure (1)..(160): unsure at all Xaa locations
  Clone ID: MRT4577_157213C.1.pep
FFGVGWGGVGCIRRPVCPSCAPCVCLAPRGARRWGLSQGSFASWACLGFTSLRGPDYFFSFESRFRVACARFAFLLKAGALLVFPILLRLFVASGCPSGSFSGSVPLPLGLVTRGVGVAPPLVRIDSRLFSLRRVKSRXALVISFRFFPLPVCLSSRGSF

SEQ ID NO: 247397 - protein, 83 aa, Zea mays
  Clone ID: MRT4577_157214C.1.pep
SILVLRRAHRGPPAGPSAACPTRAVSAEGITGYGAQAGGAAVVAGSWVPSLLSMDDDDDVKGSLHRSGVMDLVGSESARRPRK

SEQ ID NO: 247398 - protein, 83 aa, Zea mays
  unsure (1)..(83): unsure at all Xaa locations
  Clone ID: MRT4577_157215C.1.pep
KSPLWLMGTVNRPNRQRFCGAVSSYLDVTKSPRWGARAGGYYPTREGRARCRPLSFRIAPGWRGRRXRPALTSPPGGHQRALS

SEQ ID NO: 247399 - protein, 194 aa, Zea mays
  unsure (1)..(194): unsure at all Xaa locations
  Clone ID: MRT4577_157216C.1.pep
MADKAVKVFLMWASTMLIXRMKWTLRMKGVEYEYVXEDLANKSVYLLRHNPVTKKVPVLVHDGKPVAESTIIVEYIDEVWKGGYPIMPGDPYERAQARFWARFAEDKCNAALYPIFTATGEAQXYLDIVVGWFAHWLPVIEEVTGASVVTDEELPLMKAWFGRFLAVDVVKAALPDRDRLLAANKARREQLLSA

SEQ ID NO: 247400 - protein, 151 aa, Zea mays
  unsure (1)..(151): unsure at all Xaa locations
  Clone ID: MRT4577_157217C.1.pep
VEDLFTGLARRMHAAAVYRPIXRGPXIDSTRLNDMREGTRTDLRKTKHINXQIGNKYTXYVNRTYALMGRPCDGXLRTNYNASTEIVDIGDWAVKVANQHTYILLXMADRQLTKEGYXPQEELGQVELSKEDMMKRGVTNRWRNLMKRHIM

SEQ ID NO: 247401 - protein, 222 aa, Zea mays
  Clone ID: MRT4577_157218C.1.pep
MAEKGVKVLGMWASPMVIRVEWALRLKGVEYEYVDEDLANKSADLLRHNPVTKKVPVLVHDGKPVAESTIIVEYIDEVWKGGYPIMPGDPYERAQARFWARFAEDKCNAALYPIFTATGEAQRKAVHEAQQCLKTLETALEGKKFFGGDAVGYLDIVVGWFAHWLPVIEEVTGASVVTHEELPLMKAWFGRFLALDVVKAALPDRDRLLAANKARREQLLSA

SEQ ID NO: 247402 - protein, 56 aa, Zea mays
  unsure (1)..(56): unsure at all Xaa locations
  Clone ID: MRT4577_157219C.1.pep
RVGGAELDADGRALSLGFHHGSRWGEKKSANVGKDSXXXWAGSRGRGEPALARLGK

SEQ ID NO: 247403 - protein, 44 aa, Zea mays
  Clone ID: MRT4577_15721C.1.pep
VVVGVISRLVNPTHMVQFCVYAVGLVGPCPFKILYMMPSRGYAN

SEQ ID NO: 247404 - protein, 222 aa, Zea mays; identical to SEQ ID NO: 247401
  Clone ID: MRT4577_157220C.1.pep

SEQ ID NO: 247405 - protein, 88 aa, Zea mays
  Clone ID: MRT4577_157221C.1.pep
KHPVKFLSSVALGKEDTQCIDKAYFAEYFFTGTRQNGLPSAETLAKKAAVRCRVPQTLARKQPLDFIHSVSQLSRTFSNFITDSYMIS

SEQ ID NO: 247406 - protein, 54 aa, Zea mays
  Clone ID: MRT4577_157222C.1.pep
TGASVARRSEMQQHGVGVEKRRRDSASGAPRGSHYLSSGSCGGARSRRAEIDCR

SEQ ID NO: 247407 - protein, 77 aa, Zea mays
  Clone ID: MRT4577_157223C.1.pep
GRFLGLARGPPCLKTFPLVAQGGGPRPLGGAPWGGPPLMGGLPGPNRVFLSGFPTRGPQIFCKNFMVFRGRFYWGKK

SEQ ID NO: 247408 - protein, 47 aa, Zea mays
  Clone ID: MRT4577_157224C.1.pep
MCDVDVQLPSALDPHAEANAEDSGAGPGTKDYVHVRIHQRNGRKSLT

SEQ ID NO: 247409 - protein, 106 aa, Zea mays
  Clone ID: MRT4577_157225C.1.pep
RADYDKDDMVQGTGLLGTERQESESQPPLVNNDWHADMHRAHPLGSVPPCTTFTSDLAEKPSVSAETNGEDVMIFTTKIPGTALGDCDKTSNLNIMNSDQSKCSKD

SEQ ID NO: 247410 - protein, 67 aa, Zea mays
  Clone ID: MRT4577_157226C.1.pep
GPHGTGAGWDRFKIGSARPPPNNRKRGPLRISPPFNLIGPGYSFFSLPFLGPPILPRDGPAPPRGDS

SEQ ID NO: 247411 - protein, 92 aa, Zea mays
  unsure (1)..(92): unsure at all Xaa locations
  Clone ID: MRT4577_157227C.1.pep
IPHFIIFIPSFIPHFLFFFNIFLFCFYLLYPTVSIHSRDLLPHILCSSTQHCHPSPSRRHPLGHHPRRLWLIHVXYADAQETLRGDVTTTSR

SEQ ID NO: 247412 - protein, 71 aa, Zea mays
  Clone ID: MRT4577_157228C.1.pep
YFHYLAFGADSAGTWTSLHVFVLSVLYNNIPNWVCRTVQRVVLNAPVLCRLEAVIHSVKKKTPLELKKKKK

SEQ ID NO: 247413 - protein, 56 aa, Zea mays
  Clone ID: MRT4577_157229C.1.pep
KGVPPPTQKEPSFLKKSFPFKKKKKKKKKKKKKKKKKKKKKKKKKKKKKKKNPQPP

SEQ ID NO: 247414 - protein, 114 aa, Zea mays
  unsure (1)..(114): unsure at all Xaa locations
  Clone ID: MRT4577_15722C.1.pep
AFHVRASARDDKFSNSDIIEYPKILSANFAKLGRSGLNCGCGXCHWLHXDVMVGRLLSNITIGPSYVDALHAQTDLAWDVHTMMEEPEXRVPXDXINAPADIVSAHXEQTWTIH

SEQ ID NO: 247415 - protein, 90 aa, Zea mays
  Clone ID: MRT4577_157230C.1.pep
TNPFTSPKSLEAPFFLPRVWAKKIKRPLNNPCLSSVFDQPVYKPEMDLFQFCFKRRGTKVVSQGKSAGTFLQTPPCLSFPTPSNKSLGCP

SEQ ID NO: 247416 - protein, 55 aa, Zea mays
  Clone ID: MRT4577_157231C.1.pep
NSLNYEHVVVEEVVANAVADYPRDVLVVLSGLCGMRAAIMRVEGVVNWSFCPVGH

SEQ ID NO: 247417 - protein, 97 aa, Zea mays
  Clone ID: MRT4577_157232C.1.pep
VVSSFRFFRQKKIKFDSFLGGSNQCRAPPIRKETLFGQNVCFVFCAKSWVKPTVWFLFKGLHCNQNPGQFKKKKIWLFFYNNLFKQIYGTFINKSQI

SEQ ID NO: 247418 - protein, 113 aa, Zea mays
  unsure (1)..(113): unsure at all Xaa locations
  Clone ID: MRT4577_157233C.1.pep
MAAATAPLPRRRQRELSSMPAPALATPTEAHAHACDARRSRWRPPQIPLPPATTTLTLMPGADVVTAEQESGAARCXELVGPAPTALTAFTIFYGGRXAGFEDFAMGDRGRAP

SEQ ID NO: 247419 - protein, 64 aa, Zea mays
  Clone ID: MRT4577_157234C.1.pep
VMSVVVASRRAARRMARSASGIRWPIPGVASMATCGGPPFTLGCRLSSWRWSVEKKRVLSNAWA

SEQ ID NO: 247420 - protein, 61 aa, Zea mays
  Clone ID: MRT4577_157235C.1.pep
PPKVENPGGPKQTRGPPSPPGGHICLYPFIPQPEERKVIYQGVGYSMVFSQRTRTESWFKD

SEQ ID NO: 247421 - protein, 264 aa, Zea mays
  Clone ID: MRT4577_157236C.1.pep
MALFAAARRAASSSVPVLLRASASSGSHRSAVLLRPLAAAVAPPKPRAMPFSSAPATRPSSDAELLSVIDSEIKYAEDCDDHDRVEEIPENFPFKISDEKGTNAVTLKRTYQGEQIEVVVHMPSLVTGDEPDHDRDGEDEDTAGDDNDEDEGQKPEQSSIPLTVTISKGDGPVLEFTCTAYPDEVIIDSMSVTQQSGDDERDMIAYEGPDFNDLDENLQREFHRYLDLRGISPRTTNFLHLYMINKDSREYLLWLRKLKDFFKQ

SEQ ID NO: 247422 - protein, 66 aa, Zea mays
  Clone ID: MRT4577_157237C.1.pep
ELRNKHQKHKAGECWTLKSSSSKGYRCCRPGKDIKSRFFFLGITNRERPLCVKGLIVMGSHGDELP

SEQ ID NO: 247423 - protein, 65 aa, Zea mays
  Clone ID: MRT4577_157238C.1.pep
PLTAPFFFFFYFFGPGHAAGGVVLMLIRGHLARLWRRLSVQRGFNGLPRLTGLRTMYETKLKEGD

SEQ ID NO: 247424 - protein, 294 aa, Zea mays
  Clone ID: MRT4577_157239C.1.pep
MCLGVQSKRESQVLRPRAAGRLTANSEVKPEQQAAASLPINSIDPPAGGGDQHRGRSGDPFHTTTTALAPARRRSCQICSGHRSSDSEPSPMAVKVYVVYYSMYGHVGKLAEEIQKGASSVEGVEAKTWQVPETLPEEVLGKMGAPPKPDVPVITPQELAEADGILFGFPTRFGMMAAQMKAFFDATGGLWREQSLAGKPAGVFFCTGSQGGGQETTALTAITQLTHHGMVFVPVGYTFGAKLFGMDQVQGGSPYGAGTFAADGSRWPSEVELEHAFHQGKYFAGIAKKLKGSA

SEQ ID NO: 247425 - protein, 113 aa, Zea mays
  Clone ID: MRT4577_15723C.1.pep
GGGFFFFFFFVFFFFFFFFFFFFFSTTWGDWQSLGSQKWGGFYTQTNKRGGGGEQSLWEGYNYAMNKPRAENPSKKPIFPWKFGRTLKHFRVSKGLFLGRRPLIHERLKQFSI

SEQ ID NO: 247426 - protein, 148 aa, Zea mays
  unsure (1)..(148): unsure at all Xaa locations
  Clone ID: MRT4577_157240C.1.pep
AFFDATGGLWREQSLAGKPAGVFFCTGSQGGGQETTAYVPLHSTHGYMIRALPRPGVQRSWDQHLACYSFHXLTAITQLTHHGMVFVPVGYTFGAKLFGMDQVQGGSPYGAGTFAADGSRWPSEVELEHAFHQGKYFAGIAKKLKGSA

SEQ ID NO: 247427 - protein, 100 aa, Zea mays
  unsure (1)..(100): unsure at all Xaa locations
  Clone ID: MRT4577_157241C.1.pep
FFFFFFFFFFFFFFFFCGINIVHLLLLPPNDKVQWTSRDVGGGEPPPYAAIRTLHRTIQSVGPAPPPFEARGRSQPVLLTXATRHSSLKTNNCNDLSPSR

SEQ ID NO: 247428 - protein, 192 aa, Zea mays
  unsure (1)..(192): unsure at all Xaa locations
  Clone ID: MRT4577_157242C.1.pep
GLVFPSFSSSRYXIASCGVLPIDRMTKHREAIQVVADRVPRDVLEQIYKISLPKPKPYESQSRPPTAAELLRSYCASRGHVSHGGQPDETRAARQILKDYIDGKIPHYELPPGVVTDDEVATTEPTAPAAEGPTASAADESGRDDSDEQDDATGGPDMRQLLSELESFDLAAIEGSDATGKKQQHQASQTQH

SEQ ID NO: 247429 - protein, 90 aa, Zea mays
  Clone ID: MRT4577_157243C.1.pep
LCGMDRRSCLGAGFFLFFFFFFFFFFFFFFFFFFFFFGTIKDTTSFHTHIPRHYIFCISHSFFLRKFHKTNSDDYSTQQKTGTFHPGRPR

SEQ ID NO: 247430 - protein, 164 aa, Zea mays
  Clone ID: MRT4577_157244C.1.pep
PPRVFFFFFFFFFFFFFFFFFFFFFWPPLIWKKFLKKKKKPRVFSPKKPGTPGQFGGRGFGAQKTPGDKKPNRFQKAGFLNGKGGFLRLTPPQVPRDPKGGLASLKKFPRGKKSYFFFFGPPWPPKLFVKLKGLGGPKCPPGIKTHSVVKGPPAPPRKIKGPGP

SEQ ID NO: 247431 - protein, 103 aa, Zea mays
  Clone ID: MRT4577_157245C.1.pep
FFFTAKTENKLSFPFKNPHKKNYPREPTNSPMIPKNPKLRTPTHFNIFRRGPKQKKTNPKALSQRIRGQPLMPKTMGGTPSQGTTETCRIGTKNPTGTLKNFY

SEQ ID NO: 247432 - protein, 151 aa, Zea mays
  Clone ID: MRT4577_157246C.1.pep
RSRPAGSRQRLGRGAVYTSPPPQASLSRADTSSSRASSSTSFSIVLLHLLYLSAIRSATTALINQARSARRHRIIAATPTSSPFNNPPCFLIGEGGARARASSFPWRRSDRADHRTDGSRDAVPCDRMALPPIDRGYEDADPGAEHLIATL

SEQ ID NO: 247433 - protein, 58 aa, Zea mays
  unsure (1)..(58): unsure at all Xaa locations
  Clone ID: MRT4577_157247C.1.pep
ALSIAAATTYVTCDATXRRRQRTLLARKLAASISTYVRELTAGSSCHCRTPAASSRRR

SEQ ID NO: 247434 - protein, 78 aa, Zea mays
  Clone ID: MRT4577_157248C.1.pep
LEAVEMAPVLVVAGGRDVLRDRNAQYARRMKEEWGKEVEYVEVAGADHGFFVVDPWSERADELVRIVRRFVVDHMDTE

SEQ ID NO: 247435 - protein, 45 aa, Zea mays
  Clone ID: MRT4577_157249C.1.pep
NKLIYRLASADGPTCIVPASNDETLARWGRRSLFVRARSDFTMER

SEQ ID NO: 247436 - protein, 40 aa, Zea mays
  Clone ID: MRT4577_15724C.1.pep
NITHKASTSSTYNYIITSQIPTTNISPPSTTNISSNTTSP

SEQ ID NO: 247437 - protein, 53 aa, Zea mays
  Clone ID: MRT4577_157250C.1.pep
DDGYQGIRYYTYDRRPAITLNERRLLQIGQKTHNAYPLLLEAIGHKLNAKGQV

SEQ ID NO: 247438 - protein, 75 aa, Zea mays
  Clone ID: MRT4577_157251C.1.pep
MANARSGVAVNDERTLTPGELQLKRLHRFITFMMDHTSTATAVDQARDRAPSYDDSAHSVPENDCRSVTYDLDIA

SEQ ID NO: 247439 - protein, 102 aa, Zea mays
  Clone ID: MRT4577_157252C.1.pep
SLLRQQPTYDSINFPPLISRPRRIFFPFYSSTILLLSVCRVDFFSYIDRGSTHRFVIPAICKCNDLYDSVFLLNCKKKKKKKKKKKVRYIDFLFKKKKKKAA

SEQ ID NO: 247440 - protein, 51 aa, Zea mays
  Clone ID: MRT4577_157253C.1.pep
MDIKLMASRKYGVTIQPIVLGELKPLWVGKNVLIVTTAMSVNGYMNYLVYK

SEQ ID NO: 247441 - protein, 96 aa, Zea mays
  Clone ID: MRT4577_157254C.1.pep
PVTVNPKPLILFAKIGICVSHDQKDSIPKLTNVSAQKKASPFLAPNTFKMENQKKFSWFVKHWISLAPNKKCVPMLGRFLGKTFSLLAVPNNPFFW

SEQ ID NO: 247442 - protein, 70 aa, Zea mays
  Clone ID: MRT4577_157255C.1.pep
MAQSMRIVALALVALLVVAAAAPVATAYGCYDDCYERCANGKKDPACTKMCNQACGSTDQGAGAAGAAPA

SEQ ID NO: 247443 - protein, 62 aa, Zea mays
  Clone ID: MRT4577_157256C.1.pep
TTKPNFFYSTSFKFFFNHTPIFKKLLKSHPRKMISCISSGNIIILTSPSFFIKLLSYFRPLK

SEQ ID NO: 247444 - protein, 70 aa, Zea mays; identical to SEQ ID NO: 247442
  Clone ID: MRT4577_157257C.1.pep

SEQ ID NO: 247445 - protein, 103 aa, Zea mays
  Clone ID: MRT4577_157258C.1.pep
PLARRLPTIPSLCRPARRRRDGTRPGFRASRPQWPPHDRTPRQARLPTPAPIRRLRRRSATVRPTAICVAPSRDVRSKLLVSARRLHLADRCTAEAARQPRLY

SEQ ID NO: 247446 - protein, 72 aa, Zea mays
  Clone ID: MRT4577_157259C.1.pep
GHCDLIDLRSRYSSTSGYDALRLSHSQIGALARSSSMPCAVRISRGDRSSVSRVEHSCERIVIERCELLANR

SEQ ID NO: 247447 - protein, 90 aa, Zea mays
  unsure (1)..(90): unsure at all Xaa locations
  Clone ID: MRT4577_15725C.1.pep
HPLSLSALLLPPSPWLDTRALLCPWVRLHPPSPTAAPFLXLTQNKTPRLICFVLPSGYIPPSLPLIFPPYLHXLYHILAQPPPGAPTPRS

SEQ ID NO: 247448 - protein, 72 aa, Zea mays
  Clone ID: MRT4577_157260C.1.pep
RQLTPMQTTELATRPHSKERMVRPAGTRSRNSPGRSHPVRPMRPFHASVFFFFFFFFFFFFFFFFLTSSRSR

SEQ ID NO: 247449 - protein, 46 aa, Zea mays
  Clone ID: MRT4577_157261C.1.pep
LARLGCGIGSFLIRPRRRARISHPPSHILGGSARISPRPCRHLEPK

SEQ ID NO: 247450 - protein, 90 aa, Zea mays
  unsure (1)..(90): unsure at all Xaa locations
  Clone ID: MRT4577_157262C.1.pep
NNQTTRRTIILSLXLLKALIESATNAFIIPQCSLAPSSIITQSLPPLTXKGFXHPSRQAYLLQHAIAASVSHQPITQFQHQXLAHLTISN

SEQ ID NO: 247451 - protein, 40 aa, Zea mays
  Clone ID: MRT4577_157263C.1.pep
ISIHNQSNISDLFSLRRETYIHVYDLRSEIDGKHTQSSDL

SEQ ID NO: 247452 - protein, 57 aa, Zea mays
  Clone ID: MRT4577_157264C.1.pep
KKYEKQEPRGDKIKKSNTLPTGEEQQNGGHSPVNWLLRKKPVYLYRKNRVGHLHRFI

SEQ ID NO: 247453 - protein, 175 aa, Zea mays
  unsure (1)..(175): unsure at all Xaa locations
  Clone ID: MRT4577_157265C.1.pep
PAPSPRAGPTSSAGASSAYPPSRGSRGWPTPAAATSRRPLRRRPLEAGQGLVQTTTLTHTEAYQAHKREVKLNLGVGAYRTEKLLAYLLKVDXKADMLMMQKGENTEDLPMAGLAEFNKATGELLLGPDNPDINQGXVATLQNLSGTGSLRIAAAFIQRNXPGAKEVIWSATWGN

SEQ ID NO: 247454 - protein, 51 aa, Zea mays
  Clone ID: MRT4577_157266C.1.pep
EITIMPLTKDYNYDSDPYGLRSHFIFKLVRTFLFRYVTLPKLYERELRFYI

SEQ ID NO: 247455 - protein, 48 aa, Zea mays
  Clone ID: MRT4577_157267C.1.pep
LDTDIATRYDYATGFITTRVELDKLPVQSLHVVTYQCIMHLILRQNLS

SEQ ID NO: 247456 - protein, 87 aa, Zea mays
  Clone ID: MRT4577_157268C.1.pep
KRVVLYVVGVHLHRDTSALSAFSKECQARASSNELKSASVSWMLTCRYVHYGERFLRMGLLHFYTGGKGKLIALLQSIAGQQLSSGE

SEQ ID NO: 247457 - protein, 61 aa, Zea mays
  Clone ID: MRT4577_157269C.1.pep
QSSPWHGHTPPTLSPSINHRGFARQLPCLSKREGMTVGDLIHAAKAMRVFCFTLHCIAKLT

SEQ ID NO: 247458 - protein, 35 aa, Zea mays
  Clone ID: MRT4577_15726C.1.pep
AVKWWLLQCLQVALGAKPLACCDVVENMTAALDVV

SEQ ID NO: 247459 - protein, 65 aa, Zea mays
  Clone ID: MRT4577_157270C.1.pep
FSFFFYSFSGGTKGINLGRVCLKPWTPKFHGVFLMGLPHPKKIHLLPQRTLKMTHHRRGPQFTDG

SEQ ID NO: 247460 - protein, 77 aa, Zea mays
  Clone ID: MRT4577_157271C.1.pep
YPFLPPTFKEHFQTWLRYYTKQTVNLNRFGPLKKGNQLTGGPFPGPQKYFGEIKGPCGEGPNEGEPWAPTQGAFSPG

SEQ ID NO: 247461 - protein, 117 aa, Zea mays
  Clone ID: MRT4577_157272C.1.pep
LICSFPSTISPMPATSHSRRNEMTLILMLLESVQISSHTQRSSLRTLIIYFYLKLFNLAMVLSFVVVKHYLDLTSTLFFEHLRHYLLSALEMRLALEGSSMSHNCSQDLYGLHAPVF

SEQ ID NO: 247462 - protein, 84 aa, Zea mays
  Clone ID: MRT4577_157273C.1.pep
ARAQGPANARQQQLECPRCHTNMTKFWYYNNYSTAQPRHFCRACRRYWTHGGTLRDVPVGGASHRAATGRVGKRRRKLRRDLIP

SEQ ID NO: 247463 - protein, 346 aa, Zea mays
  Clone ID: MRT4577_157274C.1.pep
MARPRLLLTFLFAAAAVLTTVPGVALAKSKLAKKSDDVVNGPLLTEKIQAKKTLIVGPDEEFKTVQSAIDAVPAGNAEWVIVHLRSGLHRGKVVIPENKPFIFVRGNGKGRTSISHESASSDNAESAAFTVNSDNVIVFGVSFRNSARVGLVNDPEIRSVAAMVAGDKVAFYHCAFYSPHHGLFDSAGRHYYESCYIQGNIDFIFGSGQSIFQCPEIFVRPDRRTEIRGSITAQVRQEEDSSGFVFLKGKVYGVGEVYLGRVTAPDSRVIFADTYLSKTIHPAGWTTIGYSGSTDKVTLAEFNCTGPGADVTNRVPWSRRFSPDDAAKYLTIDFINGKDWLPAYYY

SEQ ID NO: 247464 - protein, 215 aa, Zea mays
  unsure (1)..(215): unsure at all Xaa locations
  Clone ID: MRT4577_157275C.1.pep
MARGGGGGCCPPMDLMRSEAMQLVQVIIPAESAHLTVSYLGDLGLLQFKDLNAEKSPFQRTYAAQIKRCSEMARKLRFFKEQMSKADIGPTQLNETHLDFDDLEIKLGELEAELTEVNANNEKLLRTYNELLEYHTVLQKAGDFFYSAQRTAASQQRELEANLSGQTSLESPLLEQEMSTDPSKQVKLGSLSXLVPKEKAMAFERILFRXTRGNI

SEQ ID NO: 247465 - protein, 90 aa, Zea mays
  Clone ID: MRT4577_157276C.1.pep
VLIPQSQCAPKTHVWLRCPKFAPIWNVFSPVPVSPLLYCASHKREPNPTKFRFKPRIVQNGSPPFSFHIRSFGPPKPFSLFFWNHPMIDL

SEQ ID NO: 247466 - protein, 67 aa, Zea mays
  Clone ID: MRT4577_157277C.1.pep
QLQRAIHAVCQGFHRVCAWGHVHMIAYSVGSLPCDCAHRILFLLTMCARLRHVEECYAGSGLFRSMQ

SEQ ID NO: 247467 - protein, 64 aa, Zea mays
  Clone ID: MRT4577_157278C.1.pep
NVKIKVCAHFFLMKAFNSVFFFFSGGATFFFYWPTDFSFFVIFLYQFLFLSNGPVVSFFAFSKY

SEQ ID NO: 247468 - protein, 96 aa, Zea mays
  Clone ID: MRT4577_157279C.1.pep
VIVVSTRFAAAQTVKCFFRRPSLFFPPLSIPSACVCFAKNQFGFFLKKNGFQSTYRKPVPLERVFFFSKKGLVNIPPKLVREGPFVVKETGGRLTS

SEQ ID NO: 247469 - protein, 105 aa, Zea mays
  unsure (1)..(105): unsure at all Xaa locations
  Clone ID: MRT4577_15727C.1.pep
GAPLGSPFKAQFSSPSVCRAMGVRXEPPQNIWGIRQHEALWRQLLPSADLQRPKSNHQRERSNRPTSVVPAAGSPAWRRGGWRIQRRARVVGVERRDRRPVCARD

SEQ ID NO: 247470 - protein, 177 aa, Zea mays
  unsure (1)..(177): unsure at all Xaa locations
  Clone ID: MRT4577_157280C.1.pep
GNPGGFFPWVKKKMGGNTGPXIPGFFPGGIPTXKTNKRGPKGPQKPPKQRPPGPKNXKGVAPGPGSPGNPPRLSGDPPXFGPFPERGPPGKGGFQTTPGPCSTSRPPPIGGGGGXVNPRAQPLGGPPXTKNPGGQTFGPGGKPPQTGGGPPGTPPGGGXPPGKSHPNGXPPLGAPPG

SEQ ID NO: 247471 - protein, 115 aa, Zea mays
  Clone ID: MRT4577_157281C.1.pep
HFYATSCQESQEGIIGVDVLLSMNAPATQGDLLSEFVQLVDKNRYLVVLEDLPTMAEWDSIRTFLPDRKNGSWIIVSSQKYEIASLCVGHPYQILDLKQSSPTEHSVCAFLREEV

SEQ ID NO: 247472 - protein, 84 aa, Zea mays
  Clone ID: MRT4577_157282C.1.pep
CKPESAFINKIGKSKRNHWKVLTTHQTLTDHLAVVAHNILGVLLKHSPSEVKLLLNCARKSVLVRGPAEKFQNIRNLPRHFSFP

SEQ ID NO: 247473 - protein, 94 aa, Zea mays
  Clone ID: MRT4577_157283C.1.pep
WGLFTRGNPFSIVIVGPITGVQWGVINACEPMVGLPTTGGVTLPQYHKSGWKTTALFFVFVCHETTLGRVALYKPVETWVPDPFFNREKLVRPK

SEQ ID NO: 247474 - protein, 53 aa, Zea mays
  Clone ID: MRT4577_157284C.1.pep
IMKSARLIHPTSERAVYDALGFLLIHVYCFGSEGTIAKPHANTCKQLSFLDEY

SEQ ID NO: 247475 - protein, 97 aa, Zea mays
  Clone ID: MRT4577_157285C.1.pep
FQGYLNPNGSMRFYYSSVYLGTGEEIVHRLIVDFFMPCNVHALSLNYGLFWPFKYTVFIIRSYIGKNISRKVKKSVACSAVRLPGLRGHAVYHLFCR

SEQ ID NO: 247476 - protein, 42 aa, Zea mays
  Clone ID: MRT4577_157286C.1.pep
PSTFTEQDFDYRIIKQHQEQHYQKLQGKYKNKENTTEHSTQH

SEQ ID NO: 247477 - protein, 81 aa, Zea mays
  unsure (1)..(81): unsure at all Xaa locations
  Clone ID: MRT4577_157287C.1.pep
FPRPPSPSPSPAGDFHHHRRTAPTLLASRAMALTVVLKVXMSCXGCVGAVXRVLGKMEGVESYDVDIMEQKVTVKGNVTPD

SEQ ID NO: 247478 - protein, 249 aa, Zea mays
  Clone ID: MRT4577_157288C.1.pep
MARYDRAITVFSPDGHLFQVEYALEAVRKGNAAVGVRGTDTVVLGVEKKSTPKLQDSRSVRKIACLDTHIALACAGLKADARVLINRARVECQSHRLTVEDPVTVEYITRYIAGLQQKYTQSGGVRPFGLSTLIVGFDPYTDKPALYQTDPSGTFSAWKANATGRNSNSMREFLEKNYKETSGKETIKLAIRALLEVVESGGKNIEVAVMTKKDGLRELEEAEIDEYVAEIEAEKAAAEAAKKGGPRDT

SEQ ID NO: 247479 - protein, 106 aa, Zea mays
  unsure (1)..(106): unsure at all Xaa locations
  Clone ID: MRT4577_157289C.1.pep
ATXXARQWLXXAAYSLPCXXPHTPSXQCSGVGWXVKNPARSTIIGLQQGKSRARXXIRFMRAFGWCSTQSXQPVSFGWQXHWVPXTIRGXQQLAXQLVADLWDQPS

SEQ ID NO: 247480 - protein, 80 aa, Zea mays
  unsure (1)..(80): unsure at all Xaa locations
  Clone ID: MRT4577_15728C.1.pep
CNTTKPGQYIQCWSXXGDELTPCCLLYNLPQKNSYNCTHNCTNINWPGKFTFTHIVHYPCLLQTVCQCQYIILIRPLISP

SEQ ID NO: 247481 - protein, 254 aa, Zea mays
  Clone ID: MRT4577_157290C.1.pep
MARYDRAITVFSPDGHLFQVEYALEAVRKGNAAVGVRGTDTVVLGVEKKSTPKLQDSSFRLPRSVRKIACLDTHIALACAGLKADARVLINRARVECQSHRLTVEDPVTVEYITRYIAGLQQKYTQSGGVRPFGLSTLIVGFDPYTDKPALYQTDPSGTFSAWKANATGRNSNSMREFLEKNYKETSGKETIKLAIRALLEVVESGGKNIEVAVMTKKDGLRELEESEIDEYVAEIEAEKAAAEAAKKGASKNA

SEQ ID NO: 247482 - protein, 36 aa, Zea mays
  Clone ID: MRT4577_157291C.1.pep
ASFLQSLWRHIDNGRLDQDPSYETNLLIVSHDLTLD

SEQ ID NO: 247483 - protein, 106 aa, Zea mays
  unsure (1)..(106): unsure at all Xaa locations
  Clone ID: MRT4577_157292C.1.pep
TGLAIDYQGGGPEMDKAGAKKLNASDYRGINDVRTTIKNXADDAGGSARKAGYSXPPYKIIILVETPYTTEDAQKGLRRTTETYPKVTRIFLXSNYTSRIIEPLAL

SEQ ID NO: 247484 - protein, 62 aa, Zea mays
  unsure (1)..(62): unsure at all Xaa locations
  Clone ID: MRT4577_157293C.1.pep
RNFQACLHNSWIEQAAXAWEIKLEEDMYKGGKADQQEERRRQKQMKVLKKELRHLLSQPLFT

SEQ ID NO: 247485 - protein, 113 aa, Zea mays
  unsure (1)..(113): unsure at all Xaa locations
  Clone ID: MRT4577_157294C.1.pep
NRKKPKKKEIAQQWLWIMPGKFYCLELFLSLFVGFLLCAPGLVTPLHRRGLGGPLAVACGCGALVVAAGVVLVAASAPVFVRVATQLGXRPFYRGAAWVSLFXSCVACPLCLF

SEQ ID NO: 247486 - protein, 155 aa, Zea mays
  unsure (1)..(155): unsure at all Xaa locations
  Clone ID: MRT4577_157296C.1.pep
GRREARRACRVARIGGPQEDSWMLRTVKAELXQIPVGRWARYIEEGXRYAQGGGTGAPVYLADVLEYVFAEVLELVGNAVRDNMKTRIIPSHVLLTIRNDEEIGKLLCGVTIAHGGVLTNINPDMLPKKTEREAYSXDSKEAKSTKKAAKSPKKA

SEQ ID NO: 247487 - protein, 113 aa, Zea mays
  Clone ID: MRT4577_157297C.1.pep
IAYIQELEDRLRGGGGGGGGCSAARPDSPDVEVKAMQDEVVLRVTTPLYAHPVSRVFHAIRDAELIVAASDVAVADEAVTHTLVLRSPGPEQLTAETVLAAMSRGMTSATPSP

SEQ ID NO: 247488 - protein, 72 aa, Zea mays
  Clone ID: MRT4577_157298C.1.pep
MPGSLPFSLREKRKITTVLETKNWEAQAAPPPKKKAYRTLITRNKENELQNRMPSFCFQRHLLWLLEQFSKM

SEQ ID NO: 247489 - protein, 104 aa, Zea mays
  Clone ID: MRT4577_157299C.1.pep
GAKPFFRGDQLTTSPPGGGGRFRCDRLTCMGPGLTWGLVTSRRGQSKKKFFYHHQRGGGQTTQANKNMGEEGGFPFSLKTMPLNLHPLAFLIGKSRHKTNSWLC

SEQ ID NO: 247490 - protein, 62 aa, Zea mays
  Clone ID: MRT4577_15729C.1.pep
PSPFTMCKSCEKRSGRASSLLFHMGKKGCGARRLKFVSPRVFLSPPCVKTAREFIYIRYKKK

SEQ ID NO: 247491 - protein, 281 aa, Zea mays
  unsure (1)..(281): unsure at all Xaa locations
  Clone ID: MRT4577_1572C.1.pep
MALRLHDVALCLSPPLAARRRSGGSFVAVASMTSAAVSTRVENKKPFAPPREVHVQVTHSMPSHKIEIFKSLDDWARDNILTHLKPVEKCWQPQDFLPDPASEGFHDEVKELRERAKEIPDDYFVCLVGDMITEEALPTYQTMLNTLDGVRDETGASPTAWAVWTRAWTAEENRHGDLLNKYMYLTGRVDMRQIEKTIQYLIGSGMDPRTETGTXSDIHLFLVDRSKVANSTGLSGEGNKAQDYLCTLASRIRKLDERAQSRAKKAGTLPFSWVYGREVQL

SEQ ID NO: 247492 - protein, 137 aa, Zea mays
  unsure (1)..(137): unsure at all Xaa locations
  Clone ID: MRT4577_157300C.1.pep
QQHRPTNQRGGGPAAFKRQHQLHPGRPKGERTEGPAANHNKRGQSPHRVRRQKARTATPTKPAKRPTEWAHQRRLGAQHAXAAKGPTRFDETRPPVAHQAHTADGAIFKNSAGYSVNRSFKGRNGDLTVGRKVSQSS

SEQ ID NO: 247493 - protein, 26 aa, Zea mays
  Clone ID: MRT4577_157301C.1.pep
IRGAGEIFSLLNFIQLMHQYWTNELF

SEQ ID NO: 247494 - protein, 65 aa, Zea mays
  Clone ID: MRT4577_157302C.1.pep
MCRCLNLLMLLMPSVNVTVGEKEDRMTITGMYSVSDIFCVGCGEIVGWKYVRFIMMIWQYIYNML

SEQ ID NO: 247495 - protein, 60 aa, Zea mays
  Clone ID: MRT4577_157303C.1.pep
WLGTFGPIDVPADVVGTVNVVVSQMSTRRSSTIVARKGKTLQRRPKRRHLRCRGRFNRRR

SEQ ID NO: 247496 - protein, 66 aa, Zea mays
  unsure (1)..(66): unsure at all Xaa locations
  Clone ID: MRT4577_157304C.1.pep
RGVGVPSSSAHPLAAAHTVXFAHCSTFADRIQPQSVDPTMNATYAEDLQAVCPAGXGPHIALQLDP

SEQ ID NO: 247497 - protein, 65 aa, Zea mays
  Clone ID: MRT4577_157305C.1.pep
TNHNLNYFKFQIFCQHISQLIHLLSSINVINFLIKPKGFLPLPFFHLLQTKCKHQKKSHNYLKKN

SEQ ID NO: 247498 - protein, 52 aa, Zea mays
  Clone ID: MRT4577_157306C.1.pep
VGSTRNCHRASSMPVIRGRTEPLATMDAHEKKPKQSFGRCVPSHYVAGAFVI

SEQ ID NO: 247499 - protein, 83 aa, Zea mays
  Clone ID: MRT4577_157307C.1.pep
QLGVRFVRTCEGILASCCVHRVCIFVRSVNTGIVRLVRYGQYGALLQEFLNGLWFGVVGSLCMYTFGWRSYRPVLGSDQVARK

SEQ ID NO: 247500 - protein, 168 aa, Zea mays
  Clone ID: MRT4577_157308C.1.pep
MQRRVGMADGEARCRTLGAVIKEKDEEFALFLEMRRREKERGAAAAAADQLLLSGDVAAENGMLLLDPPPPAEPKPAAYKVAGGGFRRAPGGVDDFLNADASDKNDYDWLLTPPGTPLFSSLKVEPKRSLVSQAGTPKARPTALKSRGEGDDGDIESVEFPKCVVASN

SEQ ID NO: 247501 - protein, 73 aa, Zea mays
  Clone ID: MRT4577_157309C.1.pep
PNQVGLVPVQEAAITVFCLKDSFFSRCPFKGCRFLHPHLGVKMLLCPPPLPFFLSLHMCVACHPACDCIGWES

SEQ ID NO: 247502 - protein, 90 aa, Zea mays
  Clone ID: MRT4577_15730C.1.pep
TLWTRVNISVLIQDNLAARAPPLNFSSSRRSYRSRRHGCHRRNRLSFNLIRAGMLVADQADVLPLSMMPLSAEAAAPHLPSDSNASSTLT

SEQ ID NO: 247503 - protein, 435 aa, Zea mays
  unsure (1)..(435): unsure at all Xaa locations
  Clone ID: MRT4577_157310C.1.pep
MATAVSGRRTRVRTLGRGASGAVVSLAADAASGALFAVKSAPAWAAEQLRREGSILSSLRSPHVVPCLGHRPAADGGWQLLLEFAPGGSLADVAARSGGGRIGDERAVAAYAADVARGLAYLHGRSVVHGDXKARNVVVGADGRAKLADFGCARSVGSGRPVGGTPAFMAPEVARGEEQGPAADVWALGCTVVEMATGRAPWSDVDSLPAAVHRIGYTDAVPDAPGWMSAEAKDFLARCFARNPRDRWTAAQLLEHPFLASAGRGVKAEEDAAASPTSTLDAAVWEPDSDDEGDASESPAQRIKALACPCSVLPDWDSDEGDWIEVLDEQCEATNLVPVPTKKAAGDDECQLPSVALETGVDFIDADAEGEDPGCCVAVGYDPGCCVAVGLTTALSVGLLEEQCMGDYSNPTVFLAYSIEISKTSLLRKKKKKST

SEQ ID NO: 247504 - protein, 128 aa, Zea mays
  Clone ID: MRT4577_157311C.1.pep
LGTSRPAGSLPHSRIPSTSFSPSPPFYSKPRPTCLSTPTSSALTRSCSASSSSSRSSDGQCALLSPTTTTVVSGPRTRSVTEFASSCSPTCGRSSSRSSTSSGSSRRPAASSSRSRRMPSSSSSRGSS

SEQ ID NO: 247505 - protein, 57 aa, Zea mays
  Clone ID: MRT4577_157313C.1.pep
PFLGVEKDAPINQALIRNFFWDPVHGAIKGCAELRPPVEIFGPANPAFVGPEPRQFS

SEQ ID NO: 247506 - protein, 134 aa, Zea mays
  unsure (1)..(134): unsure at all Xaa locations
  Clone ID: MRT4577_157314C.1.pep
KKNEETESQQKQNKGEKKAQTRKGEARTRXEGEKKTTGGRAKKDPSQRTRAGNKKALIKGTQTQTTGRGVNKGGTGKTVGFPILLACEQSPFGNWGKKKKGPTRSPFPKFCHFNGQGVRPFFRLFNGGGGGGTP

SEQ ID NO: 247507 - protein, 76 aa, Zea mays
  unsure (1)..(76): unsure at all Xaa locations
  Clone ID: MRT4577_157316C.1.pep
APXLVLPSGGFFYQIAVFLLQVRRGRGRLPRAEAVLERGAHKKDKALDANKIVINSSMLMCNRANTNHHYLVTLEP

SEQ ID NO: 247508 - protein, 550 aa, Zea mays
  unsure (1)..(550): unsure at all Xaa locations
  Clone ID: MRT4577_157317C.1.pep
HASASIEAVAAAAGRDRLRRGGNGRRXDLEVLTALDTAKTQWYHFTAIVVAGMGFFTDAYDLFCISLVTKLLGRIYYTVEGSATPGTLPPHVSASVNGVAFVGTLSGQLFFGWLGDKLGRKKVYGMTLMLMVLCSVASGLSFGHTPASVMATLCFFRFWLGFGIGGDYPLSATIMSEYANKKTRGAFIAAVFAMQGFGIMAGGLVAIVVSAWFKASFPAPAYAVDPAASTPPQADFVWRIILMLGAMPAALTYYWRTKMPETVEISAGAAEEGAAAATATATEPAPASASASFGLFSGEFLRRHGLHLLGTSSTWFLLDIAFYSQNLFQKDIFSAVGWIPKAATMNALEELFSIARAQSLIALCGTVPGYWFTVALIDVLGRFAIQVTGFLMMTVFMLGLAVPYEHWTTPGHHIGFIVMYGLTFFFANFGPNATTFIVPAEIFPARLRSTCHGISAASGKLGAIIGSFGFLYLAQNRDPAKTDHGYPAGIGVRNSLFLLAGCNLLGLAFTFLVPESKGKSLEEMSGENDEAAALEDPSLRTRACDVIALL

SEQ ID NO: 247509 - protein, 384 aa, Zea mays
  unsure (1)..(384): unsure at all Xaa locations
  Clone ID: MRT4577_157318C.1.pep
MAAGDLEVLTALDTAKTQWYHFTAIVVAGMGFFTDAYDLFCISLVAIVVSASFKARFPAPAYAVDPAGSTPPQADFVWRIILMLGAMPAALTYYWRTKMPETARYTALVAKNAKQAAADMSKVLQVXLSRRRRGGRRGCXRLSLRRXFGLFSGEFLRRHGLHLLGTSSTWFLLDIAFYSQNLFQKDIFSAVGWIPKAATMNALEELFSIARAQSLIALCGTVPGYWFTVALIDVLGRFAIQVTGFLMMTVFMLGLAVPYEHWTTPGHHIGFIVMYGLTFFFANFGPNATTFIVPAEIFPARLRSTCHGISAASGKLGAIIGSFGFLYLAQNRDPAKTDHGYPAGIGVRNSLFLLAGCNLLGLAFTFLVPESKGKSLEEMSGEND

SEQ ID NO: 247510 - protein, 582 aa, Zea mays
  unsure (1)..(582): unsure at all Xaa locations
  Clone ID: MRT4577_157319C.1.pep
LGPSRPAGKTKIDHPSIEAVAAAAGRDRLRRGGNGRRXDLEVLTALDTAKTQWYHFTAIVVAGMGFFTDAYDLFCISLVTKLLGRIYYTVEGSATPGTLPPHVSASVNGVAFVGTLSGQLFFGWLGDKLGRKKVYGMTLMLMVLCSVASGLSFGHTPASVMATLCFFRFWLGFGIGGDYPLSATIMSEYANKKTRGAFIAAVFAMQGFGIMAGGLVAIVVSASFKARFPAPAYAVDPAGSTPPQADFVWRIILMLGAMPAALTYYWRTKMPETARYTALVAKNAKQAAADMSKVLQVXLSRRRRGGRRGCXRLRLRLRRRRRRXFGLFSGEFLRRHGLHLLGTSSTWFLLDIAFYSQNLFQKDIFSAVGWIPXKAATMNALEELFSIARAQSLIALCGTVPGYWFTVALIDVLGRFAIQVTGFLMMTVFMLGLAVPYEHWTTPGHHIGFIVMYGLTFFFANFGPNATTFIVPAEIFPARLRSTCHGISAASGKLGAIIGSFGFLYLAQNRDPAKTDHGYPAGIGVRNSLFLLAGCNLLGLAFTFLVPESKGKSLEEMSGENDXRRPPPPPRRTTTTAQCPCK

SEQ ID NO: 247511 - protein, 266 aa, Zea mays
  unsure (1)..(266): unsure at all Xaa locations
  Clone ID: MRT4577_15731C.1.pep
MPSTAEDFPAIRKLGKLFRLTEVYLWDDSYGAGPHDGQKNGRSAEAALVDSHTDKTCNEASNSTDKGHFFVEDLELVNLMGSLGLPVSFSTSKVNKNTCNKGKKKGRQAPLKAANTQINDAVRICINTEDRENSVESLDAMEQTHSCNLFVTPLGQNEPSRDDTDKRLREDSSCVEEQEESGCSTIYSAGKAPGCDAKNHLTELGAFELSDNLANSAKEEYSIQENQLXESVLLDSEEMSRNDCVDDESTHSCVGIYQDERVSTRG

SEQ ID NO: 247512 - protein, 59 aa, Zea mays
  unsure (1)..(59): unsure at all Xaa locations
  Clone ID: MRT4577_157320C.1.pep
NAPPKSMSDFVKGKAPMRQHNEGFILRPPGYAXDAISSILCRKSHCGPNHAFIYKGADV

SEQ ID NO: 247513 - protein, 134 aa, Zea mays
  Clone ID: MRT4577_157321C.1.pep
NGAWGLGARDKNRPVIMPNPIYPKPARKGETIFIFVNKTTQTPPPLFNNKPNPNGHFKGSQVANSWEKITTGPWEMAVWSKLMSFFRRHKTSSGKKAHMQHRTYIILVKGGKRAITEVIPLLAPKSLIWAGKGP

SEQ ID NO: 247514 - protein, 50 aa, Zea mays
  Clone ID: MRT4577_157322C.1.pep
NIFKMEWELCNTVTMLTIRYSSDLTDELQADIITLAIEPWAVYIILGLGT

SEQ ID NO: 247515 - protein, 135 aa, Zea mays
  Clone ID: MRT4577_157323C.1.pep
PGTSRQPDIACPAARHRLPGTTTPLARHGATRQFGQCSQPLASSPPGSPFAHNSPMSTPTEQSSNEVLNATKESAPTAGNTTEEKKEDNAKKRKEIAPRSEVWSHFVKICVDGHLKKGKCKYCSREIKCDPNLNG

SEQ ID NO: 247516 - protein, 88 aa, Zea mays
  Clone ID: MRT4577_157324C.1.pep
YDARSTLVFDLHLVNESTSPTDIPKPHYPSNMPTVHYYSGHHVLYTSSADCAPGGIDFRQIQEHSHLRIRVCRKIQHHHATRTFSILT

SEQ ID NO: 247517 - protein, 121 aa, Zea mays
  unsure (1)..(121): unsure at all Xaa locations
  Clone ID: MRT4577_157325C.1.pep
SLRCFERSRTTTCTVALHNHDDLQGIARNEQRAYYTLDIVFPSDNPFKTTXNIHKXRIYHCNIYSTGKIHXTFLKDGWSPTFTISNVLLAIKDIISNPHPYSKLMISISRHYLTDRVKHDE

SEQ ID NO: 247518 - protein, 226 aa, Zea mays
  unsure (1)..(226): unsure at all Xaa locations
  Clone ID: MRT4577_157326C.1.pep
MATAVASQPCHLPLSAGGDPRCAASTSNVHTLEKVYGFRFICRSIFDVKTHKFHSRISKRKCYLRNSLSECDRTIHSGRWLEFRRHKGVFQKTRRMVHIIPLASDGDGNHISVNGALQVGSTSNIDEIKLKLNKALQSEDISNGLVQSIHDAARSIELALIEHSKLPKSSWFPKTWLGVENNAWIKSLSYQAAVDSLLKAVIDVSSRGNDRDRDINVFVQRSLXRL

SEQ ID NO: 247519 - protein, 99 aa, Zea mays
  Clone ID: MRT4577_157327C.1.pep
NKSAPFFIESQSSYNDPSGESKMARGNRAGERSVTKQNAPPPPPQIFFAPRDMEGDYLSPRRLTPPCDTQRRQGGFGSVRHPPFPSTTKSVPAMLSPFR

SEQ ID NO: 247520 - protein, 68 aa, Zea mays
  Clone ID: MRT4577_157328C.1.pep
GCLLPRVLPPLRGAARAGKVGMHRVWFPRLINCFFYLRGLRLVNCLFVGSFGGRVNCKRVCSVIVNHC

SEQ ID NO: 247521 - protein, 70 aa, Zea mays
  Clone ID: MRT4577_157329C.1.pep
VKLGFKDLKSSMYTKGFSAAPVFFASLNGIFPLIETIFGIKTGDAPTKSFCWVSPSEEHPGPHGVLDNKF

SEQ ID NO: 247522 - protein, 101 aa, Zea mays
  unsure (1)..(101): unsure at all Xaa locations
  Clone ID: MRT4577_15732C.1.pep
PSLQLLALPGINQVALANLSPYSQHQQFLPCNPLATLNPAAYLQHQLXPFSQVVTAYYQQQQPLSLNQWAVLNPGVYLQQHILLPFNQLAAANRASLLTQQ

SEQ ID NO: 247523 - protein, 95 aa, Zea mays
  unsure (1)..(95): unsure at all Xaa locations
  Clone ID: MRT4577_157330C.1.pep
MASLAAVSVKAVAIKGLAGSSISGRKLXPSPGATDRSIRRPRACGVVAKYEAEIDYYDHNYIGYIIDLLDLYASAAPTTYSPLLSILKYDVTKYV

SEQ ID NO: 247524 - protein, 83 aa, Zea mays
  Clone ID: MRT4577_157331C.1.pep
DIRGSCLEGKGTLNRVRATSTAFDRRPFSLFVLFRRCCTSMKFPLAASNSQAGLEPLFLLDPVSHFFLQGCDLRLDSLLPSLQ

SEQ ID NO: 247525 - protein, 249 aa, Zea mays
  Clone ID: MRT4577_157332C.1.pep
MRLKTFEDTLAGANLKCAVAEADRDVSEYWKNYLEKTVAELRSSKERCFEKSVECVKKIKTSFANVGAYSSEDNFIRGDPEGVIEWISNEAESFEEILSDRGDVCAFSGARGIATVLEKADCDHIKTLAQAEAAFSVDVTKDPSTEASLIGGKIFTDIWENGGRKMAHEIIKKREKDLHDAREAAKEAERAAALEKRIAKLSPPPEPLDPLANPETKKEEEIINMAEAIIDEVVAKLLNEAAEKVLKEV

SEQ ID NO: 247526 - protein, 53 aa, Zea mays
  Clone ID: MRT4577_157333C.1.pep
NDRSSSSSSFSRSRRLQDPTAPGDGSGAGAGATAASWSASVTLRRSTRPSILP

SEQ ID NO: 247527 - protein, 198 aa, Zea mays
  unsure (1)..(198): unsure at all Xaa locations
  Clone ID: MRT4577_157334C.1.pep
MAPSAKSGTNAAGSSSASNNAASIGIGLSSSSSGAPGVGIGLGPLAGAPASVYPTDTVRDVAESLGINGMKESVAAALAADVEYRIREIVQDATKYMRHSKRDQLKTADIDAALRARNIEPIYGFLPSSSGRTGGGNPSGYTAGPIFRRVQTSSGVPLHYIEDEEIDFDKILEAGPKNGIGRXRGWGAHWLXIEGVQP

SEQ ID NO: 247528 - protein, 292 aa, Zea mays
  unsure (1)..(292): unsure at all Xaa locations
  Clone ID: MRT4577_157335C.1.pep
HWVPRGRPGKKNLSWASRLMESYEPERIPNKPNYQKYADRFANEEDLTSRAAILGQIVALTQDLGLKYEELVRTVMDSEEEKRGIPGTEDEPPATAADIPLSRTGALLLIAAQNVKQELYAPAKQEEEASSVAIFPGHATILRNFIGTLGPQTVGMEPEALLDTVLAMGLIALQRNNVGEPKDDESFAQYLQTISLISANSPSPSLRGHAHYLTTTVLRSHPHDLVRLTFIRDTLEHCPYENLXASAVSWLXGETLESNTPHLHSSEGTHESRHTNIFATPVALSTVAPYLW

SEQ ID NO: 247529 - protein, 41 aa, Zea mays
  Clone ID: MRT4577_157336C.1.pep
VKIPNWSTAASPKQRMDLQDTKTITKIYIGDQSSQTNRPIT

SEQ ID NO: 247530 - protein, 75 aa, Zea mays
  Clone ID: MRT4577_157337C.1.pep
KTRPTARVRYGLSLILCGALKATGRNASPVRPITKGHSSMHLAHLIYQLHPCQYSSELMAPAELHHLFCSTRLAP

SEQ ID NO: 247531 - protein, 86 aa, Zea mays
  unsure (1)..(86): unsure at all Xaa locations
  Clone ID: MRT4577_157338C.1.pep
LNKSVHIFLYIAKTTLFLNFLTILRILDNRFISITNGFHIFYSRLKENTTNIFQLTKLVYTFLYIHSQLHLKVLTKXRFLMIYLNS

SEQ ID NO: 247532 - protein, 78 aa, Zea mays
  Clone ID: MRT4577_157339C.1.pep
PQILFLPKGPQGKGNPPQGPPQTIQRVSHVETLFHGKFFQPIFYQTNGNRRGRKYKGFLHKEHFWVFMPRSNSGEFFF

SEQ ID NO: 247533 - protein, 70 aa, Zea mays
  unsure (1)..(70): unsure at all Xaa locations
  Clone ID: MRT4577_15733C.1.pep
MKHTLLYRRFNIGSSKPICSVVFQYDSAKNQXKKKKKKKKKKKKKKKKKKXGKKKKKKKKKKVLCVVTTA

SEQ ID NO: 247534 - protein, 50 aa, Zea mays
  Clone ID: MRT4577_157340C.1.pep
MTNYIGKNPLQNGAQLKQKLRPFTTGHLNSTKIKEKFQPFKYYWTTKFQH

SEQ ID NO: 247535 - protein, 151 aa, Zea mays
  Clone ID: MRT4577_157341C.1.pep
LAPSNHSYILLYVLFTASHNSQPASEISDSVALFSLGITRTATHPRPRHVDRRCGRRAPRYRKSATLQSALTQQRGNGAAQSLTASLAFVQEHSEAVKPLGRYARRDPAARTPARSAPLGPGRRVPVERDQHRRQVVPGAPPQRLVHDLPA

SEQ ID NO: 247536 - protein, 77 aa, Zea mays
  Clone ID: MRT4577_157342C.1.pep
FGSRFFYLGCLFDHMDHGPDPACLNGLADDCLPSVSAMQQRSMVIGSMEYLGRKHYPPLEMMEDTLWNASPVRVLDD

SEQ ID NO: 247537 - protein, 47 aa, Zea mays
  Clone ID: MRT4577_157343C.1.pep
GHEAQTRTDDIGHRRSRSGTWVRVRRAPPCQERNTAIRNASTEGVLR

SEQ ID NO: 247538 - protein, 108 aa, Zea mays
  Clone ID: MRT4577_157344C.1.pep
KTMHFYWLIKIPFFFICSDRGGGPHGGAPTGKNTRDGVTGGWGFPNPTFTGQIKAYRSGGGDFFVQQQQRPKLKKTPGGGPGPNKKLLVCWPLDVFLGVHKLLVLGGK

SEQ ID NO: 247539 - protein, 36 aa, Zea mays
  unsure (1)..(36): unsure at all Xaa locations
  Clone ID: MRT4577_157345C.1.pep
YNHFYHQGNFFNSNVITRLNLIHGCPPPIFFNXRGP

SEQ ID NO: 247540 - protein, 47 aa, Zea mays
  Clone ID: MRT4577_157346C.1.pep
ETTSKTHLRLTKDDHVPLARDVGPGEARSGRQRESMRTKLGAQGRAG

SEQ ID NO: 247541 - protein, 35 aa, Zea mays
  Clone ID: MRT4577_157347C.1.pep
CRDLVRKLGLDTPTRARQLMDIAYRVRLRPGGGQV

SEQ ID NO: 247542 - protein, 131 aa, Zea mays
  Clone ID: MRT4577_157348C.1.pep
SSAEIWGGGGGGGGGGGGGVPPCRQLFPRRHRTRYPKNFPTTTRSLSGSCVAHDHRTRLFMPTRTLAPRSVLEVKTFLTVKYAPRQRASVGGRAHRAIIPGAKGSRTYSLERFDPTRPLSLPRLIFRTPEQ

SEQ ID NO: 247543 - protein, 950 aa, Zea mays
  Clone ID: MRT4577_157349C.1.pep
MGASRPPSTPASKGEHTPMSTPGGSSRAKEEKIFVTVRVRPLSKKELAAKDDVAWECADTQTILYKGPAQDRAAPMSYTFDKVFGPACQTDVVYEEGAKDVAMSALTGINATIFAYGQTSSGKTFTMRGVTESAVSDIYRHIDSTPEREFVIKISAMEIYNEIVKDLLRPDSAPLRLLDDPEKGTIVATLQEEIAKDSQHLRHLISICEEQRQVGETALNDTSSRSHQIIRLTLESRLREVSGCVKSFVANLNFVDLAGSERAAQTHAIGARLKEGCHINRSLLTLTTVIRKLSSGKRSGHIPYRDSKLTRILQLSLGGNARTAIICTMSPALTHVEQSRNTLFFATCAKEVTNTAKVNMVISDKQLVKHLQTELARLESELRTPDRGSSSDILIMEKDRKIRQMEIEIEELRKQRDNAQSELEELRKKKVDHQPGWNPFDSPQKARKCLTFSGSLEPSNKNKMMMSSIRQSSTAPFMLKHEIRKLEQLQQQLEVEANRAIEVLHKEVECHKHGNQDAAETIAKLQAEIREMQTVRSENRDMEMITDEGNGSDLKDEISRLHMQDNDIAKLEAKLENVQRSIDRLVMSLPNVAMPCNETTPKSNRSKKKKRLLLPLGVSNNINRANLLRAPCSPHSSSRPSESEVENRAPEGDTMSVEGSEKATPTKSEDGDMSSRDETPRYRRSSSVNMKKMQRMFQNAAEENVRSIRAYVTELKERVAKLQYQKQLLVCQVLELESNEGKPNGEDNSGPLQDGPDSWDRLFKEQMQCIIHLWDQCQVSIIHRTQFYLLFRGDKADQIYIEVEVRRLVWLQQHFAEVGDASPGAVEDPAVSLVSSMKALRNEREFLARRMGSRLTDEERERLFIKWQVPLDAKQRKLQLVNKLWTDPNDQVHIDESAGLVARLVGFCEGGNISKEMFELNFAVPTSRRPWLVGWQPISNMIREKTQQLW

SEQ ID NO: 247544 - protein, 79 aa, Zea mays
  unsure (1)..(79): unsure at all Xaa locations
  Clone ID: MRT4577_15734C.1.pep
FVCSVSVCFSRFXSPPPPPGLASLLCXASSLLGXLSXGVAXFXVRSARVGSGPFLPLCLXFGVCCPPPPPFFFLXGLES

SEQ ID NO: 247545 - protein, 95 aa, Zea mays
  Clone ID: MRT4577_157350C.1.pep
ARHRAVRRVGTALSLSRDQEGAVPAPYLHRAWRLYGSEFSSTEVVLRPSPPFCLVFAYAPTKPKREEARGRSAWSGRLEKYFFFFFFFFFFFFFF

SEQ ID NO: 247546 - protein, 125 aa, Zea mays
  Clone ID: MRT4577_157351C.1.pep
GSGKCNRHAGRNPRNEGGVKAPDTRRGSKLPRKGGHGAGTGRTVRGPIREVGQAGERREVGHRGLTTGNPQGFPASGKLINGRANRMVLRFPYKKLFFFCFYFFFFFFFFFFFFFFFFFFFFFFF

SEQ ID NO: 247547 - protein, 144 aa, Zea mays
  Clone ID: MRT4577_157352C.1.pep
MSFNGPAGKAKKGPAGAKAGGPTKKSGLGSSRGGGQFPVNRGGGGLKKGRFPQGVGTGAPFFLPPVLGDPPAEGVEFPGNPARGNKKRGFFPGPGVFPIPKKKELGKLLGGVPLAPGGVLPKIPPGVLPKKGAQKGAKEPKKAL

SEQ ID NO: 247548 - protein, 43 aa, Zea mays
  Clone ID: MRT4577_157353C.1.pep
MLHKFLWQITEPQVIQGNLTIIQTHSREPYNNEYMNQCKITLI

SEQ ID NO: 247549 - protein, 129 aa, Zea mays
  unsure (1)..(129): unsure at all Xaa locations
  Clone ID: MRT4577_157354C.1.pep
IRHEGRTRPRTAHGRTPPGALVSLSVSRLRPPQQRGARGGGALAILVSIPAAGVPFPPLAVARASRXRAPEPEPRRESRVASASPPPPETPSGRNXDEGNRRQRLRRTPLXVKCAGDRSVEEQPEHAGG

SEQ ID NO: 247550 - protein, 79 aa, Zea mays
  unsure (1)..(79): unsure at all Xaa locations
  Clone ID: MRT4577_157355C.1.pep
GKSTLACTLGRELHTRGKLAYVLDGDNLRHGLNKDLGFKAEDRAENIRRVGEVXKLFSDAGLVCIASLISPYRRDRESC

SEQ ID NO: 247551 - protein, 117 aa, Zea mays
  Clone ID: MRT4577_157356C.1.pep
TGEVAKLFSDAGLVCIASLISPYRRDRESCRALLSDGSFIEVFLNMSLELCEARDPKGLYKLARAWEIKGFTGIDDPYEAPLNCEIEIKEIDGVCPSPSDMAGQVVTYLEEKGFLHE

SEQ ID NO: 247552 - protein, 429 aa, Zea mays
  unsure (1)..(429): unsure at all Xaa locations
  Clone ID: MRT4577_157357C.1.pep
FLFNFIHGLSPPKLILTLASITTRNLGFTLSPGQLVPILQAFKRNCRGSLTCGHYLGLVPNVSDGAGSKYEASSVVYRENTSVPGCQQQRSRTRPRTAHGRTPPGALVSLSVSRLPPPPQRGARGGGALAILVSIPAAGVPFPPLAVARASRXRAPEPEPRRESRVASASPPPPETPSGRNXDEGNRRQRLRXGRPLVECAGDRSVEEQPEHAGVEGQALKMSSTVPKSSNIFWHDCLVGKTDRQKLLNQKGCVVWITGLSGSGKSTLACTLGRELHTRGKLAYVLDGDNLRHGLNKDLGFKAEDRAENIRRVGEVAKLFADAGLVCIASLISPYRRDRESCRALLSDSSFIEVFLNMSLELCEARDPKGLYKLARAGKIKGFTGIDDPYEAPLNCEIEIKEVDGVCPPPAEMAGQVVTYLEEKGFLHE

SEQ ID NO: 247553 - protein, 88 aa, Zea mays
  Clone ID: MRT4577_157358C.1.pep
MPMERAFRHCDKDTLKVAMLKHEETFRQQVHELHRLYRIQKLLMRDLKRGLKSQRNLSTSPNGSCTEYNRGALAMCAYDYEHRYAARG

SEQ ID NO: 247554 - protein, 61 aa, Zea mays
  Clone ID: MRT4577_157359C.1.pep
FIFFLWFTHIYCNSTSGFHIWLCIPKNWEDVMKPCKPVLWLCCHLTNIHASANRQPFRIGY

SEQ ID NO: 247555 - protein, 65 aa, Zea mays
  Clone ID: MRT4577_15735C.1.pep
KLRKATTARPLVINIDADGGMLLPGAVDAVDPDDAGDSVVVTTPDKAGNVFRIFFQPQSYLGTKG

SEQ ID NO: 247556 - protein, 94 aa, Zea mays
  Clone ID: MRT4577_157360C.1.pep
PSLCIMPILSALETCRACLLSCRSRRGASGGSLTSVGFLWSPLWKKMSWSWSSSRTSRCTLGWNVARAKTAATLPLGNGLPLQVSQLAHLCSHP

SEQ ID NO: 247557 - protein, 156 aa, Zea mays
  unsure (1)..(156): unsure at all Xaa locations
  Clone ID: MRT4577_157361C.1.pep
RPGSIQFKVQSSISKHQTKRKQIKGSRASREYGGGGHASTSGDVYSFGTVLLEILTSRSPIDPTFKDGXGIINFVENNFPNQVFQVIDSDLLEECRNSTQRNNLVQENEIYQCLVDLLQVTLSFLCSLPSEXRTNMKKVASRMHAIKTSHIGWKHM

SEQ ID NO: 247558 - protein, 56 aa, Zea mays
  Clone ID: MRT4577_157362C.1.pep
VVLNSSSKKYAQVPLSARSDPCQLSAYHVSVIMCSKHFARCCQQSIMLSSYVRIHS

SEQ ID NO: 247559 - protein, 111 aa, Zea mays
  Clone ID: MRT4577_157363C.1.pep
RRPYMLYYTLGSEDPSGTAVKTLVCVRALSVWARAPRATHIADKLLSVMSLRTTNHIAGSSALCNQSSSALWASNAPDAASTIPLYTLGSTTGRRIYGGSLARTISGQQLQ

SEQ ID NO: 247560 - protein, 66 aa, Zea mays
  Clone ID: MRT4577_157364C.1.pep
IVMVLRLLCLAVYVLFGSFPASVNICVTFGPFLGLGFRFQGLEEICFGSGLLCYRETSPNGLKFTP

SEQ ID NO: 247561 - protein, 104 aa, Zea mays
  Clone ID: MRT4577_157365C.1.pep
RGPSRRGGSSCGAAAAAGGATPAIASRWWGCGGVVTASRCSCRKQHHQPDDAGCGSSDDHYQHDVIMLRTTKSGRAFPPPISVICKGGRAWLCLLAHREGGRLV

SEQ ID NO: 247562 - protein, 34 aa, Zea mays
  Clone ID: MRT4577_157366C.1.pep
LIQHHNRSTSAIYQVFVLKRLISHSSHDLHQNIN

SEQ ID NO: 247563 - protein, 95 aa, Zea mays
  unsure (1)..(95): unsure at all Xaa locations
  Clone ID: MRT4577_157367C.1.pep
EKVKLKQGLKSAMGISSDGNAYLQXSRCFCLVFPCRLXTFSYLLLSNQXESQFWKLYKEDPAACAIVMKTSVGLVYLLACLLSPFMPSFSDEVWS

SEQ ID NO: 247564 - protein, 68 aa, Zea mays
  Clone ID: MRT4577_157368C.1.pep
ESFCAVYVSKAPKMCQAPRDTLLKRKMFGVLGMLHEIWKSIGYPPRQTLFEGRRFRKMHPPKCWAPNT

SEQ ID NO: 247565 - protein, 128 aa, Zea mays
  unsure (1)..(128): unsure at all Xaa locations
  Clone ID: MRT4577_157369C.1.pep
MQDAAADEAPCCSASVRDVTNTSMNIITGVVTRFFVKLSLDCATYLRKADLMMYHCYXSSIXALDVMVNSVITSYMLTKFAAFYEDPNGDLMLVGYDQVDMFASTYAKVEIMMRSESTRVVSYTARYQ

SEQ ID NO: 247566 - protein, 115 aa, Zea mays
  unsure (1)..(115): unsure at all Xaa locations
  Clone ID: MRT4577_15736C.1.pep
KRGSGKVKCSVLDLAHVGGRSQAHTSVHFIAGEWFESVPLPPAVLWKSVGHNRVRVECAKILRXAKXALPPRDAGVKVIIMHSVGGAGPFVMELKEGVALVDVSVMLSKGMQQDD

SEQ ID NO: 247567 - protein, 30 aa, Zea mays
  Clone ID: MRT4577_157370C.1.pep
LDWSENIILYNDIKESNYEIDVGSGWFVYV

SEQ ID NO: 247568 - protein, 37 aa, Zea mays
  Clone ID: MRT4577_157371C.1.pep
LDGKGFIVGRRAGTCGGEDQSRESIQLEKELIVHGNK

SEQ ID NO: 247569 - protein, 385 aa, Zea mays
  unsure (1)..(385): unsure at all Xaa locations
  Clone ID: MRT4577_157372C.1.pep
MAGDRLSWAGLLKWSLSYVDGAGPSRAVREEERRWLADAVEQHMMMDVVSRMREIALLMSTPPAVLEAQGITHDDIEDLLSELQVHVESIDMANDLHSVGGLVPVIKYLRNSNARIRAKAADVVTTVVQNNPTSQQLVMEASGFEPLLSNFRSDPDLTARIKALGALSSLIRNNKPGVSAFRLANGYSGLRDGLFXECVCLXRKALSLTHYLLSESHSDCSVFAQLGFPQLMMRLASSDDSGVREAALGGLLELARDTTLGNRNLLAEHDRLRRLLRGRMESIRTMTPEDLDAAREERQLVDSLWITCYHEPSMLRNEGLLVLPGEESFEQPPDVAGRLFEPMRRASARRAPPAERSDPRDETGGGMVLLLGGPAQDGRSNSPNH

SEQ ID NO: 247570 - protein, 104 aa, Zea mays
  Clone ID: MRT4577_157373C.1.pep
NTMKHQVDHLLHVCHMEFCTDYFLSAPPNSSDCVPAVNCLGSGVTEDGGARRWTWSFRRLTLTRYRQEHPPLQLYTLTLHTELATAALSPAADLATESEVVSKL

SEQ ID NO: 247571 - protein, 61 aa, Zea mays
  Clone ID: MRT4577_157374C.1.pep
LASGHRWGVLTLSGGRQLADVCNPVSPTNRCLFVYVLGLPLARFKILHYVSGLLVAANLVL

SEQ ID NO: 247572 - protein, 365 aa, Zea mays
  Clone ID: MRT4577_157375C.1.pep
MVIMQSSDSSHHGIVENSPYRIPYDRHAEGDQLGASWYFSRKEIEENSVSRRDGIDLKKESYLRKSYCTFLQDLGMRLKVPQVTIATAIVFCHRFFLRQSHAKNDRQTIATVCMFLAGKVEETPRPLKDVVLISYEIIHKKDPAAVARIKQKEVYEQQKELLLIGERLVLVTLGFDMNVHHPYKPLVEAIKKFKVAQNALAQVAWNFVNDGLRTSLCLQFKPHHIAAGAIFLAAKFLKVKLPADGEEVWWQEFDVTPRQLEEVSNQMLELYEQNRVGPPPSQGNDTEGSSASVVNQRAPVKSEEPPAHETHQAPRQSSVPGRHGHDHPQPEKQNSNQRIPKSEARDGTTNSNEGTNMSSSMMDDE

SEQ ID NO: 247573 - protein, 87 aa, Zea mays
  Clone ID: MRT4577_157376C.1.pep
GPKNKQRKRAPIWATPSPNLRGGGGLHQDFPGHAWNPRGPPRGGWGPQGGILRKAFSSNPLKKFMFPTNPVFHPLGLGHALFWGGNP

SEQ ID NO: 247574 - protein, 156 aa, Zea mays
  unsure (1)..(156): unsure at all Xaa locations
  Clone ID: MRT4577_157377C.1.pep
RVLPTRFLQSKRXILTLSXPIEHGIVRSWDDMEKIWHHTFYNELRVAPEEHPVLLTEAPLNPKPQGGEAQIMFETFNVPAMYVAIQAVLSLYASGRTTGIVLDSGDGVSHTVPIYEGYALPHAILRLDLAGRDLTDSLMKILTXRGYLLHNLLLER

SEQ ID NO: 247575 - protein, 112 aa, Zea mays
  Clone ID: MRT4577_157378C.1.pep
NLTQKHITHSAGGVMYSLRLGYIIKLLYIYIFSHNIAGSRVTISMLRLNWPCVYGTEAISVGIMCSLRVLVIVDACQARPTCWKRSSDSEVCSREGRVACLGGSIPCVGGCC

SEQ ID NO: 247576 - protein, 89 aa, Zea mays
  Clone ID: MRT4577_157379C.1.pep
EREVGAGVSAPHPLSLLTYSRGTTNYFSGSLVLSQTRPLRVVESRTTEGFRFLLSHEEPRCLDPKHMMQTILPSDVTRLSGTTASRSQR

SEQ ID NO: 247577 - protein, 105 aa, Zea mays
  Clone ID: MRT4577_15737C.1.pep
LSPLYLPFSIACDTHLYRAPTLTATPHHAFSMSAPPPSTQGCLGQGRAGLPATSESSWQLQIWHVLHYCQKCVVMQVYFFKDGARRLLLPEIHILRYNRWVKLLQ

SEQ ID NO: 247578 - protein, 83 aa, Zea mays
  unsure (1)..(83): unsure at all Xaa locations
  Clone ID: MRT4577_157380C.1.pep
MAMIKIGIKGCGRILRLGDMAALQIDDVKLESGNDPFXITGYTTYRLKCDTVHGQWKHHEXKVQDSKSLLLQEKEVDVLGCTN

SEQ ID NO: 247579 - protein, 91 aa, Zea mays
  Clone ID: MRT4577_157381C.1.pep
LPLIIGCRPGNASCLLIHLFRDLGSTCQDIDRGLFVEIERETSDSSKLASVGLAMARAAGELASQVAGRPGTRRRREREERTSDGVRTPAG

SEQ ID NO: 247580 - protein, 45 aa, Zea mays
  Clone ID: MRT4577_157382C.1.pep
CRVVNFCVHSCCSRGRMFLFDSSTCPLPANVIILIKKKGGGVRCT

SEQ ID NO: 247581 - protein, 34 aa, Zea mays
  Clone ID: MRT4577_157383C.1.pep
CSTSEINMIIHLYHVDFTCKHTLGISCAFVHSVC

SEQ ID NO: 247582 - protein, 66 aa, Zea mays
  Clone ID: MRT4577_157384C.1.pep
FKGASFYERGDSQKALANTKSLRRFSSNFSMFRSSKSPFRKDSTPILASISSLRCLLASIFGLHYL

SEQ ID NO: 247583 - protein, 81 aa, Zea mays
  Clone ID: MRT4577_157385C.1.pep
SEEGAGWSWCGFKNDDVRNPQFSVFIYYCVYNSENPSSHGPLRPNKLRIRTPSTRAASLHTRHLLLHIRGRPGLHIPPSLS

SEQ ID NO: 247584 - protein, 139 aa, Zea mays
  Clone ID: MRT4577_157386C.1.pep
MATAAAAKRKPVFVKVDQLKPVTSGHTLVAKVLSSKTVLQKARAAGGPGPAAKPTRIAECLIGDETGCVLFTARNDQVDVLKPGNTVIIRNAKIDMFKGSMRLAVDKWGRVEVTEPASFGVKEDNNLSLVEYELVNVEE

SEQ ID NO: 247585 - protein, 492 aa, Zea mays
  Clone ID: MRT4577_157387C.1.pep
MPPKKASAPGAAALQPLDPNQETLSLREAQSQKRKATSPTLQEEELDQEIRNMEIIHQQVQRKKEKMARLADPQRQIDEATEKVLHQEGLFNEDGWYDDFNHDTFTFDDASPLAVELQAIPWPPSYKPPQLPMYDGHSGPKQFLMSYEATISSYEGNAAVMTKSFVMAVRNVAQTWYSSLRPGTITSWQKLKDMLLTSFQGFQMKPVIAQALFQCTQDHEEYLQAYVRRFLHLRAQAPTVPNEIVIEAMIKGLRPGPTAQYFARKPPQTLEKLLQKMDEYIRADNDFRQRREEAYRFSEMTRGFGGRIHSRHVRSIHNSTQNGNRGSQLQRPQYSSQSLGQQQSSFRPPAPRGRGTRGFGGRYGEQPRKIYYLFCEDKGHTTRMCQITIQKQKEIAEAEARQSQPKQVLHTASCHSPYIPEYVGNHPVASVASASQPQASWPQLPPPPPLQPAYSRGQQPEGSHQTHQQRDLREESEARTVNSTVPESKHIY

SEQ ID NO: 247586 - protein, 374 aa, Zea mays
  unsure (1)..(374): unsure at all Xaa locations
  Clone ID: MRT4577_157388C.1.pep
MPPKKASAPGTAALQPLDQNQETLSLQEARSQKRKATSPTLQEEELDQEIRDMEIIHQQXTEEVCHLAQDEQDRRPQHRELHQEGLFNEDXDAELQAIPWPPSYKPPQLPMYDGHSDPKQLLMSYEATISSYGGNAVVMAKSFVMAVQNVAQTWYSTHRPRTITSWQKLKDMLVTSFQGFQTKPVTAQALFQCTQDHEEYLQAYVRRFLRLRAQAPTVPNEIVIEAMIKGLHPGPTAQYFARKPPQTLEKLLQKMDEYIRADNDFRQRREEAYRFSEMTRGFGGRVHPRHIRSIHNSTQSDDKGSQSQRSQYTSQSSGQQQSSFRPPAPRGRGVRGFGGRFGNQPRKIYCLFCGEDKSHTTRMCHVTIQXQKEI

SEQ ID NO: 247587 - protein, 407 aa, Zea mays
  Clone ID: MRT4577_157389C.1.pep
MEIILQQVQRKKEKMARLADLQRQIDEATEEVRHLAQDEQDRRPQHRELHQEGLFNEDGWYDDFNHDAFTFDDASPLAAELQATPWPPSYKPPQLPMYDGHSDPKQFLMTYEATISSYGGNAAVMAKSFVMAVRNVAQTWYSSLRPGTITSWQKLKDMLVTSFQGFQTKPVTAQALFQCTQDHEEYLQAYVRRFLRLRAQAPTVPNKIVIEAMIKGLHPGPTAQYFARKPPQTLEKLLQKMDEYIRADNDFRQRREEAYRFSEMTRGFEGRIHPRHVRSIHNSTQSDDRESQLQRPQYTLQSLGQQQSSFRPPAPRGRGARGFGGRYGNQHRKIYCLFCGEDKGHTTRMCQITIQKQKEIAEAEARQSQPKQVLHTASCHSPYIPEYVGNHPAASVASSSQPQVSWP

SEQ ID NO: 247588 - protein, 69 aa, Zea mays
  Clone ID: MRT4577_15738C.1.pep
CAGSSVPVSHAHMRALLRTKYVSGSIPCSKYLSHRFRPSISSTSNRASSANTPMHIVYVGSHVCTDGVW

SEQ ID NO: 247589 - protein, 57 aa, Zea mays
  Clone ID: MRT4577_157390C.1.pep
EEANQKRNTRHIKDPTRPHACIANAHARIIHSSSNSDHGLRRIPNRRTSFIASRSRG

SEQ ID NO: 247590 - protein, 217 aa, Zea mays
  Clone ID: MRT4577_157391C.1.pep
MPPKKASAPGAVALQPLDPNQETLSLREARSQKRKATSPTLQEELDQEIRNMEIIHQQVQRKKEKMSQLADLQRQIDEATEEVRHLAQDEQDRRPQHRELHQEGLFNEDGWYDDFNHDTFTFDDASPLAAELQAIPWPPSYKPPQLPMYDGHSDPKQFLMSYEATISSYGGNAVVMAKSFVMAVKNVAQTWYSSLRSGTITSWQKLKDMLVTSFQGF

SEQ ID NO: 247591 - protein, 43 aa, Zea mays
  Clone ID: MRT4577_157392C.1.pep
MWTLFQSTNSWFRFVVAVYDASARNWFVSVWVTDTIIIKWCFD

SEQ ID NO: 247592 - protein, 89 aa, Zea mays
  Clone ID: MRT4577_157393C.1.pep
ALRSMTLRGLLIVAIVEIRRFQRPASIDGSSCCLLSTPWLPPCRVERPRIEDDSLTRSTVAAASTPSLASCCALGQIRLYASILAKPFL

SEQ ID NO: 247593 - protein, 51 aa, Zea mays
  Clone ID: MRT4577_157394C.1.pep
IKKKKKKKKKKKKKKKKKKKLKKKKKKKKKKKNFNKKKKKKKRFFLGPEPP

SEQ ID NO: 247594 - protein, 96 aa, Zea mays
  Clone ID: MRT4577_157395C.1.pep
NYFSQFLFNTTNAEPTVGIFNIGWGRTLNTFDVSSPTTTIPDGCLRLTVDTQHLRDVNFPTNSLYQFIDELHIQKFYDFHDPHYSRDFIDCFHPAL

SEQ ID NO: 247595 - protein, 82 aa, Zea mays
  Clone ID: MRT4577_157396C.1.pep
MARTTYTALKNTGSKALPKQLGTKAMWKFMSTTTRVKMNNMFRNGTVELGAIPKYQKSTDLMIHKLAFQPLVREITHVLNTD

SEQ ID NO: 247596 - protein, 82 aa, Zea mays
  Clone ID: MRT4577_157397C.1.pep
STGISGWHSQIQQRVNKFDCTLLNLHRCTWAMRCSPRTTNLQDNCKVQDLEIMVSMLDIRIQVISFRRKGGRTVFLNPHTGS

SEQ ID NO: 247597 - protein, 63 aa, Zea mays
  Clone ID: MRT4577_157398C.1.pep
KNTYHNKVHNAIKVISQKALHIKLLQTYVYPQCFKDPKLVGSCRCLPLYLNANKTISFDQSPS

SEQ ID NO: 247598 - protein, 68 aa, Zea mays
  Clone ID: MRT4577_157399C.1.pep
REETYPASMESANKKVAAAGRVLLLLQGRAAPTTARLLQQADTSPDSRLHIMTRELDHQNGAIPCGES

SEQ ID NO: 247599 - protein, 103 aa, Zea mays
  Clone ID: MRT4577_15739C.1.pep
CARRVREAREGLDCNAVGLGRRDGVAALPRGVVTPLTIRGMLLRAAALRECNEWHDQRSRARAHCGSTTSPSTDSPRPAMTQGPSGDTSCNHRAASPSGIQTL

SEQ ID NO: 247600 - protein, 392 aa, Zea mays
  Clone ID: MRT4577_1573C.1.pep
HPRGRPGHEAGRATHPNLARARSSGRFVAVASMTSAVSTKVENKKPFAPPREVHVQVTHSMPPHKIEIFKSLDDWARDNILTHLKPVEKCWQPQDFLPDPASEGFHDEVKELRERAKEIPDDYFVCLVGDMITEEALPTYQTMLNTLDGVRDETGASPTAWAVWTRAWTAEENRHGDLLNKYMYLTGRVDMRQIEKTIQYLIGSGMDPRTENNPYLGFIYTSFQERATFISHGNTARHAKDFGDLKLAQICGIIASDEKRHETAYTKIVEKLFEIDPDGTVVALADMMKKKISMPAHLMFDGQDDKLFEHFSMVAQRLGVYTARDYADILEFLVDRWKVADLTGLSGEGNKAQDYLCTLASRIRRLDERAQSRAKKAGTLPFSWVYGREVQL

SEQ ID NO: 247601 - protein, 104 aa, Zea mays
  unsure (1)..(104): unsure at all Xaa locations
  Clone ID: MRT4577_157400C.1.pep
CGGGEGGVTESDAGRARRAKAKRGSTAPGPLFAAAASDLREVVMIQYVXXHIGVLXGAVXQXXNNXXLPNSNKKPFXSXLLXPXYXXSXPXXLQXTLFLXHXFI

SEQ ID NO: 247602 - protein, 130 aa, Zea mays
  unsure (1)..(130): unsure at all Xaa locations
  Clone ID: MRT4577_157401C.1.pep
STANREIQCCGWRGGGCSWQLARSPTSFAXIKYWGKRHEALILPVYDSISVALDPDHVSATTTVAAGPSFPSDRMWITVAEISLLGAGFQSCLAEITKRARDSEDKETCVKIDKEDWDKWPGHIASYYNF

SEQ ID NO: 247603 - protein, 77 aa, Zea mays
  Clone ID: MRT4577_157402C.1.pep
KRGVVLSFPPFGPKVWPNLFGNNVGNFLFPLFTGFKKPGLTRNCPMPLWFLFNPVFKKPFREPPCFLDPLFVKAPFF

SEQ ID NO: 247604 - protein, 62 aa, Zea mays
  Clone ID: MRT4577_157403C.1.pep
MAEREHRTVFVTVGTTCFDALVMAVDSPEVKKALLQKGYSNLLIQMGRGTYVPSKVSTLVPL

SEQ ID NO: 247605 - protein, 60 aa, Zea mays
  unsure (1)..(60): unsure at all Xaa locations
  Clone ID: MRT4577_157404C.1.pep
LGTVTMTYEQVPDSELSRLGSATHRRACLVCLDCTILSIFXDHLYKSNPAXXYNXXKTRT

SEQ ID NO: 247606 - protein, 110 aa, Zea mays
  unsure (1)..(110): unsure at all Xaa locations
  Clone ID: MRT4577_157405C.1.pep
SASTIMGSQESEQAKVLPGTDCPQQPPASRTWQRRFDDEGKNVAMFSMTMSDLVELMPLMVKILKLHVEENAEGRVGYQTLSRIIAXLSLSLSLSWQHPVHDHVSVSAET

SEQ ID NO: 247607 - protein, 503 aa, Zea mays
  unsure (1)..(503): unsure at all Xaa locations
  Clone ID: MRT4577_157406C.1.pep
QPARLPVPRTSRLLRFSLLHSSHPRISAPRRARTSWFVPCSPREDVDREAALPRGGGAADGCASARRGAGGGAGRGGGGRGPACGGDRGEREGQGGGGSGRXELVQLRAKISALESRIAKQNLEFKTKNDAIETLNMIVKEKSQKIATMRTDVTSLGAKGSLAAEEQASKANALAIELKKQTEKLKKDITEQKIKKAALEARAGNADKKVQELNMKLEKLQXTSSDQKRRIQKTEHALKAAEEELMKAQLETTTKVKQLREVHGAWLPPWLATHAARSMEVMSNHWNEHGKPAFDSFLQKASEKTVQTKKWAEPHLETAKTKWMPVAKEKWVTLKKHAKPYVQMVSEKSLEAYQTSSDFVRPHLVNAHQVVDPYFQEAKKLSKPYVDQIATATKPHVEKVRTALKPYTERARHVYGQFLETATTYHQQAQATISDYLHRHEFTKQFVTKELVWYLASALLVTPFFVLYTLLTETFCTKKKKKTPRSSNTNHGHRRHKRRHADK

SEQ ID NO: 247608 - protein, 116 aa, Zea mays
  Clone ID: MRT4577_157407C.1.pep
WTHFSLCLNLLSPKNINISWFIYIQPFFNIQFIGLTCASMFHVPTQILCGGQQDSASSNIDPLLGDLGDELGPNDDGVGQQHPLSEHLEAAELALTWQSLSMVKLDIKEEKIRWSN

SEQ ID NO: 247609 - protein, 40 aa, Zea mays
  Clone ID: MRT4577_157408C.1.pep
GSRVPGLYRVFTAFPRDKKISFHEAETRHIYFYVWLGVAG

SEQ ID NO: 247610 - protein, 101 aa, Zea mays
  Clone ID: MRT4577_157409C.1.pep
FRVRSPAGGGGPHMPNYRSHTTCTLHDRACCRRGQIGSRRRSHRIMWTWSGDDDGMDDDDARYRRRGSRDDSEEPIEDDDNDVRHRVIDYDAQVDPEPAGS

SEQ ID NO: 247611 - protein, 134 aa, Zea mays
  unsure (1)..(134): unsure at all Xaa locations
  Clone ID: MRT4577_15740C.1.pep
MPRGARSPRSPSRAXVRCGAAARFIGQGEFPAEVLESELPVLVDFVADWCGPCRLIAPVVDWASEEYAGRLKIVKIDHDANPQLIEEYKVYGLPTLILFKDGQEVPGSRREGAMIKDKFKEYLEPLLTTITTAA

SEQ ID NO: 247612 - protein, 57 aa, Zea mays
  Clone ID: MRT4577_157410C.1.pep
GPPPPPPFWGVFLKKFFPPKKKKKKKKKTKKKKKKKKKKKKKKKKKKKKKKKNPPPP

SEQ ID NO: 247613 - protein, 132 aa, Zea mays
  Clone ID: MRT4577_157411C.1.pep
MLPALCLRSPNTTPAPGIGKESHTNPKHFGVNYAFQVPIATKYRYVITKAAKDNQSTNRNTKPNSVICADCDGNGAVLCSQCKGSGVNSVDIFNGQFKAGDSCWLCGGRKEMLCGNCNGAGFVGGFLSTYDQ

SEQ ID NO: 247614 - protein, 65 aa, Zea mays
  Clone ID: MRT4577_157412C.1.pep
LVGGALPTKVVCLTQVVTADELRDDEEYNDIVEDMREEGRKYGKLHEAHRVLLYLCFKSSYIQLV

SEQ ID NO: 247615 - protein, 102 aa, Zea mays
  Clone ID: MRT4577_157413C.1.pep
LVVRGMISPAKFYSQSAASQRGEACVSCLCPAKKKISDDKSSVAVDAARGGYGGAGAVPQVHRDQQVLVGDHVLVGAHRVAPPPLDAAGGAAVAGLGLGGFG

SEQ ID NO: 247616 - protein, 147 aa, Zea mays
  Clone ID: MRT4577_157414C.1.pep
SANGLVALTLNTPISFLCYESRSKKHRSYLTASLLSLCRRTMASERVLSLFISVFLLSCNAKGIPASVMTNGNNTYLLLDVDFLAEKFGLPLLKPSEQTGSYLLHYVHVLNDCPNHPALPISSNLWASPSISATRGPSSPSSLVTVV

SEQ ID NO: 247617 - protein, 53 aa, Zea mays
  Clone ID: MRT4577_157415C.1.pep
PRCRPGYIPSTLCSIRNVPLAARRDLLLVGQNLRLASPELVGYPSSMSFYSTP

SEQ ID NO: 247618 - protein, 45 aa, Zea mays
  Clone ID: MRT4577_157416C.1.pep
RDGGAGYDGVGVLDGVDGGYGGGDDGYVGDNRVGGYGSSHGNWRI

SEQ ID NO: 247619 - protein, 47 aa, Zea mays
  Clone ID: MRT4577_157417C.1.pep
KKPPPGPWFLGNRHFPHPPLGPGGRGFQSFTTPAHKIGDLGVQEIKI

SEQ ID NO: 247620 - protein, 35 aa, Zea mays
  Clone ID: MRT4577_157418C.1.pep
RLVIRICTLGQSLEQFGYDLLSEIIVAQKGKGFHL

SEQ ID NO: 247621 - protein, 128 aa, Zea mays
  unsure (1)..(128): unsure at all Xaa locations
  Clone ID: MRT4577_157419C.1.pep
MARTKXTVRKSTXGKAPRKQMNTXAARKSSPGTGGVKKSHRFRPGSVALREIRKYHKSTELLIRKMPFQRLVRDISQDFKNDLWIQFYFVAALQEDDDAYLVGLFXRTNLCGIHAKRVTIMAKDIQLA

SEQ ID NO: 247622 - protein, 50 aa, Zea mays
  Clone ID: MRT4577_15741C.1.pep
YLNVLVLRKRNYNLITKNSSKEALVFWLPTIKTEDETLPRLKGCKRNAHG

SEQ ID NO: 247623 - protein, 98 aa, Zea mays
  unsure (1)..(98): unsure at all Xaa locations
  Clone ID: MRT4577_157420C.1.pep
DATAEENRVLLAMVNPTVFFDIAVDGEPLGRVSFELFADKVPKTAENFRALSTGEKGFGYKGTCFHRVIPGFMCQGGDFTRHNGTGGKSIYGEXFEDE

SEQ ID NO: 247624 - protein, 211 aa, Zea mays
  Clone ID: MRT4577_157421C.1.pep
MATAVSKSAVKSHPRLPTTAQPPPPNPGSNAASAGGGAAPPPPPSPAAGATPSKNAAMAELKSRVLAALVKLSDRDTHHIAVEELDRIIRAPPSTDAVPMLLNALAPDSPGLASPARRECLRLLATLCTSHPDAAAPHLHKVLAHLARRLKDPASDTSVRDTCRDVAGQLAAVYLRPLSASGVCEAGNATVTLFVKPLFEVMGEQSKSVQG

SEQ ID NO: 247625 - protein, 53 aa, Zea mays
  Clone ID: MRT4577_157422C.1.pep
GRLNKISTFIPIADLAVSCRTHKNIQVYTAGLSKTEHSPLPFSFVDTFYQKIL

SEQ ID NO: 247626 - protein, 41 aa, Zea mays
  unsure (1)..(41): unsure at all Xaa locations
  Clone ID: MRT4577_157423C.1.pep
KHPFSLYIIPFHFNGSSRSLLTXPPMVMGNTPLLIPAKRVN

SEQ ID NO: 247627 - protein, 72 aa, Zea mays
  Clone ID: MRT4577_157424C.1.pep
RSPTARIGRATSSVTASAADMESNRGRDWRELLTTTSVRGGRRRLRTSGSRTLLAPCRLPPQTQKRGTVDAR

SEQ ID NO: 247628 - protein, 190 aa, Zea mays
  Clone ID: MRT4577_157425C.1.pep
RPGRVSSQPSLPGLHLPHVFCLSHRLALASVFRVASTRRSGRWTPASRPAWSCSSLPLHIPAPSAQRPTPAHMLPIMLNTAPASSCTRCPRDARKQPPDFFFLALACRLVELLNVTVSSSCITVPALGSPKPLLPTAPSARSAVVLELALLGKLIQRRYESNINKVLTRDGNSSINPAFQGHCTKVFIGV

SEQ ID NO: 247629 - protein, 50 aa, Zea mays
  Clone ID: MRT4577_157426C.1.pep
KKKTTKIILIIIGKRTFIQGRYLTYHFTSMTNTDTSLYIMHHLLKITLLL

SEQ ID NO: 247630 - protein, 194 aa, Zea mays
  unsure (1)..(194): unsure at all Xaa locations
  Clone ID: MRT4577_157427C.1.pep
MSAALAVTDEVALPIRAVGDLAAAAEVSREEVAVITQCAALGGKLPFEDASVGAVLAVIKNVESLREQLVAEISRVLKAGGRVLVQSPAPSSSQKPNTEIERKLXMGGFAEVQXLLLRTRKIACXSVTVKAKKASWSMGSSFXLKKTTKALPKIQIDDDSDLIDEDSLLTEEDLXEPQLPSCGDCEVGAAKKAC

SEQ ID NO: 247631 - protein, 263 aa, Zea mays
  unsure (1)..(263): unsure at all Xaa locations
  Clone ID: MRT4577_157428C.1.pep
MSAALAVTDEVALPIRAVGDLAAAAEVSREEVAVITQCAALGGKLPFEDASVGAVLAVIKNVESLREQLVAEISRVLKAGGRVLVQSPAPSSSQKPNTEIERKLLMGGFAEVQSSAANSQDSVQSVTVKAKKASWSMGSSFPLKKTTKALPKIQIDDDSDLIDEDSLLTEEDLKKPQLPVVGXCEVGAAKKACKNCTCGRAEAEEKVGKLELTAEQINNPQSACGSCGLGDAFRCGTCPYRGLPPFKPGEKVSLSGNFLAADI

SEQ ID NO: 247632 - protein, 255 aa, Zea mays
  Clone ID: MRT4577_157429C.1.pep
MTVGLPCCAEGGPSAAAEVSREEVAVITQCAALGGKLPFEDASVGAVLAVIKNVESLREQLVAEIRRVLKAGGRVLVQSPAPSSSQKPNTDIERKLLMGGFAEVQSSAASSQDSVQSVTVKAKKASWSMGSSFPLKKTTKALPKIQIDDDSDLIDEDSLLTEEDLKKPQLPVVGDCEVGAAKKACKNCTCGRAEAEEKVGKLELTAEQINNPQSACGSCGLGDAFRCGTCPYRGLPPFKPGEKVSLSGNFLAADI

SEQ ID NO: 247633 - protein, 70 aa, Zea mays
  Clone ID: MRT4577_15742C.1.pep
VKSDPCPHDTNHHHQPAAASRTQRTAMASLTHDGVLRRRGRGRALARRHLRRGQVRLGRPLRGARQVGTC

SEQ ID NO: 247634 - protein, 62 aa, Zea mays
  Clone ID: MRT4577_157430C.1.pep
PYLSSEFGSSTIHNQLFFFPSYTFSLGGVYKNKRRNPPPQSFPSSAQTSPLSTNPYFSPIFL

SEQ ID NO: 247635 - protein, 164 aa, Zea mays
  Clone ID: MRT4577_157431C.1.pep
NERLCKISSKTEDLLVKKRISWPWKGHEHSGPDKGHMNPLQFHDKQDNDQIHLVGPESIIIPDYQDSDSTQESRYEVTGNWWSFNNDSFNSLGSSLSSNSSAIERVDLEADCLDYEILWEDLVLGEQVGQGSCGTVYHAQWYGSDVAVKLFSKQEYSDEMIDTF

SEQ ID NO: 247636 - protein, 109 aa, Zea mays
  Clone ID: MRT4577_157432C.1.pep
PGTKKRRAKNALVFAPPPPRRPSAGEPREGGGKRAEEARRAKEAGNDAYRKAFLETAGEHYTRGALHDPREITGLTNRAAAYLHRGKHKESARDCLGAAERGRGPSAGN

SEQ ID NO: 247637 - protein, 76 aa, Zea mays
  Clone ID: MRT4577_157433C.1.pep
MAAATNADLEVADFNLNDNNFRDKDPGQVQQRPPASGFGSTTAGNNPPLRTKARGFRKDLNLLGYPRLALWRGGDA

SEQ ID NO: 247638 - protein, 61 aa, Zea mays
  Clone ID: MRT4577_157434C.1.pep
SFLYDVLMSNAFLIFLAFSGLLLTDRLPSNANSGSTSIPGYEASRVVIHSQKPQKGMLTSL

SEQ ID NO: 247639 - protein, 67 aa, Zea mays
  Clone ID: MRT4577_157435C.1.pep
PAQATVVLGVAPKKKAAPEFVKAPGESGKAAHGCSWGGNCKCDPCNCCSHRSAPRDMIIIYLAWGGG

SEQ ID NO: 247640 - protein, 129 aa, Zea mays
  unsure (1)..(129): unsure at all Xaa locations
  Clone ID: MRT4577_157436C.1.pep
RSRGRSAATPRQQQHRTMALLLHPRLPSHPFRAAAHHHHAIXDASCFLTLHGPGGKRRRCLRGDMPRAARAKEPAQSAGASLSAAATGADKGGAQVLRPRRGHRRRGQRWTRRRARHAAGALXGRRQAP

SEQ ID NO: 247641 - protein, 43 aa, Zea mays
  Clone ID: MRT4577_157437C.1.pep
VLLHLPLHKALPIHMSVVLQTINKLRFYRTQGVYKSSQGFTIL

SEQ ID NO: 247642 - protein, 54 aa, Zea mays
  unsure (1)..(54): unsure at all Xaa locations
  Clone ID: MRT4577_157438C.1.pep
PLTPVKARFNKWGMESALFQPKXRPKTLVPISRKVDPKPPKKSSKVGPPRAPNP

SEQ ID NO: 247643 - protein, 427 aa, Zea mays
  unsure (1)..(427): unsure at all Xaa locations
  Clone ID: MRT4577_157439C.1.pep
FRWQVNDSDARKNAKPRWVRXRVNLDDHIIVPCLEPAATSTKPDQAVEDYLSWLSTAPMDHSRPLWEFHVLDFPTSEATATVAIRMHHSLGDGVSLLSLLIACTRSAADPARLPELPPAPRRASPVYARQRPPLSAGLVAFALWLWSYVLLAWHTLVDVACFVATAWFLRDQRTPFMAASEGVEFRRKRFVHRTLSLDDVKFVKNVMKCTVNDVLIGVTNAGLSRYYFRKTSDTNNERKKSQNIRVRSALLVNIRRTPGLHALAEMMDSIKNNRAKWGNLIGYMILPFHIAMHDDPLEYIRQGKRTAQRKKASLEAVFTYWSGNLIVKLFGMKAAAALCYGMFTNTTMSFSSMVGPAEKVEFYGHPIVYIAPSVYGHPHALTIHYQSYTNSIKLVLAVDDAQFPDSHQLLDDFAESLRLIRQAASTR

SEQ ID NO: 247644 - protein, 349 aa, Zea mays
  Clone ID: MRT4577_15743C.1.pep
MSAKVPRCLEVCSSGMADWASIQTDILGIIIKKLPIPDYIRFRAVCTSWNNVCKDVSYCPRVDPWLMLPPNQNPLGAQFFCIPERKNQSIRLPNTASLFESVWAPVGSSNGWLIYFSHTYGTMQLVNPVSGKHIQLPPIGRRTFSKAKLLEISERNFIVAVLYGDEKGYKITRKGSSNWSSVESKFILDDIIKHGGRLYTCDMYGTVEMWAEPPRAWPDEEVTHRWRFRCLIETPAGDLVRVKRLCQNKFAVWILDKASSSWVGTENIGDLALFVSHYNSFCFPASGQPNLKANCIYFIDIYNNLCAFNLEHGTKELVQTLTIGRGQGRNDYHRWPERDQVLWFIPSLK

SEQ ID NO: 247645 - protein, 117 aa, Zea mays
  Clone ID: MRT4577_157440C.1.pep
CAWRCLGNVLSFGFVDRQRSIRAANVTVYLEVMRFYVHNILPCVPFLLIQDGAGERLGLGVPVLFDRVILVILVVQEAVGVLLLVSQWSPVVTPTYVTSSTRSWRWNTLQVAARDVH

SEQ ID NO: 247646 - protein, 73 aa, Zea mays
  Clone ID: MRT4577_157441C.1.pep
GGFPQDFKTALRFQSSPVPALQEGSRASLVGFFGDPNFWAFSARGVPFLPRDFRFAPGFRGEGALGSSRWGWK

SEQ ID NO: 247647 - protein, 78 aa, Zea mays
  Clone ID: MRT4577_157442C.1.pep
MVLSYALVILAALLRLAALMPTGATAGLLHASACAWALGFGLYLWRFFPWMIRPRADAAAKPAAPLMKIVPAGPRRAP

SEQ ID NO: 247648 - protein, 88 aa, Zea mays
  unsure (1)..(88): unsure at all Xaa locations
  Clone ID: MRT4577_157443C.1.pep
SGYEDRKNGCNSDLLKKKKKKKKKKKKKKKKKKKEKQKKKKKIKKKKKTKXKILNKSKKKIRGGGVLRDQGLLAGDWELIIFFWGPLI

SEQ ID NO: 247649 - protein, 63 aa, Zea mays
  Clone ID: MRT4577_157444C.1.pep
ELNLGNNIENLFGSMKGDVMLDHIEGGENSWFYSNSLDENFIVCLVNQLFICRYRVNRGIPFI

SEQ ID NO: 247650 - protein, 57 aa, Zea mays
  Clone ID: MRT4577_157445C.1.pep
MADDCCYQFGQEMGGAYCSPPVFDNGMTSLLNYAGVEGDGRRPVGGPAGGTGNGGGR

SEQ ID NO: 247651 - protein, 153 aa, Zea mays
  Clone ID: MRT4577_157446C.1.pep
EIQIKQKESPRSSSTNLRRDRERALTVSQEVAVVSNGLVALHGGEDHARCSYQWLLGHGRGPLAFPAATTTAILTHVYLPSMAASHGRMLATAPPVPQEPKATDLSSIHAEQQWRCGRGGAEGRGGEPSLAWTVVTAELACVEEVGKREESRP

SEQ ID NO: 247652 - protein, 56 aa, Zea mays
  Clone ID: MRT4577_157447C.1.pep
NRGNACIYIPSDTAMKGATFFSSTQPNSNPELASNTNQPGLHYKKNTKMTPLPHTL

SEQ ID NO: 247653 - protein, 114 aa, Zea mays
  Clone ID: MRT4577_157448C.1.pep
VQLPIPCYHVQLPTSQYPPSRVPGLHSTSRTNGFPIVTAMDTLAGMMIDRRLKLKHEDIQRSEDQEAKYHRSDYEPDYAYDISQLNMQGWLIDVSHTNIEANHVKGIRIDQDVG

SEQ ID NO: 247654 - protein, 100 aa, Zea mays
  Clone ID: MRT4577_157449C.1.pep
GEDIRHVSVQHGVHLQVPLQLELLLDLLDLDVGVVACASVCERDSQRDISRADSGVDVRLGVALGYVACFLAACSPVCSAGPSDWRAGPGLSTDACSEGS

SEQ ID NO: 247655 - protein, 106 aa, Zea mays
  Clone ID: MRT4577_15744C.1.pep
YPLRFRGICGGIAAVANWVSNLIVTQTFLSLTKALGTSATFFLFCAVSLLALVIVCVTVPETKGLQFEEVERMLEREDYKPWKRYHGGSSSSIEPAKNSDIGLTPP

SEQ ID NO: 247656 - protein, 35 aa, Zea mays
  Clone ID: MRT4577_157450C.1.pep
LTVVSPITMVTLPQHVRRDDTYELIGVICVDKRAT

SEQ ID NO: 247657 - protein, 163 aa, Zea mays
  unsure (1)..(163): unsure at all Xaa locations
  Clone ID: MRT4577_157451C.1.pep
NLFPYFRGHQFFPFNQRFTLDPGGFLGPPLFPFAPGGXGHFQQQQLFSFNQLGGLDPPGFLPQPILLPFSPLGSASRGSFLAQQPVVPFYPQVGGNPPTLFQIQQLLAFGPPGLAKPAASFPQHIIGGGLFLVGFSPGFHKKGFLGGGWGPPQIKRFLSRFLW

SEQ ID NO: 247658 - protein, 43 aa, Zea mays
  unsure (1)..(43): unsure at all Xaa locations
  Clone ID: MRT4577_157452C.1.pep
ASAPACPCPPPVPFPPAFVPLSHTVIRXRLRXRYAGGPAGXAX

SEQ ID NO: 247659 - protein, 59 aa, Zea mays
  Clone ID: MRT4577_157453C.1.pep
LTPIKSRITQKSSVELTRLRIRRIQLIKSPAEYSKVPNKITLLQVLKKKKQGQQRLEKL

SEQ ID NO: 247660 - protein, 78 aa, Zea mays
  Clone ID: MRT4577_157454C.1.pep
PPQRSTGTPPRRLFSEPTRAARRFGQRPTLGGAPRLRVTHPLTFRRPGRAGTFLWNPFGTFKNNFTPFYLTLFSAGKS

SEQ ID NO: 247661 - protein, 52 aa, Zea mays
  Clone ID: MRT4577_157455C.1.pep
STFHASLLMQPHSNICLTWRCLIYSPKKQILLLYIRGNKSYISCLFLIDLTL

SEQ ID NO: 247662 - protein, 98 aa, Zea mays
  unsure (1)..(98): unsure at all Xaa locations
  Clone ID: MRT4577_157456C.1.pep
LCCASXALGLXAXFXSXLCVLPRXVFSFXXPXXXCRVVXFVXFLLLLCFSLSCPGLLLPLLVAPVFSLVGXRLXSCWRSAAPPSCAPXGLXPAAGFTP

SEQ ID NO: 247663 - protein, 109 aa, Zea mays
  Clone ID: MRT4577_157457C.1.pep
NDIIHSIIDMDADVITIENSRSDEKLLSVFREGVKYGAGIGPGVYDIHSPRIPSAEEIADRIDKMLAVLDTNILWVNPDCGLKTQRQVSTFFLPFSFPRRASSMPICFQ

SEQ ID NO: 247664 - protein, 145 aa, Zea mays
  Clone ID: MRT4577_157458C.1.pep
EQPSPLTPSVAAEIDLVGRMPGLRHPSVLSAMTRAVADVSSARDSIRLLGPRPDHEQVDAFRELLRLADAGKKADANADVKTKDLDEEKLAKCREVVRLEEDHEAYGALLRDADGKLEHVYQMAMHVRDIKKAVGGDGKGEEGFR

SEQ ID NO: 247665 - protein, 54 aa, Zea mays
  Clone ID: MRT4577_157459C.1.pep
LPSSYTGSSHPATGHVCGDWAEVHRVLGSFRALLQRHRAYAHPSPSGLLAYRRR

SEQ ID NO: 247666 - protein, 51 aa, Zea mays
  Clone ID: MRT4577_15745C.1.pep
VCNTNLHFTFLPVFTFFFLYLLKYKKTLNHFIIYYILFFYSYFSLYYFIIL

SEQ ID NO: 247667 - protein, 429 aa, Zea mays
  Clone ID: MRT4577_157460C.1.pep
MAVTYSSSEIFFALYSRRTLLSSTVDALAKALAGQKDEAYFAANAAAQASRKSSPRVTNEEVQKAAAALKGSDHRRGTNVSARLDAQQKKLNLPILPTTTIGSFPQTVELRRVRREYKAKKISEEEYVTAIKEEINKVVKLQEELDIDVLVHGEPERNDMVEYFGVQLSGFAFTANGWVQSYGSRCVKPPIIYGDVSRPNPMTVFWSKTAQSMTSRPMKGMLTGPVTILNWSFVRNDQPRFETCYQIALAIKKEVEDLEAGGIQVIQIDEAALREGLPLRKAEHAFYLDWAVHSFRITNCEIQDTTQIHTHMCYSNFNDIIHSIIDMDADVITIENSRSDEKLLSVFREGVKYGAGIGPGVYDIHSPRIPSAEEIADRIDKMLAVLDTNILWVNPDCGLKTRKYTEVKPALTNMVSAAKLIRTQLASAK

SEQ ID NO: 247668 - protein, 97 aa, Zea mays
  unsure (1)..(97): unsure at all Xaa locations
  Clone ID: MRT4577_157461C.1.pep
WAVHSFRITNCEIQDTTQIHTHMCYSNFNDIIHSPRIPSAEEIADRIDKMLAVLDTNILWVNPDCGLKTRKYTEVKPALTXMVSAAKLIRTQLASAK

SEQ ID NO: 247669 - protein, 766 aa, Zea mays
  Clone ID: MRT4577_157462C.1.pep
MASHIVGYPRMGPKRELKFALESFWDGKSTAEDLEKVATDLRASIWKQMADAGIKYIPSNTFSYYDQVLDTTAMLGAVPERYSWTGGEIGFDTYFSMARGNATVPAMEMTKWFDTNYHFIVPELGPNTKFSYASHKAVNEYKEAKALGVDTVPVLVGPVSYLLLSKPAKGVEKGFPLLSLLSSILPVYKEVIAELKAAGASWIQFDEPTLVLDLDSDKLAAFSAAYAELESVLSGLNVLVETYFADVPAESYKTLTSLSSVTAYGFDLVRGTQTLGLVTSAGFPAGKYLFAGVVDGRNIWADDLATSLSTLQSLEAVVGKDKLVVSTSCSLMHTAVDLVNETKLDSEIKSWLAFAAQKVVEVDALAKALAGQKDEAYFAANAAAQASRKSSPRVTNEEVQKAAAALKGSDHRRATNVSARLDAQQKKLNLPILPTTTIGSFPQTVELRRVRREYKAKKISEEEYVTAIKEEINKVVKLQEELDIDVLVHGEPERNDMVEYFGEQLSGFAFTANGWVQSYGSRCVKPPIIYGDVSRPNPMTVFWSKTAQSMTSRPMKGMLTGPVTILNWSFVRNDQPRFETCYQIALAIKKEVEDLEAGGIQVIQIDEAALREGLPLRKAEHAFYLDWAVHSFRITNCEIQDTTQIHTHMCYSNFNDIIHSIIDMDADVITIENSRSDEKLLSVFREGVKYGAGIGPGVYDIHSPRIPSAEEIADRIDKMLAVLDTNILWVNPDCGLKTRKYTEVKPALTNMVSAAKLIRTQLASAK

SEQ ID NO: 247670 - protein, 93 aa, Zea mays
  Clone ID: MRT4577_157463C.1.pep
SFNPHDPQPPKAHNYREEQGSHPYLGFPQENLQDMGVEHLLDPLFLFNPYCSSSSRSLLRGGRSRGRRKQWRAAAKGKGEGRPSKGKKGGGDH

SEQ ID NO: 247671 - protein, 66 aa, Zea mays
  Clone ID: MRT4577_157464C.1.pep
LALRPRPHGPCGLNEFWGAQPPTYRISVLPTRPTFKKAPKTKKKPGLWKRLPGTPFPNKQRSLKLN

SEQ ID NO: 247672 - protein, 766 aa, Zea mays
  Clone ID: MRT4577_157465C.1.pep
MASHIVGYPRMGPKRELKFALESFWDGKSTAEDLEKVATDLRASIWKQMADAGIKYIPSNTFSYYDQVLDTTAMLGAVPERYSWTGGEIGFDTYFSMARGNATVPAMEMTKWFDTNYHFIVPELGPNTKFSYASHKAVNEYKEAKALGVDTVPVLVGPVSYLLLSKPAKGVEKGFPLLSLLSSILPVYKEVIAELKAAGASWIQFDEPTLVLDLDSDKLAAFSAAYAELESVLSGLNVLVETYFADVPAESYKTLTSLSSVTAYGFDLVRGTQTLGLVTSAGFPAGKYLFAGVVDGRNIWADDLATSLSTLQSLEAVVGKDKLVVSTSCSLMHTAVDLVNETKLDSEIKSWLAFAAQKVVEVDALAKALAGQKDEAYFAANAAAQASRKSSPRVTNEEVQKAAAALKGSDHRRGTNVSARLDAQQKKLNLPILPTTTIGSFPQTVELRRVRREYKAKKISEEEYVTAIKEEINKVVKLQEELDIDVLVHGEPERNDMVEYFGEQLSGFAFTANGWVQSYGSRCVKPPIIYGDVSRPNPMTVFWSKTAQSMTSRPMKGMLTGPVTILNWSFVRNDQPRFETCYQIALAIKKEVEDLEAGGIQVIQIDEAALREGLPLRKAEHAFYLDWAVHSFRITNCEIQDTTQIHTHMCYSNFNDIIHSIIDMDADVITIENSRSDEKLLSVFREGVKYGAGIGPGVYDIHSPRIPSAEEIADRIDKMLAVLDTNILWVNPDCGLKTRKYTEVKPALTNMVSAAKLIRTQLASAK

SEQ ID NO: 247673 - protein, 79 aa, Zea mays
  Clone ID: MRT4577_157466C.1.pep
GRDIILYYVTAQKKIKKKKKKKKKKKKKKKKKKKKKKKKKKMGFFEVSKEPKGIKVGYVVPNSSGGGVGSPSQVGGCCI

SEQ ID NO: 247674 - protein, 76 aa, Zea mays
  Clone ID: MRT4577_157467C.1.pep
SPDSPSCAAYSGRRTWASRWPGRRQSRGIVPLSCRARGRPASPPRFVCVAAGLAPRAPCVGRYVNAVSALSSEQLT

SEQ ID NO: 247675 - protein, 90 aa, Zea mays
  unsure (1)..(90): unsure at all Xaa locations
  Clone ID: MRT4577_157468C.1.pep
RAGXNSKKKKKKKKKKKKKKKKKSKKKKKKKKKXKKKNKTQYGTLREKKTKARGRHYAFLNPRISCPPHYTEEKGGQFSPLPWEKGFPPR

SEQ ID NO: 247676 - protein, 74 aa, Zea mays
  Clone ID: MRT4577_157469C.1.pep
RVASGLRQPLGRLLRLLFPPLFPFSFSSFMMLACCFSDWYTSSYHVNNYFGVLDLVVWIFDLQSPVFKVFIRDA

SEQ ID NO: 247677 - protein, 57 aa, Zea mays
  Clone ID: MRT4577_15746C.1.pep
GASQAHLMSPARFLLNAPNVMLPMLGIHDSTAHSEHTICHTGQHSTLETHLQRGRCY

SEQ ID NO: 247678 - protein, 35 aa, Zea mays
  Clone ID: MRT4577_157470C.1.pep
RVRGDKKHGGVRDGTSLVLWKWCEGDNQRWKILPW

SEQ ID NO: 247679 - protein, 63 aa, Zea mays
  Clone ID: MRT4577_157471C.1.pep
LSTPSGPTTYLCPPGYATFPICHNLPQAPNRSVSCYVASLRRPSRPHASACVSTGYTDSSPSR

SEQ ID NO: 247680 - protein, 40 aa, Zea mays
  Clone ID: MRT4577_157472C.1.pep
KNQAFFFQHATSKLWGAPKILGGFQTNLNIPTNLYPPHPF

SEQ ID NO: 247681 - protein, 202 aa, Zea mays
  unsure (1)..(202): unsure at all Xaa locations
  Clone ID: MRT4577_157473C.1.pep
PQKPHLLMAYNDDGTIIAAGTNSGRVVFYDIRGKPKPLTILRAYNTSEXLPSATPAGLGSGVATTSLLSLTANTSGYLSASNSSTMEETPYRTRPLTGGPLSKLQAPLSNYNLKDDMDVFSPLVDVQPFTPSSGNWWDEHGSDDAKKDDKPGEKKFSTTRKYPYMEGNDEPHPIADWRSTARQDSISSVTTTSMPSWELTVC

SEQ ID NO: 247682 - protein, 165 aa, Zea mays
  Clone ID: MRT4577_157474C.1.pep
HYSYEAPFSSLAYNDDGTIIAAGTNSGRVVFYDIRGKPKPLTILRAYNTSEAVTGLCWQRSKPVVVNENSSSEVALLGGTNEESVLMPDPLPSATPTGLGSGVATTSLLSLTANTSGYLSASNSSTMEETPYRTRPLTGGPLSKLQASLNNYNLKDDMDVFSSTW

SEQ ID NO: 247683 - protein, 108 aa, Zea mays
  unsure (1)..(108): unsure at all Xaa locations
  Clone ID: MRT4577_157475C.1.pep
MREIIIIHIGQAWIQVGNACWELYCIEYXIDHDGTMPSDCSVGVSHDAFNTFFIETGFGXHVPRAIFFDLEFTVIDXVRTGSFCQMLHSEQLILSNEDTANIFVCVHY

SEQ ID NO: 247684 - protein, 80 aa, Zea mays
  Clone ID: MRT4577_157476C.1.pep
IELMSNKHLIKFDKTLVYNNYMETNHIYYHRPQYLTNSLPNTYIQIGTSKKHGQSVLCLSRIFSCKCTTTPKLNLSSVYA

SEQ ID NO: 247685 - protein, 663 aa, Zea mays
  Clone ID: MRT4577_157477C.1.pep
MAPRRRKQDDPPPEYGADEMKFSVEVHHGGVFYGSGQNRAYIDGKVDWWDHVDAWSWSYFWVEEIVMKLGYGLNPSNLTVYWLLTGKDLSDGLRYLSTDDDTRVMSRVADKVKNFVIYFNHAPTGKDNEDDPIFMDDEDDPFVMDNDSDVQQGDDPDFMDSDNDVQEGDDDLFVDSVDEGVVNPVAVKDKSKKAIGSRMGKGNAIVVSQPQSTDEESDDELELPEDEDGANGVRLKFKSFVPDDLNNPTFRLGMTFPSVEMVRKVVTEYSLKHRVDIKMPRNDRMRISAHCALGCPWTLYCSWDSRVKTFLVKKYVAEHNCRREWDLKRCTAKWLAEKYIESFRADEKMTLGNFSRTVQKEWNFTPTRSKLWRARRLALETIYGDELGQYNKLWDYGNEILRSNPGSTFYLKLLDGHFSHLYMSLDACKRGFLSGCRPVIFLDGCHLKTKFGGILLTAVGVDPNDCIFPISMAVVEVESLATWKWFLETLKKDLNIDNTYPWTIMTDKQKGLIPAVQQVFPDAEHRFCVRHLYQNFQEHFKGENLKNQLWMCARSSTVTQWNENMDAMKVLDPAAHAWLDKMAPNTWVRAFFSTFPTDIQHGPLPDSVFIGDNQPVARPVAPTTASKAGKAALKKRKSAGNTAGATKTTKKSKTKPKSGGKKT

SEQ ID NO: 247686 - protein, 113 aa, Zea mays
  Clone ID: MRT4577_157478C.1.pep
KKGKNFKLGVYKRQLANTKEGGKFFFKKKNKDQKLWGPIFFKNGEKPPPPLFLKRKGGTNPESTQENKFFAAFYIFYTRKKNNGSGFNPALEPLKKFGPPLEPLKSLFFLKKE

SEQ ID NO: 247687 - protein, 84 aa, Zea mays
  Clone ID: MRT4577_157479C.1.pep
CPRSPGPGCLSPIFPLGRVGVEIPLAAVVDRILAHNWRITAVGPKAVVHALPRCWILLASSFSRNIMSPHIYGLINILLHRWVH

SEQ ID NO: 247688 - protein, 102 aa, Zea mays
  Clone ID: MRT4577_15747C.1.pep
AGAVGLYEKNKYGGPRAQIPRDEQQQAASAAQAAAGNLLCSRTSRLRGPMQFPMANISFMSKDKILIFISGGGRALRAAACPSLRASEQRAWRSSCGWSSKS

SEQ ID NO: 247689 - protein, 117 aa, Zea mays
  unsure (1)..(117): unsure at all Xaa locations
  Clone ID: MRT4577_157480C.1.pep
FNRPCTCSQCDNGHKFDNSTTTTPCSFFLXHGVQLRLSCPYTSPRNGQVKGMIRTTTNMICCILFQASLPXSYWVEGLNTDSHLPKCLPSKAVSHPIPFFALFGIAPSYTHTHTHVF

SEQ ID NO: 247690 - protein, 108 aa, Zea mays
  Clone ID: MRT4577_157481C.1.pep
ERGSLQWYRINLTSSSMSSGGRSVLSLTRGAPEFAAAPARRTHHWNSSPSYPSERRRSSPVCVSTGARGRVLGSQRTSAHLMQATWSSVGDVLGCSIEGNGSPRIEPE

SEQ ID NO: 247691 - protein, 91 aa, Zea mays
  Clone ID: MRT4577_157482C.1.pep
CVFFTFRGLSGGIHISFVTSKHTDLQTYIHTKGPQPLGHSTKTQQPEKRGEGQCTGRGLFPKSGGQFTYRGFRKPGPLGGPRTKGPKPRGA

SEQ ID NO: 247692 - protein, 200 aa, Zea mays
  Clone ID: MRT4577_157483C.1.pep
HRFADATPSASTAWLLGARWRQGHGRRCFASAASPAQATPGEASELVDVPLAQTGEGIAECELLRWFVAEGDQVDEFQPLCEVQSDKATIEITSRFKGKVHKIHFVPGDIVKVGETLLKMVVGDSQIVSPDNIVPSAGKDGRVLKEDVLNYAVSKGVCKQQSLASEGNIGQVELLEEGKALLDEDFYEDKKILLRGYQRS

SEQ ID NO: 247693 - protein, 522 aa, Zea mays
  unsure (1)..(522): unsure at all Xaa locations
  Clone ID: MRT4577_157484C.1.pep
MAWARLASRSRLRXGLRXGRSRHASTPAPPPPPSPPTTRTVPAATSAPPLRRLLLLPRHRFADATPSASTAWLLGARWRQGHGRRCFASAASPAQATPGEASELVDVPLAQTGEGIAECELLRWFVAEGDQVDEFQPLCEVQSDKATIEITSRFKGKVHKIHFVPGDIVKVGETLLKMVVGDSQIVSPDNIVPSAGKSLGVESAVFSSEGNVPGGNLSTPAVRHLAKQYGISINEIVGTGKDGRVLKEDVLNYAVSKGVCKQQSLASEGNIGQVELLEEGKALLDEDFYEDKKILLRGYQRSMVKSMSLAAKVPHFHYLEEINCDSLVQLKTTFQNENKDQTIKHTFLPFLIKSLSMALSKYPMLNSSFIEETNEVVFKGPHNIGVAMATTHGLVVPNIKKVQSLSILEITKELARLHEMASQNRLSAADIEGGTITLSNIGAIGGKFGSPLLNLPEVAIIALGRIQKLPRFDDDENVYPSSIINVTVGADHRVVDGATVARFCNEWKSLVEKPELLLLHMR

SEQ ID NO: 247694 - protein, 59 aa, Zea mays
  Clone ID: MRT4577_157485C.1.pep
LHLPVAQAGILLAGYAGVRQALNCHNIMSVATNTEYKGAVGKALVPHDELPRFTIFLIP

SEQ ID NO: 247695 - protein, 89 aa, Zea mays
  unsure (1)..(89): unsure at all Xaa locations
  Clone ID: MRT4577_157486C.1.pep
VINLQKMEEPDRSKSACIYHLLRHGGGASREGVVALGAAGRRLLVHSAGAPRVRLRPPQHGRVADFRGXALPCRRRRRRAGRGRAAAGI

SEQ ID NO: 247696 - protein, 99 aa, Zea mays
  Clone ID: MRT4577_157487C.1.pep
AGRVGIHHHTQESTQVLRRPRALQQTTKGRHQWLTTKRWTTASKEVRSNGPVRLRPPRRRRAAVRRLRKARGETTRAHAPATRPRTTAMIITRDTASVV

SEQ ID NO: 247697 - protein, 82 aa, Zea mays
  Clone ID: MRT4577_157488C.1.pep
TRARCENCGWAFGRGRIQDGFGWRYPRRTIGPFRYFNGECISRKARRNLTDPIGNERRPRSRDLHESVFLAISLLVAVPAQA

SEQ ID NO: 247698 - protein, 50 aa, Zea mays
  Clone ID: MRT4577_157489C.1.pep
SGIPVDHRRQILTDFIQEIFSAQEQAYAATVSKRLFHGPKAVRNRKTTYI

SEQ ID NO: 247699 - protein, 101 aa, Zea mays
  unsure (1)..(101): unsure at all Xaa locations
  Clone ID: MRT4577_15748C.1.pep
XIXQIXKNLTVQVIIKLWYIQSVTGVLXKVPYIVRDTRKHRQSTRALLPCDYFHGLRNHGDLHHVQTYRLAILNISIKPDSFLVQXRCSSSLQXGLLYSST

SEQ ID NO: 247700 - protein, 55 aa, Zea mays
  Clone ID: MRT4577_157490C.1.pep
PTQATPPLPTHLLHTFLITNHNITSMRAYSILQSAPTILSSSDLLSLLLYLHCIT

SEQ ID NO: 247701 - protein, 80 aa, Zea mays
  Clone ID: MRT4577_157491C.1.pep
GVGLFIFLPPGEDPPGYRLPSDRGAPGPPVESIVLGFFSRLFGPNGGFPPNFEPPQDWKKNRVEFKKKVWQWVPGFQEIL

SEQ ID NO: 247702 - protein, 50 aa, Zea mays
  Clone ID: MRT4577_157492C.1.pep
LITKEKVLIIFKGDKNKKNSRITIISIFLFSFFISLFFFLVTDFGLHRCC

SEQ ID NO: 247703 - protein, 86 aa, Zea mays
  unsure (1)..(86): unsure at all Xaa locations
  Clone ID: MRT4577_157493C.1.pep
KGWLQSNSIFLPHQALRGIASPQRQRFLPAQILLPMVEPRAYVXEQLLASSPRALANVVQKQQQQQLPQFPPTHNQLXMVYPSRLV

SEQ ID NO: 247704 - protein, 106 aa, Zea mays
  unsure (1)..(106): unsure at all Xaa locations
  Clone ID: MRT4577_157494C.1.pep
EQNQVPDHTLTRPPSXFFFFFFLILGLVLFGGINNFHPQIFLVIFTPPVYETSSPPLKTGPPIFIIPSPPFFFTKKTPLFFFLPLPLGAKNKKLPARAQFWGGGKL

SEQ ID NO: 247705 - protein, 424 aa, Zea mays
  Clone ID: MRT4577_157495C.1.pep
MSLSSVKIGEEVWLTCLSHALTTETEEVMGLLLGDIELSSKGATALIWGASPQMRCERKKDRVEVNPELLAAASAQADKMTATIKKTTRVIGWYHSHPHITVLPSHVDVRTQAMFQLLDTGFVGLIFSCFSEDAQKVGKIQVTAFQSEGGQQHALPLAIAPVIDLDSSLSSSDNALTSHSALVEGMEQDTGDSRASKHNKAWKRSLDFYSHPDTNHSTNYQPNENTLALYNPDNTQEAPVDPYDSDMTQSLQEALHRSTMDISGAEYRGKEVPLLVVPTRYLLKLDTTMTSYCDMQRVLFEEEQSAYNQAMQQNICDGKIHPLTSIHCTSTYNSSLCKLMEYCLSPAVITLQDRLKENELRLSMLKEEAKQLEADTQNMRNGSPRRLMNHGAGGKSSPTAQSRHPFSNQGSPRSPSGGSRRRAC

SEQ ID NO: 247706 - protein, 60 aa, Zea mays
  Clone ID: MRT4577_157496C.1.pep
AGLRVYVVGRALVPSRLKGCVSWQGWRPPASDIVLDCYTSMLGRIIDCSASHFWGSPRSI

SEQ ID NO: 247707 - protein, 120 aa, Zea mays
  Clone ID: MRT4577_157497C.1.pep
QSAYNQAMQQNICDGKIHPLTSIHCTSTYNSSLCKLMEYCLSPAVITLQDRLKENELRLSMLKEECKQLEADTQGMRNGSPRRLMNHGAGGSGSPMAQSRHPFSSQGSPRSPSGGSRRRA

SEQ ID NO: 247708 - protein, 127 aa, Zea mays
  unsure (1)..(127): unsure at all Xaa locations
  Clone ID: MRT4577_157498C.1.pep
AEYRGKEVPLFVLPTRYLLKLDTTMTSYCDMQRVLFEEEQSAYNQAMQQNICDGKIHPLTSIHCTSTYNSSLCKLMEYXDRLKENELRLSMLKEECKQLEADTQGMRNGSPRRLMNHGAGGSGSPMA

SEQ ID NO: 247709 - protein, 169 aa, Zea mays
  Clone ID: MRT4577_157499C.1.pep
MAASDDHDPKALLQVRVSDEDGALVDALNRRAAVSAAAPSFFEGFALHGIRVESIRPGHILCSFTVPARLTSGSDHIAPGAVVALVDEIGSAASVSDGHHLKVSVDMSVNFVDLDAAAPGDALRITARALGHKGAYSGTHVIVANAATGLVVAEGRHSLFGKMKIRSNI

SEQ ID NO: 247710 - protein, 261 aa, Zea mays
  unsure (1)..(261): unsure at all Xaa locations
  Clone ID: MRT4577_15749C.1.pep
MRSSVSERSLIIESDDDDDDHPQSRSSAAARSRRRHHQHEEDSAAGSDSDSGSSSSSCGTPRGPATDSSYTQQWPQSYRQSIDILSSVQSPNLSFLGTPTLSRLSNSFRGKTPEIISNLVKPLLRPTTSDDHHHHHQQQPEERKSSQYLLPSRKPSLQQIPEDQKPVPVAHEVSPYHKCTYTQAVVNGINVLCGVGILSTPYAIKQGGWLGLVILCLFAILAWYTGVLLRRCLDSKEGLETYPDIGHAXFGATXRIAISII

SEQ ID NO: 247711 - protein, 52 aa, Zea mays
  Clone ID: MRT4577_1574C.1.pep
CMPATLALIPVRYLHPHHQLSRQRHLSCVLQALLERPSAITGSGGSSSYPMS

SEQ ID NO: 247712 - protein, 462 aa, Zea mays
  unsure (1)..(462): unsure at all Xaa locations
  Clone ID: MRT4577_157500C.1.pep
MSLSSVKIGEEVWLTCLSHALTTETEEVMGLLLGDIEXIASPPDPFSSFLSRMLGWMFWFSPLTGSWLWLILLAYXSXSSKGATALIWGASPQMRCERKKDRVEVNPELLAAASAQADKMTATIKKTTRVIGWYHSHPHITVLPSHVDVRTQAMFQLLDTGFVGLIFSCFSEDAQKVGKIQVTAFQSEGGQQHALPLAIAPVIDLDSSLSSSDNALTSHSALXRXEQDTGDSRASKHNKAWKRSLDFYSHPDTNHSTNYQPNENTLALYNPDNTQEAPVDPYDSDMTQSLQEALHRSTMDISGAEYRGKEVPLFVLPTRYLLKLDTTMTSYCDMQRVLFEEEQSAYNQAMQQNICDGKIHPLTSIHCTSTYNSSLCKLMEYCLSPAVITLQDRLKENELRLSMLKEECKQLEADTQGMRNGSPRRLMNHGAGGSGSPMAQSRHPFSSQGSPRSPSGGSRRRA

SEQ ID NO: 247713 - protein, 238 aa, Zea mays
  unsure (1)..(238): unsure at all Xaa locations
  Clone ID: MRT4577_157501C.1.pep
MHLCCVVLQGQSSNWVVVEFRHPNPSNDDWVGVFSPSGFRYSTDYGMFRLCIANTEEDWRPGTEQYKFIDXKQPWLVFLAHRVLGYSSGGWYETMMGSYGEPMGRDGLQDLWQRYDIAVFGHIHGYERTCPVYQXRAGESKXMDHYXAGRFNATTHVTVGCGGGASLSTFRDSVPYWSFFRDADTXFGKLTAINSSFLLFEYKKSRDGHVYDRFXVSHDYRHLVACSVDSCPRSTLAV

SEQ ID NO: 247714 - protein, 114 aa, Zea mays
  Clone ID: MRT4577_157502C.1.pep
LEYEKHKVRTGQLQIPPPGLPQPSGADREVVVNQSSSARVRRDVAARAMQGWHAHRLLANGTYGDNILKDKDSMPSSSRDNLKSFGTLHDFNTIHIMIFLLLMCTILFFLAYLS

SEQ ID NO: 247715 - protein, 185 aa, Zea mays
  unsure (1)..(185): unsure at all Xaa locations
  Clone ID: MRT4577_157503C.1.pep
MATSSTLGQTQRYAAGALLALALRQAQTHQTVLLGSHGLDDEPHPDAATAVEPDARDLWTHESRGLLRPVLRFLEIDPKAWVGVEKTAASSDPKHHIGAFLRKVFEDEDDDEKARSERSDHELALAKAVDAMAMGLEAAGVGSVAEALRPESHGSDDDDGDPALAXASTRTKDYRKIXAXLYMLL

SEQ ID NO: 247716 - protein, 228 aa, Zea mays
  unsure (1)..(228): unsure at all Xaa locations
  Clone ID: MRT4577_157504C.1.pep
LNIFLIVIDLEKIYGFYSHHDTNHSTNYEPRESVLVPHNPDNTQEAYVDPYDSDMTPSLQEALHWSTMDISGAEYRGKEVPLLVVPTRYLPQLDTTMTSYCDMQRVLFEEEKSAYNQAMQQNICDGKIHPLTSIHHTSTYNSSICKLMEYXKAQSPCLISAKLIYCIISVNLCXHILFNSLSPAVTTLQDRLKENELRLSMLQEEAKQLEADTQNMRDGSPRRLMNHG

SEQ ID NO: 247717 - protein, 62 aa, Zea mays
  Clone ID: MRT4577_157505C.1.pep
HNLYSVATIGDGKIHPLTSIHHTSTYNSLCKLMEYCLSPAVTTLQDRLKENELRVNRLACIF

SEQ ID NO: 247718 - protein, 68 aa, Zea mays
  Clone ID: MRT4577_157506C.1.pep
FFATAPPFLRYGKYCGIMYSGCPGEPPCDALDACCMHHDNCVQAKSTSALLQSSSSVPIAPVVNLQFL

SEQ ID NO: 247719 - protein, 118 aa, Zea mays
  unsure (1)..(118): unsure at all Xaa locations
  Clone ID: MRT4577_157507C.1.pep
MHLIFTGGGGTCFFIGVQMGSPSKIPQRNWFPSDFTLRAGTSSCHIQXAWNEQGKGESNXDHFCHYHAERILDGINLYIGANSYHMYKTDVTLLTEMGMDAYTRSISWPKILPKGTKE

SEQ ID NO: 247720 - protein, 162 aa, Zea mays
  Clone ID: MRT4577_157508C.1.pep
MASRAVLLSAMCVLPAMVVAIRPAKNPFCVKGRVYCDPCRAGFETSATTYIAGAEIMLQCKSRVSNEVVYTKKGYTDSTGAYTMYVDEDHADQICSAKLVSSPHPQCKEVTPGRDEAVVILTRYNGIASDDRFANAMGFMSQEVASGCAEILRQYQEFDNEN

SEQ ID NO: 247721 - protein, 66 aa, Zea mays
  Clone ID: MRT4577_157509C.1.pep
PFKGWAVRAFYQLCIPWAVANQVHGSSGSILLAPGIACAPFPFLLSSRDHDRSRAPSSHVNRMGLL

SEQ ID NO: 247722 - protein, 159 aa, Zea mays
  unsure (1)..(159): unsure at all Xaa locations
  Clone ID: MRT4577_15750C.1.pep
MADIQERLKKLGAVSRIGGKGTPRRKVKRAPPRSAADDKKLQASLKKLNVQPITQIEEVNMFKSDGNVIHFAAPKVHASVPSNTFAIYGNGEDKELTELVPGILNQLGPDSLASLRKLAESYQSLQKAXGGQEGXAAPEAEDDDAIPDLVDRTFEDKVE

SEQ ID NO: 247723 - protein, 41 aa, Zea mays
  Clone ID: MRT4577_157510C.1.pep
EIRGSIPINRHAVYLFIGDRAPNLLYNYSNASSLSNGLVIY

SEQ ID NO: 247724 - protein, 59 aa, Zea mays
  Clone ID: MRT4577_157511C.1.pep
SYILWRVVNKLRVFIWVVMNGEIVIEVFRESISLSRFSVVGILKCCRCVGRTSGSIGNS

SEQ ID NO: 247725 - protein, 44 aa, Zea mays
  Clone ID: MRT4577_157512C.1.pep
TAFVPFITADDRDLATTAKARRILDVCGLDVIELGVPDFDPLLE

SEQ ID NO: 247726 - protein, 56 aa, Zea mays
  Clone ID: MRT4577_157513C.1.pep
RYPVRTIGRGCSPSHHAQRRTNTPPARARDFVCGKKKSSSKAGCLSIMYDRTGGST

SEQ ID NO: 247727 - protein, 272 aa, Zea mays
  Clone ID: MRT4577_157514C.1.pep
MDPPPTRDRGEELEPETRAFPDADDPETSRSEREEGIPPPPPPPPLRQQLMGACRADERLRPLLTLNVSCGAADDRLIAHLAQHFEVSEVGMLARCLCVPLVSLRVGKVQREGALLCPTHIRGKLNLVLLPSSSMRLTFVCDDGYPEQLALLSNGFEFSEVMIEEISADNSGRSFLIRISESKVFYYWCAEKSKEHGMELLAKMKNLLDGRPTLSDLTGISNSRLDAFATHLHAYLLASSIGDVTSLGSLNDFLSTSRSHDQYLQLQSDFSK

SEQ ID NO: 247728 - protein, 153 aa, Zea mays
  unsure (1)..(153): unsure at all Xaa locations
  Clone ID: MRT4577_157515C.1.pep
SVLGDIVSXLHHVTLDGTGKAVGDRHPMIGDGVLIGACVTVLVNIRIGXALKYGPCTIVLIDMPPKSTGLLNPARLIGGKKGQEVMPCESMDHILLILEWKVYMIGAPKLEKKRALFCTVGILLIGFLCLCVDVIAVCYCSTEVNRRHAGVVF

SEQ ID NO: 247729 - protein, 115 aa, Zea mays
  Clone ID: MRT4577_157516C.1.pep
MLSHCSSTSLLSDVAFCSSRTTSACSPRRGKPGYMLWVEEWMVVQKRCWIYHLASLPPLLLVLADHIRVVDHWWNQHGLGGDNVEGRCRVSKSRSLAVMKGTKAVYIFSDNIELK

SEQ ID NO: 247730 - protein, 129 aa, Zea mays
  Clone ID: MRT4577_157517C.1.pep
MLSHCSSTSLLSDAAFCSSRTTSACSPRRGKPGYMLWVEEWMVVQRRCWIYHLASLPPFLLVLAGHIRAVDHWWNQHGLGGDNVEGRCRVSKSRSSAVMKGTKAVCSGLSVYAISITIYTSSGPLCFST

SEQ ID NO: 247731 - protein, 59 aa, Zea mays
  Clone ID: MRT4577_157518C.1.pep
QGCPISALKSYLLFPVGQGRTLRLSLDKYPPNLFILSLSMLWNPGIVQLLSLCRPGSIR

SEQ ID NO: 247732 - protein, 47 aa, Zea mays
  Clone ID: MRT4577_157519C.1.pep
LLSHMSNSGFSHLTYIHQVIADGRELYELVGTDINGLVINTCCRHGA

SEQ ID NO: 247733 - protein, 339 aa, Zea mays
  Clone ID: MRT4577_15751C.1.pep
MERYEVIKDIGSGNFGVAKLVRDVRTKELFAVKFIERGMKIDENVQREIMNHRSLRHPNIVKFKEVVLTPTHLAIVMEYAAGGELFERICNAGRFSEDEARFFFQQLISGVSYCHSMQICHRDLKLENTLLDDSIAPRLKICDFGYSKSSVLHSQPKSTVGTPAYIAPEVLARKEYDGKVADVWSCGVTLYVMLVGAYPFEDPDEPKNFRKTLTRIISVQYAVPDFVRVSMECRHLLSRIFVAKPEQRITIPEIKNHPWFLKNLPIEMTDEYQMNLQLVDMNVPSQSLEEIMSIILEARKPGDGLKHAGQLPGLGSMELDDIDVDDIDVEDSGDFVCAL

SEQ ID NO: 247734 - protein, 255 aa, Zea mays
  unsure (1)..(255): unsure at all Xaa locations
  Clone ID: MRT4577_157520C.1.pep
MDPPPTRDRGEELEPETRAFPDADDPETSRSEREEGIPPPPPPPPLRQQLMGACRADERLRPLLTLNVSCGAADDRLIAHLAQHFEVSEVGMLARCLCVPLVSLRVGKVQREGALPCPTXLGNLGVCHNXIXGKRRGKLNLVLLPSSSMRLTFVCDDGYPEQLALLSNGFEFSEVMIEEISADNSGRSFLIRISESKVFYYWCAEKSKEHGMELLAKMKNLLDGRPTLSDLTGISNSRLDAFATHLHAYLLAKYR

SEQ ID NO: 247735 - protein, 220 aa, Zea mays
  Clone ID: MRT4577_157521C.1.pep
MARTGRSVLLLLLIPTVLSPLLLSERRLTVAINPNERKDFPAEIASQGHSVKDRKLNAFPLETLSSLKESVGAVLVEEPPHLANDSIESADQELLPGKRANRVLSETTSGDGAVLKGGDLIDQVTRRTAEDGGLATGSMDKQEKHTGSQQQSSSEGRSLEAITQIPQGYQGAGKNPQKENTDGRSKNMASSDTRVRDIKDHLIKAKVYLGLGAIRANPQY

SEQ ID NO: 247736 - protein, 59 aa, Zea mays
  Clone ID: MRT4577_157522C.1.pep
ASKQQYVNYPFPIKYMLKPWLLGEWSYFGHQMQVSLIFSNALLFVVSITCTLAYLLANL

SEQ ID NO: 247737 - protein, 90 aa, Zea mays
  Clone ID: MRT4577_157523C.1.pep
EVIGSRGYLGGFGNVFSDFNHSPSNAKEYPLALPSRLFCPLSVALASQDSTYAYFKIAGLMYAKNCTYLRSFDSVLCLKKNEQNKKQKNH

SEQ ID NO: 247738 - protein, 657 aa, Zea mays
  unsure (1)..(657): unsure at all Xaa locations
  Clone ID: MRT4577_157524C.1.pep
MDPPPTRDRGEELEPETRAFPDADDPETSRSEREEGIPPPPPPPPLRQQLMGACRADERLRPLLTLNVSCGAADDRLIAHLAQHFEVSEVGMLARCLCVPLVSLRVGKVQREGALLCPTHIRCCWNDEEVILXFSMSLLPGKKGNLGVCHNXIXGKRRGKLNLVLLPSSSMRLTFVCDDGYPEQLALLSNGFEFSEVMIEEISADNSGRSFLIRISESKVFYYWCAEKSKEHGMELLAKMKNLLDGRPTLSDLTGISNSRLDAFATHLHAYLLASSIGDVTSLGSLNDFLSTSRSHDQYLQLQSDFSKTSRFRASAASAIKPSSVYQASLSPRSGTFKDGVPRASCARVVGRDKLKRRVEWLGPLTAPLDTNPLTINPDSASEKCDADCSKNNVSSVPLDLPLSFPLLPSIYSLGTRPVPEVSLEKQFKPYYCWCPPCPSSLQYTVTHLHLPATPVDPLPLPPLSSLLASEQPPSSTVSVKLDTTDLPSLNLPSILHSPLIPLHGPQVPTFTPLMSDPIVHVPVIDVCSAGQAYLVSCGPSITSAVPLLPSLKPLLPEAESLVERSARETLMRLIASTPPASNPLPGSISWANNNVKKHVDVCPNEKASGTSCVAAVFGSGIAHAEDEVPSGGDSQEPFAEYDGTSNECDVHHWQKF

SEQ ID NO: 247739 - protein, 50 aa, Zea mays
  Clone ID: MRT4577_157525C.1.pep
PGVHLGDLFQSLIFGTPLFLLKPPYVLPLPVPMFIATSVLSPKNPSMVEL

SEQ ID NO: 247740 - protein, 125 aa, Zea mays
  unsure (1)..(125): unsure at all Xaa locations
  Clone ID: MRT4577_157526C.1.pep
VGVAVNTDVHDGAEESNKDEESWTGWTKDKICEGLMLKHNADVHKEETERKDGHTAKCARESNQDTSMRXGKKAAYAKETGADATVGAWNKARQAKDQAKDTVKDAAGEAFNKAEYGKQKTKEAT

SEQ ID NO: 247741 - protein, 762 aa, Zea mays
  unsure (1)..(762): unsure at all Xaa locations
  Clone ID: MRT4577_157527C.1.pep
MSEFLDLELQDGIRMPWNVIPGTKQETVNCVIPVSAIYTPLKPISDIPVLPYSPLRCRMCRSILNPFSIVDYVAKIWVCSFCFQRNQFPQHYSSISENNLPAELFPQYTTVEYISSTETGPIVPPVFIFVVDTCMIEEEIGYLKSALAQAVELLPDNSLVGFIRLGSYVKLHVLGRSXNPSVTYNSDNPSPTRRRLIHRWCFFAGKKMPTTGVIAGTRDGLSSESISRFLLPASECEFVLNSVIEEIQKDPWPVPADQRASRCTGAALSVAANLLGVCVPGSGARIMAFVGGPSTEGPGPIVSKSLSEPIRSHKDLDKDSAPLYDKAVKFYDQIAKQLVHQGHVLDLFACAVDQVGVAEMKVAIEKTGGIVVLAESFGHSVFKDSLLRIFQSTDDNLGLSFNGILEINCSKDVKVQGIIGPCSSLEKKSPLSSDTVIGQGNTSAWKMCGLDRKTSLCLVYDIAKKDGPDSIAQSANNQFYFQFLTYYQHNEGQMRLRSTTISRRWVSGDNHVEELVAGFDQEAAAAVMARLVSFKMETEVDFDPVRWLDRALIRLCSKFGDYQKETPSSFSLSPRLSIFPQFIFNLRRSQFVQVFNNSPDETAYFRMMLDRENVTNTVVMIQPSLISYSFQSGPEPVLLDATAIASDKILLLDSYFTVVIFHGVTIAQWRNAGYQDQEGHEVFAQLLKAPHEEANLIIKERFPVPRLVVCDQYGSQARFLLAKLNPSVTYNSDNPSPGGDVIFTDDVSFQVFMDHLQRLAVQ

SEQ ID NO: 247742 - protein, 43 aa, Zea mays
  Clone ID: MRT4577_157528C.1.pep
VVGVHFGTWARVHALKLIWFSTLLRCASVLPRGCTLRVFLGWT

SEQ ID NO: 247743 - protein, 80 aa, Zea mays
  Clone ID: MRT4577_157529C.1.pep
GWARMARLPLLVSTRRYRLQVNSVEVIGFSSLTSGGVGHVTTFIAPFVLFNPSVFVPGFVTLAVAGPLYTSISLRVGRFC

SEQ ID NO: 247744 - protein, 102 aa, Zea mays
  unsure (1)..(102): unsure at all Xaa locations
  Clone ID: MRT4577_15752C.1.pep
NPCHYLCFLLANRSLLTYVWLSGTCLILMHAKPPHSIITNYXHDVAIAIKKVFPNARHRSXLSHILNALPKKLEEIDNKDEIIYTFTTLAYDYITMTDFDRK

SEQ ID NO: 247745 - protein, 612 aa, Zea mays
  Clone ID: MRT4577_157530C.1.pep
MIAVTVMIAALMRDQQGSPRSFQRLPQPVQRSPPVLSKKPDTAVSNGSKQVKPDSSSSDSSSDEDEKPAASLKKPVVASVQKKTQESDSSDSDSDEDESEDDIPAKAQVVAKKKEESSSSSDSDSDSESEDEKPAANLKKPPVPSVQKKTQESDSSDSDSDEDESDDIPAKAQVVAKKKEESGSSSDSDSESESDDEDSNAKTVQPAKPAAIKKKEDSSESSETDSQSDSEDSEPEKPTVPAKRPLATNKKNEQSSEKSDDSSDESSDESDEEPPQKKTKNSAPSGAAKAATNVSKKKSSSDEDDESSEESSDDEDTEQVETKETSVVTTQKPAHNEPKTPAKSQSQATGSKTIFVGNLAYSIEREQVKEFFEEAGEVVDVRLATFDDGSFKGFGHVEFATVEAAQKALEFVGHDLMGRPLRIDMATERGAYTPSSGKDNGSFKKFAPRSGNTVFIKGFDTSGGEDQIRTALEEHFGSCGDITRISIPKDYDTGVSKGMAYMDFKDPDSLNKAYELNGTDLGGYSLYVDEAKPRPDNSGGFSGDRGGGRGRSGGFSGGRGGRSDRGRGGSRGRGFGGRGGRGDRGRGGRGTPFRQTAGTASTGKKTTFGDDD

SEQ ID NO: 247746 - protein, 49 aa, Zea mays
  Clone ID: MRT4577_157531C.1.pep
ISKTIQSFGDDPNKFVVGITPLEPAPLPSLGKAKVKHELPKDGNVTRAP

SEQ ID NO: 247747 - protein, 291 aa, Zea mays
  Clone ID: MRT4577_157532C.1.pep
MMFKSVLTTIFKFSILRATLSEPPQNIISSVKKLDALLYMYGNIDEMTPYFKAIDARGREMNYYGFIKDIVQYYLIGSKNLKVVFFKCDRVIGSRRKLKKFTKKMSLKRRGDRWERMCKRTMRWMARWMAEWPMDACGWSSDGVSRGGGSRAGRSRDEGSGGGGSRVGGSGDVGFGCGRAGGSTRVRKPWRTSWVPPPKDPDEKFEIIPIGDGLVNEDGQEVLVAMWDQYALAVNGQHGNAHGVVVQLLGRRPESKSEASRYGLQMSEEQFLQMLKLLLNELSLHNIRFRG

SEQ ID NO: 247748 - protein, 54 aa, Zea mays
  Clone ID: MRT4577_157533C.1.pep
ILQADPYSDIWEMPCISTASADDLPNRVLSFDYISAHTFPMLVIIYIFCGICFP

SEQ ID NO: 247749 - protein, 58 aa, Zea mays
  Clone ID: MRT4577_157534C.1.pep
DHRRPFPHEEEDRRERYGDHRALFDHICPHSLIDSNSWAVSFINLDVIACNQVTNFSL

SEQ ID NO: 247750 - protein, 78 aa, Zea mays
  unsure (1)..(78): unsure at all Xaa locations
  Clone ID: MRT4577_157535C.1.pep
IVQLAHLIGMTHGQSLDVSNAVFQVIKYLPXCPVQQIVPYLIRRATXNSGLLSASSLDRQLLREKLVSRFKGAVFERE

SEQ ID NO: 247751 - protein, 95 aa, Zea mays
  Clone ID: MRT4577_157536C.1.pep
GPPAHGSGARLGTGCCLYSLVRRPPWGPPASHAARGAPLGFFFLGRGPSMCPGLVFLPLSLVPVCSLEAIGTKSAYRCLVINPLKNKKSPGWDCR

SEQ ID NO: 247752 - protein, 52 aa, Zea mays
  Clone ID: MRT4577_157537C.1.pep
MSQRKFEQPRHGSLGFLPRKRSSRYCGKVKSFPRDDPKKPCHLTDFLGYNAG

SEQ ID NO: 247753 - protein, 129 aa, Zea mays
  unsure (1)..(129): unsure at all Xaa locations
  Clone ID: MRT4577_157538C.1.pep
KPPNKKPNGKNPQKRTKRKGKKPKEREQRPPQKXNSHPAGKPPQPPRKKGPQKGGPKTKQXGQPGGKAKRAGPXAKKPTGKKGKGPKANXGEPQGFPKQKGVKPRPXNVKPPPKRPNGPPKRKAKRPPG

SEQ ID NO: 247754 - protein, 55 aa, Zea mays
  Clone ID: MRT4577_157539C.1.pep
MEAKQAAAAVDRLSSLPAELQDEILVRLDLRDAVRTSALSRTWRDLWKSLSVLSL

SEQ ID NO: 247755 - protein, 211 aa, Zea mays
  unsure (1)..(211): unsure at all Xaa locations
  Clone ID: MRT4577_15753C.1.pep
MERYEVIKDIGSGNFGVAKLVRDVRTKELFAVKFIERGMKIDENVQREIMNHRSLRHPNIVKFKEXMEYAAGGELFERICNAGRFSEDEARFFFQQLISGVSYCHSMQICHRDLKLENTLLDDSIAPRLKIXXDFGYSKSSVLHSQPKSTVGTPAYIAPEVLARKEYDGKVPDVWSCGVTLYVMLVGAYPFEDPDEPKIXADATRISASIR

SEQ ID NO: 247756 - protein, 63 aa, Zea mays
  Clone ID: MRT4577_157540C.1.pep
SPISNVDFSSALTECRVLNLSNEVLWVSPIVMYCLKYRSTSRGHHPTLVICSGGRTPTRPSIK

SEQ ID NO: 247757 - protein, 46 aa, Zea mays
  Clone ID: MRT4577_157541C.1.pep
IPPFYKKKNIFPFLGLKKKKKKKKKKKKKKKKKKKKKKKKKKNSRR

SEQ ID NO: 247758 - protein, 178 aa, Zea mays
  unsure (1)..(178): unsure at all Xaa locations
  Clone ID: MRT4577_157542C.1.pep
RSXQRPXIVPALWXFXKRCHANXXGHFFXEFASSLPADAPGWLLPCXVFCPIYKHMXXIIDTGEFYEQEKPLSLKDLKSLVLILKQALWQLLWVIPSSSTQKVSPNPSGLKKLSVENVKTRARVGLSELLTQLQDWNSRLPFTAASDFYSQEATSENFVSQVWMPMLFWINRNVFHLL

SEQ ID NO: 247759 - protein, 767 aa, Zea mays
  unsure (1)..(767): unsure at all Xaa locations
  Clone ID: MRT4577_157543C.1.pep
GGRRCSSRVTRRRGGGSTSAAGAARSGTARCCSSRRARSGVGARASDYRTPPPRRSRGKKALELARSEVRKNFCSTFGEHCERIEWNNFGTNSDFLRQLLFFFNANEDNDIAILCQICNLLLQYVKQGGDVVTLFTGVNGSSLQPLVAHRVKKITLICVQAVYQKRHDWGSQLLTTLHISAFCLITGNCRLLDIPRIMTVLAYRTEIVPALWKFIKRCHASRWPFFLKFASSLPADSPGWLLPMSVFCPIYKHMLKIIDTGEFYEQEKPLSLKDLKSLVLILKQALWQLLWVIPSSSTQKVSPNPSGLKKLSVENVKTRARVGLSELLTQLQDWNSRLPFTAASDFYSQEATSENFGPQAILGNTRASEIXKLAPFLAPFTXRVKIFTSQLTCSRQSTSHSALTRQRFKIRRSRLLEDAFDQLSLLSEEDLKGPIRVSFINEHGEEEVGIDGGGIFKDFMENITRAAFDVQYGLFKETADHLLYPNPGSGLVHELHLQYFHLXSLLGKAMYEGILVDCFNSAPVLSKVKQKYNFLNXLPSLDPELYRHLLFLKHYNGDISELELYFVIVNNEYGEQCEEELLPGGRDMRVTNDNVITFIHLVANHRLNYQIRAQSTHFLRGFQQLIPKDWIDMFNEHEIQVLISGSLESLDIDDLRSNTNYSAGYHPDHELVEMFWEVLKSLSSDNQKKFLKFVTGCSRGPLLGFQYLEPKFCIQRAGVPGLEEHADRLPTSATCMNLLKLPPYKSKEQMQTKLLYAINSEAGFDLS

SEQ ID NO: 247760 - protein, 78 aa, Zea mays
  unsure (1)..(78): unsure at all Xaa locations
  Clone ID: MRT4577_157544C.1.pep
SLNSSAYXQQQQXALFKQLAGLSPAAFLTQPQMLSFYQHAAPNASSLLHLKQXLPFIQQALTNPAKFNLHPIIDCAQF

SEQ ID NO: 247761 - protein, 139 aa, Zea mays
  Clone ID: MRT4577_157545C.1.pep
MASGGPKPKLAYIILYVRDVEKAASFYDAAFGYTVRRLDQSRKWAELESGATTIAFTPLHQRETDELSGAVQLPDSSAAGRGSVEVCFAYADVDAAYKRAVDNGAVAVSAPEDKPWGQKSGFVRDMDGNIVRIASYVRE

SEQ ID NO: 247762 - protein, 1054 aa, Zea mays
  unsure (1)..(1054): unsure at all Xaa locations
  Clone ID: MRT4577_157546C.1.pep
MFFSGDPSARRRVDLGGRSSKERDRKVLLEQTREERRRRQGLRLQNTSATKIQKFFRGKKALELARSEVRKNFCSTFGEHCERIEWNIFGTNSDFLRQLLFFFNANEDNDIAILCHVCNLLLQYVKQGGDVVTLFTGVNGSSLQPLVAHRVKKFALHCMQEVYQTRHDCGSQPLTLPGTTTVPSKSKMETVGWLINPDYFLKGNVIIAVHXAKDFVLIXRNRQTLFNQSXQFLYMLHFILRFYMYLIMVRXHVNHHPCSCLKVDQRWSFSSQLLSIXLFDSIXPQLKKVFSXNGLNKYYIHQIACLLPSLVDVLPNDISANHPGYACVLANVLEAATWILSDAKLASDSAADIIAVCTSSLYAFTAVTTPTVWTNFDHEMAMDXKXNETWVLLSSSLESFNSFDLRSKFXILQDRIPIMSMLRCXLGGHEELKLRQPEKFAXNFVXVAFLVSPFLGFIIALRYCALRELALWKFRKLWHASRRWPFSXNLCIFIXPTDSPSWRLPMSVSCPIYKHMLKIIDTGEFYEQEKPLSLKDLKSLVLILKQALWQLLWVIPSSSTQKVSPNPSGLKKLSVENVKTRARVGLSELLTQLQDWNSRLPFTAASDFYSQEATSENFVSXYGCLCFFGLIEMSFIFYDYAYVFQAILGNTRASEIIKLAPFLAPFTSRVKIFTSQLTCSRQSTSHSALTRQRFKIRRSRLLEDAFDQLSLLSEEDLKGPIRVSFINEHGEEEAGIDGGGIFKDFMENITRAAFDVQYGLFKETADHLLYPNPGSGLVHELHLQYFHFLGSLLGKAMYEGILVDLPFATFFLSKLKQKYNFLNDLPSLDPELYRHLLFLKHYNGDISELELYFVIVNNEYGEQCEEELLPGGRHMRVTNDNVITFIHLVANHRLNYQIRAQSTHFLRGFQQLIPKDWIDMFNEHEIQVLISGSLESLDIDDLRSNTNYSAGYHPDHELIEMFWEVLKSLSSXNQKKFLKFVTGCSRGPLLGFQYLEPKFCIQRAGVPGLEEHADRLPTSATCMNLLKLPPYKSKEQMQTKLLYAINSEAGFDLS

SEQ ID NO: 247763 - protein, 168 aa, Zea mays
  unsure (1)..(168): unsure at all Xaa locations
  Clone ID: MRT4577_157547C.1.pep
MASGGPKPKLAYIILYVRDVEKAASFYDAAFGYTVRRLDQSRXKHARVRPPPDPDARLICRICAPFWVLLCRWAELESGATTIAFTPLHQRETDELSGAVQLPDSSAAGRGSVEVCFAYADVDAAYRRAVDNGAVAVSAPEDKPWGQKSGYVRDMDGNIVRIASYVRE

SEQ ID NO: 247764 - protein, 64 aa, Zea mays
  Clone ID: MRT4577_157548C.1.pep
HAYAHAHPSCFTTRGLKTDQSPLASASTMASLIYYLLTNQTPTLRRVQIHAPIQRHEPLQYHAK

SEQ ID NO: 247765 - protein, 45 aa, Zea mays
  Clone ID: MRT4577_157549C.1.pep
TVLPNTLFSYSLYWKRWKHLILFIGTQLITQYKLHIIPSLLVQYY

SEQ ID NO: 247766 - protein, 281 aa, Zea mays
  Clone ID: MRT4577_15754C.1.pep
KRGLVFQVVLTPTHLAIVMEYAAGGELFERICNAGRFSEDEARFFFQQLISGVSYCHSMQICHRDLKLENTLLDDSIAPRLKICDFGYSKSSVLHSQPKSTVGTPAYIAPEVLARKEYDGKVADVWSCGVTLYVMLVGAYPFEDPDEPKNFRKTLTRIISVQYAVPDFVRVSMECRHLLSRIFVAKPEQRITIPEIKNHPWFLKNLPIEMTDEYQMNLQLVDMNVPSQSLEEIMSIILEARKPGDGLKHAGQLPGLGSMELDDIDVDDIDVEDSGDFVCAL

SEQ ID NO: 247767 - protein, 78 aa, Zea mays
  Clone ID: MRT4577_157550C.1.pep
FRFPPSRRRFFLRPLLRLRGRPRLGRPPQILPREYVPALLAPSSRLKSPGQPKASRGGREKKHIFLVFCFWCFRLVIC

SEQ ID NO: 247768 - protein, 54 aa, Zea mays
  Clone ID: MRT4577_157551C.1.pep
HLNPSFNLISEFNWYKLKLVGLNHASNGPFLHKWVGCADWHLLPCISISIFCQI

SEQ ID NO: 247769 - protein, 78 aa, Zea mays
  Clone ID: MRT4577_157552C.1.pep
GEKILVALFFHLASREITGLLEENPGKNVFNTPPLHFWKTSPFEKGGGKGPSLKDGFPTIPLYGSFWGVKKVYNLENF

SEQ ID NO: 247770 - protein, 157 aa, Zea mays
  unsure (1)..(157): unsure at all Xaa locations
  Clone ID: MRT4577_157553C.1.pep
QDKRTKELIAAYRNRQNMVIDAKTKAECIKALREGDEMMNTGXXXXXXXXXXXXXXXXXXXXXXXXXXXXXWSICLDSLCRSKEAMSMYSKLXXHPNSEISKKANMFVFSFQAMDFMKVSSIPVPKSTGYETYFTKFGSKKNYYASLEEPEKSWTSC

SEQ ID NO: 247771 - protein, 458 aa, Zea mays
  Clone ID: MRT4577_157554C.1.pep
PRPSTCHRRNSPRSLHLPRPRHHLRPTGTISRTPSSSLSPALPHTRRGGTVTARARPPAPPPTPPPQSPPPSQPQASVSEPGSKEAFKRALEYRNGNGAGAGAAGGDSPLLGGSPDFGQNALISEEVSFGKRGGYEFDEADFLGLDFFEKKRSKGLPPGLAPAFEPLRDDDFPEVDIIVGDPSKFDKSPRRTEIQPVDNGESGEASQSTTKPNEADKAGIAPPSTVIETEEDEDVYRPTVRSWGMFPRPQNISKAYGGGRNIRLGGETQSAEEKAAKDKRTKELIAAYRNRQNMVIDAKTKAECIKALREGDEMMNTGRLKQALPYYEKVMDAVDFKTEFHGRAALQWSICLDSLCRSKEAMSMYSKLKNHPNSEISKKANMFVFSFQAMDFMKVSSIPVPKSTGYETYFTKFGSKKNYYASLEEPEVGIEQIVPYIIFLVSPIFLVAFVALRKSFQL

SEQ ID NO: 247772 - protein, 231 aa, Zea mays
  Clone ID: MRT4577_157555C.1.pep
RVAPESLLRGVGRHRVTLLFSFLPFLKLVLVGDGGTGKTFVKRHLTGEFEKKYIATLGVEVHPLGFSTNLGQIQFDVWDTAGQEKFGGLRDGYYINGQCGIIMFDVTSRITYKNVPNWHRDLVRVCENIPIVLTGNKDDVKERKVKAKTITFHRKKNLQYYDISAKSNYNFEKPFLWLARKLVGNQTLEFVAAPALAPPEVQVDQAAMESYQKEMEAAAQMPLPDEDDADL

SEQ ID NO: 247773 - protein, 72 aa, Zea mays
  Clone ID: MRT4577_157556C.1.pep
SVSRPAVGWLLLHIQSLRGIGCFSSSIVLARARVQQCLAAASHSQAPLLQANGGRAGLLSSFLILNAVNAIS

SEQ ID NO: 247774 - protein, 107 aa, Zea mays
  unsure (1)..(107): unsure at all Xaa locations
  Clone ID: MRT4577_157557C.1.pep
TVLIESVISQIKELNPEFELVEEDTAESSGLEARNPSNIICNVGGSXYVDVKAAQREQRYLRSLGTSVCGCGWXXWXVRSRLLFLWRCYLALXRPQPLHPTQVQLLG

SEQ ID NO: 247775 - protein, 74 aa, Zea mays
  Clone ID: MRT4577_157558C.1.pep
WVPLRPTVSPEGGPPFEPSQKVWGKPAWYGTWLRPPPTKKGRKGSCRPGPNANSWSLGEWSLRVLKSGYFSARS

SEQ ID NO: 247776 - protein, 126 aa, Zea mays
  unsure (1)..(126): unsure at all Xaa locations
  Clone ID: MRT4577_157559C.1.pep
RTRGHVLRRAVCWSRCPHAPGVAPPPLPPTAARVRPPPPXPPKGNAXRYNPTLHHPCRPPPPXSPSPPGPPPPWPLLPLLPPPAPXPPRXPPPCXRPTRPSRSRGPTPXPXRRRPGAPXPPPTGPS

SEQ ID NO: 247777 - protein, 116 aa, Zea mays
  Clone ID: MRT4577_15755C.1.pep
DASDIARAFEVLNNNEQLLSGGDGNSSDQPSPLALVATPSPALWASFGRTPAHARQLRITDSPFPLGDDDGDCGQVDLDAEDFIKKFYDQLRTQQALATATPDYCGGYARPVSGIA

SEQ ID NO: 247778 - protein, 52 aa, Zea mays
  Clone ID: MRT4577_157560C.1.pep
SLFFFSPNLRWGGINSNALWTPSEKNNGPTVHVLTKLNLHGLIRFTHYYEWY

SEQ ID NO: 247779 - protein, 126 aa, Zea mays
  unsure (1)..(126): unsure at all Xaa locations
  Clone ID: MRT4577_157561C.1.pep
NPGPTHACELRYSPALGFIKIGINGXGRSRRLVARVALQSEDVELVAVNDPFITTDYMTYMFKSDTVHGPWKHSASPLKASKTLVFGDKPCTGFGXIRNPEEIPWSEAGAAYAGEPTGVSTDKDKA

SEQ ID NO: 247780 - protein, 72 aa, Zea mays
  Clone ID: MRT4577_157562C.1.pep
IRGGPAAERTLLHPLRRGLIRHYSSSYSIDSKSLTLARTSRLHARALYAPRARPASAGTPLGKKPTHMRPVH

SEQ ID NO: 247781 - protein, 221 aa, Zea mays
  unsure (1)..(221): unsure at all Xaa locations
  Clone ID: MRT4577_157563C.1.pep
MSSKPITGTPGVASAAPKLEKKPVKFSNLLLGAGLNMFEVTTLGQPLEVVKTTMAANRSEGFSGAIRRIWARGGVLGFYQGLIPWAWIEASTKGAVLLFVASEAEYYAKSFGAPDFVAGISGGMTGGLAQAYATMGFCTCMKTVEITKHKVAATGAKPPGTLETFMQIWRTEGIRGINRGVNAVAVRQVTNWGSRFGLSRVAETGIRRVPXQEHGEKLSVL

SEQ ID NO: 247782 - protein, 91 aa, Zea mays
  Clone ID: MRT4577_157564C.1.pep
SCPPGPGWGWAPSVAWGSGAPATIPSTAQEATGGCEGPQPLPPKRTDAVGPFSRGRDRHGRGPLEASAYFWLPLAVALFATAFSFSFTWSF

SEQ ID NO: 247783 - protein, 59 aa, Zea mays
  Clone ID: MRT4577_157565C.1.pep
FGGLQGTFTLTINSSVTILAYIFWGPKGISTKLRHVDIATPTYTLHISEGARSQDLVWF

SEQ ID NO: 247784 - protein, 63 aa, Zea mays
  Clone ID: MRT4577_157566C.1.pep
VRPIIKFGNRPVFFHQDFKLRQGSPSFFFPRPGHGLIPQGMVVPIGPSCLQGPNPPSWCLTPR

SEQ ID NO: 247785 - protein, 116 aa, Zea mays
  unsure (1)..(116): unsure at all Xaa locations
  Clone ID: MRT4577_157567C.1.pep
TVEVESCFNIYNFKVXIQVMVVIFPDQPQLIFDSQQNRDGRTVCWYKQLTGSSLHLTLPLRHGIQLAGERHTGKNITLEADYAEHRYHGAGQHEVHAAMPKDQQEFIFGDHQPPVG

SEQ ID NO: 247786 - protein, 88 aa, Zea mays
  Clone ID: MRT4577_157568C.1.pep
HAWRKELLSDLGALVTEGRAVTGCACREERSGCCSSCPSLRMRGEGDGIEEGEVVVVGVGDATVAAATGEKLSHRGVRRRGEGGERWF

SEQ ID NO: 247787 - protein, 42 aa, Zea mays
  Clone ID: MRT4577_157569C.1.pep
GEPASSQKIPFLGGEKKKKKKKKKKKKKKKKKKKKKKKKKKK

SEQ ID NO: 247788 - protein, 184 aa, Zea mays
  unsure (1)..(184): unsure at all Xaa locations
  Clone ID: MRT4577_15756C.1.pep
WGVSLKNNMHACGTITLHIAAKLSPSCEETASVCNMHASRLQGGSTPCMSFPRPCRPLLHRHFYCRKLLHLVLAHAHAGAMTCISSLTTTYSTNQVAIATINSRSTARTSVADARRAPAALPPPPPSSCFPPRPPVSWGGRTGSRAAGGRRGGRRRCPSCRTRLGRPARPTSGRRHLRAPAPXP

SEQ ID NO: 247789 - protein, 39 aa, Zea mays
  Clone ID: MRT4577_157570C.1.pep
HSCISRCFVPYLGMLLASYIFMGCKMKHKLSLYLINSFA

SEQ ID NO: 247790 - protein, 228 aa, Zea mays
  Clone ID: MRT4577_157571C.1.pep
MVTQALISKSSKYQFGKFTLGKFLSLLMVSGLIYLLAHRSSKGFVSGELHNKEVESRHASKDSPTIRTFWRKPPRLPPRLPPNEIYKNSSILHHPPSSEWTSRQKKVKEAFEHAWSGYRNYAMGHDELMPLSRRGVDGLGGLGATVVDSLDTAIIMGADDIVSEASKWIEDNLMKKISEKGQVNLFETTIRVLGGLLSAYHLSGGDQAGGGDSGIAVAPNKTNPDRLL

SEQ ID NO: 247791 - protein, 74 aa, Zea mays
  Clone ID: MRT4577_157572C.1.pep
STPHREERRGSDGERQGGVCLPNRRRYKRGGAPMKNDEGCPSPTIIAIDFESAARERDNMPPLFSSRRLVAADD

SEQ ID NO: 247792 - protein, 74 aa, Zea mays
  Clone ID: MRT4577_157573C.1.pep
ILGRSNSLEAISDSKKDEHCYYEKKKKSRPKNRGSLTRSFRFYHELDNILAGLLTSQLTRSLFMLDDLISNELY

SEQ ID NO: 247793 - protein, 114 aa, Zea mays
  Clone ID: MRT4577_157574C.1.pep
KFRGVRRRPWGKFAAEIRDPWRGVRVWLGTFDTAEEAARVYDTAAIQLRGANATTNFSAAANSGSRAGQRDPATPGYESGTESSPAASSPTSVLRKVPSLSSLAEDDSCAAPCE

SEQ ID NO: 247794 - protein, 134 aa, Zea mays
  Clone ID: MRT4577_157575C.1.pep
VPQLAWCANGHTFHTDMRVLDLGPYDAILGYDWLESHSPMECDWANKVLVFHDDDNIHSAARRLSISLARDLPFHAPSAPSSTRADQRQILRVSLGLCSCCRLPTLDLRSCCDRPTNTPRMLQAHPTALQSNHP

SEQ ID NO: 247795 - protein, 71 aa, Zea mays
  Clone ID: MRT4577_157576C.1.pep
MIIPVRCFTCGKVIGNKWDVYLDLLQADYSEGDALDALELFRYCCRRMLMTHVDLIEKLLNYNTLEKTETS

SEQ ID NO: 247796 - protein, 63 aa, Zea mays
  Clone ID: MRT4577_157577C.1.pep
FSAITPRLSCSQLRCCVDLRILWASPTVVPIRVRRYLFTHYTPKILLNLVFEDLRKPKAPNTY

SEQ ID NO: 247797 - protein, 109 aa, Zea mays
  Clone ID: MRT4577_157578C.1.pep
ASEYLYEILTNANVVKKKIPVLLCCNKTDKLTAHTKEFIRKQMEKEIEKLRASRSAVSTADIANDFTIGIEGEVFSFTHCSNKVTVAEASGLTGETIQIEDFIREYIKP

SEQ ID NO: 247798 - protein, 71 aa, Zea mays; identical to SEQ ID NO: 246926
  Clone ID: MRT4577_157579C.1.pep

SEQ ID NO: 247799 - protein, 144 aa, Zea mays
  Clone ID: MRT4577_15757C.1.pep
SGKATSPALEAAGGGAWTKQAGTGPAESTPTIATFLPMISSRDDCMDGWGARPAAPVTARRILFLDRKPAKDALRITGSIGRHRASDVSGHGRDNKTTWDLLPTVWILPFFMAHASAAAARLPEAGTEASAQSHTDTSPYAGKQ

SEQ ID NO: 247800 - protein, 71 aa, Zea mays; identical to SEQ ID NO: 246926
  Clone ID: MRT4577_157580C.1.pep

SEQ ID NO: 247801 - protein, 71 aa, Zea mays; identical to SEQ ID NO: 247795
  Clone ID: MRT4577_157581C.1.pep

SEQ ID NO: 247802 - protein, 69 aa, Zea mays
  Clone ID: MRT4577_157582C.1.pep
SLGHTPMSTMTVASSLTRRRHTYQQARGQAPADGLPLDLSDCLRPRGRTERVASEKSTMRTKHCAGIPT

SEQ ID NO: 247803 - protein, 93 aa, Zea mays
  Clone ID: MRT4577_157583C.1.pep
PAAGLSDAIRVVPHFPKQGIMFNDITTLLLRPRVFKDAVDLFVERYRGMGIDAVAERAGADVVECACVIGLPKFKDLYKLNGKPVYVLVESRE

SEQ ID NO: 247804 - protein, 30 aa, Zea mays
  Clone ID: MRT4577_157584C.1.pep
SCPVHPNGRHSAAECREIIDLAKRVSERRE

SEQ ID NO: 247805 - protein, 200 aa, Zea mays
  unsure (1)..(200): unsure at all Xaa locations
  Clone ID: MRT4577_157585C.1.pep
MGEEASCDAVSLTEAGTNAKPVGKEVGREPAAAPAAAADPRLQGISDAIRVVPHFPKQGIMFNDITTLLLRPRVFKDAVDLFVERYRGMGIDAVAGIEARGFVFGPAIALAIGAKFIPLRXPRKLPGEVISEKYVLEYGTDCLEMRVGAIERSGERVLVIDDLVATGGTLCAAIRLLERAGADVVECACVIGLPKFKVSE

SEQ ID NO: 247806 - protein, 107 aa, Zea mays
  Clone ID: MRT4577_157586C.1.pep
LGIRLEGSRKHFLLLLLEGEVISEKYVLEYGTDCLEMRVGAIERSGERVLVIDDLVATGGTLCAAIRLLERAGADVVECACVIGLPKFKDLYKLNGKPVYVLVESRE

SEQ ID NO: 247807 - protein, 115 aa, Zea mays
  unsure (1)..(115): unsure at all Xaa locations
  Clone ID: MRT4577_157587C.1.pep
LPGCPCPPLLPPLCSRVRPSSVLCFRPRLAVGSVGLPLGRSACXACVVXVPPPPPXPGXVLLPLGLGLAPCFCSFLRPXLXXSRCXGRGGAVLPAXXLFXGLPLPCLWXXAGAFL

SEQ ID NO: 247808 - protein, 60 aa, Zea mays
  unsure (1)..(60): unsure at all Xaa locations
  Clone ID: MRT4577_157588C.1.pep
QNRSDNNASSNSESARASKCPPSRXRCCLTGTTASNNDLASLIECTVCFDYVLPPILQCQ

SEQ ID NO: 247809 - protein, 88 aa, Zea mays
  Clone ID: MRT4577_157589C.1.pep
KKKKKKKKKKKKKKKKKKKKKKKKKKKKKKKKKKKKKKKKKKFKKNFRNLKKKKKKKKVFSFPGRPPLKGRYFLNFTKPHWGPFEHFF

SEQ ID NO: 247810 - protein, 49 aa, Zea mays
  Clone ID: MRT4577_15758C.1.pep
ESESLITKKKKKKKKKKKKKKKKKKKREKKKKKKKKVPARAGTAIGIFV

SEQ ID NO: 247811 - protein, 81 aa, Zea mays
  Clone ID: MRT4577_157590C.1.pep
ERTGTGATQDYNGLQPRQAWGTVRTDTGPHHHYHPTHTLFSPRDYEPAPDTFTRQELLATYRATYDTHTHTHRETPVTVAC

SEQ ID NO: 247812 - protein, 95 aa, Zea mays
  Clone ID: MRT4577_157591C.1.pep
SARVTGLFFGPPRSRGSAGWLISWTAACSGALWVINWRTITTVVCFRFNLNPTFRRAMVMDPSIRCCLECTCTMRVYMGCYFIACVGGISLKGRG

SEQ ID NO: 247813 - protein, 51 aa, Zea mays
  Clone ID: MRT4577_157592C.1.pep
NLFLCYHKQWVFLKILRDPVFFEIKFNPVLSLVRAPQIIKMTTPEKKKPLP

SEQ ID NO: 247814 - protein, 87 aa, Zea mays
  Clone ID: MRT4577_157593C.1.pep
PHRGEVTIISACCIIPLYYLLPPKNQHPAVPASGFDSLSPLSLFLSSRLVWTCMWDSYKSPALPFKYPIHLADHEPVNCGPLPARRT

SEQ ID NO: 247815 - protein, 508 aa, Zea mays
  Clone ID: MRT4577_157594C.1.pep
MGWLTKFFRGSTHNISEEQYHSRPAEDTAWNEPSSSPVVTDILSEFNNEDIDRAIALSLSEEEQRKEKAIDKDMHLEEDEQLARAIQESLNVESPPRRNGSANGGTMYHPPRETGNAYQPPRENGSANGGNAYHPLPFMFSSGFRACAGCHREIGHGRFLSCMGAVWHPECFRCHACSQPIYDYEFSMSGNHPYHKTCYKEQFHPKCDVCKQFIPTNMNGLIEYRAHPFWVQKYCPSHEMDGTPRCCSCERMEPRESKYVLLDDGRKLCLECLDSAVMDTNDCQPLYLEIQEFYEGLNMKVEQQVPLLLVERQALNEAMEGEKAGHHHLPETRGLCLSEEQTVSTILRPRMAGNKIMGMITEPYRLTRRCEVTAILILYGLPRLLTGSILAHEMMHAWLRLKGYRTLSPDVEEGICQVLAHMWIESEIMAGSGSSAASSSSGSSSSTSSKKGGRSQFEHRLGDFFKHQIETDTSMAYGDGFRTGNRAVLHYGLKRTLEHIRLTGTFPF

SEQ ID NO: 247816 - protein, 213 aa, Zea mays
  unsure (1)..(213): unsure at all Xaa locations
  Clone ID: MRT4577_157595C.1.pep
MRPTRLLAAASSTFRRRRLYTAAAVSTVAPSSAAPPPQSAVQPLSTQFARPSPARGHGVADDLASSLRALLASSPTVQHAFHLLRSAALDTRLPPNELVDAVLSTVDAGSPAAVTLLSHVLTCLSRAASDCAAAAAAYSRMVTRGXVVPDAKSRTDLLVTTARGASAADALTLFDEMRXKGCYADAKMYDVVIRACVRGGMHCDAVRLVDEMA

SEQ ID NO: 247817 - protein, 138 aa, Zea mays
  unsure (1)..(138): unsure at all Xaa locations
  Clone ID: MRT4577_157596C.1.pep
FTNIFTLCSCTLNDLINTEKTATICRSTNLDSWTPEQLKMMVYGGNNRAQAFFKQHGWTDGGKIEAKYTSRAADLYRQLLAKDVAKSSTEDGNNSWPSXPVAASQAPNQAAAFPDLKLTEVSKENVSEKKDSEIVRSP

SEQ ID NO: 247818 - protein, 212 aa, Zea mays
  unsure (1)..(212): unsure at all Xaa locations
  Clone ID: MRT4577_157597C.1.pep
DLIESSDINYPAAGSTTGVMAAHPHPHGSRKQQPSPSNKQDQEDTRVAKIAEVLSVLEPVRASISQQLGAGAAGRRCVVAAGYTRRRCLAFMETELSIIAEFLKTLSQQHLDADTRRWMEHYELVFSKLDSVIQEVDPSRRTLLRTRLRSATQCILSRTIDRIRSLLTXNSFTIAANIPAGLSIFFKLIVVLRPTSGLHHPNWWWQWDWHQL

SEQ ID NO: 247819 - protein, 122 aa, Zea mays
  Clone ID: MRT4577_157598C.1.pep
RIHKLGRRGGRVTNWAPKWVIQDMNHYTHPSVDPNKVEAKVWGNYWPHDGPFGTRGQNRLQNIAMTRIKALKKAPDMNNIEGQTRRVTPEVIPTMIEAAMEDGAIKRAPRMGPTMGAMKNAG

SEQ ID NO: 247820 - protein, 470 aa, Zea mays
  Clone ID: MRT4577_157599C.1.pep
PPPPFFPLPPRLHPFPSISSHLATPLPLSRADRLAHPSIEHGKKIPVRRGLNSIGLVLVWVGTMAATEASADKNAVFRKLRTKSDNKMCFDCNAKNPTWASVTYGVFLCIDCSAVHRSLGVHVSFVRSTNLDSWTPEQLKMMVYGGNNRAQAFFKQHGWTDGGKIEAKYTSRAADLYRQLLAKEVAKSATEDGNNSWPSSPVAASQASDQTAAFPDLKLTEVSKENVSEKEDSEIVRSPRVPTRSIKKPIGAKKPGNKTGGLGARKPPASPNESLYEQKPEETAPVLPSSVIASTTARSKPHTSRFEYVENAPAPKTGSSSEGNLMSGHVAPPKSSNFFVEFGMDSGYHKKSTSSSSKVQIEESSEARQKFSNAKSISSSQFFGDQASFEKDTQVSLQKFSGSSAISSADLFGHPANNSSVDLSASDLINRISFQATQDLSSLKNMAGETGKRLTSMASNIITDLQDRIL

SEQ ID NO: 247821 - protein, 64 aa, Zea mays
  unsure (1)..(64): unsure at all Xaa locations
  Clone ID: MRT4577_15759C.1.pep
AXSMAESRSHLSSFKRLPXQWLNPVHTSRPSSGLFRPVTXLCPKLFHLGLQVSNWVIAAATTPF

SEQ ID NO: 247822 - protein, 295 aa, Zea mays
  unsure (1)..(295): unsure at all Xaa locations
  Clone ID: MRT4577_1575C.1.pep
GGEIARALCRLFVPRARHQAPPHTSQSREGAAAAAGXVAVASMTSAVSTKVENKKPFAPPREVHVQVTHSMPPHKIEIFKSLDDWARDNILTHLKPVEKCWQPQDFLPDPASEGFHDEVKELRERAKEIPDDYFVCLVGDMITEEALPTYQTMLNTLDGVRDETGASPTAWAVWTRAWTAEENRHGDLLNKYMYLTGRVDMRQIEKTIQYLIGSGMDPRTENNPYLGFIYTSFQERATFISHGNTARHAEDFGDLKLAQICGIIASDEKRHETAYTKIVEKLFEIDLDGTVVALA

SEQ ID NO: 247823 - protein, 49 aa, Zea mays
  Clone ID: MRT4577_157600C.1.pep
PSYSQQLFLVPHGGHLREISINVILYNFFLVSRIKKAGRRQVSASIRQY

SEQ ID NO: 247824 - protein, 483 aa, Zea mays
  Clone ID: MRT4577_157601C.1.pep
MRINVCGCRGSTVHLHHLSSSSSPPPLPFHLLPPGDSSSSLPRRSIGPPIDRARGRRFQSGVVSIRSGSLPVWVGAMAAMDASADKNAVFRKLRAKSDNKMCFDCNAKNPTWASVTYGVFLCIDCSAAHRSLGVHVSFVRSTNLDSWTPEQLKMMVYGGNNRAQAFFKQHGWTDGGKIEAKYTSRAADLYRQLLAKDVAKSSTEDGNNSWPSSPVAASQAPNQAAAFPDLKLTEVSKENVSEKKDSEIVRSPRAPTHSFKKPIGAKKPGNKTGGLGARKLTSKPNESLYEQKPEEPAPVLPSSVIESTTTRSKSHTSRFDYVENAPALKNGNSSEGNHMSGHVAPPMSSNFFAEFGMDSGYQKKSTSSSSKVQIEESREARQKFSNAKSISSSQFFGDQASFEKDAQVSLQKFSGSSAISSADLFGHPANNSSVDLSASDLINRISFQATQDLSSLKNMAGETGKKLTSMASNIITDLQDRIL

SEQ ID NO: 247825 - protein, 52 aa, Zea mays
  Clone ID: MRT4577_157602C.1.pep
VEGVQPIILVWRYKPTACNQIWNSNVPISDQTKHHLRPQGSPAPAVYFHVQT

SEQ ID NO: 247826 - protein, 77 aa, Zea mays
  Clone ID: MRT4577_157604C.1.pep
SRCSASSTIGTISIVVKGSATCAPRAYSQVILFLFNNGWLCVITASCSYNVCSHSFQVFPVQYSSIHHTQVHDYMMC

SEQ ID NO: 247827 - protein, 134 aa, Zea mays
  Clone ID: MRT4577_157605C.1.pep
PINLTDRLHQVLRWATGSVEIFFSRNNAFLASRRLMFLQRVAYLNVGIYPFTSIFLLVYCFIPALSLFSGFFIVQTLNVAFLCYLLTITVTLIALGVLEVKWSGIELEDWWRNEQFWLISGTSAHLYAVVHGLL

SEQ ID NO: 247828 - protein, 84 aa, Zea mays
  Clone ID: MRT4577_157606C.1.pep
CRPFFFFTLFLVCLAIPSLLISKLQALHENKCSNDVIHTVMQQTLHPIVRYTAKFQTFKSPYILKPLLLQMPQTEVKRCPAMPG

SEQ ID NO: 247829 - protein, 46 aa, Zea mays
  Clone ID: MRT4577_157607C.1.pep
MAPMEPLKLVQQACCLAYAARPSLRSGPTSARSRSGALPDGVKDRE

SEQ ID NO: 247830 - protein, 102 aa, Zea mays
  unsure (1)..(102): unsure at all Xaa locations
  Clone ID: MRT4577_157608C.1.pep
RGAKKTAGEKAPXQGRTXRAARKRKRRERQAARTTTQKRQPPPPPRAARRKRRATPGXPQPRRRKTTARELKIGDTTEEXGRSRXXKKKKKKKSPAARDLEL

SEQ ID NO: 247831 - protein, 505 aa, Zea mays
  Clone ID: MRT4577_157609C.1.pep
MGAEPVDFSPPPPPEPTLSPEPEISGKDRGGNWKADMMSALGESVSFGRFLSEPLEWGKRSAFAHNRYLEEAAVQARPGSVAQKKAFFEAHYARKKRKSEDHAAAASDDVAGGDGELEAAEDGGAASWSLSATESSCMTDEPPAPAEEVCCGWEEDRVVDCGGSASDKPVHVPEELADITDAVGPCCRMDAPTDETQHMEGGDEVVGAVLPLQKQDLCMDSLTAVDATLKGISILNQDITDSVSRRRPPIVRLLPKPAKLSSPPTAKKGQNSSAKRRSMRHSAKENNSPPSAGSNKLRTTSTPKKRSTLSALHMSMSFPRCESGNTSMASRNLGTTIAARISELEHANATKPAEKNTKPHDLRLPRKKFSSALPEIAPRTSQVDEERSSHIMKIKEKLFGSTFPTLHQKYGITKEKERKINNEHGFKESRHSFCFKATLLPNFYRSNKQPKDTSHQATQEILSSSKSGHLSRDINQAHQTGKDAQTSKDASDAKQICCFPLRKMY

SEQ ID NO: 247832 - protein, 137 aa, Zea mays
  Clone ID: MRT4577_15760C.1.pep
MILAVLFANSDGNILVERFHGVPAEERLHWRSFLVKLGSENLKGSKNEELHVASHKSVSIVYTTVGDVCLYIVGKDEYDELASVKDVCAKPPTERLFLDKYGRICLCLDEIVWKGLLENTEKDRVRRLIRLKPPVEP

SEQ ID NO: 247833 - protein, 71 aa, Zea mays
  Clone ID: MRT4577_157610C.1.pep
LTFSPHIGSNSGGWGTDKKKYIGYLSTSTHVANAASLQGQSELYPLPHLTIDSQPEIPPDHHKHPVNMPRP

SEQ ID NO: 247834 - protein, 218 aa, Zea mays
  unsure (1)..(218): unsure at all Xaa locations
  Clone ID: MRT4577_157611C.1.pep
MVNAQMVSGYLDNSFNALMVSGGGESGQTQNGGTDTTLSGWKDLPMELLLRIISVAGDDRMAIVASGVCTGWRDALGWGATSLSFSWCQDHMNELVISLAHKFTKLQVLSLRQIKPQLEDSAVEAVANSCHDLRELDLSRSFRLSDRSLYALAHGCPHLTRLNISGCSNFSDAALIYLTSQCKNLKCLNXLAGCVRAASDRALQAIARNCSQLQLLNL

SEQ ID NO: 247835 - protein, 216 aa, Zea mays
  Clone ID: MRT4577_157612C.1.pep
MSKLQSDAVKDAITQIVGEAREKKRKFTETVELQIGLKNYDPQKDKRFSGSVKLPHIPRPKMRVCMLGDAQHVDQAEKMGLDYMDVESLKKMNKNKKLVKKLAKKYHAFLASEAIIKQIPRLLGPGLNKAGKFPTLVSHQESLEAKVNETKATVKFQLKKVLCMGVAVGNLSMDEKQIQQNIQMSVNFLVSLLKKNWQNVRCLYVKSTMGKRVRVF

SEQ ID NO: 247836 - protein, 128 aa, Zea mays
  unsure (1)..(128): unsure at all Xaa locations
  Clone ID: MRT4577_157613C.1.pep
MHWXRGNTNTRDGHPPTRRRAVTHTTTRPRPLRPGRRPRPTNRRQTRRRGRRRLPXDRSPPRRMRRAPQRRARASPNTRRRKPRRRPPARRRSRPQAPRQRGRTPAPRRPRRRGGQRTRTPRRPRRKS

SEQ ID NO: 247837 - protein, 239 aa, Zea mays
  unsure (1)..(239): unsure at all Xaa locations
  Clone ID: MRT4577_157614C.1.pep
MEGTVLCAANHAPLTPISFLERTALVYPDCPAVVAAGHAAAPPPRTWRQTRDRCLRLAAALAGLGVARRDVVAVFAQNIPAFCELHFGIPMAGAVICALNSRLDAGMASVLLQHSEAKVVFVDAALLGVAREALRFISQQAGGASRVPPVVLINEALDEPPPAATGNDKIPGVDRCYEYEALLSNSRGGDPEFLIRXPDDENEPIALDPRAGGGESRGGALDLRAVNREVGGVGSAGGR

SEQ ID NO: 247838 - protein, 83 aa, Zea mays
  unsure (1)..(83): unsure at all Xaa locations
  Clone ID: MRT4577_157615C.1.pep
LCVAAPFTAVLKCAAEEFXVPPQTSAIITNDGIFFNPXQXAXGVWGESFXELRLIPRDGVGAXVMSSGRLSPVQCLLSKTCEK

SEQ ID NO: 247839 - protein, 171 aa, Zea mays
  Clone ID: MRT4577_157616C.1.pep
MHGKQLILKCLNLICGFCCFSTLARPTCLGPKKLCLLLYYVCWCIHTMVCQILDHMHTLISVYMIQVSSCLVAWFSFMAFIVVTNSLTGASPCDVLLFLQPEQLTKIFELCGTPDDTIWPGVTKMPWYNNFKPPRPLKRRVKDFFKHFDRHALDLLEKMLTLDPSQVCYIA

SEQ ID NO: 247840 - protein, 171 aa, Zea mays
  unsure (1)..(171): unsure at all Xaa locations
  Clone ID: MRT4577_157617C.1.pep
MEGTVLCAANHAPLTPISFLERTALVYPDCPAIVAAGHAAAPPPRTWRQTRDHCLRLAAALAGLGVARRDVYXESNQTCRPVLNRSRCCPRXVAVFAQNIPAFCELHFGIPMAGAVICALNSRLDAGMASVLLQHSEAKVVFVDAALLGVAREALRFISQQAGGASRVPAV

SEQ ID NO: 247841 - protein, 63 aa, Zea mays
  Clone ID: MRT4577_157618C.1.pep
FFGTGGVAGVVNDVNYPVFTLPWLDTLFFFIWGWPWLVIYYYGVTEVLCVEKDGVIFFCFLWV

SEQ ID NO: 247842 - protein, 135 aa, Zea mays
  Clone ID: MRT4577_157619C.1.pep
LCGEVKVRREIAARRPSHTPEMRRAPPRWLKEAPGHGPWTLRWCTGAIDCGACPQFLRSRPFPRARLRLTSIRPNQGLRVAVGRWHGSCRPELDAGWLGGRCCAWLERAHSGGLLRPMAAEPGVGKCSRPASRYP

SEQ ID NO: 247843 - protein, 147 aa, Zea mays
  Clone ID: MRT4577_15761C.1.pep
MILAVLFANSDGNILVERFHGVPAEERLHWRSFLVKLGSENLKGSKNEELHVASHKSVSIVYTTVGDVCLYIVGKDEYDELALAEVIFAITSAVKDVCAKPPTERLFLDKYGRICLCLDEIVWKGLLENTEKDRVRRLIRLKPPVEP

SEQ ID NO: 247844 - protein, 134 aa, Zea mays
  Clone ID: MRT4577_157620C.1.pep
SDHDQVDRRYRRYREQMRSVEVSFEAVAGAGASQVYTRLALRAMSRHFRYLRDALVAQVRALRKAMGERDGGPAGAAAGATKGDTPRLKVLDQCLRQQRAFQHPGTIDNYPWRPQRGLPERAVAVLRAWLFEHF

SEQ ID NO: 247845 - protein, 55 aa, Zea mays
  Clone ID: MRT4577_157621C.1.pep
SSTCTQTRHHDSHSLHCNSSQTDRILTVAMTTNQLMRVRTLGCGASGVVCSGWPS

SEQ ID NO: 247846 - protein, 57 aa, Zea mays
  Clone ID: MRT4577_157622C.1.pep
QHNQIIRMMANHALYITKGNLHCCITQLSRVNYWPDQNKTLRKIHGRATPNPALVNN

SEQ ID NO: 247847 - protein, 47 aa, Zea mays
  Clone ID: MRT4577_157623C.1.pep
QARRSVLYLKVMGHALGNKVGVYEDKLKHNLFLEPPHPHRRPPGGGG

SEQ ID NO: 247848 - protein, 136 aa, Zea mays
  Clone ID: MRT4577_157624C.1.pep
VKIFVITVIMSMYQFMSHLISHVIVTAHVMQANLYTVLASVAAGGGADHGRHQEGPHNVHGILQQLHHEMHRRMFEPVEDAFDAFVVQHGADRGALGRVLEAIVDASLGVTAAVPRRRFGPGPVSVDPVADCADAC

SEQ ID NO: 247849 - protein, 97 aa, Zea mays
  Clone ID: MRT4577_157625C.1.pep
KTKAFFGQPPSLSFRKVCSQVPCQIKRRFYATRSLIAVFKKNKKMKAGETEFFGSYLGGLENKKASTGLPPLGKKRVGKWSFLMPVGWPFFPDNFHS

SEQ ID NO: 247850 - protein, 93 aa, Zea mays
  Clone ID: MRT4577_157627C.1.pep
PPERQSLLAPVQPPDGGGGQTLAQRTRKPCRLHCAPPPIAELFAPLRSGGRGSRVCTFNPVKVSCARSTGSCHFGCAFPYIGPSVRLGGTLSR

SEQ ID NO: 247851 - protein, 56 aa, Zea mays
  Clone ID: MRT4577_157628C.1.pep
PQDSGDPPRSFGALLGVGPQMYSNPFPKLPYMGHPWEHFLGMGLGPVFFTPLVKFY

SEQ ID NO: 247852 - protein, 45 aa, Zea mays
  Clone ID: MRT4577_157629C.1.pep
FFFFFIFGGRGLIYNITSISVTNIEKNKLKLHQKHFYCMWKCKGK

SEQ ID NO: 247853 - protein, 98 aa, Zea mays
  Clone ID: MRT4577_15762C.1.pep
GIAVSRNPHRHFYDARALRTDTPSDNTNDLLPGGGLLLGGGEVEWPLPASGDTAETASIASPKTSPRRATRAHAPGATTTTTMSTTTGTVFSGALRPE

SEQ ID NO: 247854 - protein, 90 aa, Zea mays
  Clone ID: MRT4577_157630C.1.pep
VRSESGSPREERAGGGTWRTRGRTRGKREGRSIRRSGDPSAGRSHTSSSLPSFLFPTIKMSRGGSAGGGQSSLGYLFGSGEPPKPAVAPA

SEQ ID NO: 247855 - protein, 34 aa, Zea mays
  Clone ID: MRT4577_157631C.1.pep
HYKLSQSPTFQREPGRAAANLKMATERPPEGSGP

SEQ ID NO: 247856 - protein, 95 aa, Zea mays
  Clone ID: MRT4577_157632C.1.pep
SVSSTDHAQDHMSDDAYVELRKGALCAYHGKNFEGGGSGHVTSDMSSTMGAEVEEETYKLSGETAWQNARPYEKVGIYAGRAQKFRRPQFSHGGR

SEQ ID NO: 247857 - protein, 214 aa, Zea mays
  unsure (1)..(214): unsure at all Xaa locations
  Clone ID: MRT4577_157633C.1.pep
QRPTPCSPSPAELLPAVPSTDLRPPLPAGNPSSSRGGDLFRHPQQHAYLLGSPQGEASSPCKYYSDGWPTLSAKLNFEKAVFTKAQKVSAGTDDIGMPDALIEXYKCIHDLIFFVTGGEDENDLIFTSILQGFSDAEELLLQNLVDXRTALENLXLILLCLDEIVDGGIVLETYGIEIPEEESDHGSDGASSADHTLAYALTQAIEHLEKTLLM

SEQ ID NO: 247858 - protein, 88 aa, Zea mays
  unsure (1)..(88): unsure at all Xaa locations
  Clone ID: MRT4577_157634C.1.pep
HKQESMTDRFLCTAGYPNMSDMVVHFDVEHSDLIMQLSQVSXKXRIQPYTSKLXDLGFRFQFGVQETLDSSVDCAKRLAHLYMHSTHA

SEQ ID NO: 247859 - protein, 72 aa, Zea mays
  Clone ID: MRT4577_157635C.1.pep
DVPHYLLNLQIYVVDSLDRERIGRARAEFQAIINDPFMLNSVLLVFANKQDMVCSATFSLEHLFCVVIHFSG

SEQ ID NO: 247860 - protein, 101 aa, Zea mays
  Clone ID: MRT4577_157636C.1.pep
LGKHNRFKKLFYGKDGRPQVPPRWGVPPPFLLKGGGGGPLLGGGPFFFDVFKPLVCTNRACLTVELGFRWPKFFIPKKGFLFFFFFLAIRYCLPSACSQTV

SEQ ID NO: 247861 - protein, 466 aa, Zea mays
  unsure (1)..(466): unsure at all Xaa locations
  Clone ID: MRT4577_157637C.1.pep
MERDVVLSAPEAAGSSSSPASSSYSSFAETRVICRVCQKQFAQYTCPRCNARYCSLSCYKXQQVGYGNVALVSIVFPDDILAPPGSXHLSGTTPERQPSAGCRQTPTSQGHSVQCTESFMRENVMDELKQMQPEDESKKKMLDILKRLHLEEEMASDGEDESMLSEELIQKVMSGEEIKLEDLSDCEIKRFRQALASGELSKMIEPWTPWWKKPSARSISLGPDGSQLIRQVNAEDTAVPYPDANTDQEASINEIPEGPESPLPSLKQLTRTEPSPLLAVHLVDILYSYCFTLRLYNGDWHSDPLGACTVALSMSKVMGQDAKPETVPEALAACIEETCSPAYRHTGGFRFAIGLVDDIIAILSLGQNALICALCDFHRLIEVGKSMLKVEKVGKTERAQNSPKLRSAARKLFFMTCWVHEQPDEAWPSLAHIVQVQKASMEELETGNWKADRKSKPQSAVLIEEL

SEQ ID NO: 247862 - protein, 107 aa, Zea mays
  Clone ID: MRT4577_157638C.1.pep
PVKKNKIAAEEIKEPLNLPQGPNHCARHHRLRFNHGGGLRRQQSPWPFGWDGMEGRMGEEAKGLPRRAWLQLHRPPTTRKESKTARPFSFELILHLPLFFTPSLISP

SEQ ID NO: 247863 - protein, 304 aa, Zea mays
  Clone ID: MRT4577_157639C.1.pep
MLSEELIQKVMSGEEIKLEDLSDCEIKRFRQALASGELSKMIEPWTPWWKKPSARSISLGLDGSQLIRQVNAEDTAVPYPDPNTDQEASINEIPEGPESPLPSLKQLTRTEPSPLLAVHLVDILYSYCFTLRLYNGDWHSDPLGACTVALSMSKVMGQDAKPETVPEALAACIEETCSPAYRHTGGFRFAIGLVDDIIAILSLGQNALICALCDFHRLIEVGKSMLKVEKVGKTERAQNSPKLRSAARKLFFMTCWVHEQPDEAWPSLAHIVQVQKASMEELETGNWKADRKSKPQSAVLIEEL

SEQ ID NO: 247864 - protein, 59 aa, Zea mays
  Clone ID: MRT4577_15763C.1.pep
YWYTTSSAALMRYHGSAGPHVAYTLEFTLLWPHAVQSIILFHVHAHNHISFFGYRVAQA

SEQ ID NO: 247865 - protein, 149 aa, Zea mays
  unsure (1)..(149): unsure at all Xaa locations
  Clone ID: MRT4577_157640C.1.pep
WRGHCGRITYLNQMKICENQHTFKIGLGHEELQGKSPEEAQKHIEKMKKNFEAQYAIYLGHAMLQFQHRESLVAPYNFEXCEFAYIKLIISIDMHHKFDSCRDHRIYFIIHPKDGTVLFLDSIVHKPSRYAKFMTILAVSLDIHAYFYR

SEQ ID NO: 247866 - protein, 45 aa, Zea mays
  Clone ID: MRT4577_157641C.1.pep
GFFRMSTSKAAGPGLLNIEARIEDLSLTSSGAGSATTNHPLARTC

SEQ ID NO: 247867 - protein, 64 aa, Zea mays
  Clone ID: MRT4577_157642C.1.pep
RSLLVHWYNHHSIRGLVQQRGRYNRFRERADSIRPVSQVTDTHAGVKTEHFLTGAYGNGSYLSP

SEQ ID NO: 247868 - protein, 306 aa, Zea mays
  Clone ID: MRT4577_157643C.1.pep
MAPSPILVRPPALANSPLPPPRCVAAVAAAPAVRTAPAAPFSRLRTKCRFAASDVREDYSSTPIDIVADVKTEKIVVLGGSGFVGSAICRAAVSKGIEVVSFSRSGRPSYSDPWVDQVNWLPGDVFYARWDEVLVGATAVVSTLGGFGNEEQMKRINGEANVIAVNAAKENGVPKFILISVHDYNLPSFLLTSGYFTGKRKAESEVLSKYPASGVVLRPGFIYGKRKVNGFEVPLDAVGQPLEKLLSSVENFTKPLSSLPASDLILAPPVSVDDVAYAVINGVIDDSFFGVFTIEQIKEAASKVRV

SEQ ID NO: 247869 - protein, 110 aa, Zea mays
  unsure (1)..(110): unsure at all Xaa locations
  Clone ID: MRT4577_157644C.1.pep
MDMLGCRRRAAASISYPSRVLSCSSQDHLAWDVPTLGPGENPSCSAYCXGKYKDEIIKNDAYIGTPGKGILAADESTGTIGKRLSSINVENVEENRRALRELLFCCPXAL

SEQ ID NO: 247870 - protein, 53 aa, Zea mays
  Clone ID: MRT4577_157645C.1.pep
PPPPPRDRDIHNSRPTREPKHPAHGSTRIPLAAGGPNTKVGFHTYGQEDTTPS

SEQ ID NO: 247871 - protein, 590 aa, Zea mays
  Clone ID: MRT4577_157646C.1.pep
PRAGRENRHATFLLLLWSHAPAPALSLPPRPPVRCSDGGTTGCVLSNAYGAWSSDRADCPVSSVAYPASEQEVVAAVARASASGARVKVVSGFAHTIPKLACPGGGNGTTTTLLISTARLAGVEVDVAARTVTADAGAPLRAVIDAAEASGLSLTAAPYWEGVSVAGLVSTGSHGSSWWGRGGAVHDHVVGLRLVVTAGEADGWARVLTLRRGDELFPAALVSLGLLGVVSKITLSLEPRFKRSITFDYRNDSTFQDDFAAHAASHEFADITWYPSQHTAVYRIDDRAPANAPGDGVNDFIGFQATPIAVTAGLRVVETSLERSKNMKGKCAMAAAEGVAKRLVGNGLKNNGLLFTGYPVVGYQGKMQTSGSCARSSAADLLSACGWDPRFHGLFFYESTAIFSPARFRDFILDVKRLRDLAGSDSLCGVDVYNGLLVRFVKASAAHLGQPEDSVVVDFNYYRASDSAAPRLSQDVWEEVEQLAFVKHGARPHWAKNRLVAFAGVRGKYPRWGQFAAAKRQLDPRGLFDSPWSDEVVGGVELAKGDGCALDGRCVCSEDRHCSPEQGYYCRPGLVFTDARVCRYSGSQNQ

SEQ ID NO: 247872 - protein, 38 aa, Zea mays
  Clone ID: MRT4577_157647C.1.pep
DLVHVGVRKFFFFYYVCPIFFFFFLIFLFFFFFFPRVR

SEQ ID NO: 247873 - protein, 280 aa, Zea mays
  Clone ID: MRT4577_157648C.1.pep
MAWTTAATVCWRLLHLPSARCPLSSRARCSAAQSPDAVDKEYADLNLRPLYPNRGHHMRIRQHVNPLSSSFSEPTGPPEWKEVFDDPLLPLMVDIGCGSGRFLIWHAKNSGKSQNYLGLEIRQKLVERAQFWVNELELMNVYFMFANATVSFEKIISSYPGPLSLVSILCPDPHFKKRHHKRRVLQQPLVDSIINNLCLGGQVFIQSDVLEVAVDMRERFDGYSGILAHVNYVDQDLQCDNEGWLLDNPMGIRTEREIHAELEGATIYRRVYQKVRDASF

SEQ ID NO: 247874 - protein, 65 aa, Zea mays
  Clone ID: MRT4577_157649C.1.pep
KKKRGKKNQEKNRPLKGKRGKVDPKKKKKNPLLPEKKKGKGPKKNKKKKGLDGQNKKKKNPGPRE

SEQ ID NO: 247875 - protein, 189 aa, Zea mays
  Clone ID: MRT4577_15764C.1.pep
RDGVSMMKRSFGLDSTSAASSSDLGSSRQSIICFERLRSGKRGDFEKSQISSTMSRQSIASVSDMSICSSSASLCPQIGAVGDSCFPIDTLESSTSRTLISSEENDAFCKDALPSDMECLSPQVIADDDSHVDLKIQSYLSEVGDTTFENHSAGRMPDMDHTSSNMYSLDSELSCASPLFSCPEESCLP

SEQ ID NO: 247876 - protein, 138 aa, Zea mays
  unsure (1)..(138): unsure at all Xaa locations
  Clone ID: MRT4577_157650C.1.pep
GFLTLLRLPSVRCPLSSRGRCSAAQSLYAADKEYADLNLRSLYPNRGHHMRIRXHVNPLSSSFSEPTVPPEWKEVFDDPLLPLMVDIGCGSGRFLIWHAKNSGKRQNYLGLEIRQKVLLDLGFSLLIWVLDWMIFPFF

SEQ ID NO: 247877 - protein, 138 aa, Zea mays
  unsure (1)..(138): unsure at all Xaa locations
  Clone ID: MRT4577_157651C.1.pep
MPTSTSGLCTPTSVVTLLLFVPTPGAIPILPLIHLCTQRGHHMRIRXHVNPLSSSFSEPTGPPEWKEVFDDPLLPLMVDIGCGNXCPGSGRFLIWHAKNSGKSQNYLGLEIRQKVLLVLGFSLLIWFLDWMIFPFFNV

SEQ ID NO: 247878 - protein, 34 aa, Zea mays
  Clone ID: MRT4577_157652C.1.pep
VCRRHGKLMICSRWDICDCILLIYYYASLVLECV

SEQ ID NO: 247879 - protein, 74 aa, Zea mays
  Clone ID: MRT4577_157653C.1.pep
NGDCGNKPSKESARWRHTGMWFLQLKTISLKTQLNKSTTMEITHAATELNCFVPHSNNYHNPGRDRDTPQQSSS

SEQ ID NO: 247880 - protein, 187 aa, Zea mays
  unsure (1)..(187): unsure at all Xaa locations
  Clone ID: MRT4577_157654C.1.pep
MSVVQELTSHMGLPDVSIKRFSVTHDIKNLLMFVDVVLYGSLRQEPVFPPLLLLSMSSEIPVVAPNLTVITKYVXLDRILNNSLVNLCHYFXNLLFQVSDGVHGFLFDSADPSTISSAFIQILGEKKLLDTAYSVALEGKLLSKNMLAHDCIKAHVKLLESVIHFPSYAKLPSSVSKVQERTXXLWD

SEQ ID NO: 247881 - protein, 72 aa, Zea mays
  Clone ID: MRT4577_157655C.1.pep
CNMCLFLQYIPSFIYPITPYFQTVAWKYNPHVKSPPLGEGISMRKKKNHLPRFACCLMLITSSCQTSSTEEK

SEQ ID NO: 247882 - protein, 70 aa, Zea mays
  Clone ID: MRT4577_157656C.1.pep
LAVGSKGRDWEKPAVTQLTHLATQRPSARQCSSQNARVDGTSQQSRTSKGEWEVPRHTTLSTVFVGVTST

SEQ ID NO: 247883 - protein, 68 aa, Zea mays
  unsure (1)..(68): unsure at all Xaa locations
  Clone ID: MRT4577_157657C.1.pep
VIELSPEEAESTTGGYAKSISHVIIGLKTVKGTKQLKLDPSIYDAXIKEKGAVGXDVIYIESNSGSSE

SEQ ID NO: 247884 - protein, 37 aa, Zea mays
  Clone ID: MRT4577_157658C.1.pep
VCSRGVLCVLSPGCAGARAACVLVPRGCCRRFFVLPG

SEQ ID NO: 247885 - protein, 194 aa, Zea mays
  unsure (1)..(194): unsure at all Xaa locations
  Clone ID: MRT4577_157659C.1.pep
MFHPTRGGTRGGQGDFKWTDVAADKDREYYLGHSLDAPVGRWQNGKDLTWYQKDKDRDLEEEERLRKEEIRKVKEAEEDALAVALGFEPTVRNPNEIPTGSGSGPGPAKDSNESVLEKAKRKAEKEARKAERDEKRRQRDARKSERRSHRERSRSRDRSPSPRRRGSDERDGRRSNDARGPSYDXRRPDRRDER

SEQ ID NO: 247886 - protein, 74 aa, Zea mays
  Clone ID: MRT4577_15765C.1.pep
TISATQDRHHLQASGGFEFSLNATYTTDKRCPGGLISAEQTGESIWVLMMTIDGTFVSVSYVRPALPCATGRLT

SEQ ID NO: 247887 - protein, 395 aa, Zea mays
  unsure (1)..(395): unsure at all Xaa locations
  Clone ID: MRT4577_157660C.1.pep
MAPAPAAASAGRKSHVTVLLLYVVCGLILLLLLASYSPRLQPHAHGRSLHRRLKLHPKSSLPSDASSGGNGGQQKTQHQNHHAASFDPTIAELERRLDDKEWEREHYSLLHGGEPDDHMKEWEEFLKEEEDFINDDDRFNIADRIRALFPKIDVAPQDGFVSLDELTAWNLQQARADQHHRSAREMELYNKNGDEIVSFEAFNALRQESHGEGNMLGXMVEGGSXSMRQMQTLMVSLIXEFNDFLNPSDSDNPKIINLLCKQEIRQRDKDGDGKLNFEEYFTGLHDHIHGYDDENADISQIGNITVAKDRFFKLDKDNDGFISEHELEPVLDKLYLSERYYSRQQAIHAISEADKDHDGRLTLEEMVENPYAFYGSVYLSSSDNDDEDYFHDEFR

SEQ ID NO: 247888 - protein, 43 aa, Zea mays
  Clone ID: MRT4577_157661C.1.pep
TGDIASTGGRLYRAPATGPRLDVGMGLAAHCEKYERRSLALTA

SEQ ID NO: 247889 - protein, 105 aa, Zea mays
  unsure (1)..(105): unsure at all Xaa locations
  Clone ID: MRT4577_157662C.1.pep
MAGLIVLENLETNNIVLVHGEGFGACCWHKTIXHLEEGGLDAVAYDLTCCGMDDADANRIFTVALYYMPLLDDVDRLAEDXKVIVLDHNAFCASVLYAHGQYRLK

SEQ ID NO: 247890 - protein, 73 aa, Zea mays
  Clone ID: MRT4577_157663C.1.pep
ASRERVASPPRGLNQPVPPKGMFLVGGDSPFTKRRGAFIYLKWQSLFFAPLRKRKKKKKKKTPRAANIEDPSL

SEQ ID NO: 247891 - protein, 90 aa, Zea mays
  Clone ID: MRT4577_157664C.1.pep
LEAGRDPLTILFPDSKIPLETRSSPPWYASYFHLHEALSSLQKSSRQDSYVSDSPFRSSCSHHVFDPSDYFRTDEHRSCTTVQCAQPRPL

SEQ ID NO: 247892 - protein, 38 aa, Zea mays
  Clone ID: MRT4577_157665C.1.pep
FFFFFFFFFFFFFFFFFFFFFFFFFFFFFWGTKQLTDN

SEQ ID NO: 247893 - protein, 100 aa, Zea mays
  Clone ID: MRT4577_157666C.1.pep
KGCFALYLRRPFRLMFSLCSLKQFGFDAPEIFAMILPRLWGPYLGATTHAIFGCALPSCRCRWSETTVRRQKNIFRRKEMWQPLLLLSVLLLLLLSSYSS

SEQ ID NO: 247894 - protein, 83 aa, Zea mays
  unsure (1)..(83): unsure at all Xaa locations
  Clone ID: MRT4577_157667C.1.pep
FFWFFFIGRGGTFPSIFLTRKGNWGNKTSAFYPHKAPQETFANHRLPQLERPKNKQTPXAQKPRSKHQKHETLQEEKKPKPIQ

SEQ ID NO: 247895 - protein, 231 aa, Zea mays
  Clone ID: MRT4577_157668C.1.pep
PHPRPARRSIQSFATTLTASPSSSKQSMECSNKSGDRRLMDRFSQLLLCPANTFLGSRYSSSSLTSTVFTATAAAASTTLSISSTSTTAANYTGRADPFSAALDRPPPERMRCNKEQHKDKGKLQEHRRRRFKNAVDKDGVRTLSSNPYGFTSSGEEDDGTDGYGDDEDTETFLSSRSLLSFDSSGFYAYRKLLKPPSKNRSHLGRQGRRRRCCRRPSASCVETCNARAVR

SEQ ID NO: 247896 - protein, 74 aa, Zea mays
  unsure (1)..(74): unsure at all Xaa locations
  Clone ID: MRT4577_157669C.1.pep
MAATAAEGVAATALRAVLGRAGMAAXRSGCAAEAVRVVAVGKTKPVSMLRQLYDAGHRCFGENYVQEFVTKAPQ

SEQ ID NO: 247897 - protein, 61 aa, Zea mays
  Clone ID: MRT4577_15766C.1.pep
SGGAKINAPKKDNKNGYSITPKPKLTKKPEMKVIFLKNGTFSKMVTKYKRAFMASYSTKIR

SEQ ID NO: 247898 - protein, 189 aa, Zea mays
  unsure (1)..(189): unsure at all Xaa locations
  Clone ID: MRT4577_157670C.1.pep
MPPRAATAKPSWLGDALLFAAGAVVATVALLAFANPFAQPEGYYGDGAVPSSGSGSSSVGAAGGGGGAAAHTFYDDPALAYTVDRPITGWDEKRAGWLRAHPEFAGGGEKGRVLMVSGSQPTPCRSPGGDHTLMRLLKNKADYCRLHGVQLLYNMALLRPSMDRYWAKIPVIRAAMXAHPEAEWVXWWV

SEQ ID NO: 247899 - protein, 107 aa, Zea mays
  Clone ID: MRT4577_157671C.1.pep
IQVMHVAVIVNVVVGATIQPLTGMSTVDVGVTALGAHGPMHGWRRRRRAPRAHAHGAMHRGRRRCRRSLVAGAVALQVYRLSTRHGAVLVAPLRARQRPLHCHRTLS

SEQ ID NO: 247900 - protein, 130 aa, Zea mays
  unsure (1)..(130): unsure at all Xaa locations
  Clone ID: MRT4577_157672C.1.pep
LVXAPGDSLNTDVIHMGXLFGITITNTGIGVXYYCIFIGPGTFNVNITGVTCGPVHCIIIFCLXRYKDEKDVTDINVKDCTLNXTVCXXRGNAYYDAGSVLTVFNIHYENIKMEDSANPIFIDMKYCPNK

SEQ ID NO: 247901 - protein, 48 aa, Zea mays
  Clone ID: MRT4577_157673C.1.pep
KIRSQMLDDELDGAKVKARGNIMQTNIVVDDPSDYTSLFMDRGFQIEH

SEQ ID NO: 247902 - protein, 149 aa, Zea mays
  unsure (1)..(149): unsure at all Xaa locations
  Clone ID: MRT4577_157674C.1.pep
SPTRSPTRSRTRGLAVACPGLVDLDLSNGVDLGDAAAAEVARARALRRLSLARWKPLSAMGXGCXVXGCTELRELSLKWCLGLTDLGIQLLALKCRKLTSLDLFYTMITKASLPPIMKLPSLXELTLVGCIAIDEDALGSLERECSKLL

SEQ ID NO: 247903 - protein, 127 aa, Zea mays
  Clone ID: MRT4577_157675C.1.pep
VCKELPQVFSLGGYTVVPHLLFLMKHVWFVPSNWMVGPMAAPSSLCVAPPVFFCGGGQSRGLLRRGSDGFFPRGPWWFLGGRSSLWRPAMLSEVGGGPFVLSPGVGGVADALLFSRKIKIRREIEIG

SEQ ID NO: 247904 - protein, 50 aa, Zea mays
  Clone ID: MRT4577_157676C.1.pep
SSSPLLNTGFPWARFIIFPFGSKIWIFSRRLFLNKLRCREPFFKRGLMFF

SEQ ID NO: 247905 - protein, 233 aa, Zea mays
  unsure (1)..(233): unsure at all Xaa locations
  Clone ID: MRT4577_157677C.1.pep
QLSFFFFFFFYAFFFFFFFFFFFFFFFFFFFFFFWDFFFFFFGAPPKNNPXKQNPPLGPXLKPTPKKKKKPQTPEKPGXPGGKKKKPTRPGGPPKGQNPTHGGPEQREPSPEPNRGXKQGQNRSPGKKGNPPKFHTKNKPETKRGKPGGPKEGPNPQKWGGPHRXPFQGENPAGQLDKKNGQPPGKSGLGKGGPSPSPVKEPLGPGVRGGGAGSAHPKGGKRVPPKSGENPGK

SEQ ID NO: 247906 - protein, 87 aa, Zea mays
  Clone ID: MRT4577_157678C.1.pep
KAAVVLEHPEGCSEAVTLTFFFSIVHRNASLRSQRHGYTMLNTNAEKHAHAAQIFYLWATALKPLDFDERSLAYLKTMVASVRRNTY

SEQ ID NO: 247907 - protein, 226 aa, Zea mays
  unsure (1)..(226): unsure at all Xaa locations
  Clone ID: MRT4577_157679C.1.pep
MAAPRPSGGMDPRSGFCAATRTFHSLRPSAALPPDSLPATAAAYAFSILSSPLPDRPALVDAATSISVSYPSFLAAVRSLAGGLWSVLGLRPGDVVLVVSPSRMDGPVIDFALMSIGAVVSPANPASTAEEYTHMGALSRPVVALAAPEVAAKLPRNLRCVXIIGSNEYKSLSSAGGVAPSPPVAGKQSDTAAGLYSSGTTGRVKAAAVSHRNLIXVISAHRNNRV

SEQ ID NO: 247908 - protein, 46 aa, Zea mays
  Clone ID: MRT4577_15767C.1.pep
MNNPGPLFFFCGAKKKKKKKKKKKKKKKKKKKKKKKKKKKKKKKKK

SEQ ID NO: 247909 - protein, 298 aa, Zea mays
  unsure (1)..(298): unsure at all Xaa locations
  Clone ID: MRT4577_157680C.1.pep
AKLVKTXSLAPGEPTKKPSPFSTSEIWAWSAIFVASFGVACFNPTAFGTTARTCLPFLLAANVLGYMVGSGLPPGVKKVLHPIISCALCADFAALAYGYISGFGLDAVLGAYLTKVPSNPGAGDVLMTFLGSVIISFAFSIFKQRKLVKRHATEIFTSIAIASAFSLYSTAIIGRLIGLEPSLTISILPRCITLALALSIVSFFEGVNSSVTAVVVVLTGLIGANFVLAAMEKLGLNDPISRGVGTASSAQGLGTAALAAKEPEALPFCAIAYSFTGIFGTLICSVPAVRQSLIFIAG

SEQ ID NO: 247910 - protein, 308 aa, Zea mays
  unsure (1)..(308): unsure at all Xaa locations
  Clone ID: MRT4577_157681C.1.pep
LASAGIWAWSAAVPVRNSRVDPRVRAFGTTARTCLPFLLAANVLGYMVGSGXYVRLYKLDRSIXPKYAVSFGLTYGLSVFRLPPGVKKVLHPIISCALCADFAALAYGYISGFGLDAVLGAYLTKVPSNPGAGDVLMTFLGSVIISFAFSIFKQRKLVKRHATEIFTSIAIASTFSLYSTAIIGRLIGLEPSLTISILPRCITLALALSIVSFFEGVNSSVTAVVVVLTGLIGANFVLAAMEKLGLNDPISRGVGTASSAQGLGTAALAAKEPEALPFCAIAYSFTGIFGTLICSVPAVRQSLIFIAG

SEQ ID NO: 247911 - protein, 81 aa, Zea mays
  Clone ID: MRT4577_157682C.1.pep
CLSRHKLHIAGSPYITSCRFAQCIGRACLAYTIVGRRRFHRRGSLTVDSRGSSRCRSRANCEWQVFACRSRASSLVGATFS

SEQ ID NO: 247912 - protein, 85 aa, Zea mays
  Clone ID: MRT4577_157683C.1.pep
HTSFLGSIFSSRPLLAPNQDLTFMTPLSVTSQLLFFSLQSCTTVHSHRLLLSPAMHGPLTAAGCHHCSLAPQLLVREVRLPVEGQ

SEQ ID NO: 247913 - protein, 40 aa, Zea mays
  Clone ID: MRT4577_157684C.1.pep
FCQYILEPFLSERVRKNVASYLNSCHGMLEITYLFLCSQC

SEQ ID NO: 247914 - protein, 59 aa, Zea mays
  Clone ID: MRT4577_157685C.1.pep
DSNRSSPIHCLQLRRDRFRVWLSVWSVKMTNIQRKVFILLDSTLGHGHRFWVGARGRKF

SEQ ID NO: 247915 - protein, 79 aa, Zea mays
  unsure (1)..(79): unsure at all Xaa locations
  Clone ID: MRT4577_157686C.1.pep
XXXAEGRXKXAXXAXXGXFGLPXXRRLSGTFQPREXLIFHSXSPRGGGGGTVLXKTSASGAGAPWPGGLSGACWRVAWS

SEQ ID NO: 247916 - protein, 90 aa, Zea mays
  Clone ID: MRT4577_157687C.1.pep
MALVSHSGAANKNAFKALIAAEYSGIKVESTKDSEMGGSNKTPEFIKTNPLGTFPDLATSDSPVLESNGIARYADRLTDVNALYACLPIV

SEQ ID NO: 247917 - protein, 97 aa, Zea mays
  Clone ID: MRT4577_157688C.1.pep
PDPDPAGVTRNRGRQWRYATSSHCLVRSAWFPRASALGSSDQRGALGFANPHRGLFNRAAAYCLLRREMDGFLHTLKGLEENRKGNENFYNHTLCGG

SEQ ID NO: 247918 - protein, 120 aa, Zea mays
  Clone ID: MRT4577_157689C.1.pep
QFLPFPQQAALYCAVYLQHHHMLPFSQLAASFHQQFLPFNRLAALTSPAYVQQQLLPFSQLSAVSPAAFFTQQQLLPFYLHDAPNVGTLFQILPCVPFNQSFVFMWTALCPLPIIGGALF

SEQ ID NO: 247919 - protein, 52 aa, Zea mays
  Clone ID: MRT4577_15768C.1.pep
QDQPAISEYAEYTTAPRHVDTHSQIIARPKRRLTLPPELQSNQPRSSFITSW

SEQ ID NO: 247920 - protein, 276 aa, Zea mays
  unsure (1)..(276): unsure at all Xaa locations
  Clone ID: MRT4577_157690C.1.pep
RGAQIQKLRKTNTKANCIDSRKRTFFHAYFPLCQDVTLTEQPSVDERIWSFSAAARWGGGSPWRRRPPSAAPSPXVPRGLRRPTVRPPPPVDAPRRHLKPSARPPXPRRPPARSRSAGPEARRSRRGGSCRRRRPGRPRRRVGRARRTRAASGRGRPGRRTPGATTRGRSPPPPAPASPPRSAGRGTAPRKARRAPPRGSASRRCRSQPPSASSCPPSCFARSHALSCCCCTHCRAVVWGDGDWYSSLDWGRWASKNRKRGMGKEEGRHSADASTR

SEQ ID NO: 247921 - protein, 336 aa, Zea mays
  unsure (1)..(336): unsure at all Xaa locations
  Clone ID: MRT4577_157691C.1.pep
MRISTDKRQRSRGSRAEAEPRSRNCARRTPKQTASIQERELFFSCLFFPLCQDVTLTEQPSVDERIWSFSAAAGWGGGSPWRRRPPSAAPSPXVPRGLRRPTVRPPPPVDAPRRHLKPSARPPXPRRPPARSRSAGPEARRSRRGGSCRRRRPGRPRRRVGRARRTRAASGRGRPGRRTPGATTRGRSPPPPAPASPPRSAGRGTAPRKARRAPPRGSASRRCRSQPPSASSCPPSCFARSHADALSCCCCTHCWSGLGRWGLVRLFDEKVADSPSSPPSSWPCAAPSAHTMGMVVAGSSEQGRALTRQPCQWRWRGRAEAICRQRRRNNRSERRY

SEQ ID NO: 247922 - protein, 240 aa, Zea mays
  unsure (1)..(240): unsure at all Xaa locations
  Clone ID: MRT4577_157692C.1.pep
SGAQIQKLRETNTKANCIDSRKGTLFFSCLFFPPCQDVTLTEQPSPSVDERIWSFSAAAGWGGGSPWRRRPPSAAPSPXVPRGLRRPTVRPPPPVDAPRRHLKPSARPPXPRRPPARSRSAGPEARRSRRGGSCRRRRPGRPRRRVGRARRTRAASGRGRPGRRTPGATTRGRSPPPPAPASPPRSAGRGTAPRKARRAPPRGSASRRCRSQPPSASSCPPSFFTVALAVVWGDGIGTPA

SEQ ID NO: 247923 - protein, 52 aa, Zea mays
  Clone ID: MRT4577_157693C.1.pep
FIWGAHMVIYLRVPVKFQGCFLTGKETTKKMGQSQGGTAYGTKAGLNGVQLN

SEQ ID NO: 247924 - protein, 186 aa, Zea mays
  Clone ID: MRT4577_157694C.1.pep
TPGRSPSCLPGRGTAACGPWRRRRSRRWRTSPPSGGAWCPPPRPSATAGCASTARSAYSTPRTTWTTTSTASSPTTSSRLRPRATVKPPPLSVYLSLLLQVPLAISTADSVCVCVCVSWRSDGAESEREDAAGRRAGRGLEVAAWGIDRWWRAHGGPPETPRYAEKAPRRVAAAARVSPRPIQQPR

SEQ ID NO: 247925 - protein, 60 aa, Zea mays
  unsure (1)..(60): unsure at all Xaa locations
  Clone ID: MRT4577_157695C.1.pep
LFANVVGFLGAVSLWPLTVXYFPVEMSVKQRSVPRGSTKWICPQQLSVSCHLVSVPPSEK

SEQ ID NO: 247926 - protein, 107 aa, Zea mays
  unsure (1)..(107): unsure at all Xaa locations
  Clone ID: MRT4577_157696C.1.pep
VQALPSKSYFFCEAEPKSGGEPSFVPSHDLYRCNNEKLPAFVQKLKKDMIEYTRDIGEGNIPYSLIGRXWLFDFLTKDTASCXERAVKLGIKLDWPDHGMKTDMGPI

SEQ ID NO: 247927 - protein, 139 aa, Zea mays
  unsure (1)..(139): unsure at all Xaa locations
  Clone ID: MRT4577_157697C.1.pep
MADQLSDEQIVELKEAFGLFDKDGDGCITTKEVGSVMRSLGQNPTEAELQDVINEVGAEGGGKADLPGGXEVSGRTAHDPAPEGGFRXAYGGSGKGQNGFISWGELRHGMPNLGAKPTDDEGAEMIXREADVXGDGPIN

SEQ ID NO: 247928 - protein, 365 aa, Zea mays
  Clone ID: MRT4577_157698C.1.pep
MENDAKEARQGQHRVFPWGMLKVFLLLGLGLSAAGVLMARHGHEVAAATLFRPWLGVSPAAAAAEGLEHSMTDEELLWRASFAPGVRRYPFRRVPKVAFMFLTRGPLPLAPLWERFFRGNEGRYSIYVHALPSYRANFTSESVFYRRQIPSKVAEWGQMTMCDAERRLLANALLDISNEWFVLVSESCIPIFDFNTTYQYFLNSSQSFVMAIDDPGPYGRGRYDWNMTPEVDLTQWRKGSQWFEVNREVGIEIVKDTVYYPKFKEFCRPSCYSDEHYIQTMLSIETPQSLANRSVTWVDWSRIAAHPARFGRVDITEEFLREVREGQTCLYNEKNSTLCFLFARKFAPSALEPLLELAPTVLGFG

SEQ ID NO: 247929 - protein, 85 aa, Zea mays
  Clone ID: MRT4577_157699C.1.pep
RLMYLRNQIFSGQANLIYLCVRHFDCSYERPVEGVMHLWKRGSCTIPFQDTRYALMHASYIYIADTDNYDDMIQPTDCRRDHTVL

SEQ ID NO: 247930 - protein, 61 aa, Zea mays
  Clone ID: MRT4577_15769C.1.pep
LLHSGLLGWWLAFPLWTSSSWPHLNRHHTLNLHPLEGICTPVQNAQSRDKTSDFVHLGFLP

SEQ ID NO: 247931 - protein, 140 aa, Zea mays
  unsure (1)..(140): unsure at all Xaa locations
  Clone ID: MRT4577_1576C.1.pep
RVFHYTRHDGNASSFIYSDPPPPHLXRPSPSACLSLPQPIAPGPSFVLPSPPPPPPPPDPPXPPPPPPPPLSPPPPSXPPPPSPPPPPSPPPPPPPPPSPPPXPPLPPPPPPPPXPHPPPPPPPPPPPPPXPPPPPPPPP

SEQ ID NO: 247932 - protein, 57 aa, Zea mays
  unsure (1)..(57): unsure at all Xaa locations
  Clone ID: MRT4577_157700C.1.pep
PGPNVMXRCWXRDPGKRPEMAEVVSMLEAIDTSXGGGMIPKDQTQGCLSCFRQYRGP

SEQ ID NO: 247933 - protein, 76 aa, Zea mays
  Clone ID: MRT4577_157701C.1.pep
TCRANLMNLSVQKFRPRFLLTQMKTKSANITFYSYQDINLQDKPYEFIYAKVDFFNTDGDECCKHNLDNLKFGFKF

SEQ ID NO: 247934 - protein, 402 aa, Zea mays
  Clone ID: MRT4577_157702C.1.pep
MDPNRPPLGRRAFLSSSVHAATALLSILLLVTLLRLPLSTSPHAASTIADQKPKEQTCDPTSPLDCADPRLFHLMMRSAIEAFPAVHFARFGRPVPGDPPSSSCDMAWRSRSDFDSPSKATTKDYRRFAIGRDPHTCAYSVLSIGDYHSGPNARKPRRGATNATIATPPPPALSRSQFAKGAYLAYLGGGDRCKPMPHYLRSLLCALAEARYLNRTLVLDLTLCLAASYAAPGTGGMPEEGKRLAFYIDVEHLHSQVPIIEERQFWADWDSWGVQGQLRAHLIEDTRLALIKFSKGKDTLIIRKFGDVEPGNYWYNVCEGEAKHLLSPLHWVIRWTSSLMHIGDDILSRMQPDFDSVHIDAKGEDLRQKVEEVLGGRPQVYFSRVGVNKALVESLKEKCIGH

SEQ ID NO: 247935 - protein, 41 aa, Zea mays
  Clone ID: MRT4577_157703C.1.pep
GETVISIIIKTFLKLLRTVRTLTFETPQLHYQDLKGHLYEL

SEQ ID NO: 247936 - protein, 112 aa, Zea mays
  unsure (1)..(112): unsure at all Xaa locations
  Clone ID: MRT4577_157704C.1.pep
DLLFFLLKEYNLSGGLCPREATKYXFVPKTRSLTENKPSPXKVGYRNGFALLNYYTASGTLGDGRLTDVVGINTKLLVWARVTAGMADHVKVHLTAGIKRSRSRYAYEARRG

SEQ ID NO: 247937 - protein, 104 aa, Zea mays
  Clone ID: MRT4577_157705C.1.pep
HQGLWLNIKVLIINKLVIFNNVEFFNKHSHLKHKLQLPSEDRRLLSSSTKIKHIHRTSITQKEATMMWYLDQKESMPTMRKRHMRTLHTPSTEDCEQAYHHNCP

SEQ ID NO: 247938 - protein, 119 aa, Zea mays
  Clone ID: MRT4577_157706C.1.pep
SWICSAICISLCICAQQCTEQRGAYLRLFPVHIHVSLPFSIPKKLRVHLDVHGIFQLISQLIRHMLLYLSLYWRLQRQRSEQATAGDPRHPRSSKRSMRRRERHRAPHQAVEHPLRVLL

SEQ ID NO: 247939 - protein, 73 aa, Zea mays
  Clone ID: MRT4577_157707C.1.pep
KDPILHTRCMLQDRWDIIATKIKWVWPLFYTVFTVSFPVVIPLICCAVHSSFSGWLYYRGGSDRSSFPTFSLP

SEQ ID NO: 247940 - protein, 98 aa, Zea mays
  unsure (1)..(98): unsure at all Xaa locations
  Clone ID: MRT4577_157708C.1.pep
LKVRGPRLPRAEVLEIYRGSQENPWXSELPLKILNCVRVLARPHSQCFTVYILFSFCGSTFDGLESTCLNAFVWLSTLVRVLRIGLVTLKAAWPGRVG

SEQ ID NO: 247941 - protein, 67 aa, Zea mays
  Clone ID: MRT4577_157709C.1.pep
LVTAQPQPAFVYFAFSDRIAWYFGPCIFMLKGSQLWGSNIYVTSHAIKTLMEIKFCPREKTPAPEKV

SEQ ID NO: 247942 - protein, 93 aa, Zea mays
  unsure (1)..(93): unsure at all Xaa locations
  Clone ID: MRT4577_15770C.1.pep
MSKRGRGGSAGNKFRMSLGLPVAATVNCADNTGAKNLYIISVKGIKGRLNRLPSACVGNTVMATVKHGKPDLKNMVMLAVIVRQRXPWRRKSV

SEQ ID NO: 247943 - protein, 64 aa, Zea mays
  unsure (1)..(64): unsure at all Xaa locations
  Clone ID: MRT4577_157710C.1.pep
GGRSTALPRHPSPCTPAAPGAIMPQDRSLWCADDLSTTSRGRVVLGRFATVRYGSGPAGLEXYP

SEQ ID NO: 247944 - protein, 55 aa, Zea mays
  Clone ID: MRT4577_157711C.1.pep
YRCSRAMVARWVIVRSPSPMHLHHGLKIGHCIGRHDLAQKPSHWCVPVALYNTPR

SEQ ID NO: 247945 - protein, 34 aa, Zea mays
  Clone ID: MRT4577_157712C.1.pep
WSPTCREENEVDNDRKHVSIWQKAIMCYVNQYNT

SEQ ID NO: 247946 - protein, 88 aa, Zea mays
  unsure (1)..(88): unsure at all Xaa locations
  Clone ID: MRT4577_157713C.1.pep
EERMPTRELLCPAVIRGPGKDAQXRPAMAAQTRDIPLLAIIYAREEESSYQANISGLGRIFLERLSELGGGGGFLPVAGGTPGDPSAC

SEQ ID NO: 247947 - protein, 90 aa, Zea mays
  unsure (1)..(90): unsure at all Xaa locations
  Clone ID: MRT4577_157714C.1.pep
RADPPVRQLVRVLAKKYXHASLLSEAIIKQRLRFLFSGIIMAGTFPAVVTHQXSLRSRGKETNASVKLHLRAVLFMCATLRTFACEDIHL

SEQ ID NO: 247948 - protein, 33 aa, Zea mays
  Clone ID: MRT4577_157715C.1.pep
QCLIPSHTLSMICESIHTPVFGYCYPRLIPTCT

SEQ ID NO: 247949 - protein, 57 aa, Zea mays
  Clone ID: MRT4577_157716C.1.pep
AIYKLLLDFTHKMVDLKILPPLAPIGAIETQFCATHQIWGECKNMFSGTTSLPHLRQ

SEQ ID NO: 247950 - protein, 67 aa, Zea mays
  Clone ID: MRT4577_157717C.1.pep
LLMMVCFLLGGGWASWKDWLKPGGGVLMKNLNLFWGRGRSCFRWSGDEGGLEFSCVYGLRLKKTLAS

SEQ ID NO: 247951 - protein, 245 aa, Zea mays
  Clone ID: MRT4577_157718C.1.pep
MKMHEVEEPPAEITRDAHPAHALRLVATDDGAPFRCDGCKEPGSGQGRRYRCGHGCDFDLHVACALAGPTLRHPLFGEGLEFQLLPEAPPPVDKTFCDACGLRAPGLVYHCFDRDLDLHPTCAALKPESAFPGGHLAQLGWEAAEHRCVACDAAAAAAGKRFWAYRWAYGGTHGYLHVACMKKIAFQSWEQAYQASVVGGGLVEASVPTMTAVLHRKRTDEITGGVKIIDTGIRGQYLSSSTWGT

SEQ ID NO: 247952 - protein, 96 aa, Zea mays
  Clone ID: MRT4577_157719C.1.pep
MLQFPALMRQWPSPALIPASTLLPVPATSQEDELLLSMAESDLEDKLNEIRKTNSHLVIIGKPTGDTKEEYDAEVEDDDADNVEESDGDDFDQETG

SEQ ID NO: 247953 - protein, 141 aa, Zea mays
  unsure (1)..(141): unsure at all Xaa locations
  Clone ID: MRT4577_15771C.1.pep
PPLKYVAAXTAAARLGVQEEIKQDSHVALXDHESPARGLETIYLTTQDYXPLSSQALAHELVLNNGLSRWVIXTITWXEDGLGXKNLHSGGAXASSXSKAYKENPTLPLGTGRAVIMGAYLNDTLXKCIHLVEQTIIGTAL

SEQ ID NO: 247954 - protein, 44 aa, Zea mays
  Clone ID: MRT4577_157720C.1.pep
FRPHHVHSGVTWQRYGHSLYATLAQVGARGRCFRVLYALGTSDQ

SEQ ID NO: 247955 - protein, 255 aa, Zea mays
  unsure (1)..(255): unsure at all Xaa locations
  Clone ID: MRT4577_157721C.1.pep
MCPGLRNAMATHDHPQPSSYLLDLAAADDLPAFRRAVQDDNLSLVAASPWYGPSPKTAKTRTTHHLALHLRTPAMVAALYGSTAVLSYVLSIAPSEAARASASDGATPLLLAHAGRAPSAPHAARLLLTAGASADSLLALDHRHQTTRLPASPTKKQQHPDSSSPPEATTRKTTTNKDYSDLAQTEDINAGVFATDDFRMYSFKVNPCSRAYTHDWTECPFAHPGENARRREPAXWPNSCXPCPDFXRPQACRKG

SEQ ID NO: 247956 - protein, 96 aa, Zea mays
  Clone ID: MRT4577_157722C.1.pep
MLQFPALMRQWPSPPLIPASTLLPVPATSQEDEVLLAMAESDLEDKLNEIRKTNSHLIIIGKPTGDTKEEYDAEVEDDDADNVEESDGDDFDQETG

SEQ ID NO: 247957 - protein, 84 aa, Zea mays
  unsure (1)..(84): unsure at all Xaa locations
  Clone ID: MRT4577_157723C.1.pep
MIELTTLESNNLNMRKKKSICSIKKKKKKKNKKKRGKKKKKKKKKKKKKKRXKKKKKKKKKFFPFPGVILKGGNFEFFQHMGGR

SEQ ID NO: 247958 - protein, 95 aa, Zea mays
  unsure (1)..(95): unsure at all Xaa locations
  Clone ID: MRT4577_157724C.1.pep
VAPMERRCTXXXXXPSPXMKXEFYXXIVXRQIQAXXVXXXXRLXFXRFRXXXVARATNGLXSXXXKDXILXXXXLXLPXXYSXYXXXXFLLXTMV

SEQ ID NO: 247959 - protein, 46 aa, Zea mays
  unsure (1)..(46): unsure at all Xaa locations
  Clone ID: MRT4577_157725C.1.pep
APYINQPQLQQPQLXNLAEYSXQHQVLPFNQLAVLNSAAYLQQQLP

SEQ ID NO: 247960 - protein, 224 aa, Zea mays
  Clone ID: MRT4577_157726C.1.pep
MARTEDKLSSINQLLFDYRDLAHLLTPSSLNRVQRSSKLTVRLITDFNEAKEQVLIIRDNLRTAQSRHKSYADTRRSQLEFEEGDHVYLRVSPIRGMRRFKVKGKLPPRFIGPFKILKRVEEVAYQLELPNHLADVHDVFHVSQLNKCIRVPEEQLPMEELSVQGDLTYKEYPIKIIDTLTCVKRNKVIKMCKVQWSHHVEDEATWEQEDELQVEFPHIFPSSS

SEQ ID NO: 247961 - protein, 61 aa, Zea mays
  Clone ID: MRT4577_157727C.1.pep
KQPRPRPLSGLARRARGVCKIYTGGPSLPSSFQCFARFPFRALQSFLPHPVLFPVMPLFIS

SEQ ID NO: 247962 - protein, 153 aa, Zea mays
  Clone ID: MRT4577_157728C.1.pep
LLVRKKSSSRFAIGDAERGKASRRPSTAASLPLLSAPAYLDRSLLRPASRRRMMITSPVDVRRSRRLRRILTTLPRTRGRGTSWCMTRGLPQTWIRSSWRGFTTARAPPHGFTDGNGYTKFYAEHSRAEVRNAQFAEFLPNVGWSSCCTDIMV

SEQ ID NO: 247963 - protein, 72 aa, Zea mays
  Clone ID: MRT4577_157729C.1.pep
GEQSGLYFDAEVHAIERKTHISGKECDCKILVLYGHDNFEDIVSLKKLPRPYVEYDYNPQTWYELPKGTKIA

SEQ ID NO: 247964 - protein, 74 aa, Zea mays
  unsure (1)..(74): unsure at all Xaa locations
  Clone ID: MRT4577_15772C.1.pep
NSARGFSVLLTAVLTXDRLKAGVGRPRPDFFWRCFPXDGKPXVNNFTTGAICHGQASVIKEGHKSFPSGHTSCK

SEQ ID NO: 247965 - protein, 125 aa, Zea mays
  Clone ID: MRT4577_157730C.1.pep
GTAKFEARKRGFKPDNKGPAQISHQHNTLPTRNETGWGCSTCHPTAALSGDPPPHCCTTCRIFSTAAAGMREKGVRIHCLFLIVRGHTAKLRKREEGPAPHWVCALWLRKREKEWRWLGRGSRVV

SEQ ID NO: 247966 - protein, 532 aa, Zea mays
  Clone ID: MRT4577_157731C.1.pep
MLRLHHHSAPVSPHAAICPPSRLACSCICNKPNSRITASQGWSSIRRRITTVASGQSVPGYTPDDGDQCLETGNKLSFATVKEAFISSLNSVGVRSELILLALPAVLGQAIDPIAQLMETAYIGRLCALELASAGIGISIFNIVPKIFNIPLLSIATSFVAEDISRSATKHPSSGKLELTSVSSALILAAGIGIMEALALFLGSGLFLKLMGVSPVSPMHRPAKLFLSLRALGAPANVIMLAVQGIFRGFKDTKTPVFYIGLGNLSAVALLPLLIYGFKLGITGAAISTVVSQYIITVLLIWSLSKRAVLLPPRIDQLEFGGYLKSGGMLLGRTLSILLTMTIGTSMAARQGPTAMAAHQICLQVWLAVSLLADALAVSAQALIASSYAILDYKKVQKTAMFALQIGVFSGLALAIGLYASFGNISRLFTSDPEVLTVVKSCALFVCASQPINALAFIFDGLHYGVSDFEYVAQATIVVGVTSSLVLLWAPSVFGLAGVWAGLTTLMGLRMAAGILRLLQKAGPWSFMHEEP

SEQ ID NO: 247967 - protein, 80 aa, Zea mays
  Clone ID: MRT4577_157732C.1.pep
ERPPGQVKVKKKRGKILKNFFFFIILISFSENSYGKFGRLSFQMGGFFSPFLEALFGPLAILFKINWGDFYNVAKIKTLA

SEQ ID NO: 247968 - protein, 53 aa, Zea mays
  unsure (1)..(53): unsure at all Xaa locations
  Clone ID: MRT4577_157733C.1.pep
LKKWSLFLNYKPFFPTQFFFFLTILTLQRFPPLEDNLGIRFPEEIQSTAXGFY

SEQ ID NO: 247969 - protein, 100 aa, Zea mays
  Clone ID: MRT4577_157734C.1.pep
MSDEFSKRFFDYVDERKNLDIDRLAEAVAIPSVSSDLENHLVDINTLIAWTKGHIERLGGLTELVTIPACTEYRPLPPILCGSFVSNPHTKTVCVYGHLD

SEQ ID NO: 247970 - protein, 29 aa, Zea mays
  Clone ID: MRT4577_157735C.1.pep
NLDERYSQSDEAGFKRNQPHCALESRVMY

SEQ ID NO: 247971 - protein, 158 aa, Zea mays
  Clone ID: MRT4577_157736C.1.pep
HNASHQPLSKVSSAFRSFSSSESMVLLCSDLVRRSESREDEDGGDELRFLLSPTTFNDGGGQRRRFAMAILLRGTASTAATSVALSTRPSSLRSARSGPPPDPPTHDLFSPNLAANDDGARRLEGGDAVANARTMENTEVSPRTDGRSVGQPGRLEVP

SEQ ID NO: 247972 - protein, 60 aa, Zea mays
  unsure (1)..(60): unsure at all Xaa locations
  Clone ID: MRT4577_157737C.1.pep
XYFFFSSLLTRVSFSRARLEPIISLCEELHANNSPGGETYSIHSLTHPSWAPPTFNSHRT

SEQ ID NO: 247973 - protein, 166 aa, Zea mays
  unsure (1)..(166): unsure at all Xaa locations
  Clone ID: MRT4577_157738C.1.pep
PGPFLLKNLGLWRKASNDRGFVGGPLAFFFIWGEPFREGAHQGVNLFTPRNPSVVGPGGPMGVGGRVSFWPPICWGGWPPFPSGGGQEGENPPVGRRPSGPFLFSPGRPQQLVGPPWVPPPPFFSFFFVGLIYFFLVVIVGGFFFFFFFLYFFFFFFFFXPGTRXG

SEQ ID NO: 247974 - protein, 61 aa, Zea mays
  Clone ID: MRT4577_157739C.1.pep
TFSNGRWVTNRVVLKIAFIVRSTGNLQPNKRFYMKLNKKSMYLTVECCALLNKNSVFANTD

SEQ ID NO: 247975 - protein, 264 aa, Zea mays
  unsure (1)..(264): unsure at all Xaa locations
  Clone ID: MRT4577_15773C.1.pep
GVRLLXMYGRXGSMSDANVVFSNRTKDDVISWTAMIVGHAEHGHSKEAFELFEEMCRIGLKPDHVTFIGVLTACSHAGELELGLRYLNAMNKSYGLEPEKEHYGCVVDLLARAGRIHEAEELIGRIAAEERDGVVWTSLLRACAARGAEETGKIAAERMMEAEPWGSGAHVVMANLYASKGLWCEAAQERHLMKQKGVLKGAGWSSVEVGGDDRGVGVFVSGDRTNPQDSAIYMMLELMYYGAGMVRQIPDQLDLGSEGELTVY

SEQ ID NO: 247976 - protein, 92 aa, Zea mays
  Clone ID: MRT4577_157740C.1.pep
RSGIPVAHRPAILASSTLLGSSAAEVTAQHGGKEEDVRLGANKFSDASPRPAAQARRQDYKSPGGGSSTRELKSCPSPAGCRFVPLPFLLFS

SEQ ID NO: 247977 - protein, 88 aa, Zea mays
  Clone ID: MRT4577_157741C.1.pep
GFNRSHSIQPQSSSALCYSPPLSTYLNYISAKVVGRRSLRCCRPHQSTVPDNVCRGALHAQLNSVRGSHGPIRYGVCIRTGDRAGMQQ

SEQ ID NO: 247978 - protein, 249 aa, Zea mays
  unsure (1)..(249): unsure at all Xaa locations
  Clone ID: MRT4577_157742C.1.pep
MEATAATLSRSASLSXPAAPTAPAPPGSRHHPHTSPRSXAASPRGLPLRRARSDAEVAYFARSAVLVRHAPIPAIIVADEEERQDDNSKAPAGLDGAGAGRNGSSHRGGSGGRGGGGGGGGCDMGEYYRRVLRVDPGNPLLLRNYGKYLHEVERDLAGAEGCYARALLACPGDADLLSLYGRVIWEARQEKDRAAAYFERAVQAAPDDCYVLGSYASFLWDAEDDDEETGTPAVDVVASCDSPALVPAC

SEQ ID NO: 247979 - protein, 72 aa, Zea mays
  Clone ID: MRT4577_157743C.1.pep
ERACKNLTAGSEPVHIWDFSGRTTYIVMTELNRSPHDSKSADQEVSSSPSSLPSHLIPLQFCWDCIVTGSYF

SEQ ID NO: 247980 - protein, 145 aa, Zea mays
  Clone ID: MRT4577_157744C.1.pep
HSWLLPLAPFKSSTTLYGSGLSVRFFTLSLMSDSNVSSPMDVSSCRSMRLPYQPLSQLETSWLLFSSPLAEASSRHEAPRNLSDGRGFGGCDVGAEEGEAVCEVSHRRHSCSMACCARSIRKPLDAGGRRSGTRRLVRWSCVLRS

SEQ ID NO: 247981 - protein, 68 aa, Zea mays
  Clone ID: MRT4577_157745C.1.pep
KFYPDSLSDDASARRYLPGLPPSLEVSTYPCASSVRHAPFLLSSVKSSHLRHFLLPPRSARTSAPPGL

SEQ ID NO: 247982 - protein, 84 aa, Zea mays
  Clone ID: MRT4577_157746C.1.pep
KEKDMIFGPRSPKGYPPGPKLGRNSRPGKIPGGKTNGFFLCPRGGGKTQPKAGGLQNWTCSSPRGGDWVKNGGDFLFGHYTLNK

SEQ ID NO: 247983 - protein, 234 aa, Zea mays
  unsure (1)..(234): unsure at all Xaa locations
  Clone ID: MRT4577_157747C.1.pep
MAAAAAATVVTPSSPRSMAVAAAIIAFFLAVTAAAASPVPAIYVLGDSLADVGNNNHLVTLLKADFPHNGVDYPGQKATGRFSNGKNSVDFLAENLGLATSPPYLALSSSSNPNYANGVNFASGGAGVSNLTNKDQCISFDKQIDYFATVYASLVQSLGQAQATAHLAKSLFAITIGSNDIIHYAXQLRRQYQAGQCQWRRRRXSQQFVDALIHTLTGQLQRLYALGARKVLFL

SEQ ID NO: 247984 - protein, 339 aa, Zea mays
  Clone ID: MRT4577_157748C.1.pep
MPAALSMVPACDAEEPLLAESSDRFSMFPIRFPQIWEFYKKAVASFWTAEEVDLSSDARHWDTTLSNDERHFISHVLAFFAASDGIVLENLASRFMSDVQVAEARAFYGFQIAIENIHSEMYSLLIETYIRDDVEKDRLFRAIDTIPAVRRKADWALRWIDGGERFAERIVAFACVEGIFFSGSFCAIFWLKKRGLMPGLTFSNELISRDEGLHCDFACLLYDILRGKLDESRVRTIVADAVDIEREFVCDALPVALVGMNGDLMSQYIEFVADRLLMALGCKKMYNVTNPFDWMELISLQGKTNFFEKRVGDYQKASVMNSLNGSAAANHVFSIDEDF

SEQ ID NO: 247985 - protein, 152 aa, Zea mays
  Clone ID: MRT4577_157749C.1.pep
MGGSGRAALLLALVVVAVSLAVEIQADAGYGYGGGYTPTPTPATPTPKPEKPPTKGPKPDKPPKPTPPTYTPSPKPPTHPTPKPTPPTYTPSPKPPTPKPTPPTYTPSPKPPTPKPTPPTYTPTPKPPATKPPTYTPTPPVSHTPSPPPPYY

SEQ ID NO: 247986 - protein, 95 aa, Zea mays
  Clone ID: MRT4577_15774C.1.pep
RGDGTPSGRAVPVATPAPSALPTPPPPPHHVPGKNASSPSQGPAPSPALAPAPAPDANGTSSSPPSPSSAVAAFRGGFLLACLLSVTAGAAIILV

SEQ ID NO: 247987 - protein, 377 aa, Zea mays
  Clone ID: MRT4577_157750C.1.pep
MMGGSGRAALLLALVAVSLAVEIQADAGYGYTPTPTPATPTPKPEKPPTKGPKPEKPPKEHKPPKEHGPKPEKPPKEHKPTPPTYTPSPKPTPPTYTPTPTPPKPTPPTYTPAPTPHKPTPTPPTYTPSPKPPTPKPTPPTYTPSPKPPASKPPTPKPTPPTYTPSPKPPTPKPTPPTYTPSPKPPATKPPTPKPTPPTYTPSPKPPTPKPTPPTYTPSPKPPATKPPTPKPTPPTYTPSPKPPTPKPTPPTYTPSPKPPTPKPTPPTYTPSPKPPTHPTPKPTPPTYTPSPKPPTPKPTPPTYTPSPKPPATKPPTPKPTPPTYTPSPKPPATKPPTPKPTPPTYTPTPKPPATKPPTYTPTPPVSHTPSPPPPYY

SEQ ID NO: 247988 - protein, 363 aa, Zea mays
  Clone ID: MRT4577_157751C.1.pep
SRPRSTGPSRRSRPRSTSRRRPRTPRAPNPRRRRTLPPRRPPSRRHPHTLPPLRPTNPLPLLRRTPLPPNLRHLSRPRRRTLQAPSHRLASLPRPSRPRRRTPLLPSLDAQSMEILSRWIPGWGIDAVTLPLAVDLNVATDSATKAVRTLARDEDFKFRAAHWGDLHRRLHEELPPAVTVLWGHQFLSFEAPDDTRRVVATARVLRTGGTVEATGDLLIAADGSTSSVRRSFLPDLKLRYSGYCAWRGVFDFSGKESSDTMTSIRRAYPELGNCLYFDLAYKTHAVLYELPRSRLNWLWYINGPEPELAGNSVTMEATDAMVGRMRNEAERVWCPELARLVRETAAPFVNVIYDADPLRRLSW

SEQ ID NO: 247989 - protein, 126 aa, Zea mays
  Clone ID: MRT4577_157752C.1.pep
ASTVVAVVTEVQRPTAQLQASSHRRPPSSAETPSAKRPSTPVPSAQQASRLQKLKEKAAFRNPDEFYFKMINSRTVGGIHRPKPEDNKYTEDELLLLKNKDMGYILQSAQSEKRLLNWNGEKSIKC

SEQ ID NO: 247990 - protein, 60 aa, Zea mays
  Clone ID: MRT4577_157753C.1.pep
GRVCGRVGGRTETNEDGCEIKKKKKKKKKKKKKKKKKKKKRKKQYNKKMKKGGCIWGGFF

SEQ ID NO: 247991 - protein, 236 aa, Zea mays
  unsure (1)..(236): unsure at all Xaa locations
  Clone ID: MRT4577_157754C.1.pep
MGGSGRAALLLALVVVAVSLAVEIQADAGYGYGGGYTPTPTPATPTPKPEKPSTKGPKPDKPPKEHKPPKEHGPNPQKPSQEHKPTPPTYTPSPKPTPPTYTPSPKPPTPKPTPPTYTPSPKPPTPKPTPPTYTPSPKPPTHPTPKPTPPTYTPSPKPPTPKPTPPTYTPSPKPPTPKPTPPTYTPSPKPPATKPPTPKPTPPTYTPTPKPPATKPPHYTPTXXVSHTPXPPAPYY

SEQ ID NO: 247992 - protein, 71 aa, Zea mays
  Clone ID: MRT4577_157755C.1.pep
WWTFYGNPHARSIHLVFSTLWIFPFQFSNRSPPNSRELIRKREGKINRLEHRACNFPGEKQRIRQHEKPVN

SEQ ID NO: 247993 - protein, 32 aa, Zea mays
  Clone ID: MRT4577_157756C.1.pep
KFISRPENNHAYLLIIYLGSNAFCNSSSIKQQ

SEQ ID NO: 247994 - protein, 220 aa, Zea mays
  unsure (1)..(220): unsure at all Xaa locations
  Clone ID: MRT4577_157757C.1.pep
MMGGSGRAALLLALVAVSLAVEIQADAGYGYTPTPTPATPTPKPEKPPTKGPKPEKPPKEHKPPKEHGPKPEKPPKEHKPTPPTYTPSPKPTPPTYTPTPTPPKPTPPTYTPAPTPHKPTPTPPTYTPSPKPPTPKPTPPTYTPSPKPPASKPPTPKPTPPTYXPTPKPTPPTYTPSPKPPTPKPTPPTYTPSPKPPTPKPTPPTYTPSPKPPATKPPTP

SEQ ID NO: 247995 - protein, 67 aa, Zea mays
  Clone ID: MRT4577_157758C.1.pep
MPSRLQKLKEKAAFRNPDEFYFKMINSRTVGGIHRPKPEDNKYTEDELLLLKNLDIGYILQSAQSGK

SEQ ID NO: 247996 - protein, 312 aa, Zea mays
  Clone ID: MRT4577_157759C.1.pep
MGGSGRAALLLALVVVAVSLAVEIQADAGYGYGGGYTPTPTPATPTPKPEKPPTKGPKPDKPPKEHGPKPEKPPKEHKPTPPTYTPSPKPTPPTYTPTPTPPKPTPPTYTPAPTPHKPTPKPTPTPPTYTPTPKPPTPKPTPPTYTPSPKPPTPKPTPPTYTPSPKPPTPKPTPPTYTPSPKPPATKPPTPKPTPPTYTPSPKPPTPKPTPPTYTPSPKPPTPKPTPPTYTPSPKPPTHPTPKPTPPTYTPSPKPPTPKPTPPTYTPSPKPPTPKPTPPTYTPTPKPPATKPPTYTPTPPVSHTPSPPPPYY

SEQ ID NO: 247997 - protein, 33 aa, Zea mays
  Clone ID: MRT4577_15775C.1.pep
EYNNFTTGAICHGQASVIKEGHKSFPSGHTSCK

SEQ ID NO: 247998 - protein, 79 aa, Zea mays
  Clone ID: MRT4577_157760C.1.pep
LSMHVQVYFYKKKLSIYGGTQNSVDVCINHHMLLCLMSCGLVFDLVNSSCPPFGTVIFAATYIPTDRHLELFFCVCLGY

SEQ ID NO: 247999 - protein, 318 aa, Zea mays
  Clone ID: MRT4577_157761C.1.pep
MGGSGRAALLLALVVVAVSLAVEIQADAGYGYGGGYTPTPTPATPTPKPEKPPTKGPKPDKPPKEHKPPKEHGPKPEKPPKEHKPTPPTYTPSPKPTPPTYTPTPTPPKPTPPTYTPAPTPHKPTPKPTPTPPTYTPTPKPPTPKPTPPTYTPSPKPPTPKPTPPTYTPSPKPPTPKPTPPTYTPSPKPPATKPPTPKPTPPTYTPSPKPPTPKPTPPTYTPSPKPPTPKPTPPTYTPSPKPPTHPTPKPTPPTYTPSPKPPTPKPTPPTYTPSPKPPTPKPTPPTYTPTPKPPATKPPTYTPTPPVSHTPSPPPPYY

SEQ ID NO: 248000 - protein, 147 aa, Zea mays
  Clone ID: MRT4577_157762C.1.pep
CVQGVELNAQQASRLQKLKEKPAFRNPDEFYFKMINSRTIGGIHRPKPEDNKYTKEELLLLKNKDMRYILQSVQSEKKKIEKLSSTLHEVDNMPQNKHVYFPEDREEAKEIQSRIGQSSSMPDPLFLLFMESHFYCLLVLTFIFVSI

SEQ ID NO: 248001 - protein, 73 aa, Zea mays
  Clone ID: MRT4577_157763C.1.pep
PEHTHKNSSKCLSVGIYVDVRINHHMLLCLMSCGLVFDLVNSSYPPFLLHDRYTRHLELLFLQLHIYQMSVSW

SEQ ID NO: 248002 - protein, 117 aa, Zea mays
  unsure (1)..(117): unsure at all Xaa locations
  Clone ID: MRT4577_157764C.1.pep
QHTKHNIFPTISTKIFIWLIRHSLISTFSTPTIFLQFSQSPITSLLPPYLSPXISLXYLKPIFXPYIIQQSISTFILPLLPLYLQQPSSLLQHLPLFHFFSQNYXSQQLQQLFTNKP

SEQ ID NO: 248003 - protein, 115 aa, Zea mays
  Clone ID: MRT4577_157765C.1.pep
SRRISSTRLVLVQVSQTTFLQWSTTRLESITAYIARSQSISRMSLDLRLVVQQNLVPIPPLLRFVPARHGWWYLSSDTSGGRAQGLRLSLVLSASAIRGAESGPHILTDPALVPN

SEQ ID NO: 248004 - protein, 87 aa, Zea mays
  Clone ID: MRT4577_157766C.1.pep
PVPMVLNTGLCSPGRAFFWCPNLEGDRCGAWFSYRQKKFRPRGAGANMLSPAPARLIFDQLSVYEMTAVCVHCLVECAVNLVSYRSA

SEQ ID NO: 248005 - protein, 65 aa, Zea mays
  unsure (1)..(65): unsure at all Xaa locations
  Clone ID: MRT4577_157767C.1.pep
HKXEHLNHYFDVQIQXDKSIDIYKINTLVIILITKKVKQILFRDGRSTYRDSSERSFSDMQSCLS

SEQ ID NO: 248006 - protein, 85 aa, Zea mays
  Clone ID: MRT4577_157768C.1.pep
FGKMTWGPVFPDGFLCEIVRVLLLKPGATSSVCFLFLTGPRKARQSGFNRGGFLVAPNPFSVLKGPVFPGRGLGFFHSAAPMGGV

SEQ ID NO: 248007 - protein, 106 aa, Zea mays
  Clone ID: MRT4577_157769C.1.pep
CLKEKTYIQKHTYLIHFTVKFLTLATKDYWFQYVTATSPSNYFQSGLSSSLTENSVKKFPNCQIRQSLHSFQSISCISSTEDLYTTQIPWFLIFNDIQRIEGDHMK

SEQ ID NO: 248008 - protein, 58 aa, Zea mays
  Clone ID: MRT4577_15776C.1.pep
VGGERVGYVGPHLGVLAGGLDALVLLGWLHVCGLGAFDMPCVRRRARLGKLELCALVC

SEQ ID NO: 248009 - protein, 142 aa, Zea mays
  unsure (1)..(142): unsure at all Xaa locations
  Clone ID: MRT4577_157770C.1.pep
PPWRIPRWGPSTATSRPLTTTPSTTTRTPPLSARPTGPPXTEPRDDVXPRPAPKQPRAAPPPATRPSHSPAPRRASAPPPLSPREPSPPSEERRLVSFRAGVAKSLRYFIYLFNMVAFLGLIFVCKHTAKANRPFVCVKTFQ

SEQ ID NO: 248010 - protein, 135 aa, Zea mays
  Clone ID: MRT4577_157771C.1.pep
LSHGDETGDTTHALLRTGRHRQRQTVGKLHHLRAKNTQERARVRRGASQTPRHYRTGSMGTDATRHSAQPPKAESSRRAAPKRPAKRRATHGDGGSTKGPLGTEALHADQATKDGQTQPDNASVITRGGAQQRGG

SEQ ID NO: 248011 - protein, 75 aa, Zea mays
  Clone ID: MRT4577_157772C.1.pep
WLRFSSSIFSWVRSLLETNFATLRLIRCRGSGGGSLAMGSGLKLMKESHVVLGSWTQQIWAKRNHSTEPVRTSPL

SEQ ID NO: 248012 - protein, 71 aa, Zea mays
  Clone ID: MRT4577_157773C.1.pep
TSPKLQFTYPIFLQPSYTIKNHLDNPNLYPFFYTSLLFTQPSFFISKVTSPNLLFPTFFSPLISSTQIPPL

SEQ ID NO: 248013 - protein, 102 aa, Zea mays
  unsure (1)..(102): unsure at all Xaa locations
  Clone ID: MRT4577_157774C.1.pep
MTLLPSYPDSTIPLILHVTKAARKXAPTIGGSNNSHRYXRTATEALREIRKNHKRTEMLISKLPFQRLXRXIVQHSTTDMRCQSHAVIALXEAAEVYLATTV

SEQ ID NO: 248014 - protein, 65 aa, Zea mays
  Clone ID: MRT4577_157775C.1.pep
SSFKHFFYYFRLDVLEWIYCFRSAGHIITVRLLHWNGECLRSINACQRAACSEQLHDSSVIVLAH

SEQ ID NO: 248015 - protein, 115 aa, Zea mays
  Clone ID: MRT4577_157776C.1.pep
PLDGRRQFSPVPLHFITDHPSRRSSSAIKHDEIGTRRHLHARIPRDNDSNRWLPRSQNYHAQPTTSGLSCRITSTATDSWLTFSSAAAGRTSADAIGTDDTINEQIPHQYKLHLQ

SEQ ID NO: 248016 - protein, 101 aa, Zea mays
  unsure (1)..(101): unsure at all Xaa locations
  Clone ID: MRT4577_157777C.1.pep
MAFLKTLNPLIRRQATPISNPRPLLSLHTVLDSSSPNTTAAATPFANAVHTHVPIRSSGPLFLSSAPWMLSQXATPLTAAAAALGVKLRRAQALPGGRALA

SEQ ID NO: 248017 - protein, 62 aa, Zea mays
  Clone ID: MRT4577_157779C.1.pep
MTYNDSSKQIKMRYTLKSRMKIIHEDESTFYAWPSYELSHTLTSQPWYSTHHRVTRQSMLIG

SEQ ID NO: 248018 - protein, 94 aa, Zea mays
  Clone ID: MRT4577_15777C.1.pep
MHMAMASRSSATGTAVLCFLVVVSLFMAPSLFVAGTEAAAAYGAAGAGAGRKMKQAAAGAVATKQDGYGYPATSSPAGYPAVPCCPHPPEGGRG

SEQ ID NO: 248019 - protein, 103 aa, Zea mays
  Clone ID: MRT4577_157780C.1.pep
RVFPKGRPGEGKGERGGPPVGARAVVLLQVYIPVPAGSGWQFPRPRFVAPPVFKLVWPLGLNGGIRDSRPTQGPWIKEAPVFFLPKVPVSPGRGGVAYVSCLF

SEQ ID NO: 248020 - protein, 57 aa, Zea mays
  Clone ID: MRT4577_157781C.1.pep
HNGTKLECRSPPQIVSRNPVDPHYPYPFTPVGSKAVSFIHPPMCFSHSRCGGLMIHQ

SEQ ID NO: 248021 - protein, 81 aa, Zea mays
  Clone ID: MRT4577_157782C.1.pep
WPKAHGSGTPIFNWSRFPAGKYGMDFNCWIYTSESCYALRCRGWTDFTSDSYTVIIMCTKLARENLMQDAYTTNIMPLKPQ

SEQ ID NO: 248022 - protein, 70 aa, Zea mays
  Clone ID: MRT4577_157783C.1.pep
YSPWACHFISKDSIILNLSTKLFVALLLLVCYTVTQGGPMTIVSFRKCDSHSFLFQGTLLEGRQLPKRLP

SEQ ID NO: 248023 - protein, 49 aa, Zea mays
  Clone ID: MRT4577_157784C.1.pep
WDVSLKGCLALSAQIQCVAGAPSLNYLFKVVVVIIKERGMLMPYFLGSN

SEQ ID NO: 248024 - protein, 60 aa, Zea mays
  Clone ID: MRT4577_157785C.1.pep
QINVLNFCEDLAPADLAEDEVLLQTRHYETINTLRLKFEKILGILHGSCRMDHLELVDVA

SEQ ID NO: 248025 - protein, 66 aa, Zea mays
  Clone ID: MRT4577_157786C.1.pep
LGLHFNWMFLALRYVICSGLGLRSWLCSYHGRNEKNPPLQVWYGISCGAFPLGWVFCPFSFWLGKS

SEQ ID NO: 248026 - protein, 47 aa, Zea mays
  Clone ID: MRT4577_157787C.1.pep
YGVAVSFCLGVSVRSHFGLGVGTLLFPLEAPSMGRTEKTVTKVFVNR

SEQ ID NO: 248027 - protein, 133 aa, Zea mays
  Clone ID: MRT4577_157788C.1.pep
SARDRLQHLTDKSDVYSFGVVLLELLSGCKVIQRFEGSGTPKNVVDVTVPHIEADRVHRVLDARLPLPTPAEMEAVAYVGYLASDCVRPAGRDRPTMSEVVGVLERAVAACEEHDDGGGEAVLSRSCTDGSTA

SEQ ID NO: 248028 - protein, 194 aa, Zea mays
  unsure (1)..(194): unsure at all Xaa locations
  Clone ID: MRT4577_157789C.1.pep
GLRIRVYDRKMXFVSNHFAAHLEXVSRRXADFDHIYRTMAFNKPHGSTASATSVQLHRTVNVNGNQVEEVRPDLAEADMIVFLGDFNYRLYGITYDEARDMVSQRSFDWLREKDQLRAEMKAGKVFQGMREGIIKFPPTYKFQKHQPGLGGYDSGEKKRIPAWCDRVLYRDSRSVSVAECSLECPVVASITSYV

SEQ ID NO: 248029 - protein, 164 aa, Zea mays
  unsure (1)..(164): unsure at all Xaa locations
  Clone ID: MRT4577_15778C.1.pep
FAWXXVCVCXXXXSXXSXXXXVXXLXGFXLFXFXCXSWLXXWXSAXXXXCXAXCXXCXXXPXXSLGXXCXXXAXXXXXXXGXXWXLGVXLLXXSSXALXCSXLXXPXXALSFXVGWXFXSXXSCGXCXXCPFSXXSXXXACWXSXVXVGCCXYVRXRXRGSXPG

SEQ ID NO: 248030 - protein, 105 aa, Zea mays
  Clone ID: MRT4577_157790C.1.pep
HASAHASSYASAHACAHASVHAFGEKEKEKDREHNRRREILKQEDESDEEDNRKRKRRSSSSLEDRKRRRQREKEEDLADKIREEEEIAEARRRAVELQQQADEA

SEQ ID NO: 248031 - protein, 54 aa, Zea mays
  Clone ID: MRT4577_157791C.1.pep
MNHYWLKKKKKKKKKKKKKKKKKKKKKKKKKKKKKKKKKTQKKKQRKKKKKKAP

SEQ ID NO: 248032 - protein, 54 aa, Zea mays
  Clone ID: MRT4577_157792C.1.pep
KAHGGVHDGTEIVLWKWCEGDNQRWKILPWCKSTTHCAFAVCPLPVPPNLLMTL

SEQ ID NO: 248033 - protein, 178 aa, Zea mays
  unsure (1)..(178): unsure at all Xaa locations
  Clone ID: MRT4577_157793C.1.pep
MAPEMMEEGQSASYTVDDALLSSGFGRFQILILSYAGIGLIAEAMEMMLLSFVGPSVQLEWKLTSHQESMITSVVFVGMLIGAYSWGVVSDNYGRRRGFLFTAIMTSGAGFFSAFAPNYLSLISLRFLVGIGLGGGPVLGSWFLEFXPAPTRGTWMVVFSAFWTVGTILEASLAWTIM

SEQ ID NO: 248034 - protein, 61 aa, Zea mays
  unsure (1)..(61): unsure at all Xaa locations
  Clone ID: MRT4577_157794C.1.pep
YLTHRSCSQNXRXCCDXISXXPYTPGRSAQGSSSXLEDGEVLSSPGKGRDPTCRDRCRTAW

SEQ ID NO: 248035 - protein, 66 aa, Zea mays
  Clone ID: MRT4577_157795C.1.pep
THPPSASGPSAETIDVRLQDRTCLAGSHLLACHGWYSSKKVVSCHHCEGQAPNMSKYARERRAGSR

SEQ ID NO: 248036 - protein, 81 aa, Zea mays
  unsure (1)..(81): unsure at all Xaa locations
  Clone ID: MRT4577_157796C.1.pep
HASAKDTILXWRPRTAAMPKARHYGPVRAFEDALPQNVALIYTHFTMFTASDNISIALVTPSPAMELANIQYHANQAPASV

SEQ ID NO: 248037 - protein, 121 aa, Zea mays
  Clone ID: MRT4577_157797C.1.pep
LVAMASNNNDKSIAATALLFLAVALMLAASVRAQALLAPTPAPAPSQNPCPAGFPNLLAFKIAKMQFFLSNGTTLVFSLSRPITTSMASSLFKGVPRVVCICFPSTNSTMTMIRPLECQQA

SEQ ID NO: 248038 - protein, 63 aa, Zea mays
  Clone ID: MRT4577_157798C.1.pep
TKTTQRGRGCFVIPHTEPMGAETHDKTTLSDPRKTREGPSNPITHRIMRSSRTATTMNTKLLC

SEQ ID NO: 248039 - protein, 94 aa, Zea mays
  unsure (1)..(94): unsure at all Xaa locations
  Clone ID: MRT4577_157799C.1.pep
TFPSQVFSTPPVFYPSKNFTSRSKKKGARSLRLANKGKNKNKIKKGRLIDWLRLPGPWGMVIRRRAWSRGAGPRDPTGHTRRPRVLCVVTTAXG

SEQ ID NO: 248040 - protein, 109 aa, Zea mays
  Clone ID: MRT4577_15779C.1.pep
CMISVPMHYDKLRLRMSLSNVSWSQSIASSLNSLIPFRFVLRRSESRWRLRRCMLLGGARRSAFGMVKLWCRSSRISSSSFHQGCPSPEACAHNAAMHMAFRSTACWSQ

SEQ ID NO: 248041 - protein, 391 aa, Zea mays
  Clone ID: MRT4577_1577C.1.pep
MALRLHDVALCLSPPLAARRRSGGSFVAVASMTSAVSTRVENKKPFAPPREVHVQVTHSMPSHKIEIFKSLDDWARDNILTHLKPVEKCWQPQDFLPDPASEGFHDEVKELRERAKEIPDDYFVCLVGDMITEEALPTYQTMLNTLDGVRDETGASPTAWAVWTRAWTAEENRHGDLLNKYMYLTGRVDMRQIEKTIQYLIGSGMDPRTENNPYLGFIYTSFQERATFISHGNTARHAKDFGDLKLAQICGIIASDEKRHETAYTKIVEKLFEIDPDGTVVALADMMRKKISMPAHLMFDGQDDKLFEHFSMVAQRLGVYTARDYADILEFLVDRWKVANLTGLSGEGNKAQDYLCTLASRIRRLEERAQSRAKKAGTLPFSWVYGRDVQL

SEQ ID NO: 248042 - protein, 183 aa, Zea mays
  Clone ID: MRT4577_157800C.1.pep
MQYRLVSMLAAGILVAMSSAAPVPSADNLSITNPPNTIELGKPSSEISWGRSVATEVTNPDIVDISPPTSEIIWSKDKKARTDEPAVNPDDIVLTPPNSEIIWSKARSVEFEKPKDSFNLGNANTDVTWGKRESTTTVGTPEDTIELGKPSTEITWSKEKRDELVTPDDSISLGKPSTVVTWS

SEQ ID NO: 248043 - protein, 186 aa, Zea mays
  unsure (1)..(186): unsure at all Xaa locations
  Clone ID: MRT4577_157801C.1.pep
MGAAKEAGVSPSPDAGSSPPSSXRPRPLSDPNSHLYPPHPPLLHPXSYPPPTPXPGRSRPPDPQSPHLSPPISPPPPLPHPPRPSLAPPPLPPPPPGPPPPRLSCSDSPRPPPRPGSRPPRGRARLERRRWWPWTPRLSWAAPPPRLPGRCSLPPQARLGRRRWWWPWPPLAPPARNEARKQWRQQ

SEQ ID NO: 248044 - protein, 314 aa, Zea mays
  Clone ID: MRT4577_157802C.1.pep
MAGRFDLQGRHGKSRVRVSRVWRRPAEAGGHLFVEWSVAVSVVSDCLPSYTSDDNSAIVATDSIKNTVYVKAKECTEVVSMEEFAVILGRHFTSLYSQVSEATVTIVERPWERVAVDGKPHSHGFKLGSEKHTTEVIVKKSGSLLINSGIQGYSLLKTTQSGFEGFVTDRYSLLPDTRERIVATEVTAWWRYPFEHVSQLPSKPFCFTQRYQDVKKVLAETFFGPPDVGVYSPSVQNTLYLMAKEVLTRFPDISSVQLRMPNLHFLPVNLGTKEAPLVKFADDVYLPTDEPHGTIEATLSRPMTKLVVMLVSSS

SEQ ID NO: 248045 - protein, 368 aa, Zea mays
  Clone ID: MRT4577_157803C.1.pep
MYTSTLATPNPDGPPDPPAGIAGATQTQTARPSGRLLASQSQRTRATVGITDQIPAGAAAMAENFQLQGRHGKSRVRVSRVWRRPAAAGGDVIVEWNVAVSIVSDCLPSYTSSDNSAIVATDSIKNTVYVKAKECTEVVSMEEFAVILGRHFTSLYPQVSEATVTIVERPWERVTVDGKPHSHGFKVGVEKHSTEVIVKKSGSLLINSGIQGYSLLKTTQSGFEGFVTDRYRLLPDTRERIVATEVTAWWRYPFEHVSQLPSKKPFCFTQRYQDVKKVLAETFFGPPDVGVYSPSVQNTLYLMAKEVLTRFPDISSVQLRMPNLHFLPVNLGSKEAPLVKFADDVYLPTDEPHGTIEATLISRPMSKL

SEQ ID NO: 248046 - protein, 147 aa, Zea mays
  Clone ID: MRT4577_157804C.1.pep
MCLTVTRRSGRETIDRGPSPSSLPPPPQSNSTHTELDRTWISRHAGAGPAARHTSSRRRGGGPDTAPALPGGTTSMPGGNIGGRRPFTRIRPSPPTGDEGYVAQATGIHTIMAGEHCYRGRGPSGVHGPDQQHAHHARSEGRVHRAC

SEQ ID NO: 248047 - protein, 60 aa, Zea mays
  unsure (1)..(60): unsure at all Xaa locations
  Clone ID: MRT4577_157805C.1.pep
HRPVYGVLACEDKNVNVLEHPALIILLAVKRDTLSVSKHISCXMFVKSLESISRACNLQD

SEQ ID NO: 248048 - protein, 45 aa, Zea mays
  Clone ID: MRT4577_157806C.1.pep
LPFLRHLAILCDAGIDSHLPAYSSFDGISPTPVNDCLTSPDFKNG

SEQ ID NO: 248049 - protein, 138 aa, Zea mays
  Clone ID: MRT4577_157807C.1.pep
MSAPRGRLAGKNAVITGAGGGIGLETSILFTKEGASILMSDISQPALEKAAAKVKQLVPDAPRVEILKVDVSKESEVQAMIESLDSWGGIDVLFNNAGIMHAQDDDDVNTPENIWDLTQNIQPSRMCGSGLQTRRSFS

SEQ ID NO: 248050 - protein, 82 aa, Zea mays
  Clone ID: MRT4577_157808C.1.pep
FRFLWGHLRSQQTTNQGSESRYLEQDVRLEGRLAVGAVDQVVIHLLIHLLPDVDALPLELRLRVRARRRARHAVLVAVLVVV

SEQ ID NO: 248051 - protein, 38 aa, Zea mays
  Clone ID: MRT4577_157809C.1.pep
LDGMTFGYVYGYIIISVLHEHMNVVAVLYRLCIALQDT

SEQ ID NO: 248052 - protein, 65 aa, Zea mays
  Clone ID: MRT4577_15780C.1.pep
DPPGEKKQNQKAPDMMWNIRIPTGQGPAKSNPIKKVFPKNPNGAKGRGGLTFVLLNCNPTRAVKF

SEQ ID NO: 248053 - protein, 85 aa, Zea mays
  Clone ID: MRT4577_157810C.1.pep
YLLQWQAFVLQDCHQFLNTHYMPPMHGQPYSLSFISKCGRITVTWFCSRSCEPVPASVASVYACDPLGTYGELRFLFSAATSGFT

SEQ ID NO: 248054 - protein, 42 aa, Zea mays
  Clone ID: MRT4577_157811C.1.pep
SFSPKKKKKKKKKKKKKKKKKKKKKKKKKKKKKKKSLRCYHC

SEQ ID NO: 248055 - protein, 182 aa, Zea mays
  unsure (1)..(182): unsure at all Xaa locations
  Clone ID: MRT4577_157812C.1.pep
MAMEAMMSGLNSGVVLSLIAVLWTVVWQNLQHLQLQQFFARQLSRRARRLAAMVDPYLSVTIAEYEGGRMKRSDAYEEVKAYLSDASAHGVRHLRAESAKDADKLVLSMSDGEEVEDDFEGARVWWWAYSKQPPRSDGAAAWWSGGGRRRAXERHFYXLFFLEHQRSLVLDTYXPRXXQLGR

SEQ ID NO: 248056 - protein, 96 aa, Zea mays
  Clone ID: MRT4577_157813C.1.pep
IPGRRAHNTAAGPPFFFVGFFWFFFFFHQGPQTCSFRVQTQVAFLWHWQTKRKPRGPANRIPSKKNPCFPPTTKWHLTGRGPKNSNQGGPLTPIQG

SEQ ID NO: 248057 - protein, 75 aa, Zea mays
  Clone ID: MRT4577_157814C.1.pep
GNGELRLPRKLYIRNGDPGKDERVSARLESKFLGFFCTAIFSYCFFPLSPSLAFSFFFTLCLPSYYILCKNFIFP

SEQ ID NO: 248058 - protein, 88 aa, Zea mays
  unsure (1)..(88): unsure at all Xaa locations
  Clone ID: MRT4577_157815C.1.pep
AGSSCSVLVAADSGSVYEAPLLTGDGQLLQTMAFSSSDPWSESRVVRLIEALGGSAKASLYQLDYTDTRGALLPYXMPDMVQLLTQCV

SEQ ID NO: 248059 - protein, 74 aa, Zea mays
  Clone ID: MRT4577_157816C.1.pep
IKLGKHKKKPPGNFGATLSLGRTQLAPTPIRGLTQKKPFYGGGFRAFLKTGDFTGFGLGLGLGGGEFFGFATNF

SEQ ID NO: 248060 - protein, 106 aa, Zea mays
  Clone ID: MRT4577_157817C.1.pep
MCLLPKKIFTSKKKNKKGKYKKKKKESSNNNKNTKNKKKKNKKIWGALFKNPKLSSPSFQPYTSFKGAPNFNQLPCFLQLFYCKTPVFPKLNPLTKNPLFPTFLNT

SEQ ID NO: 248061 - protein, 72 aa, Zea mays
  unsure (1)..(72): unsure at all Xaa locations
  Clone ID: MRT4577_157818C.1.pep
MAAFIFALLSLLALSTSASTSTVISQCXQQYLFLATAARFQYPTIQPYMLQEAISSSILPTLTFTLQQPYSL

SEQ ID NO: 248062 - protein, 145 aa, Zea mays
  Clone ID: MRT4577_157819C.1.pep
MGGVVTSALGERPGCRERHMAFSSAGRSGPLADINVTPLVDVMLVLLIIFIVTAPIVARPIAVQLPQATDRVVDRPEPPPPIELRLDAANQLSWNGQPMAIGELQARLQAQAGEHAGNLPELRIATDPAAEYEGMARILAAAEAT

SEQ ID NO: 248063 - protein, 96 aa, Zea mays
  Clone ID: MRT4577_15781C.1.pep
ARREAGLTEQRSLPASNGGRITGRLHLRAQLGPRSTLSRPPFFFFYLCKPLEVTCSPPLHPTCSDFSRQRHLFFSAHGIQRVGPSPVYRSACSGGR

SEQ ID NO: 248064 - protein, 47 aa, Zea mays
  Clone ID: MRT4577_157820C.1.pep
RIHKNQTSVVDKHTIFLEFLSIFVTVAFPMLKIPQLPLLGPPPILKS

SEQ ID NO: 248065 - protein, 75 aa, Zea mays
  Clone ID: MRT4577_157821C.1.pep
KKFFPNNPRLKGLKPPIHGRVLGFNQKGLMEGIRFQKIWGKNNYLFRTLNLLKNLKKTSVTRGGDYFHQTKKNFH

SEQ ID NO: 248066 - protein, 127 aa, Zea mays
  unsure (1)..(127): unsure at all Xaa locations
  Clone ID: MRT4577_157822C.1.pep
RQLSSGVSEIRHTADRWRVSLDVNHFAPDQLTVKTKDGVVEITGXHEERQDEHGYISRCFTRKYTLPPGVDPTQVSSSLSPEGTLTVEAPMPKLATQSNEITIPVTFESRAQLGGPEAAKSDETAAK

SEQ ID NO: 248067 - protein, 433 aa, Zea mays
  Clone ID: MRT4577_157823C.1.pep
RRGNTFAEAEINDMVYDFDRDYKDIGIALFTTKYFVVRNCMVNAKCDTLLSAWNTPPGKINMLRVDAKQGAPKDGSSPLELFQVEIYPLYPHLSEAMYRMMWDYFFPEEDDSQRRQEVWRVSTSTGPRRTRRLSSGVDAVTSSSYSVRDHELPGKSSTTVSTSTNVSSWQGILSDNSQVSKFQSIKANMVCGSHQELHRSSSFERNWEESAAESVASNDVVSLLNSSIVSSKVDASNSVLENPVVGSEMWRSKTKDSKPAKSGRLSHEEKKLGKSNDEKKTKPRKSMEFHNIKIGKVELLVTYEGSRLAINDLRLLMDTFHKAEFTGTWRRLFSRVKKHIIWGVLKSVTGMQGKKFSNHRETLEGSIPENDLNLSDSDVGQPGRHDQLTASWLKRPGDGAGDGFVTSIRGLFNTQRRKAKPFVIRTMRGEGHN

SEQ ID NO: 248068 - protein, 80 aa, Zea mays
  unsure (1)..(80): unsure at all Xaa locations
  Clone ID: MRT4577_157824C.1.pep
MAEAEEQRGLMATGRTPTNMAGIKYXRKRNEVLILPINDRISVSVDPDHLWSTTTVARSPXFLYDRMWLKEEEILNMRRK

SEQ ID NO: 248069 - protein, 79 aa, Zea mays
  Clone ID: MRT4577_157825C.1.pep
HLSNGYTHRHVLSPVECNNLQVEGKQITVCLYNLEWLFNLQIGTCLHLTLWTLIAFSFKFPFSYLMNTYPHASENSKFA

SEQ ID NO: 248070 - protein, 177 aa, Zea mays
  unsure (1)..(177): unsure at all Xaa locations
  Clone ID: MRT4577_157826C.1.pep
PGYCFQRSRRLLYLFLSASELYLPGHTTSAPDFCTPVTIIGIGSAAIYNNSGWRSTQLKYVPALVHKKNHLRNMAVIGHAHHGLSTLTDSLVPPAVIIAQEFARDVHMYDTPAHESKRXMTNKSTVISLYYEMTDESLKNYKGDRDDNHYLNNLIDSPVHVDFSSEDRAALRITDAA

SEQ ID NO: 248071 - protein, 263 aa, Zea mays
  Clone ID: MRT4577_157827C.1.pep
MEVVVTTRDSGILARFLIKPAAFHPWRDRATTQPTHQRRPNKSPALRARRLATLTFLPCSAAAATVASTAMVSAEVGIDYVLWTEDEVSTRVGEVAAELAADLRALPEPAVIVGVATGAFLFLADLVRRVDVRLVVDLVRVESYGAGTESSGKPRITADLKVDVAGKHVVVVEDIVDTGNTLSYLIAHLEKKGASSISVCTFLDKPARRKVNVHLVGDGKFYRGFECPDYFVVGYGLDYAELYRNLPYVGVLKPEMYTKDSSN

SEQ ID NO: 248072 - protein, 628 aa, Zea mays
  Clone ID: MRT4577_157828C.1.pep
MDLDPEGIFRDDSDEDEDSVQEREANKEMVVYLVDASPKMFTPATTQDNGKQETHLHTIVNCITEPLKTQIIGRSYDEVAICFFNTKEKKNLQDSAGVYVYNVGDREQLDRPTAKLIKDFSLIEDSFMSTIGSRYGITAGSRENTLYNALWVAQALLRKGSVKTVSKRILIFTNEDDPFGTITGAVKTDMIRTTLQRAKDAQDLGLSIELLPLSPPDDQFNMSLFYADLIGLDGDEMTEYLPSAGDKLEDMTNQLRKRIMKKRRVKTLSFAITNDVCIEVNTYALVRPTTTGTITWLDSLSNLPLKVERSFICNDTGALLQDAQTRFQMYNDTIVKFSVRELSEVKRVASHHLRLIGFKPLDCLKDYHNLRPSTFIYPSDERIFGSTCVFVALHSSMLRLGRFALAFYGNPTRPQLIALVAQEEVTSSGRQFEPPGMHMIYLPYSDDIRYPEEVHVTSDDAPRATDEQIKKASNIFKRIDLINFSACQFANPALQRHYGILEALALGEDEMPDIKDETLPDEEGLSKPGVANAIEEFKTSVYGENYDQEEAEAAAGKASRGNASKKRKEVTDAAAQISAAYDWAELADNGKLKEMTTVELRSYLTAHDLPVSGKKDVLISRILTHLGK

SEQ ID NO: 248073 - protein, 170 aa, Zea mays
  unsure (1)..(170): unsure at all Xaa locations
  Clone ID: MRT4577_157829C.1.pep
KGSRDLCDKRAIATASIRDLEVVASESLVAHNRCWVRDSKGLQPVRPTKSLHHPKATCVCVPKHQHIALRQVAQPCFCAVPKKIASLSRTTVRGRWRGRGAVVALPGRGGRAPPELRGRAAAGGGAGARGRAARWPVEGPERGGAVAGGRDAVAGGVRWKRIGXPTERLG

SEQ ID NO: 248074 - protein, 192 aa, Zea mays
  unsure (1)..(192): unsure at all Xaa locations
  Clone ID: MRT4577_157830C.1.pep
AHASDNLRPSTFIYPSDERIFGSTCVFVALHSSMLRLGRXEVTSSGRQFEPPGMHMIYLPYSDDIRYPEEVHVTSDDAPRATDEQIKKASNIFKRIDLINFSACQFASPALQRHYGILEALALGEDEMPDIKDETPPDEEGLSKPGVANAIEEFKTSVYGENYDQEEAEAAAGKASRGNASKKRKEVTDAAA

SEQ ID NO: 248075 - protein, 232 aa, Zea mays
  Clone ID: MRT4577_157831C.1.pep
HVYGFRFALAFYGNPTRPQLIALVAQEEVTSSGRQFEPPGMHMIYLPYSDDIRYPEEVHVTSDDAPRATDEQIKKASNIFKRIDLINFSACQFANPALQRHYGILEALALGEDEMPDIKDETLPDEEGLSKPGVANAIEEFKTSVYGENYDQEEAEAAAGKASRGNASKKRKEVTDAAAQISAAYDWAELADNGKLKEMTTVELRSYLTAHDLPVSGKKEVLISRILTHLGK

SEQ ID NO: 248076 - protein, 28 aa, Zea mays
  Clone ID: MRT4577_157832C.1.pep
HTHVTTLQQLAVAYAKELLTPIIKMEKM

SEQ ID NO: 248077 - protein, 87 aa, Zea mays
  Clone ID: MRT4577_157833C.1.pep
SLIKGKQHTNHKAITTHYFPPFIIRYNTCTASIPTARPCVTMLTGQGLLPLPPSIQAQKTATSRKNGKENLNTNIQPTNKSIKTRSL

SEQ ID NO: 248078 - protein, 143 aa, Zea mays
  Clone ID: MRT4577_157834C.1.pep
ARERECERARAGLIIYLLGLSLFEAGELARCSLAAAGKPTVLPHDDSRPVQDTCPIATCPSTNPKPAIITVPYTNPTITIPSLNPLPTPMTVSSPNIPSASTMLPPDPVIYSLPTPSTYCPPAEPVTNPAGTTPSTYTSWTPT

SEQ ID NO: 248079 - protein, 169 aa, Zea mays
  Clone ID: MRT4577_157835C.1.pep
VHGFVQDNRTGQKVAMLIGKWDEAMYYVLGDPSVKPKGYDPMSEAVLLWERDKSLNQTRYNLSPFAISLNELTPHLLNKLAPTDSRLRPDQRHLENGEYEMANSEKLRLEQLQRQARQLQEKGWRPRWFKKDDGDSYRYMGGYWEARETGNWDGIPDIFRQNSLSPGLH

SEQ ID NO: 248080 - protein, 92 aa, Zea mays
  Clone ID: MRT4577_157836C.1.pep
GIAILYVSAASYALFITIYAYINSLLKACTGKLNTAVNAPLSWWSPASWTQTCPRPTGVVPPNTQTSSAKVCIATCHACSSGTRYTTAGPAA

SEQ ID NO: 248081 - protein, 168 aa, Zea mays
  unsure (1)..(168): unsure at all Xaa locations
  Clone ID: MRT4577_157837C.1.pep
MLVHQDLLSDDXSSPDCFTYHDLENGVLRHGQGKWLTQGPVDVHIGANPSAEGGEDDRGDDTAGXVIDIXDTVPLYSEXPPFDKKSFVSYITRYIKNLTAVLEPQKAYEIKKAVXGATKFLLNKLKDLPFFVGESMKDEASAEFAYYKDGATNPTFLYFSHVLKEIKS

SEQ ID NO: 248082 - protein, 149 aa, Zea mays
  Clone ID: MRT4577_157838C.1.pep
VETEARPSEPAKEKLLETGEKKIEKDAAEQILPEKTATPTPEASSEVLDYIIRHASGKRLTEEVIFEAKHYARELKYPKGALVFNGTEEDDFLYCLPDNKELSVCREMARSIGFPKLEAGLCAMTKDDLADSLAYNSLKVQKFAHFGSF

SEQ ID NO: 248083 - protein, 73 aa, Zea mays
  Clone ID: MRT4577_157839C.1.pep
KAAGPLACRDGRRHYQVLLVVGPRHRRHGLEPCRRRQWQSQAGSHSVTHRVFAAGRSKTSGPLACRDGTSGGF

SEQ ID NO: 248084 - protein, 149 aa, Zea mays
  Clone ID: MRT4577_15783C.1.pep
GLSPAAKVKPQFKRLFFFCLPPRIKGIHESSSPPKGLEQPRKKKKRNYPSEAKIRGRGGKIVIGPSAPPTTGLRLGGQNYHPQFSVKFWPKGQARMATHAGPNAESPGGLLQGEILRSISGMHSAVPEPPPPQGMGGHATSPLPEKRPK

SEQ ID NO: 248085 - protein, 118 aa, Zea mays
  unsure (1)..(118): unsure at all Xaa locations
  Clone ID: MRT4577_157840C.1.pep
RPSPRQEEXIFIALTGSDILARAKNGTGKTAKSWIXALGPIDQEKNALQVVLLAPTRLSALQTXQVRTELGKHLLIQVKVTTGGTSLKDDIGHLKQPVHSIDGTPERILDLSKNGVRI

SEQ ID NO: 248086 - protein, 104 aa, Zea mays
  unsure (1)..(104): unsure at all Xaa locations
  Clone ID: MRT4577_157841C.1.pep
YIHSLSTSHPPLSLNATHLFSPTTSLSTHPPTTSTTPQPPSPPPPPNNTHFYSLKYYYLIFTNLYYLHYPVLKFSINTSYFYKTNYFLIKASXLILNEITNSLL

SEQ ID NO: 248087 - protein, 64 aa, Zea mays
  Clone ID: MRT4577_157842C.1.pep
IPAFSMPDTGSSLPDGSFLPGSTASIGSMPLYNGGSPAFSGFGGTPGSPAAGSVPVDPVHGSKP

SEQ ID NO: 248088 - protein, 171 aa, Zea mays
  unsure (1)..(171): unsure at all Xaa locations
  Clone ID: MRT4577_157843C.1.pep
RALHDKLPAMSEPSLLLTEMMRAVLYTSLPVLVQGRNWMLVYSTWRHGISLSTLYRRSRLCAGYSLLIVGDRRGAVFGGLVEAPLQPIVKRKYQGTNDCFVFTNVDGCPVICHPTXMTGSSSTSETFNNPCLSHTQEFKIKDVELWGFVNASKYEEMLMICRTEKQGIWNL

SEQ ID NO: 248089 - protein, 79 aa, Zea mays
  Clone ID: MRT4577_157844C.1.pep
HAHAVLKKFVRMVSYRLAKNNPFWVAEFVDFRLAGKFACSQVKGMLRLAVSCLEEKRKKRPPMESVVQSPLSVNSAGSQ

SEQ ID NO: 248090 - protein, 363 aa, Zea mays
  Clone ID: MRT4577_157845C.1.pep
MGYLPALGGKAAHLVNDLATVILNPVSERERQPHHPTHLPEATEGEDTLFVDDDSDQNSDGPDTSSFRAFLMSFVPSSTASKNSMETIPEHNLDVEYPTLTPVGKACSGRKGLFSRGKHSLGRIISKAGLGNLRQKQTHSIDGEIIGQTESVAPRFEVKGSKESTLHDKLPAMSEPSLLLTEMMRAVLYTSLPVLVQGRNWMLVYSTWRHGISLSTLYRRSRLCAGYSLLIVGDRRGAVFGGLVEAPLQPIVKRKYQGTNDCFVFTNVDGCPVICHPTGANNYFTFCSTDYMAMGGGGHFALYLDGDLMTGSSSTSETFNNPCLSHTQEFKIKDVELWGFVNASKFEEMLMICRTEKQGIWNL

SEQ ID NO: 248091 - protein, 91 aa, Zea mays
  Clone ID: MRT4577_157846C.1.pep
PLLLPHIRDHIPPIASRPLQSDRCLSRRSDEEEDEELADNTTVLLRVAPIDRFSILRVKGSKRRVLVTAEKIAEGLVIARRSAGAQLTQSY

SEQ ID NO: 248092 - protein, 48 aa, Zea mays
  unsure (1)..(48): unsure at all Xaa locations
  Clone ID: MRT4577_157847C.1.pep
GGGXGGEXVGEGEGGVDRCDLEPDGNTYLRDREXTDYPLFVTSLAKTS

SEQ ID NO: 248093 - protein, 333 aa, Zea mays
  Clone ID: MRT4577_157848C.1.pep
SEAKALGIKMGVPLFKIRDLVERHNIQVFSSNYCLYGDLSHRIMTSLQLFSPVVEIYSIDEAFLELTPNQSNTNYGEEIRRCLKQWVGIPVSIGIAPTKVLAKVATDVAKQSGAGTFCLDKAEAADTILATMPIADIWGIGRRLEKWFTTRGVSTALQFKQANPELIRKKMGVVGQRLLLELQGISCLPLELIPNPKQETCVSRSFAQAVTTLDELQTAIAFFVSRAAEKLRRQQQTPAVMIIFARTSFFIEQPISISQTIALPTPTHYTPELLKLAQTSLKQIFRPHHPYKKAGVIMTGLQSERIVQGDRHRCDVIWPQFWSCFGHRSGGIN

SEQ ID NO: 248094 - protein, 98 aa, Zea mays
  Clone ID: MRT4577_157849C.1.pep
FPLFPRPPWHRGRALKPRTGGLNKPSGLVPPKMGGLGSFTAFKRHYPITQNVGPPLTRHLTKHLNLFQVQKPLTQWRIHPFFIPKLVQLHTENVCTPY

SEQ ID NO: 248095 - protein, 138 aa, Zea mays
  Clone ID: MRT4577_15784C.1.pep
SRRRPHPRSISLSFAATGGTPTKSVRGQGGRWRGVLRLARLVLQSAGRVLDGSGLRRRPLPGYYRCSTDLVWGPRRRHPAVACVARWPCVVVRGRPLLRRIHTGQPWPCAVRLPWLGSSSLVMQVAPFWIHTGLLPFC

SEQ ID NO: 248096 - protein, 82 aa, Zea mays
  Clone ID: MRT4577_157850C.1.pep
KKQNTNKKKNKNLNTGKTGLPFYGPQPSLPFFWISYLFSGVPYIYFVCPCFTPRCLVNPCFYSVYPLSRFSSFGHLAISLYG

SEQ ID NO: 248097 - protein, 163 aa, Zea mays
  Clone ID: MRT4577_157851C.1.pep
IGYLEAGRERRGTVVCHGGALHKALAPSLLSLCLDAVADRLISDNAAAGGGVGRTGSSGGCSGGGGLAGFSEDDGGEADEDRLHPQELAEGLPWELLHRLASRLPPVVLESLHHAAHARYCSAETTSGLGVQDGERRGVKRSRCEDFNSTWAVVVQTSLAPGW

SEQ ID NO: 248098 - protein, 65 aa, Zea mays
  Clone ID: MRT4577_157852C.1.pep
SAPSHRLSGVAFINQWPQVPTERAVATHNGVAPLGTQAYLSSVYVGNVRIHSQTAMPYTQLSVDP

SEQ ID NO: 248099 - protein, 114 aa, Zea mays
  unsure (1)..(114): unsure at all Xaa locations
  Clone ID: MRT4577_157853C.1.pep
LRRTPFWVLGDYEKNVRGTCRTIVLGQQWXLATDHWKVLVNNEQQSADIVHGVHGHFNNRPEENGSGDQGHMTGYPTEETPELGPLSHDLVSKLGARLTEVWKNGTCPWVTPEG

SEQ ID NO: 248100 - protein, 90 aa, Zea mays
  Clone ID: MRT4577_157854C.1.pep
SYYHAVCLHIHRRLRTYVLHTWSERARSIDLSSLWSLDGGGGHTPAAAPDVHPAMQWICIHMFPILGLASLFAHVRTYVHVRASERAIRT

SEQ ID NO: 248101 - protein, 76 aa, Zea mays
  unsure (1)..(76): unsure at all Xaa locations
  Clone ID: MRT4577_157855C.1.pep
MTTRFKKNRKKRGNVSAGHSRIGKHRKHPGSRGNTGSMHHHRILFDKYSHGYIGKVGMRYIHKLRYIFXXPAVNIE

SEQ ID NO: 248102 - protein, 70 aa, Zea mays
  unsure (1)..(70): unsure at all Xaa locations
  Clone ID: MRT4577_157856C.1.pep
MAFSPKTSSSXSLSSALQAAXSPPLLLXRMSXTATPRRRYXAAVVVXXTTTAXAAXAAVXVPXXXXXXGG

SEQ ID NO: 248103 - protein, 101 aa, Zea mays
  Clone ID: MRT4577_157857C.1.pep
SRDVGSPGRWALGSWLTVRGHWFGSQFESPRSLADSRTMRVVATLTSEAAAALQPSTAAATADERVVDCSRAPPPQPPMSVSPSSVAAVLTRLGGCTCTAD

SEQ ID NO: 248104 - protein, 98 aa, Zea mays
  Clone ID: MRT4577_157858C.1.pep
WPSSYLNLKRSGLLHRKGFCSLRSPLRLDKPMVAFVRYDGKHSTHLIIPLDGLHAILAIHVKLLLFERLTRFHNAHFDNARLCLTSAHAKVPHTQVPD

SEQ ID NO: 248105 - protein, 302 aa, Zea mays
  unsure (1)..(302): unsure at all Xaa locations
  Clone ID: MRT4577_157859C.1.pep
MNILERIRGGGDRAAATERPPRPECWVEISESVSRLCSFDAAGSGSRSISVKVIQDSRPIHDKLVDSFLNKIFPSGYPYSVNEGYLTYTKFRVLQHFSSAMLHVLSTXGLRPTPAQATAVSWVXMMSEMLKSKQHAGKLICSSMGARMDSEPKSWRILADVLYDLGTALEVVSPLCPQLFLEVAGLGNFAKGMAVVAARATRLPIYSSFAKEGNLSDLFAKGEAISTLFNVMGIGAGIGLASTVCSTTQGKLIAGPLLSAVHXYGVIQEMRATPVNTLNPQRTAMIVADFIKLKGASQSLSY

SEQ ID NO: 248106 - protein, 57 aa, Zea mays
  Clone ID: MRT4577_15785C.1.pep
AGINIHGFSHVPRKSKSRGHRRKTGGWAVFRVTRASHINHTKSSNRWEKLIQIEWEG

SEQ ID NO: 248107 - protein, 189 aa, Zea mays
  Clone ID: MRT4577_157860C.1.pep
NSEKKKKKKKKKKKKKKKKKKKKKKKKKKTTTGSLFASCPLPLGFVAVTRGSPQQQPGAAAENLAKKTGIGAAAKSTGPEKRGPALPGVGEFPRGCSARIRHPLLPTWPLPHLRMRFHPSNCCPQVVCIPIKKIAAGFLFQKGVAAPGPEIWVYFGLQTLNLQGLSRSSYRGALKVAYFQRNQVKVHSF

SEQ ID NO: 248108 - protein, 302 aa, Zea mays
  unsure (1)..(302): unsure at all Xaa locations
  Clone ID: MRT4577_157861C.1.pep
MNILERIRGGGDRAAATERPPRPECWVEISESVSRLCSFDAAGSGSRSISVKVIQDSRPIHDKLVDSFLNKFFPSGYPYSVNEGYLIYTKFRVLQHFSSAMLHVLSTQSLLFAAGLRPTPAQATAVSWVXMMTEMLKSKQHAGKLICSSMGARMDSEPKSWRILADVLYDLGTALEVVSPLCTQLFLEVAGLGNFAKGMAVVAARATRLPIYSSFAKEGNLSDLFAKGEAISTLFNVMGIGAGIGLASTVCSTTQGKLIAGPLLSAVHIYGVIQEMRATPVNTLNPQRTAMIVADFIKVWYL

SEQ ID NO: 248109 - protein, 439 aa, Zea mays
  Clone ID: MRT4577_157862C.1.pep
MNILERIRGGGDRAAATERPPRPECWVEISESVSRLCSFDAAGSGSRSISVKVIQDSRPIHDKLVDSFLNKFFPSGYPYSVNEGYLTYTKFRVLQHFSSAMLHVLSTQSLLFAAGLRPTPAQATAVSWILKDGMQHAGKLICSSMGARMDSEPKSWRILADVLYDLGTALEVVSPLCPQLFLEVAGLGNFAKGMAVVAARATRLPIYSSFAKEGNLSDLFAKGEAISTLFNVMGIGAGIGLASTVCSTTQGKLIAGPLLSAVHIYGVIQEMRATPVNTLNPQRTAMIVADFIKSGKVSSPAELRYKEDLLFPNRVIEEAGSVKIGQPLRKVFSPRLVEQLRATFPGEKFLLSQKSNRTYMVLERSASGEDALRGWLVAAFASEMERSGAGSRDDAVLSEAYEKMERVFPTFVSEVRSRGWYTDQFLDGNCSRVSFAKFR

SEQ ID NO: 248110 - protein, 43 aa, Zea mays
  Clone ID: MRT4577_157863C.1.pep
QDRRDIRKRQVTIHDMTKFTASRRMSTGNIWIPEISSGTVSQN

SEQ ID NO: 248111 - protein, 147 aa, Zea mays
  Clone ID: MRT4577_157864C.1.pep
ETKTENPFGFWENRAGEGRTQERPPTPKRGKPKLGEKEKGAQNGLKGEKGPGEIGKKKHPWGDSPPPGGEKGKTFQKGHLPRGGGHPGAALNPGGGLNIFTGKKHLFGKIKASLGKNFLVFEKPKKWALPSSYFNQIKRGDPQQTSH

SEQ ID NO: 248112 - protein, 91 aa, Zea mays
  Clone ID: MRT4577_157865C.1.pep
MYSYVKLMFCICSSTVGYDPASTATPSSPSSGSDSGAPVLNASGAGSSESSDFGFDIPGAVNLGSGWRSVSPPNWPWAALVWILVALCVHK

SEQ ID NO: 248113 - protein, 123 aa, Zea mays
  Clone ID: MRT4577_157866C.1.pep
AVESQISRCMSSPKSYTGAQTHRSTEIPPPRHLAGLRSKQFDFTPHGANSNGSKRPRTTPRSAASARRRARNPSHRSRNPTQVSGSQASRNHEQPHDPDQNSLPTKPRISPRASRAAAILLTP

SEQ ID NO: 248114 - protein, 172 aa, Zea mays
  unsure (1)..(172): unsure at all Xaa locations
  Clone ID: MRT4577_157867C.1.pep
MLIYQDLLSGNELLTDSITYKHLDNEALCDGKKNRSPDALVDXHIXANPSCHGVDDIHGXDTYCQEWIDMGDTVRXQDPSPFDTRSYCVXIRKYVKNLTAVVQPIEAXAHKGGLXDAALLLRTNLNDLQVFVDESVNDDEQAAHYXYMAVDSKPRFLHVSHDHKEIKSNISL

SEQ ID NO: 248115 - protein, 43 aa, Zea mays
  Clone ID: MRT4577_157868C.1.pep
GKEENIYLFFLFGPIVGDESLFQITGDRTRLLPVHVVLRVLQF

SEQ ID NO: 248116 - protein, 149 aa, Zea mays
  Clone ID: MRT4577_157869C.1.pep
MACSTNLCFSASIPPLPASSSSSVSSPFLTVERVSYVPSLSRWTIRYKQLGHAYQRSHVLAFASADGKRSSGENVVMVDPLEAKRLAAKQMQEIRAKEKLKRRSQAEAINGALAMIGLTAGLIVEAQTGKGILGQLAGYLTAISSLFGQ

SEQ ID NO: 248117 - protein, 113 aa, Zea mays
  unsure (1)..(113): unsure at all Xaa locations
  Clone ID: MRT4577_15786C.1.pep
LLXPLGFXAGGXXVXXGACXXVXLXSRLGAXXACWXXFXSLAFCAXALVFFFWFALLLWRXFXXAVSXSFXAAVAALLLGSWXXLALASASAXCWLPRPFGXSAXVGCRRXLX

SEQ ID NO: 248118 - protein, 87 aa, Zea mays
  unsure (1)..(87): unsure at all Xaa locations
  Clone ID: MRT4577_157870C.1.pep
WWPLILELMRFCAPLFVVLRIFVCLLIREDRPRIVTCDSELFLEPCVTILFFFVSGPLFGRMYQLCSSGVGVFVIKKLGRAPFFGXV

SEQ ID NO: 248119 - protein, 62 aa, Zea mays
  unsure (1)..(62): unsure at all Xaa locations
  Clone ID: MRT4577_157871C.1.pep
MSGNCGSSCGCGXGCRCGRKYPDLEETSTAGQATVVFGVAPEKKAAPEFVKAAANSGKAANG

SEQ ID NO: 248120 - protein, 79 aa, Zea mays
  unsure (1)..(79): unsure at all Xaa locations
  Clone ID: MRT4577_157872C.1.pep
FDHTIEINVPMSRFLPFKGTGDFKLAQSDLYTYDDRSVTLNSTLTNPXNTSIEHFPDFNNDWSYLGLXQSIPIIVELDT

SEQ ID NO: 248121 - protein, 89 aa, Zea mays
  Clone ID: MRT4577_157873C.1.pep
KPAEHVDQDLSGGRVGTGRMYNGRVEHQVLIFAADYTKSRSICLAVSVVEHSLQSVKSGFSGGPGNTGVLRPSRIPSLRTGAIDVIALL

SEQ ID NO: 248122 - protein, 94 aa, Zea mays
  Clone ID: MRT4577_157874C.1.pep
AYFICILMYVLYIIVSAFFIVSGGFNQLTVRFNTSHLPYRYAHYFVHYSLSFLTLTLSCSRVWLRFDKLTFVLAHKLYTNFIMFTLKLTRSFLF

SEQ ID NO: 248123 - protein, 117 aa, Zea mays
  Clone ID: MRT4577_157875C.1.pep
ARGAPRGEPCEERGAGPRGRGGGAKRRGGGTTAGRAGAGGGGAPTERRGAPRVPRGPDEARQGQGRKRTRDGPRAPARRRPRRRSAPERPPEEKPGGGGGGVVEEAAEDKGCHEKAT

SEQ ID NO: 248124 - protein, 170 aa, Zea mays
  Clone ID: MRT4577_157876C.1.pep
FSPVFVVTRFPPFGWGEPAPPTRTPEPTGSLTGEGEGRPFRNPPFPGGWRFLFSSWRAGFSSWKGGGGGPPIIVGWLPLWAPRGFPFLFPGRFFCGILRGYHFSPGGGFALFFPQFGPGVGSPSTGPQCVGIRLLRGRPGGLKKKKKKKKKKKKKKKKNQKKKKKKKKSL

SEQ ID NO: 248125 - protein, 96 aa, Zea mays
  unsure (1)..(96): unsure at all Xaa locations
  Clone ID: MRT4577_157877C.1.pep
PPPRGQVSPPPKENGAPHGPGPXTPLGAGKLTKGVGAPXLPPEPLGQRGQPQPEPHPPGSPWFLPPPPGAPWVPPHPPGPQXFPSPPVSPKGVRPP

SEQ ID NO: 248126 - protein, 94 aa, Zea mays
  Clone ID: MRT4577_157878C.1.pep
TQVQPQLQMDGAPLRQVSSKPRVILDNWVDTVEPGPAKVLRQPEPWRPSVHTIGPLVHAENSGCSKDYSPCPSVECQDRQSAKSVILNAFGYSC

SEQ ID NO: 248127 - protein, 88 aa, Zea mays
  unsure (1)..(88): unsure at all Xaa locations
  Clone ID: MRT4577_157879C.1.pep
WAEPPAVRGDTKIMIRKLPFQRLVREIAQDFKTDLRFQSSAVAALFLASEAYLVGXGGDTYLCAIHAXRVTIMPKDMSFARRIRVVRA

SEQ ID NO: 248128 - protein, 35 aa, Zea mays
  Clone ID: MRT4577_15787C.1.pep
HSCSYVLVSPFAVLLALLHVLCLIRTFVNLCIQRF

SEQ ID NO: 248129 - protein, 79 aa, Zea mays
  Clone ID: MRT4577_157880C.1.pep
GKQKHGQVLGVLQRLPICPARWKTAGEHLPWGTPRVMGALPKFRDGVIAHRRSCSTVAPPISVGSGLHRPIDRARTRVI

SEQ ID NO: 248130 - protein, 68 aa, Zea mays
  Clone ID: MRT4577_157881C.1.pep
MGCTRASSTLLMVVGAISVLALDHSVANARQVRRPSMSTGEHHSNKEALQATTTKEHGAVHTGGGAGT

SEQ ID NO: 248131 - protein, 112 aa, Zea mays
  Clone ID: MRT4577_157882C.1.pep
CLPLNSPATIDPTSPKPSMSKRKTVNATSVLAPPYGASLLQYRSTLCAALRCYGCPQIRHRTIGTRASKSTDRCSACCNGFRFARLDGRRLGSIFLGEHRASWVPCRSSGTA

SEQ ID NO: 248132 - protein, 176 aa, Zea mays
  unsure (1)..(176): unsure at all Xaa locations
  Clone ID: MRT4577_157883C.1.pep
VSRYQLALQILVTSRGPCSVMVWRQSSATSGGGYAPVRISGHTDGPPRPTPPCSDEQTGSVPQTHPRLEQWSSLPTLHYLHAKMHHCWRRHQHPSENWRSGLVCGGRAEANACDVRGPLRPQTDRVAQAGSLPPGRRTAPKHQDLAQRPRRGEPAKSPWQLESSPQVRGSLSSXAG

SEQ ID NO: 248133 - protein, 156 aa, Zea mays
  unsure (1)..(156): unsure at all Xaa locations
  Clone ID: MRT4577_157884C.1.pep
QDIYNNSKRRLRCTKTNNNTPRSFPPCHFYLLFFLFIFQLPWQCPVERMPQVMYRRQHTRLTPRTHVRKKSCLAPHQDRFHTHPYVPTQRDVLLQGTRSRSRATGRTSQMMYDWKPPFCIGALHVWLETTLLLDILVAFLRSSSATSEQIWLXEKS

SEQ ID NO: 248134 - protein, 91 aa, Zea mays
  Clone ID: MRT4577_157885C.1.pep
RKTVSATSVLAPPYGASLLQYRPTLCAALRCYGCPQIRRRTIGTGASKSTDRCSACCNGFRFARLDERRLGSIFSGEHRASWVPCRSSGTA

SEQ ID NO: 248135 - protein, 63 aa, Zea mays
  Clone ID: MRT4577_157886C.1.pep
RSVFSCARARARDSARERTVLLPFFEESALTAPLGDLHRFLLHKATTIQDYNHYEESAAIHCA

SEQ ID NO: 248136 - protein, 88 aa, Zea mays
  Clone ID: MRT4577_157887C.1.pep
MSAHGRRDDADGGRRRRSLSPVFPRGRRGGREVVIEPIIERSSTAATYPMLSKTNYAEWSLVMHVNLQAQGLWEAMEPGTYNFRDDRN

SEQ ID NO: 248137 - protein, 45 aa, Zea mays
  unsure (1)..(45): unsure at all Xaa locations
  Clone ID: MRT4577_157888C.1.pep
MATAPYASSLFLVSSPISTAPRIXAGPCPPSRPXIPXVPVEVRPR

SEQ ID NO: 248138 - protein, 67 aa, Zea mays
  Clone ID: MRT4577_157889C.1.pep
MTSPEAKSVLRLRKTSEESNKDVKQESCLEPHVRAPMQKGGFQSYIIWLVLPVALLLLLCVGTYGWV

SEQ ID NO: 248139 - protein, 91 aa, Zea mays
  Clone ID: MRT4577_15788C.1.pep
LGNHRGFPGPALENHGPKIKIKRPKKRTIDLQARGRKLGILRADPPFYIIYLYFSNFIVFFYLSFFIFFFFFFFIIIFSHASAHASADAMG

SEQ ID NO: 248140 - protein, 660 aa, Zea mays
  Clone ID: MRT4577_157890C.1.pep
MVEMAVVELRTLPLGFRFHPTDEELVTHYLKGKITGRINSESEVIPEIDVCKCEPWDLPDKSLIRSDDPEWFFFAPKDRKYPNGSRSNRATEAGYWKATGKDRIIKSKGDKRKQHTIGMKKTLVFHRGRAPKGERTGWIMHEYRTTEPEFESGEQGGYVLYRLFRKQEEKTERSSPEEVDRSGYSPTPSRSSPDNLEANEEANTPLNKESPESALHESPIELPKSVETNGGSMTRWLADRNDNLMATAPDVSHIPFHGHAAGVAKVDPSVGASGHLVNPHNGNDDYNKFVSDFTPILPLENAFFTDIQQGAFGFDGIMNPLDPLDAFLNQTLVDPDEHSSTTSKVQYDSDIPTEFENHWNMKVEPQDDQCWWANIGFEPDEPNPLLPCDTTDQDILSVDSGADSFNELFNSMEETGITVRPQQLDSTVQPNHVFASQGNATRRLRLQVECREIITKDESEDEVSCVLTPDCLNDSVEESTAEKDVASDGDEAESTGIVIRSHHPAPRSSSESSFTQQGTAMQRLRLQSGLNKGQRPSTDDSSSCIIDEPGSQHKAEKAEIEEDASTNLAGSADDLPGNIHDDEQKNIPEHGAEMTSPEAKSVLRLRKTSEEGNKDVKQESCLEPHVRAPMQKGGFQSYIIWLVLPVALLLLLCVGTYGWV

SEQ ID NO: 248141 - protein, 103 aa, Zea mays
  Clone ID: MRT4577_157891C.1.pep
HARSVSSEFGSSTSPEPRSCYSGTHTAYEGGFKKDFGGHQQIQDPLYIMVYCSLLLLFLYTGQTISYLSLESIHFSLGVKFLGITLNFPYARKSLNFSINQYA

SEQ ID NO: 248142 - protein, 59 aa, Zea mays
  Clone ID: MRT4577_157892C.1.pep
PKKISPYQKIFLPNPQIFKLPPFRKNFTPPTNLSQINSQSYKLFICIPPFFFFFFFFFF

SEQ ID NO: 248143 - protein, 66 aa, Zea mays
  Clone ID: MRT4577_157893C.1.pep
AEWRLWPATQSLKCVVTGDGAVGKTCLLISYTTNAFPGEYIPTVFDNYSASVMVDGRPISLGLWDT

SEQ ID NO: 248144 - protein, 82 aa, Zea mays
  Clone ID: MRT4577_157894C.1.pep
STYKILFKAGRAVSQTGPNDNAKRGIHHSTRPQDLFIHGSDNLGQGKGNWCPGSLKLVAMLEEDSYYAFRDRGGNLRLPFHG

SEQ ID NO: 248145 - protein, 124 aa, Zea mays
  unsure (1)..(124): unsure at all Xaa locations
  Clone ID: MRT4577_157895C.1.pep
NLRVTQLNWLEEHPTFSLWENSKQAQSXRPSQPVAKTEXHWTPPERGSLNSLGVADSPILTGTIGSAICPNXFANFPCLGGTFIGFSSQSLNTGFLLWVRFIALRDLDHXKVDLGDCTRSGPYP

SEQ ID NO: 248146 - protein, 197 aa, Zea mays
  unsure (1)..(197): unsure at all Xaa locations
  Clone ID: MRT4577_157896C.1.pep
PPAPEGAATDPXXDXVXXXSEEASRLVXHQVVXWLERXVAPGXSRVFFVTPSPTPTDXRAWGXADAEGXGHCXXQXSPXSXASSYRXXXAKEXXRATEEVLXRVAGSPVGLVPVARLSVSRRAAPARPSGXRWVAXAGRAARRPRXCAACXPWCLPGVPVPWXXLLXWXLFFPGFARVLWWCLPAWPAGGSPRAGCV

SEQ ID NO: 248147 - protein, 56 aa, Zea mays
  Clone ID: MRT4577_157897C.1.pep
SLYLALRAHTDFKYAPPSYRFIVPKLSLPDPTLFPPTNDLNTITDGRPIGLYYFSV

SEQ ID NO: 248148 - protein, 70 aa, Zea mays
  Clone ID: MRT4577_157898C.1.pep
KKGGGGAYLQGFFFEQLFTRILGSYRTGFSKQGPLAEVDRDPTAVLAEAPSWGPRQGEPAAASSAPASRS

SEQ ID NO: 248149 - protein, 72 aa, Zea mays
  unsure (1)..(72): unsure at all Xaa locations
  Clone ID: MRT4577_157899C.1.pep
FSYLLVKNSTIGXFCFTIIGTAVIVRLKNNVFLNTWILQTNYPFYNFYDTFSFKLLKSKRLISHTFKFVFFL

SEQ ID NO: 248150 - protein, 133 aa, Zea mays
  unsure (1)..(133): unsure at all Xaa locations
  Clone ID: MRT4577_15789C.1.pep
CLVXLLASLLAXCXVRRXVXVGXCVGSGXXWPVLLPGVLXLVLRCXVGRGWSXFLCGXXAVGXRCPXVAPPPXXRGGXPXLLLLXXCARXRAALVAAAAFFXVXXCXGXGPGPPXSLSPPPAPVSLPLKCXWC

SEQ ID NO: 248151 - protein, 135 aa, Zea mays
  unsure (1)..(135): unsure at all Xaa locations
  Clone ID: MRT4577_157900C.1.pep
SLGACIQHRQFLPFNHLGGVNRGAYLQAQQLQPFNQLVGSLGAILLQQQLLPFGIQVVANIAAFLEQQQFVPFYPQVVGNINAFLQQQQLVPFYPQDVAKIVAFFHQQQLVPISQLALSNPTTXLQQPTIGGPIS

SEQ ID NO: 248152 - protein, 96 aa, Zea mays
  Clone ID: MRT4577_157901C.1.pep
IRFDKKRTFEVQLRMHSFCVRESLVRLCCFSARTITVFTEEKIRMACVSSLYRFCYLCVSLPSRLFWTTLESIQLSSVTSSLGTVLGPSSQRANEC

SEQ ID NO: 248153 - protein, 84 aa, Zea mays
  Clone ID: MRT4577_157902C.1.pep
IINLRPWVSPGKPSIDFRDLCIGLVGRWATPVEKRHPCARIVRSCQVAGALQMDKHRLEGYTLSSSFFDHRIRSALCRCWCKNP

SEQ ID NO: 248154 - protein, 84 aa, Zea mays
  Clone ID: MRT4577_157904C.1.pep
VRSPCSLACTWPLWRPTLSGPRRPRSRVVVQVHEVSRRVLRRGGGGHHRCCHGRSELSSAARRLVRLGHAILDRSLLVILLCVA

SEQ ID NO: 248155 - protein, 169 aa, Zea mays
  Clone ID: MRT4577_157905C.1.pep
MAKPRSGGGGGLLDLEGHYAFYGAYHSNPVNVGIHELFVWPIFLTALMLLHLTAPSTHAAGISAAVYAAYYFLLDRRAGALAALLCYLCWAASGALSARLGFSVGWKKRAPALLDNLVQAFLMAPFFVLLEILHTFGGYEPYPGFHDKVSKLIEEARKEWEDKKSKKSS

SEQ ID NO: 248156 - protein, 190 aa, Zea mays
  Clone ID: MRT4577_157906C.1.pep
MAKPRSGGGGGLLDLEGHYAFYGAYHSNPVNVGIHELFVWPIFLTALMLLHLTAPSTHAAGISAAVYAAYYFLLDRRAGALAALLCYLCWAASGALSARLGFSVGWKVVLVAQLFCWIMQFIGHGVFEKRAPALLDNLVQAFLMAPFFVLLEILHTFGGYEPYPGFHDKVSKLIEEARKEWEDKKSKKSS

SEQ ID NO: 248157 - protein, 69 aa, Zea mays
  Clone ID: MRT4577_157907C.1.pep
LVKMRIPPSEMFLSETDKYSKFDENGLPTHDMEGKELSKGQAKKLKKLFEAQEKLYKEYLQMAQNGSFQ

SEQ ID NO: 248158 - protein, 45 aa, Zea mays
  Clone ID: MRT4577_157908C.1.pep
ESFSIQKPKFPIPIHNYTENIWLVTFFKNLGERNALKRSHTISQC

SEQ ID NO: 248159 - protein, 123 aa, Zea mays
  Clone ID: MRT4577_157909C.1.pep
AADVDTAPVGAVKEVNEAKAAWCYGPGKCSRPAAGYVYPRSALWAASRRVSCRQPGAASVCCTRWNGLLGAHHARESRIGPQPECIASAHVSTFGASYASPSCRLDLAHVIYDVRPRKSTSAS

SEQ ID NO: 248160 - protein, 98 aa, Zea mays
  unsure (1)..(98): unsure at all Xaa locations
  Clone ID: MRT4577_15790C.1.pep
GRXPDTQRANPVRKMIPRSMVRDPFNTPAYVPXRHPGPSLGLCMPXWSYPQGXSCSTSGRIGVSHTCXPIYEGKYALXXTPSPSSRPWLGRDXSPTTS

SEQ ID NO: 248161 - protein, 73 aa, Zea mays
  Clone ID: MRT4577_157910C.1.pep
FLREDYNQTALYSITSKNCNWKQTLVPNLTSKKGYFKDDTPTSQTNYSASSIIYLQTQKSFKEFLKKKIIIFQ

SEQ ID NO: 248162 - protein, 98 aa, Zea mays
  Clone ID: MRT4577_157911C.1.pep
NPPAFGASPNIGFWSFFLRSRLSAARLSLSLNKIALSSGFGRSDLISILSQGFACDVHMPGVPVVIFSNCMNHQGGVRFTHGQVASLLGGWLCRVSRG

SEQ ID NO: 248163 - protein, 79 aa, Zea mays
  unsure (1)..(79): unsure at all Xaa locations
  Clone ID: MRT4577_157912C.1.pep
KRQGAXADRQRXKGAEQEAKDXGAGNTRRKAAKXDGNTGRNDXQKEEGGGEKQXXDKXGDRGRRXTSARTRTETTRNHT

SEQ ID NO: 248164 - protein, 65 aa, Zea mays
  Clone ID: MRT4577_157913C.1.pep
VPPSINMHYHRVPLLNIPGDAGSFALLPSAEARSSCLCIYWHVGTYYAAWRAIRTWRSPSDPQRS

SEQ ID NO: 248165 - protein, 72 aa, Zea mays
  Clone ID: MRT4577_157914C.1.pep
TGLWGLSHHGQFDPLLNILVLTTHHFGSISIHNRLNPIHSIGAIPIGWKGMSNLMDLLTGMGFRSTKQLPTV

SEQ ID NO: 248166 - protein, 103 aa, Zea mays
  Clone ID: MRT4577_157915C.1.pep
GDWVYSSRPGLDPFPHTRPHCTPVDPYTVHKHGICRFHHTRDARDIIPGGHYDYYVPYLCGALPCDIYQFVTATVLKRVHEKVLAPHTSSAARVDTQVDSQSA

SEQ ID NO: 248167 - protein, 89 aa, Zea mays
  unsure (1)..(89): unsure at all Xaa locations
  Clone ID: MRT4577_157916C.1.pep
NGGRRSAAARAARRPATRGRGAPAAAAPTAQAKKDXTRGTHKGDGDNESDGKPAGRKGKGPXGKTXPKTAENPRAXXTGEKGXGKRGKA

SEQ ID NO: 248168 - protein, 117 aa, Zea mays
  unsure (1)..(117): unsure at all Xaa locations
  Clone ID: MRT4577_157917C.1.pep
MVLAHTSKVVLGCVAFGIFWVLAVFPSVPFMPVGRTAGSLLGAMLMVLFRVISPEDAYAAIDLPIIGLLFGTMVVSIFLERADMFKYLGNLXLQWKSRGPKDLLFRVCIVSAIASAL

SEQ ID NO: 248169 - protein, 153 aa, Zea mays
  unsure (1)..(153): unsure at all Xaa locations
  Clone ID: MRT4577_157918C.1.pep
MQIFVKTLTGKTITLEVESSDTIDNVKAKIQDKEGIPPDQQRLIFAGKQLEDGRTLADYNIQKESTLHLVLRLRGGMQIFVKTLTGKTITLEDESSDTIDNVKAKIQDKEGIPPDQKRXLIFAGKXQLEDGRTXLADYNIQKESTLQLGVRLG

SEQ ID NO: 248170 - protein, 148 aa, Zea mays
  Clone ID: MRT4577_157919C.1.pep
MQIFVKTLTGKTITLEVESSDTIDNVKAKIQDKEGIPPDQQRLIFAGKQLEDGRTLADYNIQKESTLHLVLRLRGGMQIFVKTLTGKTITLEVESSDTIDNVKAKIQDKEGIPPDQQCLIFAVKQLEDGRTLADYSIPKEFTLYLLVP

SEQ ID NO: 248171 - protein, 56 aa, Zea mays
  unsure (1)..(56): unsure at all Xaa locations
  Clone ID: MRT4577_15791C.1.pep
CEIMQVSLYVPKMCYICQRRGVHWCCKESGNVLLPLVXGFVXSLKNFKLDTXXRCI

SEQ ID NO: 248172 - protein, 56 aa, Zea mays
  Clone ID: MRT4577_157920C.1.pep
AGQSFFKTKSVEIPGFAQNHQFGLGGNSLPSGQKGLLIYGTPLMGFLFFISGYFLQ

SEQ ID NO: 248173 - protein, 170 aa, Zea mays
  Clone ID: MRT4577_157921C.1.pep
TRSPRLGRTHSSCFGCHRCCDTHGVRVAESSAIVPHPSMQGHGTCSISIHESSVSSSNCLADTNQASSAMCHMPMSLPYTIRRARVARIPPHEEPAPSSSRSWRRTVASCLCRVRPWSSSGSSGVVQSFMRCVEAYCWRRCCRCGSSSETACLGVRRGKNRERERDGHRD

SEQ ID NO: 248174 - protein, 125 aa, Zea mays
  unsure (1)..(125): unsure at all Xaa locations
  Clone ID: MRT4577_157922C.1.pep
KALDGYGGTMGHVDHTSXIENLLPHMHFSNTPPRAFMVSLKRWNGHASNTLRHTHKGVLPVPFWAMLQQTLPAKQKGKLNGVLAYTIVFHMYAACKSPRKRLYETLLSTLHSKKLLLGYMSVILH

SEQ ID NO: 248175 - protein, 164 aa, Zea mays
  Clone ID: MRT4577_157923C.1.pep
MAERRRSAVTLEVQTSETIEYVRANMQEKEGIPPDQQRLIFAGKQIEDGRTLADYNIQKESTLHLVLRLRGGMQIFVKTLTAKTITLEVESSDTIDNVKAKIQDKEGIPPDQQRLIFAGKQLEDGRTLADYNIQKESTLHLVLRLRGGMQIFVKTLTGKTITLG

SEQ ID NO: 248176 - protein, 335 aa, Zea mays
  unsure (1)..(335): unsure at all Xaa locations
  Clone ID: MRT4577_157924C.1.pep
MAAGFGPRFAAGDAPARRCNLERFLEATTPVVASSSCSSKETANGWGQRRSDDADGSSPFFALGDLWDSFKECSAYGTAVPLALNGCSDGVVQYYVPYLSAIQLYGALSRHIGPSRTGAEESDSDAERETSSSTNTLSAREEAXREQHQRXEASGDEGEPGPGSWCQERLLFEFLESEPPYQREPLADKICSLAQRFPELKTLRSCDLSPASWISVAWYXDELDRXPIYRIPTGPTLRDLDACFLTYHSLSTQFAAGASSNGPRPATAATATAMMWLPTFAMASYKVKAAAWTPGWRDRQVAASLAQAADAWLRLLRADHPDHRFFAARRPPRRW

SEQ ID NO: 248177 - protein, 253 aa, Zea mays
  unsure (1)..(253): unsure at all Xaa locations
  Clone ID: MRT4577_157925C.1.pep
MQIFVKTLTGKTITLEVESSDTIDNVKAKIQDKEGIPPDQQRLIFAGKQLEDGRTLADYNIQKESTLHLVLRLRGGMQIFVKTLTGKTITLEVESSDTIDNVKAKIQDKEGIPPDQQRLIFAGKQLEDGRTLADYNIQKESTLHLVLRLRGGMQIFVKTLTGKTITLEVESSDTIDNVKAKIQDKEGIPPEQQRLIFAGKQLEDGRTLADYNIQKESTLPLVLRLRGGMQIFVKTLTGXTITLKVESSDTSTR

SEQ ID NO: 248178 - protein, 204 aa, Zea mays
  Clone ID: MRT4577_157926C.1.pep
MACLHDHSCEDHNCAADWSLYNHIDVPKVVALNESVPGSVKSVFKPWEQRLDTSGGFLESNEGDPELLIFIPFTSDVKIKSISVVGGADGTSPSRMRAFINREGIDFSDAQNMQPVQEWELAENLQGALEYQTRYSRFQGVANLTLHFSDNFGGDTTKIYYIGLRGEATQNKRDVVATIVYEVMPNPSDHKTKSETGGGFSHVE

SEQ ID NO: 248179 - protein, 91 aa, Zea mays
  Clone ID: MRT4577_157927C.1.pep
SDESPVQICSLAQRFPELKTLRSCDLSPASWISVAWYPIYRIPTGPTLRDLDACFLTYHSLFTQFAAGASSNCPRPATAATATAIIWFPTF

SEQ ID NO: 248180 - protein, 199 aa, Zea mays
  unsure (1)..(199): unsure at all Xaa locations
  Clone ID: MRT4577_157928C.1.pep
MERPPYDNATIRSVYHVRHYDVLKLMHVKEPLDIFMSHDWPLGITEYGNRERLLREKPFFKEEVNERTLGSESAAKLLNKLKPPYWFSAHLHCRFPAIIQHGEDGPTTKFLALDKCLPGRNFLQVIDIPSNPGPYEIQYDEEWLAITRRFNSAFPLTRMPCTIRNEELDIEDDRQWVRSKLNARXAKTFDFAQTAPPYD

SEQ ID NO: 248181 - protein, 253 aa, Zea mays
  Clone ID: MRT4577_157929C.1.pep
MQIFVKTLTGKTITLEVESSDTIDNVKAKIQDKEGIPPDQQRLIFAGKQLEDGRTLADYNIQKESTLHLVLRLRGGMQIFVKTLTGKTITLEVESSDTIDNVKAKIQDKEGIPPDQQRLIFAGKQLEDGRTLADYNIQKESTLHLVLRLRGGMQIFVKTLTGKTITLEVESSDTIDNVKAKIQDKEGIPPDQQRLIFAGKQLEDGRTLADYNIQKESTLHLVLRLRGGMQIFVKTLTGKTITLEVESSDTIDT

SEQ ID NO: 248182 - protein, 56 aa, Zea mays
  Clone ID: MRT4577_15792C.1.pep
HILLSTLHGRMSIPQNNLILANWYGPKFQPHRDRTIINRTLTALHDTKKNKNSRQT

SEQ ID NO: 248183 - protein, 204 aa, Zea mays; identical to SEQ ID NO: 248178
  Clone ID: MRT4577_157930C.1.pep

SEQ ID NO: 248184 - protein, 117 aa, Zea mays
  Clone ID: MRT4577_157932C.1.pep
GIPHGEGLERDYELRSRGAATLGVEALDNLVSASRRSSPTRPCPPPSPSTPTASTDHSITMAEPTIKDLMELMQFFQTELAAVKATMKDKSSSSSTHGGGEREDRPRVDRPPSGRVG

SEQ ID NO: 248185 - protein, 64 aa, Zea mays
  Clone ID: MRT4577_157933C.1.pep
NQCIDFNKKNPTDKPKKNLMTKKANRNQKHHPSKQQPVKGQLIHHPKQIPKKTLPKHEPLNTYI

SEQ ID NO: 248186 - protein, 287 aa, Zea mays
  unsure (1)..(287): unsure at all Xaa locations
  Clone ID: MRT4577_157934C.1.pep
GAPCPSSSTSSPPCPPPPRRRRPTPPSTRRTRISSTSPLTRSTGRSARRRRTRTTARRTRPTNPIDQCWRCRRDWARDRKRLARCAMGFGHRTTGGLAGKFYVVIDPSDDAADLVTPRKGTLRHAVTRARALWITFARDMVIELCQELIVSSDKTIDGRGAQVHIVGAQITLQNVRNVILHNLHVHDAAAHGGGAIRDSQHHWGVRGESDGDGVSVMGSSDWARDRKRLARCAXGLRPQDHFGKGLVQRMPRCRHGFFHVVNNDYTHWLMYAIGGSRNPTIISQGNR

SEQ ID NO: 248187 - protein, 125 aa, Zea mays
  Clone ID: MRT4577_157935C.1.pep
AYSLCALVPLHTNTSRALLCDGTEPNHHTRNKQTLIQGPSLTTGKKPIVRHFDDFRKSFCEEQSGDSLGPIRRLPPGAWMPMPTQQALRVATSFHAATPAHAALVNNTTPLHGLKDLGGATHDLE

SEQ ID NO: 248188 - protein, 150 aa, Zea mays
  Clone ID: MRT4577_157936C.1.pep
GASDAAVKDKAMQVTVAFNHFGKGLVQRMPRCRHGFFHVVNNDYTHWLMYAIGGSQNPTIISQGNRFRAVDDGRFKEVTKREYTPYSEYKDWVWKSQDDLFLNGAFFNQSGGENERRFDRLDLIQAKGGQYAELLTRYAGALNCRVGKKC

SEQ ID NO: 248189 - protein, 228 aa, Zea mays
  Clone ID: MRT4577_157937C.1.pep
NGRLRRPEEPPVRPPLHPRRRARHRRGDGVSVMGSSDIWIDHLSMSSCADGLVDAVDGSTAITVSNGHFTRHDHVMLFGASDAASKDREMQVTVAFNHFGKGLVQRMPRCRHGFFHVVNNDYTHWLMYAIGGSRNPTIISQGNRFRAVDDSRFKEVTKREYTQYSEYKNWVWKSQDDLFLNGAFFNQSGGQNERKYDRLDLIQAKGGQYAESLTRYAGALNCRVGRKC

SEQ ID NO: 248190 - protein, 115 aa, Zea mays
  Clone ID: MRT4577_157938C.1.pep
WAQAKTGPFLHITGPIKFFGKGKTFQQKIDRGGACLMGGKITWGAPPRRPRWANLPIIMGRFGDFGPEKKLTHFWRRKKPLLQKGMCRAGALIYRPRRGEIFFLAWPTGNMGHRG

SEQ ID NO: 248191 - protein, 123 aa, Zea mays
  Clone ID: MRT4577_157939C.1.pep
RTTFHTAHTFFDKVFEFRDYTTDKVLEANDSVLRKTGETADATRNKLGEYNDSSMEKARETKDAVAHNTSETAVATKNKLGEYNDAAAGKARDDLDTNGGKAREAKDATMQKAHETRASTPTP

SEQ ID NO: 248192 - protein, 56 aa, Zea mays
  Clone ID: MRT4577_15793C.1.pep
SLHSARRSLLQQTPTHSLRSPGQHNIRSFSELTVRRSALGIFNLGQRRVPKELDQP

SEQ ID NO: 248193 - protein, 60 aa, Zea mays
  Clone ID: MRT4577_157940C.1.pep
FFHYKNGPFQSVCLSSDQESGRPLFTMLKMLSCQVTLGNLLYIVPEFLVSRESFSLGKLY

SEQ ID NO: 248194 - protein, 455 aa, Zea mays
  Clone ID: MRT4577_157941C.1.pep
MAGSAVLRSPLSVLLYILAAVPATAAATPTDAAIDEAYAHLVNLTANQEYWAERAEAAHAYNRAAYQTDPVAVVQRFNDGVHRATATQTRSRSLAHRARGPCTATNPIDQCWRCRRDWARDRKRLARCAMGFGHRTTGGLAGKFYVVIDPSDDAADLVTPRKGTLRHAVTRARALWITFARDMVIELCQELIVSSDKTIDGRGAQVHIVGAQITLQNVRNVILHNLHVHDAAAHGGGAIRDSQHHWGVRGESDGDGVSVMGSSDIWIDHLSMSSCADGLVDAVDGSTAITVSNGHFTRHDHVMLFGASDAASKDREMQVTVAFNHFGKGLVQRMPRCRHGFFHVVNNDYTHWLMYAIGGSRNPTIISQGNRFRAVDDSRFKEVTKREYTQYSEYKNWVWKSQDDLFLNGAFFNQSGGQNERKYDRLDLIQAKGGQYAESLTRYAGALNCRVGRKC

SEQ ID NO: 248195 - protein, 66 aa, Zea mays
  Clone ID: MRT4577_157942C.1.pep
SRWERFALMGVVSEATLFASSGSFVLATAIGVDLTAIDGIHRSRQQTTTSKQTATTIRGRVDDPGR

SEQ ID NO: 248196 - protein, 61 aa, Zea mays
  unsure (1)..(61): unsure at all Xaa locations
  Clone ID: MRT4577_157943C.1.pep
WDVIMVDCPRGYTAPSPGKMWAIFTAGVLVRTQAGEGVMTDFLVHDYXREVERKLSREFLC

SEQ ID NO: 248197 - protein, 291 aa, Zea mays
  unsure (1)..(291): unsure at all Xaa locations
  Clone ID: MRT4577_157944C.1.pep
MPAAAMATETESFYSAQSSPEPEVAPMAPNVEPASQPAKPAAPQPVEPASLPAEPAARPADRLEILIERGLGQRREGESSMMTIFRVPAHVRDASKELYEPRLVSIGPYYRDRAALRTMEQHKWRYMRELMRRPHSLPPLDSYVRAVRNVEQEARCCYSERTDIFGSTAQSEPSGGGEIEEAHSPGFAEMLMLDGCFILEFFLKWHKSEKDKLCDVAWGLTLLHSDLLLLENXIPFFVLEALLHVVYXLTATRLHLFMLIIPYXXSPTTNCRRPRDXXPIEIQXAHLLHLF

SEQ ID NO: 248198 - protein, 110 aa, Zea mays
  Clone ID: MRT4577_157945C.1.pep
QQCVSQQEIGSPESIERTIRLWCPELPIELHATDRGLGFGTSPNQNPGLSCIGREKRRVIVGPGGGEEDYAIVTGADDGEEVEHAPELLLVHGRHRRDVSSGCLLLACDG

SEQ ID NO: 248199 - protein, 82 aa, Zea mays
  Clone ID: MRT4577_157946C.1.pep
VDSRARPGQMPASAFEKVGVCCPQATHSIKCRSRHCHWLSKMRDITSKRDYLLLVMHPLLLPHVWSIFGRARMDLAGAIWLS

SEQ ID NO: 248200 - protein, 91 aa, Zea mays
  Clone ID: MRT4577_157947C.1.pep
VLFFFFMYLCTHDTRFGFLFFLKQAFHLVGVVKRQTGTVFGTGWACSPVVLKKRLWGPLSHPLFYGQPFWVRQDRRIPPSIFSKKISPPLG

SEQ ID NO: 248201 - protein, 111 aa, Zea mays
  Clone ID: MRT4577_157948C.1.pep
DRDRVSNSKAVCLLDRVEFVFSYCRLQCCCRFEYRYGDIKLLEVVLITLTSEHVFMYQAVCLLDRVEFVFSYCRLQCCCRFEYRYGDIKLLEVVLITLMSEHVSMSQAVCL

SEQ ID NO: 248202 - protein, 57 aa, Zea mays
  Clone ID: MRT4577_157949C.1.pep
FIGPSMVQHPGAGMKICETESPRSPHRNETASFMLEAKIAAQQRCHLYLRTLFNEPR

SEQ ID NO: 248203 - protein, 374 aa, Zea mays
  unsure (1)..(374): unsure at all Xaa locations
  Clone ID: MRT4577_15794C.1.pep
NDNLLTGFIPPDLGKLQXLFELNLANNNLIGPIPENLSSCANLISFNAYGNKLNGTIPRSFHKLESLTYLNLSSNHLSGALPIEVARMRNLDTLDLSCNMITGSIPSAIGKLEHLLRLNLSKNNVAGHIPAEFGNLRSIMEIDLSYNHLSGLIPQEVGMLQNLILLKLESNNITGDVSSLIYCLSLNILNVSYNHLYGTVPTDNNFSRFSPDSFLGNPGLCGYWLHSASCTQLSNAEQMKRSSSAKASMFAAIGVGAVLLVIMLVILVVICWPHNSPVLKDVSVNKPDNLASASNNIHPKLVILHMNMALYVYDDIMRMTENLSEKYIIGYGASSTVYRCDLKNCXPIAIKKLYAXYPXSLKEFETELRLLKHQ

SEQ ID NO: 248204 - protein, 58 aa, Zea mays
  Clone ID: MRT4577_157950C.1.pep
RPLTSMLHMLSPGSASYRKGFTVLSLSGTHADLLRSFYVAPVVFYVYSHYSSVWTLES

SEQ ID NO: 248205 - protein, 72 aa, Zea mays
  Clone ID: MRT4577_157951C.1.pep
TKHLPGHGLRKARRQLRFWTFLPTIHIKGLGFRFPKFWGANGAFPGGPWVFYFMGLNGFEPGPGFHGDFSWF

SEQ ID NO: 248206 - protein, 156 aa, Zea mays
  unsure (1)..(156): unsure at all Xaa locations
  Clone ID: MRT4577_157952C.1.pep
LAPEGPILXLNNWGFSRRGATRNICSKRRKGMISKREHARLAASSIDSIVNGGDAVMEPGVAVCNTEPAVAQVQLQTMSGQXPLMCAGPSEGAEQISKXVNEXAKRCXACQNMVGLTXFNCRCGNYVLSTYXYSDNDDCKXDYLTAVRNNIAKVNP

SEQ ID NO: 248207 - protein, 355 aa, Zea mays
  unsure (1)..(355): unsure at all Xaa locations
  Clone ID: MRT4577_157953C.1.pep
MLLSFAPSFVFGSSIYSRPSFLGWYFSMIFALVLHLLSVSIFFLLQQFSTKCSLYTSLAMEVRCIHDAPFLSFFSFFFCWYFTHDHLCLGGAPTVGIITSGIVIILVMKFVTRWIEVTREWQMERARLQALEMQAAAAAAGAPMIQQPAANGSAAPPYAIAANHVVEMGAVNRFLDDILREKPARFTPENLREFTRNYAERLGSGGFGVVYRGAFPNGVQVAVKILNSTLDRRAEEQFMAEVGTAGRTYHINLVRLYGFCFDATTKALVYEYLEKGSLDRVLFDLEGDALGFDALSGIVAGTARGVRYLHEECQHRIIHYDIKPGTCCSPRTTPPRVXDFXLXRLCNRDSTHLTM

SEQ ID NO: 248208 - protein, 206 aa, Zea mays
  Clone ID: MRT4577_157954C.1.pep
FGATFCHLGDKKLLTPQPRLRTGFFSVMDSQMIPVGCIPEACTSVGAAKYGRPIGLDESLKVDLIVIGSVAVDPSSGARLGKGEGFAELEYGMLRYMGAIDDSTMIVTTVHDKQLVDDIPVEKLLVHDVPVDIICTPTQVIFTKTTIPKPQGIYWEKLSPEKLGQIRILRELKQRIEQETGTMLPCGPSEKLPPTAQRKQRWQRRR

SEQ ID NO: 248209 - protein, 157 aa, Zea mays
  Clone ID: MRT4577_157955C.1.pep
AGRPKPLYQVSQFRYSSLMLNARSPTHPLLLPEVLHHLGCYLPRPTLLLSLGVCRTWHRALQPYLWSTLQLENQPCNFTPRQATPTVLLRNKHHIRHLHEIGSNSLLKFLAFSTASLPMQLTSIHVSMLSPEILIVAQQSVETLVTFSWRAKPAPKG

SEQ ID NO: 248210 - protein, 305 aa, Zea mays
  unsure (1)..(305): unsure at all Xaa locations
  Clone ID: MRT4577_157956C.1.pep
PSADTPQKQVRFLTLSGDKKLLTPQPRLRTGFFSVMDSQMIPVGCIPEACTSVGAAKYGRPIGLDESLKVDLIVIGSVAVDPSSGARLGKGEGFAELEYGMLRYMGAIDDSTMIVTTGCHGLSQPTGDDSSNGGFCCHACLVPCGHARRHRRALGTGQPTHGAPTDYCAXKQLVDDTQAVGSRHTCPNTQQQVLVHDKQLVDDIPVEKLLVHDVPVDIICTPTQVIFTKTTIPKPQGIYWEKLSPEKLGQIRILRELKQRIEQETGTMLPCGPSEKLPPTAQRKQRWRRRRRDFCMLLLTVSFTQ

SEQ ID NO: 248211 - protein, 90 aa, Zea mays
  Clone ID: MRT4577_157957C.1.pep
DNIYECHRLDSGYRRRSICLCSPTRRQQATATERDGQGQAAGEAEAGAVIKRKRRTRAVITSSTETSTRRPPWTRTNCWTRCTGYARRWG

SEQ ID NO: 248212 - protein, 436 aa, Zea mays
  unsure (1)..(436): unsure at all Xaa locations
  Clone ID: MRT4577_157958C.1.pep
MGISAKWIKSLVGIKKHEKGRNAECSDARSSAVQLLRKREHSVDTESVPAAEELRVQAEPLAGDTNTETISNSASSPSTSLQASQTELGTKEHQAAVVIQSAFRAFLARRALRALKGLVRLQALVRGHAVRKQAAETLQCMQALVRAQARVRARRVRVSLESQGTQKKPPEENVHEDHVRDIEEDWCGSIGSVEEMKAKTLKRQEAAAKRERAMAYALTHQWQASSRKQKAASLQGQGLAGDENQWGRNWLERWMAARPWENRLLDSNARDSVTAGDDDDKPAEEGKAKAPDLSKPKGKAPVLASQSNGSRQEKAADHEKSHSDVSGCGSSVXGLRTVQPTVSLESSKVEVKVKAPQEVADEASSGPSNPASRSASNPKERPARTDAPARKRLSLPNNATAASRGVGKRPTNSSRSRTNVASRPKNGRGASSPGLE

SEQ ID NO: 248213 - protein, 592 aa, Zea mays
  Clone ID: MRT4577_157959C.1.pep
MDEAAGLLLQEEGGGGDQEALLLPLPQDVGLYTGDGSVDVKGRPALKGTTGNWKACFFILGNECCERLAYYGIAKNLVTYLKVKLHLGNLEAARHVTTWQGTCYLTPLVGGILADSRWGKYWTIAVFSSVYFIGLAILTLSASVPALQPPSCLRTVCPEASLLQYGIFFGGLYMIALGTGGIKPCVSSFGADQFDDTDQAERAKKGSFFNWFYFCINIGSFISGTMIVWIQDNTGWGIGFAIPTIFMALAISFFFSASNKYRFQKPGGSPLTRVCQVVIAAFRKWHIEVPHDTSLLYEVDGQTSAIEGSRKLEHTNELEFLDRAAVISSADLKSESFTDPWKLCTVTQVEELKILIRMFPIWATTIIFSAVYAQNSSMFIEQGMVLDKRIGSFNIPPASLSTFDVISVIMWVPLYDRILVPLARKFTGREKGFSELQRMGIGLVLSILAMVSAALVELKRLEIARSEGLIHEKAAVPMSILWQIPQYFLVGAAEVFTCIGQVEFFYDQAPDAMRSLCSALALITVSLGNYISSIILTLVSYITTQGGDPGWIPDNLNEGHLDRFFWLIAGISFVNLIVYMGCAVRYRYKKAS

SEQ ID NO: 248214 - protein, 63 aa, Zea mays
  Clone ID: MRT4577_15795C.1.pep
EVHADRASWASNGKGTTTIALSNNLNSLINETVPLYTGVLILVAVYCYRTPVTVYTLPPSLAN

SEQ ID NO: 248215 - protein, 113 aa, Zea mays
  Clone ID: MRT4577_157960C.1.pep
MVMCMPCTLCQDNSGVTRLLGSGSLHPCTSWCPVLIRSSGSTHYRLFLSGVVQPVRVVELYGCMVRPHFHRPASRPVWNLRQGPQPFPVSHVVGVVTAYLPVHQPSHARSNVR

SEQ ID NO: 248216 - protein, 76 aa, Zea mays
  Clone ID: MRT4577_157961C.1.pep
PARALSVRPPFPSARCSQPSWPPHNASARPSPRAGRAWQIFHLGRVVDNQAQGQSHCLLSLSALQGEGHTHTGCGG

SEQ ID NO: 248217 - protein, 81 aa, Zea mays
  Clone ID: MRT4577_157962C.1.pep
KSPSHMVEVITTRTKEILVTGGTEEILRVTTEALLSALTTVLVSVPTEDDQWSAKTAVMAWYPISIASDRSSGGPSEKLLY

SEQ ID NO: 248218 - protein, 112 aa, Zea mays
  Clone ID: MRT4577_157963C.1.pep
LPFPHDPEFQTTGALDRRRSEKLLLQLCDAMCTSLLSRSPVIQQSTDSVVCPNSERDDVHMHGDLHDQLEREVVLGPDEPVVHRNASAPAVFHPMQQHAEVGGVLPSVCGLP

SEQ ID NO: 248219 - protein, 101 aa, Zea mays
  Clone ID: MRT4577_157964C.1.pep
RINNGQLPFSLSNIGSVFGVPEKLQSKHEPLPEKFVEPLKLMDPRSGAKDFETSSDTIFLQPGPFSLPKVASMSRSFFSQNPAKETGGGKTKCCNGFANGP

SEQ ID NO: 248220 - protein, 71 aa, Zea mays
  Clone ID: MRT4577_157965C.1.pep
TLKGGLITKQPKGMTASPTILSVSILSLVCSHVTHTYMGRHTCIHAYQCTVRSRYRSHTTSRSIYIVGRYQ

SEQ ID NO: 248221 - protein, 178 aa, Zea mays
  unsure (1)..(178): unsure at all Xaa locations
  Clone ID: MRT4577_157966C.1.pep
CTTLFALFQSSSGVYMVAFAGKKYAARSPPVFVGNISYTVTGFTLVXRPHAAPQSKRDKKLTWLTEPPTTRLASRFXLEFQKGTLQNLFWKAGGCSSCSGRSDFACVDGSCAVRTASCRGKGGQVECSPGIQLAFSGTDRHEAVLNSWYEVSKLRQYSLFGLFSNLKDSLTNQFSSFF

SEQ ID NO: 248222 - protein, 52 aa, Zea mays
  unsure (1)..(52): unsure at all Xaa locations
  Clone ID: MRT4577_157967C.1.pep
IXTHAXRPXHPNTQSXIGHXLVRTAGHRLRHXTFXXXARXSLXXRRXXRSXT

SEQ ID NO: 248223 - protein, 808 aa, Zea mays
  unsure (1)..(808): unsure at all Xaa locations
  Clone ID: MRT4577_157968C.1.pep
MRMCIDYRSLNEVTIKNKYPHPRIDDLFDQLQGAKYFSKIDLRSGYHQLRIKEADIQKTAFVTRYGQYEFTVMPFRLTNAPAFFMNLMNKVFMEELDKFVVVFIDDILIYSKDREDHKRHLRIVLGKLRAHQLYAKLNKCEFWLEKIAFLGHILTAEGIEVDPSKVEVVSKWRQPTNVSEVQSFLGMARYYRRFIKGFSSIARPMSELLKKDHKFVWTPKCEGSFQIIKEKLTTAPVLSLLDIHQDFVIFCDASRQGLGCVLMQNEKVIAYALRLLKPHEQNYPTHDLELAAIVHALKIWRHYLIGNKCHIFTDHKSLKYILTQPDLNLRQRRWLELIKDYDLEIHYHPGKANVVADALNRKPFGIKGTNFLEDWKKELAQLNTCLGNSDILEVKPMLEDLICKAQCLDSETARLVEKARNEQLPDLRTDDQGVLWFKYRLCVPKGEAREVLLKEAHNSAYSIHPGTTKMYLDLKTRYWWKGMKKEIAQYVAQCDICQRTKAEHQKPAGLLQPLPIPEWKWEEIGMDFITGLPRTQKGNDSIWVIIDRLTKVAHFIPVKTTFGRATLARIYLKEIVRLHGIPRKIVSDRGTQFTSKFWTSLQKAMGTKLDFSTAYHPQTDGQTERVNKVLEDLLRAXTPLMWSNVGEXALEGPAFVKEAEEKVALIRRRLLEAQSRQKSYVDNRRRELRFEEGDFVYLKVSPMRGVRRFQVKGKLAPRFVGPYPIIGRLRKCLKVPETRIEAEAIQIQKDLQYREKPVKILDSAVRRTRNSEVKLCKVQWSRDGEEEATWESEDSLRKEYPYLFSSPV

SEQ ID NO: 248224 - protein, 1727 aa, Zea mays
  unsure (1)..(1727): unsure at all Xaa locations
  Clone ID: MRT4577_157969C.1.pep
MTSHGSSNDGNALTHTDGLAREGFPRILWEVLQGAGYTTPPQYAVQQFEKHRVPRCRVWMTLEPHPLQPGWRSLDSESFGYRAEDTIEAIALHGLTTFCGFHPLELATHPIGLFPAEREDDPMWKDRVEHAKDIWAIYPGQTAHLTVRCMNALYHLQVMRGEAMSHLMALLEATKITLDNREELVVDLSQEMVEKDLQVEQLSTDIQELEELVGTRENTIEVLEDQLINTQQQLAEANEHLDMHHQEIQDQEANEDVDIEGGDEPASSVDTADVVLSMYMVFQMAGRQRRGQNERVPPPPPPPPTLQELMAQQNEILRQLAQRQPPPQHYGGGDHQRHPAAATYQEFLSTQPPLFTRAEDPLDADVWLRVVESKFPLLHGVCSEVTKVRFATQQLRGPARTWWDHFLAMQPEDREVEWREFKAAFRGHHIPAGIMDRKLNEFLALTQGNRTVLQYAQAFNDLCQYAGYHADTDEKKRDRFRRGLITKLRDRLNTVRANSYNELVNMAISQEDCITARQAEKKRKTPVAGPSAQPQRFRIVSDTQGRGPQQQQGRWVIRPQQQQQQAPNRTQFPAQRGNQQQQQYRQANDKRCFTCGNTGHYAKNCPRNQQRQGXCQSEPRQEAEGXQVRQGRLNFTTMADIPEGAPVMTGIFTVLNFPAIVLFDSGASHSFISAKFSAKCQFPFHHTDGGITISTPGGRVATYQINRQVPIKFGSLVIRTTLLILGLDSVDIILGTDWLTRHQAVLDIAARAIEIHSPAYGETVLYLPDQGCTRSCAFVMIESPVEKIPVVCDYPDVFPDELPGMPPDRDIEFAIELQPGTAPISKRPYRMPPAELAELKKQLQELLDKGFIRPSTSPWGCPALFVKKKDESLRMCVDYRPLNAVTIKNKYPLPRIDDLFDQLQGAKYFSKIDLRSGYHQLRIKEADIQKTAFVTRYGQYEFTVMPFGLTNAPAFFMNLMNKVFMEELDKFVVVFIDDILIYSKNREDHKRHLRIVLGKLRAHQLYAKLSKCEFWLEKIAFLGHILTAEGIEVDPSKVEAVSKWRQPTNVSEVRSFLGMAGYYRRFIKGFSSIARPMIELLKKDHKFVWTPKCEESFQIIKKKLTTAPVLSLPDIHQDFVVFCDASRQGLGCVLMQNERVIAYASRLLKPHEQNYPTHDLELAAIVHALKIWRHYLIGNKCHIFTDHKSLRYIFTQPDLNLLQRRWLELIKDYDLEIHYHPGKANVVADALSRKPFGIKGTNFLEDWKEESAQLNACLGNNDSLEVKPMLEDIICKAQHLDPETARLVEKARKEQLPDLRTDDQGVLWFKHRLCVPKGEAREVLLKEAHDSAYSIHPGTTKMYLDLKTRYWWKGMKKEIAQYVARCDICQRTKAEHQKPAGLLQPLPIPEWKWEEIGMDFVTGLPRTQKGNDSIWVIIDRLTKVAHFIPVKTTFGGATLARIYLKEIVRLHGIPRKIVSDRGTQFTSKFWTSLQKAMGTKLDFSTAYHPQIDGQTERVNKVLEDLLRACVLAFDRSWESSLPYAEFSYNNSYQSSIKMSPFEALYGRKCQTPLMWSNVGEKALEGPAFVKEAEEKVALIRRRLLEAQSRQKSYADNRRRELRFEEGDFVYLKVSPMRGVRRFQVKGKLAPRFVGPYPIIGKVGPAAYRLELPESMSDIHNVFHLSQLRKCLQAPESHLEEETVQIQKDLQYREKPVKILDSAVRKTRTSEVKLCKVQWSREGEEEAT

SEQ ID NO: 248225 - protein, 78 aa, Zea mays
  Clone ID: MRT4577_15796C.1.pep
RGSIATNVSGTDNYGTMQKFMINTGPTNHNFDNLGDSSCSNDVPEKPKKLDLSTCIPSSKHARAQLGEGANGQRRDWD

SEQ ID NO: 248226 - protein, 40 aa, Zea mays
  Clone ID: MRT4577_157971C.1.pep
FKCNYKHEYINYCSCKVLFGSRNVTRMVMVIVPPQLLPAP

SEQ ID NO: 248227 - protein, 1265 aa, Zea mays
  Clone ID: MRT4577_157972C.1.pep
MGDFLRLKPPTFAGSSNPLDADDWMRTIKRKLEAIGCPENQRVQLDAHQLSGMALAWWDTFNVTIRDATWAEFEAAFREHHVPQGLVQLKEDEFRELTQDGRSVSEYVHKFTELARYAPDDVNTKSKKMARFLKGLRPELKTILASQDFLNFSHLSNKAMQVERAKEEEKGHLKRKFQVLRAQQQDRHQKTRSFGFPPKGPNFSRPAGPTLSRFSQQSQSSFHSPSVASNQPPANACWHCSDPSHFKNNCPQLKPQGPAYSNSVNGPKNTSAPAPKAPSAVSQQNKTPYQGRARVNHVDAQEAQQAPGVVLGEFLVEFTPATVLFDSGASHSFIATSFVEKYGIPSTPLEIPLVTRTPGSDLLCQLKCSQVRILLSGVVFLADLTVLPSKGIDVILGMDWLTKHKGIISCADKTVLLTDQQGKSVSCQAQPPASDPMMFSITTENISVVEEFMDVFLEELPGMPPEREVEFYIDLIPGTAPIAKRPYRMAPTELAELKLQISDLQQKGYIHPSSSPWGAPVLFVSKKDGSMRMCIDYRSLNEVTIKNKYPLPRIDDLFDQLQGAKYFSKIDLRSGYHQLRIKEAGIQKTAFVTRYGQYEFTVMPFGLTNAPAFFMNLMNKVFMEELDKFVVVFIDDILIYSKNREDHKRHLRIVLGKLRAHQLYAKLSKCEFRLEKIAFLGHILTAEGIEVDPSKVEAVSKWRQPTNVSEVRSFLGMAGYYRRFIKGFTSIARPMTELLKKDHKFVWTLKCEESFQIIKEKLTTAPVLSLPDIHQDFVVFCDASRQGLGCVLMQNEKVIAYASRLLKPHEQNYPTHDLELAAIVHALKIWRHYLIGNKCHIFTDHKSLSLEVKPMLEDLICKAQHLDPETARLVEKARKEQLPDLRTDDQGALWFKHRLCVPKGETREVLLKEAHDSAYSIHPGTTKMYLDLKTRYWWKGMKREIAQYVARCDICQRTKTEHQKPAGLLQPLPIPEWKWEEIGMDFVTGLPRTQKGNDSIWVIIDRLTKTDGQTERVNKVLEDLLRACVLAFDRSWESSLPYAEFSYNNSYQSSIKMSPFEALYGRKCQTPLMWSNVGEKALEGPAFVKEAEEKVALIRRRLLEAQSRQKSYADNRRRELRFEEGDFVYLKVSPMRGVRRFQVKGKLAPRFVGPYPIIGKVGPAAYRLELPESMSDIHNVFHVSQLRKCLQAPESHLEEETMQIQKDLQYREKPVKILDSAVRKTRTSEVKLCKVQWSREGEEEATWEIEDFLRREYPYLFPNPV

SEQ ID NO: 248228 - protein, 285 aa, Zea mays
  Clone ID: MRT4577_157973C.1.pep
MRALVQNQLPENIHHSKEFIKYDRQIALSTGRVMPTTDSVRARASELIKALDGQDCPRPISCCLFANKIISIVKSRNTKDKTFGNLAFACGYVMLLVTNQVPDAMDYLLAEFNRVCIYTVPKHLHALNAEARNRDYYRLIGYQEENGQFESTESYLTYVVAYVKLYAAMIQTEIKGVRHPHGLAEGWKWLAMFLNSLPATTATACALHAFLKMAGFALHKKYGSQFMKILYVISRYFLPALKEQGNKMQAEAVNNLQNYLNDKIYLEEPEGQYLVQQLLSKELFM

SEQ ID NO: 248229 - protein, 99 aa, Zea mays
  Clone ID: MRT4577_157974C.1.pep
NPPFFVFFFFFFGVFFGVFRVFSNKTPNINEPEKEVLGVKTPSSGYRLWGGGGAPPFLGWETTRGHERFFWPGLENPPFYWGTPKFPFHLVKSPLQGLF

SEQ ID NO: 248230 - protein, 252 aa, Zea mays
  Clone ID: MRT4577_157975C.1.pep
HPSVRPSVVRRPPPARASQQRSVIIEDLAPSPEINGEKEKETEVAEKRWKVLVWKTAVYLITLGMLIALLMGLNMSWTAITAALVLLALDFTDAQACLEKVSYSLLIFFCGMFITVDGFNKTGIPNTLWELVEPYSRIDSAKGVALLAVVILILSNVASNVPTVLLLGTRVAASAASISHGSERKAWLILAWVSTVAGNLTLLGSAANLIVCEQARRAQFFGYNLTFWSHLRFGVPSTIIVTAIGLLIVISY

SEQ ID NO: 248231 - protein, 94 aa, Zea mays
  Clone ID: MRT4577_157976C.1.pep
TISPIHNPTANIHRMLAQQATNKARSIRIKARVFSCKTCKKGGNGGEVSCLRRRGCCKGPPRGARQEEAVQRRPRRRRAAGTRHEPPPPFRSLR

SEQ ID NO: 248232 - protein, 78 aa, Zea mays
  unsure (1)..(78): unsure at all Xaa locations
  Clone ID: MRT4577_157977C.1.pep
GLTFRAERCLFLAEXYSSGGKRAEPYALCCHAHTLTGSALEQXETVXDRAVIQDLEYVSHNCISNNCIEHATDILVEE

SEQ ID NO: 248233 - protein, 164 aa, Zea mays
  unsure (1)..(164): unsure at all Xaa locations
  Clone ID: MRT4577_157978C.1.pep
SLADRRYRHYMQICDDHGNATHGLVLSELICHGIRRSDPQXTGTTSANKGKQQQRLAVPAATAEELDIIDHLHLIGAXTQISIREMYGKHGRNDLVFLRIGVVSTLFVSSXSDAEAGLRIQDYVFAEAARAMADEIIRYELSDVANACYGEYXEEGRKLLTTHM

SEQ ID NO: 248234 - protein, 367 aa, Zea mays
  Clone ID: MRT4577_157979C.1.pep
DAGDFPHFTGLADSIMIMNGINAPKVIECFGSDGNPRVRLAKSGNDDLRQDAVMEQFFSLVNTFLQNHRDTSKRRLKIRTYKVVPFTPSAGVVEWVNGTVPLGDYLIGSTTSGGAHGRYGIGDWTYLQCREYLMSEKDKRRAFLKICSNFRPVMHHFFLERFLLPADWFQSRLAYTRSVAASSMVGYIVGLGDRHSMNILIDQDTAEVVHIDLGVAFEQGLMLKTPERVPFRLTRDIIDGMGVTGVEGVFRRCCEKTLCVMRANKEALLTIIEVFVHDPLYKWALSPLKALQRQKETVDTDSCLDDSQEPYDGNKDAARAILRVKQKLDGYEDGEMRSVQGQVQQLIQDAVDVDRLCQMFPGWGPWL

SEQ ID NO: 248235 - protein, 144 aa, Zea mays
  unsure (1)..(144): unsure at all Xaa locations
  Clone ID: MRT4577_15797C.1.pep
GKTPPLGTPGPSETGGPPPKXGKRPQNPPKGSGKKQALGTPPRKGGAQNPFPKKAGPKKPPQKKWGQGPPPPGTWAKIGPKPKKKQPFPLAWGAPERRNPKXKGPPPFXGKNPRAPKPKGGTLTPGGPPGKKIQNPPLGNFRGG

SEQ ID NO: 248236 - protein, 67 aa, Zea mays
  unsure (1)..(67): unsure at all Xaa locations
  Clone ID: MRT4577_157980C.1.pep
WLPSRRRCCLGLVGVIRCRRHLALLQVRSVQPTCCHCGDGXXGWVCISSKILLGHVAWSSELGVRVG

SEQ ID NO: 248237 - protein, 93 aa, Zea mays
  Clone ID: MRT4577_157981C.1.pep
QVVSVSASVPIWSASARLVVIVSVWSVLIGSLQTLVSQLHKSGTSSLLWVPLLVGMSRLPLAASWRRPRPVPEMIEASVENSPPVQVDGLVNI

SEQ ID NO: 248238 - protein, 89 aa, Zea mays
  Clone ID: MRT4577_157982C.1.pep
MLATRRLLGWSLPALGSVRFSGDTTAPKKTSFGSLKDEDRIFTNLYGRHDWRLKGSLSRGDWYKTKEILLKGPDWILGEIKTSGLRGRG

SEQ ID NO: 248239 - protein, 104 aa, Zea mays
  unsure (1)..(104): unsure at all Xaa locations
  Clone ID: MRT4577_157983C.1.pep
PFQLGLQDATSPIIEELTNFHDHTLIIVFLISSLVLYIISLILTTKLTHTSTIDAQEVETIXTILPAVILILIALPSLRILYIIDVXNNPVLTVEAVGRQXXWS

SEQ ID NO: 248240 - protein, 69 aa, Zea mays
  unsure (1)..(69): unsure at all Xaa locations
  Clone ID: MRT4577_157984C.1.pep
HSKRLGFGVSIAAAAXNFTFQVIINNHPWQIGNRPYDWNVYLFFHHILKXXRAFPRSPKAKKLNFSFWK

SEQ ID NO: 248241 - protein, 173 aa, Zea mays
  Clone ID: MRT4577_157985C.1.pep
MNVAEEEVSMEREEKGGNVRDGEVRTTAAAAAAVSLETLRKRMADFATERDWEQFHSPRNLLLALVGEVGELSEIFQWKGEVPKGLPGWDDAEKEHLGEELADVLLYLVRLSDMCGVDLGKAALRKMEINARKYPVGQCKGSSKKHTHYGSTNNVGDSDKANAANKEQHSCGV

SEQ ID NO: 248242 - protein, 126 aa, Zea mays
  unsure (1)..(126): unsure at all Xaa locations
  Clone ID: MRT4577_157986C.1.pep
KKKKKKKKKKKKKKKKKKKKKKKKKKKKTLGRNPPRGNFCSFPSHGGPFGLPFRGPIWPFGGAFYIXLAGVLQPRDGKNLGVPQLNRLGANPLFPSWGITKKARPNRLSKQLPTLIGKWTPLVAGH

SEQ ID NO: 248243 - protein, 58 aa, Zea mays
  unsure (1)..(58): unsure at all Xaa locations
  Clone ID: MRT4577_157987C.1.pep
GSPRKSCTDSSHELVPGIRVHHRWYGEEDQVXWRDLSEKTLMDEESAALEPKRLERLE

SEQ ID NO: 248244 - protein, 762 aa, Zea mays
  Clone ID: MRT4577_157988C.1.pep
MDPKGKNTKWDRQIPKPQRQNSPPWGRHWNLSWRLRPPHMKVESKQDMQAATFGESADPAKAKSRLHTIWVVAENVPEELLNYQAICEIGSTIGAIEEIDLNSLESKDMVRFKVHVKSIDMIPEVIEVRVKPYLYDIFFKVENIDAEGWNDDSVSLGKRASVDVQRSGKFVMEKKVIKESGEKEGFEGDVEFNESEDDLLSSQELDVLVKDMGVDMKGTKKNKGKGADPMEGIRKSTRLEANEDIKITDKAISRAVAKDAFLNKGMSSNPFSVLSTSDNILVEMVDLLNVSLGKNDEDVCLNLNDIKMVETERFIACSSNIVPEVNLNITETEKEIEISDSIDKMVQGLLDSESEKEKMLVYNKKEDLRREKKFSLRNKKKNNSPKGLVKPGKFEFLKELITKHKVDFIGLQETKRKEFDQSFVNIYGAAQAENRSRFLSEFSSVCSNCKGPTIFGGDFNIIRTNEEKNKPGILCRWSALFNSIIEMHGLIDLDLSDRLYTWSNNRNNPTFEKLDRFLVISENQFGFVKGKYILDCVVALHEIIHEVKKKKQNEIILKIDFEKAYDKVNWQFLYSMLQQKGFGDKWGDWVMKAVKGGKVAIRTNGMIGPYFPTHKGVRQGDPFSPLLFNIAADGLACLIEKAQEKKLIAGLIPHIISNGCAYLQYVDDTILLLQDNLEFARNLKFILVLFEKISGLKINFHKSEVYCFGNANNNKDAYAEIFTCPIKILLICYLGVPIDHKTLSISQWAKTEEKFEKNLGVW

SEQ ID NO: 248245 - protein, 72 aa, Zea mays
  Clone ID: MRT4577_157989C.1.pep
KNKRLAPFYSITQHMGAQEYFNIWLTYIYRGIELLRLGKQNPVLFKKTIPPTCSPIYGDPWVQGQTGPGRGP

SEQ ID NO: 248246 - protein, 58 aa, Zea mays
  Clone ID: MRT4577_15798C.1.pep
YDAYKSFIFILVLFIDYVSNLHIFQYLFGELFYDWIDVPRIEKTVVYHYRKKNKPIQL

SEQ ID NO: 248247 - protein, 65 aa, Zea mays
  Clone ID: MRT4577_157990C.1.pep
EDTGFTTEDASRWMTNFPRDDVQSTPRWRYSPAGGGPSPSSELTTTGEAAAAALGVLIFGWLSSS

SEQ ID NO: 248248 - protein, 81 aa, Zea mays
  Clone ID: MRT4577_157991C.1.pep
MVANGPAPAKGSARVAPTLRRGRPPSVSFAGKGGPSSMLQFYPNEAAGPKMSPNLFLFMSIGFKAVVAMPHVFGKLSRPPN

SEQ ID NO: 248249 - protein, 217 aa, Zea mays
  Clone ID: MRT4577_157992C.1.pep
CKSLKSLKLYHLEHLHIQCNDELERWCKSEVNQHKFSQTLRKGFFLESPMGTNSCILPARSLSILWGQDDRYWRLNSIPESRFALSMELIAVWWLEIEGWVPFEFLSTDTSYDIFLVYKLADEHDGLRWGESYVAVDGVHTTDGVVSFVDEDAVRVDRVAYPVTRSEGWMELWLGEFYNKYVDREVKVSVWEKTDTYAKIGLIIEGMEIRKKSGSIS

SEQ ID NO: 248250 - protein, 84 aa, Zea mays
  Clone ID: MRT4577_157993C.1.pep
MAAMAALQSSMDGLSLSSNSFLGQRLSPITLPSLLPGKSTEKQCPIVMRLKRWERKECKPNSLPILHKMHVKLGDTGQVISGRE

SEQ ID NO: 248251 - protein, 87 aa, Zea mays
  Clone ID: MRT4577_157994C.1.pep
MENDRGDLVDIYVPRKCAATGRLIEAKDHASVQIAVGDVDAEGKIIPGSNTTFALSGYVRNAGEADDSLNRLATKEGLLRNVWTYAK

SEQ ID NO: 248252 - protein, 65 aa, Zea mays
  Clone ID: MRT4577_157995C.1.pep
SQKPNPFKKKGKRRKWELPKVVVPPPGKKKLVFPLFNQVLPTNMHLKVVNKGPPPTCGRFFFGEP

SEQ ID NO: 248253 - protein, 315 aa, Zea mays
  Clone ID: MRT4577_157996C.1.pep
MAAAAAAAAAVSSPIAPRAVAAAASRRGFVTFGGGAARSSPTLRSGRGFSGVQTHVAAVEQAVVKDATKLEAPVVVVTGASRGIGKATALALGKAGCKVLVNYARSSKEAEEVSKEIEASGGEAITFGGDVSKEADVESMMKAALDKWGTIDVLVNNAGITRDTLLMRMKKSQWQDVIDLNLTGVCLCTQAATKVMMKKKKGKIINIASVVGLTGNVGQANYSAAKAGVIGFTKTVAREYASRNINVNAIAPGFIASDMTAELGEELEKKILSTIPLGRYGQPEEVAGLVEFLALSPAASYMTGQVLTIDGGMVM

SEQ ID NO: 248254 - protein, 318 aa, Zea mays
  Clone ID: MRT4577_157997C.1.pep
MATAAATAAAAAVSSPAARGAAGAAAASRRGFVTFGGGAARFSPTLRSGRGFSGVQTHVAAVEQAVVKDATKLEAPVVVVTGASRGIGKATALALGKAGCKVLVNYARSSKEAEEVSKEIEASGGEAITFGGDVSKEADVESMMKAALDKWGTIDVLVNNAGITRDTLLMRMKKSQWQDVIDLNLTGVFLCTQAATKVMMKKRKGKIINIASVVGLTGNVGQANYSAAKAGVIGFTKTVAREYASRNINVNAIAPGFIASDMTAELGEELEKKILSTIPLGRYGQPEEVAGLVEFLALNPAASYMTGQVLTIDGGMVM

SEQ ID NO: 248255 - protein, 60 aa, Zea mays
  unsure (1)..(60): unsure at all Xaa locations
  Clone ID: MRT4577_157998C.1.pep
MKCDAAYLVAILAVNASPYDVDXTDILESVGCEVDXXKIKLLLALLNAKDITTLIVMDQE

SEQ ID NO: 248256 - protein, 82 aa, Zea mays
  Clone ID: MRT4577_157999C.1.pep
MGSWVRTITTPFRKACTIFGPHKDGGGKKQTQQRPNSAAVVQHVDAERAKLHGEVMACAYDDVQVMWSMLDQARIRDLSASS

SEQ ID NO: 248257 - protein, 92 aa, Zea mays
  Clone ID: MRT4577_15799C.1.pep
MFSWLKRGGARGQQPEAIRTVTSALKELYRTKLLPLEEHYRFGAFHSPALEDADFDGKPMVLVAGQYSTGKTSFIQYLLEQEVPGSRVGPEP

SEQ ID NO: 248258 - protein, 396 aa, Zea mays
  Clone ID: MRT4577_1579C.1.pep
MALRLNDVALCLSPPLAARRRRSRSRSSGRFVAVASMTSAVSTKVENKKPFAPPREVHVQVTHSMPPHKIEIFKSLDDWARDNILTHLKPVEKCWQPQDFLPDPASEGFHDEVKELRERAKEIPDDYFVCLVGDMITEEALPTYQTMLNTLDGVRDETGASPTAWAVWTRAWTAEENRHGDLLNKYMYLTGRVDMRQIEKTIQYLIGSGMDPRTENNPYLGFIYTSFQERATFISHGNTARHAKDFGDLKLAQICGIIASDEKRHETAYTKIVEKLFEIDPDGTVVALADMMRKKISMPAHLMFDGQDDKLFEHFSMVAQRLGVYTARDYADILEFLVDRWKVVNLTGLSGEGNKAQDYLCTLASRIRRLEERAQSRAKKAGTLPFSWVYGRDVQL

SEQ ID NO: 248259 - protein, 194 aa, Zea mays
  unsure (1)..(194): unsure at all Xaa locations
  Clone ID: MRT4577_157C.1.pep
MASRRRTLLKVIILGDSGVGKTSLMNQYVNKKFSNQYKATIXGGFXLTQEGQFEGXRLFHLRQKMGTLAGPRKRFQXSLGVAFQPRENKKFGWGPPKTPREGGKFFPKKNNPRWKKKILPNKKGGGAKKIFFFLGGGGPPKTGGKKSSSFFGGGGGTKKIFFFLGGGRTTPPACGVGIGKKKKKQKGGGPPPPP

SEQ ID NO: 248260 - protein, 84 aa, Zea mays
  Clone ID: MRT4577_158000C.1.pep
MGSWVRTITTPFRKACTIFGPHKDGGGGGKKQTQQRPNSAAVVQHVDAERAKLHGEVMACAYDDVQVMWSMLDQARIRDLSASS

SEQ ID NO: 248261 - protein, 84 aa, Zea mays
  Clone ID: MRT4577_158001C.1.pep
MGSWVRTITTPFRKACTIFGPHKDGGGKKHTQQRPNSAAVVQHVDAERAKLHGEVMACAYDDVQVMWSMLDQARIRDLSASLVT

SEQ ID NO: 248262 - protein, 82 aa, Zea mays; identical to SEQ ID NO: 248256
  Clone ID: MRT4577_158002C.1.pep

SEQ ID NO: 248263 - protein, 112 aa, Zea mays
  Clone ID: MRT4577_158003C.1.pep
AGLAGTAFISPYRADRDSARALHEAAGIPFIEVFVDAPLEVVESRDPKGLYKKAKAGEIKEFTGISAPYEAPLKPEVHIHTDQVTIEQGVELIIDYLLKNQLLDSEKIVKKY

SEQ ID NO: 248264 - protein, 151 aa, Zea mays
  unsure (1)..(151): unsure at all Xaa locations
  Clone ID: MRT4577_158004C.1.pep
KPENVLLRADGHVTLTDFDLSRLAHPHXPSLLGFTETDDLLAWAVPYCSGGDLNELRYSLPDRIFSPAAIRFYIAEIVSAVAELHAAGVVYRDLKVFDKRSAARSRKPDADPRAVGDQRALPPCAPAPPQQVVRGVVVAPAVSVVPRPPQP

SEQ ID NO: 248265 - protein, 48 aa, Zea mays
  Clone ID: MRT4577_158005C.1.pep
VCLPGKAIVSLLRVLMCSHTYVGLLCLVSPASLNVVSIIRWLAVNQFF

SEQ ID NO: 248266 - protein, 485 aa, Zea mays
  unsure (1)..(485): unsure at all Xaa locations
  Clone ID: MRT4577_158006C.1.pep
AEPLLRAILSPRARATPQHVPPARGACKHTAAPARAPVPXRPADMDIDLDRARALRILGRGAMGTVFLVAEGPSALRPSRYALKVFDKRSAARSRKPDADRRARWEISVLSRLAHPHLPSLLGFTETDDLLAWAVPYCSGGDLNELRYSLPDRIFSPAAIRFYIAEIVSAVAELHAAGVVYRDLKPENVLLRADGHVTLTDFDLSRLLXTPAGRPRSRXAPAASVVPRPPQPPVARPRAERXFSASRSSRTPTPTTPGPLTSPGPRRXAAAAAPEPGPXIMGSGDGAGVGRKSKSARVSPLSRKPASFGGSSSAAAWGKSYSFVGTEEYVAPEMVRGEGHGFAVDWWAVGVLAYEMAFGRTPFKGQNRKETFRNVLQQELEFPGDTRWRTPELADLISGLLERDPRRRLGYAGGADEVRAHPFFAGVAWDMLTEVSRPPYIPPPADEDLADVEGFDVRGHFKDLHQPPPPKSASESSSSEFSTEF

SEQ ID NO: 248267 - protein, 142 aa, Zea mays
  unsure (1)..(142): unsure at all Xaa locations
  Clone ID: MRT4577_158007C.1.pep
FVGAPPVGALAPSKSLGTQLNFGGSCRYSTAGPTVAAQKIASLASKMPGQKPKPAAVSSSSPDVSDELAKWHGPDRRIYLPHGLLDRSEVPELLTGEAPGDYGYDPFGLGKKPKDLAKSQXYELIHAXWAMLGAGAAVIPRA

SEQ ID NO: 248268 - protein, 90 aa, Zea mays
  Clone ID: MRT4577_158008C.1.pep
DKGKMLKGGLKTQIAQGRDVAYSVQKGGKGRYAKMNLKPMVGPNTNRPRALPLIQRREKGGVFKKNKLVYSETLGAVLFREGGGHWPGAS

SEQ ID NO: 248269 - protein, 71 aa, Zea mays
  Clone ID: MRT4577_158009C.1.pep
IGGRPLFFAGGDPYLFSVAHARPPLSVEAFVSLGAQPHDPLESLMLVRAMVLWHGLLHRVLVSRCGEENTK

SEQ ID NO: 248270 - protein, 280 aa, Zea mays
  unsure (1)..(280): unsure at all Xaa locations
  Clone ID: MRT4577_15800C.1.pep
FLASMSSLEVGFSMXLFVEMANEAKNLVLFTEKGQFGTLARMLQVDPPPKAVKVTMSKRVPLVGDELKAYEEEQERIKKEEVLKASISKEKELKASHESNAKASDPMVVDASSSRKSSNAGSHVGGNVDILIDGFVSPVTSIAPMFPFFENTADWDDFGEVINPDDYMMKQDEMDNNMMLGAGDGMDGKLDESSARLLLDSAPSKVISNEMTVQVKCSLAYMDFEGRSDGRSVXSVIAHVAPLKLVLVHGSAEATEHLKXHCAKNSDLHVYAPQIEENID

SEQ ID NO: 248271 - protein, 104 aa, Zea mays
  Clone ID: MRT4577_158010C.1.pep
RGETGGGTRGTFREPPKTPQETPGGGKTPFCYQTKPNQSKAPGAPGGVETPCFEPTKVGGLVTWVTPIFMHAVPRLKTKPKCPKLGVCRLQPTLGKKDGLVFFP

SEQ ID NO: 248272 - protein, 52 aa, Zea mays
  Clone ID: MRT4577_158011C.1.pep
GKGRYFISYECQTGIVHLQGITKLCPRAGLRVCPVCFFLPLGGGGGGGFSFF

SEQ ID NO: 248273 - protein, 204 aa, Zea mays
  unsure (1)..(204): unsure at all Xaa locations
  Clone ID: MRT4577_158012C.1.pep
MALVARFPSRSRXIFGLAALCRMEGTLXVHSFASDARPGDRPPVGDDDLHEXIFFEANKMYVTDLVELNTEEIAIDPXDPAVVSRYSPRSCSTVMDEADLLSDSHRIKYTIETFTKGISDGLTHLNTLEQLRICSGLIDRLEIETLLMDALEKIEKDIXTPLLRSVLMNMSTLLAECDKIIRYAWLSVGGSSQDRGTACIANCQ

SEQ ID NO: 248274 - protein, 288 aa, Zea mays
  unsure (1)..(288): unsure at all Xaa locations
  Clone ID: MRT4577_158013C.1.pep
LGTSRPAGTLLTRAPTTSQSSSRSAAAASGCLISPALFRPLATPPTAAASSASRRLPRGFRPHSPPKHAEPRPRSPPRFLPPPARRRVGNLFDHSPSYLFILIILHLVAHEARTLSSDGEALLAFKKAVTNSDGVFLNWREQDADPCNWKGVRCDSHSKRVINLILAYHRLVGPIPPEIGRLNQLQTLSLQGNSLYGSLPPELGNCTKLQQLYLQGNYLSGYIPSEFGELVELVALDLSSNTLSGSVPHSLDKLSKLTSFNVSMNFLTGAIPSSGSLVXFNETSFGGN

SEQ ID NO: 248275 - protein, 79 aa, Zea mays
  unsure (1)..(79): unsure at all Xaa locations
  Clone ID: MRT4577_158014C.1.pep
FLHTRLVGPIPPEIDRELEIXLGSVKHRYLAXFRGYCNSPSSXLLIYVYLQGEALDEVLHEKSETVXDWDARINIILGA

SEQ ID NO: 248276 - protein, 680 aa, Zea mays
  unsure (1)..(680): unsure at all Xaa locations
  Clone ID: MRT4577_158015C.1.pep
LFRPLATPPTAAASSARCRPSSPGQRLPPPFAVAARRAPFQIAAALPAAVGAAQPSYLFILIILHLVAHEARTLSSDGEALLAFKKAVTNSDGVFLNWREQDADPCNWKGVRCDSHSKRVIDLILAYHRLVGPIPPEIGKLNQLQTLSLQGNSLYGSLPPELGNCTKLQQLYLQGNYLSGYIPSEFGDLVELEALMRTPSLSTTPTKNMVKGSSQLKHNPIRQCTIIFDVGCLKGDLSSNTLSGSVPHSLDKLSKLTSFNVSMNFLTGAIPSSGSLVNFNETSFVGNLGLCGKQINLVCKDALQSPSNGLQSPSPDDMINKRNGKNSTRLVISAVATVGALLLVALMCFWGCFLYKNFGKKDMRGFRVELCGGSSVVMFHGDLPYSSKDILKKLETIDEENIIGAGGFGTVYKLAMDDGNVFALKRIVKTNEGLDRFFDRELEILGSVKHRYLVNLRGYCNSPSSKLLIYDYLQGGSLDEVLHEKSEQLDWDARINIILGAAKGLSYLHHDCSPRIIHRDIKSSNILLDGSFEARVSDFGLAKLLEDEESHITTIVAGTFGYLAPEYMQFGRATEKTDVYSFGVLVLEILSGKRPTDASFIEKGLNIVGWLNFLASENREREIVDLNCEGVQTETLDALLSLAKQCVSSSPEERPTMHRVVXVLESDVLVPCXCDFYDSE

SEQ ID NO: 248277 - protein, 79 aa, Zea mays
  Clone ID: MRT4577_158016C.1.pep
RATVHCVTHIIMNGTALFLRDPERLRRTHVHSPGGNNGFEPGFGDDYSLWRAIPTLPAHACRGSQPVPLRLHHPGDHVL

SEQ ID NO: 248278 - protein, 594 aa, Zea mays
  Clone ID: MRT4577_158017C.1.pep
MGSFLRKQPSYLFILIILHLVAHEARTLSSDGEALLAFKKAVTNSDGVFLNWREQDADPCNWKGVRCDSHSKRVINLILAYHRLVGPIPPEIGRLNQLQTLSLQGNSLYGSLPPELGNCTKLQQLYLQGNYLSGYIPSEFGELVELVALDLSSNTLSGSVPHSLDKLSKLTSFNVSMNFLTGAIPSSGSLVNFNETSFVGNLGLCGKQINLVCKDALQSPSNGLQSPSPDDMINKRNGKNSTRLVISAVATVGALLLVALMCFWGCFLYKNFGKKDMRGFRVELCGGSSVVMFHGDLPYSSKDILKKLETIDEENIIGAGGFGTVYKLAMDDGNVFALKRIVKTNEGLDRFFDRELEILGSVKHRYLVNLRGYCNSPSSKLLIYDYLQGGSLDEVLHEKSEQLDWDARINIILGAAKGLSYLHHDCSPRIIHRDIKSSNILLDGSFEARVSDFGLAKLLEDEESHITTIVAGTFGYLAPEYMQFGRATEKTDVYSFGVLVLEILSGKRPTDASFIEKGLNIVGWLNFLASENREREIVDLNCEGVQTETLDALLSLAKQCVSSSPEERPTMHRVVQMLESDVITPCPSDFYDSE

SEQ ID NO: 248279 - protein, 58 aa, Zea mays
  Clone ID: MRT4577_158018C.1.pep
WIKKPELIVQSSRASLKEGGPLTFGAKTSLISFLLPNQIIGETRFLKKGAKKTMGFLF

SEQ ID NO: 248280 - protein, 37 aa, Zea mays
  Clone ID: MRT4577_158019C.1.pep
RRRLSMSLRGWGPLVRGWGCSCLISSISSSTDNRLIY

SEQ ID NO: 248281 - protein, 125 aa, Zea mays
  unsure (1)..(125): unsure at all Xaa locations
  Clone ID: MRT4577_15801C.1.pep
ATLRSNKNSRPTQSIQEGALFGYRRRVLKAPKGLKKPXRPKPAGEEHRGEKALAEKNPTAEKRVPATKSRCKEAGKNKGXKKAKMSVETYKTYIFQVLGHAHPDIGIWLKAMIMMNSFINDIFEN

SEQ ID NO: 248282 - protein, 594 aa, Zea mays
  Clone ID: MRT4577_158020C.1.pep
MGSFLWKQPSYLFILIILHLVAHEARTLSSDGEALLAFKKAVTNSDGVFLNWREQDADPCNWKGVRCDSHSKRVIDLILAYHRLVGPIPPEIGKLNQLQTLSLQGNSLYGSLPPELGNCTKLQQLYLQGNYLSGYIPSEFGDLVELEALDLSSNTLSGSVPHSLDKLSKLTLFNVSMNFLTGAIPSSGSLVNFNETSFVGNLGLCGKQINLVCKDALQSSSNGLQSPSPDDMINKRNGKNSTRLVISAVATVGALLLVALMCFWGCFLYKNFGKKDMRGFRVELCGGSSVVMFHGDLPYSSKDILKKLETIDEENIIGAGGFGTVYKLAMDDGNVFALKRIVKTNEGLDRFFDRELEILGSVKHRYLVNLRGYCNSPSSKLLIYDYLQGGSLDEVLHEKSEQLDWDARINIILGAAKGLSYLHHDCSPRIIHRDIKSSNILLDGSFEARVSDFGLAKLLEDEESHITTIVAGTFGYLAPEYMQFGRATEKTDVYSFGVLVLEILSGKRPTDASFIEKGLNIVGWLNFLASENREREIVDLNCEGVQTETLDALLSLAKQCVSSSPEERPTMHRVVHMLESDVITPCPSDFYDSE

SEQ ID NO: 248283 - protein, 102 aa, Zea mays
  Clone ID: MRT4577_158021C.1.pep
TGPPTGPGTGGANGCQVSHRGQTSRQRAIWAGPGAFVKGPAWAPVKGAGYQLKKGDHDHVLQKKKAQKCGGLRPAGVLFPPVVRNQTKQKSPKASKKTNRKV

SEQ ID NO: 248284 - protein, 80 aa, Zea mays
  Clone ID: MRT4577_158022C.1.pep
VQVQNQGWILLLETISRQIYHLEPMTDQSFSLEANKACSISWVPLQTQRKMLKGTLHSYFLIVLDKNIGGGVSVSQWSKA

SEQ ID NO: 248285 - protein, 48 aa, Zea mays
  Clone ID: MRT4577_158023C.1.pep
MAQRDKKEEPTELRAPEITLCANNCGFPGNPATQRDKVFGVIIITLFL

SEQ ID NO: 248286 - protein, 48 aa, Zea mays
  Clone ID: MRT4577_158024C.1.pep
VPKFYRGPKKHFVFVKKGSFLLKENPRYGVKIIICAFFKKQNSSNLYF

SEQ ID NO: 248287 - protein, 84 aa, Zea mays
  Clone ID: MRT4577_158025C.1.pep
GLQFVPRLCLSSYPLRKEAPPGPPPPPPRARARAHTHRQTDRQTERETHRYSDRHGCSYDYRGAARDAIARENPVVRAAKVVRF

SEQ ID NO: 248288 - protein, 71 aa, Zea mays
  Clone ID: MRT4577_158026C.1.pep
RGYVFKITGGCDKQGFPMKQGGLTSGRVRLLLHKGTPCFRGYCKRNGERTRKTVRRRIVSQDPYVIKLWNC

SEQ ID NO: 248289 - protein, 91 aa, Zea mays
  Clone ID: MRT4577_158027C.1.pep
GRPPNSLAAPAAVAAAAGQATEAAARASASRCSSCRKRVGLTGFRCRCGELFCGAHRYSDRHGCSYDYKGAARDAIARENPVVRAAKVVRF

SEQ ID NO: 248290 - protein, 163 aa, Zea mays
  Clone ID: MRT4577_158028C.1.pep
MAQRDKKEEPTELRAPEITLCANNCGFPGNPATQNLCQSCFSASRSPSSPTSSSSSLASAASQPRPAALVVDAAAVEALAAPAAAAAGVGQATEAAARASASRCSSCRKRVGLTGFRCRCGELFCGAHRYSDRHGCSYDYRGAARDAIARENPVVRAAKVVRF

SEQ ID NO: 248291 - protein, 96 aa, Zea mays
  Clone ID: MRT4577_158029C.1.pep
YAGVMCPTNLLLSVFSLVPWSLPVEVFPELKHLTVDAPHMTFEPCSYNSLVPVYGLRSISVCLPLPGGLRAQHRSHGNALVKLGVPLRLYSRAVVR

SEQ ID NO: 248292 - protein, 52 aa, Zea mays
  Clone ID: MRT4577_15802C.1.pep
KNSFFSFWVLPGMMGFLAYKTAALVQVNNNNEDLRLIIPQEKYADSESPSCI

SEQ ID NO: 248293 - protein, 208 aa, Zea mays
  unsure (1)..(208): unsure at all Xaa locations
  Clone ID: MRT4577_158030C.1.pep
MYADTMKGHQPKGDKGNRDDYTFSFRRLADVWPTYFPEEAEVGLSESDQKVRLTTALADFFSTPEMAEVLRSRVEDDGNDILCLPIDFQQLQELRMFIEDKLNESPKEALLCMGVAAHLALCSDKDNKRNKINIRLYNTGAAIALKKLKAAFIKKLVTVRGTVLKVSTVKPLVLWLKFRCMKCRKXIPRVFCDGKFSPPRSCTIQGCK

SEQ ID NO: 248294 - protein, 104 aa, Zea mays
  unsure (1)..(104): unsure at all Xaa locations
  Clone ID: MRT4577_158031C.1.pep
XAREKSFTSTVISTTSIDSSTLQRQTNPGIISSNMQPILRAMPVEKIVPLLLTVGSATVVVGGVRTQLKPQTQSRSFDRRLASYSTAQSEKTMTTMIYSTWLED

SEQ ID NO: 248295 - protein, 30 aa, Zea mays
  unsure (1)..(30): unsure at all Xaa locations
  Clone ID: MRT4577_158032C.1.pep
KKKPPPPPLYIXPNNNSYHPITXILIWLNI

SEQ ID NO: 248296 - protein, 141 aa, Zea mays
  Clone ID: MRT4577_158033C.1.pep
PRPGNSTSDDDYGSTSAGNACTVEQVENLKSALSVMPMWSAMVMSFLLQSSSFGVLQAATMDRRVGATRFQIPAGSISVFEILTFTAWSSCYDACIVPVLRRMTERQRVLTLKQRMGVGVSLAVASMAVASAVETHRRQHA

SEQ ID NO: 248297 - protein, 52 aa, Zea mays
  Clone ID: MRT4577_158034C.1.pep
ALLLIVACRLPRWPGGGCALYLLPFSELVDSVREFVHTFYRISSFMITVLLF

SEQ ID NO: 248298 - protein, 61 aa, Zea mays
  Clone ID: MRT4577_158035C.1.pep
PPPKGPLSQERLELPGPLERSWFDKPRARPECSVTINPASPLGSQPQNKNQQKKKKKKRPV

SEQ ID NO: 248299 - protein, 51 aa, Zea mays
  Clone ID: MRT4577_158036C.1.pep
RMMNQRLSVRIRASYRRISWPPGSTPVRAFAHPMAGGIGSVRPADEPRGTA

SEQ ID NO: 248300 - protein, 84 aa, Zea mays
  Clone ID: MRT4577_158037C.1.pep
PPDPFRVSLSDFFFCKQGGAFPSMLVNVGGFWAPANRETLFPEKEEPVEKPLVLFSPCQVTVSRSRASKPQHPRELHAPRFPSL

SEQ ID NO: 248301 - protein, 62 aa, Zea mays
  Clone ID: MRT4577_158038C.1.pep
PFAPFGGRGSSRPAPICRGFVSFLSLISISSSSCCCCGIGTAIPCCALVVSGTDVMLNSQRS

SEQ ID NO: 248302 - protein, 74 aa, Zea mays
  Clone ID: MRT4577_158039C.1.pep
PPKPFQGEHQRNGFQSPSFRCLAPGFFNWQTDVKRCLNWEAPNPRAIGFTLPFLSSPTKELGCPFPLLQGPFWF

SEQ ID NO: 248303 - protein, 41 aa, Zea mays
  Clone ID: MRT4577_15803C.1.pep
RVQRLPNISGLSQADCRYRLRSLGFLVDLIQAFVRRNRKQL

SEQ ID NO: 248304 - protein, 88 aa, Zea mays
  Clone ID: MRT4577_158040C.1.pep
SVHKAVGHRTFTAETVKLEIVVLLSYHTLLNAQDCHAAMLGRLSYAVESVMQTLVGLRISVTILNILRILGTRHMYIWLNSLHNHRAL

SEQ ID NO: 248305 - protein, 166 aa, Zea mays
  unsure (1)..(166): unsure at all Xaa locations
  Clone ID: MRT4577_158041C.1.pep
DEDHFESTADLQETSSXRQRAGTASKNGXICVNNRHVQVTRVSTSKTGTNAKGTCHFDAIDVFTGRQIVDIATSPCNCAMPHVNRTEXPLIDISEDGFVRLLTSQGNTKDAVRLPTDETLVCQNDGGAESGKDLAVTDQPAMGDXQICAVNDGGPKELPWLGIMDL

SEQ ID NO: 248306 - protein, 283 aa, Zea mays
  unsure (1)..(283): unsure at all Xaa locations
  Clone ID: MRT4577_158042C.1.pep
LEAGRAGRRRGARRASNDSLLPLAVAGGPXRRWRCLLPLLVGAAFLAEIAFLGRLDMAKDAEVVESWTTSFYRRSSHWGESVGRGAVPRADGDGDGEDEEIRRCEQRLEREDAVPYDRDFDRDPVLVGGAAKDWSKCYVGCQFGFSASKTPDATFGIAPDPSVEGILRSMESSQYYSENNIDVARXDVPVGYFSWAEYDIMAPVPPKTEEALAVAFISNCGARNFRLQALEMLXNLDVKIDSYGSCHRNRDGKVDKVDTLKRYRFSLGIEXFYEEGYVTEKFF

SEQ ID NO: 248307 - protein, 233 aa, Zea mays
  unsure (1)..(233): unsure at all Xaa locations
  Clone ID: MRT4577_158043C.1.pep
LNWSRPNRTKSVPVRGRSQRLLARGVVGSFQTRLTPPTVSWSPHTISPPLPTRRRRGARRASNDGLLPLAVAGGPPXRRWRCLLPLLVGAAFLAEIAFLGRLDMAKNAEVVESWTTSFYRRSSHWGESVGRGAVPRADGDGDGEDEEIRRCEQRLEREDAVPYDRDFDRDPVLVGGAAKDWSKCYVGCQFGFSASKTPDATFGIAPDPSVEGILRSMESSQYYSENNIDVARG

SEQ ID NO: 248308 - protein, 94 aa, Zea mays
  Clone ID: MRT4577_158044C.1.pep
NRILVGFFFFFFFFFFFFGKNNRWPSLNKRGSPTCPSGAPQKRAWPDNPGQQHIGWWEKQASPPRNNARLKPPPGQPKKKTLVSIPQPGSQRSY

SEQ ID NO: 248309 - protein, 498 aa, Zea mays
  Clone ID: MRT4577_158045C.1.pep
MKGSSHSQAGAQAVRRRRWGCLLPLLVGAAFLAEIAFLGRLDMAKNAEAVESWTTSFYRRSADLGDAVGGGAASRAGGDSEDEEIRLCEQRLEREDAVPYDRDFDSDPVLVGGAAKDWNKCYVGCEFGFSASKTPDATFGIAPDPSVDGILRSMESSQYYSENNIDVARGRGYKIVMTTSLSSDVPVGYFSWAEYDIMAPVPPKTEEALAAAFISNCGARNFRLQALEMLENLDVKIDSYGSCHRNRDGKVDKVDTLKRYRFSLAFENSNEEDYVTEKFFQSLVAGSIPVVVGAPNIQEFSPGEGAILHIKELDDVASVAKTMKNIASNPDAFNQSLRWKYDGPSDSFKALIDMAAVHSSCRLCIHIATKIHLKEERTPKFTNRPCSCSTKKGTIYHLFIRERGRFKSESIYMRSGQLTLGALESAVLGKFRSLNHVPVWKDERPPSIRGGDDLKLYRIYPVGLTQRQALYGFRFRDDSELEQYIKDHPCAKLEVIFV

SEQ ID NO: 248310 - protein, 91 aa, Zea mays
  Clone ID: MRT4577_158046C.1.pep
KVILLLSRFVIPKLHEEEPSVISCGQLQLKLLLPTRPSARRSIVPTMSIWSFGNLFLLRYSFVYPENGIYNITIKFEVYSILEVFNACKLV

SEQ ID NO: 248311 - protein, 177 aa, Zea mays
  Clone ID: MRT4577_158047C.1.pep
CCASNKCSAHVKTFFKAHDTIELLSAKYKVHISNRLISEFLFSSISPRLIKLEKILKTWFSKRNQENSSVHFIEAKVTSIPLVKFRLEFERDVTEDDPIWEDVPEWKTRPMVQRVPVDIIARVEDDDRLKAISVKKVRRQFPVVDTTTWGSLTSNISFTKFLSFILPPEPLSLDVKW

SEQ ID NO: 248312 - protein, 177 aa, Zea mays
  unsure (1)..(177): unsure at all Xaa locations
  Clone ID: MRT4577_158048C.1.pep
MKVPEILSEEVLGKMGAPPKPDVPVITPQELAEADGILFGFPTRFGMMAAQMKAFFDATGGLWREQSLAGKPAGMFFSTGTQGGGQETTXSAVPLPHMVTATTCRPDVQRSRFVCYIVFIHXLTXITQLTHHGMVFVPVGYTFGAKLFGMDQVQGGSLYGAGTFAVDGLRWPSEVEL

SEQ ID NO: 248313 - protein, 203 aa, Zea mays
  Clone ID: MRT4577_158049C.1.pep
MAVKIYVVYYSMYGHVGKLAEEIKKGALSVEGVEAKIWQVPEILSEEVLGKMGAPPKPDVPVITPQELAEADGILFGFPTRFGMMAAQMKAFFDATGGLWREQSLAGKPAGMFFSTGTQGGGQETTPLTAITQLTHHGMVFVPVGYTFGAKLFGMDQVQGGSPYGAGTFAADGSRWPSEVELEHAFHQGKYFAGIAKKLKGSA

SEQ ID NO: 248314 - protein, 52 aa, Zea mays
  Clone ID: MRT4577_15804C.1.pep
YVMCSAIPFLMPSWKLILSKPGLVIHVPQLCNTPRLCYVLSLIIRQRVALPH

SEQ ID NO: 248315 - protein, 144 aa, Zea mays
  Clone ID: MRT4577_158050C.1.pep
GKQDIRGGAGVIGAPPRIFGFPSTGGGFRGPALKMGLMGRDFFFPDGVWGSGEAKQTLGGGGEKPPPRRSLPQRGNQLFGKPTFGGNLPRGGPHDLGLAPGPKGGFITPLFGGPGSPEKKKWALGALAHRGVPGSISLPFHPVF

SEQ ID NO: 248316 - protein, 118 aa, Zea mays
  unsure (1)..(118): unsure at all Xaa locations
  Clone ID: MRT4577_158051C.1.pep
TSXVCQITAGMRMRIPTTITWVGPRHRQWFFIRKYAPCRHWCLSGVLSPGNELLTWKLCICSQPSALSDRALVLCTRTLAGQLLWPTPQAMCLDIVIRAWIMLWFRLCDMCPVKDVVC

SEQ ID NO: 248317 - protein, 65 aa, Zea mays
  Clone ID: MRT4577_158052C.1.pep
SRPAQYHVLWDENKSTADGMQTLTNNMGYTYARCTRSGSNGPPAYYAHRAACRARVYMEPETSDS

SEQ ID NO: 248318 - protein, 89 aa, Zea mays
  Clone ID: MRT4577_158053C.1.pep
NSHIIHSSFSIQHHIHIFISFNIIQFSLYIIYPSHLNDQAYHILSIQHYYIHIFTSFHHIQMPTRPPTRLISIKTTAKQVQQSRKRICL

SEQ ID NO: 248319 - protein, 72 aa, Zea mays
  Clone ID: MRT4577_158054C.1.pep
LKLAVWSGGWPSGGRSICLRAGYVGLFTCPGRLVPCCFACCFGGFPRVLGCVLSPHEAGLCCPRARAGMRVL

SEQ ID NO: 248320 - protein, 105 aa, Zea mays
  Clone ID: MRT4577_158055C.1.pep
IRDPAHNSAVHLKKKKVAVRQGLGTQQPSCRDSMSNEKCIQISMLFCVQVSAFVAHCASISVELAQPILGEVKWVLLGGDHEFLAVAEEDAGSFVVHPPGGIQVV

SEQ ID NO: 248321 - protein, 82 aa, Zea mays
  unsure (1)..(82): unsure at all Xaa locations
  Clone ID: MRT4577_158056C.1.pep
GSLDMXGVIILTVEDTKPLLVLLSCLARSKDSHSVSRPALSAVLLLESCLSKTSWRLGVRDSLPEATIVCVFGSAESYSEKS

SEQ ID NO: 248322 - protein, 96 aa, Zea mays
  Clone ID: MRT4577_158057C.1.pep
ISSVCWNLVVSALEAMLKWPLTLFSSIHNVLHAYNVLGLNVGFFRMAGLFLLYLCFFFFFSEVVTFVFFFFFFFFSFPFFFFFFSHASADAWADAW

SEQ ID NO: 248323 - protein, 39 aa, Zea mays
  Clone ID: MRT4577_158058C.1.pep
GRVWGRSRRSAGNSRLHLFCSGQSRWNRSLLVQAVGTSP

SEQ ID NO: 248324 - protein, 43 aa, Zea mays
  unsure (1)..(43): unsure at all Xaa locations
  Clone ID: MRT4577_158059C.1.pep
VCGAELHHGADRDLGHXQLQLRLSEHSYLIAYQNTYSYIPTST

SEQ ID NO: 248325 - protein, 180 aa, Zea mays
  unsure (1)..(180): unsure at all Xaa locations
  Clone ID: MRT4577_15805C.1.pep
TQCSKTSRHTELDYIADVLSSVNLTTDEXDHSLSIRIDXLDSSLFEKLENTHAYTQGKAPFCHRGYRRLLFDCVNECLETRRTTYFRAGYAAWSKGAATLIRGMEAQVCSEVTSWKSMGDWTEDELVDKDMSGGLGTWVDFRVEEFEAGEEVENHVLSSLLDEVVADMVARRRRPGVFVA

SEQ ID NO: 248326 - protein, 327 aa, Zea mays
  Clone ID: MRT4577_158060C.1.pep
MSSPPPASPMAAENEACDWAEMPSDALAAVFAKLDVAEILSGAGLVCRAWHRLAASDPTLWRRVDMCYQGDQLQTEEVEAMARAAVDRSAGTMEAFCAETFVNDDLLRYISQRAPSLKSLHLCLCHYVTNQGFAEAVNCFPQLEELDITFCSLYGIVCETAGRACPQLKCFRLNERWSILQSEFAPYEGMDDDTEALGIASTMPGLQELQLIGNNLTNDGLVAILDRCPRLESLDIRQCYNIQMDDALRSKCARIRYLKLPHDSISDFKYRAYIVSSIANSGSDFEVDMYDDLLDVVTEDDDADFDDMDDFDDTVSDGGMYDDDLDI

SEQ ID NO: 248327 - protein, 59 aa, Zea mays
  Clone ID: MRT4577_158061C.1.pep
RVVFLSSAGQSRTSTGSLIAWMISEDVAQHCDQQPYSALSSSAADSEGHADGREDDVQE

SEQ ID NO: 248328 - protein, 49 aa, Zea mays
  Clone ID: MRT4577_158062C.1.pep
ILDMTLQYKSNNFNLHTKSSNSPYIAMKLMHIPKPQVITAWQKQSTNST

SEQ ID NO: 248329 - protein, 173 aa, Zea mays
  Clone ID: MRT4577_158063C.1.pep
SDDQVSDRPDRVGTPYRMRDDDQSINRRLIAINRTIRKHCSTSQRKTRSRDWARQAGEIPRAQSRESLGWAHWSSRAIAAAWNSKKKRPAPRDTTAGRSRKVGRPSVVSRGEHRRAEKTRGTRERAGERESAMGAEGERSWGWAPWVFTAGCGSELDDGRGERWGEGGFLQPG

SEQ ID NO: 248330 - protein, 37 aa, Zea mays
  Clone ID: MRT4577_158064C.1.pep
FLEVRTGRTDTRTPGAVRIQINGPFQTPQLRRHNTPL

SEQ ID NO: 248331 - protein, 147 aa, Zea mays
  Clone ID: MRT4577_158065C.1.pep
TRQQRRRRKRGQVRARFGARFAARARFPVQGSAQLRPARSPGPRSLAPINDYVVPFPAHGVPRICGHCIELAAPRSHSLLATTSTRSWSLDGLSRPRTGHQLVHCMPDDRGGLRWLPVLSLGGEYPNSGCWCAWSTWCPPLAKMAHV

SEQ ID NO: 248332 - protein, 58 aa, Zea mays
  Clone ID: MRT4577_158066C.1.pep
VDIFQIEVVGKCLGEYVEPIGVSAVVVGDLAGVVVPRFPGEGSQVFETERQPLVRPRP

SEQ ID NO: 248333 - protein, 77 aa, Zea mays
  unsure (1)..(77): unsure at all Xaa locations
  Clone ID: MRT4577_158067C.1.pep
MAHGKPNRNSPYLRNSRPRGIFRLISFFSQSTLKSFCKSSRNSFLRGGRDSMPWGPFFWLGXPXMWLAWPPWRAPSP

SEQ ID NO: 248334 - protein, 150 aa, Zea mays
  unsure (1)..(150): unsure at all Xaa locations
  Clone ID: MRT4577_158068C.1.pep
ATCQGEADXQPSPASGTIGISASPDPRARTRPRSRXTVSASPDPKARTRPRXRTTVSASPDPKARTPPRLRKTVSTSPDPRARTQPRLQKTISASPDPRARTQPRLRKTVSASPDPRAWAQPRPRRSHRLARPRARTDHATRGAIITLPL

SEQ ID NO: 248335 - protein, 56 aa, Zea mays
  Clone ID: MRT4577_158069C.1.pep
LTPSGPCPPVVSVTCLMRWVPCPTPPIAPVYWSPWPVAPCPRCPRTCGPPRDPRTG

SEQ ID NO: 248336 - protein, 72 aa, Zea mays
  Clone ID: MRT4577_15806C.1.pep
GKNKQTGENCQIQNPFYVFYLSTVCPQGGLKCKNHMLVGQISLQGGKTKTCCWEQISLQRGKTKTRFRVAVI

SEQ ID NO: 248337 - protein, 79 aa, Zea mays
  unsure (1)..(79): unsure at all Xaa locations
  Clone ID: MRT4577_158070C.1.pep
RVTCVELRNNHCLPPACPGACATSPWFPSHYGXREDRRRDDRRSPTSIARSYLLFSPLRRGGGFTLFLDAVETGREGSP

SEQ ID NO: 248338 - protein, 252 aa, Zea mays
  Clone ID: MRT4577_158071C.1.pep
LGTSRPAGKKKNYLTRSRHLEHPHFVEVPLASPEGLYLRDVINHLNMVRGKGMAAMYSWSCKRSYKNGFVWHDLSEDDLVLPATDGEYVLKGSELVDQSPSGPFYPVTVSNGNQKQQSRPKEGARQPLPRDQSDPSSPPSVTVREAKARRSPSVPSQDEEDDTPSPCRDRSMSQPQELEPQRNERRTQPPASGSASPVELRAHRPTTGCTDAATQTDDLGRRPAGRRALELPRKKSLSTDHDAVVREIAEYR

SEQ ID NO: 248339 - protein, 52 aa, Zea mays
  unsure (1)..(52): unsure at all Xaa locations
  Clone ID: MRT4577_158072C.1.pep
MACLTDLVNLNLSDNTEKIIGEYIWIGGSGMDLRSKGRTLCGGGTXDRSKLP

SEQ ID NO: 248340 - protein, 117 aa, Zea mays
  unsure (1)..(117): unsure at all Xaa locations
  Clone ID: MRT4577_158073C.1.pep
NSSPSFALQSICANGDHLAKRFPHPATCPLCDHTRDSIQHLLISCVFARQVWFVILQRLGXPHLSPVSASKFSSWWNRQSXDVPKEMKKGLNSLITLVALDIWKHSNVCVNCDAAWQ

SEQ ID NO: 248341 - protein, 107 aa, Zea mays
  Clone ID: MRT4577_158074C.1.pep
MSSENTSTVKSMIDSVTGTAQNVAGNLFGTSGDQVEGQAKKNKAQAEYDASHATIKLPGATATADGVTRDDPDRSAGSWNQTVGSAKETVGGVIGSENLKQAGREQN

SEQ ID NO: 248342 - protein, 184 aa, Zea mays
  Clone ID: MRT4577_158075C.1.pep
AQVLATIRGARLEGYLTGSAKKPAMMIDGKDGDMVTNPVYEDWLAADQQVLSFLLSSVSKEILILVATKEIAAEVWQAIETMFASKTRARAVNTRLALATTQKGNMTVTEYIGKMRFLGDEMSAAGRPLEDDELVEYILTGLDDEFDPVVSSVLARTEAISVSELYSQLLAFEIRLDLRNNGGN

SEQ ID NO: 248343 - protein, 90 aa, Zea mays
  unsure (1)..(90): unsure at all Xaa locations
  Clone ID: MRT4577_158076C.1.pep
ASKICSYAQGHGTFIQGPRARRKGWEGCNLGELXQXSGKGRGGMHXAAHALPGXPXFKXRXLTXKGNXXGLXPSPGXVRTPRXFRRQGXI

SEQ ID NO: 248344 - protein, 693 aa, Zea mays
  Clone ID: MRT4577_158077C.1.pep
SSRKEFEEMSEQYVAVTKKEKRRRACYRCGKRKWESKESCLVCDARYCGYCVLRMMGSMPEGRKCVNCIGQPIDESKRSKLGKNSRTLSRLLSPLEVRQILKAEKECQANQLRPEQLIVNGCPLRPEELTDLLSCSRPPQKLKPGKYWYDKESGLWGKEGEKPDRIISSNLNFTGKLQVNASNGNTQVYMNGREITKIELKVLKVANVQCPRDTHFWVYDDGRYEEEGQNNIKGKIWESALARFACALFSLPVPPGNSNGTRDEVPYTARAVPDYLDQKRIQKLLLLGPPGAGTSTIFKQAKYLYGTRFTQEELEGIKLMIQSNMFKYLGILLEGRERFEEEALSRLNYTISQGEETQHDENKANGSNSCIYSINARLKKFSDWLLDIIAMGDLDAFFPAATREYAPFVDEMWKDPAIQATFKRKEELHFLPDVAEHFLSRAVEVSSNEYEPSEKDVIFAEGVTQGNGLAFIEFTLDDRSPMSEPYIDNSEAHSQPLTKYQLIRVSAKGMNDGCKWVEMFEDVRMVIFCVALSDYDQLGPPVSGSSRPLVNKMMQSKELFEATIRQPCFCDTPFVLVLNKYDLFEEKINRAPLSSCEWFNDFCPVRTHHNNQSLAHQAYYYVAMKFKDLYSAQTNRKLFVWQARARERQTVDEAFKYIREVLKWEEEKDDNCYQEESFYSTTEMSSSPFIRAE

SEQ ID NO: 248345 - protein, 43 aa, Zea mays
  Clone ID: MRT4577_158078C.1.pep
VLSSLNAVIKSINQFMIIEECKLCGACASQRDHHFFVEVEVKI

SEQ ID NO: 248346 - protein, 57 aa, Zea mays
  Clone ID: MRT4577_158079C.1.pep
RAPTRAVPPSNVAYVAKELYDMGCYEVSLGDTIGVGTPGDITCLFLFLQKNIHIRFF

SEQ ID NO: 248347 - protein, 77 aa, Zea mays
  Clone ID: MRT4577_15807C.1.pep
MEAQVCSEVTSWKSMGDWTEDELVDKDMSGGLGTWVDFRVEEFEAGEQVESHVLSSLLDEVVGDMVARRRRPGVFVI

SEQ ID NO: 248348 - protein, 231 aa, Zea mays
  unsure (1)..(231): unsure at all Xaa locations
  Clone ID: MRT4577_158080C.1.pep
MCGGAIIFDYIPARRRVSTADFWPGSEADAEDIHASHSTDPQRAPPPRAKAKPGRRKNQYRGIRQRPWGKWAAEIRDPVKGVRVWLGTYPTAEAAARAYDRAARRIRGAKAKVNFPSDTSSSVTVPTAVSRSAAAAAAQAPAVLPLPKVEAQTQVSDEVKELSEELMAYENYMNFLGIPYMEGGTTAASATTAAASASAAXVAEESQVPAPAGLWSFEDYYYPPSLSLFTE

SEQ ID NO: 248349 - protein, 73 aa, Zea mays
  Clone ID: MRT4577_158081C.1.pep
MTGNKATGSGRIPSRESGDKYKEESSSSIKSLRRGDKKKMKKVVYYETDSSSPPHPVSSRQLRNATSVPKVHL

SEQ ID NO: 248350 - protein, 155 aa, Zea mays
  Clone ID: MRT4577_158082C.1.pep
RRAADCSHAAPRAKAKPGRRKNQYRGIRQRPWGKWAAEIRDPVKGVRVWLGTYPTAEAAARAYDRAARRIRGAKAKVNFPSDTSSSVTVPTAVSRSAAAAAQAPAVLPPPKVEAQTQVSDEVKELSEELMAYENYMNFLGIPYMEGGTTAASATT

SEQ ID NO: 248351 - protein, 52 aa, Zea mays
  Clone ID: MRT4577_158083C.1.pep
FVFFSGFFFSKPETVLRPCRTLLDIPHMRKSVALPTYYVFKKKRDVIRGDVP

SEQ ID NO: 248352 - protein, 60 aa, Zea mays
  unsure (1)..(60): unsure at all Xaa locations
  Clone ID: MRT4577_158084C.1.pep
ATVAAPLALVFGPSGPFXGRSTYQATQWGVWEGXXGRAXPPSGEDDPTTEVRGVQTAGDT

SEQ ID NO: 248353 - protein, 177 aa, Zea mays
  unsure (1)..(177): unsure at all Xaa locations
  Clone ID: MRT4577_158085C.1.pep
ALSCSGNVAHTFWVLACFNTKHFLFWVQPLVQTIGAPHLHQLVLPGINXLAMANLNGYSXQQQLLAFNQLPTLNPDGYLQQLLLPLSQLATAYSQKQQLLSFNQLAALNPAAYLQKQILLPFSELAAASRASFLTQQQMLPFYKQFAANPGTLLQLQQLVPFVQLALTNAAGYYQQH

SEQ ID NO: 248354 - protein, 97 aa, Zea mays
  unsure (1)..(97): unsure at all Xaa locations
  Clone ID: MRT4577_158086C.1.pep
SDSPQPNQVTAATLSAMSAPGKGGKGLCKGGAKRHPFVLPHPIXAITKPAITQMRTRGASHRIYALILEEARGILHIHLLASPSPTLPPIATPPLST

SEQ ID NO: 248355 - protein, 74 aa, Zea mays
  unsure (1)..(74): unsure at all Xaa locations
  Clone ID: MRT4577_158087C.1.pep
KTEEKPIFSFSTVVAAENMSIYDDIDADVLQXYQEYNLANIIYYSLKESTTSXQSARMTAMDNAXKXASDMIDK

SEQ ID NO: 248356 - protein, 314 aa, Zea mays
  Clone ID: MRT4577_158088C.1.pep
MATLTVPSSVPAVAEDCEQLHKAFEGWGTNEKLIISILGHRNAAQRRAIRRGYAEAYGKELLRALGDEIHGKFERAVILWTLDPAERDAVLANEEAKKSHPGGRALVEIACARTPAQLFAVKQAYHDRFKRSLEEDVAAHVTGDFRKLLVPLVSAYRYDGPEVNTSLAHSEAKILHEKIHKKAYSDEEIIRILTTRSKAQLLATFNSYKDQFTHAINKDLKADPKDEFLSTLRAIIRCFTCPDRYFEKVIRLALGGMGTDEDDLTRVVTTRAEVDLKLIKEAYQKRNSVPLERAVAKDTTRDYEDIMLALLGAE

SEQ ID NO: 248357 - protein, 236 aa, Zea mays
  unsure (1)..(236): unsure at all Xaa locations
  Clone ID: MRT4577_158089C.1.pep
RLQVPVRNSRVDPRVRDFKPSYGTPAPGFSSMLYGMKIANLAFVTKTRVRFFKLDRWADVQLPEKRRIKPGSNISKQHRSLLARIFHDRAEYLHGKHGVDVEVQGPHEARDGQLLIRLDLNRKEVLTLRLRNGGSKPVTLTHLFPLCWTPQFVFYHGEQDLPCPLGPGESYELHIYCKTSIVGYFPATVLXELLXPXESGAEGAETFYIARFLAAVAHSPLAAQXKPTTPFKRPPR

SEQ ID NO: 248358 - protein, 159 aa, Zea mays
  unsure (1)..(159): unsure at all Xaa locations
  Clone ID: MRT4577_15808C.1.pep
MGQIKIRISGXSRXGRLEATAPLXSDDCSCQPTHGPXITTDYVTYMCKYXTGYSHCKHSHSTIKDSQTLLYGDKPTTDXGILNPDEICEGEADAEYAMKNTCVCCDTDKAAAHLRGEVNKVCIYGPSKYAYMLAVGECEDNHTSDGNIDAIASCTTDCL

SEQ ID NO: 248359 - protein, 81 aa, Zea mays
  Clone ID: MRT4577_158090C.1.pep
RFRQYLHTKRSYDLQSTREVLSHTRIFSFISIIFTRGPLEIAGSSSSMKGMSSRITAPEPLGGSLYQELVSRRHVIRDIDR

SEQ ID NO: 248360 - protein, 61 aa, Zea mays
  Clone ID: MRT4577_158091C.1.pep
FPWSSLRTPFGCEYLFTPVVPSGVWARYSRFCYISRPFSCKTAILSVNTCLPKVVFVHFTL

SEQ ID NO: 248361 - protein, 93 aa, Zea mays
  Clone ID: MRT4577_158092C.1.pep
FGTVGYLLQMREMYRYVMTHASMESYYEAALRGSDPRGANQLSLGDIRILKRMELSHILQDFTCPVSLVSMIASGQFTRLRSNRQLARRTTCQ

SEQ ID NO: 248362 - protein, 69 aa, Zea mays
  Clone ID: MRT4577_158093C.1.pep
PCAKHSKVLSNPSFHNFVCVQVNIAYKVFATAKFIELDLAQETYFASHATVTFLFQGNRECKPPTCFHL

SEQ ID NO: 248363 - protein, 221 aa, Zea mays
  Clone ID: MRT4577_158094C.1.pep
PGSPSVRARVELEFLYELRFLNARQRADAARHAIGYRLEPKGVRELARAMKGFPRWRGEEGWEAFSKDSPADCLAFARFRQSREAIDVQDRVAELERALQVVETESGRARVELELERARRKAAGEEEVGEEGEDDDAAALLRPGVTVVRLRYGEVAEATTVILLPVVRETDGVAAMESAPRRAKTDVGLGVVEVDRAWARWAVVPGWGPVAEQRRRRRRRA

SEQ ID NO: 248364 - protein, 53 aa, Zea mays
  Clone ID: MRT4577_158095C.1.pep
TEAILLNSEGEGDVFLVVVVSHPKDLLFSIPHMRKESCHQRDTVVGRDGYTFG

SEQ ID NO: 248365 - protein, 75 aa, Zea mays
  Clone ID: MRT4577_158096C.1.pep
GEEAPEKQEPFLFRSWCHKNVASPSPSQTTTRAVITKCFPKPLQLCPRRYSTRGARVESLLGGAGALPKWAKFRR

SEQ ID NO: 248366 - protein, 84 aa, Zea mays
  Clone ID: MRT4577_158097C.1.pep
YPTGLEGVLKSDLHADGHIYHWPQPFILYWPVRHPGPLATQLFPPIGSPPTGTGNTASTTMPSCSGPPRGPHPGRAPPNFWKNI

SEQ ID NO: 248367 - protein, 85 aa, Zea mays
  Clone ID: MRT4577_158098C.1.pep
MAQASSLVAVLRRRNPAAARLLPHRLVSSAPAPAFASSSLDPLPLPSLLEGDRCGGSLSASFVSHSRLRLPRRHHADAMATRTAH

SEQ ID NO: 248368 - protein, 73 aa, Zea mays
  Clone ID: MRT4577_158099C.1.pep
GNFYIGDLSNVGNLLGYGHNDFHRSKDRGAKDLLTILVQVVLKQGVETVEGLLTFQVQAISYSRIVTFTTVVK

SEQ ID NO: 248369 - protein, 507 aa, Zea mays
  unsure (1)..(507): unsure at all Xaa locations
  Clone ID: MRT4577_15809C.1.pep
IRLEVRCLFLFVVGMRFDLIGASITHYASKWLPGLTKDGPHGGALEEPWAQAQASPGGGLHMIIASGGGGGGGKDDIAGSTPAREQRMVVESLISIIPLQRDSVSCGFLLRLLRLAVMLKAAPALVTELEKRVGMQLEQAVLADLLIPSYGRAETAYDVDLVQRLVEHFLVQEQTELLASSSPGRVEQPPLPEYYGARTAGAAAASASAGLNAKARVARLLDSYLSEVSRDRNLSLTKFQVLAESLPESARTCDDGLYRAVDSYLKASQVTAVDLIPRSSFVLGDEPMMVVCSCSGWFXHPTLTEHERKRLCRVMDCQKLSLDACMHAAQNERLPLRVVVQVLFSEQVKISNALASGSSSNAAAAALLANKAADGVAPPTRRQLLDGTPQSFQEGWAAAKKDINTLKLELESMKAKYLELQHEMDALQKLVERGAPSPLAAGLKATGGGGVGSKNHSQGPSAWSSGWKKLGRLAKMTGGDAAGHDGHVPGAPGDAPRKPRRWRNSIS

SEQ ID NO: 248370 - protein, 102 aa, Zea mays
  Clone ID: MRT4577_1580C.1.pep
CSCRALHAVHLPQPPQRRTSRPPMSRTGWTLKLHVMARLLMPIPTTRRCVYIQRREQVLLQLHGIISYIPILRMNCDADPATTYTCRNLISAPINLIIGALL

SEQ ID NO: 248371 - protein, 63 aa, Zea mays
  Clone ID: MRT4577_158100C.1.pep
GMVFYGIVKRTLLMLQKTSRCGLPMGTWLTTGKKSYNNLARGEDKRTDSNGKKNKNLSLFTGS

SEQ ID NO: 248372 - protein, 43 aa, Zea mays
  Clone ID: MRT4577_158101C.1.pep
PILPPPIFNTHIPKKNGRIQTYSLIAHHQQWPQRTLYCLPQQH

SEQ ID NO: 248373 - protein, 96 aa, Zea mays
  Clone ID: MRT4577_158102C.1.pep
RGLGFSHRAEMSSLPAGCWVVGDDRRVFHLLLHMVGVLLDQCECHCHDLCFAVDTVPVGDQETMSGSGLPDWIIPNFSGCNTVCVRFRFGITRHFR

SEQ ID NO: 248374 - protein, 138 aa, Zea mays
  Clone ID: MRT4577_158103C.1.pep
MARVEAVVICLLVLAMDVAAGVLGVYAEKAQNQGRHLRILFVECRQPVRRAYELGMAAAAVLAAAHAIANAAGGCACACSGDKLRRASPNRQMASFALVLTWMVLVVALSLLVLGALPNAKRKLAECGVARHRFLSIG

SEQ ID NO: 248375 - protein, 77 aa, Zea mays
  Clone ID: MRT4577_158104C.1.pep
LQVPSGIIPGSTSSLVGGRPFFFFFFFFFFWHRPFLFYFFSPVWAALNLLNEIGRNNSLGRTKPKLTCASYLFITAL

SEQ ID NO: 248376 - protein, 83 aa, Zea mays
  Clone ID: MRT4577_158105C.1.pep
GFKCGINYQPPSVVPGGDLPKVHGAVCMISNSTSVVEVFFLIDHKFDLMYAKRALVHWYVSQGMEEGEFCEALQDLVVLEKDY

SEQ ID NO: 248377 - protein, 62 aa, Zea mays
  Clone ID: MRT4577_158106C.1.pep
MDQPNKIPDGDDEKEEEQEKQVEQSKNDRTRKKNPIKEPETKPNNEVSEDIKRISREGTTRG

SEQ ID NO: 248378 - protein, 82 aa, Zea mays
  Clone ID: MRT4577_158107C.1.pep
RATLLFLACLSDVVHKKNLLNHSPVKRNCTHIYSWKTEKTLKSHKKIILRRKHPYLTNDCSCAKKNLGKIQVLLFDTFQIAS

SEQ ID NO: 248379 - protein, 39 aa, Zea mays
  unsure (1)..(39): unsure at all Xaa locations
  Clone ID: MRT4577_158108C.1.pep
GXGDAAVYASIKSYPLFYPTLSISPAGVLISSAGSTLTI

SEQ ID NO: 248380 - protein, 221 aa, Zea mays
  Clone ID: MRT4577_158109C.1.pep
EGIVAALLRAGSGGAVVQVRGLLRRASLYYIMRFVFGKEYDVSRVVPPSGGEEVEELLEMVHEGYELLGMENLCDYFPGLAALDPQGVGARCAELMPRVNRFVHGVIQEHRAKAVAGGDARDFVDILLSLQESEGLADADIASVLWEMIFRGTDAMAVLMEWTLARLVLHRDVQAKAHRELDKVVGADSQTTESAAPYLQALLKEALRMHPPGPLLSWRHR

SEQ ID NO: 248381 - protein, 75 aa, Zea mays
  Clone ID: MRT4577_15810C.1.pep
AHQKLWLCSLVKLFDSNLCSDWLLVLYLLYTIKLDCENNMDVVFMFRLGCVCLDFDHPAVGQIPSFVAFSIKEKN

SEQ ID NO: 248382 - protein, 50 aa, Zea mays
  Clone ID: MRT4577_158110C.1.pep
PFLDFLAVFLKFVLINTIVRDVNIKNEIENNDLNLDYNVVTGELIVDENI

SEQ ID NO: 248383 - protein, 121 aa, Zea mays
  Clone ID: MRT4577_158111C.1.pep
FTTRPGRGGQGGGRRAGGNGSGGRNGGRRERGGRPANGGSGGYGGRREGGGGGNGGGGGRRRRARREGPPWPRPKHLQRPIGSSNRAIHHRAKDPPPQEKGKEPCCKPRMPPDTKRDPGRT

SEQ ID NO: 248384 - protein, 238 aa, Zea mays
  Clone ID: MRT4577_158112C.1.pep
MGKKAIRYAVVDAFAAEPFKGNPAAVCLLEEEGASAAVDDRWMQSVAAEFNLSETAFLARDSSGGAGAAPRFHLRWFTPVTEVDLCGHATLASAHFLFTTVLPEHGKLEFMTRSGILTAKKVPAPGSTGVPGEEQGKLFIELDFPMIGFLECDETPSILETLNGAPIVSVHKSATDGDLIVELSSGKEVVNILPSIDEIKNLACRGLIFTGPAPAGSGYDFFTRFFCPKIGIDEDPVT

SEQ ID NO: 248385 - protein, 61 aa, Zea mays
  Clone ID: MRT4577_158113C.1.pep
QKDKSEHGLYLDETTRPIALLYIFLTGPLTVSIVLVVSWTIFPSRCSALILQLHSLSYLPI

SEQ ID NO: 248386 - protein, 56 aa, Zea mays
  Clone ID: MRT4577_158114C.1.pep
GELRRDRTRRAAYRSRRRCLPYPPSANLLYRGAFSDITRDRGVVRTRALVPDISGL

SEQ ID NO: 248387 - protein, 63 aa, Zea mays
  Clone ID: MRT4577_158115C.1.pep
SRIAPKFALMSAKRPFVHWYVGKGMEEAEFSEAREDLPPLEKDSEEVGPEFDEGEEGDDGDES

SEQ ID NO: 248388 - protein, 196 aa, Zea mays
  Clone ID: MRT4577_158116C.1.pep
MSDDAPSRLYHPDTDPAVATGQDAAVEAPPTPAHDPGGSECRFCEMTRQHQPQCARRLPKRIILVRHGESQGNLDMSAYTTTPDYRIPLTALGAEQARAAGQRIRDVVAGSGNWKVYFYVSPYARLRQPPLLGRGVLLLHRHLLRGALRLVGDLLLGRRRSRGQGGGDQAAGPTITGFIHIQSTHSPRPLKFSPLD

SEQ ID NO: 248389 - protein, 386 aa, Zea mays
  unsure (1)..(386): unsure at all Xaa locations
  Clone ID: MRT4577_158117C.1.pep
MSDDAPSRLHHPDPDPELAVATGQDAAVEAPPPPPPAHDPGGSECRFCEMTRQHQPQCARRLPKRIILVRHGESQGNLDMSAYTTTPDYRIPLTALGAEQARAAGQRIRDVVAGSGNWKVYFYVSPYARTRATLREIGRAFPRDRVIGAREECRVREQDFGNFQVEERMRAVKETRQRFGRFFFRFPEGESAADVFDRVASXSSDPSRADSVHRLPLLFSSPHHYLLTHQSTNPCVCAGFLESLWRDIDMGRLDQDPSCETNLVIVSHGLTSRVFLMKWFKWTVAQFERLNNFDNCEFRVMQLGPGGEYSLLVHHTQEELQQWGMSPEMIADQQWRASANRRCWAEECSSFIDTFFEEPYGSSETSSSDEDEAEDKEEETKLLEQL

SEQ ID NO: 248390 - protein, 198 aa, Zea mays
  unsure (1)..(198): unsure at all Xaa locations
  Clone ID: MRT4577_158118C.1.pep
TDWWKKALESENVDSVKISNRLHDTPCVVVTSKYGWSANMEKIMQAQTLSDSSKQAYMRGKRVLEINPRHPIIKELRDKVAQDNEXLTLPYLHFDLLVRGTRTWEDVDSFVRVDCNVKQQQSEELKHTARLVYQTALMESGFNLPDPKKFASSIYKSVQKGLDLSPDATVEEENEAEEQPEVEKEPEPEPSSYDKNEL

SEQ ID NO: 248391 - protein, 111 aa, Zea mays
  Clone ID: MRT4577_158119C.1.pep
KNQKSASRQRQSDGLSTSYCSLTKENMEARWSDHILSLSHLGKYRNHQSREEGTLIIQHHPRFYQSSKLSEPFSSKVFQSSDFCLFIDNSLALVVRTCRVSASVVVSGAQC

SEQ ID NO: 248392 - protein, 170 aa, Zea mays
  Clone ID: MRT4577_15811C.1.pep
PASAPRPPTRPPTRPPTRPPTRPAPEILAVIGKVPHLSEFLNSLYNCQYKSFFVAFSGLTEQIKLDRYLQPHFRYYMREVRTVVYSQFLESYKSVTMEAMATAFGVTVDFIDQELSRFIAAGKLHCKIDKVAGVLETNRPDERNAFYQATIKQGDFLLNRIQKLSRVIDL

SEQ ID NO: 248393 - protein, 46 aa, Zea mays
  Clone ID: MRT4577_158120C.1.pep
HPCSRCSIDSVCPTFGGSDPGVRAEVVHSLKEELNLMCGLSCSRHP

SEQ ID NO: 248394 - protein, 346 aa, Zea mays
  unsure (1)..(346): unsure at all Xaa locations
  Clone ID: MRT4577_158121C.1.pep
KKADLIFAWVSTKSDGKLASLDEYISRMKPGQKDIFYLTGSSKEQLEKSPFLERLTKKNYEVYMYAAGLSTFITERAGSGIQLEKYHRCAWFLVCFCFCXIFFTDPMDXYLMQYLMDYEDRKFQNVFNEGLKLGMDSWLKDLNESNKXLTEWGKKALESESVDSVKVSSRLHDTPSVVVTSKYGWSANMEKIMQAQTLSDSSKQAYMRGKRVLEINPRHPIIKELRDKVAQDNEXLPLRYLHFNLLVRGTHTNQHTWEDVDCNVNHQQSEELKHTARLVYQTALMESGFNLPDPKEFASSIYKSVQKGLDLSPDATVEEDDEAEEQPEVEEKEPEPEPSSYDKDEL

SEQ ID NO: 248395 - protein, 109 aa, Zea mays
  unsure (1)..(109): unsure at all Xaa locations
  Clone ID: MRT4577_158123C.1.pep
DAGRPCISGSATXNGIPGLARAYKSALIAMRSMARRTLPLRMPCFQCYGAAVADFGMYTTLRTELGIVTYCHITDNAAGIVEMAAMRHTIRERTDALDAVEDTTAAIGK

SEQ ID NO: 248396 - protein, 207 aa, Zea mays
  Clone ID: MRT4577_158124C.1.pep
MAGSSRPAKINNSVSLTSLEGKRTHHPKAQGIAPSWDPYSAPPSRRICAGDAPGRRIYAAAGGGRRRCGRSLPVSARIRPAARIMDPKEKPNVSSSPPTPRLDCIKCFDMLWFCYSPFHQMQNYYRYGEFDTCFGKWGDLMGCLALKTKRKAEVEEILIAREKAKPHIWTYRTVDEASENWWRMYKHAVMMSPLPGSAQLPPRSDES

SEQ ID NO: 248397 - protein, 156 aa, Zea mays
  Clone ID: MRT4577_158125C.1.pep
QFSFVNKPTGKKDRGPKGTGNRTIVGPVQRTAQPPDLRRRRARTSDLRRRRRGEAALWPFSARERPDPSRRYYYRYGEFDTCFGKWGDLMGCLALKTKRKAEVEEILIAREKAKPHIWTYRTVDEASENWWRMYKHAVMMSPLPGSAQLPPRSDES

SEQ ID NO: 248398 - protein, 139 aa, Zea mays
  Clone ID: MRT4577_158126C.1.pep
MCINLTLLASYYAARIMDPKEKPNVSSSPPTPRLDCIKCFDMLWFCYSPFHQMQNYYRYGEFDTCFGKWGDLMGCLALKTKRKAEVEEILIAREKAKPHIWTYRTVDEASENWWRMYKHAVMMSPLPGSAQLPPRSDES

SEQ ID NO: 248399 - protein, 83 aa, Zea mays
  Clone ID: MRT4577_158127C.1.pep
CVISLWVSSSIDARATSCASYWSKFSGIVVHAKMLKLYLSQFYRLKSFFRRFARSWIPVVWEAWVFVYALVMGQLRHSSGDVM

SEQ ID NO: 248400 - protein, 90 aa, Zea mays
  Clone ID: MRT4577_158128C.1.pep
GGDNPGQQDFDRPIKALPLASNPVQEPKATKHDVKTFWEGSFISLPIKIKLDLAKSSQPAIQRTYALATTWAEKSRLLCSSKMLSLKPLP

SEQ ID NO: 248401 - protein, 133 aa, Zea mays
  unsure (1)..(133): unsure at all Xaa locations
  Clone ID: MRT4577_158129C.1.pep
MEPMDSQLTALALSDSDSASVEGAAADAADADLQALRRLSDNLAAAFRSPDDFAFLADARIVVPGAPDLRVHRCVLCARSPFLRDAFARRAASAGXGGEGQGQXMCKVELRDLLGDEVEVGYDALRLVLDYLY

SEQ ID NO: 248402 - protein, 183 aa, Zea mays
  unsure (1)..(183): unsure at all Xaa locations
  Clone ID: MRT4577_15812C.1.pep
VDAPEILAVIGKVPHLSEFLNSLYNCQYKSFFVAFXSSDIEITCPYSCSIIRLLSVHFVACIDMVYNCXAGLTEQIKLDRYLQPHFRYYMREVRTVVYSQFLESYKSVTMEAMATAFGVTVDFIDQELSRFIAAGKLHCKIDKVAGVLETNRPDERNAFYQATIKQGDFLLNRIQKLSRVIDL

SEQ ID NO: 248403 - protein, 51 aa, Zea mays
  Clone ID: MRT4577_158130C.1.pep
VATIVCYNALMINLLRYILCYYVVINNLLRCKYVAAIFCYYTLAICLDINM

SEQ ID NO: 248404 - protein, 53 aa, Zea mays
  Clone ID: MRT4577_158131C.1.pep
PSRPCIPTFLDFIRNTDRSSPSILILPTNVHVLFLCLDVVADHCMHSDGSNSC

SEQ ID NO: 248405 - protein, 243 aa, Zea mays
  Clone ID: MRT4577_158132C.1.pep
MTTAPNIEMIASSLRHCSLTGGAGGRRRGGTRRRGAEGGGDTDGVTVELNSEVALPYHWEQCLDIRTGQVYYINWENGTRTTVDPRTASAFVSSPTPRSSTSRRTRRASTPSSGYTSVSSSVGAADVVTGAWRGASNDSGYDNDDEQEDGEADDEDEAESSSTTTTSSSSSSSTGSSPGVGNLVDALVLLAHRRVRLRRQRRRPPRRRARSWRAAAAPASCTSWCPSAPTCGPSAGAPGSSTS

SEQ ID NO: 248406 - protein, 43 aa, Zea mays
  Clone ID: MRT4577_158133C.1.pep
LRLTDGTRRKRQPNKFGRDSRSPKTKGTPPRLSNNQRNMESVC

SEQ ID NO: 248407 - protein, 67 aa, Zea mays
  Clone ID: MRT4577_158134C.1.pep
FSTFKYIIPVQPRRFVYTVFCTTIKVWSDGFIFKSARLGPHNSSMRYIVNFFVTGFISSAVEVFCSA

SEQ ID NO: 248408 - protein, 542 aa, Zea mays
  Clone ID: MRT4577_158135C.1.pep
MENLAGQQFVYEVTSLRALFLLLLLSPFLFLIMRNARATTLMFDTKRTRGHRQPADRQQSLPPSPPAVPVLGHLHLVGSLPHVSLRSLARTLGADLMLLRLGSTPVLVVSSSSAAEAVLRTHDHVFASRPHALVSEVVLYGPSDVGFAPHGDCWRRGRKLITTHLLSVNRVQSFRHAREEEVSVVMGRIAEAAAAGAAVDVGELLGSFTNDLACRAVMGKSFRSEGRNKLFRELVLDTTKLLVGFNVEDFFPFLARFGVLSKLVRAKSERLRRRWDELLDRLIEDRESKYEAAAAGASDLKDDDDDNFIHVLLSVRQEYDHITREQMKALLQDVFIGGIDSTSSLLEFTMAELMRKPRVMNKLQAEVRSSTPEGHDGVVGEDSLEHMAYLRAVTKESLRIHNVTPLLAPHLSMDSCTIDGYTVPAGVQVLINSWAIGRDTRYWGDDAEEFVPERFMDGGSAVHVSFKGSDFEFLPFGSGRRMCAGVNFAMATVELMLANLVHRFDWDLPPGQEGRDIDVSQVFGLVVRRKKKLLLVPKLRVY

SEQ ID NO: 248409 - protein, 63 aa, Zea mays
  Clone ID: MRT4577_158136C.1.pep
PAFAEILNRTAISSNEEFCLAVGVPGGVCVIKGQRQYFDQIRGGDLHYIVQGLKVSRVKTLKG

SEQ ID NO: 248410 - protein, 102 aa, Zea mays
  Clone ID: MRT4577_158137C.1.pep
KKKKKKKNLELRSCCFSERALAVAALQLKSLRYLWGQGYKASPTGTDLMAMVRPFWNIEFIAPNQDEPCPKGQAQILAYYSLAGARTDCPQSEIPLHPSGGS

SEQ ID NO: 248411 - protein, 75 aa, Zea mays
  Clone ID: MRT4577_158139C.1.pep
QIGTNLRYISQTQGCSSTYELLVLLTDPEPLENGIARPPQSMDDTNIYSSTGQTDEQLILIERIARLPWNLNAKG

SEQ ID NO: 248412 - protein, 49 aa, Zea mays
  Clone ID: MRT4577_15813C.1.pep
KYIIRLNSSVKDKRHSSIHGITTVNLTNNDISGNPSALPSPLHKIFFFK

SEQ ID NO: 248413 - protein, 58 aa, Zea mays
  Clone ID: MRT4577_158140C.1.pep
PPQPHYNTMPLKAPCPKSKPLIATGPTNKTKNRDRDDQERTQKKTRKANTISHLISPF

SEQ ID NO: 248414 - protein, 89 aa, Zea mays
  Clone ID: MRT4577_158141C.1.pep
SRPTPSLGVQAGGPRSTNEAHQVSSVGPYAGRLAGISWDFLPEYGGRCGITVPWRFGSQKTAWDDLRTLLMRCVRLIRTKVNRGSWQLV

SEQ ID NO: 248415 - protein, 45 aa, Zea mays
  Clone ID: MRT4577_158142C.1.pep
LKGGLFSHGRDKISPINAQPTTSIHPTYLHTFLWKKIYSLKHFSS

SEQ ID NO: 248416 - protein, 107 aa, Zea mays
  Clone ID: MRT4577_158143C.1.pep
TRCCRSLCCLFFWWCCYATDNNEEVTDEYDDHYGASYLFILREDPTHSRTLHNISLVAVKDYLVLWYDSRLSYNYPSFEFLRCGYGMNSNHLMRVKPVSNFYIGAVH

SEQ ID NO: 248417 - protein, 146 aa, Zea mays
  Clone ID: MRT4577_158144C.1.pep
WRGGPPKGPGLLWCGGGPDLGAGGGCPQVTSPPWNAVFLSVNREKEGIKVCSRDIPLAWAGFFYGQPKCRGPWVLPRVSLMWLHSGPPPSFAFLPPLFCIYYPLICLGRFNCLPKKKKKKKKKKKKKKRKKKKKKKKKSTLRCYHC

SEQ ID NO: 248418 - protein, 81 aa, Zea mays
  Clone ID: MRT4577_158145C.1.pep
ELQASIAFYMSRLLDDSALQSKLSPNYRAVYTYLLHQQNLLGAEGPPIAPTKLPVSFLSQQEKQLVGVLCDTFGSINRGPH

SEQ ID NO: 248419 - protein, 64 aa, Zea mays
  Clone ID: MRT4577_158146C.1.pep
ARLAGARNPSVSNRDNLAPRPEHKQKATATFHKLERDCRWLDLNYDPTCWMISPGPEPDSSGLC

SEQ ID NO: 248420 - protein, 64 aa, Zea mays
  unsure (1)..(64): unsure at all Xaa locations
  Clone ID: MRT4577_158147C.1.pep
PLMKKLKIFVFKKPVVGPSSLIVGLGFFFPPVVGPILDXWQTGEKVPPPFLNNVVPGVPAKKKK

SEQ ID NO: 248421 - protein, 60 aa, Zea mays
  Clone ID: MRT4577_158148C.1.pep
DLCSTGVLARTHCEWRATGSSRVDLRRMGNIGSGQGPSLVKCWSWYCLEVRRGSFLCGSV

SEQ ID NO: 248422 - protein, 56 aa, Zea mays
  unsure (1)..(56): unsure at all Xaa locations
  Clone ID: MRT4577_158149C.1.pep
TRDPFLIRQERENPTXXXXDRFAHREYIRLAMXEGDVEDASNGSGDVWDESLEAPF

SEQ ID NO: 248423 - protein, 76 aa, Zea mays
  Clone ID: MRT4577_15814C.1.pep
WTSLRLLLCMNIAALQDIHCAMYYATNSVLAIAPLHTHDIIYSHTKPRLHILCQHSPVTVPILYLLPFGQGIASPT

SEQ ID NO: 248424 - protein, 187 aa, Zea mays
  unsure (1)..(187): unsure at all Xaa locations
  Clone ID: MRT4577_158150C.1.pep
MGGFCSKESAVDKSPSDTTLGPGRVVDHHHDRLVVKEEKKAVVGEAAAKRIQEEQHQQQRQPAPPPLHVSVSRTAVPGASADTTAAPWDGVPPLARLPSLKSGMGVANKVSEVSSILGRASTAGLGKAVEVLDTLGSSMTDLNISSFGSGTATKGNKIYILAFEVANTIVKGCNLMHALSKXSIKYL

SEQ ID NO: 248425 - protein, 45 aa, Zea mays
  unsure (1)..(45): unsure at all Xaa locations
  Clone ID: MRT4577_158151C.1.pep
LVALALLALAGSAIYTHTNGGXGCHPPPSVHLPTSVHLPPTDQLS

SEQ ID NO: 248426 - protein, 112 aa, Zea mays
  Clone ID: MRT4577_158152C.1.pep
KLESIYKPNALGTHLNNLLELFYSEIGKPKLMFLKQSSLKQALTIFCIFLSMYLLLVYINCTPFSDCAMFWVFLFVSRLDFRLCNGFGFLSFFSGLERVLDSVGNEKKCTIF

SEQ ID NO: 248427 - protein, 101 aa, Zea mays
  unsure (1)..(101): unsure at all Xaa locations
  Clone ID: MRT4577_158153C.1.pep
GGLXPAAWTSFCRRVGETIMLYFLWTRRSYCHCNVWCTRRSYCHGIVVAYSCITRQPLGHSKFHLSYNLIRSTLTYYITCLSLRSLVHYTLLAEFNIFIFN

SEQ ID NO: 248428 - protein, 186 aa, Zea mays
  Clone ID: MRT4577_158154C.1.pep
RRLGSASSPPPPPGGGRRRYASASASKKPRLLSSQTTTSHTSTSNATTPRSFDTTSSHQDASFRDRLPRQVRAPAVFKCVRVTSIEDGEDEYAYQATVTINGHLFKGFLYDQGPDDGRHAATSNDDCTAGGVPNISELHLGAASGSGAGTGTSMSMAPPTGLYGGGGGGHHPHILGGSSSYGNTMN

SEQ ID NO: 248429 - protein, 128 aa, Zea mays
  Clone ID: MRT4577_158155C.1.pep
MAPAGPPLAPPLAECHGDTWQRFTLCRVSTTDTRQRSSPWVPLSVPLPRVLGGTRQKRLPLCRVPRRTSTRQRDHPTSPFVSTFAECTRRHSTKVASLPNTKATTLSKEALPVPRRAFFAECYDLDTR

SEQ ID NO: 248430 - protein, 67 aa, Zea mays
  Clone ID: MRT4577_158156C.1.pep
IFVIFILFFIIYLFYLLFIISLFIIFIYLFYLFFIYFYFYSTRNSDPIYHQPSVYCLYSLEVINIMW

SEQ ID NO: 248431 - protein, 57 aa, Zea mays
  Clone ID: MRT4577_158157C.1.pep
TSHARLPKPGSSILTHGSGSLFTERYHNTTWARLQTRDSARTAESGASLAHQRSGAP

SEQ ID NO: 248432 - protein, 97 aa, Zea mays
  Clone ID: MRT4577_158158C.1.pep
AKLERRSLGVRRISDARRRPLCSVSPCIFIDVASVVNLAVAALKLGVLVQNRRHPVIAGRCAIVCLCFIICAMALAIVPSLILCVVNGRSLDCKCQF

SEQ ID NO: 248433 - protein, 84 aa, Zea mays
  Clone ID: MRT4577_158159C.1.pep
VGGAYCCYSWLVAPERDVSYGDATVTMIPGRGRWQWRRLHEQPLRQAGIGQGQVHVPEPVGLEHGAVQPHRSNGHHREGPKGRR

SEQ ID NO: 248434 - protein, 88 aa, Zea mays
  unsure (1)..(88): unsure at all Xaa locations
  Clone ID: MRT4577_15815C.1.pep
SLSSRYATKILIVCSSDHSIVRPFFHSSYSSFIHSHYSSLIVRSYDYSHYYSLSYYSPLLXIIVTGYYCYYALLLFIRCCSCCYVLSM

SEQ ID NO: 248435 - protein, 805 aa, Zea mays
  Clone ID: MRT4577_158160C.1.pep
MSEDKKVVGDSKLSLFEEMHLGFLQSMSKTNTEKITKEILEGLSEDTGDSDSYDMDSGGEDFEDRPWRPSHAVFGKSSIKENHLVNMWGRYFRDVSVVRADEGEKTCPAPEENEVVVFRSFLKAGLRFPLSSFVVEVLKIFEIFLHQLTPEAIIRMNIFVWAETIKETDEGGLVRLKYTFKFGDKFVEPDDDWLKSIETVEDTALSAAFGGRKKKRLNRVFDAIGFVYPDYHYPVRGQKRKNTSSAKETTSVVPSEPAPKRKRLAEEPAKEKIEEAKTEEAKTLEVLSPSVKIESEKSQKGPTVTPKRKRMVNVLDVLETIKSSSITPKKTIETFEVSTEAFVAEISKQQLEAEPGPSEPTKEQPLEIEETKVTKAALEAEKIKMSEPISVEEIDTAAPEAPSNIRDYIVRHASGKKLSEEEIYEANHYARELKYPKGALVFNGTDEDDFLYCLPDNKELSVCREMARSMGFPKLEAGLCAMTKEDLADSLAYNSLKGLILSNALRAQKNAEDENYNIAFNNLRAEVIKLRNEALEKDKILLTLVDKIKEDKATSKAQVEAQKREIQDLQKQLARAKEERIIEETKRELSDQWANHLEINVEELRASKKRYYDKSIECVKKIKSSFASVGAFSSEENFTRGNPEGPIEWISHEAEAFEEILNSRGDICAFSGARGIATVLERKGCNHVKSLAQTGTSLSPEDIKDPSTESSLVGGKFFTDIWDNGGREMAQEIIRRSEKGVHDARKIAEAAEKGAEPEGQIEPAKAPPGPHPKGDDEIRKMAEAIMDKVVDQLLNEAAEVVLRED

SEQ ID NO: 248436 - protein, 314 aa, Zea mays
  Clone ID: MRT4577_158161C.1.pep
MAYGYNSPDCPVCTGLSGKRLSEEEIFEANHYARELKYPKGALVFNGTDEDDFLYCLPDNKELSVYREMARSMGFTKLEAGLCAMTKDDLADSLAYNSLKGLILSNALRAQKNAEDESYNIAFNNLRTEVIKLRNEALEKDKILLTLVDKIKEDEATSNAQAEAQKREIEDLRKHFASVDAFSSEENFTRGNPEGPIEWINHEVEAFEEILNSRGDICAFSGARGIATILERKGCEHVKSLAQSETALSSEDIKDPSAEASLVGGKFFTDILDNGDREMAQEIIQKSEKGIHDARKVAEVAEKSAEPEGQIGIN

SEQ ID NO: 248437 - protein, 438 aa, Zea mays
  unsure (1)..(438): unsure at all Xaa locations
  Clone ID: MRT4577_158162C.1.pep
RNFGGGGEDSEDRPWRPSHAXFGKSSIKENHLVNMRGRYFWDLSVVRADEGEKTCPTPEENEIMVFRSFLKAGLRFPLSSFVVEVLKIFEIYLHQLTPEAIIRMNIFVWAMRSQGLEPNAKSFCNIHELFFGSWSGSSCPVPTFRKRWPGDWMTEWFYVKNDLKSREDIKKIIMRPIWQRFGLRRPKVEMDEAAEECQRAFGVVCSFIGTRDLVQEHIAFRVWPLAEKWEMPKETVKEPDEGGLVRLKYTFKYGDKFVEPDDDWLKSIETVSDELLGVYSKAEDTALSAAFGGRKKKRLNRVFDAIGFVYPDYRYPARGEKRKNTSSAKETASAAPSELAPKRRRVKVLTHRPRYIEPAIVHVFVGGIPSATEAKETAPLPNVEALAEVPVTEKIEETKAEETRAEEVKTSEILSPPAKTEATKSQKGLAVTPKRKRM

SEQ ID NO: 248438 - protein, 213 aa, Zea mays
  unsure (1)..(213): unsure at all Xaa locations
  Clone ID: MRT4577_158163C.1.pep
KIFEIYLHQLTPEAIIRMNIFVWAVRSXGLEPDAKSFCNIHELLYETKPWGKEQYHNNFGCYSFGSRSGSSCPAPTFRKRWPGGWMTEWFYVKNDLKSREDIKKIIMRPIWQRFGLRRPKVEMNEAAEECQRAFGVVCSFIGMRDLVQEHIAFRVWPLMEKWEMPQETIKETNEGGLVRLKYTFKYGDKFVEPDDDWLXNIETVSDELLGGIF

SEQ ID NO: 248439 - protein, 1195 aa, Zea mays
  Clone ID: MRT4577_158164C.1.pep
MAEFRVIAEHIDTRDLVQEFLAFKLFPTMKEWAMPKLEGKKKEGELIRLPYHYKFKRHFKVPCQEWLDTIKVMCNEILGNYFKKEDQLMTAAFGTRPKRRLNRVMDAIGFEYPDYERLDKEGKEPAKTKAPRPKRQRIVTVTPPGTSAPKMSAIESMTTTEVVPSEAAAEEVRAEDAKSEDINLESMVADIDKMLLNMATEEAAAVTEETTTAKPEKEEMTSEDEAFNFQNLVGQELTKAEKEELKEYAIYCGFLSFGFESTFSAFARMSEDKKAAGDSKLSLSEEMHLGFLQSMSKTNTKKITKEILEGLSEDTGDSHSYDVDSGGEDFEDRPWRPSHAVFGKSSIKENHLVNMRGQYFWDLSVVRADKGVKTCPTPEENEVVVFRSFLKAGLRFPLSSFVVEILKIFEIYLHQLTPEAIIMMSIFVWAVRSQGLEPNAKSFCNIHELFFGSRSGSSCPVPTFRKRWPDDWMTEWFYVKNDLKSREDIKTIIMRPIWQRFGLRRPKVEMNEAAEECQRAFGVVCSFIGTRDLVQEHIAFRVWPLVEKWEMPKETIKETDEGGLVRLKYTFKYGDKSVEPDDDWLKSIEAISDELLGVYSKAEDTALSAAFGGRKRKRLNRVFDAIRFVYPDYHYPARGEKRKNTSSAKETASAAPSEPALKRRRVKVLTHRPRYIEPAIMPAFVGGTPSATEAKERAPLPNIEVLAEVPVTEKIEETRAEEVKTSEILSPSAKTEATKSHKGLAVTPKRKRMVNVLDVLETIKSSSTTPKKIAKTSEVHTETFDAEASKPRSETKAGPSEVAKVKSLEVEKTEIAEQMLSEETGTAAPEASSKIHEDDFLYRLPDNKELSICREMARSMGFPKLEAGLCAMTKDDLADSLAYNSLKGLILSNALKGQKNAKDESYNIAFNNLRTEVIKLRNEALEKDKILLTLVDKIKEDEATSKAQAEAQKREIEDLRKQLARAKKERILEETKRELSDQWANHLEINVKELRASNKMFYDKSIECAKKIKSSFASVGAFSSEENFTRGNPEGPIEWISHEAEAFEEILNSHGDICAFSGARGIVTVLERKGCEHVKSLAQSETALSFEDIKDPSAEASLVGGKFFTDIWDNGGREMAQEIIQKSEKGIHDARKVAEAAEKSAEPEGQIEYAKLSPGPHMKGDDEIRQMAEAIMDRVVDQLLNEAAEVVLKED

SEQ ID NO: 248440 - protein, 922 aa, Zea mays
  unsure (1)..(922): unsure at all Xaa locations
  Clone ID: MRT4577_158165C.1.pep
MSEDKKVVGDLKLSLSEEMHLGFLQSMSKTNTEKITKEILEGLSEDTGDSDSYDVDSGGEDSEDRPWRPSHAIFGKSSIKENHLVNMRGRYFRDLSIVRADEGEKTCPTPEENEVVVFRSFLKAGLRFPLSSFIVEVLKIFEIYLHQLTPEAIIRMNVFVWAGKEQYHNNFGCYSFGSRSGSSCPMPTFRKRWPGDWMTEWFYVKNDLKSRENIKKIIMRPIWQRFGLRRLKVEMNEAAEECQRAFGVVCSFIGTRDLVQEHIAFRVWPLVEKWEMPQETIKETDEGGLVKLKYTFKYGDKFVEPDDDWLKSIETVSDELLGVYSKAEDTALSAAFGGRKKKRLNRVFDAIGFVYPDYHYPVWGQKRKNTSSAKETTSAAPSESAPKRKRVKVLTHRPRYIELATVPEFAGETSSATEAKESTLLPEIEKLAEVPAIEKMEKPRTEEAKTSEILSPSAKIXDRKKPEGSNSDPEKKKDGXVLDVLETIKSSSLTPKKTVETSKVSTEAFVAEASKQQFETEAGPSEPTKKLSEEEVFEANHYAKELKYPKGALVFNGTDEDDFLYCLPDNKELSVCREMARSMGFPKLEAGLRAMTKDDLADSLAYNSLKGLILSNALRAQKNAEDESYNIAFNNLRTEVIKLRNEALEKDKILLTLVDKIKEDEATSKAQAEAQKREIQDLQKQFGPRLARAKEERILEETKRELSEQLANHLEINVEELRASQRKYYDKSMECVKKIKSSFASVGAFSSEENFSRGNPEGPMEWISHEAEAFEEILNSRGDICAFSGARGIATVLEKKGCKHVKSLAQSEATLSTEDIKDPSLEASMVGGKFFTDIWDNGGRELAQEIIQRSEKGIHDARKVAEAAEKSTEPEGHIEPAEASPGPHPKGDDEIRKMAEAIMDKVVDQLLNEAAEIVLKED

SEQ ID NO: 248441 - protein, 719 aa, Zea mays
  Clone ID: MRT4577_158166C.1.pep
MSEDNKAVGGLKLSLYEEMHLGFLQSISKTNTEKITKEILEGLSEDTGDSDSYDVDSGGEDSEDRPWRPSHAVFGKSSIKENHLVNMRGRYFRDLSVVRADEGEKTCPTPEENEVVVFRSFLKAGLRFPLSSFVVEVLKIFEIYLHQLTPEAIIRMNIFVWAARSQGLEPDAKSFCNIHELLYETKPWGKEQYHNNFGCYSFGSRSGSSCPVPTFRKRWPGDWMMEWFYVKNDLKSREDIKKIIMRPIWQRFGLRRPKVEMNEAAEECQRAFGVVCSFIGTRDLVQEHIAFRVWPLVEKWEMPQETIKETDEGGLVRLKYTFKFGDKFVEPDDDWLKSIETVSDELLGVYSKAEDTALSVAFGGRKKKRLNRVFDAIGFVYPDYHYPVRGQKRKNTSSAKETASAAPSEPAPKRKRVKVLTHRPRYIELATVPEFAGDTSSAPEAEESILLPGVKELAEVPATEKLEEPKTLLPEIKELTEVPATEKLEEPRIEKEKTSEVLVSKGPTVTPKRKRMVNVLDVLETIKSSSITPKKTVETSEVSTEAFGAEASKQQFETEAGPSEPTKVKPFETEETNVAEAAEKIKISEPILVEETDTAAPEAPSKIYDYIVRHASGKKLSEEEIFEANHYDRELKYPKGALVFNGTDEDDFLYCLPDNKELSVCREMARSMGFPKLEAGLCAMTKEDLADSLAYNSLKVRELRVWKFCNLQLILLFLY

SEQ ID NO: 248442 - protein, 39 aa, Zea mays
  Clone ID: MRT4577_158167C.1.pep
NEATVYRVTDLSPWHRCRTRLMLAPMPTRGAPLRSWLGL

SEQ ID NO: 248443 - protein, 847 aa, Zea mays
  Clone ID: MRT4577_158168C.1.pep
MSEDKKVVGDSKLSLSEEMHLGFLQSMSKTNTEKITKEILEGLSEDTGDSDSYDVDSGGEDSEDRPWRPSHAVFGKSSIKESHLVNMRGRYFRDLSVVRADEGEKTCPIPEENEVVVFRSFLKAGLRFPLSSFVVEVLKIFEIYLHQLTPEAIIRMNIFVWAVRSQGLEPNAKSFCNIHELLYETKPWGKEQYHNNFGCYSFGSRSGSSCPVPTFRKRWPGDWMTEWFYVKNDLKSREDIKRIIMRSIWQRFGLRRPKVEMNEATEECQRAFGVVCSFIGTRDLVQEHIAFRVWPLADNWEMPQETVKEPDEGGLVRLKYTFKYGDKFVEPDDDWLKSIETAEDTALSAAFRGRKKKRLNRVFDAIGFVYPDYHYPVRVPEFAGETSSATEAKESTLLPEIEKLAEVPATEKMEKPRTEEAKALEVLSPSAKIETEKSQKARPSEPTKVKPLEAEETKIAKADEKIKISEPILVEEIDTAAPEAPSKIYDYIVRHASGKKLSKEEIFEANHYAKELKYPKGALVFNGTDEDDFLYCLLDNKELSVCREMARSMGFPKLEAGLCAMTKDDLADSLAYNSLKGLILSNALRAQKNAEDESYNIAFNNLRAEVIKLRNEALEKDKILLTLVDKIKEDEATSKAQAEAQKREIQDLQKQLARAKEECILEETKRELSDQWANHLEINVEELRASKKRYYDKSIECVKKIKSSFASVGVFSSEENFTRGNPEGPIEWISHEAEAFEEILNSRGDICAFSGARGIATVLERKGCNHVKSLSQTETALSSEDIKDPSAESSLIGGKFFTDIWDNGGREMAQEIIQRSEKGIHDDRKIAEAAEKGAEPKGQIGIN

SEQ ID NO: 248444 - protein, 162 aa, Zea mays
  unsure (1)..(162): unsure at all Xaa locations
  Clone ID: MRT4577_158169C.1.pep
STLGDGRVVRGLAGLPREGPAVLVGYHMLLGFELGPMVTGILSGTGVHVRGLAHPFMFDGATERLMPDSAHFDLHRVMGAVPVTGANFYRLLAAKEFVLLYPGGAREALHRKXWWWCGFAGEESKLFWPEQPEFVRMASRFGATIVPXFGVVGEDDICPTAT

SEQ ID NO: 248445 - protein, 56 aa, Zea mays
  Clone ID: MRT4577_15816C.1.pep
LTACILVCLPPRARKDVHARMHVKGSSLDSTCKKVVRSSISNKKKGMYNPRKRYVS

SEQ ID NO: 248446 - protein, 112 aa, Zea mays
  unsure (1)..(112): unsure at all Xaa locations
  Clone ID: MRT4577_158170C.1.pep
GSLAPXPPPWAXGVVGGPXXGSXFLGXLSLXXGXPXXCLSPFXPAPPXLLXXXXFXXVXXXXXXLGVVGFXXXCXXXALXSXSPSAXSPLXSXXLPXVPSYXKVWLLFPXPG

SEQ ID NO: 248447 - protein, 92 aa, Zea mays
  unsure (1)..(92): unsure at all Xaa locations
  Clone ID: MRT4577_158171C.1.pep
GSGLRAIPGCELLICVLGRLAFPRLSSPVRVSAAPFAFPSWFVRPWGCRVALCFXCLRGGCPPCCVWLTPPAVGCGGGAYYMCVWARAGFRA

SEQ ID NO: 248448 - protein, 110 aa, Zea mays
  unsure (1)..(110): unsure at all Xaa locations
  Clone ID: MRT4577_158172C.1.pep
SDNREFWLAPSTLSSSKMWXAGYIIERXIIAIVTVEVTCNPKAMPDDXNGAFAHTNYSTYSMRNEGESKVIKGGIYKLKLNYMDHIGAYGQGNKRLITAGHKTIYINTLI

SEQ ID NO: 248449 - protein, 101 aa, Zea mays
  unsure (1)..(101): unsure at all Xaa locations
  Clone ID: MRT4577_158173C.1.pep
LLNLYCTYFDNDLPGHQGPQRSGRPIKSICSRLKAKEGRIRGNLMGKRVDFSARTVITPDPNINIDELXVPWSIALNLTYPETVTPYNIERLKELVEYGPH

SEQ ID NO: 248450 - protein, 81 aa, Zea mays
  Clone ID: MRT4577_158174C.1.pep
PYLNNYADWKKPCLLTTISGGGGKSGLTQLLLRKALTEGGCPTLAEPPRRSPTRNCTRQHLIVEEERWIAPNAYKLHWRAP

SEQ ID NO: 248451 - protein, 59 aa, Zea mays
  Clone ID: MRT4577_158175C.1.pep
PPRQNSTPTHIHDRYRGRVLDAAPHLPHLTTCSSTCTMSSTHTSLLLSVLIFLNNHLIY

SEQ ID NO: 248452 - protein, 38 aa, Zea mays
  unsure (1)..(38): unsure at all Xaa locations
  Clone ID: MRT4577_158176C.1.pep
ETIGHVRSCLDQGFCRGRSPVLPRXRKRGPPSPIEDSW

SEQ ID NO: 248453 - protein, 144 aa, Zea mays
  unsure (1)..(144): unsure at all Xaa locations
  Clone ID: MRT4577_158177C.1.pep
SNCAFNGSGILWGIXAVNXNDRTKDQNMDEDMHLTIKARKKGYMFDYQGKSQLKSNLNGSLIDXHMQQHRRANLPRNMLMKMVMNIKTNIKKTIQKXYHFFYKFMMIRNIITHMIYCLIYWVIILVTMFLIHDRIRKYICFYIT

SEQ ID NO: 248454 - protein, 115 aa, Zea mays
  Clone ID: MRT4577_158178C.1.pep
QKKKTQGSARGGTPLTKTGGTGREAWDPETKGTKKAVNRTGRDGFGKTPGNRGGQTPRGETMGGGGQNQGGTRRGQNKAPPGKGNPSHPGTRKTKNPRDPGWGGDKKQVPFFQKP

SEQ ID NO: 248455 - protein, 88 aa, Zea mays
  unsure (1)..(88): unsure at all Xaa locations
  Clone ID: MRT4577_158179C.1.pep
FFXXXXXXXXXSYTEMINGSNVLFLVSATPPTPTQRKYIIVTTLANQKEAIVFLESLPERVRVHYSRELLAHVDNMHVPFTIIPNNSL

SEQ ID NO: 248456 - protein, 114 aa, Zea mays
  unsure (1)..(114): unsure at all Xaa locations
  Clone ID: MRT4577_15817C.1.pep
WRPSPPWRWPRPRAAAPSPWSGPPRSTAARSPPRXSSNXPGPPAPPWRAPRTGPPRRRRSTRPSASPCPPPRSATTEHARVACSCRAGGWYIINVRATVLLSLLLVRALDACLT

SEQ ID NO: 248457 - protein, 65 aa, Zea mays
  Clone ID: MRT4577_158180C.1.pep
RHYSTLIHAGGQTSRYTERIVTTQTTKSLFEVSYKFTWHIYDSWVPIESSFIAYLARFEVLCILL

SEQ ID NO: 248458 - protein, 109 aa, Zea mays
  unsure (1)..(109): unsure at all Xaa locations
  Clone ID: MRT4577_158181C.1.pep
MLSVLEKVVTGSIIGVVLKACGLRITYIKINAYINTDARTMFTFNHTEKWALYDGEEEDLDLGNYERHLDINLTRDIDITTEKIYQXSDFDRERRRDXYEKLISLEPHM

SEQ ID NO: 248459 - protein, 114 aa, Zea mays
  Clone ID: MRT4577_158182C.1.pep
MASAAAATQVGTYFLRNYYNLLQQNPDVVHQFYSEASTMVRVDDLNGTSTTANSMMDIHSLIMSLNFTQIEIKTANFANSWGDGVLVMVSGLVQTKEYSNQRKFIQMFFLAPQE

SEQ ID NO: 248460 - protein, 172 aa, Zea mays
  unsure (1)..(172): unsure at all Xaa locations
  Clone ID: MRT4577_158183C.1.pep
MAQRDKKVEEPTELRAPELTLCANSCGFPGNPATNNLCQACFLAATASSSASVSPPPPSSSSSPAVLQFDEQQQQQNPRPCAPAASGPTEEPPRPARASAPAPXASSSSVRRCQTCRKRVGLTGFRCRCGDLFCGAHRYSDRHDCCFDYRAAGRDAIARDNPVVRAAKIVRF

SEQ ID NO: 248461 - protein, 95 aa, Zea mays
  unsure (1)..(95): unsure at all Xaa locations
  Clone ID: MRT4577_158184C.1.pep
EPPPGFPPKGEAPPGGVSQGPXAPVGNRFGENRWFPLYPFLPKKFGWVFFPGKRPNSPGKKAKKVFLGINKGKFLAPMFKAPKKGGGKPLPFTLK

SEQ ID NO: 248462 - protein, 118 aa, Zea mays
  unsure (1)..(118): unsure at all Xaa locations
  Clone ID: MRT4577_158185C.1.pep
APGPPPVAMAASALLPGGPMAQEVFLGPGHGGLVFEPSQFPVKAGDPLPFKKNPAFPQKVVFEEKKVPKGVHPPKISKEESLHAPGETYSVPLPVRGTXGLFLGPAXGPGMVGKLPLP

SEQ ID NO: 248463 - protein, 233 aa, Zea mays
  unsure (1)..(233): unsure at all Xaa locations
  Clone ID: MRT4577_158186C.1.pep
MKKFYGLRGTQLNIAIAVIAGTDFALFGYDQGVMGGLLTLKSFVRYFPEIDSVNPPPGSSTSHAATIQAITVGAYTLGCFFGAVATIWLGNMLGRKKTIFIGSAIMVIGAILQTASYGLAQLIVGRWITGFGNGMNTSTVPTWQSETSKPHRRGQMVMIEGSLIVFGVMLSYWIDLGFSFLEPSSIAWRFPIAFQIILALFIIALIPGXPESPRWLVLKGREDEALEVLAALS

SEQ ID NO: 248464 - protein, 127 aa, Zea mays
  Clone ID: MRT4577_158187C.1.pep
SELSIIPWRHKVDWEMPPRSTRTLIIGRLLLDHLLFTYNGGAEITDHGKRDVGGRAPAPASDSSPIWFKSDSIRLRLDSPRDGDASLLLPRPLDAVARGTLTAARRRSNGGGRDFVLLPHGNGGDQD

SEQ ID NO: 248465 - protein, 104 aa, Zea mays
  unsure (1)..(104): unsure at all Xaa locations
  Clone ID: MRT4577_158188C.1.pep
RTHWRIKTYLAISHMDAGKSXVADMRKVLAKNPHIEQQKLHRRVFFEKIDPKNQALMIFISCFVKTSHFEEYLNVQVMCLYIDRYLLCKKALEHIMLAFAYGVC

SEQ ID NO: 248466 - protein, 69 aa, Zea mays
  Clone ID: MRT4577_158189C.1.pep
SNITSEELEQRRDKDCNNVNGTRDMTILFRGSVKHNMLAYSRCVVPMNEGCTQPLSSDPKTKLEYLSSS

SEQ ID NO: 248467 - protein, 66 aa, Zea mays
  Clone ID: MRT4577_15818C.1.pep
GPFFFFFFLKDPILVFLSPSELSASDLLSFLSSLCTNPSKPAKTVSISHLLIQAKKVILFRSSSYY

SEQ ID NO: 248468 - protein, 170 aa, Zea mays
  unsure (1)..(170): unsure at all Xaa locations
  Clone ID: MRT4577_158190C.1.pep
MLLRPDLVRLITRHSMVSICLRSTADINNSSLDVQCEHHRAHDRSLGSSRSATDASPIRPNVGCEHVQYDTTLAAYIIHKEXLLPIGFRLRGGMHIFVKTLTGETITLEVEFSDTIDNVKANIQDKEGIPPDQQRXIFAGKQLEDGRTLAXYNIQKESTLHLVLRLRGGM

SEQ ID NO: 248469 - protein, 211 aa, Zea mays
  Clone ID: MRT4577_158191C.1.pep
MHRSMAADIKCEQPKRTPSPSASSLRIFGYDVAGSGIADRIIEPPPQDDGRPAVVDSRRRFECQYCCREFANSQALGGHQNAHKKERQQLKRERQFAARALVGGPAAAGLGGICAAGFTSSQSQPPPGHIIAVSPGAIASWVYLANQPAATMGLPFHAGVCQPEPLMLRGGTGSSILRRSYELCAPADDDLEESSAMGLDLHLSLAPASSS

SEQ ID NO: 248470 - protein, 68 aa, Zea mays
  Clone ID: MRT4577_158192C.1.pep
GQAKSLIELFKRHCTRLEAGNFCIFPIPRAPGFCWVTFYTLTKKPAPVQTVGKKKIDKPSAKASNNRL

SEQ ID NO: 248471 - protein, 261 aa, Zea mays
  Clone ID: MRT4577_158193C.1.pep
MAIGKNKRLSKGKKGIKKKVVDPFTRKEWYDIEAPGFFETRNAGKTLVNRSQGLKNADDSLKGRVLELSLADLMNGDQEQGFRKIKLRVEAISGKNCLTSFYGMDFTTDKLRSIVRKWQTLIEASVDVKTTDGYVLRLFAIGFTKRAYNQVKKTTYAQSSQVREIRAKMVEIMKREAEGGDLKELVQKFVPESIGREIEKATKGIYPLHNVYVRKAKIVKTPKLDMTKLLESNGETGADATPGSKVVKGGDFVEPEVLASV

SEQ ID NO: 248472 - protein, 59 aa, Zea mays
  Clone ID: MRT4577_158194C.1.pep
TDSNSHPKAINTEMLGGARIQGPWWVVYTDRSENRTILRKICPLPARRTLTATTINDKA

SEQ ID NO: 248473 - protein, 646 aa, Zea mays
  unsure (1)..(646): unsure at all Xaa locations
  Clone ID: MRT4577_158195C.1.pep
LSPGSALPCSPLTPKRRRDLLRWPLPAPSIPTAHHRLHHATDSASRSPLAAPPERHDASPPPLPLPPPRWRQRHPQRPLPPPPPPPRPXSSSPSPVSSDAELRKYAGYALLLLGCGAATYYSFPFPADALHKKAVPFRYAPLPEDLHAVSNWSGTHEVHARVLLQPDSLPALEGALAAAHKERRKLRPLGSGLSPNGIALSRAGMVNLALMDKVLDVDAKKKTVTVQAGIRVAELVDALREHGLTLQNFASIREQQVGGFTQVGAHGTGATLPPVDEQVISMKLVTPAKGTIELSREKDPELFYLARCGLGGLGVVAEVTLQCVERHQLVEHTFVSNADEVKKNHKKWLSENKHIKYLWIPYTDTVVVVQCNPPSKWITPKLASKYGKDEALQHVRDLYRESLKKYRXFRTETESKDPEIDTLSFTELRDKLLALDPLDKDHVVKINKAEAEYWKKSEGYRMGWSDEILGFDCGGQQWVSENCFPTGTLAKPSMKDLDYIDKLLQLIEKEEIPAPGPIEQRWTARSKSPMSPASSSEEDDVFSWVGIIMYLPTSDARQRKEITEEFFSYRSLARSLWDDYSAYEHWAKIEVPKDKDELAELQARLRKRFPVDAYNKARMELDPNKVLSNAKLEKMFPVLEPAHQTK

SEQ ID NO: 248474 - protein, 68 aa, Zea mays
  Clone ID: MRT4577_158196C.1.pep
PISLRSVILCCIHASPMWWVRWWFKASLGSCVITSLYPVPFIQGVSGLACLYGAHNFRFALKKEKQNI

SEQ ID NO: 248475 - protein, 52 aa, Zea mays
  Clone ID: MRT4577_158197C.1.pep
NQHSSALIGSLSMVKRHLIYKNSGFVYALGTMVYELGPPPPSGAYMFRSFDF

SEQ ID NO: 248476 - protein, 97 aa, Zea mays
  unsure (1)..(97): unsure at all Xaa locations
  Clone ID: MRT4577_158198C.1.pep
KKKKKKKXXXXKKKXKKXQKKKXXXXXXPTTKKKXXXKKKKKNSHXXQKKXKKKKKKKQXQKAXTTKINTVSPPHKFICWKISLHPPPSTPVSQNTR

SEQ ID NO: 248477 - protein, 89 aa, Zea mays
  Clone ID: MRT4577_158199C.1.pep
MHALSPPASQASWYRRSRDACVGSDTGPREPLPTMSREFSGMVAAAAAIANGAAADRVGEAEDEETNPLGMVPDRNPMPCARRAQGPAT

SEQ ID NO: 248478 - protein, 104 aa, Zea mays
  Clone ID: MRT4577_15819C.1.pep
MASLTMMASFAAVAVAAPSRRGTFAVVRSAKVDRCQEPATLAATEARPAADGRRAVMLAAAAAAVAAIGGAGAAMAGPKNGTPEAKKKYAAICVTMPTAKVCHN

SEQ ID NO: 248479 - protein, 77 aa, Zea mays
  Clone ID: MRT4577_1581C.1.pep
GFFKKGEKAKDWGEGKKDKINRWLGGGGFRASKTHSFYLKGLKVMLEDPKKWGQGQGGAEGFVFFSQKGELGTFGFF

SEQ ID NO: 248480 - protein, 108 aa, Zea mays
  Clone ID: MRT4577_158200C.1.pep
HYNVLVELNLCDRQVVQVCPNVMFVHFPVLSLPDAVAHRRCPPTQTNWLGITCNIFLPNAGCLGLDLLHTFFTCSWILSKLLIGLSFTCVTYSAHYCDFFIELGRMVI

SEQ ID NO: 248481 - protein, 156 aa, Zea mays
  unsure (1)..(156): unsure at all Xaa locations
  Clone ID: MRT4577_158201C.1.pep
GIDDRRHXRHVRFHTVAYLQQIWWLEVDGELEFCFPAGAYSLFFHLHLGRPYRRMGRWLCGTEHVHGWDVTPTRFQLTTSDEQQATSEYYLHLHEQGGWKLYHVGDFVISNSDEPMKLKFSMMQIDCTHMKGGLCVDSVFIYPKGYKPEKANIVCT

SEQ ID NO: 248482 - protein, 203 aa, Zea mays
  unsure (1)..(203): unsure at all Xaa locations
  Clone ID: MRT4577_158202C.1.pep
MGSPARFPCGSPGGPTVLPRRPAPRARPAGGPLGRFPAWLPARDRCLASWRCPVAGRLLGGPPAAPXPGRAXAXXPRGWAGSAPLPLPXPPPPRLXGPXPRGAPPXXPPPPAPXPPPPPPPXXPPAPPXPPPGPPPPPAPPPPPPPXPPPPPPPRPPPPPPPXPXPPRPPPPPPPPPPPPPRPAPPPSPPPPAPXRSPPPPPP

SEQ ID NO: 248483 - protein, 55 aa, Zea mays
  Clone ID: MRT4577_158203C.1.pep
PNPMNAAGITPKLGLPPRRQGPWYTQGPCPPPGEGLYKGLDWLSTTIGSKAWGPP

SEQ ID NO: 248484 - protein, 53 aa, Zea mays
  Clone ID: MRT4577_158204C.1.pep
DRVIKHTGCSIAGSCQNESAKDSSEQFMAVSCEANARKENGSHLLYGNDDKFQ

SEQ ID NO: 248485 - protein, 158 aa, Zea mays
  unsure (1)..(158): unsure at all Xaa locations
  Clone ID: MRT4577_158205C.1.pep
VYCVVXPFVCMVPGVSIPVWGLVYIPTGITCMNFIRNPWSLHLMPFWILFENVMSMHRMRAAVTGLLETARANDWVVTEKVGDLVKDDLDVPLLEPVKPTECVERIYFPELLLALHLLICASYDFVLGSHKYYLYIYLQAFAYVVMGFGFVGTKTPCS

SEQ ID NO: 248486 - protein, 86 aa, Zea mays
  unsure (1)..(86): unsure at all Xaa locations
  Clone ID: MRT4577_158206C.1.pep
MIGASCSTLDTHCTASACTTYIIIYRAPDGCPYKKTTVDRFRCPTDTRRASSGGGCCRXATQGLPWLPRRDVMLNGLTGVVAGLAW

SEQ ID NO: 248487 - protein, 163 aa, Zea mays
  unsure (1)..(163): unsure at all Xaa locations
  Clone ID: MRT4577_158207C.1.pep
STYFPKVGSQPGTPKNRPQVVGIPPKGGPPPRNSPKAKKKGNFPKPPKTRPPLKKKKKKSPQKAPKKTPPKKKKTYLPAKKCLAFKPNFGFKKPLFFPREKIGGFLPKTPAPPPKKFPLKKKTVPLNPLGFKKKKKKKKKKKKKKKKKKXXFKKKKKKKKKST

SEQ ID NO: 248488 - protein, 50 aa, Zea mays
  Clone ID: MRT4577_158208C.1.pep
PFMSCHSSFSSLYCVLIHYRDALNNYKLGNYSSSIPFGLMKRFGIIIEMH

SEQ ID NO: 248489 - protein, 54 aa, Zea mays
  Clone ID: MRT4577_158209C.1.pep
LKAAWVETVKSGKITKVLAIFVLGFSRVTKSHSLTTEEFIDAVVIKFRSRLEAN

SEQ ID NO: 248490 - protein, 56 aa, Zea mays
  Clone ID: MRT4577_15820C.1.pep
LGFNETNQPHFSLNPRVHTTTHQVKVRWRVLTGQVRGVILNKMGLICFKKKKKKKK

SEQ ID NO: 248491 - protein, 107 aa, Zea mays
  unsure (1)..(107): unsure at all Xaa locations
  Clone ID: MRT4577_158210C.1.pep
MLLMVCLVEVSSAPKRQEQILEEELHSPDNKPLIVRDGNRWLMQDIDCSGLCKTRCTAHSIPNLCTKACGTCXVRCKCLPPGTSGNTQLCGACYTDMTTHGNTTKCP

SEQ ID NO: 248492 - protein, 154 aa, Zea mays
  Clone ID: MRT4577_158211C.1.pep
PCGHASGSALWTSSFSVYATQESLGGLKAAVQDLLAGLRRRDDASVQAKVQSYVRLAKNARKQLTKAGRRAAAASGREERECSLVRLLLRARLVAASLLGSALQCLAAVAKQVVTLTPRRSLVSKALQRRSKAVVCEEGQELALERVLIGELER

SEQ ID NO: 248493 - protein, 87 aa, Zea mays
  Clone ID: MRT4577_158212C.1.pep
EKISSGSQITITLYILLLGMAAAAKRLVLITGASGGIGFELAAQLLAKGTYHVFLGARSFEKGNSALQQLRSRNLPDSVEMLLLDVT

SEQ ID NO: 248494 - protein, 99 aa, Zea mays
  Clone ID: MRT4577_158213C.1.pep
IRTSNRTKLMVGTKQWKNQIKTGKNCRKCEMGPFYHHFPGEVANGPFPVTIATGRDMLPFRAGFESPFSEHVFDKIDRLLFFPAVPVEGDGLFYGGEPG

SEQ ID NO: 248495 - protein, 69 aa, Zea mays
  Clone ID: MRT4577_158214C.1.pep
GVAASQFHGQKLGGIFVWLLTRVCFPNKWPLCYVFPCCRCPNLICRYHLAPCSFGHCSPKMAQISAQFC

SEQ ID NO: 248496 - protein, 61 aa, Zea mays
  Clone ID: MRT4577_158215C.1.pep
VIPRVKSASSRLMIILQPVQSQQTILAPPDTRFAHQQHPRHHGRDREPPRNTKVPRAKGQQ

SEQ ID NO: 248497 - protein, 100 aa, Zea mays
  unsure (1)..(100): unsure at all Xaa locations
  Clone ID: MRT4577_158216C.1.pep
MAATHHPASPTGAGKSPSSSPSPPTPVRLAAAQAAAVAXIQPSSPRYFFSSLAASSSPHRRIGIAVDLSDESAFADKWVVQNYLRPGDSVVLLHERPNSV

SEQ ID NO: 248498 - protein, 68 aa, Zea mays
  Clone ID: MRT4577_158217C.1.pep
TSAAAPSGSDPRQGKKVFARGDSFSVSKIWQWRGSKRLPGGLCADDDGLPWAPAAKDRTTNTRQHSDT

SEQ ID NO: 248499 - protein, 386 aa, Zea mays
  Clone ID: MRT4577_158218C.1.pep
MGSSRPAGRTRATKYQSCSEMMGFSCQHRSASLRIFLVSVVLLLTAPAGRCHCYKRIFSFGDSIIDTGNFARSGPIMEYPFGMTYFHHPTGRISDGRVLVDFYAQALQLPLIPPNLPEKDTGLFPTGANFAVYGSTAMPPEYYRRWNHDVRACYLGVQMGWFKQMLQRIAPWDGAKRQILSESLIVLGEIGGNDYNFWFAARRPREQAGQFIPVIVATIGSAAQELIGMGAKAILIPNNFPIGCVPTYLSGYRSGNRADYDEHGCLRWFNDFSQRHNRALRGEVDRLRAQHPGVKLIYADYYGAAMEFVKDPHRFGIGDPLTACCGGDDQPYHINRPCNRAARLWGKPSGFASWDGMHMTEKAYQVISHGVLNGPFADPPFAKWSC

SEQ ID NO: 248500 - protein, 51 aa, Zea mays
  Clone ID: MRT4577_158219C.1.pep
TIKGGVFYFDGGPICNTLPSALPKVKLVYPIKANMSHFMMQADYIGFYARS

SEQ ID NO: 248501 - protein, 36 aa, Zea mays
  Clone ID: MRT4577_15821C.1.pep
IKLILLSALILVSLTHEYIYNNLLFFKNLSHLLYPI

SEQ ID NO: 248502 - protein, 293 aa, Zea mays
  Clone ID: MRT4577_158220C.1.pep
MAASGQAAGAPRRAEREGAALVLLIHDIKINPSATLKHKEKIENEDEDKGFTLQHVDRAKNEEADSLAKAAARDEALPSDVFYHVIGTPAVRSPEGLQITNDSEGHRIVNLIMTEDWRAPITMFLQGYYHPTDINEAKRLKHRSWDFALVEGQLYKKGVSQPMLKCVTETEGVQILREVHSGTCGSHAGPRALAAKVIRQGFYWPAMICAANRVTRSCEACQKFSPRSGSPSQFTKLIAHTWPLQRWGLDIVGPLPTTQGNLKLTFVAVEYFTKWIEARVVSTITSKTAQKFF

SEQ ID NO: 248503 - protein, 68 aa, Zea mays
  Clone ID: MRT4577_158221C.1.pep
SQYTKPQVSIKQCRLYLMAMELRSGSVAHRSTSQPAKVRGLKCKVSLTKKLDINSKRRNVYVFFENGQ

SEQ ID NO: 248504 - protein, 54 aa, Zea mays
  Clone ID: MRT4577_158222C.1.pep
MEMKKIGCAVLVAASATVALDAEVPAQSHSSGSAAVASDIVGAAVVSVVGYNRY

SEQ ID NO: 248505 - protein, 63 aa, Zea mays
  Clone ID: MRT4577_158223C.1.pep
GSISYVHVSIHPHYRIDETHFVVLSSCFGEKTACIHLALTMYFQNFVQISFTEFASINQTDMI

SEQ ID NO: 248506 - protein, 60 aa, Zea mays
  Clone ID: MRT4577_158224C.1.pep
PAGPRWMILSVNSTSTIGHNKRTQNCSSLKSNYAFSYQAYPEAECHESGLPRGIPTPRFA

SEQ ID NO: 248507 - protein, 252 aa, Zea mays
  unsure (1)..(252): unsure at all Xaa locations
  Clone ID: MRT4577_158225C.1.pep
MASPALISDTDQWKALQAHVSAIHKTHLRDLMTDADRCKAMTAEFEGVFLDYSRQQATTETVDKLFKLAETAKLKEKIDKMFKGEKINTTENRSVLHVALRAPRDAVINSDGVNVVPEVWAVKDKIKQFSETFRSGSWVGATGKPLTNVVSVGIGGSFLGPLFVHTALQTDPEAAECAKGRQLRFLANVDPVDVARSIKDLDPXTTLVVVVSKTFTTAETMLNARTIXXEWIVSALGPQAVXKHMIAVSTNL

SEQ ID NO: 248508 - protein, 108 aa, Zea mays
  Clone ID: MRT4577_158226C.1.pep
GTSRPAAARAPPSAPEALWQKRVPVRRSSSSQAGRKPDELGQRLVMEMYKSVLASRNISGMLQASVAAIAQAGVLLCLISGMPRTARQATLVFHVSLPLWSSVLTCDI

SEQ ID NO: 248509 - protein, 76 aa, Zea mays
  Clone ID: MRT4577_158227C.1.pep
PRVHRVALAHDVACHLQQRLIATLSSGGRKEHISVIGRITDLYEARTHRLLAEAGEPGVRARACNGVVTQHVEEDH

SEQ ID NO: 248510 - protein, 167 aa, Zea mays
  unsure (1)..(167): unsure at all Xaa locations
  Clone ID: MRT4577_158228C.1.pep
MRWRPPPRSGRPPEMERFLCERLLDAEDPIAERFRAFFSLXLRNLRGDAPRPHLXAAKDPSNLLAHGAAFALGQMQDAEAIPDLVAVLKDFSLHPIVFHEGKGRVYNVGGGRTPPLESLGGTTAAGDGMGGTTSASKWRASEDPGPSTTSTSPSISASVRSGSSGRT

SEQ ID NO: 248511 - protein, 81 aa, Zea mays
  Clone ID: MRT4577_158229C.1.pep
MDDEIADVDVNDDTDLWINAADALRAQVNAEEHQEQQDSSSSSGSSSSSSGSESGSGSGSSSSGSDGSDADSASSGGDVDI

SEQ ID NO: 248512 - protein, 177 aa, Zea mays
  unsure (1)..(177): unsure at all Xaa locations
  Clone ID: MRT4577_15822C.1.pep
TRSKFILGIDAVVGDIXILANRSLYVDYTLPYTESGVRMLVPVRDQRQKTAWTFLEPLTADLWFGTGSFVVFTGFIVWFIEHRTNQEFRGPPASQIGTVFYFSFSTLVFAHRERIVNNLSRIAVVVWLFVVLILQQSYTASLSSILTVEQLQPTVTNLDEVIRRGDYVGYLNDSFMP

SEQ ID NO: 248513 - protein, 74 aa, Zea mays
  Clone ID: MRT4577_158230C.1.pep
MGGCHAKPLTQDADGSPPHAAPATPPPGNATPGPGKKHWAVSPFFAFSTPSPSPAHHLFGGSAASPRKSPAPPG

SEQ ID NO: 248514 - protein, 60 aa, Zea mays
  Clone ID: MRT4577_158231C.1.pep
PPQTRAEKPIPGPGKGGKGLAKGGPEGPRKVLGATIQGFPKPAFRRLERRGGVKGFLGFI

SEQ ID NO: 248515 - protein, 77 aa, Zea mays
  Clone ID: MRT4577_158233C.1.pep
KGPPNILYLIFIYFFFFYLYINFFYFFFFFFFFYFIFFLTKTQVMNRIPVLREFQVFQHLVFYSKQQISAWRSPDAW

SEQ ID NO: 248516 - protein, 105 aa, Zea mays
  Clone ID: MRT4577_158234C.1.pep
YLHGDRFFSQAGIVCARLLSIYGLPPFSAEIEWSCMGKEWAPFKSLLVFMVSWFLARLIRMLRVFSGRRSTGTILLLLCASPQLMLSASGRCRSALSRGRGSHPG

SEQ ID NO: 248517 - protein, 65 aa, Zea mays
  Clone ID: MRT4577_158235C.1.pep
MAPLCNAPSGGGPHLRRPGNYHDYSPSYKELEDELLVQGGVVSGPKEAHGGPAAAAAMGPPRGIR

SEQ ID NO: 248518 - protein, 57 aa, Zea mays
  Clone ID: MRT4577_158236C.1.pep
SGTNEQGLSWNDSRCNPTQTNKVLLIFQFYWTGALQSWSSISTSIHQKLIASLAPCI

SEQ ID NO: 248519 - protein, 124 aa, Zea mays
  Clone ID: MRT4577_158237C.1.pep
TSSVRALRCGAVVLSKSKVRAAGGGSGKAVTPEQTKGHSSTRHMLLHPTTNHQLMLQPIHLMRINGLQSGEIIQIKINRRKTSKRRSLEGYRDETPLLFRGIGTCARVAISVDKHINKHINQPK

SEQ ID NO: 248520 - protein, 70 aa, Zea mays
  Clone ID: MRT4577_158238C.1.pep
VAAIIEEEIDAADLSVDPDVAADLLSFVKRHVEAGEKVDLVGLHIRIGEGSLHFFERRHLPLDIKDVSNG

SEQ ID NO: 248521 - protein, 49 aa, Zea mays
  Clone ID: MRT4577_158239C.1.pep
PTGHRHVLVESFGTPTGILPTQPGRPPSRGPDNSFPLCFFIHKQSFPFV

SEQ ID NO: 248522 - protein, 86 aa, Zea mays
  Clone ID: MRT4577_15823C.1.pep
MGLYALYRNATPRVPAKDVADDASKDKAPGEHVVVTIAKLTAATTAPAAAVAEDLVKVHDGHPEEAAKGAAKPAENGAGRSDAEQV

SEQ ID NO: 248523 - protein, 81 aa, Zea mays
  Clone ID: MRT4577_158240C.1.pep
KVLHNRGKSKNIFPVKGLERSTRGGFQFGSCSLIGEELQDSIWRFPFEGGHKVFLLQSFFKYLMGRTYTLGCHYKTWPLLG

SEQ ID NO: 248524 - protein, 59 aa, Zea mays
  Clone ID: MRT4577_158241C.1.pep
REAVDLVDKCIKEIRLRLVVAPQNFVIKIVDKDGAREYARRELVGDNAPAEAATAVVAA

SEQ ID NO: 248525 - protein, 98 aa, Zea mays
  Clone ID: MRT4577_158242C.1.pep
SGSSGVSHQIFQLKGITKGNPLVQQGLVEWSGLPLDLATWKDRKALQQCFPFAPAWGQAGLQEPGNVTPPLPVHTKETTYRGARKRRPNVRTSGPEWA

SEQ ID NO: 248526 - protein, 66 aa, Zea mays
  unsure (1)..(66): unsure at all Xaa locations
  Clone ID: MRT4577_158243C.1.pep
VCGGVFFFFFFFFFFLAEHSFFYGPPALKKXXXLWPGEKFIFPLALPFPKKIPSFFQKGSNAVGVL

SEQ ID NO: 248527 - protein, 70 aa, Zea mays
  Clone ID: MRT4577_158244C.1.pep
LSKAYLSLYHNVHPPSSSPLESIIALARSYNTQLLLLSNKADSSRSVTSAPFKLLPDSDLLRSPLETQHP

SEQ ID NO: 248528 - protein, 79 aa, Zea mays
  unsure (1)..(79): unsure at all Xaa locations
  Clone ID: MRT4577_158245C.1.pep
TTFQQQSSHTFSSNSSSSQPXNMPFTASDICKIILAIILPPVGVFLERGCGADFFINILLTILGYIPGIIHALYIILKY

SEQ ID NO: 248529 - protein, 81 aa, Zea mays
  Clone ID: MRT4577_158246C.1.pep
LFPLYWIVLYILFPVGMLCRDICIQDTRARRRRAEWQRQLSYLPLCGQHCRGMLLYARPILFAFCNSSLISRGLEPTRAPH

SEQ ID NO: 248530 - protein, 104 aa, Zea mays
  Clone ID: MRT4577_158247C.1.pep
PPRGGPFQPKKYPPYFKKGPFTKNNPKGGPSPRGQNPRKGKENLTRPRQINRKGWLRGFGGGEKIPHRARTFGISYLGLGGPPSASGGPGAEMIWWLLTRPYPP

SEQ ID NO: 248531 - protein, 38 aa, Zea mays
  Clone ID: MRT4577_158248C.1.pep
LNQVLASMSMKWTNKSIEYTIQNYEMGRGSPMHCGWLT

SEQ ID NO: 248532 - protein, 59 aa, Zea mays
  Clone ID: MRT4577_158249C.1.pep
KEGPAAPCACFSPAGRRARSCSGSRCTGHAAPAGGLRLRVSRRRVARRRGGWDGIRKGD

SEQ ID NO: 248533 - protein, 120 aa, Zea mays
  unsure (1)..(120): unsure at all Xaa locations
  Clone ID: MRT4577_15824C.1.pep
FHSSAHASAHACGYEQGKQPILKLPESKDDAATHLHAGLGAGYYAGCDGSPPDAANLSMKGDLAYKSTLDRMGKTLNNDGPXAFNRGSLSNCARPGPGNVNLVYTWLQVQKQYVRKATTC

SEQ ID NO: 248534 - protein, 250 aa, Zea mays
  unsure (1)..(250): unsure at all Xaa locations
  Clone ID: MRT4577_158250C.1.pep
KILVYEYLPNKSLDFFIFDENRKSLLDWKKRLAIIEGIAEGLLYLHKHSRLRVIHRDLKPSNILLDSEMNPKISDFGLAKIFSSNNIEGSTTRRVVGTYGYMAPEYASEGIFSIKSDVFSFGVLILEIXSGKRNAGNHDYGDFINILGYAWQLYEEARWMDLVDASLVPMDHSSEIMRCMNIALLCVQENAADRPAMLDVVAMLSNKAKTLAQPNHPAYFNVRVGNEEESTAATASGSINEMTVSVTTGR

SEQ ID NO: 248535 - protein, 115 aa, Zea mays
  Clone ID: MRT4577_158251C.1.pep
MQFVYLQCKKLWCEDAKLFVKLRMSTKALMIIGKRDLGVVASKVGFGINKWGARSEPMRRTNIIMWGVASYSILMRRVVSYCRSAVEPRSVLEHTDHILIFPTRLETRSYTTIVG

SEQ ID NO: 248536 - protein, 45 aa, Zea mays
  Clone ID: MRT4577_158252C.1.pep
QITVASAPSVDDTPVCAIGPRASLAGDAHHEVRESALLVASWAHL

SEQ ID NO: 248537 - protein, 76 aa, Zea mays
  unsure (1)..(76): unsure at all Xaa locations
  Clone ID: MRT4577_158253C.1.pep
MVTNIFALRMLRALCTRDANATMFTQCXQAPIASILSIYVRLIIGSACENTAFEPYRLQQAIATCIIPVSTLVCNN

SEQ ID NO: 248538 - protein, 109 aa, Zea mays
  unsure (1)..(109): unsure at all Xaa locations
  Clone ID: MRT4577_158254C.1.pep
PDLNSRVEPRVRPRVQLASPLSSVRLRVREVAAGFTLVDDRIYMSPSDVDYRXYSTASSXATDYHSLHNAFITYRDVLESKIIPDRXTHRYLCFGSHNFSTEEAMRNPI

SEQ ID NO: 248539 - protein, 118 aa, Zea mays
  unsure (1)..(118): unsure at all Xaa locations
  Clone ID: MRT4577_158255C.1.pep
GPKFTGPRTRPQTEALLGYPFDFTTAGAEEQDEQQLHEHRDNLSTSARAAAMPLAQLPDADQHREIVDNLRKSSTAYYTLQQIVRLLVLFREWREEEQTLIQIRAERKERRRICXTQA

SEQ ID NO: 248540 - protein, 50 aa, Zea mays
  Clone ID: MRT4577_158256C.1.pep
GILPWIKLMLNHCILAMFEVIIHMEYITMALHHVKAKEGGSALRPLAILE

SEQ ID NO: 248541 - protein, 49 aa, Zea mays
  Clone ID: MRT4577_158257C.1.pep
LRWGQYSHMRMQLQDLQKPPKCSESTVNFLSIFFDMSFCCYLDHSYMAN

SEQ ID NO: 248542 - protein, 91 aa, Zea mays
  Clone ID: MRT4577_158258C.1.pep
ININARSLWFSRLSSHGLVVHRKWHLAGSAHRCVPCLHAHAGLCTQYGRDVCKGLHVIARPRQIPPAICHAVACSRRASRVRGMSPPPMRK

SEQ ID NO: 248543 - protein, 207 aa, Zea mays
  Clone ID: MRT4577_158259C.1.pep
MEKKTVVLYPGAGVGHLAPMLELAKALLRHAGDQVDVAIVVVEPPVYADGFAATVARAKASNASVAFHVLPPPASDGDAEPDDDPLTRLLRFLRATNAPLRDFLRALSASRRVQAIVLDMFCAGALDVAADLGLPAYFHFASGAAGLAYFLGLPAMRASVGTSFAELGESTVLSFPGAPPLTVADLPQGVLNDSEACRVIMGAAARM

SEQ ID NO: 248544 - protein, 91 aa, Zea mays
  Clone ID: MRT4577_15825C.1.pep
VAPFRVSFYRGDHMAWRTVFWYKGYKATIKKTLAITAIICPVELRHTPVVMPPGASRAASQIHRCPSRNTPAIAGTLVGCSIPWCVNARAE

SEQ ID NO: 248545 - protein, 47 aa, Zea mays
  unsure (1)..(47): unsure at all Xaa locations
  Clone ID: MRT4577_158260C.1.pep
RGLVGGLVGSVPTLYXIATVWFFYLRVVLHKIHTIHINDINHCWNNL

SEQ ID NO: 248546 - protein, 60 aa, Zea mays
  Clone ID: MRT4577_158261C.1.pep
KPWARLGNLGCDGCKAPGVISVFSGPFSASKSDQVLGPKLKIVVSINCSLSVKAEKGRPL

SEQ ID NO: 248547 - protein, 89 aa, Zea mays
  Clone ID: MRT4577_158262C.1.pep
IVANHLVSPGLSDGKAPSLPEHRHLPGHDLVELPIVSLDARRLDKHPMHVLVQGARVSPFVRDAYPQSVEHGRLVSQTAPPLSVMRTRE

SEQ ID NO: 248548 - protein, 182 aa, Zea mays
  unsure (1)..(182): unsure at all Xaa locations
  Clone ID: MRT4577_158263C.1.pep
GKTLVTYDRHNEKIGFWKTNCSEMWERLISXDAPSPAPSSDTISKTDLSPAPSPSSLPGSXVMNITSQGNSTLIKWGIFPAGSDNAMSNATAMGIIYRLTQHHVQLPENLGNYQLLEWNVQPLSRRSWFQEHAVSILLGILLAILVTLSAFLVVLIWRKKFSGQTAYRPVDSVVPEQELQPL

SEQ ID NO: 248549 - protein, 165 aa, Zea mays
  Clone ID: MRT4577_158264C.1.pep
MAVEAHRLLLAGGHRQQQQQQQLASAGWPWAGADEDRCATTARPSQHHHHQQQQQQQELRLHNASCVGVLAPRVSTIAAGGQMFLGDAAESDVTFGGGGAAARQEVTAVAPAPKRRKRAEQQQTPPVFQVCAADDVAAQFQQHIVDVNRLVFQQVLYYLYHFRLS

SEQ ID NO: 248550 - protein, 268 aa, Zea mays
  unsure (1)..(268): unsure at all Xaa locations
  Clone ID: MRT4577_158265C.1.pep
GIRHQQKLSLTPENYLFRHSKVDGAYCLGVFQNGKDPTTLLGGIIVRNTLVTYDRHNEKIGFWKTNCSEMWERLHIGDAPSPAPSSDTIXXXDLSPAPSPSSLPEFDVGLITVDMSINVTYPNLKPHLHELAELIAKELEIDSRQVRVMNITSQGNSTLIKWGXXPAGSDNAMSNATAMGIIYRLTQHHVQLPENLGNYQLLEWNVQPLSRRSWFQEHAVSILLGILLAILVTLSAXXVVLIWXXXFSGQTAYRPVDSVVPEQELQPL

SEQ ID NO: 248551 - protein, 40 aa, Zea mays
  Clone ID: MRT4577_158266C.1.pep
ETKDRALGGLFFFFFLVSSHFHMLRTTHGHCESPVTCNHS

SEQ ID NO: 248552 - protein, 133 aa, Zea mays
  unsure (1)..(133): unsure at all Xaa locations
  Clone ID: MRT4577_158267C.1.pep
TGVPKKTKPGGGGGPGKPXPAPAGEPSPPDRAGNXSPGPEGAPGFPGGKGNPAPIPQKKKPESKRKKARGPKGGTYPPXGMGQTGGAQGGNPPTPXRKGNRPPPGGGTWRTGXGGICPPPGRGGTPDGPPRGG

SEQ ID NO: 248553 - protein, 135 aa, Zea mays
  unsure (1)..(135): unsure at all Xaa locations
  Clone ID: MRT4577_158268C.1.pep
VQGGAYYAEEPYWARLFQTKHWMDVVLPYRAVNKRGNTGLDAWGYPNFTGEDYQDPGVMKVTMSGPGMILTCSXECVKPTNRFLCIEATTTGLARPVLNAHGREHTCSYSRVSGLWTVAIRRGNHAGAETPDTAG

SEQ ID NO: 248554 - protein, 101 aa, Zea mays
  Clone ID: MRT4577_158269C.1.pep
RSHPATRFGEAKDPGVKASQNHFGRHLLPLPRAQIGFYVPLPLAVSRPAQNREVISQIRVFLGEFCTLGAKRCLPVALLGALWPKSFFACARSVCSLFSSA

SEQ ID NO: 248555 - protein, 106 aa, Zea mays
  Clone ID: MRT4577_15826C.1.pep
GSSPRVLSASMKCTFSLYVPNRRSLYPSCPSTSVVRLPLVVHVRTTPSSETQVPRRRTPLALHRPTAPEDTSIRPPWRSVLVTCVIVQVRCASRMLSMEMLNHCTD

SEQ ID NO: 248556 - protein, 137 aa, Zea mays
  unsure (1)..(137): unsure at all Xaa locations
  Clone ID: MRT4577_158270C.1.pep
IPSPATPPTYSNQQHYLHFNQLTASNSACNLLQLHLPFSHLSTAYPQKILPFNQLTPINSSAYSHLXQLLPFIHLNPIIQSYIITQPQLSPIXINHPLTSNNLLQLLQQLPFNHLSLQNINTLYLQPIILGNLLYNS

SEQ ID NO: 248557 - protein, 51 aa, Zea mays
  unsure (1)..(51): unsure at all Xaa locations
  Clone ID: MRT4577_158271C.1.pep
MPSHKTFRINNKLVNKMRQNRPIPYXIRMRTDHTIRYNAKRRHWHRTKLGF

SEQ ID NO: 248558 - protein, 97 aa, Zea mays
  Clone ID: MRT4577_158272C.1.pep
MASKALFLLAILLLATSAAVLAAAAEQTHENNEKMVARSKDAAAGVMKQQERRGGGSDEYGHACEYGCCHHVFHGGCQKCCPPPPGAAGGRPQEVKN

SEQ ID NO: 248559 - protein, 52 aa, Zea mays
  Clone ID: MRT4577_158273C.1.pep
ITEVVPVSIERAVLFVREIGACLLVITAAGVNSMWREPVELSHVEVLTFGML

SEQ ID NO: 248560 - protein, 352 aa, Zea mays
  unsure (1)..(352): unsure at all Xaa locations
  Clone ID: MRT4577_158274C.1.pep
MGLSGSGAVASIVFLGLCATVSCWPAPPPPEMLHESFAGKSEFRTVNRRRLSSCSNPSQYLSINVSSGGAPLPDEAFLTVTVAGVLRPDADDWVAMITPCSSSVSGCXXLSGVNYVQTGDLAHLPLLCHYPVKAQYMKRDPGYLGCKAAACQKRDASGACSVRTCAATVAFHVINFXRTDVEFVLFSGGFPXPWVPQRSGALRSRVRFRTPCVLKRSGALRFANPASPLYGHLSSTDSTATSMRLTWVSGDGRPQQVQYGGGKSGTSQVATFTRNDMCSSPLLPSPAKDFGWHDPGYIHTAVMTGLQPSQSYTYRYGSDSEGWSDTNTFRMPPAAGSDARARDLDTHAAASR

SEQ ID NO: 248561 - protein, 71 aa, Zea mays
  Clone ID: MRT4577_158275C.1.pep
ISTWIGMHSTIAMKAFLRAEFSSVALGPKEECHCIFLDEEPVHLVSVSHDVGVLYIMTPSCAFMTSSETIT

SEQ ID NO: 248562 - protein, 119 aa, Zea mays
  Clone ID: MRT4577_158276C.1.pep
MIQYNVIGVQGSVPPRHPAASDVGRRARRRGGANSESIGDRFEEKKAARGLGASLQRLGKYREAMRQYSKVLELSKETGEDSGCTEAYGAIADCYTELGDLERAAKVYDKYISRLQPGE

SEQ ID NO: 248563 - protein, 87 aa, Zea mays
  Clone ID: MRT4577_158277C.1.pep
NLPLQKMACPNLLKAALSTMTLLSVPLEASAEMCQPPSSFANMPIFIGVALIGAAVGGLLARQRKAELKRLNNQLRQINAALIRQAQ

SEQ ID NO: 248564 - protein, 65 aa, Zea mays
  Clone ID: MRT4577_158278C.1.pep
KPPPLQCPYSPQETEMGGWGIIHKTKAYFKRFQVKFKIKRPCHTNFKARIKLIYPDQNQFHTTIF

SEQ ID NO: 248565 - protein, 555 aa, Zea mays
  unsure (1)..(555): unsure at all Xaa locations
  Clone ID: MRT4577_158279C.1.pep
LGTSRTAGTLLRARLEHPAHAAQLHARLLISAGARPHPHPVLLTQLVSLYAAAGRLADALRAFRAHLPSANLHTYAVLVSALARPYPDLAFSLFSGSRRQLRPSPHVISAVLAACAGLQPLCGRQVHTCAAKVVPPGDVFVYTGMVDVYAKGGDMESSRKVFDEMLNRGAASWNALLVGYARYKMCLEALSVFRELAAQGREVSLDQVSVSSVLSACAVAGALNYGRQVHACATKVGLELSAVCVSNALLDMYTRCGCSRESSALLNAVGCKDVVTWNIIIRSCIHDNRFKEACVLFRSMVRNGTLPDDVAFATVLQASACMSAWAIGASMHASVVKTGFLYSDGVASSLITMYSKCGCLDDAHRAFVGAKDHLHIMSWTAMITALQQHGHGMQAIDVFENMLENGIPPDHITFVSVLSSCSHSGLXEQGRRYLISMTWVHKITPRNEHYACMVDMFGRAGLLTEAKRFIHQMGPKQDASVLGALLWACMNCRDLEMGKEVAKKLFVIEPGNTGNYVLLANIYTSHGRLEEAKEVRRWMMFQELRKEKGCSLINN

SEQ ID NO: 248566 - protein, 183 aa, Zea mays
  unsure (1)..(183): unsure at all Xaa locations
  Clone ID: MRT4577_15827C.1.pep
MGRRWTTTTIERTLTEAHLKANKEIVRADLNVPLXRAQNITCDTRIRSSFPTVKFLLDKGALVILXCHLGCPXEITPTYSSNALVPHLSELXIVVSSMLSDDCIXVTSCYIGCRFDDSRLLLLENVVFYNEEENNEPEDADRVASVXADLYVHDAFGTGRXAHASSEGVTXFLLXSAAGFLMQ

SEQ ID NO: 248567 - protein, 86 aa, Zea mays
  Clone ID: MRT4577_158280C.1.pep
GGHTHSLLVIKKRHSYKKIRKGPILYKRPLHLSLFSIYLQAPKIWLTVKPPSCYRRPQKLNVRTGTTIPKQKFLYAIGGRFSHIAQ

SEQ ID NO: 248568 - protein, 164 aa, Zea mays
  unsure (1)..(164): unsure at all Xaa locations
  Clone ID: MRT4577_158281C.1.pep
MEVGPTQQRLGDSFSRGWLAKRGARAPSLEHLVADADLGHSFGSSRSSFIDMDPAALFSMRWTATAAPPPESDFEFGLIIPGGVGGGSXPPVPGAGQREPPGHPRRXLVPGDPLFCSARSAPASPSPSPCCGGRAAAAGRRSSWWKMPLQYLRVLLPLYRKVRA

SEQ ID NO: 248569 - protein, 39 aa, Zea mays
  Clone ID: MRT4577_158282C.1.pep
SSNKPETLITRKTLPITALSQAYYRMMCQKIICCLPTRP

SEQ ID NO: 248570 - protein, 65 aa, Zea mays
  Clone ID: MRT4577_158283C.1.pep
THMISIGKTEMAQKYFVQEGRLIILLGVCIFAQGLINTLFLRRPPATQPGMSSRGHSRPTRGRTL

SEQ ID NO: 248571 - protein, 58 aa, Zea mays
  unsure (1)..(58): unsure at all Xaa locations
  Clone ID: MRT4577_158284C.1.pep
SDKSSSIAHVSAQIHSEXNWRAKSSSAALLPEXSXSAAQRVLXXXRALVASLFHGRDL

SEQ ID NO: 248572 - protein, 142 aa, Zea mays
  Clone ID: MRT4577_158285C.1.pep
FRPNLCVRISRETVTAMAAAGGVSTDDVPILQAENLTSNVKSVYYSRTFLSIIGGVVAGIWGFTGLMGFVFYFLIMMVASIGLLAKSKFSVQAYFDSWTRISIEGVFGGLMSFVLFWTVGPFLHEFILDDVYRFAYDIVHIF

SEQ ID NO: 248573 - protein, 39 aa, Zea mays
  Clone ID: MRT4577_158286C.1.pep
FKKKKKKKKKKKKKKKKKKKKKKKKKKKKKKKKKKKHAI

SEQ ID NO: 248574 - protein, 64 aa, Zea mays
  Clone ID: MRT4577_158287C.1.pep
NTYALHIFNPTSVFVVFWLSINVFEVTLLLLIMCNVVQGPYDIKKNILKILFHSIESKFNPYDI

SEQ ID NO: 248575 - protein, 107 aa, Zea mays
  Clone ID: MRT4577_158288C.1.pep
WWLPSFWGPGGVSLFIFPSFFLWPCWPITFVPRAQFVPCLGSAFIGLPFRIFWGVLGTGQVFSARAFCFFRTGWVITSGPGFCSDWGFGLSWHSGASGLWLDKNNRK

SEQ ID NO: 248576 - protein, 121 aa, Zea mays
  unsure (1)..(121): unsure at all Xaa locations
  Clone ID: MRT4577_158289C.1.pep
MDHRVLLLLSLASDAEIAAGGDAEDPLIRQAVPGGDDNDLDVNEESHFLSFAQRFGEAYKDADDDAYRLCDFKANLRRAGRHQRXLDPSAEHADTNDCDVTPPEGRXRSYVVLAECRRRSR

SEQ ID NO: 248577 - protein, 47 aa, Zea mays
  Clone ID: MRT4577_15828C.1.pep
NKTGQRGAGSQGIGAKRPLCHLQGPGGFKVLCKGFNPPPVGKGTLRG

SEQ ID NO: 248578 - protein, 50 aa, Zea mays
  Clone ID: MRT4577_158290C.1.pep
GATPGQSGLPAEFKHIITRRRRHLRGFPSVRCARLLASLCVPLSARLGWG

SEQ ID NO: 248579 - protein, 57 aa, Zea mays
  unsure (1)..(57): unsure at all Xaa locations
  Clone ID: MRT4577_158291C.1.pep
KKKKKKKKKKKKKKKKKKKKKKKKKKKKKERPSLKXSRLSFSRPPRCLTPSWGGPYL

SEQ ID NO: 248580 - protein, 40 aa, Zea mays
  Clone ID: MRT4577_158292C.1.pep
SSICIDTKKGMLKIRFKEVLVFAISCGPDTSKSNSRENGT

SEQ ID NO: 248581 - protein, 68 aa, Zea mays
  Clone ID: MRT4577_158293C.1.pep
ALCLQAPRLSELVLSYPCACLGWNYSFSTGQFLPVPHGTLSPCSSMWSMLPPWGALSLAQLFSHSVLC

SEQ ID NO: 248582 - protein, 74 aa, Zea mays
  unsure (1)..(74): unsure at all Xaa locations
  Clone ID: MRT4577_158294C.1.pep
GRHLDHGVLLAGYGASAFAPIRLKDKPYWIINNSXGENCRHNVYYKICRGSNDRNKCGVYSMLSTESAVHASNE

SEQ ID NO: 248583 - protein, 34 aa, Zea mays
  Clone ID: MRT4577_158295C.1.pep
IFIELVINLIISRQKKWDENSMLSIECYSRKKKT

SEQ ID NO: 248584 - protein, 122 aa, Zea mays
  Clone ID: MRT4577_158296C.1.pep
KTLLFYYNGSAGTGASVRSAPVSEYYGWEKLPNMLVARQDGSPCASLNSVSLHAGEFTSSRRPFLESREQRAPIRQTNIQRLHRRRRNTDLTARGPDLSRLGHSNGGRPRPLPAAASRGVFL

SEQ ID NO: 248585 - protein, 120 aa, Zea mays
  Clone ID: MRT4577_158297C.1.pep
GGESCSFIVVPRVLSPAAKEGARAGLRTHSRGWSSILAVVCGAGACRRHGHRRGVHGGAGDMNADKTECADHLLGLAPCLLYLLGQARAPPPDCCCGLRQVLRKSPKSLCLLIKDKVYLN

SEQ ID NO: 248586 - protein, 369 aa, Zea mays
  unsure (1)..(369): unsure at all Xaa locations
  Clone ID: MRT4577_158298C.1.pep
MGANCCIAAKERTQPCITPIEVSAYRNVRRSPSWNIRWDNRTHIEDIMDIPTLFSNHSSGSIHPHTKSGSVAPTEGFSNGNSLGTSPSNVFHGAKWHKSDKKMEARKVTKSDSRANRSTASNSSPETKLSRKSLHWSPXEAGREGLHSSSMLSVCSNDLSAAGSYAESSDGWSMRTFSEMVATSQRERWSLDSELLGSISSKVTRTSASNSTTLPPEQEVCKLCLKLLKERSTWNAQELAVVAVLLCGHVYHADCLDSITTEADKYDPPCPVCTHGEKCTVKLFGKLESKVKNKIPKNVAADINPDGNSNKHQKKGRREPRLGTSSSMKVPFSRPFLRRHFSIGSRPPRSVSETDSTRKKGFWARHWRE

SEQ ID NO: 248587 - protein, 105 aa, Zea mays
  Clone ID: MRT4577_158299C.1.pep
LRPSHLTTIGFYSTLSQCLAQNPFFLVESVSETDRGGRDPMEKCLLKNGRLNGTFMLELVPNLGSLLPFLWCLLLLFPSRLISTDTFFGILFLIFDSSLTNPRVR

SEQ ID NO: 248588 - protein, 59 aa, Zea mays
  Clone ID: MRT4577_15829C.1.pep
GLGASGASSVCVATRTEGAVRWGHVGASSGDRDRKREAASIGKGESSIAATRDAICPAG

SEQ ID NO: 248589 - protein, 57 aa, Zea mays
  unsure (1)..(57): unsure at all Xaa locations
  Clone ID: MRT4577_1582C.1.pep
TACIYSRILMDCRMEVSSSSVYMLMYTTWPRVAACVCVWYYIYNCQLTDAIXKKIII

SEQ ID NO: 248590 - protein, 658 aa, Zea mays
  Clone ID: MRT4577_158300C.1.pep
MVVAAASRHIPTPQAHWQMTGSSYACTCTAFRSISTKLAARSSGGRRSAVAPSAGGPPLPPPPPVVMAGAVASPGKRIPPSPIGCTSRAASGVAVSASATVAAPASSSRQAKEDDGASRNVSGFEPSIWGDFFLTYSSPLATSSLHKAWMVHRAEQLKEQVAAKLVAASSSACSLHRRIHLIHVLERLCLDHLFEDEISDMLARMNDVDVSGCDLQTVAMWFYLLRKHGYSVSSDVFAEFRDEQGGGFTANSARDLLSLHCAACLATRGETILDEAISFTAKSLKSTAPYTGAASLACEIKRALEIPLPRRVRIYEAKSRIAEYGREAEADELVMELAKLNYNLVQLQYQQELKIITRWWNGLELQSRLSFARDRVVECYFWIVGVYFEPSYSRARIILTKVIAIVSLLDDTYDVYGTPQECELFTECIESWDPAVAGGLPENMKFIFGKILDTYQSIEEELAPEEKYRMPYIKNFIIDLVRAYNKEVRWREQGYVPATVEEHLQVSARSGACHLLSCASFVGMGDVAGEEAFEWVCSVPKLVQALCIILRLSDDLKSYEREKMAPHVASTIESCMREHEVPLEVARVKIQEMIDETWKDFNEEWLNMNKHQPAELLERIFNLTRTMVYMYKNDDAYTNCHVIKDTINSLFVEPVFIA

SEQ ID NO: 248591 - protein, 154 aa, Zea mays
  Clone ID: MRT4577_158301C.1.pep
MGANCCIAAKERTQPCITPLEVSAYRNVRHSPSWSFRWDNRTHIEDIMEIPTLFSNHSSGSIRPDTKSGSIAPTEGFSNGNSLGTSPSNVSHGTKWHKSDKKMEASKVTKADPRADHPTASNSSLEAKLFMNHWTCCCFRFEDIRGADSSFLRG

SEQ ID NO: 248592 - protein, 231 aa, Zea mays
  unsure (1)..(231): unsure at all Xaa locations
  Clone ID: MRT4577_158302C.1.pep
MVAAASTTQAHWQMTGSSYACTCTAFRSISTKLAARSSAGRRSRGRRSAVDPSAGGPPLPPPPVVIAGAVASPGKRMPPSPIGCTSRAATASSSRQAKEDDGASRNVSGFEPSIWGDFFLTYSSPLATSSLHKAWMVHRAEQLKEEVAAKLVAASSACSLHRRIHLIHVLERLCLDHLFEDEISDMLARMNDVDVSGCDLQTGGMWFYLLRKHGYMVSSDVFXAEFRDEQG

SEQ ID NO: 248593 - protein, 64 aa, Zea mays
  unsure (1)..(64): unsure at all Xaa locations
  Clone ID: MRT4577_158303C.1.pep
XLRNLSADTKAGLLLFHAVPFHYSLVSLKSNIFPINTLATDGFARNFYSLCITPLIFFFFIISF

SEQ ID NO: 248594 - protein, 200 aa, Zea mays
  Clone ID: MRT4577_158304C.1.pep
GIRHEALIRDRDITTPDFVFYSDRLIRLVVEHGLGHLPFTEKQVITPTGSVYMGVDFCKKLCGVSIVRSGESMENALRACCKGIKIGKILIHRVGDNGQQLVYHKLPMDIAERHVLLLDPVLGTGNSVAQAIDLLIRKGVPEDRIIFLNLISAPEGIQCICKRFPSLKIVTSEIDYGLNEEFRVIPGLGEYGDRYFGTDN

SEQ ID NO: 248595 - protein, 127 aa, Zea mays
  Clone ID: MRT4577_158305C.1.pep
AQLLCGHVYHADCLDSITTEADKYEPPCPVCTHGEKCTVKLFGKLESKVKNKIPKNVAADINPDGNSNKHQKKGRREPRLGTSSSMKVPFSRPFLRRHFSIGSRPPRSVSETDSTRKKGFWARHWRE

SEQ ID NO: 248596 - protein, 490 aa, Zea mays
  Clone ID: MRT4577_158306C.1.pep
MPDKAVDDVMEAAVGAHFSGLRLEALRLSTSAPSSPSSSPAAAAHTHSNGAVYANGTTELPSPAAARQPFVIGVSGGTASGKTTVCDMIIQQLHDHRVVLVNQDSFYRGLTAEESAHAQDYNFDHPDAFDTEQLLECMGQLKCAQPVNVPIYDFKKHRRCSESFRKVNASDVIILEGILVFHDQRVRNLMDMKIFVDTDADIRLARRIRRDTVERGRDISSVLDQYGRFVKPAFDDFVLPSKKYADVIIPRGGDNHVAVDLIVQHIRTKLGQHDLCKIYPNVHVVQSTFQIRGMHTLIRDRDITTPDFAFYSDRLIRLVVEHGLGHLPFTEKQVITPTGSVYMGVDFCKKLCGVSIVRSGESMENALRACCKGIKIGKILIHRVGDNGQQLVYHKLPMDIAERHVLLLDPVLGTGNSVAQAIDLLIRKGVPEDRIIFLNLISAPEGIQCICKRFPSLKIVTSEIDYGLNEEFRVIPGLGEYGDRYFGTDN

SEQ ID NO: 248597 - protein, 119 aa, Zea mays
  Clone ID: MRT4577_158307C.1.pep
PSIGPYIHEGHTVSVRLLLLLSCNQGLQQPYLAWYKRPCYSTIMDLLGPALACALHQYPNIMAGRNFTNMLVARQDGSPCASLNSVSLHAWGVHLLSKTLPVKRHSINKCCCPFQNVQG

SEQ ID NO: 248598 - protein, 566 aa, Zea mays
  unsure (1)..(566): unsure at all Xaa locations
  Clone ID: MRT4577_158308C.1.pep
MPDKAVDDVMEAAVGAHFSGLRLEALRLPTSAPSSPSSSPAAAAXRTPTEPSTPTAPXLPSPAAARQPFVIGVSGGTASGKTTVCDMIIQQLHDHRVVLVNQDSFYRGLTADESAHAQDYNFDHPDAFDTEQLLECMGQLKCAQPVNVPIYDFKKHRRCSESFRKSICNFIFDPSLSAPEEKGRPGAVVKAVSLSHRVTDSKQXSTFDGGRLASVYPFLRPLVRGLSLSSLEGNLXKTTKLEVNASDVIILEGILVFHDQRVRNLMDMKIFVDTDADIRLARRIRRDTVERGRDISSVLDQYGRFVKPAFDDFVLPSKKYADVIIPRGGDNHVAVDLIVQHIRTKLGQHDLCKIYPNVHVVQSTFQIRGMHTLIRDRDITTPDFVFYSDRLIRLVVEHGLGHLPFTEKQVITPTGSVYMGVDFCKKLCGVSIVRSGESMENALRACCKGIKIGKILIHRVGDNGQQLVYHKLPMDIAERHVLLLDPVLGTGNSVAQAIDLLIRKGVPEDRIIFLNLISAPEGIQCICKRFPSLKIVTSEIDYGLNEEFRVIPGLGEYGDRYFGTDN

SEQ ID NO: 248599 - protein, 436 aa, Zea mays
  unsure (1)..(436): unsure at all Xaa locations
  Clone ID: MRT4577_158309C.1.pep
MGANCCIAAKERTQPCITPLEVSAYRNVRHSPSWSFRWDNRTHIEDIMEIPTLFSNHSSGSIRPDTKSGSIAPIEGFSNGNSLGTSPSNXMLTRTKWHKSDKKMEASKVTKADPRADHPTASNSSLEAKLSRKSLDMSSVASDLKTXGSVPSTPPLVSRADSSSSRGHSXPMIQDSMMKLQRSPWYQLYGAVSDSKIPSLISLKETSSPELRPSSXILSFCSNDLSAALASADCSEEMSMLTFFVLVLNIKSPEITPNSELLXNIPSKVARTXXDSNSTTPPLEHEVYMLPSNLLKXTSTWSCQELAFGAVRCCEHVYHYDCRDSITMEADKYDPSCPLCTHGEKCILKLFRKLESKVKTKMPKYVAADINIDLDSTRKQHTVRIVARLGRSSSMKVPFSRPFLRRHFSIGSRPPRSVSETDSTRKKGFWARHWRE

SEQ ID NO: 248600 - protein, 196 aa, Zea mays
  unsure (1)..(196): unsure at all Xaa locations
  Clone ID: MRT4577_15830C.1.pep
MSPTMASSLCVFAAMSGASGRPSAGGSAVPSRLSSSTQGGKGKRAVVQPLAASVVTETPAPAVAPARPVVDAPPRRRGGRGTVEHAAWKSVRQERWEGALELEGELPLWLDGTYLRNGPGLWNLGDYGFRHLFDGYATLVRVSFRDGQAVGAHRQIESEAYKAARAHGKVCYREFSEVPKGGGXFLSHVGQLRTLF

SEQ ID NO: 248601 - protein, 431 aa, Zea mays
  Clone ID: MRT4577_158310C.1.pep
YKEWFHCQPCITPIEVSAYRNVRRSPSWNIRWDNRTHIEDIMDIPTLFSNHSSGSIHPHTKSGSVAPTEGFSNGNSLGTSPSNVFHGAKWHKSDKKMEARKVTKSDSRANRSTASNSSPETKLSRKSLDISSVASDLKTSVSVPSTPPLVSRADPSSSKGHSQPTDSDSMKKAWRSPGYQLYRQVSDSKIPSLRSLNEIRSPEGRPPSSMLSACSNDLSAAGSYGESSDGWSMRTFSEMVSTSQRERWSLDSELAGSISSKMTRSSAWSSTTCPPDQDGCKLCLKLLKERSTWNAQELAVVAVLLCGHAYHADCLDSITTEADKYDPPCPVCTHGEKCTVKLFGKLESKIKNKIPKNVAVDINLDGNSSNKHQKKGRREPRLGTSSSMKVPFSRPFLRRHFSIGSRPPRSVSETDSTRKKGFWARHWERVE

SEQ ID NO: 248602 - protein, 99 aa, Zea mays
  Clone ID: MRT4577_158311C.1.pep
LTTFLLNSFRFSKIEYKYVTFKIQILQTTSDDEKSVKIKVVELQKLFIFVVDNFFIRIRLGSQISNLHTNGCNMHYRNPRLCRVLYSRTRGRTRGRTRG

SEQ ID NO: 248603 - protein, 437 aa, Zea mays
  Clone ID: MRT4577_158312C.1.pep
MGANCCVAAKERTQPCITPIEVSTYRNVRRSPSWNIRWDNRTHIEDIMDIPTLFSNHSSGSIHPDTKSGSIAPTEGFSNGNSLGTSPSNVFHGAKWHKSDKKMEARKVTKSDSRADRSTASNSSPETKLSRKSLDISSVASDLKTSVSVPSTPPLVSRADPSSSKGHSQPTDSDLMKKAWRSPGYQLYRQVSDSKIPSLRSLNEIRSPEGRPPSSMLSACSNDLSAAGSYGESSDGWSMRTFSEMVSTSQRERWSLDSELLGSISSKMTRSSASSSTTRPPDQDVCKLCLKLLKERSTWNAQELAVVAVLLCGHAYHADCLDSITTEADKYDPPCPVCTHGEKFSVKLFGKLESKIKNKIPKNVSVDINLDGNSSNKHQKKGRREPRLGTSSSMKVPFSRPFLRRHFSIGSRPPRSVSETDSTRKKGFWARHWERVE

SEQ ID NO: 248604 - protein, 166 aa, Zea mays
  unsure (1)..(166): unsure at all Xaa locations
  Clone ID: MRT4577_158313C.1.pep
WRXSLAPXLALXWCXFLXXXXXXXXXXXXXCRSXVSXSXXPXXRXPWPXCPXXFSPLGXVLAXXGXXVGVXXRXXXGLCRGAVPRPAPAAXXWLWXXEKKKISAPPPHSRLVQNQDAVHDVESXXAXEDGAGXXAXVSPPPXPRRRPRSLFXXLTPPPLQPRAEKS

SEQ ID NO: 248605 - protein, 272 aa, Zea mays
  unsure (1)..(272): unsure at all Xaa locations
  Clone ID: MRT4577_158314C.1.pep
MPSHQPTAGMMAVDPDYVKQPSSMASTSEPNRNPKYDPKKPHITDTPITKSNWYKHVNWLNVTFIIGIPLAGCIAAFWTPLKWQTALWAVIYYFWTGLGITAGYHRLWAHKSYNASLPLSVFLALVGGGAVEGSIRWWSRDHRAHHRYTDTNKDPYSVRKGLLYSHLGWMVMKQNPKRIGRTDITDLNEDPXVVVWQHKNYIKVVIFMGLIFPSAVAGLLWNDWKGGFIYAGILRIFFVQQATFCVNSLAHWLGDQPFDDRNSPRGHVITAL

SEQ ID NO: 248606 - protein, 243 aa, Zea mays
  unsure (1)..(243): unsure at all Xaa locations
  Clone ID: MRT4577_158315C.1.pep
PRNLGSIRHSSAAAMAAIFSASGRRLLSTAAAAAEFPVPMARIRNLARVGRLDDIDAAVAPLVPTNPKAVISALSVVGLSDRASAILSTIPSPTAEHLNALLAPLLRRRRLAERVPALLDAHPSAPRDAFTWSILAKSLCITKGADHAVYLLHGEEPPSLHLYTAIIDSYYKQKKPHRAEELWREMVEERGIAPDSAAYNVRITYKSSTGTVEEVQELIRAMGEEXGLRPDVISYNGXDPGAW

SEQ ID NO: 248607 - protein, 66 aa, Zea mays
  Clone ID: MRT4577_158316C.1.pep
FGSRTRRVPASCLLWLVGTAARPPVPYARGGTLCQYLVTATNYQLQEDATANRWRWIITHKQAVPC

SEQ ID NO: 248608 - protein, 71 aa, Zea mays
  Clone ID: MRT4577_158317C.1.pep
SVHRCRRNGSMQPTERQRTCALDTRLVPESTQAPTAHLWKVDRSVARALGIPVDLNPAEIQRGGAILWAIR

SEQ ID NO: 248609 - protein, 35 aa, Zea mays
  Clone ID: MRT4577_158318C.1.pep
GREGGVTRVQEKLHFSGLNIKTLQPLGSLVEADET

SEQ ID NO: 248610 - protein, 382 aa, Zea mays
  Clone ID: MRT4577_158319C.1.pep
MGSSGADTSSKPNKASAPQEQQQPATSGAATPAVYPDWSSFQAYPPIPPHGFFPSPVASSPQGHPYMWGAQPMIPPYGAPPYVMYPPGVYAHPSMASGAHPFTPYAITSPNGNADATGTTAVACDTDGKPSEGKDKSPTKRPKGTLGSLNMLTGKNPSEHGKTSGASANGATSQSGESGSDSSSEGSEGNSHNDSYKHSGQEQDGDVRSSQNGASRSPSEGKFNQAMAIMPMPSSGPVTGPTTNLNIGMDYWANTASSAPVIHGKVTPTTVPGAVVPAEQWIQDERELKRQKRKQSNRESARRSRLRKQAECEELAQRADVLKQENASLRDEVNRIRKEYEELLSKNNSLKEKLEGKQHKTDEAGLNNKLQHSGNDIQKKGN

SEQ ID NO: 248611 - protein, 66 aa, Zea mays
  Clone ID: MRT4577_15831C.1.pep
RLLISPSTRGFKVCRKTNLGLGPINLPPHWVFKKGACDIAWGFPTREKLYFPVGWGPIWARILNGG

SEQ ID NO: 248612 - protein, 89 aa, Zea mays
  Clone ID: MRT4577_158320C.1.pep
QQRQSLLWIPSRHQRAAALGAHTNTRRILRSVCSTGHNNTMGACTFLQATDGENPPGSPVTRCEGRCCLTARCGSSLAARGRPMPRKRQ

SEQ ID NO: 248613 - protein, 199 aa, Zea mays
  unsure (1)..(199): unsure at all Xaa locations
  Clone ID: MRT4577_158321C.1.pep
MGSSGADTSSKPNEASAPQEQQQPATSGAATPAVYPDWSSFQAYPPIPPHGFFPSPVASSPQGHPYMWGAQPMIPPYGAPPYVMYPPGVYAHPSMASGAHPFTPYAITSPNGNADATGTTAVACDTDGKPSEGKDKSPTKRPKGTLGSLNMLTGKNXSEHDKISGASANGATSQXGESGSDSSSEGSEGNSHNDLYHSG

SEQ ID NO: 248614 - protein, 90 aa, Zea mays
  Clone ID: MRT4577_158322C.1.pep
IRLEGALYSVFVAMHLTAGVPGLMSVLALAYIANLYGALTHYSSGHSAIYSGAGYADLPDVYKLGFITAAIDAAIWRVAGALWCKFLGLY

SEQ ID NO: 248615 - protein, 382 aa, Zea mays; identical to SEQ ID NO: 248610
  Clone ID: MRT4577_158323C.1.pep

SEQ ID NO: 248616 - protein, 376 aa, Zea mays
  unsure (1)..(376): unsure at all Xaa locations
  Clone ID: MRT4577_158324C.1.pep
MGSSGADTPSKEQQPPATSGAAIPPVYPDWSSFQAYPPIPPHGFFPSPVASSPQGHPFMXGAQAMIPPYGTPPPYVMYPPGVYAHPSMPPGAHPFTPYAITSPNGNADATGTTVAAGNTDGKPSEGKDKSPTKRSKGSLGSLNMLTGKNPSEHGKSSGASGNGVTSQSGESGSDSSSEGSEGNSHNDSHHKESGQEHDGDVRSSRNGVSRLQSEGKLNQAMAILPIPSSGPATDPTTNLNIGMDYWANTASSAPAIHGKATSTTVPGAVVPAEQWTQDEHELKKQRRKQSNRESARRSRLRKQAECEELAQRADVLKQENASLRDEVNRIRKEYEELLSRNNSLKEKLEGKQHKTDEAGLNNKLQHSGDDSQKKGN

SEQ ID NO: 248617 - protein, 90 aa, Zea mays
  Clone ID: MRT4577_158325C.1.pep
GTSARARRTLLFRMAAAARVFRGSLVRVSPAAGAKALVAKKAGTVAAAAAAAKNTEAGTTKPRLPTGITKPMPVFDEFYMFFWRTPEVAR

SEQ ID NO: 248618 - protein, 376 aa, Zea mays
  Clone ID: MRT4577_158326C.1.pep
MGSSGADTPSKEQQPPATSGAAIPPVYPDWSSFQAYPPIPPHGFFPSPVASSPQGHPFMWGAQAMIPPYGTPPPYVMYPPGVYAHPSMPPGAHPFTPYAITSPNGNADATGTTAAAGNTDGKPSEGKDKSPTKRSKGSLGSLNMLTGKNPSEHGKSSGASGNGVTSQSGESGSDSSSEGSEGNSHNDSHHRESGQEHDGDVRSSRNGVSRLQSEGKLNQAMAILPIPSSGPATDPTTNLNIGMDYWANTASSAPAIHGKATSTTVPGAVVPAEQWTQDEHELKKQRRKQSNRESARRSRLRKQAECEELAQRADVLKQENASLRDEVNRIRKEYEELLSRNNSLKEKLEGKQHKTDEAGLNNKLQHSGDDSQKKGN

SEQ ID NO: 248619 - protein, 66 aa, Zea mays
  unsure (1)..(66): unsure at all Xaa locations
  Clone ID: MRT4577_158327C.1.pep
APPFLLPLTGXHYFIFLPTARQTAFSHREPQLDPTVPHQLXXXASSSEAQXRLLRRAHWXRQGRLL

SEQ ID NO: 248620 - protein, 184 aa, Zea mays
  Clone ID: MRT4577_158328C.1.pep
EPAGNLSQVQVSHCLLAKSEEIGYRPASRAGPLLPLDGILRPRPRGRRTRAFWPREHGARRLRDNESFSRRNDPADPRPLVPAHTGLRPARRPSEPRRPRPTTPVGGTYYPRSPYIGTSATTPTAPGDIGGYDAPPSPGRDTSPTTPGGGYYGPPSASSDTSPVTPPGGGGARYSTPPSPCSDT

SEQ ID NO: 248621 - protein, 74 aa, Zea mays
  Clone ID: MRT4577_158329C.1.pep
SSPYSAPRRGRRRDGDGDAGEGRKRREWGRGSFSSSLLVRITTSGGGRRRGLKWRQKKPPSRNDISCPAPQPFS

SEQ ID NO: 248622 - protein, 41 aa, Zea mays
  Clone ID: MRT4577_15832C.1.pep
LSGALCAQVCAGDQRQDAGSRSSLCSEAATMGTNFGSWSSA

SEQ ID NO: 248623 - protein, 63 aa, Zea mays
  Clone ID: MRT4577_158330C.1.pep
MSVGSGGDTGALLASDRRLLLYEAPAAAEGDSQEEEQGQLPKRWAIALLCFSAFVLCNMDRGK

SEQ ID NO: 248624 - protein, 84 aa, Zea mays
  Clone ID: MRT4577_158331C.1.pep
IPTQILPSSQKSQIPSNPQILALRSSNRTHPSKQMKRLNDIILIVEHVDDHGKRRCGYRSRGCMPPRVFRTPPRDCLIVVRPPS

SEQ ID NO: 248625 - protein, 89 aa, Zea mays
  Clone ID: MRT4577_158332C.1.pep
NKPSKLSIFSCVVFGCLLQVLSSVDMTFTRCLLLGALDGCRMVLWSLVTGQERTQDNGLDYSLLDLVSYSLRCWLSGCVLVLWSVVFCI

SEQ ID NO: 248626 - protein, 137 aa, Zea mays
  Clone ID: MRT4577_158333C.1.pep
PPPAHQRPPRQAPQPAPQHHQGLQIPVQVLQRRMNTSGVAQGLIKWSGLSSSLATWEDLETLKQTFPNAPAWGQAGSRRRGDVTSRAPQAAEPEGAGAKLDNVGRSKEKEEPAGPRRGTRERKLNQRLLGPEWVNSM

SEQ ID NO: 248627 - protein, 147 aa, Zea mays
  Clone ID: MRT4577_158334C.1.pep
NLERAAYNNPKPPVLRGHGARPGDVFPITQATLVFPFTRGPPPEPNGTLANFCCFLKKALIFLGPFTTPGGGRGGFLFLYSLRWPFPWFFFGRGGGRGLFGLGGGLTGSRGCACGPFGVFNGDFFWGSPPLHRLGLGTWFPRAWGGF

SEQ ID NO: 248628 - protein, 120 aa, Zea mays
  Clone ID: MRT4577_158335C.1.pep
LRGPYVCVSWPPPEPPGDPWVPFKEVLGALEPPGGGFSFRDPEGPPPACGALEPFWDRGPGSGSGGQGGPPKLRAGLFIRRVVSSKGQGGLNFGMGPALFGPRVALKAGRLFPGSAGSPI

SEQ ID NO: 248629 - protein, 222 aa, Zea mays
  Clone ID: MRT4577_158336C.1.pep
LHATGLAIDNLDYIFTVGAPSIINHSCVPNAVLIFDGRTAYVRALQPINKDEEVSISYIETAAVTKKRNNDLKQYFFTCTCPRCVKGFDEDALLEGFRCKSQACDGFLLPNSGNKAEAGSIYKIIKQLERNLYHAFSTTLLHTCETLLKIYLELQDWWTALTYCRLTIPVYERVYPPFHPMIGLQFYTCGKLEWDWFGGRRLTLCPPAACLLLYWSLVFMFI

SEQ ID NO: 248630 - protein, 100 aa, Zea mays
  unsure (1)..(100): unsure at all Xaa locations
  Clone ID: MRT4577_158337C.1.pep
XYIPCLVNVKAVKALKSLRHMEXHRERHCPTDPRPRCLVPLPREYRCPVPXWPHRXDMVWLNDVPHPKXVEYNTEATLCQRTXNYTDWPGSGAQLINELC

SEQ ID NO: 248631 - protein, 48 aa, Zea mays
  Clone ID: MRT4577_158339C.1.pep
EWDTVSKLTTITTTIRVQCNFLICVLKIFYKKKLFMKFYTFYLGENSI

SEQ ID NO: 248632 - protein, 82 aa, Zea mays
  Clone ID: MRT4577_15833C.1.pep
ETSFRTRRGRLSVGFIEAWTLSTPTTSQSTWRAPCQSARPDFEPGNNRTSIAPAGGWCPAQLRPVDLCQVNYLPCRGAKRRG

SEQ ID NO: 248633 - protein, 119 aa, Zea mays
  unsure (1)..(119): unsure at all Xaa locations
  Clone ID: MRT4577_158340C.1.pep
GRDILRTIRSMASNMLRVYDWHITDCQTFPIVLPSVPNLANFGSYSDDMRYTDQDVRRIVRYAEAFGIRVIPEIDMPXVRADSTVLYWILHYATAAIFNAKTSGHTGSWADAYPEIVTC

SEQ ID NO: 248634 - protein, 75 aa, Zea mays
  Clone ID: MRT4577_158341C.1.pep
RRANRELPSLRIGRPLLPNCLLLRSSQSLTGCTFCWRGLLLGCEPRSSRTLSLHAAPFSTKLDCQCSPYTAFNFL

SEQ ID NO: 248635 - protein, 170 aa, Zea mays
  Clone ID: MRT4577_158342C.1.pep
MTQPLLTETHWEVGEKILTFLELFYDWTVALSGVYYPTSPMMLHHIIEIAEHLNNFENDIMLRDTVVPMKSKFLKYWKSIPILYSFAFVLDPRAKIRGFSNALQVLSRYVTTDYSDYFNVIRSELTNMFSKYEIKFGAAKLQRPTHTTSTSRKKTAWGKIYASPEVSEVD

SEQ ID NO: 248636 - protein, 209 aa, Zea mays
  Clone ID: MRT4577_158343C.1.pep
MPLPMRRLAAAPSLPAVHPHDSPAPPSVRLRRQHGRVSMERSSTTTARGVSCVMASGKEHAATTSGDEKKGGLRGKLKKVVLAYSGGLDTSVIVPWLRENYGCEVVCFTADVGQGDVELEGLEKKAKASGASQLVVKDLTEKFVGEYIYPCLRAGAVYERKYLLGTSMARPVIAKAMVDVAKEVGADAVAHGCTGKGNDQVRFELTFYA

SEQ ID NO: 248637 - protein, 182 aa, Zea mays
  Clone ID: MRT4577_158344C.1.pep
MDSQAPLRPPLAFACFIFLCSSFCAANGMYDRVGAAASDGESRRMRLHTDGSRGDAHAWPGYLYTRAVGRCTPQFWSSGAEPWPNIVPQEAAVAKVFGSRSVERYGPRLTLLEATMRTDDAGGSAFVKLVKQGSAALLNAYARRGFPFDSWEVKALLLEALVSEDAAVVQAERFEQANESCV

SEQ ID NO: 248638 - protein, 80 aa, Zea mays
  Clone ID: MRT4577_158345C.1.pep
PWGVIITSEHLTLVQMVSCYTKRSLLPDSFSGGLNCLLNTCDCFSSVVGSGRSLPVFLNSLLPPLFSSLILCSFGTFLSL

SEQ ID NO: 248639 - protein, 562 aa, Zea mays
  Clone ID: MRT4577_158346C.1.pep
MHDPSEIRNLPIDIAFGRLQEWLVDRKRVPHDWRKRLAGIRARIAPAFSALPRNLHPSLLALDPEEIGYLEAKKIYSILLESNTESRNIFGRLTGSAGEWESIIKAYEKDHVFLGEAAQIMVQNVNYDIPYQRKQMQKTQQQLAELDRREADIKRLAALSATRYVEACQELGLQGINVREELIESAKTLPSTFSKILEVLNSDPVSNAMEYYTTFVKDCHTEDKRNSDSVLPKLKDLQANPPSLHVSVYNEIKSSLGEASKSPGFTVIAGEIDSNVAAADDIDWDISVDTNEIDWDIGAVEQPGEESGDGFGSYEIIDANIELAGSENYNVGVSDKSMNKEDLASSESGICWDITADSSEEIASIQNASSVLEQSQSQMIAEDRSLLLEKEYRNNILDDLLEVKSFLTQRLGEMRNADTSSLQHQVQAVSPFVLQQHAPDSLENMLVEISSAISLLTNQKTLDLIMILNSKRFLDRLVSSLEEKKHHEVKLREGLGDLSVKRMELQNALSSSWPKQEAAITKTRELKKLCESTLSSVFDGRPVYIIGEINTLLSSSVSQLAG

SEQ ID NO: 248640 - protein, 163 aa, Zea mays
  Clone ID: MRT4577_158347C.1.pep
LKQVKSFLTQRLGEMRNADTSSLQHQVQAVSPFVLQQHAPDSLENMLVEISSAISLLTNQKTLDLIMILNSKRFLDRLVSSLEEKKHHEVKLREGLGDLSVKRMELQNALSSSWPKQEAAITKTRELKKLCESTLSSVFDGRPVYIIGEINTLLSSSVSQLAG

SEQ ID NO: 248641 - protein, 311 aa, Zea mays
  Clone ID: MRT4577_158348C.1.pep
MHDPSEIRNLPIDIAFGRLQERLVDRKRVPHDWRKRLAGIRARIAPAFSALPRNLHPSLLALDPEGSRVVPPSQRVISVRISPCSCKPYPPAEPRHFLPYLAFLGRSILFSYSICCVECNPFLLVPCLGLEIGYLEAKKIYSILLESNTESRNIFGRLTGSAGEWESIIKAYEKDHVFLGEAAQIMVQNVAPSSPYQRKQMQKTQQQLAELDRREADIKRLAALSATRYVEACQELGLQGINVREELIESAKTLPSTFSKILEVLNSDPVSNAMEYYTTFVKDCHTEDKVQSGLCRTHHLLNTQFSAARNI

SEQ ID NO: 248642 - protein, 70 aa, Zea mays
  Clone ID: MRT4577_158349C.1.pep
GGRNFLTDSMTGGVSDAVKNTAAAPIGRAMPVTKSQDERPTSARVSQAAMGLGDGGKRPLMDEGFCGLWR

SEQ ID NO: 248643 - protein, 63 aa, Zea mays
  Clone ID: MRT4577_15834C.1.pep
RRRPWTCSPHHICSNGSRHGNEPCCIHSAIARSYQCRTPSCSAGCSAISPSAYSSDLDGPRRK

SEQ ID NO: 248644 - protein, 88 aa, Zea mays
  unsure (1)..(88): unsure at all Xaa locations
  Clone ID: MRT4577_158350C.1.pep
MSAYXKRSKDYLINNAAYISTPGKAILAPNESTGTIHKPLFNINIXNLQQNPLTLHDLLFCSPPAHQYIIVIILFQDTLYHKTNDGKP

SEQ ID NO: 248645 - protein, 173 aa, Zea mays
  unsure (1)..(173): unsure at all Xaa locations
  Clone ID: MRT4577_158351C.1.pep
MALSVSSLGDALSHLSLPSTXSTPKPHPAPILCLLSNYRRADILTLRDSAAQSLEEDLPADEVMGDKEEAEEDALTQITLQKNVNHRLPGGFAEQRITATGHRKTDIARDTLQEGTGKAVINYRDDNEYLEGNPMWMXYCKEPLMTLWNENNYDVYVKAHRGGLSSQAQHICL

SEQ ID NO: 248646 - protein, 78 aa, Zea mays
  Clone ID: MRT4577_158352C.1.pep
ANNYRQARHTGHRTGLDTWRKEKHAGMGTSPSSLRRCSLVSCRIVLSVGARTNRTRASLQSRVCTWCDSQDVKRRADM

SEQ ID NO: 248647 - protein, 44 aa, Zea mays
  Clone ID: MRT4577_158353C.1.pep
VQLSSVRETICAHSLHVRAMNCSDSQWPMYIPLEARSKYKLEIY

SEQ ID NO: 248648 - protein, 73 aa, Zea mays
  Clone ID: MRT4577_158354C.1.pep
IGDLDQLGHTQQLDLHNRYILASCPNSRWRHQRARRRRSTSTWKNRSQIRSRDDSRFTTLDGAFPYQVLLTIS

SEQ ID NO: 248649 - protein, 81 aa, Zea mays
  Clone ID: MRT4577_158356C.1.pep
GRATECLEHASGREAKCWKREHLREPQDLHHHASEVPQHRIAGSRGHSHHRKASHVVQAVDAGLSAMWNVMPGHPSSTWPL

SEQ ID NO: 248650 - protein, 264 aa, Zea mays
  unsure (1)..(264): unsure at all Xaa locations
  Clone ID: MRT4577_158357C.1.pep
MASTTDNRGLLLVVAAATVVLAVAAAPAHTPGGNTATPPPPFRTVYAFGDSFTDTGNTRSTTGPYSFGYVSSPPYGATFFHRSTNRYSDGRLVVDFLAEALALPSYLPPYLAVSVSNANANATXGGAAXXSAVAGATAIEHDFFARNNSSIDXTPQSIXTQLXWFDAHLAPVXSSSSAAAAADALFXWVGEIGANDYAYTVVARDTIPPKLVRTMXRPEGHRPSSRAWLERGAYNFDLFATGGSPQVTTACARPAEYVNWDGST

SEQ ID NO: 248651 - protein, 234 aa, Zea mays
  Clone ID: MRT4577_158358C.1.pep
MASTTDNRLDLGLLLLLVASATVVLAVAAAPAHTPGGNTATPPPPFRTVYAFGDSFTDTGNTRSTTGPYSFGYVSSPPYGATFFHRSTNRYSDGRLVVDFLAEALALPSYLPPYLAVSVSNANATAAGAGVNFAVAGATAIEHDFFARNNLSIDVTPQSIMTQLGWFDAHLLRSSSSSSVNRQSYAPRLRRALSHLLRLRRRRLQLRPLRHLRRRRSPRPARAPPSTSTGTAST

SEQ ID NO: 248652 - protein, 74 aa, Zea mays
  Clone ID: MRT4577_158359C.1.pep
QISNSYSTVNNNSRNNQLLTDKGPKLNFSDLAGAARTRTPSTTNYDVHSPTWGDGKPAHPPCAMRATDLGHRTS

SEQ ID NO: 248653 - protein, 184 aa, Zea mays
  unsure (1)..(184): unsure at all Xaa locations
  Clone ID: MRT4577_15835C.1.pep
FSCTAINENAQKVINXRKGKNISTRPPPTTSTLPISKIFQDNXRIKHHCMTEFIHLTHTIDAHXNVRTRKHNGQLMSDNFXSPTKDRXQHWIXHPRXFELIXHDDTEPXKREVEQIYHLAWPASPIFYKHHXVKTIKTXVIDTLNMLRLVKRVGVXILLTKTSXLHXDTLEHPXTETYLXNVNP

SEQ ID NO: 248654 - protein, 58 aa, Zea mays
  Clone ID: MRT4577_158360C.1.pep
IFFVFFFFFFFFFSQHRGRANAYPSTINYDVHSPTWGDGKPAHLPCAMRATDLGHGAS

SEQ ID NO: 248655 - protein, 484 aa, Zea mays
  unsure (1)..(484): unsure at all Xaa locations
  Clone ID: MRT4577_158361C.1.pep
MAYYLEAVDLGVWRVTHDGMKPHKNPKKLTTSDKKEIHSNTRAKNCLYESLSMGIFNQVFTLKTANEIWLKLHELHDSTSNVREQKXLHSLKXEYNYFAMKENDLVRGMYSRLNLVINVLNSIGINMLGDANIVRKIISLLPQQRYGSIITILHNLEDLSQMIPTIVIEKIAAFEMSRKMGQEEEPTSSKPYAFACDEHKRVKHKKKAPSSSSSSEEEKEEDENDDEENDQASTSSSEDEEIVRHIGKVKDLLFNIDRKRQKKRMLRMWGEGSLQGQLSKYDRTYKEEEKRQGTHNLVKKNEKLKVKLASSQEAIENLLEKMEILRIHNNELTSKLESIDSTLGASLVEIYEIIKKGASTSSFYLIDDSNPCNQVLVKNVVIETCSNEIAMEGEQLRQEVARLGKALYDKKGKAKQTQPPQDNTTAGVNKRVEGEIVVCRLCHKEDHKSYQCKVKPRESKRKRQQTISPTPTSTRWTKRPLHHI

SEQ ID NO: 248656 - protein, 400 aa, Zea mays
  Clone ID: MRT4577_158362C.1.pep
MASTTDNRLDLGLLLLLVAAATVVLAVAAAPAHTPGGNTATPPPPFRTVYAFGDSFTDTGNTRSTTGPYSFGYVSSPPYGATFFHRSTNRYSDGRLVVDFLAEALALPSYLPPYLAVSVANANANATAAGAGVNFAVAGATAIEHDFFARNNLSIDVTPQSIMTQLGWFDAHLLRSSSSSSAAAAADALFWVGEIGANDYAYTVVARDTIPPKLVRTMAVQRVTAFVEGLLERGAKYVIVQGLPLTGCLPLAMTLARADDRDAVGCAASVNRQSYAHNRRLLAALRALRRRHPAAVLAYADYYAAHLAVMRSPARHGFAEPFRTCCGSGGGAYNFDLFATCGSPQVTTACARPAEYVNWDGVHMTEAMYKVVAGMFFSGDGYCRPAFKDLLAMKARQGKP

SEQ ID NO: 248657 - protein, 383 aa, Zea mays
  Clone ID: MRT4577_158363C.1.pep
PGDSYSCETTAKRIEKFEVRHDSTYMLRIINAALNTAFFLKVAGHTFTVVAADASYTTQYETDVIVIAPGQTVDALMVANASPGPGRYYMAISSYQSAAPLRPGSYNANITTAVVEYVGAAASAGQQAPTPALPEMPEVNDTATANRFYTGMTALVRPGRRTVPLAVDTRMFVTIGLGFVSCDQDQAPCPVVASMNNQSFKLPDADTMSMLDARYRDTPDGVYTRDFPDQPPVAFDYTNQTERLLLGGVAAALLFPGPQSTKVRTLAYNATVEVVLQNTALVGRESHPMHLHGFNFFVVAQGFGNYDTAAKQHFNLVNPQERNTIAVPTGGWAVIRFVADNPGMWFMHCHIDAHLSIGLAMVFEVEDGPNTTLPAPPPDLPRC

SEQ ID NO: 248658 - protein, 82 aa, Zea mays
  unsure (1)..(82): unsure at all Xaa locations
  Clone ID: MRT4577_158364C.1.pep
MLDKLWDDVVAGPRPETGLEKLRKATTARPLVINKDADGGSYKRAQSMPSTPTTPVTLXXXXPXFSPSPLGLISILLTCSLF

SEQ ID NO: 248659 - protein, 67 aa, Zea mays
  Clone ID: MRT4577_158365C.1.pep
SPWPPVYQGMGFGDFLGVWPFVNLFVGYRYHWENANPVSTSTPLLIFCKGEHLTRSCDWRLIQHYNR

SEQ ID NO: 248660 - protein, 96 aa, Zea mays
  Clone ID: MRT4577_158366C.1.pep
MGISRDNWHKRRKTGGKRKPYHKKRKYELGRPAANTKIGPRRIHTVRVRGGNKKYRALRLDVGNFSWGSECCTRKTRIIDVVYNASNNELVRTKTR

SEQ ID NO: 248661 - protein, 65 aa, Zea mays
  Clone ID: MRT4577_158367C.1.pep
MTNSFDSVVFSDDNLLQSFVYACSCWLNPHNFFSLIMMYEVYIYATFFNDLCFARYEPSEKKKKK

SEQ ID NO: 248662 - protein, 62 aa, Zea mays
  Clone ID: MRT4577_158368C.1.pep
QLTTAQNTQPTKATKSCRTTSRRERRSARPSDSLVRRYQSLYLSSPPDLACAATTAAPDGEW

SEQ ID NO: 248663 - protein, 91 aa, Zea mays
  Clone ID: MRT4577_158369C.1.pep
VQKGPPPKFLEPIEPLFRTTRPLIPIPEFKKAPLPNFWKQMNPQLGAGNLHDKVSCPKNPYLTCPKRHRAKTPSFQNNSYLFRKRLNQKPW

SEQ ID NO: 248664 - protein, 194 aa, Zea mays
  unsure (1)..(194): unsure at all Xaa locations
  Clone ID: MRT4577_15836C.1.pep
HTTQHTQHKRSAQPPRHSELLHNAEHTRTTRTRARQRXTHTTXHTTHTNTHTAHYTHTHTQPHTTHIQPQYMNXHSTXTTTSXLHRXXGATXSQQXXTXXTDSTSTTXTTKXTTXANXTAXSTAXPHPXHTXTSPXXTKDRHRSNSTHTITHTTRXSENXXTTXPXTTTSNTXHTKSKSRXTAAPTAXAXTKHQ

SEQ ID NO: 248665 - protein, 67 aa, Zea mays
  Clone ID: MRT4577_158370C.1.pep
ELMLMAGPFWNIGVTPPNTTTGGRLLEVCASSVDSHAEILGYDSLAGGRLDCQHGVVPWDPAGVEAD

SEQ ID NO: 248666 - protein, 118 aa, Zea mays
  Clone ID: MRT4577_158371C.1.pep
STPHRPPLPRRTAAAAAAAARRTPAAPGPGSPPAVGPTRAPPRRARRPGTARSSRQARTRAPPARTPRQPGARGGAPPPSAPRPGASGPAPAAPRPAPRRAPPAPAPGPPPPPRTIPP

SEQ ID NO: 248667 - protein, 107 aa, Zea mays
  unsure (1)..(107): unsure at all Xaa locations
  Clone ID: MRT4577_158372C.1.pep
MPCYDHRCGGTRLIVDKLAARTLTGDLEYLXFSRYGRLLXAELKGDYAFIEFREHGDGEEARDQLNDRDANGRFIDEETAKGVPRGPCVSRKYMVRGPPPRTGRGVT

SEQ ID NO: 248668 - protein, 82 aa, Zea mays
  Clone ID: MRT4577_158373C.1.pep
RANSRSCQSQDKREGIVTKSRFQSSESHVHRNQRRRCVFSRFLVTHKYAETSSLRCYNRSRERKRTTSRQTPAMRQKLQGEQ

SEQ ID NO: 248669 - protein, 529 aa, Zea mays
  Clone ID: MRT4577_158374C.1.pep
HASGYGLVGPNGMGKSTLLKLLAWRQVPVPRNIDVLLVEQEIIGDDRSALEAVVAADEELTALRAEQARLEVSNDADDNERLLEVYEKLNLRDSDAARARASKILAGLGFDQAMQARSTKSFSGGWRMRISLARALFMQPTLLLLDEPTNHLDLRAVLWLEEYLCSQWKKTLIVVSHDRDFLNTVCNEIIHLHDKSLHVYRGNFDDFESGYEQKRKEMNRKFEVYEKQMKAARKSGSKAAQDKVKGQALSKAAKEAAKNKGKGKSAADDDDDQKQVAVPRKWRDYSVEFHFPEPTELTPPLLQLIEVGFSYPGRPDFKLSGVDVGIDMGTRVAIVGPNGAGKSTILNLLAGDLTPTEGEVRRSQKLRIGRYSQHFVDLLTMEENAVQYLLRLHPDQEGMSKAEAVRAKLGKFGLPGHNHLTPIVKLSGGQKARVVFTSISMSQPHILLLDEPTNHLDMQSIDALADALDEFTGGVVLVSHDSRLISRVCEDEQRSEIWVVEDGTVNRYDGTFEDYKDELMEEIKKEVEE

SEQ ID NO: 248670 - protein, 79 aa, Zea mays
  Clone ID: MRT4577_158375C.1.pep
ASGFAGAFSFERHVIRWYQVVVGQLQLRCPSSVLSRAIAPVKEAARAEVGGPARHLHGTTADHKRHHDSVWNRRIAVLI

SEQ ID NO: 248671 - protein, 91 aa, Zea mays
  Clone ID: MRT4577_158376C.1.pep
FANDASGTRFGSWRQPLELASELCCCAFLIKSYHGSRFVHLIWRGKNMVCCRAKKHRIKKMLVLSYSVHSFKRKTRLFTVTVEDISVYPIC

SEQ ID NO: 248672 - protein, 68 aa, Zea mays
  Clone ID: MRT4577_158377C.1.pep
IFFLWRFPLKMHKGVKKGFRKNGSNKSFEKENKGIFLFHCGKGDNVNRGDIPGGGRDSFFCIKKVGLF

SEQ ID NO: 248673 - protein, 123 aa, Zea mays
  unsure (1)..(123): unsure at all Xaa locations
  Clone ID: MRT4577_158378C.1.pep
YLITIMLTTKLTHTSTIDAQEIETIXTVLPAIILILIALPSLRILYIMDEINNPSLTVKTIGHQXLXSYEYTDYEELNFDSYIVPTIDLKPGELRLLEVDNRVVLPIETPIRILISSEDVLHS

SEQ ID NO: 248674 - protein, 73 aa, Zea mays
  Clone ID: MRT4577_158379C.1.pep
PTYPAEGFLLYYRYSIYTIDSTIMTNTLSRQNLKIEFSDIQLCLLFHEPPYLSNSFYSLTTVKTTIHNTNFIY

SEQ ID NO: 248675 - protein, 41 aa, Zea mays
  Clone ID: MRT4577_15837C.1.pep
RMEKMEAKKCQMVLLDKKTKNLVMIYKTEPKVIKPYNMKDL

SEQ ID NO: 248676 - protein, 57 aa, Zea mays
  Clone ID: MRT4577_158380C.1.pep
LKADVTAVLTFVFTPDPIANANYHGGAPLHDIAKQIATYNATSPSSLQHKARTTTTT

SEQ ID NO: 248677 - protein, 95 aa, Zea mays
  Clone ID: MRT4577_158381C.1.pep
ITSTDHPYSTDLSTPHFFVPKSFLLSPHNNTILWARAAASSYAGIISDKQGTSAKLADDVRLCQVVVVHRDGGLYRRSHFVLGDRRFAYEIAIRF

SEQ ID NO: 248678 - protein, 46 aa, Zea mays
  Clone ID: MRT4577_158382C.1.pep
FRVVSRYSLSGSFLQSDNSGHHSRTGGPASVPNGCVLVRVVVLSDF

SEQ ID NO: 248679 - protein, 64 aa, Zea mays
  Clone ID: MRT4577_158383C.1.pep
NIVEWFVSIFGVMLFLPILCLSICIAMCRSEVTRNLKLQLEKYLELHQKSKWPLITFLYLKCSL

SEQ ID NO: 248680 - protein, 197 aa, Zea mays
  Clone ID: MRT4577_158384C.1.pep
VKVVHLGPTGHTRLGWATNKADLQTPVGFDAYGFGYRDVDGAKVTKAWRDKYADEGYGEGDVLGFYISLPDGERYEPKQPDLIQYKGMPFHVQVPKEEQKTPDPVPGSEICYFKNGVCQGSAFKDIPGGRYFPAASLYTMPNEPNCVVKFNFGPDFEFFPQDFGSLPVPQPMSEVTHQALEVKNEGPTENGIAEKTS

SEQ ID NO: 248681 - protein, 552 aa, Zea mays
  Clone ID: MRT4577_158385C.1.pep
MADGNAGGAARVLFSILGLALALPLPLLVAGDDPYRFFTWTVTYGDIYPLGVKQQGILINNQFPGPQIEAVTNDNLIINVFNKLNEPFLLSWSGLQQRRNSFEDGVAGTTCPIPPGSNFTYIMQAKDQIGTYYYFPSLAFHKAAGGFGGIRVLSRPQIPVPFPPPAADYTVLIGDWYKANHTDLRYVLDSGVALGFPDGLLINGRGLNGYTFNVQPGRTYRFRITNVGLATSLNIRFQGHTMKLVEVEGSHTMQTTYSSLDVHLGQSYSVLLTADQPGYDYAVVVSTRFTSRIISTTAVLRYANSAGRAPGPLPGGPTIQIDWSLNQARSVRWNLTASGPRPNPQGSYHYGLVPVTRTIRLANSAATIGGKRRYAVNGASYVGPDTPLKVADYYKIGGVFSVGTIADSPPAYGGAAYLRTSVMGASYRDYVEVVFENGEDEVQSWHIDGYAFWVVGMDGGKWSSASRQGYNLRDGVSRYTVQVYPRSWTAIYMPLDNVGMWNVRSENWARQYLGQQFYLRVWTPSTSLRDEYPIPKNALLCGRAAGRRTRPL

SEQ ID NO: 248682 - protein, 91 aa, Zea mays
  unsure (1)..(91): unsure at all Xaa locations
  Clone ID: MRT4577_158386C.1.pep
IYCCVPLPRWVDARWNTSGGMRLILSCTGVLVVGVTSVARERGREQERDRESLRVSVSACLVCQGASTCLRKALDIPFYRYKEXASCIWXV

SEQ ID NO: 248683 - protein, 59 aa, Zea mays
  unsure (1)..(59): unsure at all Xaa locations
  Clone ID: MRT4577_158387C.1.pep
RPRMMVAGSTPNPMGVKVPPNIQTLINQQYSNKSKLKKERGGLHFCWEKKSXTVASAWR

SEQ ID NO: 248684 - protein, 50 aa, Zea mays
  Clone ID: MRT4577_158388C.1.pep
RGKGPWLKRPLLPKGVAPPAILFTMGLIWPKKLEPRNKQIDRRPQLGPVL

SEQ ID NO: 248685 - protein, 46 aa, Zea mays
  unsure (1)..(46): unsure at all Xaa locations
  Clone ID: MRT4577_158389C.1.pep
KRPVRGADAGSLSPATDGDVGRAAYNYMPVRCFRRCPPLKKLCAXK

SEQ ID NO: 248686 - protein, 44 aa, Zea mays
  unsure (1)..(44): unsure at all Xaa locations
  Clone ID: MRT4577_15838C.1.pep
GDKVXVFSQSLTTLDLVEFYLAKLQINGKEGKQWKQGKDRYIWF

SEQ ID NO: 248687 - protein, 36 aa, Zea mays
  Clone ID: MRT4577_158390C.1.pep
TALKCILRVSSCRPFCPKTFFVKKLFLLSLNTIRIF

SEQ ID NO: 248688 - protein, 532 aa, Zea mays
  Clone ID: MRT4577_158391C.1.pep
MAIAADSAADQDPNPIPNEAAGESVELPAYTDHGEPNADLADVDYEDEEELDGVTAEAAARDKVQAVFQRLSEAPVGIRVHDIIIKGNTKTRDALIEAEVVGLIRSAVTVQDLVRTANIAAVRLRLLDVFDSVHVLLDAGPPELPGTTNVIIEVVEAANPIDGSVGCFSKPEARSWTVEGSVRWRNIFGYGDIWDASGAYGWDQSSEISIGVSLPRFRSIPTPSTARASLLSHDWLKFSSYKERLLGLSFGLLSDMHHDLSYNLTWRTLTDPSQSASKSITRQLGHNLLSALRYTYTIDQRDSHLRPTKGYAFVSTSQVSGLWGSKGLRFFRQEFDIRGAVPLGFYNAALNAGISAGVILPLGRGFMESPSSVPDRFFLGGHSSPVISLCSLTSLLGFKTRGVGPTELRRIVPSESVTNESTASPGWDYLGGDFAVSAFADLSFDLPLKLFQDAGIHGHAFLSAGNLAKLSEGEFRNFSFSKFGRTFRSSAGVGIILPTKLLRAEINYRYILKQFERDRGKTGIQFSFSSPM

SEQ ID NO: 248689 - protein, 72 aa, Zea mays
  unsure (1)..(72): unsure at all Xaa locations
  Clone ID: MRT4577_158392C.1.pep
YTFSIRDCHVYSLWPSEELISSSMLTSCRRPAXXMXQRPPPPLYTRTITREVHATQSQRHTSQLSSSLLGGR

SEQ ID NO: 248690 - protein, 107 aa, Zea mays
  Clone ID: MRT4577_158393C.1.pep
RCISFMTRATCRGPRLKHAMLSVTLPPMCDVVFMSRCLSLWWFRVQWRCPTSTLTMWMVGHAFCIQCPLHRLQFAPRPAVWSPCRFSFGSCSQGAICKLPCRSGLCQ

SEQ ID NO: 248691 - protein, 105 aa, Zea mays
  unsure (1)..(105): unsure at all Xaa locations
  Clone ID: MRT4577_158394C.1.pep
HRRATRTTTVPSSWIACKQAQFQERIFTLSIWYTAAQXRIKSLTAAFYRPAXCSVVCYDGNSMRSCDNLNNWRKEYLIQATPSYPDNFPFDILCNIADADGGNSR

SEQ ID NO: 248692 - protein, 138 aa, Zea mays
  unsure (1)..(138): unsure at all Xaa locations
  Clone ID: MRT4577_158395C.1.pep
IRLVVHDQRLVIPDTVALNVKSMDNAYALFRHKAATVRXMRCLIRIESVSQGLVWLGHDATARWLLDSAGELSQALAIATHRAHIPRXRRSRWLEFXKPSTSLPVILCGIGGSKLGVDRAASGALQDMTFLVGVQATM

SEQ ID NO: 248693 - protein, 70 aa, Zea mays
  Clone ID: MRT4577_158396C.1.pep
GILSFKHAILQCSTQLDCLKYFSKNNNKGKIIYLDISYYHLLKPKLMLSYNLNLYNFLSELTRICMYIIC

SEQ ID NO: 248694 - protein, 50 aa, Zea mays
  Clone ID: MRT4577_158397C.1.pep
CGLQPERWDSLISRWYCFDHEIFDTSSWSICIASSIQCLVVIPVFSQCVK

SEQ ID NO: 248695 - protein, 54 aa, Zea mays
  Clone ID: MRT4577_158399C.1.pep
LPFVSWRPLGGLSHMRPRASCQVVLRHFARDQYHKFSSSGHFLWYQKVNGQLLI

SEQ ID NO: 248696 - protein, 204 aa, Zea mays
  Clone ID: MRT4577_15839C.1.pep
MQERERFHSMAAPRGLLALFAVAAAATAAATGVDALGVNWGTMSARRLPPKVMARLLTDNGFTKVKIFDADERTMKGLAGTSIETMIAVPNDMLAAVADYDRARRWVRDNVTKYTFDGGVNTKFVAVGNEPFLRAYNGSFDHVTVPALRNIQRALDEAGHGAAVKATVPVNADVYDSPASNPVPSVGRVPSDVGRFMVEKVRFL

SEQ ID NO: 248697 - protein, 49 aa, Zea mays
  Clone ID: MRT4577_1583C.1.pep
DACEQVIAGEQYCDVPIGLHVIRGENDALLGESDREKDQLPGHMTCGSE

SEQ ID NO: 248698 - protein, 280 aa, Zea mays
  unsure (1)..(280): unsure at all Xaa locations
  Clone ID: MRT4577_158400C.1.pep
MAGMAPEGSQFDAKNYDSKMQELLNQGETEEFFTSYDEVHESFDDMGLQENLLRGIYAYGFEKPSAIQQRGIVPFCKGLDVIQQAQSGTGKTATFCSGILQQLDYGLVECQALVLAPTRELAQQIEKVMRALGDYLGVKVHACVGGTSVREDQRILASGVHVVVGTPGRVFDMLRRQSLRPDNIKMFVLDEADEMLSRGFXKDQIYDIFQLLPXGKIQVGVFSATMPPEALEITRKFMNKPVRILVKRDELTLEGIKQFYVNVEKEEWKLDTLCELYETL

SEQ ID NO: 248699 - protein, 384 aa, Zea mays
  Clone ID: MRT4577_158401C.1.pep
MYFCVFGFLKRHIIKQIGSRRIRKPFQIVGEDRSTAAADDYIYEDDSVKRSILSSPLVEFSSVYSATNNFSEKLGEGGFGPVFKGILPDGQEIAIKRLSKTSAQGLEEFKNEVTVLSKLQHRNLVRLFGCCVHGEEKMMVYEYMPNKSLDSFIFNESKRLVLGWSLRYKIIQGIGRGLLYLHQDSRLKIIHRDLKASNVLLDDDFSPKISDFGMARIFGEHQLQDLTRRIVGTYGYISPEYAMEGKFSDKSDVFSFGVLVLEIVSGRRNSSLLDDEWSMNLLGYAWTLWKEGSVSELIDPLMGATYAYDEACRCVQVGLLCVQEVPAERPAMPLVLRMLSGDAAIPSPKQAAFFVGRAPRLPPADDSSNTESGNQLTCTDLQGR

SEQ ID NO: 248700 - protein, 80 aa, Zea mays
  Clone ID: MRT4577_158402C.1.pep
VKVGQCQASPLCHLAPLLSTPHEEPVSSLVSVRAAIACRVVHPSTGVRTTSIFFHPGHLRRDTMAPKFPYYNTCPSLNFS

SEQ ID NO: 248701 - protein, 176 aa, Zea mays
  unsure (1)..(176): unsure at all Xaa locations
  Clone ID: MRT4577_158403C.1.pep
GGWXFAALSLHVLLCLVSGAYSRRTSSYVRSEFPSTDMPLDSEWFATPKGYNAPQQVHITQGDYDGKAVIISWVTPSEPAPSQVFYSKEENRYDQKAQGTMTNYTFYDYKSGYIHHCLVDGLEYNTKYYYKIGTGDSAREFLFQTPPAIDVDAPYTFGIIGDLGQTFNSLATLQLI

SEQ ID NO: 248702 - protein, 191 aa, Zea mays
  Clone ID: MRT4577_158404C.1.pep
IRHEVEASAEKSIAGWNSLISAFGFHGHGMKSIDLFWKMHDSGMKATKSTFIALLSACSHSGLVDEGWKYYCLMSEKFGITPAPEHHVCIVDMLGRAGRLQEAPKFVESLPSQQTHGIWGALLNACSSRSELKMGESIAKHLLHLEPGNSGYYVTAANLYAYKDMWSGVAQVRSVLQNKGLVKPHGRSTVG

SEQ ID NO: 248703 - protein, 80 aa, Zea mays
  Clone ID: MRT4577_158405C.1.pep
YISSIQQGLVYNAKYYYPLALGRTSILLDIIWLWRPESQNFGDNSTYLSLQHKLSACSSATFSLFLFSFAVVIMADVEEV

SEQ ID NO: 248704 - protein, 73 aa, Zea mays
  Clone ID: MRT4577_158406C.1.pep
MALERLIHVVICIESRVNLPSAVLVLGRGIGATVHWCNGVQEFRPDPPSVPGVFVPPVPGQNPPRSVQALSAS

SEQ ID NO: 248705 - protein, 99 aa, Zea mays
  Clone ID: MRT4577_158407C.1.pep
GQGAPPLNPNMELRGLNQNFPSWKKIFSGRLRETKVFFNKLGNGNKSSPPFLKRKWWGGFTPPKFLGVYYVLMGNLERNPVFSPPGWFYLPKVFPPRGF

SEQ ID NO: 248706 - protein, 228 aa, Zea mays
  unsure (1)..(228): unsure at all Xaa locations
  Clone ID: MRT4577_158408C.1.pep
MKRSPIVSQARQGASASSSEANPNPAVAKVVLSLDPLSSAEPSLQLKMEMPQTRETSTCNLPKSCPLNMFFLLRLFAIAXSCLALPTTPPXVYDTEGNELNSKSNYYILPAKPASGGGLKAIPTGLRCLHFVVEERSETTLLDTPMRFMPLPEHASTTEPIRLSSDIWIRLSSDIWIEFHDLRSFCSERLDWHLTEQVPESSSGEPKHMAAGSEEGLRSFGVFRDGSL

SEQ ID NO: 248707 - protein, 184 aa, Zea mays
  unsure (1)..(184): unsure at all Xaa locations
  Clone ID: MRT4577_158409C.1.pep
MVMTLTRHDSGESKEMEGLRAHSEAALLTLSSTXRAAPAPAPXTGTAAAAEGAFECKTCSKRFPSFQALGGHRTSHTRLQARTLVGDPAERYDDRPAARVHECAVCGLEFSMGQALGGHMRRHRGEGPPPPAAHDDDGDGPAQPDRDMPDLNLPPLDDDDGSQAGSRQSGGGRGSGPQLLNLLV

SEQ ID NO: 248708 - protein, 58 aa, Zea mays
  Clone ID: MRT4577_15840C.1.pep
AGGSPQVLFFLISLGFRDPYESIRNKRCSLSSSPMCKWRNGQVQNVKLALKNKGWYCM

SEQ ID NO: 248709 - protein, 211 aa, Zea mays
  Clone ID: MRT4577_158410C.1.pep
GRPPRPPTRPPRVRLILPFYSFTLFCVILPLTMFVPEAELPVWVICYVPICMSFLNILPSPRSFPFIVPYLLFENTMSVTKFNAMVSGLFKLGSSYEWVVTKKSGRSSELDLLTSEEKNRKCTTLPQLQNQLPENSELVEINVRKEQREKVPNDAKRGNKIYKKELALSLLLLTAATRSLLSAQGIHFYFLLFQGMSFLAVGLDLIGEQIS

SEQ ID NO: 248710 - protein, 72 aa, Zea mays
  Clone ID: MRT4577_158411C.1.pep
RSSSPSSPVYLIIKDATADLSAVCGDESELRPGQHLHDVQVYLVGRRGVHASKGPACIDCSPRADPVSVVQS

SEQ ID NO: 248711 - protein, 105 aa, Zea mays
  Clone ID: MRT4577_158412C.1.pep
TEITPGKGGQCIVKESPHGGSGMFKWRVRRAPLCHGNKQNKPLKKNDKTGKKPLKIACCVGKKKKKKIKAGQPFFFFFFIKKKKNKILVLDKLFFFFFFFTSSVV

SEQ ID NO: 248712 - protein, 64 aa, Zea mays
  Clone ID: MRT4577_158413C.1.pep
RYVPSWATLGLAVYASVLCAESACHCIPFGLCTHLSPGRWVFLSWLPLGTGGKLLVSCGCLHGL

SEQ ID NO: 248713 - protein, 69 aa, Zea mays
  Clone ID: MRT4577_158414C.1.pep
VPSYPFPHNIFLFFLFFLFLTNLTLLLIIFFPFLFYLFYPTNITTITNILHLIYFFLIIPKYLLFFSLF

SEQ ID NO: 248714 - protein, 155 aa, Zea mays
  unsure (1)..(155): unsure at all Xaa locations
  Clone ID: MRT4577_158415C.1.pep
IWDEQDEDLNVSQPVLNEKRMGGLSGENFRCLNRNHFQIDYRVLGLCNNTHLQNLDKQNTKGNLPIRPPASKKTINGHWNHSARSPSLNMRKLFSDRDPHTFNECLHRYQEYXTDXKEFRLKHDFSXTHLXETASSNVTSGEAWLLNSTLHRQPL

SEQ ID NO: 248715 - protein, 299 aa, Zea mays
  unsure (1)..(299): unsure at all Xaa locations
  Clone ID: MRT4577_158416C.1.pep
REAKAAASEEKERSVNERLSQSLSRITVLETQITILRTEQTQLSRSLEKERQRASESRQEYLAIKEEAAIQEGRAKQLEEEIKELRARHKEELQEAAEHRDLLEKDLEREKAARAEIEKTSSREAPXLHFPIKQEMPLSESXSSGSINSLEESHFLQASLDLSDNASLERRMSSESNMSYYLKTMTPSAFESALRQKDGELASYMSRLASLESIRNSLAEELVKLTEQCEKLRTEATAVPGLRAELEALKQRHFQALELMGERDEELEELRNDIVDLKEMYREQVDLLVSQLQALGARV

SEQ ID NO: 248716 - protein, 55 aa, Zea mays
  Clone ID: MRT4577_158417C.1.pep
FWQGGMYPKNQEQGAFRLTWTKSRRNDRRVALTRTSRSDPLDANKKRSVIRTAWA

SEQ ID NO: 248717 - protein, 94 aa, Zea mays
  Clone ID: MRT4577_158418C.1.pep
GPCATMVSPSQSHSRTPPAQTRRVHLAKVMAPMTRPYHAHHRQAVRCRVAWTHNACHSRTHDTRCPWDVVIERVVRESGNSRKWPQLARTNYNL

SEQ ID NO: 248718 - protein, 170 aa, Zea mays
  Clone ID: MRT4577_158419C.1.pep
MEERPSSEAGAGNSRAEDDFRSCCGDEEEWEDTEESFTAGVAKGELDEASVRLFFKGVSSPEAEGKKLSGIGVVMERSPGVPVLKVQKKLDFYVEELVADHLALMDGLLVALQNGITKIFAFTNSEKLYFQIAEAEILEDPRCVSSRTQSSTDGLVGSLLICYWSLALNY

SEQ ID NO: 248719 - protein, 95 aa, Zea mays
  Clone ID: MRT4577_15841C.1.pep
PPPTGPGERAGAETAPGSGGGSCPADRPTLWSGRGWYRCRCRAASRPSLRRCTRPCWRSHSRREEWTSSGSGHKALAAGHGTREPSAGTDGMEET

SEQ ID NO: 248720 - protein, 36 aa, Zea mays
  Clone ID: MRT4577_158420C.1.pep
FFLPLVCTVFPFVDEGIPLANLSRALSVSVLTFPTA

SEQ ID NO: 248721 - protein, 132 aa, Zea mays
  Clone ID: MRT4577_158421C.1.pep
KFFWGGGGFSPHKKSPPPCSCEESALPVVRCPRVFSEAIFWSPPHPKSSFVSCTGGVCGVSVRVPITPSANFVLFRPDSFALVAFRRTSPPASCFALGNLGANALGGDRREFFNCTPMFKDGGLDRSCSLQA

SEQ ID NO: 248722 - protein, 127 aa, Zea mays
  unsure (1)..(127): unsure at all Xaa locations
  Clone ID: MRT4577_158422C.1.pep
RDHCCKTTKELGTEMHPPLNKNPTEAELQYKNNKVYAYENGTIYFSEFLNLMVXRTMKDTDXGVELKEALXLFYNDQDGIMLADELHTVMTKLGEKXLTEKEVDEKIRKAKIXATAQINYQEFYTWF

SEQ ID NO: 248723 - protein, 150 aa, Zea mays
  unsure (1)..(150): unsure at all Xaa locations
  Clone ID: MRT4577_158423C.1.pep
TSFFFFFFFFFFFFFFFFFFFFFFFFFFFTPPPTPLRAKPSPPAAGARGPDPGPQXGEPRPKPGPGGNRXRSQPHTKNEPEAKSQKPGGXPRREPTHXGRAKGPPPXQNGKPHRPPAKRKPPTPGGRGKGKRAPFRVPDHWPPAPGPSAG

SEQ ID NO: 248724 - protein, 45 aa, Zea mays
  Clone ID: MRT4577_158424C.1.pep
TPVTLYHISVPYLVTKMRVCFLANTDLHINYLTLNEAHIIVLKCI

SEQ ID NO: 248725 - protein, 162 aa, Zea mays
  unsure (1)..(162): unsure at all Xaa locations
  Clone ID: MRT4577_158425C.1.pep
MLHLHDYRSDGAMIRFILLHNRKVTTQLLTYYSPLKDSEKRKVEYNTHRVVVNRHPEVTKFSQSHTHQGICRTYAGLFFAXCADITDNEVXYVECIHLIDWILYRLFSTDWELDLRNTYHEAYLILKXFILAGELXQETSKDAKIDSMSGLGNCHDEHQKML

SEQ ID NO: 248726 - protein, 108 aa, Zea mays
  Clone ID: MRT4577_158426C.1.pep
QQPQPMVPKSNSYLTKLSNRSIYKSSPQAGLILLKELGLYVEKRRGKGVTGCCLFPLFPFPAQTPPGQLYQKNSVKCPFVSHLKGLIYFQPIFLKLILGLLGSQLFVN

SEQ ID NO: 248727 - protein, 65 aa, Zea mays
  Clone ID: MRT4577_158427C.1.pep
PSLSRDPSDNQTFFPMSPARPIAAQHASLSSPYPLLRCRWSPWPYIASHLLIGARRKCSGVRSNT

SEQ ID NO: 248728 - protein, 228 aa, Zea mays
  unsure (1)..(228): unsure at all Xaa locations
  Clone ID: MRT4577_158428C.1.pep
ERLPFRYCEKEGRYKGRKFSSVCHFFGYQARXSTPSNFDCDYAYALGRISLHMIAVGLTGYMTTVANLKDPVDKWRCAAAPLIAMMIVMRHLHGPGAIPIGRPSIHPSPIDLKGKAYELLREKASSFLLDDFYRTPGGIQFEGPGSDAKPITLTIENQDYMGDIEILKXYLGKVRTMVKPGCSREILKAAISSMVSVTDVLTVMSHPLNAELPLYHFKLHIFNIMNAW

SEQ ID NO: 248729 - protein, 81 aa, Zea mays
  Clone ID: MRT4577_158429C.1.pep
GGRAVTIQPSPHPPIARVRATIHSCFPAFLLHPNNRYFLQACRPLLFATKPLAASARYLAFLPLAFRIKTAQPWPPKPCPA

SEQ ID NO: 248730 - protein, 90 aa, Zea mays
  Clone ID: MRT4577_15842C.1.pep
HPVFRELWQMSQEEFGFAGDDGPGRVTLACDSAVMEYTMCLLRRGASAELEQAFLSTMAMSGRCARYMALYVGRARQHQKKNKLVPVRCM

SEQ ID NO: 248731 - protein, 65 aa, Zea mays
  Clone ID: MRT4577_158430C.1.pep
SLTRPPGARFSTIFLRVTHVADMSVCGVCHGYKYWKAKAVQNPTLAQLAEPRTVARRKEILRAVV

SEQ ID NO: 248732 - protein, 68 aa, Zea mays
  Clone ID: MRT4577_158431C.1.pep
GPEPRSKGYSKCILHCPHSIINHSATLWSCRYSCVPHKGTIRSISTTKATTSTKHTEHVHQGVEVDIA

SEQ ID NO: 248733 - protein, 64 aa, Zea mays
  Clone ID: MRT4577_158432C.1.pep
MLDELEQLLKGNSMVKELTPRTNDYLVSFRECMSTRILSVNLNKIHIKARQVLLDISLICTVIE

SEQ ID NO: 248734 - protein, 81 aa, Zea mays
  Clone ID: MRT4577_158433C.1.pep
MGIDLVVGRRTKKTKRTALKSDDVYLKLLVKLYGFLVTRTKTNFNAVILNRVFMSKTTRPPISMRRLVNFMVGKVKNIAVI

SEQ ID NO: 248735 - protein, 85 aa, Zea mays
  Clone ID: MRT4577_158434C.1.pep
GRLSSARFLSAPSPDCALKSTSVPSRAIFTVVERGVANPAAYGLSGAGGLSPRGRKGGGSARPGRRSTMRRRVGRREGRGASCRI

SEQ ID NO: 248736 - protein, 259 aa, Zea mays
  unsure (1)..(259): unsure at all Xaa locations
  Clone ID: MRT4577_158435C.1.pep
TSVHSDWGCLIFQKEGRYKGRKFSSVCHFFGYQAXGSTPSNFDCDYAYALGRISLHMIAVGLTGYMATVANLKDPVDKWRCAAAPLTIXDAMMSVKRHLRGPGAIPIGRPSIHPSPIDLKGKAYELLREKASSFLLDDFYRTPGGIQFEGPGSDAKPITLTIENQDYMGDIEILKEYLGKVRTMVKPGCSREILKAVISSMVSVTDVLTVMSHPLNAELPLYHFKLHIFNIMNAWLTTNFQISLRNQPTPRTTIRFYGP

SEQ ID NO: 248737 - protein, 150 aa, Zea mays
  Clone ID: MRT4577_158436C.1.pep
GKQASSVYLHTRQPGSQGAHLDGGLVCHRRRSCPGSQVHLQPSHLPPLLQNPLLLLHLHILSFSFIFFLFFFNFYLFIISFFIIFLFFFIYFIYFIYFIFVVILFIFLFYYYIILFYLFILFLYYLFIFFIFYSIFYNFFYYLFYFIFFY

SEQ ID NO: 248738 - protein, 118 aa, Zea mays
  unsure (1)..(118): unsure at all Xaa locations
  Clone ID: MRT4577_158437C.1.pep
AVHLAGQACXGGRSSVSVPPSILAGVKASLGTRSRAFKECSCSRERLCKPRVWIGRSGMFGRXGLCPPPRYEAVIGGVLSVGQCVGAELGPPLVSACSWEPSFGGVATCLLGRVVYSR

SEQ ID NO: 248739 - protein, 58 aa, Zea mays
  Clone ID: MRT4577_158438C.1.pep
TRSPSFGRWIASVVHHGSASGGHDDDCEAHPRPHGGVCAPWHGAGRGECARRGVQQLG

SEQ ID NO: 248740 - protein, 74 aa, Zea mays
  unsure (1)..(74): unsure at all Xaa locations
  Clone ID: MRT4577_158439C.1.pep
QPTSASPEPWIRTVWRTGGALRICGVIYEETRGVLKXFLENVIRDAASYSEHIRRKTVTGMDVDYALMRQRRTL

SEQ ID NO: 248741 - protein, 50 aa, Zea mays
  Clone ID: MRT4577_15843C.1.pep
IFDTSPVPKYYPKILVVLAFDFYFYVQIDDNKSRHVRKTNTLIMYKSTKR

SEQ ID NO: 248742 - protein, 100 aa, Zea mays
  Clone ID: MRT4577_158440C.1.pep
GRGLAPPTGKENRDMMHTVDERRPEQHQVVRPPSIYPPRWIRDRASLVAERWSSPKPPTPPPTSSTRTVFADALPMSTTSLEGATSRTTRRAGRPRKHGK

SEQ ID NO: 248743 - protein, 42 aa, Zea mays
  Clone ID: MRT4577_158441C.1.pep
SFSHSGSSTVVEEAIRYAASLLFHQLSHQEDVLRGALRLRYT

SEQ ID NO: 248744 - protein, 60 aa, Zea mays
  Clone ID: MRT4577_158442C.1.pep
SYPWMYDRFSAFVHSALSASGGFQKRSALPRSGLCPMFFESVRKGLNGVFNKKNKKKKGG

SEQ ID NO: 248745 - protein, 184 aa, Zea mays
  unsure (1)..(184): unsure at all Xaa locations
  Clone ID: MRT4577_158443C.1.pep
SSGRLGRSSFFFFFFFFFLIFFFFFFFFFFFFFFFFFFFLKKTPNTPFPKKKTPPIKRVQPGHCPPPPPGGGGTPPNPXPKQRNHPKEANQRPHNIKTTAPRPQPPQGQIPTPWRPLQRNPTPDPNLAKTRPKPFPGKKXPPHNPTQKTTRKQKGKTPGPPKRDPTHKNCVAPTPPFPSEKPGG

SEQ ID NO: 248746 - protein, 168 aa, Zea mays
  Clone ID: MRT4577_158444C.1.pep
LRFQRERAENGYGTAVDNGTMMQLIVRWGGEKNHHQRWHFGCATEKGINKQLIKPLLTRSLVVVVLVGSGTCFRCRIGCCFPAFLTACLSPSSDLSLSLFSCFAEPHVSCSLGESEPAAHLREPVGGEAKRCRGCSREERAREGDHEPCRAVPILPPRIRRCPCFGGI

SEQ ID NO: 248747 - protein, 68 aa, Zea mays
  unsure (1)..(68): unsure at all Xaa locations
  Clone ID: MRT4577_158445C.1.pep
MAKKTLAVEARLVLTASAIXAVISAQCSHAPSAIIAEVLRTGTSMGCXHLAGRVNMPQPALAASVLQQ

SEQ ID NO: 248748 - protein, 48 aa, Zea mays
  unsure (1)..(48): unsure at all Xaa locations
  Clone ID: MRT4577_158446C.1.pep
MANXTLRVVFFPDGQGLPTIFTSLGLEYDDKVLPSIGNEVNKDSNHTN

SEQ ID NO: 248749 - protein, 91 aa, Zea mays
  Clone ID: MRT4577_158447C.1.pep
RKLGIRLEEPTAGVFSGSASEVTCVVRTFIVGSTSELLCDGPSRDTYAVCCHGGTHSTRRALELGIVLEVILYSGVIMTVHCLYGHALYLY

SEQ ID NO: 248750 - protein, 126 aa, Zea mays
  Clone ID: MRT4577_158448C.1.pep
MNTSAGAARPNPQGSFHYGSINVTQTFVLKNEQPLSISGKRRRTINRVSYSPPETPLRLADLHNLTGVYAADFPATPSDDDAPPRVASSALNASYKGFLEIVFQNNDTDVQTYHLDGYSFFVVGYV

SEQ ID NO: 248751 - protein, 46 aa, Zea mays
  Clone ID: MRT4577_158449C.1.pep
SQGVPDKLPVSSGHLKPSTMMESTTSFQAPFPFFYPGGTNNFSPRG

SEQ ID NO: 248752 - protein, 90 aa, Zea mays
  Clone ID: MRT4577_15844C.1.pep
MVSLWTNEQILAPLPIGFAVFLVHLATIPITGTGINPARSLGAAVIYNQHHAWADHVSGKQLSSTFMLLTSFTVKSSMKSLKLNSEIKPK

SEQ ID NO: 248753 - protein, 77 aa, Zea mays
  Clone ID: MRT4577_158450C.1.pep
FIVGATTRNTVRFLGQNRQKCALNTSKHLDLPVDKTHPKALGAAGGTPHHLRFAPARLRFGDTVRFTFHNSQSRRGT

SEQ ID NO: 248754 - protein, 59 aa, Zea mays
  Clone ID: MRT4577_158451C.1.pep
RISLRLTYSSSLFISVSNFKIHSIIVLSTMQNNILHCSLQIIDKSLPRFLCSDSLRTRG

SEQ ID NO: 248755 - protein, 81 aa, Zea mays
  Clone ID: MRT4577_158452C.1.pep
LVRSTQATRNVISRRDGVIDHQEAWTQGTVLNLADQVQNILLVTSDHLLYLLILVIVCMPLKVEERLSQSRGSFRFPSEMY

SEQ ID NO: 248756 - protein, 61 aa, Zea mays
  Clone ID: MRT4577_158453C.1.pep
THAYSIMLSIRYDHNVQDLGDIYSTGLRTRSCASLYGYKQRLPPAPYYNQLPNCYNNPVHI

SEQ ID NO: 248757 - protein, 382 aa, Zea mays
  Clone ID: MRT4577_158454C.1.pep
MSRSLVPVVTFVDGILDLLVPSAPAGTVDDLPAELHCRLCKKVMRDAVLTSKCCFDSFCDRGIRDYIIKESKCICGVETLADDLIPNQTLRSTISNMLGTQTSSGGSGTTRHRSSSGSNPHPKIQSHTASAASAREVKQSIDHQLPAVSAPDYVLQVATEGDLVNQPLEKLAATAEFLSNSAEVSAEKAVANAEALKVKDGSETSSKATTVSGSREYDVTRTDQPKKKRKKADLTKNVQPNNVGYGYNVSFDPAYYNPFVSGHPWATEPYMYSSMGMPYAGYPMDPYCANPMDPYCVNPMDPYCVNSMQGYPASYQRPETEPMRRGSTAAARAPSKHRERSDRPKDTRLQPQSTEHKRRLVSSHGTRSNSDRRDHGHSYGAY

SEQ ID NO: 248758 - protein, 68 aa, Zea mays
  Clone ID: MRT4577_158455C.1.pep
HHYLPGRAIRNVLYSFDKPNDETALRLMNESASLSRSTTLTLSLAMAVTMSISDGTTRRFYYPRNGNT

SEQ ID NO: 248759 - protein, 69 aa, Zea mays
  Clone ID: MRT4577_158456C.1.pep
KRGWRPSHTIALYIDRCSRKLKQKRGLTNLAPGLVHELKPRGLRPRHPLTTDTLEAEETHYGLLHGSPA

SEQ ID NO: 248760 - protein, 56 aa, Zea mays
  unsure (1)..(56): unsure at all Xaa locations
  Clone ID: MRT4577_158457C.1.pep
MAKAYLTVNXDYLKAVDKAKRYFRGLIFXKNCAPFMLRLTWHSMGTFNVATKNGGP

SEQ ID NO: 248761 - protein, 81 aa, Zea mays
  Clone ID: MRT4577_158458C.1.pep
PSVQVPGKPVRSSAPLDSPANDLITKGSLFFHGGGKAGHQIFKAQVGSPSRVPRGCSSTSCVNQRPTSHALMCHVVCSCSL

SEQ ID NO: 248762 - protein, 143 aa, Zea mays
  Clone ID: MRT4577_158459C.1.pep
LFFLFALINVFGSISNMNGFLFYFSYVYLVVRLSRRISIRLLQRESSGNCSPNSPVAARRPCTKGGRASRSHTRGARLLLFIFYRGWAPTIARLAPPLQLVTRAPEETEVLGRAKQASVTVANACKFRPDLVGWPKHEKTQSV

SEQ ID NO: 248763 - protein, 95 aa, Zea mays
  Clone ID: MRT4577_15845C.1.pep
MWSTGTTAPPPMAWETEKGRRGRSQGREESGFLIMALRRRHLKLGKGAWADEVDAAWQSNSRERAMVDAGEGTWPANRACTREAEQGAAMGDGAS

SEQ ID NO: 248764 - protein, 265 aa, Zea mays
  Clone ID: MRT4577_158460C.1.pep
GRDKTSENLSNRRTPGILRQYKYYLGRCGKQRLREARIQGVDYLILGLAGICLGTLAKVSDETFGALGYTYTVIAVSLLCKIGALRSFSLEKIHYWRERASGMSSLAYFLSKDTIDHFNTIIKPIVYLSMFYFFNNPRSSIWENYVVLLALVYCVTGIGYTFAIFFQPSSAQLWSALLPVVLTLIATQQKDTFFANLCYTKWALEAFVIANAQKYSGVWLITRCGSLLNSGYDINDRILCIVVLVANGVIFRCVAFFCMVIFQKD

SEQ ID NO: 248765 - protein, 65 aa, Zea mays
  Clone ID: MRT4577_158461C.1.pep
KWSGRFIGLLQHGLEELDTILQVTELMPVRVPEVLNGIDLARKLDQPFSRLALCTSCRNIYHVVL

SEQ ID NO: 248766 - protein, 83 aa, Zea mays
  Clone ID: MRT4577_158462C.1.pep
SPPCDPCGFMGRLQLVGCRVAVPSGPLLGMCLVLNIQSLDLFGSVALLFSALPAKKKKRAGGRQITSLVHPVNSVRGRVQQAL

SEQ ID NO: 248767 - protein, 91 aa, Zea mays
  Clone ID: MRT4577_158463C.1.pep
VWAPFFFFFFAKTLTIYLLGHKPEYNDCRLGSITPRQPFRCTFTFVLRLQEAYRLSIIPIKKEGYIPASHCLHTYHCPMEIRSKTHNTIMY

SEQ ID NO: 248768 - protein, 78 aa, Zea mays
  Clone ID: MRT4577_158464C.1.pep
DNIFMHHVCLSTVLSYMCTLKSVTRLIIIETVFTLHYYVELLNVFTCRWSVTIFSCTTYLGAANFHYCYVHNIVWLNF

SEQ ID NO: 248769 - protein, 107 aa, Zea mays
  unsure (1)..(107): unsure at all Xaa locations
  Clone ID: MRT4577_158465C.1.pep
MNWTTKYNNMTRTTVSSHNLITCANMYTMTPRVITYRLRPVAXITMKLRMNGTAYIPCIGXYLXQEHSVVSLRGTSAIDRPLARYRIILGTLYSAPVTNCQQGRYKY

SEQ ID NO: 248770 - protein, 384 aa, Zea mays
  Clone ID: MRT4577_158466C.1.pep
RRRGHVRYLPSPSLRDGRPRLGFFLLLAAAAFAPLVSAQLSADFYKTSCPDAEKIILDVVQKRFKADPGTAAGLLRLVFHDCFANGCDASILIDPMSNQASEKEAGPNVSVKGYDVIEEIKTELEKKCPNVVSCADIISVSARDSVKLTGGPEYAVPLGRRDSLVSNREDADNLPGPDIAVPKLIDEFDKQGFNVEEMVAMLGGGHSIGVCRCFFIETDAAPIDPKYKKTISDACDGKDSGSVPMDSTSPNDLDGSYFGLVLEKKMPLTIDRLMGMDKKTEPIVKAMSDKTTDFVPIFAKAMEKLSVLKVLTGKEGEIRKTCSEFNNPQNSSGSTSVIRISSIDPDLVGVPGRSRVRSPVEACLRLVYRFCLIIVCVQNYVRMW

SEQ ID NO: 248771 - protein, 59 aa, Zea mays
  Clone ID: MRT4577_158467C.1.pep
PNLTQKIPNYVYYQEIQKERMKTNQEERLIIQNSCSARVITIEKKGYRTISSNKQFVGH

SEQ ID NO: 248772 - protein, 129 aa, Zea mays
  Clone ID: MRT4577_158468C.1.pep
RPWRRRRRGTWPSSAPPVRPPRVWIIVGVGVRAFGLPLPLCQVTQVIFFPHCLFRLCKKGRAKYLPQRITKLYNYAIVVSSLLKMTTGTFLVSPVGQEKSCRGMLKFSISLLLNNCLRAKLRENVVMNR

SEQ ID NO: 248773 - protein, 444 aa, Zea mays
  Clone ID: MRT4577_158469C.1.pep
MDARLRLGFFLLLVAAAFAPLVSAQLSADFYKTSCPDAEKIILGVVEKRFKADPGTAAGLLRLVFHDCFANGCDASILIDPMSNQASEKEAGPNISVKGYDVIEEIKTELEKECPNVVSCADIISVSARDSVKLSGGPEYAVLLGRRDSLVSNREDADNLPGPDIAVPKLIDEFDKQGFNTEEMIAMLGGGHSIGVCRCFFIETDAAPIDEAFKKKISDACDGKDSGSVPMDSTSPNDMDGSYFGLVLEKKMPLTIDRLLGMDKTTEPIVKAMSDKTTDFVPIFAKAMEKLSALKVLTGKDGEIRKTCSEFNNPQNTSGSTSVIRISSIDADQMAGLSQPGSTSRKVGGRADVSTPAAVETPAMAATEAAAKVPGGVVVSAGDQDRSGSGSGPKLRGSGEPVVNPVPAAPGGAEEAAKQQEVTDLEEKKKRNMAKLRGAGQAKQ

SEQ ID NO: 248774 - protein, 282 aa, Zea mays
  unsure (1)..(282): unsure at all Xaa locations
  Clone ID: MRT4577_15846C.1.pep
MSGISLAVAPRSDPDHGSERQPTAMLGGVMGSLRVIELQLVAFIMVFSASGLVPLIDLVFPVATTVYLLAISRLAFPPLHATKSSKPDDAAGSPAASSQSSPEIFRGSNLEPGCRRLFQAYVVVGTTVGLFLPLAHVLGGFARGDDXAVRSATPHLFLLSCQILTENVVGSLGAFSPPVRALVPLLYTVRRVFVILDWAYDAWASTAQDAAWVWFGRCLAAANLLYFSANLFVFLIPRFLPRAFEKYFRMRDELCAKTAEDKHAREGVVGAAKLEVSSKKAD

SEQ ID NO: 248775 - protein, 121 aa, Zea mays
  Clone ID: MRT4577_158470C.1.pep
ARAGWDPIERPPFLIYQILSRAIYSFMRRGNAAFFLDGILLLTVTLDGAPIDIGGKKRSEFSLTPSRKRGCGAPVRSTLGEGQKGQGLGASKESCDLVTELQPGVERQISSARSRVLSRMS

SEQ ID NO: 248776 - protein, 126 aa, Zea mays
  unsure (1)..(126): unsure at all Xaa locations
  Clone ID: MRT4577_158471C.1.pep
MERLNTKLYLQNCYIMKENERLRKAALLLNQENQALLSELKHRLAKSATAXVAVAATATRQRRAAPRPSPAPTPTPLLRRLIIRPAACLPPSPSPSRLRLQSVAHGCCCRIVVGCLHGVCFSDHFN

SEQ ID NO: 248777 - protein, 45 aa, Zea mays
  Clone ID: MRT4577_158472C.1.pep
KCKSYRVFMFVSARCCIRYTDLKFNSSRLGISEDRYSPLKASCGT

SEQ ID NO: 248778 - protein, 101 aa, Zea mays
  Clone ID: MRT4577_158473C.1.pep
NATNLIYCKPHNNPTDTIKVLRLRMLLVAFAASATATNTTGCWQGHTPALVHLHLSAHVSSACELPTLEHYTMPEEMAAGVQLLSPVHVPPSFDLLPPPCL

SEQ ID NO: 248779 - protein, 113 aa, Zea mays
  Clone ID: MRT4577_158474C.1.pep
MALFGRVLALALALALGPAATLAGPAKSPYQLVLQHSRLRGRQHGPNVCAVQNVIGTNRKYFTNCKQRYQRKICGKSTVISYECCPGYDMVHGENGCPASLPLSNLYETLGVV

SEQ ID NO: 248780 - protein, 46 aa, Zea mays
  unsure (1)..(46): unsure at all Xaa locations
  Clone ID: MRT4577_158475C.1.pep
LDVGFSMLGNMSDVTNHKGYAYASNTVCSFHHKKKKRAAATAVEXQ

SEQ ID NO: 248781 - protein, 85 aa, Zea mays
  Clone ID: MRT4577_158476C.1.pep
PRVRGKTAAPAGDQGQRAPGAQDHPHRPPIRILSLRRVTNGCSRGWKGPIPLPRGFLPYGSPPLVIPSPQMCGRQMVLAPIVSCT

SEQ ID NO: 248782 - protein, 74 aa, Zea mays
  unsure (1)..(74): unsure at all Xaa locations
  Clone ID: MRT4577_158477C.1.pep
GRGGRRDAGERARHGEGPRRAGPRAGXPTARLVRGRARGGWRMPEEDARRGGATGAWRCCGRPRTTLSXFXPGX

SEQ ID NO: 248783 - protein, 47 aa, Zea mays
  unsure (1)..(47): unsure at all Xaa locations
  Clone ID: MRT4577_158478C.1.pep
XHVSMESDMSELAASCRESAQNKHQKINGIRSSLFRWSSYSTLYLIS

SEQ ID NO: 248784 - protein, 116 aa, Zea mays
  Clone ID: MRT4577_158479C.1.pep
KGFFFFCGAFYLPFFSKKKTLGGPPGGPVGWPPGFGLRKPGFFSLGPKENPKGVWGIRMGLKLGGGKENWGAKRPWLGSIRPLPGFGVKSPQKLFLGSKEFFLRGFKPVPPKRGFV

SEQ ID NO: 248785 - protein, 111 aa, Zea mays
  Clone ID: MRT4577_15847C.1.pep
LNFTQTDFLKLLPDENKKENSILGKSRPFCWLEGGTPQKPPKPGGKPPPGGPKEERFPFYPEKRKKKTSRGGGKLKNFRPGIWAFFLEPPGGLGNPFLCGKKHGPLFKGAP

SEQ ID NO: 248786 - protein, 88 aa, Zea mays
  Clone ID: MRT4577_158480C.1.pep
MKSSTLVVILVLQAVLVMGILSQANAEFPKCCDSCRFFSGAVVCDDAGPKCRDGCVNCRVVQTSPKKTFRCADARVDDGTPCKPCKKY

SEQ ID NO: 248787 - protein, 49 aa, Zea mays
  Clone ID: MRT4577_158481C.1.pep
TPHLGDLMRGGLRPGGGGIHASGFTRAVGERTRHCADCCARSALDLTYC

SEQ ID NO: 248788 - protein, 146 aa, Zea mays
  Clone ID: MRT4577_158482C.1.pep
MNTKQQYWESFSSFSTKSKRGGKRKKGRFRPTKLVKDNRSAHNNAGWCQAKLYPITKPAWHGLQLQRGLPKPLIILFSVHFLWSSSQSLIKHTHPATAMLAGNNKTRGRESSCPQGTLPTLSPCLVKLEGVHHLPREIGVLTAQRP

SEQ ID NO: 248789 - protein, 115 aa, Zea mays
  Clone ID: MRT4577_158483C.1.pep
LHGAKSDESRRMVEKKVEAAAGELAMGQHRDHGVLLRGFAGGREGCIREGRWVGALCGGMIPRRTWWSPWNRAPSPRGLPAQPSSKRGCEAPTFYIGEVPGVAPKRSRTGTTGGT

SEQ ID NO: 248790 - protein, 86 aa, Zea mays
  unsure (1)..(86): unsure at all Xaa locations
  Clone ID: MRT4577_158484C.1.pep
HCVDCREVPVDICYSSKKKKKKKKKKKKKKKKKKKKKKKKKKKKKKKKKKKKKKKKKKEKKIKKNKKNVKKXEKKRGKPCKKVNLI

SEQ ID NO: 248791 - protein, 64 aa, Zea mays
  Clone ID: MRT4577_158485C.1.pep
KAIVTWSLLDTTKTRLSSHKFSMLRPLNETIPIGRQQCIARYIATIEIAIQVTRCYLLGIIEDA

SEQ ID NO: 248792 - protein, 163 aa, Zea mays
  unsure (1)..(163): unsure at all Xaa locations
  Clone ID: MRT4577_158486C.1.pep
KGPPPPKEEPQPAQTKEDPPPQQARGAAQTQPAEQDPARPGRQAHPRQKGQPARPPDTPTRRPPGTPPQSAPKEERTARARRTEREPKPRQAGAGPPTRKEXPPAGTGPESPTPTHAXGRRKPHGKNRRRPTRHTEPPNRQENPTHRQDTEGEKTRKKKKKNN

SEQ ID NO: 248793 - protein, 138 aa, Zea mays
  Clone ID: MRT4577_158487C.1.pep
WERNARVKAPLTPKKWLHSRGRRGWRLRSGAARKGFEASQLGTVAGGSGARGLLGESRQLQCAVRRAVCAAGASWRQALLVRRPRLQGRVSGRGGLARTGWRLASWASGPAGRCLGERSEERERETAGWREERGRWRL

SEQ ID NO: 248794 - protein, 74 aa, Zea mays
  Clone ID: MRT4577_158488C.1.pep
MSACPCTPGARDGEEDDAAGVHGLELEAYGSTMRALYASGPLTWEQEALLTNLRLSLNISNEEHLLQLRRLLSS

SEQ ID NO: 248795 - protein, 62 aa, Zea mays
  unsure (1)..(62): unsure at all Xaa locations
  Clone ID: MRT4577_158489C.1.pep
LQLINCTPLVLQPSTTTTTXILVSSSNECVLIQVQLCVYHLTQVYLLCTVHSTQATTSSLVR

SEQ ID NO: 248796 - protein, 99 aa, Zea mays
  Clone ID: MRT4577_158490C.1.pep
KKIKIRLTIKKMFEIQGANLLEKIVPHQGKVMPMNPEGGGFKNMILHGEGGNVFCFKFRQTVFLKLTKPLLPFRTRGKSFYLGEVSLGLIFFGGQPPIC

SEQ ID NO: 248797 - protein, 77 aa, Zea mays
  Clone ID: MRT4577_158491C.1.pep
LLRGQCRLPPPQQPTPAPPPRFTARPPADPALPSTLAVAADPFSAEAPSILGVVPLISVFLNWTALANASDMSATTS

SEQ ID NO: 248798 - protein, 205 aa, Zea mays
  unsure (1)..(205): unsure at all Xaa locations
  Clone ID: MRT4577_158492C.1.pep
DAWADAWADAWADAWADAWADAWARLCCEPGEAVAVNLAFALSHVPDESVSPANPRDELLRRVRALGPQVVTLVEQELNTNTAPLAARFTDACAHYGAILESLDATLGRETAEKARAEAALSRKAANAVGRDGPDRLEXCEVFGKWRARFGMAGFRPVSLGSSIAEQMVAPRVGPVPPGFTVKAENGVLRLCWMGRVVTVASAWR

SEQ ID NO: 248799 - protein, 395 aa, Zea mays
  Clone ID: MRT4577_158493C.1.pep
MTRSPSNSFTAYLISSCSPPTPGAASSWLSPGLALAIADLIHEASASHLAALKRAANQHGDAEQRLIAMMVAALSSRIAPAASAPSQLLADLCSVEQRAGSQLLQDLSPCFRVALHAASAAIVEAVGDHRAIHLVDFDVSFPQHAALIQYLADRRVQGRSLKVTAVTDPSSPFTQSLTASLPAIEERLKKLAERAGVEYRFTVVSCRAAELDASRLCCEPGEAVAVNLAFALSHVPDESVSPANPRDELLRRVRALGPQVVTLVEQELNTNTAPLAARFTDACAHYGAILESLDATLAREIAEKARAEAALSKKAANAVGRDGPDRLERCEVFGKWRARFGMAGFRPVSLGSSIAEELVGARVGHVPPGFTVKAENGVLRFCWMGRAVTVASAWR

SEQ ID NO: 248800 - protein, 126 aa, Zea mays
  unsure (1)..(126): unsure at all Xaa locations
  Clone ID: MRT4577_158494C.1.pep
MARTNHTARLSAGGNAPRLLLVTKAARKSASTTGGVXKAHRYRPXTVALLEIRMYHNSTELLIRKLPFHGLVREIAQDFXQTSRFHEPSSVMVLQEAVEAYLVGLFEDINLCVIHAKRVXVMPIGH

SEQ ID NO: 248801 - protein, 58 aa, Zea mays
  unsure (1)..(58): unsure at all Xaa locations
  Clone ID: MRT4577_158495C.1.pep
VVTIHYNSRRXSPVLLLLLLVVLSPQTQPSLIPSNTLYTAILPRRLDCFNRNYPWINV

SEQ ID NO: 248802 - protein, 101 aa, Zea mays
  unsure (1)..(101): unsure at all Xaa locations
  Clone ID: MRT4577_158496C.1.pep
FYNNHVYKLGSAQRYLDILRFFNYAELLEELGQMYSIKGQVDDPGKSSXQLNFVDRKNDGLLLXGDDPWESFVNTRXTSSILSPCDVLNMGKAXNDPRYLS

SEQ ID NO: 248803 - protein, 60 aa, Zea mays
  Clone ID: MRT4577_158497C.1.pep
SIIYFFFSREKNNPGYILTLVVILHTKKNPHRGAFFIQNSLITTLVSLKIEARLPFILGN

SEQ ID NO: 248804 - protein, 75 aa, Zea mays
  Clone ID: MRT4577_158498C.1.pep
KEGGRGAFFGSFFRSHGTNVRVPRHGADSAKLASPKGQNKKPPGSSNANQGHPKNKCRPPAKLTIELPRSLFFYN

SEQ ID NO: 248805 - protein, 191 aa, Zea mays
  Clone ID: MRT4577_158499C.1.pep
PLRGPAGSREKKKKKKKKIKKKKKKKKKKKKKKKKKKKRVGFQKQNLESGPGPQPKKGPKGPGPWPGYGKGPGLAQKFWSPQGPGEQPFRFRIGPGSGVQGWDQGVFTLPGGEIAPIPGPPDYAYGTGGFPAWGIPPNPGVGVQIEIPQGPKFPFGNYGNLGPGSPGMEKFRWPPLVPTANWGYQLNPGKL

SEQ ID NO: 248806 - protein, 141 aa, Zea mays
  unsure (1)..(141): unsure at all Xaa locations
  Clone ID: MRT4577_15849C.1.pep
GVCEAPAADCYAGRSPSASGDGDTVKRSLVRTWRRXIRLDPARRSIXPYELPKLVRTAVRIKSLTKYHVACKQQTSDLQSLLMWPQAGVLSPGHRIVAASGKLGEHHQNNDKPFDKCKVKDNIVSLKAKGPEQYESELNEK

SEQ ID NO: 248807 - protein, 61 aa, Zea mays
  Clone ID: MRT4577_1584C.1.pep
FFFFFFLNIFYFLTYCGERGFFILSCPFFVLRRNPLLLGEKNKDWSRTNHQRLFTNMRKII

SEQ ID NO: 248808 - protein, 96 aa, Zea mays
  Clone ID: MRT4577_158500C.1.pep
RTASRMQFLAGPRGSSMGRCVPWASMSTSSLSPEKNRWSRRSSTTKSTSSSRWRLLVSFRTPRLMFSLLYCSHLFLVRLLLCNNDICDIYLYTHCH

SEQ ID NO: 248809 - protein, 64 aa, Zea mays
  Clone ID: MRT4577_158501C.1.pep
PEGSLACFQHPSIVIHRNRSRASIVVERFHPSVVKEQEDAPSASCSIRCLFGSRLSSPTAPRTR

SEQ ID NO: 248810 - protein, 63 aa, Zea mays
  Clone ID: MRT4577_158502C.1.pep
PTRQASRDRALQNQLDLSITCSSRRAFAASDGSQPTIPPACPGPRFYKGGSAVLARPCRSQSS

SEQ ID NO: 248811 - protein, 114 aa, Zea mays
  Clone ID: MRT4577_158503C.1.pep
VCLRLGCVVCLVLKVLFMSILRRILMIRVSPLLVLILRLRRRLRLLIMVSLLVSFRLLRSMLMRSLLLLYSTLPYLIFMIVLPSVLGFFMLMISLIVCGHLRLGVGMVEKRWKW

SEQ ID NO: 248812 - protein, 68 aa, Zea mays
  Clone ID: MRT4577_158504C.1.pep
CVDLSGLTTILLNICPLGFRSGPKRCGLTLARPQYILRAAETPVYIGRYILAKELKRTSPVQWKWNRF

SEQ ID NO: 248813 - protein, 98 aa, Zea mays
  Clone ID: MRT4577_158505C.1.pep
KNRIVSPVLFPSSLLAARLAVQVPPVLWRQAYPVCGSRDGGRAVLPPAPACGGVGGFGGALPAEEGPEAEGPGLRPGGGCPDRGGPRWAVLHLQGARR

SEQ ID NO: 248814 - protein, 47 aa, Zea mays
  Clone ID: MRT4577_158506C.1.pep
LYHTQIPQPLGVTTREECAYFFIHIIYMAREENVYIANLAEHAERSE

SEQ ID NO: 248815 - protein, 56 aa, Zea mays
  Clone ID: MRT4577_158507C.1.pep
IVSPHVWVALNSCVFNPIASDRLACPACEKCFISSLSQCRGKILYVLGPFGRASFA

SEQ ID NO: 248816 - protein, 94 aa, Zea mays
  unsure (1)..(94): unsure at all Xaa locations
  Clone ID: MRT4577_158508C.1.pep
IFIXXSNFFFLLIXPPSFFXFXSXSSSXXSSSSSXNPFFXTSXXPXSLLSSSXXSXXXSLXLNFSKXSXKSSNKISSNXTFSPTYSISTSTFTS

SEQ ID NO: 248817 - protein, 101 aa, Zea mays
  unsure (1)..(101): unsure at all Xaa locations
  Clone ID: MRT4577_158509C.1.pep
LITNAERQHHNHENHLWHCYEGMKSWLLRLILIVAFVSVKRYLRLLPSKPLFYLQDLQLXRPISLEDPSVTAAAHVTVASRKPNDRLGIFYKLLHTLPIYY

SEQ ID NO: 248818 - protein, 84 aa, Zea mays
  unsure (1)..(84): unsure at all Xaa locations
  Clone ID: MRT4577_15850C.1.pep
FNKSLNLAYLGWLSGAHTIDNPHWKSFSXERLSSFTGRGGPDHLDPSMDPMYPENLRVKCKTLKQNTPIGERDPGSYRTFDLSY

SEQ ID NO: 248819 - protein, 42 aa, Zea mays
  Clone ID: MRT4577_158510C.1.pep
GEEAFLAAGGRSKSHTCQNVWFDKLIGWRSSKVILYPNHAAG

SEQ ID NO: 248820 - protein, 73 aa, Zea mays
  unsure (1)..(73): unsure at all Xaa locations
  Clone ID: MRT4577_158511C.1.pep
RIPPQNTSCHPLSLHQASIRCAYCSKYANXLIKNAAYIRTPSKYILAANQSTPTISKRLSSINVKNMKDNRLS

SEQ ID NO: 248821 - protein, 106 aa, Zea mays
  unsure (1)..(106): unsure at all Xaa locations
  Clone ID: MRT4577_158512C.1.pep
GRSEVALCPTLTXXDTPYFXNXSPQVWEGTLXSGERVXGVISLKLCHRXTLSTSSFGPSWXAXQIRPTLXXKFLLERIPYXVFNGRLFLFPFMGYCRFKLMSLGYX

SEQ ID NO: 248822 - protein, 96 aa, Zea mays
  unsure (1)..(96): unsure at all Xaa locations
  Clone ID: MRT4577_158513C.1.pep
SQQQRTHRQDRPTAGTRRANRNPRAHPPTXRRPPRRRTPTAQETPPRHTTGTXEQQEGKSAGRRGGKAAPPQQAQRRKKESPGQHKAMKNQHVLRK

SEQ ID NO: 248823 - protein, 80 aa, Zea mays
  Clone ID: MRT4577_158514C.1.pep
IRSHARRAVVCTRDILGLHCGDDDHGGRALLFVVVGGNDAGWCPIRGQAWHPAYEFPVGCSPWHAVIVERYHFLCHCVLL

SEQ ID NO: 248824 - protein, 55 aa, Zea mays
  unsure (1)..(55): unsure at all Xaa locations
  Clone ID: MRT4577_158515C.1.pep
MALLTVGKGGNGKVVERSESWEXGKYAGLCEELDDDAAARKNGNVLRRISGMWKK

SEQ ID NO: 248825 - protein, 49 aa, Zea mays
  Clone ID: MRT4577_158516C.1.pep
IRHTRWFDQLTFQGTPYLCSVGLTIRAGRVAHTFPKTMVVYISEPRQLY

SEQ ID NO: 248826 - protein, 215 aa, Zea mays
  Clone ID: MRT4577_158517C.1.pep
PRIHLQSPQTAVPTRAVEPGRTRRITVAAPPLPPAALQRRTRVVLYYRADAAGADGRASVRLWEEAMWAKESLSEAVADHPEMGGRLRRHADGSWEVKLNDAGVRFTEATAEATLDEFLATAQDKDRAPSWEAALAPWADVNAEDPDVSALVYVQLTRFQGDGGFAVGVSCSLMLSDPLSLARFLASWARTHARMKAQNDAAGHPLMQYASYFRR

SEQ ID NO: 248827 - protein, 141 aa, Zea mays
  Clone ID: MRT4577_158518C.1.pep
GAAKKLGPRQILGGAAPLGKNGASTLPFLGGFSRFRSHPFSGGLGFSNKWLVFGPGNQVFVFMCWDPFMLLPLFFFEPWGGLPVFGGENGFNPMKGGMPVMDSSVWFLVRTWFPRPALFLVLPGEVGLPPFFNFRILMSVG

SEQ ID NO: 248828 - protein, 96 aa, Zea mays
  unsure (1)..(96): unsure at all Xaa locations
  Clone ID: MRT4577_158519C.1.pep
WWARAWLFTSXAVNEGDPDQLCYQVSXDDVLDPCLAHDPHSEVACETCTRTNMLMVFGEITTHATVDYEKIVRDSCREIGFTSDDVGLDANXCKVL

SEQ ID NO: 248829 - protein, 335 aa, Zea mays
  unsure (1)..(335): unsure at all Xaa locations
  Clone ID: MRT4577_15851C.1.pep
TEMINMVKVRHNNVVPTMALGMQQLKKELGRSRKVPFEFDEIHEFLDRFYMSRIGIHMLIGXHVALHDPKPEPGVIGLINTRLSPIQVARAACAAARSVCLPLYVRTSIRNIDENRRFTLAPLLPRHKIGHRTLTDRAAWWLCYDPKPEPGVIGLGGTGLSPIQVAXAXCEDARSVCLREYGSVSVXNIYGDPNFTFPYVPSHLHLMLFELVKNSLRAVQERYMNADKDVPPVRIIVADGEEDVTIKVSDEGGGIPRSGLPRIFTYLYSTAKNPPELDRPNTEGVTMAGYGFGLPISRLYARYFGGDLQIISMEGYGTDAYLHLSRLGDSEEPLP

SEQ ID NO: 248830 - protein, 43 aa, Zea mays
  Clone ID: MRT4577_158520C.1.pep
PRFRRRVSLHAKGDTYLVRGGIDLISFTRYHLRTKGNSPLLLA

SEQ ID NO: 248831 - protein, 65 aa, Zea mays
  Clone ID: MRT4577_158521C.1.pep
LSIFINLGYKYKFIIRWRSCTLVIVVKLHDPAYDQLCACPACDVPDSTCTLVHLVPMESVTTGRK

SEQ ID NO: 248832 - protein, 95 aa, Zea mays
  Clone ID: MRT4577_158522C.1.pep
MGDRIPPPSHLQQYSQSPVHSSPHHHHLNSMRYSASSDRERYLAELLAERQKLGPFIQVLPYCTRLLNQEILRASSLPPNHNFVDAERIEHGSPL

SEQ ID NO: 248833 - protein, 74 aa, Zea mays
  Clone ID: MRT4577_158523C.1.pep
DEPSLQDYYSDSDEFFNLDLYDDQYAFFNNQAFESMNDLFSANTMQSKASTAAEQGIPMWNFDDSCLFRDNPTF

SEQ ID NO: 248834 - protein, 69 aa, Zea mays
  Clone ID: MRT4577_158524C.1.pep
LNSKLVGAYGLAGSRGVRQKKHGLPGLLTTCVCRSRPVRKARITGRCFNNACSSFNGPNAEQDEISSFL

SEQ ID NO: 248835 - protein, 386 aa, Zea mays
  Clone ID: MRT4577_158525C.1.pep
LEAGRAGRELGQRLHEKEIEGRELLKAHLEKKAAAEAAVDSSLASSSNSLEKTPQVLKGPEQSSVIVDDAKINAPLPKAVPVAISDDNNGVIPATATYTINTKPVLVSPTPSKLEPVLCEEHVSSSIQQTNKAILMPSRSPLVDNEANPTPPKSPVPQADTVAKATPAPPKSPMLQIDTIAKATAAPTKSSTSQLDKVANIQAAPKSPAPQPDEVASHHNSVSGQILSTSISKPREDTVSKRAAVVTVPGTPTPMSRPTSAPLLQVPKSTMLPTPSVQVSPMLSRSWTMSAQVPPMLSRSRTVSERPNNEPSSVSSSVRFDMTDPYYGEGYRRAYNTQNALHRLDGYPNERLDSTAPPKRWAYSHPNPAVNLAYNSNVFPQQMGDY

SEQ ID NO: 248836 - protein, 405 aa, Zea mays
  unsure (1)..(405): unsure at all Xaa locations
  Clone ID: MRT4577_158526C.1.pep
EIASHHNSVSGQILFTSISKPREDTVSKRAAVVTVPGTPTPMSRPTSAPLLQVPKSTMLPTPSVQVSPMLSRSRTMSAQVSPMLSRSRTVSERPNNEPSPTAPMYVTQTYRNAILGKGHLDTTPASLEQSTSVSPNTAASQPWSAYAMTTSVMAPPFERNGQLPGKQGFMFGPSRAETLDNWHSWKGNTDVNRNTWKHDFPNQQMTNCDAHLHHLKDISYQQLSSIGTEQHRLGGLQCREFLQREIPAATFVSRQQYGSVGEEFPHIDIINDLLDEDQNSAHMTVSPLHEYHTFGLPFSSGGNVADSEIPSVSSSVRFDMTDPYYGEGYRRAYNTQNALHRLDGYPNERLDSTAPPKRWAYSHPNPAVNLAYNSNVFPQQMGDYXNLASGRXYSDYMYRRGNGQW

SEQ ID NO: 248837 - protein, 286 aa, Zea mays
  unsure (1)..(286): unsure at all Xaa locations
  Clone ID: MRT4577_158527C.1.pep
MAAATAAAAAAALASPAALSTSLARRGLVSFAPALRPGPDRSSRAVSLLGVRTHVAAVDQAIVKGDTKLEGPVVVVTGASRGIGKATALALGKAGCKVLVNYARSSKEAEEVSKEIEAFGGQAITFGGDVSKEADVESMIKVXQVAVDTWGTIDVLVNNAGXATKVMMKKKKGRIINIASVVGLTGNAGQANYAAAKAGVIGFTKTVAREYASRNINANVIAPGFIASDMTAELGEELEKKILSTIPLGRYGRPEDVAGLVEFLALSPAASYITGQVLTIDGGMVM

SEQ ID NO: 248838 - protein, 91 aa, Zea mays
  Clone ID: MRT4577_158528C.1.pep
FKCLLHRSMAQDMIYFPLACGGGLTKKKRAQLGSKKKDFLGCVLKKKKKNFSSCYPPLHVWGQALCPRKGVYIQVGLEKKKNETKKKNRPP

SEQ ID NO: 248839 - protein, 191 aa, Zea mays
  unsure (1)..(191): unsure at all Xaa locations
  Clone ID: MRT4577_158529C.1.pep
TWGTIDVLVNNAGITRDTLLMRMKKSQWQDVIDLNLTGVFLCTQAAXXXXXXXXXXXXXNIASVVGLTGNAGQANYAAAKAGVIGFXXXVAREYASRNINANVIAPGFIASDMTAELGEELEKKILSTIPLGRYGRPEDVAGLVEFLALSPAASYITGQVLTIDGGMVIGLWYSTVCFEGRVDTRNLHTYS

SEQ ID NO: 248840 - protein, 50 aa, Zea mays
  unsure (1)..(50): unsure at all Xaa locations
  Clone ID: MRT4577_15852C.1.pep
TLIKVFGACFLTKRVTPWGVLQAWGCLNXPKQFQTWAGNLAGTRRWGGGA

SEQ ID NO: 248841 - protein, 312 aa, Zea mays
  Clone ID: MRT4577_158530C.1.pep
MAAATAAAAALASPAGLSTSLARRGLVSFAPALRPGPDRSSRAVALLGVRTHVTAVDQAIVKGDTKLEGPVVVVTGASRGIGKATALALGKAGCKVLVNYARSSKEAEEVSKEIEASGGQAITFGGDVSKEADVESMIKVAVDTWGTIDVLVNNAGITRDTLLMRMKKSQWQDVIDLNLTGVFLCTQAATKVMMKKKKGRIINIASVVGLTGNAGQANYAAAKAGVIGFTKTVAREYASRNINANVIAPGFIASDMTAELGEELEKKILSTIPLGRYGRPEDVAGLVEFLALSPAASYITGQVLTIDGGMVM

SEQ ID NO: 248842 - protein, 52 aa, Zea mays
  Clone ID: MRT4577_158531C.1.pep
KQGQLIVKPPPIRPIGPPKSKPKPPPVLWEFPKLPPRMVTAKKKKFFFFFFF

SEQ ID NO: 248843 - protein, 95 aa, Zea mays
  Clone ID: MRT4577_158532C.1.pep
AFDSSRGHTLTNCPHLNGGVPWRPDGHLLNDFSTYGEVLESNIILHRETQRSLGFGFVTFSTEEAMRNAIEGMNGKELDCRNITVNEAHSRGCRG

SEQ ID NO: 248844 - protein, 47 aa, Zea mays
  unsure (1)..(47): unsure at all Xaa locations
  Clone ID: MRT4577_158533C.1.pep
SADDLPHLLLHLCRRQTYTGRIWGGGHDTXNTITPSTVGHLVQMMTH

SEQ ID NO: 248845 - protein, 95 aa, Zea mays
  unsure (1)..(95): unsure at all Xaa locations
  Clone ID: MRT4577_158534C.1.pep
NXXXEXPANQXDTXXGXEDPDQRTKEXPXKXTKKKXSKDXSKDNXAXGKPRREAERAKRAXSNQHQXRXENEXXXDGTXXXEPRTRARXEERNND

SEQ ID NO: 248846 - protein, 92 aa, Zea mays
  unsure (1)..(92): unsure at all Xaa locations
  Clone ID: MRT4577_158535C.1.pep
SLLALLALFVRAPKAFIIQQGXLAPRAIIPKCLLPVTXMGFKHPVVQAYRLQQALAASVLEQPIAQLQHQSLAHLTIQTIATQEQQALSHLA

SEQ ID NO: 248847 - protein, 84 aa, Zea mays
  Clone ID: MRT4577_158536C.1.pep
KRAPRAVKAIKEFAQKITHTEDVRIDASLNKFMWSRGVRNVPKRVRVLIKRVRNDDEDAKEKMYTLVSHVPTTSFTGLHTKKVE

SEQ ID NO: 248848 - protein, 115 aa, Zea mays
  Clone ID: MRT4577_158537C.1.pep
KEKTRAGIFAQSMGELAQNGVFGVPGSTRGGLVKHKGPQEALVGPHRDRGVRPHSEAPQIWVPPGPGGVLNGQGFFVKLGEQGGANHPPRRGNPSCPGEPRGQPVAPKREPDPRG

SEQ ID NO: 248849 - protein, 51 aa, Zea mays
  Clone ID: MRT4577_158538C.1.pep
FLVRFCCRVPPSLEGVYLRRWSSRALLFRFVFPCCCSPSPFLSPWVCVLKK

SEQ ID NO: 248850 - protein, 116 aa, Zea mays
  Clone ID: MRT4577_158539C.1.pep
PEGPRTSKIPPVDTIPKQLNVELINSARDQKRVLSSKASGEPPLLLAASVHCAMREAIRAARKEFSVCTGPANFAITFEMDVPATMPIVKELFGLDVVERYLESMSPAGPTTPAKA

SEQ ID NO: 248851 - protein, 83 aa, Zea mays
  unsure (1)..(83): unsure at all Xaa locations
  Clone ID: MRT4577_15853C.1.pep
TQNPKPIYXNATSXRRDAVDGAHXYLTPGGGPGSPPSPTARPCRRGLRRAQTQQVHVRAXLEPNVAGQPRSGGGGGGCVLFDA

SEQ ID NO: 248852 - protein, 99 aa, Zea mays
  unsure (1)..(99): unsure at all Xaa locations
  Clone ID: MRT4577_158540C.1.pep
LLEILSGRRPIEARRGPNXERITVRWAFYKYNRGNVRDILDPMLTEAVNENILNRIFDLAFQCVAPTREDRPSMKKVVERLWKIRRDHTKIQRIAELTL

SEQ ID NO: 248853 - protein, 52 aa, Zea mays
  Clone ID: MRT4577_158541C.1.pep
RFEMSSSDFDYRCFINCVGCFTDDALPPQLLHHLLRGPRVQDHSMIGRRIGS

SEQ ID NO: 248854 - protein, 26 aa, Zea mays
  Clone ID: MRT4577_158542C.1.pep
HIVSSVSRLLIGLVEMRIPANGLIVD

SEQ ID NO: 248855 - protein, 183 aa, Zea mays
  Clone ID: MRT4577_158543C.1.pep
AFVAPSSRIFGRGELVRDPDQIAIRYLKNDFIIDLAAMLPIPQMIIWFVIPAVSTSSANHSTNNTLSMIVLIQYIPRVYLIISLNSKIVKASGVVTRTAWAGAAYNLLLYTLASHVLGALWYLLSVERQYSCWKEVCTSENGTTAEMPTRCLVSFLDCKSRDNPIRQTLHNHSAIQKQCMLSD

SEQ ID NO: 248856 - protein, 87 aa, Zea mays
  Clone ID: MRT4577_158544C.1.pep
SSISEQPYTDLEIQHVILPGVHNTKLKIHHTSAYTFNVSCWCLCLCYTYRLDDYLLNNRAYPCLQGLHAGNCCMCEAPVLGMHMCIC

SEQ ID NO: 248857 - protein, 92 aa, Zea mays
  Clone ID: MRT4577_158545C.1.pep
FHASLSRSRGPAPRRFENRDPSLLFTLLRRRLSPTARPFPASACESRVNHRAPLRRRPLFEHILRHLSSPSNKYLTHRHPRRPQDRHPALLL

SEQ ID NO: 248858 - protein, 75 aa, Zea mays
  Clone ID: MRT4577_158546C.1.pep
LGPSPLPPCPSSPSAGSSSPPLPWSSSYRAMSWRTPSQRRRARASSRASLAFSRRSRAFSSSSATTAPLTPSVAQ

SEQ ID NO: 248859 - protein, 52 aa, Zea mays
  Clone ID: MRT4577_158547C.1.pep
KKTSCHFLLTAKHIFSTLFFTDYSTPHRIVSLVHDRLFDVVVIDKDNTSPRV

SEQ ID NO: 248860 - protein, 51 aa, Zea mays
  Clone ID: MRT4577_158548C.1.pep
SYGSKIPFNGPKRRNTRFRGLLGYKVTFPPTPYKGGVSLPKQTGDPVKNKP

SEQ ID NO: 248861 - protein, 178 aa, Zea mays
  unsure (1)..(178): unsure at all Xaa locations
  Clone ID: MRT4577_158549C.1.pep
MRPLGYVTLLXIFFAIHLHLCVSSRLLAERPATPNGQESPAAAAPVPSAVGSLPENTPASNDVPVNMPAKANAPTGAAAPVPSAAGSLSENTPASNVPVNMPANANAAIGAAAPVPPAAGSLLEYTPATNVSVTMPANAQRNDRCSGASPFHRRDVAGEHSGEQRPGEICPPTPTQRQ

SEQ ID NO: 248862 - protein, 86 aa, Zea mays
  Clone ID: MRT4577_15854C.1.pep
VPVGLVNITGLSESPREGPPQPSKNQWVEPRAKKGPAPRSYPDCPHWCLPGVRDTWNELFYWKFFFPSKDQGPLMGPANKRLETNC

SEQ ID NO: 248863 - protein, 128 aa, Zea mays
  unsure (1)..(128): unsure at all Xaa locations
  Clone ID: MRT4577_158550C.1.pep
PTATRPSRNSSPAPSPPPRTPATLDDPTRSPSVMVSTAMATSRPSSTTGTPASANPKPRAGALMTPSPPPTRRRPRRYSTTPWSVATXSGAPPRGRCAPXPCVSPAPARPTATRTTSGATACARSPDL

SEQ ID NO: 248864 - protein, 45 aa, Zea mays
  Clone ID: MRT4577_158551C.1.pep
KLFMLILTHPNDRTEFLCITGSSIRSLLLYIYLLTTSYAELPSLR

SEQ ID NO: 248865 - protein, 114 aa, Zea mays
  unsure (1)..(114): unsure at all Xaa locations
  Clone ID: MRT4577_158552C.1.pep
STYASCRLSMXIRQSTSTHQFWSSISSDRGAFLEGFELLGSRKAKNIFLLSTSTSSDVSACKLFVGIEATSRYITRCXYKGEIXLVVSSILKKMVRIAMQMQDPQIKNVFNCFI

SEQ ID NO: 248866 - protein, 147 aa, Zea mays
  Clone ID: MRT4577_158553C.1.pep
LSWVIPGFCGFPFSPLCFTRNRSRPPKSLAQQVFEGAKGKGPLPPPSSFPQLVGSLRFPPFPVSLLGSGLFARCPFFWVAPPFGSPGLAFFFSGFFFVWHFFRGTFPPGVLPLPLFSPRLVPGWGPLVRAYPLWGIPPKGDTTNRKK

SEQ ID NO: 248867 - protein, 98 aa, Zea mays
  unsure (1)..(98): unsure at all Xaa locations
  Clone ID: MRT4577_158554C.1.pep
SCSRSLPFNFLRQGLFRYFLFYXSLFXWFAFCLFYLFFFIFFFLFLFIFFFHFNFFFLFIFFFTLMSCSFFYKLLSYLYLSLFYFCFFFVVLFFFFLF

SEQ ID NO: 248868 - protein, 123 aa, Zea mays
  Clone ID: MRT4577_158555C.1.pep
PRAGREARQRQPVSPSRFSSAFASKRVRSTTPPAKRELLHNQPPRPRRDHDRGGLLRGHVRGGVAAVREAGQEHRGGACHALRLHRVRHQPDCGDDHHCSAVRAGVRAAAVTEAHGDAAPEGA

SEQ ID NO: 248869 - protein, 65 aa, Zea mays
  unsure (1)..(65): unsure at all Xaa locations
  Clone ID: MRT4577_158556C.1.pep
GDTPPPLCLPLPSCKMKTILASXTFDIPXGLTVTVAAKLVTVEGPRGMLTLNFKHSNLDFQLHEA

SEQ ID NO: 248870 - protein, 119 aa, Zea mays
  unsure (1)..(119): unsure at all Xaa locations
  Clone ID: MRT4577_158557C.1.pep
TVREITSRPFAFDNNSIVIYLGLDSLFLFKSVSSFLPSCRSSLAHSFGSVPSFVLFLCFFIPWVLVRRSLSIHYTPEALLNHVFEDLQKPKAPNSVQMNLKFVCXLYSKKIARXSGSVA

SEQ ID NO: 248871 - protein, 136 aa, Zea mays
  unsure (1)..(136): unsure at all Xaa locations
  Clone ID: MRT4577_158558C.1.pep
FSRPFWSLRPWPKDLQGRRQKNSSGSASAPPGRGCGPXTPSPPSAPPPAKNGSPCPRTRGPSSTGAPTSSPKTGAARSPKNSSNSPMAARPNGPTDGPFHVPPPGPPATSRQPPQKASPCCCFESLIGGPPPPQME

SEQ ID NO: 248872 - protein, 151 aa, Zea mays
  Clone ID: MRT4577_158559C.1.pep
FIFIFVTVLTITNYKYTFGSKESKGTSVTRKQMPSQREQYGNTVHLFIGTGRSPCKITSRPFAYDNNSIVIYLGLDSLFLFKSVSSFLPSCRSSLLRSFGSAPSFVLFPCFFIPWALVRRSLSTHYTPEALLNHVFEDLRKPKAPNISDTT

SEQ ID NO: 248873 - protein, 150 aa, Zea mays
  unsure (1)..(150): unsure at all Xaa locations
  Clone ID: MRT4577_15855C.1.pep
MREQNVALALLAVDASASSTXTCGRWGCQPPPVXIYAAKEHHXPPNVXHLPILEHIPPSVHLTPPVHLRPXDHVPADXHLPXTPCQYATQPARPQAHFQAHACPCQQPHPSQCHVNGTCGARTTPIVNHGVELLRHEGSPTATPYCSPEC

SEQ ID NO: 248874 - protein, 209 aa, Zea mays
  unsure (1)..(209): unsure at all Xaa locations
  Clone ID: MRT4577_158560C.1.pep
TFLLLPCVQEMTHINIVVIDHDDSGMWTITXHLIYXLGGIDKRAIDRTNEEAADMNKRIFKYARAIDSVMDESEKGITLDIVVGHFENTKYYCAAIDDTXHRDFIKDMIPVTSHADCAAHIIVSPNDDVHDVISKDGXSREHXLRALTSSGEXMICCCNYMYATTPKYSHDRYDDIEKEVSLYLNIRGYDPXDKSYFDPISGSEGDNMI

SEQ ID NO: 248875 - protein, 141 aa, Zea mays
  unsure (1)..(141): unsure at all Xaa locations
  Clone ID: MRT4577_158561C.1.pep
MFDEMWQWDAVVDAALVTLEARSLLRATRGXAPPATPQTIDXSGPWDRAAVEIRLHRDTLHQWLAEGQGQSNPPSVAQAKLVVNVYSSLXICIAGEASGHEEELDGNLILFSGNDYMCLSSHPAVPEAVVKVCQFCTVAAV

SEQ ID NO: 248876 - protein, 186 aa, Zea mays
  unsure (1)..(186): unsure at all Xaa locations
  Clone ID: MRT4577_158562C.1.pep
MAGGDDLKLLGMWASPYVLRVKLALSLKGLSYEYVEEDLRDKSELLLKSNPVHSKVPVLIHNGKPVCESQVILQYIDEAFAGTGPSLLPADPYERAIARFWAAYIDDKMTPAWNKSTMGKTEEEKAEGKKQSLVALETLEGALRDCGKGKPFFGGDSVGYVDVVLGGMLRWVRAAXEMHGVKPFRP

SEQ ID NO: 248877 - protein, 101 aa, Zea mays
  Clone ID: MRT4577_158563C.1.pep
LVKLFKELEACGRKPPSKDIVRKVEDAYETLGLLEDKKALLDKYKDLYNKPSRDDWKKGSRSKKIETDKPSDGDSKESKMETSENLEDRCFPVDAKSDASA

SEQ ID NO: 248878 - protein, 100 aa, Zea mays
  Clone ID: MRT4577_158564C.1.pep
GSKRVLRARRSLMLTAPGFGQILWRRRWFSDEPKQRHLVLHPQGNSGLQGSQMFPSCFPYCHHCLKGLWAPGMGKSNQMVYQSRSFWIWSLSSDRPGRVG

SEQ ID NO: 248879 - protein, 322 aa, Zea mays
  Clone ID: MRT4577_158565C.1.pep
MLRHLQRSLRAIHYSPIIGRDASCNPIPLHRSWDSHIEHATRDFSTSTRLTGHPIYQQNELEPTTPVKDTDIIIDRIRKSTRKLEEGPVGKNLSSAEKRKFLVNTLLSLEDSREAVYGTLDAWVAFEQDFPLASLKQALSVLEKEEQWHRIVQVIKWMLSKGQGNTMRTYELLACALEKDNRAEEAHRIWQNKVGHDLHSVPWRFCRLMLAIYYRNNRLDRLVKLFKELEACGRKPPSKDIVRKVEDAYETLGLLEDKKALLDKYKDLYNKPSRDDRKKGSKSKKIESDKPSDGDSKESKMETSENLEDRCFPVDAKPDASA

SEQ ID NO: 248880 - protein, 66 aa, Zea mays
  Clone ID: MRT4577_158566C.1.pep
MASGELACTYAALIISGDGIAITAERIPTIVHAATIDVESYWPALFATLLEKRNVEELILSVGSGG

SEQ ID NO: 248881 - protein, 335 aa, Zea mays
  unsure (1)..(335): unsure at all Xaa locations
  Clone ID: MRT4577_158567C.1.pep
PELLFANKSEDSQLKVIDFGLSVFFSXGDRFTEVVGSAYYMAPEVLKRNYGPEVDVWSAGVILYILLCGVPPFWGDNDEKIAQAVLRGNIDFNREPWPRVSANAKDLIRRMLDPNPSTRLTARQVLEHPWLKNADTAPNVSLGEAVRARLQQFSAMNKFKKKALGVVARNLPVEELDKYVQMFHLMDKDHNGNLTLEELMDGLHINGQPVPESEIRMLLEAADTDGNGTLDCDEFVTVSLHLKKMSNDEYLASAFRYFDKDGSGFIEPEELRDELGPNDQAILDIIRDVDTDRDGRISYQEFELMMKSGTDWRNGSRQYSRANFSSLSRRLCKDM

SEQ ID NO: 248882 - protein, 57 aa, Zea mays
  Clone ID: MRT4577_158568C.1.pep
QQLILISIATGIKKLYKKNKKKKSKKFKKKKKKNKKKKKKKIKKKYIIKLFFIKIFF

SEQ ID NO: 248883 - protein, 129 aa, Zea mays
  Clone ID: MRT4577_15856C.1.pep
SRENVEFQRRIIERSGLGEDTYLPEAVLNIPPNPSMASAREEAEMVMFGALDELFAKTGVRPKEIGVLVVNCSLFNPTPSLSAMVVNHYRLRGNVASYNLGGMGCSAGIIAVDLARDLLQCHRGNYPGV

SEQ ID NO: 248884 - protein, 137 aa, Zea mays
  Clone ID: MRT4577_158570C.1.pep
HGTDRLSRGPKKKPPQSSSPPHIKFRRTHLTDRMTITRGSYWTNQQLQHSQVLTTNRLDHLLNLGARAALCQLGRPHPCQQRPPCINPLPVTYCRSWGSNRLFRYFILAWNSNNSLSWMVSSQLMGWFKVILIFFLL

SEQ ID NO: 248885 - protein, 65 aa, Zea mays
  Clone ID: MRT4577_158571C.1.pep
DWSGTTTHHWYSYMDIFDSLFLNNGSLQFPEQFRSHFFWLHDSPIIQAQSSHVTYGQSAPALARM

SEQ ID NO: 248886 - protein, 162 aa, Zea mays
  Clone ID: MRT4577_158572C.1.pep
MNRGQFRASPLQQQVIWSADTATASSSSVVMSAFNFNSCHEDQEAFSPNNLPSLSSPSLLFSHDQQQSFPHTGTTSTSPGHQLLANCGAAAGGCLPSLHDGGQENHHMPESWSQMLLAGLVGGDQEERCSAALLSKGMDNWGDHAATASAACMVGGGGMKKG

SEQ ID NO: 248887 - protein, 31 aa, Zea mays
  Clone ID: MRT4577_158573C.1.pep
CSPMPSDELDQDAVLPSRYSSELTDAHSKKQ

SEQ ID NO: 248888 - protein, 150 aa, Zea mays
  Clone ID: MRT4577_158574C.1.pep
MHSHLACSGCKRLVQYRRGAAGVRCPSCDAFTAAANPSGPPEMSELVCGGCFTMLVHSRGAANVRCPHCGRLNSTRSGNQMGHLSCGQCRTTLAYPPGATTVGCPTCRNVNPVRDARAAPQTVLVENPRTLDEKGKLVSNVAVGVASWKR

SEQ ID NO: 248889 - protein, 92 aa, Zea mays
  Clone ID: MRT4577_158575C.1.pep
ISLQCKDQGRDIASSSMPSGAVGFIPICSSFCSASTFCLVVDCSVEIMLIQVIFISRIIICILIQTICNIINFPNVFIFHYSFIIVVNINTT

SEQ ID NO: 248890 - protein, 127 aa, Zea mays
  Clone ID: MRT4577_158576C.1.pep
CPDLSEYWRQLQAIGSVTLAELIRSEASEGRPVRVLVYDPFLPWSRRVAQEAGVAAVAFLSQSCAVDVVYGEVLSGRLPLPVVNGKELFARGLLGVELWPDDVPSVVAKPDWCPLFLRAFAVAIEGL

SEQ ID NO: 248891 - protein, 68 aa, Zea mays
  Clone ID: MRT4577_158577C.1.pep
KEGSATLDAYLSHKHDKLLAKLLQPDSYRKRSSLAIVDGFAVEITEDQASVLRSAKEVRVVEKNQELA

SEQ ID NO: 248892 - protein, 47 aa, Zea mays
  Clone ID: MRT4577_158578C.1.pep
KGFSLFEKVIISLLSELPVVVEYKIVEMGSIKFFLAPKIFDDEEIKP

SEQ ID NO: 248893 - protein, 210 aa, Zea mays
  Clone ID: MRT4577_158579C.1.pep
MQVLCDVCGGAPAAVLCCTDEAALCSACDRRVYRADKRRRIPLVQPCGDDSAAAAAAPLCDVCKERRGLVFCVEDRAILCPDCDDPIHSANDLTAKHTRFLLVGAKLSAALVDQAPPSPDDDDDDVAEPDAVPAACAAKASSLESGGGSSISDYLTNICPGWRVDDLLLDDSSFSAPSKTGYSDGHDQVPSVDADLFHVVASGRPGKRVG

SEQ ID NO: 248894 - protein, 265 aa, Zea mays
  Clone ID: MRT4577_15857C.1.pep
IDARLNDLKLTLGPELRIVYPLILNFAVSGDLELNGMVHPKYLRPKGILTFENGEVNLVATQVRLKNDHLNAAKFEPDLGLDPVLDLVLVGSEWQFKIQSRASMWQDNLVVTSTRSVDQDVLSPSEAAKVFESQLAESLLEGDGQLAFKKLATATLETLMPRIEGKGEFGQARWRLVYAPQIPSLLSVDPTVDPLKSLANNISFATEVEVQLGKRLQASVVRQMKDSEMAMQWTLIYQLTSRLRVLFQSTPSNRLLFEYSATSQE

SEQ ID NO: 248895 - protein, 100 aa, Zea mays
  Clone ID: MRT4577_158580C.1.pep
SSARRGGGGTCGGCIAHLFVAGLCERTKSEGLIDAFAELAEVIPVPAFNILDLYCNKEHRLMCTSNTSPAPERIHFQKSMFIAPRTAFLYAFIPPPSLPP

SEQ ID NO: 248896 - protein, 141 aa, Zea mays
  unsure (1)..(141): unsure at all Xaa locations
  Clone ID: MRT4577_158581C.1.pep
PVPSINRSSTMCCAVFMDVKFYVIGGVTSSNTXGLCVXEYDLQRRSWRIIETHVLRLPRSDXAPLVIAGVSNXFTLLHYIDNDLSKYDKKYTRWIAVGYSRERSVSMNGWVRALRXCGXSIIVIEGPRTCSVGPTELNSWT

SEQ ID NO: 248897 - protein, 72 aa, Zea mays
  Clone ID: MRT4577_158582C.1.pep
GLWVIALHVALNFFTIVVPSVVRVVFSPKRLIQLNVPCFAKWVNWKWNFCKNRKTVVWPRGGKKTECCCSFP

SEQ ID NO: 248898 - protein, 48 aa, Zea mays
  Clone ID: MRT4577_158583C.1.pep
QIIVDNAVIHRSVKCSKWRICQRCIDRVCRRAYSEHGEYRCKRVVSGV

SEQ ID NO: 248899 - protein, 90 aa, Zea mays
  Clone ID: MRT4577_158584C.1.pep
PRKIEKGAPFGGFQKTFKGASKGPPKGFLGFSEEDLVFSHFLGGNRWNLFYPKAGVPFKDPFVKLVFGGANKGGFNNRGVGLIPPIFKTP

SEQ ID NO: 248900 - protein, 215 aa, Zea mays
  Clone ID: MRT4577_158585C.1.pep
PRRWPPAATSARAPTWGTYQRSPCSPPRRTLSSSPVRSRLLPLLDAHPPAPTWLARAAVECVCRLCLPHQAGDNIHALRHLAAGTGSQLLLYEVGAARLVASFRVFDGVRVHGIEPRSGGPSCPSYTLALFGERRVKLFSLGFGVEADGGEARRRCLASHGMVVAPGTALHLPERAGPGRHGRSGWRRREALAGEVESHGVDVALPRADAWVDPR

SEQ ID NO: 248901 - protein, 60 aa, Zea mays
  Clone ID: MRT4577_158586C.1.pep
MAFMRYRALPQGELTVEGFRAWLAQFDADRDGRISREELQHALRSLNVWFALWKARCAVR

SEQ ID NO: 248902 - protein, 55 aa, Zea mays
  Clone ID: MRT4577_158587C.1.pep
SPLLTSLHLYGSRIILGSAINLHGACPSANQTRSRTHHLTTTKELGFAHLHIHST

SEQ ID NO: 248903 - protein, 86 aa, Zea mays
  Clone ID: MRT4577_158588C.1.pep
FCQPWVLTHKRKNGPVLHLIPVFFLGLSRAKKKKTGGSGIPSFGIIFNRGQGPKNPFSPHFFFEPFTSKGVFNPRIDKNFKKKCVF

SEQ ID NO: 248904 - protein, 56 aa, Zea mays
  Clone ID: MRT4577_158589C.1.pep
WLPATLASHALPMGVHQIKCLKIIVWSLLKYPIVFYGFSWAIIPPMCIPLILFPVC

SEQ ID NO: 248905 - protein, 65 aa, Zea mays
  Clone ID: MRT4577_15858C.1.pep
ETARRRAPRRSGIDVTPDASRVNRLTVSSTELGDVYTTDAHALGRTQSTSRHSVQCRQLQSCCLI

SEQ ID NO: 248906 - protein, 85 aa, Zea mays
  Clone ID: MRT4577_158590C.1.pep
HAPGCWLTSVSFAVVDIFVEQATISMAFKVLASLEIFNDAPKPLSTWHFLQVCGEAFVCKVVNYSKMKDQGPNTRVSLHLGHLIP

SEQ ID NO: 248907 - protein, 257 aa, Zea mays
  Clone ID: MRT4577_158591C.1.pep
MSSSRRRPPPPPPAWTPEPWSDGETSALLDAWGPRHLRACGGALRPADWRACADAVTSRRAAAGRAPRTVDQCKNRLDYLKKRLRAERSRPKGAPPTPPPVSGWLTRLRALLHLAPSAPPGFAHRLGAKTPKVEEEEEVLDEKPSGGAPLPRYWPPVPKRPRTAVSLSPLTAASGDHPGGGGRNCTEVAAALDRLAGTYERVEAAKQREATRLEERRLEAMRDLEIERMRLLVDVAVTASVVVDGAAATATTATGDF

SEQ ID NO: 248908 - protein, 23 aa, Zea mays
  Clone ID: MRT4577_158592C.1.pep
ATAVSEWSVSKSSSSSSSSSSSS

SEQ ID NO: 248909 - protein, 79 aa, Zea mays
  Clone ID: MRT4577_158593C.1.pep
GAPKLALKVSTPRSSVFFVSSSQICYPCGPQEQGERSGWRRSWEDQIAELKRRSVAKDSEENLSWGARMRRRAEASAAE

SEQ ID NO: 248910 - protein, 206 aa, Zea mays
  Clone ID: MRT4577_158594C.1.pep
MPHLAATPPTSSAAAVPAAGRIAFRRPWNTPQPEALRLRLRLRARGVRREDGGGVRTEEQEQTAPRTFYDLLGISADGSPDDVRASYRRLALKYHPDVSPPGAAAENTRRFIEVQEAYETLSDPSRRSSYDRALARGVCRLAFSGRRSQSHHAYYHHQEQGERSGWRRSWEDQIAELKRRSVAKDSEENLSWGARMRRRAEASAAE

SEQ ID NO: 248911 - protein, 461 aa, Zea mays
  unsure (1)..(461): unsure at all Xaa locations
  Clone ID: MRT4577_158595C.1.pep
MAILVGLVGVLSALFAAALRRLLISCRHPAYAAGFFHPYTNDGGGGERVLWCAVRAVQELRPDLPCAVYTGDADAAPEALAARALDRFGVRLLRPPQVVHLNKRKWIEASTYPHFTMIGQSLGSVYLAWEALTKFTPQFYFDTSGYAFAYPLARLFGCKVICYTHYPTISSDMVERVKHRSSMYNNNSLIAGSIWLSRCKILYYTIFSWLYGLVGSCAHLVMVNSSWXTRSHITNIWKIPERTKRVYPPCDTSALQMLPLERPTTPPVLISVAQFRPEKAHGLQLEAFALALQKLDPDFPKPKIQFVGSCRNKEDLDRLQKLKDRSTELHIDELVEFHKDISYRDLVQFLGGAIAGLHSMTDEHFGISVVEYMAAGAIPIAHKSAGPMMDIVLDEDGHQTGFLASEKEEFTEAIIKVLRMPESERQEMAAAARKRAQRFSDQRFHQDFTETVRPILSARES

SEQ ID NO: 248912 - protein, 87 aa, Zea mays
  Clone ID: MRT4577_158596C.1.pep
AKVADLVVVLSADFHLVLNVRSRSSFRHMVSLYSILVRCIILNRGALDGVGLVCIDSGLKVVVVDGAGPLKPYSATGGFARGHKYQR

SEQ ID NO: 248913 - protein, 53 aa, Zea mays
  Clone ID: MRT4577_158597C.1.pep
KKKKNLRARGVNQKKLHQKGFKGPGPLCAGRNFNPLPGEALFGGGGGFFYDPP

SEQ ID NO: 248914 - protein, 39 aa, Zea mays
  Clone ID: MRT4577_158598C.1.pep
IYFRWLIRVVDIPVFFFYLFVCLFFLYFLVFFFFGPLAI

SEQ ID NO: 248915 - protein, 142 aa, Zea mays
  Clone ID: MRT4577_158599C.1.pep
SSTAGSAVQGLLRGASYEDVATRVRALFAGDGCRPALGIGGSKMARSFLTFCEEQLRQPFPAPNETNAPPFRPVIFHDGRLVCRPTPFMSLVILLWLPLGVLVAFVRIAVGLMVPIWTVPYIAPVFGGAVITHGRAPSPGKL

SEQ ID NO: 248916 - protein, 191 aa, Zea mays
  Clone ID: MRT4577_15859C.1.pep
MPSKKASGLGAALQPLDVNQETLREARNQKRKATSPTPQEEELDQEIRDLEAIHQQVQRKEKMLRLSNLQKKIDETAEEMCHLTQDDEDRRPQRRELRQDNSYDDDECFQGFQMKPVTAQALFHCTQDHEEYLQAYVRRFLRQIAQAPTVPNEIVIEAMNKGLQPGPMAQYFARKPPQTLEKLLQKMDEYI

SEQ ID NO: 248917 - protein, 95 aa, Zea mays
  Clone ID: MRT4577_1585C.1.pep
QCLCCSKFLFQRQNLACFLTNPHCGSLVNADGHGEVWTDWNNMSKFFQYGWRCTTNENTYSNRTLMGNWNQERYDLRNIVQPKPLPSQFGHYFET

SEQ ID NO: 248918 - protein, 110 aa, Zea mays
  unsure (1)..(110): unsure at all Xaa locations
  Clone ID: MRT4577_158600C.1.pep
SFLEDIVGXVQLETPRDAEMHVLRMIEDGEIHASINQKDGMVSFHEDPEQYKSVEMVEHIDTSIHRLTALSKKLASIDQNMSCDTAYLMTGRDRGRFDYDDFDSVPHKYF

SEQ ID NO: 248919 - protein, 99 aa, Zea mays
  unsure (1)..(99): unsure at all Xaa locations
  Clone ID: MRT4577_158601C.1.pep
NGKIHASINQKDGMVSFHXDPEQYKSVEMVEHIYPSIHRQRTHVICAAXSISIHRLTALSKKLASIDQNMSCDTAYLMTGRDRGRFDYDDFDSVPPKYF

SEQ ID NO: 248920 - protein, 53 aa, Zea mays
  Clone ID: MRT4577_158602C.1.pep
SKHLPMLTPEYGVHVQCHCFLTDTWSSELAKPISMIYMFRSQYSVVLLIMHNI

SEQ ID NO: 248921 - protein, 101 aa, Zea mays
  Clone ID: MRT4577_158603C.1.pep
MSSRPRTPTSPTMAMIMPSTTCSTSSPSQSRSLSSKLPPFTMGFLDALYHVVMRRNAVYVTVVVIDSSAGEQVRPPSLPFFLGHQIPNLSFPLLKGLFFDS

SEQ ID NO: 248922 - protein, 109 aa, Zea mays
  Clone ID: MRT4577_158604C.1.pep
MAVAAQPLLASALLALLLAAASAADTKNNPADELVSLINSNRTASKASNLADNQGLGCIALQYIKAYKGQCDQVGGNKKPVDSSFIDTFAPNCGVQAASLAKITGRLLA

SEQ ID NO: 248923 - protein, 56 aa, Zea mays
  Clone ID: MRT4577_158605C.1.pep
RLRALTSTSKFHYWMELIGSQSNTLRCDRDCPRPSVSVCPGSTWLFCLLYLLHLSR

SEQ ID NO: 248924 - protein, 48 aa, Zea mays
  Clone ID: MRT4577_158606C.1.pep
MVFIKEMCSDGGSLNCSGCAYTLFSDERACAGRTGRVRVRVGRTEFRT

SEQ ID NO: 248925 - protein, 50 aa, Zea mays
  Clone ID: MRT4577_158607C.1.pep
VCVLIETPSTPGEARRAERDGTSYGFNDCGLTGTTVQNARTEHCKNRLTR

SEQ ID NO: 248926 - protein, 52 aa, Zea mays
  Clone ID: MRT4577_158608C.1.pep
AHSVSPVGKRKTMGYSITVALITGIGVICTHKTYTQKNGSIAKGDPNSQQSF

SEQ ID NO: 248927 - protein, 87 aa, Zea mays
  Clone ID: MRT4577_158609C.1.pep
ARRTGWKEGQKSVFPVPLEVKGGKYGGGSIVSVPRRVIPPSNSVTSTEEKVDPWVEATRRFYFQLFLVERAGQGPSRRKCIVTRACE

SEQ ID NO: 248928 - protein, 228 aa, Zea mays
  unsure (1)..(228): unsure at all Xaa locations
  Clone ID: MRT4577_15860C.1.pep
MGRMHSRGKGISSSALPYKRTPPTWLKTAASDVEEMITKAAKKGQMPSQIGVLLRDQHGIPLVKSVTGSKILRILKAHGENYIPIARFTCCQWRSLRYSECEAGKSKPSSGKYTKIRKHPLXIAKLGGAMALMKLHLGLSVFCDLHSNHVSCARVGLAPEIPEDLYFLIKKAVAIRKHLERNRKDKDSKFRLILVESRIHRLARYYXRTKKLPPTWKYESTTASTLVG

SEQ ID NO: 248929 - protein, 63 aa, Zea mays
  unsure (1)..(63): unsure at all Xaa locations
  Clone ID: MRT4577_158610C.1.pep
MVKAVALLISSNRFKITIFFTQQGDGPTXVTGNVSGLNPGLHRLHVHALGDTTNGSMSTGPHY

SEQ ID NO: 248930 - protein, 116 aa, Zea mays
  Clone ID: MRT4577_158611C.1.pep
ESFHLRSKKPADNTLVLGVGGGGRLVQMKQLQKMALLQLLLENIVLLLLPLLALTFSCCDAATLKLHAHHADGGLSLSRRELLHRMAARSKARAARLLSASGSARVDPGTYANGVP

SEQ ID NO: 248931 - protein, 47 aa, Zea mays
  Clone ID: MRT4577_158612C.1.pep
RHFNVLPGSYRLIFEGRKKQHHGFRQILVLEGASATNSPHSSDTKGT

SEQ ID NO: 248932 - protein, 112 aa, Zea mays
  unsure (1)..(112): unsure at all Xaa locations
  Clone ID: MRT4577_158613C.1.pep
KNHQKEFLKPITGKKETLIDLTVIEILSRHASDEFYLGQRDGGDYXTSDAGPLEAFKRFGKKLEEIEKKLIEKNKDETLRSRYGPAKMPYTLLYPSSEEGLTFRGIPNSISI

SEQ ID NO: 248933 - protein, 86 aa, Zea mays
  Clone ID: MRT4577_158614C.1.pep
SILYGGFKDRSFALYRSQACQFSMPSALAQCCPVVLYVLVCIIRELEVRLSRSRVIWCRSVSYLSVQRCGCLPPRPPCWGWCALRG

SEQ ID NO: 248934 - protein, 85 aa, Zea mays
  Clone ID: MRT4577_158615C.1.pep
PKHHAWAMDQIIIIMASWDGKGSEYLLNHDQDTRFFGRGGGIPGDGRAKKKKLEFLKKIPSLAPGASPGGGVLAKLPQGVGLGPQ

SEQ ID NO: 248935 - protein, 103 aa, Zea mays
  Clone ID: MRT4577_158616C.1.pep
KPDPMLVLQFLWMGKNLGIALDPLVSGYGSIPLSPYYFWPRKNAWGGLKTKLEKKKWVSPKQMIILFNPAPDIIPLWHQGGGSPSPLVASLPFVGFLTSPLRC

SEQ ID NO: 248936 - protein, 93 aa, Zea mays
  Clone ID: MRT4577_158617C.1.pep
SARAPFLGRPFFLPRVPRHQWRRHNGRTPSVFKGDRITGFLGNDPAELELHKKDIADFIQRISNPEISTLQRSIDKLPITHLKRHESLGDLTS

SEQ ID NO: 248937 - protein, 50 aa, Zea mays
  Clone ID: MRT4577_158618C.1.pep
GEQENRLYSLSDTLDCIFLYLERGNMPIRDWLHLELVQGGLAFVLFLSRS

SEQ ID NO: 248938 - protein, 170 aa, Zea mays
  unsure (1)..(170): unsure at all Xaa locations
  Clone ID: MRT4577_158619C.1.pep
IPPSRHTIASHLVSALSDPTEWYTSFIMIKTDGFHKLLVVEIISRLENKVFDLXRLVNXTLKGLLANKLYIDVASXPFFDASXEIIISGPVEVMDWKGNTDSTTGRTIIVASNPQSYEAGTIQGIFAADVEKNDVHEEDGIVTADKDIALRVPEGHADCENSQHPYIYEE

SEQ ID NO: 248939 - protein, 65 aa, Zea mays
  Clone ID: MRT4577_15861C.1.pep
ILVLHHACTRLRINITRRGCSCSHAHIREYVWSMITHGMHKSWRRANSRRKHQVLRRTLSMRSPS

SEQ ID NO: 248940 - protein, 56 aa, Zea mays
  Clone ID: MRT4577_158620C.1.pep
FCSEQPHLAVQVNMQHQALAVSVLQLPIGQLLQQFFAHLTVQAITTPHFFYVPTRT

SEQ ID NO: 248941 - protein, 43 aa, Zea mays
  Clone ID: MRT4577_158621C.1.pep
MDAIKKKMQMLKLDKENAIDRAEQADADKMQAEDRCKLLEEEQ

SEQ ID NO: 248942 - protein, 57 aa, Zea mays
  Clone ID: MRT4577_158622C.1.pep
FTNFVRRVLVYISSIILVTIIITRLIKIKTSKQPSKKFEHNNQCVKFITLRLSVLWL

SEQ ID NO: 248943 - protein, 75 aa, Zea mays
  Clone ID: MRT4577_158623C.1.pep
ASFRLAMIWARNGVMSILVIVAKSLNRNVSFVLYLNIVRLVKIMQYWPSSKMGDGGHLPSRWSIKVRFCRPYSRI

SEQ ID NO: 248944 - protein, 92 aa, Zea mays
  Clone ID: MRT4577_158624C.1.pep
TPLQVRLNGDATLIEFECLSDAGQDSLCFGIKYFNWNIPDNSDGTPHIDAVTTGAMQGFMVATRIMTIAETIVVVACPDGLTLAVTLTLAYS

SEQ ID NO: 248945 - protein, 104 aa, Zea mays
  Clone ID: MRT4577_158625C.1.pep
SGRSFFFSAQMKCSDKSCKLVQHMSRSYIYKRKLRNTVNPMKHAKTYTAKADGGHVCLASKAAPNMRVRSKPRLPSEGNHENMVYNPGHSCIIVPTNLMHNPTV

SEQ ID NO: 248946 - protein, 261 aa, Zea mays
  Clone ID: MRT4577_158626C.1.pep
ELSLKIVSKIEAGERFTVYVVVPMWPEGVPESASVQAILDWQRRTMEMMYTDIAQALEANGIEANPKDYLTFFCLGNREVKQEGEYEPEEHPEPDTDYIRAQEARRFMIYVHTKMMIVDDEYIIIGSANINQRSMDGARDSEIAMGAYQPYHLATRQPARGQIHGFRMSLWYEHLGMLEDVFQRPESVECVQMVNKVAEKYWDLYSSDDLEQDLPGHLLSYPIGVTADGSVTELPGMENFPDTRARVLGNKSDYLSAILTT

SEQ ID NO: 248947 - protein, 97 aa, Zea mays
  Clone ID: MRT4577_158627C.1.pep
RTSIYWLSVLAPPPGMHTAAWGCNPPDPVYYPPQRHLLCAYHLASQLHGARDGHLQARGQLGQWRHVPQGVHLLHERSRLLTEPSQARDDPQDQGCH

SEQ ID NO: 248948 - protein, 50 aa, Zea mays
  Clone ID: MRT4577_158628C.1.pep
INKNGLAPPMVLIWETLLKIACAKSFQPIVNSMLCYQNLATGHLVGPQCR

SEQ ID NO: 248949 - protein, 264 aa, Zea mays
  Clone ID: MRT4577_158629C.1.pep
LGPSRPAGKISSIEAGERFTVYVVVPVWPEGVPESASVQAILDWQRRTMDMMYTDITQALEANGIQTNPKDYLTFFCLGNREVKQEGEYQPEEHPEPGTDYIRAQEARRFMIYVHAKMMIVDDEYIIIGSANINQRSMDGARDSEIAMGAYQPYHLATRQPARGQIHGFRMSLWYEHLGMLDDVFQHPESVECVQKVNKIAEKYWDLYSSDDLEQDLPGHLLSYPIGVTADGTVTELPGMENFPDTRARVLGNKSDYLPPILTT

SEQ ID NO: 248950 - protein, 151 aa, Zea mays; identical to SEQ ID NO: 218723
  Clone ID: MRT4577_15862C.1.pep

SEQ ID NO: 248951 - protein, 70 aa, Zea mays
  Clone ID: MRT4577_158630C.1.pep
LFYCLLPHYGTNLQIRGITLLNTKFFHLNIFYCKNMLIDKITFKAPYVNPNTDYIHICYSIHPHHHQNHH

SEQ ID NO: 248952 - protein, 159 aa, Zea mays
  unsure (1)..(159): unsure at all Xaa locations
  Clone ID: MRT4577_158631C.1.pep
PDRSTARAGPRVIPQFLPSVTAMGIEHPXVGAYRVQQALALSVXQRPFGQXNDSNXAHLPMLAISPQLEPQCVYALSHLAAVNPSTXVHHHLLACTPHGKANTSAHQQQLQMRQNVPALSDLSMVNRHGYLSQQRCAFMSTLCVGNRYTYMLHHADAMR

SEQ ID NO: 248953 - protein, 91 aa, Zea mays
  Clone ID: MRT4577_158632C.1.pep
NRAGERSPVSEPPDPDSGDLPNPMASAGEAPSTLLRFLYFVGAGVICTKAINTYRDYEHKKESTAALAAAESALAAAAAAEPAPATAAAKP

SEQ ID NO: 248954 - protein, 53 aa, Zea mays
  Clone ID: MRT4577_158633C.1.pep
LSINTDCSSGGTNLVPAPQTCAAYWRAQGSHLRCQTPIYGFISKYKTPPQSFF

SEQ ID NO: 248955 - protein, 91 aa, Zea mays; identical to SEQ ID NO: 248953
  Clone ID: MRT4577_158634C.1.pep

SEQ ID NO: 248956 - protein, 75 aa, Zea mays
  Clone ID: MRT4577_158635C.1.pep
RKNKSCFPSLLILVNYIKMTKDTKMTSGLYTTRLYTSKREKRRKNTVTKLSYRSELHHTIQSSSSYTIQATIGSQ

SEQ ID NO: 248957 - protein, 101 aa, Zea mays
  Clone ID: MRT4577_158636C.1.pep
SARDLNHHTTTVATHSNHSARLASLVDAVATATSRKAPAAHARGSALPLGFDRSLLQLQGDTRHAGSRDEGRAFGSAQGDRAASMAVAAKLTHDLERLKEN

SEQ ID NO: 248958 - protein, 43 aa, Zea mays
  Clone ID: MRT4577_158637C.1.pep
VRPRVRSLFRTFSMVAYLKEFLMIWSNKMFHTTTCLALLQGIY

SEQ ID NO: 248959 - protein, 121 aa, Zea mays
  Clone ID: MRT4577_158638C.1.pep
MAGATVTVEEVRKAQRATGPATVLAIGTATPANCVYQADYPDYYFRITKSEHLTDLKEKFKRMCEITPCECPRLYIKLTLYLSLSPRLHRSLALASLKNIHSRHVVVVSCYLLTVLVSRRR

SEQ ID NO: 248960 - protein, 49 aa, Zea mays
  Clone ID: MRT4577_158639C.1.pep
EHEPVNAPQRFIGRLTNITVLFCDLYTHGIDLARGLRHSTISLSPTDPR

SEQ ID NO: 248961 - protein, 51 aa, Zea mays
  Clone ID: MRT4577_15863C.1.pep
FCAIQAYQCVHQPIVTTSYHTRGFNESSWTSDAQVWSSLFMDGQWYSILAH

SEQ ID NO: 248962 - protein, 129 aa, Zea mays
  Clone ID: MRT4577_158640C.1.pep
GPRFGDGGPLGGGGGSGGGGGSGGGGGGYGGGTRGGGFGTSPGNWRTLPVGPARPSYPVCPRVVSPSPKGLSSFAPFVVAPLCFFLQGPFVPVVRPVFLPGPRRPLLPPAWPVAPRLLFPPPGFVFGSP

SEQ ID NO: 248963 - protein, 72 aa, Zea mays
  Clone ID: MRT4577_158641C.1.pep
NEALAPTWVAREKKSQQRVRGNSHRGGHTMGHNYAGPQVGHQHWNEQIKGTGLYKRFLDYGSLLKRTTRVEL

SEQ ID NO: 248964 - protein, 420 aa, Zea mays
  unsure (1)..(420): unsure at all Xaa locations
  Clone ID: MRT4577_158642C.1.pep
LGPRAGRKWSMFGGGVTFLVGAALNGAAKDVGMLILGRVLLGVGVGFANQSVPVYLSEMAPARLRGMLNIGFQLMVTIGILCANLINYGTAKIRGGWGWRVSLALAAVPAAIIAVGALFLPDTPNSLIDRGYTDAAKRMLKRVRGTDDVEEEYSDLVAASDESKLVAHPWRNILQPRYRPQLVMAIAIPMFQQLTGINVIMFYAPVLFKTLGFADDASLMSAVITGLVNVFATFVSIVTVDRLGRRKLFLQGGTQMLACQIVVGRLIGANSGFSGVAEIPKGYAAIVVLFICAYVAGFAWSWGPLGWLVPSEIFPLEIRSAGQSINVSVNMLCTFIIAQXFLPMLCRFKFILFFFFGAWVVVMTIFVALFLPETKNVPIEEMGRVGKAHWYWGRFIRDVHVHVGADLEMPSANAKLGGMQ

SEQ ID NO: 248965 - protein, 56 aa, Zea mays
  Clone ID: MRT4577_158643C.1.pep
CDIDTEVTIVTFTSAQLRAIIDKKDSIRNMSVIAHVDHGMSTPTDSLVAAAGLIAQ

SEQ ID NO: 248966 - protein, 52 aa, Zea mays
  Clone ID: MRT4577_158644C.1.pep
DLLELECDRVRSRVERHDVVGGGRHDVDGFSSGYGSGMETKGLKWRSMPQIV

SEQ ID NO: 248967 - protein, 111 aa, Zea mays
  Clone ID: MRT4577_158645C.1.pep
GESTPQEFLDFLAKFQRTSRNFAKRQLTWFRNEKIYHWVDGSKPFEALVQFVCDAYHGCSARMVPESLEMKRENCVLKSRDLKTYRSMNRVFLGGDDCSHVLNWIRRTQSK

SEQ ID NO: 248968 - protein, 134 aa, Zea mays
  unsure (1)..(134): unsure at all Xaa locations
  Clone ID: MRT4577_158646C.1.pep
MARFQLAALAMAMLFAAAAAQAPAATPTPAPKASPPPPATPAPTPATPPPAPAPVSPPAQPPATPHPGPGARSQGPRPCARGPWPGPXLRGPGLAVGVRRVCLGWCLRGGPLGRVLCARFFRRCGPGGAAPRVG

SEQ ID NO: 248969 - protein, 67 aa, Zea mays
  unsure (1)..(67): unsure at all Xaa locations
  Clone ID: MRT4577_158647C.1.pep
MANTITNLKNHLKLARYYTLKHLYQTCMIFFEVHIXQINIHLTTLDDTLIXTKCINCNIAISEDVQH

SEQ ID NO: 248970 - protein, 96 aa, Zea mays
  Clone ID: MRT4577_158648C.1.pep
NLSIGWMLRQQLACMRVIIFSHFKQSDPCFHLLFLHAGCWRRRAGDGGGAERDDVAAPEMEEAPEMEEGSAPPSPIPLARAPILPRQLVACCLVPN

SEQ ID NO: 248971 - protein, 85 aa, Zea mays
  Clone ID: MRT4577_158649C.1.pep
FKPWSNHGLKMRHLNVVLVPQIFGKTMITYTRRTILLATQLSTWMTTKTCLFSDLEDDHLKSLICNLQSEISTCVQQNVYVDIAP

SEQ ID NO: 248972 - protein, 59 aa, Zea mays
  Clone ID: MRT4577_15864C.1.pep
LFLSPPIVPLSSHKNLAVPNTRPSLFIFASSNVPQSPQLVRVRVSARYSFFPTRRRTRG

SEQ ID NO: 248973 - protein, 40 aa, Zea mays
  Clone ID: MRT4577_158650C.1.pep
STTITQLNGFNSTIRNFRYLGSSKLVTLYGSWNYNVGTQK

SEQ ID NO: 248974 - protein, 125 aa, Zea mays
  unsure (1)..(125): unsure at all Xaa locations
  Clone ID: MRT4577_158651C.1.pep
PPGFSTPRASPVGPLPAPPPGPAFFVPSSLGGFPGXRPPPRPPFLSVPLPXVAPFFFPFGPPGFPPGFRPVTPSPFLFVRSPIRPPLALRFLLPAAVLPGIPPPPRFPPAPPPPHVCAPVLNRTH

SEQ ID NO: 248975 - protein, 57 aa, Zea mays
  Clone ID: MRT4577_158652C.1.pep
FYCFRRRLRVSLVSVEPFRFRPFLFWPWDMPVPQRLTNHCGPVLCCSLGPPFAFVEP

SEQ ID NO: 248976 - protein, 50 aa, Zea mays
  Clone ID: MRT4577_158653C.1.pep
NLVEFTETYLRCYCFGLSQCWGSFYLGMKTAGNGIYSVISFLKKKKKGRP

SEQ ID NO: 248977 - protein, 64 aa, Zea mays
  Clone ID: MRT4577_158654C.1.pep
LATFGGRGQNLGPGCWPGSLRFRGGKLRHEQRDGSPHQGGVAGDSHMEAGGGLPYISGFKPFWG

SEQ ID NO: 248978 - protein, 71 aa, Zea mays
  unsure (1)..(71): unsure at all Xaa locations
  Clone ID: MRT4577_158655C.1.pep
QIRHGILQNFRVKXQVTNKNKIIVSLSPFYLPPLLQKPPSIPHGVQRLPKLQSPKIPKTYNQLSRREKISP

SEQ ID NO: 248979 - protein, 645 aa, Zea mays
  Clone ID: MRT4577_158656C.1.pep
MARGQHHLVGGASLEMRRGRKTEYLDIPLKDSIEGWRLEWFIMENHGKSLPPRSGRQPDVRAPSWIESPTDLEIAEAKVILAEICLLKERGMTVEAVVADFVFKNIQPLKDRAYPAYLYSGVTDSTRVTNKRIPAVDLVSRLEMILRGKVSNIGVVVAYSAWNLPPSKFFFDFVSNPPASDSGLGLRVRPSLEEVEVLVASLGDLPNDERQVHFEMPMSLGDAEISAMMDMLARDSSDSVPAETMVVATIPEPEKTVDTRRPEEVPVELFTGADPNGCVPADADPNGCVPADVDPNGCGPAVAELNGCGPTDADPNGCVPADADPNGCDPVPYIVCIVDEDEEEEEEVPLVRKNSRRYRVTESTSALEVAVAENPVLKDGASGCPAPEGVAGNDPARVGSASCDLAPEGVAGSDPAPMGSAGCNPAPEGVQAGSPSHTSMDVHVGSSPPRSDGMVIRLFWFWQFSWQVIVFVLIYFQYQALVDGMSNQLRSQDMARQYSELEEKYSQGQTDLARVCASLDDANSLNSSLNAQLDSEKAANEDEVLRLRQLVSSKDSIIKDLCASKRSVVHELEAAQLATKIAEDNSTILKAQRDKAMDKAIRTGRILIRRPGVIVPDDIVADVKAAPDSSSRPSSSVAPEKNVAK

SEQ ID NO: 248980 - protein, 99 aa, Zea mays
  Clone ID: MRT4577_158657C.1.pep
LPLVGNNQSICDRLIHDNSPKRPHWTNNLFHRMSFLQPRSIQTRVLLLCSNLSDNRLGCTPAATILGAPYQILLPETLGKDNFLWRVTTELQLWLLQAL

SEQ ID NO: 248981 - protein, 201 aa, Zea mays
  Clone ID: MRT4577_158658C.1.pep
MGNNGVWCVLLVGLLLVASVEGDDWSAHLNLKPSAGEAGGVMVAKGGLPDVRFSICDVWCEDRRPNVNHRLCVQNLCPYDKTPKRFSAGEARGAMLAKGGLPAVRLSICDVWCEDVHPNMNHRLCIQNLCPYDKTPRHFSAGEVRGAMLAKGGLPAVRLSICDVWCEDVHPNMNHRLCIQNLCPYDKTPRVKLTSNDLLSA

SEQ ID NO: 248982 - protein, 141 aa, Zea mays
  Clone ID: MRT4577_158659C.1.pep
MTYRRTRPSVKDRFIINVDIYLQPTALQLLPHPPPPSHPDLIMLHLFSFRCAPTSATRMTPRQRPHRHCLVSTAGAVRAEPANTNEGYTHVVSLTHRSADLISVFMGQHTMTGKDSPFLLIIMKDVLHHYTAALRDAAPVE

SEQ ID NO: 248983 - protein, 78 aa, Zea mays
  Clone ID: MRT4577_15865C.1.pep
CVTAAPGRGARSKRSSRAPAAAAWHSLVPRPPSQPSPSLSFCSSSDFPSLSNRPARGRKSPAPGGDASAGSYGGGGVR

SEQ ID NO: 248984 - protein, 387 aa, Zea mays
  Clone ID: MRT4577_158660C.1.pep
MSAAPPRRVVICGGGVVGACTAYFLATHAASPTVPTLVERCAPACAASGKAGGFLALDWCDSTPALSRLARASFALHRRLADALGGADAYGFRPVHTLSILLPPHPAASSSSPQHPLLPPWVDPSASAAPPRELGTPDTTAQVHPGLFTKAVLAASGAEVVIGEVERVVVARDGRVAGVVVKGRDGVLDADAVVLALGPWSGRLQVVSEVFDVSGLKAHSIVLRPREPEKVTPHCLFLSYQPEPGAKMLDPEVYPRPTGEVYICGMSKDENPPDDPATIVGEPDSIAMLHKIAGKVSSQLKKEEGAEVVAEQACYLPCTADGLPVIGEIPGVKGCYVATGHSCWGILNGPATGAALAELILDGKSKIVDLEPFSPARFLKRRSRRGV

SEQ ID NO: 248985 - protein, 69 aa, Zea mays
  Clone ID: MRT4577_158661C.1.pep
MAALKAYVLLFTAFFFSGLMQLSMAAHDKQPATTARVVVDAKAIDQAVAYLLMFAALFVTYFAHSRSVV

SEQ ID NO: 248986 - protein, 146 aa, Zea mays
  unsure (1)..(146): unsure at all Xaa locations
  Clone ID: MRT4577_158662C.1.pep
PSRFSVKDLATRTPLARCDRSGPLYTFGLHPPXASPLSVLVSTTCSITWHRRLGHPRPDVMGKLTSSXIFXCSRGHFEDLCHTCQLGRHTRLPFTTSRAEQVFDLVHCDLWTSPVLSLSEYKYYLMILDAXSIFYXTFPLLLKFDT

SEQ ID NO: 248987 - protein, 98 aa, Zea mays
  Clone ID: MRT4577_158663C.1.pep
PCVPPGVRSHSAVRHTQPTSQDYLPAKPPEGELQSKPRPWAFTSAPPWAAGLSTRRPRSPYTPQNRRKWHPTCPRPRNGASKPNSPQGPPCGTIPLRH

SEQ ID NO: 248988 - protein, 108 aa, Zea mays
  Clone ID: MRT4577_158664C.1.pep
IQYGDSGKFYSFVLLHLVHRKICRLVGGLQPNVFVLQGNWLIAKKPKVRDTATGNMKGPGREATVGETEKDVLELMEASQAAPSVNAKKKGAKKRTSRCPFCYSIWRQ

SEQ ID NO: 248989 - protein, 68 aa, Zea mays
  Clone ID: MRT4577_158665C.1.pep
SSPSGRPHARSESQSPRTRVPPSTDTATSSPKVADASSPSLIHSGSSDGSFHEPLSARLGTSRQPPIS

SEQ ID NO: 248990 - protein, 178 aa, Zea mays
  Clone ID: MRT4577_158666C.1.pep
MVGGGGRRAALGRWCLVILAVASALGVSGPAFYWRYKKGFSSSSPSCPPCSCDCPAPLSLKSIAPGLANFSITDCGKNNPELAKEMEKQFVDLLNEELKLQQVVAEEHSHHMNATLVEAKRQATQYQREAEKCNAATETCEEAREQSEVAISKEKKLTAMWEQRARQLGWHDSRATSM

SEQ ID NO: 248991 - protein, 189 aa, Zea mays
  Clone ID: MRT4577_158667C.1.pep
MVGGGGRRAALGRWCLVILAVASALGVSGPAFYWRYKKGFSSSSPSSTAAAVASSPSCPPCSCDCPAPLSLKSIAPGLANFSITDCGKNNPELAKEMEKQFVDLLNEELKLQQVVAEEHSHHMNATLVEAKRQATQYQREAEKCNAATETCEEAREQSEVAISKEKKLTAMWEQRARQLGWHDSRATSM

SEQ ID NO: 248992 - protein, 119 aa, Zea mays
  Clone ID: MRT4577_158668C.1.pep
KTAPLWKAGNGLEEFDRCFYYGKGPGVVSLRGHCQGPRGGGLHFRKQGSKKFGRGAPPFDCLFLPCSAPGLRKIPRRAGWDLSSPPRQMRIENPSSPCVAFRVIIPHRPVACCSVRKNR

SEQ ID NO: 248993 - protein, 73 aa, Zea mays
  Clone ID: MRT4577_158669C.1.pep
GACPNSLIETERLNAPLLQTKSNKYGRYQRNSRPRIASATAACMREVALAARARRARATSNTLRCRSGLLRSE

SEQ ID NO: 248994 - protein, 97 aa, Zea mays
  Clone ID: MRT4577_15866C.1.pep
SVCLDWYIAGCTFPPQFHSITDAIVYIVATKWCSFEIIIYLEKVKGKRTFFYKNRQICWIIPRQIINSNKDSLRHDHIRATTNIQLGLMCKRAKGGF

SEQ ID NO: 248995 - protein, 97 aa, Zea mays
  unsure (1)..(97): unsure at all Xaa locations
  Clone ID: MRT4577_158670C.1.pep
MADVEQGLNSRTLRGYTIQKESSLHMGALVTEAVRHFIKATARGTITVEGVLTDTIDSEPAKIQDKEGFPTDQERGXFADKQLEDGRTLAVYNIDKE

SEQ ID NO: 248996 - protein, 40 aa, Zea mays
  Clone ID: MRT4577_158671C.1.pep
PDRISRWQYHLLLFLLGAFNYVVLNIFQHFSRCHKYNGLT

SEQ ID NO: 248997 - protein, 75 aa, Zea mays
  Clone ID: MRT4577_158672C.1.pep
QPPPFSLPRTPHHPGQGIYLWSSAITQVDHQHDTPKLFNRWTLYDVQNNYIYLNHYLLLNSTKHATYLPHTLLPH

SEQ ID NO: 248998 - protein, 84 aa, Zea mays
  Clone ID: MRT4577_158673C.1.pep
REPLIRPLVRPRVRFLSRATVVQYYSALRMLGGARIHPQSSHEMVCVLTISCNLIQLFLVVWVNFESFPCLYIFYILLFLYILS

SEQ ID NO: 248999 - protein, 31 aa, Zea mays
  Clone ID: MRT4577_158674C.1.pep
LREGGDTVWIRYCKHLVVQDEACCKLLVGTS

SEQ ID NO: 249000 - protein, 231 aa, Zea mays
  Clone ID: MRT4577_158675C.1.pep
MESESDNDFRDDKSVSEHEEVEETKPKSALKKGREPAPVVERPELPEQPDPSTLDVSTLSPLSPEIISRQATINIGTIGHVAHGKSTVVKAISGVQTVRFKNELERNITIKLGYANAKIYQCDNSECPRPTCYRSYKSEKEVDPPCEREGCGGRYRLKRHVSFVDCPGHDILMSTMLSGAAVMDAALLLIAGNESCPQPQTSEHLAAIEIMKLNHIIILQKQVDLMREDSA

SEQ ID NO: 249001 - protein, 60 aa, Zea mays
  Clone ID: MRT4577_158676C.1.pep
GLRCSFFLLLSSVCLSKVLCRSPIMYSLLMCHASCMCASVPCELRRTCDYFYQWVLIIVS

SEQ ID NO: 249002 - protein, 93 aa, Zea mays
  Clone ID: MRT4577_158677C.1.pep
TCLWSFVLDGLQSYEIYVIAGVDMLDTKFGGNSPTEAGVPLPKMRGWLYVKPTAQIGMPVLFLNGVGAHTLHVRTRGDRLLPSLQSVVRAYLP

SEQ ID NO: 249003 - protein, 164 aa, Zea mays
  unsure (1)..(164): unsure at all Xaa locations
  Clone ID: MRT4577_158678C.1.pep
IRVEIITIVQKISTTTSFHFVTHSKSLLINAVNKQSARKPXSTSLFDRLGINFXKTSEASAFRDMKLRPFRAITVLMAKTMLIVQNYXEEMXLAAEXISSMTLIKMSEIIDTYLGTSMXNAVVTGPVXFIYSQRLLTFDDMVIDGLDVMRIIDEPIAAAIDYGL

SEQ ID NO: 249004 - protein, 125 aa, Zea mays
  Clone ID: MRT4577_158679C.1.pep
MGTSPVIPATMLFVALLVAVCFGATAARSSHARHTDADDAIRLPSSFGAGGRPWNCCDSAIKDASLPAWRCNDVVDKCSADCQDCEASPAGDGFVCGDFILSLTEPPVCTPRPWDCCRTWISTSN

SEQ ID NO: 249005 - protein, 137 aa, Zea mays
  Clone ID: MRT4577_15867C.1.pep
YILSAQRKCGALQIAALCTSSTTLPSTRPWHRQNHRMQAVLTRHRPSHQRHAVLQHMPMHLSLLPRELPPLMHLKPPTPPALPMPHLRQQPRKSEPAAEPTTDVSTPSSSTDEELSPSPSAFTVDVASPAADGPADG

SEQ ID NO: 249006 - protein, 54 aa, Zea mays
  Clone ID: MRT4577_158680C.1.pep
STHAFSLMLSINMSGAHNTMKEVHRSSSVPRICNVQPNSNTYPCSCYFERFIAH

SEQ ID NO: 249007 - protein, 202 aa, Zea mays
  Clone ID: MRT4577_158681C.1.pep
MNNHQQQLEAWRKKKGIAAGSGMGTSPVIPATMLFVALLVAVCFGATAARSSHARHTDADAAIRLPSSFGAGGRPWNCCDSAIKNAELPAWRCNDVVDKCSADCQDCEASPAGDGFVCGDFILSLTEPPVCTPRPWDCCDSVACTRDYIPNCMCLDKVESCSSNCERCEFLYHSDPPRFQCRDIFHGYPGPKCWTTWISTSN

SEQ ID NO: 249008 - protein, 249 aa, Zea mays
  Clone ID: MRT4577_158682C.1.pep
MHSPMYNSNEAHYMEGESMRAAFEKWFVKYKVDLVFAGHVHAYERSYRISMYQQQLQAWRKKKGIAAGSGMGTSPVIPATMLFVALLVAVCFGATAARSSHARHTDADDAIRLPSSFGAGGRPWNCCDSAIKDASLPAWRCNDVVDKCSADCQDCEASPAGDGFVCGDFILSLTEPPVCTPRPWDCCDSVACTRDYIPNCMCLDKVESCSSNCERCEFQNHSDPPRFQCRDIFHGYPGPKCRTWISTSN

SEQ ID NO: 249009 - protein, 487 aa, Zea mays
  unsure (1)..(487): unsure at all Xaa locations
  Clone ID: MRT4577_158683C.1.pep
STVGAATPLVWDHVTGAARLPFRLPASVESLPAGLPRLDSPRRIAAAAFGSDDELVDLELRVEISSIAGIEDALXLKPASGKAAETRLRAGWARWLEGKADYLRRDRMLRSNLESLNPRNHPLLQDPDSPGLTSLTRGDRMVQRMLLAELDKPASKSFERRRLLSYENKQXHDNNCEGEAADGXRWGYFPGIDPHLGFSEFMERFFEHGKCSMRVFMVWNSPQWAYGIRHQRGLESLLKQHPDACVVMLSETLELESFHQFVKEGYKVAVAVPNLDELLESTPTHVFASVWYEWRQTKYYHLHYSELVRLAALYKYGGIYLDSDVIILKPLTSLRNSIGATNHVSGNSRFGGAVLAFEKQSPLLEECLREFYSTYDDTLVQWNGAELMTRVISNISSRADENRGHLDIKLEPFVKFYPISSTDIIRYFSEPDNMVQKAHHDASFXRIVNDSTTFHFWNGITSALVPEPSSVVSKILNRYCIRCLDVL

SEQ ID NO: 249010 - protein, 37 aa, Zea mays
  Clone ID: MRT4577_158684C.1.pep
LFSRSVRSRVLLVAAAPPWPAPFLVPAPAVSGRLRNR

SEQ ID NO: 249011 - protein, 60 aa, Zea mays
  Clone ID: MRT4577_158685C.1.pep
LSGGTVAVAGRWGHAGLTRDTGRNHPTRRVVVAFVSRAHQENKTRATKNSTSTVRPPSVS

SEQ ID NO: 249012 - protein, 171 aa, Zea mays
  Clone ID: MRT4577_158686C.1.pep
MASGPRSGEAKPRRFDLTMSRRTRRPAAATVERLGFLQPVVRPEERRSPDGRPFCLPGHPQPEDAHQEHEASEPSTEEECQDRRFSLQELIEDEAVDGAATGGTTEGNTPAAGVREFAQLQGAAAGEATRRAGQVPAGRRVIGMVRRYVKVRSIKPKRASPSAEKCASPVC

SEQ ID NO: 249013 - protein, 54 aa, Zea mays
  Clone ID: MRT4577_158687C.1.pep
FIGQLCISIFGCFSFKTVKLVDYSLVLYTNIFKNSFRNARSGVRNIVITWILRK

SEQ ID NO: 249014 - protein, 78 aa, Zea mays
  unsure (1)..(78): unsure at all Xaa locations
  Clone ID: MRT4577_158688C.1.pep
GLCQVFPGRARKRVPRGFKRKPPGLLQKGGQGKKNGPLGGEPGPVQAPFREKNIGPXKIGSPVGGFNGQAFHPGGVQP

SEQ ID NO: 249015 - protein, 32 aa, Zea mays
  Clone ID: MRT4577_158689C.1.pep
LNPPKSNLDPLKVTFLAFSFRPPFVGKRCALA

SEQ ID NO: 249016 - protein, 74 aa, Zea mays
  Clone ID: MRT4577_15868C.1.pep
GQGPCPPRLQAGGFLRIRPQKGQGVPVAHGGWPPQGKTVGPRPVHFQKIFKSSCLCRLQLDGTKNMSPCICPPL

SEQ ID NO: 249017 - protein, 190 aa, Zea mays
  Clone ID: MRT4577_158690C.1.pep
MVSIPTVCFLPTRTSGKLLEPSPLRAPLSWCRALFTRYLCSECRSPCRSPWLGSTLAGARRSSRSRMLSLSSMVFVVSSTYGSGHRSSRRDPFLLVLSMKPRPAPTSTISLAHLPAPSIRRQYSCQAILLSQFIGRRSPLHLSPSMLSTVRPVVSNLIVVSHLQSRQPLLDMCLVKSLSQVLLLLPGIHN

SEQ ID NO: 249018 - protein, 96 aa, Zea mays
  Clone ID: MRT4577_158691C.1.pep
LHTKYRLQAVPSYNGNSGCNETQGPILPYIRCNFKTGEMCWRHCLKIHLFYGHNRHRTGFRLQSHVFYLGANILQRADLVPQHLRLHRANLILPAL

SEQ ID NO: 249019 - protein, 133 aa, Zea mays
  Clone ID: MRT4577_158692C.1.pep
PFFPFLRARGGMAIKCAASPWLKEKTRWGPISKAPFPAGWPLPLCIWPARFPLWKGGSGAHPIILSSPPPLAPPAFPFLFPGCLLWGIGYGYHFPPGSIFCPGSPQLFFPSLLAKVGRPQAPVRFSRVAPRAP

SEQ ID NO: 249020 - protein, 54 aa, Zea mays
  Clone ID: MRT4577_158693C.1.pep
DPSLQHIQKSAYHAKLTFKYSQPLVEMLTINHCSQLKNYKSTTLSTISKHIYDR

SEQ ID NO: 249021 - protein, 75 aa, Zea mays
  unsure (1)..(75): unsure at all Xaa locations
  Clone ID: MRT4577_158694C.1.pep
VRLCAVTYTTPHQFSIPEGAKITXXSCTSACLKRASPARFSPELLDPSHGNPPVIVMCACGPGRLWTYIGALTPV

SEQ ID NO: 249022 - protein, 52 aa, Zea mays
  unsure (1)..(52): unsure at all Xaa locations
  Clone ID: MRT4577_158695C.1.pep
SLYQQPTCXVCDTARVWVADCWVSGRELGFRGFRGLRWLSCERLTSLLEYFL

SEQ ID NO: 249023 - protein, 72 aa, Zea mays
  Clone ID: MRT4577_158696C.1.pep
PALVKIPRDIFIYISDHEASIPHNSSKPSASSSLSSWCSAQLIYGPSKSGEFQPAGSGSQRARVHRALALLL

SEQ ID NO: 249024 - protein, 116 aa, Zea mays
  Clone ID: MRT4577_158697C.1.pep
MKFWAAATPDGTPRLVPTPDWGAGAAGFPQTHDRSPRFAATPDWGTGFIMPPGAAVAPRTPERWPALPRTPEYGSPGVKASRKKVTQSARASIPPRRLLQFLDSTGISPLASVLIF

SEQ ID NO: 249025 - protein, 156 aa, Zea mays
  Clone ID: MRT4577_158698C.1.pep
DWYPPSDGEDPTANGILTVAAGGGCMRCRQLPGRAPHQDNTLPAGRANALHPPHGPDALPRQARGRSHHVTRTSRWVCTTRRCTRERRTATRRRRDPQIQAGDLPGTQRLGRCEASVTWADVAHAIQNVADAMKQDIEADYVLLNDRLDGRVKWND

SEQ ID NO: 249026 - protein, 86 aa, Zea mays
  unsure (1)..(86): unsure at all Xaa locations
  Clone ID: MRT4577_158699C.1.pep
MLRWTVHLEGGPRRVNHAAVAVGHRVYSFXGYCSGEDYETLRQIDVHIFNAVSLRWTKLPPVRPAXRGQAPVVPYMRYGHSTVLID

SEQ ID NO: 249027 - protein, 68 aa, Zea mays
  Clone ID: MRT4577_15869C.1.pep
GSLGSLAVTGSEHPGWCYTIDDNVLMGKQSCISPWSMHKPTNRFILGSHNVCNTVCVSVGTLGSSAIL

SEQ ID NO: 249028 - protein, 99 aa, Zea mays
  Clone ID: MRT4577_1586C.1.pep
RPSASKAFKHPGFFFLTSQFFFYPNCFWVLGGLTYGAPPKPPEFLVVQGESFFSPVEPWQTQFWFFPGWCPNQLVFSPVCNQSLPCVGLVKKLCFFFSF

SEQ ID NO: 249029 - protein, 60 aa, Zea mays
  Clone ID: MRT4577_158700C.1.pep
FIKIEWLVKIAFSVFSLGRLDIMKSVTQQQLAMLSLQDLVLPFPLLCRCRFSHLEFDYPT

SEQ ID NO: 249030 - protein, 436 aa, Zea mays
  Clone ID: MRT4577_158701C.1.pep
MAAARRLFSFHLQARPLAAGVAVATPHCHGKHDAVSCKATGKTKPKAKAGKGGERQHRRALEEHLKRRTRSAAAFDADLYGRRAHEHHIPVLLGEVLAAFRRPRPLRSFVDCTLGAAGHSLAMMEAHPELELYIGMDVDPSALGIGHGHIEAFLAGREREANGGEDDALLGTLRAYTHVKNFKYIKQVLSSVDESLVVGSSGVDGILIDLGMSSMQVNKSNRGFSVLQDGPLDMRMDPKATLRAEDILNSWPELELGRILREYGEESNWQSVQKQIVKARSVGGLHSTGDLVKLIQRMCTISSGRQGWIKTSTRVFQALRIAVNDELRVLEDSLHSCFDCLATGGRLAVISFHSLEDRIVKKTFLELIHGGEANEEDDKDDRALTDIEDGDEPWSGQRVQGRNGTVLTKRPITPSQEEEKLNQRCRSAKLRVIQKT

SEQ ID NO: 249031 - protein, 39 aa, Zea mays
  Clone ID: MRT4577_158702C.1.pep
VRRQLRHVCARYKPTNIKCCKISYMTVMHKTRCLSISSR

SEQ ID NO: 249032 - protein, 203 aa, Zea mays
  unsure (1)..(203): unsure at all Xaa locations
  Clone ID: MRT4577_158703C.1.pep
PPVRYGSSSSTRSSPRSPSFPPGRCRCNRPAAVPGSRSRGGPRPRCCSASAPSPSSPSPPPASTTPRHRRSRSLTPPPKKQRRRPGHRRRXKPSPRALPLPXRHPRCRRXARAGGRRRRAQRDEHGRGLRAGAGXRRRPDREREEEARRXPRWTPRPRSSSAASRRTCASSASTPSSTTPXAQAARVAAARRQRQPDAPPDQL

SEQ ID NO: 249033 - protein, 56 aa, Zea mays
  Clone ID: MRT4577_158704C.1.pep
TQEKAPTNRRYGREHAAPTQCIGTLHSCPETADSDTQLFKQNCADADRVSTLSLGG

SEQ ID NO: 249034 - protein, 159 aa, Zea mays
  unsure (1)..(159): unsure at all Xaa locations
  Clone ID: MRT4577_158705C.1.pep
WVSRRDPPSPATSLLGAAGRSRHWFGVALGLGSGPHLALLHAAVRGSPLGXILHGTASGLSGTPQQVQARSPQQPPTAEQNIRTEINPVLTPRAAGTEGSLIGIQGSNQAGNNLTLKGWPLTQKPFMQSPQQFQQLQFLTPQQQQQLFAAASAKCCRPR

SEQ ID NO: 249035 - protein, 887 aa, Zea mays
  unsure (1)..(887): unsure at all Xaa locations
  Clone ID: MRT4577_158706C.1.pep
MQAGPVQSISSLSPHTSQLPHNQPPPRQQQFNATPSAPGPVSSNIPTGQIPSSPSQPQAPWPKITQVDVRKYMIVFIKVDRDRDGKITGEEARNLFLSWRLPRDVLRKVWDLSDQDKDGMLSFKEFCIAVYLMERHREHRPLPDTVTDAIWAEGTALPSTGQFAENPSAPAPQASAGYTSRTMQGPHHGMLPSSMKPPSRRPLPLDADDTIKPEQQKPKVPVLEEHLVGQLSKEEQDTLDAKFNEASVADKKVQELEKEILDSREKTEFYRTKMQELILYKSRCDNRFNEVSESMSADKREVQSLSAKYDERCKKVGDVASKLTMDEATFREIQEKKLEIYNAIVKLQKGDDSDEKFQERANKIQSDLEELVKSLNEQCKRYGLRAKPTTLVELPFGWQPGIQETAYAWDEEWDNFGDEGFSIIKELTVEVEPPVVAKSQPTEDVKASSNGASTEKEDNKGDKSAAAVEQVVKPETAPSNIKPESAKSPPVSPVKNKEDGPDEHDKKQSGTNDVSPRESISNRGAMDSPTHGDKTHDGHSWGMDNDSLWNFDHKEGENGDSDLFFGPQGLPPIRTGGSSSGNSVVKEQKPFFDSVPGTPVEKSVFDSIPGTPFQKSVFDSIPGTPVQKSVFDYSVPSTPMQNSVFDYSVPSTPMQKSLFDSVPGTPVQRSVFDSVPSTPMQRSXLTLFRARRRRXFFDSFPSTPMQRSLFDSGPSRAESPTASSMYGKEQKGFFDSSVPSTPMYNSSFTPRYSEAGDDSFDTMSQYSSFGMHESNSFGQRDSLSRFDSFSSNADNGGNDTFARFDSFRSTSDQGGGNSFMRYDSMNSSSDHDGIGTFARFDSMKSSNYNSRGYSFDDEDPFGTGPFKSTETTSHSPTKHGTDTWSAF

SEQ ID NO: 249036 - protein, 92 aa, Zea mays
  Clone ID: MRT4577_158707C.1.pep
PTIAQRRPPQPVPPPPHCKIPILQPQPQRRLEWPRVQPWVWRRRPQLGPAPQASWDWLRKRPWLMWRLQRLSCWPAGEEEVGRVIRRHFREL

SEQ ID NO: 249037 - protein, 541 aa, Zea mays
  unsure (1)..(541): unsure at all Xaa locations
  Clone ID: MRT4577_158708C.1.pep
MKLDLEKEKSFFEEEKRXAIQAQENLAITQNEREDLQSLQVKLKDESDSRRAQKVDLIADAERLLSEKERFEIEWELIDEKKEELQKEAARIAEERRVIDEHLKSEFDIIKQEKEDLRVQLKISTESLAHEHAEFMNKMQQEHASWLSRIQLEREDLKKDIDIQRTELLNSAKARQMEIDSYLREKEEEFEQKKSKELEYICCEEETIGSKPLHVTLELQKLEEERKRSMLERERREEELSETKKTIDALNEQREKLXQKQRKLLHSDRKSITQQMQLLNELEELKIESENKQLSLRQCGKSKHAGVENLEDNGVHLSPDEDQNASPKQTTVKKLEVSPSVSTPISWVKKCAQVIFKRSPEKSADPNNDIPPKLGNVNDCTSLATAYSDGLFACHLENGAEKVPQAIDGLKVGKKRLNNALSHGDSEISQPKRKQQRSTTQTLRVIGGEIDSNCSPSVLEEKCSKNEHDAVPVGLCGKGPQNPQAEHSEDISVSASEPSNGPGVVDSEDKDEADEESDDEGEDEEEEKTSSAKKLWRFLIT

SEQ ID NO: 249038 - protein, 43 aa, Zea mays
  Clone ID: MRT4577_15870C.1.pep
ACGSESSQCRTSRGIRPGTSSGWQQSTMKPHLGPAMSIRLRPR

SEQ ID NO: 249039 - protein, 50 aa, Zea mays
  Clone ID: MRT4577_158710C.1.pep
PSFPKILVPFNIGIISWASISPDKSRNIKLMMTVQNRGSILAVNITVQND

SEQ ID NO: 249040 - protein, 327 aa, Zea mays
  unsure (1)..(327): unsure at all Xaa locations
  Clone ID: MRT4577_158711C.1.pep
MAGTVPKLAAPRPAAAGPLPSQPLRSAALASAPSARRFRVSLAARARSPVIAMASAKEGNGAVTKRTTLHDLYEQQGQSPWYDNLCRPVTDLLPYIANGVRGVTSNPTIFQKAISSSNAYDGQFKELISAGKDAESAYWELVIKDIQDACKLFEPIYDETDGADGYVSVEVSPRLANDTQGTVEAAKWLHKVVNRPNVYIKIPATAECVPSIKEVIANGISVNVTLIFSVARYEAVIDAYLDGLEASGLSDLSRVTSVASFFVSRVDSLIDKMLEKIGTPEALAPRXKAAVAQAKIANQLYLKKFSGPRWEALVKXGSQKQXLLWAS

SEQ ID NO: 249041 - protein, 78 aa, Zea mays
  unsure (1)..(78): unsure at all Xaa locations
  Clone ID: MRT4577_158712C.1.pep
MRTTRRDATPSAAMTLSLSRSFLSIAAAARTIARTRRSVVPSHGMRCSMRXNWLHPAIYEDAKVYSNVELLLMTRVTN

SEQ ID NO: 249042 - protein, 98 aa, Zea mays
  unsure (1)..(98): unsure at all Xaa locations
  Clone ID: MRT4577_158713C.1.pep
MGPIPAAFAGAAFGDVELLDNQFTGDXSXMFGAENPLNALSVXRNRFRFDFVRVELLEAMDILDIDHNMVYGSISAATXESKWLAFDVSYNKMCAPTP

SEQ ID NO: 249043 - protein, 36 aa, Zea mays
  Clone ID: MRT4577_158714C.1.pep
ALSKAGTSASETPATVGTKSINISPKLHPRVSPSVR

SEQ ID NO: 249044 - protein, 269 aa, Zea mays
  unsure (1)..(269): unsure at all Xaa locations
  Clone ID: MRT4577_158715C.1.pep
TTNNLEGELPXTVSLLRNLRYLSVFDNNMSGTVPPDLGAGLALTDVSFANNSFSGELPQGLCDGFALHNFTANHNNFSGRLPPCLKNCSELYRVRLEGSRFTGDISEAFGVHPSMDYLDISGNKLTGRLSDDWGRCTRTTRLKMDGNSISGAIPAAFGNMTSLQDLSLAANNLVGAVPPELGNLSFLFSLNLSHNSFSGPIPTSLGRNSKLQKVDLSGNMLSGAIPVGIDNLGSLTYLDLSKXRLSGQIPSELGDLFQLQTLLDLSSNS

SEQ ID NO: 249045 - protein, 89 aa, Zea mays
  Clone ID: MRT4577_158716C.1.pep
LPLLGRGLFFLVAVHLLIPRPSLVCGVAPYPPLCLSGLAPVYFNSQWSLFVCVGFKFPPWVALVFSFFWYFWGLLCFMDSGFAVSEVCK

SEQ ID NO: 249046 - protein, 59 aa, Zea mays
  unsure (1)..(59): unsure at all Xaa locations
  Clone ID: MRT4577_158717C.1.pep
GIPPDQQCFFFAGKQLEDGRTLADYNMGEXXXLPPVLRXRGGQXVKRRKAPPPPSSGAL

SEQ ID NO: 249047 - protein, 1111 aa, Zea mays
  Clone ID: MRT4577_158718C.1.pep
MVEDRAWMYNGWSRNGRHSDEWVAKTKDFVDHVFALSLTGTVRCPCRRHENSIFLNKERVSLDLCQFGFMPGYEVWEHHGEVVPNRNVEEEENNDWAGDDAMHEMVDSLRPEFNLSSEDPATPEVSRFFKLLKDSEEPLHEHTDVSILAFVTRLMAIKSKYFFSNNCYNEILKLLGDVLPKPNKLPKDMYQSKTIIKGLGMDYEKIDVCKNNCMLFMKEHAEEKKCLKCGQSRFVEVVNDEGEKVMTDVAHKQLRYLPLTPRVKRMFLSKKTAMHMRWHKEGVRDNDDLIVHPSDGDAWKALDTFDPEFAADPRNVRIGLATDGFTPFGQMASSYSCWPVFVIPYNLPPSLCMKYEFIFLCLIIPGPDYPGKNLNVMLKPLIEELKELWKGVEAYDVFTKQIFKLRVAYLWSVHDFMAYAIFTGWSTHGRLTCPYCGSDTDCFRLAHGGKITYFDCHRRWLPRKHPFRSDKKNFIKNTVVTKGPPKRLNAAEIYAQLNNLVLNEKGDKYEGFGVDHNWTHICGLWELPYMSSLILVHNIDVMHQESNVAEALIHTCMHFDKTKDNLKARRDLAMLCDRPTQEEEDDEEEVQHHEEEDEDEQAHEEDNEEDEQAHEGIDAEADDDTTEAPVVRRRGTRKGHFVLPPSAPAQSEARVLIIPVGDSQWEDTSFDGRGHHRQVNQVLGNLCRLHNPGIVTDPKGVVVPCTSWSHFALAPHATYGTAQGAVKHDFWRRYRVEPEAQEHADRVLEKNAKKVCRDAFSNARLQVVNAYMKRRGHSINNFRQYSDVYLTVDQYMEVTLPWMEHRPQAYKALCEIWASPEWIEKSNRNRHRQRHQQDEDDDEVVVNHTYGADGHIRLAKRMEAQTGVVPSPIDVYRRGHRAKNSEISDELCSQAAVERMETYGQEMVKKYGEDYDWRGAPTIDAEVVHSLGGKAHGRYSMFTGVIDSTELRSRGGSSSQAGCGSSSRSRRSVSSMEEAMREQQEKFREEMRQQQMAFLQQQSEYMAAYNAQAQQAMNSWFPQQAQQQPFVFPQFQPPMPQWGLHAPPPPPPPQGSGVMGHNTPPPVIPAPGGAYAGEGAYAGEDPNPLHDFVDQLLASGGSGHNSNDPNV

SEQ ID NO: 249048 - protein, 258 aa, Zea mays
  Clone ID: MRT4577_158719C.1.pep
NRIELIYLQEAQTGVVPSPIDVYRRGHRAKNSEISDELCSQAAVERMETYGQEMVKKYGEDYDWRGAPTIDAEVVHSLGGKAHGRYSMFTGVIDSTELRSRGGSSSQAGCGSSSRSRRSVSSMEEAMREQQEKFREEMRQQQMAFLHQQSEYMAAYNAQAQQAMNSWFPQQAQQQPFVFPQFQPPMPQWGLHAPPPPPPPQGSGVMGHNTPPPVIPAPGGAYAGEGAYAGEDPNPLHDFVDQLLASGGSGHNSNDPNV

SEQ ID NO: 249049 - protein, 44 aa, Zea mays
  Clone ID: MRT4577_158720C.1.pep
MAVGTMALIYRALVCKPVTNTRDVFCEGRITMRKTVGKPKPAAF

SEQ ID NO: 249050 - protein, 130 aa, Zea mays
  Clone ID: MRT4577_158721C.1.pep
PSNRAAAPWVAQLPRRQPRGAPTPLLPGHPCAAQRPSVARPPSPSTGRPCRHEPPPSSAAVLSFRRPAVAKPSSCNHSAVVAKLFPIERYSMFTGVIDSTELRSRGGSSSQAGCGSSSHSRSYVLAWRTL

SEQ ID NO: 249051 - protein, 230 aa, Zea mays
  unsure (1)..(230): unsure at all Xaa locations
  Clone ID: MRT4577_158722C.1.pep
EVWEHHGEVVPNGNVEEEETNDWTGDDAMHEMLDSLRPELNLSSEDPTTPEVSRFFKLLKDSKEPLHEHTDMSILAFVTRLMAIKSKYFFSNNCYNEILKLLGDVLPKPNMLPKDXYHSKTIIKGLGMDYEKIDVCKNNCMFFMKEHAKEKKCLKCGQFRFVEVVNDEGEKVMTDVAHKQLHYLPLTPQVKRMFLSKKXAMHMRWHKEGVRDNDDLIVHPSPAYSALLPL

SEQ ID NO: 249052 - protein, 93 aa, Zea mays
  unsure (1)..(93): unsure at all Xaa locations
  Clone ID: MRT4577_158723C.1.pep
IXGRRTRXVTLYTTTVKGFKLHMHPTYTGQGRHTPTSDDYTYGSKPRYLISLHTPKKGANNLNLHTNKGCATGTRTRKTKEAATANKNNTNTH

SEQ ID NO: 249053 - protein, 168 aa, Zea mays
  Clone ID: MRT4577_158724C.1.pep
MLPVYRFDECVLRFRQAGCGSSSRSRRSVSSMEEAMREQQEKFREEMRQQQMAFLQQQSEYMAAYNAQAQQAMNSWFPQQAQQQPFVFPQFQPPMPQWGLHAPPPPPPPQGSGVMGHNTPPPVIPAPGAYAGEGAYAGEGAYAGEDPTPLHDFVDQLLASGGCNFVLL

SEQ ID NO: 249054 - protein, 128 aa, Zea mays
  Clone ID: MRT4577_158725C.1.pep
QTPYTKRSHANDDHVRPKFYGRDKAITIPLKEGKKKPPGIQINLKGPPHFMGEHKRNFLSEGVGGAFPEGSPGEPGGSFFLERNLAGSQTMTARNTMATTERSRPGPNQPPLGRLVKNATLFAHPENG

SEQ ID NO: 249055 - protein, 175 aa, Zea mays
  Clone ID: MRT4577_158726C.1.pep
IPRKGTLRHAVIQDRPLWIVFAHDMVIELRQELIVNLNKAIDGRGAQVHIMFAQITLQNVQNVILHNLHIHDSKAHSGGMIRDSNRQYRLRTRSDGDGVSVLSSSNVWIDHVSMSSSRASPDHSSASSASRASRQRPGRAHTPLPIYIGFGWAAYMYVCVIYYYYILYYMRRLLD

SEQ ID NO: 249056 - protein, 63 aa, Zea mays
  Clone ID: MRT4577_158727C.1.pep
LLRPNSQNCFAQIASPDMIGSSFQGMMIQSRTSKNVTGSDRIRFHVNRSSKKAGVFELFAALA

SEQ ID NO: 249057 - protein, 438 aa, Zea mays
  Clone ID: MRT4577_158728C.1.pep
MAAVIRSRRRVSVFFYVVLAAAAAAAAAQASNNVTSDEEYWAERAEVARSRNLAAYVSDPVAATNRFNADVLRATTRRALARYDGPCMATNPIDRCWRCRADWATDRKRLAQCARGFGHRSVGGAAGKLYVVRDPSDDEMIIPRKGTLRHAVIQDRPLWIVFARDMVIELRQELIVNHNKTIDGRGAQVHIMFAQITLQNVQNVILHNLHIHDSKAHSGGMIRDSQRHYGLRTRSDGDGVSVMGSSDVWIDHVSMSSCADGLVDAVDGSTAITVSNGHFTRHDHVMLFGASNDSPQDAVMQVTVAFNHFGNGLVQRMPRCRYGFFHVVNNDYTHWIMYAIGGNMNPTIISQGNRFSAVDDSRFKEVTKREYTPYKDYKEWVWKSQGDVMMNGAFFNESGGQNERKYDRFDFIPAKHGRYVGQLTRFAGPLKCIVGQPC

SEQ ID NO: 249058 - protein, 67 aa, Zea mays
  Clone ID: MRT4577_158729C.1.pep
HAIRTSAPLSSSLLLRLRREFKWETGQGGKTNGKQRNARIQGKHGLAKNQLQDSQRGSIRKNPKMGK

SEQ ID NO: 249059 - protein, 83 aa, Zea mays
  Clone ID: MRT4577_15872C.1.pep
TSLPPARGKACHWLCSRHDGCGAELKPLDNRWRLPKPATTFRYGEIHREATNFSPSFPLRRDFAWYLAGRNQALTHAVRSRVT

SEQ ID NO: 249060 - protein, 67 aa, Zea mays
  Clone ID: MRT4577_158730C.1.pep
DPTGRTYKQNLSTLMSLSCINYPWVICYGLCKTFLLLNQEAVVSGIQGHGNCDSKVALSHPVNFSSS

SEQ ID NO: 249061 - protein, 54 aa, Zea mays
  Clone ID: MRT4577_158731C.1.pep
LKLTTNICVVHSLVNKAFFRLFIAVQLALMYSVLSDDRIPVIVLCTSLSLKKKQ

SEQ ID NO: 249062 - protein, 131 aa, Zea mays
  Clone ID: MRT4577_158732C.1.pep
HQHEAARTSPSSPRARTASSGLRRRLLLWLNVALFLLLAAASHGMLGLVWVPTSSTLCSGLRRCRLAMLVVALHVFMFLCVDLASPKQQQHQRRLLAWVREFPRRTGIMSSSGSVALFIRILAIYILVYIL

SEQ ID NO: 249063 - protein, 60 aa, Zea mays
  unsure (1)..(60): unsure at all Xaa locations
  Clone ID: MRT4577_158733C.1.pep
QFGVTYLDTHSDTAQRFACKRLPTRTLVHRDDIEDDRRECDXLYHLGAHLRRIRPLAGIR

SEQ ID NO: 249064 - protein, 98 aa, Zea mays
  Clone ID: MRT4577_158734C.1.pep
HVQTFGRNYIAVLHTVTQHWGTGTYFPIRQNRMAHGKLPKREKASNPSRGINNGAVTRYIQDRPFHLKPIQIVALNRSQNSKKQMTLYLPPCVGAEFS

SEQ ID NO: 249065 - protein, 66 aa, Zea mays
  Clone ID: MRT4577_158735C.1.pep
FATPKLITKSKPGFTETKLGFALPAKISLCKMTNFYLRRPKSCFLLIQQTRNQSIYAGIHRRWGPI

SEQ ID NO: 249066 - protein, 77 aa, Zea mays
  Clone ID: MRT4577_158736C.1.pep
LLDTCLILVKSIVKLFSVFSHIYFFLIVLRYVLAKSGNGLIVYVDSYYGGYLYIIIFFSCYVLYLFNIYSYILEILF

SEQ ID NO: 249067 - protein, 153 aa, Zea mays
  unsure (1)..(153): unsure at all Xaa locations
  Clone ID: MRT4577_158737C.1.pep
GGGQKRSQREKKPAAEEKAEKTTAXKKPKXEKRXPAXKXSGKEGGKKRGXRGAFLFLETXKXXXXRGGRQXHPDTGXXXKAXXXXNPXXNDTXEKXAGEAAKXARGNKRPTXTXRENQTAXRRXXPGERAKHAXXEGTKAXTKXTSGAAPSGH

SEQ ID NO: 249068 - protein, 124 aa, Zea mays
  Clone ID: MRT4577_158738C.1.pep
VAIYIEVGKDFDLNDIQRIIGDRLGVSWENRTLKERAGVLYRVLSKMNFVLLLDDVWEPLNFRMLGIPVPKHNSQSKIVLTTRIEDVCDRMDVRRKLKMECLPWEPSWELFREKVGDHLMSASP

SEQ ID NO: 249069 - protein, 121 aa, Zea mays
  Clone ID: MRT4577_158739C.1.pep
EISRATFHGEHACYMYGGSMFSLLFVYRIFLLFLSGGWYTYCQCHTPPPFFGLVHLSWCLCHWFFHWLYHALVDSCIQAFDDVMMTLPATERGQRERGHVAMKGMSHQWTTPSLGSDWVIH

SEQ ID NO: 249070 - protein, 53 aa, Zea mays
  Clone ID: MRT4577_15873C.1.pep
QFLSTPPFANLQKINLAANWPCKSGGIPKTLGFDPAVSQTSGFFVAKFCKPPP

SEQ ID NO: 249071 - protein, 57 aa, Zea mays
  unsure (1)..(57): unsure at all Xaa locations
  Clone ID: MRT4577_158740C.1.pep
KCSSATRLGPSPSSRWATVPRASACGAQTPAPTPLAGPXASSVAXLPVPPCRPRTRG

SEQ ID NO: 249072 - protein, 31 aa, Zea mays
  Clone ID: MRT4577_158741C.1.pep
KRDKTGEGSNLGAPILFYKTTSSTDKYPWNL

SEQ ID NO: 249073 - protein, 243 aa, Zea mays
  Clone ID: MRT4577_158742C.1.pep
MMSSRLRLEHQRIMPLMRSFLRQGSTHKDGLRIGLKVGKPVENGGVVEYFFGSDGNEPLHCVRFSNFLKELHDEIIRLEFSHYDVKSSKTIPTKDFALSMVASADMNHINKLLDRADGLVKEPDLKDIRITFEEFKAFADLRQRLEPLSMAIFAHGKVNGLLTKEDLKRATQHVCGVNLTDRVVDIIFHVFDTNQDGNLSSEEFLRALERRETDIRQPTIPGPWGFLSCWFSGRKCSLKQVVL

SEQ ID NO: 249074 - protein, 211 aa, Zea mays
  Clone ID: MRT4577_158743C.1.pep
IGYLEAGRGRSSLFRFVLSPHPTASLIYLAKRCGWASSEELEKIEHIEVCPKAMELTEQIADRISSDGGGALIIDYGKNGIVSNSLQAIRKHKFVDILDDPGSADLSAYVDFASIKRSAEEASDDISVHGPMTQSQFLGSLGINFRVEALLQNCTEEQAESLRTGYWRLVGDGEAPFWEGPEDQAAPVGMGTRYLAMAIVNKKQGTPIPFE

SEQ ID NO: 249075 - protein, 93 aa, Zea mays
  Clone ID: MRT4577_158744C.1.pep
TVEFWLFHEVILHHYFLAVCIVLDLVSWLCVADSRLPWTCQVHFIVGGDGPKRVRLEEMREKFSLQDRVEMLGAVPHAQVRSVLISGHIFLNR

SEQ ID NO: 249076 - protein, 90 aa, Zea mays
  Clone ID: MRT4577_158745C.1.pep
SSNYASETALDSFIYIKLYKVGKKKLLCICASHRVIKTKPLQMINFGSEVALAKLGILVERGLLQHLHPLLAVGVLLLHKNDGVAQRTRG

SEQ ID NO: 249077 - protein, 246 aa, Zea mays
  unsure (1)..(246): unsure at all Xaa locations
  Clone ID: MRT4577_158746C.1.pep
MLLRVGRRAALLLAATAAFSRLRDPDTAVYVSASPPQPPRQAFSSSAAAEGLRSGTCLFSPYLLPYPFQGFPVLNTFTSASVSPANNGDQGSDGSSGDPRCCPACLGRNSIAKAASAVGPAVVNISSMHDMHGWVNEQSIGSGTIIDPDGTILTCAHVVADFQSTKAIVRRKVSVTLPDGREFEGVVLNADRLSDIAVVKIKSMTPLPAARLGSSSQLQXPGPGVVALGCPLSLQXTVTAGIVSCV

SEQ ID NO: 249078 - protein, 613 aa, Zea mays
  unsure (1)..(613): unsure at all Xaa locations
  Clone ID: MRT4577_158747C.1.pep
MTDGGEDGNAAAPRAPSRRRGPVRASLDADEFMALMHGSDPVRVELTRLENELRDKERELGEAQTEIRALRLSERAREKAVEXELTXNLEKMAEKLKLTESVRPRVRPRVRQNLEVKKINDERKAALAAQFAAEATLRRVHAAQKDDDMPPIEAILAPLEAELKLSRQEIANLQDDNRALDRLTKQKEAALLEAERTVQIAMAKAAMVDDLQNKNQELIKQIEICHEENKILDKLHRQKIAEVEKLSQTVRELEEAVLQGGATANVVRDYQRRFQEINEEKRTLDRELARAKVTANRVASVVANEWKDSNDKVMPVKQWLEERRFLQGEMQQLRDKLAITERTARSEAQLKEKYQLRLKVLEDGLRGPPSGSIRPPTEGKSFSNVPSRRLSLGGADNISRLSPNGLLSRRSPSFNSRSSLTSNSSLVLKHAKGTSKSFDGGTRSLDRGKIHGSGAHLLNRSTDAVRDKETSDSWKGDMDERTNERADNNTDEKSNETTNKNSAETVSGFLYDMLQKEVISLRKSCHEKDQILKDKDDAIEMLAKKVDTLTKAMEVEARKVRREVAAMEKEVAAMRASKEQETRAKLLGTKGSGSSQLLPGRNAARTGSMRNFQ

SEQ ID NO: 249079 - protein, 240 aa, Zea mays
  unsure (1)..(240): unsure at all Xaa locations
  Clone ID: MRT4577_158748C.1.pep
MSLPPTDGGDDWFLDCGILEDLPAAACGAFPWDASVSSSNPSAEVGSHVNKLDLPKDSGSNKRLRSEPCGRPTSKACREKVRRDKLNDRFLELGTTLDPGKPVKADKAAILSDATRMVTQLRAEAQQLKDTNGSLEDKIKELKAEKDELRDEKQKLKLEKETLEHQMKLLTATPAYMPHPTMMPSPFAQAPMAPFHAQGQALGQKLMMPFVGYPGYPMWQLMPASEVDTSKDSEACPPXA

SEQ ID NO: 249080 - protein, 151 aa, Zea mays
  Clone ID: MRT4577_158749C.1.pep
PRAPSRRRGPVRASLDADEFMALMHGSDPVRVELTRLENELRDKERELGEAQTEIRALRLSERAREKAVEELTDELEKMAEKLKLTESLLESKNLEVKKINDERKAALAAQFAAEATLRRVHAAQKDDDMPPIEAILAPLEAELKLSRQEI

SEQ ID NO: 249081 - protein, 60 aa, Zea mays
  Clone ID: MRT4577_15874C.1.pep
LNLQHHIIIVKSQYKHSLKTWYNESKRQVYISYVYIKVRLQRQTIIITSLSDDAEEALHP

SEQ ID NO: 249082 - protein, 126 aa, Zea mays
  Clone ID: MRT4577_158750C.1.pep
SSFTLFRCVWRLLPCERGAQKTLFWRQNHVESLVAGAIRTGSGWKLDIDGGTAGVRKKERAREIGRFLSPASVGEEAEVAAGPCRRVLLAGLLPCRPSRRSSCRQSPGRSDGAQSSLGRAGKRQRG

SEQ ID NO: 249083 - protein, 101 aa, Zea mays
  unsure (1)..(101): unsure at all Xaa locations
  Clone ID: MRT4577_158751C.1.pep
KTTKKNKKPQTNKKTKKKNKQKQSTTTTKTKPKNTQPQANKQTKKKPPXXKTTTXTAKPPTTRRTTTPKTHPYPTTPKKTRPPQXTXTTTNANGWNKDPVQ

SEQ ID NO: 249084 - protein, 99 aa, Zea mays
  unsure (1)..(99): unsure at all Xaa locations
  Clone ID: MRT4577_158752C.1.pep
MAIKSMTVAPTTTRSLDADMTVDEFKEWLRXFDTDRDGRISXEELWCAMRAIRARFTGWRSKLGISYADTDGDGYIDDXEVDGLIEFAQKNLGXWIVGY

SEQ ID NO: 249085 - protein, 87 aa, Zea mays
  Clone ID: MRT4577_158753C.1.pep
QWGGEWYWCQHTTWFLLAGATCSSCIEGVDADISPVHLNVYRCQIRWRVQRVQHPRNVYLWPRLQHIASLCPITIIIHSVEGRPVNA

SEQ ID NO: 249086 - protein, 588 aa, Zea mays
  Clone ID: MRT4577_158754C.1.pep
KQKANIASLNNCVSMDNLTVNPIDPVVLNEGEQTGTAITEQVPVPLNLVLENKNDKDQGEQSSETSEQLMSKEPQKRDIKRQKRTWSHTCKFDDDDLLMTAVIYKLTARYRNSFHRKLRNKFGFRRLPTYRWENEDKGDRKKFPGEARTVLNKLLEMGIVARVDILQCHGPGGKNVLKDGNITASGIQCQCCGTTFTMSKFKCHAGLRQEVPSLNLFLDTGKSYSLCQLQAWSIEQKVRKEHAKDTMSLQADQNDDTCGSCGDGGELICCDNCPASYHQACLSCQDIPDGNWYCSSCLCDICGEVIDSKELVTSLPALECSQCERQYHVKRVSAKVPCNEDGSGTWFCGRKCHEIYMTFRSRVGVPDHMDDDLCFTVLRNNGDKKVRTAEEIALMAECNMKLMIATSIMEECFLPILDPRTGIDIIPSILYNWRSDLHFNYKGFYTIVLESDDSMVSVASIRLHGAIVAEMPLVATSKENRQQGMCRRLMDYIEEMLKSLKVEMLLLSAIPHLAETWTSTFGFREIDESDKKRLSKVRLAAVPGTVLLKKDLLCECSGADAGEPPSPKPFQVYSRVPRGRTGLDAVCQ

SEQ ID NO: 249087 - protein, 78 aa, Zea mays
  Clone ID: MRT4577_158755C.1.pep
MKSTIFFALFLFCAFTTSYLPSAIADFVLDNEGNPLENGGTYYILSDITAFGGIRAAPTGNERCPLTVVQSRNELLKG

SEQ ID NO: 249088 - protein, 46 aa, Zea mays
  Clone ID: MRT4577_158756C.1.pep
YTMPCYDTYLNNTFISLCNTYVCSTTPKLHQVIYHAHVNTQQVLIT

SEQ ID NO: 249089 - protein, 113 aa, Zea mays
  Clone ID: MRT4577_158757C.1.pep
VSQQYAMSPTVVAASACAGPNALVGQQYPKSAALLSSHLAQQCGFSFFIRSISSRTRQRATRKPWPSRQSAAAGQPPGSAKGRQYHAAREVAAVSGEGEVQTCSAAAAARTRR

SEQ ID NO: 249090 - protein, 228 aa, Zea mays
  Clone ID: MRT4577_158758C.1.pep
MARPEENAKFPSCDAYFDTIQSKKKLPLALQESQTAAFAQIPVASFPDVPSGRVTEIPGETSVLDAVRILSEHNIRAAPVLNPEPGAPADWQGRYLGIIEYSAIILWVLDNADLAAVALSAGSATAAGVGMGAVGAVGVAALGVTGPAAVAGLTAAAVGAAVAGGLTAEKGVAKDGVTAADHLGEDFYKVLLQQEPFQSTTVRSIVEPYPWSPFVPVTLDSSMLAVLL

SEQ ID NO: 249091 - protein, 76 aa, Zea mays
  Clone ID: MRT4577_158759C.1.pep
VVSVLSVGTCPTPCHHVAPSKSLRFQDQGTIKKVCDQARSSVFKGTPVYKMGKNKPSLGPGVRPRAALLNSRSCPQ

SEQ ID NO: 249092 - protein, 52 aa, Zea mays
  Clone ID: MRT4577_15875C.1.pep
SYWKSILSVCFIECGFCIHQNINHKIQQVHLYSPLTFIPSPFFPVHYKQKIY

SEQ ID NO: 249093 - protein, 49 aa, Zea mays
  Clone ID: MRT4577_158760C.1.pep
CTRCNSRSLSNRPIHENGTPHSSMDLTSQEQVQRGKKEPAYQREGGHRR

SEQ ID NO: 249094 - protein, 267 aa, Zea mays
  Clone ID: MRT4577_158761C.1.pep
MTVGAGIAVQDGSLLALGAKVLREVRGNVLVTPAAGGGLTNGAFLGVRSAPAASRSIFPVGKLRDQRFVCTFRFKMWWMTQRMGSAGRDIPSETQFLLVEVSGGGEQPAVVYTVFLPVLEGSFRAVLQGNADDELEICLESGDPDVESFQGSHLVFVGAGSDPFEVITSSVKAVERHLQTFSHREKKKMPDILNWFGWCTWDAFYTNVTAQGVKQGLQSLEKGGVSPRFVIIDDGWQSVAMDPVGIACLSDTSANFANRLTHIRGDH

SEQ ID NO: 249095 - protein, 101 aa, Zea mays
  unsure (1)..(101): unsure at all Xaa locations
  Clone ID: MRT4577_158762C.1.pep
PLALVTLGADRTKIIPRNTTXSLPRRQVXSAAADGQTRVGINELHRERAIVRYSKALGPLPVAWIPSAPTGASDGGDKLDLEADRLRYQPDPDMGTGDNQD

SEQ ID NO: 249096 - protein, 82 aa, Zea mays
  Clone ID: MRT4577_158763C.1.pep
ARGPQPGARIELRAALVQAAYYLLKAYTLVRHDRAHVAAAQILEAGQHRLAGQHVRQLPVRRPSGISKETMHTALRYQVFVS

SEQ ID NO: 249097 - protein, 180 aa, Zea mays
  unsure (1)..(180): unsure at all Xaa locations
  Clone ID: MRT4577_158764C.1.pep
GHADMGYYVFARSIVAGEPVTLFRAADGSDARRDFTYIDDVVKGCLGALDTAGKSTGSSSCRKSGPAPLRVYNLGNXTSPVPVTRMAAILEKLLGRKANKRVVTMPSNGDVPFTHANVSHAAHDFGYRPTTSLEAGLRHFVDWFVSYYKLDAKIAKPAAAADDDKPAKKKKKNKAMSASS

SEQ ID NO: 249098 - protein, 102 aa, Zea mays
  Clone ID: MRT4577_158765C.1.pep
IDPGTLRGRVIPPIRGIGNSGGIMLWALFNGVKKNYTTQLKGSFLWASRKKIFKLKPLPMKKKKVVIRKVMGLQKKKKKKGDFGEKKTHVSYFFFFQQTTKS

SEQ ID NO: 249099 - protein, 80 aa, Zea mays
  Clone ID: MRT4577_158766C.1.pep
RVGRTRSFPNARRAAFSTSSRTARSPQLPRHLIHPYRVQLLQPLPPSDISSPILRRSPRGQPRVPKIPSSALTIEGSPWR

SEQ ID NO: 249100 - protein, 74 aa, Zea mays
  Clone ID: MRT4577_158767C.1.pep
LFRYVSRRVSPPRGQSHLGHGGGRSQHCFMAVLDAVCGVERVIVINDFCPLVTFAILINRRWFERNQRKIWKRK

SEQ ID NO: 249101 - protein, 108 aa, Zea mays
  unsure (1)..(108): unsure at all Xaa locations
  Clone ID: MRT4577_158768C.1.pep
LFRVHGLWIXVWXAHGSDTAEPFVLYYXLSYGALPRSLHATGACGLGLGLATASADGGLLARLSPLPGCALAGTSLGASFVSLSVVLADPSSGRAWRVLVWLFPWGGE

SEQ ID NO: 249102 - protein, 140 aa, Zea mays
  Clone ID: MRT4577_158769C.1.pep
MEANKRRMNGFLDLLQTKGLSYPSGLSNNSNSGGQSDDYEASVGPEVKIPSDTSAKTNDEYLVTKMRNGGRSRDDDDTGSIEAQYFGKQDSAWSQGVNHGSGNAKRLLTLEKLRENKNHLSTTTLKISEPIEKLFLWGQA

SEQ ID NO: 249103 - protein, 227 aa, Zea mays
  unsure (1)..(227): unsure at all Xaa locations
  Clone ID: MRT4577_15876C.1.pep
MANEQPAETYTVEELVAVNPYNPDILNDLEVFVNDQVSSKTYNLDANLSLLRLYQFEPERLSVQIVARILIKALMAMPAPDFSLCLFLIPEHVQMEEQFKTLIVLSHYLETGRFRQFWDEASKSRNXILDVVPGFEQAIQSYAIHVLSLTYQKVPRPVLAEAINIEGLALDKFMEYHAANSGWVIEKGSRSQLIVLPRNEFNHPELKKNTADTVPFEHVTRIFPILS

SEQ ID NO: 249104 - protein, 94 aa, Zea mays
  Clone ID: MRT4577_158770C.1.pep
YFSISYVSFTTKHTLQPLLTQICRAALTNNITKLRRSHLPHLGRVDPCSSADYDEATRRNHSRGCSPTWSSPQIWKSTRHKRSTTGGSTAKRTG

SEQ ID NO: 249105 - protein, 81 aa, Zea mays
  unsure (1)..(81): unsure at all Xaa locations
  Clone ID: MRT4577_158771C.1.pep
LLSRVREKVAKTVYVEERTXVVERNLLSVAYKNVIGARRASWRIXVSSIVQKEVSXXNVEHVYLIKEYLGMIVVCTCLYMI

SEQ ID NO: 249106 - protein, 40 aa, Zea mays
  Clone ID: MRT4577_158772C.1.pep
TIRTFFIETPSFITLDYFFIFVSFIGVLALPLPAFFPQIL

SEQ ID NO: 249107 - protein, 90 aa, Zea mays
  Clone ID: MRT4577_158773C.1.pep
WERSKMLGKGLNKWGQRVKGIALGSRNLEVLPLGIGPKAGPSNRVGFCMSPRGPLSFAREHWQGINGGKKVFSGLLMQINSLKTAGLRIT

SEQ ID NO: 249108 - protein, 100 aa, Zea mays
  Clone ID: MRT4577_158774C.1.pep
NGIYLKVQVTLVGFQTKQYGFARAIRPVTNFNEVALHFIDCIYLHLENVRQKVNSLAPFKQMCLLMRCKLKLLTVFKQNHLLISPFLVELEIIKLILLLK

SEQ ID NO: 249109 - protein, 84 aa, Zea mays
  Clone ID: MRT4577_158775C.1.pep
APQHGDTNFLQWWERVSAIVVRKGLDSLIILGAWMIWKHRNEVMFKGVSPNLTLLLESANEEREKWQVARANGLSFLAAPSRNV

SEQ ID NO: 249110 - protein, 88 aa, Zea mays
  Clone ID: MRT4577_158776C.1.pep
SPEKKRTAEGTPQPAKQGACAGKPTKKGTHGGAQMPLRLQKGGYFPLKHKRGGKSRSIGWESRKLIRIGGEGNLTFFGKGEKNRAGFR

SEQ ID NO: 249111 - protein, 227 aa, Zea mays
  unsure (1)..(227): unsure at all Xaa locations
  Clone ID: MRT4577_158777C.1.pep
MYRGLRRWLAGEIMATTSRASCWGESSPSVTVAAGSDVERRWESAFIQKHWSTQQLRHTEQQCWRPQRGLPAKSVAVLKAXMFKNFLHPXSVPRRCCANRLSTLLAMIRIALCFALLRYPKDHEKDVLAARSSLTRXSTDRNPTRLVSNSILFWRDGVMMDSXVLHLYQVSNWFINARVRLWKPLIEEMYQDLKRSSGAGGGHGPAMEPQQQHLSKRRICELEDGGQ

SEQ ID NO: 249112 - protein, 65 aa, Zea mays
  Clone ID: MRT4577_158778C.1.pep
TPILSPTAWAGRKRVGPYVRIYIPPPVSFCSSNTCFKAPPPPWMLMYVYVLVVCQAPGQQKGGAY

SEQ ID NO: 249113 - protein, 98 aa, Zea mays
  unsure (1)..(98): unsure at all Xaa locations
  Clone ID: MRT4577_158779C.1.pep
RLRVLIGLAVSAATATISTQCXHAHIANYLILYLSLAVSSAXENAILQLYRIQKAIAAGILPLSPSFLQHPQALLQQLPLAHVQAQNIKVQQLQLLEL

SEQ ID NO: 249114 - protein, 173 aa, Zea mays
  unsure (1)..(173): unsure at all Xaa locations
  Clone ID: MRT4577_15877C.1.pep
APKFGGANNEPTAWEDKKSPGELRFPAQGRVATRKIFHPLEEEAFRPILXHKKGPXFRVELSVPKGPALLEIFSHKEKALSPPDLLLGPPKVGCLKELMKEIPNHKNGWMGMEIVKGKFPPKKGGNPGGGGYLKLKKDGPPCFKPLKGMYLGPRPPFLFLKNLCEGCKQQTPV

SEQ ID NO: 249115 - protein, 59 aa, Zea mays
  Clone ID: MRT4577_158780C.1.pep
EKLIACIELDDQGSVCYGDTASFIDDPKCRRKPSRSDTQPVRPVTNVEEQTSPVITDHP

SEQ ID NO: 249116 - protein, 119 aa, Zea mays
  Clone ID: MRT4577_158781C.1.pep
RNTLRKAPGWSAGTFAFISAWKRRATARTSWPLRTGRTREISRGSPPPTGVRSARIVCRSHRPFAFWETESSLHRCRSSQSRTGRMLTRSVVYLVNEAGALSPIDESGCASSSKHHYNR

SEQ ID NO: 249117 - protein, 75 aa, Zea mays
  Clone ID: MRT4577_158782C.1.pep
YAIPRSLHNPAEEETNPRQPGREVEDESEKDSSGVFGREESTSGVGAEAPQDLGIRGRRRGALMSMDKKWCEHYF

SEQ ID NO: 249118 - protein, 53 aa, Zea mays
  Clone ID: MRT4577_158783C.1.pep
GWIGESTGAGGSCLASPLCIVRRRAGRTDDGCGGGGPLDTGIPKVCRGETVGG

SEQ ID NO: 249119 - protein, 413 aa, Zea mays
  unsure (1)..(413): unsure at all Xaa locations
  Clone ID: MRT4577_158784C.1.pep
MMALQAQGTRVPLVLALFLLLAGCGSEAQPLVPALFTFGDSSVDVGNNDYLHTIIKANFPPYGRDFANHVATGRFCNGKLATDITGTYVARTKSGMHAIAIPFCLSLESGQHRSDECNPRQRTTTFSXRLRTWCMHCAMAAADTLGFTTYPAAYLSPQASGQNLLIGANFASAGSGYYDHTAXYHAIPLSQQLEYFREYQTKLAAVAGAGQARSILSGALYIVSAGASDFVQNYYINPLLFKTQTADQFSDRLVAIFGRTVQELYGMGARRVGVTSLPPLGCLPASITLFGHGAAGCVSRLNSDAQSFNRKMNGTVDALARRYPDLKIAVFDIYTPLYDLVTDPQSQGFAEARRGCXCGTGTVETTVLLCNPKSVGTCPNATSYVFWDAVHPSEAANQVIADSLITEGLILVT

SEQ ID NO: 249120 - protein, 200 aa, Zea mays
  Clone ID: MRT4577_158785C.1.pep
PAWSRRLLPHLPARARDAPSSPNAQPELPPCSDFVRPRSSLAPLSSELPPLALARRALLYSALLKHVPIPLPPRHSRRFSQLGPRPSLLVLHLDHGARPLLGSLPSAMAASPSSVLTSARLTRALPCRFKFTSLPWPGFSGGRVRCQVLSLPPHRAQSQSSCIKLELKVCADIDWFEEEARQGRTCSGALSKKKKKKGAA

SEQ ID NO: 249121 - protein, 63 aa, Zea mays
  Clone ID: MRT4577_158786C.1.pep
SQNKVENRIYKKVKKVKKENYTDYVTCVSKGLKPAYDADAKSTGGGGPHEKTEGVEYYITFED

SEQ ID NO: 249122 - protein, 184 aa, Zea mays
  Clone ID: MRT4577_158787C.1.pep
MGIDLDRHHVKGTHRTAPKSDNVYLKLLVKLYRFLARRTDASFNKVVLRRLFTSKINRPPVSLSRIVANINKEGEKRTVVVVGTITDDNRLLECPKVTVAALRFTATARARILAAGGEAITLDQLALRAPTGSNTLILRGPKNAREAVKHFGFGPHSHKKPHVESKGRKFERARGRRRSRGFKV

SEQ ID NO: 249123 - protein, 55 aa, Zea mays
  Clone ID: MRT4577_158788C.1.pep
AHNLARELFPLNTLFQIWTHNNESRDMIMSSNSFMSLNQILYVQPKIINLVSHTF

SEQ ID NO: 249124 - protein, 182 aa, Zea mays
  Clone ID: MRT4577_158789C.1.pep
FGTRPHSATACRIAHCPALLCYQPPMLSGCAPTHELIFCPHLARWGPLLINMLNLPFLSRIYTFSILHRCRHTIPPATIPCLLPTTHCCSSPGIFLGGTPPPRAHLLRHSPIYTYPLLRRTLELHRQTRSPQRLRAPPKVMVAIVCSHTPQAHATPSTSHLSYCYARWPEASMNTIEVCPPM

SEQ ID NO: 249125 - protein, 404 aa, Zea mays
  unsure (1)..(404): unsure at all Xaa locations
  Clone ID: MRT4577_15878C.1.pep
PGRVSTRGDQTSEETLSVPHDYNDVGREASLSLAEPSSIDEHAQSSANNFYYDYGEWRVIWDPFYNRYYFYNIQTQESTWCPPEGLEDFASYCSPDTTKELAELGSQCSSMAPQENNLATHVNHLEAQEQDHCIHDLSDIPVEKPIYQSMITTSDKAQHTENKYSDSTTTVLEMNQEVASTKTKKRXHSCQDMAGNVSNDIIKYWAQRYSLFSLFDSGIKMDEVGWFSVTPEPIAKHHASRVGAGVMIDCFTGVGGNAIQFAKKCKHVIAVDIDPQKIDCAHHNASIYGVNDHIDFIVGDFIHIAPHLKGETAFMSPPWGGPDYAKVDVYDMKSMLIPCHGYSLFKLGTMIASRVVMFLPRNIDLNQLADMSLSVDPPWAVEVEKNFLNGKLKAITAYFEEQDR

SEQ ID NO: 249126 - protein, 142 aa, Zea mays
  Clone ID: MRT4577_158790C.1.pep
MVLSPADKTNVKAAWGKVGAHAGEYGAEALERMFLSFPTTKTYFPHFDLSHGSAQVKGHGKKVADALTNAVAHVDDMPNALSALSDLHAHKLRVDPVNFKLLSHCLLVTLAAHLPAEFTPAVHASLDKFLASVSTVRTSNYR

SEQ ID NO: 249127 - protein, 86 aa, Zea mays
  Clone ID: MRT4577_158791C.1.pep
MATVPVNPKPFLNNLTGKTVIVKLKWGMEYKGYLTSVDSYMNLQVANTEEYIDGQFSGNLGEILIRCNNVLYLRGVPEDTEIEDAE

SEQ ID NO: 249128 - protein, 46 aa, Zea mays
  unsure (1)..(46): unsure at all Xaa locations
  Clone ID: MRT4577_158792C.1.pep
QTXXEXCYFMSHDGREXXNRELHHLHMPPLVPFLIPPPPPPPLFFF

SEQ ID NO: 249129 - protein, 43 aa, Zea mays
  Clone ID: MRT4577_158793C.1.pep
GLNPYQNMHELDRRCHPTTPSSLALQSPPCSSTPPPLRELDDE

SEQ ID NO: 249130 - protein, 124 aa, Zea mays
  Clone ID: MRT4577_158794C.1.pep
CPGRVKKWALVAGTFFLVSLRPLVVGHSSFTRESFKKAPPLPSFLVSLNASPVRILNTLPFIFFGQMYMNSPLDLFDFFHFFVIGWCISTFFQPPSWWWNCLLVIPMNSVNMVEGPLPQKKSPS

SEQ ID NO: 249131 - protein, 116 aa, Zea mays
  Clone ID: MRT4577_158795C.1.pep
WLYFTQASFHPPMLGNKEFKECFRTAIRNLTWYIWWSCFTQVYPHPTLLRNRHSQEPAPELPSSVVQRGLSALCFSVTSEDSSCIGKSDDSASHTPLFTAPCLEACCSGEGAPEPP

SEQ ID NO: 249132 - protein, 43 aa, Zea mays
  Clone ID: MRT4577_158796C.1.pep
YLGLDTHHPLPSRLCSSPSSSDPPHFCLIKLPSYCYISMFDMI

SEQ ID NO: 249133 - protein, 270 aa, Zea mays
  Clone ID: MRT4577_158797C.1.pep
MGVPKQRWTPEEEAALKAGVAKHGPGKWRTILRDSDFSALLRLRSNVDLKDKWRNLSVTAGGYGSREKARMALKKGRRVVPKLTADPMDVDEKDMDNAHDTVIDVEPLAMAFEPLPLLESPDKSVARLDDLIVEAIRKLNEPSGSNKAVIAGYIEVNQKYRIAPSSSLGGISTKVSSSEGMNTENNNVKRLTKPQVVAELEKMKGMTREEAAAFAAKAVAEAEVAMAEAEEAARVAEAAENDAEAAKAFLDAVILSMRNRNAASMILRAC

SEQ ID NO: 249134 - protein, 55 aa, Zea mays
  Clone ID: MRT4577_158798C.1.pep
GIDTLKSIFFFYRAKEPPKIKFIPFSPKRNFKGAPRVPLNDGDEKKTKSFGNKPP

SEQ ID NO: 249135 - protein, 298 aa, Zea mays
  Clone ID: MRT4577_158799C.1.pep
MGVPKQRWTPEEEAALKAGVAKHGPGKWRTILRDSDFSALLRLRSNVDLKDKWRNLSVTAGGYGSREKARMALKKGRRVVPKLTAEPMDVDEKDMDNAHDTVIDVEPLAMAFEPLPLLESPDKSVARLDDLIVEAIRKLNEPSGSNKAVISGYIEDQYWPPADFQYLLSTKLKSLVNSGKLIKVNQKYRIAPSSSLGGISTKVSSSEGMNTENNNVKRLTKPQVVAELEKMKGMTREEAAAFAAKAVAEAEVAMAEAEEAARVAEAAENDAEAAKAFLDAVILSMRNRNAASMILRAC

SEQ ID NO: 249136 - protein, 540 aa, Zea mays
  Clone ID: MRT4577_15879C.1.pep
FDLRSILDDVISLFSSKSREKGIELAVYVSERVPELLLGDPGRFRQIITNLVGNSIKFTERGHIFVQVHLADHSNLATEPKVESVANGMNGHKDEKTAVATSVSLNTLSGFEAADSRNSWENFKLLLSYEKNEMPYESVSDKVTLVVSVEDTGIGIPLDAQAKVFTPFMQADSSTSRTYGGTGIGLSISKCLVELMGGQINFVSRPHVGSTFTFTAVLKRCDRSAIGDSKPVMLHPLPSSFKGLSALLVDRRPVRATVTKYHLQRLGIACDVVATIELALGVLSGRNGSSLTSMKQPCMLLIESDSWGFNIDVSLRSRLLEMKQNGHTHVLPKIILLAAAESGKLKEHYAVDSVITKPLKASALAACLFQTLGIKQSSNERSDNSGSLYGLLLGKNILVVDDNKVNLRVAAGTLKKFGAKVECVESGKDALALLQVPYKFHLCLMDIQMPEMDGFEATKQIRAMEAKANEQAVACDDSEIDGATRAARWRLPVLAMTADVIQATHEECTKCGMDGYVTKPFEEKQLFQALQKFLDPGMSC

SEQ ID NO: 249137 - protein, 154 aa, Zea mays
  Clone ID: MRT4577_1587C.1.pep
PSKFSRIQRVFFSEEGPKYKKFGRTATNTCNPVTLTCGTRWSALSPLSTISKRDHAHGGNRNKPEKLNSLHDLGIVRRQRINPHISFTLTPPPQPCQAHSLGADLKAIASREMRSGHRGQRMCAASQPSEHDLEASLGCGGAIHGSIKQNVASD

SEQ ID NO: 249138 - protein, 48 aa, Zea mays
  Clone ID: MRT4577_158800C.1.pep
SDVVMRDSDGHSRCYGFVNFENADAAAQAVQELNGKLFNDKALYVGRA

SEQ ID NO: 249139 - protein, 299 aa, Zea mays
  Clone ID: MRT4577_158801C.1.pep
MGAPKQRWTPEEEAALKAGVAKHGPGKWRTILRDSDFSALLRLRSNVDLKDKWRNLSVTAGGYGSREKARMALKKGRRVVPKLTAEPMDVDVKDMDDAHDTAIDVEPLAMAFESLPTEESPDKSVARLDDLILEAIRKLKEPSGSSKAAIAAYIEDQYWPPADFQRLLSTKLKALVNSGKLIKVNQKYRIAPSPPPSGRIGTKVSSAEGMKAENNNAKRLTKHQVIAELEKMKGMTKEEAAAFAAKAVAEAEVAIAEAEEAARVAEAAENDAEAAKAFLDAVTLSMRNRNAASMMLRAC

SEQ ID NO: 249140 - protein, 163 aa, Zea mays
  Clone ID: MRT4577_158802C.1.pep
ASLHSPPPVSLHRPIDRSSPAGGLPLGGQPHLTSRAATIAPLDALHTVRYPLLCAPRDSNRSPHDLFHPGGGVHPSVVPVHAIRVRGRGPRAAPRRRADPAVVAQVARPDVVCLLRTLVANRCVEVEGTLLWVVTRRRSGEGEGGDAALEAGSSCCSTSTYPS

SEQ ID NO: 249141 - protein, 80 aa, Zea mays
  Clone ID: MRT4577_158803C.1.pep
TYVPTPPIQIKNFFIIRMNCCGRGLMKAETGIFKKKKKRAALRPSLLACCSILLWYQINYAALHADGKLRPLMLRHPLAV

SEQ ID NO: 249142 - protein, 59 aa, Zea mays
  Clone ID: MRT4577_158804C.1.pep
LCGASTKLCYLLDQLRLIISWTKNQPCNILTISPWPHACLDPRLKGAFIYSNELLTLVR

SEQ ID NO: 249143 - protein, 64 aa, Zea mays
  Clone ID: MRT4577_158805C.1.pep
MGNPGTSANPAVRHRLSPHLVGQPPVPRASDPLDLASVAAPSGYRRLLPSLRPPRLPSPDAGCN

SEQ ID NO: 249144 - protein, 65 aa, Zea mays
  Clone ID: MRT4577_158806C.1.pep
RSDSGFLLFLLKNSTFCCSLNVTYILPSGKCTLFRFLFVVHVLKFHCDVPRCTFIFSLPRICENC

SEQ ID NO: 249145 - protein, 91 aa, Zea mays
  Clone ID: MRT4577_158807C.1.pep
SPQREPNRSRGRTMNNLATDRARPAAPLSCLVTDAPRPNRITFVCATLASMTTILMGYDRALMSDTTCITSRPQPLRHASRRAHGVHGPVH

SEQ ID NO: 249146 - protein, 38 aa, Zea mays
  Clone ID: MRT4577_158808C.1.pep
GLSTCVDMLNLLSKRICTPCFSYEKSFINLYHYRWGGG

SEQ ID NO: 249147 - protein, 119 aa, Zea mays
  unsure (1)..(119): unsure at all Xaa locations
  Clone ID: MRT4577_158809C.1.pep
PYGALRSTPPTSAQLASTLPATTAEDLASDTAIRDRALIPHYEAMAHIGALRYCEAKLMRAPTTPPTPDPKPRKEGQAVIMTRNLRTNVQXIPPRGSTRHPKAKLHPTEDKCDHYHVSK

SEQ ID NO: 249148 - protein, 99 aa, Zea mays
  Clone ID: MRT4577_15880C.1.pep
WRSASRTSAPGSRPRATPPPAPRGPRPDGVLDFFLLRRTTPARCSARSRSAPLEESRVAGNCSSARPLVDKCIYMVHRTRRRLAWMDWMDVIKYSSRYR

SEQ ID NO: 249149 - protein, 37 aa, Zea mays
  Clone ID: MRT4577_158810C.1.pep
HTQSYVHFKTSQALPLLLNYIHLSFTSLSLNNQQSNL

SEQ ID NO: 249150 - protein, 72 aa, Zea mays
  Clone ID: MRT4577_158811C.1.pep
PTGPRTGGENSAQKKCILQLNHIPGGAKSFDLVARFFYGVKIKISPANAVYLRCPPKHLKMPEKVAEETPIL

SEQ ID NO: 249151 - protein, 63 aa, Zea mays
  unsure (1)..(63): unsure at all Xaa locations
  Clone ID: MRT4577_158812C.1.pep
VGLEIEYALSCLNDVMLFIPCIITITCILEWIMLVMLRILYKASSFIECPCSSPIMFXYHWLF

SEQ ID NO: 249152 - protein, 99 aa, Zea mays
  unsure (1)..(99): unsure at all Xaa locations
  Clone ID: MRT4577_158813C.1.pep
EGFNAITTALVKHATNRPIIGGPFLMQPARLLQFIXISMPDKPYRLYMTPACLXSTPXAKDHPSRAFVIDTQCLMLTDISQNXQRACLYHIYENICKVI

SEQ ID NO: 249153 - protein, 49 aa, Zea mays
  Clone ID: MRT4577_158814C.1.pep
PRVRFVISSDTQQMEVLPCTLHNFNVPTHSTDMRHFTFVLSQNSLFCQN

SEQ ID NO: 249154 - protein, 56 aa, Zea mays
  Clone ID: MRT4577_158815C.1.pep
QLAVRGCFLGGGVFLWGLALQWAFAVFFVLAVTFFVHEHGGWSMFCSRRYCFVLRG

SEQ ID NO: 249155 - protein, 214 aa, Zea mays
  Clone ID: MRT4577_158816C.1.pep
FGSICLSDTMCLSKYIEEIVVSAVSYHLMNNKDPEYRNGKLVLSTKSLSHALEIFQGNKISDKDSMKLEATDDALKAAEKATAPTTAKSETKSATSLPPARAPAAAAAAPASAPAPRIESKTELEKKDNPPPVAKAPEVTPDNEFEKRIRPEVIPANEIGVSFDDIGALDDIKESLQELVMLPLRRADLFKGGFLNPCRGILLFGPPGPGKNFL

SEQ ID NO: 249156 - protein, 762 aa, Zea mays
  unsure (1)..(762): unsure at all Xaa locations
  Clone ID: MRT4577_158817C.1.pep
IRHEGTILLSGPAELYQQMLAXALAHYFXAKLLLLDPTDFLTNIWSKYGTGGSTEKTVKRSISETTLERVSGLLGSLSILPQKEQPKGTIRRQSSMMDVKLRSSESMSNLTKLRRNASTSSDMSSMASQGPSTSTAPLRRSSSWTFDEKILVQALYKVLLSVSKKYPVVLYIRDIEKFLHKSPKMYLLFEKLLNKLEGPVLILGSRIVDMNSDEESDDRLTVLFPYNIEIKPPENENHLVSWNSQLEEDMKMIQFQDNRNHIMEVLAENDLECDDLGSICLSDTMCLSKYIEEIVVSAVSYHLMNNKDPEYRNGKLVLSTKSLSHALEIFQGNKISDKDSMKLEATDDALKASEKAIAPTTAKSETKPASSLPPVRPPAAGAPAPRVESKTELEKKDNPPPSAKVPEGTADNEFEKRIRPEVIPANEIGVSFDDIGALDDIKESLHELVMLPLRRPDLFKGGLLKPCRGILLFGPPGTGKTMLAKAIANEAQASFINVSMSTITSKWFGEDEKNVRALFTLAAKVSPTIIFVDEVDSMLGQRNRAGEHEAMRKIKNEFMTHWDGLLSRPDQRILVLAATNRPFDLDEAIIRRFERRIMVGLPSMGSRELIMRRLLSKEKVDEGLDFKELATMTEGYSGSDLKNLCTTAAYRPVRELIQKERKKELEKLKCEKGETPSDLPKKEKEETIILRPLNMTDLKEAKNQVAASFASEGVCMSELRQWNELYGEGGSRKKEQLTYFLLSNMKIYGPSHAKNVWTFWKV

SEQ ID NO: 249157 - protein, 55 aa, Zea mays
  Clone ID: MRT4577_158818C.1.pep
IAQGFSCHGFPINPNPLSFFYAQKISLFFVAQFFFCIKAASIKLGLVEILVTRPR

SEQ ID NO: 249158 - protein, 187 aa, Zea mays
  Clone ID: MRT4577_158819C.1.pep
MKHGPNSMNPNAEAFYRVHELHYQMKDRADGLLENFGCYNFVYQTDTKAPADEKRREKLMTMVMSPLKLSFRMTRPLCHMQLGSPCQVAEVEFRVVAAEVSTRDLVQEFLANRVFPTSSGWGMAKKKDGGKKHELVWLPYRFKFENEFKKPCQEWLEMIETMCNEILSNYTKKEDQLMTAAFGTRPK

SEQ ID NO: 249159 - protein, 167 aa, Zea mays
  Clone ID: MRT4577_15881C.1.pep
ITQSSNERRDNSGSLHGLLLGKNILVVDDNKVNLRVAAGTLKKFGAKVECVESGKDALASLQVPHKFHLCLMDIQMPEMDGFEATKQIRAMEAKANEQAVACDDSETDGATRAARWHLPVLAMTADVIQATHEECTKYGMDGYVTKPFEEKQLFQALQKFLDPGMSS

SEQ ID NO: 249160 - protein, 112 aa, Zea mays
  Clone ID: MRT4577_158820C.1.pep
KMKTIYRLYSNKSTYTVVKRREEKKEVQRKKLSLYPASAAAPKSQMESAHPSKRPNPDLDADLTLGVRRRHLPAAAAAAGRRRLRRPYDRARRVATPTAPCRGRGLGYDHGG

SEQ ID NO: 249161 - protein, 180 aa, Zea mays
  Clone ID: MRT4577_158821C.1.pep
GDMPTADKTLASFLAKQTDFEDVADSCVIPAVTGSMAAAYTSYAKSMENWISEFKDDLSSVYDACKDVPQVQEQLESYAIPSGLCSSYAWATASATETATATAKTTNSVADTATSTATESISSISTPSNVAENSAVRSTGLGVICRCRRCRSDCSWSSLDRYSSVGVYFYSRCRPIVSAF

SEQ ID NO: 249162 - protein, 183 aa, Zea mays
  unsure (1)..(183): unsure at all Xaa locations
  Clone ID: MRT4577_158822C.1.pep
GLVGAEAVRGWQPRRAESFEKLDKIGQGTYSSVYKARDLENGKIVALKKVRFANMDPESVRFMAREIHILRRLDHPNVIKLEGLVTSRMSSSLYLVFEYMEHDLAGLAATPGLKFSEPQVKCYMQQLLSGLDHCHNRGVLHRDIKGANLLLDNNGILKVADFGLATFFNPNQNNXLTSRVVTL

SEQ ID NO: 249163 - protein, 94 aa, Zea mays
  unsure (1)..(94): unsure at all Xaa locations
  Clone ID: MRT4577_158823C.1.pep
PIPPIRQGQARPREXXXRVVILQTRMPGALKDRVYMYYGDNAAVIDNAKGAMKGCGITRPIVTDCADIGATIASAKDVIVSDLVGMDIDLLMTI

SEQ ID NO: 249164 - protein, 45 aa, Zea mays
  unsure (1)..(45): unsure at all Xaa locations
  Clone ID: MRT4577_158824C.1.pep
SHVPPLTFLSNSHFSTSGCPPRFSCDTTPLHPLPXXXSILAEFLS

SEQ ID NO: 249165 - protein, 38 aa, Zea mays
  Clone ID: MRT4577_158825C.1.pep
AQAAAEYLSKLALQKGSKDNITVIVVDLKSHRKFKSRT

SEQ ID NO: 249166 - protein, 69 aa, Zea mays
  Clone ID: MRT4577_158826C.1.pep
RIFLWHKKNGDDSGSAQKSGDSANEPAQPAAEYLSKLALQKGSKATIPVIVVALKSHKKFKSRTYPRIR

SEQ ID NO: 249167 - protein, 71 aa, Zea mays
  Clone ID: MRT4577_158827C.1.pep
LCGTVGFCCGVLVQLQLRLVCASLAFDCGRRWNLGEVPMNVITFDSTLKLLCSSSSSTKSQWWWFFFGGEP

SEQ ID NO: 249168 - protein, 45 aa, Zea mays
  Clone ID: MRT4577_158828C.1.pep
CQLACNTINPSKKPIIIMTPPKERSCSRLESKAQHLIISLVPQHY

SEQ ID NO: 249169 - protein, 99 aa, Zea mays
  Clone ID: MRT4577_158829C.1.pep
ISRQCLLLSFVSLHSRHLFGLGDYLRLSSLVRGSISLRVCCRQGGLRLCYIGCRLYSRQSAPRALPRSGQHHIRLRRRPRPKPLLPCSQSRLRWAPARQ

SEQ ID NO: 249170 - protein, 66 aa, Zea mays
  Clone ID: MRT4577_15882C.1.pep
AFHTSKDLQDFEIQAAILCKFSAIYVGNSLCPAILFADRRAAGRAPPNQVRSCAAARQPPEAREHP

SEQ ID NO: 249171 - protein, 135 aa, Zea mays
  unsure (1)..(135): unsure at all Xaa locations
  Clone ID: MRT4577_158830C.1.pep
MFPGPTSQPSPPPPXASSGVGSRWAGDICSIFCGSNQVPRTPAAIRGKDAALQPEVPSGAGAHDGTSSSGGSGSNYGGSGLPSDSVHVHKRKGMCRDESDSRSEDAECEEXKETKPWRRHGRKRRTRAAEVHNLS

SEQ ID NO: 249172 - protein, 76 aa, Zea mays
  Clone ID: MRT4577_158831C.1.pep
KTITPNLITHLHRGGIKPYNVSGIPPNAMFFYNRPKLNTFGATLGSPQVCRGTQSLLPRASIGFSSCHPLCLPYPC

SEQ ID NO: 249173 - protein, 90 aa, Zea mays
  Clone ID: MRT4577_158832C.1.pep
MGKNKEGGSSSHHSDDKRKREPSPPSEDFGDSEYSEEEFSSESEGSPVYASPSVSFDDSDNSQGIAAEVWTYIQAIERSGLEGSDESEIS

SEQ ID NO: 249174 - protein, 75 aa, Zea mays
  Clone ID: MRT4577_158833C.1.pep
PCGRAVPRECRRAALGAVVDQLHVLGRPGRLGRNGRGRRRQQGVLPAQRRRGPVNYDRLLKCTNRALFCHRLSEP

SEQ ID NO: 249175 - protein, 70 aa, Zea mays
  Clone ID: MRT4577_158834C.1.pep
MSAPNAGRQSPDPERQSGAQAGQISDNVNQQGAGPKEGAEKSSDNTKDTLSSNPEHPLKEHSEETTSKKV

SEQ ID NO: 249176 - protein, 84 aa, Zea mays
  unsure (1)..(84): unsure at all Xaa locations
  Clone ID: MRT4577_158835C.1.pep
PWTGCPAPKGSRSSSCPFCTVFRQLNTAIAVSQMSSGQFCLVPLIQVLQDFCHLXHYTVKLLFKLHSCECARATPGPRSCVYMA

SEQ ID NO: 249177 - protein, 47 aa, Zea mays
  Clone ID: MRT4577_158836C.1.pep
HSYPRVRRDQKHLTMAHLFDKPSFRRPVTLDKDYISISHVNTHLPIL

SEQ ID NO: 249178 - protein, 37 aa, Zea mays
  Clone ID: MRT4577_158837C.1.pep
EKDICKVWHGIPSSTMVKQPLAHSQSHPACLPTLTLH

SEQ ID NO: 249179 - protein, 54 aa, Zea mays
  Clone ID: MRT4577_158838C.1.pep
RDDRAHSDRPGRINCWGQDGAGVDLPEAHIYSTKSNHTHLNKTPGGKLVYQYTN

SEQ ID NO: 249180 - protein, 96 aa, Zea mays
  unsure (1)..(96): unsure at all Xaa locations
  Clone ID: MRT4577_158839C.1.pep
GASADGTPKRRTYDXIHSKTFMEVKGTVTAYQCLSIVCXVXVFPFRLFWSKLNKXCLVAALFIFYIVFIAKNAPPEFQKTKLMNRLTYTLDEIEGP

SEQ ID NO: 249181 - protein, 282 aa, Zea mays
  unsure (1)..(282): unsure at all Xaa locations
  Clone ID: MRT4577_15883C.1.pep
MTIQWKLRQWEQQIKXPMRTISDHEQDTPNILRSHPESIDPSMVRRIGMPFGNVDEAYNFYSCYAYEVGFPLKKYRERKNCKWLNCSMEGRNTERDNPQFFSDFQLDNEGKILSIFWSHASQQGEYVDFGDAVTFDTTHKTNLYGKPLGMFVGANHHLQCTVFGFSLLGDETIETFEWVFNAFKTCMGTEGPRVMLTDQDPAMPVALHRVFPNTVHMLCLWHVQNRYMPFLNELYARYAGADFKTKFQSIVHHPLTEIEFEAAWTMLLDEFNLHEDGTLRKL

SEQ ID NO: 249182 - protein, 163 aa, Zea mays
  unsure (1)..(163): unsure at all Xaa locations
  Clone ID: MRT4577_158840C.1.pep
LPERLYSYTPTAXAQIVTDMNETLGYIRPGTTHQVHGGLPXTRLSVLDKSYHLPXGRAHTIGAEHFRCPEXLFHPSLTEIDAAAIHETTYTYIMNCDGDIRKDLYGLIGPSRGTTMIPGLADRMSKDITALAPNITNINVLAPTXRMYRRWIEGSILASLSTY

SEQ ID NO: 249183 - protein, 60 aa, Zea mays
  unsure (1)..(60): unsure at all Xaa locations
  Clone ID: MRT4577_158841C.1.pep
LRATWLSTLLPHDLDRSKIDDYNTLTYIDDLNADHITIRVGQTYMCDISSXVRSIHLITS

SEQ ID NO: 249184 - protein, 460 aa, Zea mays
  Clone ID: MRT4577_158842C.1.pep
MGKEEKTHLNVVVIGHVDSGKSTTTGHLIYQCGGIDKRTIEKFEKEAAELGKGSFKYAWVLDKLKAERERGITIDIALWKFETPRYYVTVIDAPGHRDFIKNMITGTSQADCAILIIAAGTGEFEAGISKDGQTREHALLAYTLGVKNLIVAINKMDTTKWSEARYQEIIKETSSFIKKVGYNPKAVAFVPISGFNGDNMLTASTNCPWYKGWEREIKSGKLSGKTLLEAIDSIEPPKRPNDKPLRLPLQDVYKIGGIGTVPVGRIETGIIKPGMVVTFAPSNVTTEVKSVEMHHEQLTEGQPGDNVGFNVKNVSVKDIRRGNVAGDSKNDPPMGAASFTAQVIVLNHPGQVGAGYAPVLDCHTAHIACKFAEIQEKIDRRTGKATEAAPKFIKSGDSAIVKMVPSKPMCVEAFTDYPPLGRFAVRDMRQTVAVGVIKAVEKSTGAAGKVTKSAAKAGKK

SEQ ID NO: 249185 - protein, 129 aa, Zea mays
  Clone ID: MRT4577_158843C.1.pep
EKEKGAQGPVPPPPGARVFPVPPNKVWGQVMGTPAFFFLQRAPHVGAFFPRSPLCPCQPCKAPLMCQGSGWWDPPFPRVPPGKVPGFPGLAPWGGSPLGFPLPLPLPLPPPQGVFSFSAPPPKSSQAFS

SEQ ID NO: 249186 - protein, 81 aa, Zea mays
  Clone ID: MRT4577_158844C.1.pep
VRVCTIYFTFALVSMLLGLTASSFPDSALCAKTVSSNGALQAFLFLNIVMHLHNIEFYPEFFHLGVSWMLTSLVFCIYWAM

SEQ ID NO: 249187 - protein, 132 aa, Zea mays
  Clone ID: MRT4577_158845C.1.pep
SGQKDGDQLRRNADVVEILRKTRFPHVHGAGEEKSPETILDHDRVIWLGDLNYRIALSYRSVKALVEMHNWKQLLEKDQLRIEQRFGRVFAGWREGRIYFPLTYKYSYNFDRYAGDDMRPNEKRMTPAWCDR

SEQ ID NO: 249188 - protein, 32 aa, Zea mays
  Clone ID: MRT4577_158846C.1.pep
TSLGSYLALLAGHSFCSIAFYRHQCHCRGPKP

SEQ ID NO: 249189 - protein, 115 aa, Zea mays
  Clone ID: MRT4577_158847C.1.pep
LLFNHLFFSMNRAVPIHVHGRWRPGNGEVLAAAAPPEPRRRIPRSPARSQGDYLTRRCWWSSVQPSGGLPELSTAMGAAAWQQHRTPARHPPPPSCRSSRQRRPGEGGTSRGGRQ

SEQ ID NO: 249190 - protein, 53 aa, Zea mays
  Clone ID: MRT4577_158848C.1.pep
TCSKQVGVCRDFLVFPKYFLSNSVKRRSFFVFRRTYDCLMHFGPTPGLFKTIH

SEQ ID NO: 249191 - protein, 89 aa, Zea mays
  Clone ID: MRT4577_158849C.1.pep
SFFSPSSLLVEGSELNELRSNLHFTCSTTSSPLPSSQLSTPSSSFSSLPLDLYFSRLFLFRRLLTPPVLHFTYLLMMINLTCLSSLHSI

SEQ ID NO: 249192 - protein, 57 aa, Zea mays
  Clone ID: MRT4577_15884C.1.pep
IFKKIFFGPNRTWLDLRKRPTPSLFSFFKLFCYGPPKGPRVPPNRGGGPTKSKYFYS

SEQ ID NO: 249193 - protein, 147 aa, Zea mays
  unsure (1)..(147): unsure at all Xaa locations
  Clone ID: MRT4577_158850C.1.pep
DTRPLAHMHSNTFIVANQTLPSDRAAKTNELDAISTPLGDIATESDSDRXSLEQVKQXRMLXSSYLNLATLXSXKAYENVLKLAEEQXTEKHAASQKILIVEQQLDANQNLEFEIQHVNGRLLVIEHMPLDEDLPVXNKLNVLSDAL

SEQ ID NO: 249194 - protein, 312 aa, Zea mays
  Clone ID: MRT4577_158851C.1.pep
MEPVPRKRKGAPPVCSAARSLQDLASRKRACRGSVPQQSHCTDAPAPAVVMTAPAASGASASAGVLPGRGLKRKVGCIDNATRIGRRKRLENEYDLGEEIGHGKFGSVRVCRPKARTRGEEEFACKALPKNGGDTAHREVEIMQHLSGHPGVVTLRAVFEDTDAFYLVMELCHGGRLLDEVAREGKLSERRAANVIKELMAVLKYCHEMGVVHRDVKPENVLLTKSGRLKLADFGLAVRVADGQQLTGVAGSPAYLAPEVLLGNYSQKVDVWAAGVVLHVLLMGTLPFQGKSVEAIFDAIKTAELDFHSSQW

SEQ ID NO: 249195 - protein, 484 aa, Zea mays
  unsure (1)..(484): unsure at all Xaa locations
  Clone ID: MRT4577_158852C.1.pep
MEPVPRKRKGAPPVCSAARSLQDLASRKRACRGSVPQQSHCTDAPAPAVVMTAPAASGASASAGVLPGRGLKRKVGCIDNATRIGRRKRLENEYDLGEEIGHGKFGSVRVCRPKARTRGEEEFACKALPKNGGDTAHREVEIMQHLSGHPGVVTXLRAVFEDTDAFYLVMELCHGGRLLDEVAREGKLSERRAANVIKELMAVLKYCHEMGVVHRDVKPENVLLTKSGRLKLADFGLAVRVAXCVKSRSGANLVVAVELLSSGGSCYFHGVLDIWVHSINRLTSXXGQQLTGVAGSPAYLAPEVLLGNYSQKVDVWAAGVLLHVLLMGTLPFQGKSVEAIFDAIKTAELDFHSSQWASVSLLARDLIGRMLNREVSSRPDAEDVLRHPWVLFYTDCPQKAEFSNLWGTNKTAAPMIHQEIVRFGYCESSSSKSSSDNSEERDECGIVDALATAITQVRISEPKRSRLFSLPNGLLPPSRNSLRT

SEQ ID NO: 249196 - protein, 93 aa, Zea mays
  Clone ID: MRT4577_158853C.1.pep
KPKLIYEAKIIGPYHTGKGGAANGIITYIDRGGGIEEISQISGNTSRAEGRGGPHRGWGGSWARGTPAATTRGANYIRLPAGERGAPLTPEGG

SEQ ID NO: 249197 - protein, 97 aa, Zea mays
  Clone ID: MRT4577_158854C.1.pep
PPWPRWDGMPPPCLAGLVLVSYVAVVVFFSLWRMHVLLLSFLSSYQALCLAYAAPDPWWPCLWVVLSGSCMSWLLSSSYASTCLYHGNLITNKVIPA

SEQ ID NO: 249198 - protein, 82 aa, Zea mays
  Clone ID: MRT4577_158855C.1.pep
RAIAVVAHQQRPLCYSSVGPDVVAIFCLYLLPLASLQSSSLLRFRSNGSIDSDARGHLDGALGSDRSYTCVCLFLPRPVQTH

SEQ ID NO: 249199 - protein, 141 aa, Zea mays
  unsure (1)..(141): unsure at all Xaa locations
  Clone ID: MRT4577_158856C.1.pep
LPGRPTPPKTWSYSSCYHVLSWGTLADVAGALIGVYYVAGGKIAAHPQLKTHPKDLIQWLPQENPFFKPYNIPESILKIINYDTLXGALGIKSHNKRLLVEAITHASRPSSGLSRYQPLESVGEALLDHLITKHLIFTYTD

SEQ ID NO: 249200 - protein, 105 aa, Zea mays
  Clone ID: MRT4577_158857C.1.pep
PRPSPWVLRSPPRAAVFLSTPAIWGPNSCSPFPAPIYPVQQLAPKIQRPPPIFLKKKAAFKKNPFNGPPPFQPKVAPGVLFPLERAPGYAPPPPLFIFICRVFCF

SEQ ID NO: 249201 - protein, 323 aa, Zea mays
  Clone ID: MRT4577_158858C.1.pep
HASAHASAHASVQCHVLLDCMQRVEVKPRDIVVQQGGEGDCFYVVGSGEYEVLAIQEENGKEITKVLHGYTVDKLSSFGELALMHNKPLQASVRAVTSGTLWALKREDFRGILMSEFSNIPSLKLLRSVQLFTRFTVLQLSQLAESLVEVSFADGQIIVDKNDKFSSLYIIQRGRVRLILATDQMTSDTWDLISAETKQAQSSRENGNYVLDIDEGGHFGEWSLIGETIAFTAIAVGDVTCSTITKEKFDSIVGPFPKLSQADSKIKESLVTLENVADGDFPFRRVKLSDLEWKMCIYAADCSEIGLVQVRGYEQMRLKGFTS

SEQ ID NO: 249202 - protein, 308 aa, Zea mays
  Clone ID: MRT4577_158859C.1.pep
MCIYAADCSEIGLVQVRGYDKMRTLKRFYIKRVQDLHKEVQVFEEKDLMKSLSKSTCVPEVLSTCADQSYLGILLNCCLCCSLASILHTPLNETSARFFAASVVVALEELHQKSIIYRGVSADILMLDRSGHLQLVDFRFAKKLEGQRTYTICGIADSLAPEIVLGRGHGFPADWWALGVLIYFMLQSDMPFGSWRESELEPITKIAKGHLVMPVSFSAEVVDLITKLLVVDENARLGTSGAEAVKKHPWFDGTDWERIASGTCAAPEEITERINYCIETLNEDLSASPSVPIEDPDDLTAPEWIQDW

SEQ ID NO: 249203 - protein, 77 aa, Zea mays
  Clone ID: MRT4577_15885C.1.pep
IRNSTLSTRMYSARLTRPKLGNKKVKDSNDYAKLYQELALYFIRVTRVNEIVSNLKGYQVHYTIFSRSVFVPIPLQN

SEQ ID NO: 249204 - protein, 84 aa, Zea mays
  Clone ID: MRT4577_158860C.1.pep
LSSGNNAEYFFSFFFFFFFALFFCFFLSSRSSGSLLAGVTIAHGGVLPNIHSVLLPKKAAEKAASAGCPEPKSPKKGASPPTKA

SEQ ID NO: 249205 - protein, 112 aa, Zea mays
  Clone ID: MRT4577_158861C.1.pep
FPKFHTPFLPTLYLFYFPPYLIFSPPFYTTFTLKTPYFPKFISFYNISLFPHFVLSKKPPHFSLFKNFPHPISNFTPPLSLLFNPGYFFFLPLFPLLLFISLLPPPFHISPF

SEQ ID NO: 249206 - protein, 49 aa, Zea mays
  unsure (1)..(49): unsure at all Xaa locations
  Clone ID: MRT4577_158862C.1.pep
MGKEKTHINIVGIGHVDSGKATTTVHLIYXLGGIDKRVIERFXKEAAEM

SEQ ID NO: 249207 - protein, 61 aa, Zea mays
  Clone ID: MRT4577_158863C.1.pep
LSPSQGLMASQVQHHGRPGWQVLSNRQTSGLTFTASLTHSHPAFPEGNITGARSSRSVRTA

SEQ ID NO: 249208 - protein, 57 aa, Zea mays
  Clone ID: MRT4577_158864C.1.pep
MASADALLARITSSIRYIRDFTKPGIIIQDITTLLLDPKTFRNTINLFFEPFKDQCI

SEQ ID NO: 249209 - protein, 308 aa, Zea mays
  unsure (1)..(308): unsure at all Xaa locations
  Clone ID: MRT4577_158865C.1.pep
TLLLPLAAATVLVASTRFLFAAVGARWRPADTGLPVPPDAFPTAVTIALPNATTGKELSFLDENGRPDDPSSASASGATAVRCDPRAAAVRVFMYDVPPEFHFGLLGWSPPSPASVWPDVTDGSLPPPRYPGGLNQQHSVEYWLTLDLLSSSFSPPCGRHSAVRVTDPRDADLVFVPFFASLSYNRHSRPLPPEKVGRDKALQEKLVGYLTARPEWRRFGGADHVIVAHHPNSLLHARAALSPAVFVLSDFGRYPPRVASLEKDVIAPYKHMAKTFVNDYGTVFDDPDXSLYFRGSIYRQYGWGFDRS

SEQ ID NO: 249210 - protein, 162 aa, Zea mays
  unsure (1)..(162): unsure at all Xaa locations
  Clone ID: MRT4577_158866C.1.pep
MATKRLSLLMLLGPPACVADATIAPXCSQAPIACLLPPXLPSLRGGXCQNPALQPYWLQQAIAASNIPLSPLVAQHSPALSPVQPLGHTIRAHRHAGPRATWDQPTYSGQPLSLLSPSALSCILPTGYTATLVLVCANAYFHSPRLTAAYSYKQQLFPFTPL

SEQ ID NO: 249211 - protein, 148 aa, Zea mays
  unsure (1)..(148): unsure at all Xaa locations
  Clone ID: MRT4577_158867C.1.pep
IDVNEFQDIKSGYSITLAFSXXNPYFEDTKLTKTCSFSDDGKITVKATTINWKDGMDIANGKAYMENGEKRLLIDESFFTWFNDAKNKSFSDGVMDEVADVIKEELWPNPLKYFNNEAEDEFEDDKDEEGFDEDDDDEDEEEEEDDEE

SEQ ID NO: 249212 - protein, 129 aa, Zea mays
  unsure (1)..(129): unsure at all Xaa locations
  Clone ID: MRT4577_158868C.1.pep
IMEKSNFKLLSDEEYEVAQSGQYLLNLPIKVDESKVDSKLLTKYFMEHPHDNLPAFANKYIIFRRGIGIDRTTDYFFMEKVDVIISRAWRSLLRVTRIDRLFSKKQILPRKDTKNTDGINDDXXEPDLY

SEQ ID NO: 249213 - protein, 99 aa, Zea mays
  unsure (1)..(99): unsure at all Xaa locations
  Clone ID: MRT4577_158869C.1.pep
RGRNRISPKYTENPATGPKHPDINLLKMKNETQPNPPKIILNHLQVTSPHQNPAAELLKKALLHLPRARXIPIKHTPVALKPYAPSTQDDGRCYAFPFI

SEQ ID NO: 249214 - protein, 106 aa, Zea mays
  Clone ID: MRT4577_15886C.1.pep
NKKSNMVARRADTYSGLPTALTLRLKSPNCATSPRRHIVTPPAEFRASGVNDDNTMEIETMGAANQMVPMRTISDHEQDTPNILRSHASYLSLIISIKQFNQTYTS

SEQ ID NO: 249215 - protein, 76 aa, Zea mays
  Clone ID: MRT4577_158870C.1.pep
RPRRTQAPGAQVRRTRYSAPNQKPGELFMDMDKHTNTCDMPDMLVDYIKELLNQVKVSNTVCSMQMSTLSGRCTGT

SEQ ID NO: 249216 - protein, 66 aa, Zea mays
  Clone ID: MRT4577_158871C.1.pep
TNLPPRIFLTLIPMTKCQTLKYVMLSTSPKRITLLELHPALKSKKLAPIIDIYEDHRRKSQYLLEL

SEQ ID NO: 249217 - protein, 62 aa, Zea mays
  Clone ID: MRT4577_158872C.1.pep
DPPPTHSYAATDNSEHNTGDVLVHTSHMVTTLCPHPCQCLRPRCALGDCGRPSGATEDYRDY

SEQ ID NO: 249218 - protein, 72 aa, Zea mays
  Clone ID: MRT4577_158873C.1.pep
GWNRLDPNYLTPGLTFKKWLPVLTKSPGAKFWRNSNIACLGWAIGQTSWGVLVLPFGQTIFLKGPPLVLRGG

SEQ ID NO: 249219 - protein, 155 aa, Zea mays
  unsure (1)..(155): unsure at all Xaa locations
  Clone ID: MRT4577_158874C.1.pep
ERRPEFRRPVIPRQELTRICRDLLVXVLLMXYLLIXIRPCSLNYLAIITTQIIPYEWTIFTCXKIQEGLPARMGSFLELLIXGKDLEXNDRGKAQLKGIILIXAICGDRAYCCTIGVYYNAEXERFHCTPLSGFHRXLAGFLAFLKXTLTNLEFP

SEQ ID NO: 249220 - protein, 43 aa, Zea mays
  Clone ID: MRT4577_158875C.1.pep
DEMEVEVKSAADDVWASVRDSIEVVPKSLPYQYQSLKTGESDS

SEQ ID NO: 249221 - protein, 72 aa, Zea mays
  Clone ID: MRT4577_158876C.1.pep
GEVLLSTRRSPSISKEPRPFSPCRFRSTNGRLKDLERLRKLEGARNSPKSFWKSLHKRERIPENIVDHTTDQ

SEQ ID NO: 249222 - protein, 95 aa, Zea mays
  Clone ID: MRT4577_158877C.1.pep
IYLTCLPFYCFQPPSPVLPPFFLLTCFPINHFPVLFLPIGSTRKTPGLPYLKFLTPQSPFCPLPYYPNYPSLFPLPSFSHPYCLIVPSLQLPFNL

SEQ ID NO: 249223 - protein, 92 aa, Zea mays
  Clone ID: MRT4577_158878C.1.pep
SGKLRTPLVNPFLFEVLIGQASVLPIPGGGAGLFQGPNNFIPGYGGKQQGRSTGMASPSKKRSSFPSAQLVLKVVKILEPIQLPLFLPPTGP

SEQ ID NO: 249224 - protein, 58 aa, Zea mays
  Clone ID: MRT4577_158879C.1.pep
TLQIWPLPPVLLFWRCRKFMVTIFLVRLHQNLIRQFVRLLGHSTCMRWSTRPSLVPDG

SEQ ID NO: 249225 - protein, 91 aa, Zea mays
  unsure (1)..(91): unsure at all Xaa locations
  Clone ID: MRT4577_15887C.1.pep
SSCGVSAAPTVTPYCSSHCQLLRRLCCLXLMQVEPLLRFQAIFRLVLHSFLLCLPYSGRGAGLLACPIASFLTVMCXGLLYSTPCPYSVVG

SEQ ID NO: 249226 - protein, 79 aa, Zea mays
  Clone ID: MRT4577_158880C.1.pep
RPGGLPGGPQNVGGGKSPHPSGFAQGFYFFFGLPQGFLFLKNRVLGVVKTVPLPQKVQKPQKKKKKKKKKKKKKKKLCK

SEQ ID NO: 249227 - protein, 70 aa, Zea mays
  unsure (1)..(70): unsure at all Xaa locations
  Clone ID: MRT4577_158881C.1.pep
LEITEKQHYFTIGQNQSMILRTETVILLAVRAASHSFSIIRYSKSTNTRXFPPAPGNMLLDRQFGVLFLI

SEQ ID NO: 249228 - protein, 56 aa, Zea mays
  Clone ID: MRT4577_158882C.1.pep
LALRRQGHVPPPDRGWERNGKMDKQSCSFTPPERGQPHPGDREQAIRNGVGAWGVA

SEQ ID NO: 249229 - protein, 60 aa, Zea mays
  Clone ID: MRT4577_158883C.1.pep
QVLQDIGLVFCRLKWVIYFKKGKKGYAQRFAENGAHNLQPLTRKRGATHGTIQSPGRRGL

SEQ ID NO: 249230 - protein, 124 aa, Zea mays
  unsure (1)..(124): unsure at all Xaa locations
  Clone ID: MRT4577_158884C.1.pep
EYRALIAYTSVNKAKDNDWFRIAAANPEGTRWEGTCWXAPEIELPTLDGKTHKMYRGGKICLTVHFKPLWAKNCPRFGLAHALCLGLAPWLAAEVPILVDSGMVKHKDDEAAPAEASASAAPPS

SEQ ID NO: 249231 - protein, 175 aa, Zea mays
  unsure (1)..(175): unsure at all Xaa locations
  Clone ID: MRT4577_158885C.1.pep
MEGWDKGTKSTVGEIPLLSTRAGPRDGEAWRQRLKEEYRALIAYTSVNKAKDNDWFRIAAANPEGTRWEGTCWYVHNLQFDIPVAYPQVAPEIELPXLDGKTHKMYRGGKICLTVHFKPLWAKNCPRFGLAHALCLGLAPWLAAEVPILVDSGMVKHKDDEAAPAEASASAAPPS

SEQ ID NO: 249232 - protein, 182 aa, Zea mays
  Clone ID: MRT4577_158886C.1.pep
MEGWDKGTKSTVGEIPLLSTRAGPRDGEAWRQRLKEEYRALIAYTSVNKAKDNDWFRIAAANPEGTRWEGTCWYVHNLRRYEFPLQFDMPVAYPQVAPEIELPTLDGKTHKMYRGGKICLTVHFKPLWAKNCPRFGLAHALCLGLAPWLAAEVPILVDSGMVKHKDDEAAPAEASASAAPPS

SEQ ID NO: 249233 - protein, 164 aa, Zea mays
  Clone ID: MRT4577_158887C.1.pep
PAPSKYMLSNCIVSMVAAIGCLSPGSCARRTDIIKCCRRRYRWHWIHNFFIYPLFLLFLRSRRNKLLFLCSMIAKKRGNISLLLHILVTVRGIAVGPWPLQLQTVRPSTRAEQEIAKSTPRNCSSKTEQQQDEDANCLIANAKMPATAVLPCLWPCGTPHAAAE

SEQ ID NO: 249234 - protein, 89 aa, Zea mays
  unsure (1)..(89): unsure at all Xaa locations
  Clone ID: MRT4577_158888C.1.pep
AVVLLLCLAGAGWVAASVDSECPLLRRVVPGGDDXDLDLSTESXLLSCVQXFGXSVRDAGQHPYRLXVLKDNLRSAHQYHLLSPSDDHG

SEQ ID NO: 249235 - protein, 88 aa, Zea mays
  Clone ID: MRT4577_158889C.1.pep
SSTRMQTATLWGGVGWTSTLPKQERPGLHAAGRKVLPRAAACPRVIKHPSSTDQHLHTLTPTSTTWKQSIKEPSDAYVGDHSQGRRNG

SEQ ID NO: 249236 - protein, 62 aa, Zea mays
  Clone ID: MRT4577_15888C.1.pep
IFIIIFFFEKPPPKYHAFFPVVGLARYVQNKAQVWPVNGTVVVLLTRPPKTEKIYYYHHHYK

SEQ ID NO: 249237 - protein, 46 aa, Zea mays
  Clone ID: MRT4577_158890C.1.pep
PLPGVLQAVLPHVPGTDDCTVNYTLMGPHLSPTPPPMQCTDPPQAS

SEQ ID NO: 249238 - protein, 75 aa, Zea mays
  Clone ID: MRT4577_158891C.1.pep
SSHQSMPYSAGDSPSPRQITVADHLFLTVRSTTRDSTGARVNSCVVLCRSIPITRVAVPTRISQPVRSGQHHQGR

SEQ ID NO: 249239 - protein, 366 aa, Zea mays
  Clone ID: MRT4577_158892C.1.pep
MPGGRKRPTPFAGFSPFARSLIFSAATSSWPKSRPLPDASTAAETPRQDDMPRPPSKRVKRAEPSSDEVEDRGSSGSEEESFSTSGSDSDDGEESSEELETVQADFALFDPKPSDFHGARLLLKTYLDSKPWDLTGFADLILAQTTVGTVVKLADDEEEEGEGNGVQKANSSTNNDDDDLFGLISVLNLGQHAEQKCIKDLKEYLLDVCPDKGTKKQLRSLLEEKASSVGLLVCRRFVNFPYELVPKLYDALFDEVSWATEDEPTQELQDSFRFKHYLLIVRMLERKTPPKHKSKANKDDDEPIIYPKFEDEIFHELSSWSFTFPIRSEESAQQEMKNYKEMGLVMAIKAGTVPKFRKKLGDLVSE

SEQ ID NO: 249240 - protein, 918 aa, Zea mays
  Clone ID: MRT4577_158893C.1.pep
MQGLAVSCQLPPAAAAARWRPRASSSNREAVLQCWKYELSQDHYLGGPLRIGQSQGSLHRHRSTNFLRPAAAAISVEQDEVNTYLPKGDMWSVHKFGGTCMGTPKRIQCVANIVLGDSSERKLIIVSAMSKVTDMMYNLVQKAQSRDDSYAIALAEVFEKHMTAAKDLLDGEDLARFLSQLHSDVSNLRAMLRAIYIAGHATESFSDFVVGHGELWSAQMLSYAIKKSGAPCSWMDTREVLVVTPSGCNQVDPDYLECEKRLQKWFSRQPAEIIVATGFIASTAGNIPTTLKRDGSDFSAAIVGSLVRARQVTIWTDVDGVFSADPRKVSEAVILSTLSYQEAWEMSYFGANVLHPRTIIPVMKDNIPIVIRNMFNLSAPGTMICKQPANENGDLDACVKSFATVDNLALVNVEGTGMAGVPGTASAIFSAVKDVGANVIMISQASSEHSVCFAVPEKEVAVVSAELHDRFREALAAGRLSKVEVINGCSILAAVGLRMASTPGVSAILFDALAKANINVRAIAQGCSEYNITVVLKQQDCVRALRAAHSRFFLSKTTLAVGIIGPGLIGGALLNQLKNQTAVLKENMNIDLRVIGITGSSTMLLSDTGIDLTQWKQLLQKEAEPADIGSFVHHLSDNHVFPNKVLVDCTADTSVASHYYDWLKKGIHVITPNKKANSGPLDQYLKLRTMQRASYTHYFYEATVGAGLPIISTLRGLLETGDKILRIEGIFSGTLSYIFNNFEGTRAFSDVVAEAREAGYTEPDPRDDLSGTDVARKVVVLARESGLRLELSDIPVKSLVPETLAESCSSADEFMQKLPSFDEDWARQRSDAEAAGEVLRYVGALDAVNRSGQVELRRYRRDHPFAQLSGSDNIIAFTTSRYKEQPLIVRGPGAGAEVTAGGVFCDILRLASYLGAPS

SEQ ID NO: 249241 - protein, 405 aa, Zea mays
  Clone ID: MRT4577_158894C.1.pep
LAKANINVRAIAQGCSEYNITVVLKQEDCVRALRAAHSRFFLSKTTLAVGIIGPGLIGRTLLNQLKDQVAALKENMNIDLRVIGITGSSTMLLSDTGIDLTQWKQLLKKEAEPADIDSFVHHLSDNHVFPNKVLVDCTADTSVASHYYNWLKKGIHVITPNKKANSGPLDQYLKLRTLQRASYTHYFYEATVGAGLPIISTLRGLLETGDKILRIEGIFSGTLSYIFNNFEGTRAFSDVVAEAKEAGYTEPDPRDDLSGTDVARKVIILARESGLRLELSDIPVKSLVPETLAACSSADEFMQKLPSFDEDWARQRSDADAADEVLRYVGVVDTVNKRGHVELRRYKRDHPFAQLSGSDNIIAFTTSRYKEQPLIVRGPGAGAEVTAGGVFCDILRLASYLGAPS

SEQ ID NO: 249242 - protein, 76 aa, Zea mays
  Clone ID: MRT4577_158895C.1.pep
WGLSGSVARNVPFKWLSLSEKSQPCATNTTNGPWSLLYPVKVFFFFNLEASPVGRGWMFQQPPSVGEKVLSAFFFP

SEQ ID NO: 249243 - protein, 77 aa, Zea mays
  Clone ID: MRT4577_158896C.1.pep
SRWNHKFTWCKKVSECKAINVSYPTHLGHHTFYFMHPVTHYVCDCERSNKLSQETNYDPGLHLAAQINPQLNRSHQH

SEQ ID NO: 249244 - protein, 48 aa, Zea mays
  Clone ID: MRT4577_158897C.1.pep
NNIYRMGSWVFFFYWNTPKPWPRMLMTTSVGRTRTHYGVFTLLEAITE

SEQ ID NO: 249245 - protein, 30 aa, Zea mays
  Clone ID: MRT4577_158898C.1.pep
LTHSIEGIQFMIYLCTNYLDLNVALTIVQT

SEQ ID NO: 249246 - protein, 78 aa, Zea mays
  Clone ID: MRT4577_158899C.1.pep
LPCRFKRLFDERVVPSRMALRECYGSGKCCKNRTYLDDVGVSISLVVKDWPHREVGGLGLWNLTCDIDKVYVCDIVAA

SEQ ID NO: 249247 - protein, 115 aa, Zea mays
  unsure (1)..(115): unsure at all Xaa locations
  Clone ID: MRT4577_15889C.1.pep
RPGDLRRRITTGGGGGGGKKTKLVASSGGRSSPAPCSARSCSRVSRCACWASRLSWCPWSPWPSPPPSCCPRWRWVPSSLXVLAWGRSVAAAGGSLVXXSSFLVVKTFPRAFSPL

SEQ ID NO: 249248 - protein, 41 aa, Zea mays
  unsure (1)..(41): unsure at all Xaa locations
  Clone ID: MRT4577_1588C.1.pep
FNDKNLFSTLIRSHRVLVLVDSNKECDVGLXAIVGLIGACR

SEQ ID NO: 249249 - protein, 49 aa, Zea mays
  Clone ID: MRT4577_158900C.1.pep
GSGRPWLRHSTPGNQRYLCIRRTPSRFAHPDDPNPVEPHGPQAEPSEGG

SEQ ID NO: 249250 - protein, 195 aa, Zea mays
  Clone ID: MRT4577_158901C.1.pep
MQAGPVQAVPPPPPVATESKQPIEEEASSKEDPTPSKPVVGIIYPPPEVRNIVDKTASFVARNGPEFEARIRQNEINNPKFNFLNPNDPYHAYYRHKVSEFKEGKAQEPSAAIPKVMQQQQQATQQQLPQKVQAQVIQETIVPKEPPPEFEFIADPPSISAFDLDVVKLTAQFVARNGRQFLTQLMQKEQRNYQF

SEQ ID NO: 249251 - protein, 51 aa, Zea mays
  Clone ID: MRT4577_158902C.1.pep
TQSGNPSGCDYHAYFKICILKEKTFFLPYWMDVSIVSVHGTCYLIHLPQTF

SEQ ID NO: 249252 - protein, 120 aa, Zea mays
  unsure (1)..(120): unsure at all Xaa locations
  Clone ID: MRT4577_158903C.1.pep
RGCLLGGAASGVVLLLGCXFCFVXXLWLSFGXSVGXPGRAFVLXXCRLWXCGLPALPLAGSVXFGGFAALGGXLRLPXWACSFXRVSVGPGGFFIGFXFFXVXXXKEVGGGRSSGSVLRP

SEQ ID NO: 249253 - protein, 150 aa, Zea mays
  unsure (1)..(150): unsure at all Xaa locations
  Clone ID: MRT4577_158904C.1.pep
KKKNVIDAQLLKKLKISKTDIFPIGLENISXQKEENDGSDNIDEDIRWLARGPLEIARRHRAFNIRGFRFRAKRFDKATQNSGVVVTAKTSSYSSAGDSNPILGDIMYYGRIIDIIELDYYGRFSMVLFKCEWVDVTRGKGVKTDKFGLP

SEQ ID NO: 249254 - protein, 64 aa, Zea mays
  Clone ID: MRT4577_158905C.1.pep
VLFAGGIKGAIYYAGPSWTTCKANHIVGFCSWGEFGLPIGETYFSSHRRMGFKGGYRLLGFWKR

SEQ ID NO: 249255 - protein, 90 aa, Zea mays
  Clone ID: MRT4577_158907C.1.pep
TKKKTKKEKKKQTTLKFTSFSTHAFLLLLTPIVPPHIKYTCQCFFNGRTLNTLGLPNPMRFRNNPLFTYFVLPADSLTDLLFLLFHILNG

SEQ ID NO: 249256 - protein, 36 aa, Zea mays
  Clone ID: MRT4577_158908C.1.pep
SRFGRMDRIFLGLTSKHNPIGIIQSFKSLLIGSSYV

SEQ ID NO: 249257 - protein, 72 aa, Zea mays
  unsure (1)..(72): unsure at all Xaa locations
  Clone ID: MRT4577_158909C.1.pep
KKKKKKKKKKKKKKKKTKRRKQXSLDSSLKKKKKKKQTLKKKKNLLAAGLFRVPIFFPRFCQSFSFFFGPPN

SEQ ID NO: 249258 - protein, 55 aa, Zea mays
  Clone ID: MRT4577_15890C.1.pep
KVESLINLKTALLVRAPNIKLVWLNSKGRPLYCVKIKTGGSGQTNWNSKPKFFLP

SEQ ID NO: 249259 - protein, 62 aa, Zea mays
  Clone ID: MRT4577_158910C.1.pep
SFEWLLKEKNTTNSRRERMNHEAVIHAFALTLPPAMYSTLLLLANSSYLAIKIRSPLRFSPS

SEQ ID NO: 249260 - protein, 100 aa, Zea mays
  Clone ID: MRT4577_158911C.1.pep
VRTASKRNCYCQGSELFRSVPSARVLALQLFVAKDGPVANRGWSGPSSPVYPSGTELWTLTLVGYLEQQIRRFPVRSPAGGCGSIHYGKSCFSPLPPVWW

SEQ ID NO: 249261 - protein, 85 aa, Zea mays
  Clone ID: MRT4577_158912C.1.pep
DRAMTVLFPDRHLFQVQYARPGRPQGSTLVARIRGTDTDQLGVLNKCTHKLQEYMFVRKIDCLDTHIALVRAQPKADARVLINRA

SEQ ID NO: 249262 - protein, 80 aa, Zea mays
  Clone ID: MRT4577_158913C.1.pep
MHASAAVLAFVAVAAAAQTPVAPVATPIATPGAPTNGTKPGHGSGSGSGSGSGSGSQPPSGAAALGLSGLAGALAIALAL

SEQ ID NO: 249263 - protein, 172 aa, Zea mays
  Clone ID: MRT4577_158914C.1.pep
MELGLGAPTSPPPWRGHLLLRALVIFLCLWVTSEANEQHVELPPRGWNSYDSFSWTVDENAYLQNAKILAEKLLPHGYQYAVIDYLWYRRYVDGAYTDSYGFDNIDEWGRPFPDLQRFPSSKYDKGFSQIANKVHEMGLKFGIHLMKGISTQAVNANTPILDIETGKPYVEN

SEQ ID NO: 249264 - protein, 112 aa, Zea mays
  Clone ID: MRT4577_158915C.1.pep
GASLGLELGARPLLLQSHTCFSPFNGLGKSQQLFWIFISPELDTCSVCFLKVGPSCQIGPLGGWLLLKKIGFQFTPESVMFCEPKKKKKKKKKKKKKKKKKKSKKKKKKPAA

SEQ ID NO: 249265 - protein, 75 aa, Zea mays
  Clone ID: MRT4577_158916C.1.pep
LRVGSRGELLELAARCKLARKWPREKQPTARRRRGAGAQHGLRRRLPDQARPHACTDGPSHGEPGHRSGSVHERC

SEQ ID NO: 249266 - protein, 57 aa, Zea mays
  unsure (1)..(57): unsure at all Xaa locations
  Clone ID: MRT4577_158917C.1.pep
GHSRLHMRTMQELHRRCHEADGXIQFTSVYPGCLVTRGLFREHIPLLRLIFPPFQQV

SEQ ID NO: 249267 - protein, 112 aa, Zea mays
  Clone ID: MRT4577_158918C.1.pep
RLNINRAPQRSGGGGGGGGGGHILCYHGHDTPSATPTTRLSKPPTHPGIIGRHDRPSHPPLHNTSRAELVAIWCGTYNERYDRRKQLQLKSTYRHYCSRLTSSPTVRLGTRL

SEQ ID NO: 249268 - protein, 165 aa, Zea mays
  Clone ID: MRT4577_158919C.1.pep
MVRSLVALLLVATAVAAVARAAPSPGFVVTGRVYCDNCRAGFETNVSHAIEGATVEMECRHFESQEVHDKAEATTDAGGWYRMEISGDHQDEICEVLLLKSPEADCAEIERTRDRCRVPLTRNDGIRQSGIRYANPIAFFRKEPLSNCGELLRAYDLFNETSENS

SEQ ID NO: 249269 - protein, 63 aa, Zea mays
  Clone ID: MRT4577_15891C.1.pep
FFFFLNVDPYRSSLKAFFSLHMSRLQDFSRDKGWGLGLSQRDYYSQDIRNHHTHTRAHRLRRR

SEQ ID NO: 249270 - protein, 130 aa, Zea mays
  unsure (1)..(130): unsure at all Xaa locations
  Clone ID: MRT4577_158920C.1.pep
NELXHSSLYQLNXIILCSLLVFNELLLSNFYLMNTRILGHWLFGSCEGARTGPRRERTPRRHPTPVKNSRQTMTSLAKSRLDMLPRRAREVPEPQHEPQARASTRRRRPLHPSSANTSVMVFCPDRVRSS

SEQ ID NO: 249271 - protein, 164 aa, Zea mays
  Clone ID: MRT4577_158921C.1.pep
MMPQLRSLVALVLVATAIAAAPGVGFVVTGRIYCDNCRAGFETNVSHAIQGATVEMECRHFESQQVHDKAEATTGPGGWYRMEISGDHQDEICDVRLLKSPEADCAEIDHSRDRCRVPLTRNDGIKQSGVRYANPIAFLRKEPLPNCGELLRAYDLYNETSENS

SEQ ID NO: 249272 - protein, 66 aa, Zea mays
  Clone ID: MRT4577_158922C.1.pep
KHARAHCLTDKELGRDFNLLGIEIHSISFNPYRLVLKRTYYEGAKIFLLFNEGILSPLIPWLIKKP

SEQ ID NO: 249273 - protein, 85 aa, Zea mays
  unsure (1)..(85): unsure at all Xaa locations
  Clone ID: MRT4577_158923C.1.pep
LLSPDXCETDFERCRYRVGKPPGAKVKIPLTFRRVFYYIPVRSDSGRTSPSLLRSQGTEPRQGPDPEREDISHGGIGLSWGRPHL

SEQ ID NO: 249274 - protein, 144 aa, Zea mays
  Clone ID: MRT4577_158924C.1.pep
SVAPLIKWQSDSVKVAFSQMVGDAKEKIRKLTETGELKMGLKIYDPQKDKRLRGSVKLPHILRPKMKVCLLGDAQHVEEAEKMELDYLDVEALKKLTRTMRLVKRLAKKYHAFLASKAIIKQIPRFLGPGLNKAGKFPTLVTHQ

SEQ ID NO: 249275 - protein, 116 aa, Zea mays
  unsure (1)..(116): unsure at all Xaa locations
  Clone ID: MRT4577_158925C.1.pep
TLLALLALIVIATNALIIPQCXLAPTAIIPQCLPPATSMVFEHLAAXAIIQQQALAASELHQPIPQLQQRSLPHLTMHAITTQHHQQLLPALTHLAMVNPAVYLPEHLLASNPLAL

SEQ ID NO: 249276 - protein, 678 aa, Zea mays
  Clone ID: MRT4577_158926C.1.pep
MQRNCEKIALTREKSPGASFACYTDRFSEQKHPAPLLLNLLPRRPHSCAALAMGEVVAASSLALVLLFFCSCGPASGLLSPKGVNYEVQALMMIKNYLKDPHGVLKNWDQDSVDPCSWTMVTCSPENLVTGLEAPSQNLSGILSPSIGNLTNLETVLLQNNNINGLIPAEIGKLRKLKTLDLSSNHFSGEIPSSVGHLESLQYLRLNNNTLSGAFPSSSTNLSHLIFLDLSYNNLSGPIPGSLTRTFNIVGNPLICAATMEQDCYGSLPMPMSYGLNNTQGTVIPAKAKSHKVAIAFGATTACISLLFLAVGSLFWWRCRRNRKTLFNVDDHQHIENGNLGNMKRFQFRELQAATENFSSKNILGKGGFGIVYRGQLPDGSLVAVKRLKDGNAAGGEAQFQTEVEMISLAVHRNLLRLYGFCMTASERLLVYPYMSNGSVALRLKGKPPLDWITRKRIALGAARGLLYLHEQCDPKIIHRDVKAANILLDDCCEAIVGDFGLAKLLDHRESHVTTAVRGTVGHIAPEYLSTGQSSEKTDVFGFGILLLELITGQTALEFGKSSNQKGAMLDWVKKMHQEKQLDILVDKGLGSKYDRIELEEMVQVALLCTQFLPGHRPKMSEVVRMLEGDGLAERWEALQHTESHKFKVPEFSFSRCHSDLTDDSSLLVQAVELSGPR

SEQ ID NO: 249277 - protein, 223 aa, Zea mays
  unsure (1)..(223): unsure at all Xaa locations
  Clone ID: MRT4577_158927C.1.pep
MGEVVAASSLALVLLFFCSCGPASGLLSPKGVNYEVQALMMIKNYLKDPHGVLKNWDQDSVDPCSWTMVTCSPENLVTGLEAPSQNLSGILSPSIGNLTNLETVLLQNNNINGLIPAEIGKLRKLKTLDLSSNHFSGEIPSSVGHLESLQYLRLNNNTLSGAFPSSSTNLSNLIFLDLSYNNLSGPIPGSLXRTFHIVGNPLICXSNMGXDWYGSLLCHAYGL

SEQ ID NO: 249278 - protein, 80 aa, Zea mays
  Clone ID: MRT4577_158928C.1.pep
LEEMVQVALLCNQFLPGHRPKMSEVVRMLEGDGLAERWEALQHTESHKFKVPEFSFSRCHSDLTDDSSLLVQAVELSGPR

SEQ ID NO: 249279 - protein, 52 aa, Zea mays
  Clone ID: MRT4577_158929C.1.pep
ARQSSSLTASLILEISLNNSALQHTSRGYTGHWLNSFTLVITGCQTQTILMI

SEQ ID NO: 249280 - protein, 173 aa, Zea mays
  unsure (1)..(173): unsure at all Xaa locations
  Clone ID: MRT4577_15892C.1.pep
MIPFDRHRMHILNFSTAYTFYRALATPDRHRQTRERHAMSSPAARSITCYSKIPEFLLGTNGQPMPAVGLGTASHPFVAEDVRTSVLTALELGYRHIDTAGLYASERVVGEAMAEAVSHGLVASXDELFVTSXKVWCTQCHPELVLPSLKESLKNLQMEXWVDLYLIHWAHGL

SEQ ID NO: 249281 - protein, 40 aa, Zea mays
  Clone ID: MRT4577_158930C.1.pep
NTGVGLVCTTLECPNGSPNPPNIKTHACGGNSNYQVPFCP

SEQ ID NO: 249282 - protein, 96 aa, Zea mays
  Clone ID: MRT4577_158931C.1.pep
SSLLVDSLAIGDERQDMYEDLEAAAEQSSTLLPHHHDGRRPLSCLSNASLPCKGWSPLIYRHGFHRWLRTIHRDTLLNMGRGKAYTLWPRRLERQR

SEQ ID NO: 249283 - protein, 57 aa, Zea mays
  Clone ID: MRT4577_158932C.1.pep
RRALAHRMLRLGMRMARSERSMTRMASITTYTMTMNKQYSRSRGIKPSVMFPINLLF

SEQ ID NO: 249284 - protein, 56 aa, Zea mays
  Clone ID: MRT4577_158933C.1.pep
LIAAAKYPQENIMHAPVGGSIASPRHPFCSVYTSSWQRLIPHHHRTHTQSCHLVIL

SEQ ID NO: 249285 - protein, 114 aa, Zea mays
  Clone ID: MRT4577_158934C.1.pep
LKHQLQNLKMLSKSFSLLAFGALAYGQELVQEGAPAPVVLATAKSGVIPATPTATPFTGVDTIQGAIVSPLPPAPGYLPGETGGLKGTAAASSNQPSATYRATMPEEQYKPFVG

SEQ ID NO: 249286 - protein, 179 aa, Zea mays
  unsure (1)..(179): unsure at all Xaa locations
  Clone ID: MRT4577_158935C.1.pep
MMLLLPLVRQGSGRCAHSTGRRRTVSGFFDEGESGGNDDTESADLKEEVLLQEFLGARXYYEQEKKNDTDELESGMEKVTVSEPEKLGHKEEEHEVVSDKKEELIAKLHRTSCSSSSSSDEEEEANDENGQIIKRKRKKMALKEKLKEKPAGHKDGHHTGEPIPAPXAPAETPAQHQEE

SEQ ID NO: 249287 - protein, 132 aa, Zea mays
  Clone ID: MRT4577_158936C.1.pep
GCRNWWPIRDISSSREYARQGFALGLVVVLKSIRAIKEAKDNILGRQFGFGAIVRSDRVSQQWTCDKSSPIVKEFVSVDVELGGKKRYLTEPAVAVILELVRKWWKICAGMMLSYQKNFCSTFGEHWKRIEW

SEQ ID NO: 249288 - protein, 131 aa, Zea mays
  Clone ID: MRT4577_158937C.1.pep
VDPREKKTHDGAERGGWFKRKNAGAPTEKSKGRTGEQGDRKQSQKAGHNNRKGNQGEREQEGTRGRRRNGRGNGQEGKVRPKEESKRQRTERGNRKSGETKRTMAKNEPKTTARRNARRKGKTKGHDREGP

SEQ ID NO: 249289 - protein, 65 aa, Zea mays
  Clone ID: MRT4577_158938C.1.pep
TVLAHGGARKPGEWVVASGRNSLGTAAGPLPGSRVLPRVVRGKKPSALFFYFFFFNLSFFFFLLK

SEQ ID NO: 249290 - protein, 68 aa, Zea mays
  unsure (1)..(68): unsure at all Xaa locations
  Clone ID: MRT4577_158939C.1.pep
MAHEKKLSNPMREIKVQGLFLNISVVERGGPLTRVAKVLXELSVYTPTGGKARXKMLSFGILLNYNIA

SEQ ID NO: 249291 - protein, 98 aa, Zea mays
  Clone ID: MRT4577_15893C.1.pep
NKKKGLFQPSGWNRVFEYSYGAKAANLLILCVGPSWLRHNYLIDIMLVVCVRVSHRVSVRSTFGLGVGTPVVPFDRSRYQARRDKNELVFLLEAIFVQ

SEQ ID NO: 249292 - protein, 71 aa, Zea mays
  Clone ID: MRT4577_158940C.1.pep
VAPFFSTGRINSPTMGPQISRRLQPEYFLPELLQDDILTHLHHCGIHSFHLNKRLCSDTGEHQLLHHIRTG

SEQ ID NO: 249293 - protein, 43 aa, Zea mays
  Clone ID: MRT4577_158941C.1.pep
GSPSCAVLSTSQISFALFNPCCNELVLVRNKMTLLEAGFYILP

SEQ ID NO: 249294 - protein, 87 aa, Zea mays
  unsure (1)..(87): unsure at all Xaa locations
  Clone ID: MRT4577_158942C.1.pep
LENNLLNGSIRAEIVSLGSMQHLVLGGNKLSGEIPDXFTSMQGLLELQLGGNSLDGAVPWSLGKLQFISQVMNMSSNMLSGTIPSSL

SEQ ID NO: 249295 - protein, 301 aa, Zea mays
  Clone ID: MRT4577_158943C.1.pep
MDLDITDAETKRSNAVWKNLELATMKLSQELAEQLRLVMEPTLASKLQGDYRTGKRINMKKVIPYIASHFRRDKIWLRRTKPNKRNYQVVIAVDDSRSMSEGKCGKFAIEALVTVCRAMSQLEVGQFAVASFGKKGNVSVLHDFDQIFNSEAGVNVISSLSFEQDNKIEDEPVSDLLTHLNVMLDTAVARARTPSGQNPLQQLILIISDGKFHEKENLRRHVRDVLNRKRMVAYVLLDSPEDSIINLKEACFRVGEKVELKKYMDSFPFPYYVMLQNIEALPRTLADLLRQWFELMQSANE

SEQ ID NO: 249296 - protein, 71 aa, Zea mays
  Clone ID: MRT4577_158944C.1.pep
MLWEVLFPGSTLLGVLLKFVFPHPFSWGFFYVFLISNLPALPQKKKKKKKKKKKKKKKKKKKKKKKKKKGP

SEQ ID NO: 249297 - protein, 38 aa, Zea mays
  Clone ID: MRT4577_158945C.1.pep
CFTNHKNPFALLSCVSLVIRTHTSPRVWIMPRYQAHEL

SEQ ID NO: 249298 - protein, 139 aa, Zea mays
  Clone ID: MRT4577_158946C.1.pep
IPEACAPPSVVSSAAPFLAIAGRVEGSAAREVGEEYQMRAIRFLELWATGGAAITRRSSIAVADPRVTADGDSSASLVAVKSRGSKESSWYLESQAPVLLRLAVRSRGSKESSWYLESQAPGEEQVVQDEAHNEEFELI

SEQ ID NO: 249299 - protein, 53 aa, Zea mays
  Clone ID: MRT4577_158947C.1.pep
VNRWHTEAPFGDGFISTLKKTCNFYLGAKFSLKSVPNLFWEPRHMTLNLWVTQ

SEQ ID NO: 249300 - protein, 57 aa, Zea mays
  Clone ID: MRT4577_158948C.1.pep
ECLLAKKIVYKGRTRLFVFKKKKKKKKKKKKHKKKTTQKKKKKKKKKKKKGGRSRSR

SEQ ID NO: 249301 - protein, 50 aa, Zea mays
  Clone ID: MRT4577_158949C.1.pep
PGRPRVRSNFLGRAKAATVSGERARRPTAPPMRLDEESDYYIVYHPPHTR

SEQ ID NO: 249302 - protein, 84 aa, Zea mays
  Clone ID: MRT4577_15894C.1.pep
PELLSVLTNSPFVFCYSGRAITNVNLWVCQWFSTPRKKSIWIVLSCSISSQGCLGSRRARANRNLSPLGPSLTASVRYHFVVNS

SEQ ID NO: 249303 - protein, 259 aa, Zea mays
  unsure (1)..(259): unsure at all Xaa locations
  Clone ID: MRT4577_158950C.1.pep
LTLVIAAIVIAAAVTLHYVRTYSYWKKRGINGPTPLPIIGNVSXSTLTTRXMQNTRWVHKYGEIHGTYVFSLPVVSIARVDMLKEILIQHFHKFSDQATMVNHPLEKENLINKNGYEWKADRDIMSPTFSSGKMKAMYPLMRESYSYLDRELEKYAGTERDIDTKLVFSQLSTIVITRCAFATDVDAFSDRNNELIKHLDSIFHMGFWEIVRVITILALPQWLNXLLKTSFFKPTAMQYLKKFAIIYSNNDAIIHLIQM

SEQ ID NO: 249304 - protein, 55 aa, Zea mays
  Clone ID: MRT4577_158951C.1.pep
QYIIFSPAIIITKIPQTIFLNNSSSILITNRTPSAAHHQPHLFSLLPATSLLFLS

SEQ ID NO: 249305 - protein, 81 aa, Zea mays
  Clone ID: MRT4577_158953C.1.pep
ICVSLSSTVTASSGHLSLPGSLALFSYCREAGRLHLVPPACTLQLGPSSEHELDNHRAPLLSLPSQESLSFTPWYLVACKP

SEQ ID NO: 249306 - protein, 187 aa, Zea mays
  unsure (1)..(187): unsure at all Xaa locations
  Clone ID: MRT4577_158954C.1.pep
AARWASEREGERGRIGIPKVGHGGERREGXVVRRLMEAKEVSGKTFSGIAAETGLTNVYVAQLLRRQAQLKADTVPALRAALPTLTDDLIELMMQPPFRSYHPNIVHEPAIYRLNEAVMHFGESIKEIINEEFGDGIMSAIDFYCSVDKVEGADGKDRVVVTFDGKYLPYTEQKSEHMMSRPTRKTS

SEQ ID NO: 249307 - protein, 39 aa, Zea mays
  Clone ID: MRT4577_158955C.1.pep
RKKKKQKKKKKKKKKKKKKKKKKKKTKKKKKKKLKTKKE

SEQ ID NO: 249308 - protein, 878 aa, Zea mays
  Clone ID: MRT4577_158956C.1.pep
MDMERGAGSEQGSPDSEMGEGDNDSVGYGAEMEVDAGSGSAPASSASASASVSASAYAARAGAFDGVDPFEGMEFDDEEDAWTFYNVYAHRVGFSTRISVMHRSRRDGSVMSRQFVCAKEGFRTYRGKNEVSRADAADAGDDDSGRGRRTRAVTRVGCKAMIRVKKQDNGRWSVTKLETAHNHPLVPTNQAHCLRPHKPLSECGKHRPFGGHRNGGSLLAIEPPPPPLTPPVPHTSVAQVVPQYFSDGTCIPCRVFLDYVKRMQAEDPAFFYAMQFVEGRPVGNVFWADARARTTYKDFGDAVVLDDYCKRSKHELPLVAFTGVNHHCQPILFGCAIMAHNNEVSFVWLFETFLLAMSGCHPTSLIMEHDNVLKPAALKVFPLTRLQFCKWHIMNEAHDKLSYLLDAFPSFHDDFINCINMSETINEFEENWKALISKASSQKSEWLDLVYNCRHHWVPVYLRDTFFGDVSLKLQCSSRSSLFEGYISAKTDSQSFIQQYEKALDCCYEKEVKEEFETKYSLPDIKTSSPIEKQGAELYTRSMFLKFQQELICATAYTAEMVKEEGNASIYTVAISEGSEKSVTVQFCSSGSSATCSCRMFEYFGIVCRHILTVFGVRGVSALPSHYFVKRWTKNALDRSLGKNVDEVSRVEPKEEQRSSAEDGEQSPTWRYNSLCHEALRYAEEGASSLEVYIVAMQALQEAANRVNMAKRGIGQVAPLAVMPIAAQPPESFAIYQETTSNKQKKRKKNSSSSRENATSNQLMYVRQPVNFLFVAPGSSSALQGPSQLVAAPPVSLSSKYGQTSGANNSVDDNIPPASVVDKFSGLPDQNAPATSTGNLQGGVTKSIGADSRIKEVDYFCYADHRKFIPCIFSNVLF

SEQ ID NO: 249309 - protein, 123 aa, Zea mays
  Clone ID: MRT4577_158957C.1.pep
SCGLHPTPHISQTVVLIDPACTLPPYRLASQLDRVTVGPTSGVPGLHFQALSSDEHPMYAPPRLLRSTTTEHQMQRKGSDFNMKSTIVGKVVDEMIGVLVSRKVRTTVKTRIFWPPGLFHPHV

SEQ ID NO: 249310 - protein, 42 aa, Zea mays
  Clone ID: MRT4577_158958C.1.pep
SRNTAQPEALTTARSVLHHQMCHHLWAAMLPQEVTTHVSTME

SEQ ID NO: 249311 - protein, 56 aa, Zea mays
  Clone ID: MRT4577_158959C.1.pep
RLTTPPRRRLIKKDTEMALGCQHMARRARFFVARSFNTRGCIHDNMQGSGGRDNSD

SEQ ID NO: 249312 - protein, 101 aa, Zea mays
  Clone ID: MRT4577_15895C.1.pep
MTRLRPTSGGRRSHGSPETNLGWENTVKTRPRSPMGGRGSHALPEATLKRETHSRLARGRPWAGDTVMARSRPTSGGRHSNALPETISGLEMQSHLARGHP

SEQ ID NO: 249313 - protein, 65 aa, Zea mays
  Clone ID: MRT4577_158960C.1.pep
KTHPPKKKKKTREFWRNLNLKHPLRGKKKKIKNLTLNHPPRGKKKKKSPSRFINPNLFFVCQSKS

SEQ ID NO: 249314 - protein, 34 aa, Zea mays
  Clone ID: MRT4577_158961C.1.pep
LHLQRPLLIYNPTRPTSCRSLGRPCTPTINRCLP

SEQ ID NO: 249315 - protein, 57 aa, Zea mays
  Clone ID: MRT4577_158962C.1.pep
HHDTDTDRSRHTLFVKRDVSSRLESMRGTLECVGALISIVKSLGVMPWHHFESLEYL

SEQ ID NO: 249316 - protein, 58 aa, Zea mays
  Clone ID: MRT4577_158963C.1.pep
DQPLRSPPWDKNPKERTLGESTITDGGRPDRPDQRDLGELSAASVLVHLSGGAVAGAH

SEQ ID NO: 249317 - protein, 63 aa, Zea mays
  Clone ID: MRT4577_158964C.1.pep
GKKKKKKKKKQKKKKKKNKKKKKKKKKNKKRGGPPKGSSLSTPSMKIKTPPKWPPNSIPRPSV

SEQ ID NO: 249318 - protein, 224 aa, Zea mays
  Clone ID: MRT4577_158965C.1.pep
MALQCLVDWKGQPVNPKRHGGVKATMFIYFLVVMTNIGNIPMLLNVVSYLHGKMHMDIADASTTATNFFGAVCVFTFLGAFVSDSYITRFYTILIFAPIEILGYMLLACQAHLPSLLFVVWVQDNEGWDLAFALSALVALLGTLVLVAGMPFYRHQKPTGSPLTRILQVFVAAFRKRNLSVPEDFVGTHETTGETGTIVEVLERTSGFKFLDAVNDGDARRWSL

SEQ ID NO: 249319 - protein, 116 aa, Zea mays
  Clone ID: MRT4577_158966C.1.pep
FFFFFFFFFFFFFFFFFFFFFFSPFPFYSVPYKRFPGYYFSSTPGEKKKNALLKTTPPKKGGPEEKNSGRRHAEKKGWPKKGDAHKRGSRILPLPLRGKREAPGGAHPWGKPPKEK

SEQ ID NO: 249320 - protein, 84 aa, Zea mays
  Clone ID: MRT4577_158967C.1.pep
TVVAACIIIIWFHIYSQQGIILRHISHAAEFQFVFSVAELVSYCLGLSITNVIATSFLKWLFLFKCLLCSNYISHIYICFYLVL

SEQ ID NO: 249321 - protein, 38 aa, Zea mays
  Clone ID: MRT4577_158968C.1.pep
PVVVVNLLYVRYRLNHYFILYEYSKTIKQYTHFFKTQP

SEQ ID NO: 249322 - protein, 96 aa, Zea mays
  unsure (1)..(96): unsure at all Xaa locations
  Clone ID: MRT4577_158969C.1.pep
RRIIQESVPYKEQDSNWPEPDRIERQELWIVMGNQXISFATFKIGSLVDVQSSKKPEGLRIFQSIVQDVKCLVFSLLSLHFKIKPIQFRAPSQAFM

SEQ ID NO: 249323 - protein, 59 aa, Zea mays
  Clone ID: MRT4577_15896C.1.pep
RNPGPTRPLNHHRIGEGANRETQCGLFHRDLDQWSGRLQPRGWANTRHDCATNHGRWTG

SEQ ID NO: 249324 - protein, 67 aa, Zea mays
  Clone ID: MRT4577_158970C.1.pep
KKTILIGILHVLVLFWVNKQYIKILKQFQPARNMEIPLNSIIWTYHSNFAYFHFDSTPIDKPAEHFH

SEQ ID NO: 249325 - protein, 48 aa, Zea mays
  Clone ID: MRT4577_158971C.1.pep
VLDGCSLLINAMVHETELHFLLYYGCPSCHYHDVRQLPWLLLEKKKRG

SEQ ID NO: 249326 - protein, 31 aa, Zea mays
  Clone ID: MRT4577_158972C.1.pep
LIVSGTIVTHSLSACYSSAMSQLPSLAHRMH

SEQ ID NO: 249327 - protein, 55 aa, Zea mays
  Clone ID: MRT4577_158973C.1.pep
SSAPIMEFPHHFHHHVHLHIHDFILPHRPSYPSLLLLLPTTSTPPVLPLSLRPLS

SEQ ID NO: 249328 - protein, 75 aa, Zea mays
  Clone ID: MRT4577_158974C.1.pep
SSLLHMWPNLLLTFILLDKLSYTFAFLQTEFPSNPPLTLKPPPPSKVYASKCLPSVPKLSLSPVVLKSPKGPTRL

SEQ ID NO: 249329 - protein, 50 aa, Zea mays
  Clone ID: MRT4577_158975C.1.pep
PTLTDMTDEPYMRSPHERSLVRVTPRGGGHEGSAHRSIRPQLRPDPQDHP

SEQ ID NO: 249330 - protein, 472 aa, Zea mays
  unsure (1)..(472): unsure at all Xaa locations
  Clone ID: MRT4577_158976C.1.pep
MAVSPDQQQPPAGVGSPLPSPRLRVRVRDTTLVPPSPSPPETSLPLTFLDIFWLHSPPVERLFIYRLAPDADVDAIISRLRDSLHQAVRAFYPLAGRLRLTPGTSDRYELHYRPGDAVTFTVAECETDDADXTIDALATDEPREVAKIATLVPPLPERGGLFAVQATLLPARRGLSIGVTVHHAACDGSGSTHFLHTWAVACRAGAEAPPPPPPVIDRSLIADPRPIVRLSSAGAPSTEEYEFVKMSADQLFATFALSKDELKRIKDAVAEEAARRGVAPPRCSSLVATFGFVWSCYQQAKEASSGAGEFPMTCMAFPVDHRSRMEPPLPDKYLGNCVGPAFALAPTGELAQVGAGGFFSACAAVASSIDEAVRDIETSNVEVWFDRIRDLIPMGFLTVAGSPRFRVYDMDFGFGRPAKVDVVSVARTGAVAVAESRDGNGGIEVGVSLQPAAMKRYRKCFADAIAWLHQRT

SEQ ID NO: 249331 - protein, 53 aa, Zea mays
  Clone ID: MRT4577_158977C.1.pep
LIKEQMVLDLCLSHSRPAVLSGSHLGEALLRYTFNCSKPLVIIITQNLGTRNL

SEQ ID NO: 249332 - protein, 75 aa, Zea mays
  Clone ID: MRT4577_158978C.1.pep
ILMPPPPPEGTILTNNHPVKKLNTALEVNPLTINSYGKGKMHVKKDLKGQPNQTKRGYKAPRQKPGGKPRPCNQT

SEQ ID NO: 249333 - protein, 56 aa, Zea mays
  Clone ID: MRT4577_158979C.1.pep
VRFWLPVFGHRLGVLARCVVFSARSRPWPRLCGCCGVLCLVGLGPVLVRGRPTGCG

SEQ ID NO: 249334 - protein, 77 aa, Zea mays
  Clone ID: MRT4577_15897C.1.pep
KKGGGGVFYPFTPRKIGALFLGGKKILSPSKIGLKLKRKIFLKNPKKTPPPFFYILLIKGEGGKNGGLKKGKKWGGN

SEQ ID NO: 249335 - protein, 80 aa, Zea mays
  Clone ID: MRT4577_158980C.1.pep
GMCWVQKATALVKPPTVESGQCSLLCKASLTPFLTPQVCRDAKAPPDTTNLGWASRPVSQRAQTPKHSQSIPASLMPPLG

SEQ ID NO: 249336 - protein, 81 aa, Zea mays
  Clone ID: MRT4577_158981C.1.pep
RVRLTYLSTQTQRPSHMRCVGPCSALSAHYHQRVSAPRAVITARHCTRYCTRAFTRHCARHCTRHCAQYCAHHHSITPASY

SEQ ID NO: 249337 - protein, 60 aa, Zea mays
  Clone ID: MRT4577_158982C.1.pep
PKNFGPKKVGDHFPGPFFAGYKCAPSNLWGPLFFLRAHLKSGTLGPHKIWGDHRSDRFYL

SEQ ID NO: 249338 - protein, 169 aa, Zea mays
  unsure (1)..(169): unsure at all Xaa locations
  Clone ID: MRT4577_158983C.1.pep
FCTNASREHRAQMGRXAXTSIDDERRAMPQIVAEHRQAVGRDGRARTGRSTARFGHRRTSYSRDLGKTWPWRRERKAGAPRAGKQGGSWSQGATMEDGAWPANCGRRRMPIADQRAGEQGASWAEGAGGSRRAWGGGCAGAGRREEEIRAGRDELGKDSVRGRDRQGGV

SEQ ID NO: 249339 - protein, 116 aa, Zea mays
  unsure (1)..(116): unsure at all Xaa locations
  Clone ID: MRT4577_158984C.1.pep
VLGRPSWXRRCAAACGCCRCGASAPGARGLACPRRRSPGAPRGAGVVCRRALLRWRRCSXRCRAWPRLRPLRPLSPVLVPRRRSPRARPALVVSVGSGGAAARLRLPLRVRSSGLP

SEQ ID NO: 249340 - protein, 110 aa, Zea mays
  Clone ID: MRT4577_158985C.1.pep
LGTSRPAGIIFHRRAGSTLTPWTLCIGLRTVLLTTERLVPSLPLYLSRAEPCWATDHHFLLMAMSTYVEALDANIHRWIRIRGPPWATPTTPSAPTTTMIIIIDTDEGHR

SEQ ID NO: 249341 - protein, 41 aa, Zea mays
  Clone ID: MRT4577_158986C.1.pep
INVYKCVANQVEMWELCCGINSLAPPSSMWDGSNSSLTWYK

SEQ ID NO: 249342 - protein, 844 aa, Zea mays
  Clone ID: MRT4577_158987C.1.pep
MEAALGALCRAGGWSYAAVWRFHPQDPRLLTLGDCYCEDEAKAMVQKMLNLVEVVGEGILGQALVSGECQWIYDDTCHALNQISHADNGDLHQGYTWWQHQFLSGIKTIALLPLQLHGLVQFGSTRKVPRSSVFLNQVRDIFDRMKNASSDGPMEYTQNNSLACGQQPILTSSRPVNDMLVHSKVNPLQTEKLLEDIERTESIRSSICSPSNSQRSLNDLTSHGTGNSSMDTNILAMPVNSKSIYDLKRFDNVTELFHRSSNDRIGFQVNSSKEPGSTIAGVMSGYKSLNNIHMTENDSCDQNIEYTPYLYTTTNSSNSGLDELSYSGVALSSSFTAVSGKVKDCLQTESDKFLCKSVSFGSNPCASKFQENRLSPYHALMHEQSLIPDPGESVRLLSQEESFIVQGDSSQFKDTADFTSQGNSTFPELPNRSPEEATAETLENNMKDCSGNNSLLETMMLDLSTNSFVQDWWDNSVLLAENLPNSSEKDPEPAMELANRHSLPTGERGSPFIPVIEQMLGDVAHPPTPTGHSSLEAEATALAGRISDYQLPQFAFRDCLTVDNAQIPALACSNYTCRSRSAQNGSSEVPSANVSVDDTCSLNTANSNGSQSSNPEGTKVAKRRARAGESTRPRPKDRQLIQDRVKELREIVPNGAKCSIDALLERTIKHMLFLQSVNKYAEKIKQADEPKIIDKGSGVILKDNPVAGTNGGATWAYEVAGQTMVCPIIIEDLSPPGQMLVEMLCEEQGLFLEIADNIRGIGLTVLKGRMELCDGKIWSRFLVEANREVTRMDIFLSLVQLLEQNSLVRSTDQMAKVMNNGVPSFANHQRSPLLVPVGIPERLQ

SEQ ID NO: 249343 - protein, 421 aa, Zea mays
  Clone ID: MRT4577_158988C.1.pep
DVFFYQADDQHFIPRSLLIDLEPRVINGIQNSEYRNLYNHENIFVAEHGGGAGNNWASGYHQGEQFVDDIMDMVDREADGSDSLEGFVLCHSIAGGTGSGMGSYLLETLNDRYSKKLVQTYSVFPNQVETSDVVVQPYNSLLTLKRLTLNADCVVVLDNTALNRIAVERLHLSNPTFAQTNSLVSTVMSASTTTLRYPGYMNNDLVGLLASLIPTPRCHFLMTGYTPLTVERQVNMIRKTTVLDVMRRLLQTKNIMVSSYARTKEASQAKYISILNIIQGEVDPTQVHESLQRIRERKLVNFIDWAPASIQVALSRKSPYVQTTHRVSGLMLANHTSIRHLFSKCLGQYEKLRKKQAFLDNYRKFPMFADNDLSEFDESREIIESLVDEYKACESPDYIKWGMEDPGEANVVAALDSKLVV

SEQ ID NO: 249344 - protein, 135 aa, Zea mays
  unsure (1)..(135): unsure at all Xaa locations
  Clone ID: MRT4577_158989C.1.pep
SISLGAASTVCGXVIGSMAVAQIFSSVYFSAWSNKSYFKPLVFSSIVLFLGNVCYAMAYDMKSLTVLIIGRLLCGMGSARAVNRRYISDCVXARIRMQASAGFVSASALGMACGPALAGLLQWKFKIYMVTFNQS

SEQ ID NO: 249345 - protein, 82 aa, Zea mays
  Clone ID: MRT4577_15898C.1.pep
MGEETLVAMPPAFPHHHAPTPPQPPSGPVAADKGEEGDHRRPAEGVAGPPQVQPRSVAPHGLGGEEGDVYYARKMLQGAVPA

SEQ ID NO: 249346 - protein, 123 aa, Zea mays
  unsure (1)..(123): unsure at all Xaa locations
  Clone ID: MRT4577_158990C.1.pep
MVKICCIGAGYVGGPTMDVIALKSPDIEAVVVDISKPLIEAWNSDTXLSIYQPELDDDGKDCMDKNLFFSTDAEKHVTEADIIFISTNTLTKTRAIAAGKAADLTYWESAARMITDVSKSDKI

SEQ ID NO: 249347 - protein, 251 aa, Zea mays
  unsure (1)..(251): unsure at all Xaa locations
  Clone ID: MRT4577_158991C.1.pep
MSAPKVLIILSDAHAFEVKKKDGTVAEEETGFFLMELAKPLAKLIDAGYQVTFASPQGKQPNIDPXEVNTSCFHGHVVGEEQXSELIKKMELENNLMHPRPFHTITDDELKTFKGIFIPGGHAPLTDLGADPELGRILLHFHSQVKPTAIICHGPYALLSTKVAPGSTGFAYEGYNITSWSDEEEKLVETLKGGEIVKVQSSLREAGAIMAEGAAPKLGSIHVDXEVISGANPLAAAALXDKLVEMLDVRA

SEQ ID NO: 249348 - protein, 469 aa, Zea mays
  Clone ID: MRT4577_158992C.1.pep
MPREIITIQVGQCGNQIGMEFWKQLCLEHGIGKDGLLEDFATQGGDRKDVFFYQADDQHFIPRSLLIDLEPRVINGIQNSEYRNLYNHENIFVAEHGGGAGNNWASGYHQGEQFVDDIMDMVDREADGSDSLEGFVLCHSIAGGTGSGMGSYLLETLNDRYSKKLVQTYSVFPNQVETSDVVVQPYNSLLTLKRLTLNADCVVVLDNTALNRIAVERLHLSNPTFAQTNSLVSTVMSASTTTLRYPGYMNNDLVGLLASLIPTPRCHFLMTGYTPLTVERQVNMIRKTTVLDVMRRLLQTKNIMVSSYARTKEASQAKYISILNIIQGEVDPTQVHESLQRIRERKLVNFIYWAPASIQVALSRKSPYVQTTHRVSGLMLANHTSIRHLFSKCLGQYEKLRKKQAFLDNYRKFPMFADNDLSEFDESREIIESLVDEYKACESPDYIKWGMEDPGEANVVAALDSKLVV

SEQ ID NO: 249349 - protein, 109 aa, Zea mays
  Clone ID: MRT4577_158993C.1.pep
FTHLAGMSNAVSPITMGGSVSTEPCEPQRWGGEGYIEKKGVGKKKAQKAEKNENSGGCTSQNPGSHHFPFCLVLVGATCPLFEKKKKKDGCLGGPPLGGTVAACRKVGG

SEQ ID NO: 249350 - protein, 469 aa, Zea mays
  Clone ID: MRT4577_158994C.1.pep
MPREIITIQVGQCGNQIGMEFWKQLCLEHGIGKDGLLEDFATQGGDRKDVFFYQADDQHFIPRSLLIDLEPRVINGIQNSEYRNLYNHENIFVAEHGGGAGNNWASGYHQGEQVVDDIMDMVDREADGSDSLEGFVLCHSIAGGTGSGMGSYLLETLNDRYSKKLVQTYSVFPNQMETSDVVVQPYNSLLTLKRLTLNADCVVVLDNTALNRIAVERLHLSNPTFAQTNSLVSTVMSASTTTLRYPGYMNNDLVGLLASLIPTPRCHFLMTGYTPLTVERQVNMIRKTTVLDVMRRLLQTKNVMVSSYARTKEASQAKYISILNIIQGEVDPTQVHESLQRIRERKLVNFIDWAPASIQVALSRKSPYVQTTHRVSGLMLANHTSIRHLFGKCLGQYEKLRKKQAFLDNYRKFPMFADNDLSEFDESREIIESLVDEYKACESPDYIKWGMEDPGEANVAADLDSKLVV

SEQ ID NO: 249351 - protein, 79 aa, Zea mays
  Clone ID: MRT4577_158995C.1.pep
VVKGRLLKRPMCAPFSLLLLSLFAWITNKTLLHPYCFMLCSKKALPFILSFSIRAKASSKSRNCVRSGTERRPFHFTLR

SEQ ID NO: 249352 - protein, 81 aa, Zea mays
  Clone ID: MRT4577_158996C.1.pep
HTVGFRLQSQGMLCGVVIVQRAHTVLSYRSVYSQIGIELAFDSFVSQGHESLLKCECEIGLSVALQCNKIHRYILSVYHSS

SEQ ID NO: 249353 - protein, 65 aa, Zea mays
  Clone ID: MRT4577_158997C.1.pep
MQDVLSLYAGSCTRGIELNDRDGETQARPNYHGCALSHAISRRALAEEDLTDCVRNILNERAHSF

SEQ ID NO: 249354 - protein, 133 aa, Zea mays
  unsure (1)..(133): unsure at all Xaa locations
  Clone ID: MRT4577_158998C.1.pep
EFYSGGLVRSQXRWPNAAISAARRPLRQPEREGEHVLRCPGRRRSSFSSDQAKSHRTKDAESFYKIRSQRGAHHRGAGRSRVAAARDAGCRRWVAWSLRRCLWVAMGAGTGRRRAGRGGVWTRGKSSWISESG

SEQ ID NO: 249355 - protein, 68 aa, Zea mays
  Clone ID: MRT4577_158999C.1.pep
TWFQTKFLGPMKTSGQLLVYVFSNLFSKLPFFLKLQTNFLGGETFWTGFFSLTGLLSFTGTRGRGRSL

SEQ ID NO: 249356 - protein, 47 aa, Zea mays
  Clone ID: MRT4577_15899C.1.pep
WLFGHISCRSTIYLCVIIERTTLLTLPSSINLLCVPVEKLPKKSAIS

SEQ ID NO: 249357 - protein, 118 aa, Zea mays
  Clone ID: MRT4577_1589C.1.pep
MAMSASKMMAVAAAALLALALAASTAEARNIKTTTTTTEKKDDAVVQPQTFPPFDRLGGGASPASGGLPGTSSGGSSIPAFSMPLFSGGSPAFSGFGGMPGSPAAGSVSVVPVHGSKP

SEQ ID NO: 249358 - protein, 85 aa, Zea mays
  Clone ID: MRT4577_158C.1.pep
IPPARKNGFVSFPRPFRPVLKGCSRNNEVWKFLKNSKLCLKNLFQPLRRPFFNLGLFHPTNFWPQNFVSYFSGFNPLNQVIFSGG

SEQ ID NO: 249359 - protein, 54 aa, Zea mays
  unsure (1)..(54): unsure at all Xaa locations
  Clone ID: MRT4577_159000C.1.pep
VWGLACLSLPLAPSSSFCRLLRFLXLCLLHLLLVPARXGCLSXDKNSRCLXSTV

SEQ ID NO: 249360 - protein, 163 aa, Zea mays
  unsure (1)..(163): unsure at all Xaa locations
  Clone ID: MRT4577_159001C.1.pep
EHDGASISHREKTRESKNISRMTTHLLWVSGFKHHCSHVFFHILFQMLSCVEFLALVGGVLVVSLSFSDSPSTTWGSVAAADPVGPSAAVSSAGAGASARGGISCIFRRPLGVTSMAAVRRAAPPKPSCSVXPWVWCLSWIGFYLLAKFDAWCLYAHLVRFRP

SEQ ID NO: 249361 - protein, 210 aa, Zea mays
  Clone ID: MRT4577_159002C.1.pep
MECVLGLVGRDFAVVAADTSAVQSILVHKTDEDKVMVLDSHKLLGASGEPGDRVQFTEFIQKNLHLYQFRNTIPLSTAAAANFTRGELATALRKNPYMVNVILGGYDKDVGASLYYIDYIATLHKIDKGAFGYGSYFCLSLMDKLYRPDMTVEEAVDLVDKCIKEIRLRLVVAPQNFVIKIVDKDGAREYARRELVGDSAPAEAAATVAA

SEQ ID NO: 249362 - protein, 210 aa, Zea mays
  Clone ID: MRT4577_159003C.1.pep
MECVLGVVGRDFVLVAADTSAVQSILVHKTDEDKVMVLDSQKLMGASGEPGDRVQFTEFIQKNLHLYQFRNTIPLSTAAAANFTRGELATALRKNPYMVNVILGGYDKDVGASLYYIDYIATLHKIDKGAFGYGSYFCLSLMDKLYRPDMTVEEAVDLVDKCIKEIRLRLVVAPQNFVIKIVDKDGAREYARRELVGDSAPAEAAATVAA

SEQ ID NO: 249363 - protein, 346 aa, Zea mays
  Clone ID: MRT4577_159004C.1.pep
DLEPAQTTCDRLRVLDLGANRFSGAFPVFVTAFRGLQRLDLGANRLEGPIPEALAGMAATQQLQALNVSYNNFSGQLPPSFAASRFTADSFVGNDPALCGPPLRQCVTASGLSSRGVAGMVIGIMAGAVVLASVSIGWAQGRWRRNGRIPEQDEMLESADDAQDASSEGRLVVFEGGEHLTLEEVLNATGQVVDKASYCTVYKAKLASGGSSIELRLLREGSCKDAASCAPVVRRIGRARHENLVPLRAFYQGRRGEKLLVYDYFPRSRTLQELLHGGSEPAAGRPALTWGRRHKIALGAARALAYLHAGQGEAHGNVRSSIVVVDDLFVPRLAEYAVDRLLVPAA

SEQ ID NO: 249364 - protein, 210 aa, Zea mays
  Clone ID: MRT4577_159005C.1.pep
MECVLGLVGRDFAVVAADTSAVQSILVHKTDEDKVMVLDSHKLLGASGEPGDRVQFTEFIQKNLHLYQFRNTIPGRTAAAANFTRGELATALRKNPYMVNVILGGYDKDVGASLYYIDYIATLHKIDKGAFGYGSYFCLSLMDKLYRPDMTVEEAVDLVDKCIKEIRLRLVVAPQNFMIKIVDKDGAREYARRELVGGSAPTEAAATVAA

SEQ ID NO: 249365 - protein, 211 aa, Zea mays
  unsure (1)..(211): unsure at all Xaa locations
  Clone ID: MRT4577_159006C.1.pep
MECVLGLVGRDFAVVAADTSAVQSILVHKTDEDKVMVLDSHKLLGASGEPGDRVQFTEFIQKNLHLYQFRNTIPLSTAAAANFTRGELATALRKNPYMVNVILGGYDKDVGASLYYIDYIATLHKIDXGAFGYGSYFCLSLMDKLYHPDMTVEEAVDLVDKCIKEIRLRLVVAPQNFVIKIVDKDGAREYARRELVGDNAPAEAATAVVAA

SEQ ID NO: 249366 - protein, 70 aa, Zea mays
  unsure (1)..(70): unsure at all Xaa locations
  Clone ID: MRT4577_159007C.1.pep
EWKGGTMVAGVGERWMGAARDGFVRGVKKGPFGKTAIPGFSYANSXXXLGWDGWVLQKKGRFGRLRKVRG

SEQ ID NO: 249367 - protein, 346 aa, Zea mays
  unsure (1)..(346): unsure at all Xaa locations
  Clone ID: MRT4577_159008C.1.pep
MELHLATIAHRPPLPVPARGHHLRRRLHHLPAPLSFQNTYSPSLSSPHHHRLSPTLRRHLRLPLLASQAPNSHPEPEPEPEPTGAKLLPLVISIAIGLAVRFLAPRPVEVSPQAWQLLSIFLSTIAGLVLGPLPVGAWAFLGLTAAVATRTLPFTAAFSAFTNEVIWLIVISFFFARGFVKTGLGDRIATYFVKWLGSSTLGLSYGLTLSEACIAPAMPSTTARAGGVFLPIIKSLSLSAESKPNHPSSRKLGSYLVMTQFQASGNSSALFLTAAAQNLLCLKLAEELGVIIAPWVSWXAASLALSLLATPYLLXKXLPPETRTXPDAPALAETEAHGPTKSSRSC

SEQ ID NO: 249368 - protein, 120 aa, Zea mays
  Clone ID: MRT4577_159009C.1.pep
LLRSAVTISQGGIDCPTSWRTHVSSDQTVDMDSTQSARSGRLGGRGAVVGRCLDDLVGPGSPAATANSAIASLRLLPPRYGVRPLRVLLDTLLNLNSAASSDADRLAFWNCLKNAARGDS

SEQ ID NO: 249369 - protein, 153 aa, Zea mays
  Clone ID: MRT4577_15900C.1.pep
NFTHRLHGRLDLSLRRRWRRTEAEAAVSAGRRRRNGRNRGGRPWRGGCCLDPDEGSRCCDLDADEESSNRAPVLRGAAASARSFALLFPRGAAATSGRVRGPSDGRCTPDVVMEAPTPRHPPCFLLVASPPDSILSMPTRCTTELLAGLQSHA

SEQ ID NO: 249370 - protein, 264 aa, Zea mays
  Clone ID: MRT4577_159010C.1.pep
MELHLATIAHRPPLPVPARGHHLRRRLHHLPAPLSFQNTYSPSLSSPHHHRLSPTLRRHLRLPLLASQAPNSHPEPEPEPEPTGAKLLPLVISIAIGLAVRFLAPRPVEVSPQAWQLLSIFLSTIAGLVLGPLPVGAWAFLGLTAAVATRTLPFTAAFSAFTNEVIWLIVISFFFARGFVKTGLGDRIATYFVKWLGSSTLGLSYGLTLSEACIAPAMPSTTARAGGVFLPIIKSLSLSAESKPNHPSSRELGSYLVMTQFQAS

SEQ ID NO: 249371 - protein, 133 aa, Zea mays
  Clone ID: MRT4577_159011C.1.pep
HYVVIRTSRSSETSVRYAHASANGSAGELRRGADPRVREENWHAGGVSVEVRMPISIGHRWLPSRHVRTRFYPSRQADRPPGRTASRGATPSRQVRRDDLLVRLVFLAGRAIVSGPRDHQPSFRSVDAGCSRV

SEQ ID NO: 249372 - protein, 40 aa, Zea mays
  Clone ID: MRT4577_159012C.1.pep
HLSGYKGTKKSLGRKHDSLYCPGRLCVVQFILKDNVLRTY

SEQ ID NO: 249373 - protein, 96 aa, Zea mays
  Clone ID: MRT4577_159013C.1.pep
RSGSLETRRWQVRSRTVLGTGQTRVLFGFLCSFLLNPNFNLFIGCVEPLAPSRELPVKGVRAQGRRTSTTKFVVSARGSWRGYAPLVILRWLGCTP

SEQ ID NO: 249374 - protein, 44 aa, Zea mays
  unsure (1)..(44): unsure at all Xaa locations
  Clone ID: MRT4577_159014C.1.pep
XSRTTHPHRHASQTDTXHPTHVLTTPCTVXSSVSTQTLLPRRGR

SEQ ID NO: 249375 - protein, 45 aa, Zea mays
  Clone ID: MRT4577_159015C.1.pep
VPAVNFVLQILQRHLSGLPHVTVIIKVNVINFNCNRDSHMHADPI

SEQ ID NO: 249376 - protein, 85 aa, Zea mays
  unsure (1)..(85): unsure at all Xaa locations
  Clone ID: MRT4577_159016C.1.pep
PASSSKSPSPAEACIQELTXDRKAVLKGSNRDRQFHQGSLLVGLGVLESVGGPLDAWFRTCKLFPGPHLLAGAAIPVMWTAAAAD

SEQ ID NO: 249377 - protein, 69 aa, Zea mays
  Clone ID: MRT4577_159017C.1.pep
TEINSRCNKQHHIELFWVIASWNLLSWQMKKVDHDVSLFQDAPYVHKRCNYRRIWASQTSLQIYCLVIK

SEQ ID NO: 249378 - protein, 118 aa, Zea mays
  unsure (1)..(118): unsure at all Xaa locations
  Clone ID: MRT4577_159018C.1.pep
MARMAPEGSHHNAKHYDSKMQELLSTGETEELFTPXDEAFESFDDMGLQENLLXGIYAYGFEKPSAINHRGIXPFCKGLDVIHQAQSGTGKTAPFRLGILHXLHHALAECHALGPCLP

SEQ ID NO: 249379 - protein, 111 aa, Zea mays
  Clone ID: MRT4577_159019C.1.pep
QRWDLLRQGRQAQLQCAPTQSNSSSERLKPTHLMAHLNSIATNITQTTKFATYWIDNEKTKYISAHIWLHCHCLERTMMGVLTMHNQKSTPLPNRCVTTTTCYQGRTTFFH

SEQ ID NO: 249380 - protein, 58 aa, Zea mays
  Clone ID: MRT4577_15901C.1.pep
ASGLSGVTDFPFQGKKSFQILVKQESLAYRQSRLAPPPPAQSRSLKEEKIQEETTPRH

SEQ ID NO: 249381 - protein, 67 aa, Zea mays
  Clone ID: MRT4577_159020C.1.pep
FFPPPPKIGKGQKTTKALFPSARDASTEWHGRRESSGGPRLNSWDCCRGNQVQPRYVLSYSHRSFST

SEQ ID NO: 249382 - protein, 45 aa, Zea mays
  Clone ID: MRT4577_159021C.1.pep
RVRKKITLNLYETPKIPNWEGFHSILRRTIKKHIKCHMPLARSNP

SEQ ID NO: 249383 - protein, 106 aa, Zea mays
  Clone ID: MRT4577_159022C.1.pep
RTCARAGNQTQPIGSGPGEPTQQQSEVKSRDRRGADLLVHQRGLADPANKETHQGVNEEPAQASKQTNEQKRKEKQNKKRSGMERDREPPAPAVAPAHDLFLFCFS

SEQ ID NO: 249384 - protein, 163 aa, Zea mays
  unsure (1)..(163): unsure at all Xaa locations
  Clone ID: MRT4577_159023C.1.pep
MCWCEQGLPISGISTPGESPPKATPAKIIXAKYGNDCVHAMATXYGQPTSAGPDDNGVSCDHNDENKDPYIMMLLRVNVLIFNDGLMCGSCFDIXRHRPLRVTLASPSCVHITDMNYHPIAGVPFTPTGHRFXVMAKNDEDHKLLEAGIINMLFHHTASTTCV

SEQ ID NO: 249385 - protein, 131 aa, Zea mays
  Clone ID: MRT4577_159024C.1.pep
KGGGPNPAADPGAPPARRGPGPPKSGGGRQRGPSTPGGRIKVFPGAPTPPPAQAFKGLGLVNRASPVPMVPVVPEKKLFGFGRGFPRSLFLPLCLPPGWVPACNPPPPPVGLPPRVCSPRWFGPPPGPLFL

SEQ ID NO: 249386 - protein, 90 aa, Zea mays
  unsure (1)..(90): unsure at all Xaa locations
  Clone ID: MRT4577_159025C.1.pep
RTTIAGRSGKAITFVTQYDEXLYQRIEHLIGKQLPGYPTQDDEVMMLTDRVAEAQMFARMELREHGDKKKRSRKEAGXNDDTEGAIGVRN

SEQ ID NO: 249387 - protein, 532 aa, Zea mays
  Clone ID: MRT4577_159026C.1.pep
LDKISENRADYNIEHTPAPAWAACSSSATTLAAWDDLEEYTVGLDKYSDMLKAQLLDDSVPARALVAIAGESSIGKTTLARKVYQSLEVRNHFEIRTWTVLPHKCRAADVLRDIHEQMTSQLRRTPSASNSKQAVEDACDDKAFGPGKDISNQLYRSMTGRRYLVVIDGSVAVTDWNSLRASLPDEGNGSRVLLITDLEGLEVVGHAQAGHTYDPIELTRLSPESTYEVFRRRVFGARGDCPGRYKSRYYQDVFRITRGLPLSIVVLAGILRSKELPAEWDEVMAQLAPPAREQQRGGSGGSSNSWPRIMSRAFDDLPHHLKSCFLYLAAMRESTPVDAQRLVRLWVAEGFVRPRRGSTMEEVGQGYLKELISRCMVQLVDKDDFGAVLTVVVHDRLHAFAQDEAQEASFIESHDSTDVLAPATVRRLAVLNSTTDRYVQLSNALPKLRSIICDLVEGRRVRSSNFIRTSDLSFLHASKFLRVIDIQGLELKRLPNEIGSMIHLRYLGLRCGHLEKLPSTIGNLVNLQSLIR

SEQ ID NO: 249388 - protein, 397 aa, Zea mays
  Clone ID: MRT4577_159027C.1.pep
MGEGDDDRRDELLGAGRDHEPEPADAEEAKKPAPGEAEAGNGAGAEAATCDYCGTAAAAVYCRADSARLCLPCDRLVHGANGVCSRHARAPLCAGCCAAGAVFRRASTSAFLCSNCDFGRHRDGGDPPLHDRCAVQPYSGCPPASDLAALLAVPLFDKPAAEDGAWWNIWEEPQVLSLEDLIVPTTPCHGFEPLLTPPSPKNRSISPDRKVNEEILRQLGELAESDGGMQASAGREEAEQAGGDQFPSWASPQYATGHGNFGTEDNHENGRWNNSEYHDLNDACKLEVTYDQAPVNSAEPCLSSFAPLSEICPSMSNGSSKEDNHQANPGIGMPMQGLPKRSGFDVVPCPDRDSVISRYKAKRKTRRFDRQVRYESRKVRADGRLRIKGRFAKANQT

SEQ ID NO: 249389 - protein, 209 aa, Zea mays
  unsure (1)..(209): unsure at all Xaa locations
  Clone ID: MRT4577_159028C.1.pep
MAARHLRSGLPLLQARLAANESAAVAQVSRGLATEADKPKENKIKVPKALYGGTGNYASALFLAAANANSLEKVGSEILDVVGASKKSPMFSQFMKDTSVPKETRVKAITEIFSEAGFTDITKKFLSALASNGRLKYVERIAERFVDLTMAHRGXEVKVVVRTVVPLPDKEEKELKETLRDILGKDKTILVEXKIDQSIMGGLVNEFGQ

SEQ ID NO: 249390 - protein, 341 aa, Zea mays
  unsure (1)..(341): unsure at all Xaa locations
  Clone ID: MRT4577_159029C.1.pep
MGEGDDDRRDELLGAGRDHEPEPADAEEARNAPGEAEAXCCAAGAVFRRASTSAFLCSNCDFGRHRDGGDPPLHDRCAVQPYSGCPPASDLAALLAVPLFDKPAAEDGAWWNIWEEPQVLSLEDLIVPTTPCHGFEPLLTPPSPKNRSISPDRKVNEEILRQLGELAESDGGMQASAGREEAEQAGGDQFPSWASPQYATGHGNFGTEDNHENGRWNNSEYHDLNDACKLEVTYDQAPVNSAEPCLSSFAPLSEICPSMSNGSSKEDNHQANPGIGMPMQGLPKRSGFDVVPCPDRDSVISRYKAKRKTRRFDRQVRYESRKVRADGRLRIKGRFAKANQT

SEQ ID NO: 249391 - protein, 97 aa, Zea mays
  unsure (1)..(97): unsure at all Xaa locations
  Clone ID: MRT4577_15902C.1.pep
ELPSSDSLMSAAIYLNHSVPLVSVAYGMHGSYIGVKGEAIYIPPPQCVTVDTCGAXDAYAYWDYCVRRPAGVLPDLKAHRYFMVVHWVRLSCVYVRG

SEQ ID NO: 249392 - protein, 164 aa, Zea mays
  unsure (1)..(164): unsure at all Xaa locations
  Clone ID: MRT4577_159030C.1.pep
MKTSEALSAGANPIQIYRTRALLGKLMNAFVLRKDRQHAHRIIGCQAARSISDNRVPKMLNRMLMKLLLLGGISLHTVAMDVPEDGFFDHDVLQNAXGGTYAKDXKLSCDXVWCRRSINTQGDEHRKFTRGFNTDPTDLMWNHDQTLAXTYGINAVCTYHCCVV

SEQ ID NO: 249393 - protein, 102 aa, Zea mays
  Clone ID: MRT4577_159031C.1.pep
VLLCQNLLSCLLGPQFDVYRTKQPYNRAIDTPAERTSRRFNSTKVSPKLPSVSYNIAQVSYELNVLGTRGPRRMRCIMHSIPASSVEPGGTVPGQPQFFLLV

SEQ ID NO: 249394 - protein, 77 aa, Zea mays
  Clone ID: MRT4577_159032C.1.pep
YNLKHLTFYSQKHSPYKHIFLLSNLTNSILLLIYHTFPSFFIRPLLPFPPNSTFSYHFIHFSSSINFSISLMTFSFS

SEQ ID NO: 249395 - protein, 62 aa, Zea mays
  unsure (1)..(62): unsure at all Xaa locations
  Clone ID: MRT4577_159033C.1.pep
FTSSSKYSSCVLXILEHCVVIINYLKHMRVMFVDDRSCLWTLKFELCSLSLYYVCQVMFLVK

SEQ ID NO: 249396 - protein, 156 aa, Zea mays
  unsure (1)..(156): unsure at all Xaa locations
  Clone ID: MRT4577_159034C.1.pep
MLPNFQSLLGRLTPATSTVEQASSTISNMVVANGNVDTEEGTLEIGMEYRTVSGVAGPLVILDKVKGPKYQEIVNIRLGDGTTRRGQVLEVDGEKAVVQVFEGTSGIDNKYTTVQFTGXEVLKTPVSLDMLGRVFNGSGKPIDNGPPILPEAYLDI

SEQ ID NO: 249397 - protein, 84 aa, Zea mays
  unsure (1)..(84): unsure at all Xaa locations
  Clone ID: MRT4577_159035C.1.pep
YHVSKVECRNCVCIDREECCYIYRGRAXGKRKPPRQGNRRTLIDPYHPGLFPKSLSILTCYTRLAGCLKKPGITPIYKAMNIVV

SEQ ID NO: 249398 - protein, 118 aa, Zea mays
  unsure (1)..(118): unsure at all Xaa locations
  Clone ID: MRT4577_159036C.1.pep
TGGPNLKNCLEFLREQATPLGRLFPQSGFKHPSSSQVFHQQWFFVFRQIYPQNIPQAIYKRVQPKIRGGPPPPPCGFCGSPQAXPKGGGNFESSPNPPPNGGVGPPNPPKKPLPHQCH

SEQ ID NO: 249399 - protein, 107 aa, Zea mays
  Clone ID: MRT4577_159037C.1.pep
INYCFWLLIGTDLFWDTTPNFPRIKDSLHETYSGGGLITHLTKPCPAKSSAFYSKNKPSPTGTKTKPCRLTLLIWLRQLQNIGGRNCPVVLESNSGEDDWHYVKAEL

SEQ ID NO: 249400 - protein, 150 aa, Zea mays
  unsure (1)..(150): unsure at all Xaa locations
  Clone ID: MRT4577_159038C.1.pep
RDPAEILKKKQDTDELDRQKQAEKKRRRXEKAXANXAAIIXEPEKKKQQKKEEQQRXDEEGAAGGEAXXXHXXXGEDPXEPXXXXXNKHXXRGNXXAPXAXXENTXDAQPAEGXPXEXGXGXGSXAXXPRAPKGRRXXXGXGQAXPSXGE

SEQ ID NO: 249401 - protein, 98 aa, Zea mays
  unsure (1)..(98): unsure at all Xaa locations
  Clone ID: MRT4577_159039C.1.pep
AYSAVVAAGAYLTDPAPYRVALPQGIYRTAHLVDSKVADLMNCSRKGXSGPITFRLCCFSVELRHADGSCYYSDRFGWIYHSSRSAGVGMIVAGMLTI

SEQ ID NO: 249402 - protein, 63 aa, Zea mays
  Clone ID: MRT4577_15903C.1.pep
PQLLNRAACFFERRITWGYITTFSFAIQFTIGHTPANTHLFQPMDLAPEGPLDPLKNREDHGF

SEQ ID NO: 249403 - protein, 79 aa, Zea mays
  unsure (1)..(79): unsure at all Xaa locations
  Clone ID: MRT4577_159040C.1.pep
MGRVIRAQYRGPGSVFKSHIHHRKGPRRFRSLDFGERNGVLKXVVIDVIHDPGRGAPLGKVTLRYRSSTSTRRVFVAAE

SEQ ID NO: 249404 - protein, 287 aa, Zea mays
  Clone ID: MRT4577_159041C.1.pep
LGPRAGREPTRWVGREYEFVLFSGGFRTPCVLKRSGALRFANPASPLYGHLSSTDSTATSMRLTWVSGDRRQQQVQYGGGKSATSQVATFTQNDMCSSPLLPSPAKDFGWHDPGYIHTAVMTGLQPSQSYTYRYGSDSVGWSDTNTFRMPPAAGSDETSFVIYGDMGKAPLDPSVEHYIQPGSISVVKAVAKEIQTGKVNSVFHIGDISYATGFLVEWDFFLNLIAPLASRVPYMTAIGNHERDYAESGSVYVTPDSGGECGVAYESYFRMPAVSKDKPWYSFEQGS

SEQ ID NO: 249405 - protein, 76 aa, Zea mays
  Clone ID: MRT4577_159042C.1.pep
VNLTVHDFISLYLYFKLTFLQGPRHHQSPSYLGSAAAKTPSASEQCKRKALGPPLSRITVYISPMAAFTYYLAASR

SEQ ID NO: 249406 - protein, 171 aa, Zea mays
  unsure (1)..(171): unsure at all Xaa locations
  Clone ID: MRT4577_159043C.1.pep
VAWVYGHLSSTDCTATSMRLTWVSGDGRPQQVQYGGGKSATSQVATFTRNDMCSXVVSSVYHRDQTPDVTKGNVTVFYSGIAXRTYLDAGSPLLPSPAKDFGWHDPGYIHTVGMTGLQPSQSYTYRYGSDSVGWSDTYTFRMPPAAGSDETSFVIYGDMGRXSADPSVDTT

SEQ ID NO: 249407 - protein, 95 aa, Zea mays
  unsure (1)..(95): unsure at all Xaa locations
  Clone ID: MRT4577_159044C.1.pep
PKKCIVRPSTGELMALXSSSKQRRLILXADALLFGLAGASASDGTCCMPRWAILHKPVPSCRWYDTRRTCGIGPHLPWPELKMIFXPELADMPVY

SEQ ID NO: 249408 - protein, 50 aa, Zea mays
  Clone ID: MRT4577_159045C.1.pep
LWIFFYYLPTWIIPTHHLTHQHRDNIKQYIIDKDTSFTSLLGDFYTGLGI

SEQ ID NO: 249409 - protein, 119 aa, Zea mays
  Clone ID: MRT4577_159046C.1.pep
MCIMRTYETRGRTVVEPPPRRGNFTSHPPAGVMRLPREWRRTESISDDGRYVEYRRSRSRPRVIEYYEEPRRSTTRHRSVSRRRVTDVERRTPRTSYIDPRDSYVDERITRRSVSRVRH

SEQ ID NO: 249410 - protein, 129 aa, Zea mays
  Clone ID: MRT4577_159047C.1.pep
VIVPFYFVGPRPLGDASPGKNLLYLTKFLLGPNKKGVFFGEGYGRAGLFQFSPPPGRISLFSVGFITLKNACFYFLVPFCKGWAPLGSLALFFTGFLFKVFRPPCLYISPFFFFCFFFCFFVLKNKPPL

SEQ ID NO: 249411 - protein, 136 aa, Zea mays
  Clone ID: MRT4577_159048C.1.pep
FLRPVVIGMGPCGLFAGLILAQMGFRPIILERGKAVRERTKDTFGLWRKSVLNPESNVQFGEGGAGTFSDGKLYSQIKDPHHYGRKVLDEFVKAGAPEDILYLSRPHIGTFRLVSMVEKMRASIHELGGEVRFETR

SEQ ID NO: 249412 - protein, 74 aa, Zea mays
  Clone ID: MRT4577_159049C.1.pep
IHDVHSSMRRNTSLSRENLFNAIQTYTNLGPCRNDLWPRSICEPVRYCLIQVVDARSYSARYVFLLLPRSHDEG

SEQ ID NO: 249413 - protein, 56 aa, Zea mays
  Clone ID: MRT4577_15904C.1.pep
SEQHSLQKKVSNAIAFYLKGAPATQPKKGEACPKKPSPNTTIVASDPPDLKLVTTI

SEQ ID NO: 249414 - protein, 119 aa, Zea mays
  Clone ID: MRT4577_159051C.1.pep
PGSCRASALRLLFFFFFVQPRDRFRKTGGGIGSPILVPNETGPKNMQQYSRAKGVAHVLFPAKMRHSCVGPVEDLQQGVTAPSPWGSMIHPELPDSSQVQFKDGPKPCLERCWPHYPSP

SEQ ID NO: 249415 - protein, 116 aa, Zea mays
  unsure (1)..(116): unsure at all Xaa locations
  Clone ID: MRT4577_159052C.1.pep
MKGVIGFVRCLALSNANAFAMHMPCPCAXGCRACTGDDDGLTTIMGARGLHHYAEYLTHAQCTLLAAVPYYDRCVQTSAMYQPLRQHYYHQHMMMMDVHADDHQLQTMMQLEHAAV

SEQ ID NO: 249416 - protein, 214 aa, Zea mays
  Clone ID: MRT4577_159053C.1.pep
NSARGCNAFPTRGAQHTQNRNPRLQEDMASKFGLAGGIPERRVRPIWDAVDSRQYKPALKLCTALLAKHPTSPYALALKALILERMGKPDEALSGALNAKELLYSDNIFHFDDLTLSTLQIVFQRLDRLDLATSCYEYACTKYPSNLELMMGLFNCYVREYSYVKQQQTALKMYKTVGEERFLLWAVCSIQLQVHFSSGGVKLLALAEALLKNT

SEQ ID NO: 249417 - protein, 94 aa, Zea mays
  Clone ID: MRT4577_159054C.1.pep
MGSLGPTVSLSIMARPGGQQPAEMERKKDSGVFFGGGCGFRMPLHYPRYKKADYESMPEWRVDCLLREYGLPADGDVDSKRRFAMGAFLWPDQY

SEQ ID NO: 249418 - protein, 76 aa, Zea mays
  Clone ID: MRT4577_159055C.1.pep
RVSCCLVQFISPENSLHWDTFVIQLVSLIFAGLCGRWFHFSFFPLKFTWSRSTRYCRFLGNGCVAIVSKLFFLLGS

SEQ ID NO: 249419 - protein, 92 aa, Zea mays
  Clone ID: MRT4577_159056C.1.pep
EGFFFCRNLTWLQKLFTWSIPLKAEGMVRLFVKFTPRVPRIVVRVKTYFGRGNVPDLDYVGEGVGQNKCTVQRFWVAAVPENTQGPERLYNK

SEQ ID NO: 249420 - protein, 111 aa, Zea mays
  Clone ID: MRT4577_159057C.1.pep
TQKKTEEQEKGSTKQTTPHQKRTGHPPRLVWSVVHLIKTHIPRFLQTFFPRNNNKKKPNPQLAQNSNDPNPRQWVGQKGGTSFPWLVGQNSRASRNQCPGPPPGAAGPDQR

SEQ ID NO: 249421 - protein, 71 aa, Zea mays
  Clone ID: MRT4577_159058C.1.pep
RRQYKKHRVCSVGLTAYANMQSDEGMLVLLLYKKCASELGWCFAPPISHCVSGRKHSPVALEKCLPGNWDA

SEQ ID NO: 249422 - protein, 91 aa, Zea mays
  Clone ID: MRT4577_159059C.1.pep
APLSPSKVDRALLSMLSRWHQVRAIRPVIMNSRIVRQRRASSVNLINASLTKLEVGCSSCYRTTAGIRDARSLPGRPLKRRILPNSLPLAA

SEQ ID NO: 249423 - protein, 104 aa, Zea mays
  unsure (1)..(104): unsure at all Xaa locations
  Clone ID: MRT4577_15905C.1.pep
TYSCVRVWQHXRFQIIDNDQGNRTTPSYVVFKESERVNLDAGKSQVAMNPINTVFDAKRLIHTRFSDAYDQSDIXNGPXNVISGPDEKPMNGVQKSGHEKHLVI

SEQ ID NO: 249424 - protein, 61 aa, Zea mays
  Clone ID: MRT4577_159060C.1.pep
NGVAPVPGNVPGRLTQLTFRFSGFVFSFQTSPNVLVPISVRSPPLLIRACPPFFFTERTGE

SEQ ID NO: 249425 - protein, 92 aa, Zea mays
  Clone ID: MRT4577_159061C.1.pep
PAARRTAARRGPDCRLLLQDPASRATPLIERTPCTLIAPSDRPPRGYAYHWLPAPYWRRSQIPQTHFAAGSARLNTGEFEKWHTLQSCYAYK

SEQ ID NO: 249426 - protein, 230 aa, Zea mays
  Clone ID: MRT4577_159062C.1.pep
MSSVLRNWARPSPLLLVLLSCRSNIPLDRPTRWQGGRPSHTINHFLNGTCKNYATSKAEYTNTQLDLPAYMVTSIYFNQQVISCNLISLLTRCSTRGQAVSLAARSRRFESSFNLARPHRLGIQCSTDPGCRRAVTALVPTIASMGDPVSGRMRDKVRVRLQSEITTLEVYDLLELNKVNFTSSCEWFIGLNLAKWLGIGVCFSVSKFGDQKVNGFLWTKLLNSRAEGVL

SEQ ID NO: 249427 - protein, 298 aa, Zea mays
  unsure (1)..(298): unsure at all Xaa locations
  Clone ID: MRT4577_159063C.1.pep
MIDGRRHSVDIPVSRALLAIMRSRSLRDPDTNSLAKFSAKKTIWEGSSLDEDELEGANNKNAYGRHSFSYNAYDHLQRRREEFGDGLRSGRLADSPINIIKANAMAKAALHNQSCCSAISGMSRSTKDRAFGLVGDGEEIGRREASTFQESSRSLLQKYRPRSFSELVGHGVIAQSLSGAVLKGKLAPIYLFHGPHGVGKTSTARTFAAALNCRSPGENQPCGRCDECMPIFSGSSSSVVEIDASKLDCKSRVAALLRNAXSPXASSHFKVLIVDDCQHMXKEGWYSIYNSLKGFLRA

SEQ ID NO: 249428 - protein, 114 aa, Zea mays
  Clone ID: MRT4577_159064C.1.pep
LREADDSNRVLTLQGKPKHTACQGTPTPHMTTVPIDSPSASRPHCLGIQCSTDPGCRRAVTTLVPTIASMGDPVLGRMRDKVRARLHSGTRFTGYHFSQHVLSTFKSLTQVSTH

SEQ ID NO: 249429 - protein, 519 aa, Zea mays
  unsure (1)..(519): unsure at all Xaa locations
  Clone ID: MRT4577_159065C.1.pep
MAEAAPHFVLVPMLAQGHLLPMLDLARVLASHGARATVVLTPVNAARNRAFLEQAAGAGLTINFAELAFPGPALGLAAGCERVDMLHDLSLIVPFYDAVWLLAEPLEAYLLSLPRMPDCLVSDSFMAWTASVARRXGILRFVVHFSPASYVLAAHILETRGVYDRAADDEFEPFEXVPEFPVRAVVSRATAQGVFQWPAGMEKFRRDTLDAEATXADGILFNTCAALEGAFVERFASELGKKIWAVGPXCSSSVXSDAGAMAGRGNRAAVDADQIVSWLDARPAASVLYISFGSIGRLFPAQAAELAAGLVASRLPFIWSVKETAPGLDAEFEERVKDRGLVVHGWAPQMTILSHPAVGGFLTHCGWNSILESLCYGVPLMTWPLFVDQFLNEALVVDVLGAGVRSGAKVPVTHVTVVKPGEVLEVQVWRDGVERAVTDLMDEGPAGAARRARAKELGQQMRAAMAKGGSSDTDVRDLVRHVVEVARKKGEHEDTALAGGDHVITSKEKAMNGTGGKHY

SEQ ID NO: 249430 - protein, 34 aa, Zea mays
  Clone ID: MRT4577_159066C.1.pep
FRYMRLMTYSLSTVDLYSHQGALRVRTSVLGRVG

SEQ ID NO: 249431 - protein, 264 aa, Zea mays
  unsure (1)..(264): unsure at all Xaa locations
  Clone ID: MRT4577_159067C.1.pep
MAEKPAGPTPRTRIRGGLAASAPSSRRLSSVSFTAAPSKIKKVPDPPKAVRPSRATPAKKRPQVDQAQKRREEVAALQEQLNGLQSKLHEKDEALRSAENLIGRVTAANEAVDGLRSQLSEKELLIESTGSELHGAKIMLAEKQAALEKLEWEANVSSTKVEELQADVASMDTEVSALMKLFRKITESDRAPPPRDRNDDLSLECEPVHLDDTVDDIDLEKMEKEMSAYVSXRSSALSAAKENPTDEFMRAVADARLRLQAVVL

SEQ ID NO: 249432 - protein, 68 aa, Zea mays
  Clone ID: MRT4577_159068C.1.pep
FLFVSFIKKKKKKKKKKKKKKKKKKKKKKKKKKKKKKKKGGPPENGTPSPGDLFRAGYLQGNKFSQKG

SEQ ID NO: 249433 - protein, 235 aa, Zea mays
  Clone ID: MRT4577_159069C.1.pep
MSHQATAMMSGGGGAGQFGDTTLTKVFVGALAWETHKDGMRAYFQQFGDILEAVVITDKNTGRSKGYGFVTFREPEAALRACIDPYPVIDGRRANCNLAYLGVNKSKTALTTMLPHYLQPYAAHVYGGGSSMRATMKSFQTAGGGASLMSFVPAADHGIQQGIPTYDSVYAAAGYSPYFSDYGYPLSYYQPYMVGLQQGGQLQQYAAVGGTAAAAPAANPSVGPYSYFQYGPASA

SEQ ID NO: 249434 - protein, 37 aa, Zea mays
  Clone ID: MRT4577_15906C.1.pep
SLHGRISRVTYSSKSLSHISLTSLYISHFTHASGQGT

SEQ ID NO: 249435 - protein, 51 aa, Zea mays
  Clone ID: MRT4577_159070C.1.pep
EQYEDGVAEGGYRAPGLATAVVVLVPWATALLAKLKVVGVDPRTLGRSRNP

SEQ ID NO: 249436 - protein, 55 aa, Zea mays
  Clone ID: MRT4577_159071C.1.pep
NPVLDTRAWLVLQFQRSPPMYVDVRSHCHEIAQSIFKFWNCSPQTFDPLLQSFGS

SEQ ID NO: 249437 - protein, 122 aa, Zea mays
  unsure (1)..(122): unsure at all Xaa locations
  Clone ID: MRT4577_159072C.1.pep
LPTTPYYSTNQAKINQLLSLVIDTYYSDKDIFLSQRLANSSTCLEXIKLHRVTQKIKLDAHTHHDILITTENDMITLNITDNDVAMTETHLENNLANNARSSAEENMPSVAWYGLNHDDYLI

SEQ ID NO: 249438 - protein, 134 aa, Zea mays
  unsure (1)..(134): unsure at all Xaa locations
  Clone ID: MRT4577_159073C.1.pep
NQNFFWPCKKKRKNKKKKGKAKTRAKTTKRATATKRAEGQKKGERGTKRGGTRGKXRGPGKKGETCAMGRQKGKRKEKQKSQGKKKKGKTKRDRGGQKKREKAGKPGAPPKPKKRPKNGERRMGKRAPKRGREN

SEQ ID NO: 249439 - protein, 192 aa, Zea mays
  unsure (1)..(192): unsure at all Xaa locations
  Clone ID: MRT4577_159074C.1.pep
YYQKTKKKKKKKKKKKKKKKKKKKKKKKKKKKKKKTGGKRPPQKGRNLSRTRRPPPRGKGGFQKTQKGGPGGXKGPFREPKGEKGDPEGGGPPRGXPPPKRGGRKKPKGPGGGGGEPQGQGPAPXKKPKAPRRGPKGARGPAPXGPQETPGXAGKEFQGPPEPLPPTEDPWGPGGFFGKEEREPETPGPPFG

SEQ ID NO: 249440 - protein, 53 aa, Zea mays
  Clone ID: MRT4577_159075C.1.pep
NRENLLKIEGITSYPEKVRKETKGPKALKDFTKENNKNWLNNQWGNGKTKKVQ

SEQ ID NO: 249441 - protein, 395 aa, Zea mays
  Clone ID: MRT4577_159076C.1.pep
MQSAAAFRPCPTRLLVSSPCRPLLSARPLRVSAAGAVATRSSAVGPRGLGLGLLPASPDRDGKCRQRQVSCSAAGDAVAAPKAEEGGGLMKTLWLGSLFGLWYLFNIYFNIYNKQVLKVFPYPINITEVQFAVGTVAALFMWITGIIKRPKISGAQLVAILPLAIVHTMGNLFTNMSLGKVAVSFTHTIKAMEPFFSGILSAIFLGELPTIWVVSSLLPFGGGVALASLTEASFNWAGFWSAMASNVTFQSRNVLSKKLMVKKEESLDNLNLFSIITVMSFFLLAPVTFFTEGVKITPTFLQSAGLNVNQVLTRCLFAGLCFHAYQQVSYMILAMVSPVTHSVGNCVKRVVVIVTSVLFFRTPVSPINSLGTAIALAGVFLYSQLKRLKPKPKTA

SEQ ID NO: 249442 - protein, 57 aa, Zea mays
  Clone ID: MRT4577_159077C.1.pep
TSLPPYLLKMRNWNSPRNSDLISFGFRIGLIRQLIIPIHISTFLPPYFLKKSNWHSP

SEQ ID NO: 249443 - protein, 100 aa, Zea mays
  unsure (1)..(100): unsure at all Xaa locations
  Clone ID: MRT4577_159078C.1.pep
VEAATAAVCKGEPLRFXVXTDPMPELPNPDKTDLCDGPQCEALGSFVQYMWALGMTFHLICCGVAEATYYDRATDFRDTPAYKEYTSQELPEESELSSAD

SEQ ID NO: 249444 - protein, 84 aa, Zea mays
  Clone ID: MRT4577_159079C.1.pep
GSTDVDKLRLMDTSSLLSFKPDGPVGPYKTPYSFSRGSSKSPPVQKNCLPWCVPGPLYAWNDLVIKKALDPLKPYGFVWWALME

SEQ ID NO: 249445 - protein, 70 aa, Zea mays
  unsure (1)..(70): unsure at all Xaa locations
  Clone ID: MRT4577_15907C.1.pep
STQSTIVDLEFAVARASTXSHRHMRQIRERVVGRVLATKNVRDCEMLLLSXSAWTNISRRSNCRKARQST

SEQ ID NO: 249446 - protein, 194 aa, Zea mays
  unsure (1)..(194): unsure at all Xaa locations
  Clone ID: MRT4577_159080C.1.pep
KKKKKKKKKKKKKKKKKKKKNSLFRPPGEKKAFLTQTPPPWAGEPDPGLASGSSGAPPGPGANKGGGGKIPAFAGVFSRPATXPVGAFWAFWVDHPENKAQPARWGXSFRQIHPFSPXGEFWGVFHNLYPPYQLVGGSCFPLFKNQDRPKGENPFWGKGGKRALRWGXRGKSDXFWVAPLGAFDGETFRFRGKI

SEQ ID NO: 249447 - protein, 51 aa, Zea mays
  Clone ID: MRT4577_159081C.1.pep
GWLKSLIRLKTPKLKMQLTLVNHLINNEPLELIHTNQNFMRTNIPLHNSRK

SEQ ID NO: 249448 - protein, 81 aa, Zea mays
  Clone ID: MRT4577_159082C.1.pep
FFTGFSRDFFLFSPEKPPSHKQAPKYVKHRIHPTYIQWPTVCFGPALNITTTWGWIKHVNKCVKPKHFSGWEIIRNPGIGV

SEQ ID NO: 249449 - protein, 58 aa, Zea mays
  Clone ID: MRT4577_159083C.1.pep
NDISYNLPTSYYTCSVVLTISGMSCTCSNYLWHEFQVAKSRFRGNKCPFPLQSFKARA

SEQ ID NO: 249450 - protein, 108 aa, Zea mays
  Clone ID: MRT4577_159084C.1.pep
PYVHCPLASSSPLLYIRASKILTAASTALSSACTQASKCSYCHAISGQLNRRGRKRKVHMLTTHTQRLNATTQKQDSLEQNPRSRILVAAGATCVKIKTRPGGATTRS

SEQ ID NO: 249451 - protein, 66 aa, Zea mays
  unsure (1)..(66): unsure at all Xaa locations
  Clone ID: MRT4577_159085C.1.pep
MGAKILALLALLALSASAATSTVSAQCSQQYLSSATAEGFNXPNYQSYMDKRHATSVYGIHNPSHH

SEQ ID NO: 249452 - protein, 78 aa, Zea mays
  Clone ID: MRT4577_159086C.1.pep
PVGPPPPNFPFSPRYFFPSPRGLSFSRSGFFSPPCFFFYKAPLCPFLILGSSPGSPGPCSKHHGLRIDEIFFPPPAFF

SEQ ID NO: 249453 - protein, 143 aa, Zea mays
  Clone ID: MRT4577_159087C.1.pep
QKGLICIKNNLTRPKLQLFKKNGPNPIMEKKFSFGPPLPQIYNSPRPPAARGRKRFFCQTNRPKRKHRSIQEAHFARGNFCRKQVGKPIKSFLRSNCLKTTHLAQEFGENPHCISGPGSCTRGYLIPPKEGQHQGNGPIPISL

SEQ ID NO: 249454 - protein, 105 aa, Zea mays
  unsure (1)..(105): unsure at all Xaa locations
  Clone ID: MRT4577_159088C.1.pep
WQECXTNMPEITQXVHIKKVELIREGNAVTEVAKYSAKDYEMSVSQDVFDVFXLALKGRQLIVYGGLLKDYAKKYKDVELDQYKSKDKNEHSPPRPPPSCYHPSS

SEQ ID NO: 249455 - protein, 66 aa, Zea mays
  Clone ID: MRT4577_159089C.1.pep
MLSTDNAAWISVTTFLVLVVPLIIYDDLEQQLNRPLAGAADASGRGPYDVVADHIDISVHRTFYAP

SEQ ID NO: 249456 - protein, 107 aa, Zea mays
  Clone ID: MRT4577_15908C.1.pep
GTSRPAGPGMPKLFPTAAPTRPPTPRGPRCITPSSPMVHTGDSEVDAASPQSSAHSQGALRRAVAQARRSPPRPHPRFASGSTPCRAASSASKLQRPASSTRSEVVM

SEQ ID NO: 249457 - protein, 87 aa, Zea mays
  Clone ID: MRT4577_159090C.1.pep
IPDISKKEKGSWHDGNRPSKSLNFFRAWIENRSFSHLGLGLPAVICCGPKNFIYKLQSEQKAQRSTLLEFKWVACTRLKLKGPIIAA

SEQ ID NO: 249458 - protein, 65 aa, Zea mays
  Clone ID: MRT4577_159091C.1.pep
RPFQIPRPWFASGKPWLRGAEVAPPPAGQFGEMQRGRSAIGPDTFQTSTPFCRLNQQYDWETSGN

SEQ ID NO: 249459 - protein, 51 aa, Zea mays
  Clone ID: MRT4577_159092C.1.pep
AHVNMGPQKRPPFSYFLSRRTSILRGAKTGKGPPCKLTKSFPDWHVHVDPL

SEQ ID NO: 249460 - protein, 68 aa, Zea mays
  unsure (1)..(68): unsure at all Xaa locations
  Clone ID: MRT4577_159093C.1.pep
XXAXPNIXXXRXXXGNETAGADKGADXNRKRPTSHAXXRQKRPHXPGTXNEGEEKGRDTXTDNXTGNK

SEQ ID NO: 249461 - protein, 206 aa, Zea mays
  Clone ID: MRT4577_159094C.1.pep
PAFSGSPTRPIIHKHQSSKISIAVIIDQVTHALKNVISPKGDDGANFSYGSAEIEKMVATLIGRVSSMAERSSKDNVMSSRSLSHEKSELTLRLEHLVHVCSDVLDGKANHERLTDEVCLILEWMVRRCLLCPDGIDIVEYTTNNSDGNESQRTLSIHEKDMVQSIINSKMVSGTQKENATGYGAEDLIPAVILEKHSQIELISSK

SEQ ID NO: 249462 - protein, 106 aa, Zea mays
  unsure (1)..(106): unsure at all Xaa locations
  Clone ID: MRT4577_159095C.1.pep
DNSNTPRWRLRKSAQQLEVTAALILGDRXHRYTRPEMDTEIHMDKEHGMHVXYCGPEPTDCSMXEGHLPNYDETGTGRCRRYLHTYGXDVPYNKAPTASTASKSLT

SEQ ID NO: 249463 - protein, 112 aa, Zea mays
  unsure (1)..(112): unsure at all Xaa locations
  Clone ID: MRT4577_159096C.1.pep
PGFMGFRTRGWLVGHRASLDPRAGFPSCGARVXRMPALGLAPRSGSRRLGAYEGRLEYLVWVNGHLPGSFWLGGLSDSEGTGPDPEDTSAGATGEVDPDLYPRSTGGTCSEY

SEQ ID NO: 249464 - protein, 316 aa, Zea mays
  Clone ID: MRT4577_159097C.1.pep
MATGDESETAVRASEELRDWSDMTPVCLAEAFSRLALEDLWRGAMPCCRSWRDAARSRPGLFAVLDLEPGFAESTPGAEAAAWWTPSFQRRVDAMVRSAATFAVGELCEIHVRHCSDDALAFAAERSPRLSILSVKTSPAVTDRSMLIVGACCPMLTELDISNCYEISYKSLEVIGQSCQNLRVLKRNVFNWIDPSEHAGVVPDDYLCQCSCPPPREAITTSRFMPKLRHLELRFSKLTAVALGSIPEGCKDLEVLDLFGCANLTSRGIDQAAASLKSLVTLVKPNFYIPRSSFHMGRYGHWQLYDERFQTNVFQI

SEQ ID NO: 249465 - protein, 94 aa, Zea mays
  Clone ID: MRT4577_159098C.1.pep
SIVKEQRYSNALCLSESLNQAPDRLVSNIIELTLSCSVFLRPRVCASGVLDPCKSRSADTDANDFDSALDLHEGDQITASNYPLTIEVVRKGQL

SEQ ID NO: 249466 - protein, 212 aa, Zea mays
  Clone ID: MRT4577_159099C.1.pep
MGFGPVTEHYTSMFETGHFPNLLQDVLHALGTYVRPFYETRRVCEPPRACHYITRIHVRVMDAGDRGFRTLSAHESLIPLSTYTTSVSNAARRTPWSLSHTYQQQLHDIRFRHLPLCLSGGSQTSIVPGGAGEDRLNTLASVVADLNTDLDSATLDLSRRHLELEDVHVGIAPLEALLQGRDPPEAQVLAMALSPPRKRIRYGEHGSITRLL

SEQ ID NO: 249467 - protein, 138 aa, Zea mays
  Clone ID: MRT4577_15909C.1.pep
LQKAPKMYSYLPSLIEDRQIYSHVYQNSRNRAQLPAPAGDVAGWLLLRVGKPADASSPPLDQPDSGSLVPSFASSTDKACHERFGGAVIAGTWRHSERLYLLNLPDRTIYRPFGESLSAHLSSQFEVSRSQRAQHSLF

SEQ ID NO: 249468 - protein, 141 aa, Zea mays
  Clone ID: MRT4577_1590C.1.pep
MAMSASKMMAVAAAALLALVLAASTAEARNIKTTTTTTEKKDDAVVQPQTFPPFDRLGGGASPASGGLPGTSSGGSSIPAFSMPGSGSSSIPGGSFLPGSGSIGSMPLFSGGSPAFSGFGGMPGSPAAGSVSVVPVHGSKP

SEQ ID NO: 249469 - protein, 658 aa, Zea mays
  unsure (1)..(658): unsure at all Xaa locations
  Clone ID: MRT4577_159100C.1.pep
MDLNRTNLWFHGKEHIATASFSQAQPSAINCRNEELSMSAVNLGYIRSSEIAQNSRKSFQHGDQSLTAPDDSCRLALGLGPTPNLYSADSHSFGGNKAYQSATLLSQHCATTDPGLMLGLSRCSSRNLQSTRASGSKNYSPARKTGIILPLIDEGSTSAKRKKGGYLLPLLFVPRSEDLCLNGTSTDTDAQQHIGTECDTESGHNRSLNLHEIQPSADLSITAGCSFAATSDVVADTSDEQRSHQRHPKKCRFNGCSKGARDASGLCISHGGGQRCQKPGCNKGAESRTAFCKAHGGGRRCQELGCTKSAEGKTEFCIAHGGGRRCGIEECPRAARGKSGFCIKHGGGKRCRIEGCTRSAEGHPGLCISHGGGRRCQYPNCDKGAQGSTIFCKSHGGGKRCMFDGCTRGAEGSTSFCKGHGGGKRCLFEGGGMCPKSVHGGTSFCVAHGGGKRCSVPGCTKSARGRSDCCVKHGGGKRCRFDGCDKSAQGSTDFCKAHGGGKRCAWSTGCDKFARGRSGLCAAHTTLMASKVVHHPGHARSMVGPCHFSGGVSGSSAADSNMDHAISSSGHGAWSDCVDSXERHAERRQXLLIPRQVLVPGSLKXSFVWSSRQRPXDGGSRNQSCGLVVPEGRVHGGGLMSMLGVGGNLGSNPDGSKA

SEQ ID NO: 249470 - protein, 129 aa, Zea mays
  Clone ID: MRT4577_159101C.1.pep
ISSYHNPTLFIISRMDLNRTNLWFHGKEHIATASFSQAQPSAINCRNEELSMSAVNLGYIRSSEIAQNSRKSFQHGDQSLTAPDDSCRLALGLGPTPNLYSADSHSFGGTKLINQQLCSVNIVPQPILV

SEQ ID NO: 249471 - protein, 212 aa, Zea mays
  Clone ID: MRT4577_159102C.1.pep
AGRAGLAVLATDKGISYTLNPQVIILRCLAWTGAVLSPRRLDHFIDDFGIGKTSGNELKKFTNIAQNLIVGSVLVSTVTFAAVFTLPGGYISEGHPHAGAPILSHKYTFKAFVMANTLAFVGSTLSTIWLTYAGSEHVHPLLRAIYMFLSVISMEQATRSMVIGFALGAYVVLSPVSERIAIVVCMSTFMTLLLRNPSSWQLWFLFMPIKRR

SEQ ID NO: 249472 - protein, 40 aa, Zea mays
  Clone ID: MRT4577_159103C.1.pep
KSPGEEGNKVFVGINQGKLVGPKLECPQEWGGKPLPLKVK

SEQ ID NO: 249473 - protein, 225 aa, Zea mays
  Clone ID: MRT4577_159104C.1.pep
MTLSIWMNGELNDLESNLVGKKTGRSLPATMLAAELIVPPAQEIKEFFAITEASRTNVSLPQMFRFQVRLYCPDCDELLDTRGRNFLHTAIEHKKWKVVWRFSGTADLGRMANVMDSEGNTPLHLAIKNADQMIVSLLMATNSVLPNIVNNQGLTALDLAVLATDKGISYTMVIILRCLAWTGAVLSPRRLDHFIDDFGIGKTSGNELKKFTNIAQKKHGIVFIF

SEQ ID NO: 249474 - protein, 60 aa, Zea mays
  Clone ID: MRT4577_159105C.1.pep
RALLGPMRSIVVKAIVTCSWGSNLARKIYNILYHSRFVVVMDGINNGCVENKRRISILFN

SEQ ID NO: 249475 - protein, 236 aa, Zea mays
  Clone ID: MRT4577_159106C.1.pep
MRLNKVEVNLIRLLEAAPRQQNQAKLVYYVTTARELLEQLGAETTPEGISSISKAKLSEYSEKIEALASRLAASVPENENPIIESKDEISYEEAKPESPISLSSGLRRRSTAHAVVGTSHQENKEDIGAPIKLDAEAQAHIEKHRKLQEDLTDEMVELARQLKESSLMMNQSVQETEKILDSTERAVEHSLASTGHATSRAAEVYSLASKTTCFQWLLMFVMTCMFVMVVLLIRVT

SEQ ID NO: 249476 - protein, 141 aa, Zea mays
  Clone ID: MRT4577_159107C.1.pep
EISYDEAKAESPISLSSGLRRRSTHHERKEDIGAPIKLDAEAQAHIEKHRKLQEDLTDEMVELARQLKESSLMMNQSVQETEKILDSTERAVEHSLASAGHATSRAAEVYSLASKTTCFQWLLMFVMACMFVMVVLLIRIT

SEQ ID NO: 249477 - protein, 68 aa, Zea mays
  Clone ID: MRT4577_159108C.1.pep
PRVRPRVRPRVRPRVRRAVEHSLASTGHATSRAAEVYSLASKTTCFQWLLMFVMTCMFVMVVLLIRVT

SEQ ID NO: 249478 - protein, 236 aa, Zea mays
  Clone ID: MRT4577_159109C.1.pep
MRLNKVEVNLIRLLEAAPRQQNQAKLVYYVTTARELLEQLGAETTPEGISSISKAKLSEYSEKIEALASRLAASVPENENPIIESKDEISYEEAKPESPISLSSGLRRRSTAHAVVGTSHQENKEDIGAPIKLDAEAQAYIEKHRKLQEDLTDEMVELARQLKESSLMMNQSVQETEKILDSTERAVEHSLASTGHATSRAAEVYSLASKTTCFQWLLMFVMACMFVMVVLLIRIT

SEQ ID NO: 249479 - protein, 418 aa, Zea mays
  unsure (1)..(418): unsure at all Xaa locations
  Clone ID: MRT4577_15910C.1.pep
MAAAFVCVPPPPGYPVMLNTSMSKVSVLLSVQELHPVELAARLKQWSSSSLDFVTSYWEAIASYQERPVLGPHLAANVTAAAAEVDADYAVGFYYSAAQTRPTSLELGTRDVVSENDTEMIAGPDVEDPATCDDPDAEPIDDIEMEQEDLSEVPSAMEEVNVDAVVEEFDDEMAEEVSGGSSGEERAAFMTNSSIPSQSTPEPEQAKGIDEVSLQQDVQTEDSEDHADGKEDQPAQHGQKLGSDMWSSYLDKVSDPAAIGAALAAIIVAAVVAFLYMRQKQTRVASNEPAEQVEQVEQVERVEQVEQVDQVETLSDSGSSQGHVVAKGSLFHSPGVEASGPSQYSSSLSSGLGRRRNTKGEGLXASSVEERLDSSIXSSYGSFTTYQKIPAKKGNKEDEAMTPVRRSSRLRNVKTPES

SEQ ID NO: 249480 - protein, 95 aa, Zea mays
  Clone ID: MRT4577_159110C.1.pep
MKLQATVTVAGLLFLVLLLALPSLRVSMAGSGFCDGKCAVRCSKASRHDDCLKYCGICCATCNCVPSGTAGNKDECPCYRDMTTGHGNRTRPKCP

SEQ ID NO: 249481 - protein, 39 aa, Zea mays
  unsure (1)..(39): unsure at all Xaa locations
  Clone ID: MRT4577_159111C.1.pep
YIWPVESDTILQYPHSWITDSHNFEYLAKFPXLDHLVDI

SEQ ID NO: 249482 - protein, 169 aa, Zea mays
  Clone ID: MRT4577_159112C.1.pep
MRLNKVEVNLIRLLEAAPRQQNQAKLLYYVTTARELLEQLGAETTPEGISSISKAKLSEYSEKIEALASRLAASLPENEKPITESRDEISYDEAKAESPISLSSGLRRRSTAHAEVGPSHHERKEDIGAPIKLDAEAQAHIEKHRKLQEDLTDEMVELARQLKESSLMM

SEQ ID NO: 249483 - protein, 189 aa, Zea mays
  unsure (1)..(189): unsure at all Xaa locations
  Clone ID: MRT4577_159113C.1.pep
KISAGSNPLEEYTIPKGTITRIMRQVLPQDSRVTGGAKETMDQCIVQFSTALVRAATQECRRDRRXTITADDLIVGFANLGLADYVQPMSVYLRLYREAVNNQQQAVAPPAPTVQRGTTTAVPPPPPNLTLQLGLPSVPDVTELARDTDVYALWHGAAPAAGTTSASSVAPMPPPAGALQTKKVSYGSK

SEQ ID NO: 249484 - protein, 249 aa, Zea mays
  Clone ID: MRT4577_159114C.1.pep
MAQGTVPSAAGAGGGGCPSAPAVSTTPPGTPRAAPPPPSTFPTGFYYAVELYFDPALENQVLKAWNALARRQLGSRLIDAAARPHLPLLHLPAAALPPPGTGAGGDPLLRLAPSLRALASRLDPLALALSSLAALPASASSSPHDNVLFLAPTPTAALLGLHAQLCELLRKDAGVEVPDAFRPDHWLPRCAVAVDVPRGRMAEAFCVLRELKLLPVSGYGMDIALVEVGATVRELVSYPLGGGSSAGAD

SEQ ID NO: 249485 - protein, 72 aa, Zea mays
  Clone ID: MRT4577_159115C.1.pep
YKLVMTNRSGGANHDHDWLTTGLNGKKLGLVTWIFYYHAPTDQNETTLVVLLIKSLLPQLYPKISRAIPFEG

SEQ ID NO: 249486 - protein, 51 aa, Zea mays
  Clone ID: MRT4577_159116C.1.pep
QLTFRSPGTIWSVDAIYCRIARSVNQFFTSSFVLFSSRNSIMYKMQNITSM

SEQ ID NO: 249487 - protein, 89 aa, Zea mays
  Clone ID: MRT4577_159117C.1.pep
ETTAQILVRALNPLDYMKWRRKSAYWKALKVFKLPVEFLLLLTVPVVDPDKDDQNWKRPLNCLHLVISPLVVVLTLQSGTYGVYEIGGL

SEQ ID NO: 249488 - protein, 177 aa, Zea mays
  unsure (1)..(177): unsure at all Xaa locations
  Clone ID: MRT4577_159118C.1.pep
LHRGSMSSAGSARVPKRRRTTKTSEAADRQLQERQFLDLNLLPAVEVASTGGSLSINEPVSHRQPPPTVAALLYETTQVVVSSAAAESNIGMNSFPINVEVIDDDVAIYTSGPPPQARQQSSRTGPITVIIDDDSETTAGPAGEALDEHVNTLLSLGMNPRHNPSRAXPNTDPCNNI

SEQ ID NO: 249489 - protein, 156 aa, Zea mays
  Clone ID: MRT4577_159119C.1.pep
LHRGSMSSAGSARVPKRRRTTKTSEAADRQLRERQFLDLNLFPAVEVARTGGSLSINEPVSHRQPPPTVAALLYETTQVVVSSAAAESNIGMNSFPINVEVIDDDVAIYTSGPPPQSLSQARQQSSRTGPITVIIDDDSETTAGTEGEALDEHVKP

SEQ ID NO: 249490 - protein, 245 aa, Zea mays
  Clone ID: MRT4577_15911C.1.pep
RCCRDAFLNFLRRKKEKPRRGVAAPDICGGGRRQRRCRWAPVPGAVSIATSEDPAATFKVCAHLPPRLLRDSVTAATIAFDYKWSLWGLEPGTPVWQSAKHHAHLRSANRLQELCFRNGGIYIKLGQHSARVEYVVPEEYVQTMRESMLKRCPVSSYEQVRGVFTKDLGESPETVFAEFDPAPFASASLAQVHVARTHDGQKVAVKVQHDHLTNTGVVDIATVDLLVNALHYIFPTFDYSSLQNL

SEQ ID NO: 249491 - protein, 134 aa, Zea mays
  unsure (1)..(134): unsure at all Xaa locations
  Clone ID: MRT4577_159120C.1.pep
RDPAAAATGTSPGRWRHTRGRRHRPRPGGAXGGGKDKHDESDKGXXPNXXHGGTESXGXPPQGNPPQGHPPQPGAXPXPPGAXPPPPGAXPPQXGXXQPXGHPXQXGXPAAGHPGPXHQXXGSSHPRGHKGTGA

SEQ ID NO: 249492 - protein, 106 aa, Zea mays
  Clone ID: MRT4577_159121C.1.pep
KVKNYDHATGMSSYDVQWISKASASQRAGRAGRTGPGHCYRLYSAAAYGKDDLFPEFAEPQIKKIPVEGVVLMLKFMSIDKVENFPFPTPPNKESLVEAERCLKTL

SEQ ID NO: 249493 - protein, 137 aa, Zea mays
  unsure (1)..(137): unsure at all Xaa locations
  Clone ID: MRT4577_159122C.1.pep
FRALIYDQNTAFQYYREVEVCISLLLYIWAYGRTAGVVELWRVEKLKGIKVASTWNQSNLDLSSEEIRIFKRAKXHMLLEAIGLWIPGEVTRTVLSVHDDKRENEPEEEEIVAGPPLSRQCNAELHTDYDGAAVRWD

SEQ ID NO: 249494 - protein, 43 aa, Zea mays
  Clone ID: MRT4577_159123C.1.pep
DVIKSRRTPRVAHHQRHPRTRLTDTSFHGAYTQCLHTQLTGTM

SEQ ID NO: 249495 - protein, 194 aa, Zea mays
  unsure (1)..(194): unsure at all Xaa locations
  Clone ID: MRT4577_159124C.1.pep
LTVRDGNVELAPVNPRDEHQHWYKDMRFNTHDKDDEGIPAFALVNEDTGLAIKHFLSQAHPVKLEPFIPQYHDEKVLRTEXSGDQDKGLLCIRMGNNIRVNFYVFHGDKGHGSLHDCTTDVLXEWAKDDTHSWMILPCGDEAYTWGSMSCGNAPYFGGGEPTVRMYCLGGERFSATVRSGAEXLVRTNPRDEYQ

SEQ ID NO: 249496 - protein, 166 aa, Zea mays
  unsure (1)..(166): unsure at all Xaa locations
  Clone ID: MRT4577_159125C.1.pep
PPPPPLSPPPXPPPPXSPPLXPPXPXSSPYPPXPIPHSSPPPPPTLXPTXPTSPPTPPPPXPXPPSQPPKLPQHPSPWYPQPXPPPSPSSPXRSQXPPLGXFPSXXXSHTVPFPXINTXXTXTRXPPXLPXPPPNKKSXDPAPXXQPYPPPPQVLFVIVPVIVSTV

SEQ ID NO: 249497 - protein, 620 aa, Zea mays
  unsure (1)..(620): unsure at all Xaa locations
  Clone ID: MRT4577_159126C.1.pep
MGLGVCGSLCQGGDEDDGFGYDYGTSKWYSFRLERMARLRHTARKSVIPFLPSRLAKRPLRRPVTGQSSHLERLHHRLQEEQEGRRQELEQQDSSFSLQQEIESVRSCSPVLPLGAPPAPPLSAPAAGVAAGGDPDDEGGDSSSSHNTDLSEEQELEGWVARPITRDVARGCHFHDALDTLLHRALDRRTWSIEYRCVVFQHSRGVYPDRWEATCLVPRPENSLQGAGVCSEHYSISERDSTKADMQEAARRALSHYCSVLGGVADGLNLNCGLSARSIITWRMAPPLPSGLSTRTAHLSVDTMLKMSDNRRRGGRRAQQEQAAPQDEAPHQQLPPPPLMMIERMFLMQTQVVQAIGQTLAAIQQQQPPPQPQMPRDKRAEFMRGLMTVKKEEFLALKQGPMSVSEYRDKFLQLSRYAPEDVNTDAKRACFHCGEQGHWVMQCPKKAAQQQSGPSAPAKQNVSQPGPGNRSQPHYNHGRLNHLEAEAVQETPGGEVVAELISPEPRKGSCHQMATDSKEPDSLEIIKVVSEFSDVFPEDLPGMPPERKVEFAIELLSGTAPISKRAYRVSGPELVELKKQINELSEKGYIRPSTSPWXCPVLFVEKKDGTRRMCIDYRAL

SEQ ID NO: 249498 - protein, 255 aa, Zea mays
  Clone ID: MRT4577_159127C.1.pep
MSIRMLNQNAEVMNKSAALAMNIGAAKGLQDVLKTNLGPKGTIKMLVGGAGDIKLTKDGNTLLKEMQIQNPTAIMIARTAVAQDDTSGDGTTSTVLFIGELMKMSERCIEEGTHPRFLVDGFEVAKKATLEFLETFKTAVVIGDQPDREILKMVARTTLRTKLYESLADQLTDIVVNAVLCIRQSDQPIDLFMVEIMHMRHKFDVDTRLIEGLVLDHGSRHPDMKRRAENWYILTANVSLEYEKVKIMQGFSTQR

SEQ ID NO: 249499 - protein, 95 aa, Zea mays
  Clone ID: MRT4577_159128C.1.pep
PAGAEIHHHTAIITSTSTSHGRCAQTHQASVPMAYYQEVDYCSEEVRSVVPVGFCRTLVVFRRTLLRIILISFNCFYLTSSTTTTTMLTIMYSNY

SEQ ID NO: 249500 - protein, 144 aa, Zea mays
  Clone ID: MRT4577_159129C.1.pep
HRLQNKILCRNDLYAGEYFADKIQGFGAYRFANGHSYEGSWHEGKKQGFGMYVFGSGDERAGEWDSGILKSSFHLPRVQLSDPAVQRALQAARRAAGSAFRLPSVQEQVSKAVMAANRAATAARVTAIKAVQNRIDGKLCFIDV

SEQ ID NO: 249501 - protein, 74 aa, Zea mays
  Clone ID: MRT4577_15912C.1.pep
DVVTAVRGKGLLNAIVIKETKDWDAWKVCLRLRDNGLLAKPTHGDIIRFAPPLVIKEDELRESIEIINKTILSF

SEQ ID NO: 249502 - protein, 94 aa, Zea mays
  Clone ID: MRT4577_159130C.1.pep
VLPLPGSGPFGSVRPWGDSLRLLGSPWSRGSRRRRRLAFSGGWLLVALASLPADSRVLRFLPPPVAPPLCPAVPWGLPALIFYNPPQPSRAAAD

SEQ ID NO: 249503 - protein, 66 aa, Zea mays
  Clone ID: MRT4577_159131C.1.pep
QHCLADVAHRGHPTTAAGSWRGGSAPRCLPPLSKVQRHVYLIVLPVPQICQLCPKCDHSLSLPGRV

SEQ ID NO: 249504 - protein, 51 aa, Zea mays
  Clone ID: MRT4577_159132C.1.pep
MEQVDDRIMRDLKEERVKVKQQAQRYEMERKERELMEEAWSQLMKKGRANR

SEQ ID NO: 249505 - protein, 37 aa, Zea mays
  Clone ID: MRT4577_159133C.1.pep
PEAAESQSSNSEHLLATNLKGKPLLSSKNSSDSSYKH

SEQ ID NO: 249506 - protein, 48 aa, Zea mays
  Clone ID: MRT4577_159134C.1.pep
LFIFFLPLSHRGGFSVYRASRSYMCPKQHTGADLLRRSKTHTMNYIIL

SEQ ID NO: 249507 - protein, 85 aa, Zea mays
  unsure (1)..(85): unsure at all Xaa locations
  Clone ID: MRT4577_159135C.1.pep
DEMIKPGRLSKPYKGIVDCYKRTIKDEGCSHLRRGNTCXNCISYFPTQAXNFAFKDYFKRLFNSKMDRDGYLKWVAGNLCSGGAA

SEQ ID NO: 249508 - protein, 80 aa, Zea mays
  Clone ID: MRT4577_159136C.1.pep
LPTAHPKIKGAVKRPINAVSQVFAPVFWVTMRFCQFWGGIYNIRPNCLPEGRGPHKAGDQTIPLQGNFFRRHPTGEVFGV

SEQ ID NO: 249509 - protein, 44 aa, Zea mays
  Clone ID: MRT4577_159137C.1.pep
KGTGPATAGQVARPVVNKRFSCPVFGPRTGGAFPALAGTRCVVW

SEQ ID NO: 249510 - protein, 123 aa, Zea mays
  Clone ID: MRT4577_159138C.1.pep
TLLNLDASRLRKILGSGMSTKMWEATVEHAKTCVLTDKVHHYYPDGLNKAGVVFNVVGEVRGLISDKYVFVDDFTEKEKAEARAAVKQAYEHWKDVHTCDNETLVENPSHPFNLGSPSLHENQ

SEQ ID NO: 249511 - protein, 95 aa, Zea mays
  Clone ID: MRT4577_159139C.1.pep
AWNRFYLASKRSFCSGSKIVLTSSSDRAVKFGTSQALTLNHLSHEAYWYFFKTLAFGSIDPEAHPGLAQVAMEIARTQNRSIPGACIICYLLRNN

SEQ ID NO: 249512 - protein, 286 aa, Zea mays
  unsure (1)..(286): unsure at all Xaa locations
  Clone ID: MRT4577_15913C.1.pep
MAPAGNHANSTSHTLPSQLAGWSSFMKGAPLTQPLVNMLVSTPASSLAEVDKLFEVAVDGSDDDSISAATVLCGATLLRGWNFQEHTVRLVVKLLSPSDPIDNSGRESQLIKLGPMLNVILSGISAVDYAPIFSFHGLIPELAASLMAICEVFGCLSPSVSWTLRTGEEISAHTVFSNAFILLLRLWKFNHPPLEYCIMGDGAPVGSQLTPEYLLLLRNSQVLSSSSLSKQRNGQRQSQLSTSHPSSGNPIFMDSFPKVEVXWYQQHQACLASTLSGLAHGTPVRN

SEQ ID NO: 249513 - protein, 173 aa, Zea mays
  unsure (1)..(173): unsure at all Xaa locations
  Clone ID: MRT4577_159140C.1.pep
MYKLGRGNRDKVQQFMTITGASEKVALQALKASDWHLEGAFDFFYSQPQVDPQDIVMLVISWHMKAATMCEFTRQEFIGGLQSIGVDSIEKFRGKLPSLRAELKDDNKFRDIYNFAFTWAREKGQKSLSLXTSIGMWQLLFAERNWPLSDHXWCQFLQXRHNKAISRDTXVPA

SEQ ID NO: 249514 - protein, 250 aa, Zea mays
  Clone ID: MRT4577_159141C.1.pep
MYKLGRGNRDKVQQFMTITGASEKVALQALKASDWHLEGAFDFFYSQPQVSVVNTRHLEDIFNRYKEPDADMIMVEGISQFCNDLQVDPQDIVMLVISWHMKAATMCEFTRQEFIGGLQSIGVDSIEKFRGKLPSLRAELKDDNKFRDIYNFAFTWAREKGQKSLSLETAIGMWQLLFAERNWPLLDHWCQFLQVRHNKAISRDTWSQLLEFVKTTDPQLSNYDDEGAWPYLIDEFVEYLTENGLVQRKR

SEQ ID NO: 249515 - protein, 258 aa, Zea mays
  Clone ID: MRT4577_159142C.1.pep
TLELAGAACLRRRGKGRGAEPATVFGVAGGDWLRFRIKAGRTLPLLVGDLAESKSLVSGYRGAWFRCKIHNMRVRLGYLECYLEYIDYPGEKKEWVRLFRKNSARSNQNSSDSIHTMIRPSFPKWYFVHEVPEQFPNSDVTAIVDETWQIGDRVDWLKEGCYWSGTITKIINEDLVEIELPAPPIGEGKCYKAKCSDLRPTLEWSLARGWMVPLSQANGKGWHAARLLQHYKSESDDDNDDNDSCDAPANGVQSFKHA

SEQ ID NO: 249516 - protein, 101 aa, Zea mays
  unsure (1)..(101): unsure at all Xaa locations
  Clone ID: MRT4577_159143C.1.pep
RKIAIXGARSKDYFDRHGDLKRIRRLKYWPLDRLLIDKYKLPEAEAREFADFLCPIMDFAPEKRPTAQQCLQHPWLNLRTQNNEDDIEGQMSNMQIKGSCS

SEQ ID NO: 249517 - protein, 293 aa, Zea mays
  Clone ID: MRT4577_159144C.1.pep
MDLILPYKVGDLAESKSLVSGYRGAWFRCKIHNMRVRLGYLECYLEYIDYPGETIVDETWQIGDRVDWLKEGCYWSGTITKIINEDLVEIELPAPPIGEGKCYKAKCSDLRPTLEWSLARGWMVPLSQANGKGWHAARLLQHYKSESDDDNDDNDSCDARQTVCRASNTHEEAPGPMVPAPPSATNNAPSHTYQKDAAVASTEDLLKPGSTSKSPDPRHDAQASAQPAGTGVSMKPEPVIGVSTIKKEDSLTEGEVDGDTEECLEKLGAIKARLKYLMQGTRLEHERSATFRG

SEQ ID NO: 249518 - protein, 62 aa, Zea mays
  Clone ID: MRT4577_159145C.1.pep
YGLSLLYSHLGMHHFPDSSTATTYKTKSSPYLTTNNTNLNKHHAIYTNILQPIYSSNMYTHI

SEQ ID NO: 249519 - protein, 216 aa, Zea mays
  unsure (1)..(216): unsure at all Xaa locations
  Clone ID: MRT4577_159146C.1.pep
MDLILPYKVGDLAESKSLVSGYRGAWFRCKIHNMRVRLGYLECYLEYIDYPGEKKXNGLGSFERTLQGPTKIQVXIHTMIRPSFPKWYFVHEVPEQFPNSDVTAIVDETWQIGDRVDWLKEGCYWSGTITKIINEDLVEANGKGWHAARLLQHYKSKSDDDNDDNDSCDARQTVCRASNTHEEAPGPMVPAPPSATNNAPSHMYQKDAAVASQRTC

SEQ ID NO: 249520 - protein, 344 aa, Zea mays
  Clone ID: MRT4577_159147C.1.pep
MDLILPYKVGDLAESKSLVSGYRGAWFRCKIHNMRVRLGYLECYLEYIDYPGEKKEWVRLFRKNSARSNQNSSDSIHTMIRPSFPKWYFVHEVPEQFPNSDVTAIVDETWQIGDRVDWLKEGCYWSGTITKIINEDLVEIELPAPPIGEGKCYKAKCSDLRPTLEWSLARGWMVPLSQANGKGWHAARLLQHYKSESDDDNDDNDSWDARQTVCRASNTHEEAPGPMVPAPPSATNNAPSHMYQKDAAVTSTEDLLKPSSTSKSPDPRHDAQASTQPAGTGVSMKPEPVIGVSTIKKEDSSLTEGEVDGGTEECLEKLGAIKARLKYLMQGTRLEHERSATFRG

SEQ ID NO: 249521 - protein, 74 aa, Zea mays
  Clone ID: MRT4577_159148C.1.pep
PPPPTPTPRPLSPPPPPPPKSLDPNIAHGSARRGDRPAPCLMRRRGGASAGASCASLRSPRERARERYGREERP

SEQ ID NO: 249522 - protein, 56 aa, Zea mays
  Clone ID: MRT4577_159149C.1.pep
KIVKKKNVLALWKNYTRNLYGWKTGAFVKTAPFFFFCSPPKRWVLLCVKWELVPEK

SEQ ID NO: 249523 - protein, 42 aa, Zea mays
  Clone ID: MRT4577_15914C.1.pep
KTYFQTLKVMSLVENLAATDGGSISNHFKVKRKKLIHFRYTK

SEQ ID NO: 249524 - protein, 40 aa, Zea mays
  unsure (1)..(40): unsure at all Xaa locations
  Clone ID: MRT4577_159150C.1.pep
TGMPTTENRLDTDRSLLIPVSHRIYTEXLVIVDKHRTHYT

SEQ ID NO: 249525 - protein, 123 aa, Zea mays
  Clone ID: MRT4577_159151C.1.pep
MDILLGSGRFLARRTPLMLVPRCSRASRDRSGSDKGETSADWDKAWAKFKKKGKRTLFSDFSPDKYVTWNPRRSEYPLSEEVDPIKRTERSNLMLWTSPQFTLVGAIIIVLTLLIYTLVVPPK

SEQ ID NO: 249526 - protein, 79 aa, Zea mays
  unsure (1)..(79): unsure at all Xaa locations
  Clone ID: MRT4577_159152C.1.pep
TGPGPASKTRPGKPEKPAALVALSRSVLTGASEWQAPPKDGWGTYXKGYACGRLHSPPHSPVTQALLRQKKKNPPTRSS

SEQ ID NO: 249527 - protein, 149 aa, Zea mays
  Clone ID: MRT4577_159153C.1.pep
VMMTSCGCLFILVMYERLFPSGLLVVEELLQYPRQRRFCLRTRTHVGVICILPVLGEEVSVRHQSGLVYCHDETMLLLFDAEIGFSELVCVLCSLDHKFLYADGIGFLCHLSIFYDWALVVSIYVAFLLSRLVAIHVILYLHICCASGL

SEQ ID NO: 249528 - protein, 60 aa, Zea mays
  unsure (1)..(60): unsure at all Xaa locations
  Clone ID: MRT4577_159154C.1.pep
TPSPFFFFSFLYIPSYFXGWGNFKFPQQTTPNFTYFKTSYAPTKQTTILKKKFLPPSPLI

SEQ ID NO: 249529 - protein, 108 aa, Zea mays
  unsure (1)..(108): unsure at all Xaa locations
  Clone ID: MRT4577_159155C.1.pep
RVQFTFNLMAKNIMSMDPGEEETERLRLEYITFMKGVVSAPLNFPGTAYWKALKSRASILGVIERKMEDRLEKMSREKSSVEEDDLLGWALKQSNLSXEQILDLLLSL

SEQ ID NO: 249530 - protein, 58 aa, Zea mays
  Clone ID: MRT4577_159156C.1.pep
KKKRLHLGEIKPGGLPMVPFLGFPVQAPPPGKGPLNNWAPPLRDPLPPPFFDPLGGSF

SEQ ID NO: 249531 - protein, 76 aa, Zea mays
  Clone ID: MRT4577_159157C.1.pep
PLLCSPTLIGLPDALLQHILTSLLHTDIDTLVRAHHMSSAIIAPKPSHLPSASNYLYETQNQSPHTSVFTSTTALL

SEQ ID NO: 249532 - protein, 72 aa, Zea mays
  Clone ID: MRT4577_159158C.1.pep
INWNSMEPICLLGIFEQSFIKNSGPFEVKCKAFLLFLNRIYHRFPSQFQKVPHVVIKQPGSPFQRDLEKTLT

SEQ ID NO: 249533 - protein, 66 aa, Zea mays
  Clone ID: MRT4577_159159C.1.pep
AGQWPIRFWKCNFLFLGGPILQPKNFIIDFQLLTILKDGPANNVLLLKGCWFCQTKLAKGHHLFHW

SEQ ID NO: 249534 - protein, 127 aa, Zea mays
  unsure (1)..(127): unsure at all Xaa locations
  Clone ID: MRT4577_15915C.1.pep
MQELAPTGETDALFTXYDEDFESCDXDMPLEQNILRXMDAYGLXEKPXAIQPRGXIVFLCKGLDVIQQAQSCTXKTETFCSGIXQDVDYGLFECQALVRAATRELAQQSDIDMRALGDYLGVKDHAC

SEQ ID NO: 249535 - protein, 38 aa, Zea mays
  Clone ID: MRT4577_159160C.1.pep
AMRISYPHLRLVYTWGLVAKLLNTLGEPNHYLLIITLD

SEQ ID NO: 249536 - protein, 76 aa, Zea mays
  Clone ID: MRT4577_159161C.1.pep
KVEKMVLLACGWRYTITVCDSSNLYTYGWRKYVQLGHIDFEDDLVPHKLEALKDSTISQEKIEWNSNFGGYTGVET

SEQ ID NO: 249537 - protein, 79 aa, Zea mays
  Clone ID: MRT4577_159162C.1.pep
KSFLVSLIGIFYFPHDGDGGWFSPVIFFFFNTKGGFFIKQPGLFYPPPGMKKNFSPFPPIYREGDFKKINYCLPPAGRG

SEQ ID NO: 249538 - protein, 76 aa, Zea mays
  unsure (1)..(76): unsure at all Xaa locations
  Clone ID: MRT4577_159163C.1.pep
MVLSVFHYGSLISDLAFDCPYKILGLIKGFNRTFNVHCIDHRGTTEHAARTCTLXRRRSDDQAICHGTRPTRRKFI

SEQ ID NO: 249539 - protein, 66 aa, Zea mays
  unsure (1)..(66): unsure at all Xaa locations
  Clone ID: MRT4577_159164C.1.pep
VEKMVLLACGWRHTITVCDSSNLYTYGWHKXVQVGQXDFEDDLVPHKLEAMKDSTISQVIPSTNIP

SEQ ID NO: 249540 - protein, 101 aa, Zea mays
  Clone ID: MRT4577_159165C.1.pep
LSVHERNLSFVAYNNVIGTRRASWRIGSSIEQKEESRKNEEHVNLIKEYRAKIEALLCYILYVILNLLYSHLVPSSTAAESMVFYLMTMVYYQRYLAEFKT

SEQ ID NO: 249541 - protein, 60 aa, Zea mays
  Clone ID: MRT4577_159166C.1.pep
YLIQNINRRPSPVLVPIMHNVGNWRSFIIFCSVFFFTLRLVYCFLVMHGLEPDAWADALG

SEQ ID NO: 249542 - protein, 76 aa, Zea mays
  Clone ID: MRT4577_159167C.1.pep
KKFGAPIDAPISGLAPTHLPKGDDFKTKIKKLKTFSTPFFAKMSRGGGKKMGGPAAMKKNPPVERGAPAPKMKKVD

SEQ ID NO: 249543 - protein, 80 aa, Zea mays
  Clone ID: MRT4577_159168C.1.pep
SGPHVSGGSALPPPHGLRLPRRVLAPSLFVSLGRWGCPGSLLVSGPFRRLPPLSSVASCHRQPARWCLHLGSRPCPGVTN

SEQ ID NO: 249544 - protein, 75 aa, Zea mays
  Clone ID: MRT4577_159169C.1.pep
GRALHLLPIISSSSLCPSISYNPLSIPVHQISPQCACSPQAPVTASRFASSVGPSCKICYVHIHRLLLSPARLHL

SEQ ID NO: 249545 - protein, 38 aa, Zea mays
  Clone ID: MRT4577_15916C.1.pep
LLGLLGCVRARRQPTRARVGFNGVMRRDGGREKRAPRQ

SEQ ID NO: 249546 - protein, 36 aa, Zea mays
  Clone ID: MRT4577_159170C.1.pep
DFSPMSYLICGEVRGPIHGFAKFFPFLGLLCQYVFS

SEQ ID NO: 249547 - protein, 85 aa, Zea mays
  Clone ID: MRT4577_159171C.1.pep
LRWCLVLQSTAAASNGNGIITTPSNLFCLIHAWQSKDSFVFHADGSVSVIGALGGPIYSRNFPIEQSSKSRHVCLGDVWFNHYFF

SEQ ID NO: 249548 - protein, 84 aa, Zea mays
  Clone ID: MRT4577_159172C.1.pep
GENWPLKIYFFRGSMFHGHKKMYNPVELFFWGGVAPRLNTGPLTNCYWTPEGIFCSSGDGDPDTQKNVASLQGLFYFSGLGTSG

SEQ ID NO: 249549 - protein, 237 aa, Zea mays
  Clone ID: MRT4577_159173C.1.pep
TAPPCACGAPSPSLRCPLALPLPFATSHPAVRLAAPPLLARRLAVSPRRAASALEALVLESDDEEEESGIGLFQGEEWAATADERDAVRSPELEVFELEELPEQWRRSRIAWLCKELPAYKHSTFTRILNAQRKWINQDDATYITVHCLRIRHNAAAFRVYSWMVQQHWYRFNFALATRVADCLAREGKVEKCREVFDAMIKQGRVPAESTFHILVVAYLSVARGGCLEEACTIYNR

SEQ ID NO: 249550 - protein, 40 aa, Zea mays
  Clone ID: MRT4577_159174C.1.pep
VLAVVQETWMDPAIGLTPYDVHKHVGFLKHLMIRTGRLVS

SEQ ID NO: 249551 - protein, 176 aa, Zea mays
  unsure (1)..(176): unsure at all Xaa locations
  Clone ID: MRT4577_159175C.1.pep
TTLLTRRSKRIALRVSLAGAKPSWRDWAGLAPLAVEKIADRDRGAELADFVRFRLVCKLWMDGSGIRKPRELGARVIDHSFHPRRWILLTEEKEEADEATPTPTRRTLLNLTTRKTIQVDLPELAGHSVVPGPTAAPEGMLVXVLHQXRYLLMTMLWWHSHLMLGLVLVQGSVLLV

SEQ ID NO: 249552 - protein, 100 aa, Zea mays
  Clone ID: MRT4577_159176C.1.pep
GREKCLRPPHLRVFKKKKGSPCPKTDGEKNACLIKPRENFPPPKKQLPPQSFEKKKKPQPHSKIFPQKFCTSQTRGVFGFPQLFFLPGICAPFKFIEILQ

SEQ ID NO: 249553 - protein, 490 aa, Zea mays
  unsure (1)..(490): unsure at all Xaa locations
  Clone ID: MRT4577_159177C.1.pep
MADHQPQVEVLTESVRVNGTKAEATLVGGELXGAPPPAATERGRXRRLELESEVLGFQMDGKQLKFATFAASGGGNGKGGGGDGNRRRGEVVVEMENEATAVRWGVVISDRLASLGRPKKLFIIVNPYGGKRSGPSIFQNEVLPLIEASGVLYTMQETKHRLHAQEIAHSLDLRKYDGIICVSGDGVMVEVVNGLLQREDWEAAIKVPLGIIPAGTGNGMARSLLHAAGEPFYISNAVFAIIRGKXRFFSVLMLTWGLVADVDIESEKYRWMGSARLDFYLLLRILNLRRYNGRILFVPAPAYDLVRXLRLCYREPCDSICKXVTRSHPTPVDERXGYVGPSIKEAEAGLRWRSLNGPFVSVWLGNVPFASEDAMAAPKAEFADGYLDAAIIKDCPRWDVLGLVFQMKDGSYVNSPCVEYFKVKAIRIEPGLRVGSSTEGGIIDSDGEVIARGDESDSRAGDDEPGHLMAYGPPIQLTVDQGLATIFSPR

SEQ ID NO: 249554 - protein, 90 aa, Zea mays
  unsure (1)..(90): unsure at all Xaa locations
  Clone ID: MRT4577_159178C.1.pep
LWSSALATTAWSSLLKSNLRGLPVPXSATRTTTSESVAVATRRAWGGPIRPSISSSPTPPYDLTFFRFSPIKVAILSPTRTSLYMADITT

SEQ ID NO: 249555 - protein, 381 aa, Zea mays
  Clone ID: MRT4577_159179C.1.pep
SSRPRIVLIVNPYVRKRSGRSIFQNEVLPLIEASGVLYTMQETKHRLHAQEIARSLDLRKYDGIICVSGDGVMVEVVNGLLQREDWETAIKVPLGIVPAGTGNGMARSLLHAAGEPFSISNAVFAIIRGHKRALDVTSVVQGNTRFFSVLMLTWGLVADVDIESEKYRWMGSARLEFYLLLRMLNLRRYNGRILFVPAPGYEEVGDPVEQTTGHETNGVSGATDNNGETCGYVGPSIKEADRRWRSLNGPFVSVWLGNVPFASEDAMAAPKAEFADGYLDAAIIKDCPRWDVLGLVLQMKDGAYVNSPCVEYFKVKAIRIEPGLRVGSSTKGGIIDSDGEVLARGDGSHSRAGDEPGHLMAYGPPIQLTVDQGLATIFSPR

SEQ ID NO: 249556 - protein, 167 aa, Zea mays
  unsure (1)..(167): unsure at all Xaa locations
  Clone ID: MRT4577_15917C.1.pep
MNLQTLQNYLQKHQLTQKVEEPLIDPIMHTMIRSKLGFSLLKCGLTYDRTKIMKSLMGHIMELVLSDAGCDFLICIIIIVDDTELDTKIVIQNLVKHLKQLILDMIGRQTLIQLLQPXTXRYLSPYDLAGVNYSVPYIEPTVVETSDGALGGVTGDISDDVITDDPT

SEQ ID NO: 249557 - protein, 69 aa, Zea mays
  Clone ID: MRT4577_159180C.1.pep
DIFRSKLEKYREAITTGICHVINNELRVMLPLSGLNAMAHIEYTVRHHMTTNQTNEVLLAKSGTNQMTM

SEQ ID NO: 249558 - protein, 46 aa, Zea mays
  Clone ID: MRT4577_159181C.1.pep
SMQASQDSHLVRQGVANAHTSGRFHHGRGYPLSGSPRGGGPCVRRD

SEQ ID NO: 249559 - protein, 57 aa, Zea mays
  Clone ID: MRT4577_159182C.1.pep
ARCRPPRCACKRCSRLYREDLRVSPSLSGMINESRSAITVNACKELGCYKLQIETVP

SEQ ID NO: 249560 - protein, 29 aa, Zea mays
  Clone ID: MRT4577_159183C.1.pep
CDIVVCRSYRFKSGYVMVSFLHVSMLRCL

SEQ ID NO: 249561 - protein, 119 aa, Zea mays
  Clone ID: MRT4577_159184C.1.pep
MPASANSANLSRPVTYQTPNTPAPSAQHVPSLTPTPVQSYNFSIPQTNTGSSVATNARVNGNQRPKETPVAAARPYYMPDNLFGDLIDVKSFGAGSKISRSTSMPSPKGGGQPMIGRNK

SEQ ID NO: 249562 - protein, 75 aa, Zea mays
  Clone ID: MRT4577_159185C.1.pep
PFYNFSWIIKKKQGFFPKFPRYLGNATFFFWLAPYIIENTLFLTYNLFPKVRGAPPNMGCCLEAVGAAKKSGSKG

SEQ ID NO: 249563 - protein, 609 aa, Zea mays
  Clone ID: MRT4577_159186C.1.pep
MYPVVTGTPPARLPAASRVDKATSHLLQGPDWAVNLEICDTLNADRWQTKDVVKAVKKRLQHKDPKVKFFTLTLLETMMKNCGEYVHFEVADQHVLQEIVKIVQKRHDMQVRDKALLLLDSWQEAFGGPGGKYPQYYWSYIELKRAGVMFPQRPVDAPPIFTPPATHQAYGSPRYPSGSLNERITSDAGTLSFEGLNNIRNATELLYDMVNALNPADRMAVKDEIIADLVNQCRSNQQKLMQFVSSTGDEDLLKQGLELNDRLQSVLTRHDAIASGSPLPVETPIREPQREDPNPEPSTPITHDNKAQVEEDEDDEFAQIARRKNKSVICGDEASSSAGDQALVPVDPALSEVSSVASNAIVPLDATSVSGTRTKEQDMIDLLSLTLYSPESSEDSSTQNQNGSQPSVTSNGSETLPSYQPAVANGANYPANTQVYPTNQGYVPYNNYVAPWAQTGPVAQPGAYSTQTQQYVSSNPAPPWAMPASANSANPFQPVTYQTPNTPPAASVAPSAAPSAQHVPSPAPTPVQSYNFSIPQTYTGSNVATNARVNGNQRPKETPVAAARPYYMPDNLFGDLIDVKSFGAGSKISRSTSMPSPKGGGQPMIGRNK

SEQ ID NO: 249564 - protein, 86 aa, Zea mays
  Clone ID: MRT4577_159187C.1.pep
PPGHPVPTAPGLCAPTGRTNIPCRYINPRAICRLPKLPSYLPTYLPPGHELREPGPCFGRSTRPRPSSARARRAAPCRAGARAGSG

SEQ ID NO: 249565 - protein, 146 aa, Zea mays
  unsure (1)..(146): unsure at all Xaa locations
  Clone ID: MRT4577_159188C.1.pep
MDFLCALVVRDEDLLKQGLELNDRLQSVLTRHDAIASGSPLPVETPIREPQREDPNPEPSTPITHDNKAQVEDDEDDEFAQIARRKNKSVICGDEASSSAGDQALVPVDPALSEVSSVESNAIVPLGATSVSGXPGRRRQDMIDLL

SEQ ID NO: 249566 - protein, 596 aa, Zea mays
  Clone ID: MRT4577_159189C.1.pep
MTSTAVGGEPAAGHGYWRWSKADFFPEPSFQSWRAYGGALLSTGPRLRDRVTSRSSEAVEAGTLLAQSENPLRRCLSWVDLAFLGFGSVVGSGVFVLTGQEARFDAGPAIPLAYAAAGFSALLSSFCYAELAGEIPSAGGSFSYLRVELGDLAAFIAAGNILLEAVVVAAGLGRSWTSYLAALIGRDSDALRIHVPALADGFNLLDPIAVVVLCATSALAVSGARLTSTVNSVASAVGIAIIAFVLAAGFSHFEPANLAPSFFPFGAAGVFRAAAVVYWSYTGFDMVATMAEETKNPGRDVPLGLISSMSAITLVYCAMSLALVGMQRYSDIDANAAYSVAFAAAGMKWARYVVALGALKGMTSGLLVGALGQARYTTQIARTHMIPPYFALVHPRTGTPIYATIAVTLGAACVALFSSLDVLASVSSISTLFIFALVAVALLVRRYYVAGTTSPAQARTFVGFLALIVLSSIGLSVYYNSGYAARWPGYVAFGALWAAGTAGLALFAEQQRAPRVYGAPLMPWLPAMSVATNLFLMGSLGSLAYMRFGICTAAMLVYYVLFSVHATYDMVHSQGQTTSAPDAATDGVEQRKIMPV

SEQ ID NO: 249567 - protein, 62 aa, Zea mays
  Clone ID: MRT4577_15918C.1.pep
HSVVISNVLSQLLEATYYISCIRYIRMDRRVRQEALTVQLVATINKQDVPAKILYFNQKKKC

SEQ ID NO: 249568 - protein, 60 aa, Zea mays
  Clone ID: MRT4577_159190C.1.pep
TCLKKEDISFLFYPKFPFPIFCQGRALLFCGINTLFKTAIFGNVQICCNFFGLFFAFCCF

SEQ ID NO: 249569 - protein, 135 aa, Zea mays
  Clone ID: MRT4577_159191C.1.pep
GFASPLLSHAFSSFFGPPIFIFLAGVLQGHPWEIPGVPHFIPLAVPPFLGRWPIPFWARCDRPFQHWPGLFAQCFPPCMGALNPPFVVVFPRGAGAFSSLFPPLFSAFLPSFLAPFSVFSRHVFTGLLLFGFRLG

SEQ ID NO: 249570 - protein, 66 aa, Zea mays
  Clone ID: MRT4577_159192C.1.pep
MLLKRIKDFVQTEHPVMGSQSRSVTISTNDKIARALIPHDFRCPISLYLMEDPAIVATEQTYERGN

SEQ ID NO: 249571 - protein, 118 aa, Zea mays
  Clone ID: MRT4577_159193C.1.pep
LFFFFFFFFIFFFFFAKQTITYDHVKSTAKFLYTTICTTGLPINATTAISAKSNSYLTKLSTRPIYKSRPKQVPYCSQNSVYTSRKKSAASSIRKSRVLCVLTPCFHLQLKHRLFSYT

SEQ ID NO: 249572 - protein, 60 aa, Zea mays
  Clone ID: MRT4577_159194C.1.pep
FFFFFLLYNVKWMQYIMSTKGVYHHVKNMLFQFKNMLFFWNYKTKMSRTSSWKLYMSKTK

SEQ ID NO: 249573 - protein, 164 aa, Zea mays
  unsure (1)..(164): unsure at all Xaa locations
  Clone ID: MRT4577_159195C.1.pep
LEPAGRXITQRWAQPTRFLTLTVGSRRFFIFVAAAALRLPLLPPPTRARHAGDGGSAQDRALSDGGAVPDSAAASPAPPPASRQSPAQRSATLRARFPLPCRLRWTVDGARPRRLHCAPRATGGQRDPAAAAPPRRLRRFGSAYAPNEVLPVRLGLKCALSDAF

SEQ ID NO: 249574 - protein, 74 aa, Zea mays
  Clone ID: MRT4577_159196C.1.pep
TFKRQTLKHTGCEPFFEKDHKSICLKNDPCLDRHKPQAPSEEVDHERPYTNPPAYAKFTAKHWEQKRVKHKLLK

SEQ ID NO: 249575 - protein, 115 aa, Zea mays
  Clone ID: MRT4577_159197C.1.pep
MHPHLTLHRHPMCAEVTCYFFFNFVLALFIYMLLHYFSKTYNYDVLVQIIEEFQKCHLDHPVKKFFGECTDLKIKLDRCFRQEKALKRKANFEESKRFKEQLKAYKREIAEKSEE

SEQ ID NO: 249576 - protein, 307 aa, Zea mays
  unsure (1)..(307): unsure at all Xaa locations
  Clone ID: MRT4577_159198C.1.pep
PQVFPYPINITTVQFAVGTTISLFMWATGILKRPKISGAQLLAILPLAIVHTMGNLFTNMSLGKVAVSFTHTIKAMEPFFSVLLSAMFLGELPTPWVVLSLLPIVXGVALASISEASFNWAGFLSAMASNVTFQSRNVLSKKLMLKKEASLDNINLFSIITVMSFFLLAPVTLLTEGVKVTPTYLQSAGLNLQQVYTRSLIAAFCFHAYQQVSYMILARVSPVTHSVGNCVPNXSIILSSVLFFRTPVSPXQISLGLHLFLLLLLTIVFRHGXPHEYETLNLCTGIALAGVFLYSQLKRLKPKPKTA

SEQ ID NO: 249577 - protein, 90 aa, Zea mays
  unsure (1)..(90): unsure at all Xaa locations
  Clone ID: MRT4577_159199C.1.pep
LVLGAPLLALLLLAAAAMIAPSPANAAVSYDHRAVVINGQXXILIXGSIHYXFFTPEMWPVLVGGVKDGGLDVVQTYVLWNGYEPVRGLY

SEQ ID NO: 249578 - protein, 228 aa, Zea mays
  Clone ID: MRT4577_15919C.1.pep
RPGPAARVLLPRARPAPLRPYLYPFPLVPLNNPPHRALVFVSSRPQAAVHGHRQPSMEVVAKANHVTVMDHEMKSRREHFVPDPMRIPRTIMEQWNPQIADSLPDAFCGGWVGFFSYDTVRYVETKKLPFSKAPHDDRNLPDIHLGLYSDVIVFDHVEKKTHVIHWVRTDCYRSVDEAYEDGRNRLEALLSRLHCLNVPTLSSGSIKLNVENFGPVMQKSTMSSEEYK

SEQ ID NO: 249579 - protein, 62 aa, Zea mays
  Clone ID: MRT4577_1591C.1.pep
IDLCSSVLENSVFLSHVFLEYCEKYAKPEDAGVSPEDESSDEELSEEENDSGDEEIMGKPDT

SEQ ID NO: 249580 - protein, 46 aa, Zea mays
  Clone ID: MRT4577_159200C.1.pep
EPRLPTATDSNLYPDPVRVGWCLNYFFRLRKSFFPTERYLLFGATN

SEQ ID NO: 249581 - protein, 80 aa, Zea mays
  Clone ID: MRT4577_159201C.1.pep
APTGQTHCHPTIVPFAMIETEVLVDCVIYSHALSIRLVEEAVRLSRVYMPMKPDDGSTSTKGVCRCLYSMYSSMSPGTRA

SEQ ID NO: 249582 - protein, 157 aa, Zea mays
  unsure (1)..(157): unsure at all Xaa locations
  Clone ID: MRT4577_159202C.1.pep
MAGKGDGPGIGIDLGTTYSCVGVWEHDRVEIIANGRGNRTTPSYVAFTDSERLIGDAGKNQGAMNPINTGFDAKRXLIGREGTDASGQSDIKRWPFKGIPGPGEKPMIGVQHKGEEKQVAAEEISSMGLIKMREIAEAYLGSTIKNAGWTGPAYFND

SEQ ID NO: 249583 - protein, 151 aa, Zea mays
  unsure (1)..(151): unsure at all Xaa locations
  Clone ID: MRT4577_159203C.1.pep
KCLSRVEGIELIKEIHAGICGSHNXSRPLLGKVFRQEFYWPKVASNAAELVQKCESCKKCARDQKHRSSLTQLIQPTWPLQRWGLDLLGPLPPAQGNLRYVVVAVEYFCKWIEAKPLAAITSVTVQKFFXQNIVCRFGVPKAIIVDNGAQC

SEQ ID NO: 249584 - protein, 59 aa, Zea mays
  Clone ID: MRT4577_159204C.1.pep
PTRPKKKKKIKKKKKKKEKKEKKKKKKKKKKKKNKQYKKKIDNAIQNYNDLQLLNRNQN

SEQ ID NO: 249585 - protein, 56 aa, Zea mays
  unsure (1)..(56): unsure at all Xaa locations
  Clone ID: MRT4577_159205C.1.pep
FFYVKDPEEIISSNVAGFIHVDGVALQRKKVTYIAPCPGAFPTRFLIPSSLXWYEA

SEQ ID NO: 249586 - protein, 76 aa, Zea mays
  Clone ID: MRT4577_159206C.1.pep
SSRAGALFFFVMLFSQRATSDATFEKMIWFGHKGHQRFFIGYNKYRCCAKLNLSANKLKRRRMGQTDRVAGRVGGT

SEQ ID NO: 249587 - protein, 54 aa, Zea mays
  Clone ID: MRT4577_159207C.1.pep
WFFYPILFLIVPPSINKFVYSPIGGFKNSINSSFNHLFFPCIYLFKFFSPLYNP

SEQ ID NO: 249588 - protein, 145 aa, Zea mays
  unsure (1)..(145): unsure at all Xaa locations
  Clone ID: MRT4577_159208C.1.pep
NKKILKKKFLKKKKKKKKKVFYPLPVTPLGGIFAVFLPPAGRSGVLLGAPIPPFGGGFTIPGPAFYTLGFGKTLGFPLLCPWGGFPLSPGGXFXXGPHPXPFPXXXXAXWGXGPPLVGRFLPPGGGGSPPGARSLCGPPGAPPLG

SEQ ID NO: 249589 - protein, 65 aa, Zea mays
  Clone ID: MRT4577_159209C.1.pep
LPIQELVRCSSAIVALGACEHCALITAYIALAISTRSATTCKIVLALVATATVVRVECKVLHWSD

SEQ ID NO: 249590 - protein, 55 aa, Zea mays
  Clone ID: MRT4577_15920C.1.pep
VRLYRTALALALDRTSQTQRYGKHVSAWVRSRGGGINHMTVLVLWQDSDVSEYLK

SEQ ID NO: 249591 - protein, 45 aa, Zea mays
  Clone ID: MRT4577_159210C.1.pep
AQRLINFRIAVSYLFIFMHICLATIPVITSYSIVLALIIYYLLLQ

SEQ ID NO: 249592 - protein, 68 aa, Zea mays
  Clone ID: MRT4577_159211C.1.pep
QRILASSCQSPGNASTPLNQSMRNIFKTPAMMFVFVFALRQQIKRGRLSLALPLSIFLSPSFDGKNIS

SEQ ID NO: 249593 - protein, 74 aa, Zea mays
  Clone ID: MRT4577_159212C.1.pep
FLVYATSGQTDISAYICVYGFFLSVAVNGYVWIQVLDLSRGYGCPEPLSVDGLPVVIPSREPYTLIHIVVKAVR

SEQ ID NO: 249594 - protein, 92 aa, Zea mays
  Clone ID: MRT4577_159213C.1.pep
MTKRTKKAGIVGKYGTRYGASLRKQIKKMEVSQHSKYFCEFCGKFAVKRKAVGIWGCKDCGKVKAGGAYTMNTASAVTVRSTIRRLREQTEA

SEQ ID NO: 249595 - protein, 474 aa, Zea mays
  unsure (1)..(474): unsure at all Xaa locations
  Clone ID: MRT4577_159214C.1.pep
MRLNVGLLVPLMAQYSAPTWATLVAGFFMLLALSLSTYLIFEHLSAYNNPEEQKFVLGVILMVPCYAIESCISLINPSTSVYCGILRDGYEAFAMYCFGRYITACLGGEDKTIAFLKREGGSGSGQSLLHHTSEKGIIHHHFPVNYVLKPWRLGTRFYLIIKFGIFQYVIIKTLTATLSLLLESFGVYCDGEFNLRCGYPYFAAVLNFSQYWALYCLVAWYTATKDELAPIKPLAKFLSFKSIVFLTWWQGVVIAIMYALGLLRSPLAQSLELKSSIQDFIICIEXMGIASVVHLYVFPAKPYALLTNQSHGNISVLGDYVSSEPVDPFEIKESNRPTKMKLPQLEPDERSVTNIKESVRDFVVGSGEYVIKDFKFTVNQAVRPVEKRIDKLMKKNDKSKKSQDDNWVSAATPERPVRGIDDPLLSGSASDSGVTKGRKYRRVVSSVTAVDSWGGGDQASDGYEIRGRRWAVKS

SEQ ID NO: 249596 - protein, 213 aa, Zea mays
  Clone ID: MRT4577_159215C.1.pep
PNRACSLTVLAMVAASKLLPAAPVAVPSARHDVSSSRVESFSCSPAMPGVLPALLAIRPCVMRGATEENLQPKPWSMSVWIWERRLKLACVSRLVLSEKPEHETVIDPAVVHLANIFYPPWFSSPWVWSSSLLCLPQAAVWMASLTSSFLQISNLRNSDPHQPCDVSSDFYAQSRRLSRPYSPSTRSDIASTRNNHHSVGIQLRRFFFGAQIA

SEQ ID NO: 249597 - protein, 150 aa, Zea mays
  Clone ID: MRT4577_159216C.1.pep
PLITIHRSRRKGAEEGFPCTLVPTSHTSYETPRLLPSWYVLVAVLKTTPQRYTRRRIVLYLAKPSYLPRSLHTCLLPGMGTRACRRHQAESAAGRSRSRPRPPCSAETIRGLPLLFWRRRRRPPLPPLCCYLHKVSLSVSSLLPPLRPRA

SEQ ID NO: 249598 - protein, 50 aa, Zea mays
  Clone ID: MRT4577_159217C.1.pep
CVCAPPLSFFSRWCLRIWPPSQIDLKKRKREPRAPLKRGVWFGTGFYQKA

SEQ ID NO: 249599 - protein, 320 aa, Zea mays
  unsure (1)..(320): unsure at all Xaa locations
  Clone ID: MRT4577_159218C.1.pep
MGGGGEGRDSGGGGGAASFREAARDFSNVASFSELPFLQRSAAPPRGXAPTTPASASSXIDVPHSPPERNSNKDATAATTTTAAASATQSSGGGGATTDSSSSSSRKFECHYCCRNFPTSQALGGHQNAHKRERQHAKRVQMQSAMAAAAAAAAAAGGAHHHHLLGYPQHRFGVAGPTVATLYPSWPTMRPPAPAGAGAGAVAIGGPQFYSGIGSIAQPINGSPLLTAAGLWRGPPPPAAGHGNASLPSSPGGERRRPVALSSSSPVFRGDDPRASTSLLAAASSPSSSSSLLLSPQGQFVCEQPAATTAAEGVSLDLHL

SEQ ID NO: 249600 - protein, 195 aa, Zea mays
  Clone ID: MRT4577_159219C.1.pep
PPKDMSFRFFPALRKALALGYVEAITCFPNSFVPQGWVLFLQVVFKKISSGDENEFAFLFKVLGPIVEGGQEKVMFHIPEIGSPLARPVKGVLPPVPKPWPPGGSKTGERPRAEGSRTGGSPRAALRPSPGWLKPFAKARFFPFVGPGNIEVGFQFGGPQKGGLIHIKVGFPFKKKKKKKKKKKKKKKKKKTRGG

SEQ ID NO: 249601 - protein, 577 aa, Zea mays
  Clone ID: MRT4577_15921C.1.pep
MATASLALSLRLAPYSHPLSLRRRGAAGVTCRATTATFHQLDAVAVREEESRFRTAAAEGRNLLPLTRCIFSDHLTPVLAYRCLVKEDEREAPSFLFESVEQGSEGTNVGRYSVVGAQPSMEVVAKANHVTVMDHEMKSRREHFVPDPMRIPRTIMEQWNPQIADSLPDAFCGGWVGFFSYDTVRYVETKKLPFSKAPHDDRNLPDIHLGLYSDVIVFDHVEKKTHVIHWVRTDCYRSVDEAYEDGRNRLEALLSRLHCLNVPTLSSGSIKLNVENFGPVMQKSTMSSEEYKNIVVQAKEHILAGDIFQVVLSQRFERRTFADPFEIYRALRIVNPSPYMAYLQARGCILVASSPEILTRVQKRTIINRPLAGTIRRGKTKAEDKTLEQLLLSDEKQCAEHIMLVDLGRNDVGKVSKPGSVKVEKLMNIERYSHVMHISSTVTGELRDDLTCWDALRAALPVGTVSGAPKVRAMELIDQLEVSMRGPYSGGFGGISFRGDMDIALALRTIVFPTASRFDTMYSYTDSKSRQEWVAHLQAGAGIVADSKPDDEHQECINKAAGVARAIDLAESTFLEE

SEQ ID NO: 249602 - protein, 54 aa, Zea mays
  Clone ID: MRT4577_159220C.1.pep
GKILNSKIIMEQYTLTSRCFSFINFYSENSILNSIDNINCNEINFLIIRFIYTQ

SEQ ID NO: 249603 - protein, 101 aa, Zea mays
  Clone ID: MRT4577_159221C.1.pep
PGTQRVRKKKKKKKKNKKKKKKKKKKKKKKKKKKKEKKKKKKKKKERGGAAKGPQANAPELEKAGRSEGEGERKKTGGRQKREGGEKPGGRQKETMGRGAR

SEQ ID NO: 249604 - protein, 125 aa, Zea mays
  unsure (1)..(125): unsure at all Xaa locations
  Clone ID: MRT4577_159222C.1.pep
MGKKFPSIKLKTGPFAHLTTTTFKKKIPPQTCLNKLFLGKPPFFFPRNSPKPNIFLLKVFRQKLKKCLHLKKNVNKTWVPKKKKKKKPKKKKKKKKKKKKKKKKKKIKKKKKKKKKXSTLRCYHC

SEQ ID NO: 249605 - protein, 236 aa, Zea mays
  unsure (1)..(236): unsure at all Xaa locations
  Clone ID: MRT4577_159223C.1.pep
RLPTRSPTASGTRDPPARLPARAPPSRSPEPWTASXGPAGPRLRRPAAXRPPPWPAPPAPPDPAPAPTHGPATADPPRPPPRPRPTTTSSAPRSSTRSRAPPPPQPPIPPRLRLPPRTTTTSSTXPGGCAPPAPRPPPPPPRRGTTTACSALRRPRRTTTCSPPAPAPRRRLPLTTTTSSAGSGARCRRHRPRRGGGRWLSTTTTCSGRSGGARQRERGSRLLRRRTEWGARGSMI

SEQ ID NO: 249606 - protein, 99 aa, Zea mays
  Clone ID: MRT4577_159224C.1.pep
LTFNITMSHAGTPRILCIQHLINHPGIIKAYGGNMYRLQRSIRSIFIAEAKCSDDFVFSIVFSVIGSACTYIDMSYGMTSAIFVIFMTSFLIDLCDMND

SEQ ID NO: 249607 - protein, 73 aa, Zea mays
  Clone ID: MRT4577_159225C.1.pep
FLFQCRECYAYPSHPAVTLLTEVVLHRSERLDSTQAGLWLCSRGLALARVIFEPVIEQVTKLLSLCVLILEPN

SEQ ID NO: 249608 - protein, 80 aa, Zea mays
  unsure (1)..(80): unsure at all Xaa locations
  Clone ID: MRT4577_159226C.1.pep
GRVGKNPVQVDDNLHLPRKNEFIAGDFTLRNANSXLDPXSDDNPRCIVDEPFIKLWYKMDMTFNVPRANTYFLIYVKDGY

SEQ ID NO: 249609 - protein, 36 aa, Zea mays
  Clone ID: MRT4577_159227C.1.pep
NVKQLVNRKEQKLEVINFGQLVRGHIHKLDNIIIIM

SEQ ID NO: 249610 - protein, 168 aa, Zea mays
  Clone ID: MRT4577_159228C.1.pep
NYIILVQRRCCSDQRERPFLPTGGHLTPSCTPEHIRPDSVTHRAACNNQQTPLGKKEHTNPQKAAVVFQPSGTPMGPFGLQICPQIQFISWFAFSPDLQYTHPTVLPQDRLACMPSASDTRLLLSSISIPHFKDAARLPACLCAGGLTVTGHRQHCINLRACVHGPIY

SEQ ID NO: 249611 - protein, 79 aa, Zea mays
  Clone ID: MRT4577_159229C.1.pep
GGNVLCVFGPPLGPPGFSLYCSGSWMCGGLLRNKISHREAFLALFAPRFGRGFEPPSAGPRGSGFPPLRGSPRGPGVKR

SEQ ID NO: 249612 - protein, 154 aa, Zea mays
  Clone ID: MRT4577_15922C.1.pep
LGTSRAGREEYFGCRQGWQKEQGKLCKSSRLPNSDPCGPTSQARSPTCSGMVAVDAAASKVWIEKESGESTTGGEPTRERKVPRRIVIVHLQVAMQMDILIIVQTAETADKPMPLSVFSIAMLLHGQAGQPSDTCGVVEAGPGDNARTRQSFYC

SEQ ID NO: 249613 - protein, 114 aa, Zea mays
  Clone ID: MRT4577_159230C.1.pep
QCQPPQLSLAALTPLQSSTYGVGPQQKSCSVSWVPTNVSGRSKAALPSHDPEMEVDPWNLLEDGTSCPSTASGSHGASGVTGDHANLKACSWLKGAVRVRRTELTYIGSLDDDT

SEQ ID NO: 249614 - protein, 111 aa, Zea mays
  Clone ID: MRT4577_159231C.1.pep
TTAGRVGASAGRDKQPQPAPCSRLPPAGRDTAQAGRGRRTAVCKSSRAGRLAGRAAERRSGTTVCRARAAEQSVGDEEQPSRPSAKRSAPMQMREEPAAVPVQPSRQASRV

SEQ ID NO: 249615 - protein, 81 aa, Zea mays
  unsure (1)..(81): unsure at all Xaa locations
  Clone ID: MRT4577_159232C.1.pep
TVGAFRGAAARGLGLSSPCSAGGRRLIRFCASCTCSAIGSAVRPVLXDVGVCVCAVRLPVCSALSPAFLASLSAKATAAAQ

SEQ ID NO: 249616 - protein, 110 aa, Zea mays
  Clone ID: MRT4577_159233C.1.pep
MAQTMASMTGLSQGVRLPGPAGRRASRFTVRASSAEAEAAGRRAVLGLMASGVVGSAFAQVVRAGTVAAIKVGPPPPVSGGLPGTDNSDEARDFYLPLKNRFYLHSLPPA

SEQ ID NO: 249617 - protein, 34 aa, Zea mays
  Clone ID: MRT4577_159234C.1.pep
PLRFYSNGHTHMEAGNSKNRNFTLTSTTCKPYLA

SEQ ID NO: 249618 - protein, 148 aa, Zea mays
  unsure (1)..(148): unsure at all Xaa locations
  Clone ID: MRT4577_159235C.1.pep
MGSLQPNNAVAVAVAAAVVLAALATGGSCXRRPPQXVPPGPNITADYDGKWLAAKATWYGSPVGAGPDDDNNGGTCGFTGVNLPPYSGMAACGNSPIYKDGKGCGSCYEIRCTAPQECSDEPVVVLITDANDYRLGPYHLDLNGSGVG

SEQ ID NO: 249619 - protein, 50 aa, Zea mays
  Clone ID: MRT4577_159236C.1.pep
YQHKVLAGWARHREGRKKSLSKGHQVIVSQNFLRKIPCCIRQKISSIKHN

SEQ ID NO: 249620 - protein, 202 aa, Zea mays
  unsure (1)..(202): unsure at all Xaa locations
  Clone ID: MRT4577_159237C.1.pep
FPIHSAAPADTFSLHRHRSPRFATPCASTTAVAAAATTPSATGAAPASPTTRARPSSASASASSWSPPSSSSSCSSPPTGSSATWRSPSRPPXTRFALVTTPXPPRSPTTSPSRSPSXPELGHXASRTPSRWRPTTASTASGSTASNSPTRGTSTPRARPGCTTSTPARKARTWRWGTPASPNSGRRTQRGCSRWRWRSPAR

SEQ ID NO: 249621 - protein, 111 aa, Zea mays
  unsure (1)..(111): unsure at all Xaa locations
  Clone ID: MRT4577_159238C.1.pep
QTQALLMTRVLSSENYPLCLQLLAKTIPLTLHRELTKIKINDQTETLRTLHSXXXXXXXXXXXXXXXXXXXXXXXXXXXXXXXXXXXXXXXXXXXXXXXXXXXGVNTKINN

SEQ ID NO: 249622 - protein, 180 aa, Zea mays
  unsure (1)..(180): unsure at all Xaa locations
  Clone ID: MRT4577_159239C.1.pep
IPIIGDLMLIIYNAHLKVNVLLERKTVLGLDVTSIDASLLDGIXGEVLSRSVTCHVISSTVANPNNVDRGKLHAQXSLEQWMLNPPPLLSREXRSRVTFDXWESGRMQDIPGSPSSVKNNHVSEIFLESITLNDVPGHVTIVFVDNSXIYPQSKYRYNRGFFSNDTYLLNHMPXMLKFYR

SEQ ID NO: 249623 - protein, 137 aa, Zea mays
  unsure (1)..(137): unsure at all Xaa locations
  Clone ID: MRT4577_15923C.1.pep
CRRGTVSFLVCARAAVREEESRFRTAAAEGRNLLPLTRCIFSDHLTPVLAYRCLVKEDEREAPSFLFESVEQGSEGTNGXRYSVVGAQPAMEVVAKANHVTVMDHEMKSRREHFVPDPXRIPRQXMEQWNPQMLTAS

SEQ ID NO: 249624 - protein, 92 aa, Zea mays
  Clone ID: MRT4577_159240C.1.pep
HVRAQPACMSSLAYCFSDRSSPSYVHPSMEIARCSSGGEERSRMAYVHARALLLQRGPSHSYIYTYISTSRHLISYSLVVGNSERCGSSGGR

SEQ ID NO: 249625 - protein, 63 aa, Zea mays
  Clone ID: MRT4577_159241C.1.pep
GNGKAATGSSWALCHGDAKDNTSTQRRMSWCLALSSVPLAVPVSFHLWSTVSSQIRSLQKSLL

SEQ ID NO: 249626 - protein, 89 aa, Zea mays
  Clone ID: MRT4577_159242C.1.pep
NTFGRSIRRWSTWCLCPVGGFVNALIPWSNWRVSPQLVAIEGTFTGPVCQIRFAHVMLERCEGHGAIYCRMGWACAVYRNSVRCNRGYS

SEQ ID NO: 249627 - protein, 48 aa, Zea mays
  Clone ID: MRT4577_159243C.1.pep
TNVGQIYNIASNFDRSKLFRWNFSQLPAMNKSSYLVPNKQKNTASRSN

SEQ ID NO: 249628 - protein, 74 aa, Zea mays
  Clone ID: MRT4577_159244C.1.pep
SGRAPSSELVDHQCTVTVGVWLSCCVAATVVAHSVSSSAVAAAVPGSAGDLLLPNPHLGQLAGHHAGRREGPGP

SEQ ID NO: 249629 - protein, 100 aa, Zea mays
  unsure (1)..(100): unsure at all Xaa locations
  Clone ID: MRT4577_159245C.1.pep
MRRFACRVCRSIGIEYPMAPNAEKKPAEKNXLDENAKTKYRADKRVPGXEGCEMNWKNWAMKSVQTYNTDIYKVLKHVHPGIGISIKAVAINNWFSNDGL

SEQ ID NO: 249630 - protein, 34 aa, Zea mays
  unsure (1)..(34): unsure at all Xaa locations
  Clone ID: MRT4577_159246C.1.pep
NNAQPFIRMRXFFDYSGXIYTXFSFNGKICLKVS

SEQ ID NO: 249631 - protein, 70 aa, Zea mays
  Clone ID: MRT4577_159247C.1.pep
ISPLLIFQCSFWFAQRWGCKKVNTIQREQIEAPVHLFIGPGPTPVENTFMPLTLFFEHNWNIWGLMGFCP

SEQ ID NO: 249632 - protein, 72 aa, Zea mays
  Clone ID: MRT4577_159248C.1.pep
RSGRTLSLMVPVRPGAGGPGPYRERRGAQILSMSQGGLNHPSTPINTQAYDHDLVAKPVYYMEHYSKQHHSI

SEQ ID NO: 249633 - protein, 78 aa, Zea mays
  unsure (1)..(78): unsure at all Xaa locations
  Clone ID: MRT4577_159249C.1.pep
MASKGVLFLALNLLFFTVANACGSCPTPTSPVVPPPPXVCLCTVIKGNVLGVVFDVPIKFNALVNYCGKCVPKGYMCA

SEQ ID NO: 249634 - protein, 294 aa, Zea mays
  Clone ID: MRT4577_15924C.1.pep
GTLEAGRYKNLVVQAKEHILAGDIFQVVLSQRFERRTFADPFEIYRALRIVNPSPYMAYLQARGCILVASSPEILTRVQKRTIINRPLAGTIRRGKTKAEDKTLEQLLLSDEKQCAEHIMLVDLGRNDVGKVSKPGSVKVEKLMNIERYSHVMHISSTVTGELRDDLTCWDALRAALPVGTVSGAPKVRAMELIDQLEVSMRGPYSGGFGGISFRGDMDIALALRTIVFPTASRFDTMYSYTDSKSRQEWVAHLQAGAGIVADSKPDDEHQECINKAAGVARAIDLAESTFLED

SEQ ID NO: 249635 - protein, 133 aa, Zea mays
  Clone ID: MRT4577_159250C.1.pep
MASKGVLFLALNLLFFTVANACGSCPTPTPPVEPPPPPPATPPPSSSSGKCPLNALKFGVCVNALGLVKGEAGKVPAEPCCNLIKGLADFEAAVCLCTAIKGNVLGVVFDVPIKFNALVNYCGKCVPKGYMCA

SEQ ID NO: 249636 - protein, 42 aa, Zea mays
  Clone ID: MRT4577_159251C.1.pep
SSPYLFFYTYYLEFIHPFVMLFSFFVLYISFIYLFYILTRVT

SEQ ID NO: 249637 - protein, 65 aa, Zea mays
  unsure (1)..(65): unsure at all Xaa locations
  Clone ID: MRT4577_159252C.1.pep
LFRSPXCSGRASPXRVLAPPLGXLVLGSFRPPGSFPGWPXLLAAGRFAWLLWRGFSLSGGWGAAG

SEQ ID NO: 249638 - protein, 119 aa, Zea mays
  Clone ID: MRT4577_159253C.1.pep
PQGMPDSSSEMTRQSSMSVVACRRRSGATRGRHPIRVRVSKRFLMYRIGLIDCRRTAIICDVTRHHPPCGAAQQVASATVAQVACQCPTSSTRRCRRLRCTYVLFGGFGFGRDTSVMGK

SEQ ID NO: 249639 - protein, 151 aa, Zea mays
  Clone ID: MRT4577_159254C.1.pep
MSKAGGGPGSAPGPTAAAAAAAVQKQKSLLQKADADVSSLVDNFSSLINIARVNDPPVRNSQEAFQMEMRAARMVHSADSLLKLVSELKRTAIFSGLASLNENVDRRIEVLGQQAEGTERMLERIGQEAAASLKELEAHYYSSVVRSPSYD

SEQ ID NO: 249640 - protein, 591 aa, Zea mays
  unsure (1)..(591): unsure at all Xaa locations
  Clone ID: MRT4577_159257C.1.pep
MAFFRGLTAVSRLRSRMAQEATTLGGVRWLQMHSASELDLKSQLRELIPEQQDRLKKLKSEHGKVQLGNITVDMVLGGMRGIIGMLWETSLVDPEEGIRFRGLSIPECRKVLPTAVEGGEPLPEGLLWLLLTGKVPTKDQVDALSKELLARSTVPAHVYKVIDALPVTAHPMTQFTAGIMALQVESEFQKAYGNGLPKSKLWEPTYEDCLNLIARLPPVASYVYRRIFKDGKSIEADNSLDYAANLSHMLGFDDPRMLELMRLHXDHEGGNISSHTGHLVGSALSDPYLSFASSVNGLAGPLHGLANQEALLWLKSIIQETGSDVTTDQLKDYVWKTLKSGKVVHGFGHGVLRRTDPRYLCQREFALKYLPEDPLFQLVXRSSLSNCICFLELNDFRYDTPYVTXSKLYEVVPPILTELGKVXGTTLITSFHSFGFSLDLSYSPQSMCIEVDWSVIXLNYTPNSPQYMWIELNMRVSKXLVYQHHSLPMFSQVKNPWPNVDAHSGLLLNHFGLSETRYHTVLFGVSRSMGVGSQXAFYLLFAQFLSNSAGXLFGYLIMMQLIWDRALGLPLERPKSVTMEWLENYCKNKAA

SEQ ID NO: 249641 - protein, 199 aa, Zea mays
  unsure (1)..(199): unsure at all Xaa locations
  Clone ID: MRT4577_159258C.1.pep
KKKKKKKKIKKKKKKKKKKKKKKKKKKKKKKKKKKNSPPRGFQTFSFFSPKGQKNPFDPLGGWFLALLLWVFVGGAPPPIKRGGGGCHPPPRVFLPPRGILPPRVPRPPRGIFPRGVHLGPRVHLPPRVLGPPRFFLRPPPCHYLIKPPGLQLFPQTXPLPGQKGDXSPGHLKETWGVGSPPILGQGVKFLGLQGTPRG

SEQ ID NO: 249642 - protein, 53 aa, Zea mays
  Clone ID: MRT4577_159259C.1.pep
FYCLKNVCVFHLSPLLVLPVLFFYHARSFSLLLRSKHSASGRTIWAHIRHQTV

SEQ ID NO: 249643 - protein, 70 aa, Zea mays
  Clone ID: MRT4577_15925C.1.pep
FAAGTPSSWGVDFHVDYIRQCVPRPSLNWCCAILFQGNHVRWILARARDILKAPASCGLLKSEISDVFLA

SEQ ID NO: 249644 - protein, 131 aa, Zea mays
  Clone ID: MRT4577_159260C.1.pep
AACAGRRPPSRCPGAIFVGGLARPQLWSIARLALGLQDRSPLPPGSRTESVSRTAAGPRSSRARRQDPSRLMHGAAGRVDGGQMLGGAQSLWLGERRVSGVVVFRPWMPGRRPWWWLRGAQGQSPWLSAAR

SEQ ID NO: 249645 - protein, 45 aa, Zea mays
  Clone ID: MRT4577_159261C.1.pep
MASYIALLLPLLLLALPVATRLAYAICSFEKIPAMRAYTSYRGPA

SEQ ID NO: 249646 - protein, 69 aa, Zea mays
  Clone ID: MRT4577_159262C.1.pep
SSPFPASNKRRGISVSSRVPHEPPRWNPRKIPEKTRALSQRAPGFLIWPPKPVPPNVQNPGPSWPNNQA

SEQ ID NO: 249647 - protein, 62 aa, Zea mays
  Clone ID: MRT4577_159263C.1.pep
RPSLVFSFLVETGYGIFLICIMHLVEFETPICLKNMKTLQIVTNSYIFRTQANCYQLDYGLV

SEQ ID NO: 249648 - protein, 50 aa, Zea mays
  Clone ID: MRT4577_159264C.1.pep
RVRARDDPVRQSPRLLCSENHVPVVTMLTILYPPYSEHSRETLAYMKLDP

SEQ ID NO: 249649 - protein, 65 aa, Zea mays
  Clone ID: MRT4577_159265C.1.pep
KMWGWKQTLRPILFTCSGGVLNRTIRDCVVFYSPSKINLQGIVCSLIPFNSHSTKQALRDLHFLF

SEQ ID NO: 249650 - protein, 81 aa, Zea mays
  unsure (1)..(81): unsure at all Xaa locations
  Clone ID: MRT4577_159266C.1.pep
RIQVYISKFNSNILKYNLQPSFLSTILTPSTKNKXXIXNILNNLSNNTHNLYXKSKNNINITNLKNXTITHPYISFTINFI

SEQ ID NO: 249651 - protein, 82 aa, Zea mays
  Clone ID: MRT4577_159267C.1.pep
PVSFGLTCVLSSFGVAAAFSFYPQLFLMVKVTALTVMSAKSSSCISRRPEDEEFGVHCWCFAFYLCESKQYSSYRVRRITSR

SEQ ID NO: 249652 - protein, 163 aa, Zea mays
  unsure (1)..(163): unsure at all Xaa locations
  Clone ID: MRT4577_159268C.1.pep
GLPGPPSFPGPQYPFVSPGRGGLHGVRLPGPPGPPGXPWPPPSLSSSPPPSSPPSXAPGPPGTGPLPASPGTKKXPFLAPGPPQPRRPPPPPPSQLRVPPHPPGXAGLLGPDPPPPPGRLGRPRPPGPXPAGPPPXPGPARARGDPGPGPAGPPPXNPAPEHK

SEQ ID NO: 249653 - protein, 62 aa, Zea mays
  Clone ID: MRT4577_159269C.1.pep
KERKKVDKDDVEHFVGMTRREGIYKSKRPKDYKHISHKLFEKRRKVKLFRISGNKKNNYFTH

SEQ ID NO: 249654 - protein, 103 aa, Zea mays
  unsure (1)..(103): unsure at all Xaa locations
  Clone ID: MRT4577_15926C.1.pep
RVGATAVPRAGVRQHGRGCLSVRNRLLDSLLSTTADAISKFDSIADRISIFCSSDEAAEASISTLKNLTCDWXLAAMLYHSLSXHYSAQSLRAINEDVSTLVF

SEQ ID NO: 249655 - protein, 80 aa, Zea mays
  Clone ID: MRT4577_159270C.1.pep
VQRRSQPSVILSNESCQPVTVTSSETNKFRLRSSSSVLSHELAPAFPIHILSTANRTEPVHRCLFALVSLTEDPARVGVA

SEQ ID NO: 249656 - protein, 34 aa, Zea mays
  Clone ID: MRT4577_159271C.1.pep
WSKSEISCHKKPCKTLSSLTKQENARIIQKDTSY

SEQ ID NO: 249657 - protein, 149 aa, Zea mays
  Clone ID: MRT4577_159272C.1.pep
METPQQQFAAAAAAAAHGQDDGGSPPMSPASAAAAALANARWNPTKEQVAVLEGLYEHGLRTPSAEQIQQITGRLREHGAIEGKNVFYWFQNHKARQRQRQKQDSFAYFSRLLRRPPPLPVLSMPPRATVPLTAASRAPPAMPMPMPST

SEQ ID NO: 249658 - protein, 59 aa, Zea mays
  Clone ID: MRT4577_159273C.1.pep
VLCILTLAGFVSYKKNLVLEDAFNQNMLGSFLLANILTGLVNLSVNTLSASSLTAFMIL

SEQ ID NO: 249659 - protein, 492 aa, Zea mays
  Clone ID: MRT4577_159274C.1.pep
MAAEGEAAALEFTPTWIVAAVCSLIVLLSLVAERCLHYLGKTLKRKNQKPLFEALLKVKEELMLLGFISLLLTVFQGMIRRTCIPERWTFHMLPCEKPDEKAGEAATMEHFVGTLGRIGRRLLQEGTAGAEQCQKKGKVPLLSLEAIHQLHIFIFVLAITHVIFSVTTMLLGGAQIHQWKQWENGIKKDAPGNGPKVTNVHHHEFIKKRFKGIGKDSIILSWLHSFGKQFYRSVSKSDYTTMRLGFIMTHCPGNPKFDFHRYMVRVLEADFKKVVGISWYLWVFVVIFLLLNVNGWHTYFWIAFLPLILLLAIGTKLEHVIAQLAHDVAEKHTAVEGDVIVKPSDEHFWFGKPRVILYLIHFILFQNAFEIAFFFWILSTYGFDSCIMGQVRFIVPRLVIGVVIQLLCSYSTLPLYAIVTQMGSCYKKEIFNEHVQQGVLGWAQKVKMKKGLKGAASASKDESITNADSAGPSVKIEMAKAGEDVEIVGNTG

SEQ ID NO: 249660 - protein, 157 aa, Zea mays
  Clone ID: MRT4577_159275C.1.pep
RAGPISSIGGDTRPCRPLSLVQPWSGLQFVPRDYIVPVPMTAPSHVVDQRQPGSSLTNALGAPGRIPSPMGRISSNCLFARLGQTLYENRIIAESLGNTDYFACEYQRSLLREYRMHSQLVPEATSLSYSAFLEARQWESVQRQERLRRRIEYGRSQ

SEQ ID NO: 249661 - protein, 75 aa, Zea mays
  Clone ID: MRT4577_159276C.1.pep
HASEKKKKKKIKKKKKKKQKGGKNKGWRARPYPSHRSFFLAPISFLLPVVFQRPDWYIPGVAQLNPLAHIPFSPA

SEQ ID NO: 249662 - protein, 260 aa, Zea mays
  unsure (1)..(260): unsure at all Xaa locations
  Clone ID: MRT4577_159277C.1.pep
MPAPAAACSLLLLLLLVAPVAAGDCVIHGVRWSAWANRGHLTEGLIIPAQTFSAFTFDLSVGLQTLSVIMDISSELVWVQCGPGLRRKPTFLPGLRPSFAPIAPCPSSVRNNSDSFGQIHYADRTCHPGETGCAARCRYVEHIYGAGNTSGYLATETFGLGNRVFTGVVFGCSGNVTLRDGLAGVSGFVGFSRGPLSLVSQRQISRFSYFFVLPDDPDNGKAFVSLSXGQTAQNTPTLRXHTPLLAAXQQNPYLYYVNLI

SEQ ID NO: 249663 - protein, 57 aa, Zea mays
  Clone ID: MRT4577_159278C.1.pep
AEQAVREILTLPSKHNHAIIILLIPADNLLHNITYCRDFTRRMRPPVNDVRVLPRLP

SEQ ID NO: 249664 - protein, 32 aa, Zea mays
  Clone ID: MRT4577_159279C.1.pep
KKNNNINYKLIIIKFGLSLLKNPNLLTRASNY

SEQ ID NO: 249665 - protein, 99 aa, Zea mays
  Clone ID: MRT4577_15927C.1.pep
GGTTPTKSPPFCTWPTKGTPCIGSVVKGPFYTKKYYTLKTTGTGSLAVPGYTQLTGHGTGACKLESMTRNGGQGNTPVPFYSSGQGFWREEPFFFFGAQ

SEQ ID NO: 249666 - protein, 133 aa, Zea mays
  Clone ID: MRT4577_159280C.1.pep
SSLTAAALPLPFWTVFLTSLSTISTVILPKCSWGSRLPPTPGGQGPGPAAAKAYEGGAPPTLQGHHLWALDHWRDDHRNDCVFSSQSPSPRTCARETSSHGHTPHPSTQWPKPNSVFSEKTPPENSHIQLFLR

SEQ ID NO: 249667 - protein, 86 aa, Zea mays
  Clone ID: MRT4577_159281C.1.pep
TKPPYFVTGKTANRGVSFIRGSKKKGGSGTPKKKAVPLAPLKKRPRGTPQSENRPGEIPPQEIFPILHPQPLETRTPGFALQRPGP

SEQ ID NO: 249668 - protein, 114 aa, Zea mays
  Clone ID: MRT4577_159282C.1.pep
DVAWVESSSDNVHVYDFHVVYSFSYKVPVLYFRGYHTSGQLLTLDEVKEGLPSHSQKVLSESKWTFITQEEHPHLSYLCFGLYPCATSGWMKLLLEETEATDKEHSVQYLPAWL

SEQ ID NO: 249669 - protein, 38 aa, Zea mays
  Clone ID: MRT4577_159283C.1.pep
KPKITRLHPFLISHPSTTYGWGDFSPCPLFKRPEVPRT

SEQ ID NO: 249670 - protein, 75 aa, Zea mays
  Clone ID: MRT4577_159284C.1.pep
CVCRSRVVFLLFPCPVLGFFVGVLFFPAALCWPSCFSGCLCVLWRSPCLVSAAVVSLPLVLCAAPLPCALVWTVE

SEQ ID NO: 249671 - protein, 94 aa, Zea mays
  unsure (1)..(94): unsure at all Xaa locations
  Clone ID: MRT4577_159285C.1.pep
KGPISPGPLGTGCPPKGPPRGRPSVFPRVGPPPGVPKPNPPPXPGVLGICPPPNPXLPPGXPPPGKVPPGPTQPAXGVPPPLGNPYSPPLPPGY

SEQ ID NO: 249672 - protein, 120 aa, Zea mays
  unsure (1)..(120): unsure at all Xaa locations
  Clone ID: MRT4577_159286C.1.pep
ALDTITSKRTRARTTPCGSRRVALVSWVLLGVPARAIQTDTGGGCHCQPLXVASSTHVGASVNLRSPVHFRASVNVGPPVDVGPPVNVPPCADVGSSACDYITLPYXTEPDSESYPCTCK

SEQ ID NO: 249673 - protein, 48 aa, Zea mays
  Clone ID: MRT4577_159287C.1.pep
IRRGILAHPILFDFVAHKVAIKRDLIPYNPLRSRSNRTSPKGCLISRD

SEQ ID NO: 249674 - protein, 113 aa, Zea mays
  Clone ID: MRT4577_159288C.1.pep
SLGAVQRPKEQEDRQRKREEEGKMAEDRKETVQEKDTVTEQHQQQEEKAMLAEKEMAFANQPGPAFASRGLLMNVAIAVVVLLGVTVHLWLSLRNATGGAGEHGHGPRADGGR

SEQ ID NO: 249675 - protein, 91 aa, Zea mays
  Clone ID: MRT4577_159289C.1.pep
TEEIVENSKLAKPLHHFLLACSPYANDNSTRCFTTGPHFILQWANIHKTLGPYFGKLQTDLVTGQTNLGPAKAPHPTKRAMLSWGKKMHHE

SEQ ID NO: 249676 - protein, 111 aa, Zea mays
  Clone ID: MRT4577_159290C.1.pep
PRMRRLTLGPTATGNCTGANLKWTTARGLLIVSDNIDGTISTRKHRGRWHQNCNISSSGDPCSCRIYLYLKLEGAPTVGNGQSPILFTSRHLYRDCYLLQKPEQRHARLAA

SEQ ID NO: 249677 - protein, 253 aa, Zea mays
  unsure (1)..(253): unsure at all Xaa locations
  Clone ID: MRT4577_159291C.1.pep
MGERDALPPLPLALGPPHLIPPAPTRDPRAIAFLPDLVGFHWVAYAAGSFLVVSHLPSPCRDDNNNDSCSPFFRQVIDLRAPVSAVAWCRRGSGEVAAATDNSIHIFQPAPASSPGSFGWLLRWSITETFAIVAVSWTGCGNGIVAVGAGVSMWARLESSWQLAWRSTPQVPQALVSTTCSMQGPVATVAALAPAEGSVPVLVFLXDARRGLEQAELVHPQPVCMIXQWRSCSLYPHDLSEIXREILMTCCFD

SEQ ID NO: 249678 - protein, 226 aa, Zea mays
  unsure (1)..(226): unsure at all Xaa locations
  Clone ID: MRT4577_159292C.1.pep
ERDALPPLPLALGPPHLIPPAPTRDPRAIAFLPDLVGFHWVAYAAGSFLVVSHLPSPCRDDNNNDSCSPFFRQVIGLRAPVSAVAWCRRWSGEVAAATDNSIHIFQPAPASSPGXFSGQLFKFSSSVSLDGCCGSVQCLEIGTCXSFGWLLRWSITETFAIVAVSWTGCGNGIVAVGAGVSMWARLESSWQLAWRSTPXVPQALVSTTCSMQGPVATVAALAPAEG

SEQ ID NO: 249679 - protein, 246 aa, Zea mays
  Clone ID: MRT4577_159293C.1.pep
MADSDASAPPPEVATEMKIPVVDLTDAVQEDAASDPSADAQNAEAAPAGDLQTSSEVKPQETATEAPPQHQEGDATGALQETTRLIDVPNTKVGVLIGKAGETIRNLQMSSGAKIQITKDADVPSDATTRPVELVGTNESIDKAEQLIKSVIAEAEAGGSPALIAKGFGSGQSGSEQFEMLVPDNKVGLIIGKGGETIKNLQTRSGARIQLIPPHPPAGTTLTERTVRVTGNKKQIEAAKELIKQL

SEQ ID NO: 249680 - protein, 62 aa, Zea mays
  Clone ID: MRT4577_159294C.1.pep
IMASLRVCSSRFNIPDTAGFTRAACRHQFVSIPRKLIKDDRRLKRSSTRQYNSGPAHCRRAC

SEQ ID NO: 249681 - protein, 246 aa, Zea mays
  unsure (1)..(246): unsure at all Xaa locations
  Clone ID: MRT4577_159295C.1.pep
MADSDASAPPPEEEAPSEVAEAEGDHKRKLEEVDAGAEANGAGEDAKRPRVEGNGADAVQNSESSEPQEPVAVITEGAADAQNAEAAPAGDLQTSSEVKPQETATEAPPQHQEGDATGALQETTRLIDVPNTKVGVLIGKAGETIRNLQMSSGAKIQITKDADVPSDATTRPVELVGTNESIDKAEQLIKSVIAEAEAGGSPALIAKGFGSGQSGSEQFEMLVPDNKVGLIIGKGSEXIKNPATRS

SEQ ID NO: 249682 - protein, 243 aa, Zea mays
  unsure (1)..(243): unsure at all Xaa locations
  Clone ID: MRT4577_159296C.1.pep
MADSDASAPPPEVATEMKIPVVDLTDAVQEDAASDPAAAAPTQEEAPSEVADAEGDHKRKLEEVDAGAEANGAGEDAKRPRVEGNGADAVQNSESSEKPEEPVAVITEGAADAEVAPTGDLQTSSEVKPQETATQALPQQQEGDATGALQETTRLIDVPNTKVGVLIGKAGETIRNLQMSSGAKIQITRDADVPSDATTRPVELVGTNESIDKAEQLIKSVIAEAXEAGXSPGLIAKGFRVLV

SEQ ID NO: 249683 - protein, 92 aa, Zea mays
  Clone ID: MRT4577_159297C.1.pep
KRPRNRARAPFFPPQKKCPPGKAGAPLTPVCGICQTDGFKTKGTLKVWGKPRETPHLGANFDAFRGERQRGDLFFSPKKKQKHKHKKKKPHS

SEQ ID NO: 249684 - protein, 36 aa, Zea mays
  Clone ID: MRT4577_159298C.1.pep
EELIPFFGHFLVAYHAPELGFQRVKIKQLAFEVLEP

SEQ ID NO: 249685 - protein, 94 aa, Zea mays
  Clone ID: MRT4577_159299C.1.pep
AVSNSQRASSLAPGLLRFWPIGPCSDNVAFVKICSTSSVYLLYGLVLLPCGVSGKMTIPSKSLLSLLASCFALLLCRATYHLPYHASHIAMSRL

SEQ ID NO: 249686 - protein, 160 aa, Zea mays
  unsure (1)..(160): unsure at all Xaa locations
  Clone ID: MRT4577_15929C.1.pep
PASRLSLLLWSSLPPDSDTLDHADSRGKDDVATASVLSDALNAMDNAEKIGKRQVMITPPTKDIIRILTRMHRHRYVGQLXYVDDHRYGNIELQLSGRLNKCVVXRPRFDIGVKDIEXWTARLLPSIHFVYIVLTTSAGIMDHXEARRNSVGGKALGFFY

SEQ ID NO: 249687 - protein, 274 aa, Zea mays
  unsure (1)..(274): unsure at all Xaa locations
  Clone ID: MRT4577_1592C.1.pep
MTCHASLLLPALAAVLLCCPLAQCGQQNYTSMFSFGDSLTDTGNLLVSSPLSNHIVGRYPYGITYFHRPTGRCSDGRLVVDFLAQAFGLPLLQPYLQSRGKDLSRGVNFAVGGATAMDPPFFQEIGASDKLWTNLSLSVQLGWFEQLKPSLCSSPKECKEYFSKSLFLVGEIGGNDYNYAFFKGKTLDDAKTYVPTVAAAVTDATEXGCLRTYNDFAQHHNAVLQRKLRALRAKYXQARIMYADYYGAAMSFARNPKXQFXFXRRGPLRTCFAR

SEQ ID NO: 249688 - protein, 114 aa, Zea mays
  unsure (1)..(114): unsure at all Xaa locations
  Clone ID: MRT4577_159300C.1.pep
VAPEYATSGLLNEKSDVYSFGVVLLEAITGXNLVDWLKMMVANRRSEQVVDPNLERRPSTKELKRALLTALRCIDLNAEKARITVAGVMLLSMKRGHHDLRAEHFRPNERKRAY

SEQ ID NO: 249689 - protein, 329 aa, Zea mays
  unsure (1)..(329): unsure at all Xaa locations
  Clone ID: MRT4577_159301C.1.pep
RFAKDNVIGEGGYGVVYRGXLSNGTPVAVKKILNNLGQAEREFRVEVEAIGHVRHKDLVRLLGYCVEGTQRMLVYEYVNNGNLESWLHGELSQYSSLTWLARMKILLGTAKALAYLHEAIEPKVVHRDIKSSNILIDDEFNAKISDFGLAKMLGAGKSHIATRVMGTFGYVAPEYANSGLLNEKSDVYSFGVVLLEAITGRDPIDYDRPTNEVNLVDWLKMMVANRRSEQVVDPNLERRPSTKELKRALLTALRCIDLNAEKRPSMDQVVRMLDSNELIPQEERRHRPIRIPESSETEPLRGKNNSGRSDAPEHEARPPRPKSRTFSSK

SEQ ID NO: 249690 - protein, 54 aa, Zea mays
  Clone ID: MRT4577_159302C.1.pep
TLQVFQKKQVLFPHMIPLFFLNDRNDVLMVKLRLLANSWRLMFHTEPPSQGVFK

SEQ ID NO: 249691 - protein, 83 aa, Zea mays
  Clone ID: MRT4577_159303C.1.pep
VGRYSSGEALGPPQSSCVQRGEAVANGTHRLPSQKTTRPSATPRVRPGVGPSTRAHASTNGSMCSSGAASADRSMDSRSFRST

SEQ ID NO: 249692 - protein, 98 aa, Zea mays
  Clone ID: MRT4577_159304C.1.pep
MGLVRVPEITLSQGFLKGPPFWGGVFFWWGAGNPPLPRGGGLKFWPALGGFFVPPGGPFFCPQKKKKKKKKKKKKKKKKKKKKKKKKQKKKKKKKKKK

SEQ ID NO: 249693 - protein, 62 aa, Zea mays
  Clone ID: MRT4577_159305C.1.pep
HAVGAVSLPREVEEGEGAGHHAPGDPGAKAEGADEEVCLPHFLIFCIRLDLLLRKLYLIEEL

SEQ ID NO: 249694 - protein, 102 aa, Zea mays
  Clone ID: MRT4577_159306C.1.pep
AVTVVGTGASTRMEGSYSGLTLATRKKDAFRDRSLRCLCLPQVAGSGLPSGPKACSHLLLTLEWGGGGGPAGARGQDSSKRQGPRTEAFPTVGWVVHSSSSR

SEQ ID NO: 249695 - protein, 100 aa, Zea mays
  unsure (1)..(100): unsure at all Xaa locations
  Clone ID: MRT4577_159307C.1.pep
DARYFWTIDNQPNFKKVIAVVNQAEFVPPIPKKGAPSKEXQTATDCKKDASKEATKTKVVDAPTXXEDAPYPMTNNTLDLLPPSQMVLDDCDRLYSHTQT

SEQ ID NO: 249696 - protein, 261 aa, Zea mays
  Clone ID: MRT4577_159308C.1.pep
MSHRKFEHPRHGSLGFLPRKRCSRHRGKVKAFPRDDQSKKCHLTAFLGYKAGMTHIVREVEKPGSKLHKKETCEAVTIVETPPIVIVGLVAYVKTPRGLRTLNSVWAQHLSEDVRRRFYKNWCKSKKKAFTKYALKYDSDAGKKEIQMQLEKMKKYATVVRVIAHTQIRKMKGLKQKKAHLMEIQINGGTIADKVDYGYNFFEKEVPIDAVFQKDEMIDIIGVTKGKGYEGVVTRWGVTRLPRKTHRGLRKVACIGAWHPC

SEQ ID NO: 249697 - protein, 133 aa, Zea mays
  unsure (1)..(133): unsure at all Xaa locations
  Clone ID: MRT4577_159309C.1.pep
PSQEHYIEEXLKLKNLWKGFKKNLXIKHSLILXGKKHIFSGRGAFLAWVIXNKKLSFGPLDHQCLAIQLRVRFXYWHSYFFDRLFQLTKGXGLIKHSKXINLNGGLFSGXFISQLAEGNVPXHEILPVGQRKG

SEQ ID NO: 249698 - protein, 84 aa, Zea mays
  unsure (1)..(84): unsure at all Xaa locations
  Clone ID: MRT4577_15930C.1.pep
DSDLHXIIXSXQPGTDEASQYFFYQLXTWLKHVHSPHILHRDLKPNNLFLNANLNLKNAHFRLTKTTSETDLMTHYMLTPWYPA

SEQ ID NO: 249699 - protein, 70 aa, Zea mays
  Clone ID: MRT4577_159310C.1.pep
KTNEMPLLSRSIGVKFVNQIHYRNKYFTSFPLPKSLILGASTVNMVYFSFSFLLDHACFHSITCPLEQNS

SEQ ID NO: 249700 - protein, 116 aa, Zea mays
  Clone ID: MRT4577_159311C.1.pep
TSEFGKALGGAQYGGISSRSECDSFPELLKDGCHWRFDWFENADNPDFTFEQVQCPKALLDISGCKRDDDSSFPAFKGDTSASKPQASSSAKKTTSAAAAAQPQKTKDSAPVVQKS

SEQ ID NO: 249701 - protein, 43 aa, Zea mays
  unsure (1)..(43): unsure at all Xaa locations
  Clone ID: MRT4577_159312C.1.pep
VNDQSGFIWMSWMVYGXCWLCFRTQHAYWCCKTVPLDLICPII

SEQ ID NO: 249702 - protein, 91 aa, Zea mays
  unsure (1)..(91): unsure at all Xaa locations
  Clone ID: MRT4577_159313C.1.pep
PGPTHSSSDPCPQISPLILIKRPXTGEGGSFSFRGSHLLLILAAAVLLSLLAVASPSSGTSCLPLWAIPYNPFPSCRLYMTSLTCLIFPRL

SEQ ID NO: 249703 - protein, 126 aa, Zea mays
  Clone ID: MRT4577_159314C.1.pep
VLPEQNSRCKASSASSLKLVRQMDTIIRLVVVSWRPCAGAGGSRAGDSKGSFRTMRQCMPARERCAVEQLLHADATPVRCHPRAKTSLSSSRIIIASCKEGNDTVCTCAGIGVVFHCGLGNWCPGR

SEQ ID NO: 249704 - protein, 86 aa, Zea mays
  Clone ID: MRT4577_159315C.1.pep
INIGDFLKFMYICKFGMVFNFRPKKRGQCYSFIQLHKYVTKNNKKFSGKKELAVWRTKKAGAQAFGQPISGRKIATIFATDREEKH

SEQ ID NO: 249705 - protein, 159 aa, Zea mays
  Clone ID: MRT4577_159316C.1.pep
VALSRPCALVGGCLLCICLARAVPRPENWGKRARAERIVASCAGRFRDMDSAARATQKWRAVVAQDQGMGIPPRVRGARPDGQVQARAAAGREAATCGPGVARSVSTPVPGRIFSARAQSPLPPTLDRDRLWTALLLWHMSGQLLGWSLILNDRTLLYK

SEQ ID NO: 249706 - protein, 164 aa, Zea mays
  Clone ID: MRT4577_159317C.1.pep
LLPPDPQVLPCLFPGKCEGPYYRTPFFPGVWRFFFARGPPVFPLGIGAFAPPQLISVCSFFGAPRFSPFWFWFFFFGQFCGDKFFSVGISLLRLILPRLVPCWGPLVRAPWWLAFSLWRAPPGGVNKKKKKKKKKKKKKKKKKKKKKKKKKKKEKKKKKKKKKL

SEQ ID NO: 249707 - protein, 100 aa, Zea mays
  unsure (1)..(100): unsure at all Xaa locations
  Clone ID: MRT4577_159318C.1.pep
ITXNITLSXILISIAFXLPQINLYSXKANPYECGFDXPTSSARLPFXIXFFLVXITFXLXXDLEIALLXPLPXAIQTTNTXTIIATAFIXVXILALGLSY

SEQ ID NO: 249708 - protein, 87 aa, Zea mays
  Clone ID: MRT4577_159319C.1.pep
MASFSSDAATAPSFAAPAPVRAVVRRRSFTVRASLRKATGTIAEPLAASAMLAGDDMAQEVMLGARDRGLVLEPSPHTAKVHLQHHI

SEQ ID NO: 249709 - protein, 211 aa, Zea mays
  Clone ID: MRT4577_15931C.1.pep
PVLVTAYICHYNVHSIDNELEDTTQIKPIVQTSLGLCSSVYIATSFFAYLLFGEATLADVLANFDSDLRIPLSSAFNDIVRVSYVVHIMLVFPIVFFALRLNLDGLLFPTARHISGDNKRFTIITISLIAVIYLAAIFIPSIWDAFQFTGATAAVLIGFIFPAMIILRDPYGVSTKRDKVLAVTMIVLAVVSNCVALYSDAFNIFYRKQEA

SEQ ID NO: 249710 - protein, 138 aa, Zea mays
  Clone ID: MRT4577_159320C.1.pep
KNGFFRAGQKPIFLWEAFLGAPPQMGRAPSPPKKLFFRVAKPQLFFVLPGVVPPPKGPLKGPIFPRAPVFRVGFGIGSQKKGAFPQRWVILKWDPKLPGGNLFREKRGLKKPPQKSLGSFPPFLGFTRGPPIPGFKGF

SEQ ID NO: 249711 - protein, 62 aa, Zea mays
  Clone ID: MRT4577_159321C.1.pep
SKGRLMLRRVANPDTVGKLQLKWEGPFLVVPSSRPGSYRLKDMDDNDIPRSWNADELRRYYV

SEQ ID NO: 249712 - protein, 66 aa, Zea mays
  Clone ID: MRT4577_159322C.1.pep
YIQFTTHLTGGIKTTEVGPINIISHSLISTPWGISLLSTTAIPFFMSHSHASIFTALCFLSILTFW

SEQ ID NO: 249713 - protein, 96 aa, Zea mays
  Clone ID: MRT4577_159323C.1.pep
MDSSVEKQGSVALDPDERAPASGETKACTECHTTKTPLWRGGPCGPMSLCNACGIRYRKKRREAMGLESSSKAATAGGSEHQQQQRKKKATAAARG

SEQ ID NO: 249714 - protein, 65 aa, Zea mays
  Clone ID: MRT4577_159324C.1.pep
MASFAPSGEVSSKHGVVGYGIVGGPNGNAVAPAAKSTVVETTIERVIFDFWFLALLPAAREPLHR

SEQ ID NO: 249715 - protein, 84 aa, Zea mays
  Clone ID: MRT4577_159325C.1.pep
CLLQAVACLIVITWTLPSSRLSCYGQAHTPGLHNGLKVWTKSSVQCSRLAVTYMGGSSPLCIRLSVSLLLPTRRGVGLRAWVDR

SEQ ID NO: 249716 - protein, 328 aa, Zea mays
  unsure (1)..(328): unsure at all Xaa locations
  Clone ID: MRT4577_159326C.1.pep
MVQMSLQRSIAVYPRCSLSDSFHRVGGSRRRWASCRSQSSRFAYNARPSPIVLKTDHAIDPPEPKDLDASSSASRSGPYIGTCHPSGAVGVMGASSSSCLRFLEKFVSWSTGGGEEAPPFIICNDPLVKKELLPSGTQSTSGCSASIALGKLRQKRLFLEQSGACCIVMPCQFLHAWHDEISQGCSVPFIHVGDCVVKELKAANLKPVEYGSXARVGVLFTDNKLATNCYPRQLESQGFEVLCPDKASMERTVLPSVAAFGKGDMEGARNLLRVSLQVLLVRAVNSIILASDDLVGILPDDDPLLKKCIDPLDALVREAIACARAPRP

SEQ ID NO: 249717 - protein, 96 aa, Zea mays
  Clone ID: MRT4577_159327C.1.pep
LDKLQEQLPELLEIIKPKLEMIGFKNFSSISAALEDSQSSFSACVPSLSSKIIQDLSDSCFGFLKSALEVPRLYRRTNKEVPTTASSYVDSALKPL

SEQ ID NO: 249718 - protein, 52 aa, Zea mays
  unsure (1)..(52): unsure at all Xaa locations
  Clone ID: MRT4577_159328C.1.pep
PTLPVTXKFLKSISYSCTSSFKTFFEFFKTPNNHPFIPITTFYYYYPNFIFI

SEQ ID NO: 249719 - protein, 195 aa, Zea mays
  Clone ID: MRT4577_159329C.1.pep
MAAATSSSAVAVSTPQGVAERRGIPAASFVEDVETYLRQAGLEVNSALAFLQERLQQYKMVEMKLLAQQRELQAKIPDIEKCLDIVATLKAKKALGEALIADFELSEGIYSRAKIEDSDSVCLWLGANVMLEYSCDEANELLKSNLENARASLEVLVGDLHFLRDQQTITQVTIARIFNWDVHQRRSKQSVMKET

SEQ ID NO: 249720 - protein, 68 aa, Zea mays
  Clone ID: MRT4577_15932C.1.pep
QALAMTTQANQEVIPRPNQQVATMSSCLRDFTRMNPPTFYGSKVEETYEFIDKVYNILLAMGLSTSEK

SEQ ID NO: 249721 - protein, 91 aa, Zea mays
  unsure (1)..(91): unsure at all Xaa locations
  Clone ID: MRT4577_159330C.1.pep
RRGHQRGACSCPQHGIRNSVPITGVISLRTXPSSALDGLSGTVLTGAVSVREAMFSLSWPLTFVLVFVTVTDMFENQLGKMRCGTIGGHKI

SEQ ID NO: 249722 - protein, 100 aa, Zea mays
  unsure (1)..(100): unsure at all Xaa locations
  Clone ID: MRT4577_159331C.1.pep
KKKKKKKKKKKKKKKKKKKKKKKKKKKKIKKKXKYKKNLKMNTKLFNQAGGGPPFLWLPAVLPPFLSPFFWFFFCVPLFRFLGGLFPRSPPGSPPFFPPL

SEQ ID NO: 249723 - protein, 222 aa, Zea mays
  Clone ID: MRT4577_159332C.1.pep
SHARVGKLGIRHEVDAAGTLLAPTEPMAQVYRTIGQKYGVNYSEDEILMRYRLAYAQPWGRSRLRYVDDGRPFWQHIVSSSTGCSDLQYFEELYQYYTTEKAWRLCDPDAGRVFEALRRAGVKTAIVSNFDTRLRPLLQALKCDGWFDAVAVSAEVAAEKPNPTIFLKACELLGVKPEEAVHIGDDRRNDLWGARDAGCDAWLWGSDVYSFKEIAERIGVEV

SEQ ID NO: 249724 - protein, 135 aa, Zea mays
  unsure (1)..(135): unsure at all Xaa locations
  Clone ID: MRT4577_159333C.1.pep
LISSTGSTTQPLALRILIWDQRKVFGTRIGSMKNSILGDNPPILDNNVNSLNPSSNPTSNSKAARKDSGAVVKKLTVGGMPEKIVSAYQSVLDQHXDEDTALNKCKSTVGLLERINXDINDASINGNQPASSFDL

SEQ ID NO: 249725 - protein, 214 aa, Zea mays
  unsure (1)..(214): unsure at all Xaa locations
  Clone ID: MRT4577_159334C.1.pep
MADKLASLSAPVQVLTSILSSFAAEQAASINGGSSSGEFSGGPPGFHIDKRPRLEKTGQASDMGAPPPXWASGTGATTDWSSAXTSLGGTHPPAPAPGPFPPPPPPLPSLLPPLLQQFGQNTGGMIGMGGPFGMMAGSMPPPPPLSNILPAGFPRPSGPPPPPPLPPAQSQPQQQQQSPQAXXXXXXXXGFFQSSGMGFFPPAQVQQSPSAQRQ

SEQ ID NO: 249726 - protein, 119 aa, Zea mays
  unsure (1)..(119): unsure at all Xaa locations
  Clone ID: MRT4577_159335C.1.pep
EVSKPYIPSSNPGIGNKSFALFIPRLHISALSQWCIFHRKRAKRVVDTWEKQFTSSREEKKIPFLYLSNDILQNSKRKGADYVDEFWRFYLDPECXFXKNGGREGRKTVARLVLIWXIT

SEQ ID NO: 249727 - protein, 589 aa, Zea mays
  Clone ID: MRT4577_159336C.1.pep
MAGAKADVDAETGDGSGVGSGGGGLFSEQMLIDKLNRLNNSATSIETLSQWCIFHRKRAKRVVDTWEKQFTSSREEKKIPFLYLSNDILQNSKRKGADYVDEFWRVLPRSLKHVYENGGEEGRKQVARLILIWDQRKVFGTRIGRMKNSILGDNPPILDNNVNSLNPSSNPTSNSKAARKDSGTVVKKLTVGGMPEKIVSAYQSVLDQHFDEDTALNKCKSTVGLLERINKDINDASINGNQPASSLISDLQEQEMTLKHCIEQLESAGMARISLINQLKEALSEQESKSLVLRDQLQVAQAEAERVIQLRQQLGGVLVTNDTQSTSSPLMITPPDQTAAMMHGSGVRSTPPHSQPLNPAVSLPPTVSAVGDESKRTAAAMADKLASLSAPVQVLTSILSSFAAEQAASINGGSSSGELSGVPPGFHIDKRPRLEKTGQADAGAPPFFGQASQVQQQAGAVPTSFGGTHPPTPGPFPPPPPAQVPQSPSAQRQLGQNTGGMIGMGGPFGMMAGSMPPPPPLSNILPAGFPGPSGPPPPPPLPPAQSQPQQQQTSQAPQQSPTSAGFFQSSGMGFFPPVQVQQSQPAQRQ

SEQ ID NO: 249728 - protein, 52 aa, Zea mays
  Clone ID: MRT4577_159337C.1.pep
QRRVLFFFFFFFWNKTENKLTPKRISVIDCITTSYTYRMILNVVWLCLTETP

SEQ ID NO: 249729 - protein, 49 aa, Zea mays
  Clone ID: MRT4577_159338C.1.pep
PVSVAGEKPSTITHGMPYCFSRNPCLQVQVYSFRNYIPLVHCGTLLYPI

SEQ ID NO: 249730 - protein, 577 aa, Zea mays
  unsure (1)..(577): unsure at all Xaa locations
  Clone ID: MRT4577_159339C.1.pep
MAGAKADVDAETGDGGSFSEQRLIDKLKRLNNSAASIQTLSRWCIFHRKKAKRVVDTWEKQFTSAREDKKISFLYLSNDILQNSKRKGADYVDEFWRVLPRSLKHVYEKGGGEGKNQVARLISIWDDRKVFGTRIESMKNGILGDNPPILDNNGNSLNPSSNPTSNSKAAXRDSGTIVKKLTVGGMPEKIVSAYQLVLDQHFDEDTALNKCKTTLGLLERINKDINDSIINGNQPALSLISDLQEQEMTLKHCIKQLESVDMARISLVNQLKEALNEQESKSLVLRDQLQVAQTEAQRVIQLRKQLGGALVTSVTHSTSSPLMITPPEQTSAIMQGSEVRSTHPQSQPLNPAASLPPTVSAVGDESKRTAAAMADKLASLSAPVQVLTSILSSFAAEQAASINGGSSSGEFSGGPPGFHIDKRPRLEKTGQASDMGAPPPFFGQAAQVQQQIGGTHPPAPAPGSFPPPPPPLPSLLPPLLQQFGQNTGGMIGMGGPFGMMAGSMPPPPPLSNILPAGFPRPSGPPPPPPLPPAQSQPQQQSPQAAQQSPTSTGFFQSSGMGFFPPAQVQQSPSAQRQ

SEQ ID NO: 249731 - protein, 83 aa, Zea mays
  unsure (1)..(83): unsure at all Xaa locations
  Clone ID: MRT4577_15933C.1.pep
PPSINFPIFSPNTLILFSSLIILXLLIFXPPHTHQKYNLKLSFFFFSPIIFHNSSNKPFPTTSSFFPQKKKPPKKFFLKTPPP

SEQ ID NO: 249732 - protein, 194 aa, Zea mays
  Clone ID: MRT4577_159340C.1.pep
MANKATAPTSWRWRLLLLLLVTVAALCWIPPAIAAVAAAAAASTSNGARRSLLGFVEAQGNASYHCTPSGPCVPCQYSEKNDEKYSCSETGYRLPLKCVQAQNATKEGNMSKQRKILDDASTSGGTKSASGGPKHYITYRSCVPLVGEENLSVVGFEIMMAGMLLVSGPFVYYRKRRTNLMQGAARIPTSDPRF

SEQ ID NO: 249733 - protein, 245 aa, Zea mays
  Clone ID: MRT4577_159341C.1.pep
MGSTVDDDEACELVSGSDLVIGEGDDSVSAYLFKAVKNNNGTGILLLSDIFGFQDSATRDFAYRVACNGYNVLVPDLFRGNPWKLNVPFDGDSFERWRAGQAPGRVSGDIDACTRWLVDEFKAAGVSKKLGVIGFCYGGGRLVETLARDAESCFSAGVCFYGSRMDASLGDRVAAPVLFVCGDGDPLCPVETVRELEGRARGARAAVYAGRGHGFAHRPQSVEEDGDAEDAFNAMRGWLHDHLLA

SEQ ID NO: 249734 - protein, 111 aa, Zea mays
  Clone ID: MRT4577_159342C.1.pep
KSVVSDSLGPHGLYSPWNSPGQNSGVGAAAAVTKSFQSCPTLCDPIDGSPPRSPIPGILQARTPEWVAFPFSRGSSQPRDRTQVSCTAGRFCSGRCTRDVLKGAYHKKRCL

SEQ ID NO: 249735 - protein, 129 aa, Zea mays
  Clone ID: MRT4577_159343C.1.pep
RGLPYLLNMYRRATMVATGSGICVFMSFLMQPGPAELSLVWVAKGIDANYGEEMKSAAYSSERLRGRVIVHDTALMGRPNVAALAVDAARRWGSEVVVVTSNPEGSRDVVAFSTYAAIPPFYPICHPRS

SEQ ID NO: 249736 - protein, 78 aa, Zea mays
  Clone ID: MRT4577_159344C.1.pep
NLCIINESLQLVLKNSAEPENESLRVVLKNNRVTCTAPAAASRSPAAGYSRTGTAWALAVTVPHADSYSCLRGCAATA

SEQ ID NO: 249737 - protein, 38 aa, Zea mays
  Clone ID: MRT4577_159345C.1.pep
ITSTLLSAIRIDLHILATNRVSAMTPFDEEITPETLKD

SEQ ID NO: 249738 - protein, 94 aa, Zea mays
  Clone ID: MRT4577_159346C.1.pep
GPRSVLVVPPPATRGGPAPAKKKKGLGEPILGFFFKKAHLVERDPLLNKVGAGPAPPSRAKTTGGKKATGGDDRGRGGGFNLGGLGGLFAKKSS

SEQ ID NO: 249739 - protein, 138 aa, Zea mays
  unsure (1)..(138): unsure at all Xaa locations
  Clone ID: MRT4577_159347C.1.pep
FIIVPXRFEPCGLIQLQGMRYGVCKYFXIPICSSTGGLVDTVKEGVTGFHMGSFSVECETVDPADVTAVASTVTRALKQYDTSAFHEMVQNCMAQDLSWKGPAKKWEEVLLGLGVEGSQAGIDGEEIAPLAKENVATP

SEQ ID NO: 249740 - protein, 52 aa, Zea mays
  Clone ID: MRT4577_159348C.1.pep
DCLPTALSKPLRSGWDLCIMFFFLNHLFHSATQGCIFKKKTHSILHPNTSST

SEQ ID NO: 249741 - protein, 104 aa, Zea mays
  unsure (1)..(104): unsure at all Xaa locations
  Clone ID: MRT4577_159349C.1.pep
FFDRARETSSSGIPDDGNRNIGEIKKKRKPEYDVVDTQANLPKAPLPHXEKQKPSKPADEASAGSLPSTSTTQTVLGLPYHRCLVITNNLTDHFGILLDIWLSL

SEQ ID NO: 249742 - protein, 52 aa, Zea mays
  Clone ID: MRT4577_15934C.1.pep
TLSVFVCGICFFFLRRDRIFCLDMFLFIGGAATQVIAANRVLKKFGRGTSGE

SEQ ID NO: 249743 - protein, 78 aa, Zea mays
  Clone ID: MRT4577_159350C.1.pep
ECKHMPNCRVRHIYNSYHVRKQHAVVGHVAELIIALAHAVVDTGMGARTVTRVEVVSADIQHDILGACVFGLDGCVQC

SEQ ID NO: 249744 - protein, 82 aa, Zea mays
  Clone ID: MRT4577_159351C.1.pep
KKGANRLSVRPGGLIQWARKALPVPLHMPLTIELDLRHCSGNQIVGGVLHFNPAPKDQLPERLVREKAAQLEVPIPWSQYPW

SEQ ID NO: 249745 - protein, 62 aa, Zea mays
  Clone ID: MRT4577_159352C.1.pep
WEPGGSFLSQQFFRARQIRCAVMFNLRSLHHGIVGKVYIFKPWLGRLCQIKRLWAIGTGGSR

SEQ ID NO: 249746 - protein, 519 aa, Zea mays
  unsure (1)..(519): unsure at all Xaa locations
  Clone ID: MRT4577_159353C.1.pep
MLCLSLCAPHLHLHLPRSPTARPAAATCRNARCIGVTLCLRMPTTPEERRQKRGLAQFLDLSAAPTLTPPAPTPVHLTPAAKRRGALREMRRVWWVCGVGYWVQGFRCFPWLALNFHLTRGMGLSPAGLQLLQNAGSLPLVAKPLFGVLSDAVYIGRAHRIPYISLGVWLQLIAWGVLATIPVTGDAFPTLMACILIGNLGASVTEVVSDAVVTEFSRTQKAGVLQSYAFVALAAGSLLGNLSGGYILLKTQEPKIMFTAFSVLLGFQLALSLSTKETLPSSRGXPEIVXKSSLAANFRKQFSNLMTAIREERILYPLAWIMTSFAVVPVLSGTMFCFQTQYLNLDPSVIGLSKVVGQVMVLSLTVLYNRYLKRIPLRCLTTGLQILYALAVLSDLILVKQVNLVLGIPNEIHVLCFSALAEALAQFKVLPFSVLLSSLCPPGCEGSLFAFFTSGLVLSAILSGVFGVGLSTLIGVSSVDYSSLPLGILLQSLAALLPLGWISFVPEKWTADDTVVIKR

SEQ ID NO: 249747 - protein, 52 aa, Zea mays
  Clone ID: MRT4577_159354C.1.pep
PLGKKVKPPALRSHIRKCICPVWSRYVLTPRLVLFFIRHSTPSLPPVCDSSI

SEQ ID NO: 249748 - protein, 80 aa, Zea mays
  unsure (1)..(80): unsure at all Xaa locations
  Clone ID: MRT4577_159355C.1.pep
KTRLDATRPLNHXIAKLAVGVAVIQVGAVTXTELKEKNLRVEDALNATKAAVEEGIVVGGGCTLLRFAHKEDAIKASLEN

SEQ ID NO: 249749 - protein, 175 aa, Zea mays
  Clone ID: MRT4577_159356C.1.pep
AANQSDQYNVFSGQVITAVKEACRAAVLQNKPRLVEAMYFCELTTPTEQLGATYAVLGKRRARILKEEMQEGTSLFTVHAYLPVAESVGFSNQLRSLTAGAVSALLVLSHWEAIPEDPFFVPKTQDELEEFGDGSSIGPNLAKKLMNSVRRRKGLHVEEKVVEHGTKQRTLAKKV

SEQ ID NO: 249750 - protein, 106 aa, Zea mays
  unsure (1)..(106): unsure at all Xaa locations
  Clone ID: MRT4577_159357C.1.pep
QAQEQRPEANGGGRNRKHQRRHARAKRGTATTGSKRRQKQXPEPERKAGRRGQRRKTGKPKERRKGTPPHEGGGEKTPTAQGKAARRRDRGRKTDQRGGTKKRRQL

SEQ ID NO: 249751 - protein, 130 aa, Zea mays
  Clone ID: MRT4577_159358C.1.pep
VELGTPCHMKSLRVLVGQFVADTIWMSASQPHFVGLSGGDEVSGPFMMSSRHGHQATGWAGGQCHCQQCGSWRCADMLHLYLWALDGQARPWLVLPHSQHGSDGLATGLQIDLSPYRSGSRTQGTEQLAT

SEQ ID NO: 249752 - protein, 135 aa, Zea mays
  unsure (1)..(135): unsure at all Xaa locations
  Clone ID: MRT4577_159359C.1.pep
YLGGGGPNGQKGGEPGSSGGPKKRGPPPRXLWPGKEEPGPKKGSRRNPKKKSGXGGGPKNRGVNFSQPEKGPGNPXGSPPIKGGPIKGGKKWGGLAREYPSPARENPTXPPLNPKELVKVPPQKGGRVXNPPWPR

SEQ ID NO: 249753 - protein, 102 aa, Zea mays
  unsure (1)..(102): unsure at all Xaa locations
  Clone ID: MRT4577_15935C.1.pep
ASAXRRGXKKKQKKKKKKKKKKKKKKKKKKKKEKGQACFDPVLTFLPLSIGPGLFFGVALSSLHSSLFLLPWCWPAIPLLCPIFFASQPVHPWSLALFVAWP

SEQ ID NO: 249754 - protein, 80 aa, Zea mays
  Clone ID: MRT4577_159360C.1.pep
AGRSGPFSYRSFSYGPKTPVKLARVTKVLGRTGSRGGVTQVRVEFMDDTNRSIIRNVKGPVRENDILCLLESEREARRLR

SEQ ID NO: 249755 - protein, 76 aa, Zea mays
  Clone ID: MRT4577_159361C.1.pep
GPAIVGGGGAPAPAPRKNIPKFKPGGESKSTPFGNPDKDRWGSRGPLRQNGPPARLEAPPPRQDTDRGGGSRFPPN

SEQ ID NO: 249756 - protein, 72 aa, Zea mays
  Clone ID: MRT4577_159362C.1.pep
PERDSKNHCLRCGTRQPCAFSSDTHNGLPTERCHAPQQQTGAQIAPQTQGHVSLARTWPPGALAACPTLQGP

SEQ ID NO: 249757 - protein, 98 aa, Zea mays
  Clone ID: MRT4577_159363C.1.pep
YLVERRGTGLTKENALTKHRHKRDVTKKEHRNKPQSGRPENSKQRKNRILANRRQKKREPRKAWGNHPTEGGHHHHYNPRKSLLRPRKCESGPDTSKP

SEQ ID NO: 249758 - protein, 163 aa, Zea mays
  Clone ID: MRT4577_159364C.1.pep
MDGGYYGGRDQRYGGGYCRANPNYAMSVREGKVVLAPANPKDEYQHWIKDMRWSTSIKDEEGYPAFALVNKATGEAIKHSLGQSHPVRLVPYNPDFLDESVLWTESRDVGNGFRCVRMVNNIYLNFDALHGDKWHGGVRDGTNVVLWKWCEGDNQRWKIQPYY

SEQ ID NO: 249759 - protein, 207 aa, Zea mays
  unsure (1)..(207): unsure at all Xaa locations
  Clone ID: MRT4577_159365C.1.pep
MDGGYYGGRDQRYGGGYYGGGGAIATPGYAPAVPYGMSQVNIEGNGCGRALPPQPTVKVYCRANPNYAMSVREGKVVLAPANPKDEYQHWIKDMRWSTSIKDEEGYPAFALVNKATGEAIKHSLGQSHPVRLVPYNPDFLDESVLXWTESRDVGNGFRCVRMVNNIYLNFDALHGDKWHGGVRDGTNVVLWKWCEGDNQRWKIQPYY

SEQ ID NO: 249760 - protein, 78 aa, Zea mays
  Clone ID: MRT4577_159366C.1.pep
VWYLTTVTKVFLRVKKKKKKKKKKKKKKKKKKKKKKKKKKKKKKKKNKKKKKKEKKKKKKKKRKKKKKGGARLLVQNF

SEQ ID NO: 249761 - protein, 230 aa, Zea mays
  Clone ID: MRT4577_159367C.1.pep
RRAGATALRVGRVAKGNDLSVGDAGASQRHLSVKFLPPPAARWSVTDLCSSNGTLLNGTPLVATIPAPLSDGDLIKIGEATVLAVSISTEAGPVPGAAATRRSARNAAAVATAAEEQVAAVSRRVGRRKAVSAEAPEAGNEVEEEAALPTRRGGRRKAVEPAGVETEEEDEEEEAAIPRRSRPRKAAATVVLPPQPQNMRSTRAAARRVEVLGCENDEGEVVRTGSRRGR

SEQ ID NO: 249762 - protein, 158 aa, Zea mays
  Clone ID: MRT4577_159368C.1.pep
GFKKTFGMGKPAPFILPKDKRFFYFFDSKGTCPPWVSKENIFFFAKKFAKTGFFGGFNFSRGINRSWGLFSAWAGAPIKVPSKFIVGGLAITNNAPGGPGSLPKGGFKARGPNLKDVVFLEGVSPFLPPEKPPGVFGPICGFFNKFLYVLEKFQGAVI

SEQ ID NO: 249763 - protein, 145 aa, Zea mays
  unsure (1)..(145): unsure at all Xaa locations
  Clone ID: MRT4577_159369C.1.pep
LSHRSLSYGTTAAIKSLACTSRQGILESPSATHVIXTRAAPXLIMMIRCHVDGXNIVLLYPSAEHACPCHGCFGPKNKCFPLHWIATVVICIGPAYGLAFLHEEAQPRIVHRDMKASNILLDKKLLSXIGDFVLAKLSSDTVTHI

SEQ ID NO: 249764 - protein, 95 aa, Zea mays
  Clone ID: MRT4577_15936C.1.pep
LKYPIPKYGSRPGIGPVPADVAKRSCTRGSNRLALVLLRHGAQLVRGFFFHQTWLSGGSKNSSLFTLGKAFGAAPFTALVGSYLFTPFSVKKNAN

SEQ ID NO: 249765 - protein, 143 aa, Zea mays
  unsure (1)..(143): unsure at all Xaa locations
  Clone ID: MRT4577_159370C.1.pep
MEVFGKSVIAEPSNVIFLSAILNTEGSNPSHKCDKRCQSERILGNMYRCKLTETTHICDKNCNQRILYDNHNSLCRVSGQLFPLSPLEQQAVRGIRRKHEVDSSEGCSFKRRRGAQLHPSPFEXSYSAVSPIPSQVGDGMDMS

SEQ ID NO: 249766 - protein, 129 aa, Zea mays
  Clone ID: MRT4577_159371C.1.pep
LDERSMAHVCLARRKRDFCAYLCMQSDMQLDVLFLVYPAAAGAVPGLVYTRNQTLFITRSMHVESMDGRERATNHANCVWFGPSRKVVASNFSSTNLCSGKHAAQLQLNSPPLQGMRRDSLISFLPPNR

SEQ ID NO: 249767 - protein, 75 aa, Zea mays
  Clone ID: MRT4577_159372C.1.pep
SRSLSLLILCVEDCLAVAERHAFQNINWWKRSLMLPLCEKDRTRHNNIKLRHCSLPTFSIWQIEEQQDQPLPYAA

SEQ ID NO: 249768 - protein, 65 aa, Zea mays
  Clone ID: MRT4577_159373C.1.pep
LNAYSDLKKKKKNSTFRKSFAAYLFSHFRVSYFVCFFTLCSTKFPSNFDSLMQFIIIEVYICPSM

SEQ ID NO: 249769 - protein, 230 aa, Zea mays
  Clone ID: MRT4577_159374C.1.pep
KPLHAGCYKKSSCPPNSATQDITIFGALLVVASCLVLLIIYNFSGQILTNREKRQAKSREAAARHARETAQARERWKSAKGVAKKAGVGLQSQLSRTFSRKKGGGGGGGQSSQLQAGASTKVGDDAGGKKHSNLADMVRSIDDNPESDEGFNLEVGDKALKKPTGKEMHTRSQIFKYAYGQIEREKAMQQENHNMTFSGVISMAQDHDVSTRLSVEIAFKDLTLTLKGSK

SEQ ID NO: 249770 - protein, 94 aa, Zea mays
  Clone ID: MRT4577_159375C.1.pep
MSIENLKTFDPFAEADEDTGETKQSQNYIHIRIQQRNGRKTLTTVQGLPKKFDQKKILKVIKKKFACNGTIVNDSEMGEVIQLQGDQRKNVQEF

SEQ ID NO: 249771 - protein, 268 aa, Zea mays
  unsure (1)..(268): unsure at all Xaa locations
  Clone ID: MRT4577_159376C.1.pep
MASLQADEEIVAVLDEETLALMGVSNAATAARVAVGAEWEKFKENVRPLKRGHDVSKLNXRSLKAHANPSQRTALVEARKLIFLXRKMIEAIYEYRGEDPLQPWLDCIKWVQESFPTGGDXCVRTLWHDERYKDDIRFLKVWLEYAGNCADAEVTYRFLEANQIGQGHAIYYMAYASLMESKNKLRKANEIFDLGIARQCFQIGDQLLIARGPIRAIRAINRTISPINRLPDRLIRAPDRPGLGKTTRGPGIRNQHSAGRFSSSALQL

SEQ ID NO: 249772 - protein, 341 aa, Zea mays
  unsure (1)..(341): unsure at all Xaa locations
  Clone ID: MRT4577_159377C.1.pep
RVLYGSDSPAYSCIRWLREXFRSGGEXPGLVGLPDQXVRTLLDDERYKDDLRFLKVWLEYVSXFASLIVFLCSLCQCSGGTSYIIPLPILSFLQAGNCADAEVIYRFLEANQIGQGHAIYYMSYASLLESKNKLRKANEIFDLGIARKAKPLEKLEAVYRAFLRRSIKKREQEDDTVDDDLPKRSFGNNLKRDENRNQQAGNSHLGRPRALQRPLSVYKDESPLPNQGLDRVRSKENNTSWRVLGTRAERNKENNMMPAKWTSHKIPQKLGARGAVQSTRASCSIEVFVEEDCTQEPARPVPKSPNPSVLKLRQTTSKSLKKETELLKENPLRNFPLSRLR

SEQ ID NO: 249773 - protein, 92 aa, Zea mays
  unsure (1)..(92): unsure at all Xaa locations
  Clone ID: MRT4577_159378C.1.pep
PALGRPVFTKVDQLMPCTNWHTLTVKVFSATPVPGRARPVAPAXPIHPARLASXLVPRCTRPTIXFTVQNDQVDLLKPNATVILXNAKLDML

SEQ ID NO: 249774 - protein, 80 aa, Zea mays
  Clone ID: MRT4577_159379C.1.pep
LRGHGEDEQILVLDPPTDLRFKGPFTDVVTTNLKLRNPSDRKVCFKVKTTVPHRYCVRPNSGIIDPGSTVTVSVMLQPFD

SEQ ID NO: 249775 - protein, 60 aa, Zea mays
  unsure (1)..(60): unsure at all Xaa locations
  Clone ID: MRT4577_15937C.1.pep
MASKVFSVLMLLAHSTCVALATIVPLCSQGPSCFLTQPYLPSVIRSXIVDNPAIQPYLLQ

SEQ ID NO: 249776 - protein, 95 aa, Zea mays
  Clone ID: MRT4577_159380C.1.pep
RHTNLKTKTSKYKTEYIPNRLSELFNRPWMLLATPFGTSPDNLGPVILLPYQVCAVQVRAAQARRQRRLGRRRRRGRHAGERLEQLRLTALPAVV

SEQ ID NO: 249777 - protein, 55 aa, Zea mays
  Clone ID: MRT4577_159381C.1.pep
AHQECRLHRDPCLGYPCSSRANWNHWQTTFPLNVDNPENNLGAPRELQFWCPGAL

SEQ ID NO: 249778 - protein, 52 aa, Zea mays
  Clone ID: MRT4577_159382C.1.pep
TSSRSRAAPLFCFFSEQNPCSYFSHPISQREQTRGPPGVPTPNPRVEGTLSR

SEQ ID NO: 249779 - protein, 58 aa, Zea mays
  Clone ID: MRT4577_159383C.1.pep
ARILKPGTTSAATLFFLNGTMRRGKKHALLNIHSNKHTLCKIPYCSYTDSNICAYSQT

SEQ ID NO: 249780 - protein, 172 aa, Zea mays
  Clone ID: MRT4577_159384C.1.pep
MPPYDSEPLDHSLELHELHYQLILIQHWCGTSKANQVEVASPGGFNKLGNMVANDWDLEDPCQNGKIVAHAKGLHVQASREEASWHASFDIVFEQGSGLEGSTLQVMGPNVFKGDWSIVGGTGKLTMARGVIYKKYLTTVDSTSKIDLQIHAFYIPMERKDAGTSGKNVWRW

SEQ ID NO: 249781 - protein, 157 aa, Zea mays
  Clone ID: MRT4577_159385C.1.pep
HHGHILAYLGRCGDSPTACQSFDASTASYFKIQQKKDGVLQLRRQYSSEARADIWEVPIPSEIAAGSYIFRFEIITWGESVASEGFQDQYYPSCGQLDIESDHAGTLNNVPSIHFPWGYHNGNLHSTSPLPGPPLSSQYARRSLVRHRPKSKHEGSH

SEQ ID NO: 249782 - protein, 60 aa, Zea mays
  Clone ID: MRT4577_159386C.1.pep
GGASDGQEFKVVSRLKKRPTIGEVESMLYNIMAANSPVTKSARFLREIVSNVTGAKSKAQ

SEQ ID NO: 249783 - protein, 84 aa, Zea mays
  Clone ID: MRT4577_159387C.1.pep
MTAPRITRPVALTPQQGKRHPWQAKRASFHLRHDDHVKKGTGKGDISKRILLSEGNGPRALLLIRGSKVGPSEGFDSRPRALGL

SEQ ID NO: 249784 - protein, 194 aa, Zea mays
  unsure (1)..(194): unsure at all Xaa locations
  Clone ID: MRT4577_159388C.1.pep
MLRLAELQRKIDESAKEMCHITQDDQGRRPQQRELRQESPSNDNEXAAELQAXPWPPSYKPPQLPMYDGHSDPKQFLMSYEATISSYGGNTTVIAVRSVTETWYSSLRPGMITSWQKLKDMLCTQDHEEYLQAYVQMFLCLRAQAPTMPNEIVIEAMIKGLRLGPTTQYFARKPPQTLEKVFQKMDEYIKADND

SEQ ID NO: 249785 - protein, 63 aa, Zea mays
  Clone ID: MRT4577_159389C.1.pep
RETKQPNPNQTSKESPDGSSRSPPPLSRDNQRGVFEAPHEGGLTPSVCCRQLVPSSSIRIWAA

SEQ ID NO: 249786 - protein, 168 aa, Zea mays
  unsure (1)..(168): unsure at all Xaa locations
  Clone ID: MRT4577_15938C.1.pep
QSLLXSWACQVVLMGADKRSAFAGGPLDXVVDLLYPGVSFGPLGVAADPXGVSRSXVKQIRIGRLCXMCSMFGXFVQPIVTSSGPVDILTVRLAVPVXNIGWAGAPTFVGGKLPGAYTRLYACPVISRLRICPAGDVPVFVKNGACLRHCSGSVRIPLARCGPCDHYQ

SEQ ID NO: 249787 - protein, 45 aa, Zea mays
  Clone ID: MRT4577_159390C.1.pep
PFRLGKNNYETYFIGSVLCIYYLLKVETVNILTMQCMCHAYILLV

SEQ ID NO: 249788 - protein, 79 aa, Zea mays
  Clone ID: MRT4577_159391C.1.pep
PCRTGISTHNTAPHTYQLLGQGQSSTNDNQGANQESHVGPIKKHDTPQAHQTRPDQTKLLFQNKRSALCTRLILRLGGL

SEQ ID NO: 249789 - protein, 90 aa, Zea mays
  unsure (1)..(90): unsure at all Xaa locations
  Clone ID: MRT4577_159392C.1.pep
VFINLVNIRFEPFNIYVYNYIYAYVDIIYIHGLKGPTYRLKGPTYKFSPRAPKISGTALLSRRLQLXTHSEVLPNSKKSFSSREPEPFNC

SEQ ID NO: 249790 - protein, 154 aa, Zea mays
  Clone ID: MRT4577_159393C.1.pep
GEPPPPPPQWNPPCPPLKNKKVPFLHLPTGLRNGIPWWNFFFFPKNKALHPGIIKNVQNFLQTRYGHGNGLLQPLLFICKPQLLFLSKKTRVLPSSPDLFWESFYNVLKVECSKVKPVERESQIIGLFFFFLQRPPLKKNVQKGPQGVCPLDKN

SEQ ID NO: 249791 - protein, 86 aa, Zea mays
  Clone ID: MRT4577_159394C.1.pep
HPIVFVVGHYQRALGMSLIRLISASIFCEDRGQHLEFMGCMFMVCKSYRSGRMISSPSRGQGKAKVLPIVKCQTNRFKGLLPWSPA

SEQ ID NO: 249792 - protein, 79 aa, Zea mays
  Clone ID: MRT4577_159395C.1.pep
TPCPRLCSGYDGPPYRSPAVVASAGIASIQPGGHRAHLRRHRRWVASSFRLRTRKGGRCVLGLSLPLRGGVAQPAMGVS

SEQ ID NO: 249793 - protein, 83 aa, Zea mays
  unsure (1)..(83): unsure at all Xaa locations
  Clone ID: MRT4577_159396C.1.pep
PTRPRTRGNLLDLEDKLHPGGPFDPLGLASDPDQAAILKVKEIKNGRLAMFFMFAFFIQAYVTCXGPDENLFLHLIDPFFINL

SEQ ID NO: 249794 - protein, 79 aa, Zea mays
  unsure (1)..(79): unsure at all Xaa locations
  Clone ID: MRT4577_159397C.1.pep
PTCIVHKMSSQAQGLSKNLNSSLQTELSPTRLFSGALAACXFNGFTGSAEADRSSRVFLDNSITDFISVRQKKSTGQTS

SEQ ID NO: 249795 - protein, 55 aa, Zea mays
  Clone ID: MRT4577_159398C.1.pep
FIFGFHWLRHMTNPQAFLKCTQNNLFKKKERKTQAHAAPRTLHDACHVYPPAPNL

SEQ ID NO: 249796 - protein, 65 aa, Zea mays
  Clone ID: MRT4577_159399C.1.pep
SICEPIKPNQSIIRSCEPSSGRVKPRELWLVRVGSQNMAPLIFGCCRCSWDNFKMFSNFLSVLQP

SEQ ID NO: 249797 - protein, 42 aa, Zea mays
  Clone ID: MRT4577_15939C.1.pep
SNIAAPEPLAFNHSPKHPPRMLSKLSISYNQSQEEEAIVSLV

SEQ ID NO: 249798 - protein, 212 aa, Zea mays
  Clone ID: MRT4577_1593C.1.pep
MTGHASLLLLLLPALAAVLLCCPLAQCGQQNYTSMFSFGDSLTDTGNLLVSSPLSNHIVGRYPYGITYFHRPTGRCSDGRLVVDFLAQAFGLPLLQPYLQSRGKDLSRGVNFAVGGATAMDPPFFQEIGASDKLWTNLSLSVQLGWFEQLKPSLCSSPKECKEYFSKSLFLVGEIGGNDYNYAFFKGKTLDDAKTYVPTVAAAVTDATVRLI

SEQ ID NO: 249799 - protein, 79 aa, Zea mays
  unsure (1)..(79): unsure at all Xaa locations
  Clone ID: MRT4577_159400C.1.pep
AXKKKKKKKKKKKKNSLPFSSSPASRMHHQXFSRSHSSGASLLXPXPRRSAPGSPPXXAVGLPSSCASYGGRTPSPRGS

SEQ ID NO: 249800 - protein, 376 aa, Zea mays
  Clone ID: MRT4577_159401C.1.pep
MAMWRAAARQLVDRALGSRAAHTSTGSKKIVGVFYKAGEYADKNPNFVGCVEGALGIRGWLESQGHQYIVTDDKEGPNCELEKHIEDMHVLITTPFHPAYVTAERIKKAKNLELLLTAGIGSDHIDLPAAAAAGLTVAEVTGSNTVSVAEDELLRILILLRNFLPGYQQVVQGEWNVAGIAHRAYDLEGKTVGTVGAGRIGRLLLQRLKPFNCNLLYHDRLQIDPELEKEIGAKFEEDLDAMLPKCDVIVINTPLTEKTRGMFNKERIAKMKKGVIVVNNARGAIMDAQAVADACSSGHIAGYGGDVWFPQPAPKDHPWRYMPNHAMTPHISGTTIDAQLRYADGVRDMLDRYFKGEDFPVQNYIVKEGQLASQYQ

SEQ ID NO: 249801 - protein, 103 aa, Zea mays
  Clone ID: MRT4577_159402C.1.pep
YCAPNSSPLVSAPPIKTPPGGFFFWLVPSPFCYQKAAKKKSGGGLFYGSPLTIKAPKKFVAANDVEGRKKRKQQKKKQQKKNMVVKKKKKKKKKKSTLRCYHC

SEQ ID NO: 249802 - protein, 50 aa, Zea mays
  unsure (1)..(50): unsure at all Xaa locations
  Clone ID: MRT4577_159403C.1.pep
SVLPGRGLRSASTFPRAFPXARSPPGWPHLDAKRARPSCQYTWRRAGXGA

SEQ ID NO: 249803 - protein, 102 aa, Zea mays
  Clone ID: MRT4577_159404C.1.pep
LNGNRKKENIFWTNSMSWQNPLFPTSAHLARVACLRQQAGPAGRPSHARYRTIQCVGPIRLMNTPHWRVGPEGQGAFPLLRTNGASSSTNCAESSVVVAVTL

SEQ ID NO: 249804 - protein, 78 aa, Zea mays
  Clone ID: MRT4577_159405C.1.pep
TFYSSSFHFLTKQNNFVWTASLWHTLSRRSRGGPHFSSINYRSSPRLFIYAMDSNSGLNLLIPSYITQTNQIKGCSLC

SEQ ID NO: 249805 - protein, 91 aa, Zea mays
  Clone ID: MRT4577_159406C.1.pep
PFQGGGELFFGGDENKAKTLGAAGAPLKGIPPKPRKGPPHLCPQINCPLESPKGTPAKTHPLGIFKGPPRGGGFFLCNNTPGSVLKEEKGG

SEQ ID NO: 249806 - protein, 78 aa, Zea mays
  Clone ID: MRT4577_159407C.1.pep
MQALSGSASTGAMTYSFIKAVESEPGTTYGRLLTAMRATIRDNGGEFGIPGPIGTFFRRVITFSCAQVQNSQTKTSII

SEQ ID NO: 249807 - protein, 894 aa, Zea mays
  Clone ID: MRT4577_159408C.1.pep
MAALEDDGVEQQQQQQAGVAGMRRFKSGRRAASWGDEALATAAVGDVDEGMEMPDSQDAEQWSRRPVLFRLDLLHRLVDLYEISGSPQIDNGAYLDVPVSYNMDNICRASNSVDVQIEDEEEPYEAARALDSDDDRPVQEMTEQEIELIRRLCPERDPAVHEFSSLSHSTRVYAEGRDDELLEAPDNADSIEIKVGLLFKDLPTLTRWLQEYSVNRKRPFKVRHSYAQRRYTVVCEVSECNWRVCARRQKDTGKFKITKIVGPHTCAQTELSSKHRQLTSTLIAKRILGILKGQPKLKVKSIMTMTSELFGYRIKYGKAWRAKQRAWKMIYGDWEEGYEKLPALFNAIKAKNPGMHYEYIPKPNEWRNDREIFFRVFWCFSQCVEAFRHCRPVLSIDGTFLLGKYKGTLLVAISCDADNALVPLAFALVERENRDSWSWFLRLVRIHVVGPGREVGVISDRHQDILNAVQEQIPGYAPMHHRWCTRHLAENLLRKDHNKANFPLFEEVCRQLKVSFFEDKLKELKDATNDEGKNWIAGLLREPQKWTRAYDEGGWRFEFQTSNMAESFNSVLKGIRGMPVNDIVTFTFYRLVAWFNDRHAQAKAMQTRGQRWAPKPTSHLNNAKERAHRHEVQCFDEELGKYERIDGTNVVVGKGAGATWLWIRFPDAVGEVERPPFSWTQRRMNAENAVDLATTHVHAFGHLVRMAQFHLLDPHYDEHHRGRLTAEGEVLPVLRVRTHDRFLEEMRYDERYTPLLQRAGLDVVSYQRVSRRLRRAAARCGCRSLAGVDVQLPVPRMQQDVQPPICAVGPSTAGLSSSRSTRDTFEDVAHEDEDKDDDTGAGAAGQEEIGPSQLQDAPTTQPSQLTPRRRRPRDPYTPGTDALGAKGKGKTRRK

SEQ ID NO: 249808 - protein, 54 aa, Zea mays
  Clone ID: MRT4577_159409C.1.pep
ATDEHKATVYLDPTANPIVHTAELTQTAHNASIINDAWVKAIYLYTLVVTMIWY

SEQ ID NO: 249809 - protein, 137 aa, Zea mays
  unsure (1)..(137): unsure at all Xaa locations
  Clone ID: MRT4577_15940C.1.pep
MAPKAEKKPPEKKPAEEKAEKKPRAEKRVPSKEGGEKKGKKKAKKSVETYKIYIFKVLKQGPPDIGILSKAMSIMNSFINDIFXKLPPEAAKFARYNKKPPIPSREIQTSVGLVLPGELAKHPVSEGAKAVSKFTSF

SEQ ID NO: 249810 - protein, 578 aa, Zea mays
  unsure (1)..(578): unsure at all Xaa locations
  Clone ID: MRT4577_159410C.1.pep
MVPPCLDVVVQKLPVSHCEGPVGLSPQMPNASRIEAPLVELHEEVVVVPDAQSGPHEYGICGASNAVVPPQEIPFTQDPVHDHPRSPHIDNADVQIDVPVSYNMDNICRASNSVDVQIEDEEEPYEAARALDSDDDRPVQEMTEQEIELIRRLCPDLSHSTHAYAEGRDDELLEAPDNADSIEIKVGLLFKDLPTLRRWLQEYFVNRKRPFKVRHSYAQRRYTVVCEVPECNCRVCARRQKDTGKFKITKIVSPHTCAQTELSSKHRQLTSTLIAKRILGILKGQPNLKCVEAFRHCRPVLSIDGTFLLGKYKGTLLVAISCDTDNSLVPLAFALVERENRDSWSWFLRLVRIHVVGPGREVGVISDRHQGILNAVQEQIPGYAPMHHRWCTRHLAENLLRKDHSKANFPLFEEVCRQLEVSFFEDKLKELKDATNAEGKNWIAGLLREPQKWTRAYDEGGWRFEFRTSNMAESFNSVLKGXVAWFNDRHAXAKAMQTRGQRWAPKPTSHLNNAKERAHRHEVQCFDEELGKYEDGAVPLAGTSLRRAPQGPSHRRGRGVARSAGPDPRPVSGGDEVR

SEQ ID NO: 249811 - protein, 1256 aa, Zea mays
  Clone ID: MRT4577_159411C.1.pep
MDSLVTLYHGGRVEIDAYGSVTFDGMKIVTMLFVERPTFDQLLARACEEISCDINDPRISIQGLLSHITYGTVVRRLISITSEDDWVIYLRIVKTMVPPCLDVVVQKLPVSHCGGPVGLSPQMPNASRIEAPLVELHEEVVVVPDAQSGSPHINNADVQIDVPVSYNMDNICRASNSVDVQIEDEEEPYEAARAVDSDDDRPVQEMTEQEIELIRRLCPERDPAVHEFSSLSHSTRAYAEGRDDELLEAPDNADSIEIKVGLLFKDLPTLRRWLQEYSVNWKRPFKVRHSYAQRRYTVVCEVPECNWRVCARRQKDTGKFKITKIVGPHTCAQTELSSKHRQLTSTLIAKRILGILKGQPNLKVKSIMTMTSELFGYRIKYGKAWRAKQRAWKMIYGDWEEGYEKLPALFNAMKAKNPGMHYEYIPKPNEWRNGREIFFRAFWCFSQCVEAFRHCRPVLSIDGTFLLGKYKGTLLVAISCDADNTLVPLAFALVERENRESWAWFLRLVRIHVVGPGREVGVISDRHQGILNAVQEQIPGYAPMHHRWCTRHLAENLLRKDHSKANFPLFEEVCRQLEVSFFEDKLKELQDATNAEGKNWIAGLLREPHKWTRAYDEGGWRFEFQTSNMAESFNSVLKGIRGMPVNAIVTFTFYRLVAWFNDRHAQAKAMQTRGQRWAPKPTSHLNNAKERAHRHEVQCFDEELGKYERIDGTNVVVGKGAGATWLWIRFPVAVGEDERPPFSWTQSRMNAENAVDLATTHVHAFGHLVRMAQFHLLDPHYDEHHRGRLTAEGEVLPVLRVRTHDRFLEEMRYDERYTPLLQRAGLDVLSYQVRRGLPTFNPAALTALVDRWRPETHTFHLPCGEMTVTLEDCQKILGLSIMGRPVTGQASPGGWRQRVEAFLGRLLPDELRVLFLDATGDSASWMFLPCLTDWDTTGGYSWASAVLAFLYRQLCEACRRSSRTASLGGCVYLLQLWMWAHIPVGRPREFPPREWFVVAGHRLKPTAAYRWDQVEEPFARHQRAYVEYSNELDALTPSMVTWQPYLDPYFASIQLSSMCSIDENLYLMRCPLICFYAVEYHLPHRVARQFGLRQEFPVEPFSTSIQLHKFDRQRQKKVTDFETHHRDYIDEWDQQGDLNYENDQAHTNYNFRRCKLKGQWTAADYAEQESSDDEDTAFDIAARHGSQIEAAPILDRVGNSMLVSVVELERISQRTSDTTTLSLLSQDVLPPMCAVGPSTAGLSSSRSTRDTFENVA

SEQ ID NO: 249812 - protein, 1089 aa, Zea mays
  unsure (1)..(1089): unsure at all Xaa locations
  Clone ID: MRT4577_159412C.1.pep
MDPKGKGIVINDKKKESFVNKPKDDKPTDSSSGHKRKDGKKKKTRRIKEIVYYDDSDESSSSQKDDDNDYEKKKTVNSNFSFDYSRIPHSSNAHLLSIPLGKPPHFDGEDYGFWSHKMCSHLFSLHPSIWEIVESGMKFDSLDSPLFINEQIHKNAQATTVLLASLCRDEYHKVSGLDNAKQIWDTLKISHEGNDVTMLTKMELVEGKLGRFVMIRGEEPTQTYNRLKTLINKIRSYGSTRWMNHNVVRLMLRSFTVLDPHLVNNIRENPRYTKMSPEEILGKFVSGRMMIKEARYVDDALNGPIHEPQTIALKATRSKEALPSKMDNLVTLYHGGRVEIDAYGSVTFDGMKIVTMLFVERPSFDQLLARACEEISCDINDPRISIQGLLSHITYGTVVRRLISITSEDDWVIYLRIVKTMVPPCLDVVVQKLPVSHCEGPVGLSPQMPNASRIEAPLVELHEEVVVVPDAQSGPHEYGISRPIPGVCGASNAVVPPQEIPLTQDPVHDHPRSPHIDNADVQIDVPVSYNMDNICRASNSVDVQIEDEEEPYEAARAVDSDDDRPVQEMTEQEIELIRRLCPERDPAVHEFSSLSHSTRAYAEGRDDELLEAPDNADSIEIKVGLLFKDLPTLRRWLQEYSVNRKRPFKVRHSYAQRRYTVVCEVPECNWRVCARRQKDTGKFKITKIVGPHTCAQTELSSKHRQLTSTLIAKRILGILKGQPNLKVKSIMTMTSELFGYRIKYGKAWRAKQRAWKMIYGDWEEGYEKLPALFNAMKAKNPGMHYEYIPKPNEWRNDKEIFYRAFWCFSQCVEAFRHCRPVLSIDGTFLLGKYKGTLLVAISCDADNSLVPLAFALVERENRDSWSWFLRLVRIHVVGPGREVGVISDRHQGILNAVQEQIPGYAPMHHRWCTRHLAENLLRKDHSKANFPLFEEVCRQLEVSFFEDKLKELKDATNAEGKNWIAGLLREPQKWTRAYDEGGWRFEFQTSNMAESFNNVLKGXAKAMQTRGQRWAPKPTSHLNNAKERAHRHEVQCFDEELGKYEDGAVPLAGPSLRRAPQGPSHRRGRGVARSAGPDPRPVSRGDEVR

SEQ ID NO: 249813 - protein, 60 aa, Zea mays
  unsure (1)..(60): unsure at all Xaa locations
  Clone ID: MRT4577_159413C.1.pep
FHGGXWXRDPYLRGVIHGDEKGFDCNVLXTVHGFXTMYXXXXIGXXVXXXVRGGFGXAXE

SEQ ID NO: 249814 - protein, 216 aa, Zea mays
  Clone ID: MRT4577_159414C.1.pep
TRPAEGRDDELLEAPDNADSIEIKVGLLFKDLPTLRRWLQEYSVNRKRPFKVRHSYAQRRYTVVCEVPECNWRVCARRQKDTGKFKITKIVGPHTCAQTELSSKHRQLTSTLIAKRILGILKGQPNLKVKSIMTMTSELFGYRIKYGKAWRAKQRAWKMIYGDWEEGYEKLPALFPVEPFSTSIELHKFDRQRQKKVTDFETHHRDYIDEWNQQGI

SEQ ID NO: 249815 - protein, 151 aa, Zea mays
  Clone ID: MRT4577_159415C.1.pep
MVGGAEGRDDELLEAPDNADNIEIKVGLLFKDLPTLRRWLQEYSVNRKRPCEGRHSYAQRRYTVVCEVSECNWRVCARRQKDTGKFKITKIVGPHTCAQTELSSKHRQLTSTLIAKRILGILKGQPNLKVKSIMTMTSELFGYRIKYVSSS

SEQ ID NO: 249816 - protein, 620 aa, Zea mays
  unsure (1)..(620): unsure at all Xaa locations
  Clone ID: MRT4577_159416C.1.pep
MLDYWSTRAFLIELKFYAGSINITLQGRCSSDLTFSTVSWTRTRSQMDSLVTLYHGGRVEIDAYGSVTFDGMKIVTMLFVERPTFDQLLARACEEISCDINDPRISIQGLLSHITYGTVVRRLISITSEDDWVIYLKIVKTMVPPCLDVVVQKLPVSQCEGPVRLSPQMPNASRIEAPLVELHEEVVVVPDAQSGSPHIDNADVQIDVPVSYNMNNICRASNSVDVQIEDEEEPYEAARAVDSDDDRSVQEIELIRRLCPERDPAVHEFSSLSHSTRAYAEGRDDELLEAPDNADSIEIKVGLLFKDLPTLRRWLQEYSVNRKRPFKVRHSYAQRRYTVVCEVPECNWRVCARRQKDTGKFKITKIVGPHTCAQTELSSKHRQLTSTLIAKRILGILKGQPNLKVKSIMTMTSELFGYKIKYGKAWRAKQRAWKMIYGDWEEGYEKLPALFNAMKAKNPGMHYEYIPKPNEWRNGREIFFRAFWCFSQCVEAFRHCRPVLSIDGTFLLGKYKGTLLVAISCDADNTLVPLAFALVERENRESWAWFLRLVRIHVVGPGREVGVISDRHQGILNAVQEQIPGYAPMHHRWCTRHLAENLLRKDRSKANFPLFEEXCQQLEV

SEQ ID NO: 249817 - protein, 631 aa, Zea mays
  unsure (1)..(631): unsure at all Xaa locations
  Clone ID: MRT4577_159417C.1.pep
DFERMAQFHLLDPHYDEHHRGRLTAEGEVLPVLQVRTHDRFLEEMRYDEGYTPLLQRAGLDVLSYQVRRGLPTFNPAALTALVDRWRPETHTFHLPCGEMTVTLEDCQKILGLSIMGRPVTGQASPGGWRQRVEAFLGRLLPDELRGSHNTGVPLTWLRQSFGQCPPGADEQTVGYHCRAWILHLFGSVLFPDSTGDSASWMFLPCLTDWDTTGGYSWASAVLAFLYRQLCEACRRSSRTASLXGCVYLLQLWMWAHIPVGRPREFPPRXWFVVAGHRLKPTAAYRWDQVEEPFARHQRAYXEYSNELDALTPSMVTWQPYLDPYFASIQLSSMCSIDENLYLMRCPLICFYAVEYHLPHRVARQFGLRQEFPVEPFSTSIQLHKFDRQRQKKVTDFETHHRDYIDEWDQQGDLNYENDQAHTNYNFRRCKLKGQWTTADYAEQESSDDEDTAFDIAARHGSQIEAAPILDRVGNSMLVSVVELERISQRTSDTTTLSLLSRVSRRLRRAAAQCGCRSLAGVDVQLPVPRMQQDVLPPMCAVGPSTAGLSSSRSTRDTFENVAQDDDDDDDDDAGAGAGAAGQVEIGPSQLQDAPTTQPSQLTPRRRRPRDPYTPGTDALGAKGKGKTRRK

SEQ ID NO: 249818 - protein, 81 aa, Zea mays
  Clone ID: MRT4577_159418C.1.pep
KPQKVSLLGRRCNSFALGLGAARLETPPQGFHKKGGPKIICPRGWFSSPGWFFLRVKKNRVLFPPRYSFFFCPRRGFLSLF

SEQ ID NO: 249819 - protein, 81 aa, Zea mays
  Clone ID: MRT4577_159419C.1.pep
SPAFMGSGAFQGSMEGRAWPSPRVHDSAPSVCYPGRFASWPLVGPAALLPSRFFRVALTGPAFGCSWTLCIFFPALSGFFL

SEQ ID NO: 249820 - protein, 90 aa, Zea mays
  Clone ID: MRT4577_15941C.1.pep
DHPAFIPRTVHTIFACLIVCECTNTKYYSEFLLLPSSSTPEHRVFSDRPEYEMLPIRKIHSEACQDQLPHLKPCEQLRRNRPDGPCHWHS

SEQ ID NO: 249821 - protein, 73 aa, Zea mays
  unsure (1)..(73): unsure at all Xaa locations
  Clone ID: MRT4577_159420C.1.pep
KVVWFMSHHDKCLDADNDKGRVSPDRDGSLANAPWTREAAPDNAGAIRLXSIYGRYLTVSGEPFLLGMTGQPG

SEQ ID NO: 249822 - protein, 120 aa, Zea mays
  Clone ID: MRT4577_159421C.1.pep
LVRSLARVEYSQWVFTYVAGTCSSAHTHSGTFLPLRSSGTEESCRAPRGMVKGPVAAISRQCDDGSCSCLTRSEQSGSLSGSRRAKYMYLLGLEVMAIYSAVILWHSSHEIVCGGSAWHF

SEQ ID NO: 249823 - protein, 282 aa, Zea mays
  unsure (1)..(282): unsure at all Xaa locations
  Clone ID: MRT4577_159422C.1.pep
MLPFYKKKKKVCSHPFQGNHTDLSMPPLAPPILMELSSSPMLLTCLGMVLTIVILILRSLKCKSRRRVYRLPPGPRPWPVIGNLNLVGALPHRSIHELSNKYGELMHLRFGSYSVVVASSPEMAELFLKAHDLLFLDRPRTAAGKHTTYNYADITWSPYGAYWRHARRICATQLFSPGRLASFERVRAEEVRRLVRGLFAASGRRRAVRLGKDHLSTFSMNVITRMVLGKRFFDGEEAEESAAEGPGVVPXEFMWMMDELMLLNGVLNIGDWIPWLDCLDLQ

SEQ ID NO: 249824 - protein, 112 aa, Zea mays
  Clone ID: MRT4577_159423C.1.pep
MSFFSGGGSKNHQRTFRAKKSLSSPGNKGTQLRRHIDATLGSGNLREAVRLPVGEDLNEWLAVNTVDFFNHINVLYSTLAEFCTPHTCPVMAAGPKYEYRWADGAKVKVPIK

SEQ ID NO: 249825 - protein, 494 aa, Zea mays
  unsure (1)..(494): unsure at all Xaa locations
  Clone ID: MRT4577_159424C.1.pep
MSARPPPQPRPRLALPPRSTAESLFTGAGDTSPGPLTLASALFPSDADXRWPRRRVLLXAGAATFTQLLTGSLAPPPPQQQXGMTRRGDEAAGSPGPGRRSRXPPASASAGASVFTVPPGLSPSGLFDSPGLLFSPAMGGFGMSHQQALAQVTAQATHSPLRMFDHLEQPSFSTAATTSGALQHMNSAASMAGISDMTMATANNENPSFQSAEASQRYQVNAPVDKPADDGYNWRKYGQKVVKGSDCPRSYYKCTHPNCPVKKKVEHAEDGQISEIIYKGKHNHQRPPNKRAKDGNSSAFDHNEQSNDTASGLSAAKRDQDNIYGMSEQASGLSDGDDMDDGESKRHEDXSDNESKRRNIHISSQRTLSESKIIVQTTSEVDLLDDGYRWRKYGQKVVKGNPHPRSYYKCTFAGCNVRKHIERCSSDPKAVITTYEGKHNHEPPVGRGGNQNAGMSSQQKGQNNVSSNQASFSRPDLSNANQMPIGILQFKSEQ

SEQ ID NO: 249826 - protein, 52 aa, Zea mays
  unsure (1)..(52): unsure at all Xaa locations
  Clone ID: MRT4577_159425C.1.pep
HHHHXXPATYSNGVRAHSNINHFITTHLFFTYTYLHTFPLTHITSVSHNLYT

SEQ ID NO: 249827 - protein, 33 aa, Zea mays
  Clone ID: MRT4577_159426C.1.pep
KIPLTFFRLVPNNTGDSFWSQPQFYNALHLTFK

SEQ ID NO: 249828 - protein, 125 aa, Zea mays
  Clone ID: MRT4577_159427C.1.pep
MHTNPAMAKAAPPLLAAGSRTAITAQQPSSRKGAAGAGLFCSRVIVSKRARVTAKLGDGELKPAGKRKFITKEEEPEQYWQTAGEREGENPMMTPLPYIIIFGMSTPFVILAIAFANGWIKVPVR

SEQ ID NO: 249829 - protein, 105 aa, Zea mays
  Clone ID: MRT4577_159428C.1.pep
GLNFPSLSPPQVGPIFFSLFPGVLSLNFFPPRAMRIAFFLEVLGGPSQIFGHVQLLVAAAAVHPFPTCGPCGLPSAVGPPANTRFFAQGPGLFSKSPLCAEVPRF

SEQ ID NO: 249830 - protein, 125 aa, Zea mays; identical to SEQ ID NO: 249828
  Clone ID: MRT4577_159429C.1.pep

SEQ ID NO: 249831 - protein, 80 aa, Zea mays
  unsure (1)..(80): unsure at all Xaa locations
  Clone ID: MRT4577_159430C.1.pep
PRRGGARARARARPRAQPALPFFRDGGPGAPENGGGGRRTTAVLGRRXPASPLFCPSGRPFEKKKLHLSHLIWIHPSIHL

SEQ ID NO: 249832 - protein, 94 aa, Zea mays
  Clone ID: MRT4577_159431C.1.pep
VRAQNEKEKAKANESQSGKQREEPAAGECGDIVAADRGAPVRLGRTRLARAVRAHVTRLHGRPRPPRQPTNDDQTRTTWATTRRPRSSGCLIPT

SEQ ID NO: 249833 - protein, 204 aa, Zea mays
  Clone ID: MRT4577_159432C.1.pep
MHPWPCTALFKTHGTPAPPAPPPPPPPPPRPPPPPNPPNGPAPATAPPNGPNPATPPPSGPWTPPKRPPPPVRPPNTSAVLACSSSSSTAPALPSPAAKAAVVSQSRGVALAAADATARQSSREATSHHLAAIGLSLSLAYYQEDQLLFFEVCLSGLVLLDWWWRGFDAAGPAGNLEEHELVLLVISEREREANGRQVGVRRLP

SEQ ID NO: 249834 - protein, 50 aa, Zea mays
  Clone ID: MRT4577_159433C.1.pep
KRPKGSFAFQSPPFRRFMPTQHKVHRTRGKSLKIKAQIGPDSILAYMDHP

SEQ ID NO: 249835 - protein, 492 aa, Zea mays
  unsure (1)..(492): unsure at all Xaa locations
  Clone ID: MRT4577_159434C.1.pep
LFNGSSNHFSGNLDESISNFTQLSFLDIHNNSLTGSLPFSLSDLSYLNYLDLSSNDFNGPAPCGICNIVGLTFADFSGNHIGMSGLVDCAAEGFCTGKGFDRKALNSSDRVRRAAIICVSILTVVIVLXXLVVYLKRRLLRSRPLALVPVSKAKATIEPTSSDELLGKKFREPLSINLATFEHALLRVTADDIQKATENFSKVHIIGDGGFGTVYRAALPEGRRVAIKRLHGGHQFQGDREFLAEMETIGKVKHPNLVPLLGYCVCGDERFLIYEYMENGSLEMWLRNRADAIETLGWPDRLKICIGSARGLSFLHHGFVPHIIHRDMKSSNILLDENFEPRVSDFGLARIISACETHVSTDIAGTFGYIPPEYALTMKSSTKGDVYSFGVVMLELLTGRPPTGQEEGEGGGNLVGWVRWMMAHGKEGELFDPCLPVSSVWRVQMAHVLAIARDCTVDEPWKRPTMLEVVKGLKMAETIECGPLVVTVTKDM

SEQ ID NO: 249836 - protein, 62 aa, Zea mays
  Clone ID: MRT4577_159435C.1.pep
TEKGLHNKVQSSKPAGNLQKHVHFYIIQHSSFTKEKEKSKERQGKGQKKCLNNRLPHSVPAD

SEQ ID NO: 249837 - protein, 119 aa, Zea mays
  unsure (1)..(119): unsure at all Xaa locations
  Clone ID: MRT4577_159436C.1.pep
GPEXPGGRHASAPIQNLAFTGLPLPSGACPAARRSALAGSPPQPPPRLWRNQTSAPCRTRRAAAASSWCQSLVRSLSHPTMNGRPPPYDRSPTRRQAFASNEQQAPTTKICAPSLPLFR

SEQ ID NO: 249838 - protein, 117 aa, Zea mays
  unsure (1)..(117): unsure at all Xaa locations
  Clone ID: MRT4577_159437C.1.pep
MAAVTAAAVSTSAAAAVTKASPSPAHCFLPCPPRTRAAHQRGLLLRAQVSTTDAAAVVVAPAKKEKISKKPDEGVVTNKYRPKEPYVGKCLXNTKNTGDDPPGETWHTXFNTAGEIP

SEQ ID NO: 249839 - protein, 65 aa, Zea mays
  Clone ID: MRT4577_159438C.1.pep
STYNIHKHHQNPPFHIHISIYPNLSYQYTPTTTSSHSPHINTLNINLLYTYTTHIISTTIIICQP

SEQ ID NO: 249840 - protein, 70 aa, Zea mays
  Clone ID: MRT4577_159439C.1.pep
RHVRAGVRGATRLRRDHYLVGSSSFVTRKTLTKVDQLSRAGYRHHVGGRSILETRQVAKILTKLPIPRAQ

SEQ ID NO: 249841 - protein, 266 aa, Zea mays
  unsure (1)..(266): unsure at all Xaa locations
  Clone ID: MRT4577_15943C.1.pep
MAMDAERRQAELIAQFSAQAAALSSAPQLAALVLEATSHPALFAFSELLTLPALSKLTGTQYASSLDLLRLFAYGTLNDYKSNSGFLPALLPDQVRKLKQLSVLTLAESTKILPYDQLMQELDVSNVRELEDFLINECMYSGIVRGKLDQLRRCFEVQFAAGRDLTPDQLKNMIETLSDWLGTSDRLLHQIQEKIKWADTMSEVNKKHQKEFEDRVEEAKKSIKKXQFKQADIDLRGHDEFLSESGGIMDFEEDRVRPKRRRQPPA

SEQ ID NO: 249842 - protein, 103 aa, Zea mays
  Clone ID: MRT4577_159440C.1.pep
VFKTDMNRRVCVLPLTVNLRLCWWRRDIGPACTCELSPCAVSWFCLSSGSPHVRDACRLLPLSVFLVLFLIRPCVGLVDPLSPFPAPPPPVPYPPVLLPSHAK

SEQ ID NO: 249843 - protein, 171 aa, Zea mays
  unsure (1)..(171): unsure at all Xaa locations
  Clone ID: MRT4577_159441C.1.pep
MATYEPKNILITGAAGFIASHVANRLIRSYPHYKIVVLDKIDYCSNLKNLNPSRPSPNFKFVKGDIASADLVNYLLITESIDTIMHFAAQTHVDNSFGNSFEFTKNNIYGTHVLLEACKVTGQIRRFIHVSTDEVYGETDXXDAVVGNHEASQLLPTNPYSATKAGAEMLV

SEQ ID NO: 249844 - protein, 31 aa, Zea mays
  Clone ID: MRT4577_159442C.1.pep
KKKKKKKKKKKKKKKKKKKKKKIKKKKIKKN

SEQ ID NO: 249845 - protein, 282 aa, Zea mays
  Clone ID: MRT4577_159443C.1.pep
MLACKASPSRPCVVLLVCLLVVAAAVVVVAASTPPAEAAFDDNYVAQWGRDGYHLVVRGTEANVTMDQSSGAGFRSKSTYGSGFFHMRMKLPSGYTAGVVTTFYLISQPEDGSRDEVDLEFLGDKAGVPITLQTNVFVDGRGDREQRTRLWMFVDDTPVRVLRNLTGAVPGYPFPGKQTMLIRASVWDGSDWATDGGRTKVDWSRGPFTAGYRGFDVDGCANNGSDACQSPDLWWNAAEYRNITAEQRAAYEDVKRSYMNYDYCADKARFNSTTVPIECNYA

SEQ ID NO: 249846 - protein, 77 aa, Zea mays
  Clone ID: MRT4577_159444C.1.pep
NLEHIGSWHRSSYYVLPCPMALLTSVFCLLFKCVDRFHAYVQSTSSFVPLCHQWMCCVSSEVQLWCFNPTLYFRGAP

SEQ ID NO: 249847 - protein, 291 aa, Zea mays
  unsure (1)..(291): unsure at all Xaa locations
  Clone ID: MRT4577_159445C.1.pep
MASKACAWDAVLVICLAAAVVAGSAAEAAFDENYVVQWGEDGYHLVIRGTEANITMDQSSGAGFRSKSMYGSGFFHMRMKLPSGYTAGVVTTFYLISQPEDGSRDEVDLEFLGDKAGVPITLQTNVFVDGRGDREQRTRLWFDPAADFHDYKILWNPYQLVMFVDDXPVRVLRNLTGAVPGYPFPGKQTMLIRASVWDGSDWATDGGRTKVDWSRGPFTAGYRGFDVDGCANNGSDACQSPDLWWNAAEYRNITAEQRAAYEDVKRNYMNYDYCADKARFNNTVPIECNYA

SEQ ID NO: 249848 - protein, 242 aa, Zea mays
  unsure (1)..(242): unsure at all Xaa locations
  Clone ID: MRT4577_159446C.1.pep
PRGRPGISDAFPCWMSELPRLQVLVLKXNRFFGQVSEPVLQEKKQSYSCAFPSASIVDLSSNSFSGPLPEGRWFKNLRSMVLTDPSKPLVMDHEVPGVTRTYRYTTAVTYKGHDTSFAEILTALVFIDFSNNTFSGSIPAAIGELGLLHGLNVSHNFLTGQIPPQLGHLSRLEALDLSFNGLSGEIPKELASLDSLTTLNLSXHRLVXSIPASPHFSTXSSSSFQGNDXLCGPPLVRRATTT

SEQ ID NO: 249849 - protein, 170 aa, Zea mays
  unsure (1)..(170): unsure at all Xaa locations
  Clone ID: MRT4577_159447C.1.pep
MSPYSDLLCALQLLAYSFIYQELXNALLRQVHPKRPTPRPADVHIGANPSAEAAXHDKRADDTPAKACDIVDTFCLQXENTPFDNNSFGSYINKYXRHLTAVLEPAQSGCSLKKGAQGATKSLLSXLKDLRFFVAESMNDDAPEVFAYYQDGATNPTFLYFSHGLNEIKS

SEQ ID NO: 249850 - protein, 66 aa, Zea mays
  Clone ID: MRT4577_159448C.1.pep
GNMRDINKKIRQIFKKTILWGRPFYRTKVYYPVHTTIYLFFWDPKINLTGRILKTWELEKPWGPQI

SEQ ID NO: 249851 - protein, 48 aa, Zea mays
  Clone ID: MRT4577_159449C.1.pep
VIKYNTYDGNLTTTPINGAILTLNTRTAQLLLKGMHTSVWTGHKHPEQ

SEQ ID NO: 249852 - protein, 260 aa, Zea mays
  Clone ID: MRT4577_15944C.1.pep
MAMDAERRQAELIAQFSAQAAALSSAPQLAALVLEATSHPALFAFSELLTLPALSKLTGTQYASSLDLLRLFAYGTLNDYKSNSGFLPALLPDQVRKLKQLSVLTLAESTKILPYDQLMQELDVSNVRELEDFLINECMYSGIVRGKLDQLRRCFEVQFAAGRDLTPDQLKNMIETLSDWLGTSDRLLHQIQEKIKWADTMSEVNKKHQKEFEDRVEEAKKSIKADIDLRGHDEFLSESGGIMDFEEDRVRPKRRRQPPA

SEQ ID NO: 249853 - protein, 792 aa, Zea mays
  Clone ID: MRT4577_159450C.1.pep
MAGSKDSSEVSTSNIITPTWEALPAEEQLLFEERQEQLIQEAKAKFLADFKVDRNNKVVRQRATDLASLRPTTITPNRAGGLAPAAIGIVREEIAGAFRDKLGVSMIPGGQSYRKPYDSRFDHHPYPQGTRIPEFAKFSGDQGKSTREHIGQFLAQLGELADTEAFRVRLFSLSLTGTAFTWYATLPPNFILSWGDLEQKFHEHFFSGDYELDLVDLVTLRQEKDESVSDYIRRFQDTRNRCFQIHLTDKQLAGIAFDGLRYYLKERLEGIQFFTLAQLHQRASACESRSKELVRPVHHNVPIVEHNQSSSDDEPKKVYTAEIVWPEQAKSSACYSLQSVQKERQEEVKFTFNVDKCDKIFDELLKNGNIKIDYIVPPADELKRRAYCKWHNSFSHATNDCNVFRRQIQSAINEGRLKFQEDTEPFPMNVIDFNGKKVLIRPNTADKGKDKEVIIGNAREADGNNKISCRKVMAEKTPDGGETLKVTITNSSAGGQAQTRGYAREPILRIADGPVSRRGRSVTSPDGPKRSDGRSGNVEEPRQPRTFKPRRPEIGTWKTNTFKATGRLVKSSPTFDQLLSKYVKKKAGSSNRPTKGPRLPTQVRRQVRPIGPPHQSERTEGHNVQLRPNVPAWTPPPPYPPMPYPYTYIPPPYVPNQMWGMPPYPFGMPQYPAWGAPQTSVFNRLTPPVQDRLRAPQSGPRAQAQQDCRTTQPQRLTNPAGGHTAITSNSMVDCPAIKAGSSAQDADHPTPEAEPSALHQDTSDDVPTPMEEDDLHGEDLVDYGAMPEHLEN

SEQ ID NO: 249854 - protein, 287 aa, Zea mays
  Clone ID: MRT4577_159451C.1.pep
MGRKAIYQHPNKLTHIGSKSRWSPTGFHRYRTAFMWYATLPPNSILSWGDLEQKFHEHFLSGDYELDLVDLVALRQEKDESEDTEPFPMNMIDFKGKRVLIRPSTADKGKDKEVIIDNSREADGNNKISCRKVVAEKTPDGGETLKVTITNSSTGGQPQTRGYAREPILCIADGLVPRRGRSIASPDGPERSNGRSGNAEEPRRPRTFKPRRPETGTLKTNTFKATGRLVKSSPTFDQLLSKYVKKKAGPSNRPDQRDLAYPPRCDDRLGRLDHHTNRKGREVIIFN

SEQ ID NO: 249855 - protein, 56 aa, Zea mays
  Clone ID: MRT4577_159452C.1.pep
LRVVVTGGYHGKWVWADPQGVPRWGGAGEVFDTGVQITDVAQEGCFPCDPPEWEEE

SEQ ID NO: 249856 - protein, 746 aa, Zea mays
  Clone ID: MRT4577_159453C.1.pep
MAGSKDSSEVSTSNIITPTWEALPAEEQLLFEERQEQLIQEAKAKFLADFKVDRNNKVVRQRATDLASLRPTTITPNVSSTNELQSLKAYIDEQREQMQNIIGVMQNDCRRLVRAFDKSSVANFPSHEVELGDNTRNTSVRGCHDQSQPPYGMPMDTYPEQTQIGSKPADLHVSGPSARERGPSGSAAAGPIFNELPRHAPEPPHRAPNLNYPVGRSAYNDGRSAHNHGRSGPVSGQSAHDPFEGDCYLNPRPSQQHFPSHYAMHQPINSGPRAQESFPAPPRRPERNDQTYEPYRANGNAPRSSNQWGERQHTNMQPTPPMFDQRAGGLAPAAIGIVREEIAGAFRDKLGVSMIPGGQSYRKPYDSRFDHHPYPQGTRIPEFAKFSGDQGKSTREHIGQFLAQLGELADTEAFRVRLFSLSLTGTAFTWYATLPPNSILSWGDLEQKFHEHFFSGDYELDLVDLVTLRQEKDESVSDYIRRFQDTRNRCFQIHLTDKQLAGIAFDGLRYYLKERLEGIQFFTLAQLHQRASACESRSKDLVRTVHHNVPIVEHNQSSSDDEPKKVYTAEIVWPEQAKSSACSSLQSVQKERQEEVKFTFNVGKCDKIFDELLKNGNIKIDYIVPPADELKRRAYCKWHNPFSHATNDCNVFRRQIQSAINEGRLKFQEDTEPFPMNVIDFNGKKVLIRPNTADKGKDKEVIIGNAREADGNNKISCRKVMAEKTPDGGETLKVTITNSSAGGQAP

SEQ ID NO: 249857 - protein, 562 aa, Zea mays
  Clone ID: MRT4577_159454C.1.pep
MAGSKDSSEVSTSNIITPTWEALPAEEQLLFKERQEQLIQEAKAKFLADFKVDRNNKVVRQRATDLASLRPTTITPNRAGGLAPTAIGIVREEIAGAFRDKLGVSMIPGGQSYRKPYDSRFDHHPYPQGTRIPEFAKFSGDQGKSTREHIGQFLAQLGELADTEAFRVRLFSLSLTGTAFTWYATLPPNSILSWGDLEQKFHEHFFSGDYELDLVDLVTLRQEKDESVSDYIRRFQDTRNRCFQIHLTDKQLAGIAFDGLRYYLKERLEGIQFFTLAQLHQRASACERRSKELVRTVHHNVPIVEHNQSSSDDEPKKVYTAEIVWPEQAKSSACSSLQSVQKERQEQVKFTFNVGKCDKIFDELLKNGNIKIDYIVPPADELKRRAYCKWHNSFSHATNDCNVFRRQIQSAINEGRLKFQEDTEPFPMNVIDFNGKKVLIRPNTADKGKDKEVIIGNALEADGNNKISCRKVMAEKTPDGGETLKVTITNSSAGGQAQTRGYAREPILRITDGPVSRRGRSVTSPDGPKRSWPGVHFPYTADGPATSKSRGDHVPSNHDDQK

SEQ ID NO: 249858 - protein, 43 aa, Zea mays
  Clone ID: MRT4577_159455C.1.pep
RFFFPGRAGDGSVDIEVCLPPETMAALLHDAEFMHYVSSPSYL

SEQ ID NO: 249859 - protein, 92 aa, Zea mays
  Clone ID: MRT4577_159456C.1.pep
PPLNRPEGPGQASRGNPPPPPPQGTRLFLKGAFPRRLFEGPMVKAPPLLGGSGGVPSVDVFKAPFNSPFRGVCLTPLEPVDRIFLPCPQNHT

SEQ ID NO: 249860 - protein, 915 aa, Zea mays
  Clone ID: MRT4577_159457C.1.pep
MAGSKDSSEVSTSNIITPTWEALSAEEQLLFEERQEQLIQEAKAKFLADFKVDRNNKVVRQRATDLASLRPTTITPNRAGGLAPAAVGIVREEIAGAFRDKLGVSMIPGGQSYRKPYDSRFDHHPYPQGTRIPEFAKFSGDQGKSTREHIGQFLAQLGELADTEAFRVRLFSLSLTGTAFTWYATLPPNSILSWGDLEQKFHEHFFSGDYELDLVDLVTLRQEKDESVSDYIRRFQDTRNRCFQIHLTDKQLAGIAFDGLRYYLKERLEGIQFFTLAQLHQRASACESRSKELVRTVHHNVPIVEHNQSSSDDEPKKVYTAEIVWPEQAKSSACSSLQSVQKERQEEVKFTFNVGKCDKIFDELLKNGNIKIDYIVPPADELKRRAYCKWHNSFSHATNDCNVFRRQIQSAINEGRLKFQEDTEPFPMNVIDFNGKKVLIRPNTADKGKDKEVIIGNAREADGNNKISCRKVMAEKTPDGGETLKVTITNSSAGGQAQTRGYAREPILRIADGPVSRRGRSVTSPDGPERSGGRSGNAEEPRRPRTFKPRRPEIGTWKTNTFKATGRLVKSSPTFDQLLSKYVKKKAGPSDRPPKGPRLPTQVRRQVRPIGPPHQSERTGGHNVQLRPNIPAWTPPPPYPPMPYSYTYIPPPYVPNQMWGMPPYPFGMPQYPAWGAPQTSVFNRLTPPVQDRLRAPQSGPRAQAQQDCRTIRPQRLTNPAGGHTATASNSTKKGDVIKIGTTDVIVQQNNEGLMIFGESADTNKKESTTVNKITDPKYSMPRWCPSGLTRSQKRKLQRLRAKENQEKEAEKIFNDTHLQYPPPQKRWRPKAVEENQTAIKIENKTTTVQLFAGIADSLAIKNGPTVQGPDRPTPEADSSAIHHDTCNDVPTPMEEDDPQGEDLVDYKATPEHLEN

SEQ ID NO: 249861 - protein, 126 aa, Zea mays
  unsure (1)..(126): unsure at all Xaa locations
  Clone ID: MRT4577_159458C.1.pep
TWGINEFVKLRGRTKKRKQRGGESKHPHPLECPPVLGSAQPCFLPLGFSSSSSSSLWARAAGSLNVXGEKGGHGGPECGAHGGCHGGGAAGGGRSRSLRGERHGGRGGEKDGAGNLFYFHPWRRGG

SEQ ID NO: 249862 - protein, 137 aa, Zea mays
  unsure (1)..(137): unsure at all Xaa locations
  Clone ID: MRT4577_159459C.1.pep
MEAQDDCKWRQIPAFGGWNVWDGDTPVTQYFQAGAFFFAAPAEKGDADLFKVPQLPAKPXGYKKWVVRVKGEKKTLVPAAARKGPRRPWVSDQPKWKPKGAVDEDLYKISPQLLCKVKKKKLLRNLLGGCLGLGCIA

SEQ ID NO: 249863 - protein, 261 aa, Zea mays
  unsure (1)..(261): unsure at all Xaa locations
  Clone ID: MRT4577_15945C.1.pep
MAMDAERRQAELIAQFSAQAAALSSAPQLAALVLEATSHPALFAFSELLTLPALSKVRALPLACALLRYSGTRCRTSSLXQYASSLDLLRLFAYGTLNDYKMXNSGFLPALLPDQVRKLKQLSVLTLAESTKILPYDQLMQELDVSNGIVRGKLDQLRRCFEVQFAAGRDLTPDQLNNMIEILSDWLGTSDSLLHQIQEKIKWADTMSEVNKKHQKEFEDRVEEAKKXSIKADIDLRGHDEFLSESGGIMDFEEDRVRPKR

SEQ ID NO: 249864 - protein, 64 aa, Zea mays
  Clone ID: MRT4577_159460C.1.pep
LVTAQHLSTGYNLLQFVFYATVQRHHFLLITSHCSYIIPFCLYTSSSISYSSVLNTYNIQPYTL

SEQ ID NO: 249865 - protein, 292 aa, Zea mays
  Clone ID: MRT4577_159461C.1.pep
MSMLLSRRFSCALARAPSLVRGRPLPPCAARTTPPAPSSPPRRLMSSSSAGWQHSSHRPPPPPPPPHPGADKDQLFRGLEAALGTAFSSEPLAPPPQPMILVISGPSGVGKDAVIKRLQEEREGIHFVVTATSRAMRPGEVEGKDYYFVSKEEFLTMIEREELLEYALVYGEYKGIPKQQIRDYMAKGCDIVLRVDIQGAATLRQILGESAVFIFLVAESEEALVKRLIHRKTETSDMLLVRVATAREEVKHMKNFDYVVVNAQGKLEEAVKQVESIIDAEKSKIHKRHVNI

SEQ ID NO: 249866 - protein, 96 aa, Zea mays
  unsure (1)..(96): unsure at all Xaa locations
  Clone ID: MRT4577_159462C.1.pep
VVRMIKNRKRRMPTEFARXSHGAGHPPRXYPYQITFNYRTLLVSNWTRLSFSEVDYAXGPTTHVVPLTNLDYIGTFILVKPXAHKPWARLITHCVT

SEQ ID NO: 249867 - protein, 98 aa, Zea mays
  Clone ID: MRT4577_159463C.1.pep
RISCQGVGPTTRTKERCSTSGEGTECASGQKMSSASCRGGDPSKPAATGISRTRSLQTNCQHVLSWPCSSARYGKAKWVHPMALLTIIGITSAKWIRR

SEQ ID NO: 249868 - protein, 134 aa, Zea mays
  Clone ID: MRT4577_159464C.1.pep
SNESQWILNYMSSQPPDQRSTATRILAETLFYPLIRVVHRWIHDHTPLPHPVMTRAVVLPPHTAASSPDGGKEAEASCSQSGATSRRRDNYGQKYAPHQGSTRGIGDARSSHKSRQGARTAFLALGDNAGETRV

SEQ ID NO: 249869 - protein, 40 aa, Zea mays
  unsure (1)..(40): unsure at all Xaa locations
  Clone ID: MRT4577_159465C.1.pep
TPPPRPYRRAPXPPPPPPPPCPPGSPNRLSPASTSAPLGR

SEQ ID NO: 249870 - protein, 64 aa, Zea mays
  Clone ID: MRT4577_159466C.1.pep
LFGMRNQVEIGKSKLGGNDTVGRKDGKRSGDSDRLWSGFNRLRLFEALGSDDGTNRDAWFSSSC

SEQ ID NO: 249871 - protein, 109 aa, Zea mays
  Clone ID: MRT4577_159467C.1.pep
GKGGPFLTFFPKGFYFAQKKPVFRAKQNWAGELKHPFPFLDWTGFKKRDFHRGKGAGKPRGPCLTPLGGSNRVGFKKHSHPGPGGEPPPPGGLYGWGPSPGIKTEGGGG

SEQ ID NO: 249872 - protein, 108 aa, Zea mays
  Clone ID: MRT4577_159468C.1.pep
PHVQCMVRESVKRACIHSCHDKSSAVTTLCTTWQDPAVPAHLVNRSSTCSRACQFRSHLPLYGWSQTTRLNAPWRGGFLPVWGEPFFHLEFVIVDAEQDEDPWYFVLV

SEQ ID NO: 249873 - protein, 108 aa, Zea mays
  Clone ID: MRT4577_159469C.1.pep
PKIVAQRCFLTSIGGFAEKYNPVSKRPCIDRLFNEFVVALASSFPASLLSAEVEEVANRVHVGGGELAPTSLVFRLESMLGHGCSDNGDGDCSRGVPFMHDRRSGSPG

SEQ ID NO: 249874 - protein, 85 aa, Zea mays
  Clone ID: MRT4577_15946C.1.pep
KAYPNTLRALANLICLTVTGPSVDGAAPLFNSAVSLSTSPSPTLPNAVAGSGASNTGDMTRYERGCVPPLKGAVTHAGYCDPPHW

SEQ ID NO: 249875 - protein, 151 aa, Zea mays
  unsure (1)..(151): unsure at all Xaa locations
  Clone ID: MRT4577_159470C.1.pep
RTGPDLRVDPILLSRAYAMSDQQPHLLLGEHFSVQLPLPRIVPHHLHQHLLGTCNXVVTPILYSYVQEQQFISFKQLAVVNLAAYFQAHPLLPFNQLVRSPAALLLEQQLLAFHVQDVANIACFLXQQQLVPLYPQDCGNSYAFLQQQQVA

SEQ ID NO: 249876 - protein, 102 aa, Zea mays
  unsure (1)..(102): unsure at all Xaa locations
  Clone ID: MRT4577_159471C.1.pep
KKKKKKKKQKKKQKKTKQKKKTKKKKKTKHQKQKKKTKKKTXKQRKXPAKKPTKQNKKKKNIKTKPKHQTNPSPKKKHKHXRNYTETAYQQIIISTLAPFTI

SEQ ID NO: 249877 - protein, 154 aa, Zea mays
  Clone ID: MRT4577_159472C.1.pep
GGQKLSKGLENPKNMFPQGSRTKALTGGPRPTLFQPKQPRGKTFFPTFRDPGPLFMGKLDSGAPDPNKKNLFPNPNLSGGNHPPNPRGVGVLKLGRANSGPPGGGLLGPPPGPLGGPPGPPPGPRPLNKRVPGADGVKLHLFETAPLAGKGRAP

SEQ ID NO: 249878 - protein, 72 aa, Zea mays
  Clone ID: MRT4577_159473C.1.pep
MADHHRSATQGGGGYADLQRGGSMHGEAQEQDKQGAMMTALKVGMVATLRRSMLVLSGLILAGTVIALTEAT

SEQ ID NO: 249879 - protein, 120 aa, Zea mays
  unsure (1)..(120): unsure at all Xaa locations
  Clone ID: MRT4577_159474C.1.pep
MAMETCFRAWALHAPAGSKDRLLVCNLGLPSKRALAPLSVGRVDTRRPRHVCQCKNAVDQVEAADXLIRDWLVMAYQTPMLEEILAPQSRPYRMIAPYIDELIKGFPVMITCCLDNTAYS

SEQ ID NO: 249880 - protein, 122 aa, Zea mays
  unsure (1)..(122): unsure at all Xaa locations
  Clone ID: MRT4577_159475C.1.pep
MPSCEMLIIFISXVSELVLLESGDLLSSSVGALAYDVWIIAKLGGSSAFFMNSWDDYDGYMLVHILQQNNVHRDGXLNDKHERXTSVDVVTLKHDGERECMLYRNPSXADMLLTDAELELRL

SEQ ID NO: 249881 - protein, 96 aa, Zea mays
  Clone ID: MRT4577_159476C.1.pep
ILHSISKINGRRAIFAFVCSTCRAIVELQLSFSVALSLVPRRVFEMANVLQPIHPLLLDCMITESLWCSGCLISRASRVNSSGSSRVSLPAGRAVS

SEQ ID NO: 249882 - protein, 51 aa, Zea mays
  Clone ID: MRT4577_159477C.1.pep
KYRSVRIFYRKGSTKVRGFEKEVVFFVKILLREGSGGVTYFIAFDVVEKRK

SEQ ID NO: 249883 - protein, 116 aa, Zea mays
  unsure (1)..(116): unsure at all Xaa locations
  Clone ID: MRT4577_159478C.1.pep
TGGESHARATPSRHCHVRQDKQRHEQQQXRSHERQPHPHFQGXDELHQPQQXPSEHEAWPVXTQRQQCHSPERHQTTRRICGFYSSSSNLKNCHEFLMQQCSPLTMAFLQSRLIQP

SEQ ID NO: 249884 - protein, 79 aa, Zea mays
  Clone ID: MRT4577_159479C.1.pep
IWSYLGLRTYFVCLDLCIAIISNSRVVDSIFPCSMLRFRFLQVPALICLFSCTCLLILQCDGIRFCLPCLRQSVCVRMK

SEQ ID NO: 249885 - protein, 259 aa, Zea mays
  unsure (1)..(259): unsure at all Xaa locations
  Clone ID: MRT4577_15947C.1.pep
MAMDAERRQAELIAQFSSQAVALSSAQQLAALVLEATSHPALFAFSELLALPALSMLAGTQYSSSLDLLRLFAYGTLKDYKNNSGSLPALLPDQVRKLKQLSVLTLAESTKILPYDQLMQELDVSNVRELEDFLINEXMYSGIVRGKLDQLXRCFESXNFXSRERSXXQPGSRLKQTWISRILNWKWVGGNIQDKPRWASKFQGGKSKXVXHNGVDGAKKSIKADIDLRGHDEFLSESGGIMDFEEDRVRPKRRRQPPA

SEQ ID NO: 249886 - protein, 139 aa, Zea mays
  Clone ID: MRT4577_159480C.1.pep
PRPAGGGALKVDGGKGPKAWGQLGPQKGGLGTPPLAGGGPKPPPPFGVLWPKGKWLPRPPLKAVGILRAGWGGGHGKKRLSKLVRPGFKKGLPLGKNWDPRPLFVLFLGALGSLEGPFGFGIPLYVKGWEFGRGPVSFF

SEQ ID NO: 249887 - protein, 114 aa, Zea mays
  Clone ID: MRT4577_159481C.1.pep
APTARRRLSLGSLPPAVMDVRPSSCPASRAQAASSSSSGHRLRARPQAAVRPIPSLSRVPPLIGVRPHFWPWDTRPPRRSLGCRSVLSHPGSLLSLVRLRKPLVSSSSVPISSL

SEQ ID NO: 249888 - protein, 76 aa, Zea mays
  Clone ID: MRT4577_159482C.1.pep
VYTTKFQWNSLSISMNMKYHRCRLDVNTSHLFFYLPHYWSKEMLKISSVFFFLRDRFPSIQCLKGINDPKQKRTLG

SEQ ID NO: 249889 - protein, 57 aa, Zea mays
  Clone ID: MRT4577_159483C.1.pep
RSGESNHRPTADTRAGDSQDSGKPSPYLAQHFSSTTATLNPVLLQTQLLPSTSCSAT

SEQ ID NO: 249890 - protein, 59 aa, Zea mays
  Clone ID: MRT4577_159484C.1.pep
CCASATVWSVVLETYSIEYKLGDVKKSWGPSVEVRKGLVAFGSLQCERGRADPGEIMIL

SEQ ID NO: 249891 - protein, 133 aa, Zea mays
  Clone ID: MRT4577_159485C.1.pep
RPEGSLGPRKKTRAPPKTARGPAPPPLFEEKPLEMNEPCRQACMYACPGVTGGSPQALRGFIGRWSPGGPACDNHFIWGEQKIGFQLIGPFLSKLFLFKKKTRRGAPQCNVPQMGVFPRLKGKKKKGRGAVFF

SEQ ID NO: 249892 - protein, 51 aa, Zea mays
  Clone ID: MRT4577_159486C.1.pep
SLNVHRDANNIIRRTAGKRPPETPLILTDGGGCVIYYTSHYKGGKNGSQTP

SEQ ID NO: 249893 - protein, 72 aa, Zea mays
  Clone ID: MRT4577_159487C.1.pep
LLKFNLCLPELFTSAGQHACLTPFYNRRSHTHQQTNSKMPANKNNSEQCSVLLPEIKNMSEKEGTKILTVNV

SEQ ID NO: 249894 - protein, 203 aa, Zea mays
  unsure (1)..(203): unsure at all Xaa locations
  Clone ID: MRT4577_159488C.1.pep
MVPRRQRGRRRGRHLVQAPAAAAAAAAAVAPPPPXAAAPPPRSRGGPRLRCCSASAPSPSSPSPPPASTPPRRFRTPTPPKEQKLRRRPGHRRPLSXLGRAPAADADEEDSEPGGMSXRGLRAGAGGAPPAGPGEGXRPGGPRWTPSPRSSSAASRTTNASSASTPSSTTPRCSSSAPPPPAASASRMPRQISFESRVRFVRS

SEQ ID NO: 249895 - protein, 128 aa, Zea mays
  Clone ID: MRT4577_159489C.1.pep
APARYGSSSPTRSSPRWPSCPGARRCRCRRPAAAAAAAAPPPRSRGGPRLRCCSASTPSPSSPSPPPASTPPRRFRTPTPSKKQKQRRRPGHRRRPTRRRARSRRLLSRRWAARRRQTPTRRMASPAG

SEQ ID NO: 249896 - protein, 120 aa, Zea mays
  Clone ID: MRT4577_15948C.1.pep
ARIAMLSMLVFYFKAGQGKTPLGALGLLFACCRPPRGSCHQSSLWACAHRSIESPQLVFDFQRRGTAASDQTHATKWGVFFFLLPGMSPVGYSSLVMEPIKAELVSEGPFVPLISHSPLL

SEQ ID NO: 249897 - protein, 85 aa, Zea mays
  unsure (1)..(85): unsure at all Xaa locations
  Clone ID: MRT4577_159490C.1.pep
TPQTLLFILPPHIFFXIFIPYQFHTXNTHYHFTPTLYPTLIPYNIPQFPQFSLIIKKPPPPPFLSYFSPFSKHPFPYIFFLSTFQ

SEQ ID NO: 249898 - protein, 51 aa, Zea mays
  Clone ID: MRT4577_159491C.1.pep
EQKFGLEPYQLVVKVPFFQVAPVMSLLELGELVVHLLALGLIYVLVYAYAD

SEQ ID NO: 249899 - protein, 258 aa, Zea mays
  unsure (1)..(258): unsure at all Xaa locations
  Clone ID: MRT4577_159492C.1.pep
DPRVRAPRRRRPAGSRRAGPQRRSPKQSQRRRTAVTARELRXCQGLSRAGKGSCRRPRPRPRPPDAWVTRPRQRRARSPRTPVRRRXSRRDDGEVAXRRRRRRQCPRTSRSSATHTTPXPVVXTTRRSRARACRTRTSRRRRSRRTPCNRHSRTHRPRSPTPCSRHRRCTTPRRSCSRSSRRSSGRRRTCTCRTRTRRRRRSLTTSSRTTTARPGRTRRRCTTRTASSTTRTPTPAASCERRELVGAARTPPAAVGSE

SEQ ID NO: 249900 - protein, 113 aa, Zea mays
  Clone ID: MRT4577_159493C.1.pep
VKKNPFFLKSFQGNEKHRGVLWVPRYKKNRGFPTLREKKGGGAKTKRKGGTRGEEKLGKPVKNSQWVFFQWGGGKRPTFMGPGWKLQNRAWTKWGFGGPPPHPGYGTLGGRAS

SEQ ID NO: 249901 - protein, 550 aa, Zea mays
  unsure (1)..(550): unsure at all Xaa locations
  Clone ID: MRT4577_159494C.1.pep
PVFIGVLAVDCELGGGQDRLLRAATFAFIPLLLLVCVQSAAPVLGFTRSEFPEDFVFGSATSAYQYEGAVGEDGRSPSIWDTFTHAGRMPDKSNGDVAADGYNKYKDDVKLIIYNNFLGSRLNFXIKYTDGRGAINPKGIEYYNNLIDELVTHGVQVHVMIYQLDLPQILEDEYGGWLSPMVVEDFTAYADVCFREFGDRVSHWTTLDEVNVAAIGSYDIGQIAPGRCSDPFGTNPRVRGNSSVEPYIAAHNMLLAHASATRLYREKYQAVQKGVVGINIYTMWSYPLTNSTADLEATQRFLDFYSGWILEPLVFGDYPSVMKKNVGSRLPSFSKVQSEAIRGTLDFIGINHYYSFYVNDRPLEKGIRDFSLDIAADYRGSRTXIANRSGKVFHQQSSEFRHDRYILFILLQHAPTSIPADPRGLQLLVEYLSEAYGNLPIYIQETGYATTNGSLHDTDRVDYMKTHISSTLAALRNGANVKGYFAWCFLDVFEYLSGFMSQYGLYRVDFEDEALPRQARLSARWYSKFLENKGIHVEDELDDAGSHVEQ

SEQ ID NO: 249902 - protein, 123 aa, Zea mays
  Clone ID: MRT4577_159495C.1.pep
MELDPSEALVAAAVEAKGEEAANGRREFVMGRNVHTSCFAVKEPDADDEETGEREATMASVLALYRRSLVERTKHHLGMLRLGRSSPIDFDFLLLPLDLARGGLIPSHTSAPDDLAACGLRHY

SEQ ID NO: 249903 - protein, 222 aa, Zea mays
  unsure (1)..(222): unsure at all Xaa locations
  Clone ID: MRT4577_159496C.1.pep
GLKTRINAQLVAVAKEHAAYGDTVESVAGQGVKLLNILRKYCEAFSSMVEGKNRVSTDKLSGGARIHYIFQSIFVKSLEQEIDPCKSISDEDIRTTIQNSGGPKGAMFLPEVPFEILVRKQIGRLLDPSLQCAQFIYDELIKISHSCLISELQKFPALKKRLSEVVCSFLRDGLRPAETMITHIIEMEMDYINTSHPSFVGGTKXVELAKHEVLPPKTSASL

SEQ ID NO: 249904 - protein, 356 aa, Zea mays
  unsure (1)..(356): unsure at all Xaa locations
  Clone ID: MRT4577_159497C.1.pep
ILLREFSQNEHILIIHATTKRREDFTAYADVCFREFGDRVSHWTTLDEVNVAAIGSYDNGQIAPGRCSDPFGTKKCTVGNSSVEPYIAAHNMLLAHASATRLYREKYQAVQKGVVGINIYTMWSYPLTNSTADLEATQRFLDFYSGWILEPLVFGDYPSVMKKNVGSRLPSFSKVQSEAIRGTLDFIGINHYYSFYVNDRPLEKGIRDFSLDIAADYRXAPTSIPADPRGLQLLVEYLSEAYGNLPIYIQETGYATTNGSLHDTDRVDYMKTHISSTLAALRNGANVKGYFAWCFLDVFEYLSGFMSQYGLYRVDFEDEALPRQARLSARWYSKFLENKGIHVEDELDDAGSHVEQ

SEQ ID NO: 249905 - protein, 40 aa, Zea mays
  Clone ID: MRT4577_159498C.1.pep
SVRDITSGQTPYVGQQFYKLISCRRRSRNLPPPDISRFFH

SEQ ID NO: 249906 - protein, 417 aa, Zea mays
  unsure (1)..(417): unsure at all Xaa locations
  Clone ID: MRT4577_159499C.1.pep
VLGFTGASGPEDFVFGSATSAYQYEGAVGEDGRSPSIWDTFTHAGRMPDKSNGDVXADGGNKYXDGRGAINPKGIEYYNNLIDELVTHGVQVHVMIYQLDLPQILEDEYGGWLSPMVVEDFTAYADVCFREFGDRVSHWTTLDEVNVAAIGSYDIGQIAPGRCSDPFGTKKCTVGNSSVEPYIAAHNMLLAHASATRLYREKYQAVQKGVVGINIYTMWSYPLTNSTADLEATQRFLDFYSGWILEPLVFGDYPSVMKKXIKGIRDFSLDIAADYRAXQHLFPLIPEDCXLVESLSEAYGNLPIYMAYRSYATTNGSLHDTDRVDYMKTHISSTLAALRNGANVKGYFAWCFLDVFEYLSGFMSQYGLYRVDFEDEALPRQARLSARWACSFFTDSSPGIVPSRITSLIYINFDELE

SEQ ID NO: 249907 - protein, 50 aa, Zea mays
  Clone ID: MRT4577_15949C.1.pep
LLAGKRVYRSLKQVLLLLVIRVRLVVHFISLCTWLPITPNSWVMPQIKCL

SEQ ID NO: 249908 - protein, 370 aa, Zea mays
  Clone ID: MRT4577_1594C.1.pep
MTGHASLLLLLLPALAAVLLCCPLAQCGQQNYTSMFSFGDSLTDTGNLLVSSPLSNHIVGRYPYGITYFHRPTGRCSDGRLVVDFLAQAFGLPLLQPYLQSRGKDLRRGVNFAVGGATAMDPPFFQEIGASDKLWTNLSLSVQLGWFEQLKPSLCSSPKECKEYFSKSLFLVGEIGGNDYNYAFFKGKTLDDAKTYVPTVAAAVTDATERLIKAGATHLVVPGNLPMGCSSAYLTLHPGRNGSDYDAAGCLRTYNDFAQHHNAVLQRKLRALRAKYPQARIMYADYYGAAMSFAKNPKQFGFTQGPLRTCCGGGGPYNFNPKASCGVRGSSVCADPSAYANWDGVHLTEAAYHAIADSILNGPYTSPRLL

SEQ ID NO: 249909 - protein, 390 aa, Zea mays
  Clone ID: MRT4577_159500C.1.pep
MAATFAFIPLLLLVCVQSAAPVLGFTRSEFPEDFVFGSATSAYQYEGAVGEDGRSPSIWDTFTHAGRMPDKSNGDVAADGYNKYKDDVKLIIDNNLEAYRFSISWSRLIPNGRGAINPKGIEYYNNLIDELVTHGVQVHVMIYQLDLPQILEDEYGGWLSPMVVEDFTAYADVCFREFGDRVSHWTTLDEVNVAAIGSYDNGQIAPGRCSDPFGTKKCTVGNSSVEPYIAAHNMLLAHASATRLYREKYQAVQKGVVGINIYTMWSYPLTNSTADLEATQRFLDFYSGWILEPLVFGDYPSVMKKNVGSRLPSFSKVQSEAIRGTLDFIGINHYYSFYVNDRPLEKGIRDFSLDIAADYRGKTVCHSIHDYPFIACNSLDTFPGTSDSFI

SEQ ID NO: 249910 - protein, 119 aa, Zea mays
  unsure (1)..(119): unsure at all Xaa locations
  Clone ID: MRT4577_159501C.1.pep
LPLNFRNDATELANGALGIRARAQGMXAACHTLDKSIDVFRKANAKLHSQLKALHTRKMWAPWINTPLKGMDINDRMMMTRLASTDRNGLPGRPWYKHLIDSPTMNNYWAEVHTVICDA

SEQ ID NO: 249911 - protein, 158 aa, Zea mays
  Clone ID: MRT4577_159502C.1.pep
MKKNKKASVTSHWTLLLTIEHAPTSIPADPRGLQLLVEYLSEAYGNLPIYIQETGYATTNGSLHDTDRVDYMKTHISSTLAALRNGANVKGYFAWCFLDVFEYLSGFMSQYGLYRVDFEDEALPRQARLSARWYSKFLENKGIHVEDELDDAGSHVEQ

SEQ ID NO: 249912 - protein, 70 aa, Zea mays
  Clone ID: MRT4577_159503C.1.pep
KRDDDDGLERKLRITFSSSLISIPGSNPSFLVLFVTPTPYPDACHRLYQHPLLLLPYAAEAKNQSSNAPR

SEQ ID NO: 249913 - protein, 93 aa, Zea mays
  Clone ID: MRT4577_159504C.1.pep
MSSEQTFIAIKPDGVQRGLVGPIISRFESRGFKLAALKLVSPPRELLEKHYADLSEKPFFPGLVTYMLSGPIVAMVWEGRDAVKTGRTILGAT

SEQ ID NO: 249914 - protein, 116 aa, Zea mays
  unsure (1)..(116): unsure at all Xaa locations
  Clone ID: MRT4577_159505C.1.pep
XFXSGSSRVLXXPXLLARGXXVXXVSLVLXXALPXXXXXSLXRXGRXGRFXXXGVALXFVPRXXXXXLFALPXFXXVPVAAPPAXVAALLWLFLVCFCPPPFLCFVSGVCSCGPPP

SEQ ID NO: 249915 - protein, 110 aa, Zea mays
  unsure (1)..(110): unsure at all Xaa locations
  Clone ID: MRT4577_159506C.1.pep
GARDHNRSHREVCSSSLDGGVLPGNQIDLSECAAARTSIDGRCASHCLSSVLATRKEEEEEEENYDDDARCCTFLGSTATAVVEDEEADTSSIARAQAVSSVSVGAVCFX

SEQ ID NO: 249916 - protein, 163 aa, Zea mays
  unsure (1)..(163): unsure at all Xaa locations
  Clone ID: MRT4577_159507C.1.pep
MNITYTASDGGNVTLSDGKNVDCIIHVGGTVERQSVSDLQKQFQQVAAYAMHLNPIYGASFFVFAVVLVSVVCVCCKFAKRRGNDGLPYQQLEMGGQAPNSSGVDITATTTDGWEHDWDDDWDDEAAAGPVDKKTXTSSVSANGLPLRSQTNSKDGWNVDWDD

SEQ ID NO: 249917 - protein, 248 aa, Zea mays
  unsure (1)..(248): unsure at all Xaa locations
  Clone ID: MRT4577_159508C.1.pep
MDAISSLLLQEGWRKGPWTALEDRLLTEYVQQHGEGSWNSVAKLTGLRRSGKSCRLRWVNYLRPDLKRGKITPDEETVILQLHAMLGCRWSAIARCLPGRTDNEIKNYWRTHFKKARPSRRARAQLLHQYQQQQEEERRQYLQSLQLLQQEQQQQQLLLQQQSQXGGETTAAGAAKPAGAXHQAVMAMLDSQQSTAECYCSPVPVVPEQCCALPADDDDAMLWDSLWRLVDGDGRGCGDGDDSSGVAY

SEQ ID NO: 249918 - protein, 151 aa, Zea mays
  Clone ID: MRT4577_159509C.1.pep
MKRVVGSPGTWSGMALRVSQCVFAAASSAAMSSAFGSLNYSAYFYLNTAVVLQLLWSMGFACQDIFALRNKKDLHAEPELVLLRAIGDWVLAILMFSGSCAAASVTIFFMKDVKFCAEYRRLPCGQIELSVALAFITWSLQAASSFSGFWL

SEQ ID NO: 249919 - protein, 76 aa, Zea mays
  unsure (1)..(76): unsure at all Xaa locations
  Clone ID: MRT4577_15950C.1.pep
YKPSWRRPKGIDSCVRRKCIGYTLIPNICYGSHKSTRLYLLNMFKXKFVLHIFLSFIFCFYSLSNSYCSYSCLLPR

SEQ ID NO: 249920 - protein, 57 aa, Zea mays
  Clone ID: MRT4577_159510C.1.pep
DSYLQMSLNWRIIRLVRSITIMIATLFMGRGHHSISLSEAARCVYKCRGDPHYAMNP

SEQ ID NO: 249921 - protein, 56 aa, Zea mays
  unsure (1)..(56): unsure at all Xaa locations
  Clone ID: MRT4577_159511C.1.pep
NQEIGGPKSXLPFPEKKKKSXVFGYFMGMTAALLEGVLHFASPFDGCSPFHMLGSR

SEQ ID NO: 249922 - protein, 465 aa, Zea mays
  Clone ID: MRT4577_159512C.1.pep
MATAAAAAAAACPLLLLAALLLAVSATTSALTDDVLALVVFKMDISDPSGRLATWTEDDDRPCSWPAVGCDARTGRVTSLSLPAASLSGRLPHALLRLDALLSLALPRNNLSGPVPPNLLTALPRLRALDLSSNRLAAPVPAQLFAQCRAVRAISLAHNQLSGYIPPAVASCASLVSLNLSSNRLAGPIPDGLWSLPSLRSLDLSGNELSGSVPGGFPRTSSLREVDLSRNLLAGEIPADVGEAALLKSLGLGHNLFTGSLPDSLRRLAGLQFLGAGGNALAGELPAWIGEIRALERLDLSGNRFAGNIPYTIANCKNLVEVDLSCNALTGDLPWWVFGLPLQRVSVAGNQLNGWVKVPDDAAMTLRVLDLSCNAFSGEIPLRITAFAGLQSLNLSSNSFSGQLPAGIGGLRLLEVLDVSANRLEGTVPPEIGGAVALRDLRMGRNSLTGRIPAQIGNCSSLVAL

SEQ ID NO: 249923 - protein, 147 aa, Zea mays
  Clone ID: MRT4577_159513C.1.pep
MATTPGLCGSVLLSTSFLRKQAMASVNMRMLKANAGVFGLKGGRGGRVSAMASYNVKLITPEGEQEFECPDDVFILEKAEEFGIDLPYSCKAGACSSCAGKVVSGKVDQSDGSYLDDTQIGNGFVLTCVAYPTSDVVIQTHQEDELF

SEQ ID NO: 249924 - protein, 123 aa, Zea mays
  Clone ID: MRT4577_159514C.1.pep
MPMATAIGFVLLTASSILAIHRSWGVDAAATASVVASYASLALLLRFMRAFESAPPGSPARGRAKAGVWLTTALLTAAFSWRTTVALLVPWPAGAAAVCFMGASTVAGGFYALFLLPSSRDDS

SEQ ID NO: 249925 - protein, 66 aa, Zea mays
  Clone ID: MRT4577_159515C.1.pep
LDFTFSQQIARKRGRLQQTPSEIAHHAEAGTSSIPGHLSTPRDGLKRSRHQLKSITKPVPMTDDYG

SEQ ID NO: 249926 - protein, 102 aa, Zea mays
  unsure (1)..(102): unsure at all Xaa locations
  Clone ID: MRT4577_159516C.1.pep
RKGRKSRVCSARRXCGRWISFFFFSFSLPTSLSLWSAFFPLPPLAWRLSPLPICFGLWRLFLRHAFLLARRDETRRGGGASARVGVREGHRGVDETTGPARG

SEQ ID NO: 249927 - protein, 61 aa, Zea mays
  unsure (1)..(61): unsure at all Xaa locations
  Clone ID: MRT4577_159517C.1.pep
KPVISKISVVIIPPPIXNSRGLYRYLLXPTYNNAILDPHLPVEDITDSLKGAGGKTMYSTH

SEQ ID NO: 249928 - protein, 110 aa, Zea mays
  Clone ID: MRT4577_159518C.1.pep
PSSASTPPYARLAPTRSIHGACLRCPASCLLCSPAPAACLCSNSSVAVLPWFMLQLAIESPAPLSAHGHCTELLPAVCDAHVMDAMRSLRVFVSEPTRPQPRFAPRVAAH

SEQ ID NO: 249929 - protein, 116 aa, Zea mays
  unsure (1)..(116): unsure at all Xaa locations
  Clone ID: MRT4577_159519C.1.pep
NLTKVFPKMGSRKKVLFGLRRNARFILRKSARKITKGIFHVQVSLNNPFLTVPNPQGRVVFWSSAGPWGLKSXKKASPYAGKKTAVNVFRPGGLQRAKFLVKGVGSEKNPDLQAFV

SEQ ID NO: 249930 - protein, 85 aa, Zea mays
  Clone ID: MRT4577_15951C.1.pep
GAPLVLLRGRAPWGAGAACRARARPLVLGVAAVRRRMDLGGPNYAPPATPGAPAPATASIIISGVLAKPGLFITFIRLLKSTGVG

SEQ ID NO: 249931 - protein, 73 aa, Zea mays
  unsure (1)..(73): unsure at all Xaa locations
  Clone ID: MRT4577_159520C.1.pep
HASTDAWVRTGSNYQVSDSAQFTXLLTQGELTGQSWAKDVQVTNERVSQIIMHMSPDHTAIQFMWVWEEFFYI

SEQ ID NO: 249932 - protein, 112 aa, Zea mays
  unsure (1)..(112): unsure at all Xaa locations
  Clone ID: MRT4577_159521C.1.pep
MARVRKSYVKAGEIAEEVIGNDQTVQAFVQNENAPRLYPEALLRTLTYRMRGRHRKGLGLGYMHYVLFLWEARVIXFNRVALHKRIWNGVECFTSMRQGQIHGSVLGQAVPN

SEQ ID NO: 249933 - protein, 105 aa, Zea mays
  unsure (1)..(105): unsure at all Xaa locations
  Clone ID: MRT4577_159522C.1.pep
HRSEVGISDLGAMSWXAYVRKQLICDIKGQQLTAATICCHNXFLWEQSIAFPDFMTEDMGNIMNDFDEPEHLAPTCLFLGPSKYMVIQWXPGAVIRGNNGLGCIN

SEQ ID NO: 249934 - protein, 84 aa, Zea mays
  Clone ID: MRT4577_159523C.1.pep
RSDLLRLVIVADVVLIRLFSLLMGRGFGMLRYINSTRYTRVMMSQVRTESITYYRTRLSFISAYGSAHGEAHKQAHKQAHKSAE

SEQ ID NO: 249935 - protein, 87 aa, Zea mays
  unsure (1)..(87): unsure at all Xaa locations
  Clone ID: MRT4577_159524C.1.pep
KGQMNFNFGRRGFDFFFQPQVPTTRDALANQTVLFILRXLNLTVPVLGSAGLVLLLVTFSIAEDVADPTVRLLQAQAKLRRLSWASL

SEQ ID NO: 249936 - protein, 121 aa, Zea mays
  unsure (1)..(121): unsure at all Xaa locations
  Clone ID: MRT4577_159525C.1.pep
TRRRRAPMPARRRKGPKGRPAATPPRPRPAGSSSPARPASSPRPRTLPPQQPSPAGGRXTSPEAAXRRRRRRRSRERRPRARWADXPLYRREPHRRGRSARAPRRERKRDEGPEEGKFEVG

SEQ ID NO: 249937 - protein, 107 aa, Zea mays
  Clone ID: MRT4577_159526C.1.pep
RHRRPFARLCPSCEGEIYPRVRASSSAPSPDEHSQGIPTPFFPSLLYETGIPNHERDLFSYLLSVPEPGSYLVITTAVYMRYTCNFNFLGALLLVCPWQSQFFFLSR

SEQ ID NO: 249938 - protein, 167 aa, Zea mays
  Clone ID: MRT4577_159527C.1.pep
MAAFATGSTTARATLASPTSCQPAARRAPARWMPLRCSPPALGLRGGARSRRSATLRVEAKKQTFSSFDELLEKSEKPLLVDFYATWCGPCQYMVPILQEVSEKLGDKIQVVKIDTEKYTSIASRYRIEALPTFIIFKDGKPCYRFEGALPVDQMIEQIENALAVTK

SEQ ID NO: 249939 - protein, 125 aa, Zea mays
  Clone ID: MRT4577_159528C.1.pep
TLAPHHTTTHDAHCSHTFPFSLVHLHRFCTQTQTLTVSTHTRTKRQRCSGSVPMYVIVRPSRSYGPIQNAIAVLNLLSLLVGMILLCVGTFVYFAPGAVFVTSTLLPHLVLVLGATISMVPFLGY

SEQ ID NO: 249940 - protein, 67 aa, Zea mays
  Clone ID: MRT4577_159529C.1.pep
IRSKNERGGFNNNYMGWYRDEPKKKDNTNQRTIYSRGDSTYLDKDRGVQRANIYITFTSQKTGSNPI

SEQ ID NO: 249941 - protein, 75 aa, Zea mays
  Clone ID: MRT4577_15952C.1.pep
SYREARAMTEMNGMPCSSRPMRILPAARRNHTGVDMLPLALGRFSWHRRSRLGGGLPAFFLPRPAFWLLSQVPRS

SEQ ID NO: 249942 - protein, 65 aa, Zea mays
  Clone ID: MRT4577_159530C.1.pep
KGPGGLFLLLTRVAYKIEEKGLLESFPQLGHYLKPSPRPAGISRFCAKKTILFFIAWTLPWGASF

SEQ ID NO: 249943 - protein, 119 aa, Zea mays
  Clone ID: MRT4577_159531C.1.pep
MARSSFKLEHPFERRQAEANRIREKYPDRIPVIVEKAERSDIPDIDKKKYLVPADLTVGQFVYVVRKRIKLSAEKAIFIFVKNTLPPTAALMSAIYEENKDEDGFLYMTYSGENTFGLL

SEQ ID NO: 249944 - protein, 237 aa, Zea mays
  Clone ID: MRT4577_159532C.1.pep
MARSSFKLEHPFERRQAEANRIREKYPDRIPVIVEKAERSDIPDIDKKKYLVPADLTVGQFVYVVRKRIKLSAEKAIFIFVKNTLPPTGLPYHRGEKQNKTYLSMVPVCTMLLLFLVHAAALMSAIYEENKDEDGFLYMTYSGENTFGWVYEVAPHPRRWIDVAPCPIRRTLRKPPQPEARLRRIRLCDPRKVANMSTVLLRPTPGTGQGFGRKKHGCGRRLHQAGRRGDQGERDSD

SEQ ID NO: 249945 - protein, 204 aa, Zea mays
  Clone ID: MRT4577_159533C.1.pep
RRISADVGADVPVRRSRRNSFNAAEAEEAGEAVAVDRKPKRKNQENDEGVAVSAQARVTRRSNLEWSATVLPPAVEKKRGRRNAAESDVQKSALVEVTARTTRSRSIVPVVVPPTVVENKRRKTGDPQTTVELDMLSDVPRNDFPATRSLRNKIVHVNNSVVDETHTTRQLENKMRPSTRRHQQVASSPEDKGQKIPATSKSPL

SEQ ID NO: 249946 - protein, 110 aa, Zea mays
  Clone ID: MRT4577_159534C.1.pep
VRTAVRTSHSRACSMKDCSMSELLAYALIFTLLFTAAATPTAGLTMRADLTHVDKGRGFTRWERLSRMAVRSRARAASLYQRGGHYGQPVTATAVPSSGEYLIHFNIGTP

SEQ ID NO: 249947 - protein, 120 aa, Zea mays
  unsure (1)..(120): unsure at all Xaa locations
  Clone ID: MRT4577_159535C.1.pep
SPVSEVTSSLGGTLRMDGAVNVDVNKFQTNLXPYQEFHCMLSANTPAISAEKAYHKQVXMVKNTNCVLEPSFMMDNGDPRIEMNMDCGHMNRGDELSKDANMAVGTIKTKRTVQGESWSR

SEQ ID NO: 249948 - protein, 60 aa, Zea mays
  Clone ID: MRT4577_159536C.1.pep
KTRGHNTEGPTKTQGTFLGGGGQNKRRGGGGGSAFFTIHITRNHRVISNLKKRKTPGPKN

SEQ ID NO: 249949 - protein, 128 aa, Zea mays
  Clone ID: MRT4577_159537C.1.pep
AGPCGIKWANIVFFPLDGQSVTEPSPGESFKAQCHAIGDSTWMFSSMFRSNKPIRVCPPQSHTCRLFRSHRFLFLSPDHYRRKPPLLFVIGRCIWPQLTSESVQCHCSDQSLVNLNKQCNCRIIGIKN

SEQ ID NO: 249950 - protein, 87 aa, Zea mays
  Clone ID: MRT4577_159538C.1.pep
MQNLTQYQAVERMNPMLVPTDLDVGTMVTFPVLCQCPAAAENATTLITYVMQPRDTLCNIRQMITEVDWSRQKMTAYYNFGGPQQRC

SEQ ID NO: 249951 - protein, 283 aa, Zea mays
  Clone ID: MRT4577_159539C.1.pep
MVTVSQSSDPEAVVRNILNQVKPLSNNAERRGEDSSGAVSLRKKNPVIATILSRIRLPFPNQKQDNGGGRDKHEHVRSEIHKNLKCSRCDKDGDPALDGTGFAATGHKASIPGVQDYADIGGFGEISGCLQKMNSTHQQIGSPTEEDLGSWGHHCDPSTVPDTILQCSAGEEVSFVFTNQVDGKLVPVESMVRSAAHQQNGIAATGEKGVQIPKSPSKPGKQSLNGKNLKMGFHLKNSSLKCSTKSRPSPNCLQGLMKTSPFLDQPQIKKLHVASDISDDDFV

SEQ ID NO: 249952 - protein, 34 aa, Zea mays
  Clone ID: MRT4577_15953C.1.pep
TTPTPSQLCRIDDHMFSHHTMFVWIVNGTMLPAG

SEQ ID NO: 249953 - protein, 45 aa, Zea mays
  Clone ID: MRT4577_159540C.1.pep
TLTSTSTEGKHRYHALVTVHAVYLFNSSEHIVTYAKYSPFYSRDL

SEQ ID NO: 249954 - protein, 257 aa, Zea mays
  unsure (1)..(257): unsure at all Xaa locations
  Clone ID: MRT4577_159541C.1.pep
MPHHHHTNPSHPPAARKLLSWRRVVAACATVAALALLLAAAPATEDPSRWRSYLLGPLPGGTRKETXRPQSWPEASRAPPPPXLPTEAPLSSFSEINLSARIAPAAAPSMFLAPSSSPAEIFYDGSMEEPEHPDIKRNPPKESSPFLKEEPIFSGLPTMSSDVNGENVMDTKSVLPVMPEAPLWSTAADEELIYAKKEITNAPLTSDDPDLYAPLFRNVSIFKRSYELMERLLKVFIYHDGAKPIFHSPEXKGIYAS

SEQ ID NO: 249955 - protein, 46 aa, Zea mays
  Clone ID: MRT4577_159542C.1.pep
VKINIQITTGLIQIENHLILQENRHTMKLDFTYFQSSNMHDNIHFK

SEQ ID NO: 249956 - protein, 93 aa, Zea mays
  Clone ID: MRT4577_159543C.1.pep
FLVFVRAAVIVSVLSSSGLRFLARWCGWLSSACLFGPVRVPWSFAVCLPCVPCSLGLVFVSRRGGSAVVLHTPLAWCRARLKARGSPEIPAGP

SEQ ID NO: 249957 - protein, 51 aa, Zea mays
  Clone ID: MRT4577_159544C.1.pep
VASLRIQSPRHHRIIVCPLPRRRHGLPLRHPHRPGRSGRAGYSGSGACGRA

SEQ ID NO: 249958 - protein, 76 aa, Zea mays
  unsure (1)..(76): unsure at all Xaa locations
  Clone ID: MRT4577_159545C.1.pep
NIFGDLRGTNKEHIITMIIHFYLAANINGKKNTNCQESFNGISXKSQKEPARDQGHHNTFNVFKPKESRTIVLTKH

SEQ ID NO: 249959 - protein, 75 aa, Zea mays
  Clone ID: MRT4577_159547C.1.pep
RPRWRTPWPPTASRSSLSCLHRWMAATLADSYCNVIAISARIIYMESNWVSSAVPVTMLFASGRSSLTLVYIRPV

SEQ ID NO: 249960 - protein, 71 aa, Zea mays
  Clone ID: MRT4577_159548C.1.pep
RSKAAVAWQSHHQPQSPLPAPPHSNHFLRLQPPWTMFLFGVPSLSQLYLCCCAAAAAGYKDVARLEHHKSS

SEQ ID NO: 249961 - protein, 68 aa, Zea mays
  Clone ID: MRT4577_159549C.1.pep
ISCSVFMPQDLHVSDFFVGMAAMCAMTTFCDTRMDVIDLHSSPAKGLAMEGYASRGKKKTKKKRDGPA

SEQ ID NO: 249962 - protein, 168 aa, Zea mays
  unsure (1)..(168): unsure at all Xaa locations
  Clone ID: MRT4577_15954C.1.pep
LIRALTTDVEKFYVMCDPEKDNLCLYGLPNETWEVNLPAEEVPPELPXIYEVVTGTAKKESKEKTPKSSNKTNKSGSKPSRQVEPNSRVPKMPPPKDEESEGEEGEPQEDHESALCGACGLGYDDFWICCDLCETWFHGKCVKITPNKAEHIKQYKCPSCTGSKRAKA

SEQ ID NO: 249963 - protein, 65 aa, Zea mays
  Clone ID: MRT4577_159550C.1.pep
RPPFWPLGSFLKDFQARNLAVGNHILMDKGLIGTAVAELFFPVILTSICTNRFSITIVVSIISRK

SEQ ID NO: 249964 - protein, 70 aa, Zea mays
  unsure (1)..(70): unsure at all Xaa locations
  Clone ID: MRT4577_159551C.1.pep
XPREAFSYLGLLLDASQPHQALCSVERTEACKGKRKEEQRGLQGLTDHWPVNLGPPCSSELNITAVGLKL

SEQ ID NO: 249965 - protein, 70 aa, Zea mays
  Clone ID: MRT4577_159552C.1.pep
SFNKNLAKTGRAYFIYRGAKQLPTQKTQNTTSLKTNNYGLLPVLFQSAPTPRQRFPIDLCHQSKGNYSHK

SEQ ID NO: 249966 - protein, 168 aa, Zea mays
  unsure (1)..(168): unsure at all Xaa locations
  Clone ID: MRT4577_159553C.1.pep
FISICTFYGGGEGFDLSPEGQLPFRVDTDYPYTVNNGKCKLHTLIIENRCPNFILLLVYEAEGTSNLIKHDPLAIRIYDVYMQTYLXGGLPCXPYLCGTHLHHHEVLFPYLSYGYFYILLKDKPYXIIKNSEIPNYPENGYYTICTPYNLLNXCSVDSMHFTEFLVHP

SEQ ID NO: 249967 - protein, 130 aa, Zea mays
  Clone ID: MRT4577_159554C.1.pep
HWDPRGRPGLIHSSQAYRRECFSARHVHSRPLPCPPLPSAQTFTRNCRKAAASTATLSYLLHMCATFASAINTLLRAGRTQIRRRRSACTPRRIPTCLYDGALQALRRVSYCTHIGKQRPMMRVPESLSR

SEQ ID NO: 249968 - protein, 51 aa, Zea mays
  Clone ID: MRT4577_159555C.1.pep
TGPALAPYSRCGGEPMTTWSTETIPSFCIANNCRAATYESSTPLMPSVWTM

SEQ ID NO: 249969 - protein, 74 aa, Zea mays
  unsure (1)..(74): unsure at all Xaa locations
  Clone ID: MRT4577_159556C.1.pep
INXXQIIQYXKIFPXXIIFFLPLPFNXTTQXSKKXYLLLXXSTTQNFNLPSPSLKFXLIXXXXPPTKKQNFXXX

SEQ ID NO: 249970 - protein, 75 aa, Zea mays
  unsure (1)..(75): unsure at all Xaa locations
  Clone ID: MRT4577_159557C.1.pep
GPHRKXRAEXTRRRLTNEPTWXQPXXRRSNXAGPGRPGXEVRSLPLVXPRPRCPWXILALAASLVRLAVXXSXXX

SEQ ID NO: 249971 - protein, 89 aa, Zea mays
  Clone ID: MRT4577_159558C.1.pep
TRFSTSVGGRYWLLHRSPCGATCSSVHCLPCRLMSASGGTAQCACGGLRWGLPLKRPGCGSAGDHPRCSCSAASDVSGPGRRSGRVGKP

SEQ ID NO: 249972 - protein, 147 aa, Zea mays
  Clone ID: MRT4577_15955C.1.pep
LKQSDGVTFGWLRCRKRLFTMINNLPSIYEVVTGTAKKESKEKTPKSSNKTNKSGSKPSRQVEPNSRVPKMPPPKDEENEGEEGEPQEDHESALCGACGLGYDDFWICCDLCETWFHGKCVKITPNKAEHIKQYKCPSCTGSKRAKA

SEQ ID NO: 249973 - protein, 49 aa, Zea mays
  Clone ID: MRT4577_159560C.1.pep
TVSNWFINARVRLWKPLIEEMYQDLKRSSGAGGGGHGPAMEPQQHLSKR

SEQ ID NO: 249974 - protein, 135 aa, Zea mays
  Clone ID: MRT4577_159561C.1.pep
TSRAAVSCCLSDCDCETVADHHRAERFLRLPFDDELQALLIYAGGRLPPLRQVGSSFRQRLAGVRSRITEGLALAREIDRCPFMRVYCRCFWPNQLLCVHTTRHLQMYLIESERGRLFAGVYNVSSIRTIYNHRC

SEQ ID NO: 249975 - protein, 38 aa, Zea mays
  unsure (1)..(38): unsure at all Xaa locations
  Clone ID: MRT4577_159562C.1.pep
SLGGRMLTRPWSCPPXRGLVDPSRFVSLVPGSFTFTCP

SEQ ID NO: 249976 - protein, 101 aa, Zea mays
  unsure (1)..(101): unsure at all Xaa locations
  Clone ID: MRT4577_159563C.1.pep
NXGFLRSLVKIHMSRNFFFFQIPTNFKDFNSLNFLSLSLNNITIRIPSSFLHFTSLTAXNLSSNSLTFQIPIILITLVNIYFLLLNNNILFLNISNFSSSP

SEQ ID NO: 249977 - protein, 225 aa, Zea mays
  Clone ID: MRT4577_159564C.1.pep
RQKAFAEWILYTSSGISSALYHSCDVGTWCILSFRVLQFLDFWLSFMAVVGTFIYMATIDEVSKRAMHTAVFILTALLAATGATRSANIGIVIAIGSVGLLMGWLLEFSTARRFICWPSRINLNMPQSWPNLRTLFQITLEMVNKRFRWIFLLLGFMTLSFAAISWKLESNNNYWIWHSIWHITIYTSSFFFLCSMRVSPRNSSPESNYELTRQDSLPRSEPRET

SEQ ID NO: 249978 - protein, 254 aa, Zea mays
  unsure (1)..(254): unsure at all Xaa locations
  Clone ID: MRT4577_159565C.1.pep
SPTTEWILYTSSGISSALYHSCDVGTWCILSFRVLQXLLSTHLLNASVKIVGHGTGIHQYXMSIQIKXXDFWLSFMAVVGTFIYMATIDEVSKRAMHTAVFILTALLTATGATRSANIGIVIAIGSVGLLMGWLLEFFTARRFICWPSRINLNMPQSWPNLRTSSGNNAEYAGKRFRWIFLLLGFMTLSFAAISWKLESNNNYWIWHSIWHITIYTSSFFFLCSMRVSTRNSSPESNYELTRQDSLPRSEPRET

SEQ ID NO: 249979 - protein, 207 aa, Zea mays
  unsure (1)..(207): unsure at all Xaa locations
  Clone ID: MRT4577_159566C.1.pep
WHTKRTVCTLLLSDLKRNKEDMHTYLNDPVDNAHNISDXTXRIRASVPTMKILLKKMATDILASRLSXTKDGTPEYGLNPLVTHLSEILGDEGGMFXDRIGEETXELTSPLCXGSMLIXLDNVIFYEEDEKNEXENAKNLASDADLNANDAFGTAHTARASTXGVTKXLKPADAGYRMQNEXIDHLVXCVVHPKKPFAALAGASKGS

SEQ ID NO: 249980 - protein, 631 aa, Zea mays
  Clone ID: MRT4577_159567C.1.pep
MAALSRFISRLGEKGLPFYKLLKKVDKFQWTSEAQEALDALKKFLTTPPVLKPPRRATSTQPAEDLLLYISCTTHVVSTALVVERAEEGHAYPVQHPVYFISEVLGPSKKKYPQVQKLLYAVLLTARKLRHYFDDHKVIVVTGFPIGDILHNKEAIGRIAKWACELGSHDIEFRPRTAIKTQALVDFVSEWTEQQVPENPETAEVWRMYFDGSLKLQGAGAGILFIAPGGEHLKYALQLLFLASNNAAEYEALIHGLNIAISLGIKRLMVYGDSLVVISQINKEWDCSNDSMGKYCTVVRKLEDKFEGLEFHHVERDRNTAADVLSKLESSRTQVPPGVFVQEIPQPSISMDQAEESSRTLIGKVFRSGFYWPTAKSDAAELVRRCEACQYLSKQQHLPAQQMQTIPVTWPFACWGLDMIGPFKKAQGGYTHVLVAIDKFTKWIEFKPIASLTSAKVVEFIQDIIFRFGIPNIIITDLGSNFTSSEFFDFCEQKSIQVKYASVAHPRANGQVKRANGMILEALRKKVFDKNEKFAGKWIRELPYVVWSLRTQPSRALYGNTPFFMFYGSEAVLPADLKFGAPRLIFESIAEAEATRLEDVDVLEEERLNAVIQSARYQQTLRRYHDKAVRQ

SEQ ID NO: 249981 - protein, 589 aa, Zea mays
  Clone ID: MRT4577_159568C.1.pep
MPFGLKNTGATYQRAIQTCLADHWGKRVEAYVDDVVMKTENSENFIEDLQLVFNSLWRYRWKLNPEKCVFGVPAGKLLGFIVSHRGIEANPDKIEAIIKWKLHNHKRRLGEKGLPFYKLLKKVDKFQWTSEAQEALDALKKFLTTPPVLKPPRRATSTQPAEDLLLYISCTTHVLQGAGAGNLFIAPGGEHLKYALQLLFPASNNAAEYEALIHGLNIAISLGIKRLMLGSSRTQVPPGVIVQEIPQPSISMDQAEECNIVNQPESGSDDWRRPNIRYIKNEEEPDDKNAAERIARQSAHYTLIGDTLYRRGASGIFMKCILSSTGKRLLDEVHAGQCGIHAASKTLVEKVFRSGFYWPTVKSDAVELVRRFGIPNSIITDLGSNFTSSEFFDFCEQKSIQVKYASVAHPRANGQVERANGMILEALRKKVFNKNEKFAGKWIRELPYVVWSLRTQPSRALHGNTPFFMVYGSEAVLPADLKFGAPRLIFESIAEAEATRLEDVDVLEEERLNAVIQSARYQQTLRRYHDKAVRQRSFSVGDLVLRRILTGEGRHKLSPLWEGPFIVAEVTRPGSYRLTQMDDIEIGNS

SEQ ID NO: 249982 - protein, 695 aa, Zea mays
  Clone ID: MRT4577_159569C.1.pep
MSGVPRELVEHKLKVYPQARPIRQKLRRFTPDKREAIRAELARLVAAGFIREVLHPEWLANPVLVLKKNKVDWRMCVDYTDLNKHCPKDPFGLPRIDQVVDSTAGCSVLSFLDCYSGYHQISLAKEDEEKTAFITPFGAFCYTSMPFGLKNAGATYQRAIQTCLADHWGKRVEAYVDDVVIKTENSENFIEDLQLVFISLRRYRWKLNPEKCVFGVPAGKLLGFIVSHWGVEANPDKIEAIMKMEAPRSQKKVQRLTGCMAPLSRFISRLGEKGLPFYKLLKKVDKFQWTSEAQEALDTLKKFLTTPPVLKPPRRATSTQPAEDLLLYISCTTHVGAGAGILFTAPGGEHLKYALQLLFPASNNAAEYEALIHGLNIAISLGIKRLMVHGDSLVVISQINKEWDYSSDSMGKYCAAVRKLEDKFEGLEFHHVERDRNTAADVLSKLGSSRTQVPPGIFVQEIPHPSISTDQTEECNIVNQPESDSDDWRRSIIRYIKFEEKPDDKNAAERIARQSAHYTLIGETLYRRGASGVLMKCILSSTGKRLLDEVHAGQCGIHAASKTLVGKVFRSGFYWPTAKSDAAELVQRKKVFDKNEKFAGKWIREFPYVIWSLRTQPSRALHGNTPFFMVYGSKAVLLADLKFGAPRLVFESIAEAEATRLEDIDVLEEERLNAVIQSARYQQTLIRYHDKAVRR

SEQ ID NO: 249983 - protein, 75 aa, Zea mays
  Clone ID: MRT4577_15956C.1.pep
MEEDAISTLMDIDDSPLSAAGAGFLDEDDGDGERGVAPHRAGRGGGGGGEARGPLLFSGFFNSFDGADFDDDDLA

SEQ ID NO: 249984 - protein, 665 aa, Zea mays
  Clone ID: MRT4577_159570C.1.pep
MPFGLKNAGATYQRAIQTCLADHWGKRVEAYVDDVVIKTENSENFIEDLQLVFNSLRRYRWKLNPEKCVFGKKYPQVQKLLYAVLLTARKLRHYFDDHKVIVVTGFPIGDILHNKEAISRIAKWACELGSHDIEFRPRTAIKTQALVDFVSEWTEQQVPENPETAEVWRMYFDGSLKLQGAGVGILFIAPGGEHLKYSLQLLFPASNNAAEYEALIHGLNIAISLGIKRLMVYGDSLVVISQINKEWDCSNDSMGKYCTAVRKLEDKFEGLEFHHVERDRNTAAEVLSKLGSSRTQVPPGVFVQEIPQPSISMDQAEECNIVNQPESGSDDWRRPIIRYIKNEEEPDDRNAAERIARQSAHYTLIGETLYRRGASGIFMKCILSSTGKQLLDEVHVGQCGIHAASKTLVGKVFRSGFYWPTTKSDAAELVRRCEACQYLSKQQHLPAQQLQTIPVTCPFACWGLDMIGPFKKAQGGYTDVLVAIDKFTKWIEFKPITSLTSAKAVEFIQDIIFRFGIPNSIITDLGSNFTSSEFFDFCEQKSIQVKYALVAHPRANGQVERANEMILEALRKKVFDKNEKIAGKWIRELPYVVWSLRTQPSRALHGNTPFFMVYGSEAVLPADLKFGAPRLIFESIAETEATRLEDVDVLEEERLNTVVQSARYQ

SEQ ID NO: 249985 - protein, 94 aa, Zea mays
  unsure (1)..(94): unsure at all Xaa locations
  Clone ID: MRT4577_159571C.1.pep
RVRSKEEIERMVQEAXNFKTDDEGVNRMGGAVNALENYAYNMRYTVRDENIALNLPVDDEKNIVDSSDDVIYWLDGYHLSEADEFEDXMKDLES

SEQ ID NO: 249986 - protein, 121 aa, Zea mays
  unsure (1)..(121): unsure at all Xaa locations
  Clone ID: MRT4577_159572C.1.pep
FTIASLFPSRDPCAHLYLALILIGAYMMQTARMTEPYLRPNKMLVDYNEPPTXIIYLSYLELNLDEGESTMSGPNRPHERVPLKERKSDWHACXLDNKVGFKGFAVPKEPQDKAGKFDFHG

SEQ ID NO: 249987 - protein, 594 aa, Zea mays
  unsure (1)..(594): unsure at all Xaa locations
  Clone ID: MRT4577_159573C.1.pep
EAIGRIAKWACELGSHDIEFRPRTAIKTQALVDFVSEWTEQQVPNNPETAEVWRMYFDGSLKLQGAGAGILFTAPRGEHLKYALQLLFLASNNAAEYEALIHGLNIAISLGIKRLMVYGDSLVVISQINKEWDCSSDSMGKYCTAVRKLEDKFEGLEFHHVERDRNTAADVLSKLGSSRTQVPPGVFVQDIPHPIISMDQAEECNIVNQPESDSDDWRRPIIRYIKNEEEPDDINAAERIARQSAHYTLIGETLYRRGASGVLMKCILSSTGKQLLDEVHAGQCGIHSASKTLVGKVFRSGFYWPGAKSDAAELVQRCEACQYLSKQQHLPAQQLQTIPVTWSFACWGLDMIGPFKKAQGGYTHVLVAIDKFTKWIEFKLIASLTSSKAVEFIQDIIFRFEIPNSIITDLGSNFTNSEFFNFCEQKSIQIKYASVAHPRANGQVERANGMILEALRKKVFDKNEKFAGKWIRELPYVVWSLRTQPSRALHGNTPFFMVYGSEAVLPADLKFGAPRLIFESIAEAEATRLEDVDVLEEERLNTVIQSARYQQTLRRYHDKAMRRRSFAVGDLVLRRILRGRDXHKLSPLWEGPFI

SEQ ID NO: 249988 - protein, 228 aa, Zea mays
  Clone ID: MRT4577_159574C.1.pep
ISLEGVSKLSHLSKLARDNNTASRTVEADRLHTMLLAMADARAVLIKLADRLHNMETLEALPCAKQERFAKETMEIFVPLANRLGVASWKDQLENLCFKYLNPEEHEELSSKLRESFDEELITSAVDKLDKGLRDAGVSYHSLSGRHKSLYSIHCKMLKKNLTMEEIHDIHGLRLLVESEEDCYEALCVVHRLWPRVTGRFKDYISRPKLNGYRSLHTVVMSEGVHPF

SEQ ID NO: 249989 - protein, 493 aa, Zea mays
  Clone ID: MRT4577_159575C.1.pep
MKLRNTAITRANSACLPMGDRVGVKYNSINEAEERKGGHGIPKVSMIPLIFLIFYEVSGGPFGIEDSVKAAGPLLAILGFLLFALIWSVPEALITAEMGTMFPENGGYVVWVSSALGPFWGFQQGWAKWLSGVIDNALYPVLFLDYVKSSVPALGGGLPRTLAVLILTVALTYMNYRGLTIVGWVAVFLGVFSLLPFFVMGLIAIPQIEPSRWLEMDLGSVDWGLYLNTLFWNLNYWDSISTLAGEVENPKRTLPRALSYALVLVVGGYLYPLITCTAAVPIVREHWSDGYFSDIARILGGIWLHSWIQAAAALSNMGNFLTEMSSDSYQLLGMAERGMLPDFFAKRSHYGTPLIGILFSAFGVILLSWMSFQEIIAAENYLYCFGMILEFIAFIKLRVYHPNASRPYKIPLGTIGAILMIIPPGLLIIVVMALASYKVMVVSILAMVFGFVLQPCLVYVEKKRWLRFSISADLPDLPDVQEIAEDDAVPLVV

SEQ ID NO: 249990 - protein, 301 aa, Zea mays
  unsure (1)..(301): unsure at all Xaa locations
  Clone ID: MRT4577_159576C.1.pep
GSPLSSGNNAESDSDDWRRPIIRYIKNEEEPDDKNVAERIARQSAHYTLIGETLYRRGASGVLMKCVLSSTGKRLLDEVHAGQCGIHAASKTLPAYSALLPLLKGESKSDAAELVQRCEACQYLSKQQHLPAQQLQTIPVTWPFACWGLDMIGPFKKAQGGYTHVLVAIDKFTKWIEFKPIASLTSAKAVEFIQDIIFRFGIPNSIITDLGSNFTSSEFFDFCEQKSIQIKYASVAHPRANGQVERANGMILEALRKKVFDKNEKFAGKXWIRELPYIVWSLRTQPSRALQETXPAEPEGT

SEQ ID NO: 249991 - protein, 54 aa, Zea mays
  Clone ID: MRT4577_159577C.1.pep
LEVGVWLYRVLSWIASGGLVGYLDAGSRVWASSALSHSLAGDLAPGAVLNSRRP

SEQ ID NO: 249992 - protein, 70 aa, Zea mays
  Clone ID: MRT4577_159578C.1.pep
GVFPSPPCGTTPMDVNPPVLAVGSGVKKGVPHWVLKNSRGPYWGYKGFFQMEMGKNMCGVGTGASPPIFA

SEQ ID NO: 249993 - protein, 103 aa, Zea mays
  unsure (1)..(103): unsure at all Xaa locations
  Clone ID: MRT4577_159579C.1.pep
QQAPVALSAPAVRAPDRLTTFVLLASVRSNSSVPMRGAPEGQESSPSRRSHTIVQSACXPSRPEGXCFYWLVSCPKGGAPAEHKFARACPMARGDSLAISGGG

SEQ ID NO: 249994 - protein, 61 aa, Zea mays
  Clone ID: MRT4577_15957C.1.pep
NIILTLTSSGRCCFFFYGTSQTLDSDNGKHAPQPSSQLHTNLHLNHPQMTIPLDKRAGPPK

SEQ ID NO: 249995 - protein, 84 aa, Zea mays
  Clone ID: MRT4577_159580C.1.pep
GSREKERAVWTIKNHTCAGYLKVLHFHLNLLFLNETATAMFYITKVSPVPREDRSCRVLGPVKSARCFGCVLQPLFYLATFIKI

SEQ ID NO: 249996 - protein, 100 aa, Zea mays
  unsure (1)..(100): unsure at all Xaa locations
  Clone ID: MRT4577_159581C.1.pep
MAIKIFFLLMLLALSACVANATIFPXCLQAPIAPLLPPYLPSMIVSVCENPSFQPYRLLQAILLCNIPLSPLFHQSLALSLVXSLVLIIRCSSFXQLVLP

SEQ ID NO: 249997 - protein, 146 aa, Zea mays
  unsure (1)..(146): unsure at all Xaa locations
  Clone ID: MRT4577_159582C.1.pep
RTRGRPTRTCRFMLLPLSSGAXTTTTAPHCSHPPIPCMLPPYLSPAMSSACETPILEPYRIQQAVTCRILPVSPSNVQLSSTLLHQLPMMHLXATXITLQQLLHLGLPNLADYAQHQQLPLMLLMAQNMSSQLLRQLLLANLDVYS

SEQ ID NO: 249998 - protein, 275 aa, Zea mays
  unsure (1)..(275): unsure at all Xaa locations
  Clone ID: MRT4577_159583C.1.pep
YRVLTPAPHLXMGPRGNAALLAAVKSAGAEEVDLSQMWGGAFQAPEGWLTAVSEHGGGVLNATKSVAMFQALAVKMGAVVRDNAEVVDIRKEPEGGVVVKTSSGEEFRGAKCVVTVGAWTSKLLRSVAGVEIPIQPLHTLTLYWRIKPGRERGLMAKAGFPTFSSYGDTPVYGTPSLELPGLIKISCDGGPPCDPDNRDWASGDXDKSXRVARWIQEFMPGHVDSAGAPVVRXSCLCSLTXDNDFVIRWLGGEFGVDMVVGAGFSGXGFFWXPRW

SEQ ID NO: 249999 - protein, 147 aa, Zea mays
  Clone ID: MRT4577_159584C.1.pep
PPPKGKKHPGGLVRLKQPAPKSPGGRAPPKQFPPKGGGKWAPPPGGVKKPPRFRPGPVALAGFPKSPKGPGFFIPKLPFQPLGGGIAQGFKTTPRFQNPPVLGLPGAPGASLGGFFGGPTLWPPPVKGVPLLPKGIQFAPRLRGGGG

SEQ ID NO: 250000 - protein, 69 aa, Zea mays
  unsure (1)..(69): unsure at all Xaa locations
  Clone ID: MRT4577_159585C.1.pep
XITSSSIAXPWSKTTXXRKRXXPXXLEWTXXSLPMALAXFXXLPXSCDTSPXRXRPXRXRGXKRKEGXP

SEQ ID NO: 250001 - protein, 260 aa, Zea mays
  unsure (1)..(260): unsure at all Xaa locations
  Clone ID: MRT4577_159586C.1.pep
TAVRQFPHAAVPATVACASSSPLLPPASRLPXHLLQAHAFLLPRGGQRDPRLLSALLLSSLCLVPHSQQTSDHAAALLRRVYPSVYLRDVARLXRISSAGXLLGQLHSLLLRTGHVASDAHVSSSLVQLYCTCGHVADARSVFDEMAVRDVVAWNVMIASYVKAGDQAHARELFDAMPERNVVSWTTVIGGYAQMKRPEKAVEVFRRMQVEGIEADGVALLSVLAACGDLGAVDLGEWVHRFVVRRGLCQEIPLMXSIIE

SEQ ID NO: 250002 - protein, 67 aa, Zea mays
  Clone ID: MRT4577_159587C.1.pep
AYTQTRAYVISRHDDDCQSTHCSTETSTTTSICRLCQLSSMSSQEVKNRVRKRCRRVDQSCTRDISR

SEQ ID NO: 250003 - protein, 140 aa, Zea mays
  unsure (1)..(140): unsure at all Xaa locations
  Clone ID: MRT4577_159588C.1.pep
INLKVLPLQCYNVILGMDXLSSHSPMEIHWQDKWLAFTHEQQRVVLHGQLSDTSMVEQISVCQLYHLDKLDELWCTIELQQTSDQQSHTSLPHEIQSLIQEFASLFDQPKRLPPPRCHCHTIPLIXGATPFRLRPSIVSP

SEQ ID NO: 250004 - protein, 120 aa, Zea mays
  Clone ID: MRT4577_159589C.1.pep
QTVMHLYNSYILSHNTFSEAARTSSAKNEGGAEFITRERDSTCNLALVASACSTMVLPPTSLLLLLSVLIVTSSSSIASSSNPCFFAIAVSFNTGLFNRDFIPINISFPLECPQSANLRR

SEQ ID NO: 250005 - protein, 111 aa, Zea mays
  unsure (1)..(111): unsure at all Xaa locations
  Clone ID: MRT4577_15958C.1.pep
SLPPTSWDDCMGTECMHACNRSCYGATRHFFLFVCNHCHDCGHASACMHLFRFDSTTSLSALMTASNQVLHVLQGMPNCCNARGQSGFAWSTKCNXFVVGRRGHRQATGQQ

SEQ ID NO: 250006 - protein, 78 aa, Zea mays
  Clone ID: MRT4577_159590C.1.pep
PTMQLGLFPLKTVFFTKDFEALGPSGPFRFFLKSILRPIQAGIIRPLPNGLNYWAVNGIPPAYGPNAGAELGPRIIGR

SEQ ID NO: 250007 - protein, 96 aa, Zea mays
  Clone ID: MRT4577_159591C.1.pep
SQLRHAGQVHGLTQRQVANQQGKNTSQPSSLKTAPELAYFTTSTIAYLGASGQEIFVVSKIKAGGLDVPFSDRKRSRSSRCSRWSRTRCCRTRESF

SEQ ID NO: 250008 - protein, 71 aa, Zea mays
  Clone ID: MRT4577_159592C.1.pep
MPPAAREGRADAGTKFRARGLFGGGGGGDGLRAVMRMVKLNSAIQNRSVRELLELLGDECLYFLGNLRSVD

SEQ ID NO: 250009 - protein, 73 aa, Zea mays
  Clone ID: MRT4577_159593C.1.pep
FSFFFKIASNDGNQMNKERGRSTKHFRESEFWLGFLERENVALSMFSVDHLGKGSSILRAAQCSCEKRKKKLD

SEQ ID NO: 250010 - protein, 88 aa, Zea mays
  unsure (1)..(88): unsure at all Xaa locations
  Clone ID: MRT4577_159594C.1.pep
DGTGSLATTXSVSTAGAAXSXSPPSTAEAAASWATSSTGAAVGTWTSTAAIGAVQLDELVCVCWPASATQRRHSSSQLSRVQILHQCS

SEQ ID NO: 250011 - protein, 93 aa, Zea mays
  unsure (1)..(93): unsure at all Xaa locations
  Clone ID: MRT4577_159595C.1.pep
MGRAAPSSSPSSPQLGRKRTAAPTPEPPTPQRHCSMVDVMRRSRAVAAPPPVARARVYTYYETLLCETCGLGDRDDQMLXCDRCDRGCHTFCL

SEQ ID NO: 250012 - protein, 134 aa, Zea mays
  unsure (1)..(134): unsure at all Xaa locations
  Clone ID: MRT4577_159596C.1.pep
YKRYRRIGSSTLVKRGWSFVHPYQIMMVQHGEPMTTIEAXEAFDYQLXNRXDVLRILGPDGCWICFKDSVCRCFGYMVYKKKDVYAINNDWFXSNETSGNGIXALGQEIMNLLRPYTQFLLRSLYDPYREGAYF

SEQ ID NO: 250013 - protein, 86 aa, Zea mays
  unsure (1)..(86): unsure at all Xaa locations
  Clone ID: MRT4577_159597C.1.pep
IXPFRGRGGGAGFFLGRPCFXLPTFLLCLFLLSPLTLVTSLDGLLVDLSCLSSFLFFGSARVVPLLAGAFVGRLVLVSRPPLWLCH

SEQ ID NO: 250014 - protein, 34 aa, Zea mays
  Clone ID: MRT4577_159598C.1.pep
AVLRPSLLVELELSLTSSFPNRNLVCLNVSRPLP

SEQ ID NO: 250015 - protein, 119 aa, Zea mays
  Clone ID: MRT4577_159599C.1.pep
SFPSLLPTSFHFLSLLLLVLASCSAECWIRGCSKGSKSLLVFPVERGTGGENPQPRRCKFPTAGAGFSCGNMRKLLFISFVLSLSAAAVHGEDGKVPRALCFDPFYAVPDVFGLLRVNA

SEQ ID NO: 250016 - protein, 47 aa, Zea mays
  unsure (1)..(47): unsure at all Xaa locations
  Clone ID: MRT4577_15959C.1.pep
VGCLIDSYESPTNCGGXTREGWRXIWWRPVRLSSSCQAHKSAQRFQA

SEQ ID NO: 250017 - protein, 368 aa, Zea mays
  unsure (1)..(368): unsure at all Xaa locations
  Clone ID: MRT4577_1595C.1.pep
MTCHASLLLPALAAVLLCCPLAQCGQQNYTSMFSFGDSLTDTGNLLVSSPLSNHIVGRYPYGITYFHRPTGRCPDGRLVVDFLAQAFGLPLLQPYLQSRGKDLSRGVNFAVGGATAMDPPFFQEIGASDKLWTNLSLSVQLGWFEQLKPSLCSSPKECKEYFSKSLFLVGEIGGNDYNYAFFKGKTLDDAKTYVPTVAGXAVTDATERLIKAGATHLVVPGNLPMGCSSAYLTLHPGRNGSDYDAAGCLRTYNDFAQHHNAVLQRKLRALRAKYPQARIMYADYYGAAMSFAKNPKQFGFTQGPLRTCCGGGGPYNFNPKASCGVRGSSVCADPSAYANWDGVHLTEAAYHAIADSILNGPYTSPRLL

SEQ ID NO: 250018 - protein, 124 aa, Zea mays
  Clone ID: MRT4577_159600C.1.pep
VYSHSVNCQFRKIPRNSWHHVSWGHKWILWENTPTKRVKWTWWITHVRHGTRKRCTHVIHWQWHSAPVRVECSSWTQGHPRKIFSSKILKIFPLLFSISRNTWPPLFLLLYRLFPCRKLFLRIF

SEQ ID NO: 250019 - protein, 216 aa, Zea mays
  Clone ID: MRT4577_159601C.1.pep
PAGPTHFRNLDIPGMDRYLDFWNLMAYDYAGSWDPTSGHQANLHGSLDNPTSTPFSTDAAIDHYTRNGVAPSKIVLGMPIYGRAFENTDGPGRPYNGIGEGSWENGIFDYKVLPLQGSQEIYDQATGSSYCYNPQTRKLVSYDTPHAARVKAGYVKQWGLGGGMWWESSGDKEGQDSLIGIVVNEFGGPQALQRKDNCIDYPQSKYDNLKNGFPNN

SEQ ID NO: 250020 - protein, 96 aa, Zea mays
  unsure (1)..(96): unsure at all Xaa locations
  Clone ID: MRT4577_159602C.1.pep
TSHASSPALVLTEYIQSTIANFCRGEGLVLLTPNVYQVNIYLDNKKYNSFNNIVRSMSHGEYDLSLLSFHFTXKGHYIQCSKRXGYMDNTDFWAPI

SEQ ID NO: 250021 - protein, 97 aa, Zea mays
  Clone ID: MRT4577_159603C.1.pep
QTKYNSGGTIYSGRQLHAENNNVTCGSSTKYSVFEPMHVLPMQIPSHQPTTLSTLTGGSTIHHATIGPTVSDAARRTSAAVAVAAHPPQPRAAPPRA

SEQ ID NO: 250022 - protein, 61 aa, Zea mays
  Clone ID: MRT4577_159604C.1.pep
KKKKKKKKKKKKKKKKKKKKKKKKKKKKKKKKKKGSAGFGGSRFFRAPRLAWVLASFLVPP

SEQ ID NO: 250023 - protein, 443 aa, Zea mays
  unsure (1)..(443): unsure at all Xaa locations
  Clone ID: MRT4577_159605C.1.pep
MAASLQLAIFMSAAIALGFAGVQAGAAQLQCSEYYDRTCPVVHRVARRVLKKAHESXDVRMYASLTRLHFHDCFVQXKAAGPVSRPVQGCDGSILLDNSSSIASEKFATPNNNSARGYPVVDAVKAALEEVCPGVVSCADILAIAAKISVQLCRFVTARLYNFSGTNRPDPTLDRGYRAFLSLRCPRAGGNASALNDLDPATPDTFDSDYYTSIEARRGTLQSDQELLSTPSAPTAPIVHRFAGSQKEFFRSFARSMISMGSIQVLTGSQAFLIHRVHSQWTGTGASALRFLNPGCAARSRRREAGTETASLALRFLETGEWRLELEVAGWRHGALEIVTGALELGMALARVEEVLECVQGRVTQEMNDNLIKHFTGEEVIREALQDMGDLKAPGADGILVIFYKEFWSLGGEKVKHEVLDVLNGASMPQGWNDTAIVLIPKI

SEQ ID NO: 250024 - protein, 143 aa, Zea mays
  Clone ID: MRT4577_159606C.1.pep
MHAGAHTFGRVQCRFVTARLYNFSGTNRPDPTLDRGYRAFLSLRCPRAGGNASALNDLDPATPDTFDSDYYTSIEARRGTLQSDQELLSTPSAPTAPIVHRFAGSQKEFFRSFARSMISMGSIQVLTGSQGEIRKNCRVVNGS

SEQ ID NO: 250025 - protein, 132 aa, Zea mays
  Clone ID: MRT4577_159607C.1.pep
LCAVCCVVLCCHRYSTDKCPVSLRRENSPLVLFFFSRATESWSTPFCLTVFLIHRVHSQWTGTGASALRFLNPGCAARSRREAGTETASLALRFLETGEWRLELEVAGWRRGALEIVTGALELGMALARVRV

SEQ ID NO: 250026 - protein, 129 aa, Zea mays
  unsure (1)..(129): unsure at all Xaa locations
  Clone ID: MRT4577_159608C.1.pep
GRATRAHTAKPAPAAPQPPGEKTXXAXETXDXPEGXTXTGAAKPXTXEGPRGKXTRNXKHXNXDGERQEAGXKXKEDAXXGTRRTKADXRTDNNHXQNQSKGGTKGXRNKTRGGDAHXPSNASKTNXNT

SEQ ID NO: 250027 - protein, 259 aa, Zea mays
  unsure (1)..(259): unsure at all Xaa locations
  Clone ID: MRT4577_159609C.1.pep
MAASLQLAIFMSAAIALGFAGVQAGAAQLCSEYYDRTCPVVHRVVRRVLKKAHESDVRIYASLTRLHFHDCFVQGCDGSILLDNSSSIVSEKFATPNNNSARGYPVVDAVKAALEEVCPGVVSCADILAIAAKISVQLSGGPRWRVPLGRRDGTTANNTAANNLPSPFDNLTTLQQKFGAVGLDDTDLVALSGAHTFGRVQCRFVTARLYNFSGTNRPDPTLDRGYRAFLSPACPXAGGNASALNDLDPGTXDTFDSDY

SEQ ID NO: 250028 - protein, 245 aa, Zea mays
  Clone ID: MRT4577_15960C.1.pep
MDGGAGFPGTPVPRSPEDVFRDYRARQAGLIRALTTEKDNLCLYGLPNETWEVNLPAEEVPPELPEPALGINFARDGMNEKDWLSLVAVHSDSWLMSVAFYFGARFGFDKESRKRLFTMINNLPSIYEVVTGTAKKESKEKTPKSSNKTNKSGSKPSRQVEPNSRVPKMPPPKDEESEGEEGEPQEDHESALCGACGLGYDDFWICCDLCETWFHGKCVKITPNKAEHIKQYKCPSCTGSKRAKA

SEQ ID NO: 250029 - protein, 58 aa, Zea mays
  Clone ID: MRT4577_159610C.1.pep
GSRPTERRLRRAQLPPRLRPLSRTRGWISSSASMVYRTSRGSTASRGGAVSFSRSLIE

SEQ ID NO: 250030 - protein, 239 aa, Zea mays
  Clone ID: MRT4577_159611C.1.pep
RVVPPFSPCAQSGGPRWRVPLGRRDGTTANITAANNLPSPFDNLTTLQQKFGAVGLDDTDLVALSGKKKRGGEKTGDACLVILAPAQHDTWRHNDGGCIAGAHTFGRVQCQFVTARLYNFCGTNRPDPTLDRGYRAFLSLRCPRAGNASALNDLDPTTPDTFDNNYYTNIEARRGTLQSDQELLSTPGAPTAPIVGRFAASQKEFFRSFARSMVNMGNIQVLTGSQGEIRKNCRMVNGS

SEQ ID NO: 250031 - protein, 177 aa, Zea mays
  unsure (1)..(177): unsure at all Xaa locations
  Clone ID: MRT4577_159612C.1.pep
ENPILEPYRIQQVTHTMAILPSIPLLLQQXQPYYMSVPSEHIWAQIIRXAQQLQQPXLANLAVYSHKQQXRPFSQLAALNFASYLHQRHPPFSRLYGDYPHQWLPFNQLTALNXSPAYLQEQQLLPFSQLAGESPATFLTQTQLLPFYHHAEPNAGTLLQLQQLLSFNQLALTNPTV

SEQ ID NO: 250032 - protein, 130 aa, Zea mays
  unsure (1)..(130): unsure at all Xaa locations
  Clone ID: MRT4577_159613C.1.pep
MARTKQTARKSTGGKAPRKQLATKAARKSAPATGGVKKPHRXLREIRKYQKSTELLIRKLPFQRLVREIAQDFKTDLRFQSSAVAALQEASEAYLVGLFEDTNLCAIHAKRVTIMPKDIQLARRIRGERA

SEQ ID NO: 250033 - protein, 89 aa, Zea mays
  Clone ID: MRT4577_159614C.1.pep
MARTKQTARKSTGGKAPRKQLATKAARKSAPATGGVKKPHRFRPGTVALREIRKYQKSTELLIRKLPFQRVTIMPKDIQLARRIRGERA

SEQ ID NO: 250034 - protein, 57 aa, Zea mays
  Clone ID: MRT4577_159615C.1.pep
MELENREVKKKGKINKQKKKKKKKKKKKKKKKKKKKKKKKKKIKKKKKKKKKKKKLV

SEQ ID NO: 250035 - protein, 80 aa, Zea mays
  Clone ID: MRT4577_159616C.1.pep
WSLTRTTWTPPRRKALRSRGMCTGYSVNRNIREAKYQDDALTVAPCSCLPLPRSCLYSSSKLDQCWPMFRAGAGQVVLYN

SEQ ID NO: 250036 - protein, 134 aa, Zea mays
  Clone ID: MRT4577_159617C.1.pep
MARTKQTARKSTGGKAPRKQLATKAARKSAPATGGVKKPHRFRPGTVALREIRKYQKSTELLIRKLPFQRLVREIAQDFKTDLRFQSSAVAALQEASEAYLVGLFEDTIMPKDIQLARRIRGERAYASSRWRWK

SEQ ID NO: 250037 - protein, 155 aa, Zea mays
  Clone ID: MRT4577_159618C.1.pep
QSLAADPRAKQSASLPTVPMARTKQTARKSTGGKAPRKQLATKAARKSAPATGGVKKPHRFRPGTVALREIRKYQKSTELLIRKLPFQRLVREIAQDFKTDLRFQSSAVAALQEASEAYLVGLFEDTNLCAIHAKRVTIMPKDIQLARRIRGERA

SEQ ID NO: 250038 - protein, 82 aa, Zea mays
  unsure (1)..(82): unsure at all Xaa locations
  Clone ID: MRT4577_159619C.1.pep
MRMVIVLVECLALSAVSASAMQMPCPCAELQGLYGAGAGLTTMMGAVGLYPYSVYLWQPQCYPLAVVPYYAXGDGQLSAMFQ

SEQ ID NO: 250039 - protein, 256 aa, Zea mays
  Clone ID: MRT4577_15961C.1.pep
MDGGAGFPGTPVPRSPEDVFRDYRARQAGLIRALTTDVEKFYVMCDPEKDNLCLYGLPNETWEVNLPAEEVPPELPEPALGINFARDGMNEKDWLSLVAVHSDSWLMSVAFYFGARFGFDKESRKRLFTMINNLPSIYEVVTGTAKKESKEKTPKSSNKTNKSGSKPSRQVEPNSRVPKMPPPKDEESEGEEGEPQEDHESALCGACGLGYDDFWICCDLCETWFHGKCVKITPNKAEHIKQYKCPSCTGSKRAKA

SEQ ID NO: 250040 - protein, 138 aa, Zea mays
  unsure (1)..(138): unsure at all Xaa locations
  Clone ID: MRT4577_159620C.1.pep
MARTKQTARKSTGGKAPRKQXLATNDALQVSPRATGXVKKPHRFRPGTVALREIRKYQKSTELLIRKLPFQRLVREIAQDFKTDLRFQSSDVAALQEVSEDYLVGLFEDTNLCAIHAKRVTIMPKDIQLARRIRGERA

SEQ ID NO: 250041 - protein, 397 aa, Zea mays
  Clone ID: MRT4577_159621C.1.pep
MDAAAAAAAQMERHSSAAAHLERHSSAAAFVEGGVQDGCDDTCSICLETFSDSDPSAVTSCKHEFHLQCILEWCQRSSQCPMCWQAISMKDPTSQELLEAVEEERNDVQENHARTTTVFRHPLLGDFEVPVDADDAEIEERIMQHLAAAAAIRRSHRHARREGRRSSRAAAAHGHGHPQPQTQVLFFPSAGEATPGGSGSPSPHPRQEHAASSVVSPPPLPAVASAEGTDADSTASVGGAVGPDDSVSRSQSSPVNHDEAGPSADAQSFSDTIKSRLQSAYGRYKDSITKSTRGWKERWFAQSSAMSNLGSEMRREVGAGIAAVSRMIEKQLETRPDGSGTAPSPATASSPAHAHPGSDASSQGQGAAVPATPAAALNNATPAAAAALNDASSSSTA

SEQ ID NO: 250042 - protein, 109 aa, Zea mays
  unsure (1)..(109): unsure at all Xaa locations
  Clone ID: MRT4577_159622C.1.pep
MARTKQTARKSTGGKAPRKQLATKAARKSAPATGGVKKPHRFRPGTVALREIRKYQKSTELLIRXLQEASEAYLVGLFEDTNLCAIHAKRVTIMPKDIQLARRIRGERA

SEQ ID NO: 250043 - protein, 136 aa, Zea mays
  Clone ID: MRT4577_159623C.1.pep
MARTKQTARKSTGGKAPRKQLATKAARKSAPATGGVKKPHRFRPGTVALREIRKYQKSTELLIRKLPFQRLVREIAQDFKTDLRFQSSAVAALQEASEAYLVGLFEDTNLCAIHAKRVTIMPKDIQLARRIRGERA

SEQ ID NO: 250044 - protein, 180 aa, Zea mays
  Clone ID: MRT4577_159624C.1.pep
MDAAAAAAAQMERHSSAAAFVEGGVQDGCDDACSICLEAFSDSDPSAVTSCKHEFHLQCILEWCQRSSQCPMCWQAISMKDPTSQELLEAVEEERNDVQENHARTTTVFRHPLLGDFEVPVDADDAEIEERIMQHLAAAAAIRRSHRHARREGRRSSRVAAAHGHGHPQTQVLFFPSAGE

SEQ ID NO: 250045 - protein, 159 aa, Zea mays
  Clone ID: MRT4577_159625C.1.pep
PASAISLAADPRATQSASLPTVPMARTKQTARKSTGGKAPRKQLATKAARKSAPATGGVKKPHRFRPGTVALREIRKYQKSTELLIRKLPFQRLVREIAQDFKTDLRFQSSAVAALQEASEAYLVGLFEDTNLCAIHAKRVTIMPKDIQLARRIRVERA

SEQ ID NO: 250046 - protein, 155 aa, Zea mays
  Clone ID: MRT4577_159626C.1.pep
QSLAADPRATQSASLPTVPMARTKQTARKSTGGKAPRKQLATKAARKSAPATGGVKKPHRFRPGTVALREIRKYQKSTELLIRKLPFQRLVREIAQDFKTDLRFQSSAVAALQEASEAYLVGLFEDTNLCAIHAKRVTIMPKDIQLARRIRGERA

SEQ ID NO: 250047 - protein, 240 aa, Zea mays
  unsure (1)..(240): unsure at all Xaa locations
  Clone ID: MRT4577_159627C.1.pep
MVRGPKKHLKRIAAPKSWMLDKLGGIFATKPSQGPHKYRESLPLTVVLKNRLKYALTGREVTMIVNDKEGNIAVDGKIRKDPRFPAGLMDVISIKKTGELYRVLYDVKGRFILRNIGQEEAKYKLVKITKKAVGPNKIPYIVTHDGRTLRFPNPELSVYDTAKLDIATGQVVDFVKFETGNLCMITSGNNVGRVGVIVHRDRHIGGFDIIHIRDSRGHAFATESXNVFMIGRERPLDFPP

SEQ ID NO: 250048 - protein, 54 aa, Zea mays
  Clone ID: MRT4577_159628C.1.pep
PCAPEVVLYELRGAFVKRLVLDHPSRRHIVNVRVHRVPKCRILRRKKSLGFIVP

SEQ ID NO: 250049 - protein, 68 aa, Zea mays
  Clone ID: MRT4577_159629C.1.pep
VIFICFFFLFWCSFLLKNKKRTSFFLGNPQHKTKNSILGPFLPKNLKGGTPTHGSLAKTMLVLQNIPW

SEQ ID NO: 250050 - protein, 71 aa, Zea mays
  unsure (1)..(71): unsure at all Xaa locations
  Clone ID: MRT4577_15962C.1.pep
MVLLPRTGRMALLCTPRAYSAVADAGAYPASPEPYGGAPPPAMSKTADFGVFKVDDLMNWARXGSIWPMTF

SEQ ID NO: 250051 - protein, 70 aa, Zea mays
  Clone ID: MRT4577_159630C.1.pep
YLYRCWGAPDFPATWLPYLVMGLSSMGHYFFPRGDYLVQSCLNHCLTTAAYDHYPHVIPYVLITLVNLLP

SEQ ID NO: 250052 - protein, 76 aa, Zea mays
  unsure (1)..(76): unsure at all Xaa locations
  Clone ID: MRT4577_159631C.1.pep
FHQPARLKXGELKGGGNSPNLQTHPCDKTKWGLNTQDDVLPFTFTLALFFFMGTNGYACMPLYLFFAHKQRGGGGN

SEQ ID NO: 250053 - protein, 100 aa, Zea mays
  Clone ID: MRT4577_159632C.1.pep
FSLFFFFFWFFFVFFFFFFFFFFFFFFFFLGGKPSFLEAPMTKFPRGFFNSPRVGKGANFPFEGEKCNFSPRKFCGFFLLTPLYLTLFFGAPKRDMVEGG

SEQ ID NO: 250054 - protein, 146 aa, Zea mays
  Clone ID: MRT4577_159633C.1.pep
SRILLLLYSPVGPPQPGFSPSGASRRGPLGPSLFCPVGAGPSAVARLPFASPFPLCVFFFIRLFPRFGLFIGPAALSGFLFFFLALRASPFMFVGSLFWLLWLGPLCFRPRLCVALSADLLFPPGSAMAVPAPGSGPAHLIKKMEH

SEQ ID NO: 250055 - protein, 88 aa, Zea mays
  Clone ID: MRT4577_159634C.1.pep
MCNCGYLGYLQQTPYPIQYILPYFKLHSANSIKQCYLQFRVPYFTLSTGDSLIMQLPPDRDEIVLLNQIEIMHCWCGMASNQMEACLF

SEQ ID NO: 250056 - protein, 44 aa, Zea mays
  Clone ID: MRT4577_159635C.1.pep
NIASPNIRIGSHQLLVLAILTLAATDVSDNSYFTDSNPIHPDTN

SEQ ID NO: 250057 - protein, 62 aa, Zea mays
  Clone ID: MRT4577_159636C.1.pep
QRRVRGLEALSLQESSSDNKHERIQIWWAGKELAMDQKLSDYIGVNDKTKIVVRLIEARDEC

SEQ ID NO: 250058 - protein, 54 aa, Zea mays
  Clone ID: MRT4577_159637C.1.pep
CSMLQSLPSFSYISFFDRFFVLVFLSFFFFIFFWFLFICFFFYLEQGLHDISSH

SEQ ID NO: 250059 - protein, 80 aa, Zea mays
  Clone ID: MRT4577_159639C.1.pep
LVRRDHRGSLKARASVSGAEDGRCGGDCSLGSARTAVRSSWVVSTLPISAFGHEDLKNHPGTWNFKCQASCALDPLLLPQ

SEQ ID NO: 250060 - protein, 234 aa, Zea mays
  Clone ID: MRT4577_15963C.1.pep
IGYLERGLIGALTTDVEKFYVMCDPEKENLCLYGLPNETWEINLPAEEVPPELPEPALGINFARDGMDEKDWLSLVAVHSDSWLMSVAFYFGARFGFDKESRKRLFTMINNLPSIYEVVTGTAKKEPKEKTPKSNIKTNKSGSKPSRHTEPNSRVPKMPPPKDEESEEEEGEPQEDQESALCGACGLGYDDFWICCDLCETWFHGKCVKITPAKADHIKQYKCPSCTGSKRAKV

SEQ ID NO: 250061 - protein, 98 aa, Zea mays
  Clone ID: MRT4577_159640C.1.pep
AHSPSAVLLFRPSLERNTLPLTWRTTSLLLIILLPTVDHWIGASLSLFGSCCQKGGESLLCSTIYAVPLYFCNEQSVCNNYLMHAWLECHKHFYDVMR

SEQ ID NO: 250062 - protein, 239 aa, Zea mays
  unsure (1)..(239): unsure at all Xaa locations
  Clone ID: MRT4577_159641C.1.pep
MGKEKIHINVVVIGHVDSGKSTTTGHLIYKCGGIDKRTIEKFEKEAAELGKGSFKYAWVLDRLKAERERGITIDIALWKFETPRYYVTVIDAPGHRDFIKNMITGTSQADCAILIIAAGTGEFEAGISKDGQTREHALLAYTLGVKQLIVAINKMDTTKWSEDRYQEIIKETSNFIKKVGYNPKHVPFVPISGFNGDNMIEASSNCPWVQXXXEKETKXKGTRXTLLEXIDASTPPSRL

SEQ ID NO: 250063 - protein, 33 aa, Zea mays
  Clone ID: MRT4577_159642C.1.pep
PPQRSRRRRMRRSVDGVAEGARRHGVGTVACQR

SEQ ID NO: 250064 - protein, 128 aa, Zea mays
  Clone ID: MRT4577_159643C.1.pep
QKQFFSFNQIGSLNFAFFLEQQQFPFSQVPFAYPQQFFPFNQLAALDFPGFFQQQQFFPFSQVVGVSPVTFFTQPQLFPFFQAVGPNGGPLFQLQQFLPFNQLVFANPAVFFPQPLIGGALFLIFFPL

SEQ ID NO: 250065 - protein, 112 aa, Zea mays
  Clone ID: MRT4577_159644C.1.pep
AARMGQLFSSARQTFEVSSYDVEVIPDIEVTTDGTKYIFSDGIGKISTRFARQVAKLIGLDPAHPPSAFQIRYGGYKGVITIDPTSFFNLSLRPSMKKFESKSTMLNITNWS

SEQ ID NO: 250066 - protein, 94 aa, Zea mays
  Clone ID: MRT4577_159645C.1.pep
PAATQLLIVGDDGITHHPSRKISTICEGDSTSRPSSTVRCSSYCSCRMATARITCSPMDLKEELLQLLLHAPDEGARAANDPYAKDNKEDAHRG

SEQ ID NO: 250067 - protein, 129 aa, Zea mays
  Clone ID: MRT4577_159646C.1.pep
CYSGEDDARQKLAPCPKRLPGHYSTNALPEIDQLPRPGGGVSSEHLHLACPRSPGAVAAMPGVLDPQCPCLPPSGRRVQDMVPARLPGSFSFRRGKLRHERMSIIPQSVRGRCVFSHVVCCRPPLHLCI

SEQ ID NO: 250068 - protein, 49 aa, Zea mays
  Clone ID: MRT4577_159647C.1.pep
GASRAPLWCEQYPALGVPPHKHALKLAQPDIRHTRISLNTWMDRELPRA

SEQ ID NO: 250069 - protein, 48 aa, Zea mays
  unsure (1)..(48): unsure at all Xaa locations
  Clone ID: MRT4577_159648C.1.pep
MXARGTSAEALXQWHSEGVRPXDAELLQAQADIWGVXLSYRAPLGLEC

SEQ ID NO: 250070 - protein, 56 aa, Zea mays
  Clone ID: MRT4577_159649C.1.pep
SFNKKWGRHQQPLPLQQKSHYHLLPYPYLRTPFSPQLTLQKLPLLQHQPRHLVHLL

SEQ ID NO: 250071 - protein, 93 aa, Zea mays
  Clone ID: MRT4577_15964C.1.pep
MPLFVLGRFLAPMFVRSFTPFSKGKKNWGGGGQKIFRFQRNMFSEGQSEAGTPIKKQRPPRGGLLPGKKNQYQRLPKNELGEPRPGCLLKKDH

SEQ ID NO: 250072 - protein, 118 aa, Zea mays
  unsure (1)..(118): unsure at all Xaa locations
  Clone ID: MRT4577_159650C.1.pep
KRGCKAKNRRTDGGKRKTEDGDKTDEEPDEEGEDEEEXRRTHRRRSRGDHTTQEERHQRRTKKKKARXRREQHDGRRPNRHTKPRKKQRPRNGGTTGAKKRRKKEQERKXSKRRREER

SEQ ID NO: 250073 - protein, 152 aa, Zea mays
  unsure (1)..(152): unsure at all Xaa locations
  Clone ID: MRT4577_159651C.1.pep
MDGLVGLLKVRVVRGINLAYRDARGSDPYVVLRLGKKKLKTSVKKRSVNPIWHEELTLTVTDPSQPLKLXKVFDKDTFSRDDPMGDAEIDVAPLIEAVNMNPEEIRNGAIIRSVRPSTKNCLADESHVCWRNGKFVQDMILRLKNVESGEIQ

SEQ ID NO: 250074 - protein, 103 aa, Zea mays
  Clone ID: MRT4577_159652C.1.pep
FSYGRIGRPLESSRGPGYQPCLPRRKRQRSKLKTSVKKRSVNPIWQEELTLTVTDPSQPLKLEVFDKDTFSRDDPMGDAEVDVAPLMEAVSMNPREESLRNGA

SEQ ID NO: 250075 - protein, 174 aa, Zea mays
  Clone ID: MRT4577_159653C.1.pep
MDGLVGLLKVRVVRGINLAYRDARGSDPYVVLRLGKKKLKTSVKKRSVNPIWQEELTLTVTDPSQPLKLEVFDKDTFSRDDPMGDAEVDVAPLMEAVSMNPREESLRNGAIIRSERPSARNCLADESHVCWRNGKFAQDMILRLRNVESGEIQLQLQWVNFPPGPGPAVAATTR

SEQ ID NO: 250076 - protein, 193 aa, Zea mays
  unsure (1)..(193): unsure at all Xaa locations
  Clone ID: MRT4577_159654C.1.pep
MDGLVGLLKVRVVRGINLAYRDARGSDPYVVLRLGKKKLKTSVKKRSVNPIWQEELTLTVTDPSQPLKLXVSSKQNDPVCDSLFXCLLQEVFDKDTFSRDDPMGDAEVDVAPLMEAVSMNPREESLRNGAIIRSERPSARNCLADESHVCWRNGKFAQDMILRLRNVESGEIQLQLQWVNFPPGPGPAAATTR

SEQ ID NO: 250077 - protein, 71 aa, Zea mays
  unsure (1)..(71): unsure at all Xaa locations
  Clone ID: MRT4577_159655C.1.pep
FSTFSINANVTSAGKFNIXSALHFNSYFNRAFYKHTIKNNFVFIYXLLDENINYSYPQNLSPKIINFYITQ

SEQ ID NO: 250078 - protein, 137 aa, Zea mays
  unsure (1)..(137): unsure at all Xaa locations
  Clone ID: MRT4577_159656C.1.pep
TSASLMKMAAAGRNHAKLTMRRKKXKAVHKTXTTDDKRXLTGXVKSVTVNTTPTNTRQENIFKADLAIQLIXNPKAQAAIGANTWRDSGSPQTKKLQDDLPGIINQLGPDNMEHLKRIAEEMQKQVAAAGAAAQVKE

SEQ ID NO: 250079 - protein, 101 aa, Zea mays
  unsure (1)..(101): unsure at all Xaa locations
  Clone ID: MRT4577_159657C.1.pep
RSISRPPLSSVXFSLYKMIRRTSRTMVXAFPIHSKTGVCGDMSLQALRSFCATRPSSRKILLRFLSLSLPLSLSSVAWVKICISLAKRDLHLKSCRIGLAG

SEQ ID NO: 250080 - protein, 100 aa, Zea mays
  Clone ID: MRT4577_159658C.1.pep
QQHVVLAALIVVVVATILVQTTPPPRGAEAAIIPGNVSAPNAVVFGVVPCSTGSSINVATAPPFPNASLQLQCGADSLAGNVSGRATTADSRGNFLVGVA

SEQ ID NO: 250081 - protein, 97 aa, Zea mays
  Clone ID: MRT4577_159659C.1.pep
GDLGQVVGVPVSLDDEASLDAAISRSNVVINLLGRFWKTKNFSINEANIETASIIAKAAKRVGVERLIHVSSVSAAPGAPSEFSRAKYLSELAVSRE

SEQ ID NO: 250082 - protein, 58 aa, Zea mays
  Clone ID: MRT4577_15965C.1.pep
KKKKKNKKKNFIKKKKKKKKRKNKKRKKKKKKKKKKKKKKKKKKKKKKKKKKKKGPPF

SEQ ID NO: 250083 - protein, 42 aa, Zea mays
  Clone ID: MRT4577_159660C.1.pep
AYKISTFCGLEFTLDETHAKLLYIKCNLQVHFFSPLNTPHHV

SEQ ID NO: 250084 - protein, 171 aa, Zea mays
  unsure (1)..(171): unsure at all Xaa locations
  Clone ID: MRT4577_159661C.1.pep
FFFFFLFFFFFFFFFFFFFFFFFFFFFLVAWFFRGPGGXREGGPGPGGGTSFPKGGAKESGGKPGEKGTPGENGKSDXRQKKKQTGGKKRKAGGAKGGSKPKKKGGSQKPGFQGGNREAPPPKGKGQPAGRGGVRIGPQGGFFFTQGNGKKWIAHNRALEKWKKAAHPSCP

SEQ ID NO: 250085 - protein, 221 aa, Zea mays
  unsure (1)..(221): unsure at all Xaa locations
  Clone ID: MRT4577_159662C.1.pep
MATGPEHVAAAVEETPEKKAASTTELPAPSGWTKKVAPTRGGRFEVIFVSPTGEEVKSKRQLTSNRPTRGGRFEVIFVSPTGEEVKSKRQLTQYLKAHPGGPASSEFDWGTSDTPRRSARLSEKVKATESPEGEKTPKRGRSSSKRGKKEEKXTAANEAGEDGASGINTDVEMKDAENAEPNACCSYCPLVRPLSICSHAPPCAPFASGPGAGGACSRWGA

SEQ ID NO: 250086 - protein, 409 aa, Zea mays
  Clone ID: MRT4577_159663C.1.pep
MATGEEHVAAPAPAVEETPEKKQASTTELPAPSGWTKKLAPTRGGRGGRFEVIFVSPTGEEIKSKRQLTQYLKAHPGGPASSEFDWGTSDTPRRSARLSEKVKATESPEGEKTPKRARSSSKRGKKEEKVDAEDANEAGEDGASAEGKGTDVEMKDAENAEDEKKDVPSAEKTEEVDDKKDAENVEMKDAAEKTEEVDDKKEEAPTVDAAENTVEGDDKKEEPPAEKTDEKEEAPAVDAAEKNEEGDDKKEEEPPAEKTVEKEVVPAVDAAENTEQSTGGQAQPNDVAAPESENKGDGKPAESESAPLAFVDEAAPLVIVGEEKTEDSQAAESAVPSLASSEGEKKENGGATEPAAPLVVETKADAPPPADADKGAENSGQVNTAPQEPTAANCDKGQIQPGASAVRCT

SEQ ID NO: 250087 - protein, 54 aa, Zea mays
  Clone ID: MRT4577_159664C.1.pep
KVRVKANQGSKGAPPFHLVSRVRFPPKFSLCFSQKKFLCWVKKRWPVIKKAFLG

SEQ ID NO: 250088 - protein, 52 aa, Zea mays
  unsure (1)..(52): unsure at all Xaa locations
  Clone ID: MRT4577_159665C.1.pep
ALAMAIQSKGTGVVXMARARERMPPFAPVRSALVCQSVNQYLSNRSFGDQSV

SEQ ID NO: 250089 - protein, 103 aa, Zea mays
  Clone ID: MRT4577_159666C.1.pep
DILFPSDAGLPKLSSPLDYKVPESFDWATQDFMYTFHDKSTNELNNFLCFKQYVPVHKQEEQENQILSQVHQYLSTGQSELNEILKGFHLSVQKSIQNNQTQN

SEQ ID NO: 250090 - protein, 73 aa, Zea mays
  unsure (1)..(73): unsure at all Xaa locations
  Clone ID: MRT4577_159667C.1.pep
AFXISLLGXLXYRXHLXXXLLCLEGIXLSLXXIATLITLNTXSLXANXVPIAILVFAACXDXXGXXLLXXXXX

SEQ ID NO: 250091 - protein, 70 aa, Zea mays
  unsure (1)..(70): unsure at all Xaa locations
  Clone ID: MRT4577_159668C.1.pep
TSRNNTNHPPPPPLIWLKKKKTKTWESQKSLPPAHHNINCIHTSKPGFXGIPQXRCKPPTPPPITTXRHN

SEQ ID NO: 250092 - protein, 56 aa, Zea mays
  Clone ID: MRT4577_159669C.1.pep
TRTHTINTHDQLVMVAASLITGMMCLKNDYYFNHTVHHYLDKLLPEHKTYILKTVA

SEQ ID NO: 250093 - protein, 79 aa, Zea mays
  Clone ID: MRT4577_15966C.1.pep
DLVSLDAPIIFQRPNIYVVHRMPLHVDILLAHNDAYDMLRLDMSSLLKNNIAHSLSVVLCPYQCSQISTYSPYRERCMS

SEQ ID NO: 250094 - protein, 144 aa, Zea mays
  Clone ID: MRT4577_159670C.1.pep
IGSETLESNRTEARQKAEAAAETSGEEIEDKAKEEAIMSLRRTVGFVLSRRFSPRVIPRAAPARSFHTLKELPVGDGLRGAAGVAAAAIAGVGAWAVQYFRKGPDDDESAARKKEEDMKARFEDWMKEYNKTYRDEEEKAMRFQ

SEQ ID NO: 250095 - protein, 80 aa, Zea mays
  Clone ID: MRT4577_159671C.1.pep
LRVLPLLGSLACWWAALRSWACVCSRCPFGSLVAFAGLLVGAAGLGVPVVFLSWALLWGPVRRSLPAGPLWSPSRGGLSP

SEQ ID NO: 250096 - protein, 106 aa, Zea mays
  Clone ID: MRT4577_159672C.1.pep
HNELLHCQVDHKSSLKQHTHNGGAETVEFHKNTVALQFSPRICRINSSAVDCMVYLSLASEPDDLPGLNYTQLQRMSFQNLHVFERLRHHLTFPQNEQSLHPDSFW

SEQ ID NO: 250097 - protein, 64 aa, Zea mays
  Clone ID: MRT4577_159673C.1.pep
DVVGEPVGVPVSGGGTPAARGVVAVVIAPWISAFVSVHVAVLVVVLVVLGHISSSISLWVRIVS

SEQ ID NO: 250098 - protein, 49 aa, Zea mays
  unsure (1)..(49): unsure at all Xaa locations
  Clone ID: MRT4577_159674C.1.pep
KRYLKYLNKKYLKKHKVGDWIRVVDDKKDRNVYEIRXLNIVEKEGEEED

SEQ ID NO: 250099 - protein, 102 aa, Zea mays
  unsure (1)..(102): unsure at all Xaa locations
  Clone ID: MRT4577_159675C.1.pep
MVLQNDIDLLNPPAELVKLKHKKKRLVQSPNYFFMDGKCQGCFSITTVFSXHSHIVCVWPWXKTVLXQPTXGGXQGLTEGWSFSEGKGDLGAGMGSLKGFGF

SEQ ID NO: 250100 - protein, 47 aa, Zea mays
  Clone ID: MRT4577_159676C.1.pep
DHLVSKEKELIKVHTKGLVGFSMPRARHRNFSKNCTHHGLKMPQLLH

SEQ ID NO: 250101 - protein, 139 aa, Zea mays
  Clone ID: MRT4577_159677C.1.pep
ASSFKSFVVEGRLGEQWVCLRTRRGRGAEEVKVEAPTMLDVVAEPVPDDAPFFYRVESLERGCVGPASTSFSLDGRSTTRTVDFLHDCDVFFSITVAASSFFLRSSRFFSSCSLYDAASSSPPQGARGRHRWDRQRAET

SEQ ID NO: 250102 - protein, 80 aa, Zea mays
  Clone ID: MRT4577_159678C.1.pep
TARVSYNTLSTPLSHESPIFLSSTNISFSSFLLTKNPIINSHHNYTNILLLSSMSPFILTIILLLLSLLSILTLLLQKHT

SEQ ID NO: 250103 - protein, 88 aa, Zea mays
  Clone ID: MRT4577_159679C.1.pep
SPSSITIISRLPLTSTLQPRSIPLTTTIRGGGGLIIPLLSRLFTGRASPTIPPGSKPYPCRLVDTTHFVRVITTFYTTTPAHGINCKH

SEQ ID NO: 250104 - protein, 60 aa, Zea mays
  unsure (1)..(60): unsure at all Xaa locations
  Clone ID: MRT4577_15967C.1.pep
MEVSGTSAPTVTVFISSSLNSFRSDKRYSRSLTIAEFKCKLELVVGXPASCMELELYGAD

SEQ ID NO: 250105 - protein, 93 aa, Zea mays
  Clone ID: MRT4577_159680C.1.pep
ILNKTKPVGVKKLGPAFGDQRGKLNKPIGREWFPPFKKKVFGLWSQKYNGLFGAGYANKPLSFGNKEWFFFCKQKKGPPPFGHETFLDILTRW

SEQ ID NO: 250106 - protein, 30 aa, Zea mays
  Clone ID: MRT4577_159681C.1.pep
QMKNERVLYIELLIGKHFTMCYVIGERLFI

SEQ ID NO: 250107 - protein, 95 aa, Zea mays
  Clone ID: MRT4577_159682C.1.pep
EGGWKRTSVLRPTKRAMAGDGVAGKIRTSTLHILNIPFIDHALIAPDNPSVNAAADGNIANSGSRDNRRLEDHNRSRLSSHCGVEAPSSVPLSTS

SEQ ID NO: 250108 - protein, 124 aa, Zea mays
  unsure (1)..(124): unsure at all Xaa locations
  Clone ID: MRT4577_159683C.1.pep
PTRAALLKRQAPTLTXPNHLMLHYLFASLAPNPSFRPHNSNQCLPLILIIINTLNYTLTYHXPISILIQPHLLPHIYFNTHKTYPTSFINIISMPNTNYNYQLLYYTKIRFPLHPIIYEDANFK

SEQ ID NO: 250109 - protein, 111 aa, Zea mays
  unsure (1)..(111): unsure at all Xaa locations
  Clone ID: MRT4577_159684C.1.pep
XGGSLFLFFFFFFFFXXSXXXKPFLIQYPLVTFPMYLKGSIAQPPTPMAPFYFSCFHPRKNQGHPTPLKFKFQLFPTLNTGKIQPPVATPLLTPPMYYPPPWIPTNGGRNP

SEQ ID NO: 250110 - protein, 112 aa, Zea mays
  unsure (1)..(112): unsure at all Xaa locations
  Clone ID: MRT4577_159685C.1.pep
MRGLLVALAVLALAVSATYTHTSGGXRCQPPPPVHLPPPVHLPPAVDLPPTVHLLPPVHLPATVHLPPAVHVPPAVHLTPAPCHYPTEPSRSKPHPQPHPCPCQQSHTSPCQ

SEQ ID NO: 250111 - protein, 76 aa, Zea mays
  Clone ID: MRT4577_159686C.1.pep
AVSARADRRDPAGAGAPRSGSSGMPPCSPIPPPSRGRRLACSRLPSLCPPPPPRLPPTMPRCSVVPVPYTLYALTS

SEQ ID NO: 250112 - protein, 213 aa, Zea mays
  unsure (1)..(213): unsure at all Xaa locations
  Clone ID: MRT4577_159687C.1.pep
GLSLAESGGFVKAPGGAPANVACAIAKLGGSSAFVGKFGDDEFGHMLVNILKQNNVNSEGCLFDKHARTALAFVTLKXRLGLVRRARVFHYGSISLISEPCRSAHMAAMRAAKAAGVLCSYDPNVRLPLWPSPDAAREGILSIWKEADFIKVSDDEVAFLTRGDANDEKNVLSLWFDGLKLLVVTDGDKGCRYFTKDFKGSVPGFKVDTVDTT

SEQ ID NO: 250113 - protein, 133 aa, Zea mays
  unsure (1)..(133): unsure at all Xaa locations
  Clone ID: MRT4577_15968C.1.pep
MPGYGAKYRDXLIKNAAYVETPGHXILAADEATXTIGKRLSSINVENDEENRRALRELLFCCPGALQHIRGEILFEENLNQKTKDGKPFVDVLKEGGVLPDIKVDEVTIEDVVTDXETSIQEHDDHAKCSVKN

SEQ ID NO: 250114 - protein, 202 aa, Zea mays
  Clone ID: MRT4577_159690C.1.pep
MRRVFPSSKPPDGGYPPSFRLLVGGTQLRGSWYLSAIVRLQGFSSASPAAPPRRRSPRMMTTSSWVGKSKSGCDLGPTLSFKDVHHPCWGGGQAEPALNLPCGSAGHLLPQRSGEEALTGLAGGADSDNVGLTDCGRRHLQRVGVVGWAPGGPLLPEGGCRAVCTGGPPTMPRAARAAFVFWGGPAFALGWRPRAEAGAPLV

SEQ ID NO: 250115 - protein, 302 aa, Zea mays
  unsure (1)..(302): unsure at all Xaa locations
  Clone ID: MRT4577_159692C.1.pep
PRGQSRHLAVYSSPTIPCTNTTNRVPHYFRRPRPLRRAPDSGDMAEYRLGLQLHGHTDDVRGICVCGDAGIATSSRDRTVKFWTRNPEKESEYVLSKTLAGHSSFVGPLAWIPPSDRFPEGGIVSGGMDTFVFLWDLQKGEVAETMKGHSSQVTGLAVDTNGDIISSSMDCTVRRWRNGNAIEVWEAHKVAVQTVLKLPTGELFTGSSDSTIKLWKGRTCLQTFSGHADTVRFLASMPGLGILSASHDSTVKLWALSGQPLLDMIGHSSLVYSGDAHSSGLIASGSEDRSLKIWXDGVCVQA

SEQ ID NO: 250116 - protein, 48 aa, Zea mays
  unsure (1)..(48): unsure at all Xaa locations
  Clone ID: MRT4577_159694C.1.pep
VNIVIPHXLPGTDADREALTEEHEDLLHAPTQARPPCHRHSLLHVPKT

SEQ ID NO: 250117 - protein, 84 aa, Zea mays
  Clone ID: MRT4577_159695C.1.pep
MSGYPKYEIRTVIREDIRISEIRRISVISYPYPISELYYPNSNLKSENSADILKKLSNRIISLFERSDGRIISVPFTPLMNSNG

SEQ ID NO: 250118 - protein, 67 aa, Zea mays
  Clone ID: MRT4577_159696C.1.pep
IATVGYPTTGAPRRRRGSDTSSRPYCFFRVAAGAQLQLHPRHFGPHLRDKLVSKLIKDAEGTCSGRH

SEQ ID NO: 250119 - protein, 57 aa, Zea mays
  Clone ID: MRT4577_159697C.1.pep
NTLIYNGSQSSIGRNNCIKQLRPLNKDGMDNNTCSRDHSFHQLQAIRLVIALPRSMR

SEQ ID NO: 250120 - protein, 230 aa, Zea mays
  Clone ID: MRT4577_159698C.1.pep
MGDNKSPLSLSPMGGRDRDRELLIPVSGGGSAPGDGVEDGDRASSASAALSSSGREAFHKVVRSWASKKFMTGCVILFPIAITFYITWWFIHFVDGFFSPIYAQLGINIFGLGFVTSVTFIFLIGVFMSSWLGASVLSLGEWIIKRMPLVRHIYNASKQISAAISPDQNKQAFKEVVIIRHPRVGEYAFGFITSSVSLQSYSGQEDLYCVYVPTNHLYIGDIFMVNQRMS

SEQ ID NO: 250121 - protein, 275 aa, Zea mays
  Clone ID: MRT4577_159699C.1.pep
MGDNKSPLSLSPMGGRDRDRDRELLIPVSGGGSAPGVDDEGADRASSASAALSSSGREAFHKVVRSWASKKFMTGCVILFPIAITFYITWWFIHFVDGFFSPIYAQLGINIFGLGFITSVTFIFLIGVFMSSWVGASVLSLGEWIIKRMPLVRHIYNASKQISAAISPDQNKQAFKEAVIIRHPRVGEYAFGFITSSVSLQSYSGQEDLYCVYVPTNHLYIGDIFMVNSKDVIRPNLSVREGIEIVVSGGMSMPQILSTLDPEMILGDRTGPSRS

SEQ ID NO: 250122 - protein, 38 aa, Zea mays
  unsure (1)..(38): unsure at all Xaa locations
  Clone ID: MRT4577_15969C.1.pep
GGWXXKGEPQNRNLDPQLLESAPSFTLSLINWARFAPT

SEQ ID NO: 250123 - protein, 75 aa, Zea mays
  unsure (1)..(75): unsure at all Xaa locations
  Clone ID: MRT4577_1596C.1.pep
GTLWYNYCTNPFFILCRFQEHLSSFNQSPGASRGVYVFSXXLTPYVGHPNPMQEGQELFRKGLLSEAVLALEAEV

SEQ ID NO: 250124 - protein, 33 aa, Zea mays
  Clone ID: MRT4577_159700C.1.pep
SILIITFLITQTSTYITRWLKQKLATNHHIQRA

SEQ ID NO: 250125 - protein, 263 aa, Zea mays
  Clone ID: MRT4577_159701C.1.pep
MAQEAAPARPAGPTRLVYFDDMGALHHSSATVLSVHQEEGGRVAVVLDATVFHPQGGGQPADTGVISAGGARFLVEDVRAKDGVVFHYGRFEGTEQGCGTVFKEGETVSLQVDAERRSFNSRLHSAGHLLDICVHNVGLFHLEPGKGYHFPDGPFVEYKGIIPPDQIPVKKNELEREANRLISEGAKVLASVFPYEEAAILCGGSLPSYISKDSNPRIVKFGDNPGGPCGGTHVADISIINSLKVTNIRVKKGLTKVSYSISP

SEQ ID NO: 250126 - protein, 93 aa, Zea mays
  Clone ID: MRT4577_159702C.1.pep
SFLSHPPPWVGALLYVPPTRGGPGLPGGPSPSLGLMGGVFFFSPPPKWFGPPPKGLAFLVLFGGGIPIWFSFWTPFWGPPFVSFLVNRAGGPV

SEQ ID NO: 250127 - protein, 183 aa, Zea mays
  unsure (1)..(183): unsure at all Xaa locations
  Clone ID: MRT4577_159703C.1.pep
AIGTLEAGRDPKYVECACSDSRVCPPKTLRLQCRXAFTVRNIAGVIPAYDXKTKYTGIGSAIKYDVCALKAQVLVAIDHSXCVDVRGVLSLQDVAPDNFHLXENCPKIGFPGKINVTERHXSGPLDDSSAXSIERSRRTLSLENLKTYPFXKECVNNGTLQLVVGQYNFGLREVLICYYKDPS

SEQ ID NO: 250128 - protein, 55 aa, Zea mays
  unsure (1)..(55): unsure at all Xaa locations
  Clone ID: MRT4577_159704C.1.pep
ASSMPSAIFGGSIGGLLRPAHVEEFYVVTXAFPIEEVFXVHIGGGASMREGRTLV

SEQ ID NO: 250129 - protein, 52 aa, Zea mays
  Clone ID: MRT4577_159705C.1.pep
MEEEQKGQKNKKEEEEEELDRERRTTTPSEHLGVGVEQVHHKIAHGLCAIDL

SEQ ID NO: 250130 - protein, 62 aa, Zea mays
  Clone ID: MRT4577_159706C.1.pep
DLCCDTRQSNMQINSLILQLLQINHTAASAEPLSQAVQVILHREHLITRRSFRGTLLCSLPC

SEQ ID NO: 250131 - protein, 82 aa, Zea mays
  unsure (1)..(82): unsure at all Xaa locations
  Clone ID: MRT4577_159707C.1.pep
LHRRDLSVCHIAPLRKLHDDSDKIGXCEMYNFGXTGKGTXSALEMVAAFXKASGKKTPLVLRGRRPAHAXIVYAVTVQAEKE

SEQ ID NO: 250132 - protein, 365 aa, Zea mays
  Clone ID: MRT4577_159708C.1.pep
SAGLRDRLLLFSTGVSIGILSNKKEFDTLKGTLKQMENLVQDLQDELEMKEGLTVKELLNETSIEHDDDNSKLHGVDPEPMSKIEAELEAELARLELNITSISLEEETSEINGADDDSIGDIVCGELKADTVPRDLTEYSSESDHRRDSRESSPGYTCGANCPVSPRDLSIRLHKVIQHRLEDRIKELESAIVHGQKQTQLQMMVTDQMVSDRIRSNSESGSSSGQGSPIFIQETSSLAEPYRLNLSGDALEAYDEAYEEFMRIADSPYTTSPNGKPQATEDCLADRGLVWGMEDSSRKLREVPTWERALRSADPSRDHERDRDESGGDDDDDDCEVLIRQIVERTRQGSHVLVNAQKLLFSVDQ

SEQ ID NO: 250133 - protein, 119 aa, Zea mays
  Clone ID: MRT4577_159709C.1.pep
IFASVTAPTATRSIPGFKTGEESIPNSLPPHPQRRPTDLVLLPKQFEFDRATVRHPRQPDLCSHAERRGPVQFDYCRCRCYGAEEGPVSGSAMASLSDSAVACGGRAGAKLMEPQLLLK

SEQ ID NO: 250134 - protein, 74 aa, Zea mays
  Clone ID: MRT4577_15970C.1.pep
TKRFLTQGSGPGCSRSVWIDQIKLWGTRAFERSSPPSNQGESRRAPVRSPPPGPIFKKGFPPVPYKKLKNIKNP

SEQ ID NO: 250135 - protein, 80 aa, Zea mays
  Clone ID: MRT4577_159710C.1.pep
TALSRPLNQVSVCHLCLILSGSQCSLILFLTLICSTQFMCCQNHHWPSSIEGVLFGIVPWSITYMLCYCLYYLECNNLFT

SEQ ID NO: 250136 - protein, 147 aa, Zea mays
  unsure (1)..(147): unsure at all Xaa locations
  Clone ID: MRT4577_159711C.1.pep
MEGTDEDFHLRAIKTSERQTIDTDDQDTDDKDYXEPPPVPFFEPGQLKICYFYRAGIVEYVSTFIFLYVSMLTVMGASKSIYKSATXVCIQGISCLFYCMIFVLVYCTDGISSGHMXPGETFGLILARKYIITTAVFYIIMHGLSPI

SEQ ID NO: 250137 - protein, 67 aa, Zea mays
  Clone ID: MRT4577_159712C.1.pep
KDSTIGWGVSSPLSQHIFRDHIKIRSCGQRAAYSLRRCGIHLGLFGTLLSFACLLEPTKESRCRAFV

SEQ ID NO: 250138 - protein, 80 aa, Zea mays
  Clone ID: MRT4577_159713C.1.pep
SSTLAHHSTCLTIHHNCYASTALTPPHYSPTRTLQSALPSTCCPASPATPLTRPIPTPSNFKPSMNPITLRPPPAWAPSP

SEQ ID NO: 250139 - protein, 80 aa, Zea mays
  Clone ID: MRT4577_159714C.1.pep
PKIMPALEEPRRWQILIVESQPAIPSLKRTLLFALSFLYPNTYKIPTYTSNYSHTLNTKLSLTRGPPYPQNIHKPHTQNF

SEQ ID NO: 250140 - protein, 77 aa, Zea mays
  Clone ID: MRT4577_159715C.1.pep
TGPNFGNGVKPNAPFDKRASFNDLTFGRAKRYILWAKNIFNTWSKYPFENPQMFEEFSMLEIKPKKTARRVDASGDP

SEQ ID NO: 250141 - protein, 218 aa, Zea mays
  unsure (1)..(218): unsure at all Xaa locations
  Clone ID: MRT4577_159716C.1.pep
PLINYXRPDIKRXNFTPDEXXLIVRLHRELGNRWSAIAAQLPGRTDNEIKNVWHTHIKKRLEDGHGEEKKARKGKPAAKKAADAVGRSSEHGPFLTASPGLSSSGVTFSAAADSAAAVSSSADNAATTSHHPQQVGASKAESSTELXTAASAPPSSXPLDDSFWSSADVVDMGLGATDEELGLACPPPLSSSSTRDEDMEFWLNMLLEAGDMRDLSVL

SEQ ID NO: 250142 - protein, 78 aa, Zea mays
  Clone ID: MRT4577_159717C.1.pep
KKKRGVGFSHLGGANFPGMKNRDLVLISQFKDNHYPNREDVFFMAEFKSFKKEKKLRNLFGGGGSKKTGSQREATQYL

SEQ ID NO: 250143 - protein, 135 aa, Zea mays
  unsure (1)..(135): unsure at all Xaa locations
  Clone ID: MRT4577_159718C.1.pep
MVMPKPVLSLLVHLHADVLFLPVPAGGAVYNVLRYGARPDCVTDAGGPFLRAWADACRSPLPAAVYVPPGRXLVRSATFTGPCHTRAVTFAVAGTVVVPAAYSARGSSVRWITFENMDVLVVDGGCTLDRRLRAL

SEQ ID NO: 250144 - protein, 38 aa, Zea mays
  Clone ID: MRT4577_159719C.1.pep
GALLSHEPLQHVIALCDDECCTRSYCLICVRHPFEQIV

SEQ ID NO: 250145 - protein, 116 aa, Zea mays
  Clone ID: MRT4577_15971C.1.pep
RELPPSLCTKAAVSEACPVKGVGAFWWTKAPLMFPKEQSYFLEGAPEIFARCYAIVPVRYGGKWVILGCLLFVCCFKVAEQSCCKGSLILLRRLSRCKPCFTSCRVTSAHFFKRPP

SEQ ID NO: 250146 - protein, 94 aa, Zea mays
  Clone ID: MRT4577_159720C.1.pep
STISGSGCPRIHPNHDLDQTLNLLKYNFCMPYGDRTGAQLCPSGSPCTRDAGEAGVTPSHVAQYAWHPRSCFDRRLHAQVHGIAYTSCTSWMHA

SEQ ID NO: 250147 - protein, 76 aa, Zea mays
  unsure (1)..(76): unsure at all Xaa locations
  Clone ID: MRT4577_159721C.1.pep
LWPRGGKTSXGFQGRLTPKWLTKKQKGLSKKKLFGQNVCFGNFRWHPGSSRSLKKNSYQCFQAISKKFFMGFDCGG

SEQ ID NO: 250148 - protein, 73 aa, Zea mays
  Clone ID: MRT4577_159722C.1.pep
VRKKKKKKKKKKKKKKKKKKKKKKKKKKKKKKKKKKKKKKKKKKKKKKKKKKGDSVREGGKTTGVTQGEGHWH

SEQ ID NO: 250149 - protein, 60 aa, Zea mays
  Clone ID: MRT4577_159723C.1.pep
QATRHTYGHSSSKTTCTTCEWYEAMKTGHVIEWLVLVTNYHTSMWLVLGRTHIHFHVSHL

SEQ ID NO: 250150 - protein, 237 aa, Zea mays
  Clone ID: MRT4577_159724C.1.pep
MAGQNQRLNVVPTVTMLGVMKARLVGATRGHALLKKKSDALTVQFRAILKKIVLQSVRAASVRVRSHQENVAGVKLPKFTHFVDPAAASGGPSNASPSLTGLARGGQQVAACRAAHVKDIEVLVELASLQTSFLTLDEASETTNRRVNALENVVKPRIENTISYIKGELDELEREDFFRLKKIQGYKKREIERQMAAARLFAEEQLAEDLALKRGISVGAAANLLVAGGEKDDDIIF

SEQ ID NO: 250151 - protein, 137 aa, Zea mays
  Clone ID: MRT4577_159725C.1.pep
SASRASTSWSYGRAPSLTVKLDHGAASLFGRRRTRMPERVEGANWMKTSAVPVVVVVARRRLCRSLRVSRRHRASRPMWVSAHCNGPRAEFVLQAVFVIAFTVMTDCNLPSWQYFGIKLGTRGAQTSLPKKKKKKAP

SEQ ID NO: 250152 - protein, 82 aa, Zea mays
  Clone ID: MRT4577_159726C.1.pep
YDTRRYTTGNTVQLNFLHELHITLRKSYLALFGFQVQIIEGLGWLDSRLLTESKSPSFYKQIQFWSSSINLLFLPLQGEGIN

SEQ ID NO: 250153 - protein, 63 aa, Zea mays
  Clone ID: MRT4577_159727C.1.pep
GQRSSLHAAIGAIGGVRPALRQECTRSLMDFTTAATPSTCTQHVCQHESTVGGENPSLMSDYR

SEQ ID NO: 250154 - protein, 269 aa, Zea mays
  Clone ID: MRT4577_159728C.1.pep
MAGQNQRLNVVPTVTMLGVMKARLVGATRGHALLKKKSDALTVQFRAILKKIVAAKESMGETMRASSFSLAEAKYVAGDGVRHVILQSVRAASVRVRSHQENVAGVKLPKFTHFVDPAAASGGPSNASPSLTGLARGGQQVAACRSAHVKAIEVLVELASLQTSFLTLDEAIKTTNRRVNALENVVKPRIENTISYIKGELDELEREDFFRLKKIQGYKKREIERQMAAARLFAEEQLAEDLALKRGISVGAAANLLVAGGEKDDDIIF

SEQ ID NO: 250155 - protein, 89 aa, Zea mays
  unsure (1)..(89): unsure at all Xaa locations
  Clone ID: MRT4577_159729C.1.pep
XTARRDLALKRASPWALRQICWLLEGRRTTTSSFDRLFPCSSNHSIEFACQDVVLRLVRLDIISLCLACVCTPHSIFSFFGDVLYTWMI

SEQ ID NO: 250156 - protein, 73 aa, Zea mays
  Clone ID: MRT4577_15972C.1.pep
HHPQQHKSSTCNNMGSKILSTKFTFASLTRLRKKLSRICWLLGIKVKFNKIQRLFCRKAYYEWILKNSFYLSG

SEQ ID NO: 250157 - protein, 59 aa, Zea mays
  Clone ID: MRT4577_159730C.1.pep
LHRSLAGKQTTNTNKFHALGGNCSCSFSRGTAADEFAPWVIPGPVLVYDLDHKGLGGHN

SEQ ID NO: 250158 - protein, 269 aa, Zea mays
  Clone ID: MRT4577_159731C.1.pep
MAGQNQRLNVVPTVTMLGVMKARLVGATRGHALLKKKSDALTVQFRAILKKIVAAKESMGETMRASSFSLAEAKYVAGDGVRHVVLQSIRAASVRVRSHQENVAGVKLPKFTHFVDPAAASGGPSNASPSLTGLARGGQQVAACRAAHVKAIEVLVELASLQTSFLTLDEAIKTTNRRVNALENVVKPRIENTISYIKGELDELEREDFFRLKKIQGYKKREIERQMANARLFAEEQLAEDLALKRGISVGAAANLLAAGGEKDDDIIF

SEQ ID NO: 250159 - protein, 124 aa, Zea mays
  Clone ID: MRT4577_159732C.1.pep
MAGQNQRLNVVPTVTMLGVMKARLVGATRGHALLKKKSDALTVQFRAILKKIQGYKKREIERQMANARFSQRNSSPRISRSRGASPWGLRQICWLLEGRRTTTSSFDRLFPCSSNHSIALETIS

SEQ ID NO: 250160 - protein, 78 aa, Zea mays
  Clone ID: MRT4577_159733C.1.pep
SFCWRTVAELGPVWFIQSYTPGAAYLKLWSTGHPQGANMQRLAYLGVSVDVHLRHGELHCSTHGGLSPISWMPLSTVG

SEQ ID NO: 250161 - protein, 109 aa, Zea mays
  Clone ID: MRT4577_159734C.1.pep
SRSSQSSKYWEIAHLNMRREADMEVAIQGGGSETCRTQRRVWTSAARRVALDGRGRGCSMARMSTSGAHLGPRRGWRRSPHPIPRDVSPHTTNCYSIFLTFFASCTQTH

SEQ ID NO: 250162 - protein, 66 aa, Zea mays
  Clone ID: MRT4577_159735C.1.pep
FHSRHYRPVASPSVGWFLVRIFGVSEAVRRRRVDGWDAMREAEAARTALTLVCFLFTFSKNAMCSP

SEQ ID NO: 250163 - protein, 596 aa, Zea mays
  Clone ID: MRT4577_159736C.1.pep
MVVWQSFDNPTDVLLSGGYLGFNKINGNINSLGIHFNLSFDATRRRGFIIQYPEGRRFAGAFPEWMDILEDGNYTLIFNDTYTYIRLDDTSFVRFGKQGDCDSILWSAPESLCDYDPYCGPYSLCTLSGSGSCICPVGFNSVSTDAWITAGCSRNDSLNCENVEVTFYPIDGIHRYPLEAFALEVTNMSECESACLRDCTCTAFAYNASCLLWFSELRNTIVLDSGLNGIRMYVRTAARQQSGSGTVPPFSFWKRVPLEWMIGVITLIVISLILLLRCRSKPYSARTVGDHGSLVVFSFAQIKNSTKRFSEKLGEGGFGCVFKGMLPGCTPVAVKKLKDHRQDEKQFRAEVRTIGMIQHINIVRLLGFCAEGSGRFLVYEYMANGSLSSHLFSKSSSKLSWELHYSIALGIARGLAYLHEGCVDELCPKIADFGMAKLLGRDYSRVLTTVRGTIGYLAPEWISGLPITHKADVYSFGMILLEILSGRRNSEKIEEGRFTYFPSYVAVKLSEGDDVMWLLDSSLESNADAEQLQRACRVACWCIQDAEDHRPMMGQAVHMLEGAMDAQVPPVPRSLQNYVGVEDSTTAEFYISEGSC

SEQ ID NO: 250164 - protein, 55 aa, Zea mays
  Clone ID: MRT4577_159737C.1.pep
KYGIMKLRVSVDCEIMSAFIELAISERRASRDNILAAIVVRLLIVKITWCVYECS

SEQ ID NO: 250165 - protein, 206 aa, Zea mays
  Clone ID: MRT4577_159738C.1.pep
LNIGIALWLAAGGDGWVDGSICRMQDGSRYKYRSRSRVLIVGSGADEQCAGYGRHRTKYRLGGWNALDQEMRLDVQRIWKRNMGRDDRCISDHGKEARFPFLDENVIKTLLEIPLWEIAKLDEPVGRGDKKILREVARLLGLQEAALQPKRAIQFGSRIARESNRKNFGSNRAANQASAGSVQIHQSPASPVASATRQPFLTNNQP

SEQ ID NO: 250166 - protein, 71 aa, Zea mays
  Clone ID: MRT4577_159739C.1.pep
GGPNFNSPIPRFSEAASFLLNANATFGLKLGFLPPWSCQREKENGGPPMKNFRPNLLTFALKKVAAPTGLC

SEQ ID NO: 250167 - protein, 40 aa, Zea mays
  unsure (1)..(40): unsure at all Xaa locations
  Clone ID: MRT4577_15973C.1.pep
LHLGVTIVALCPSMHACVNLDHLERPLAFVRVRRCCHSXP

SEQ ID NO: 250168 - protein, 86 aa, Zea mays
  unsure (1)..(86): unsure at all Xaa locations
  Clone ID: MRT4577_159740C.1.pep
FHLDGIIRLRTEVLAVSKDTDEGSSGGXMVRWRRNAAGDESXRXXEXXVFDPVVVCNSHYTEPXRXADIPGLDAWPPSKQMRGQRR

SEQ ID NO: 250169 - protein, 107 aa, Zea mays
  unsure (1)..(107): unsure at all Xaa locations
  Clone ID: MRT4577_159741C.1.pep
MGDVSLNGPIKAAEPGAGGIAKGNQVLDTMSAGWTDERHRLYISSMEASFVDQLYNHGSRPRNANGTAFKALRREYVEYEKTDAPVXEGGLSAXVPANPWMQHFRPR

SEQ ID NO: 250170 - protein, 72 aa, Zea mays
  unsure (1)..(72): unsure at all Xaa locations
  Clone ID: MRT4577_159742C.1.pep
GGCVAAVDLLTLVASATSTHTISXELGQPXTSVHIPPPGHTPPAVHLAPAVHLPPAGHLPQSVHLLPSDNVP

SEQ ID NO: 250171 - protein, 74 aa, Zea mays
  unsure (1)..(74): unsure at all Xaa locations
  Clone ID: MRT4577_159743C.1.pep
FISPCXSAIDLLXXXPSPRPFILYLLHTSHXXXPKNTKQYHLYILSIPLTITSIFSKTLSFISLSLFIIILLFF

SEQ ID NO: 250172 - protein, 94 aa, Zea mays
  Clone ID: MRT4577_159744C.1.pep
SRFNLGAGADARWEVASAVYLELRARAIAEMVMLRVTAVCWCPHQTLMLHAVVITLVCHDHGGADRDLGWSRRMARRGDSVPRKGFVAVAVAAA

SEQ ID NO: 250173 - protein, 237 aa, Zea mays
  unsure (1)..(237): unsure at all Xaa locations
  Clone ID: MRT4577_159745C.1.pep
AGLAMVGDVSLKSVESLLETKVDESVEVAVGDDEGCLLFEAMLTNFTGLIDDVDAGAIPTQRCAVSGGDLQNSKASEDLKQLGDRIEEGEPLRNCDNGQNDGGGFEEPTRPGEFQDLXSEESGNSEHGDEDGEDEKLEDNSISRGSGPNKSCDYGTQFGNLHSIPETGNDHLVLNMDAIVRGDAQISVTRAQAVTYDEVVDWNETPLPDNESVDPGKKRKRILTEERKAKKTKKKKK

SEQ ID NO: 250174 - protein, 212 aa, Zea mays
  unsure (1)..(212): unsure at all Xaa locations
  Clone ID: MRT4577_159746C.1.pep
GFVLILYLSFSPPELLNQGIYSPKKKKKKKKKKKKKKKKKKKKKKKKKKKKKKKKKKGTFFPEGGLLISGIFVGDPAPQKKIPEIRNNSGFLKNLPADLRDEDGMTTQFGGPAQPMQTMVQIMQILTEATIPPACFRRKKALPEGLDMANNLDDLDSNXNFDVNSTGEIVSPMGETFKQPFKRSPRDPIRLGMPCCILWKRACFLLEKNPCS

SEQ ID NO: 250175 - protein, 42 aa, Zea mays
  Clone ID: MRT4577_159747C.1.pep
GRIRGATGLARTTARPAQKRHGQYGNQKVCYCLGLCILERVG

SEQ ID NO: 250176 - protein, 46 aa, Zea mays
  Clone ID: MRT4577_159748C.1.pep
MFAATNLFKMLLKYRPEDKAAKKERLLKRPQAGDEGKTVESKKPIV

SEQ ID NO: 250177 - protein, 104 aa, Zea mays
  Clone ID: MRT4577_159749C.1.pep
HDEAHQGTGPQASAAAAAAALEAPAEGRQNARRGYRRRRRVTGGEESREYRHQHAGDRSGRHHAGENRGAGARPAHRPDRTAWTGRRHRPRTVLTAHRQGRGRD

SEQ ID NO: 250178 - protein, 82 aa, Zea mays
  unsure (1)..(82): unsure at all Xaa locations
  Clone ID: MRT4577_15974C.1.pep
YIISNCDIREAICPFLVKYPPILXIQSRIDARVVNILRQAYGRLKQLLKKHDKQLHALTNALLERETLTPDEINKLIHPYQK

SEQ ID NO: 250179 - protein, 91 aa, Zea mays
  Clone ID: MRT4577_159750C.1.pep
INNPGFNLSYYLHEEAGYNTQFPDDAAEATCSPDLVLTVTLSPSPMCAVIRGRNTGPRPSAQGRARTGGARCWPQTLFGQKPSSCRGTSGA

SEQ ID NO: 250180 - protein, 75 aa, Zea mays
  Clone ID: MRT4577_159751C.1.pep
RESRFRSKPLCLTHMNAEFIEVAIEHEVYKCKFSIPHSYCVGLGNSSMLFKMQCRRSTCLLKLYPSNEPSRCHRR

SEQ ID NO: 250181 - protein, 69 aa, Zea mays
  Clone ID: MRT4577_159752C.1.pep
FRMGFCWEGYLFGSFLKIGYLLKGGFFLMRFFLLKFRFFKFRCCNLIFIVFNLGLVIDGFCSSTIPFVR

SEQ ID NO: 250182 - protein, 83 aa, Zea mays
  Clone ID: MRT4577_159753C.1.pep
TRVTGCHALPRALILPSQVRCPAQTLPWQGEAEQSGPPGGRRHVNHQQARPHFIKPVGPRSPVLHPTACSVSSTPGTAWLGGG

SEQ ID NO: 250183 - protein, 72 aa, Zea mays
  Clone ID: MRT4577_159755C.1.pep
RRLGIQQPRAVLYGFSGSIQLVASSNKNKRWSQAKTKAVPKALRSLPRSKLQIIFCMSSLRSILEGLRVCVT

SEQ ID NO: 250184 - protein, 64 aa, Zea mays
  Clone ID: MRT4577_159756C.1.pep
GKTHGWGPPSHRLFLGPAGGCFKSSGGQGGDFPGKKESRVLGFLQENLKIVVQMGRKSALVFTG

SEQ ID NO: 250185 - protein, 67 aa, Zea mays
  Clone ID: MRT4577_159757C.1.pep
SACYPFPLCSAGLLGETGRFPFALPNRCPIPECGLAFSLYGTLPRCGCYAHPHRDLSPGPRPNAPSF

SEQ ID NO: 250186 - protein, 114 aa, Zea mays
  Clone ID: MRT4577_159758C.1.pep
KFISPQPGFLGTQFQFNPHWCLILGGQKNPLPPFNFLKFGGFPQGRPCFPPIWNPFCFNYVWFFLGKIFFPTKSAILGNAALKESHWAPGPITPPSLGSILFLGVPHDPKGLVF

SEQ ID NO: 250187 - protein, 58 aa, Zea mays
  Clone ID: MRT4577_159759C.1.pep
GWICAGLQLPCCCGKGLRYYEKVGINFWTGGLGSQYGFACVCLVLFCLSSIIMKGGSA

SEQ ID NO: 250188 - protein, 57 aa, Zea mays
  Clone ID: MRT4577_15975C.1.pep
LRQSGGIDNMFNVMVNCHSELEKLVNDASTTDVEGEERAPLQSAALLLKCLKILENA

SEQ ID NO: 250189 - protein, 146 aa, Zea mays
  unsure (1)..(146): unsure at all Xaa locations
  Clone ID: MRT4577_159760C.1.pep
MAAGQQQASGGGAKHGCVCGFPVCACAGAAAVASAASSADMDRVAVAATEGQIGAVNDESWIAVDLSDDGLSADGADPGVALEDRPVFRTEKIKGVLLHPYRVLIFVRLIAFTLFVIWRISHRNPDALWLWVTSIAGEXWFGFSWL

SEQ ID NO: 250190 - protein, 67 aa, Zea mays
  Clone ID: MRT4577_159761C.1.pep
KGISNVYSDVIVHSVSIRVDHPQAEKKGLRGNTVFSNRQVVLYISNVYKAWNLKFVSGKLCVRTNKQ

SEQ ID NO: 250191 - protein, 59 aa, Zea mays
  Clone ID: MRT4577_159762C.1.pep
NRNNVLLAKFFKKYIFHRFMNYYSKLYSSLHITLQKNIYILFEEVWEMNLVFCLRTNII

SEQ ID NO: 250192 - protein, 161 aa, Zea mays
  unsure (1)..(161): unsure at all Xaa locations
  Clone ID: MRT4577_159763C.1.pep
MAYRRGSSSCALCEGSNLPSCCALCVNARLLEYHTKLRMMRSLRDSLHARIAARLEAKSKTDEQRIWRSSKAHDIMELRDRLTELKSKTAVDKTKVEQASSGLKAKTASLNLALGTLKKRQADAGAMHTXAMEIAQMNLRAITXDWYEMQTKIXKQLCRIG

SEQ ID NO: 250193 - protein, 69 aa, Zea mays
  Clone ID: MRT4577_159764C.1.pep
FEIDVDDAHDAIGDVGVHRLGRGGRRYGRGAGRGNCAERASERGVEVEREAAWTRAAIAMADARVAQRL

SEQ ID NO: 250194 - protein, 35 aa, Zea mays
  Clone ID: MRT4577_159765C.1.pep
IRLPLYCIPNFGVKKIYALLPPFHITRVTEPSLCW

SEQ ID NO: 250195 - protein, 381 aa, Zea mays
  Clone ID: MRT4577_159766C.1.pep
MDLKTGLNSPVIADHLPTLALPAAVMTFTTPTSFPSPGLCLNTTKKIPLPGKIEEVRAAGWLDLMKASSPTRKRQIKDVICDAQSDLDLQYCNWTVNYPSALISFEAISDLAGSKRLALFLDYDGTLSPIVDNPENALMSDEMRAAVRHAASLFPTAIISGRSRDKVFDFVKLNELYYAGSHGMDIMGPVRKTTDSNGVECIRSTDVHGKEVNLFQPASEFLPMITEVYEKLGESVKDIDGARMEDNKFCVSVHYRNVAEDDYKKVFHRVTAVLEGYPCLRLTHGRKVFEVRPVIDWNKGKAVEFLLESLGLSESEDVLPIYVGDDRTDEDAFKVLKASNRGFGILVSSIPKESDAFYSLRDPAEVMEFLRMLAAWKEQST

SEQ ID NO: 250196 - protein, 64 aa, Zea mays
  Clone ID: MRT4577_159767C.1.pep
ITLVIMVMVLFFFFLFFNKNFFGLVFWPLKLLRLVLGGKLLRGWPGHLGVWVSWAGIRGQSDGD

SEQ ID NO: 250197 - protein, 296 aa, Zea mays
  unsure (1)..(296): unsure at all Xaa locations
  Clone ID: MRT4577_159768C.1.pep
MDLKTGLNSPVIADHLPTLALPAAVMTFTTPTSFPSPGLCLNTTKKIPLPGKIEEVRAAGWLDLMKASSPTRKRQIKDVICDAQSDLDLQYCNWTVNYPSALISFEAISDLAGSKRLALFLDYDGTLSPIVDNPENALMSDEMRAAVRHAASLFPTAFISGKSRDXKVFDFVKLNELYYAGSRGRDIXGPXRKXXDSXGXECIRSTDVHXNYFLDLYPQFKCFTCFLSVYLLILLXGKEVNLFQPASEFLPMITEVYEKLGESVKDIDGARMEDNKFCVSVHYRNVAEDDYKKVFH

SEQ ID NO: 250198 - protein, 125 aa, Zea mays
  Clone ID: MRT4577_159769C.1.pep
MYNKGIWDWRPLFSTHNSRWRTSQAIMMGVFGQFSGNGLGYYNSSIFDILGYTSHFKQLGFTVVNQVVSATGALTAMSLTDRMPRRKVLIIGTFVGAILLCINAALQNALSKSTVNGVITNTHLA

SEQ ID NO: 250199 - protein, 162 aa, Zea mays
  unsure (1)..(162): unsure at all Xaa locations
  Clone ID: MRT4577_15976C.1.pep
MGRPGYITAPILSALAAIGYVYYTTAILAIPTWPGTLQGMNPTNTAFDAKRLIGRRFSDPSVQSDMKLWPFKVIPGPGDKPMIVVSYKGEEKQFAAEEISSMVLIKMKEIAEAYLGSTIKNAVVTVPXYFNDSQRQATKDAGVIAGLNVMRIINQPPAAAIA

SEQ ID NO: 250200 - protein, 98 aa, Zea mays
  Clone ID: MRT4577_159770C.1.pep
RPGTEAPPSAAEFAHLRLHGRPEAFAVRRFQCCGLCLSRLCRLLVFFEICRCFICLGIAAWCCGTVGSVGADEEPQVVMGNLHLRHLCDVTPFFTLEI

SEQ ID NO: 250201 - protein, 64 aa, Zea mays
  Clone ID: MRT4577_159771C.1.pep
LVVVHDWLVRRSSCRTVSPAKRVDEVAAITRPIDHLSVLVRSMGTCLFTRTVAKNRHLSTTTLA

SEQ ID NO: 250202 - protein, 83 aa, Zea mays
  unsure (1)..(83): unsure at all Xaa locations
  Clone ID: MRT4577_159772C.1.pep
INXRDLSFXXIPLHFYGFTQTNPLGTPXPLLVHTCPLLTFKGTFKLXYEQXMYVSCRXIYXYILIYLXIRLFTQNAGPYAAPA

SEQ ID NO: 250203 - protein, 52 aa, Zea mays
  Clone ID: MRT4577_159773C.1.pep
HGIYYLYCRLANMINTHIFPKYCSVITNPDMFKSPNSDTYVIFYEAKINITP

SEQ ID NO: 250204 - protein, 68 aa, Zea mays
  Clone ID: MRT4577_159774C.1.pep
KVSTTLILESLLGDQTVTLDKSSRESSDLNSLRCDCRSALLLKRSLCTLIPAIKIGGRTRGGGADKGR

SEQ ID NO: 250205 - protein, 64 aa, Zea mays
  Clone ID: MRT4577_159775C.1.pep
SQDSLNVQFAILYQFSILGAMYEVCYTKMHLPTVQIDNIQHTWTCTLYGILRDQSLFKGHTSPR

SEQ ID NO: 250206 - protein, 60 aa, Zea mays
  Clone ID: MRT4577_159776C.1.pep
RRSHLKQASSRTTNLKNHMTAWQFVQNPVEGALHHPHWGGDAMRGKLTGRGDTGRTVRLF

SEQ ID NO: 250207 - protein, 58 aa, Zea mays
  Clone ID: MRT4577_159777C.1.pep
PQPAPRQPALLPQGRAAGEVCLFAQTHGLGRPRLSVIAHLRRLSIFNSTLSTTDRIRM

SEQ ID NO: 250208 - protein, 62 aa, Zea mays
  Clone ID: MRT4577_159778C.1.pep
FIKVSLFFLFAHVNCDLVTLVYSQPHMEDGLLLTNQTLFGCYVFIFTRPIKIYGYPSIFPLP

SEQ ID NO: 250209 - protein, 76 aa, Zea mays
  Clone ID: MRT4577_159779C.1.pep
GRAFTSKVSTRLYTSIHSRVGGVCLIRGTCRPGSTAVCHTHPDRYAAAHDLSLIRRPPCRVRFVYTPWLLTNHESG

SEQ ID NO: 250210 - protein, 118 aa, Zea mays
  Clone ID: MRT4577_15977C.1.pep
LRNQWIEIDNQILNALFTLMSLYEHPNFIHHTVLLCRWLPEDAAKLRKVYCKNEMPRRNERAHISFVVALLHITCLCQYADCGLYWGYPSTSRSDCADNFFFMLSITAPVFAGLYAVY

SEQ ID NO: 250211 - protein, 85 aa, Zea mays
  Clone ID: MRT4577_159780C.1.pep
HVLQLPSKKPFCFPQRFPGVKKVLSKTFFGPPDVGVYSPPGQKTLFLMAKEGPPRAGTLIWSPPVFRPLKFVICPPICFMGCVAL

SEQ ID NO: 250212 - protein, 119 aa, Zea mays
  Clone ID: MRT4577_159781C.1.pep
NWYYLGSREAKFPIPGKILKPGFGRVFPVFCPGGGISLSGPGVFFWPAHVQGLKVPLFGPKFPAGFSVGVPREKKIFGGEKIFFFSPSPFGKTLPPETRDPPGVFPFGPLDNFAPPGVF

SEQ ID NO: 250213 - protein, 90 aa, Zea mays
  Clone ID: MRT4577_159782C.1.pep
MRSSTLAVAVAAAVLVLSVLVASGGAAARRSVVMRQGGSNPGASAVLQDRVAMAVQSTSTNSSAQPSNCTYGHNSGGVCPPTPPAPGAGH

SEQ ID NO: 250214 - protein, 64 aa, Zea mays
  Clone ID: MRT4577_159783C.1.pep
HIITKNWKTHMDRIDMKRRTNRLYIINLRKTWHKFQLAARGMEAVDNGQDKTVQRDGRYGQRAG

SEQ ID NO: 250215 - protein, 118 aa, Zea mays
  Clone ID: MRT4577_159784C.1.pep
MGENKGSRSAIAVLLVLVMALGFFAGQSSARSWTDFASLIQGGAAAESADELCKDCDCPLTGGCVCYDTFASCPNFCSGCWCSKTKAECQCVNYVEKKWCAAPPATTVQKKPVSDALY

SEQ ID NO: 250216 - protein, 37 aa, Zea mays
  Clone ID: MRT4577_159785C.1.pep
VTDINARCTKSAIMVPQLRSNRSALYHLDDSPSPPHD

SEQ ID NO: 250217 - protein, 84 aa, Zea mays
  Clone ID: MRT4577_159786C.1.pep
LHLLKHLLQPTSSRTFSHSSDHGLRHGLRHQERAGDRVAGGVARPGDGLRHGVAHRGVQRRLQRAGQGARRGGRQRHAQHLELK

SEQ ID NO: 250218 - protein, 83 aa, Zea mays
  Clone ID: MRT4577_159787C.1.pep
GDAAYDGGRAGLSGGGEIRWCKPRRRLRQRSSGTGRNSSVGSAEAKLSCWQQLPCSPQSRGGLALSGAVLVTVCYRCVSRCCC

SEQ ID NO: 250219 - protein, 132 aa, Zea mays
  unsure (1)..(132): unsure at all Xaa locations
  Clone ID: MRT4577_159788C.1.pep
PASTTPILAWRPPPLVGLQILSRPSTSPCPAASLPRSSHAAPHIRRGRRAVXVXFSFTXSPRGLXGXXXIXXLTLXGGGGLNXHXQXXLXXTAXXFXPAAVXXXPGAGGXAPAEEEAPGGKXELXFFFQEVP

SEQ ID NO: 250220 - protein, 45 aa, Zea mays
  Clone ID: MRT4577_159789C.1.pep
PKLLSSIFYPLFLFNPPWYQKRTFIPTKVTSPQSLSIFQFSNVIN

SEQ ID NO: 250221 - protein, 52 aa, Zea mays
  Clone ID: MRT4577_15978C.1.pep
NVMPVLSSTTTDILEIYISRSIIGALLSLSIRARSMSLALSTPSLYLAHTVG

SEQ ID NO: 250222 - protein, 93 aa, Zea mays
  Clone ID: MRT4577_159791C.1.pep
RRAIPGSTDGCTRPRLYRMSTRSRCPRSRTPVIEGSCGGRRDSLTSQGHLRQHSCLATAPAATDQRWLLNSEANPLILGPNFGALQLSCSYIP

SEQ ID NO: 250223 - protein, 50 aa, Zea mays
  Clone ID: MRT4577_159792C.1.pep
TSSAPSSLLAPWRPAELLLCRRCSLPRSYPWRFSLHADLYISARQFLTSC

SEQ ID NO: 250224 - protein, 80 aa, Zea mays
  Clone ID: MRT4577_159793C.1.pep
GLALLRAVVAATATMMDCAGGRDPVEDFLLGGAGSCYDGDLVAVFCDGGAGDGRLGIEGIHRDACGFEQSNSGNRGRDEP

SEQ ID NO: 250225 - protein, 49 aa, Zea mays
  unsure (1)..(49): unsure at all Xaa locations
  Clone ID: MRT4577_159794C.1.pep
EQTGGLXTKDQGVRPIQNQSKHPQFWAFNSLYQARPVDRNYYSKPSSLT

SEQ ID NO: 250226 - protein, 86 aa, Zea mays
  unsure (1)..(86): unsure at all Xaa locations
  Clone ID: MRT4577_159795C.1.pep
YQHATSNVFYNINNNLTTRATIFFFLTPLAALTSIATTTFIIQQXNLLXTSIITQYLPLIISIVCEHPALQSYRLQQAIASSNIQQ

SEQ ID NO: 250227 - protein, 368 aa, Zea mays
  Clone ID: MRT4577_159796C.1.pep
AIEVSPQVDTSQVSKSPDGGKPEQTDVLIGSNQPDTVHKKSSDPPETSVAKDIDLPALVTSSGTQTEADTPNDEAPTAIEANDSSSNDDERDSGADTPEQLSSGGENEKSSLSESEKNDTPREGAKETTSKLSAAAAPFNPSSVPAFGSMAVPGFREHGGLLPSPANVPPMLSIPLRKHPHQSATARVPYGPRLAGGYNRSGHRGLRKKPVLTSGEAPTETNTSGPRIMNPNAPEFVPGQSRSPNGHPASPNGPLASPGGIPSSPQDLLSSPDSTLESPVTASPQVSECSQISPEGDVEGGGVKQNMDDTNHPESKDGEVEPEQTKAPEGTEEGAAVKDAAEELIAAEQPKSWADYSDGEVEVVEVAS

SEQ ID NO: 250228 - protein, 345 aa, Zea mays
  Clone ID: MRT4577_159797C.1.pep
WPNSPWRLLQVAWDEPDLLQNVKRVSPWLVELVSSTPAIHHLTPFSPPSRKKLCIPLYPEGHQLPAPMFHGSPLVGRGVGPMRYFPDGGTPPAGIQGARHAQFGICLPDLHHLTRLQSSLSPHAHGLRHQLDHGARPRIAGGLIVGHPAARDDISCLLTIGTAPHKKPSDVKSAAAAPAPQLMLFGKPILTEQQISLGFRPLPAPKKSPSGDVAETEITMSNNSDASSPAGTGSGSTPSISGGAPSSCQDNKAAATATDDDDLLGHCKVFMQSEDVGRTLDLSAVASYEELYQRLADMFGVDRAELTSHVFYRDGASGALKHAGDEPFSEFTKTARRLTILTDAR

SEQ ID NO: 250229 - protein, 61 aa, Zea mays
  unsure (1)..(61): unsure at all Xaa locations
  Clone ID: MRT4577_159798C.1.pep
KKKKTKNIGAFRLLFVTRLRRRDRVAEXTLXLNPHAAPRRXLLXXGGMXXSLRXESSXXRA

SEQ ID NO: 250230 - protein, 63 aa, Zea mays
  Clone ID: MRT4577_159799C.1.pep
PPPGPALARLRNNRVNDHEPLRRRVYTLVAPQGDPIDRHFHGPLASSRALVPTVIGTGVELNP

SEQ ID NO: 250231 - protein, 128 aa, Zea mays
  Clone ID: MRT4577_15979C.1.pep
KKAHCIRKRPIFRNETKQTGPKKKGLYYIIWGLDSGQIMRGGVCHGPSLKKEGPPHQPGKGEGGGHRERDAPRKEAQLELDGVHPGEQQEKGAPGGAPGGEQNYGLGEPEHGAGPFPWPGGAPCRHFL

SEQ ID NO: 250232 - protein, 86 aa, Zea mays
  Clone ID: MRT4577_1597C.1.pep
NPSFVSAQRSRHMNEPTRTILQICLFRSHHANNHFPGEERTLNPLAWQGQRKLPIHTRTWCISCWRALWASFMAGYLTKPKPFDLP

SEQ ID NO: 250233 - protein, 456 aa, Zea mays
  unsure (1)..(456): unsure at all Xaa locations
  Clone ID: MRT4577_159800C.1.pep
TRGKAARVWVRPEEVVEAXANLAVSGQPFEVVYYPRASTPEFCVKAGGVRAAMRTQWCPGMRFKMAFETEDSSRISWFMGTVSAVHVADPIRWPNSPWRLLQVAWDEPDLLQNVKRVSPWLVELVSNMPVIHHLTATPFSPPRKKLCVPLYPELPLEGQFPAPMFHGSPLLGRGGAGGPMCYFPDGTPAGIQGARHAQFGISLSDLHLNKLQPGLSPHGLHRQLDHGVQVQVQQPRIAAGLIVGGHPAARDDVSCLLTIGTPKSKKPPSDVKKASTAAAPQLMLFGKAILTEQQISLGGGNVVPALLAKKSPSDDDDDVAERTVSNSDVSSPGRSNQDGTSSGGGPAARACWQEEECNNRAAGSEDDLLGHCKVFMQSEDVGRTLDLSAVASYEELYQRLADMFGVDKAELTSHVFYRDDASGALKHPGDEPFSEFTKTARRLTILTDESSDSLAR

SEQ ID NO: 250234 - protein, 41 aa, Zea mays
  Clone ID: MRT4577_159801C.1.pep
REKKTRYKSLWKYTIDKPNLLLIHEYLEKFFLSIPLYLSMS

SEQ ID NO: 250235 - protein, 64 aa, Zea mays
  Clone ID: MRT4577_159802C.1.pep
HRSLLHLKMINWCCPRSPTIAHTAVWSLVAFLFVAWLAPFDLARARAMTSEVYAMSSEHMFPAY

SEQ ID NO: 250236 - protein, 161 aa, Zea mays
  Clone ID: MRT4577_159803C.1.pep
MAARARAAAPFWLLAAAAVTLLVAAASAQSGGSSSDDCTSALVSLSPCMGYISGNGTSAPSASCCSQLKAVVQSKPQCLCAALGSDASSSLGGVTIDRSRALGLPAACNVQTPPVSQCNNGSSGGGSKATPFLPSGGASLGGPAALVLGLAAAAVYAVAAT

SEQ ID NO: 250237 - protein, 48 aa, Zea mays
  Clone ID: MRT4577_159804C.1.pep
GCNPPGRGLIKHFLSARKLGNIFPQGFWPGKVTLNPPFMREIKMLFPL

SEQ ID NO: 250238 - protein, 72 aa, Zea mays
  unsure (1)..(72): unsure at all Xaa locations
  Clone ID: MRT4577_159805C.1.pep
MAVFFDLHTADGLKSLEAHLAGKTYVSGDSITKDDIKGFAGVPSKPGAXFLNAARWYETVSAAVASRFDLFL

SEQ ID NO: 250239 - protein, 159 aa, Zea mays
  Clone ID: MRT4577_159806C.1.pep
GDIKPSNIMLDDALGAKLGDFGLARLGDHGGRWHTTNAVLGTAGYIDPEFVNTRHPSTHSDVYSFGIVLLEVVSGRAPVVLRQDEPPFVLLKWVWGLYGRNAILDAADQRLRAGDGLHVHDQCMERVLVVGLWCAHPDQSERPSIAQAMHILQAEDARL

SEQ ID NO: 250240 - protein, 39 aa, Zea mays
  Clone ID: MRT4577_159807C.1.pep
EGHGEEFVEIGAGDLVVFPKGMSCTWDVAEAVDKHYNFE

SEQ ID NO: 250241 - protein, 103 aa, Zea mays
  Clone ID: MRT4577_159808C.1.pep
WGEGEDHNLALCSASLHIEAGLILREFECALVRFSNFFVAVNRIKSTSFHRRPRGGTPRRRRCGWRAGHGATRWGGGDEQLGKHWSIASKAGCCAGRTKPKKN

SEQ ID NO: 250242 - protein, 103 aa, Zea mays
  Clone ID: MRT4577_159809C.1.pep
YPEKTDASVDGETATGTPRLDFGRFITSDGHNTVGSTTEGSVQDGDMIVNLSSIKTSLQTDNGLSVPQLLHQISNGTEVSSSEKREALQQLVDASLDNNTSIW

SEQ ID NO: 250243 - protein, 279 aa, Zea mays
  Clone ID: MRT4577_15980C.1.pep
MDLQLHVFYRALGLSFVGGLSTAVGALFVVLNPAPNLKVLGLLQGFAAGLMLSISFLDLAHNALNSIGFLKGNLWFFAGVLFFGFIIKFIPEPDFSPPADPSEKEADDGGSGKDMMRKHRRQVLFSGIITAVGISLHNLPEGMAVFLGSVKGLHVGLNLAVAIALHNIPEGVAVALPIYFATKSKKKAFYTAAFSGLAEPLGVVAVALLFPSSLNPDILEGLLGSVGGVMAFLTLHEMLPLAFDYCGQKQAVKAVFVGMACMSASLYFLEVSLPKEISL

SEQ ID NO: 250244 - protein, 31 aa, Zea mays
  Clone ID: MRT4577_159810C.1.pep
GYNFPCYASPHFVLQMSALSIKRGRSSRRFE

SEQ ID NO: 250245 - protein, 368 aa, Zea mays
  unsure (1)..(368): unsure at all Xaa locations
  Clone ID: MRT4577_159811C.1.pep
GGRMPPKKAAPSKAELAKKQKVVEDKTFGLKNKNKSKNVQKXSSPCTRPSSPSLTRPRPPPRXKKEEEKAREKELNDLFKVAVSQPKVPVGVDPKSILCEFFKAGQCQKGFKCKFSHDLNVQRKGEKIDIYTDKRDAETMEDWDQETLEKVVESKKMEYQQNKPTDIVCKYFLDAVEKKQYGWFWVCPNGGKECHYRHALPPGYVLKSQMKALLEEESEKIAIEDEIEDQRKKTKTTTPMTTELFMEWKRRKAEEREAGQAALKAERAKNDRMSGRELFMADASVFVDDAEAYEVYEREESEANEESTNKSQNPGPSSSTSNGKEVEEPDDDDIDVDDDLDIDELNELEASLSRTSIQIREPGEGTSS

SEQ ID NO: 250246 - protein, 230 aa, Zea mays
  unsure (1)..(230): unsure at all Xaa locations
  Clone ID: MRT4577_159812C.1.pep
HQPPISQQVTPLILHISTVIGTKKEKPNVPRDTVRIQQCRLATPTEDTLQQLSYNEMHXGFHLRFRHQIDTLGCGMTISIYLPPNPENNLTELYXITGPTCTEKNFIIKTAAXSPPNDCGITLEYLYTSPRRVXDIEGKKYIYHLDGSAAIYLNATNDMWNHWRMHDYIVKELPKVISDKFEQLNTIDVSSFGHSTVQGMKLMTKYLKKXDKYNNSDIIXPIANPXINCP

SEQ ID NO: 250247 - protein, 78 aa, Zea mays
  unsure (1)..(78): unsure at all Xaa locations
  Clone ID: MRT4577_159813C.1.pep
PGGGVFADAGFSNVTKNFLAVLADNGRGGHIGRXGERFVDLTMEHKGEMKVGGRTVMALTKEEEKELKETLRDMSGEN

SEQ ID NO: 250248 - protein, 95 aa, Zea mays
  Clone ID: MRT4577_159814C.1.pep
MLEFNFSGTKASKQGRGLLILAAVHTCFLLLLVPDCYDATNVHHCSKKEYPLMENGVHIVLYPVEPGKPTTFNISAATDKPIDNVKLLINDKYSL

SEQ ID NO: 250249 - protein, 179 aa, Zea mays
  Clone ID: MRT4577_159815C.1.pep
VRWRGRPSRRPCHVALNGREVNAILMQRVVKVDGMVRTDSTFPTGLMDVISIEKTGENFRLIYDTKGRFTVHRITDEEAQYKLGKVKRVQLGKGGIPYLVTHDARTIRYPDPAIKVNDTVKVDLATGKISDFIKFDTGVIVMVTGGRNMGRVGVITHRERHDGGFNIVHIKDAVDNELT

SEQ ID NO: 250250 - protein, 46 aa, Zea mays
  Clone ID: MRT4577_159816C.1.pep
RCCRSVRTQSLGVTNCGIRCCFLKGNGFFFQFHAPRIIRLKTYAFR

SEQ ID NO: 250251 - protein, 102 aa, Zea mays
  unsure (1)..(102): unsure at all Xaa locations
  Clone ID: MRT4577_159817C.1.pep
PGXFLSRARFRLRPRGFVVRRHLHLHGRAHGNADRRGRGVIGGGAPPPPPMPASHSVDQGKTYLCHQWLTMNCRKFSDKRFLVLILLVCELILIMIVFYTLC

SEQ ID NO: 250252 - protein, 96 aa, Zea mays
  Clone ID: MRT4577_159818C.1.pep
HAAASSEPRLLGLLPGSRDAASCWVAAAAPAPCRRRRSRRQLADARPRAMNAFSSGRHIMVRQGGGGRLLFFFSAPPPADRRPLHGNRCSPAGSPT

SEQ ID NO: 250253 - protein, 58 aa, Zea mays
  Clone ID: MRT4577_159819C.1.pep
ITSSTCGNVGAVVVDSVRQALQSVLDRANSALEFAPRASLLNKRRRVSTFESSSSSSA

SEQ ID NO: 250254 - protein, 86 aa, Zea mays
  unsure (1)..(86): unsure at all Xaa locations
  Clone ID: MRT4577_15981C.1.pep
MRYVASYLLAALGGNSSPSAKDIKKILDSVGIEADDDRLNKVISELNGGNSEDVIAQGIGKLXASVPAGGAVXVSAAPGSAAPAAG

SEQ ID NO: 250255 - protein, 26 aa, Zea mays
  Clone ID: MRT4577_159820C.1.pep
LTRLSAIVFQSAVKAAEYILRLISSG

SEQ ID NO: 250256 - protein, 105 aa, Zea mays
  Clone ID: MRT4577_159821C.1.pep
FFFFFFFFFFFFFFFFFFFFFFFFNPKKTNFFHKQKGPTDFFPYLHAHWGDPNWPPRGAYLLIQTDPAWGNIGSEHAYRRQIFITIPWFAGFHEYPTPTPELGPF

SEQ ID NO: 250257 - protein, 105 aa, Zea mays
  unsure (1)..(105): unsure at all Xaa locations
  Clone ID: MRT4577_159822C.1.pep
QHASIPKRRSPPSSGSLPRGSLRELRTRIDSGRNTQKITEAMKLVAAAKVRWGGGEISPAFPXXEAPXEARDNXNQPPPPEDXXQPXTRTRPARKEKKEGRTGER

SEQ ID NO: 250258 - protein, 95 aa, Zea mays
  Clone ID: MRT4577_159823C.1.pep
YEVIKKAIEKLGKRHTEHIAAYGEGNERRLTGRHETADINTFKWGVANRGASIRVGRDTEREGKGYFEDRRPASNMDPYVVTGMIAETTILWNGN

SEQ ID NO: 250259 - protein, 146 aa, Zea mays
  unsure (1)..(146): unsure at all Xaa locations
  Clone ID: MRT4577_159824C.1.pep
MGSKNLSLLGPLGPFGGRTKGVNNPKWLIGSRSNNNQVPPTSTLKGFEPPSWEAXRLKKEMGGRXLKQPNSQVEQPFLGQLKIKNNGTEQEQPFLTRLDPLTKGNPCRLFEQEVVGIKPIGLGKRIGNQATQPVEKVLARVKQISL

SEQ ID NO: 250260 - protein, 234 aa, Zea mays
  Clone ID: MRT4577_159825C.1.pep
MSAVPCSAAVGAMNPYKYLKIRLNPDGSLCRYGEAPLLPAAPAGEPVAVEDEQGARRIVVHSSDVPLNDATGTGLRLFVPSGSGGHDGGRLPLVVYFHGGGYVLFRAASAPFHNTCAALAAAAPAVVASVDYRLAPEHRLPAAFEDAADAVLWARPHAAAGRPVFVMGSHNGATIALRAALAAADAGVELRGVVLNQPHLGGAARSPAEAASVDDRVLPLPANDLLWELALPVG

SEQ ID NO: 250261 - protein, 111 aa, Zea mays
  unsure (1)..(111): unsure at all Xaa locations
  Clone ID: MRT4577_159826C.1.pep
MSPKIFRFLRLVVLSLGGDTPTISPQCSQAPIPSLIPQYLXQAQSSMCENQIVQPYRTQHAIGPSILPLSPLFLQQPSALLQQLHLVHLVGQNIIAQQLQQSGLANLVVYS

SEQ ID NO: 250262 - protein, 143 aa, Zea mays
  Clone ID: MRT4577_159827C.1.pep
TADRLARRGLPHPQSCLLCDQEEETMNHLLVSCVFSREVWFNILKTVGLQHLSPSLDSSSFDDWWENVSMTLISPSDKKLRKGLNSLIILGAWAIWIHRNQCVFNGEQPRASKVINWVMAESHLWCRAGARGLSDILLPRHII

SEQ ID NO: 250263 - protein, 159 aa, Zea mays
  Clone ID: MRT4577_159828C.1.pep
SRRKRWARTRSPIDRLKTEKGEHELDKQSHDKLANEVDVVRQEKLKLEEEIRALKASATTAVAAEKPTPISSVANGEGVPGAHTAAKSYAVVVVLTEITALHTAKLDLGPRHTRDGEHGERREARGENGGAVARDREGRQVGLEDLGIADSPEGPRVPR

SEQ ID NO: 250264 - protein, 459 aa, Zea mays
  Clone ID: MRT4577_159829C.1.pep
MKNPNPPPSRPSAAGKEPPAGMAPPRKSRWGPPPPGVAGDKAAPSTSARRTPTPTPTRTADSRRHPGAPHAPAPHARNPGSQAVALRPQARPQPPAVETPPPQPYGFHNLDRRVMPLADGTVRTYFALPPDYSFEPVPLPPLPHRLLPRAAPDLWPPPLHLQMPPHEARRKHPAEQDEGFARHPKQPRLDEPHQPPPHAKVDGHALRRAFLKYAKMLNESSAQRRSYLEGGRVPCLACGRSSKDFADVHGLVMHAYNPPNADSLVDHLGLHKALCVLMGWDYTKVPENFKGYQSLPSDLVQASREDLIVWPPTVIIHNTSTGRKKDGRLEGLGNKEMDKKMTELGFSGGKSKSLYGKEGHMGLTLIKFANNSSGLKEAERLAEYLERQDRGRIGWSRAHASRSVDSDQNPLLVETDTRTAEKKRILYGYLAIASDLDELDSDSRKRASLQSRREFDPNE

SEQ ID NO: 250265 - protein, 77 aa, Zea mays
  Clone ID: MRT4577_15982C.1.pep
IRLLWDHLYHVHQAAIALWALLPLFMPLVLYILYGDRRSSAFRMSDSSTSLAVRTIKRAQRGCLECKAVLQGKNARF

SEQ ID NO: 250266 - protein, 55 aa, Zea mays
  Clone ID: MRT4577_159830C.1.pep
LHRMRGLRIQPRTLFISNPGDNPPLITRNIYIKRLLENMRWQQLATQHESEGVAN

SEQ ID NO: 250267 - protein, 52 aa, Zea mays
  Clone ID: MRT4577_159831C.1.pep
VEKIYISLIACLTACFPSTRRDGTGTIREPLHTTLCRIGFRYFLMAYLGQPN

SEQ ID NO: 250268 - protein, 88 aa, Zea mays
  unsure (1)..(88): unsure at all Xaa locations
  Clone ID: MRT4577_159832C.1.pep
MPKLCRFAHFFPIKHPYTSTVAQVAVDNIAKLHGVPNSALAGRDTIFLSNFWKELFQLXTWSPRTAIYHAQTDGHTKRVINCFRXYYY

SEQ ID NO: 250269 - protein, 162 aa, Zea mays
  Clone ID: MRT4577_159833C.1.pep
AENVLPVVEESLADEQHYPPALARPESLKVIVELIGNWSRVISLTDLLFVAIFTNQQVSSLACCMRSSKRPTGQWPCSTCHSVCWGGINHQPCWPACSGAEHPDEGDGYMIDHELVQTQARGHIPIHTFHDKQRKIQDNTNIQIVSYTSKKNGSCCYVPPIF

SEQ ID NO: 250270 - protein, 138 aa, Zea mays
  unsure (1)..(138): unsure at all Xaa locations
  Clone ID: MRT4577_159834C.1.pep
TNYAIEQSPDHYSCMVDLYGRAGLIKEAYEMSTXMPMEPHAGVWGALINACRKHCNVVVGKVAARELIAIEPGNPGTYVLLANTLARGQQWEYGETVWQSMRGKGFEKTAGCSWLEEENVDHEFLMGESSHPNFDEIY

SEQ ID NO: 250271 - protein, 140 aa, Zea mays
  unsure (1)..(140): unsure at all Xaa locations
  Clone ID: MRT4577_159835C.1.pep
MPDVSFKLVSLDVDSISGVLVAPICRLLSATLXKLSLRGGGXTXNFXKEQDEALQLLTSLESLDFYHCRGLQSLPQGLHRLPSLQDIGISGRENIRSLPKEGLPDSLRLLHITDCCAEIYEACQRLNGTRPDISSICLQS

SEQ ID NO: 250272 - protein, 131 aa, Zea mays
  Clone ID: MRT4577_159836C.1.pep
RSNRRSRASLGEGYSLVPYHGMRSGEALRLAQGVWDIRAEPTRARSLRPADPIRHRPRTATGPPIQPVSQVPRSRFEVIDDPLHERTTTNTSLQERHCHRLQHDDDMGHAILDLDPEEAATKLQRELRITA

SEQ ID NO: 250273 - protein, 150 aa, Zea mays
  unsure (1)..(150): unsure at all Xaa locations
  Clone ID: MRT4577_159837C.1.pep
AGAPALATSPSLSPPWSVAPAATPPSPTSPALAPAPAPPTTPSSPPAPVPPTTPSSPPAPTPTPPAGGGSPPPTASASAPAVEGGSSPTPPHPSPAAPVVAXSSARSAPSSVSPSFPHEPPVSCFFLFPPPRALLSHCTSIRFCSNFCGI

SEQ ID NO: 250274 - protein, 68 aa, Zea mays
  Clone ID: MRT4577_159838C.1.pep
EGLTIVDNKASNIIEETKEIQIRRKPASPSSYMPNSVVDTHILYTPNLLCYDIYCFFMNYVHLDFQFI

SEQ ID NO: 250275 - protein, 146 aa, Zea mays
  Clone ID: MRT4577_159839C.1.pep
SSFMIGGQRTSWKRRTWRFSSSCLFKNCSSNIIGPYNPSLKGCIAFLLSRKYISLGLKTSDRYQTRDSLIHCECYFYTIYLKHQFQRSSKHNVLIVYLVCSFWLLIVWFHIIILLDFINHDAYAHFKITLFLSQYFFPPHNYEMIC

SEQ ID NO: 250276 - protein, 601 aa, Zea mays
  Clone ID: MRT4577_15983C.1.pep
MGPPPGAQDPAPSPSGGSGSSRRRFRRLDRRNASKHIAYDATNFCQYPPSPQAASAPGSGRASLASSAACSIDLVNSFRIGGSGDGGGDLRFLCENLGLSGPDDFAIPRADWEAHKAARSSASASSSPNPARPNYDSPQRNSPLSQVGAEEQEPAQASDAETELPAATGRDGPIEAPERPARLDLPLESTCPDARRAPGQGGIKGVRPPPVLKPPPSMALPAVCGVGSTWDILRSLAPDEKDDAPASRSGRRFGHQDAVEKDDDERAAVLLMLDDLRLEESSESFTGTSSLSTTNDDDTSSTTTESMFYISPNGRFRRRIKSWSRGVLLGSGSFGTVYEGISDEGVFFAVKEVNLFDKGSNAKQCIFQLEQEIALLSQFEHENIVQYYGTDKEDSKLYIFLELVTQGSLASLYHKYRLRDTQVSAYTRQILNGLIYLHERNIVHRDIKCANILVHANGSVKLADFGLAKEITKFNELKSCKGTVYWMAPEVVNPKQTYGPAADIWSLGCTVLEMLTRQIPYPDLEWAQALYRIGKGESPAIPNTLSRDARDFISRCVKPNPEDRPSASKLLEHPFVNKSIRSVRSMRTTSSRSNSSTRGIN

SEQ ID NO: 250277 - protein, 181 aa, Zea mays
  Clone ID: MRT4577_159840C.1.pep
TICNTNGDTENEELTKHLLEIEQPKDCEEQEPEVAPAAQAVEKLEAGTADFLVDLEGKRSIKVLGSNTFLGLGIVTFAGVSYSLFSPAFNLATNDQWHTLGEGVPHMVVYTAFFYFSLACFAIGIALNIWFLYHPMVGVPRSSLTAYLKDWKGRDLALVAGMVCGLGNAFQFMAGQAAGYA

SEQ ID NO: 250278 - protein, 45 aa, Zea mays
  Clone ID: MRT4577_159841C.1.pep
FMISLTANQTAFLFLHIDMFHPQMLLYYNWGHHYLTKKFNFSYRL

SEQ ID NO: 250279 - protein, 66 aa, Zea mays
  Clone ID: MRT4577_159842C.1.pep
IFYQLTFFLHEPIYPIFPPSLNKSYKMKNFYPLKVPFRNSTVTPPFKIFLSFYLNKFYSKFFFINS

SEQ ID NO: 250280 - protein, 251 aa, Zea mays
  Clone ID: MRT4577_159843C.1.pep
NSARGSNVRRLFIVNHGGTIGPSWLCSNSNIYMKNLETLHLESVSWANLPPIGQFNLGTKLRLSKIVGISQIGPGFFGSTTEKSVSHLKEVEFNDMPELLEWVGGANWNMFSGIERIQCTNCPRLTGLLVSDWSISSIEDNTVWFPNLHDLYIDECPKLCLPPLPHTSKVSHIQMEDFSYEDRTMLKITNLSRFYEDRTMYYINNPSRFAFENLGDLETLMAWDTLPLSFMDLKKLHSLRRINVTICEETL

SEQ ID NO: 250281 - protein, 78 aa, Zea mays
  Clone ID: MRT4577_159844C.1.pep
IWHIRTWTSRFPSNLNFLCFHYNTGCLIIHNCEPFKAFFGLSSTQLVDIIRKRRNGFQMIKGMACGVTSPVFQWFSND

SEQ ID NO: 250282 - protein, 231 aa, Zea mays
  unsure (1)..(231): unsure at all Xaa locations
  Clone ID: MRT4577_159845C.1.pep
AACLVVLAVLLLPVXAAQYVKYKDAKQPINEPVQDLLXPETLEEKIGQMSQIERANATXEVLEKYFVGSVLSGGGSVPAEKAAASVWQKMVTRMQKAALKTRLGIPIIYGIDAVHGNNDVYNATIFPHNVGLGATRDPRLVKRVGEATAHETRATGIPYTFAPCVAVRTSSLEYPTTDPSSSSSAGSVVLCVHAQVCRDPRWGRCYESFSEDTRLXQLMTSNMGPASRYPM

SEQ ID NO: 250283 - protein, 106 aa, Zea mays
  Clone ID: MRT4577_159846C.1.pep
LQAKQVQRSRSDLLPKRGKKTCLLHWVRAKVYPLIATTGVAEEICVMQLVRSITTNPEVRLTNENRAAGVLDNHYQGRGYSQHGVRRFWLSQRREYMQAMDKVPTV

SEQ ID NO: 250284 - protein, 78 aa, Zea mays
  unsure (1)..(78): unsure at all Xaa locations
  Clone ID: MRT4577_159847C.1.pep
MQGRNKIWNIGRRFKKETYGCSKAGGSERMVTFKRGRPLFFLYVCVCLFGFFLLFCPFFFFFFFFFFFFFLNXRTLGD

SEQ ID NO: 250285 - protein, 67 aa, Zea mays
  Clone ID: MRT4577_159848C.1.pep
KFKQGRPRNCLSAGTDSKFIRGLTTSWELGDDLIFPWAVLPCHPRHGHDTHQERWGTHRTRPVGEGL

SEQ ID NO: 250286 - protein, 110 aa, Zea mays
  Clone ID: MRT4577_159849C.1.pep
LVTVGSDNSKDSKDAKNSKKSKENDERRQPRSSRRSKYDSDVAHDDHAHTTKTSQHASDDASEAAYAEYDEKKYNKYHRLGPHDAADDARHDAKRGKRSGSASATASEHG

SEQ ID NO: 250287 - protein, 41 aa, Zea mays
  Clone ID: MRT4577_15984C.1.pep
VGRTGSGISFLIQALFRIVGATIVQRLIYGVYFCTIGLYDL

SEQ ID NO: 250288 - protein, 196 aa, Zea mays
  unsure (1)..(196): unsure at all Xaa locations
  Clone ID: MRT4577_159850C.1.pep
GITRGWTRARDGQGKSKGPANRILRQKIAEDQFLDHVSVETEVRSVYKELYSIYKTTLKYKSSINEVNQVAQLRIIIKSKSCNGVGPLCTAQQICYHVLGLVHGIWTPVPQAVEDYIATPKPNGYQSLHTTAIPFLNESMFHLEVQXGRGVVSGPVQPGISSGRNAXGKVICLNNTGFALRIGWLNAICEWQEEFV

SEQ ID NO: 250289 - protein, 84 aa, Zea mays
  unsure (1)..(84): unsure at all Xaa locations
  Clone ID: MRT4577_159851C.1.pep
EIPCGEAGAEYVKESTLVFTDKDKAAAHFKGGAKKVVIFAPSKDAPMFVVGVNEDKYTSDVNIVFNCFXTTNCLAPLAKDIHDN

SEQ ID NO: 250290 - protein, 533 aa, Zea mays
  unsure (1)..(533): unsure at all Xaa locations
  Clone ID: MRT4577_159852C.1.pep
TLEARPGLRQKIADDQFLDLVSVETEVRSVYKELYSIYKTTLKSKSSINEVNQVAQLRIIIKPKSCNGVGPLCTAQQICYHVLGLVHGIWTPVPQAVEDHIATPKPNGYQSLHTTVIPFLNESMFHLEVQIRTEDMDLIAERGIAAHYSGRGVVSGPVRPGISSGRNAKGKVICLNNTGFALRIGWLNAIREWQEEFVGNXSSREFVDTITRDLLGSRVFVFTPKGEIKNLPKGATVVDYAYLIHTEIGNKMIAAKVNGNLVSPIHVLANAEVVEIITYDKLSSKYAFQRHQQWLQHAKTRSARHKIMRFLREQAALSAAEITADAVNSFVADLEDESDSELSLPSTKKEDSKFNWEKILSSDKLFFVNKSSDGFLPVNNVYPKVNGKQNKTVKDLGIKINGHSTIRGDSFSELMHPSNSTCKEVFPGLDDWKSGKISGWHNTEGNSVQWLCIACVDRKGMMAEVTSALTACGITVCSCVAEVSKRRGMGAMLFHFEGSYENVVSACLSVDMIFGVLGWSVGCSWCPLGALEC

SEQ ID NO: 250291 - protein, 46 aa, Zea mays
  Clone ID: MRT4577_159853C.1.pep
LCFRLLNPRCCVKKKQKKKKDEGRPKSSAAHRINNVTSDPRSVTSV

SEQ ID NO: 250292 - protein, 108 aa, Zea mays
  Clone ID: MRT4577_159854C.1.pep
MSDAQTKKFGKGERTIPHHSQKAQKWYPVDDESQPKKVRKTVRPAKPRESLQPGTILILLAGRFRGKRVVLLKHLPQGVLLVTGPFKINGVPLRRVNARYVIATSGKV

SEQ ID NO: 250293 - protein, 109 aa, Zea mays
  unsure (1)..(109): unsure at all Xaa locations
  Clone ID: MRT4577_159855C.1.pep
ATGAQKXPRTEARPPXGHEGAXXAERRNRDGXXRRRGGEDXXXRQRNPHTGAXAKTHKAHAREXRXXHXXTDNAKQEXSGADRQSXQGDGAXGRXXRKXRGHNSEGNPA

SEQ ID NO: 250294 - protein, 91 aa, Zea mays
  Clone ID: MRT4577_159856C.1.pep
LSSFIRLPSLLPSSVISAHQFLQDSDLGLGFWRRNRSGDALEPRPDRCVLLPYLFFDGQFLDSVAVVVWNAIRFSWRNSNRISVFPNRGFL

SEQ ID NO: 250295 - protein, 42 aa, Zea mays
  Clone ID: MRT4577_159857C.1.pep
VSSILHEYECSGPDKTRVCAVQLMDQVYAPSRKQLAPEWSGR

SEQ ID NO: 250296 - protein, 88 aa, Zea mays
  Clone ID: MRT4577_159858C.1.pep
SAVKDPDPLDMSEEAKAERWFRRAAQIKDIFELANIPDEDFPEIMPMRKGVNRFVVSKRKTPLERRLTSPQYRRNLPIVRFETDKDAS

SEQ ID NO: 250297 - protein, 108 aa, Zea mays
  Clone ID: MRT4577_159859C.1.pep
TTKPSWRVGVSFGMKPQKGGPNTIFRSRCGMPYFKGGGGPSPSILFGPGDCLTPPPSGGATIWFGPLVPPGPTKQSPNLSKGNFVRLLKKPKGAFLGKKKKKKKPPPH

SEQ ID NO: 250298 - protein, 71 aa, Zea mays
  Clone ID: MRT4577_15985C.1.pep
MTTMSTVVIIIGRAVPSSTMAIIVAVMRKKKKTSTRKTVLMISMTFLVRSMSPPSSRSSGATGRLKVSSSI

SEQ ID NO: 250299 - protein, 44 aa, Zea mays
  Clone ID: MRT4577_159860C.1.pep
FSDNALFKGSLIKDTCVELIAPRILSKVRARVSSTFSNACFNCT

SEQ ID NO: 250300 - protein, 56 aa, Zea mays
  Clone ID: MRT4577_159861C.1.pep
NHQNRRRSLFYCKKRQTKQPSAPPAHKINTRRYCLRLTIYKQSPREKFLLPEALAR

SEQ ID NO: 250301 - protein, 60 aa, Zea mays
  Clone ID: MRT4577_159862C.1.pep
VCGMESTCTWHLSCEGESSAREGMSGRNQRPPQAAFQQPAKAMAERYCKQTNTSKQSLFT

SEQ ID NO: 250302 - protein, 65 aa, Zea mays
  Clone ID: MRT4577_159863C.1.pep
LHTGQSLMGVLEYLSSGISFRMRAWDLWSMGISPRALACLFPHPSNIWGCHYVTRSSSLALLIFS

SEQ ID NO: 250303 - protein, 36 aa, Zea mays
  Clone ID: MRT4577_159864C.1.pep
PRHPHRCLLTQIDIRSQFHTTYQTSEAGLKTLVPNE

SEQ ID NO: 250304 - protein, 86 aa, Zea mays
  Clone ID: MRT4577_159865C.1.pep
DKAQYNQFSYPDNGTHTWGHCHPRRHLCNCSYRVHFRTMVTDCLRFVPPHDPRSTGGYSLSKRHCSPVSEPTRTGSSDHYFYDPCH

SEQ ID NO: 250305 - protein, 174 aa, Zea mays
  Clone ID: MRT4577_159866C.1.pep
MDRLVAAGILGFLLIASVGSHAARAPEQYWKSALPNTPMPSSLSQLLNNQAGGTSVNIGSGGVHVDAGHGMPGGTTVDVGKGGVGVNVKPGSAKPGRTTVGVGKGGVGVNVKPGYGKPGGTTVGVGKGGVDVNVKPGSGKPSGTTVGVGKGGVGVNVKPGYGKPGGTTVGGRRE

SEQ ID NO: 250306 - protein, 156 aa, Zea mays
  Clone ID: MRT4577_159867C.1.pep
MKQSRVDFTKVDAALLPTIILVGRPNVGKSALFNRLIRRREALVYNTPGDHVTRDIREGVAKLGDLRFRVLDSAGLETAATSGSILARTVDMTGNVLVRSQFAIFLIDVRDGLQPLDLEVGQWLRKHASGIHTIVAMNKSESLDEHGVLTSGCWRS

SEQ ID NO: 250307 - protein, 49 aa, Zea mays
  Clone ID: MRT4577_159868C.1.pep
IKKNKRGGFFLTGPSFHTQTGRPFYRIQASRNIPFNVLTFIKCNLNKIH

SEQ ID NO: 250308 - protein, 54 aa, Zea mays
  Clone ID: MRT4577_159869C.1.pep
MLGCIIYVPALLKFPSVSKSKMVWFAPAFDFGNFEPKDYLELYKKKKKRAPRYK

SEQ ID NO: 250309 - protein, 125 aa, Zea mays
  Clone ID: MRT4577_15986C.1.pep
MSAPKVKTAQLWNKSKDELASQLADLKSELIQLRTAKVTGGSNTKLTRIHDVRKGIAKVLTVINANQRAQLRLFYKGKKYTPLDLRPKQTRAIRRRLTKHEASLVTEKQKKKQTHFPQRKYAVKA

SEQ ID NO: 250310 - protein, 386 aa, Zea mays
  unsure (1)..(386): unsure at all Xaa locations
  Clone ID: MRT4577_159870C.1.pep
MGHGVSCARTGDEHDYFRAAQVGDLEALEALLDADPSLARRATLYDRLSALHIAAANGRLEVLSMVLDHGVPPDVVNRHKQTPLMLAAMHGKTDCVLKLLQAGANILMFDSQHGRTCLHHASYFGHVGCLQAILTAARTTPVANSWFPGSTSLHLAARSGSLDCTRKLLAWGADRLRRDVARRIPYAVALKRNHEACAALLNPSAAEPMVWPSPFKFISELEPEAKALLEAALTEANREREEKILRGTKHSPXLPPGTTRATPPTPTPXDDASSDVCFVTADKCXPDASSPILRSLDFTHSXASDAELCCICFEQASTIKVQXSGHQMCPACTLXLXSHSNPNPTTXTPPXPACPFCRGSISRLLVARASPHPDDGDGVDKPEHDL

SEQ ID NO: 250311 - protein, 53 aa, Zea mays
  Clone ID: MRT4577_159871C.1.pep
HLSVPISARLMTSLSFRTSRCPAYIDQPTLYATLVPYDAYLPACWQCSRPLAL

SEQ ID NO: 250312 - protein, 472 aa, Zea mays
  Clone ID: MRT4577_159872C.1.pep
MGHGVSCARTGDEHDYFRAAQVGDLEALDALLDADPSLARRATLYDRLSALHIAAANGRLEVLSMVLDHGVPPDVVNRHKQTPLMLAAMHGKTDCVLKLLQAGANILMFDSQHGRTCLHHASYFGHVGCLQAILTAARTTPVANSWGFARFVNVRDDHGATPLHLAARQGRPGCVQALLENGAIVSALTGSYGFPGSTSLHLAARSGSLDCTRKLLAWGADRLRRDSAGRIPYAVALKRNHEACAALLNPSAAEPMVWPSPFKFISELEPEAKALLEAALTEANREREEKILRGTKHSPHPPTWDHASDAADADAIDDASSDASASDAELCCICFDQACTMEVQDCGHQMCAPCTLALCCHSKPDPVTLALPSPACPFCRGSISRLLLVARASSDDADTEKSAAAAAAAAASSPQLVRRRSRRSHNLSDGGSSSFKGLSSAVAGSFSKIGRGSSRTMADSDGCGVDKPEHDP

SEQ ID NO: 250313 - protein, 446 aa, Zea mays
  Clone ID: MRT4577_159873C.1.pep
MGHGVSCARTGDEHNYFRAAQVGDLDALDALLAADPSLARRATLYDRLSALHITAANGHLEVMSMILDHGVPPDAVNRHKQTPLMLAAMHGKIDCARKLLEAGANILMFDSLHGRTCLHHASYFGHVDCLRAILAAARTTPVADSWGFARFVNVRDDRGATPLHLAARQGRSACVQVLLENGAIVSALTGSYGFPGSTSLHLAARSGNLDCIRKLLAWGADRLQRDSAGRIPYAVALKRNHAACAALLNPSAAEPMVWPSPLKFISELDPEAKALLEAALMDANREREEKILKGITKYSQPSPTSPCEHDAIDEASSEASDAELCCICFEQACSIEVQDCGHQMCAACTLALCCHSKPNPATLTPPSPACPFCRGSISRLLVARASPDADDDDKAAAASSPQLVRRRSHNLRWAAATAWTSPSTTCDRHLMLCVAEQTAEHDHFKS

SEQ ID NO: 250314 - protein, 508 aa, Zea mays
  Clone ID: MRT4577_159874C.1.pep
MSYRNMLWTHQSVNPEWEQGHVQVQPRSSYYAGTVSDSSNLGMQVAVGVPVNTVNVGICDLWNHERLPVHNSYPHASVTSRFVLPTSMYNPCMPAAAVNIYIPQTQSFGLGNVLPPSLHSQVSTGTIDENNSSFNFGDSAIGSMKRKTAVVAGNHHILHGFAGSSSSVHVPQNPVYGPWNASSQSNCLPSSAASNLPEYHNSNGWPFLEESSANASNSFTSVDACPELVPHGNNLYPACHIIQCNTWVPQTASHGIPQWGYGNVMVNPPGTVDMPNGNIQDYQAGHSSIHGPLPHFCQIPLRSMQVPQIQVPHQQFIGNNVVHGLNPSAAGLPLDPRMLAFPFNDEHTFGHQVHPPLINQANNGALRILPYQNATVMDHSRIYEAGHVIDEHRDMRLDVDNMTYEELVALQEQIGDVNTGLTESYIQENLRSTFHVPGAASISDHFCELSLENDACIICQEEYEARELIGALECGHKYHEDCIKQWLMVKNVCPICKTTALSSDRRNG

SEQ ID NO: 250315 - protein, 202 aa, Zea mays
  unsure (1)..(202): unsure at all Xaa locations
  Clone ID: MRT4577_159875C.1.pep
SSPKDRRLRTSLPPRLKTFRACRNPLRRTQFDLNDDATTGSDITIPRSHAGNHIGHPSCKLRCLEPGVPADRQMPACQTLLGIYDAYHTCISDTAPGNHQPHAVSLLLAPTDVNNERTGTYRQFFHPEKLITARQDAHNNCARGHYTIGDEIENLXLDSITLLVDDCTDILRLLYVLSSDGRTAYGLFAPLLYSLADDYAMM

SEQ ID NO: 250316 - protein, 292 aa, Zea mays
  Clone ID: MRT4577_159878C.1.pep
MATPGATCAISSALARPPALLDYAAIHACLLRGDARRSLPLLALLLLLHFRLLAAAASARFTPAVSRLAARLRLSPSMAAVTLLALGNGAPDAFASAAALGGPRGMPRAGLAAVLSAGAFVSAFVVGAVALVAAPFAVPPPSFARDVFFYLLAASALFYVYLSAEIFLWQAVGFVLFYAFFVGLVFYMDLGSADGKKAVSAAAADLEMVSGSDRVAVDLPITVEDHRQQRRPACCALLWKVCIQQLKLLMTNALVLDRNINPSLFDGVCRTTLSPENAECNGFFNRQISYFR

SEQ ID NO: 250317 - protein, 69 aa, Zea mays
  Clone ID: MRT4577_159879C.1.pep
PAVVAQVLFGGGEVRLATRTAVDGRLSLLGGLYGRRTVRVAMRCRVALRVSAAAVAVAGNPACVADFGR

SEQ ID NO: 250318 - protein, 247 aa, Zea mays
  unsure (1)..(247): unsure at all Xaa locations
  Clone ID: MRT4577_15987C.1.pep
MMMKPMAVPPPAGGGDKKGGGGKKGGGGGNEIPVQIKGNNHGGAGGQPHNAKGGAPGGGAHLGQGKKGGGSAAAVGVGGPMGGMLPQQGMMRPPNILGGAGAGFPSTAQMGGGPMGMPVGHPHMGIMQQSGGGGCGAGGMPGLGFHPGLGGGMHSGXICFRPPRXGNPVAQQQYMALMQQQQQQMMMMQQQQQQHGNGGAGYPAAMGYGYGRPPMHYPMGYPVLPPHSHAEPYNIFSDENANSCSLM

SEQ ID NO: 250319 - protein, 169 aa, Zea mays
  Clone ID: MRT4577_159880C.1.pep
MSSASCLVHPAPRFRVRLLPLPSSVTARPLLGFRPRCGAPAKGWALWHVSCFRNGQDGPTTSDEGDDFKYVAQSQSSGGAEVKKEVVSSLNGEQEQNLKDDDWFLQLQKIKENLLGRIVKFQTERWIVPWTGQTIAQVMILWIATFWFVGSWIVPLVAHAAGFSKETLT

SEQ ID NO: 250320 - protein, 258 aa, Zea mays
  Clone ID: MRT4577_159881C.1.pep
PGDSIAAGSFPEWTLYVQVMDPDTEEQYDFDPLDDTKTWPEDLLPLRPVGRLVLDRNVDNFFNENEQLAFGPGLVVPGIYYSDDKMLQCRVFAYADTQRYRLGPNYLMLPVNAPRCAHHNNHYDGAMNFMHRDEEVDYYPSRHAPLRQAAPPTPLPPRPVAGRREKATIRKPNDFKQPGERYRSWDADRQDRFVRRFADSLGHPKVSQELRSIWIDLLAKVCGWHGMPVAHVFSFDLSYSCMIYVRLLCICSATRRWG

SEQ ID NO: 250321 - protein, 132 aa, Zea mays
  Clone ID: MRT4577_159883C.1.pep
FFFFFFRRKKNMLRVKCYYYTTVHSDDKITPGNQCFDPRKRSSQEENRHRRLLSASLSELDFAATVTPIMPPIFGRNGHLRFPAPAFSTNLVHSNKILFSGAPHVGTTTTQLTRETPLLQRRQLQESDMREI

SEQ ID NO: 250322 - protein, 80 aa, Zea mays
  Clone ID: MRT4577_159886C.1.pep
LNTSGVIDPRFNVGVKQIEGYQLPRPPSCQLGYSVPTACAGPMDHQEARRRTVAGKVLESNNIENVVLQPQMCPISSIML

SEQ ID NO: 250323 - protein, 76 aa, Zea mays
  Clone ID: MRT4577_159888C.1.pep
ITLALLLPTCPSFPPSRDPHAALLSSDNSLLSVLNPPHRSLPLLHRSVYPRSHRTHTLPQLHKPPPLPASSLPTHN

SEQ ID NO: 250324 - protein, 141 aa, Zea mays
  unsure (1)..(141): unsure at all Xaa locations
  Clone ID: MRT4577_159889C.1.pep
LHLPLVEASNIITNYNGTANLTPLIGGLIADSFAGRFWTITFGSIIYQLGMVCLTLSAALPSLHPPSCAKHAADCQRASSYQISVLYLSLLCTSIGTXGTRPCTMAFGADQLELXTRTGTGAPSXWSFFNLYFFAVELAKL

SEQ ID NO: 250325 - protein, 238 aa, Zea mays
  unsure (1)..(238): unsure at all Xaa locations
  Clone ID: MRT4577_15988C.1.pep
MSKEDVLKVQTLMLRVNIHCDGCEKKVKKTLHKIDGVYQSSIDAEQGKVTVSGLLDPDTIIRKLNKAGKPAQLWGSKPGVPQNGHGGGKGQPKDAGGGKGHSKDAGGGKAQKGGAGGGGHKGAGGAGGGGGGAKDPKMVMPQPTPQQLQQLQQQLQMKGLKLPPHLLGGNMPAXPTDIPMVKAPLLNQQSVCLGMSYTQNPVGFLLLPPLSLAYFRLAFKKKGTSLNAKLGIVIMRFP

SEQ ID NO: 250326 - protein, 597 aa, Zea mays
  unsure (1)..(597): unsure at all Xaa locations
  Clone ID: MRT4577_159890C.1.pep
MAEDARGEKKDAYAAAAASKLPAKQRGGFRSMPFILANDFCDRLASVGFTTNLISYLTLQLHLPLVEASNIITNYNGTANLTPLIGGLIADSFAGRFWTITFGSIIYQLGMVCLTLSAALPSLHPPSCAKHAADCQRASSYQISVLYLSLLCTSIGTGGTRPCTMAFGADQLELXTRTGTGAPSXWSFFNLYFFAVELAKLAAVTAVVYIQDNVGWGWGIGVPTVAMVAAVIAFVSGYSLYIRMPPGGSPLVRLAQVATAAYKKRKAVVPDPSLLYEDKELDAGISTTGRLLHTDQLKCLDKAAIVTDGDVLPSGQPKLWRLSTVHRIEELKSIIRMLPICAAGIILVTSASHNHSFAIQQARTMDRDITPHFKIPPASMLIFTNFGMLLTLAFYDRVLVRVLRRFTGRPNGITHLQRTGVGLTIAMLSNVVAAVVERRRKSVAAASGLLDAPKATLPMSVFWLVPQYAIHGIANAFMDVGRMEFLYDQAPESMRSSATALYWLTFSIGSYLGTLLVTIVHDKTKRTGQWLPDNLNRGKLDNYYWLVVALEVVNLVYFFICVKYYTFKPLEMVSGEEVELYHHGNGTDDAKKQGVEA

SEQ ID NO: 250327 - protein, 141 aa, Zea mays
  unsure (1)..(141): unsure at all Xaa locations
  Clone ID: MRT4577_159891C.1.pep
MAAASSSSVLLLLLAAALAGMSANAATFTITNNCGFTVWPAATPVGGGTQLNPGGTWTVNVPAGTSXQPLLTLAEFTIGGSQDFYDISVIDGYNLAMAFSCSTGVRLVCTDPGCPDAYHNPPDMKTHACGGNSNYQITFCP

SEQ ID NO: 250328 - protein, 49 aa, Zea mays
  Clone ID: MRT4577_159892C.1.pep
AASTFKDIQNYQNFITTEPTLCIYLHHSYLPTNRSWLCATVNRLISSRV

SEQ ID NO: 250329 - protein, 72 aa, Zea mays
  Clone ID: MRT4577_159893C.1.pep
RPLFCPHVRCNFPGRRSKGRSRPIQAPHGSSFIPFRRSSQGPGPSYLVLRPSPLQWRLCLRLHIACLPSRSC

SEQ ID NO: 250330 - protein, 117 aa, Zea mays
  Clone ID: MRT4577_159894C.1.pep
LYSSSIACSPQETKQSTGCSFNGNSGSCQTGDCGGALACTLSGQPPLTLAEFTIGGSQDFYDISVIDGYNLAMAFSCSTGVRLVCTDPGCPDAYHHPNDVKTHACGGNSNYQVTFCP

SEQ ID NO: 250331 - protein, 95 aa, Zea mays
  Clone ID: MRT4577_159895C.1.pep
MAAASSSSVLLLLLAAALAGMSANAATFTITIGGSQDFYDISVIDGYNLAMAFSCSTGVRLVCTDSGCPDAYHHPNDVKTHACGGNSNYQVTFCP

SEQ ID NO: 250332 - protein, 174 aa, Zea mays
  Clone ID: MRT4577_159896C.1.pep
MAAASSSSVLLLLLAAALAGMSANAATFTITNNCGFTVWPAATPVGGGTQLNPGGTWTVNVPAGTSSGRVWGRTGCSFNGNSGSCQTGDCGGALACTLSGQPPLTLAEFTIGGSQDFYDISVIDGYNLAMAFSCSTGVRLVCTDPGCPDAYHNPPDMKTHACGGNSNYQVTFCP

SEQ ID NO: 250333 - protein, 172 aa, Zea mays
  Clone ID: MRT4577_159897C.1.pep
MAAASSVLLLLLAAALAGMSANAATFTITNNCGFTVWPAATPVGGGTQLNPGGTWTVNVPAGTSSGRVWGRTGCSFNGNSGSCQTGDCGGALACTLSGQPPLTLAEFTIGGSQDFYDISVIDGYNLAMAFSCSTGVRLVCTDPGCPDAYHNPPDMKTHACGGNSNYQVTFCP

SEQ ID NO: 250334 - protein, 35 aa, Zea mays
  Clone ID: MRT4577_159898C.1.pep
YSKKTFLVYMPSHFLILTEQNCYRPRWGIMVITKN

SEQ ID NO: 250335 - protein, 176 aa, Zea mays
  Clone ID: MRT4577_159899C.1.pep
MAAASSSSVLLLLLAAAAALAGMSANAATFTITNNCGFTVWPAATPVGGGTQLNPGGTWTVNVPAGTSSGRVWGRTGCSFNGNSGSCQTGDCGGALACTLSGQPPLTLAEFTIGGSQDFYDISVIDGYNLAMAFSCSTGVRLVCTDPGCPDAYHHPNDVKTHACGGNSNYQVTFCP

SEQ ID NO: 250336 - protein, 448 aa, Zea mays
  Clone ID: MRT4577_15989C.1.pep
MSKEDVLKVQTLMLRVNIHCDGCEKKVKKTLHKIDGVYQSSIDAEQGKVTVSGLLDPDTIIRKLNKAGKPAQLWGSKPGITQNAYHGGGHKGPGGGGGGGGGVGNPKMVMPQPTPQQLQQLQQQLQMKGLKLPPHLLGGNMPAFPAAAPMKDPKSVKFALPEDNFDDYGSEFDDDFDDGFDDDEDDYDDDGLDDDVYGDPKMMMKPMAVPPPAGGGDKKGGGGKKGGGGGNEIPVQIKGNNHGGAGGQPHNAKGGAPGGGAHLGQGKKGGGSAAAVGVGGPMGGMLPQQGMMRPPNILGGAGAGFPSTAQMGGGPMGMPVGHPHMGIMQQGGGGGGGGMPGLGFHPGLGGGGMHSGADMLQAAAASGNPVAQQQYMALMQQQQQQMMMMQQQQQQHGNGGLGYPAAMGYGYGRPPMHYPMGYPVLPPHSHAEPYNIFSDENANSCSLM

SEQ ID NO: 250337 - protein, 63 aa, Zea mays
  unsure (1)..(63): unsure at all Xaa locations
  Clone ID: MRT4577_1598C.1.pep
GMAXREXASRTDPRTLRQPAAALGGLPGRASVLRRNRRALRVGGSPHHLVDRRNRPLAQRRPG

SEQ ID NO: 250338 - protein, 87 aa, Zea mays
  unsure (1)..(87): unsure at all Xaa locations
  Clone ID: MRT4577_159900C.1.pep
QKTLSAATEAAQSRSAHPAAXKRXPRDTSXRRKSRKAHXTAPTTDRRAHRTAGPTTEHRHKNNXRTNPNRKDDQAQAARDTNKGREG

SEQ ID NO: 250339 - protein, 175 aa, Zea mays
  unsure (1)..(175): unsure at all Xaa locations
  Clone ID: MRT4577_159901C.1.pep
MAAASSSSVLLLLLAAALAGMSANAATFTITNNCGFTVWPAATPVGGGXTQLNPGGTWTVNVPAGTSSGRVWGRTGCSFNGNSGSCQTGDCGGALACTLSGQPPLTLAEFTIGGSQDFYDISVIDGYNLAMAFSCSTGVRLVCTDPGCPDAYHNPPDMKTHACGGNSNYQVTFCP

SEQ ID NO: 250340 - protein, 68 aa, Zea mays
  Clone ID: MRT4577_159902C.1.pep
DMGRTLGFAIPKPSYRAWFSNRVQQMLLFHSYAVAKSVEPRNIGIIPLKDHEKKIEAAYRGGPVHSSS

SEQ ID NO: 250341 - protein, 199 aa, Zea mays
  Clone ID: MRT4577_159903C.1.pep
MAAASSSSVLLLLLAAASSSSVLLLLLAAALAGMSANAATFTITNNCGFTVWPAATPVGGGTQLNPGGTWTVNVPAGTSSGRVWGRTGCSFNGNSGSCQTGDCGGALACTLSGQPPLTLAEFTIGGSQDFYDISVIDGYNLAMAFSCSTGVRLVCTDPGCPDAYHNPPDMKTHACGGNSNYQVTFCPVIGRNRLCICMG

SEQ ID NO: 250342 - protein, 84 aa, Zea mays
  unsure (1)..(84): unsure at all Xaa locations
  Clone ID: MRT4577_159904C.1.pep
MISSSALAVAPHGLPPLSRRASCFAVVCSKNKIKTDKPYWIGGGLTVDVHAYRRKAKGKGVYQFVDKYGANVDRYXPIYNDDDW

SEQ ID NO: 250343 - protein, 109 aa, Zea mays
  Clone ID: MRT4577_159905C.1.pep
KGGQRVFPHKKGASAPTQFMGGAPPHRAPRFYNLILRAVRLGELEREKNFPQEKTLALITPRFKTPPQKERWEAFKARAGNPGATPGAEFFSPKIFSIGPKKKRRKFLN

SEQ ID NO: 250344 - protein, 70 aa, Zea mays
  Clone ID: MRT4577_159906C.1.pep
QVSPRLDASVMPTHVVDVVAFQWLEEINCAEELLLQSKNKIAKFFTKKTTSPPSTRTNKGRRSRSKTNAW

SEQ ID NO: 250345 - protein, 38 aa, Zea mays
  Clone ID: MRT4577_159907C.1.pep
CEKGVTVSNTLPGIPGIHVGVQSAATSNRVPSDRTGPR

SEQ ID NO: 250346 - protein, 96 aa, Zea mays
  unsure (1)..(96): unsure at all Xaa locations
  Clone ID: MRT4577_159908C.1.pep
VDHASAQAHRKWKQYHNRAQWRPRYFHPMLLLFCCVLRDHFLNYKLILPLPYSYAVRCEPPYLGHXDRLLYLLTMSYWPCHIATVNCSGSRVATFY

SEQ ID NO: 250347 - protein, 104 aa, Zea mays
  Clone ID: MRT4577_159909C.1.pep
RRYLLLIYEHLLLLGLHVTERCDGRQIDEPPTAQVQATCGMTVMVMGTLVGNSVSLQRSTSPSTPPLNAMRHEFHHLFVGLPLPRALCIKWVVQIIIIKTMVLF

SEQ ID NO: 250348 - protein, 156 aa, Zea mays
  Clone ID: MRT4577_15990C.1.pep
GLLTFLVVLVPASPHGPKGGGPMGMPVGHPHMGIMQQSGGGGCGAGGMPGLGFHPGLGGGMHSGADMLQAAAASGNPVAQQQYMALMQQQQQQMMMMQQQQQQHGNGGAGYPAAMGYGYGRPPMHYPMGYPVLPPHSHAEPYNIFSDENANSCSLM

SEQ ID NO: 250349 - protein, 62 aa, Zea mays
  unsure (1)..(62): unsure at all Xaa locations
  Clone ID: MRT4577_159910C.1.pep
PNPKGFHLLIXCTVETPWLDGKNFVFEQVVHGMHVVKAIQKVGFPTGGTSKVVKVPGSEQLS

SEQ ID NO: 250350 - protein, 101 aa, Zea mays
  Clone ID: MRT4577_159911C.1.pep
MHLDESDAAPTSSSMVEVVASTAVADTVYFEFGISVGHSTPSQPVLMRDLSVSLAEYSVCGCILSIGAMLRTGARGTVTDRVRRRTAVRMSLSSLHVGIIC

SEQ ID NO: 250351 - protein, 128 aa, Zea mays
  unsure (1)..(128): unsure at all Xaa locations
  Clone ID: MRT4577_159912C.1.pep
TTPPPTRPLIGTVGQCLFMVLAFGALIPXGSQSVKGAAVGLFTYIAFFGATWLPLPWLYPADINPLRTRAKANALSTTSNWIWHFFIVMITPILIASINWGTYLFFAVLNACFIPILYFLIPETAGRS

SEQ ID NO: 250352 - protein, 122 aa, Zea mays
  Clone ID: MRT4577_159913C.1.pep
PLLLSVVIIASGKKPTNRSAEQDGACGAMLSSATRAGTSSTTKPEHAAGAVHGAGAGGTPIVVTDGGQEVTVSQFVAQLDEAAAEAGQHPPEVEAAGAADGDAGGRGRQSHQQQSAHLRLVC

SEQ ID NO: 250353 - protein, 69 aa, Zea mays
  Clone ID: MRT4577_159914C.1.pep
ARSRALQLLPYPNAHGTDTPTSRPRMHECMHAWMCRQDAKRSSVCRYCPGVGSTRTKSTGSGCDCPQDR

SEQ ID NO: 250354 - protein, 63 aa, Zea mays
  Clone ID: MRT4577_159915C.1.pep
IILKEGTDISYLNSKSYYSSIIAANDASLGTRSNYTPKKRTSKRCLVLLMTNNWSKRPNMSIT

SEQ ID NO: 250355 - protein, 81 aa, Zea mays
  unsure (1)..(81): unsure at all Xaa locations
  Clone ID: MRT4577_159916C.1.pep
APAXASLHHLGCECVYTQACFCPPKTSQTVRYWEFVVPKKAVALTHPVICKSVLLSKNLCVWPQTTKATLNHAEVLAKNTQ

SEQ ID NO: 250356 - protein, 812 aa, Zea mays
  Clone ID: MRT4577_159917C.1.pep
MAKTNTEKITKEILEGLSEDTGDSDSYDVESGDKDSEDRPWRPSHIIFEKSTIKQSHLDNMRGRYFQDMSIVRIGGDNTSPAPEENEVVIFRSFFKAVEVLKIFQIFLHQITPEAIMRMGIFVWAVRSQGLEPSTKCFCSMHELLYETKATGKEQYHNNFGCYGFIARPNASHLVPTFRKRWPGAWMEEWFYVKNDLKAREDIKEVTMRPIWSRFGLRWPKVEFDDTVEACQRAFSTICSFIGTRDLIQEHIAFRVWPLVESWEMLKETSTDSSEGGLVRLKYTFRFREKFDEPNDDWLKCIEATSDELLGAYSKAEDNALSAAFRGRGKKRLNRVFDAIGFRYPDYRYPLRGQKKKRKIAASVTPAEPVPKGKKMKVLTRRPRYIEPAVVPDFGAGSSSTAKAIQTASTVQGAEEPNVMSKTHIVEPVKDKAEKAEEPKIEEKMPKILSPPIEANLLKMQKTYAATPKRRRMPNILDAVLETTMALSPAPAKKVAPTETKSQAEIETKQAEAEVAQVQAKAKAGPLVPTETEPIAPEEKATEQIAPEVIENPTPEALIENVDYIIRHASGKKLSEEEILEARHYARKLKYPKGALVFNESNEDDFLYYLPDNKEISFCREIGKSIGFPKLEDGLSILSKDELADSIAYNSIKGLILSNALRAQKNIEDESYTMALNNLRSEVIELRNEGLEKYKILLSLVNKVQEEVIFKAQAEAQKIEIEDLWRQLAEAKEKCALAEANREISEYWKNHLEKNVEELHASKERCFEKSLDCVKKIKESFAKVVAYSAEENFIRGNSEGVIEWISGEAETF

SEQ ID NO: 250357 - protein, 39 aa, Zea mays
  Clone ID: MRT4577_159918C.1.pep
KIFFHIPVPPGDKNPGGFHPRFNYHLNKRSLRLMLKNGP

SEQ ID NO: 250358 - protein, 43 aa, Zea mays
  Clone ID: MRT4577_159919C.1.pep
TSVEIVKHGTEIVHRAVTKSFQSLHEPYKGKIVGLLISTFEAP

SEQ ID NO: 250359 - protein, 301 aa, Zea mays
  Clone ID: MRT4577_15991C.1.pep
SVAQGANAGQGVTGFDSVRESLKRSPLRTPHPPSTPFLTLSQSNIFSPELQRKFKAVDARKDGKESNVALSRLYSYEELGKKLGELRPAVGAKDGKEWFSLKELQGRIAKLAELEKQENQFSGSLWEIKNCIGNLNHKPENGAPRVNIHALLNLRGQPTPDYMSQPPQEELLEKYFHPDHMSSEEKMKLELQRVRDEFKMSENDCGSARVQIAQLTLKIKHLSAVLHKKDKHSRKGLQEMVQKRKKYMKYLRRTDWDSYCFVLSKLGLRDVPEYKAPDYKSKATTKAKSKKSKSKRRKIKA

SEQ ID NO: 250360 - protein, 500 aa, Zea mays
  Clone ID: MRT4577_159920C.1.pep
KPANVLLDAAMEPRITDFGLSRLIGEGNTRIVNTHTPGPIGYMAPEYRYMGEVSRKVDIFSLGILILEIVTGQDNSTKVDFIDHVCEHCMEGPQIKFMYPSLEPELHDQVELCIKIGLECVQTDRKKRPTAGDIIRKLEEGTKLGPTPSRENITTEIGKPQMFSFELLNDITESFSPGRLRGTGGFGYVYEGIPHGNEGAMAVKRLKEKIGISPKQFENEVHNLSRIEHRNIVRLIGYCDEIREILSHGKNKNDPPIREHIQERLLCYEYMPKGSLDKIIYDNLDWHTRYKIIEGICHGLHCLHEGQQDIQIAHLDLKPANILLDSDMVPKLADFGMSRLFSLEQVYILASKPMGTIGYIAPEYLDHKKVSTKADIYSFGIVVLEIVTRKQCPRSYADINAQHFIHHLRQNLTKDNYVKSMYPALEADCLQQVKLCIEIGLNCVEKEPTKRPTAREIISMFNQKKDSSRSGVSNCIVNVIEAWLSRLPWHPWPLTLLRQT

SEQ ID NO: 250361 - protein, 69 aa, Zea mays
  Clone ID: MRT4577_159921C.1.pep
LTCRLPGQIGLSMPRLVVRSRDFVGGRSFQVRWRYCGILLEVGFSVFPFPAPVVPPPRKFGARQEGKDL

SEQ ID NO: 250362 - protein, 606 aa, Zea mays
  unsure (1)..(606): unsure at all Xaa locations
  Clone ID: MRT4577_159922C.1.pep
IDKYIFGKNHELDWHTRYKMIKGICEGLHYLHENDRAPIIHLNLKPANVLLDAAMEPRITDFGLSRLIGEGNTRIVNTHTLGPIGYMAPEYRDMGEVSRKVDIFSLGILILEIVTGQDNSTKVDFIDHVCEHCMEGPQIKFMYPSLEPELHDQVELCIKIGLECVQTDRKKRPTAGDIIRKLEEGTKLGPTPSRENITTEQQHTTSLDVLDXSAAHQQYKXYFKNDYFLQGQVAKRTSLHMHTWENKGNNTASKTSPIDLTRNXKPQMFSFELLNDITESFSPGCLRGTGGFGYVYEGIPHGNEGAMAVKRLKEKIGISPKQFENEVHNLSRIEHRNIVRLIGYCDEIREILSHGKNKNDPPIREHIQERLLCYEYMPKGSLDKIIYDNLDWHTRYKIIEGICHGLHCLHEGQQDIQIAHLDLKPANILLDSDMVPKLADFGMSRLFSLEQVYILASKPMGTIGYIAPEYLDHKKVSTKADIYSFGIVVLEIVTRKQCPRSYADINAQHFIHHLRQNLTKDNYVKSMYPALEADCLQQVKLCIEIGLNCVEKEPTKRPTAREIISMFNQKKDSSRSGVSNCIVNVIEAWLSRLPWHPWPLTLLRQT

SEQ ID NO: 250363 - protein, 80 aa, Zea mays
  Clone ID: MRT4577_159923C.1.pep
IRESTIPSPSTKQAAPSKMDSRERKELVVVLSSTCRPVGRAWDPTPVRGRRRRAAMHQGTAASRSPDPRRPDLSVRSRVS

SEQ ID NO: 250364 - protein, 161 aa, Zea mays
  Clone ID: MRT4577_159924C.1.pep
RADSPCTRGRGDCQALLRSHRRPRGHRRPVLSFFTRNNFTVSDRGEVITFEGTMIPNRGQAALLTFCTCISLGSVGLVLSIAVPEGGNNWFWLMTLSPLAGAYYWTKASRKEEIKVKMILSDDGNVSEILVQGDDVQVEQMRKDLKFSEKGMVYVKGIFET

SEQ ID NO: 250365 - protein, 221 aa, Zea mays
  unsure (1)..(221): unsure at all Xaa locations
  Clone ID: MRT4577_159925C.1.pep
VANGGTGYSQASYYTSLGLFVLSVPGLWSLIKRSVKSKIVQKTFVKDDGQSMAPNQVAGEILSFFTRNNFTVSDRGEVITFEGTMIPNRGQAALLTFCTCISLGSVGLVLSIAVPEGGNNWFWLMTLSPLAYVSLLLNSQQFRMNSSSTNAVTDPSXEVXGAYYWTKASRKEEIKVKMILSDDGNVSEILVQGDDVQVEQMRKDLKFSEKGMVYVKGIFET

SEQ ID NO: 250366 - protein, 80 aa, Zea mays
  unsure (1)..(80): unsure at all Xaa locations
  Clone ID: MRT4577_159926C.1.pep
MATCTRQFTSSSSMKSSCGIGGGSSRMSSVLAGGSCRAPSTYGGMSVTSSRFSSGAACGXIGGGYXGGFSSSSFGGGFGG

SEQ ID NO: 250367 - protein, 102 aa, Zea mays
  Clone ID: MRT4577_159927C.1.pep
GFKILKEGPPFGRLFSPRFLIFFWASPFFFSFLPPNPLKFFFFLGVNLPKAPPGSGVFHPLFFLVFGGLLGFPGGGGGFRFWGNFKWGWVKLWGGFPLFACF

SEQ ID NO: 250368 - protein, 219 aa, Zea mays
  Clone ID: MRT4577_159928C.1.pep
MAMAKAGAPRVSAAQLVTLGLSLTGSFFNGIKSQAGSGCEGKNFYTRSAFLSAVKAYPGFAHGGSQVQGKREIAAFFAHATHETGHFCYISEINKSNAYCDPTKRQWPCAAGQKYYGRGPLQISWNYNYGPAGRAIGFDGLGDPGRVARDAVVAFKAALWFWMNSVHGVVPQGFGATTRAINGALECGGNNPAQMNARVGYYRQYCRQLGVDPGPNLTC

SEQ ID NO: 250369 - protein, 208 aa, Zea mays
  unsure (1)..(208): unsure at all Xaa locations
  Clone ID: MRT4577_159929C.1.pep
MAMAKAGAPRVSAAQLVTLGLSLLCAVAGPAAAQNCGCQPNVCCSKFGYCGTTDEYCGDGCQSGPCRSGGGGSSGGGGANVASVVTGSFFNGIKSQAGSGCEGKNFYXPLQISWNYNYGPAGRAIGFDGLGDPGRVARDAVVAFKAALWFWMNSVHGVVPQGFGATTRAINGALECGGNNPAQMNARVGYYRQYCRQLGVDPGPNLTC

SEQ ID NO: 250370 - protein, 274 aa, Zea mays
  Clone ID: MRT4577_15992C.1.pep
MSKEDVLKVQVGVRAICWPPSSQLSHPSFFPSRQAGRQLCLCLQQVFPLPRLLCSCPANVCCCSLQIPPLLLFQTLMLRVNIHCDGCEKKVKKTLHKIDGTRTNHRCLLFFFLCTSDRLVCSACGNVMEVDLATVGVYQSSIDAEQGKVTVSGLLDPDTIIRKLNKAGKPAQLWGSKPGVPQNGHGGGKGQPKDAGGGKGHSKDAGGGKAQKGGAGGGGHKGAGGAGGGGGGAKDPKMVMPQPTPQQLQQLQQQLQMKGLKLPPHLLGGNMPAP

SEQ ID NO: 250371 - protein, 167 aa, Zea mays
  unsure (1)..(167): unsure at all Xaa locations
  Clone ID: MRT4577_159930C.1.pep
MAMAQAGAPRVSAAQLVTLGLSLLCAVAGPAAAQNCGCQPNVCCSKFGYCGTTDEYCGDGCQSGPCRSGGGGSSGGGGANVASVVTGSFFNGIKSQAGSGCEGKNFYTRSAFLSAVKAYPGFAHGGSQXFCYISEINKSNAYCDPTKRQWPCAAGQYYYGRGPLLFS

SEQ ID NO: 250372 - protein, 279 aa, Zea mays
  unsure (1)..(279): unsure at all Xaa locations
  Clone ID: MRT4577_159931C.1.pep
MAMAKAGAPRVSAAQLVTLGLSLLCAVAGPAAAQNCGCQPNVCCSKFGYCGTTDEYCGDGCQSGPCRSGGGGGGANVASVVTGSFFNGIKNQAGSGCEGKNFYTRSAFLSAVKAYPGFAHGGSQVQGKREIAAFFAHATHETGHFCYISEINKSNAYCDPTKRQWPCAAGQKYYGRGPLQISWNYNYGPXAGRAIGFDGLGDPGRVARDAVVAFKAALWFWMNSVHGVVPQGFGATTRAINGALECGGNNPXAQMNARVGYYRQYCRQLGVDPGPNLTC

SEQ ID NO: 250373 - protein, 155 aa, Zea mays
  Clone ID: MRT4577_159932C.1.pep
QLSNYSSFEGVPYCKTHFEQLFKETGSYNKSFQSQSPAKITPEKLAPELTRSPSKAARMFSGTQDKCATCGKTAYPLEKVTVEEKSYHKSCFKCSHGGCAITPSNYAALEGILYCKHHFSQLFKEKGSYNHLIKCASVKRAAEAQPEQPASDSSS

SEQ ID NO: 250374 - protein, 71 aa, Zea mays
  unsure (1)..(71): unsure at all Xaa locations
  Clone ID: MRT4577_159933C.1.pep
MRSTPWFPILSHEALPATAVVTRDTIDRYEQHXTGKWLGREGAFNALQNLETAFMGATQCCCACGGIPPDV

SEQ ID NO: 250375 - protein, 285 aa, Zea mays
  unsure (1)..(285): unsure at all Xaa locations
  Clone ID: MRT4577_159934C.1.pep
MAMAKAGAPRVSAAQLVALGLALLCAVAGPXAAAQNCGCQPNVCCSKFGYCGTTDEYCGDGCQSGPCRSGGGGGGSGGGGANVASVVTSSFFNGIKNQAGSGCEGKNFYTRSAFLSAVKAYPGFAHGGSQVQGKREIAAFFAHATHETGHFCYISEINKSNAYCDPTKRQWPCAAGXQKYYGRGPLQISWNYNYGPXAGRAIGFDGLGDPGRVARDAVVAFKAALWFWMNSVHGAVPQGFGATTRAINGALECGGNNPAQMNARVGYYRQYCRQLGVDPGPNLTC

SEQ ID NO: 250376 - protein, 324 aa, Zea mays
  unsure (1)..(324): unsure at all Xaa locations
  Clone ID: MRT4577_159935C.1.pep
MAMAKAGAPRVSAAQLVTLGLSLLCAVAGPAAAQNCGCQPNVCCSKFGYCGTTDEYCGDGCQSGPCRSGGGGSSGGGGANVASVVTGSFFNGIKSQAGSGCEGKNFYTRSAFLSAVKAYPGFAHGGSQVXEGKREIAAFFAHATHETGRKLALSINLALQRGAGSLIFDPSCXQFFFWKIFRCCVCVHXDFCYISEINKSNAYCDPTKRQWPCAAGQKYYGRGPLXQISWNYNYGPAGRAIGFDGLGDPGRVARDAVVAFKAALWFWMNSVHGVVPQGFGATTRAINGALECGGNNPAQMNARVGYYRQYCRQLGVDPGPNLTC

SEQ ID NO: 250377 - protein, 77 aa, Zea mays
  Clone ID: MRT4577_159936C.1.pep
PAAAPKLVQQRVTKTKKDNSRPPISSTTTISGAAPSRRPLNSQSRNPAHPGRKLVQSIVKLNVKLVDKASLSIQQVK

SEQ ID NO: 250378 - protein, 150 aa, Zea mays
  Clone ID: MRT4577_159937C.1.pep
MKKKKKKKKKKKKKKKKSPFGPFQPSKGERAKLKVKVRLNIHGIVTVDSAMMLEEDVAVPVSSANEAPKDTTKMDTDDAPSDPVSGTDVNVHEPDTTEAAPAAENGTQNPEEKSVPMETDAKVEPSKRKVKRTSVPVHALVYGALAAADL

SEQ ID NO: 250379 - protein, 125 aa, Zea mays
  unsure (1)..(125): unsure at all Xaa locations
  Clone ID: MRT4577_159938C.1.pep
AFGELKSEGLALFRPTSLIFLGAVTLPEEANPSFYKQVWRMHTILIFRDYMINVPQNLEACQKIVYFSNPLFMNIPTSTQVDKMMTSSVTTPXYYDEVFYTTDHLYKENAAGISILYYLKHIYPD

SEQ ID NO: 250380 - protein, 86 aa, Zea mays
  Clone ID: MRT4577_159939C.1.pep
LKWHQQRDPGSKKDYSQYEENITHLQEQIVDDKMTNAQIILLIDNARMAVDDFNLKYENEHSFKKDLEIEVEGLRRTLDNLTIVTT

SEQ ID NO: 250381 - protein, 433 aa, Zea mays
  Clone ID: MRT4577_15993C.1.pep
MALRRITPRRRPVLPVPRAFSSSPPFPPPPPPANDPDPDAAQPPSSSPPPNSGAPRNPESSFFQDIKDRLRSSPTSPSPRRIPTTLPRPDPARGAPSSGPPIGDIRRMLQNFRLTGSTSDAPSTSAPGSNPSFMDLLKNHLDQGANARQAELGFNAIGESLKRPRPPKPFITPSSRNIFCRELERTSKALGARQEENGSAIELKGSYSYEELGKRLGELRPAGAGKDGKEWFSLKELQGRIAKLAEQESQLAGPFSEMRRGIRNLQKQGKPGRPVNIQALLNPVGQPTPDYMSGPPQVELLEKYFHPDHMSSEEKMKLELQRVRDEFKMSENDCGSARVQIAQLTLKIKHLSTVLHKKDKHSRKGLQEMVQRRKKYLKYLRRTDWDSYCLVLSKLGLRDVPEYKAPDYKSKATTKAKSKKKSKSKGKKKKVKA

SEQ ID NO: 250382 - protein, 98 aa, Zea mays
  unsure (1)..(98): unsure at all Xaa locations
  Clone ID: MRT4577_159940C.1.pep
TSCVFARQFWHDLLAPLGLAALAPQIDDEVFGEWWRXGVNSAIILGGWSLWLHRNRCVFEGAQPSLPKLKQDFSNKAVCWVLAGVKHLLELGLAFDPG

SEQ ID NO: 250383 - protein, 301 aa, Zea mays
  Clone ID: MRT4577_159941C.1.pep
RLHCLQEPKTGFQPNPNSVYQTEHLSYFKFAGRVVGKALFDGQLLDAHFTRSFYKHILGVRVTYHDIEAIDPAYYKNLKWMLENDISDVLDLTFSMDADEEKLILYEKAEVTDCELIPGGRNIRVTEENKHQYVDRVAEHRLTTAIRPQINAFLEGFNELIPRELISIFNDKELELLISGLPDIDLDDLKANTEYSGYSIASPVIQWFWEIVQGFSKEDKARFLQFVTGTSKVPLEGFSALQGISGPQRFQIHKAYGSTNHLPSAHTCFNQLDLPEYTSKEQLQERLLLAIHEANEGFGFG

SEQ ID NO: 250384 - protein, 165 aa, Zea mays
  unsure (1)..(165): unsure at all Xaa locations
  Clone ID: MRT4577_159942C.1.pep
QLLDAHFTRSFYKHILGVRVTYHDIEAIDPAYYKNLKWMLENDISDVLDLTFSMDADEEKLILYXIRPQINAFLEGFNELIPRELISIFNDKELELLISGLPDIDLDDLKANTEYSGYSIASPVIQWFWEIVQGFSKEDKARFLQFVTGTSKVPLEGFSALQGIS

SEQ ID NO: 250385 - protein, 76 aa, Zea mays
  Clone ID: MRT4577_159943C.1.pep
SALKPSNGTFEGFSALQGISGPQRFQIHKAYGSTNHLPSAHTCFNQLDLPEYTSKEQLQERLLLAIHEANEGFGFG

SEQ ID NO: 250386 - protein, 1111 aa, Zea mays
  unsure (1)..(1111): unsure at all Xaa locations
  Clone ID: MRT4577_159944C.1.pep
MSLESVSEVPQNPDQEPDQNASEGNQEPTRAAGADSIDPTFLEALPEDLRAEVLSSRQNQVTQTSNDQPQDDGDIDPEFLAALPLDIREEVLAQQRTQRIXTIQELEGQPVEMDAVSIIATFPSEIREEVLLTSPDTLLATLTPALVAEANMLRERFAHRYHSSSLFGMNSRNRRGESSRRDIMAAGLDRNTGDPSRSTSKPIEIEGAPLVDEDGLKALIRLLRVVQPLYKGQLQKLLVNLCTHRDSRQALVQILVDMLMLDLQGFSKKSIDAPEPPFRLYGCHANIAYSRPQSSDGLPPLVSRRVLETLTNLARSHPNVAKLLLFLEFPCPSRCFPEAHDHRHGKAVLLDDGEEQKTFALVLLLNLLNQPLYMRSVAHLEQLLNLLEVVMHNAENEINQAKLEASSEKPSAPDNAVQDGKNNSDISESYGSKLNPEDGSKAPAVDNRSNLRAVLRSLPQPELRLLCSLLAHDGLSDSAYLLVGEVLKKIVALAPFFCCHFINELARSMQNLTFCAMKELRLYENSEKALLSSTSANGTAILRVVQALSSLVSTLQDRKDPEQPAEKDHSDAVSQISEINTALDALWLELSNCISKIESSSEYASNLTPASASAATLTAGVAPPLPAGTQNILPYIESFFVTCEKLRPGQPDAVQEASTSDMEDASTSSGGQRSYSCQASLDEKQNAFVKFSEKHRRLLNAFIHQNPGLLEKSFSLMLKIPRLIDFDNKRAYFRSKIKHQYDHHHHNPVRISVRRSYILEDSYNQLRMRSPQDLKGRLTVHFQGEEGIDAGGLTREWYQSLSRVIFDKSALLFTTVGNDLTFQPNPNSVYQTEHLSYFKFAGRVVGKALFDGQLLDAHFTRSFYKHILGVRVTYHDIEAIDPAYYKNLKWMLENDISDVLDLTFSMDADEEKLILYEKAEVTDCELIPGGRNIRVTEENKHEYVDRVAEHRLTTAIRPQINAFLEGFNELIPRELISIFNDKELELLISGLPDIDLDDLKTNTEYSGYSIASPVVQWFWEIVQGFSKEDKARFLQFVTGTSKVPLEGFSELQGISGPQRFQIHKAYGSTNHLPSAHTCFNQLDLPEYTSKEQLQERLLLAIHEANEGFGFG

SEQ ID NO: 250387 - protein, 84 aa, Zea mays
  unsure (1)..(84): unsure at all Xaa locations
  Clone ID: MRT4577_159945C.1.pep
GIQSLRHACLRRACHLLWCPLSFTLLAVIVHRFAWESPGVPHLIPLEALPLFSRWRIFEXARTGRPSQRLRTLTGPWCPPCRAL

SEQ ID NO: 250388 - protein, 131 aa, Zea mays
  Clone ID: MRT4577_159946C.1.pep
MVRTEAAGAALAVALLACMVGAGADGSDHKYKEGDRVPLYANKVGPFHNPSETYRYYDLPFCAPEHPKDKREALGEVLNGDRLVDAPYELNFKEDTNSKTLCKKTLSKEQVAKLRDAVAKDYYFQMYYDDL

SEQ ID NO: 250389 - protein, 64 aa, Zea mays
  unsure (1)..(64): unsure at all Xaa locations
  Clone ID: MRT4577_159947C.1.pep
IDGYHQGXRLGSLYFNIWVRSPPALFRKKKKFLNRCLVHRSPXGRMISFFWGSGPLLIWQIAVW

SEQ ID NO: 250390 - protein, 65 aa, Zea mays
  Clone ID: MRT4577_159948C.1.pep
SFHPDSPSSPPARARARHGQDPAGGETLADPECAARPAATGGGEVTRSLRRAARKVSAFRRGLSP

SEQ ID NO: 250391 - protein, 53 aa, Zea mays
  Clone ID: MRT4577_159949C.1.pep
PYPPQNPPSQPMLVHPAQARASSSRHPPHAGGGQHQPPNGPPAQQQPQQPIQN

SEQ ID NO: 250392 - protein, 488 aa, Zea mays
  unsure (1)..(488): unsure at all Xaa locations
  Clone ID: MRT4577_15994C.1.pep
MSKEDVLKVQTLMLRVNIHCDGCEKKVKKTLHKIDGVYQSSIDAEQGKVTVSGLLDPDTIIRKLNKAGKPAQLWGSKPGITQNAYHGGGKAHSKDAGGGKSHSKDSGGGKGHSKDAGGGKAQKGGAGGGGHKAPRDGGGGAGGVGTPRMVMPHPTPQQLQELQXVXQMMGLKQPPYQLSGNMPSFSAATPMKHPKSVSFALPEDIXCSTVXFDDDFAVGFDYDDADYNEEGLDDDVYGDPKMMMKPMTVPPPAGGGDKKGGGGKKGGGGGNEIPVQIKGNNHGGAGGQPHNAKGGAPGGGAHLGQGKKGGGSAAAVGVGGPMGGMLPQQGMMRPPNILGGAGAGFPSTAQMGGGPMGMPVGHPHMGIMQQGGGGGGGGMPGLGFHPGLGGGGMHSGADMLQAAAASGNPVAQQQYMALMQQQQQQMMMMQQQQQQHGNGGLGYPAAMGYGYGRPPMHYPMGYPVLPPHSHAEPYNIFSDENANSCSLM

SEQ ID NO: 250393 - protein, 66 aa, Zea mays
  Clone ID: MRT4577_159950C.1.pep
LGRSQYNADFGWGTPQFMSRADSDRGGFVHLINDEGGCTPPGDVRVLVTVGAENIKELGRLLYAKL

SEQ ID NO: 250394 - protein, 91 aa, Zea mays
  Clone ID: MRT4577_159951C.1.pep
PPWQLPKGWLPFPIVNFCRDLIPLRAMPLGLYIALDHPSRIHVSQGAVAIQFVLFLDSNLLAYHACLDSMYAPLVVAPAGTSGTLDPLPVG

SEQ ID NO: 250395 - protein, 377 aa, Zea mays
  Clone ID: MRT4577_159952C.1.pep
MSSALVALYVTICSVLFLLSKMLISFLLYKKWARKKRIIDNSLAGGKMVIFRSATMAMPQSLTPKSFLAMLMGLSTKDVIGAGGYGTVYRLRLDDKTAFAVKRLNRGTHHHEADDRGFERELDAMGDIKHRNIVPLCGYYAATHFNLLIYELMPNGSLDQALHVHDHAHRLILDWPARYRVALGVARGLSYLHHDCIPHVIHRDIKPSNILLDHHMEPRLSDFGLATLIVKPNASHVTTLVAGTFGYLAPEYFDTGRATTKGDVYSYGVVLLELLTGKRPTDESFLENGTRLVTWVRETMEEKREEHAIDEALLHHPLHLHTEELRLLFSVADKCLHSDPANRSTMAQVVKMLEQPNNTHHHSSSSSSPAAAVESVH

SEQ ID NO: 250396 - protein, 67 aa, Zea mays
  unsure (1)..(67): unsure at all Xaa locations
  Clone ID: MRT4577_159953C.1.pep
MLFLSLNKLSGLYYCVIAGVIFGFWLWYGTLFSVAKLRXLFLFVDRVQYRVMQKVRPTNHFFYIQRF

SEQ ID NO: 250397 - protein, 50 aa, Zea mays
  Clone ID: MRT4577_159954C.1.pep
MKACYNVAAIVLPVKDIFSPPVKLVNRQVSHPVLRRLLPARDSGPLAQES

SEQ ID NO: 250398 - protein, 70 aa, Zea mays
  Clone ID: MRT4577_159955C.1.pep
MPPPAPPQGPGRGFSGAGGSNMLRFYTEEGPGLPLSPPMVLVMSLCFMGLVPPPPILGKLYRSRTAAASG

SEQ ID NO: 250399 - protein, 157 aa, Zea mays
  unsure (1)..(157): unsure at all Xaa locations
  Clone ID: MRT4577_159956C.1.pep
FXXLKIYIEYXVYXXLLTLHIXXXQINITKTSFCXTMXLPSSNSSVXXSCLPSFTIYYLLXIRAIYNRLFFRHQCGCAQSCRTKTCTIVRSARDTTRVVTHAMXLXQCSSRYREYFARXRVSCARLDLCVELTYPXXVYSTSIRITHPTSVTIDMCH

SEQ ID NO: 250400 - protein, 626 aa, Zea mays
  unsure (1)..(626): unsure at all Xaa locations
  Clone ID: MRT4577_159957C.1.pep
RLFNVPDSGALTYYRFLPRVSGRSLSVTWSSNAKFVFSGSSDGLIRCWDSTSFHEMYRITAGLGGAGTSPELCIWTLLFLRCGTIVSGDSTGSVQFWDSRHGTLLQAHSYHKGDVNALTTVPSENRVFSAGSDGQVILYKISKDEFGASKNVIKEQVQKWVYVGYLRAHTHDIRALTMAVPICREDALPEEKVVKIRRREKHEFSYHRWAHLGVPMLISGGDDAKLFAYSAREFTQFSPHNFCPAPQHPLIKLARNSTVNGDYVMLVQSSNFLDVLLVHASDKLTTPSTSSSRGXSVRQLVRLKSKGSRKIISSAACANGTLLAYSDGVRPCLFALRHKGGKKYTLDKLELPKGLPCSQSMLFTVDSSNLILAGRNGKIYIIDIATREISNVFHPTRRADGAKISREPPXVTKMFLSADGQWLAAVNCYGDIYVFNLEVQRQHWFISRMNGGSVTSGGFCPKNNTLIITTSKNEVYXFDVETKQLGEWSKRYTHQLPRSFQEFPGEVIGLSFSPQSSSSVIVYSTRAMCYIDFGLPVVEDVDLPNGSAGAAEKSDTKKIKKARQKRKAHDEESKQEKRNNLSFFAFKEPVLFVGHLLDSSILIVEKRWMDVVEGFGAPVHRHIYGT

SEQ ID NO: 250401 - protein, 125 aa, Zea mays
  unsure (1)..(125): unsure at all Xaa locations
  Clone ID: MRT4577_159958C.1.pep
MAPLKIYEMSLPLNVVNVATVLNENGLNFXDRPFDLTTDDHKQPDFLIPQALXQIPVHVYGHKLLFXCRAINRYIAINYTSEGTHLLTAKESXRKXEVWLXEVESHHFXYPNAASLKLHVLVRSL

SEQ ID NO: 250402 - protein, 116 aa, Zea mays
  unsure (1)..(116): unsure at all Xaa locations
  Clone ID: MRT4577_159959C.1.pep
LSSASCALLLVVSFARSLSVAVSPLVVFSLLSGVLGVLPCLVLARFSLRAFAVGLAAAPRRGPVALVVAVGLLAVVLXRVLACVRRVLLPPSAGPSPFPPXSSSXSAVAAPGXGLA

SEQ ID NO: 250403 - protein, 186 aa, Zea mays
  Clone ID: MRT4577_15995C.1.pep
MRKDADAKIPSYPNLSSSVLSSDSMHIGILAAAAHAAANNSQFTVFYNPRASPSEFVIPFAKYQKAVYSNQLSLGMRFRMMFETEESATRRYMGTITGISDMDPLRWKNSQWRNIQVAWDEAAPSERRTRVSLWEVEPVIAPFFIYPSPLFTAKRPRQPGVTDDDSSEMDNLFKRTMPWFGEEVGK

SEQ ID NO: 250404 - protein, 43 aa, Zea mays
  Clone ID: MRT4577_159960C.1.pep
AKCEVVTHDPNIHLYGTNLFVCGYPQNIYRKNQKKKKKKKKKK

SEQ ID NO: 250405 - protein, 45 aa, Zea mays
  Clone ID: MRT4577_159961C.1.pep
TNGQFVYVRPVRCEYRVMWVSTLEPLARRFSVDRLPTDIFLSPPQ

SEQ ID NO: 250406 - protein, 173 aa, Zea mays
  unsure (1)..(173): unsure at all Xaa locations
  Clone ID: MRT4577_159962C.1.pep
MALLGDALRQAFLMPRRAYAALRDDEQSFPPRLRRPLAVTAACCVAAAVAAAACVSLGIAFPAEPAERPFCRERRMLEALPAAASSMEEEPEAYRYRGGAFYMTTAEAADFYWMGVLVPSAALFXPNSXYLVRGMYVAYAAPKRHTMIXLVENNFXASTNKSVHCLIILNAVL

SEQ ID NO: 250407 - protein, 50 aa, Zea mays
  Clone ID: MRT4577_159963C.1.pep
YNSFIVGLKMALRLLVLGRFVFLKRAIIKISWGIYKKKKKKKGGRSRSRT

SEQ ID NO: 250408 - protein, 69 aa, Zea mays
  Clone ID: MRT4577_159964C.1.pep
PWGFTFTRKGSALTVLPTLSGEFKSSCSFSPEAASFEQRAVTWITPPTKAADRRLHGLHPLNAHGPGRT

SEQ ID NO: 250409 - protein, 65 aa, Zea mays
  Clone ID: MRT4577_159965C.1.pep
CTRSLKPYRSSLYVSGLMHHQIGPVHQVTNSESGFTMNLVWYSIELVRCTVDPLELSPFGISSSI

SEQ ID NO: 250410 - protein, 194 aa, Zea mays
  Clone ID: MRT4577_159966C.1.pep
MVLWELTAITAYFLGLRRTYRLALRIQRRLIPPNHPRIRDFVYRRTRDVFNVAVSVHKNIQQRDIEVGRNLGNAILRWLDRMKPSAEIRPRLPGPPNGSTAEQFRHVSSASRGAGAQKTSSSSKASPHDSSGKMLFSRLNIGPKHFPVLPTLAQPNRISASSQCRRISYSYAPFPSVTARRKGVFREDIAQLMV

SEQ ID NO: 250411 - protein, 70 aa, Zea mays
  Clone ID: MRT4577_159967C.1.pep
ATCPSACLCWSRAPKPRQYKPGHAGDDFLTKFQRNAGLVASGVAKNLNRVGTYIKDTVSDMMQPHRKRPK

SEQ ID NO: 250412 - protein, 61 aa, Zea mays
  Clone ID: MRT4577_159968C.1.pep
LPLLSLLPHLQQAIESGLPDKDVLTMCMKFAELERSLGEIDRSRAIYVHASNYADPKYPDF

SEQ ID NO: 250413 - protein, 195 aa, Zea mays
  Clone ID: MRT4577_159969C.1.pep
MEGAAGEEGASTPAARGGAEAGAGAGAGGGMLKGRSCKGCLYYSSKLRSRARGPVCVGVTRALPQVSERKVGKLELEAIQEGRYLADFRYACIGYSMYLNGKETPTGVRDKPRAHLPVCAGVELLIDRKVPTNVKKEAPKPRQYKPGHAGDDFLTKFQRNAGLVASGVAKNLNRVGTYIKDTVSDMMQPHRKRPK

SEQ ID NO: 250414 - protein, 142 aa, Zea mays
  Clone ID: MRT4577_15996C.1.pep
SYARASLSQQTSAPCSPISAPPATCMHLQQTPPLPHLQQTRVASPISNKSTRLSSHNTEVPRPAHPPPAYSNARVFFIAQTLAATMTEVAGDGTRRSPLERTSTMVCDAGCLTGSLALLLAAAGIDILASVVLASMVSEAQR

SEQ ID NO: 250415 - protein, 70 aa, Zea mays
  Clone ID: MRT4577_159970C.1.pep
VSYLQLRIFLDSLCLFPCICVDNFGSAMFNCWCVYSFYYKFFCSPWCFTIHYRSRSPSIYPVGAKRIIGL

SEQ ID NO: 250416 - protein, 78 aa, Zea mays
  Clone ID: MRT4577_159971C.1.pep
CISMLSFWVAPGLCLVSAPRVSFGCPWFLFLRAEGIASVCFLWCRALSIFPGVLVSLGIMLVNRWPFTRGVSISFSFL

SEQ ID NO: 250417 - protein, 70 aa, Zea mays
  Clone ID: MRT4577_159972C.1.pep
RRQVTCRRSSANTRGTRESTRGRVSPSRLSSVTGGDAEHAGVDGQDREQKERDKVGVLAEQQREASRSRA

SEQ ID NO: 250418 - protein, 184 aa, Zea mays
  unsure (1)..(184): unsure at all Xaa locations
  Clone ID: MRT4577_159973C.1.pep
RSARVQVQVQPPGLPAETDTAAVPRRHGHFSGNSNADAATSTSTIVLPRMDLGDGNRSKRGSDMDAKHNESGVRDEVVRTCARVRSSGAAVQTGDERSLRKRATPTRPEVSGXLGLQSLXLAGSTRLVGRARESVSATRKVAHGGSGPRRELVGPIVGQGRMTRRDLNSQNGLSSTSRILSNGS

SEQ ID NO: 250419 - protein, 79 aa, Zea mays
  Clone ID: MRT4577_159974C.1.pep
MRSDATAYLAGGAACVELADPVQGGNYYQDTEMSCGNVRGTAEDCKRGLDLTLDRTFSFWCQIKNENMVGKNDMQIKLV

SEQ ID NO: 250420 - protein, 236 aa, Zea mays
  unsure (1)..(236): unsure at all Xaa locations
  Clone ID: MRT4577_159975C.1.pep
AVPVCSSSADCGRTPITPRAFYSHAVPLADPVSRRPASFVTAFAFSIAAPDPASASGDGLAFFLSPFPSVLPESSAGGLLGLFNSSSVRAGTLVAVEFDTHKNEWDPSGDHVGVDLGGIVSSATADWPTSMKDGRTAHARVEYDGVAKNLTVSLSYGSARPNTTGDVLLWYAVDLRDHLPDSVAVGFSAATGEAAELHQVXLYWEFTSTVDPKEXETVALXWVGGXGLCALLLVSV

SEQ ID NO: 250421 - protein, 77 aa, Zea mays
  Clone ID: MRT4577_159976C.1.pep
LVVLITFLTILSILSRTGVPWFLKLMISLSSQTNELYQLAAVAFCLLFAWEIRLIFWLLPKYPSHLEDRWHLLSTTA

SEQ ID NO: 250422 - protein, 705 aa, Zea mays
  Clone ID: MRT4577_159977C.1.pep
MSSPSLLILCGCGRTPITPRAPSPIPMEISAGVTTVTAVSILILLLLPQPAAPFSFTYNFTSPSDTPPPGIAFQGDAFYNKAIRLTRDERLGPITSSTGRAFYSHAVPLADPVSRRPASFVTAFAFSIAAPDPASASGDGLAFFLSPFPSVLPESSAGGLLGLFNSSSVRAGTLVAVEFDTHKNEWDPSGDHVGVDLGGIVSSATADWPTSMKDGRTAHARVEYDGVAKNLTVSLSYGSARPNTTGDVLLWYAVDLRDHLPDSVAVGFSAATGEAAELHQVLYWEFTSTVDPKEETVVLWVVLGLCALLLVLVGAGIVWFVRQWRKAGQFDDGDIEVDDVMGGEYDELADEFVVQCGPRRFRYAELAAATKNFAEERKLGQGGFGAVYRGFLKELGFEVAIKRVSKGSTQGRKEYAAEVRIISQLRHRHLVRLVGWCHEHRGDFLLVYELMPNGSVDHHLYGKGMLLTWPMRYDISLGLASAMLYLHEECPQCIVHRDVKPSNVMLDAAFNAKLGDFGLAKLVEHGSQPYTTVLAGTLGYLAPECVMTGKASRESDVYSFGVVALEIACGRRPAELNNEPSKARLVPWVWELYGKNALLEAADWRLKGQFDEKQMERLMIVGLWCAHPDYAHRPSIRQALNVLTFEAPLPVLPEKMPVPTYFPLPDLVASISVGGTSSAEDPDPGVSDYGSSGKVSSVRDRLLEP

SEQ ID NO: 250423 - protein, 123 aa, Zea mays
  unsure (1)..(123): unsure at all Xaa locations
  Clone ID: MRT4577_159978C.1.pep
IMSSLWLGRVYYVFGFLLVVLALLXTVCAXVSVVLTYMGLCVKDXRWWWRAFFASGSVALYTLGYAVYYLVFELHSLAGPVSAALYVGYSLLMALAVMLATGAVGLGASFCFVHYLFSTVKLD

SEQ ID NO: 250424 - protein, 138 aa, Zea mays
  unsure (1)..(138): unsure at all Xaa locations
  Clone ID: MRT4577_159979C.1.pep
MAVHEPRDHVFEDSXRELHRKSPEEMKNRLYIVFEGEEGQDAGGLLREWYMIISREMFNPMYALFRTSPGDRVTYTINPSSHCNPNHLSYFKFVGRIVAKAVYDNRLLECYFTRSFYKHILGKSVXYTDIESEDYHFY

SEQ ID NO: 250425 - protein, 58 aa, Zea mays
  Clone ID: MRT4577_15997C.1.pep
ALKGPIWPSLKAWSNRLAQFYGNIPTIWALKGGTRPRVQVFFFFFFFFFFFFFFFFFY

SEQ ID NO: 250426 - protein, 77 aa, Zea mays
  Clone ID: MRT4577_159980C.1.pep
SSWPTLGARGRPGPRPWGWPCCWWWSLGADLPLALFLRDDGVEQPHGKHGKIMQAQASLEPRVVWLQLVQPVVVWAP

SEQ ID NO: 250427 - protein, 61 aa, Zea mays
  Clone ID: MRT4577_159981C.1.pep
NMSMVEIVSVHQSDQYLKCQWLKSLLAFCHKSWELKNHVSSTSTSIEIEFVFFSCQMLQNS

SEQ ID NO: 250428 - protein, 188 aa, Zea mays
  unsure (1)..(188): unsure at all Xaa locations
  Clone ID: MRT4577_159982C.1.pep
MTVVSYESTDSQSLSSQGSTSGSTFESRRSARGLYGSTLRNSSEREVPGDRKFTLPEIQKATKNFSPNLKIGQGGSGTVYKGQLSDGTLVAVKRAKKNMYDKHMGHEFRNEIETLRCIEHLNLVRFHGFLEFGGEQLIIVEYVPNGNLREHLEGLNGKVLEFSVRLEIAIDVXHAITYLHTYSDQPVI

SEQ ID NO: 250429 - protein, 175 aa, Zea mays
  Clone ID: MRT4577_159983C.1.pep
MAGGGGRGAAAAAASALALAALVCSLSCGLAQGRVARKSLGIGLGGGGGGGGDGLGLGLGLGLGVGAGTGGVSVSGSGSGSGSAPVVGSTSGSRSGSISVGGASSSAGSSAGSSAGSTGSAAGSSAGSGGGQGYGQGGGSGSGSGFGEGSGSGNGLVGIGTGQGYGHGSNFGGNP

SEQ ID NO: 250430 - protein, 174 aa, Zea mays
  unsure (1)..(174): unsure at all Xaa locations
  Clone ID: MRT4577_159984C.1.pep
KKTKKKKKKKKKKNRRRGGRRETPKQTNRRGRGRRRGEERRGPGTPGPPRKRNGAGRPGNGTRGATAREEAGTDNETGPKNXATAEHKSPEHXXRNPXXQXPARQEGDXTTXETRATGKNAXRKNKPERXREGNXEEAARGEGRTEGEANQNTAARXPXXXQXPTSPRPGGTTD

SEQ ID NO: 250431 - protein, 762 aa, Zea mays
  Clone ID: MRT4577_159985C.1.pep
MWRLTVAEGGGPWLRSTNGFVGRAVWEFDPDLGTPEERDEVERVRQEFSDHRFQRRESADLLMRMQCAKQNRSQRRDLPRIKLGEDEHVTEEIVLSSLRSALDQFSSLQASDGHWPGDFSGIMFIMPGLIFALYVTGSLNVVISPEHRHEICRYIYNHQNEDGGWGTLILGSSTMFGTCSNYITLRLLGEEPYANNSVLAKGRAWILSHGGATLIPQWGKIWLSVLGLFDWSGNNPIFPELWSIPQFLPFHPGKFWCFARMVYLPMAYLYGKKFVGPITPTILALREEIYDTPYGKIDWSDARSKCAKEDLICPRTLLQNVIWTSLYRCVEPVLSSWPINKLRERALGNIMEHIHYEDENTQYLCICPVNKALNMVCCWVEDPNSDAFKRHLARIPDFLWISEDGMKAQVYDGCQSWETSFIIQAFCATDLVNDYGSTLQRAYEFMKNSQVMRNHPGDQRYWHRHRSKGSWTLSSADNGWAVSDTTGEALKAVLLLSKISNKNNLVGDPIERERLHDAIDCLLSFANKDGTFSTYECKRTYSWLEILSPCETFPNIVVDYPYPECTSSVLQALILFKDLYPGYRTEEIEALVRSAATFIETKQQEDGSWLGNWGICFTYGAFFSIKGLVASGRTYKNSPCIRKACHFILSKQLSTGGWGESHIAIETQVYVNLKGDRAHAVNTAWAMLALIYAGQFERDPTPLHRAAKELINMQLETGEFPQQEHVGCFNCSLYFNYPSYRNLFPIWALGEYHRGLRAKKDK

SEQ ID NO: 250432 - protein, 152 aa, Zea mays
  unsure (1)..(152): unsure at all Xaa locations
  Clone ID: MRT4577_159986C.1.pep
MGALAGRADWPLRRHRSSTNPLLRRRHSPLRIRTRPSRLRFPQPRDRSGSPCRGGQGRDGRGRGRGREGLCDVPFPSRRGKFAAALPHAAAATRRGRXRTSVPARTRSXARPSRRYAGHRIRGGEERPAHRATRRDAQGEERLRARRPQRAA

SEQ ID NO: 250433 - protein, 89 aa, Zea mays
  Clone ID: MRT4577_159987C.1.pep
KGDRAHAVNTAWAMLALIYAGQFERDPTPLHRAAKELINMQLETGEFPQQEHVGCFNCSLYFNYPSYRNLFPIWALGEYHRGLRAKKDN

SEQ ID NO: 250434 - protein, 45 aa, Zea mays
  Clone ID: MRT4577_159988C.1.pep
HTVGNFLLADSDHTAICLFLKSYWVGSATTLLKVDSFILIRSAET

SEQ ID NO: 250435 - protein, 107 aa, Zea mays
  unsure (1)..(107): unsure at all Xaa locations
  Clone ID: MRT4577_159989C.1.pep
KDSKTLLFCDKPFTVSVIGKPYXIPWGEAVSHYTLXSTCVFTDKDKSAXAHLNGIAKKDAISAPSIYAPMFVLSVNEDKLTSHVNIDYNASCTTNXLATLAKVNHDN

SEQ ID NO: 250436 - protein, 150 aa, Zea mays
  unsure (1)..(150): unsure at all Xaa locations
  Clone ID: MRT4577_15998C.1.pep
MAVALFSSSLSPRFLALSSPNTAAPAGTVFLPFRLPPSAVSAPGRRVFEPVDVAVSSEYQTDXVAGXGEDGSQELSEDLRLFVRDLPLGXDGAHLAGVFQHAGSVQMDKVAYDRMTGRIRGFGFETMSSIDXDEAAVEQINGYAFRGRQV

SEQ ID NO: 250437 - protein, 51 aa, Zea mays
  Clone ID: MRT4577_159990C.1.pep
WLANEATRWDAHEQSASREESYYHANTMPRASRRRTRRRRRAPPTELMISR

SEQ ID NO: 250438 - protein, 399 aa, Zea mays
  Clone ID: MRT4577_159991C.1.pep
IGYGCTTCIGNSGELDEDVAKAVTDNDIIAAAVLSGNRNFEGRIHALVRANYLASPPLVVAYALAGTVDIDFETEPIGKGKDGTDVYFKDIWPSNEEIAEVEQSSVLPDMFRSTYEAITQGNPMWNQLSVPKADRFPWDPSSTYIHDPPFFKDITPTPPGPCSIENAYCLLKFGDSITTDHISPAGSIPRDSPAGKYLLERGVQPKDFNSYGSRRGNDEVMARGTFANIRIVNRLLNGEVGPKTIHVPTNEKLFVFDAAMRYKADGHHTIVLAGEEYGSGSSRDWAAKGPMLLGVKAVIAKSFERIHRSNLVGMGVLPLCFKPGEDADSLGLTGHERYTIRLPTNVSEIQPGQDVQVLSDTGKSFTCKLRIDTMVELAYFDHGGILHYVLRNLVRQQQQ

SEQ ID NO: 250439 - protein, 103 aa, Zea mays
  Clone ID: MRT4577_159992C.1.pep
ELGQLQQASSRLKIGLDLSDCKMPVICGFLVSRPASYMRSPTPRITFGVGGGGDYITWCRPIRTLSSQACMLFVGLVGKRACTHHPPVCSSWIIGGMLAMRFV

SEQ ID NO: 250440 - protein, 121 aa, Zea mays
  unsure (1)..(121): unsure at all Xaa locations
  Clone ID: MRT4577_159993C.1.pep
PSPFLGAENKAGAVPFISGATVEPLTTMHXKKSQNMVESLAESALSVAYHIGTDDGDEPIEWAKPKGETMAAVQLADAAMALAQHSDASRSCWDGKSFTYCSIINIALSAAMDGGLMTPVL

SEQ ID NO: 250441 - protein, 73 aa, Zea mays
  Clone ID: MRT4577_159994C.1.pep
GQADVRNPASDLGMGAFTLGVTRVARATVLRGWEACPPPPCRPCAPPCCILLVLVLGPCFSLVDYYRSTKIRY

SEQ ID NO: 250442 - protein, 145 aa, Zea mays
  Clone ID: MRT4577_159995C.1.pep
GNLYMVNGWRVAPSLGGLKLKLHLGSWVGWAREPRLRTGTDRDPRHKTRWGLRPRRAQARRATGTADHPPDHGTRAALLLCCVHTVHIVLLAKQTVRLFVSPSGQPIHATQGQSHNTVQFVNKSDVTTHCRLLITRGGSLLCYVF

SEQ ID NO: 250443 - protein, 41 aa, Zea mays
  Clone ID: MRT4577_159996C.1.pep
VPRAAGIFHNTNKGEQMTDLLLRHKHVQTCIYDRTIDPSSC

SEQ ID NO: 250444 - protein, 101 aa, Zea mays
  Clone ID: MRT4577_159997C.1.pep
MSDLGRKGLGEQAKEKVTPDSQKSTLDKAGESVSGLGDKAASAVQPEGQKSTTQKLGDSTRSGGDKAQNQGSGILDSAQQGLSNAGQAVTDTFNSATGNKK

SEQ ID NO: 250445 - protein, 100 aa, Zea mays
  unsure (1)..(100): unsure at all Xaa locations
  Clone ID: MRT4577_159998C.1.pep
PPEPARPGSGYDFKNGAINWGKWWGGTLGPSLMNPFITSPWGKLLHKWIYMAFLVFKKGRGPPLTWSKPPSNNWARNGKMVQGSDIQGDRFRTPGPAPXF

SEQ ID NO: 250446 - protein, 112 aa, Zea mays
  Clone ID: MRT4577_159999C.1.pep
SVCFTTSNESIGRVGSTPAASVWNLLQGCFDSFHVKGHRTETGYVRGHRLGSIGHGGNMRRNTCGSSSIILSTVHQFVFEHKAKSVCTMPSHVDRGVYDPDPKYGVPASPHC

SEQ ID NO: 250447 - protein, 107 aa, Zea mays
  unsure (1)..(107): unsure at all Xaa locations
  Clone ID: MRT4577_15999C.1.pep
LFLSFEQMYTIFHPVNGFWHNSTLYINXXLNXXIPXFLLLYXNEDXXHCTAIRLFFPCTWLDFCDWRITXSRLCEAQQNLENIPTVTGVRTFSKVVLFLDQNXSVIW

SEQ ID NO: 250448 - protein, 57 aa, Zea mays
  Clone ID: MRT4577_1599C.1.pep
LAGPTRSHTRGRPSMSLMSIIATIMLESLQLELHEEWRSQRHHPHDRPSQTTNQDTP

SEQ ID NO: 250449 - protein, 60 aa, Zea mays
  Clone ID: MRT4577_159C.1.pep
SLSSGNNAEYAGSSGNNAEYAGSSGNNAEYAESSGNNAEYAGLIINTGSYPFLALFDLLN

SEQ ID NO: 250450 - protein, 269 aa, Zea mays
  Clone ID: MRT4577_15C.1.pep
MDRARLTAKVKELGEAVRSASASAGVVVNLGNLQWLVEERCAAPRGEQQQEKRRDVVLDTARAAVAEMARVLNLSGEGEHRVWVIGTATCATYLKCQVYHPALESEWDLQAVPVTPRPPPPPPPPLGLSPSAGVNRGILSSSVEVLSTAMTSPMQRAPSLCSACAEGYERERAEMASSERAPCPAEQPMSQWLQIGTPSSGRPADRAQEKAREADELRRRWRDRCAQLHSHGRPPLVTCSEWNGASILASMQAAPPVVPVRPLVQRMVA

SEQ ID NO: 250451 - protein, 105 aa, Zea mays
  Clone ID: MRT4577_160000C.1.pep
RSQDAAAGDGTTTVVVLAGSLLRRAQSLLSAGAHPTAAADALHRLATRAVEILHGMAIPIELSDRESLVKSASTALNSKVVSQYSTLLSPLAVDAALSVVDPAQL

SEQ ID NO: 250452 - protein, 205 aa, Zea mays
  Clone ID: MRT4577_160001C.1.pep
HIRLRPAPPSASSAPPCRRKDPNPVRRLLRRLSSRGTGSPHASRYLFRRLVASAAPSVAAEWSSSDPRAARRSAPPPVRPRAGIALMVAAGVLGFVAHLLCLGTHIQGLSLGWIGQRHPRFCMRPTAAEFREPCTAMAIGNDRVTGVGEWFRDRQLFVGAALAKCRLSIVAIAGWMGSLWSALLVCSVAVCGLFRDSHAHTHADC

SEQ ID NO: 250453 - protein, 120 aa, Zea mays
  Clone ID: MRT4577_160002C.1.pep
TSIVHAMRPHLSARSSMQSSAVSLGVHQGEDVRIAVGPLDIPHDEPVLCRRWDFVSTLLRLAPLDPVISCELCSPAIFVWVSIFSPLECTEAGDLSVAQEDMVCGGNTTQRIFPARPASR

SEQ ID NO: 250454 - protein, 109 aa, Zea mays
  Clone ID: MRT4577_160003C.1.pep
PPILINTSHQPTNQPTNQHSLSTSLTHSTSLLNQPTNQPTNLFFQNACQRRLLHLHHRQAHRPQVRRVLRLLRLRRILLVHCHVKKNLPFFFLRQMSSNTEYDNMQQRA

SEQ ID NO: 250455 - protein, 28 aa, Zea mays
  Clone ID: MRT4577_160004C.1.pep
LTPQAQATHWEYNLVEGGIQILEGEILG

SEQ ID NO: 250456 - protein, 55 aa, Zea mays
  Clone ID: MRT4577_160005C.1.pep
LMLSRRMETHREIKVDTHLFNASLPIQGCYADIRGQLREWFPPKFKGNYTSQFGA

SEQ ID NO: 250457 - protein, 387 aa, Zea mays
  Clone ID: MRT4577_160006C.1.pep
MELWSKLRNLDAYPKVNEDFYSRTLSGGLITILSSLAILLLFFSEIRLYLYSATESKLTVDTSRGERLHINFDVTFPALPCSLVAVDTMDVSGEQHYDIRHDIIKKRIDHLGNVIESRKDGVGAPKIERPLQKHGGRLDHNEVYCGSCYGAEESDDQCCNSCEEVRDAYRKKGWAVNNVELIDQCKREGYVQRLKDEQGEGCTIHGFVNVNKVAGNFHFAPGKSLDQSFNFLQDLLNLQPETYNISHKINKLSFGEEFPGVVNPLDGVEWIQDNSNGLTGMYQYFVKVVPTIYTDIRGRKIHSNQFSVTEHFREAIGYPRPPPGVYFFYEFSPIKVDFTEENTSLLHFLTNICAIVGGIFTVAGIIDSFVYHGHRAIKKKMELGKLG

SEQ ID NO: 250458 - protein, 120 aa, Zea mays
  unsure (1)..(120): unsure at all Xaa locations
  Clone ID: MRT4577_160007C.1.pep
QSFNFLQDLLRPLRETYNISHKINKLSFGEEFPGVVNPLDGYSLELELNFRSXLHCTLLYNFPWPNFSKHSRVEWIQDNSNGLTGMYQYFVKVVPTIYTDIRGRRIHSNQFSVTEHFREA

SEQ ID NO: 250459 - protein, 467 aa, Zea mays
  Clone ID: MRT4577_160008C.1.pep
RPSVRAEGGPGGAVEEGVGESSSPPREDAVPAPAGSGGSGGSGGAREICAQVLDRLVADGYAEASDPEFRDRLAAHFGRLPHRQGTPYTHIHEIVFSTIDKPKLLSQLSALLSDIGLNIREAHVFSTHDGYSLDVFVVDGWPVQDADGLHKALEASILRNEGSWSGSSHSSAAERTLPFQVKGGEWEIDKRLLKMGGMVASGSCGDLYHGTYLGEDVAVKVIRAEHLNKNVWNEFTQEVYILREVQHKNVVRFIGACTKPPQFCIITEYMSGGSLYDFVHKQHNVLNLRTLLKFAVDVCRGMCYLHERGIIHRDLKTANLLMDKDHVVKVADFGVARFQDQGGVMTAETGTYRWMAPEVINHQPYDNKADVFSFAIVIWELITSKIPYESMTPLQAAVGVRQGLRPGLPKKTHPKVLDLMQRCWEADPSARPAFPDILAELEDLLAQVQGTPGKTAHAPSNNSNTKD

SEQ ID NO: 250460 - protein, 152 aa, Zea mays
  unsure (1)..(152): unsure at all Xaa locations
  Clone ID: MRT4577_160009C.1.pep
MPAAATAGKPYNTPFYHFLYLSLALASYLLVMIVVEKQVQFSHAAYGGGSTALLIVLFSPVGVVVKEEYKAXSQLEESLQQPPAIAVDEPKAGSAGKGDDESSSPPLCGGGGLACLTNLFTPPALGVDSSFLPALARVALPVAAPPLPVPPP

SEQ ID NO: 250461 - protein, 67 aa, Zea mays
  Clone ID: MRT4577_16000C.1.pep
FRRLSHARQRPLKTHALLVCSSCTSYIIICVMPAPLVILADANTCDCNKVCGRVSISLYHEWARKED

SEQ ID NO: 250462 - protein, 186 aa, Zea mays
  unsure (1)..(186): unsure at all Xaa locations
  Clone ID: MRT4577_160010C.1.pep
QHKNVVRFIGACTKPPQFCIITEYMSGGSLYDFVHKQHNVLNLRTLLKFAVDVCRGMCYLHERGIIHRDLKTANLLMDKDHVVKVADFGVARFQDQGGVMTAETGTYRWMAPEVINHQPYDNKAXTXPKKTHPKVLDLMQRCWEADPSARPAFPDILAELEDLLAQVQGTPGKTAHAPSNNSNTKD

SEQ ID NO: 250463 - protein, 323 aa, Zea mays
  Clone ID: MRT4577_160011C.1.pep
DADGLHKALEASILRNEGSWSGSSHSSAAERTLPFQVKGGEWEIDKRLLKMGGMVASGSCGDLYHGTYLGEDVAVKVIRAEHLNKNVWNEFTQEVYILREVQHKNVVRFIGACTKPPQFCIITEYMSGGSLYDFVHKQHNVLNLRTLLKFAVDVCRGMCYLHERGIIHRDLKTANLLMDKDHVVKVADFGVARFQDQGGVMTAETGTYRWMAPEVINHQPYDNKADVFSFAIVIWELITSKIPYESMTPLQAAVGVRQGLRPGLPKKTHPKVLDLMQRCWEADPSARPAFPDILAELEDLLAQVQGTPGKTAHAPSNNSNTKD

SEQ ID NO: 250464 - protein, 529 aa, Zea mays
  Clone ID: MRT4577_160012C.1.pep
MVAAEGGPGGAVEEGVGESSSPPREDAVPAPAGSGGSGGSGGAREICAQVLDRLVADGYAEASDLEFRDRLAAHFGRLPHSYQLDINVDKASDVLVHQNVLAEAKDPDRRPAFYVRFLRIEDMDSAYDSDASEEGDDDGDDLSVRQDTPYTHIHEIVFSTIDKPKLLSQLSALLSDIGLNIREAHVFSTHDGYSLDVFVVDGWPVQDADGLHKALEASILRNEGSWSGSSHSSAAERTLPFQVKGGEWEIDKRLLKMGGMVASGSCGDLYHGTYLGEDVAVKVIRAEHLNKNVWNEFTQEVYILREVQHKNVVRFIGACTKPPQFCIITEYMSGGSLYDFVHKQHNVLNLRTLLKFAVDVCRGMCYLHERGIIHRDLKTANLLMDKDHVVKVADFGVARFQDQGGVMTAETGTYRWMAPEVINHQPYDNKADVFSFAIVIWELITSKIPYESMTPLQAAVGVRQGLRPGLPKKTHPKVLDLMQRCWEADPSARPAFPDILAELEDLLAQVQGTPGKTAHAPSNNSNTKD

SEQ ID NO: 250465 - protein, 124 aa, Zea mays
  Clone ID: MRT4577_160013C.1.pep
LLLAPPRLVALPCQSAQGHARGARKSPHGRWTLTLHGTLVELQGRTQAPICLHIMSARAIKGRVRRVPCASTCDMAMGTCQERRWRSPGVSNAQERSELIHDLREYRADYMYLDDKLACTRTHG

SEQ ID NO: 250466 - protein, 71 aa, Zea mays
  Clone ID: MRT4577_160014C.1.pep
HALINGQSRRNRDLQSHRYFHRELSEPILMRSTPRPGTLLYQPEILPAVRKRKHRRAPLQMTLLHPQALPR

SEQ ID NO: 250467 - protein, 54 aa, Zea mays
  Clone ID: MRT4577_160015C.1.pep
KGTCQHLTAPDIRPQHQDTIQCSEINSLPNEYKYTMSSMLGPQGKGVGRELNSF

SEQ ID NO: 250468 - protein, 46 aa, Zea mays
  Clone ID: MRT4577_160016C.1.pep
RKSPTGLGFFKSFKHTSRVKSWALVLSVPFGGQSDHAMSMPPRKEN

SEQ ID NO: 250469 - protein, 189 aa, Zea mays
  Clone ID: MRT4577_160017C.1.pep
SRRRDLPQCLCAGDPVADGAGGRRLPRRAEPGMPHVRERSWSSHVYRNIQTRSCPPCRLRSTTRNDGPSSTLPSCWTPSCCLQPRKPSHRLSTSTRWTTWPPPTSLTSRMSALVTPSYWTKVFRVLQDYVKNKNLLEDKLGTLFAIAPENDITLYKRTMLVTETAHVEGTTHTSGMCPHAQEDASQDAS

SEQ ID NO: 250470 - protein, 56 aa, Zea mays
  Clone ID: MRT4577_160018C.1.pep
VRLQYPSDIPVDPRPPGRVREIDNTSTGMEPLNLFANECSPCSIVQQIGIPRESHP

SEQ ID NO: 250471 - protein, 86 aa, Zea mays
  Clone ID: MRT4577_160019C.1.pep
ENNGVFTWIRGAKEKRIPLWGGGMTMQRWGYNWERGYLIFGYKKRTQIPPKTLPKGKKHFKIRTNFCNGVFQKGKGYLTLTPWNRG

SEQ ID NO: 250472 - protein, 115 aa, Zea mays
  Clone ID: MRT4577_16001C.1.pep
DCALIGDGSGVQSNTAGSCWGHRVSKSRTYGACGCSVAGAGVRGRHRGSLGRVVHGGPGRRRRKTGHLGWFSALGEFGPLGRGVRRGRDDKEGEKSNHPGGDAGPRSHQVTVSSI

SEQ ID NO: 250473 - protein, 136 aa, Zea mays
  unsure (1)..(136): unsure at all Xaa locations
  Clone ID: MRT4577_160020C.1.pep
HVVTARKMIQKEGGLEPSXLVDSLAQAFXFDLETGNQELKSDLKDLTINNAIYMDVTGSKKAVVIHVPYRLRKAFRKTHVRLVRELEKKFSGXDVVIAASRRIVRPPTKGLSGLPPTTMTVTAVHDGILDDVVYPA

SEQ ID NO: 250474 - protein, 60 aa, Zea mays
  unsure (1)..(60): unsure at all Xaa locations
  Clone ID: MRT4577_160021C.1.pep
ATWGTVAGSMRGINCDAAAACAYSGLXPRAAFGPQGXKKATRGDEGWPGRVASRRVFRPV

SEQ ID NO: 250475 - protein, 57 aa, Zea mays
  Clone ID: MRT4577_160022C.1.pep
MANFACCMPQIYFFSWQKKKKKKKKKKKKKKKKKKKLKKKKKKKRRFLLAWPPTGKG

SEQ ID NO: 250476 - protein, 31 aa, Zea mays
  Clone ID: MRT4577_160023C.1.pep
MAFVPECVQCVTQSNPFQYKVVKPTLEFVAF

SEQ ID NO: 250477 - protein, 540 aa, Zea mays
  unsure (1)..(540): unsure at all Xaa locations
  Clone ID: MRT4577_160024C.1.pep
MDPGGGGGMLLEDFGQRVDLTRRIREVLANYPEGTTALRELIQNADDAGAGRVRLCLDRRSHGRASLLSPALAQWQGPALLAYNDAVFTDEDFASISRIGDSRKVAQTWKTGRFGVGFNSVYHLTDLPSFVSGKYVVLFDPQGAYLPNVSASNPGKRIDYVSSSAITMYHDQFSPYCAFGCDMKASFQGTLFRFPLRSSEQASSSRLSRQSYTEDDILSLFAQLYQEGVYNLLFLKNVLSLEMYVWESGMTEPKIIYSCYLGPQSEKLSWHRQALVRFSGTPVESSKQKLDSFSMDFISEAFLGNKIEKKSSTYFIIQGMASASSKIGIFATAAAKEYDLHLLPWASVAACISNTGLEDTVLRQGQAFCFLPLPXGGKLRSDWNRLLLEDVVAPLFRELLMKLRTLSDSTISYYSLWPTGLYEDPWSILVEQIYKVIYTSPVLHSEIEGGTWISPADALLHDEGFSGSNNLNEALVLVGMPIVRVSNAIGDMFSKFYMQSMLKIVSPAIVRHFLKDYAKLATLGKSHKLILLEYCLTDVY

SEQ ID NO: 250478 - protein, 66 aa, Zea mays
  Clone ID: MRT4577_160025C.1.pep
RVVVYQGPVSLFSQGSLWRSENPPECSRGSWFVPSLCFSGCVAEARALVSVFPRWQTKTQGTTQNK

SEQ ID NO: 250479 - protein, 63 aa, Zea mays
  Clone ID: MRT4577_160026C.1.pep
MAYHANQPTVLHKLGVQFHLRSIISERVLSLYICSFGSSYERRFASLNYMTQSLLGPSMFVSF

SEQ ID NO: 250480 - protein, 91 aa, Zea mays
  unsure (1)..(91): unsure at all Xaa locations
  Clone ID: MRT4577_160027C.1.pep
MSSPIDRYTRPCYEGFIHNYERKDSKSYADNSXRDNKTKISSFKKKAINATNKLRHSLRRRSKTNTERRDYINDIMDIKELQDLKHSEMLN

SEQ ID NO: 250481 - protein, 143 aa, Zea mays
  unsure (1)..(143): unsure at all Xaa locations
  Clone ID: MRT4577_160028C.1.pep
DRTGRPGPTHATGCFYTKQQTGNWGGNKSAKNPYNTTXKGNKGRLNRQPTDSEGNKAKATAKKGKPDHKKKGKHARKERQSKPGRPKDGANKHFEEKAGDNENPKGRERKEPANTGPXGKEVRRTHRPKNRQSNKRPKDRNPP

SEQ ID NO: 250482 - protein, 150 aa, Zea mays
  unsure (1)..(150): unsure at all Xaa locations
  Clone ID: MRT4577_160029C.1.pep
MRRHGASEASPSIIHTSSIALLQERFRNLQKVKEMREGRELXGCTLLILLLPPPXTASSPSSSSSLSSALSLGLQQAANANDHPRWFLHPDLIRPSRPXADTRATASAPPVVVXRRPDDVAAATTAELIVXGAQNSGYRTDIDVDTSLHL

SEQ ID NO: 250483 - protein, 108 aa, Zea mays
  unsure (1)..(108): unsure at all Xaa locations
  Clone ID: MRT4577_16002C.1.pep
VFPAFSTGHNIERGGCHXHVDYLCFLETLPSTHNHHCLHTAFSTYTKVFECTTILHWXTQTSPRLTFVTFCTQDSTRNAIPRINGMELDGHNITVNEPNSSCPRGRCT

SEQ ID NO: 250484 - protein, 77 aa, Zea mays
  Clone ID: MRT4577_160030C.1.pep
GQTNTSFGSNNHSQTHRPLKSKLHNRRLRSSMKLIKQLSTTLFIIHGWMGWITPKQYLAPFSSIDRSQSDGLETLPR

SEQ ID NO: 250485 - protein, 97 aa, Zea mays
  Clone ID: MRT4577_160031C.1.pep
SAGPKDDGFAGFFGKSPAPPFKFLAGPPRSLGFWPFIAPPISPGYCKGPSVKGLNPKHVPKNLKVRLLNSRAGGGWPQKKGWVLGLKKKGVFCQKKG

SEQ ID NO: 250486 - protein, 73 aa, Zea mays
  unsure (1)..(73): unsure at all Xaa locations
  Clone ID: MRT4577_160032C.1.pep
WVPHSPPRLTPRSPPFWSRGFHLSLRAHHPPLRPGPRERSAEPRRPRPTTGELLPCLNWCSLPIRCPIXXXSF

SEQ ID NO: 250487 - protein, 88 aa, Zea mays
  Clone ID: MRT4577_160033C.1.pep
KPPNLVPGARQEDRVFISRAHPGVRALGSGGPARYETKKKNSQTAFFGLGGGENNFFFKNPIWGFWKPPRKRNFGLKKKKGRGGTKRD

SEQ ID NO: 250488 - protein, 36 aa, Zea mays
  Clone ID: MRT4577_160034C.1.pep
PTASRCSTGAKTACPVLMGPAKCVLLLELCYYYYGI

SEQ ID NO: 250489 - protein, 79 aa, Zea mays
  Clone ID: MRT4577_160035C.1.pep
VKNPLVVFNPRFHMIFALFCPDPHPLRGGGNPCNKHGGEKKKHSPRLGPGFPKFWVQFTGPCRLGPFFRGEGWKIYQKN

SEQ ID NO: 250490 - protein, 204 aa, Zea mays
  Clone ID: MRT4577_160036C.1.pep
MDPKGKGMVVNDKEKESIFNEPRDDKPTDSGSSHKKKDGKKKRRIKKIVYYDSDESSSSPKDGDDDSHEYNKVSSLDNAKQIWDTLKISHEGNDATMITKMEFVEGELGRYTKMTPEEILGKLVSGRMMVKEARRFKTALKGRKEYPNKNKAKGKRSCFKCGKTGHFIANCPDNDSDQGQEKSGKKEKKKSYRKAKGEAHLGKE

SEQ ID NO: 250491 - protein, 345 aa, Zea mays
  unsure (1)..(345): unsure at all Xaa locations
  Clone ID: MRT4577_160037C.1.pep
MDPKGKGMVVNDKEKESFFNEPRDDKPTNSGSSHKKKDGKKKRRIKKIVYYDSDESSSSPRDDDDEKKKPQIHKNAQATTVLLASLCRDEYNKVSGLDNAKQIWDTLKISHEGNDATMITKMELVEGELGRFAMIRGEEPTQTYNRLKTLVNKIRSYGSTRWMDHDXPTYAKVHQDDARRDSWKVXSGRMMVKEARYVDDALNGPLPVHEPQTIALKATSSREMLPSKVAQVEATGLNEDEMALIIKRFKTALKGRNEYPNKNKEKGKRSCFKCGKIGHFIAQCPDNENDQGEERHGKKEKKKSYRKAKGEAHLGKEWDSDCSSSDSDDEGLAASAFNKSSLFPN

SEQ ID NO: 250492 - protein, 131 aa, Zea mays
  unsure (1)..(131): unsure at all Xaa locations
  Clone ID: MRT4577_160038C.1.pep
RSASAPSAAVPPCRRPLPPXHHTLVAPPRRSLRICSSTFPPPPAPAIEGRDVSLSVTTRRGRVLPVLKGCSLLVPPGQLWMLLGPNGCGKSTLLKVLAGFLNPTAGTVYINRPCSYVFQNPDHQVVKLLFL

SEQ ID NO: 250493 - protein, 426 aa, Zea mays
  Clone ID: MRT4577_160039C.1.pep
MDIKGNGMVVNDKEKESIFNEPRDNKPTDSGLSHKKKDGKKKRRIKKIVYYDSDESSSSPRDNDEKRKPEIVENGMQFDSTDNPVFINEQIHKNAQATTVLLASLCRDEYNKVSGLDNAKQIWDTLKISHEGNDATMITKMELVEGELGRFAMIRGEKPTQTYNRLKTLVNKIRSYGSTRWTDHNVVRLMLRSFTVIDPHLVNLIHENPRYTKMTPEEILGKFVSGRMMVKEARYVDDALNGPMPIYEPQPVALKATSSKEALPSKVAQVEALGLNESEMVLIIKCFKTALKGRKEYPNKNKTRGKRSCFKCGKTGHFIANCPDNDSDQGQENSGKREKKAYKKAKGEAHLGKEWDSDCSSSDSDDEGLAASAFNKSSLFPNERHTCLMAKEKKDRLLEKQEDILYEEHDKFVSVQKSLALELKEY

SEQ ID NO: 250494 - protein, 80 aa, Zea mays
  unsure (1)..(80): unsure at all Xaa locations
  Clone ID: MRT4577_16003C.1.pep
PYTFPKNLHXDFIHWGWPILFPLLYFYPELLSHNILKFCEPIYFNAISHIFNEGGLYYLINPILLHALIILPIFTFHHVL

SEQ ID NO: 250495 - protein, 54 aa, Zea mays
  Clone ID: MRT4577_160040C.1.pep
LGSDHVDDGAEKIMMMTTTTTDGCVICSLFLAPTKLEMKKGNQSERRIEIRKYR

SEQ ID NO: 250496 - protein, 60 aa, Zea mays
  Clone ID: MRT4577_160041C.1.pep
KFWFFNFWANKVSFLFVNKITFSWHIFQPYKIIRICTPMENRFNPLPFLTSWVYPLDIIL

SEQ ID NO: 250497 - protein, 106 aa, Zea mays
  unsure (1)..(106): unsure at all Xaa locations
  Clone ID: MRT4577_160042C.1.pep
SXGNNAEYAGIPCHFREIKGEDKRSQQDWSDRPRASGCMPRHSFSARNCTFNPGENIINARSPVKKKKKKKKKKKKKEGGKKKKKKEKKXXGFFKKSSVGCYHCLG

SEQ ID NO: 250498 - protein, 504 aa, Zea mays
  Clone ID: MRT4577_160043C.1.pep
MAATVSSCLSLVPTVHHRAGGFPSVALTNTLQRRRRSRRYLVVASATRAEQEAAPVTIEDVDLSSHQAAADDGELAARWREVHGSNNWEGLLDPIDGVLLQELIRYGEFAQATYDSFDYDRFSPYCGSCKYPAKTFFHDVGLGGIGYEVTRYLYATCNDLKFPNFGIKTAANAKMWSESGTFIGYVAVSTDEETARLGRRDIAVAWRGTITRLEWVADLTANQIPLRETGVPCPDPDVKVERGFAALYTDKGAGCRFCRYSAREQVLAEVRKLVDLYHGRGEQVSVTVTGHSLGSALAMLCAFDIAETRANVSPGDRVAPVCVFSFAGPRVGNVAFRRRFERELGVRALRVVNVHDSVPKVPGVFFNESAFPELVLRAADRLGLGGVYTHLGVLLQLDHKVSPFLKETLDLSCYHNLEAHLHLLDGFRGSGAGFEPRGRDPALVNKSTDFLREDHMVPPVWYQAENKGMVRTEDGRWVLPPRQRVLDDHPEDTDHHLQRLGLTA

SEQ ID NO: 250499 - protein, 187 aa, Zea mays
  unsure (1)..(187): unsure at all Xaa locations
  Clone ID: MRT4577_160044C.1.pep
MSPLLAAAMNHAAAHPVLMSHRLGASMRXFSRXHLPSSSPLSTKGWCNLSFTTRSALARIQDGDLMLIPSDVPQRDCFPSXDFTFGAAASAYDTDGAWNADGEGESNWNHFCHDHPDRILDFSLFDYXGANSYHMYNTDVRLLKEMNLNADRISISWSGILPKGDFYXGITPDGIMYYRDLICLMLE

SEQ ID NO: 250500 - protein, 505 aa, Zea mays
  Clone ID: MRT4577_160045C.1.pep
MAATVSSCLSLVPTVHHRAGGFPSSVALTNTLQRRRRSRRYLVVASATRAEQEAAPVTIEDVDLSSHQAAADDGELAARWREVHGSNNWEGLLDPIDGVLLQELIRYGEFAQATYDSFDYDRFSPYCGSCKYPAKTFFHDVGLGGIGYEVTRYLYATCNDLKFPNFGIKTAANAKMWSESGTFIGYVAVSTDEETARLGRRDIAVAWRGTITRLEWVADLTANQIPLRETGVPCPDPDVKVERGFAALYTDKGTGCRFCRYSAREQVLAEVRKLVDLYHGRGEQVSVTVTGHSLGSALAMLCAFDIAETRANVSPGDRVAPVCVFSFAGPRVGNVAFRRRFERELGVRALRVVNVHDSVPKVPGVFFNESAFPELVLRAADRLGLGGVYTHLGVLLQLDHKVSPFLKETLDLSCYHNLEAHLHLLDGFRGSGAGFEPRGRDPALVNKSTDFLREDHMVPPVWYQAENKGMVRTEDGRWVLPPRQRVLDDHPEDTDHHLQRLGLTA

SEQ ID NO: 250501 - protein, 47 aa, Zea mays
  Clone ID: MRT4577_160046C.1.pep
MFSHGADSAHDAGAVGVSSGGATVPTRFVWPYGGKRVFVSGSFTRLS

SEQ ID NO: 250502 - protein, 53 aa, Zea mays
  Clone ID: MRT4577_160047C.1.pep
PDLPYCGKHVRKARTIEKHVHWFDFFSLKAQCSAKTIILYIKRCSVTNAICEP

SEQ ID NO: 250503 - protein, 54 aa, Zea mays
  Clone ID: MRT4577_160048C.1.pep
LIMSNNMVLHGLNLSHNIFLERYYRQTLNICVYKALLVTVHGTTNDPTRGRTHN

SEQ ID NO: 250504 - protein, 123 aa, Zea mays
  unsure (1)..(123): unsure at all Xaa locations
  Clone ID: MRT4577_160049C.1.pep
MGIALADSDHNGIGSFAGNRVDHYVRCAMTNAFAKALGNGLRQGNNMDIQRNDNTSEIMAGIAKDTEHXGSVRAGDVQPGAEAVAPVPGRVRGEHAPHLLQRLAEAVHVQGDVPHERARARAE

SEQ ID NO: 250505 - protein, 171 aa, Zea mays
  unsure (1)..(171): unsure at all Xaa locations
  Clone ID: MRT4577_16004C.1.pep
STWSTPPWISPPERSSASSTTSTRDVFGEGSMIMRKTAGKPKPAGSGSPCYGAYRVLYLGPLSGQPATDLTXGEFPGDYGWDTKGLFADPETFAKNRXLEVIHCRWAMLGSLGCVFPELLARNGLKFGEVLWLKDGSYILIEGGLDYLDNPSLIHAQSILAIXACQVVLMS

SEQ ID NO: 250506 - protein, 105 aa, Zea mays
  Clone ID: MRT4577_160050C.1.pep
RVPPCVAVGVGVTCPYAGIFERVQGAFHCLFSLCRCWPRRSVWACLGSVPVAVCACPPTGFSSVNQVFASLLVGSLRGVFSVLLALFERCVVACKKPSPWVVCCG

SEQ ID NO: 250507 - protein, 32 aa, Zea mays
  Clone ID: MRT4577_160051C.1.pep
KPSWDYFPDDVYQGMIDHSVAGDSRRHEGAIQ

SEQ ID NO: 250508 - protein, 427 aa, Zea mays
  unsure (1)..(427): unsure at all Xaa locations
  Clone ID: MRT4577_160052C.1.pep
ILYCPLGVCGLFIIVVVLVLLCRRKKTLEKQHSKTWMPFSINGLTSLSTGSRTSYGTTLTSGLNGSYGYRFAFSVLQEATNNFDENWVIGVGGFGKVYKGVMRDESKVAVKRGNPKSQQGLNEFRTEIELLSRLRHRHLVSLIGYCDERNEMILVYEYMEKGTLKSHLYGSDNPSLNWKQRLEVCIGAARGLHYLHTGSAKAIIHRDVKSANILLDENLLAKVADFGLSKTGPELDQTHVSTAVKGSFGYLDPEYFRRQQLTEKSDVYSFGVVLLEVLCARPVIDPTLPREMVNLAEWGMKWQKRGELHQIIDQRISGTIRPDSLRKFGETVEKCLADYGVERPSMGDVLWNLEYVLQLQDAXFDGXSDVNSMNRIVELPSQVQNVGALESISVTMAEAGASNEPDHDLSDVSMSRVFSQLIKAEGR

SEQ ID NO: 250509 - protein, 68 aa, Zea mays
  unsure (1)..(68): unsure at all Xaa locations
  Clone ID: MRT4577_160053C.1.pep
MQSTAAISLARACTARTLPTXPSPPCGTCSCITLXQAILAPRRLWLSTRTSLLPDSPMEEEYRRCTAG

SEQ ID NO: 250510 - protein, 58 aa, Zea mays
  Clone ID: MRT4577_160054C.1.pep
STLARSECFSLSSCTDSYCVRSSLVLLISDRTLVIASHSFGQILHDKDLVAWMDGRTT

SEQ ID NO: 250511 - protein, 107 aa, Zea mays
  Clone ID: MRT4577_160055C.1.pep
LPCLQMGQMLKEVVQPSCRLRLGPILSLIRDERPVRSKSNLISTFGGAYWRTAEERSVEHVRNAEISYWVSIRASREIASIGDDMSSISSSIGWSAKWMVNKCKGKM

SEQ ID NO: 250512 - protein, 143 aa, Zea mays
  unsure (1)..(143): unsure at all Xaa locations
  Clone ID: MRT4577_160056C.1.pep
PARISSPYFVTDSANVTTECQNCMLPLVDXKLNNARDVISILEDSIRIGYPSLIAEHDIEHEALATLVXVNMLTGALKISAIKATGHAXSKSQYLDNIATLTGATDRTKEAELSLHKADYPVLRTAAKEALTXDSTTIAGHRT

SEQ ID NO: 250513 - protein, 96 aa, Zea mays
  Clone ID: MRT4577_160057C.1.pep
MGSNLNPQLCLMPFILGLLSGGVTTTPWSLARPQGSCSLEGVEIKGGSFRLLQDGHALDYVCPSSFYPYPVHTRTCRSTESWSTLNTQDQNTVRKA

SEQ ID NO: 250514 - protein, 97 aa, Zea mays
  Clone ID: MRT4577_160058C.1.pep
STVRRVSPSDDRAARPRTVVVSTALQRSGSRARSSTGRSPLYQDPPGVGLPGSRQPSAPVRLAPHAGTSSSEQATVGQVTSPSVGIKKGSLPLHSSQ

SEQ ID NO: 250515 - protein, 74 aa, Zea mays
  Clone ID: MRT4577_160059C.1.pep
ALFKLGVVTLACTFWFRATRRQVQAHPTHRLPLLDSSPQQLLRCRTTQEHLRLLHQGPLHSLKSLQPTCWPNGS

SEQ ID NO: 250516 - protein, 71 aa, Zea mays
  Clone ID: MRT4577_16005C.1.pep
TVRAESEPPVRGAPDTEQCLSGAAPDCQVSLEDKASNGQKLPNPNGWVMWLAHRTVRCAHRQQPAPTVLWW

SEQ ID NO: 250517 - protein, 68 aa, Zea mays
  Clone ID: MRT4577_160060C.1.pep
VLGVSLEGVRDADDVLVHGRPVGACVKECGAVRVAEVHRGEMVLERAGKFRCFVFLGKRINLGARCGC

SEQ ID NO: 250518 - protein, 113 aa, Zea mays
  Clone ID: MRT4577_160061C.1.pep
HAPSLPFLPAASPPSPLYFQAKARTLASRAPRSGDPDHHRDAGPDEPPRRPPAAGGAAPAGEGADPAPPSAGFAPARLPGRLLHQRCRCCSTGIRPPPHRHRRRSVRRVRLRR

SEQ ID NO: 250519 - protein, 64 aa, Zea mays
  Clone ID: MRT4577_160062C.1.pep
CGRGQLDLPGQVLQVLSCFSVRDRFGTLAYEIGYGVSFDCYKLFLANQKTCFLCGMMVISTLEC

SEQ ID NO: 250520 - protein, 206 aa, Zea mays
  unsure (1)..(206): unsure at all Xaa locations
  Clone ID: MRT4577_160063C.1.pep
MATSFQGTTTKCNACDKTVYLVDKLTADNRVYHKACFRCHHCKGTLKLANYNSFEGVLYCRPHFDQLFKRTGSLDKSFEGTPKVVKPERNVGNENAIKVSSAFAGTREKCFGCTKTVYPIERVTVNNTMYHKSCFKCCHGGCTISPSNYIAHEGKLFCKHHHTQLIKEKGXSASSRTITTRRHRVPGQWMMKTRSISQSLRISRDE

SEQ ID NO: 250521 - protein, 83 aa, Zea mays
  Clone ID: MRT4577_160064C.1.pep
GPPLFFIKNIKKISEKKKRGFLELPGFLIWGGGTFGQSGGKGKGPGLLVFLKGFGDSKNRAGGPLNNKGWKEIFKRLGVPRAI

SEQ ID NO: 250522 - protein, 53 aa, Zea mays
  Clone ID: MRT4577_160065C.1.pep
PGLVYMTLEEINPAEYFGAQKGRKKIFVGGLRVFQVENLNPVFFLGNFPFDPR

SEQ ID NO: 250523 - protein, 56 aa, Zea mays
  Clone ID: MRT4577_160066C.1.pep
VNLDHLNGAHFFFLLLFFFFFFISVFYFFFFFFFPFFFFFFIFFVRVGGRVDGRVG

SEQ ID NO: 250524 - protein, 59 aa, Zea mays
  Clone ID: MRT4577_160067C.1.pep
VYGSAENPLGFLEIEPAVLSPIKQYPRRRKGRRGLPAARLLRRGGRGRRGGLEDHGDVR

SEQ ID NO: 250525 - protein, 105 aa, Zea mays
  Clone ID: MRT4577_160068C.1.pep
PCGLTAISNPSRQLGSSAKGISGRRISKAATLPAMQIVLSGYRVTVDTFDCLPDDLLLAVLAGIAALARCPADLAAAALPCKMFRDLAEHSAVLSRTSAAAVSVP

SEQ ID NO: 250526 - protein, 69 aa, Zea mays
  Clone ID: MRT4577_160069C.1.pep
MVLYALFYVFLVLFIFFDSFKQESNKLELSGKEERKLGNGEDRLTSDSYLLFFLSYYSLLLLSSDRRSL

SEQ ID NO: 250527 - protein, 88 aa, Zea mays
  Clone ID: MRT4577_16006C.1.pep
MRVSDGIYEVDQHLLNVIIIGTFDMVSTLVPVIPGTETGKEALDKLDNEVADPKDDNVVKKKEVDYDPVHHVKKKGQTQQQVNNEDSP

SEQ ID NO: 250528 - protein, 93 aa, Zea mays
  Clone ID: MRT4577_160070C.1.pep
YLRTKLNRTLIICNKIPLQGLQIRHAPISQRGYTTCTTWLNARQHRDGHHEGCSSRSMLRQMLRPLEAYLWPGNPYPSESFHTTYSLGAQLAR

SEQ ID NO: 250529 - protein, 70 aa, Zea mays
  Clone ID: MRT4577_160071C.1.pep
IALTGSLIYWERSPREVGAKRKRGHHNGEQNDDLSDSSVECIPGGEISPDEIVAAIGPKHFWKARRAIQK

SEQ ID NO: 250530 - protein, 99 aa, Zea mays
  unsure (1)..(99): unsure at all Xaa locations
  Clone ID: MRT4577_160072C.1.pep
TRPPPSGPASASAPPSRPWPPPALPPASSGTPASRTMVRLPPAQXAPSSTLDDDALLPLPPAXPPLXTPPLPPGPTGTAGRCPPRLGSRQLLPPPSPWV

SEQ ID NO: 250531 - protein, 134 aa, Zea mays
  unsure (1)..(134): unsure at all Xaa locations
  Clone ID: MRT4577_160073C.1.pep
MVNTTISTPYAYPPSIYNSIKHTVHQYCPEQKKAPMTTSLFPKRSPPTKSPFQKTNIPPPTPECPNIPPSCPAVSPPPPETPPPPSYFFXAQPLATPPPPPPVCGAWPPVAVPARVTTLGPRKPMPTVALAATI

SEQ ID NO: 250532 - protein, 151 aa, Zea mays
  unsure (1)..(151): unsure at all Xaa locations
  Clone ID: MRT4577_160074C.1.pep
MPGARNRPGEGAHGGRHPAEQPRQGGLGELLGLVRQPRGGAALAHSWSRSSRATTRTGATTRAPRAWTXTSVTAARRRRSSSEPSTTGTTTRSSTSSTTRRRSRSEAHPTPATTRRTMTSPTCCCSWTTTTTTSTTRQTPRCSPPTAGKRS

SEQ ID NO: 250533 - protein, 83 aa, Zea mays
  Clone ID: MRT4577_160075C.1.pep
NTDATVSDKIKITSGARDQPNPANSEQHEQQSSKEPSDITEQYEQMKTETDVQKGVDASKSDASVPDDIQPACDEQEIKVGCK

SEQ ID NO: 250534 - protein, 75 aa, Zea mays
  Clone ID: MRT4577_160076C.1.pep
MSSGTEASDFEASTPFWTSVSVFICSYCSVMSKFPYPRYKIMASFFKCVKHWDHISPDGSLELCCSCCSLFAGFG

SEQ ID NO: 250535 - protein, 71 aa, Zea mays
  Clone ID: MRT4577_160077C.1.pep
QIVHTHSSHTASVHDAIRHACTVPMPEWRPSSVAYQGVCDRIQTPKSIMFSRYYLSHSLVSHHVVNEHSCP

SEQ ID NO: 250536 - protein, 122 aa, Zea mays
  Clone ID: MRT4577_160078C.1.pep
SMSTRCLAQFCCPPPLFGPTGVAWSFISVWRRVLPSAGQSRFLVPPWPLFPDGRPPPHSRASCPVDAPWTSACKVLWANRRLTVGSRCKFGRPSDGCPASEFKKLSRVGGSPPSGPVLQASS

SEQ ID NO: 250537 - protein, 41 aa, Zea mays
  Clone ID: MRT4577_160079C.1.pep
YVFTGYISGTLTFTWNPRYTFTSFGFDRRSASINTDSMKVR

SEQ ID NO: 250538 - protein, 144 aa, Zea mays
  Clone ID: MRT4577_16007C.1.pep
SRSRRVGAAASPPDVSSDDGPPPAEGAYLPRGTPEHHGQVDCTSRWIHPLRGILCVHTMRYVSLWWPMEKQSRRARLNKPSSSGTRLGNISDLCLSICVLRTMSLICAWEKQKDRVAQLIVHGDVLIIYHNRYTLNECKTPKKK

SEQ ID NO: 250539 - protein, 200 aa, Zea mays
  unsure (1)..(200): unsure at all Xaa locations
  Clone ID: MRT4577_160080C.1.pep
ARLAIAALAVPLLPPRRTEQWRGRGAPPPPPRISFLVPRASSYCPSPPPPSSSPSSSRSSPXPPRPPPQPPIHHXPTPHTHSPCPTPHPRSPCPTPPPRPLHRCRLLGTVGVPWAARWRWQQRPVMRSVGTGVEIQWRMEPAARLPETCPLGAWARQWRWKERLLEEEMVEHRRLVRFWRRKRLQELGITLLEPRIWLCM

SEQ ID NO: 250540 - protein, 53 aa, Zea mays
  Clone ID: MRT4577_160081C.1.pep
YFYIAPNAITKLKKNIEHSKVISILSSIASKRNKIEGSVHNMLKILGRVGKRV

SEQ ID NO: 250541 - protein, 759 aa, Zea mays
  Clone ID: MRT4577_160082C.1.pep
FSSTLTRLYFVCFHSTEEGMAGSSVRGGSNCPPLFVTEKPTRMARYAYRLFASTVLAGVLLVWLYRATHVPPMSSGARWWAWLGLSAAELWFGFYWVLTLSVRWSPVFRRAFPDQLLRRYKEEQLPGVDIFVCTADPTVEPPMLVISTVLSVMAYDYPKEKLNIYLSDDAGSIITLYALYEASEFAKHWLPFCNKYQVEPRSPAAYFGTEASPPDACDRKEWFSLKEMHKDLAARVNSVVNSGKIPEVSKCKLMGFSRWSENASFRDHPSIVQILIDGNKRKATDVDGKVLPTLVYMAREKRPQEHHHFKAGSLNALIRVSSVISNSPVIMNVDCDMYSNNSGSIRDALCFFQDEQLGQDIAFVQYPQNFENVVQNDIYGNPINTVNELDHPCLDGWGGMCYYGTGCFHRREALCGRIYSPDYKEDWTRVARKTEDVIDLEGMAESLVTCTYEHNTLWGVEKGVIYGCPLEDVITGLQIQCRGWRSVYHNPPRKGFLGMAPTSLGQILVQHKRWTEGFLQISLSKYSPFLLGHRKISLGLQMGYSVCGFWAANSFPTLYYVTIPSLCFLNGISLFPEITSPWFVPFAYVAVAAYSCSLVESLQCGDTAVEWWNAQRMWLFRRITSYLLAAIDTIRRMLGVTESGFTLTAKVTDPRALERYKKGMMEFGSFSVMFAIITTVALLNLACMMLGVAKVLLRKGAVSLGAMFVQAVLCALIVAINFPVYEAMFVRKDSGRLPASVSVVSLCIVLPFCILPTKL

SEQ ID NO: 250542 - protein, 74 aa, Zea mays
  unsure (1)..(74): unsure at all Xaa locations
  Clone ID: MRT4577_160083C.1.pep
EKQRTEAPGPTRRGASEPWTDPPRSPREAQEKATSAATATRPRXSCMKARREQKISKHKQNAHYRQRXAXAXEP

SEQ ID NO: 250543 - protein, 96 aa, Zea mays
  unsure (1)..(96): unsure at all Xaa locations
  Clone ID: MRT4577_160084C.1.pep
WHDAVRPSCAAVPRRHTAPVPTPAXILNPSSSSTFFTLXHKTRXAIXLXKXSLSSSSDQIXXICXAVVLTLETHXDXIALSLGXLKXLFXPDTIRD

SEQ ID NO: 250544 - protein, 95 aa, Zea mays
  Clone ID: MRT4577_160085C.1.pep
RVQRVRDALDAYSGRPTVFFFFFLRGLRSCCQISTTSSWSYKPFTPSSGRPRQLPPALLALYAGSDVGVDKDADVDFNTALLKSFIVQILLGLFD

SEQ ID NO: 250545 - protein, 200 aa, Zea mays
  Clone ID: MRT4577_160086C.1.pep
MEVAAVACRAGLLARARPSSRARTWAVAVGPAPSAARRRLLVASLGVGEPLPAQSLGEEAVALEVGEEEDDLNSIVSVENLPPAAAHVPEARRTTVRVRFVLRKQCAFGHQFLVAGDDAALGLWDPAKAISLVWSEGHVWTANTDLPANRSIEFKFLLRDASGHAHWQHGANRTLRITTETPNTVVVHEDWDHGNKQKVS

SEQ ID NO: 250546 - protein, 52 aa, Zea mays
  Clone ID: MRT4577_160087C.1.pep
LALPKAHTTYFSCSKLTVTKAFVTLVAFDALFSPPCITLQLAQMTRHPRKVI

SEQ ID NO: 250547 - protein, 212 aa, Zea mays
  Clone ID: MRT4577_160088C.1.pep
MDAFYSTSSAAASGWGYDSLKNFREISPAVQSHLKLVYLTLCFALASSAVGAYLHIALNIGGMLTMLACVGTIAWMFSVPVYEERKRFGLLMGAALLEGASVGPLIELAIDFDPSILVTGFVGTAIAFGCFSGAAIIAKRREYLYLGGLLSSGLSILLWLQFATSIFGHSSGSFMFEVYFGLLIFLGYMVYDTQEIIERAHHGDMDYIKHAL

SEQ ID NO: 250548 - protein, 44 aa, Zea mays
  Clone ID: MRT4577_160089C.1.pep
VLEADFKKVVGISWYLWVFVVIFLLLNVNGWHTYFWIAFLPLIH

SEQ ID NO: 250549 - protein, 107 aa, Zea mays
  Clone ID: MRT4577_16008C.1.pep
GPSWKLFILVKQKCDAPAVFPPPYVGPPRKKKRGRFSFEPPGFFPSGVFMGPGPTCSSPFRNAPPLALCLGLGDPLSFTLNKGFPPGLKGRVFQHLVVCFQKKRFFF

SEQ ID NO: 250550 - protein, 97 aa, Zea mays
  unsure (1)..(97): unsure at all Xaa locations
  Clone ID: MRT4577_160090C.1.pep
LSLPGSWLXGXPSVCVPWAVLLXSFGPSPRSXCXXXVFSLSPVSPLRLRCASSLSFCLCRLLXWRXGVPGACSPSLSSVXGXARAGPLIQPTKMLFF

SEQ ID NO: 250551 - protein, 60 aa, Zea mays
  Clone ID: MRT4577_160091C.1.pep
KIIPRACVVDCICWFLAPHPPSVNKSSEFGRTVQLYTVSQVVNPCLRTFANGIYPRPSYG

SEQ ID NO: 250552 - protein, 80 aa, Zea mays
  Clone ID: MRT4577_160092C.1.pep
THAFAAPCVPLRWFFYSSLTIEAMLPLPSEFHFAVGAWMKRNSPPAAATLRCWRRNRANRLSKRGGHRETRRRSKTLWKR

SEQ ID NO: 250553 - protein, 51 aa, Zea mays
  Clone ID: MRT4577_160093C.1.pep
CCQDLFQSSSVFKSSLRSHAPYDGWMRFWSVIHALSVCVILWLADLPCYSV

SEQ ID NO: 250554 - protein, 107 aa, Zea mays
  Clone ID: MRT4577_160094C.1.pep
PYNTKPIPTSLITIQQHLFKHPQNLNTKPKIQYNSNHYHHPITILPQSHCPSISNSQLNSNFLFNHDHLYIPQLPQLLIEKHFPKIKPKIPLLTQSLNLFLLSINFT

SEQ ID NO: 250555 - protein, 111 aa, Zea mays
  unsure (1)..(111): unsure at all Xaa locations
  Clone ID: MRT4577_160095C.1.pep
MGDSEEXHFEXNGGAVAGKTYXPKYAGTDTRNSFNCHRNMPLARVRSDGSAKTGNNGQCKCDXAAIDINNGRKPEEIXDVNHTXDVPYVNRTADQCEXDISEDGXFVRVLT

SEQ ID NO: 250556 - protein, 112 aa, Zea mays
  Clone ID: MRT4577_160096C.1.pep
RTRGRTRGLQGRLDRLSQRVQHRAHEHAFSISQGSDDAVQEPGDPLGHELLLRVGDDVVCQRVEPGVHPRPTHQALACKATRGRYNRRRISYRLLYKTGCFALRACVFMGSC

SEQ ID NO: 250557 - protein, 93 aa, Zea mays
  unsure (1)..(93): unsure at all Xaa locations
  Clone ID: MRT4577_160097C.1.pep
GXXXHXALQAVPRXXRRVLGXQCAXRRRRLKFGCLAIGWRFDFERADADRGDAKLCADXLGLAAXCCGGCRGLXWRXXXXSAXAGVLXQXXXS

SEQ ID NO: 250558 - protein, 155 aa, Zea mays
  Clone ID: MRT4577_160098C.1.pep
GHDAPIARCFRCRVSACAKLTLIAVATAAAAQPIPPAPPCSMAAKWAQKTVVIPAQRRGCHLITPKVLREIEGDLSGFKCGLAHLFLQHTSASLTINENYDSDVQADTETFLNKIVPEGRSAPWKHTMEGPDDMPAHIKSSMFGCALTIPITDGH

SEQ ID NO: 250559 - protein, 105 aa, Zea mays
  Clone ID: MRT4577_160099C.1.pep
KKKKKKKKKKKKKKKKKKKKKKKKFLKIKKKKKGLCLWPTFGRAPPRGEFWGFPSKGGGVELAFKGAHSPFYEGGSNSLAGGLKQNKWGKPLLSPTLEIWGKSPF

SEQ ID NO: 250560 - protein, 143 aa, Zea mays
  Clone ID: MRT4577_16009C.1.pep
AVVGEAWSRKRSTDLRQYHKNYQRETWSRVLNRTRDDGVITVKSHVQKQVLKDRFKQFNAAIDEIQRTQGSWVVSDEQLQSELRVSIAAVIVPAYRSFLGRFSQHFTAGRQAEKYVKLSGEDLEAIIEELFDGNAVSMPRRRT

SEQ ID NO: 250561 - protein, 138 aa, Zea mays
  Clone ID: MRT4577_1600C.1.pep
MAFLDRIFAGDGEGWSACASAASSREDGGVRRGLEQLMRHLAACGGRTRKPAACPRCRRALQLLRLHASVCDRAGGEPCNVPLCSNLKAKMQEEGVGKTWKLLVKKVTRARVMSALASSSSREVPEVVKKSWAKYSSS

SEQ ID NO: 250562 - protein, 66 aa, Zea mays
  Clone ID: MRT4577_160100C.1.pep
PRRGPPLNKKERNTPPRPPRSLGPLRPGPCPLERAGHPKKGGLVFNTRPWRMFKGKGFDKHQSENS

SEQ ID NO: 250563 - protein, 50 aa, Zea mays
  Clone ID: MRT4577_160101C.1.pep
KPPKKNRKSTKKKKKKKKKKKKKKNKKKIKKKKKKKKIKKKKKKKKKLVL

SEQ ID NO: 250564 - protein, 92 aa, Zea mays
  Clone ID: MRT4577_160102C.1.pep
MSPTKNVAMPIKRATRTKTYHRRAFCAIYDINGVVFPKADNAADDVETKLYPADDPNPRGPSSLKPNPTKIKLSITRDTGLILLTGRFMDDR

SEQ ID NO: 250565 - protein, 72 aa, Zea mays
  unsure (1)..(72): unsure at all Xaa locations
  Clone ID: MRT4577_160103C.1.pep
LFLGRRLTSRRPPXXGVFFKKDRGFPPTTXXXQAKTPERVIANSRCEGTTEQGLTWHRMMFKSTHKKIQARK

SEQ ID NO: 250566 - protein, 50 aa, Zea mays
  Clone ID: MRT4577_160104C.1.pep
VCSFIHIIDMAREENVYMAKLAEHALRFEEVVEYMDEAASTCKFARRLQI

SEQ ID NO: 250567 - protein, 49 aa, Zea mays
  Clone ID: MRT4577_160105C.1.pep
VPFEVYRPSYDFVFLYFFFIFFFFFFFFFFFFFFFFFFLDSETFPHAFH

SEQ ID NO: 250568 - protein, 80 aa, Zea mays
  Clone ID: MRT4577_160106C.1.pep
MCYQVRCGTCGKTTWAGCGRHVASVHAQISEGQHCACRDWPGVDPATAPAGVKKAASAADDAGKDSGTAASTPAQGGAAQ

SEQ ID NO: 250569 - protein, 458 aa, Zea mays
  unsure (1)..(458): unsure at all Xaa locations
  Clone ID: MRT4577_160107C.1.pep
MPLSKTIIFLEAQRSGKXLPRSNRVKWRGDSGLDDGKLANVDLTGGYYDAGDNVKYGLPLACTVTTLAWTALAFKPELESTKELKHVHQAIKWGTDYLLKCAARKNKLWVQVGDPNLDHQCWVRPENMKAPRTLYEIDSKTPGTEIAAETSAAFAASSMVFRDDKKYSRKLLNKAKLLFTFAKSHLGSYDGECPFYCSYSGYNDELLWAATWLYLATRRQVYADFIAHEAISSSVAEFSWDLKFPGAQVLLAEFNMTSAGGAQNFKSQADNFVCAVLPDTAFHQVFITPGGVIHLRDGANSQYVTSTAFLLVVYADLLLRTGQTVLCGNQPLPPARLHEFARQQMDYLLGANPRHSSYVVGFGANPPTQPHHRGASTPVLPPGTDVNCGLSFGDWMAPDKPNPNELTGAIVGGPDKNDGFVDKRGNSSYTEPCTYINSLAIGPLAALAVRGVQLVATQ

SEQ ID NO: 250570 - protein, 45 aa, Zea mays
  Clone ID: MRT4577_160108C.1.pep
QASFIHCSCLNQHVYALGYGSYQSRSGFNLTNISLQLTVETNICM

SEQ ID NO: 250571 - protein, 80 aa, Zea mays
  unsure (1)..(80): unsure at all Xaa locations
  Clone ID: MRT4577_160109C.1.pep
GRFVMGGPQGDTRLSGPKXIIXTSSGWGAHSXGAFXGEDPSKVDRRGAXYLGRQAGRSIAGSGLYRRCLVQVLYGIGLPE

SEQ ID NO: 250572 - protein, 75 aa, Zea mays
  Clone ID: MRT4577_16010C.1.pep
AAEHVAGQLLVFNGLDSKTRPKHHALLECSWVLRCLDSFIMGILINMRGRKSVLTRYCCVLLLGSHVCDSALVAT

SEQ ID NO: 250573 - protein, 68 aa, Zea mays
  Clone ID: MRT4577_160110C.1.pep
RNFIYGRRKCSTVAKKKKKKKKKKKKKKKKKKKKKKKKKKKKKKKKKKKKKKKKRFFLPGGAFKRGNF

SEQ ID NO: 250574 - protein, 68 aa, Zea mays
  Clone ID: MRT4577_160111C.1.pep
RGMRAPRIRWTSSLQARFVHAVELLGGHERESLIPPLCIHSILSSTTPPKKNHAVHRDLLGSFHAGCD

SEQ ID NO: 250575 - protein, 46 aa, Zea mays
  unsure (1)..(46): unsure at all Xaa locations
  Clone ID: MRT4577_160112C.1.pep
LPSSVSWEFRYDPGRTWAAAIVVCPVLSPPSSIIPVAYAWVFXXFP

SEQ ID NO: 250576 - protein, 327 aa, Zea mays
  Clone ID: MRT4577_160113C.1.pep
MGADSEDAVKQLSLLMEQVEAPLKRSFQNMHQGYPKETLVRFLKAREWNVAKAHKMIVECLNWRIQNEIDSVLERPIVPVDLYRSIRDSQLIGLSGYTKEGLPIFGIGVGHSTYDKASVHYYVQSHIQINEYRDRIILPRLTQQFGRPVTSCIKVLDMTGLKLSALSQIKMLTSISTVDDLNYPEKTETYYVVNVPYIFSACWKVVKPLLQERTKKKVKVLTGCGRDELLKIMDYSSLPHFCRREASGSSKHSSTDVDNCFSLDHPFHKELYGHIREQASRRELIKMGSLHVSIPEPDPDDAKIVEVIQAEFQKIGEQDESTNSHKD

SEQ ID NO: 250577 - protein, 102 aa, Zea mays
  Clone ID: MRT4577_160114C.1.pep
RDHFSLEYEGTYPSQLGFHHRLRDVLKAICFTCVLNQFHSLLWREWKSSETNKNMHQGYPKETLVRFLKAREWNVPKAHKMICDSLNWRIENEIDSVLERPI

SEQ ID NO: 250578 - protein, 45 aa, Zea mays
  Clone ID: MRT4577_160115C.1.pep
YIFIKNLLYFFFTDFNLFVYPFSKGGDINRKKPTEGDKGGDKKIF

SEQ ID NO: 250579 - protein, 327 aa, Zea mays
  Clone ID: MRT4577_160116C.1.pep
MGADSEDAVKQLSLLMEQVEAPLKRSFQNMHQGYPKETLVRFLKAREWNVPKAHKMIVDSLDWRIENEIDSVLERPIVPVDLYRSIRDSQLIGLSGYTKEGLPIFGIGVGHSTYDKASVHYYVQSHIQINEYRDRIILPRLTQQFGRPVTSCIKVLDMTGLKLSALSQIKMLTSISTVDDLNYPEKTETYYVVNVPYIFSACWKVVKPLLQERTKKKVKVLTGCGRDELLKIMDYSSLPHFCRREGSGSSKHSSADVDDCYSLDHPFHKELYDHIKEQASRRELIKMGSLHVSIPEPDPEDAKIVEVIQAEFQKIGEQDESTTGHKD

SEQ ID NO: 250580 - protein, 61 aa, Zea mays
  Clone ID: MRT4577_160117C.1.pep
RPAVPISKVVYYDPVKSPQGLVRGRKGLLHQPQLQFAGQPRDTLALHRDRGAPRRHIEGRA

SEQ ID NO: 250581 - protein, 99 aa, Zea mays
  Clone ID: MRT4577_160118C.1.pep
SITIVDATLVSQARGIFSLRFFSLEAEPSVVAAMNVIWFWKILTGMEKTYSRRKLSDNGITHYKGLRKDAILLRTHYHHCFTYSHLPNGTHTHSYSTQM

SEQ ID NO: 250582 - protein, 87 aa, Zea mays
  Clone ID: MRT4577_160119C.1.pep
KNQRCPKKTSLQTHGPWHGPHKKWVNRNITKPREKSHCSFIGPKKMGYPKPKQNFLKTMFLPPSTPLKGLFTRTFGKPISTKFWTFF

SEQ ID NO: 250583 - protein, 75 aa, Zea mays
  Clone ID: MRT4577_16011C.1.pep
TLTSSTHRKLKFRNKVTEQTGLLESRTRPKQQEWPDDVIILGQFGSESKLVPLYISTFTGSSEINLLAHVAFAEI

SEQ ID NO: 250584 - protein, 87 aa, Zea mays
  unsure (1)..(87): unsure at all Xaa locations
  Clone ID: MRT4577_160120C.1.pep
RERKTQAPRSPPPTPIARPIAELPCSLPGPATPXRHGAAARRAGRLLCSSRRRGRHLKPGHRPXRAGAXAXAGXRWGRGGRXAGGGA

SEQ ID NO: 250585 - protein, 125 aa, Zea mays
  Clone ID: MRT4577_160121C.1.pep
GTVLLDIAATELNAEDQLYLDEEGMSLDGSTDSMRAQRETASAANWEARMNDKDYSIGQPLSTLGISLMKRLRNLALCANLQSQFCIGRRSQEAVPLGLNNKLSLQITVRTSTSEQVQIALLGLV

SEQ ID NO: 250586 - protein, 227 aa, Zea mays
  unsure (1)..(227): unsure at all Xaa locations
  Clone ID: MRT4577_160122C.1.pep
MTCATRSPGFLREAELRLLRCTLPSLPSSPPPPASPPPAHPLGPAAASAIAAVEAGDYEAALATAAPHFFPAFAPSRPPGSAAQFYADLGAAARAFLLVDGDGAAAGEGFDCRCAVVLSAAVAALLAFTQQNVTGPPRKFPTFPFSMSSFDERCYSNLGDTWDAWASDNLASFGSHVHGKFSLLQFIVFARLLFNSVQSLDLSDCWSVSWWVVXISMLQQNILEELS

SEQ ID NO: 250587 - protein, 177 aa, Zea mays
  unsure (1)..(177): unsure at all Xaa locations
  Clone ID: MRT4577_160123C.1.pep
KIKNLFSFYKKKKFFFQTSTYPHTPTNPKNSYIKKSHPTXXXXXXXXNXXHPXPPXPQXXXXXXTXPPXPTPXPPTPXNXPXXTPYPIXPXXXTQXPXNPXXPXPXQXXXXTXPXPXPPHPPPPPPXXXXPPPPPPPPPPAPPRPPXPXXXHXPXRPXGXPXXXRERERERERERES

SEQ ID NO: 250588 - protein, 51 aa, Zea mays
  Clone ID: MRT4577_160124C.1.pep
SMWTHLISCSCVIYSLMVQVNASRPAYHAMPIDRKIIKTTSRVQNSTQGTH

SEQ ID NO: 250589 - protein, 184 aa, Zea mays
  Clone ID: MRT4577_160125C.1.pep
MAVAAVEPDSSGRAVQPAPAAAGRAGGSTEPGLGKRLMTVLRAVYHMLRRGRKRLTMDARLLLGRGNKLAGKALHDLLAAAAHQHQHQMVEPSTSRAAAAASSSGLSFVPPYGTGDVEFSCTTTPSYSFGFGAGAAAHPGTGRALFPFRIRRRGAAARASGGGGAGLVDFVEVARELQMLQAAD

SEQ ID NO: 250590 - protein, 94 aa, Zea mays
  Clone ID: MRT4577_160126C.1.pep
GRNVFVCPCSFCPGGALPPDQNRCVGENVLLAHFNFTKFVSRWIAWSRSECFKNQPALEQSVTLYVDFDTHWLYSLLDVVYYLLLLNNYDQPPI

SEQ ID NO: 250591 - protein, 91 aa, Zea mays
  unsure (1)..(91): unsure at all Xaa locations
  Clone ID: MRT4577_160127C.1.pep
MACLLRGSSALLVAATVCADGASTFYYSHPNLASARVALQTNYTDIELSLSPHIPPKTVXHIFKLIRLVCYITNHFLRIDKDFISQDADAM

SEQ ID NO: 250592 - protein, 87 aa, Zea mays
  Clone ID: MRT4577_160128C.1.pep
MSGSRNSSRNVNIDSNWSKKENKLFEEALGGYGEGTPDRWHKVARAMGGIKTADEVRRHYEILNDDVTLIESGGVPFPNYNTQGAWN

SEQ ID NO: 250593 - protein, 194 aa, Zea mays
  Clone ID: MRT4577_160129C.1.pep
SWKKELSVSLIKEFAMVIWFRCPCKKRRERPLHAHQNPLRRPECLTRWTCRIISSAFCILGPHNADKTPTPASECTYMFRIVEQHRRHHVEINGVFGCGTVRTGTSLGCPLTSSLVPPILKDNWEQHWDNTGIVLSQSLILNQTNLFEGSSYFVPSCHCNQTHPKSLWKNTEMQRNELSVQFRSYMLAPSQAGP

SEQ ID NO: 250594 - protein, 177 aa, Zea mays
  unsure (1)..(177): unsure at all Xaa locations
  Clone ID: MRT4577_16012C.1.pep
MSRHPEVRWAQRIDKVYITVQLPDAKDAKVKLEPDGVFSFFATAGTDGNSYESKLDLNDKVNVEASKVSVGVRSIFCILEKADAKWWNKLVPDDQKAPHFVKVDWDKWVDEDDDGADVNVDGMDFSNMGGMGGMPGMEGLGGMGGMPGMEGLGGMGGMGGLAGMMGGMGXXMGGMGM

SEQ ID NO: 250595 - protein, 59 aa, Zea mays
  Clone ID: MRT4577_160130C.1.pep
RHTRLERASYKQSASVGSVYHITRRGSICTDRHKSLVQQQRMHPAAQVLGGGGECLAAL

SEQ ID NO: 250596 - protein, 91 aa, Zea mays
  Clone ID: MRT4577_160131C.1.pep
FSRQCARRSAYEWVGCQASEMVTDEPCYVTGLLAHGPNHCPDSILRPAGPPDCESSDAVEDHSLVMLGGSTPVQTPTHLLWLRTGEACTYC

SEQ ID NO: 250597 - protein, 118 aa, Zea mays
  unsure (1)..(118): unsure at all Xaa locations
  Clone ID: MRT4577_160132C.1.pep
KNWAGLLMASKTPVLVNFWAPWCGPSRIIPPLFPKLAKDHPGKIPCCKVNPDHTPNVGSPXGIPSIPPVFFFKGGEKKERFFGPVPKSPLPPLLDKYMGGSWASQACMHRRLNPFGYF

SEQ ID NO: 250598 - protein, 54 aa, Zea mays
  unsure (1)..(54): unsure at all Xaa locations
  Clone ID: MRT4577_160133C.1.pep
EGLYGVCPEDVLEVEGHDVISHVEXPPIIIHLSSQILSFLDNAAPRCKPCSWSP

SEQ ID NO: 250599 - protein, 115 aa, Zea mays
  Clone ID: MRT4577_160134C.1.pep
GCMFPNLFSLTGLNFGKAVWFKAGQKIFSEGGLNYLGNPILIHAQSILAIWACQVLLMDAIKGYRIPGGPLGKVIDPLYPGGSFYPLGLADNPKAFSKLMVKELKTGRLPLSSMF

SEQ ID NO: 250600 - protein, 52 aa, Zea mays
  Clone ID: MRT4577_160135C.1.pep
DCKILLQHKHYIYYGGAQMFIPHFRLSLATQTTNLANGLFSRHRGNSDTIHK

SEQ ID NO: 250601 - protein, 85 aa, Zea mays
  Clone ID: MRT4577_160136C.1.pep
KEEAQDEIEKYRQEREKQFKEFEIKHMGSREDVAARIDADTKIKIEEMNKAVIVNKQAVIDQILELVYDIKPELHKNFKATANKE

SEQ ID NO: 250602 - protein, 95 aa, Zea mays
  unsure (1)..(95): unsure at all Xaa locations
  Clone ID: MRT4577_160137C.1.pep
TVYATAADPXKGSLGIIAPIAIGFVVGANILAAGPFSGGSMNPARSFGPAVVSGDFAANWIYWVGPLIGGGLAGLIYGDVFIGSYAAVPASETYP

SEQ ID NO: 250603 - protein, 67 aa, Zea mays
  Clone ID: MRT4577_160138C.1.pep
VRQELAAAALAADVQECIQSRTACSKRHQVVPCGILAALKCACDPPRQQVAFSQKRAAYPQQFLPVG

SEQ ID NO: 250604 - protein, 41 aa, Zea mays
  Clone ID: MRT4577_160139C.1.pep
PKLNFIAQTTSCVLSQKKKGVNSSLQFGTPINPRLLYLEIK

SEQ ID NO: 250605 - protein, 112 aa, Zea mays
  Clone ID: MRT4577_16013C.1.pep
MLYEMIGVVRPGRLSEVKEIAKTAGKIVLDQQGVVRGVSNWGTFLLPKPAKKLQSTHHYGHHFIMRFDASARAQHALRRTMSLDPRLIRYSVVKMGTKFEEIKDVPGTAKFR

SEQ ID NO: 250606 - protein, 201 aa, Zea mays
  Clone ID: MRT4577_160140C.1.pep
KKKKKKSTWLDLGDDIFEELGESRYFHRRRHGSIRVSQYSRSRIREHRRAVFDSGNEQSTAACPLGIHQTGRCTCDSFLVAEESSARASISRIVMLTEALFEVLDEIHRQPASLSLSMVSVQAPESVVNSLPCKSYKKLEAPQRSDDMEQCHICLNEYEDGDQIRTLPCKHEFHLQCVDKWLKEIHRVCPLCRGDVCEVAS

SEQ ID NO: 250607 - protein, 98 aa, Zea mays
  Clone ID: MRT4577_160141C.1.pep
LFYFFFFFFFCLFFFFLGFFFFFFPPQTRFPLAFQIQTGRDLKATPSIGLPLGPNFRWPTFQTGLKQLYWGFIQMGLPPTYPIEKPRLPNARHQVKQR

SEQ ID NO: 250608 - protein, 97 aa, Zea mays
  unsure (1)..(97): unsure at all Xaa locations
  Clone ID: MRT4577_160142C.1.pep
ASISRIVMLTEALFEVLDEIHRQPASLSLSMVSVQAPESVVDSLPXCHICLTEYEDGDQIRTLPCKHEFHLQCVDKWLKEIHRVCPLCRGDVCEVAS

SEQ ID NO: 250609 - protein, 127 aa, Zea mays
  unsure (1)..(127): unsure at all Xaa locations
  Clone ID: MRT4577_160143C.1.pep
TPLLLSHFQYITSYYSRYVIMAYTIXFQVLDEIHRQPASLSLSMVSVQAPESVVDSLPCKSYKKLETPQCSDDMEQCHICLTEYEDGDQIRTLPCKHEFHLQCVDKWLKEIHRVCPLCRGDVCEVAS

SEQ ID NO: 250610 - protein, 92 aa, Zea mays
  Clone ID: MRT4577_160144C.1.pep
HQTVFSFLTACSLQQLFPQLTAHSNFFHSHSPTKQTLTLILYKLWKNYSIPLQLKTSDLRGTTRSSYLLSLAPVAVVFYLLESHSYHWDSDE

SEQ ID NO: 250611 - protein, 33 aa, Zea mays
  Clone ID: MRT4577_160145C.1.pep
YMGMGHTINSESFNGRLGITLLDVNCQMACVSS

SEQ ID NO: 250612 - protein, 72 aa, Zea mays
  Clone ID: MRT4577_160146C.1.pep
ERARWFVQHPSMLSPSPEPGATARLGSRPRRPSDPSRGPCGGSSSVVGTRAMTWWSARFVSSVRRAWLAFFS

SEQ ID NO: 250613 - protein, 144 aa, Zea mays
  unsure (1)..(144): unsure at all Xaa locations
  Clone ID: MRT4577_160147C.1.pep
TRHCCMSXGIHQTGRCTCDSFLVAEESSARASISRIVMLTEAXFEVLDEIHRQPASLSLSMVSVQAPESVVDSLPCKSYKKLEAPQRSDDMEQCHICLTEYEDGDQIRILPCKHEFHLQCVDKWLKEIHRVCPLCRGDVCEVAS

SEQ ID NO: 250614 - protein, 73 aa, Zea mays
  unsure (1)..(73): unsure at all Xaa locations
  Clone ID: MRT4577_160148C.1.pep
IXXXXVLFXEMDFEVXGSVVXXXXXCXXRGCXXRXLTLSSKWSKTRSMNSQKKRKKEEKKKKKKKKKKKKACT

SEQ ID NO: 250615 - protein, 68 aa, Zea mays
  Clone ID: MRT4577_160149C.1.pep
RNKQHIQTRAKGGIKLTDCVDVLKDKTGLLQLLSDMKRAYSWCHQKSFVEARTLVLLISGLFALRHLK

SEQ ID NO: 250616 - protein, 83 aa, Zea mays
  Clone ID: MRT4577_16014C.1.pep
HVRVAINTSQDATIVSRFAARLMNVNTPYICLFFCNISKYYFESGRVFIHHPCVPRLIVSVCASLQPSLLLLKSGYNVKNVRQ

SEQ ID NO: 250617 - protein, 102 aa, Zea mays
  unsure (1)..(102): unsure at all Xaa locations
  Clone ID: MRT4577_160150C.1.pep
XKISXKRXGCYQGRGWKYGSGFVDGVFPVLSPXLNRQWEPIITVCEWVLXLSSFRPDIICYNLLIDAYGQKRQLSEAEAAYMALLEARCVPTEDTYALLVRA

SEQ ID NO: 250618 - protein, 598 aa, Zea mays
  unsure (1)..(598): unsure at all Xaa locations
  Clone ID: MRT4577_160151C.1.pep
MLSVEAHTYYYYPTARPRRKLCACRNVLQETAPRDAEANPCRHGERKSRRRGDGAYYIDKDGGGVARTFDRKKISRKRGGAIKGRGWKYGSGFVDGVFPVLSPMAQDVLELVQTRGTDAASVWESLDKIPQAHDLWDDIVNVAVQLRLNRQWEPIITVCEWVLRRSSFRPDIICYNLLIDAYGQKRQLSEAEAAYMALLEARCVPTEDTYALLLRAYCGSGQLHRAEGVISEMQRNGILPTATVYNAYLDGLLXKRGXSEKAVEVYQRMKKERCRTNTETYTLMINVYGKANQPMSSLRVFREMKSVGCKPNICTYTALVNAFAREGLCEKAEEVFEEMQQAGHEPDVYAYNALMEAYSRAGLPQGASEIFSLMEHMGCEPDRASYNILVDAFGRAGLHQEAEAAFQELKQQGMRPTMKSHMLLLSAHARSGNVARCEEVMAQLHKSGLRPDTFALNAMLNAXGRAGRLDDMERLFAAMERGDGAIAGAPDTSTYNVMVNAYGRAGYLDRMEAAFRSLAARGLAADVVTWTSRIGAYARKKEYGQCLRVFEEMVDAGCYPDAGTAKVLLAACSDERQVEQVKAIVRSMHKDAKTLFAL

SEQ ID NO: 250619 - protein, 169 aa, Zea mays
  Clone ID: MRT4577_160152C.1.pep
SRSRPRCEEVMAQLHKSGLRPDTFALNAMLNAYGRAGRLDDMERLLGAMERGGDDAGGAAPDTSTYNVLVNVYGRAGYLDRMEAAFRALAARGLAADVVTWTSRIGAYARKKEYGRCLEIFEEMVDAGCYPDAGTAKVLLAACSDERQVEQVTAIVRSMHKDAKTLFAL

SEQ ID NO: 250620 - protein, 91 aa, Zea mays
  Clone ID: MRT4577_160153C.1.pep
MERAASSCASLLAQRRCYSVAAVVVKGCGRKAVEKVAKRIMGKEVNTAAASGEKTPWVPDPVTGYYRPAGGAKEVDAAELRARLLTKRIAN

SEQ ID NO: 250621 - protein, 528 aa, Zea mays
  Clone ID: MRT4577_160154C.1.pep
MAWLGLGRAGGAIKGRGWKYGSGFVDGVFPVLSPMAQDVLELVQTRGTDAASVWESLDKIPQAHDLWDDIVNVAVQLRLNRQWEPIITVCEWVLRRSSFRPDIICYNLLIDAYGQKRQLSEAEAAYMALLEARCVPTEDTYALLLRAYCGSGQLHRAEGVISEMQRNGIPPTATVYNAYLDGLLKARCSEKAVEVYQRMKKERCRTNTETYTLMINVYGKANQPMSSLRVFREMKSVGCKPNICTYTALVNAFAREGLCEKAEEVFEEMQQAGHEPDVYAYNALMEAYSRAGLPQGASEIFSLMEHMGCEPDRASYNILVDAFGRAGLHQEAEAAFQELKQQGMRPTMKSHMLLLSAHARSGNVARCEEVMAQLHKSGLRPDTFALNAMLNAYGRAGRLDDMERLFAAMERGDGAIAGAPDTSTYNVMVNAYGRAGYLDRMEAAFRSLAARGLAADVVTWTSRIGAYARKKEYGQCLRVFEEMVDAGCYPDAGTAKVLLAACSDERQVEQVKAIVRSMHKDAKTLFAL

SEQ ID NO: 250622 - protein, 92 aa, Zea mays
  Clone ID: MRT4577_160155C.1.pep
SLSRPREPEKYVEDSNKAMTTSITTAGNVREMHNDLEVQNNALSMIHKHFANNQMSASRTPSITARTSSTSENCMCSAMFAAGTQRIIPVMF

SEQ ID NO: 250623 - protein, 34 aa, Zea mays
  Clone ID: MRT4577_160156C.1.pep
KAPNATWLYLISVECRNKGGANKLQRKYVLSDHC

SEQ ID NO: 250624 - protein, 83 aa, Zea mays
  Clone ID: MRT4577_160157C.1.pep
FVWPHAWIRPYPGRILLNADDPGETNWHNREKRAIWHPWPPVAIFLNSVQEYQNQAAGAAVGPDHRQEGGPRLMIIKPYAHAS

SEQ ID NO: 250625 - protein, 93 aa, Zea mays
  Clone ID: MRT4577_160158C.1.pep
MGGSGRGAHFLDACFLCRKPLAGNRDIFMYRGDTAFCSDECRSAQMAADEAAAAKAKAKAKARAVSRGALLTAREAEGPQRRGKVRAGSVLAL

SEQ ID NO: 250626 - protein, 48 aa, Zea mays
  Clone ID: MRT4577_160159C.1.pep
PTRPVLRFRFIAHIRSCALYSNDLSESAHLFVNTPNKNKHFSHHAFLR

SEQ ID NO: 250627 - protein, 80 aa, Zea mays
  Clone ID: MRT4577_16015C.1.pep
SPTSKDCAGLTAFHWGIAGCLLIGGEKISWALSRCGNWVFPWVLTLAFPLILGNFFVWYGMGFWCAVKTPQKILRKTTNV

SEQ ID NO: 250628 - protein, 84 aa, Zea mays
  Clone ID: MRT4577_160160C.1.pep
EAIPVLVQRGADVDQQWGPLQNTALHEATLLGRAGRECIAALLGCNASVQKKNARGQTAYDLALESGDEPITSLFAAKLGLDER

SEQ ID NO: 250629 - protein, 108 aa, Zea mays
  Clone ID: MRT4577_160161C.1.pep
MKRKSRREIQNQANASDGLSEEAWIERELESGIVTKQEANCAAISDELSDEAWIERELESGIVTGPTNEQAITFDGLSENDWIERELESGIIIEPAPAIKKRKLESSC

SEQ ID NO: 250630 - protein, 135 aa, Zea mays
  Clone ID: MRT4577_160162C.1.pep
GSVLDPIRRVHTTFPHSDRIDGRRGREEDDNPQKLRWRGVRGGRGGGHGVSELPRSVCVRRNEKTVVPATVRGPKAEEILERGLKVKEYELKGRDFSETGNFGFGIDEHIDLAIKHDPSIAIYGMDYYVGLGRPG

SEQ ID NO: 250631 - protein, 44 aa, Zea mays
  Clone ID: MRT4577_160163C.1.pep
YTCQNKGHCYFLQQPSALLQQLPLVHLLAQNIKAQQLQQLVLGN

SEQ ID NO: 250632 - protein, 72 aa, Zea mays
  Clone ID: MRT4577_160164C.1.pep
NNSSACEEDEEFESVYLLRLSLEQRGCMYLSSEIRQTENLKKKKKKKKKKKKKKKKKKKGGAPKKGPRPPGK

SEQ ID NO: 250633 - protein, 116 aa, Zea mays
  Clone ID: MRT4577_160165C.1.pep
MSGPIENLKSFDPFAEADEDGGTEKQSQNYIHIRIQQRNGRKTLTTVQGLPKKFDQKKILKVIKKKFACNGTIVSDSEMGEVIQLQGDQRKDVQEFLTDKKEGLGLEAPTVKVHGF

SEQ ID NO: 250634 - protein, 46 aa, Zea mays
  unsure (1)..(46): unsure at all Xaa locations
  Clone ID: MRT4577_160166C.1.pep
RDAVSWLSPCIRXMFLRDCGHEQLTRKHEWMILTPKTALLSWLGLF

SEQ ID NO: 250635 - protein, 108 aa, Zea mays
  Clone ID: MRT4577_160167C.1.pep
YGFTGYNSSTLILIWHCRDTFTIFGFHDISPSPIHVQKKGERNQHGYLNIMVRSILVPTLFGGRIPNLSVKGVMISYLHFAGFQIDRRHELSGRTPNHDQIYTSCLLL

SEQ ID NO: 250636 - protein, 71 aa, Zea mays
  Clone ID: MRT4577_160168C.1.pep
PVSCIPVDRPPFFFFFFWWLFWGKTSTVLRNLYHLSIPLCFLTFFELQPLICVLKHRDWPCLSSDLNYVGD

SEQ ID NO: 250637 - protein, 96 aa, Zea mays
  unsure (1)..(96): unsure at all Xaa locations
  Clone ID: MRT4577_160169C.1.pep
MVGSGAAGGGADHARSKEAAGMMALHEALRNVCLSSDWTYSVFWTIRPRPRCRGGNGCKVGDDNGSLMLMWEDGFCRPRVAECLXDMDGEDPVRKA

SEQ ID NO: 250638 - protein, 97 aa, Zea mays
  Clone ID: MRT4577_16016C.1.pep
GRPLWVRLFPRRLLVRNLWTSLQLRFTQWCRWRFLRRSLPCQVAVRDNPLPHAGWGLRLPQLRHGRAPMAALKKKGGKSILSGSGSETSGQRVERFG

SEQ ID NO: 250639 - protein, 75 aa, Zea mays
  unsure (1)..(75): unsure at all Xaa locations
  Clone ID: MRT4577_160170C.1.pep
ARYTVMSLIVPSYYSPHYRYSWFACRLRSVFFSRVVMFHSGGPPFCFFCFFLFFXQKNYFFLLALCFLIFGKPQT

SEQ ID NO: 250640 - protein, 171 aa, Zea mays
  Clone ID: MRT4577_160171C.1.pep
MDEDRFRRCSSKTARRRLRSLLVLAADYLKYLFTNRRRLLHKVARRTHAVVSSYHGKSNKRLPPYCPPRALMEHEFSCSDSPSPAFLAAKRLQSRLKRGAAASAAVSSCFGATVGASYGSPPATQEDDVVEEEDEADGSACYELEPDVDYRAEEFINMFYEQLRAQNFPPV

SEQ ID NO: 250641 - protein, 96 aa, Zea mays
  Clone ID: MRT4577_160172C.1.pep
MTGRGGGGGRRLMLPPIKYIFELLREHATVSIWLYEQLSIRIEGKIRGFDEFMNLVIDEAVEVKQVTKTNEKETRRPLGQIMLKGDNVSLIQNVSK

SEQ ID NO: 250642 - protein, 113 aa, Zea mays
  unsure (1)..(113): unsure at all Xaa locations
  Clone ID: MRT4577_160173C.1.pep
MLDGXSIQPLVCENGTGMIKADFDDDDAPTADFPSIAGRPRHSGVMDGMGHKDGSVGDXPSPSRRILSLKXYPIEHDIAQQCERMXKMCHHIFYXELRETVEHPSVXLKEAPL

SEQ ID NO: 250643 - protein, 51 aa, Zea mays
  Clone ID: MRT4577_160174C.1.pep
ESLHIALERPNMQAQQYTFKDKQQLDHSNHRPSSKDRNISHRHRPLTAKVG

SEQ ID NO: 250644 - protein, 92 aa, Zea mays
  unsure (1)..(92): unsure at all Xaa locations
  Clone ID: MRT4577_160175C.1.pep
SPPSLCGVGGLLSPSSPGSSVCLLAAVRRALLFVAGAGLSAGPRPHWGPRVHPLVLSPSPCSFLPAGVGSSPSPFXSVVGSSHARGGVAPGS

SEQ ID NO: 250645 - protein, 112 aa, Zea mays
  Clone ID: MRT4577_160176C.1.pep
VASPGAAQIPPALAMGARYHHPLGVSTLIRAAGAAPSVDMPPQAPPPEAARHISRRGPGHDGRARLGPRLLKNPPVELELPDPIVTTSKQRVLQRRGANGVSWNGHTMGAVW

SEQ ID NO: 250646 - protein, 50 aa, Zea mays
  Clone ID: MRT4577_160177C.1.pep
YTDQAVVILKVIIHILIIGHVRKFTGPSQTFVLVIECIRSHSMPYGRSGF

SEQ ID NO: 250647 - protein, 174 aa, Zea mays
  Clone ID: MRT4577_160178C.1.pep
LAWHPEAGADADQRQHESTVHRAHLLQLCCNNCGFDAHLGWALTKGTAGLALGRSGLMSRNNDGAVGGCGRRWRAEIPTLVHCTTVEASCWLLSHCQVGREWRAVPRNGREWVPASIQAGGRGGNRSIDRSMRLPATSSSMGVGQTPPCADGSLVTALRIHLRRRRRFHNRNGL

SEQ ID NO: 250648 - protein, 525 aa, Zea mays
  unsure (1)..(525): unsure at all Xaa locations
  Clone ID: MRT4577_160179C.1.pep
MDRDSSSSVSASDGSSEAGERGGCCSSPPSTRSRTASDASTSLSDRCSSVDVDHSGPFQPAAAVAKLIGRSSPPSAAASLRRLSIKPRADVLDRRSTEDEMELVKERFSKLLLGEDMSGGGKGVCTAVAISNAITNLYATVFGSCHKLEPLPAGKKAMWTREMDCLLSVCDYIVQFYPSTQTLPDGTKVEVHCASSWPSSFLKISAPTNKLEQXSSSSLPSTNRHCCAADQDGSIRAXMATRPRSDIYINLPALEKLDAMLIDILDSFQKAEFWYADAGTRSFGSVTSSSSSRMSSSSSFRRSAHRNDDKWWLPVPCVPDAGLTDKARKDLQQRRDCANQIHKAAVSINSGVLGDMEVPESFMAVLPKSGRASVGDSVYRVMLGADKFSPEFLLDTLDISSEHDALAMADRVEAAMYVWRRKASGSHGKLPWSKVKELAADDDDKNVTLANRAESLLLCIKHRFPGLSQTTLDTSKIQFNKDVGQAILESYSRVLESLAFNIVSWVDDVLFVDRSIRKLSDNLKS

SEQ ID NO: 250649 - protein, 50 aa, Zea mays
  Clone ID: MRT4577_16017C.1.pep
AQRHQRGVVVQIAPREMTARQRKRTCSRTVLAIATNKTKPELIKVGNLTL

SEQ ID NO: 250650 - protein, 572 aa, Zea mays
  unsure (1)..(572): unsure at all Xaa locations
  Clone ID: MRT4577_160180C.1.pep
LSQLAAAMATASEDEAASDRCSGSYSPSADVSESETSSDCSAPTTRRFASSSSASASASATVSRRLAXPPPXSLPTPASAAAFYLSKPPSSDLSEIDMMKERFAKLLLGEDMSGSGKGVCTALAISNAITNLSATVFGELWRLEPLAKARKAMWTREMEWLLSVSDSIVELTPSIQELPEGGGQFEVMVPRPRTDLYMNLPALKKLDAMLLAMIDGFKGTEFWYVDRGVMVEDSGGPFPSSSSSSSCGRPSVRQEEKWWLPCPRVPPKGLSEDSRRKLQQSRDCANQILKAAMAINSDVLAEMEIPEMYLETLPKSGKSCLGEIIYRYITAEQFSPECLLDCLDLSSEHHTLEVANRIEAAIHVWKLKGQKNSTPQARSKKSWGGKVKGLVGDKEKSHTLSERANGLLQSLRLRYPGLPQTSLDMNKIQYNKDVGQSILESYSRVLESLAFNIIARIDDVIYVDDATKKSAAAESVSIFNRGTGVPIQKRISLSPFSIQNTPYASPFATPTFCSSTPVTCSPGRVQPPLNKTNLGRPEIKVEKLFSGDLEKVWTYAGNLSARKDAGDAPERD

SEQ ID NO: 250651 - protein, 92 aa, Zea mays
  Clone ID: MRT4577_160181C.1.pep
MVASLDNVRGLTLAMSSSAFIGSSFVIKKVGLKKAGDNGVRAASGGFSYLYEPLWWLGMITMILGEVANFAAYAFAPAVLVTSLGALSIIFR

SEQ ID NO: 250652 - protein, 54 aa, Zea mays
  Clone ID: MRT4577_160182C.1.pep
SPINTKPTHVWFATIYVAMHCRYIVEGEARPECVHSHICGWTIYNRQGDGEMQG

SEQ ID NO: 250653 - protein, 78 aa, Zea mays
  Clone ID: MRT4577_160183C.1.pep
KRSIRERPQENRPLTHVLSASVSKFDLAVTINPITYINMSSIFDRNGHPLLPLFIQSTWFAVKFCRCGKTSQRVILSL

SEQ ID NO: 250654 - protein, 59 aa, Zea mays
  Clone ID: MRT4577_160184C.1.pep
CYQIEDGLETQIKSACCCRHIACMAPRLREVWTVFVDCVLLMRTGLDKLCFAEITGWDT

SEQ ID NO: 250655 - protein, 326 aa, Zea mays
  Clone ID: MRT4577_160185C.1.pep
MVASLDNVRGLTLAMSSSAFIGSSFVIKKVGLKKAGDNGVRAASGGFSYLYEPLWWLGMITMILGEVANFAAYAFAPAVLVTPLGALSIIFSAVLAHFILKENLHMFGVVGCILCVVGSVGIVLHAPKERKIDSMKEIWHLATQPGFIVYSCVAVACVLFLIFRVVERSGHRLMLVYIAICSLMGSLTVISVKAVAIALKLSFGGSNQFIYVQTWFFIVVVTICCLVQLNYLNKALDSFNTAVVSPVYYVMFTILTIVANMIMYKDWASQTATQIATQLCGFVTIVAGTFLLHKTRDMGNPPPPPPDQMCLQEAGECAPRSMTSSS

SEQ ID NO: 250656 - protein, 531 aa, Zea mays
  unsure (1)..(531): unsure at all Xaa locations
  Clone ID: MRT4577_160186C.1.pep
MDPRRACWESSTEDVTRPLLPVHDDRPAGRCSCSGLGSLLTTNKYLAVASGPLACAVVCALGDFGGHPAARNMLGVLAWVFLWWITDAVPLGVASMAPLFLFPAFGVSSADAVAKAYMDDVISLVLGSFILALAIEHYGIHRRLALNITSLFCGDPVKPHLLLLGICGTTVFISMWIHNTPCTVMMIQVATGILQRFPXTSSWRAGPTPXLQRFSKALVLGIMYASTIGGMATXTGANIILVGMWSTYFPEQRPITLLXLPMTLVLFAALWVTLCLRYCTKNTGRVLSAYLDRNDLRRELSLMGPMAFAEKMVLAVFGALIVLWMTRSLTDDIPGWAVLFDGRVGDGTVTIMMTTLLFIIPSGKSGGEKLMDWGKCRKLQWHIILLLGAGFAIADGFRSSGLTDILSSGLGFLKGAPALAIAPVACVFSGLITEFTSDDATTTLVLPLLAELGKSIGVHPLLLMVPGTVGAQLSFLLPTATPGNVVGFGTGYITIRDMVVTGMPIKLVGVAALTILLPTLGSLVFGMDSKM

SEQ ID NO: 250657 - protein, 48 aa, Zea mays
  Clone ID: MRT4577_160187C.1.pep
EGYTGSGRALCSKGVLKRESQRTTKGKVYLNNNRDEKGAPHFKQYILF

SEQ ID NO: 250658 - protein, 54 aa, Zea mays
  unsure (1)..(54): unsure at all Xaa locations
  Clone ID: MRT4577_160188C.1.pep
KKKKPHQQDKXRKKKLKKKNKIKKKKKKNKEXKKKKKKKKKKKKXKFKKKKRKK

SEQ ID NO: 250659 - protein, 94 aa, Zea mays
  Clone ID: MRT4577_160189C.1.pep
RGGKNVSSKNSLASFFFFAPRGTMQFLKGHRLKAKGGFPRTKKRATLRPPKCKLGGIWDFSFLKTRRREINYLPQILFLAFVNLSRKTLLLNTP

SEQ ID NO: 250660 - protein, 49 aa, Zea mays
  Clone ID: MRT4577_16018C.1.pep
CVSFAIKSYTGCCELHENRWVKTHIVILRQKPLRADHRKEEEHFLLNRG

SEQ ID NO: 250661 - protein, 201 aa, Zea mays
  unsure (1)..(201): unsure at all Xaa locations
  Clone ID: MRT4577_160190C.1.pep
DGSSSDEQXTEFGFSLPPPXQVSNKADWXKDTSEVKSSDXGAAILPHPSKVATXXEDAYFIAANGWFGVADGVGQWSFEGINAGLYARELMDGCKKFVTENQGDPDLRPEQILSKAVDEACSPGSCTVLVAHFDGQALQASNIGDSGFIVIRNGEVFKKSKPTLYGFNFPLQIQKGDDPSKFVQNYAIDLEDGDAIVTATD

SEQ ID NO: 250662 - protein, 565 aa, Zea mays
  Clone ID: MRT4577_160191C.1.pep
MAELPLAAGLMDLRNCKLSPKPAPPLPLPALRRMHTSATATTAPSPRHAVPELHSTTELADGSIVFRFGHPKSKALEPEPASVKTSPYSRVAPASGAVPGSQMEPEIDSEHGLDGVRIGTTAGVEKPSPNAAAEAWPTPPPPDAGAVTGATSAALEEAPEQEAGSNAAVEEVDTRPSSAESLVPSRSEDGPKGDGVAVEAGMPTSGAAMDTIETALEGRGASEDDSAVDVSGGLDEAATSGLEDSEAASEGSTAQDFYTDVETESSGSSSDEQRAEFGFSLPPPEQVSNKADWKNDTSEVKSSDRMIPIAQRTRVLSSGAAILPHPSKVATGGEDAYFIAANGWFGVADGVGQWSFEGINAGLYARELMDGCKKFVTENQGAPDLRPEQILSKAVDEACSPGSCTVLVAHFDGQALQASNIGDSGFIVIRNGEVFKKSKPTLYGFNFPLQIQKGDDPSKFVQNYAIDLEDGDAIVTATDGLFDNVYEHEIAGIVSKSLQADLEPAEIAEHLAVKAQEVGRSGAGRSPFSDAALSAGYLGYSGGKLDDIAVVVSIVRTEIQEDRLR

SEQ ID NO: 250663 - protein, 253 aa, Zea mays
  unsure (1)..(253): unsure at all Xaa locations
  Clone ID: MRT4577_160192C.1.pep
MHLPASSPWLATFLLFPMAGINAGLYARELMDGCKKFVTENQGDPDLRPEQILSKAVDEACSPGSCTVLVAHFDGQALQASNIGDSGFIVIRNGEVFKKSKPTLYGFNFPLQIQKGDDPSKFVQNYAIDLEDGDAIVTATDGLFDNVYEHEIAGIVSKSLQADLEPAXESIILVNKNVQCVIKXQLQWLFYLQEIAEHLAVKAQEVGRSGAGRSPFSDAALSAGYLGYSGGKLDDIAVVVSIVRTEIQEDRLR

SEQ ID NO: 250664 - protein, 83 aa, Zea mays
  Clone ID: MRT4577_160193C.1.pep
YLICTALLINNVLYVMIKYLASRAYYVLLMIPLYRVKCTLDRHTCQTGLLSEEVIRYNDALRWISASTYAETVNTVCDLSCRS

SEQ ID NO: 250665 - protein, 85 aa, Zea mays
  Clone ID: MRT4577_160194C.1.pep
MANPHVFFDMTVGGAPAGRIVMELYANEEPKTGENFPALCTGEKGAGKSGKSVHYKGSTFHRVMPEFMCHGGDFTTGNGTGGESI

SEQ ID NO: 250666 - protein, 165 aa, Zea mays
  unsure (1)..(165): unsure at all Xaa locations
  Clone ID: MRT4577_160195C.1.pep
PPPFFFFFFFFFFFFFFFLSPGGPXGAIGGTGGGGPGGPPPGPNPGGGGGRGEPGGNPQPPQIPTPHTTRGQKGETQGGPKREKKKKKDGPPTPRETRGNPGGKPPTKNPXRPGRGGAGKGPLPDSPPTPGRPAGARGPRALPGRSGXPPGPRRTRGTPGEQHGA

SEQ ID NO: 250667 - protein, 75 aa, Zea mays
  Clone ID: MRT4577_160196C.1.pep
RYDLRYLNWLFYFLIYLFYYFGVGPILGRDRSYPLNRNLVLEICKKRVYNYVTSKHMHKQNLSMMHNLLATHGVR

SEQ ID NO: 250668 - protein, 64 aa, Zea mays
  Clone ID: MRT4577_160197C.1.pep
FLRQFCFCHKLDMHEKLDLDMELQIVSGRFYLCLLVCQQIVYVATIVHMIVIQMIGYSQIVGLP

SEQ ID NO: 250669 - protein, 142 aa, Zea mays
  Clone ID: MRT4577_160198C.1.pep
YLLPKLSSAWRPATRLRTPISPAAALLGALALTSTPAALGARARPWRRDPALCPCRAPSTSRPQRLAVLRRVFLSPMATPLLLSIHGCALPSVLKLALSSWPWSLPWPLRAHCGRSPALFLSPTRARRRHLGRPSLFPLVSP

SEQ ID NO: 250670 - protein, 83 aa, Zea mays
  Clone ID: MRT4577_160199C.1.pep
KGWRQRQTYSASVALSTANFCLVIHTFECIPVPEAVPSNDSATPTEADLLDPPIEAPTEMTPVAKRSPVELLSRVYVKFKRDL

SEQ ID NO: 250671 - protein, 42 aa, Zea mays
  Clone ID: MRT4577_16019C.1.pep
NYSLVLPSTYGKLCCCIGCLGARSPCPSPSGSPRCVLMGGLA

SEQ ID NO: 250672 - protein, 90 aa, Zea mays
  Clone ID: MRT4577_1601C.1.pep
MAAVRSLLRSSASLLRAAPALARSSATTRPSLRRALAAPPRLLRSPVESSFCVESLLPLHTATAGARMTSMLAAPGQGLGWLTQAETDGV

SEQ ID NO: 250673 - protein, 164 aa, Zea mays
  unsure (1)..(164): unsure at all Xaa locations
  Clone ID: MRT4577_160200C.1.pep
TLGIGGMLRKSLEVDCLLTSDVMATKVCEEEYNXLAHIYSIRNELWSYDVQRLEYXPHKREVHTPVQIYNKVISHTKRECLKNVKDPMQRHFIEKCLXSACQRVTSRELLEDIFLQRDKMVXLCKLRNYHERTNYIPQPAYMRHNYSDGSMKSNLFCQSIDADA

SEQ ID NO: 250674 - protein, 121 aa, Zea mays
  unsure (1)..(121): unsure at all Xaa locations
  Clone ID: MRT4577_160201C.1.pep
MFFLALQALSTSVATVTIILQCSQQYXLFPVTAARFEYPTIXQSYRLHEAITASILRSLAXTVQHPFALLQQPSLVNLYLQRNLYSSTTTSYCFQLIIQIIFIVPCCFTFNNNQILFIHNN

SEQ ID NO: 250675 - protein, 159 aa, Zea mays
  Clone ID: MRT4577_160202C.1.pep
MARQGMVTALLLVVLAAGCCASAGAVAYLSKLPVTLDVTASPSPGQVLHAGEDVITVTWALNASQPAGKDADYKNVKVSLCYAPVSQKEREWRKTHDDLKKDKTCQFKVTQQAYPGTGKVEYRVALDIPTATYYVRAYALDASGTQVAYGQTAPSSAFN

SEQ ID NO: 250676 - protein, 35 aa, Zea mays
  Clone ID: MRT4577_160203C.1.pep
VSIPSYYRHIRFHRKTIDFIGWGKKDTPLIEPGIS

SEQ ID NO: 250677 - protein, 91 aa, Zea mays
  unsure (1)..(91): unsure at all Xaa locations
  Clone ID: MRT4577_160204C.1.pep
MEGKEEDLRQGANKLSEREANGTEEXNRGRDDDKDYKEPPPAPMIEPGELKSWSFYRAGIAEFVDTFLLLYITALTGMGVSKXTSKCATVG

SEQ ID NO: 250678 - protein, 40 aa, Zea mays
  Clone ID: MRT4577_160205C.1.pep
VLRGEGHAHVAVFEPSLEANAYDGNLALRPYCEGLAHIFD

SEQ ID NO: 250679 - protein, 113 aa, Zea mays
  Clone ID: MRT4577_160206C.1.pep
WTRKGSVGFTLYAHSLQLQGCPTDKAPMMDSILRARCIRSEQGACPLSTSLERCYTWLLTLFTWSSLWDATARRACSTRHNTATSWTRPRRPVLTCHTDAALAACSMCTCMLL

SEQ ID NO: 250680 - protein, 92 aa, Zea mays
  Clone ID: MRT4577_160207C.1.pep
PPLPPPGAPSKGKFKKLGGLYLGTPPRHQIGGIKAKNFLPGKILFPSNSPKKTAPKIKIRKPGPPMGRVNHINRGGATRPFSGRKTWSPLFF

SEQ ID NO: 250681 - protein, 149 aa, Zea mays
  unsure (1)..(149): unsure at all Xaa locations
  Clone ID: MRT4577_160208C.1.pep
NIASFQDLRLSKFAANYYATPVRDGHRGRSHSRLVGFYLIDSGYPNHEGYLAPYKGTKYHVPEFXRGPXPNGKELFNFCHSSLHNVTEHPFGVLKMKYKVLLPFITSLEKALWHMLILKCVTTMRTIYRFRATICLKKMAMKNRHESFL

SEQ ID NO: 250682 - protein, 99 aa, Zea mays
  unsure (1)..(99): unsure at all Xaa locations
  Clone ID: MRT4577_160209C.1.pep
ARGFGFVTFYTEEAMRNSIEGMNGKEXRGRNIAVNEAQSRGGRGGGGGCGYGGGRXGGGYGGGGRLDCGGRYGGGGGYGCGSGGYSGSCGPFVSGNSGG

SEQ ID NO: 250683 - protein, 73 aa, Zea mays
  Clone ID: MRT4577_16020C.1.pep
LGTFAVPWILKKQQTHTFLQFTRVQNPPPLTLKKAVASRKPMTFLQIKSPTHPASQPLLITRRFRAEAGPSGT

SEQ ID NO: 250684 - protein, 52 aa, Zea mays
  Clone ID: MRT4577_160210C.1.pep
PCSHPAMRDPLPQVRRKCSRLQRMERKETNECDVDHLLSRPAFTPYALRFYD

SEQ ID NO: 250685 - protein, 81 aa, Zea mays
  Clone ID: MRT4577_160211C.1.pep
LIPPVVFFFWFFFGSPFTPFLLGFFFPFFPFFFFFPPPLFLFFSPIFFLILFIPFFNYCPPPPPFKPFSKIFPPLYKLWVG

SEQ ID NO: 250686 - protein, 54 aa, Zea mays
  unsure (1)..(54): unsure at all Xaa locations
  Clone ID: MRT4577_160212C.1.pep
VRIGXGSSNRCLLARRGLSFRRRSDVSAGLLFLPALMCISLTDCCQTLGSRESG

SEQ ID NO: 250687 - protein, 82 aa, Zea mays
  Clone ID: MRT4577_160213C.1.pep
DQLEPLTAEEQEEKEQLLEEGFASWTRRDFNTFIRACEKYGRNDIKSISSEMEGKTEEEVQRYAKVFKERYKELSGTAVIPR

SEQ ID NO: 250688 - protein, 78 aa, Zea mays
  Clone ID: MRT4577_160214C.1.pep
MVCLSNKLFRFLLLLVRYTRTQCRPLTIFSARKSQSHSFHFKGPYSMDANCANVCLTECFTVCICKALRHRYFCTMDC

SEQ ID NO: 250689 - protein, 151 aa, Zea mays
  Clone ID: MRT4577_160215C.1.pep
CWLRWRAFHPGLVLRKGHLVRGGVLLRYASVLSSSSSRVRLFLAWPPWIARLACRTQESIRSWCARVAIFGCWVSSRSEAGSPAVAWCWAVAALNKGRMIRVGYGARLLRLWGDVARAQGTGPSGLGGERVDGAAPPSASRLGVFPFFSFL

SEQ ID NO: 250690 - protein, 86 aa, Zea mays
  Clone ID: MRT4577_160216C.1.pep
SGRVAHAWGRLVSSSASRDYLTYHSKFDVLSTNTTRILVPLLCRALGEYHTTSFVFIRFLGFLDDARNDDDLRSKSSTEHLISDAH

SEQ ID NO: 250691 - protein, 108 aa, Zea mays
  Clone ID: MRT4577_160217C.1.pep
GDTPSHYKCASINVGGYPSNGKVQTKTCTFYLSIRKCKYGENCHFSLVCGYPEINDMRQVDHLGSLQMLEMEIDLLLLQPSSQVPVDHLEKKFLEIYTKLLEIDGSIQ

SEQ ID NO: 250692 - protein, 237 aa, Zea mays
  Clone ID: MRT4577_160218C.1.pep
ALPPVSMTGVPKLLPCRRPAPGRISHGARALLLAALTFCFSLSALAALSLLLRPWLFATARSVPARPAELSTAQLHLTVLCLLGSMARHDPAMEVSLPRQLDFMARPLQSASAPPLPVAPLCLPSSSIFGRARTQPGSAGGCGRDGRGRASRRVPLVSALNSPAPSASPAVAERRSLAVADAPCCCSIQAASGFLPHRSSSVSPTHVGLQSTMSRPDLNLADVLPAMSVADHRSPSC

SEQ ID NO: 250693 - protein, 129 aa, Zea mays
  Clone ID: MRT4577_160219C.1.pep
MLIQLSRATRARSAVAAVSRVARPNAVQVRGFIAPTVSRKADFVQELYLKELKAYKVPVVKESDAEGNVQTFSVPKTPASPEETDLAGNLKEYESMAVEIEGQDTSAQSAGAPKVADWLEAEEDEEPHH

SEQ ID NO: 250694 - protein, 41 aa, Zea mays
  Clone ID: MRT4577_16021C.1.pep
SANWSAAYQMALSSHIRIFLVAEMETIDKKIKFHWPLDIIL

SEQ ID NO: 250695 - protein, 127 aa, Zea mays
  unsure (1)..(127): unsure at all Xaa locations
  Clone ID: MRT4577_160220C.1.pep
LLPSKQLAALNITRIVQHYQLPFSQLPVADPQQFLPFNQLAALNSPAYCQQQQLVPYXQLAGVNRGTFSVLNAQMCRFCQHAAPDASTVXKVQXQVIPFNPFLLLTNLTXFNQQSIIGGASLSFNEG

SEQ ID NO: 250696 - protein, 104 aa, Zea mays
  Clone ID: MRT4577_160221C.1.pep
SFQDALLWADPAQPALEAHQILNLLARKLADGTNVFLKPGDRALSCTSGPPGHVEPKGRPGDLRWILLVLKGNMENMTLYNRASEVPWVHRADTKPYAHTRLFL

SEQ ID NO: 250697 - protein, 150 aa, Zea mays
  Clone ID: MRT4577_160222C.1.pep
LVLLFFYFFWAFTLFFMVFYVFLSHFNIVFPVIYMREHYPGTGNRQETKWASILQTKEGILQGGAQNRAQGGKKGRRSTPFWNPMARIARAKKKTGMGGKHSKNARLGDPPSLFIFFFSPAKEKNDRTGLAEFRNMWGQNNWTKGGAPPP

SEQ ID NO: 250698 - protein, 131 aa, Zea mays
  Clone ID: MRT4577_160223C.1.pep
IAIFNLASICCRSCAYLLLFVYFGLSLIIHSNESFRDMVLESHTKIMCHDVEVIVRYISVTEVSPFVSLNPPIIGHGGGRGSLISECGVSFLRREHSAAPEEGFDPTRPGRGCRSRRRVRPVEQEVSEEMK

SEQ ID NO: 250699 - protein, 341 aa, Zea mays
  Clone ID: MRT4577_160224C.1.pep
MAMPAALLLFLLVLSAFEAGELPRCSAAAAGKPAVLVHDDLSPVQDTSPIATVPSTNPSPAIITVPSTNPTITIPSLNPLPTPITAPSTNIPSPSTMLPPVPVIYPLPTPSTSSPPAVPVTNPAVTTPSTSPPSTPTPFNNPPLLNPTPTPAPTVTAPAASGREVWCVAKAAGSSEAALQNALDYACGIGGVDCSAIQPSGSCYYPNTIQAHASYAFNTYYQRNPVSSSCDFGGTAMLVTANPSSGSCVFASSLPSSSSSTVGYDPASTATPSSPSSGSDSGAPVLNASGAGSSESSDFGFDIPGAVNLGSGWRSVSPPNWPWAALVWILVALCVHKEGMV

SEQ ID NO: 250700 - protein, 65 aa, Zea mays
  Clone ID: MRT4577_160225C.1.pep
IPDELVMYIGVRRSSHAAVHRRGDHVGGRPRAKTDLRAAAHAYHSKFPRAWDSSNSGEANEACPG

SEQ ID NO: 250701 - protein, 42 aa, Zea mays
  Clone ID: MRT4577_160226C.1.pep
HESDYYPLLLWILPTHIYSIRSMIYRIKIVGISSPKPIVPFF

SEQ ID NO: 250702 - protein, 119 aa, Zea mays
  unsure (1)..(119): unsure at all Xaa locations
  Clone ID: MRT4577_160227C.1.pep
NEKTKRGAKSSECQSGRVRGKEKSYKHIGNEEGXAHRCFTGPRKRRRLGPQRAKTTSAPPGEGKVRTKRPVGGERKKKKPKVFSISKEKTIKLIFFFKIFFFKFFLIIILVLFFVFFFC

SEQ ID NO: 250703 - protein, 275 aa, Zea mays
  Clone ID: MRT4577_160228C.1.pep
PSGLAGIPAVTMSLSVTTRLPALRAARRIVPKCQSTTSTQTRQFSFRSFWSKSASSAEQSEWRPAIDGPHRQSKLQIKEQQEKELAEKAAQESPAPEVSEFGQANGAPAKHIAVEIDGNARGFDTAFLRDSCSCTQCKDPHSKQKVFQTSDIPEDLEGSYRLVEDDQKGPSIELQWKNDVRGYGPDHRTRHSIDWLRRAIHQEVELRGGVRHDDRVLWDKQKITRDNKWLDYNDYMNQDEVLYDALTHLHKYGLLFIRNVPESEESVVKLSERIG

SEQ ID NO: 250704 - protein, 185 aa, Zea mays
  unsure (1)..(185): unsure at all Xaa locations
  Clone ID: MRT4577_160229C.1.pep
PWGRXXRGXRXESGXXHAFGAWXRGGAAGPTARWGRGSYLLGARXXMRXXPNXRVLXISYXXLXXFGWAVLSSLWXXXRXPGTWGIILXVGPFPKVLXLYXXAALSLXXNSSPGKGFXXLRFRGFFVXLGFKXEWEVTHSXXASIFLGEIXLFLLVNCTLPYXISFGLLDXLGAFXFMFISPGNL

SEQ ID NO: 250705 - protein, 110 aa, Zea mays
  Clone ID: MRT4577_16022C.1.pep
VYHSSSEQSCDPSQALRPIASCAAYCGKHADELIKNAAYIGTPGKGILAADETTGTIGKRLSSINVENVEENRRALRELLCCCPGALQYISDVILYDETLNSTKIPPGVL

SEQ ID NO: 250706 - protein, 172 aa, Zea mays
  unsure (1)..(172): unsure at all Xaa locations
  Clone ID: MRT4577_160230C.1.pep
AGASPTECASLSAARSLGLRPAPARAERRPSRSWDGRTRSSKSSTSTSHSRRQTAATGAWNTVKPFPNGGXASGMLATWAIHAIDTVKARIQXGEGSADQATRNMLXNEGVRSFYKGTAAGLVLQATDTTVRLGDFRVITHKXLTTNEGKPLALYQTACIGTTGGALGACGR

SEQ ID NO: 250707 - protein, 86 aa, Zea mays
  Clone ID: MRT4577_160231C.1.pep
KKFWALISAPKKRKKKKKAPKFCLYLPPLGLVPLKDREGVPVKKGGNHVFLKRGALKKLNFFFLTGEKKNNQAKKRYPLKRGGARK

SEQ ID NO: 250708 - protein, 276 aa, Zea mays
  unsure (1)..(276): unsure at all Xaa locations
  Clone ID: MRT4577_160232C.1.pep
HASADALADFFDSKRIKRNGELYLNVGCNFAEIFGENSVASILGSLLDILLLKKDVKQKSRLLQPLFQILSKLLSDQWVSDIGSQYNDQQDTSSEIPDLSSFVKEVQHLVLLALKDITDTLQSGHHDAMVSSSDVGLLIDCVRSIQDIGTRNRGYSSTLTXTKACAELVSECIVDLCVAIGDAIKQAYSHSQRVLEDLLSVLVPCWLSRTTSIEKLLQIFIKALADVPEHRRLTLMVYLLRTMGKENNLSTVIMHLLHSVVERISHSFSVHHGDDY

SEQ ID NO: 250709 - protein, 268 aa, Zea mays
  Clone ID: MRT4577_160233C.1.pep
PAGPDFPAVSLFLTHALLSSTSSSSIVPGGRRTYMDSPSLYPLGAPALLHPLRSTAPSLASSLRQPATAMGTHLPRARLPCTFTSFVGFTQSSSTSASTELRSMAPHAISPPPAADVYTADRQQGHWLGTPTADRKLSSRASLPSQPQQRSLPGTAGVALALASGMACVAPARILRGPSTAAVSLFSSLAASSSGCPPSLRDYDPFPSFEGSKIKRCDQVIWLFEFYKVEDPEHLFGEGCLWRNLCSGKEEGVEADLQEFQGFHEFED

SEQ ID NO: 250710 - protein, 75 aa, Zea mays
  Clone ID: MRT4577_160234C.1.pep
LYPSTRHQEGVEELLAMEPDPDALVTEPKGKSSPRRAHRTEESIGDQRGRGEQRGKELTAPGSEELAGQRDKGGK

SEQ ID NO: 250711 - protein, 82 aa, Zea mays
  Clone ID: MRT4577_160235C.1.pep
MAADVSQTNWSHRMEMQARRDSLPPGPSASVLLGQELGWAARVDEGGNGPRVPESAQVIYTPLPTGFEHELFYRRQSCDLRS

SEQ ID NO: 250712 - protein, 73 aa, Zea mays
  unsure (1)..(73): unsure at all Xaa locations
  Clone ID: MRT4577_160236C.1.pep
GHIGGGYVYARKGCRLKEPRIYPLAENLHPHPPTTTLHQTTHPLALYASQQVVVLHILLXAFXKGTQPNYLYT

SEQ ID NO: 250713 - protein, 59 aa, Zea mays
  Clone ID: MRT4577_160237C.1.pep
VSYTTRNLDEGTEGSGVLSLHLRRFKCMCLTYRPGARILLDHNILLIRTRCNARERDMV

SEQ ID NO: 250714 - protein, 96 aa, Zea mays
  unsure (1)..(96): unsure at all Xaa locations
  Clone ID: MRT4577_160238C.1.pep
LGXFFFLXXPHAHHVEGGYYENHYDAPPPNHQNQPLGRAQTKINLLLGRLREVLNAVLQRLIAAYDELFYEGPKSTGATLDPHLARHMHHFGGSFE

SEQ ID NO: 250715 - protein, 83 aa, Zea mays
  Clone ID: MRT4577_160239C.1.pep
ESLLLRNETNSRMMERFLQFWHSIHRTSDYWHHEDSNCSVGIIIMHPLNTWHPPVLIVICCCVRPITPLAFSVFELQSPGRVG

SEQ ID NO: 250716 - protein, 71 aa, Zea mays
  Clone ID: MRT4577_16023C.1.pep
SLACMTACTHVSAASCFARYMFLSFYIVLYVRCMHASSILKLVSSVVSTHNAASHCLFIMHLYLTACVFFL

SEQ ID NO: 250717 - protein, 176 aa, Zea mays
  Clone ID: MRT4577_160240C.1.pep
FYGGLVSNYSAAIRGLHALGVRRLAVVNVGLAGCLPVARVLDATGACAEDRNRLAAGFNAALRSLLAGLASPSSRSGLPGLSYSLADSLGLMADTFAHPLASGFTDVANACCGGGRLGAEAPCAPNATLCADRSLYYFWDSVHPSERAAALRAQAFCDGPAQYTTPINFKQLLHMT

SEQ ID NO: 250718 - protein, 73 aa, Zea mays
  unsure (1)..(73): unsure at all Xaa locations
  Clone ID: MRT4577_160241C.1.pep
GADGGHGKEEVNIEDQPLVRLVVMGRKSLPDPAKHSRPYWGYVXLVTTKVDYIKDALKEEEYSTATRGKRHRA

SEQ ID NO: 250719 - protein, 143 aa, Zea mays
  unsure (1)..(143): unsure at all Xaa locations
  Clone ID: MRT4577_160242C.1.pep
KEISRRWSQPTTDRSLRRKRPRPSIGRAPEWAALQCRWVSHRTRGGCRLSTPGXKVKVERXAMSRHLHRCFASTGTMFLWALFLVAMTATYLSVHCFVDSTSPRYFAASCGGLHWERQIRASASTRRRSAPGPPAGLSVLVTG

SEQ ID NO: 250720 - protein, 48 aa, Zea mays
  unsure (1)..(48): unsure at all Xaa locations
  Clone ID: MRT4577_160243C.1.pep
RQTSLVPRSSPSTCLRRSQSIDIIRENGPXNYLAKSFWCLMVNITLWD

SEQ ID NO: 250721 - protein, 72 aa, Zea mays
  unsure (1)..(72): unsure at all Xaa locations
  Clone ID: MRT4577_160244C.1.pep
MTAGYIVGSLAGSSAVAYLGDTFIYAXKAFRGGSSKTLYEMEWWXATDTKVQAXWAGTAGPQVVMNPMCRQT

SEQ ID NO: 250722 - protein, 190 aa, Zea mays
  Clone ID: MRT4577_160245C.1.pep
ATPASRPLSPPHASSPLSSSAAAAAAAMGRGKFKGKPTGRRNFSTPEEIASGTSGRPRSFKKNVAEAEEEEEEVEESEDEESEDDGEEKKHKGTEGVIQIENPNLVKAKNIKAKEADLGETTELSRREREEIEKQKSHERYMKLQEQGKTEQAKKDLERLALIRQQRADAAKKREEEKAAKEQRKTEARK

SEQ ID NO: 250723 - protein, 47 aa, Zea mays
  unsure (1)..(47): unsure at all Xaa locations
  Clone ID: MRT4577_160246C.1.pep
MAAAVLGQXWVRNLRSRGKLALGVLPQSYIHTSASLDISRKWEKKNK

SEQ ID NO: 250724 - protein, 75 aa, Zea mays
  Clone ID: MRT4577_160247C.1.pep
IWTLVPPNAYRTTETTKRSHLAPLASPPRLRAIPREQPLRPARGQSGLLRSRRYRARGRRHHHGRHRHHGTLRLV

SEQ ID NO: 250725 - protein, 154 aa, Zea mays
  unsure (1)..(154): unsure at all Xaa locations
  Clone ID: MRT4577_160248C.1.pep
RRPTLLGAWARVRAAQRXHXFLPALSQLAVVDPVAYLLQQLLASNPLALAXIVAFLHPXQLQQFVPALSQLALVYPAAXLHQQQLISSCPLAVVYAPTFLPHLLLRQFVPALTQLAVAYPAVFLLPLLPFIPLSVAVSAAFLLPRRLLLVSLAV

SEQ ID NO: 250726 - protein, 79 aa, Zea mays
  Clone ID: MRT4577_160249C.1.pep
KKWGPLVTQIALCSPVASKSPNPLFKIWEKFWFWGPICPAQLKGFLFLGFGFKPSFGVLAQPFWVWFPKKKNSQCIFFV

SEQ ID NO: 250727 - protein, 96 aa, Zea mays
  Clone ID: MRT4577_16024C.1.pep
RQPPPPPSPLPPPRPPLPPRPDPEPPPRPPPPPPPRPDPPPRPDPPPAPPSGPNPPSPPPTTPPRPPPVIPPMPPATPPMPPRPAPAPANPPTPPT

SEQ ID NO: 250728 - protein, 124 aa, Zea mays
  unsure (1)..(124): unsure at all Xaa locations
  Clone ID: MRT4577_160250C.1.pep
PPPRGPPRGPGLKNRPPRXNFGPPPRTPXGXSIKQILRPXGGPPPGGPXPRKGWGPPPPRRGPPGQRPGPGRQSWVSRPQRLPPIGPETPPGPKRPPPKTPPLRKGPPVKGWGPSPNPKGSGRP

SEQ ID NO: 250729 - protein, 206 aa, Zea mays
  unsure (1)..(206): unsure at all Xaa locations
  Clone ID: MRT4577_160251C.1.pep
MAWGACTAVAAALLLLLLLAAAAAGGNGGVHCLDLDLEEGRRHHLSRRALQGRQRRHHLRSRAVGGATVLELRHHSFSPAPANSREEEADALLSTDAARVSSLQGRIEHYRLTTTSSSAEVAVTASKAQVPVSSGARLRTLNYVATVGLGGGEATVIVDTASELTWVQCAPCESCHDQQGPLFDPSSSXSYAGVPCDSPSCDALQQ

SEQ ID NO: 250730 - protein, 236 aa, Zea mays
  Clone ID: MRT4577_160253C.1.pep
MAWGACTAAAAALLLLLLLLAAAAAGGNGGVHCLDLDLEEGRRHHLSRRALQGRQRRHHLRSRAVGGATVLELRHHSFSPAPANSREEEADALLSADAARVSSLQGRIEHYRLTTTSSSAEVAVTASKAQVPVSSGARLRTLNYVATVGLGGGEATVIVDTASELTWVQCAPCESCHDQQGPLFDPSSSPSYAAVPCDSPSCDALQQQLATGAGAGAPPCDAGRPAACSYALSYRD

SEQ ID NO: 250731 - protein, 97 aa, Zea mays
  unsure (1)..(97): unsure at all Xaa locations
  Clone ID: MRT4577_160254C.1.pep
NQFGAQELGSNSQIKQFACTRLKLPFPLLAKVDVNVPKHGPLXEFVKSIPGGFLGDLVKWTFEKLLANKNVIVIRXYPPTTXSPSRFXKDIQKLLAA

SEQ ID NO: 250732 - protein, 52 aa, Zea mays
  Clone ID: MRT4577_160255C.1.pep
SPLMVVYQQMLGVLLKHGSLIRFFNRCKILVHGVKHVAASVLSQKEPEYAPV

SEQ ID NO: 250733 - protein, 95 aa, Zea mays
  Clone ID: MRT4577_160256C.1.pep
PPFFFTGRARAAPAAVSSVTGPCFSHFFDHFCPVKMADELRSTSVGQKFHGPSGLFSKISFYSAMNNPVFNNAYFSYNVPQRAYHGMNATAGLLF

SEQ ID NO: 250734 - protein, 60 aa, Zea mays
  Clone ID: MRT4577_160257C.1.pep
GTGYTRPRQPPRNHGHGECVYCCYGRYCYSMHGIQYVVWLWCGLTPTCTQVLRSSSDEYR

SEQ ID NO: 250735 - protein, 230 aa, Zea mays
  unsure (1)..(230): unsure at all Xaa locations
  Clone ID: MRT4577_160258C.1.pep
MLMQKSDWWQQYTCLLSHENAIQMPYYCMQLSKMPTKPSDCIPFSNSTMGRELCIASVRTGEITKLILATTHLESPCPAPPKWXDQMYSKERVAQAKQSLEXLGGFPNAILCGDMNWDDKGDGPFPLQDGWTDAWVELKPGEDGWTYDTKANGMLSGNRKLQKRLDRFVCKLADFKMDSIEMIGKEAIPGVSYFKEKKIRKENQRIELPVFPSDHFGLVLTITQQKDDNV

SEQ ID NO: 250736 - protein, 99 aa, Zea mays
  Clone ID: MRT4577_160259C.1.pep
GPSAHPPAGPFRACELVSVRKRGRNILCGRGPRSPCCVVGLGLRPRAPTPRHASYVALPPPRWCCAERTTFFLVPCFFFFFFFFFRNVLSYFWEATNIR

SEQ ID NO: 250737 - protein, 102 aa, Zea mays
  Clone ID: MRT4577_16025C.1.pep
RQPPPPPSPLPPPRPPLPPRPDPEPPPRPRPPPPPRPPRPPRPDPPPRPDPPPAPPSGPNPPSPPPTTPPTPPPVIPPMPPATPPMPPRPAPAPANPPTPPT

SEQ ID NO: 250738 - protein, 163 aa, Zea mays
  Clone ID: MRT4577_160260C.1.pep
MDRSYLPVAAAAVALVLVCCSGLCRGERLGARECEDLGFTGLALCSDCNALSEFVKDQELVEDCHKCCTEDSDDSISKLTFSGAIIEVCMRKLVFYPEVVGFLEEDKDDFPYVETRYSYGSPPKLIMLDNKGEQKETIRIDNWKREHIRQFLKEKVKPVKLDS

SEQ ID NO: 250739 - protein, 152 aa, Zea mays
  unsure (1)..(152): unsure at all Xaa locations
  Clone ID: MRT4577_160261C.1.pep
RDNSPLPLTPDYGPVVRYADGVFDPHFHRFVTIMEDHRHNSSNPITTIVAVGISDPXCQREIKEKICVAGGDPTIVESPTEPKWSSKGELFFITDRRSGFWNIYKWDEHSRAVTPLHSLDAEFSKPMMLNALSSYGFLVSADTGSLEVCTHV

SEQ ID NO: 250740 - protein, 196 aa, Zea mays
  unsure (1)..(196): unsure at all Xaa locations
  Clone ID: MRT4577_160262C.1.pep
MSFARMRRMQFASQLSKSIRTPSRAFSSTRPAARIFGTEHLKAKEASGFISSKYPVIDHEYDAIVVGAGGAGLRAAFGLAEAGFNTACISKLFPTRSHTVAAQGGINAALGNMHEDDWRWHMYDTVKGSDWLGDQDAIHYMTREAPQSVIELENYGCPFSRTDDGKIYQRAFGGQSQKYGXGGQAYRCCAAAERTG

SEQ ID NO: 250741 - protein, 53 aa, Zea mays
  Clone ID: MRT4577_160264C.1.pep
IPIFPPGTRLWPMITAHASNTDLPHRGKRGTACQVTGTGNIPGIVPKSPKIKK

SEQ ID NO: 250742 - protein, 143 aa, Zea mays
  Clone ID: MRT4577_160265C.1.pep
MISTKRIAQLAKKWQRMEALGRKRRLAWGTAAAAKKADRCCASVASKGHCAVYTTDGARFEVPLACLGTEVFAELLHMSREEFGFAGGHGRILLPCDAMVMEYALCLLRRGASADLEKAFLSTMAMSCHSADHAAAPYVAACC

SEQ ID NO: 250743 - protein, 49 aa, Zea mays
  unsure (1)..(49): unsure at all Xaa locations
  Clone ID: MRT4577_160266C.1.pep
ILDVAATSYXFMLHGVRRLEVLSRNPADGPLKRVTVHPADWPGSARHRP

SEQ ID NO: 250744 - protein, 66 aa, Zea mays
  Clone ID: MRT4577_160267C.1.pep
QIPRAKILVMKTIHNTSDKNQLNSEDLETYAKLFCHPLSYSQIQALAALFGWAVPDDLGGAATMVC

SEQ ID NO: 250745 - protein, 113 aa, Zea mays
  unsure (1)..(113): unsure at all Xaa locations
  Clone ID: MRT4577_160268C.1.pep
MYTWAGLFFLLPLGAAHTRRAGLFFAALKYDPAKVTFYNYRVLXRLEQNPEKPAGGELLPKSAVKNERYLTGEILSIEAEVSETEAGKNALFSNINAHDAEHRTPDEKNCYCP

SEQ ID NO: 250746 - protein, 122 aa, Zea mays
  Clone ID: MRT4577_160269C.1.pep
RGRFNQLGALNFAGYLPPQFPFSPLVSAYPPQFFSFNPLAAFDFAGFFQQQQLLPFSPLGYFSPSAFFTQQQLFPFFLPAMPNAGPLFQLPPLVPFHPLVFSNPPVFFPPPLLGGAPFLIAF

SEQ ID NO: 250747 - protein, 652 aa, Zea mays
  Clone ID: MRT4577_16026C.1.pep
ETVKVPDGSNVLTNEQLDAYVVNPSLSQDQLFSILDVSPSCAYIGTNTKVSVTGTFLVNKEHVESHRWSCMFGDVEVPAEVLTDGTLRCYAPAHQSGRVPFYVTCSNRVACSEVREFEYRDSEAHYMETSRSQANGVNEMHLHIRLEKLLTLGPDDHQMLVISSGNEKYEIMNAINSLMLDGKWSNQESSVKEVVSTARVQSLKKLVKEKLHQWLICKVNDDGKGPNVLCKEGQGVIHLVAALGYDWAIRPIMIAGVNVNFRDAHGWTALHWAASLGRERTVSVLIANGAAAGALTDPTSEFPSGRSPADLASVNGHKGIAGFLAESALTSHLSALTIRESNDSTVEACGLPFAEDLTGIDSVHLAGEGPDAESLEGSLSAVRKSTQAAARIFQAFRVESFHRKKVVEYGDDTCGLSDECTLSLVSLKNVKPGQHDTHLHSAAVRIQNKFRGWKGRKEFMIIRQRIVKLQAHVRGHQVRKNYRKVVWSVGIVEKVILRWRRKRPGLRGFRPQKQLEGPSQIQPAKAEDEYDFLHDGRRQAEARLQRALARVHSMSQYPEAREQYHRLTTCVAEMKQSRVCFRSLLQDVFYFPSGFDHDLMLATLEQMMQDEMLSQAAGGADDFMAGLEDLICIDDAPPRCLPFGEAEPFYIR

SEQ ID NO: 250748 - protein, 112 aa, Zea mays
  Clone ID: MRT4577_160270C.1.pep
MAQRLIKKNVDALISTNPPGFIPREITNLLEKSFEWNVSFTESTIIYSTVSFQVNAINAEIDGGNILPTTSSSHPSSTILSQAGQGSGVAQNKGAAFIRVRVADTRESQSFV

SEQ ID NO: 250749 - protein, 215 aa, Zea mays
  unsure (1)..(215): unsure at all Xaa locations
  Clone ID: MRT4577_160271C.1.pep
MDNHTSSPPHEVTMDISSASGSKMCRGASCDFADSTNTSKDAKERSASMRKLLIAVILCVIFMAVEVVGGIKANSLAILTDAAHLLSDVAAFAISLFSLWAAGWEATPRQSYGFFRIEILGALVSIQLIWLLAGILVYEAIMRLVNGSXGEVQGSLMFAVSAFGLFVNIVMAVLLGHDHGHGGHXHXHSHDHGHDHGDSEDDHGHDHEQGHAHHH

SEQ ID NO: 250750 - protein, 47 aa, Zea mays
  unsure (1)..(47): unsure at all Xaa locations
  Clone ID: MRT4577_160272C.1.pep
ASSTLSRVGASPVTSGAGIASRIEMVILNISGQTRRWRFKKXSGEAA

SEQ ID NO: 250751 - protein, 60 aa, Zea mays
  Clone ID: MRT4577_160273C.1.pep
YRLKAPLPLDPRWIPGSYSKIWLAWSGVRECSTSRVCRSLRCRCTRVCMQTTMGQKYVCE

SEQ ID NO: 250752 - protein, 118 aa, Zea mays
  Clone ID: MRT4577_160274C.1.pep
KVANHTYIAGVPPSFTAACGCHGSSCYGHGLPIIPRDPSRRAPSPARPRRRCWPPTSATRLTHVNTLGASLLLAPATIVIVYATSYLLLLLEDIPRSHKSYMDAPADNYTASRELLVK

SEQ ID NO: 250753 - protein, 221 aa, Zea mays
  Clone ID: MRT4577_160275C.1.pep
MAMMGSTSDKMYLCQVRNTNTELVKWSGASTGLSKVHWTRTTLGGPNDLGGSVTDMEYPYNAIIGRGTLNAFETILHPTYLCMKIPSDQGPIDVHGSQEAARRAEGNWIDSKAIHSIDEAEAHQQYKHKRDKAASTDQSKPMLLCEDIAKQKMLLGSQLSVEQEKTLLRFLFNNKDVFAWSANDLCGVNRDVIEHSRNVDPAIRLRKQKLQKMSDDKVEGA

SEQ ID NO: 250754 - protein, 117 aa, Zea mays
  Clone ID: MRT4577_160276C.1.pep
GTKKEGSNFFFQNQNKTGCPNMRFGHLLPRVRKGFFLGPGTNWEFWRPPSGKWPAFFGRINPGRANPGRKAQLPSPPRGKKTAHGSNVLISSPSALLKISYLRSSASAFVLGDPRPK

SEQ ID NO: 250755 - protein, 64 aa, Zea mays
  unsure (1)..(64): unsure at all Xaa locations
  Clone ID: MRT4577_160277C.1.pep
YKCTSLSTRHDAVRTTLXSSNQPVEMTLQICPERERWYSGQNDAATEVLISASVLHTHVDNNIE

SEQ ID NO: 250756 - protein, 45 aa, Zea mays
  Clone ID: MRT4577_160278C.1.pep
ERAGPAECDLLICTIVDRSPFLGVLVTHVLMCVLLCGWMPRCKEV

SEQ ID NO: 250757 - protein, 75 aa, Zea mays
  Clone ID: MRT4577_160279C.1.pep
CWPMCYACSLKALLFGTYASTGTVTTTSSCMSLRRRTLGSDPMSQALLVVLPHRLIQIGVNSRGHTTERQGVRAR

SEQ ID NO: 250758 - protein, 105 aa, Zea mays
  Clone ID: MRT4577_16027C.1.pep
RQPPPPPSPLPPPRPPLPPRPDPEPPPRPPPPPRPPPPPRPPRPPRPDPPPRPDPPPAPPSGPNPPSPPPTTPPRPPTPPPMPPATPPMPPRPAPAPANPPTPPT

SEQ ID NO: 250759 - protein, 89 aa, Zea mays
  Clone ID: MRT4577_160280C.1.pep
RGSAPDNEKCMSGVHWIVWCARRQKVVALCPTAIIVVGAINTTPTTSIQHTQEFNTSTFNTRAKNSFQDTFKASNPLQVPQLRQVINSD

SEQ ID NO: 250760 - protein, 100 aa, Zea mays
  Clone ID: MRT4577_160281C.1.pep
KRSYYTSDQRARGWVNTKQAHSMHLLGEEPLDTEQPGARAAGGADFHPPAANLVPVPDARVHAQVQAPDAATQAGLPAVGNAGGFVLVLPRRCPPVGEQL

SEQ ID NO: 250761 - protein, 61 aa, Zea mays
  unsure (1)..(61): unsure at all Xaa locations
  Clone ID: MRT4577_160282C.1.pep
RDSQEIRARGYLLLXRLAXMVRLTISDSGVHTVRHRSRLLRXVASTTXRITDSETATTLTE

SEQ ID NO: 250762 - protein, 117 aa, Zea mays
  Clone ID: MRT4577_160283C.1.pep
MSAQNSVGIKQLLDAEQDASKIVQKAREYRTKRIREARDEAKQEIADYKAKKEEEYKKFEAEHSKGNEQAEAEANKDAETQIKSIQEAGKKGQAGVVKNLLSAIFDVNPVPPTNTKS

SEQ ID NO: 250763 - protein, 99 aa, Zea mays
  Clone ID: MRT4577_160284C.1.pep
VLAGALKGLPPLGRRPSSLAVVCSKKKIKTARPYGMGGGLPVNFNPTGRKAKARALSHFVTNSGSTVDGSGQFSNKDNCFPTGNFSFVGTIGLFIWAST

SEQ ID NO: 250764 - protein, 93 aa, Zea mays
  unsure (1)..(93): unsure at all Xaa locations
  Clone ID: MRT4577_160285C.1.pep
EVKNFFNLIKVAEEQLHKHITVSILAFVSRLMTTKSKTMFSNNCYNELLNLISEVFPPNHKXPKDVYQCWKHLSGXGMDYQKIDVCPDNCMLF

SEQ ID NO: 250765 - protein, 182 aa, Zea mays
  Clone ID: MRT4577_160286C.1.pep
APAVAHLDRPQFLPSLHSASASYVRGAATAIFLSSLVASTVVPAPPRPSHRPLPNQVRRPVAGPTMNPCRLLHIHSASLTLPCAVEPSSPCPTSSSRPWMSCRAASSICAAIASPCSLAMRPCSSLFGKMSGLVLVVCWEDRHCDADCLILGRTTHTWCSVNSSNQIASSKSRLRVDSDMVS

SEQ ID NO: 250766 - protein, 132 aa, Zea mays
  unsure (1)..(132): unsure at all Xaa locations
  Clone ID: MRT4577_160287C.1.pep
PFSGXTMNPARSFXPAMQAGNFACIWVSWVGPLVFVGLEWLVYTIVFIPSVHLVGQQEYLSKFAVSPYRSFMLISPSWWSCHLTLSAVIMSWSCWHFTNVWFSFPHSTEGANIPPCKGQKFSVLELYKFNAQ

SEQ ID NO: 250767 - protein, 69 aa, Zea mays
  Clone ID: MRT4577_160288C.1.pep
MEGYDREFYQFSDQLRLQTDVFSGLSLGDSIWSPVGRRNISNDVLFGVCASSANSAAKSNAVVGLKLND

SEQ ID NO: 250768 - protein, 105 aa, Zea mays
  Clone ID: MRT4577_160289C.1.pep
FDGFCNRELTVAEIKQIAGRAGRYGSKFPVGEVTCLNPQDLPLLHSSLKSASSIIERAGLFPTFDLLSLYSRLHGTDFFHPILERFLEKAKLSPDYFITDCEDCW

SEQ ID NO: 250769 - protein, 75 aa, Zea mays
  unsure (1)..(75): unsure at all Xaa locations
  Clone ID: MRT4577_16028C.1.pep
MKALIXVGGXGTRVXXLNFNLLKXVVDFXNKXMIXXXIXALKEVGVIEVVLVIKYRLEVMINLLKDFEDNIGIKI

SEQ ID NO: 250770 - protein, 48 aa, Zea mays
  Clone ID: MRT4577_160290C.1.pep
SFLQNWFMKSLNKKFRKEWSERLFSCNARLFPLKKRFTKKVGKKKKEK

SEQ ID NO: 250771 - protein, 106 aa, Zea mays
  Clone ID: MRT4577_160291C.1.pep
MGSRFPSHQLSSGLYVSGRPEQPKEKAPTFGSNVMPYTGGDTKKSGELGKMFELHAERSRKSGPLGSAPSRNPSFGGAASNSGPVSNAGGRTNYSGSLFSSLLGAG

SEQ ID NO: 250772 - protein, 73 aa, Zea mays
  Clone ID: MRT4577_160292C.1.pep
MGSRFPSHQLSSGLYVSGRPEQPKEKAPTFGSNVMPYTGGDTKKSGELGKMVELHAERSRKPGPLGNAPSRHP

SEQ ID NO: 250773 - protein, 124 aa, Zea mays
  Clone ID: MRT4577_160293C.1.pep
GPRQSHTAIYTIPVYVTQDGAHRHTNRGDQWLTTIRCTTAWRRRGRGARSASAATPRDDSSKSSGRQFQEVDTVARAGANHHQPSMCTTWATTSWCTRPGIYEDIYTCNGEVLERKQSFLARNN

SEQ ID NO: 250774 - protein, 61 aa, Zea mays
  Clone ID: MRT4577_160294C.1.pep
HRHIMVQSGIDWVLSRMNDRRLLVQVIVHELEGQHSCWASYRAGGTAYYCLGHNLTARSVM

SEQ ID NO: 250775 - protein, 122 aa, Zea mays
  Clone ID: MRT4577_160295C.1.pep
LVRIHTSIIRHARVISSYIYLFQVLGQGKEIASSLYIISRCGGCGPPCRRGGGRASAPGSRGSGGGPASAGFAICCSGDGSSFCCPEQSSWADVRCQAVFAAKSREMAMQWEIHGLVNAMYI

SEQ ID NO: 250776 - protein, 56 aa, Zea mays
  Clone ID: MRT4577_160296C.1.pep
SPRAPIMVVSRAQARSKPYSPAKGKGICIQKALQVDRASHPTRPMPIFMLFCSTTL

SEQ ID NO: 250777 - protein, 45 aa, Zea mays
  Clone ID: MRT4577_160297C.1.pep
PSGCLNLMALLSIPDLNTCGNCASQTPTCKQPPTHYMPLFILSHH

SEQ ID NO: 250778 - protein, 142 aa, Zea mays
  unsure (1)..(142): unsure at all Xaa locations
  Clone ID: MRT4577_160298C.1.pep
GPLLSSPLPXPLSFSSAPASVVLVVXVRLVPPVLPXRRXRRPLPRLVPLAPVLPXVLVARPALCASASGCPPSGSPSVGSWCGRPAFPRXSWSSLLLGPAALRSLSSLPLPXPPRRLSARSLFSALRRLAAPPRRGACAAAF

SEQ ID NO: 250779 - protein, 60 aa, Zea mays
  unsure (1)..(60): unsure at all Xaa locations
  Clone ID: MRT4577_160299C.1.pep
PGRYPVRXRGAARPRHRTSDAHGHRYTRTARLNRPATLAASCLACLSLNLRARVPRTACQ

SEQ ID NO: 250780 - protein, 181 aa, Zea mays
  unsure (1)..(181): unsure at all Xaa locations
  Clone ID: MRT4577_16029C.1.pep
IRHEANPQQANTFSPSCARGPPDPHGRRGTLLLLAPSTLLAPARPLKCPHLQKPWALPAAGETSSRSTRFATTRALSTRFPEGSTTRPHPPPPSRRRAPTXGRRPAPPLPRAPPPPRQAPXTSPAGRPSPPNSSPXSAPQPPAPPSQAPPASSHSXSLPPPPPPRPPFLTSSSHRLTFRRS

SEQ ID NO: 250781 - protein, 94 aa, Zea mays
  unsure (1)..(94): unsure at all Xaa locations
  Clone ID: MRT4577_1602C.1.pep
TLSXCVCSLSMNTEKRASDYTRLLGLFLVRGPTTVGSLTSFSSTGTGGSSSYFLCVLLRFVNVRRLPHRRRRHRTPRSLPVSLGLSPSPLGSGR

SEQ ID NO: 250782 - protein, 229 aa, Zea mays
  Clone ID: MRT4577_160300C.1.pep
MASGDAAAPVVQTVVLKVAIHCHGCKKKVRKVLRGIEGVQDVTVDASQHKVTVTGTVDADTLIKRLYKSGKKGVPWQCHPPAKNSEPAPEAPPAPQPAGDGGKDAAAAAAVAAADKKSEEAVKEPQGESSEEEEKKKKKPEQEQEDGAAEKKQPEAESSKEVEKVEAKTDGGDSEGAETKQSKGAANDEDEAEERQAKDAGTAEPAAVTTERSLPLPAPAPKHAYEHDY

SEQ ID NO: 250783 - protein, 137 aa, Zea mays
  unsure (1)..(137): unsure at all Xaa locations
  Clone ID: MRT4577_160301C.1.pep
MDCVVPMPNIMTTSPAGYLAVLERLTAMHKGIIKRADCGLKNPRPFCDIELLAHLTLLPLXTQQLLLALTPLLQRSLLDPVVYLQQQXXLAFHPLALANVAVYPQQLQLDHAMAALCRLAMVNPAVYLQLLASNPLA

SEQ ID NO: 250784 - protein, 103 aa, Zea mays
  Clone ID: MRT4577_160302C.1.pep
MASGAAAAPVVQTVVLKVAIHCHGCKKKVRKVLRGIEGVQDVTVDASQHKVTVTGTVDADTLIKRLYKSGKKGVPWQCHPPAKNSEPAPEAPPAPQPAGDSSR

SEQ ID NO: 250785 - protein, 360 aa, Zea mays
  Clone ID: MRT4577_160303C.1.pep
MASGDAAAPVVQTVVLKVAIHCHGCKKKVRKVLRGIEGVQDVTVDASQHKVTVTGTVDADTLIKRLYKSGKKGVPWQCHPPAKNSEPAPDAPPAPQPAGDGGKDAAAAAVAAADKKSEEAVKEPQGESSEEEKKKPEQEDGAAEKKQPEAESSKEVEKVEAKTDGGDSEGAETKQAKGAAEPAKEAPAAAGAANDEDEAKKSDKAKDAGTAEPAAVTTERSLPLAPAPKHAYEHEYRPPYYVAPAQPVLSYHAAQRSSSVSHFAPQAQPAYSTQQAHPHQAYYSAQPQPGKQWSPSYLYMPYPHAAAPEPYYQQDYYGPPGMHASPMHDSSCERRADRRGPGRRGQQQQQQQVVGGRRRR

SEQ ID NO: 250786 - protein, 116 aa, Zea mays
  unsure (1)..(116): unsure at all Xaa locations
  Clone ID: MRT4577_160304C.1.pep
RTFNSYITRRVILMGERSYIISILLYLSXXXTFFFCGIVMLHFTLHNVTLSFMFTTKHTFVTLSSIAXLFLFLYFGMVAFDYYKWELASYISXKPISLKSNIFGLVLVXRAAILFP

SEQ ID NO: 250787 - protein, 68 aa, Zea mays
  Clone ID: MRT4577_160305C.1.pep
PGGGGACCCCLLFSILELARRGDDAVVSNGRVLASHGYVLWCVTWLRWCCHFNRATPRVYIGYQPTTS

SEQ ID NO: 250788 - protein, 132 aa, Zea mays
  Clone ID: MRT4577_160306C.1.pep
MASGAAAPVVQTLVLKVAIHCHGCKKKVRKVLRSVEGVQNVTVDASQNKVTVVGTVDADTLIQRLYKSGKKGEPWQCHPPIKKSEPAPEAPPTPQPAGGGGKDAATAAAAVDKKPEEPVKKPQGDSGGKRHR

SEQ ID NO: 250789 - protein, 195 aa, Zea mays
  unsure (1)..(195): unsure at all Xaa locations
  Clone ID: MRT4577_160307C.1.pep
AAPRPAPPAGRTRTPRPQAGTGRAPGRRERKGGXAAPPARARADXDXXXKXXXXGXSGGGGRXXXXRXXXXXXXTSXXTTXGXDXKKRTXEXXGKXXKXQXXXTAGQERXXXXTXAXXXGXXXXXXXXXXTXEXXXNNSRNGXRNKEQXAXXKGNKXXGGNKAXXDESKRXEXXAKGQAXAXEXGNKXXETRAKT

SEQ ID NO: 250790 - protein, 65 aa, Zea mays
  Clone ID: MRT4577_160308C.1.pep
MENNRQQQQAPPPPGYPTAAAGLEQEQGGRKGRRREKTTSRGDKGFIEGCIAALCCCWICEMCCD

SEQ ID NO: 250791 - protein, 347 aa, Zea mays
  Clone ID: MRT4577_160309C.1.pep
MASGAAAAPVVQTVVLKVAIHCHGCKKKVRKVLRGIEGVQDVTVDASQHKVTVTGTVDADTLIKRLYKSGKKGVPWQCHPPAKNSEPAPEAPPAPQPAGDGGKDAAAAAAVAAADKKSEEAVKEPQGESSEEEKKKPEQEDGAAEKKQPEAESSKEVEKVEAKTDGGDSEGAETKQAKGAAEPAKEAPAAAGAANDEDEAKKSDKAKDAGTAEPAAVTTERSLPLAPAPKHAYEHEYRPPYYVAPAQPVLSYHAAQRSSSVSHFAPQAQPAYSTQQAHPHQAYYSAQPQPGKQWSPSYLYMPYPHAAAPEPYYQQDYYGPPGMHASPMHDSSYRIFDDENPNSCSVM

SEQ ID NO: 250792 - protein, 139 aa, Zea mays
  Clone ID: MRT4577_16030C.1.pep
VWSVGIVEKVILRWRRKRPGLRGFRPQKQLEGPSQIQPAKAEDEYDFLHDGRRQAEARLQRALARVHSMSQYPEAREQYHRLTTCVAEMKQSRMMQDEMLSQAAGGADDFMAGLEDLICIDDAPPRCLPFGEAEPFYIR

SEQ ID NO: 250793 - protein, 108 aa, Zea mays
  Clone ID: MRT4577_160310C.1.pep
VKGLKFSPYKPNTPLISRNYIHGTWSRVFFLGVRSRGAVFQTSVRPVCILPAFQIQIFLFKKKKKKKKKKKKKKKKKKKKKKKKKKKKKKKKKKKKKKKKKKNKKKKK

SEQ ID NO: 250794 - protein, 242 aa, Zea mays
  Clone ID: MRT4577_160311C.1.pep
MASGDAAAPVVQTVVLKVAIHCHGCKKKVRKVLRGIEGVQDVTVDASQHKVTVTGTVDADTLIKRLYKSGKKGVPWQCHPPAKNSEPAPEAPPAPLPAGDGGKDAAAAVAAADKKSEEAVKEPQGESSEEEKKKKPGQEQEDGAAEKKQPEAESSKEVEKVVEAKTDGGDSEGAETKQAKGAAAEPAKEAPAAAGAANDEDEAKKSDKAKDAGTAEPAAVTTERSLPLPAPAPKHAYEHEYR

SEQ ID NO: 250795 - protein, 219 aa, Zea mays
  Clone ID: MRT4577_160312C.1.pep
MASGAAAPVVQTLVLKVAIHCHGCKKKVRKVLRSVEGVQNVTVDASQNKVTVVGTVDADTLIQRLYKSGKKGEPWQCHPPVKKSEPAPEAPPAPQPAGGGGKDAATAAAAVDKKPEEPMKKPQGDSSEEKKKKPEEAAKEPQSEKKKPEEAAKEPQSEKKKPEEVVKAPQSEKEEPQSEKKKPDEAAESSKEKEKKPEEPVKEPKAESSKEEKKKKKAP

SEQ ID NO: 250796 - protein, 355 aa, Zea mays
  Clone ID: MRT4577_160313C.1.pep
MASGDAAAPVVQTVVLKVVIHCHGCKKKVRKVLRGIQGVQDVTVDASQHKVTVTGTVDADTLIKRLYKSGKKGVPWQCHPPAKNSEPAPDAPPAPQPAGDGGKDAAAAVAAADKKSEEAVKEPQGESSEEEKKKKKPEQEQEDGAAEKKQPEAESSKEVEKVEAKTDGGDSEGAETKQAKGAAAEPAKEAPAPAGAGAANDEAKASDNAKDAGTAEPAAVTTERSLPLAPAPAPKHAYEHEYRPPYYAAPAQPVLSYHAAQRSSSVSHFAPQAQPAYSTQQAHPHQAYYSAQQPQPQQGKQWSPSYLYMPYPHAAAPEPYYQQDYYGPPGMHASPMHDSSYRIFDDENPNSCSVM

SEQ ID NO: 250797 - protein, 83 aa, Zea mays
  Clone ID: MRT4577_160314C.1.pep
MATTSTPRLATLLVLLAAASPLLSAAQKDAPKAPAAAKAAPGPAASSSSGAGAAYAAPLTDVYQALKDDQFCEFNQLLHVSSR

SEQ ID NO: 250798 - protein, 345 aa, Zea mays
  Clone ID: MRT4577_160315C.1.pep
MASGAAAAPVVQTVVLKVAIHCHGCKKKVRKVLRGIEGVQDVTVDASQHKVTVTGTVDADTLIKRLYKSGKKGVPWQCHPPAKNSEPAPEAPPAPQPAGDGGKDAAAVAAADKKSEEAVKEPQGESSEEEKKKKPEQEQEDGAAEKKQPEAESKEVEKVEAKTDGGDSEGAETKQAKGAAAEPAKEAPAGAANDEDEAKKSDKAKDAGTAEPAAVTTERSLPLAPAPKHAYEHEYRPPYYAAPAQPVLSYHAAQRSSSVSHFAPQAQPAYSTQQAHPHQAYYSAQPQPGKQWSPSYLYMPYPHAAAPEPYYQQDYYGPPGMHASPMHDSSYRIFDDENPNSCSVM

SEQ ID NO: 250799 - protein, 64 aa, Zea mays
  Clone ID: MRT4577_160316C.1.pep
RARCILSWWRLSLVDKRGVGSLVVGVQREAVRFVRLHSHGRALALLICVLGLGRCIVGLCQGCC

SEQ ID NO: 250800 - protein, 104 aa, Zea mays
  Clone ID: MRT4577_160317C.1.pep
SLAVDCPPSCQGLSSLFPLRKITSLLLISPSHQGGLILRVCVHTCNQVLAVHHALALRSWCLSLATLRPVNHAMAHWSWIITHASLIIRGAKAQSCPTDPLEPN

SEQ ID NO: 250801 - protein, 110 aa, Zea mays
  Clone ID: MRT4577_160318C.1.pep
ARESEHNNLKKRSILKERPPLDDVSNTTIETSILKDKSTLCSHEAIMNPQNIFADDDETKGCHKWAKDGMEGTHFTANDSHKNDKYVLHKRLIKKKAEVTIANGGWSHDV

SEQ ID NO: 250802 - protein, 207 aa, Zea mays
  Clone ID: MRT4577_160319C.1.pep
MDRLEERNIKKGEREMEEARKEEERKEEAGDRNTQEPQQGQGLSLSLANGSDSGRSGMLPMSNPSANPTQLTIFYGGSVCVYDSVPPEKAQAIMLIAAAAAAAAATKGSAATAFNPPMSTSVAAGQAQVVADPSSISKLQADLPIARRHSLQRFLEKRRDRVVSKAPYSPAKSFDGMESAGMEMTADGKQGARPSILKGWGAAKSEV

SEQ ID NO: 250803 - protein, 379 aa, Zea mays
  unsure (1)..(379): unsure at all Xaa locations
  Clone ID: MRT4577_16031C.1.pep
SKPTWGPEDQQRLAKNSLKLKGKGPKQESSAKEVVSTARAQSLKKLVKEKLHQWLIRKVNDDGKGPNVLRKEGQGVIHLEAALGYDWAIRPIIIAGVNVNFRDAHGWTTLHWVAYFGKVCSHTLKQFETGMSMLSXVLCKGSYLYFFHIPLSCXVCTLVGXGPFSIIEPYILCFFRERTVSVLIXNGAAAGALTDPTSEFPSGRSPADLASVNGHKGIAGFLAESALTSHLSALTIRESNDSTVEACGLPFAEDLTGIDSVHLAGEGPDAESLEGSLSAVRKSTQAAARIFQAFRVESFHRKKVVEYGDDTCGLSDECTLSLVSLKNVKPGQHDTHLHSAAVRIQNKFRGWKGKKEFLIIRRRIVKLPVNPNHKCPLWN

SEQ ID NO: 250804 - protein, 230 aa, Zea mays
  Clone ID: MRT4577_160320C.1.pep
MDRLEERNIKKGEREMEEARKEEERKEEAGDRNTQEPQQGQGLSLSLANGSDSGRSGMLPMSNPSANPTQLTIFYGGSVCVYDSVPPEKAQAIMLIAAAAAAAAATKGSAATAFNPPMVHTATVAPAAVFSPVLTRSPSLQSTSVAAGQAQVVADPSSISKLQADLPIARRHSLQRFLEKRRDRVVSKAPYSPAKSFDGMESAGMEMTADGKQGARPSILKGWGAAKSEV

SEQ ID NO: 250805 - protein, 144 aa, Zea mays
  Clone ID: MRT4577_160321C.1.pep
VLCIVVAITIASLTWSSRNIIQALLMIKKSLPEFSYSDPDSIRFCSTSFSRLYSLPFFFLHSLLALFLLLLRPNSTPVGWFHAPACPFQSTGDFLGHHPYLLLLDLVAYCSWIFVGCRWKDEDSGRKTSCWSGYFGDGWRRGRT

SEQ ID NO: 250806 - protein, 116 aa, Zea mays
  Clone ID: MRT4577_160322C.1.pep
MRSRFPLTVFPPCVPSRADPSGLGHAATIYSSVQGPPGVETPTQYLNFSVSSATGYNKLHLLPTTLYSTMWTSVPVSMEGHICNCSKTYVTSKTCHHVRLHVYDKIGVVEHLRNSA

SEQ ID NO: 250807 - protein, 81 aa, Zea mays
  unsure (1)..(81): unsure at all Xaa locations
  Clone ID: MRT4577_160323C.1.pep
HRRPGNHKKSDNQVYPTTGQPNIIFALPLCFLWPXLARCLLTANHXSPQLLRQAPISXPFFPPSLFTQRAIPESRKAPSFP

SEQ ID NO: 250808 - protein, 84 aa, Zea mays
  Clone ID: MRT4577_160324C.1.pep
NINFTHDRPRHTTIEHACKLFFFIQKIPRGGDDDDVLLVLHACSPLPTTGVAEIWGGLLLLLGGRAGDEGLVDHPGKAGANHGP

SEQ ID NO: 250809 - protein, 61 aa, Zea mays
  Clone ID: MRT4577_160325C.1.pep
HYLRIQSQTRILTTSYRRNIQGSFSMAALLAPEHLRHFLQLCLVSPDSQKAVAILFTQELE

SEQ ID NO: 250810 - protein, 77 aa, Zea mays
  Clone ID: MRT4577_160326C.1.pep
MRVLLVAVALLALAESPTSTHTSGGCGCQPPATVYVPSSVHLPPSVHLPPPVHIPPSVHLRTPVHLPPLVHVPASVH

SEQ ID NO: 250811 - protein, 53 aa, Zea mays
  Clone ID: MRT4577_160327C.1.pep
GIRALHGCPPRRLQRRRRFSRVGTLVDVIRSYGACLVKIIRKVPTITDGINFD

SEQ ID NO: 250812 - protein, 143 aa, Zea mays
  unsure (1)..(143): unsure at all Xaa locations
  Clone ID: MRT4577_160328C.1.pep
GDXMXMXXGXKRXSRWNXXXMFXXFGSDDEXDGXFFXXNXGXFGFGIEXKGLNXLSXRXXGDKKXXEKFIDHLNGXXXDLXXKKPPPLALKSAAGKTRAAPDDDDEKFEVAPGGRIIVGEEGEKWKKKKKKKKNPRXLXCYHC

SEQ ID NO: 250813 - protein, 71 aa, Zea mays
  Clone ID: MRT4577_160329C.1.pep
RGGEIAFFYSTTGKGSSHHKQKFLLLHDPRITKGSSPGSVFLWCTRGVIIKQVNLRRGQGNPYLPVGVDIP

SEQ ID NO: 250814 - protein, 142 aa, Zea mays
  Clone ID: MRT4577_16032C.1.pep
AERPDEAGLPTNPPVEQILPSNPARWGCRSICLPTNLSAEQPNKAGLSTNLPAEQHKTTADSQANTSTEGKSRPSTMKPRLHDGTDHHQAMSRSWKRYRRVSIKHNAGYVSPLTSETGPPQPRGPQHRGLYSTRHAPMHDER

SEQ ID NO: 250815 - protein, 96 aa, Zea mays
  Clone ID: MRT4577_160330C.1.pep
MVQRLTYRRRLSYNTASNKTRLSRTPGNRIVYLYTKKVGKAPKSACGVCPGRLRGVRAVRPKVLMRLSKTKKHVSRAYGGSMCAKCVRDRIKRAFL

SEQ ID NO: 250816 - protein, 70 aa, Zea mays
  unsure (1)..(70): unsure at all Xaa locations
  Clone ID: MRT4577_160331C.1.pep
KIFWEQGLGCQKLEGPFGGSLGPLRIGLTAWIAFLPPSLLTSHRAAVHTTAVQKPNYKPXPTRSHASADA

SEQ ID NO: 250817 - protein, 55 aa, Zea mays
  Clone ID: MRT4577_160332C.1.pep
VVVHISTQDHGIEGAADAYLVGLFEDTNLCPIHAKRVTIMPKDIHLAMRIRRERA

SEQ ID NO: 250818 - protein, 67 aa, Zea mays
  Clone ID: MRT4577_160333C.1.pep
VLRVSSSVSSHSAAAASHSNSPSPGDRVLQRVMADGEAVRACAAGSGRCEVMIAGASAAGRVGGRVG

SEQ ID NO: 250819 - protein, 790 aa, Zea mays
  Clone ID: MRT4577_160334C.1.pep
MRGRYFRDVSIVRADNGDRTSPAPEENEVVIFRSFFKAGLRFPLSNFVVEVLKIYQVYLHQITPEAIIRMGIFVWAVRSQGLEPNAKSFCSMHELLYETKPWGKEQYHNNFGYYSFVARSGSSCPVPTFRKRWPRDWMKEWFYVKNDLKAREDIKEVIMHPIWQHFGLRKPKVEIDEAAEECRKAFGIVCSFIGTRDLVQEHIAFRVWPLVEKWEMPKETINKSDEGGLVRLKYTFRYEAAPSEPAPKRKKVKVLTHRPRYIEPAEVPEFGGETSSATEAKELAFTQEIEEPAVKPKVNKIEEPGVEDKISVLSPSTEVTVPKAQKDLIVTPKRKRMVNVLDVLETIKSSSSTPGKTAESLKTQAKTKLTEAEAAKSQAETESGPSKPAKEKSLETGEEETKREAAKQILPKRTVSSTPEASSKVPDYIVRHASRKRLYEEEKREAQYYDRKLKYQKGALIFNGSGEEDFLYCLPDSKEIFVCREMGKSFGFPTLEDGLSVLSKDELADSLAYNSLKILNSLLNKIQEDEATSKAQAEAQICEIEDLRKQLAEAKLKCAIAEADRDASDYWKNYWEKIVVELRSSKERCYEKSVACVQKIKTSFANIGAYSNEDNFVLGNPEGPIEWINGEAEAFEEVLNGRGDVCAFSGARGIAAILEKAGCEHVKILAQAEAAFSIDDTKDPSAEASLVGGEFFTDIWENGGRGIAHEIIKKNEKDTHDTREATKAVEKAAELERRIAELSSPPEPFESMADPEAEKEDEITKVAEAIMDEAVSRLLNEAAEIVLKEE

SEQ ID NO: 250820 - protein, 174 aa, Zea mays
  Clone ID: MRT4577_160336C.1.pep
FSTPLRALFSPGTAASSTSALPPPRRPPLAGALLFLSLGAVAGCALSTRRLPFLRAISSARMESTSTTVPSIVVYVTVPNREAGKKLSASIISEKLAACVNIVPGIESVYWWEEKVQTDAEELLIIKTRESLLNALTEHVKANHEYDVPEVIALPISGGNLKYLEWLKNSTREK

SEQ ID NO: 250821 - protein, 51 aa, Zea mays
  Clone ID: MRT4577_160337C.1.pep
SGLVEVAFLHKVSNIRITYERVLVACTMNYFDFCLTITLVLTEAHRFLYGS

SEQ ID NO: 250822 - protein, 68 aa, Zea mays
  Clone ID: MRT4577_160338C.1.pep
KPPPDPSNFCTLEGETWREKTLPSLASTWHPPKMSIHLGDQNKKGQKTRLRGSRAQWGEVKAAIFSCS

SEQ ID NO: 250823 - protein, 228 aa, Zea mays
  Clone ID: MRT4577_160339C.1.pep
ALSAGGSFTPHVIIVGTGEDVAARIMSFSQKGPRSVCILSANGSISNVTLRQPDASGSTFTYEGRFEILQLMGSFTMAEEGRRRTGGLSVSLAGPDGRVVGGVVAGMLRAASPIQVIVGSFLPNSLKQHQRRRMSMQQPSPVPALPAPVAPPPPVLTAATPISQAGPGNGFHAPPPPHSAAPPQPHANAMNLNATTTGFTMVGWPASSPQPMAYRASPDINVSLTPQE

SEQ ID NO: 250824 - protein, 171 aa, Zea mays
  Clone ID: MRT4577_16033C.1.pep
VWILLPSCLSLYSTRHHVPRQAIGILCGLLSGALLDGEQFPGRDRQGAALPAQRMIRSAGINLLQRSRSTVSTPGNGLLLSLAIPRTAPEMMSLRSAAFPQCSSFDGDKKPAPRILAHQMPTGPVRTHYAVAHRTQHVLNGDRDTPVSAHYQQNTPVIVVQSSPSLPIGTA

SEQ ID NO: 250825 - protein, 60 aa, Zea mays
  Clone ID: MRT4577_160340C.1.pep
ARAGCAVPHLRLWFRSPLVSAVLLWRCGGLGPPFLLPPPALRAPVVHRMAGGQLGRVRAS

SEQ ID NO: 250826 - protein, 111 aa, Zea mays
  Clone ID: MRT4577_160341C.1.pep
MSGEALYAMGCGELAGQPTMVKPVVVAFRFMALAWGWGGAAECGGGGAWNPFPGPACEIGVAAVSTGGGGATGAGNAGTGEGCCMLILLLWCCFRLLGRKLPTITCHAKGL

SEQ ID NO: 250827 - protein, 47 aa, Zea mays
  Clone ID: MRT4577_160342C.1.pep
PLPRTYLSPPLGASAQFLVGFKIFPKDLRLSSHLKRTPPVFPPLSGP

SEQ ID NO: 250828 - protein, 95 aa, Zea mays
  Clone ID: MRT4577_160343C.1.pep
GSKANHTKSGGCGSGCGGGGSGTLFSSSAAPDQVQSRSDGFGSACGGEGCASGSMVAKGSNGRHAKSGGCGAGSGAEGGCGAEACGGGCGTVFNA

SEQ ID NO: 250829 - protein, 117 aa, Zea mays
  Clone ID: MRT4577_160344C.1.pep
LTTSNVLSFASLLIKLSRQQQQLHAMVFIPDSCLRRTLASSLQTSWSWPPRASRFMAVVGTGPRVVVDLDVHPHRHLAAGVSSSHRTSTSTRTLLGGSGNPPGRVIPGLQAVPRQRQ

SEQ ID NO: 250830 - protein, 166 aa, Zea mays
  Clone ID: MRT4577_160345C.1.pep
SLTSMSILAATSPPGSRTPTAPAPAPASAPCWAGAGTSGAGSSAGCRRFLVSDRLLDRGAAEEDRGRRRRRRRQESLRQRRASEAVFLDVNSITARRSCGHRRPQDRGKTQGRETALFVERRSRSFTHTKKRLSRSLPVLGYHTNEMGELWAVAGASRRARHAVDV

SEQ ID NO: 250831 - protein, 78 aa, Zea mays
  Clone ID: MRT4577_160346C.1.pep
PTGARNGSPGRKPCGKTAARGHERGAHRDIPARTSARGRAAGATPPGLFIWCFTFCVLRSPLFLEAPLFFFLFSFFRK

SEQ ID NO: 250832 - protein, 302 aa, Zea mays
  unsure (1)..(302): unsure at all Xaa locations
  Clone ID: MRT4577_160347C.1.pep
MLGLRRLPAVSGRLAXRRSPXSAASSHSAVFFRTLQILVQQGPVRLQKLSAPDTGIVELRLERPEAKNAIGKEMLQGLRSAIQEVEADTAANVVLVTSSVPKVFCAGADLKERRLMGPSEVRDFVNSLRSTFSSFEALSIPTIAVVEGVAFGGGLELALSCDLRICGKDAKFSLPETGLAIIPGAGGTQRLPRIVGRSRAKELIFTGRRFDAVEAVTMGVVNYCVPAGDAYQKALELAREINQKGPLAVKMAKKAIDQGAEVDLPSALAVEEECYQQVLHTEDRLEGLAAFAEKRKPIYKGK

SEQ ID NO: 250833 - protein, 44 aa, Zea mays
  Clone ID: MRT4577_160348C.1.pep
LTFCPPPTFSFSCNSMSLFVMIAPQVCIYVISVSLGACNISCTI

SEQ ID NO: 250834 - protein, 134 aa, Zea mays
  Clone ID: MRT4577_160349C.1.pep
IALRSPWSISFPMAFLASGRSSLSSTIPVTNESQLGNTIPGPTSKCKISLRWGRYRQTGVRSRELLEADGPLLDEDLEGAKEDGAVGGGRRDGGDLRREAAGDSGEAPEAEHVGVGRAGTGAAGAEEPVNAGRL

SEQ ID NO: 250835 - protein, 53 aa, Zea mays
  Clone ID: MRT4577_16034C.1.pep
ASGGTQASPPAPQKAAPAPPGPKKPAFKLYERRSSMRSLKMLCPLLPDDYSSV

SEQ ID NO: 250836 - protein, 52 aa, Zea mays
  Clone ID: MRT4577_160350C.1.pep
PSGKLGGPGLSSILCHDANGASASACGSTCRASRWPTPWCLLSWGSESAALV

SEQ ID NO: 250837 - protein, 64 aa, Zea mays
  Clone ID: MRT4577_160351C.1.pep
TVGGRARFPAHRVKACKRAAETATPHYKIRRNSHEAKSRSVSPDRRSLSTWSCSHGGGSANLQA

SEQ ID NO: 250838 - protein, 147 aa, Zea mays
  unsure (1)..(147): unsure at all Xaa locations
  Clone ID: MRT4577_160352C.1.pep
LVFXSXWVPCVXXFFSVSSXVCXXLSXPALPXLXLXSXGRPSWXLAASSSXRLLASFAFSAAXRXXAXRXSRGVVPFGXFVXLWXFFLXCXWLXVCWPPLSPXXSRXXRASAVAAXARXXXXRXAXXXLXLSLVSAALVSLXRPXLF

SEQ ID NO: 250839 - protein, 59 aa, Zea mays
  unsure (1)..(59): unsure at all Xaa locations
  Clone ID: MRT4577_160353C.1.pep
PVSVLPRTGDGKGGGKHQLIGAPVSGGKLXFCKAQAGNKRWFKGPRKGVKKPPPPLRVA

SEQ ID NO: 250840 - protein, 155 aa, Zea mays
  Clone ID: MRT4577_160354C.1.pep
MPTARRTRIPAFGEWNHHHHGNGGGAWAPAVMTPSFDFGHAITTPHKAPQTQGRRRGAADGVVHAAKLDAAAAAAEPHQGHTQTTRRSKVADSGAYAQAAAAAARRSCFALAKPVDDDLYGVPPDMLYGKPPPPGARKDDGWRRILRLLGCSCLS

SEQ ID NO: 250841 - protein, 128 aa, Zea mays
  Clone ID: MRT4577_160355C.1.pep
RGLYSTHENLTSIVQYSGRVTSGSPCTLPCFLSGPGNFLSPCIICLTTMDDVASDVYEAWIAIIILLPLVMLAMRLRMHSEPYMHCNVSSSTQTTRNEVDDRKKARCHTDHQRGVPFLRTKLIDSWLQ

SEQ ID NO: 250842 - protein, 58 aa, Zea mays
  Clone ID: MRT4577_160356C.1.pep
GNLFTFLGMLPPFWLEHGFPPRYTLFYPPPLNNLAKPLCWALFPVCLMGLGVLFWASP

SEQ ID NO: 250843 - protein, 123 aa, Zea mays
  Clone ID: MRT4577_160357C.1.pep
DTLCTCSSHSANASRNASDITEAGTGGSESSVPVGCRSAGRSFGRRPRRAHLLSGTCLCCRSLQLVVVPPMSTTVTFVVVVVVGMPLLSSAGVSVRMSSRSVRLLQHHTIPALLHQAVDIPDQ

SEQ ID NO: 250844 - protein, 399 aa, Zea mays
  unsure (1)..(399): unsure at all Xaa locations
  Clone ID: MRT4577_160358C.1.pep
RPGFTNVDEILHTGKSASAPGIWLLAQLAAAKVVATALCKGSGLVGGLYAPSLMIGAAVGAVFGGSAAELINSAIPGNTAVAHPQAYALVXSYFLSVSLTRDSYIGLTFHTXXGMAATLASVCSVPLTSVLLLFELTKDYRILLPLMGAVGLAIWVPSVVNQSGSKDTFEATSPRHGYSSLLPPTDRNETDWRRQDGDDVELTILDVDPYHYGSNNEEMLLDDLKVSQAMTKHYVKVTPTFTIEETTRLMQEKQQSCVVVVDNEDFLEGIVTLGDLRRKGFVPSENSDSTQANSSTVDANSSLVSSCLTRGFQFHGNERGLVTCFPDTDLSTAKVLMEVKGIKQLPVVKRGAGRRNDGRRKVLGLLHYDSIGWCLREELERWKAIYQRENFQQTAVNGH

SEQ ID NO: 250845 - protein, 52 aa, Zea mays
  Clone ID: MRT4577_160359C.1.pep
SPGDVQIHLVNTLLYFQTVTTLNPILHYSLHPYITLPDTMQLPRQNLFPTHM

SEQ ID NO: 250846 - protein, 100 aa, Zea mays
  Clone ID: MRT4577_16035C.1.pep
RDIPMDLKKKPHSQQDLAGYPATLCLNNTPKHKDDVRREGFYSGGIHGAVVDMPGVTTHAKVARYGHDGPIRGRRRTAGKIWIVLRRPPPPIGGRLRFRS

SEQ ID NO: 250847 - protein, 94 aa, Zea mays
  Clone ID: MRT4577_160360C.1.pep
TSVSVLLKPWNIGEAGTSSTQLCKQLVLACMATSARGFSSAPCRDVPGTISLALVDADQDLLDLVYFHREEKLLESCVEACGYNVVLLIMSPST

SEQ ID NO: 250848 - protein, 141 aa, Zea mays
  Clone ID: MRT4577_160361C.1.pep
GPPPPTGSCPISPFIFKAPPRGCFGGGGGYPRLVAAGAPPPKNVFFFVSNPVGGPDLQRGPSFNGCCPGRNACVVFSFYKGGLVPPGDSFVVGGGLCFPPGLNGNGGFFFTMGFISRPPFFFFLGLEAQIVQGGGPRLVIF

SEQ ID NO: 250849 - protein, 100 aa, Zea mays
  unsure (1)..(100): unsure at all Xaa locations
  Clone ID: MRT4577_160362C.1.pep
APLPARISIRVILAEXAISSGATLGYQRRGALGAAQVEGLSHGCRKVFGAQGGPVVITSHDLRPGRRRRIHLTAKKPPLGRCLAPRDRLTHIKADAWADA

SEQ ID NO: 250850 - protein, 53 aa, Zea mays
  Clone ID: MRT4577_160363C.1.pep
HGLSGSERFVSSYAVLVASVHVVSEPVQIITMLGHNRDIGITDGDHPQQAPCQ

SEQ ID NO: 250851 - protein, 138 aa, Zea mays
  Clone ID: MRT4577_160364C.1.pep
QQSEIEAGPSEPAKVKSLEAEKTEIAEQILAEETGTAAPEASSKVLDYIVRHASGKKLSEEEIFEANHYARELKYPKGALEFNDTDEDDFLYCLPDNKELSVCWEMARSMEFPKLEAGLCAMTKPPPADSLAYNSLKV

SEQ ID NO: 250852 - protein, 131 aa, Zea mays
  Clone ID: MRT4577_160365C.1.pep
RISTATETGASTTVTDASTATDSAETESESETGSNTVDTGALASVTSALASASSAIDDQLASLSSDLATATGTASEAIESKIAAATSKQGAIESSAGAAASSATGDNAGAMPTAAVAMGALMGGAALFANM

SEQ ID NO: 250853 - protein, 78 aa, Zea mays
  Clone ID: MRT4577_160366C.1.pep
RRKKNYNLNLKRQGQDKYYRCTHGTPSIIFFYLRFCSSFPYCLASIMKGWRQYNTKNAGVCCSDESHHATKMKVMLQP

SEQ ID NO: 250854 - protein, 122 aa, Zea mays
  Clone ID: MRT4577_160367C.1.pep
ARELKRRAGSHSSNYHPAYGYCYWRRLPDGARCEGAGRGARDGRLVDWARAIRIRPKKMERMQHPHMGRGVLGYPPGTRGPARGRLAKSERPCPAVHGQGRHHSRGSPRRRCRCLLRPFTVR

SEQ ID NO: 250855 - protein, 63 aa, Zea mays
  Clone ID: MRT4577_160368C.1.pep
YLLEFRLRFPTSLCAPLRDFSFDSSNIVGHIGVFFRNLVLSTVACLHKPAFGPWSPNSPFCPG

SEQ ID NO: 250856 - protein, 128 aa, Zea mays
  unsure (1)..(128): unsure at all Xaa locations
  Clone ID: MRT4577_160369C.1.pep
PSLLSSPGGGVRAQHPSRVVPCSGSGSGSAXGLSTVYSPAGPRLVSFXFGRCRSAYGGGRRXAPLATVRCSGGGTKHAQDGVATAVATEAPASRXECFGVFCPTCGLLAGDTTKAWLMLVNVAGSGAA

SEQ ID NO: 250857 - protein, 213 aa, Zea mays
  Clone ID: MRT4577_16036C.1.pep
RLAASFPSRPVNNNCKDDGTTEDNKQTTRMSELVGEKSVFDLFYNGVRPDLEVGCEEVSMTCMKTHMEPTDNTRDSEFIEGETYSFDYKSTDESVCNHKGIGIEHKEQQLPDFSSAELTVSTELVQQIQIQKISSSQILTSETIQSRLSLSSEIPRNFVCGGSAAAYQQLGSNFDQGSSLTGNDATASEIECHRLQMAAINDYGFGKPEILLV

SEQ ID NO: 250858 - protein, 179 aa, Zea mays
  Clone ID: MRT4577_160370C.1.pep
MSTFPGMDLTKMDAPTLTLLGAACCVMLSMHFTVQLVSQHLFYWKNAKEQKAILIIVLMPPLYAITSFVGLLDIKGSKTFFTCLESVKECYEALVIAKFLALMYSYLNISISKNIVPDEIKGRVLHHSFPVSLFLPRNVRLEHKTLKLLKYWTWQFVVVRPVCSILIIALQLLGLYPSW

SEQ ID NO: 250859 - protein, 101 aa, Zea mays
  Clone ID: MRT4577_160371C.1.pep
GSGQALPLGKIVVVRGGKVQRSRVRHAHPRALFSSVALRISRRHRGGAAKRGLGRACLLRHGGTAVIFALKRSGDVEVVLRPPLSRLLSGGSVNEEGAVHE

SEQ ID NO: 250860 - protein, 236 aa, Zea mays
  unsure (1)..(236): unsure at all Xaa locations
  Clone ID: MRT4577_160372C.1.pep
KRWIGNSTFADMLIILARNAETKQLNGFIVKKGXPGLKATKIENKIGLRMVQNGDIVLNEVFVPEEDRLPGINSFQDVNKVFAMSRVLVTWQPIGISMGVFDMCHRYLKERKQFGAPLAAFQLNQEKLVRMLGNVQAMLLVGWRLCKLYEAGKLTPGQSSLGKAWTSRKAREVVSLGRELLGGNGILADFLVAKAFCDLEPIFSYEGTYDINSLVTGRDITGIASFKPAMVAKSRM

SEQ ID NO: 250861 - protein, 52 aa, Zea mays
  Clone ID: MRT4577_160373C.1.pep
MFGFVHHGHHGQYPPAHGCVHQPTFFIFFKVYYGYCLTVRDGYVVLAPANPR

SEQ ID NO: 250862 - protein, 117 aa, Zea mays
  unsure (1)..(117): unsure at all Xaa locations
  Clone ID: MRT4577_160374C.1.pep
QLVEIEKVVLHPNYSQVDIGLIRLKQKVSVNERVMPICLPSKDYAEVGRVGYVSGWGRNANFKFTDHLRYVMLXVPDQDQCIRHYEGSTVPEKKTPKSPVGVQPILNEHTXCAGMSK

SEQ ID NO: 250863 - protein, 39 aa, Zea mays
  Clone ID: MRT4577_160375C.1.pep
FGTQDLIVYMYSTKVDDTRIQKMLIYTFIHKRNIIWITP

SEQ ID NO: 250864 - protein, 161 aa, Zea mays
  unsure (1)..(161): unsure at all Xaa locations
  Clone ID: MRT4577_160376C.1.pep
AYPYVTLADLSSHGSAAWGLQRGKVGSLLRFIRSTLWAVQVCTNPVSRLLFFVXCLSLGPRKNDLTNYWALGPFVRPFTSLVDPGDIYPPQAPDLWVDLEVINSKIQGPKNDSLRSSLALITRPTKVWLCACALEVGILDCKTPDSLGAPEVHPMGVAPDL

SEQ ID NO: 250865 - protein, 150 aa, Zea mays
  unsure (1)..(150): unsure at all Xaa locations
  Clone ID: MRT4577_160377C.1.pep
IPDDYYIFQLLLFEDYLVGKASPMLRLSRDLYPQSHISSNGVDLNLRCVGSTATTTXLPTSYTAGLLCSTTIXSCYYRGTHAIIAAYKGPDQXSLHTASRRLNEIDKDARENGNKLFVGNLCDLAENRVVSYEAGKALADDIGIPISLIL

SEQ ID NO: 250866 - protein, 73 aa, Zea mays
  Clone ID: MRT4577_160378C.1.pep
ALTILHCTFDQSAINHEKMQVDTPTGFNQPAEQDYKLHHDLASNVRQQHYSTFTTAHLWAYNIMAQHHSAVAI

SEQ ID NO: 250867 - protein, 70 aa, Zea mays
  Clone ID: MRT4577_160379C.1.pep
KLYLFVPGMHHIARLGGAIPTTKAWLPLSLYTDAIKGPCLTCHRIVHCSTRTINTYYDGTPRYACQLLTR

SEQ ID NO: 250868 - protein, 115 aa, Zea mays
  Clone ID: MRT4577_16037C.1.pep
AFRRPKDPRRPRRLGKNQQDDIGEGEGEGAAPFRGWQRRIGSGGGQIQGGGGQIQGGDIRIVGGSIQIVGDDDESEAAVAQSGQQLNGRGEKQPGVARPRTMAGWWAGPPTLPSP

SEQ ID NO: 250869 - protein, 222 aa, Zea mays
  Clone ID: MRT4577_160380C.1.pep
MVSLRRRRLLGLCSGKDSLPVDLPKPIENEKTVEVAHSNVKPFSVHPLPLAKTSDVLIKSSNGSDDSKEEKTQYYPGKEIKCRKRHRRKQYVDQEPCIMRGVYFKNMKWQAAIKVDKKQIHLGTVGTQDEAARLYDRAAFMCGREPNFVLSEEEKQELRRYTWEDFLAVTRNTITSKKQRKVGSLRRSKADLFMGQSDGDTEMANGGGSSNSDNGDAGTSAS

SEQ ID NO: 250870 - protein, 60 aa, Zea mays
  Clone ID: MRT4577_160381C.1.pep
RPFAGLLELMKSSSRAREDSASTSSTAKVEKESRLIGIKFRSMLRVQCQAWKQADASSPL

SEQ ID NO: 250871 - protein, 55 aa, Zea mays
  Clone ID: MRT4577_160382C.1.pep
VSCPNGGVHAHSSVQFLRSCYWRLTDALEDPAFCGSHAPGSQRPPVGPSVRGRVP

SEQ ID NO: 250872 - protein, 76 aa, Zea mays
  Clone ID: MRT4577_160383C.1.pep
PPIILTGAGYKVMPMATAGIHWPEPLELVEKSPADLPAASARHATDNEVAGTDACTSAETEQDFHILPGRAYASQL

SEQ ID NO: 250873 - protein, 117 aa, Zea mays
  Clone ID: MRT4577_160384C.1.pep
AVVMIGSRQYIVMPGRYIYTQRLKGANVNDQIILNKVLLVSTREKAYIGMPVVTNAAVHAVVEEQGRDDKVIVFKYKKKKKYQRKLGHRQPNTRLRITGISGYEEYPADPILDPAAA

SEQ ID NO: 250874 - protein, 229 aa, Zea mays
  Clone ID: MRT4577_160385C.1.pep
MAQYYRCPPLSSSMTSLPAAVMATATTLPLGLLPSKTLTLSPLPSARRSLSIAAVEPRRWLLRAAAEEAPEAVEVEFVEPDAEAEEEPAVPEPVEAQLAAAGAGKDADIFAVVMIGSRQYIVMPGRYIYTQRLKGANVNDQIILNKVLLVSTREKAYIGMPVVTNAAVHAVVEEQGRDDKVIVFKYKKKKKYQRKLGHRQPNTRLRITGISGYEEYPADPILDPAAALN

SEQ ID NO: 250875 - protein, 215 aa, Zea mays
  Clone ID: MRT4577_160386C.1.pep
MRPLPAAAMATATLPLRLLPSKTLTLSTLPSLRRSLSVAALEPRRWRLRAAAEEAPEAVEVEFVEPETEAEEKPAVPEPIEAQLAAAGAGKDADIFAVVMIGSRQYIVMPGRYIYTQRLKGANVNDQIILNKVLLVSTREKAYIGMPVVTNAAVHAVVEEQGRDDKVIVFKYKKKKKYQRKLGHRQPNTRLRITGISGYEEYPADPILDPAAALN

SEQ ID NO: 250876 - protein, 72 aa, Zea mays
  Clone ID: MRT4577_160387C.1.pep
QSSPSMFSSPYPSHNFSFFASLFDSLPVPMSLDVLKIQQDYPKLPCSAFHQQCPNLHVSGHVVSTPASAQLI

SEQ ID NO: 250877 - protein, 137 aa, Zea mays
  unsure (1)..(137): unsure at all Xaa locations
  Clone ID: MRT4577_160388C.1.pep
GLEVAYRGKWIKVEPMPGAFVVKFGHQLEVVPPGFFKSVXPRGDQLNXLGGTGGAPFFMPPPKCLIGPSKKFLSGGKPPGFRPPRLGGFMGMDNPVKVGSSLTPGTDFKNVPKKKLAFFFFPRLSGHQGSPKIFFLP

SEQ ID NO: 250878 - protein, 108 aa, Zea mays
  Clone ID: MRT4577_160389C.1.pep
IRTRGRDQDHQQDSRGERARKEKKKPYPHPGLRLAMYRTEAIPSSLVISNKRSSLSCMVVSALPEPTVPSSTEVTAPVDDDGTPLRPIALPALLGEEVSPSAASQTSS

SEQ ID NO: 250879 - protein, 77 aa, Zea mays
  Clone ID: MRT4577_16038C.1.pep
VGRSSGQAGVEAAESKPLGAAAPASVSSSVVDPVEYNAMLKQKLEKDLAAIAMWRVRPLAFSCSSPAILFASNSQSS

SEQ ID NO: 250880 - protein, 442 aa, Zea mays
  Clone ID: MRT4577_160390C.1.pep
MAAATAAGAAATAAAVSLIACYILLHKSRAKLSWFPTVGFSRASGRRVRRRGLVEAIGNTPLIRINSLSDATGCEILGKAEFLNPGGSVKDRVAVKIIEEALESGDLVYGGTVTEGSAGSTAISLATVAPAYGCRCHVVIPDDAAIEKSQIIEALGATVERVRPVSITHRDHFVNIARRRALEANKLAAAQRESSEKQTNGLTHVDSEMLDDKLAVMQRESNKMQNGGPAHVNTEFSHCGKCDVNSDSKGGFFADQFENLANYRAHYECTGPEIWKQTKGNLHAFVAAAGTGGTIAGVSRYLKEKNRSINVLITRGVMYTKEEAEGKRLKNPFDTITEGIGINRVTKNFMMAELDGAYRGSDREAVEMSRFLLKNDGLFVGSSSAMNCVGAVRVAQDLGPGHTIVTILCDSGMRHLSKFFNEQYLADHGLTPTATGLEFLDK

SEQ ID NO: 250881 - protein, 71 aa, Zea mays
  Clone ID: MRT4577_160391C.1.pep
FNKTSVPKPTRLHKKAYSQHPVWLHHAFSASEAINKQIAHFHGAALNNIHNIPNLLTNLELMNPNVNETNA

SEQ ID NO: 250882 - protein, 310 aa, Zea mays
  unsure (1)..(310): unsure at all Xaa locations
  Clone ID: MRT4577_160392C.1.pep
AIEKSQIIEALGATVXRVRPVSITHRDHFVNIARRRALEANKLAAAQRESSEKQTNGLTHVDSEMLDDKLAVMQRESNKMQNGGPAHVNTEISHCGRCDVNSDSKGGFFADQFENLANYRAHYECTGPEIWKQTKGNLHAFVAAAGTGGTIAGVSRYLKEKNRSIKCFLMDPPGSGLFNKVTRGVMYTKEEAEGKRLKNPFDTITEGIGINRVTKNFMMAELDGAYRGSDREAVEMSRFLLKNDGLFVGSSSAMNCVGAVRVAQDLGPGHTIVTILCDSGMRHLSKFFNEQYLADHGLTPTATGLEFLDK

SEQ ID NO: 250883 - protein, 79 aa, Zea mays
  Clone ID: MRT4577_160393C.1.pep
MANIKNIKNDLKQPSMAFMYADLGLEAKPFWPRTSRQYKALICGRTPCASIFIRCQAGLFGAHDSIGADNMHVRFEQRA

SEQ ID NO: 250884 - protein, 133 aa, Zea mays
  unsure (1)..(133): unsure at all Xaa locations
  Clone ID: MRT4577_160394C.1.pep
MAKKVALVASLLALNLLLFGFADACGCRCGGSCPSPPGGGGGGGGGGGGGGSGGGGSGGGGGSGGGGSGGGGGGGGGGGGGGGGGGGGGGTRGRCPVDTLKLGVCANVLNGLINVNLGTPXRTPCCTLIQGLA

SEQ ID NO: 250885 - protein, 131 aa, Zea mays
  unsure (1)..(131): unsure at all Xaa locations
  Clone ID: MRT4577_160395C.1.pep
PTPTTFLLIVETHVGEMGDYKSLYDPILILGPLVLRSDARTCCAEEPLLLLCVHHLHLHVDLRLPTHQVRHHLQELHSRIHRHGRHQVQALLLAHAKLLLLHPLDSYTAAQPMDPFMLXRPSALLQAGSHQ

SEQ ID NO: 250886 - protein, 77 aa, Zea mays
  Clone ID: MRT4577_160396C.1.pep
VTVLFFLSMYFKCPSIEFNFRYTIYKLSRRRAAYVSLYSMNPPPFFFFFFFFFFFFFFFFFFFFFFFFLKVGFEHMP

SEQ ID NO: 250887 - protein, 51 aa, Zea mays
  Clone ID: MRT4577_160397C.1.pep
SHIVIFKWYYEERDAVTSLSLCPWSQVVLTIELYLSKGHDIVLVSIVYSGV

SEQ ID NO: 250888 - protein, 102 aa, Zea mays
  Clone ID: MRT4577_160398C.1.pep
CCARERRRSKGTAGASLASPVRRQRRQLTGAGPMTWRISHQTARASRVGLTSPAAGTVVPVLQIWCGVVQGMGCLLAALSLGPGPCGMVWPGKGEGKARLME

SEQ ID NO: 250889 - protein, 273 aa, Zea mays
  Clone ID: MRT4577_160399C.1.pep
YGSWLLALSSDSANVSVAEKILKHFPLCSLLRRHPSPTKEMLEPLLRTASSIGLNLDVSSSKALAESLDNAKSNNPYFNKLIRILATRCMTQAVYFCSGDLTFSEYYHYGLAASLYTHFTSPIRRYADVVVHRLLAAALNIAKLPPIFQDGPQLTGIADNLNYRHRNAQMASRASVELHTHIYFKTRPTDTEARIVKIKANGFIVFVPKFGIEGPIYLTPKGDKGGDWVVDEVHQRVTKPGTNISYAILQTVRIHMEVVEPQPHRPKLQLTLI

SEQ ID NO: 250890 - protein, 122 aa, Zea mays
  unsure (1)..(122): unsure at all Xaa locations
  Clone ID: MRT4577_16039C.1.pep
PTRPPYPRSRKPGAFSFFLLRRRTCKGVSGAAVVLYNNGADAASCTGVPIATIHLPDIENINGDGSTITSGANNQVEALLSVREYTKDEGHRLTFDCISPXSWRSPSTRMKREAFILLGKCS

SEQ ID NO: 250891 - protein, 38 aa, Zea mays
  Clone ID: MRT4577_1603C.1.pep
SSFFFFFFFFFFFFFFFFFFFFFFFFFLTKKDLGAFGL

SEQ ID NO: 250892 - protein, 49 aa, Zea mays
  Clone ID: MRT4577_160400C.1.pep
FLTDFISKKTLRLQQTYGICSDVSDMSLRHKYVLPGPRPPNFKHKMSYK

SEQ ID NO: 250893 - protein, 60 aa, Zea mays
  Clone ID: MRT4577_160401C.1.pep
RPRNRGLAPPTTNRIESQLINKPSDHSAQARAAVTPSNGSVPLVLYPFALLAWRDLPARL

SEQ ID NO: 250894 - protein, 86 aa, Zea mays
  Clone ID: MRT4577_160402C.1.pep
MAARSSAAAVAVLLLAAAGAAAAAGGAEGDGDGQALMAVKAGFRNAANALADWDGGRDHCAWRGVACDAASFAVVGLNLSNLNLGG

SEQ ID NO: 250895 - protein, 105 aa, Zea mays
  Clone ID: MRT4577_160403C.1.pep
FGTRDAQSPIPHLALPSGPSVLRLAGARLALLGTKAHRRRASEPPRPIASRRRPAPTRFLLTDDVMCPAFTYGNYSIPAECANTVRSVREASRICGLIRDKRPLP

SEQ ID NO: 250896 - protein, 92 aa, Zea mays
  Clone ID: MRT4577_160404C.1.pep
PPKEQKMLGWVDKHPPKGPGFRAIMDPGMGGGYPLAPARKVARLPDRCLGKNPKERPAIREVVKVLKRVVQMDPTITTANKKGGDGRLPGKR

SEQ ID NO: 250897 - protein, 135 aa, Zea mays
  Clone ID: MRT4577_160405C.1.pep
ISRKKKKKKKKKKKKKKKKKKKKKKKKKKKKKKKKKKKKKKKLKKKNFFPWGGPPLGEIFEIFLKLGGLLTFFLGAQFPLLGGVLKFIGPVFKKFVLGKPWVSPILFLLKKFPFSQFGLKQKRPHQFPFQKFWHP

SEQ ID NO: 250898 - protein, 93 aa, Zea mays
  Clone ID: MRT4577_160406C.1.pep
SAVTAAALADGALLPRIGDRRSGLNKATATDVGLLAADPTRILEHVPCGSARTDAATAPMARADWHQTPHAHEIEVDVPGQHTEDLRIEEEDN

SEQ ID NO: 250899 - protein, 176 aa, Zea mays
  unsure (1)..(176): unsure at all Xaa locations
  Clone ID: MRT4577_160407C.1.pep
MAFDSIXSAIDXGVMLXGXSCPPAPPRGMRXFXXVYRRGAVGXSIDMGGFSGYXXLXHAVARMFGMEGXLGXXRXMGWXLVYPXHGDDXILLLGXAPWGXFVNCVXCIXXXSPXXVPQMXXDGXLGXXVLSDRACXXXVGGXAWXPRRARXPGXPSIGFCGXFGPGPGGSGWGFWL

SEQ ID NO: 250900 - protein, 59 aa, Zea mays
  Clone ID: MRT4577_160408C.1.pep
PRPRSLGVDLAHAPRFPGAYGPASQAPGVVLLRIVTFTREKSEAGPRFAGFSDGNGTDR

SEQ ID NO: 250901 - protein, 60 aa, Zea mays
  Clone ID: MRT4577_160409C.1.pep
FYWVFINSMGACLNLSFSQMISQYLAGRLDVKLDPLHLRKVSWDICLLSQIARIACLGKK

SEQ ID NO: 250902 - protein, 242 aa, Zea mays
  Clone ID: MRT4577_16040C.1.pep
MAIDHIVRAALRHRGNHKQSSAMPPYAPREQRQDGPPGEVPPMSAKDVTAIEALLGYCFIDKSLVELALTHGSFYWPNRPGDTYERLEYLGDGVLTCLMSREVFRTYRTLQPGPLTRLRAANVDTEKLARVAVHRGLYRFLRHKAPKLQDQICFFIEEMRKYPVHSNGLLDPPKVLCDIVESLIGAIYLDSNFDQEEVWRVFRTLADPLIGLETLGKHPVSELFEFCQKTHRGGEISERRMG

SEQ ID NO: 250903 - protein, 40 aa, Zea mays
  unsure (1)..(40): unsure at all Xaa locations
  Clone ID: MRT4577_160410C.1.pep
PLLFFYNFIFLXQKDSKKLYCTSQYSVYIERIVRNRVVHA

SEQ ID NO: 250904 - protein, 98 aa, Zea mays
  Clone ID: MRT4577_160411C.1.pep
DKKGGSIYPGGGVIPFYYAPEKPPPWGPPIFGLCPTLKYPLFRLLNKGITFPGGKKIPPPRAKGHGKTFSLPRNFKSPPCLVCPPQSVFFFFGGGKLF

SEQ ID NO: 250905 - protein, 134 aa, Zea mays
  unsure (1)..(134): unsure at all Xaa locations
  Clone ID: MRT4577_160412C.1.pep
SYDEDPYAEEFVINTSXALGXIDARFLPAPCLKYKETXESNDSVPIAGLCYLMHXKLVNGGIVTSWTCVNFARNVQESVDIGSCHELAPMCHASRMDFELVPMLTRYXTHPDKVERAIKACFHDAMYLLGPQRI

SEQ ID NO: 250906 - protein, 167 aa, Zea mays
  Clone ID: MRT4577_160413C.1.pep
ENETLRFLPPPSFNLSQLVQSFKVKGMSVDDLVVLSGSHTIIRSHCSSFSDRISTPPSDMNPALATVLKRQCPANPNFTNDPTVVQDIVTPDKLDNQYYWNVLRHNVLFKSDAALLTSTETARMVLENAGIRGRFERKFASAMLKMSLIEVKTAATGEIRKNCHVVN

SEQ ID NO: 250907 - protein, 112 aa, Zea mays
  Clone ID: MRT4577_160414C.1.pep
HSPGNSAMRVRRGIPIHRQQYLAMGGSWSPRIAFECDAYAQCLAPDRVSRHRCWTRIVPTVTGRSQGFAWRGVTGGVGPLLKVKLCNRHNSLSYRHTDQGRKRYSTAGLEVP

SEQ ID NO: 250908 - protein, 55 aa, Zea mays
  Clone ID: MRT4577_160415C.1.pep
HVVHCVLQSRMGRIRWRVLKWLTRSSAQHTLFGPGQLEMGPSSLCRLRVSNSSAV

SEQ ID NO: 250909 - protein, 67 aa, Zea mays
  unsure (1)..(67): unsure at all Xaa locations
  Clone ID: MRT4577_160416C.1.pep
FXEGPRAFFPFGPRQQLVTKMQQPDPSHMHPQSASWIPRHPWRKISRSSEDTTWWSTAIPNPSWFSI

SEQ ID NO: 250910 - protein, 58 aa, Zea mays
  Clone ID: MRT4577_160417C.1.pep
KINMRVALEVRSTPVFKTSHSRHTGSVRLQGEQLQCQIHRWPAWQPRRKRLSSAERSL

SEQ ID NO: 250911 - protein, 105 aa, Zea mays
  unsure (1)..(105): unsure at all Xaa locations
  Clone ID: MRT4577_160419C.1.pep
ADYFFLKIGRCAATIQSAMACEIFDSSGNDTVDADXGCANXGTFGRTPVVTGACAGDYEALELMDGCFDYPVKRACQGGNRANCGIGPALIGEDPTRHTEIVNWM

SEQ ID NO: 250912 - protein, 47 aa, Zea mays
  Clone ID: MRT4577_16041C.1.pep
PKRFVTTFITRWLDNNKKNYLEIRKKQILMFIFDVIVYYWCMGVSAT

SEQ ID NO: 250913 - protein, 209 aa, Zea mays
  Clone ID: MRT4577_160420C.1.pep
QWLTDVQTSYSADPDAQKMLSKLSINVAVVPNFVLKDGLLRYKGRLWLGNDVQLHHRVLSALHSSPLGGHSRVPVTYRRVKKLFAWKGLKTSVQHYVNQCQTCLQAEADRAAYPGKLQPLPVPSWPWATITMDFIEGLPRSGAADCILVIVDKFTKYDHFLPLSHPYTSSSVAHCFKTHIYKLHGLPAAIVSDRDPVFTSQFWRHLFKM

SEQ ID NO: 250914 - protein, 91 aa, Zea mays
  Clone ID: MRT4577_160421C.1.pep
AFARPTTMGWQTVKIMIPDLVYFLECHLAHGHGGEALTHNGGVCTRGASKGEGHACSRASSQCCWYSKCSSPPSSKLLTTKGKFHSTGVEC

SEQ ID NO: 250915 - protein, 116 aa, Zea mays
  Clone ID: MRT4577_160422C.1.pep
NHATRFKYEKVASHIHCIHILGDIYSKTAIFRKRNNGIVLNRSGNIDPSYTDSCTQIKIHVPEEVYPPCPVLFKIIEPRPRPTTPTTRELCDYDPHNNTKCKHFCSKTGTPIIHYH

SEQ ID NO: 250916 - protein, 123 aa, Zea mays
  unsure (1)..(123): unsure at all Xaa locations
  Clone ID: MRT4577_160423C.1.pep
PLFXCNAPTYFQHQLLQHILRALAHLSVANPTSYLQQLLPFNQLTVSNSAAYLQQLQQLLNPLSIXNPFFTAFLHHQQLLPYNQFSFINPVLSNHQPIHYMFHLLNYLLNVIYYCALYTPCFF

SEQ ID NO: 250917 - protein, 99 aa, Zea mays
  unsure (1)..(99): unsure at all Xaa locations
  Clone ID: MRT4577_160424C.1.pep
RPSEARSFYEILXWRXLPEERALWGTVYLTALYRTIPHLSSIIRWLSFRLASNMPTXHYRDFRPKRHFIHHLKSDSQSGVLIMKNNSDLEPRGPSVHSI

SEQ ID NO: 250918 - protein, 116 aa, Zea mays
  unsure (1)..(116): unsure at all Xaa locations
  Clone ID: MRT4577_160425C.1.pep
MMELIVALALLALVASTAFSTSYVXSCQTPPIHLPTAFYMPPPFYLPPQQQPQTWQYPTQPPQLSPCQQFGSCGVXSVGSPFLRECVXFLRHHRSPAATPYSSPQCHVLHEQCCHH

SEQ ID NO: 250919 - protein, 106 aa, Zea mays
  unsure (1)..(106): unsure at all Xaa locations
  Clone ID: MRT4577_160426C.1.pep
MGIGYVVGVLGGAILGHAAXATIQYRAVVKITEEEFFRPPMDVMMELLLRLVLCMWAGLSVSPKFLSGVPHFYENRIVSLPANLDFMIFNPPGKALPSDSNLKLHT

SEQ ID NO: 250920 - protein, 48 aa, Zea mays
  Clone ID: MRT4577_160427C.1.pep
VKGAHLKSNPWQIACTKSALKDRALEPNQVLAATSRRVVTRIPTVLQS

SEQ ID NO: 250921 - protein, 23 aa, Zea mays
  Clone ID: MRT4577_160428C.1.pep
VRLLVSYLKLHILRLRFVYSVEM

SEQ ID NO: 250922 - protein, 659 aa, Zea mays
  unsure (1)..(659): unsure at all Xaa locations
  Clone ID: MRT4577_160429C.1.pep
GGGATRAPIICVNATCHNRTKWALLRQESKFTDWQRVRMQETSKEIPAGSLPRSLDVILRHEIVEKARAGDTVIFTGTVVAVPDVMALTSPGERAECRREAPQRKMGGVQEGVKGLKSLGVRDLSYRLAFVANSVQVADGRREGDIRDRDTDGDDSERQKFTEEEEDEVVRMRNTPDFFNKIVDSICPTVFGHQEIKRAVLLMLFGGVHKITHEGINLRGDINVCIVGDPSCAKSQFLKYTAGIVPRSVYTSGXSSSAAGLTATVAKEPETGEFCIEAGALXMLADNGVCCIDEFXKMDIKDQVAIHEAMEQQTISITKAGIQATLNARTSILAAANPTGGRYDKSKPLKYNVALPPAILSRFDLVYIMIDEPDENTDYHIAHHIVRVHQKREEALAPAFSTAQLKRYISFAKSLKPQLSSEAKKVLVESYVTLRRGDSTPGTRVAYRMTVRQLEALIRLSEAIARSHLERVVLPAHVRLAVKLLKTSIISVESSEVDLSDFQDAEDGTNVPSENDAGQPAEEGAAQQQDAENDQAADNGKKKLVITEEHFQRVTQALVMRLRQHEESVKKDGDGMAGMKQGDLIIWYVEQQNAKGAYSSTAEVKEEVKCIKAIIERLIQREGHLIVIDEGTAATAEDGSRSRTSESRILAVNPNYVID

SEQ ID NO: 250923 - protein, 73 aa, Zea mays
  Clone ID: MRT4577_16042C.1.pep
NLTISLNAMLDTELAHSMCFRAELRPGLCGARCTPSWCCRNAVTARLVINEIRLREAGTIWVAKICEYEEACL

SEQ ID NO: 250924 - protein, 701 aa, Zea mays
  unsure (1)..(701): unsure at all Xaa locations
  Clone ID: MRT4577_160430C.1.pep
VNATCQNRTKWALLRQESKFTDWQRVRMQETSKEIPAGSLPRSLDVILRHEIVEKARAGDTXKLFFGLFLLGMTSFDXCFVSGISRVIFTGTVVAVPDVMALTSPGERAECRREAPQRKNGGVQEGVKGLKSLGVRDLSYRLAFVANSVQVADGRREVDIRERDTDGDDSERQKFTEEEEDEVVRMRNTPDFFNKIVDSICPTVFGHQEIKRAVLLMLLGGVHKITHEGINLRGDINVCIVGDPSCAKSQFLKYTAGIVPRSVYTSGKSSSAAGLTATVAKEPETGEFCIEAGALMLADNGVCCIDEFDKMDIKDQVAIHEAMEQQTISITKAGIQATLNARTSILAAANPTGGRYDKSKPLKYNVALPPAILSRFDLVYIMIDEPDENTDYHIAHHIVRVHQKREEALAPAFSTAQLKRYISFAKSLKPQLSSEAKKVLVESYVTLRRGDSTPGTRVAYRMTVRQLEALIRLSEAIARSHLERVVLPAHVRLAVKLLKTSIIXDSVELVTFMNXVCIMMPLMLISLILCSVESSEVDLSDFQDAEDGTNVPSESDAGQPAEEDAAPQQQGAENDQAADNGKKKLVITEEHFQRVTQALVMRLRQHEESVKKDGDGLAGMKQGDLIIWYVEQQNAKGAYSSTAEVKEEVKCIKAIIERLIQREGHLIVIDEGTAAAAEDGSGARRTSESRILAVNPNYVID

SEQ ID NO: 250925 - protein, 71 aa, Zea mays
  Clone ID: MRT4577_160431C.1.pep
CLSAFSSFPVILRYTGYRDSSFRCSRVLLQLFWKSEVEDLYTQYSLPTSGPSPRENSYGVQVRQSLLTTPA

SEQ ID NO: 250926 - protein, 121 aa, Zea mays
  unsure (1)..(121): unsure at all Xaa locations
  Clone ID: MRT4577_160432C.1.pep
IKRSGVNPAVFLKGQQLLSFSQPGGSPEAFLRQKKILPFHLKTVEKNAFFFRQQQMLPFXPQGVGNNKALLQQQQILPFYPQKVANNGALLQQQQFLPFNQQALTKPTPLLPTPPHGGAPF

SEQ ID NO: 250927 - protein, 73 aa, Zea mays
  Clone ID: MRT4577_160433C.1.pep
KLVFFIKKLWPQHWARLKSKCSQGHGLSNTRKKSKAFSSVDVLLNRSTNPRLYFSPNKNLKQEPVPFYVLPQH

SEQ ID NO: 250928 - protein, 115 aa, Zea mays
  Clone ID: MRT4577_160434C.1.pep
DSSQILESTQTQKSIKQRKGREERTDRQTDTHTQAGGGHRFRGGQKSMKRRHSPKRSHSPTHTKKPEGVQPPERDVKEAPHGQEPPLEGGHQKKGRREGSPYQKEDFQKKKKLDP

SEQ ID NO: 250929 - protein, 67 aa, Zea mays
  Clone ID: MRT4577_160435C.1.pep
GAGAHLEHDPNYHPCFSRTELVSQSDRCSHNVPMCIILADDQARPRVYVMYICMSWVGSAAKVCSRN

SEQ ID NO: 250930 - protein, 45 aa, Zea mays
  Clone ID: MRT4577_160436C.1.pep
NASEFEDCGPGGKGGKKKTKKGKEIAPFFFGLKVQSNGIMMGEIV

SEQ ID NO: 250931 - protein, 127 aa, Zea mays
  unsure (1)..(127): unsure at all Xaa locations
  Clone ID: MRT4577_160437C.1.pep
DADRLMAFACVATRCRGRYRLAQDVHGSIISRGFKKEEGCRTSFSSRRGAGYSRGRRNPARPWRPRPPSSRNRFALVMADLHGRRRDAIVMGALALAADPAVQRQVGLPGERRSVSIAHRXTVQSIF

SEQ ID NO: 250932 - protein, 60 aa, Zea mays
  unsure (1)..(60): unsure at all Xaa locations
  Clone ID: MRT4577_160438C.1.pep
RCHLESDVISGWKAVARMFPLPHCNNYPFFEIFPQYLPQMICKWVCQQEQGXPPFXRESG

SEQ ID NO: 250933 - protein, 139 aa, Zea mays
  unsure (1)..(139): unsure at all Xaa locations
  Clone ID: MRT4577_160439C.1.pep
DPRVRFEKDSFFRNILIRTHHNIPEILLSKILPVMLSSVESASLEFRSVAALSITXFVTSECXLTIDDLTIIVMLSAVNHCATSECPMRQSHQYEKSQSAESVSAQIVHQVVFPHVATECTDTDRTLRSLIILSMLISQ

SEQ ID NO: 250934 - protein, 102 aa, Zea mays
  unsure (1)..(102): unsure at all Xaa locations
  Clone ID: MRT4577_16043C.1.pep
VIRFSYTNKPTLHIHVILFSFPVQYIEMITPLEKQRRLEQILRSQDSGXFGASAIHGDKSQSEREKALNQLRSGRSAMLAPTDDAARGWDIKNIRVAINYDF

SEQ ID NO: 250935 - protein, 37 aa, Zea mays
  Clone ID: MRT4577_160440C.1.pep
QNLNASNICGTSLGYVRWTTICYTDTSLKYIYRLDTI

SEQ ID NO: 250936 - protein, 123 aa, Zea mays
  unsure (1)..(123): unsure at all Xaa locations
  Clone ID: MRT4577_160441C.1.pep
PGAPRGGTRTNKPCTVEEGMGVPIHGALHXDCGGGRXGFNNLVAGIPGRSSGPLLAKHICDHVLMDYNTLNAVQSGLGTQGVIWMDTSTGVHDSIAKLDYFYNHDNCGQSTPCQEGTPWLWMI

SEQ ID NO: 250937 - protein, 100 aa, Zea mays
  Clone ID: MRT4577_160442C.1.pep
WTNDLFFAHSLPPSLRHLAATRIPTPRYVIRSDATRELSMIFLGRKRLCRVEERYGRLVNCPCGTLRFSGSLLEHEITTVSLTPVRVPLWMLAFDWPGTM

SEQ ID NO: 250938 - protein, 130 aa, Zea mays
  Clone ID: MRT4577_160443C.1.pep
SICQKSNPHLNPSDGGANRYPEPLIKGNGPLKNDLGTHKIMGFPKFYVANKVMVTGGRNPQGVGGLKNREKPQGRLCCLEPFAKARFPPIGGPENLKKNSNLGGPKRGGPLFKKKSRVYLRANRWFLVLI

SEQ ID NO: 250939 - protein, 56 aa, Zea mays
  Clone ID: MRT4577_160444C.1.pep
LTKDMQVQECSDALFHIFFIPSSKIIYKVIYITVTFLDEGMKKMTLHIIFFRIVLV

SEQ ID NO: 250940 - protein, 106 aa, Zea mays
  unsure (1)..(106): unsure at all Xaa locations
  Clone ID: MRT4577_160445C.1.pep
GQCVEFLGPRWSPGASPXGSPQCRALQPQCSPQFRQVEPLPRYRAPSGVVLQSFLHQQPQGELPALLAAQVAQQLPALFGLQLQQPGPCPFNAVAGGVSSLGPFVL

SEQ ID NO: 250941 - protein, 96 aa, Zea mays
  unsure (1)..(96): unsure at all Xaa locations
  Clone ID: MRT4577_160446C.1.pep
MAYYQEVDYCSEEVXRSVAPXXFGRHGGGVQHHVVKEKFEEVDTVSRAGSXHHHHXHGHHGGHCFVVRETRVEDDINTCTXGEVHERRESFLARAN

SEQ ID NO: 250942 - protein, 109 aa, Zea mays
  Clone ID: MRT4577_160447C.1.pep
NSFFRSAHTHNQISPKSTRRFLPFKMQIFVKTLTGKTIGLEVESSRPLGRRYSYFPVLCSKNKIETHTPYVIGRALTVYVLRQGDQISFVCLLTTSSTRTEGLFFFPPP

SEQ ID NO: 250943 - protein, 178 aa, Zea mays
  Clone ID: MRT4577_160448C.1.pep
PPPILFFVFFTPGFEKGPSYFFVKAPFKGASGGALRGFFGSPPGGVVPNFFVGVSGPGFFCPRGGFGLASSFLNLVFWFANVWGYPPGFGVLFAPGAFVGPAPCFWPGSPRSRGAPFLGAPFLPPFFFSVFFGIKPQFLAPLAPAQIGTPLLPLFFFWRGAIFSSPFLGFFCPVFLGS

SEQ ID NO: 250944 - protein, 165 aa, Zea mays
  Clone ID: MRT4577_160449C.1.pep
MASMMSSRAGAAAAGGGEHRRQHVTVACGGLTRPSTRPVPGAAGPRPGTPRPRGPAAAAGGSSSSSPTGRAGPECNWWGAAARQQATPRRSRSGRAAGARVPTGKGNRELVRRALTPPAARGRGRGRAGGAVLLRRWSFRPAPSRLRNASSLSSQPPASPRPRPS

SEQ ID NO: 250945 - protein, 245 aa, Zea mays
  unsure (1)..(245): unsure at all Xaa locations
  Clone ID: MRT4577_16044C.1.pep
MEVHAAVGKRLWSYVRAAFFMARNGVLSNKRKLLLSVPHLLANRRRGTTRAVANLLSSHRGSTAAAAYALRRRDYEFSSCSNSSAGPSSFSSSRRRLPYFPCLSAAAEXTSASTTGTAXSLPVEPAPPLARIDYHASAAASSPGLMLRGRGDGDDLAPEDEXSTCTPSRSSSSSPALLLPGAASGEFSVRVSNYSSEDEAAGCDCDAVDADAEDFIRRFYDQLRRQNTHALLPCYMQQESVASSS

SEQ ID NO: 250946 - protein, 55 aa, Zea mays
  Clone ID: MRT4577_160450C.1.pep
RCTGDGGQPRAIKKAEDLDFGRLEFYCQWMLSVEKILSGRSNMLRSELAWSETSW

SEQ ID NO: 250947 - protein, 88 aa, Zea mays
  Clone ID: MRT4577_160451C.1.pep
KVIKSTTSNPNINRLPALLQLLFLETFNYLVPTHSVGHRIPERTRCFITATIPSPMHVGGRAIGSELALVKCSIRFDSVVAIQPTFCF

SEQ ID NO: 250948 - protein, 113 aa, Zea mays
  Clone ID: MRT4577_160452C.1.pep
TCFLVTRFLVFRTLGAVHESQSHRLARFCIPHSWLLSPAKQRLRSFGTTHSATGSAFRRIGRPGLRLQRVLFGCCSTIPCSTCVVSIVRGTAPNALVGHPCHHHTAPWSDSTG

SEQ ID NO: 250949 - protein, 172 aa, Zea mays
  Clone ID: MRT4577_160453C.1.pep
ASKNHSESKQQLVAALENELGEEGIDKRSKVISLFSITLVLFYTCGFWCLRAFARGRLFSLVFECNCVPWISCAPCCFVVLGRALIPCCFSPHSFVRVPLLFQINLQPATHSRASSPFNSISFCAFLLVLSEKKEPAFLTSSCACLLARMTSSSSDSLLVLAWIVWVCSCLA

SEQ ID NO: 250950 - protein, 279 aa, Zea mays
  unsure (1)..(279): unsure at all Xaa locations
  Clone ID: MRT4577_160454C.1.pep
MASAKESYRAELRASSRQLGERCLYSAAKWAAELLVGVELDGTPVPSAATDSPSSSSAASAGRLLHLHRSGGSSFRHRPRPGGGSSSEAGTPLGGVSYVSTPIPDDDAFDSGGDKYLLAKTYFDCREYRRAAHVLQNQVGRKAVFLRCYALYMAGEKRKEAEMIELEGSLGVSNAVNQELVALEKELSTHRRTGSIDSFGLYLYGIVLRDKGCEGLARTILVESVNTYPWNWSAWSELQSLCTSSDILNNLNLKNHWMKDFFLASAYLELXKIHEKTLX

SEQ ID NO: 250951 - protein, 105 aa, Zea mays
  Clone ID: MRT4577_160455C.1.pep
GGQSPPIFRNPHSSKFHKQKLKGTQLCLGSIFYVAGKKDTFPVGEVDPACYFPAWRLQNQKSLPCFKGTTPPNCLDDRLLTVARTVFFGLGPESRCPPRTLSENR

SEQ ID NO: 250952 - protein, 55 aa, Zea mays
  unsure (1)..(55): unsure at all Xaa locations
  Clone ID: MRT4577_160456C.1.pep
VRNTESPRVVIFGFGRXPILRLPDVLNHPRVGVHRREEHGAQLPKPRLLELLAPG

SEQ ID NO: 250953 - protein, 144 aa, Zea mays
  unsure (1)..(144): unsure at all Xaa locations
  Clone ID: MRT4577_160457C.1.pep
GVHACIHTGYWEDGGTIRSFFDANLALTEPSYKFDWYEPKTPFFTARGCLPASLLGKCYINEASISNGCLPREGLVXHSATGACSLANPGCELEYFKMTGAATLETDQEASKLLLXGAGSLVGXIARNTTITNCLIDMTAPIGK

SEQ ID NO: 250954 - protein, 119 aa, Zea mays
  Clone ID: MRT4577_160458C.1.pep
ILFRFWRLQAPSSAPLRSAPSPPRNSPTRHRRDVDLRPPLHGDRDSDPAISISTCPHCQREIPSSNIALHSAHCARNLQKCEHCGNIVPMKLVDEHYDENHAPASLFPNSKLLLDAVNS

SEQ ID NO: 250955 - protein, 123 aa, Zea mays
  unsure (1)..(123): unsure at all Xaa locations
  Clone ID: MRT4577_160459C.1.pep
VRIALSLFLFSPLSSRRLLRFKMQIFVISLSGLTITLEVVSSDTIVFVLAMIQVLVGFPPVLLRLIFAGILLEDGRSLAVFIILLVCSLHLVLRLKGGMQIFVXTLSGLTITLDVESSDTIVN

SEQ ID NO: 250956 - protein, 54 aa, Zea mays
  Clone ID: MRT4577_16045C.1.pep
CLSSLFVILLVWMVRYYNRSTLVHLFSAPDRGGRGHFSGHFAPDVMLVNLAKTV

SEQ ID NO: 250957 - protein, 94 aa, Zea mays
  unsure (1)..(94): unsure at all Xaa locations
  Clone ID: MRT4577_160460C.1.pep
PQQFRPFNQLTALNSPANXQHQQQHPLSQQAGGTPAPFXKQPQWWPSNKHGAPNAGPLXQRQQLPPSNQLALTNPKAFNQHPTIGGALFKISKK

SEQ ID NO: 250958 - protein, 94 aa, Zea mays
  Clone ID: MRT4577_160461C.1.pep
RLSETIQARTFEDSENSHKSTTVTLASIKESLGMDVDQKSLEQLIKINGWWTKSSWAFLNEPPVIEAASNKYASQFHVANLGSTRLNPGDGINA

SEQ ID NO: 250959 - protein, 689 aa, Zea mays
  unsure (1)..(689): unsure at all Xaa locations
  Clone ID: MRT4577_160462C.1.pep
MAIVLLALLLFPSAYAQPWSVCGNTGNYTAASTYQDNLSQLAASLPKKASSNTSPLFATGTAGAVPDLVYALALCRGDINASACKDCVTIGFEDAQQLCAFNKEATVYYDSCLVSFSNEDFLSXPSTATRTRSPSSWXAQNFTESADYIRLLLFTLLNDTSESAINSIRRFTTARMDISSLPTIYCAVQCTPDLTADECAACLQDFPQVTLQYLDGQRGGRLLGVRCNMRYEIYKFYQGDPMLRIISLASAVPTIGKTPPGTPVTVYPQPPPAAPPAPQMITTPIAAQEETGRKGKLWIIGIAIPLVAILLCSTFTFLWLRRPKKGVLSSQDRAGANRIEENALVWTIEQKSSEFTLFDLSELLEATKSFAEENRLGQGGFGPVYKGQLSDGQDXIAVKRLASHSGQGFTEFRNEVELIAKLQHTNLVRLLGCCIQAEEKILVYEYLPNKSLDFFIFDERQSSLLNWYKRRAIIEGVAQGLLYLHKHSRLRVVHRDLKASNILLDQDMDPKISDFGLARICSSNDAEGNTKRVVGTYGYMSPEYASEGIYSVKSDVFSFGVLLLEILSAKRNSGFHQYGDFLNLLGYTWHLWEIGRWLDLVEASISKEMHEAEARRYINIALMCVQENADDRPTMSDVVAALNSESVVLPEPKHPAYFNLRVSKSVESAVVVEACSLNEMTITQDPQGR

SEQ ID NO: 250960 - protein, 53 aa, Zea mays
  Clone ID: MRT4577_160463C.1.pep
SWGFFFKKKIKKKKNNNKIKTIFFKKKKKKKKKKKKKKKKKKKKKKKKGPLAF

SEQ ID NO: 250961 - protein, 55 aa, Zea mays
  Clone ID: MRT4577_160464C.1.pep
NRGKIIISSPSSVWGTHPQKKKKSVSTSPRQPRTKLFFKTLTTTTNNDQAPPMIT

SEQ ID NO: 250962 - protein, 67 aa, Zea mays
  unsure (1)..(67): unsure at all Xaa locations
  Clone ID: MRT4577_160465C.1.pep
ILLPWKLFSRIILWFIQIGPDTYNNVYKARDLENEKIVSLKKVXFDNLKPESVKFMAREILILKIVA

SEQ ID NO: 250963 - protein, 72 aa, Zea mays
  Clone ID: MRT4577_160466C.1.pep
KDEAVYQAIHEGIQRVNANAAARCYHIQKWAILERDFSISGGELGPTMKLKRLTVLEKYKDIIDSFYQEQKQ

SEQ ID NO: 250964 - protein, 97 aa, Zea mays
  Clone ID: MRT4577_160467C.1.pep
LLSSIPTSRTGQLLTTHRGLSWQSRADEAMATDVRRPCPSSPTLQPVALLFTWRQLTSIIACSSAIAGHRAQHASNTVADEHLSASLASWPPTTLSI

SEQ ID NO: 250965 - protein, 387 aa, Zea mays
  Clone ID: MRT4577_160468C.1.pep
MASPPPTSLSSPHLIHLRLQPLPSVPPLHLTTLPFPRSLPLHLHSLRLNRPHLPPLPLASSGSGSDITGSGGEDDLPPSGGGGGGGGGEGDGEGEGDGSEGDSVNRREALFVLAQLGRKLESLPADLAAAVEGGRIPGEIVRRFVDLEASPVFRWLLQFGGFKERLLADDLFLTKVAIECGVGIFTKTAAEYEKRRENFVKELDFVIADVVMAIVADFMLVWLPAPTVSLQPPLAMNSGAIAKFFYNCPDNAFQVALSGTSYSLLQRVGAILRNGAKLFAVGTSASLIGTGVTNALIKARQAASKDFAGEVENIPILSTSVAYGVYMAVSSNLRYQVLAGVIEQRMLEPLLHQHKLVLSAACFAVRTGNTFLGSLLWIDYARWIGVQ

SEQ ID NO: 250966 - protein, 210 aa, Zea mays
  Clone ID: MRT4577_160469C.1.pep
PVSPAKTLLQLAQPPHVQQQAYPQSQVYPQQTHHMHSQNTTYAQQQTQGALMQPVHVSHQQTHVSHHPAPMRPPLSGHQPALQHPQAQGIQHTSQHEKHIGFHAQWPTMYSNIPSQAPPQGLSVHSSVSSQSVQSYQQGMSSSQQMHSQPGQPYTQQHVTGNTGQHVQTSAGRPMAHLAPTQQFQQQHPAMLRTESPAAGHPIGQGPFRS

SEQ ID NO: 250967 - protein, 73 aa, Zea mays
  Clone ID: MRT4577_16046C.1.pep
MATHAALAASGIPDNAPLHSISAASSMHGVQRLDFSDFSRLKPESCSVSAAAREASFSDILGAQLVSNATREN

SEQ ID NO: 250968 - protein, 161 aa, Zea mays
  Clone ID: MRT4577_160470C.1.pep
MAAVATTTAVHGSQAAGAQRLLLLLALVIEAVNNGADIFTEDQQEIIKQFGRIKSETVPENKDAGSDDDDDDDEDEDDETGDADDDDADAGEDFSGEEGEDDDEDDDPEANGDDAGAGSDDDDGDDDDDDGEDGEDDDDDDEDEDEEDEEDEDQPPAKKKK

SEQ ID NO: 250969 - protein, 53 aa, Zea mays
  unsure (1)..(53): unsure at all Xaa locations
  Clone ID: MRT4577_160471C.1.pep
SPGVFLQVTDSLYKRRANVNLNIRXTLIERRYDVALAARYVRLRIPARGEPGN

SEQ ID NO: 250970 - protein, 102 aa, Zea mays
  Clone ID: MRT4577_160472C.1.pep
LTIEEPTVYYIFMKRTGNAQYGSTNGLVIKQSMLTHKHSCLTIYDTSLNNQIDLYRAATLPFLGREGSPFHADGYGQGSPSSVQTARSSDQTPRASPEVIRL

SEQ ID NO: 250971 - protein, 81 aa, Zea mays
  unsure (1)..(81): unsure at all Xaa locations
  Clone ID: MRT4577_160473C.1.pep
AAALAPPLSRPVVASSSVADIRVVSFVGMVLFVADFLLSACHEFNEFGTDGGPAAKALRAKFNVSSKXVTAHLGVAVPHIE

SEQ ID NO: 250972 - protein, 164 aa, Zea mays
  unsure (1)..(164): unsure at all Xaa locations
  Clone ID: MRT4577_160474C.1.pep
PGLSIIGHLVHRDCLRFFGLGSKVAMFRYSSVEIYTTCKPQPTLQFVNPIRQDWFEGQRRNVHAKGMALFSGVARFLQNLKNEHXCNNVSNPLRXAFPVKDFTELEELLIKEKAQFESSVDKATDQNGVPTSSVHELLNINWYYQDLLLELYIWDRPSTSIILL

SEQ ID NO: 250973 - protein, 104 aa, Zea mays
  unsure (1)..(104): unsure at all Xaa locations
  Clone ID: MRT4577_160475C.1.pep
PPPRREPPPPRXPQSPPKPXAPRRNPAARPPHRRPHXPPARGDTPRVRSPPTSRPXXISPPPPTTQCCPPQTPRXLPGQVPRPLPPEPPTKSGANRTSTPPLGP

SEQ ID NO: 250974 - protein, 133 aa, Zea mays
  Clone ID: MRT4577_160476C.1.pep
MSGARHVSRPLALVAVDRWIRPLPFCPLAHRTVRCTPDSPVLQPESAFLRPLCADCPVPHRTVRCTPDTDVRCATWRWLTALSWISSLFLRASLFLSLGLLCSFYVFFEVLHPHCLGPILFASCELQTQTLEN

SEQ ID NO: 250975 - protein, 119 aa, Zea mays
  unsure (1)..(119): unsure at all Xaa locations
  Clone ID: MRT4577_160477C.1.pep
FFHGLGILASDFLRELFEYYKIELIHLSPNSILHIAIFAHLCEAFLGTPPLFSLFQYLFFXLSPSXNKEKSSIVSGXGVQLRASRVCLDCPFKAFXKNMTXKWFFIGNHTTKIMSSLVS

SEQ ID NO: 250976 - protein, 139 aa, Zea mays
  Clone ID: MRT4577_160478C.1.pep
QPRHCRCTLSGVHARRIPVRACQPGGARGARRATEGWPPRSVTRRGRPRGDLPDAVRHVAYGSWHLRYRQLVSSCSPRGAAQPVQACSGRSPSRIGYAHATTHVLQPSHRQFHAEVLSRDVDAALSPRSESSPRASVAT

SEQ ID NO: 250977 - protein, 126 aa, Zea mays
  unsure (1)..(126): unsure at all Xaa locations
  Clone ID: MRT4577_160479C.1.pep
GLSASAWWRTGHWCPVCTGLSGEAPDSLRREATDRRSLAVAPVCPVCTGLXRCANGQKGTVRIQXVDCYRRQRSADVACTRHLLFSVRWCTGQSGAPDDRKLLLSVQRLVEGVEAINTTPTGHSHV

SEQ ID NO: 250978 - protein, 88 aa, Zea mays
  unsure (1)..(88): unsure at all Xaa locations
  Clone ID: MRT4577_16047C.1.pep
ATRNRQERLSILELDNLKGPIVALALLALAASAGFSTSRSCGCAHTXVYIPPPFYMPPTVYLPPHQHPQPWQYPTQPPQLSPGQQFGS

SEQ ID NO: 250979 - protein, 34 aa, Zea mays
  Clone ID: MRT4577_160480C.1.pep
DDYYRRSIMTVAMLRDTISFAISLELALLDDHRT

SEQ ID NO: 250980 - protein, 147 aa, Zea mays
  Clone ID: MRT4577_160481C.1.pep
LLGPVSRTHTTGNTRTLRSSMGPHPNRKRLPHRRRPRNRHQISIPTKSTSNTMSRNRSRTTRKPNSTLSTSNNTLKNKLKSTRSNRSKSMRRRRNNSRLNSTNTMRKPKLRLPKLRRQHQQKLLMIRIIHTLHHHTQAHKSAQRFQA

SEQ ID NO: 250981 - protein, 44 aa, Zea mays
  Clone ID: MRT4577_160482C.1.pep
MEGFMAAAEAGLGQQTGRRRRGASGEGEVSCERERQSEIKVEQS

SEQ ID NO: 250982 - protein, 109 aa, Zea mays
  Clone ID: MRT4577_160483C.1.pep
RPRRTIIKADFPPYCTDFHNHIGALRVCNCRIPTDFIVFRLGIKELLPPYLSSEPFDKHDLFTGVSFSSGGTGFDPFTPQIAFVNSLPDQLTIVHDYLCKGARTPPGPQ

SEQ ID NO: 250983 - protein, 91 aa, Zea mays
  Clone ID: MRT4577_160484C.1.pep
VSIGFAEGESKRPLGKHAACSLTSAINELGFLLVVIYRLQFLTVVGKRSSTMHTAMTSLLHDLVSETDGTVSPTYPRPGGSNQVRRRRVNL

SEQ ID NO: 250984 - protein, 122 aa, Zea mays
  Clone ID: MRT4577_160485C.1.pep
PLMVGRIKCPIGGGVLLPVSKHLFVRRRVMGLVAFFFSPVSYIGGGRPGGFPFLLGVIRLRGGGWSFFCAVLFRTSCAFHIRALTVEYLESGGGCSPLKKKTNPKIISLIPGQNYNHSFINK

SEQ ID NO: 250985 - protein, 61 aa, Zea mays
  Clone ID: MRT4577_160486C.1.pep
VVPFELPCILAVDHGPCVWYLQTHHGHVRRKRLFVILRVSSELMIGMAVHIVERYLPVLVF

SEQ ID NO: 250986 - protein, 92 aa, Zea mays
  Clone ID: MRT4577_160487C.1.pep
DSAAQKRVDSRKPPPPSNSHPRHHSRPDCSPVIFTVLVGKLPKPYQPGLGAVAPGIPRCSSCFVADLCDIVVSTSTHFNTGQEQVPLDEAHE

SEQ ID NO: 250987 - protein, 71 aa, Zea mays
  Clone ID: MRT4577_160488C.1.pep
PKTWLLSMKFSFAIGTVFHVPPLNFKKGEKPQAWFNAEMDYPRNLRLTGCSYDLIGLGVQKVVVWRRSPQV

SEQ ID NO: 250988 - protein, 55 aa, Zea mays
  unsure (1)..(55): unsure at all Xaa locations
  Clone ID: MRT4577_160489C.1.pep
SAHAFAPTKLIWGATKHXXXYXSPXRXPMASXKFFXGGNWKCNGTGEDVKKIVTV

SEQ ID NO: 250989 - protein, 39 aa, Zea mays
  Clone ID: MRT4577_16048C.1.pep
AWSSLGFAPRAKVFAMLFSMIFLASEAWACTFSVSVTVR

SEQ ID NO: 250990 - protein, 197 aa, Zea mays
  unsure (1)..(197): unsure at all Xaa locations
  Clone ID: MRT4577_160490C.1.pep
MGVLRSTQSLEAEVEEMRGALLLHGAWAWRPGGGAAKRAARAVEPAAAEARTVCVTGGTSFLGFAVVDRLLRHGYTVRLALETQEDLDKLREMEMFGENGRDGVWTVIANVMDPESLHEAFDGCVGVFHTSSHVDPAXISGYTKHMAGLEAKAAELVVEACVRTDSVRKCVLTSSLLACVCRQNYPHDRRRXPIYID

SEQ ID NO: 250991 - protein, 127 aa, Zea mays
  Clone ID: MRT4577_160491C.1.pep
GKVNLLYEATPSTGAPPPVHASISPEVAAACGSTTPACFAAGHHVVPGVGDRRKCRPRGILAIAGEGLTSQDLDEEPSRASIHWLSSPSGAVAWTSSTKCGNEEASVNWLVSPCNTRILGVQNPGLT

SEQ ID NO: 250992 - protein, 42 aa, Zea mays
  Clone ID: MRT4577_160492C.1.pep
TRSYWTNLGLIVDHTQTQHSGAGAWRTRGHKTAPSWPVSVRV

SEQ ID NO: 250993 - protein, 75 aa, Zea mays
  Clone ID: MRT4577_160493C.1.pep
TYVSSLLLSHTPHRSRAGTTGWGAWRMLRCVRERSRPSSPSQLWVAGPLSPYNVIIYFGIELLLYSKDVTFDPVP

SEQ ID NO: 250994 - protein, 72 aa, Zea mays
  Clone ID: MRT4577_160494C.1.pep
KVCCGTLLSLKYCADPCSVIWSEIRIVEDSCTLCFNNKWGGGESFKIFVNTFYKNLVLQPKEHECMLVPTRP

SEQ ID NO: 250995 - protein, 63 aa, Zea mays
  Clone ID: MRT4577_160495C.1.pep
LGDDGLDLSRTHHSILHAPHPAVPVLDLWGCETARVSSHTFIAQQVVGNNVHELAKGGSSREV

SEQ ID NO: 250996 - protein, 61 aa, Zea mays
  Clone ID: MRT4577_160496C.1.pep
TYVSSLLLSPPPPGQEQVTGTPGLGAWRMLQCVCERFRPSFPSQLRVAGPLSPYNVIIYFV

SEQ ID NO: 250997 - protein, 112 aa, Zea mays
  Clone ID: MRT4577_160497C.1.pep
RISAAVEHRLSTSPHQGTKSTAREHRRAMLGMIGSSPRLIGVLREGISCRSRSSAATPFPSAGRQRRSAAASVNCLASSEVTCHLKSKLVPGISSATQVVPLITSFTQSCSN

SEQ ID NO: 250998 - protein, 143 aa, Zea mays
  Clone ID: MRT4577_160498C.1.pep
MHPSADLENLNPMVLKCEYAVRGEIVIHAQRLQQQLQTQPGSLPFDEILFCNIGNPQSLGQQPETFFREVLALCDHPCLLEKEETKSLISADAISPAKQILATIPGHATGAYSHSPGIKGLRDAIAAAITSRDQIPANAQDIF

SEQ ID NO: 250999 - protein, 92 aa, Zea mays
  Clone ID: MRT4577_160499C.1.pep
YTSFTLCRGCTSLTTSNVTHLPRDGQSHTPLPRRRGKVTLRGLYKVPLASENPLQFIGSSSAGIPRLTAIAAKSTQGPPYTDHSPTALTPFR

SEQ ID NO: 251000 - protein, 48 aa, Zea mays
  unsure (1)..(48): unsure at all Xaa locations
  Clone ID: MRT4577_16049C.1.pep
AXXTEIFLLSHTPTRALGRAARITEEPKSNTTANLLTFKIQTQGSRLT

SEQ ID NO: 251001 - protein, 134 aa, Zea mays
  Clone ID: MRT4577_1604C.1.pep
MSRFFQKLKRLDMLSKESKGAMTCLSLESRLQSPPAQAENHDGGSGGSTAYPKHPRAMKNIPQPVCKGCLTFSFTGSVFRLQFLRGPKYIHSQMSCTGTLGRATCCRVLNAKCDLKIEDFGFARTTTETDFMID

SEQ ID NO: 251002 - protein, 154 aa, Zea mays
  unsure (1)..(154): unsure at all Xaa locations
  Clone ID: MRT4577_160500C.1.pep
VLSAVNDLAIFNGCTTKAIEHAADNPAVVEAIGVPIVRGPWYDASLEVGHRRRSVSCTFPVSGPHGSGFLQIKATRDGXVFSFLLCCALNSHIIQKRWCCVEDGLLSFLRHHDWKILLLEAHLEAPSDDEDQRKLVKVNLASSGRGEDGDPESG

SEQ ID NO: 251003 - protein, 69 aa, Zea mays
  Clone ID: MRT4577_160501C.1.pep
GAQGKIRQKHHGWCLNLFPIFLSLMRCPCTIGLTLPCHAGAVQLCRLGAEVWELKAKRQGLCAEIRNND

SEQ ID NO: 251004 - protein, 103 aa, Zea mays
  Clone ID: MRT4577_160502C.1.pep
GSELLMTVSTASIPVLHSAEVAHLYPQVMLPICQGIATSHTPLPRRRGRVTLRGLYKVPLASENPLQFIGSSNAGFLPDRHRSKINQGPPYTDHSPTALAPFG

SEQ ID NO: 251005 - protein, 513 aa, Zea mays
  unsure (1)..(513): unsure at all Xaa locations
  Clone ID: MRT4577_160503C.1.pep
MAPSVAVENLNPKVLKCEYAVRGEIVIHAQRLQQQLQTQPGSLPFDEILFCNIGNPQPLGQQPVTFFREVLALCDHPCLLEKEETKSLFSADAISRAKQILATIPGRATGAYSHSQGIKGLRDAIAAGITSRDGFPANADDIFVTDGASPGVCIFYFSFSCPGRFMNKHDTTVVSSXLFFLKVHMMMQLLIRNEKDGILCPIPQYPLYSASIALHGGALVPYYLDEKTGWGLEISDLKKQLEDARSKGIDVRALVVINPGNPTGQVLAEDNQYDIVKFCKNEGLVLLADEVYQENIYVDNKKFNSFKKIARSMGYGEDDLPLVSFQSVSKGYYGECGKRGGYMEITGFSAPVREQIYKVASVNLCSNITGQILASLVMNPPKVGDESYASYKAEKDGILQSLARRAKALEDAFNTLEGFSCNKAEGAMYLFPQIHLPHKAIEAAKAAKKAPDAFYALRLLESTGIVVVPGSGFGQVPGTWHVRCTILPQEDKIPAVITRFKAFHEAFMAEYRD

SEQ ID NO: 251006 - protein, 79 aa, Zea mays
  Clone ID: MRT4577_160504C.1.pep
SLWSLCYMYECPCVRRYVSRAATCLGYIVLFEGHRIQYSGNSLSAVTELARLFATTLFQALTRWVHKVANGLQGSCNKC

SEQ ID NO: 251007 - protein, 143 aa, Zea mays
  Clone ID: MRT4577_160505C.1.pep
KSPKEISVTATEGASPTAYDVAALSGAIPSFPSHGDPPALRLFHATSNSYADVNKPLTYPENGDAFSSVSSSSANDLEQGTSIRPNNAERLTSLVQGPLRKLFTDMLRHQNIYLPVTSLRRGNDISKGSTAESSQETVINGFP

SEQ ID NO: 251008 - protein, 482 aa, Zea mays
  Clone ID: MRT4577_160506C.1.pep
MAASVTVENLNPKVLKCEYAVRGEIVIHAQRLQQQLQTQPGSLPFDEILYCNIGNPQSLGQQPVTFFREVLALCDHPCLLEKEETKSLFSADAISRAKQILATIPGRATGAYSHSQGIKGLRDAIAAGIMSRDGFPANADDIFITDGASPGVHMMMQLLIRNEKDGILCPIPQYPLYSASIALHGGALVPYYLNEKTGWGLEISDLKMQLENARSKGIDVRALVVINPGNPTGQVLAEDNQYDIVKFCKNEGLVLLADEVYQENIYVDNKKFNSFKKIVRSMGYGEDDLPLVSLQSVSKGYYGECGKRGGYMEITGFSAPVREQIYKIASVNLCSNITGQILASLVMNPPKVGDESYASYKAEKDGILESLARRAKALEDAFNKLEGFSCNKAEGAMYLFPQIHLPQKAIEAAKAAKKAPDAFYALRLLESTGIVVVPGSGFGQVPGTWHIRCTILPQEDKIPAVISRFRAFHEAFLAEYRD

SEQ ID NO: 251009 - protein, 48 aa, Zea mays
  unsure (1)..(48): unsure at all Xaa locations
  Clone ID: MRT4577_160507C.1.pep
ESLGEGRTQQPPPSRLGVVLSHHRKQPGEISLXSVVLHLMGXARGFXK

SEQ ID NO: 251010 - protein, 146 aa, Zea mays
  Clone ID: MRT4577_160508C.1.pep
LGTSRPAGILSKRHGTVRGGDYSGDEREQSWTANVILCPRQGLEHEIVPMCSPRHAGPVRGGVPASRGRRWPEFLTGGRAQPRIRSIAMIDALQHDSHSEVMGNPKTNLVKYLESQARDHYVNWNMERTAGKTVLPQGWYGTLLAD

SEQ ID NO: 251011 - protein, 568 aa, Zea mays
  unsure (1)..(568): unsure at all Xaa locations
  Clone ID: MRT4577_160509C.1.pep
MAPSVAVENLNPKVLKCEYAVRGEIVIHAQRLQQQLQTQPGSLPFDEILFCNIGNPQSLGQQPVTFFREVLALCDHPCLLEKEETKSLFSADAISRAKQILATIPGRATGAYSHSQGIKGLRDAIAAGITSRDGFPANADDIFITDGASPGVHMMMQLLIRNEKDGILCPIPQYPLYSASIALHGGALVPYYLDEKTGWGXLEISDLKKQLEDARSKGIDVRALVVINPGNPTGQVXLIISPLVKEHLCLSTPYSLXDVITXMCIYCTPILSQXYFVYLYCLGKGFGXKISVFLSFCNANECFSMLVTKTQILLKWFIYXXLAEDNQYDIVKFCKNEGLVLLADEVYQENIYVDNKKFNSFKKIARSMGYGEDDLPLVSFQSVSKGYYGECGKRGGYMEITGFSAPVREQIYKVASVNLCSNITGQILASLVMNPPKVGDESYASYKAEKDGILQSLARRAKALEDAFNTLEGFSCNKAEGAMYLFPQIHLPHKAIEAAKAAKKAPDAFYALRLLESTGIVVVPGSGFGQVPGTWHVRCTILPQEDKIPAVITRFKAFHEAFMAEYRD

SEQ ID NO: 251012 - protein, 163 aa, Zea mays
  unsure (1)..(163): unsure at all Xaa locations
  Clone ID: MRT4577_16050C.1.pep
SFLFTSECANDGSSPXNACADQXVQHPLLEGGAXQYPYFKGGYYTSTKTNMGRGGSEITTKATVNYKKIVRDTCHEISFTSWDRGLNSHRCKGRGNIEQQSPNIAQGVHGHFTKRAEEIGAGDHSHMFWYATDETPXLMPLSHVLCTKRGARLTEVRKNGTCA

SEQ ID NO: 251013 - protein, 485 aa, Zea mays
  unsure (1)..(485): unsure at all Xaa locations
  Clone ID: MRT4577_160510C.1.pep
MAGAWSLLALALSLCSVAAVAVQQVNTVAAAQQAADRVAGLPGQPPVGFALRAGYVTVNETHGRALFXAVFEVTASPDKKPLVLWLNGGPGCSSIGYGEAEELGPFLVQKGKPELRWNNYSWNTEANLMFLESPVGVGFSYTXTSSDLLQLGDKITADDAYKFLLNWFKRFPQYRSHDFYIAGESYAGHYVPQLSEKIFDGNRAGPKESYVNLKGLMVGNALMDDETDQTGMVDYAWDHAVISDRVYADVKARCDFSMANVTDACNAALQEYFAVYRLIDMYSLYTPVCTDDPAGSSASSSYDARGHRKVAVHGAAPRIFSKYRGWIMKPAGYDPCTAEYAETYFNRPDVQAALHANVTKIGYNWTRCSDAIYTWNDAAFSTLPVIRKLVAGGLRLWVFSGDTDGRIPVTSTRLTLHKLGLKTVQEWTPWYDHLQVGGWTIVYEGLTFVTIRGAGHEVPLHAPRQALTLFSNFLAGTKMPPTAFP

SEQ ID NO: 251014 - protein, 84 aa, Zea mays
  Clone ID: MRT4577_160511C.1.pep
ARLVYQFYTLQRWYPLPTSHVTHLPRDRDFPYTSTEEARQGNTMRPLQSSTSFRKPATVYRKLQCRNPSPDRHHSKINPRTSLH

SEQ ID NO: 251015 - protein, 100 aa, Zea mays
  unsure (1)..(100): unsure at all Xaa locations
  Clone ID: MRT4577_160512C.1.pep
LTRCNTDYTXLDRGTSTLMGLLCTNQCLTYWNAMVPVXNXIFNGNRATLIAKENDRLLKHIDFHLLRIGCFRNDLIRKRTVDGLQILRMNSFNYCKNTTR

SEQ ID NO: 251016 - protein, 155 aa, Zea mays
  Clone ID: MRT4577_160513C.1.pep
ESGLMSKEDFHEAGSKALSLFAYGQKVALENGLILVDTKYEFGKTPDGTIVLIDEVHTPDSSRYWIANSYEDRFKSGLEPENVDKEFLRLWFKDNCNPYEDAVLPEAPEELVCELAWRYIFLFETITKTKFEILEAQEPIHERISRNVAQALRDL

SEQ ID NO: 251017 - protein, 391 aa, Zea mays
  Clone ID: MRT4577_160514C.1.pep
MNTLFFWSIYCWRTNMSYFCYICYCRVDLSTAGTYLNKNFSDISTEQGWRTTHNHTSKLPISFMGNITSSSGWESGSSTTRSNQNHGSAGGNHSSVSGANIIVPDKIGNKTIMLGRERRKQTSTSSHIGESSSAADEPRGDLQSSKISAGPNHSSHQHNIPVINIDDISPEARPSSSGFTNRTVDPTIEAQLESDELLARQLQEQLYNESARFAPTEEIDAIVAMSLQHEEDTHRTSRTLRRFQNHTRGARATRLSSYRNALRAELATANNMISRQRNTAPINLGLRAALARYPGALHIQPNIDLNDYDALLALDENNHQHTGASESQINNLPQSVVQSNSIEDPCSVCLENPSVGDTIRHLPCFHKFHKECIDEWLRRKKLCPVCKFGIN

SEQ ID NO: 251018 - protein, 154 aa, Zea mays
  unsure (1)..(154): unsure at all Xaa locations
  Clone ID: MRT4577_160515C.1.pep
MRDPRRNNLYHCFVISTRADVHGWERTMKECVSIDIRQAGLNTGKPSSELDCLLHLMHSDGHMPADKTMGXXEEACNTLFTETESDKNVPLAGVVKLKPSVIYKMMTGTYLQVCHXTQIMTGIRXAVNPLCRRTYTIDRGIADIGLDRLLKHAD

SEQ ID NO: 251019 - protein, 97 aa, Zea mays
  unsure (1)..(97): unsure at all Xaa locations
  Clone ID: MRT4577_160516C.1.pep
GDFHRFPEKKAPLGFYRXLKLDQFITLAIRXDNLXLGGFKNPPGWXEFRRAGNTHFLGXNPKGVGFGGRVQELIXGNRGLETVTMARPKITRAVNNL

SEQ ID NO: 251020 - protein, 468 aa, Zea mays
  Clone ID: MRT4577_160517C.1.pep
MSCFRCFSGCRTKRGKGEKRREGSTAPASPAAASFPSTVSTGAPSNLTFSTASSAVVTSHSEDSSAVMRPEATKSSGSASVSSARSIPELYEERGASSLREFGFRELRAATSDFSRLLKVGEGGFGSVYKGVVRLPGGPAGGTVVAIKKLNPNGHQGHKQWLAEVHFLGVVEHPNLVRLIGYCAAQGERGPLRLLVYEFMTNKTLDDHLFNKAYPVLPWDIRLEIALDAAEGLLYLHEGLEVQVIYRDFKASNVLLDEEFRAKLSDFGLAREGPSAGDTHVSTAVMGTLGYAAPDYVETGHLTTKSDVWSFGVVLYEILTGRRSIERNRPKNEQKLLEWVRLYPVESKQFSKIIDARLEGHYSKQGTRKIAKLANSCLAKHRRDRPTMREVVESLKQAMQHKELDGKAGALNETSPPEEMSGKPSTEDVAVASARRRMLHLAALGENANSIARRRFMFMRTAASPTPT

SEQ ID NO: 251021 - protein, 118 aa, Zea mays
  Clone ID: MRT4577_160518C.1.pep
ARPVKNSLRLQNAEGPKNTFRELIVEKRLDIPSARWSHHTAGTSDLVIHLLVHCGPPFSGCGRLFSVCERLDDSPSHLQHYINRWVGVKLPHHLLLLHCSAAKKFDHSRSLFIVFSIK

SEQ ID NO: 251022 - protein, 135 aa, Zea mays
  unsure (1)..(135): unsure at all Xaa locations
  Clone ID: MRT4577_160519C.1.pep
EHENERNMRMGHLRNSSLDSKRENREMPPRASFVSELASKGVRACASQEERDEGKHAEHEFLPLNLASKVQSLISKISKMGGRLSSGLSCPEVKEYQYILTNENLTALRXVXQQDSCIFQXMKIDMLSRMTSILN

SEQ ID NO: 251023 - protein, 159 aa, Zea mays
  Clone ID: MRT4577_16051C.1.pep
MEHGFFAPGTAVLAGNYLEGCGSTYQCPEGRPCMTHLLSVACWSSAPKIEGTFGPLPLDWQVAEATFVFGGWPIKRMQLGVLGTPTWWMHAATDCSCVEYYLHKRSDHGAPSLLARSRCSDLVWRTGDGAEFAVFRPSEIDARVALAATGECKSSGIER

SEQ ID NO: 251024 - protein, 53 aa, Zea mays
  Clone ID: MRT4577_160520C.1.pep
CLNTPLIKPYKFSTQRLNALGMKFTTLKESLYNTVVSLQENGHIPVLLHKSSL

SEQ ID NO: 251025 - protein, 42 aa, Zea mays
  Clone ID: MRT4577_160521C.1.pep
HLVQTAYQKIWLVYVHSLNQHSKPLVLRQAFTMFIQKSNISS

SEQ ID NO: 251026 - protein, 148 aa, Zea mays
  Clone ID: MRT4577_160522C.1.pep
QHSGVDPAAVAAIRRHEISSWFNPHVPISQGHIDQPHPSTNNSSVLEQHTIVVANTRWSLESTGFFIAICLVVIILAWLVAPHVGKKAAVICLHMLLGGLCILTVVISLRFVFPRIQYGSMQYWAILFVSWFLVFGVWASRTRGARSS

SEQ ID NO: 251027 - protein, 183 aa, Zea mays
  Clone ID: MRT4577_160523C.1.pep
LSSVSIALICTIVYVWKSEQQVYDLLWKESIASVPIGLFIMTTSLLIGGIVGYAIGYYIEQRIQGLNTFLFEVERGNFPSDVSFTADDEFHEVERKVIVLARRLEEQAGLFQKVTNERAHWNEEMRQEAISQERHRLARELHDSVSQQLFAMSMMMSAINEQITEFPDVTKKQKTITNSGSDT

SEQ ID NO: 251028 - protein, 73 aa, Zea mays
  Clone ID: MRT4577_160524C.1.pep
ATVILEIWYRLVIWSFQKMQLDRMCRVVCLYGSSFCCSVECCSIFISKFLWCWCSRAFRSLIKIMYVFVVELF

SEQ ID NO: 251029 - protein, 157 aa, Zea mays
  Clone ID: MRT4577_160525C.1.pep
MAPPRVFNRVPLPSVGGGVLRFPWGRKPSLGFFFGKKEAPPAKREFCWYIQRRPPPPRFFNFPPRGGGSPPYTGFPLEQKFGPKGLKGPKKFFIVSGQREIFPQKVFFFAHPVQGGTPKNFAGKEARNLLYPGFPGVPKSIFFFLKRKEKKKKKTKT

SEQ ID NO: 251030 - protein, 70 aa, Zea mays
  Clone ID: MRT4577_160526C.1.pep
NLYHHLRARVEREGRNRPERALIRLTATAHMPTAYSLRAPTFTGQERLRLTSPALPICPTGGGACPPYEG

SEQ ID NO: 251031 - protein, 94 aa, Zea mays
  Clone ID: MRT4577_160527C.1.pep
ETGGSAERNPMHQIRAVADHKLRGQHCLLLGCINTSIIFPFTLPTINPYDIIMHMRAHAISLTLAHYLRYICIEHYDQKYPIFIPHEYTYTSQY

SEQ ID NO: 251032 - protein, 62 aa, Zea mays
  Clone ID: MRT4577_160528C.1.pep
IMLTPAILHFQRILNTSILSEVQKHQSFIFFSTTLYYFFLGKKTKQLFYVLTLLNFFTLGLL

SEQ ID NO: 251033 - protein, 48 aa, Zea mays
  Clone ID: MRT4577_160529C.1.pep
KKKKKKKKKKKKKKKKKKKRKKKKGGKKKKKKKKKKKKKKKKKKGRPF

SEQ ID NO: 251034 - protein, 123 aa, Zea mays
  Clone ID: MRT4577_16052C.1.pep
MVINPTYLAQRTRSSVNWADAKKRVIHSYRDWLRSAPEIQTMYSLNMPVSQLRTKMRQEFERHRYVNQLKTVDVLLFNSHQEFQETLNFWKQLSHVLKYFRTEEDPKARLPNNFINGFLEGRN

SEQ ID NO: 251035 - protein, 412 aa, Zea mays
  Clone ID: MRT4577_160530C.1.pep
MAPVSHNNDSDSSDSDDNTIILATLLTLCIEATRRRRRQSSIPRRVIARDHFARENLIRHHYFGPNPVYPAHMFRRRFRMSRPLFLRILQGLQQQDSYFTQQVDATGLAGLGPLQKVCAAMRTLAYGLPTDAIDEYIQIGESTARQCLIRFCRALIAYFSVWYLRTPNQADIARIMQHSESRGFPGMLGSIDCMHWECRNYRGRNSRPTMILEAVASYDLWIWHAFFGMPGTNNDINVLHRSPVFDPMTSGQMPPVHYTVNGHAYNFGYYLADDIYPHWPTFVKAIRHPWEEKKIYFTQMQESHRKDIERAFSVLQARWAVLRGLAYRRDRNRLTEIITACIIMHNMIIEDEGEFAANTDFGDNASATAHCELIQEGRSDWVIDHFDLRRQERFCNLQNDLVEHLWTKRGSM

SEQ ID NO: 251036 - protein, 116 aa, Zea mays
  Clone ID: MRT4577_160531C.1.pep
ARIPLLSAGVATAADAAKSAASSLGEQKRKQVASVANPLVKHCVKLRLSAAYRRSCSRRLLVGLVPILYSSSTPGPCHLYMSCEVSSLSKPVLLPLATGRCISLSSTPSITCFDSN

SEQ ID NO: 251037 - protein, 53 aa, Zea mays
  Clone ID: MRT4577_160532C.1.pep
RIKRTKTGIQTKSWGCRGRQGSTQTPLVNKTAGNLASRAGPPGGMKKNTAWSS

SEQ ID NO: 251038 - protein, 89 aa, Zea mays
  Clone ID: MRT4577_160533C.1.pep
VSLVATTACPVFSSVRAFILLGVVADPCVLVSLYRSSASSGQRVSPLSDECVAPPRIHRCYRTVRYGDRLELEQAYAWVGRACVPVRQG

SEQ ID NO: 251039 - protein, 70 aa, Zea mays
  Clone ID: MRT4577_160534C.1.pep
HLVPPGVYKKLGVEHTSAETGKHSSSTVRVAAYITSASNRSVDGVAVPVCVVILVLESVIIALVTYCLSS

SEQ ID NO: 251040 - protein, 244 aa, Zea mays
  unsure (1)..(244): unsure at all Xaa locations
  Clone ID: MRT4577_160535C.1.pep
MNSLESQEKAHRTTLMNTAQYSMKRKRWSLXRWHFLVVGITICSRKHFMGSKCTLHCNMXATFQLKRLEPPGFSFQIVNTNLDEVSPRARRRSALLTWQHIASLAPNLPVIYCGGFNTQKESMTGRFLLGRSREHGVVGDMRDAWPNARVRKNVSIIHTYHGFKGEKKGALEFLKLIFRALCLCWDRQTQDLHVDWILFRGRPLVPALCEVINDNIDGVYPSSHFPIFAEFLLPRSVRLAETPS

SEQ ID NO: 251041 - protein, 59 aa, Zea mays
  Clone ID: MRT4577_160536C.1.pep
IINSFLYYYYRKLEIISNYKCTFGLKEGESTSVTLKQMPSQPPQYGGTVHLFIGTGHSP

SEQ ID NO: 251042 - protein, 244 aa, Zea mays
  unsure (1)..(244): unsure at all Xaa locations
  Clone ID: MRT4577_160537C.1.pep
MNSLESQEKAHRTTLMNTAQYSMKRESVELXRWHFLVVGITIGSRKHFMGSKGTLHCNMXATFQLKRLEPPGFSFQIVNTNLDEVSPRARRRSALLTWQHIASLPPNLPVIYCGGFNTQKESMTGRFLLGRSREHGVVGDMRDAWPNARVRKNVSLIHTYHGFKGEKQGALEFLKLIFRALCLCWDRQTQDLHIDWILFRGRPLVPALCEVINDNIDGVYPSSHFPIFAEFLLPRSVRLAETPS

SEQ ID NO: 251043 - protein, 132 aa, Zea mays
  Clone ID: MRT4577_160538C.1.pep
MGKIKIGINGFGRIGRLVARVALQSEDVELVAVNDPFITTEYMTYMFKYDTVHGQWKHHEVKVKDSKTLIFGTKEVAVFGCRNPEEIPWAAAGAEYVVESTGVFTDKDKAAAHLKGGAKKVVISAPSKDPPM

SEQ ID NO: 251044 - protein, 187 aa, Zea mays
  Clone ID: MRT4577_160539C.1.pep
MVISIFVTHACTSPPWCSTPRPASGKTCCSAPTRAVAGRATSGGAREDRALRVMMTPVRSGRTRIIPSGRSWCRTVRQVSTQQVSGSNRTPPESDGKLPNRPMYVLAVKTEIEDGDEVALRLMIPTPPPPSKEHAPRRGPPEPQVQDGAETVKTRSVHEDPQALRGPGGMAWVVLYIPSSTRDWLSR

SEQ ID NO: 251045 - protein, 159 aa, Zea mays
  Clone ID: MRT4577_16053C.1.pep
RTRGRIRCEPHRPGLPGWAEDAMERHIAVDGAEAPEEPEGREDGPAYRLGPGPAEANLTDRGNETMATIENVSPNVEGAEKPERHDILGNHRDAWTLGANEPNRGTAAMMEETKRCSTQRIHRRRPRRTIICSSWDAKKNGPTGTTDWAEENRGRDELL

SEQ ID NO: 251046 - protein, 75 aa, Zea mays
  Clone ID: MRT4577_160540C.1.pep
MGVKNDHFRKPNPEAPLFVLSLGPQLLIAHVVPAKPPCRNRGIEFHPTTLPGTAAGPPKNPPVGLQLHHGPPPPH

SEQ ID NO: 251047 - protein, 66 aa, Zea mays
  Clone ID: MRT4577_160541C.1.pep
RTQFFCEMKKGLFRRQHYLMHTRGYSKVRSHCAGPKDRHTFLVVGISCSTQTPLFNEHRLIVIGHN

SEQ ID NO: 251048 - protein, 67 aa, Zea mays
  unsure (1)..(67): unsure at all Xaa locations
  Clone ID: MRT4577_160542C.1.pep
NSASVVGVFSPIDHKLDLMYAKGAFVQWNVGKGMNKGQFSKPREDLAALEKDYXEVGSKFNQGEDAN

SEQ ID NO: 251049 - protein, 679 aa, Zea mays
  Clone ID: MRT4577_160543C.1.pep
MQDSNPFTSVDCQSSGSGTPSPAPSSSSSSNLNNSAFWSNVVALLDALPSAAAPSRFASISSGNGTTRAFVRGICRGDTLPADCAKYLQNATLTIQSRCNRSSRRAGIWYDKCFVSYADTNASTSEEQSFRSILYNTGEVGDKDAFETTYYALMRQLTARVVNGSGTATSPSSTSSSLRSVSPMFATGEAVYDAAAPNGTMYGLLQCMRDRTQAECEQCLKDSVGQLPSCCYGHQGGVVLGYNCNLRVEIYTYYDLAIDAPPPSGSGFIGQSQVKKRVHTRTILAVALPVGTVFAAAAILGVFMQRRKTNRKKTQRLGNDIKEENISFVAPGKLSIAVLRTATNNFSEENKLGEGGFGEVFKGTLEDGEEIAVKRLSHTSSQGFNELKNELVLAAKLKHRNLVQLLGVCLQEEKLLAYEYMPNRSLDTFLFSGNPGTRRQLDWSKRFGIICGIARGLVYLHEESRLKVVHRDLKPSNVLLDADMNPKISDFGLARAFSNDQSVDITRRPVGTLGYMSPEYAYWGNVSTKSDMFSFGVIVIETVTGRRNNSPYDQSAGSVSVLSHVWDKWRTGATTDVVDPTLGAEHYSESEVVTCIEVGLLCVQENPADRPDASAVVLMLSSPTSTPGDRRVPSRPAFVFSTASAWSSGGVQIGNNKHTSTSMVSVSDNEVTITELQPR

SEQ ID NO: 251050 - protein, 113 aa, Zea mays
  Clone ID: MRT4577_160544C.1.pep
PARIGLWRVLPVGFLHVYDCESRKEIRRLCEHPKSITSLAVDDDALELVLSASIDGKILIWSYWHYYRARRGRRSTWHLEKTFDAGSQCLKQVAFIAPSVHRSSSTIIATARD

SEQ ID NO: 251051 - protein, 111 aa, Zea mays
  Clone ID: MRT4577_160545C.1.pep
MSRSNKKSSRGLDLKLNLSLPATGDSSGMVMADEESSPSSCLSSENEHGLQWSNSPEATSMVLAACPRCFIYVMLPQDDPWCPQCKSPVLLDFLQDNSNNSNNSSRRSRKG

SEQ ID NO: 251052 - protein, 141 aa, Zea mays
  Clone ID: MRT4577_160546C.1.pep
MLATSSGVWPRAMAVELVRCGGEGPFSLDGKLLDVKLPPSSWREDQDLANQLDSFPKSLVPPLEGRRGSLNGTQYENGLFSSSLPDFFDKKSELLVSYILFEWVYFVVLNNELLVSPARCMNIKRKKASRSIWEKNLASLF

SEQ ID NO: 251053 - protein, 52 aa, Zea mays
  Clone ID: MRT4577_160547C.1.pep
PPLRALFSFYNNFHARLRYLCSQKTGPHMGHWGSVFAPLVLRSPPRLLVFSW

SEQ ID NO: 251054 - protein, 504 aa, Zea mays
  unsure (1)..(504): unsure at all Xaa locations
  Clone ID: MRT4577_160548C.1.pep
GVPSGSGREIVEAIDKLQERLKVVPGDDAMSIEAQKNATLFFNILLRSTFASKRVLKEYRLTKEAFEWVIGEIESRFLQSLVAPGEMIGCVAAQSIGEPATQMTLNTFHYAGVSAKNVTLGVPRLREIINVAKKIKTPSLSVYLKPQVNQKKELAKNVQCALEYTTLRSVTHATEIWYDPDPLXTIIEEDTEFVQSYYEMPDEDINPDKISPWLLRIELNREMMVDKKLSMADIAEKINREFDDDLSCIFNDDNADKLILRIRITNDEAPKGEIQDESAEDDVFLKKIEGNMLTEMALRGIPDINKVFIKEGKVNTFYQDDGFKAANEWMLDTEGVNLLAVMCHEDVDATRTTSNHLIEVIEVLGIEAVRRSLLDELRVVISFDGSYVNYRHLAILCDTMTYRGHLMAITRHGINRNDTGPLMRCSFEETVDILLDAAVYAESDHLRGVTENIMLGQLAPIGTGGCALYLNDQMLQQAIELQLPSYVEGLDFGMTPARSPITGT

SEQ ID NO: 251055 - protein, 96 aa, Zea mays
  Clone ID: MRT4577_160549C.1.pep
MSTYKPTEHDGLKQDGTPDKRVSSEHGFGGSDGPDPHVEGAKGGKASGSTGESYKPSEHDGLKKDGTEDKRLSSEHGFGGSDGPDPHVEGQKGGSK

SEQ ID NO: 251056 - protein, 155 aa, Zea mays
  unsure (1)..(155): unsure at all Xaa locations
  Clone ID: MRT4577_16054C.1.pep
MVPFHTYDAFXSAPRSSPSFGTTSRLADAPXKLAAIFRQTTHETTXSWTTAPDATFAXRYCRVNQQKQTDPPYXGRGPIQLTHKYNYTLPVQALNLYLVHDPDLGARHPGLAIKTAIWIWMTPQSTKTSRHATMTSNXRSSATDRAXXRLPGYGL

SEQ ID NO: 251057 - protein, 86 aa, Zea mays
  Clone ID: MRT4577_160550C.1.pep
VRVGSPKRFFRKGHMHVHNPTHPPAGGGKGPPRGEVFPSLIKDNRKLVYHLPKPFLAVGGKAAAHLNRAGGKGMFITPGSRNRKFC

SEQ ID NO: 251058 - protein, 85 aa, Zea mays
  Clone ID: MRT4577_160551C.1.pep
THLFVHYTSQYIHTGAQKCWCIYNHYYTHHIEQVEGRTYGRINNPKKRSFFYETGLVASYEGPLVVDALAESEDKGVYWRKYVTF

SEQ ID NO: 251059 - protein, 92 aa, Zea mays
  unsure (1)..(92): unsure at all Xaa locations
  Clone ID: MRT4577_160552C.1.pep
LFTPDWHEPRNKENAQPFGIRPISLGRPPGPPLGINPLPTPNHALRGGGSRALALGWDKSRSYYVGPLLKKQKKKKKKKKKKKTKKKKKKXI

SEQ ID NO: 251060 - protein, 118 aa, Zea mays
  unsure (1)..(118): unsure at all Xaa locations
  Clone ID: MRT4577_160553C.1.pep
MGVVGEKLQLGTVGALILSVVFSVSVVMCYKALMISLGSSFTSALTSCDLAVTFCCLNGSLWMTFCDHKPFEFRPAMVSGVLDGIFIVLINVSVGFDSVGFHQMTXLSLMPCTELVET

SEQ ID NO: 251061 - protein, 116 aa, Zea mays
  Clone ID: MRT4577_160554C.1.pep
MASKKAATMFVATAVVAIAAIVVAAATGVVASDGSPRSYLTSWGGPGCTTGTKGHIASAGSCGCNHLRFHGGHEFNFRGETATLYSQPGCVGTPYQVFEDTQACGDFGWHSIHIDC

SEQ ID NO: 251062 - protein, 57 aa, Zea mays
  Clone ID: MRT4577_160555C.1.pep
VLSSASLRNMECFIFYTCLLGIKHCYINFLNSMFFFLGLCVNNTFLSKFTRGMQELG

SEQ ID NO: 251063 - protein, 48 aa, Zea mays
  Clone ID: MRT4577_160556C.1.pep
MDFVHRYAADKGFFFDHFAKSMVKMGKISPLTGRAGKIRHNWRRVNPF

SEQ ID NO: 251064 - protein, 121 aa, Zea mays
  Clone ID: MRT4577_160557C.1.pep
KERARVSADTQDHQPETGKDSSENTTEFRYVPEGEESTSQALGAATADQINYDNQINQSFLEDESCIRNLEHSDERTPDNPEVPYLQTSQALPNKSENANELDGREIQTDASVQNLVERTD

SEQ ID NO: 251065 - protein, 74 aa, Zea mays
  Clone ID: MRT4577_160558C.1.pep
ELFSENPHANKHVRGRGEERRVFFSLYIPLFLFFLHFMVLFHAFIFSLWPFTFAFLDSLLFTLTPITNFVFSLH

SEQ ID NO: 251066 - protein, 310 aa, Zea mays
  unsure (1)..(310): unsure at all Xaa locations
  Clone ID: MRT4577_160559C.1.pep
VGSDGLVKLWTIKTNECIATYDKHDGKVXIIAMHQGRVIFLSYCWRGLKLTIICSNXWALAVGRKTEMVATGGTDAVLNLWHDCTMEDKQEDFRKKEQEVLRGQELENAVSDSDYAKAIQLAFELRRPHRLLDLFSKLARRADAEDPIEKALLGLPTDGLRVLLEYVREWNTKPKFCHVAQFVLFRLLRSFSPTDILEIKGISELLEGLIPYSQRHFSRVDRLVRSTFLLDYTLMRMSVVDPDVDAGTIKDEMNGSSVENGELAEPRPASPVPQKSSKKRKSGKSGKKGKEKKVKVASSGLLSKDVSVEP

SEQ ID NO: 251067 - protein, 58 aa, Zea mays
  Clone ID: MRT4577_16055C.1.pep
IKDIERIQHSVVHSDLLLDQTVRSSPRISTLAGVFAPLSDLSRLPHVCRRVVEEAERV

SEQ ID NO: 251068 - protein, 45 aa, Zea mays
  Clone ID: MRT4577_160560C.1.pep
NILFTSMFYYITNFILVCFKHMLVDTDHYPVYYTHHPLVSLFPPF

SEQ ID NO: 251069 - protein, 70 aa, Zea mays
  Clone ID: MRT4577_160561C.1.pep
VRDGYGGPVAYLWMRREAAVVKQQSQRMALWRAANKPLKHGAMLRTVTSAGTMAWLAARNERYMRVATVH

SEQ ID NO: 251070 - protein, 71 aa, Zea mays
  Clone ID: MRT4577_160562C.1.pep
MADYEVTVRLLALHALVWRADAVYLDKVTRETLPTGIHDFQGYQTYREQPGPDFTLTTCVCYCGRCKLPPA

SEQ ID NO: 251071 - protein, 104 aa, Zea mays
  Clone ID: MRT4577_160563C.1.pep
GSHSFQYNLDCLKTQWPVTSSTRYQPQLEVSPHLGLPLSVKKLPKNTFLELIDKIADKLTGWKSALIHTAGRLTLVKSVLTAIPIHHLIVLQCPKWVIKAIDKI

SEQ ID NO: 251072 - protein, 61 aa, Zea mays
  Clone ID: MRT4577_160564C.1.pep
PRRQRNSTSRSKLVSMPTYTFSRPWSTAQQMPRNASDDQDMIVHPAVVDIHATSLQIKDDG

SEQ ID NO: 251073 - protein, 61 aa, Zea mays
  Clone ID: MRT4577_160565C.1.pep
EGLSTQGENPLPIFLYIFTPNINFLFNKISFQFLIHSTSYLFYTSTYISFTSPSFLQHLFL

SEQ ID NO: 251074 - protein, 107 aa, Zea mays
  Clone ID: MRT4577_160566C.1.pep
SKFGGQMKKCFPRGLESPWIRFQRGAAPPVFRGASIPTCPPPAPLRCSCQKRKSLLKKRLPPLSHQGTSEVYPPAGRGPFVEVLNPELFYGPFQAPFPLETFLEPMF

SEQ ID NO: 251075 - protein, 57 aa, Zea mays
  Clone ID: MRT4577_160567C.1.pep
IRFSCSWLTVFSRWETEGEVGDETSLTFRGLHVTIRAGLVDRKMKRSIGKVYLAIKF

SEQ ID NO: 251076 - protein, 629 aa, Zea mays
  unsure (1)..(629): unsure at all Xaa locations
  Clone ID: MRT4577_160569C.1.pep
MYSSDGLALAGPGCSSVAYGASEEIGPFRIKPNGTGLFLNKYSWNRXRKKERKKERKKEKPLKLLINHHQLPVPLXEANLLFLESPAGVGFSYANTTSDLKTSGDERTXVRSELCCWAIELASSXPQTDLMPEMKRHXSCVTGQVVPQLADAVAKCEXCWLXAQDALQFLVSWMSRFPQYRHRDFYIAGESYAGXHCHSLPLLIHRDTPASCPRVFFFCCFNLFTLLLLPXHYVPQLARKIVEYNEASPHPFINLKGILVXRIVSMHAAAKHEQAAGRLQSNLNPPPKKKNIDQVGNAVTDNYYDNIGTVTYWWTHAMISDRTYKAILRWCNFSSSSISRPCNRAMSYAMNHEFGDIDQYSIYTPSCAAAAARANATVLRFKNTLVRRRRSSGYDPCTETYAERYYNRMDVQRAMHANTTGIPYRWTACXKVSTYSFFSVVARPFNLRVPLNVVVVVISLYXSDVLIKTWQDSEFSMLPTYKKLMKAGLRIWVFXIDQESKSETGKLYIYTCYLVAXTLCDLAKXSGDTDSVVPVTATRFAISHLGLKIKTRWYPWYSAXGTELAIAAVVACNXSEFGAHVQVGGWSEVYEGLTFASVRGAGHEVPLFQPRRAFRMFRSFLAGEPLPKS

SEQ ID NO: 251077 - protein, 128 aa, Zea mays
  Clone ID: MRT4577_16056C.1.pep
AEAGTSPWGHTEKEDSGACTLPGGGVGTRGRPARRSRRCGVGARASAGQKAKAPGEAGSEGNGGPQKIDLKSPHGSEAETDTAGACSTCTKEPNGKDLLFGRPDAAGKGQKPISGGIAQWDGQYGPGP

SEQ ID NO: 251078 - protein, 44 aa, Zea mays
  Clone ID: MRT4577_160570C.1.pep
HRRVDHFLKFFLSFSFSTNLLFSSQAGFIITFLHLPSHPFYLLY

SEQ ID NO: 251079 - protein, 153 aa, Zea mays
  unsure (1)..(153): unsure at all Xaa locations
  Clone ID: MRT4577_160571C.1.pep
FPRPPPGXPPNPLARVFAPPQNPPGXPSHKKNFYSPLGGGPTKKFPLGKTNLGGVLGKXPPQGGGPPRYSFGSPKKNPPPPPPGGFTPPXKPPPPAPPQKXPPPFPKTPYIPLFGGGEPXNLPRAPPARCFFKHPGVGGGGPPTSPGGGPPPP

SEQ ID NO: 251080 - protein, 85 aa, Zea mays
  Clone ID: MRT4577_160572C.1.pep
KGKGVNAYVLKVKHTLHICSTGRLWGPRVPTKTTNFKITYPYRHLLQCKCMEEIYPPYYIEHSADLPYLALPQGAPHVAIPDHQH

SEQ ID NO: 251081 - protein, 63 aa, Zea mays
  Clone ID: MRT4577_160573C.1.pep
VYSFHLILQYLNTQTSPKTSVTFKIHFHPNNELTAYHSTLISNNSLLTQKLNNMHITHTFLFT

SEQ ID NO: 251082 - protein, 98 aa, Zea mays
  Clone ID: MRT4577_160574C.1.pep
QSCILLLFQRRHSKAASDCIHTYSWSKLVQSEGGRWHHALHAVDTTGYIGCVYMSESFIITEKTKHLIICSNLHRLTTPGAKAPDEPLMVQTELSVRG

SEQ ID NO: 251083 - protein, 289 aa, Zea mays
  unsure (1)..(289): unsure at all Xaa locations
  Clone ID: MRT4577_160575C.1.pep
NTCLEIANGTEANAKKSDKQLKKEARKQRELEISAMEERALQEDIPQTPDDFEKLVRSSPNSSFIWIKYMATLLDLADVKKARAVAERXAVKKVFQRALQYCDPKKLHLALLAMYERTEQYELADELLDRMTKRFKTSCKIWLCRIQFALKQGKDVEYIKAIVNRALLSLPHRKRIKFLSQTAILEFKCGVPEEGRSRFELILREYPKRTDLWSVYLDQEIRLGDVEVIRALFERRVACLTLPPKKMQFLFKKYLNFEKSLGKDNERIQLVQQKAIEYVQSSLPSQDNS

SEQ ID NO: 251084 - protein, 43 aa, Zea mays
  Clone ID: MRT4577_160576C.1.pep
PFRRDAFMRYNQRSEVGALLYHYLLEDISSDPEKPDPVQPLIS

SEQ ID NO: 251085 - protein, 367 aa, Zea mays
  Clone ID: MRT4577_160577C.1.pep
MNRKGAGGKTDLRPDRKQFKRHHKEDAAAEQGDGNGEPGSDLEDNISNTCLEIANGTEANAKKSDKQLKKEARKQRELEISAMEERALQEDIPQTPDDFEKLVRSSPNSSFIWIKYMATLLDLADVEKARAVAERALKTIIPREEEEKLNVWVAYFNLENEYGSPREDAVKKVFQRALQYCDPKKLHLALLAMYERTEQYELADELLDRMTKRFKTSCKIWLCRIQFALKQGKDVEYIKAIVNRALLSLPHRKRIKFLSQTAILEFKCGVPEEGRSRFELILREYPKRTDLWSVYLDQEIRLGDVEVIRALFERVTCLTLPPKKMQFLFKKYLNFEKSLGKDNERIQLVQQKAIEYVQSSLPSQDNS

SEQ ID NO: 251086 - protein, 97 aa, Zea mays
  Clone ID: MRT4577_160578C.1.pep
YGKNNMALQRAGTAFYALTNDRKEKSAKVVLRQTPTGCSMRLKAHAPKPIDGYHSHGGEAENAMDLSFSLSENADVKVDCHRCELLRIDESHLTDVM

SEQ ID NO: 251087 - protein, 48 aa, Zea mays
  Clone ID: MRT4577_160579C.1.pep
SSSRHALAERDRAHISIPRQTDRDSVPGTVQILKTPRLNYRQSLETAF

SEQ ID NO: 251088 - protein, 341 aa, Zea mays
  Clone ID: MRT4577_16057C.1.pep
MVGPGHRNSHGKRQSDYAENGGVKRRNPGGDTYAPGPDDTVYRYLCTSRKIGSIIGRGGEIAKQLRSDTQAKIRIGESVPNCDDRVITIFSSSRETNIIEDTEDKVCAAQDALFRVHEKLATDDGPVNEENEEGLGQVTVRLLVPSDQIGCIIGKGGHIIQGIRSDTGSQIRVLSNEHLPACATSGDELLLIIGDPIVVRKALLQVSSRLHGNPSRSQHLLASGLTQPFPAGSRLGSSSTAPVVGITPMVGPYGRYKGDMVGDWPSIYQPRREVSSAKEFTLRLLCAAANVGGVIGKGGGIIKQIRQESGAFIKVDSSSAEGDCIITVSAKEFFEDPVSPT

SEQ ID NO: 251089 - protein, 72 aa, Zea mays
  Clone ID: MRT4577_160580C.1.pep
AVIPVCMKATSTNKLISFDKANKDLFLMNVESVKDYFFQPITRLDNREVVFDKMIDDFNTMILITKIKSILY

SEQ ID NO: 251090 - protein, 102 aa, Zea mays
  unsure (1)..(102): unsure at all Xaa locations
  Clone ID: MRT4577_160581C.1.pep
FSTWRHXXLPSLPAARVELGPXPSSRADGKERFQCREEGLNCESGRGAXXWVGTHGRPHEALGESKNARGFRKRSHPNQTAXVCVRVVNAKEPRRWAVPCTY

SEQ ID NO: 251091 - protein, 203 aa, Zea mays
  unsure (1)..(203): unsure at all Xaa locations
  Clone ID: MRT4577_160582C.1.pep
RVSGRKGQRPPLSARRLETSLRRSKILNRRRRQTRLIADWMRIDADDNDPDDLDPMDSQEQQDLVRTLEVKQVQQGRRRRYDFSSFRLSYAAFLVYSSFRHDCAPSKMLEHADVMKDLPVPMGITAYRVAALXDYLLALAXLLQNSGPSHKCMWXSCYVAILRAICWTYYILRMPRXRWDVACVPLGPLMTGALSLYVDHVLL

SEQ ID NO: 251092 - protein, 123 aa, Zea mays
  Clone ID: MRT4577_160583C.1.pep
PPVWPGLNVASPPGLGLGAGATMIGSTAPAPWSGPGTPRQPRAGTPARHGRRGCTRAVAGVGRRDALVGHMGECEGEVDRDRLPRLVAQPGRMHDGSQGEEILDRAPAHGGHTTQKLSSKKEE

SEQ ID NO: 251093 - protein, 82 aa, Zea mays
  unsure (1)..(82): unsure at all Xaa locations
  Clone ID: MRT4577_160584C.1.pep
VGDKTKLAAXLETNNNKNVENALTXALEWLAATQPAKMKAYAEYLKEVQAVSNPLVWPVNQRSASAPGGDAKGGVPVDPYYL

SEQ ID NO: 251094 - protein, 56 aa, Zea mays
  Clone ID: MRT4577_160585C.1.pep
KQASQQRTNSRWAIPDGTLLQIFAQITTPYKHNYCQSHPSLSLKGDNPRFLWFHTC

SEQ ID NO: 251095 - protein, 56 aa, Zea mays
  Clone ID: MRT4577_160586C.1.pep
PSRRPPFSSCFGETHASIAQSVVRIVSPGTPEQVAPPMTWRCPPPKIKSLGWSSSR

SEQ ID NO: 251096 - protein, 124 aa, Zea mays
  Clone ID: MRT4577_160587C.1.pep
PAPRFLPPPSLSPWPRRPCPSPCARLLLVAPCSLRLGPKLPGAFAQPSSLAKPRPRYSLVLAARAQLSVRLCAQLPNLHGRFPARVVVSRLVNTYSVISACLASNSSASPCSRGSATAGVSLAM

SEQ ID NO: 251097 - protein, 83 aa, Zea mays
  unsure (1)..(83): unsure at all Xaa locations
  Clone ID: MRT4577_160588C.1.pep
KRQAPWELSYLYALFSSDPHYSKTNLTDYILEFQTNCHTCRAGFVTNVTXYIVGAKVRLECKHFRTCKLERAIYGVTDATGTY

SEQ ID NO: 251098 - protein, 112 aa, Zea mays
  Clone ID: MRT4577_160589C.1.pep
PSRPAASSQHVVVGEPAIYSTPPTPPALPAPRHQVLSGGRGDLGALARLEDSVKRLKSPVGSPGSMLPRHQADAALALLADWFLESSGSVSLAAVRASGASPAARPGDEDER

SEQ ID NO: 251099 - protein, 416 aa, Zea mays
  unsure (1)..(416): unsure at all Xaa locations
  Clone ID: MRT4577_16058C.1.pep
SSRPGNTETDNAQRSGLINPNRXFTLWWSPTINRANVYVGFQVQLDLTGIFMHGKIPTLKISLIQIFRAHLWQKIHESVVMDLCQVLDQELDALEIETVQKETIHPRKSYKMNSSCADILLFAAHRWQMSKPSLVSESKDVFDQKASNKYWIDVQLRWGDYDSHDIERYTRAKFMDYTTDNMSIYPSPTGVMIGIDLAYNLHSAFGNWFPGSKPLLQQAMNKIMKSNPALYVLREPFRVGLQPYSSEPLIQFLSXTDYVLLSAILFEIXCFRFQVNLVFCKTLNIGRFXTEDGXNNVQVIPPSVWAGQKRFGQLAKWKTPXEGAAMVRFLPVEKQPKQIVXSKKGMLDPLEGHLPDFPNIVIKGSELQLPFQAXLKIXKFGDFILKATEPPKGLYKKKEDWLKRKSSNPTFSPTWG

SEQ ID NO: 251100 - protein, 91 aa, Zea mays
  Clone ID: MRT4577_160590C.1.pep
FLTVHCGHSQRGQTIRKIGQLMGGRKKKIDGEQGRKNNILGVNYWSELDDKLQRFMRNYLKRVGKLLCTGMEIEFRFYRLRRNRTIRTLKR

SEQ ID NO: 251101 - protein, 79 aa, Zea mays
  Clone ID: MRT4577_160591C.1.pep
SLWPKEIKYDLSLCVLGILYFNISSFFLTRFGQETIGWNSMFWIVFGISLAPFPLVYLFNEHSTFGKPTAKFHPDEEKK

SEQ ID NO: 251102 - protein, 81 aa, Zea mays
  Clone ID: MRT4577_160592C.1.pep
QLSRGNTFTLILPVHQYVQPCVSSTAISWSIIAVMIISVSHRAFVAILIVQVSICIMPTSNVSASLSSGKRFIMSNTSDVY

SEQ ID NO: 251103 - protein, 553 aa, Zea mays
  Clone ID: MRT4577_160593C.1.pep
MVILDRTPAAAQGAACSPLPKSPRFSWEVASPPSDPILPYLRSISRAMDELGTGPQYDTTALDRLKHYLTECIAKYGDDYQYSTDPRLLKIWILYADAIEDFPSVYNQLEEKGMFQEHALLYDSYAQYLIAHGKLVEADKVYGIGISRKAEPLDNLKKMHLTFLKHLENILEEADAEEQCKSSNIQKNEPSVIDPWSPSTRNTLLEKINGGLRKFSGYYKSNKVYCGKVPLTSSLNVLRNKGIKLGGRKYQIKGSTGTGAFAKVYKATVDSNAEEMVALKIQNPSFTLEFYMYCQLDLRISDVERPSFGYAHEMHIFSDVSVLVCDYLPYGTLLDVINSHLVVGRYMDEVLCMYYTIEMLNMLETLHSVGIIHGDFKPDNILVCYPSGEITEDNFRSEKRVERNQGLCLVDWGRGIDLALFPSCTEFHGDCGTSGFRCIEMQEHRNWTYQVDTYGLCVVVHMMLHGSGMNVKKVPRIGGGYEWQPKQPFKRYWNVDLWQKLFSTLLNPPSNDSDVAALQSLRASFRQYMCSNRQLVGKLNQLLAKQKASLCSS

SEQ ID NO: 251104 - protein, 137 aa, Zea mays
  Clone ID: MRT4577_160594C.1.pep
GRAGDCNTGCVLIYVSRDDGGVLSSSGSGRGRGRYLMLGICRVLTGLLVLASASDAYRKYKTAQPVELLHRLKVSRTTSSRNSLLLQPCILTMRMRTLHIDGALLGEARCENGMIDIRLERRDIHNEETGFDLHTCM

SEQ ID NO: 251105 - protein, 54 aa, Zea mays
  Clone ID: MRT4577_160595C.1.pep
KLFSTLLNPPSNDSDVAALQSLRASFRQYMCSNRQLVGKLNQLLAKQKASLCSS

SEQ ID NO: 251106 - protein, 54 aa, Zea mays
  Clone ID: MRT4577_160596C.1.pep
LSTLSFFLLKKRASPLTGGPPPSLNHMVLPLGFSQHSRKPTLFFNHLKHFYPSQ

SEQ ID NO: 251107 - protein, 72 aa, Zea mays
  Clone ID: MRT4577_160597C.1.pep
NPLLYQSLTKSHKVVYIGLFLKLFVSLYSYLAKEAIPFKCSNSGGVRCTKAQPKSQLFLLLYIYPVKEARLT

SEQ ID NO: 251108 - protein, 90 aa, Zea mays
  unsure (1)..(90): unsure at all Xaa locations
  Clone ID: MRT4577_160598C.1.pep
GEPRFIAVGYVDDTQFVRFDSDAASPRMAPRAXWIEQEGPEYWDRETQISKTNTQTYRESLRNLRGYYNQSEAGSHTLQRMYGCDVVPDG

SEQ ID NO: 251109 - protein, 91 aa, Zea mays
  Clone ID: MRT4577_160599C.1.pep
EHINVLHQYCPEHAAQRAQILTRRGGSPSAPGCVPTSLGRYKVSALILAVVSALLAVQVDCRLISDRPDIHQTVRDGSISSGFRFVHVGEW

SEQ ID NO: 251110 - protein, 72 aa, Zea mays
  unsure (1)..(72): unsure at all Xaa locations
  Clone ID: MRT4577_16059C.1.pep
PAHASVELFFSERFFYHAPXHACVHAVPRCRARTSSVLCMERTSLSYARFGIRVDYVYRFEDTLQQFNINSH

SEQ ID NO: 251111 - protein, 502 aa, Zea mays
  Clone ID: MRT4577_1605C.1.pep
MLARRLAAPDGSRLFSAASSASARGGHAGGDTLGKRLLKLIYPKRSAVVVLQRWADEGRTVQKYQLNRVVRELRKNGRFKHALEICEWMRTQPEMRLLPGDHAVHLDLVAKVRGLASATKFFEDMPERAKGPSTCNALLHAYVQNGAREKAEAMLAEMARVGYLTCALPFNHMMSLYMATGELERVPEMIKELRRYTLPDLVTYNIWLTYCSKKDSVKSAERVFGLMKDDCVVPDWMTFSLLGSIYINAGLHVEGRNALVEMEKRASKKERAAYSSLLTLYASLSDRGNLDRVWNKMRGTFRKFSDTEYKCMLTSLLRFDDIAAAESIFSEWESTSGTRDSRIPNTILSYYIKNGMIKKAESFLDHIVEKGVKPSYSTWEAFVWGYLGDNKTDKVLECMKKALSCLEKWEPNHELATAIFSQIEKTGDIEAAEKLLVIFRDAEYVITEMYNSVLRTYAEAKLMPLIVDERMEQDKVAMDVETKRLLRLTSKYPIGEVSVSMS

SEQ ID NO: 251112 - protein, 105 aa, Zea mays
  Clone ID: MRT4577_160600C.1.pep
FGSDKVRRPRAPLFGCPWVFRCQRSSFLFGVSVLFKGCSTGHRPRRGSSQTRSVGAEPSSSSHCRGLNDFLLMFFHLCHVFCECPRLNGYECVNGGSVDRKCQFK

SEQ ID NO: 251113 - protein, 34 aa, Zea mays
  Clone ID: MRT4577_160601C.1.pep
DETRGGNVVYTNKGSIYTPKLLTSYHINNNITFK

SEQ ID NO: 251114 - protein, 89 aa, Zea mays
  Clone ID: MRT4577_160602C.1.pep
PLKLIHHGQGQDGEFHVNAFLTTILKNPSGSVLCPCSGLHCPICPVPWPPRVMGEAGGPTVLRHSPTSQPHFQPPVGSHPGRAGSCLRA

SEQ ID NO: 251115 - protein, 170 aa, Zea mays
  unsure (1)..(170): unsure at all Xaa locations
  Clone ID: MRT4577_160603C.1.pep
MADGEDIQPLVCDNGTALAKAGFAGDDAXRAELPIIVEHPRYTGVMVGMGQXEAYGGDQAQPKRGIQTXKYPIKHGMXVSNXDDMEXSEHHTLYKELLVEPEEHPVLLTEAPLNPITDKEIMTQIMXETLNVPAMYVXIHAVXLSLYTIERTTGIXIDSGDGASHTVPIY

SEQ ID NO: 251116 - protein, 140 aa, Zea mays
  unsure (1)..(140): unsure at all Xaa locations
  Clone ID: MRT4577_160604C.1.pep
TRPGISTYPLLHNAADLFIFWAAKLKPGHGVDAGLSGFLDHIWWLIELYIVYKRGLIKTGLGWRVLYSFVACFRFIYIGLGXSLVFAEVLLARDILSMYAHAGVMLLLLVKAICEACGXSTVNGTERHIXAWVMLTCYGT

SEQ ID NO: 251117 - protein, 74 aa, Zea mays
  Clone ID: MRT4577_160605C.1.pep
FPSVWFLSVPFENSYRIVISRHVKNQCQHTCSIIVQLVHCALSTLYILASRIHDLIIVVAQTFRFLICSAGTTV

SEQ ID NO: 251118 - protein, 36 aa, Zea mays
  Clone ID: MRT4577_160606C.1.pep
FPGVRIGFPLPIIVISFALRVLSGLVFNLLFPPCKT

SEQ ID NO: 251119 - protein, 132 aa, Zea mays
  Clone ID: MRT4577_160607C.1.pep
SSVCLSRTAVIESEERGTGGSRLRRSSSTMPMGPGVNCSPVKMLRRGTAPIRGWGIATLCTARMGTSPAGPWPHHLEAFSATANSPSVLLATEFVIDDLSTVARGWFAERHRRVQTRRRLHLRLPRQRVRRL

SEQ ID NO: 251120 - protein, 278 aa, Zea mays
  unsure (1)..(278): unsure at all Xaa locations
  Clone ID: MRT4577_160608C.1.pep
LCMYPEDYTSKRNXLIWKWSAEGFIKEEPGIRQYELGERYFSELVNRSMIQPIWGGSGSCFVTGCRVHDLVLDMICLLSNEENFVRVWDVNDQRISCQSNARRLAIQKIVLEQDDSLANMCTPQLRSFSAIGCDVHVMPSLISFGALRVLDMEDCSSSGGGSYHLDHLGSLLHLRYLGLRRIDKVPEKIGNLKFLQTLDLEDTRIKELPQSFALLRQLKRLHFVVAEGIVXMHLLXNLTSLEDLQLRFDTWSPEVVLRKLTMLRNFILIIMPYKGLDD

SEQ ID NO: 251121 - protein, 95 aa, Zea mays
  Clone ID: MRT4577_160609C.1.pep
SQVQLAFKNNTLEGSFIRKDVPYYFWAFFPKGDLTGRKGFALSSYSNEVSPIEPFLMDEKRITAKYVVFWVYKRRAGQGILPVWKEEEGEEEAAK

SEQ ID NO: 251122 - protein, 47 aa, Zea mays
  Clone ID: MRT4577_16060C.1.pep
GPSPPAWSRSTHRLFPGLGSSTLKTCVVCPTMHAWSVITSRVYVCRT

SEQ ID NO: 251123 - protein, 216 aa, Zea mays
  unsure (1)..(216): unsure at all Xaa locations
  Clone ID: MRT4577_160610C.1.pep
MVMAPQPSRALSPRLSRAPGAGHASCRCSAALAPLFGKRPAPPLVVSFPRAGSGGAVASCSALPVQESSTSTAVSKKKDGANKEATAAKPKKAAALPLXEMMQQEIIPPLKDALEAEDDVSQVQLAFQNNTLEGSFIKDDVPYCFWAFFPKGDLTGPKGFALSSYSNEVSTIEPFLIDEKRITAKYVVFWVYKRLAGQGILPVWKEEEGEDHQDAK

SEQ ID NO: 251124 - protein, 414 aa, Zea mays
  Clone ID: MRT4577_160611C.1.pep
MWGGDSNAKQMLKSRGGTGVVGGLPAAGDEESDYFPPTPRKDYWWSTGLLKLVTATVIFMGGVVLGLSVSGSVARYYYNASHAELFFPATTYGCDPRDRDCGMGLAFRAFVHPPRLAHSMTDDELFWRASLVPRAEEFPFQRVPKVAFLFMARGPIPFAPLWDKFFRGHQGLYSVYVHTVPDYKLNVSKSSAFYGRQIPSEEVSWGSITLVDAEKRLLANALLDFSNERFVLLSESCIPVFNFPTVYEYLINSAHSFVESYNIDTPQCAGRYNRRMAPHIMADQWRKGSEWFELNRELAVQIVADYKYYSIFRKHCRPSCYPDEHYIPTYLHLFHGPLNANRTITWVDWSRGGPHPASYGATDITEDFIQAIRNNGTQCFYNSKPTSVCYLFARKFAPNALPRLMNLTSTVLDF

SEQ ID NO: 251125 - protein, 113 aa, Zea mays
  Clone ID: MRT4577_160612C.1.pep
QRAAPATQTRKETERPTPMENMGHPQSERGTPTREGNKVHPRARQCKRACARPGGTPADRAHSISTERREGESDVKPLKRSTARAQGTAPPLLMSPSQQHTQQSWNQTVLPSC

SEQ ID NO: 251126 - protein, 152 aa, Zea mays
  unsure (1)..(152): unsure at all Xaa locations
  Clone ID: MRT4577_160613C.1.pep
MKVEMASETIHKELKDLQKDPPTSRSAGSAAGDMFRXHEIIVLPSDMPYSGEDFLATXIYFPPEYPLLPPXVTFHTTEIHPKIHSNYTIWLDILDDQSCPPITISMVLLSICSLLTDSNPDYPLVPEXVHLYKTDRHKYKNTARTWTQMYAM

SEQ ID NO: 251127 - protein, 105 aa, Zea mays
  Clone ID: MRT4577_160614C.1.pep
EGPIFPFTCGGFSISLLPVFTTPCFGKTPSFPSFFFFGGGPLFPFWLKIKKARSEPPSPLWGTLNGEGAPPFLGHYTRLVGGLPPPYPLLFPWLLPPGLCFSSLA

SEQ ID NO: 251128 - protein, 93 aa, Zea mays
  unsure (1)..(93): unsure at all Xaa locations
  Clone ID: MRT4577_160615C.1.pep
EGDWQERSLHGWADLCSRLLSRSTGGIWGEVTTSLLKFVSWRTRRGGRRSMGQICGVSASPVGASATREWGRVMRPLLSPGGNMQLSXPLFSM

SEQ ID NO: 251129 - protein, 56 aa, Zea mays
  Clone ID: MRT4577_160616C.1.pep
YNIYISSPSSAKSVRIQILHDLTILTINKFHYYTLFYNLLLQSTSNIQLNKYIQYY

SEQ ID NO: 251130 - protein, 98 aa, Zea mays
  Clone ID: MRT4577_160617C.1.pep
DQRGKNLTGPAKENKKLQNKGAERDSLLAISPGCWKRTRSNIFFFFFFCFFFFFFFFFFFFFCWNLYLTFNTVEPKRKKKKKKKAKKKKKKSTKKKKQ

SEQ ID NO: 251131 - protein, 34 aa, Zea mays
  Clone ID: MRT4577_160618C.1.pep
ATISPAGLWEDHHLCSTNNRHCFLLSSTPALCLP

SEQ ID NO: 251132 - protein, 38 aa, Zea mays
  Clone ID: MRT4577_160619C.1.pep
KESVRSVMRCNPVLQVDNCEASDAHGQPQLINKEAAAP

SEQ ID NO: 251133 - protein, 68 aa, Zea mays
  Clone ID: MRT4577_16061C.1.pep
DYKSGVFLFIYRGGGWTRYKQTHRTNSVNLANKHSKKLGILIGSARADRPNQRRGPSGLNLVLNTSIN

SEQ ID NO: 251134 - protein, 63 aa, Zea mays
  Clone ID: MRT4577_160620C.1.pep
DDQDDEPHHYLEQTRGNRIQRGRPEEGTARPMRQNHGGTRTRVENKISGPTHGGHTTSGCPAA

SEQ ID NO: 251135 - protein, 69 aa, Zea mays
  Clone ID: MRT4577_160621C.1.pep
VTTDPMGWHFVDLENDAVVGFDPEARTPRAESSRSKSEQARRLAPAHLGRGVTSVSTGAYLRPGRLERP

SEQ ID NO: 251136 - protein, 78 aa, Zea mays
  Clone ID: MRT4577_160622C.1.pep
IKGNILHAIRCTTNNPVKLEDVIYEKTENPRPTDIKSCLKDNHIVQKESQKCPPTQKSLLKHSAGKYSSLLIPPALAS

SEQ ID NO: 251137 - protein, 300 aa, Zea mays
  unsure (1)..(300): unsure at all Xaa locations
  Clone ID: MRT4577_160623C.1.pep
MAAPGSLRLLQAPSFAAAKCQPVAGRASARRAPRPLFAVRASAADAANRDAVLKAFRENRALKIISGLQNFDRSSVASVVTAADKGGATHVDIACDKDLVKLAMDLTNLPICVSSVDPSAFHSAVQAGAKMVEIGNYDSFYEMGIEFSSEQILKLTRETKXMLPDITLSVTVPHTLSLPDQMRLAELLEEEGADIIQTEGGKCSSPTKPGVLGLIEKATPTLAAAYSISRAVSIPVMCSSGLSSVTAPMAVTAGAAGVGVGSAINKLNDVVAMIAEVRSIAQAMELAPRIVSETLRTISY

SEQ ID NO: 251138 - protein, 527 aa, Zea mays
  Clone ID: MRT4577_160624C.1.pep
MPPVKAEDLVVHAVKEQFAGLDYCITSPPPWITTVLVGFQHYLVMLGTTVLIATIIVPLMGGGHAEKAIVIQTILFLSGINTLLQVHFGTRLPAVMSGSYTYIYPAVAIILSPRYALLIDPLERFVFTMRSLQGALIIAGVFQAVVGFFGIWRVFIRFLSPLAAVPFVTLTGLGLFFFAFPGVTKCIEVGLPALVLLVIFAEYASHVFAKGSFVFSRCAVLVTVVIIWIYAEILTAAGAYNERGPVTQFSCRADRSGIIQGSPWVRFPYPFQWGYPIFCFQDCFAMLAASFASLIESTGTLIAVSRYSGATFCPPSVFSRGIGWEGISIILDGMCGTLTGTAASVENAGLLAVTRVGSRRVIKISALFMIFFSLFAKFGAVLASIPLPIFAALYCVLFAYSAGAGFSLLQYCNLNSLRTKFILSISLFLGLSIPQYFRVYEMFFGFGPVHTHSVAFNVMVNVIFSSPATVAAILAYLLDCTHLYWEASVKKDRGWFWWEKFKSYKYDGRSEEFYRLPYGLSRYFPSL

SEQ ID NO: 251139 - protein, 65 aa, Zea mays
  Clone ID: MRT4577_160625C.1.pep
YLAFTTDNMPFTASDICKILLAIILPPVGVFLERGCGADFFINILLTILGYIPGIIHALYIILKY

SEQ ID NO: 251140 - protein, 77 aa, Zea mays
  Clone ID: MRT4577_160626C.1.pep
LNAGLMGVPKDSFSGRFHTVPQKTMNVSAPLHLVSTALQIKQSSPIRKKPLQYMFIENYLTILYSKTPSSSSPKSRV

SEQ ID NO: 251141 - protein, 87 aa, Zea mays
  Clone ID: MRT4577_160627C.1.pep
MPGSSRIPQSLRGSLESVKRRRQALSLSVINLDLLKNILFFFFVLRYTRRLWWKLKGRGIIGAILELYRDIERTLYGYFLRAPGVRR

SEQ ID NO: 251142 - protein, 138 aa, Zea mays
  unsure (1)..(138): unsure at all Xaa locations
  Clone ID: MRT4577_160628C.1.pep
KTPTNKGKKKKEHKRKGKQPXRKXPEKGXRPXXKGVLXMAKEPTRRGGEEGHRXLLDKVKAXANXTPGLGRNPPFKREAPPPASNALDAFKSDAKKXMVVALVDMERAFVPPQPFIRLGQRXKKKKKKKKKYSALLPL

SEQ ID NO: 251143 - protein, 94 aa, Zea mays
  Clone ID: MRT4577_160629C.1.pep
MSETRFWEKYCRAEYLVRTKNTAAATAEAAGDEELAIFLKNDDILAKEAKLKIKRVDPTLDMEADTGDDYIHLPDHGIHRDGSKETVDADSELA

SEQ ID NO: 251144 - protein, 149 aa, Zea mays
  unsure (1)..(149): unsure at all Xaa locations
  Clone ID: MRT4577_16062C.1.pep
KKKREKRLEIIHFLWRRIAKIATYTTSWRGGGTHARNSSDPVPPDKRRPATRSERDILGAPVWEGVVAGLRRRRLEAEQRVAAPVHVVGHRVRHVQIERQRRRRDGLVAAARTRRAVLAEDRRRGAAVAAAVLLGGRGGQKLVSSXXGN

SEQ ID NO: 251145 - protein, 48 aa, Zea mays
  Clone ID: MRT4577_160630C.1.pep
IYAEWATLREITNDTRPTKMILDRSQHNQPYDKHLLHKNNINQLYQLL

SEQ ID NO: 251146 - protein, 73 aa, Zea mays
  Clone ID: MRT4577_160631C.1.pep
GEGRPPRGPPISQGAGENPPSFLTQPQWLRVHRQKAPGGDTLLDPQHLPPCKRAAQTNPAAFNQQPIIGGALF

SEQ ID NO: 251147 - protein, 74 aa, Zea mays
  Clone ID: MRT4577_160632C.1.pep
ERSGMQSPSRSLSFIYTSFRQAPAVAGLRASYDSVILRIEIYTLVSGETIFPRCKIHPLGCSVTYSNVGALGSH

SEQ ID NO: 251148 - protein, 59 aa, Zea mays
  Clone ID: MRT4577_160633C.1.pep
KVWESSNNGEQLFTKTYTLLIILMLCTRVAITLLFTKMLQDSYIFHFFHIYFIKYMSSV

SEQ ID NO: 251149 - protein, 123 aa, Zea mays
  unsure (1)..(123): unsure at all Xaa locations
  Clone ID: MRT4577_160634C.1.pep
AWRLRVWGVVLVLWGCGSLCGLPRGRGSPCRSGAAWSSLVALFFFLVGACSSSLGPSPPSVLLSTCVAGPVLLQPSVKKNSVWAFWRLFPAPRVPFGGXSXSCAVWLVRGCAWLPRAAVGWLV

SEQ ID NO: 251150 - protein, 58 aa, Zea mays
  Clone ID: MRT4577_160635C.1.pep
WIIYIFYTILNYWGRSLIAFFRMLIARPKNEGRVLLFLPLCSTTFKFLTLWFGPFFPT

SEQ ID NO: 251151 - protein, 203 aa, Zea mays
  Clone ID: MRT4577_160636C.1.pep
GTPAGSGPEFPGRPTRPATVAEQWVLVEMVQALYEAPAYHLILEGILILWIIRLVFSKTYKLQERSDLTAKEKEELIEEWQPEPLVPPVSKNHPALNYNIVSGPPTHNIVVNGKECVNFASFNFLGLLANPRVKAAAFSSLKKYGVGTCGPRGFYGTFDVHLDLEERLAKFMKTEEAIIYSYGFSTGASAIPAYSRRGDIIFV

SEQ ID NO: 251152 - protein, 75 aa, Zea mays
  Clone ID: MRT4577_160637C.1.pep
STSGEKFQTHLGPLDWKKIRLPGNRIIFRRHGVLGSEQRNWKTGHHTTQSQGRGGGPFIHFWAFSSWTGATCPFS

SEQ ID NO: 251153 - protein, 37 aa, Zea mays
  Clone ID: MRT4577_160638C.1.pep
EASPGPMYEKVQASDQEGQKSPQALRKAAVCTPRVGG

SEQ ID NO: 251154 - protein, 69 aa, Zea mays
  Clone ID: MRT4577_160639C.1.pep
AMHECLAYLADKDKDKEGARALVNALLWCKREAGPASTPYPHGVTKTTNARGWRRTSTTRLKELANKVA

SEQ ID NO: 251155 - protein, 50 aa, Zea mays
  Clone ID: MRT4577_16063C.1.pep
LNQKFRAQLDKCLNDFIWFKSLALLIWIRYSLLQQFLNFMGFPHNTSHIG

SEQ ID NO: 251156 - protein, 123 aa, Zea mays
  Clone ID: MRT4577_160640C.1.pep
GTPGFVGYLGYPPGLYTDAEGVAVEKFKQVFKPHTFPPGASIHFTHSPAGVLTVAFSRDSSVPGAGGVAIDNKLLCEAVLESIIGEHGVSPAAKLSLAARVSELLTKGTAAAALRAEPVSVTA

SEQ ID NO: 251157 - protein, 75 aa, Zea mays
  Clone ID: MRT4577_160641C.1.pep
GCCTSFFMDISCGGYVDYLRLEPRGASASARSYRAMPASSSRLLGRHLSVRACVWTLELDWRAEDGNSHPARVAW

SEQ ID NO: 251158 - protein, 199 aa, Zea mays
  Clone ID: MRT4577_160642C.1.pep
GCSRSGWSRTGRRPALSKKKCGKTDDELASDAAFFRDDVTGDFEKFTRVTMILPLTGEQYAENVAENCVPLWGEQYARTENCVAFWKAAGLYTDAEGVAVEKFREVFKPQTFPPGASIHFTHSPAGVLTVAFSRDSSVPAAGGVAIDNKLLCEAVLESIIGEHGVSPAAKLSLAARVSELLAKGTAAAALRAEPVSVTA

SEQ ID NO: 251159 - protein, 86 aa, Zea mays
  unsure (1)..(86): unsure at all Xaa locations
  Clone ID: MRT4577_160643C.1.pep
KVEEEVGRIKEEMNRIGEKKKDGCYKVKNGEILKEERXENIFEEVDEKLREVKNRKMLNXKGEVIMKGGNEKVEIKMLTPPAYADA

SEQ ID NO: 251160 - protein, 281 aa, Zea mays
  unsure (1)..(281): unsure at all Xaa locations
  Clone ID: MRT4577_160644C.1.pep
MMHGQELSYDSYPSSFQSMDDMHRQLQAPPACQSRRSSSSIIFFFFFLAAAIIYCVVIIRRLIKFQGRRRRVKNDHAAAAAAPPPPPPPRRGSRWWWSVVETLAFLSANSSGRGFYHFVEARHRRYGPGPCFRTSLLGATHVFVSSADAARSLLGAEPAGFSKRYVRTVAELLGEHSLLCASHATHRALRRAVAPLFNAQATASLAATFDGLTRRXHEARLEQQHWGPVVVLDAALDLTFEAICDMLIGRTLRPRCEKRLQSDVLAVTRXMLAFPLKLPGT

SEQ ID NO: 251161 - protein, 144 aa, Zea mays
  Clone ID: MRT4577_160645C.1.pep
MAPKAALFVALSLLLSAVAAHGCGSTYCQPPVVVPTPPVVVPPPYHEGGGHGHGHGGQCSINVLNLRVCANVLGELLGLKIGVPVRDQCCPLLQGLADLDAAVCLCIAVRANILGLHLNVPVDISLLLNHCGKTCPSGFTCPAH

SEQ ID NO: 251162 - protein, 62 aa, Zea mays
  Clone ID: MRT4577_160646C.1.pep
RMEAMEGGDINEELVMSRVRRRKVTSTSSRTTCPLTPILSLTHTLSNCELFCCSSCQMRSKS

SEQ ID NO: 251163 - protein, 427 aa, Zea mays
  Clone ID: MRT4577_160647C.1.pep
ASQSERWLPSPQAWLFQPSATAAMPHVLSFLHLHLPLNTAPLHSFRVHRTRHSHPHLSLRTRRASATAAAAEAENPSASADVEMVRGRDGVWTARSPTVVVLWDLDNKPPRGPPFPAATALIGAASLLGRVVSISAFANRHAFSHLPGWVTAERRARRALDRSERAGVVVPSVPYSCSVCGRRFPTRPDLTRHFRQLHERERNKKLSRLRSLKGKKRQKFRERFITGNTKYEDAARELLTPKVGYGLASELRRAGVHVRTVPDKPQAADHALKRQVKHSVACGVDWLVLVSDDSDFTDTVRNARAADLRTVVVGDGCRALGKVADIWLPWDRVENGEVDEEMLRSCTFSEYREDQGTERDGQFIGDWDAGDFDDVVDDIVGTRTSLLGATTMSAFADEDIADGIFGVELTGDNMFWSSDDEEEDDYL

SEQ ID NO: 251164 - protein, 100 aa, Zea mays
  Clone ID: MRT4577_160648C.1.pep
PAPVWSSRTTVKNLRALTKCRSMPSPPKCVTCFSKTLYLALGLKKSFCIWGLPRRLNPFSKKPQKDMYDPFGHLNFFFFMGRSPGFNPNHKNPGLCFICV

SEQ ID NO: 251165 - protein, 65 aa, Zea mays
  unsure (1)..(65): unsure at all Xaa locations
  Clone ID: MRT4577_160649C.1.pep
WGFXTKKKKIKTINLREPPKIGAPMHTCITDPLRPKTHPQDKRGGNTYEPRGKSRGGVCPCTPQQ

SEQ ID NO: 251166 - protein, 36 aa, Zea mays
  Clone ID: MRT4577_16064C.1.pep
ILERTLDPQLTTAQDHRLLSLPKAPSAPQIWNKPSL

SEQ ID NO: 251167 - protein, 57 aa, Zea mays
  Clone ID: MRT4577_160650C.1.pep
PYHLLAAQIPFGSCRPLFKAQTMESSVMAAQTMESQAMMAQVLVFRPWSRSQAFKML

SEQ ID NO: 251168 - protein, 90 aa, Zea mays
  Clone ID: MRT4577_160651C.1.pep
MAAAAMNGHYLHAFGRERTTLHAALGGRRAADVILWRDKAASACILAAATAAWGLFEVAEYHLVTVACYVAMVAMLVSFVWTNASAFFNM

SEQ ID NO: 251169 - protein, 40 aa, Zea mays
  Clone ID: MRT4577_160652C.1.pep
SFGSLEEVEELYKIYALENFIGCNIPEHIEIHPPSDVHSQ

SEQ ID NO: 251170 - protein, 156 aa, Zea mays
  unsure (1)..(156): unsure at all Xaa locations
  Clone ID: MRT4577_160653C.1.pep
LCLLLFFSFTTLSTLNRAVYLLFLLLPFIHLSTVYFYYQQLFSFNQLFSQNQKAYLLXKRLPPFSQLAAVSCASFGTQXRGLPFYQQLAGNPATLLQLQHLLPFGQLALTNPAAFYQQHIIEKRPLLHSLLVVKQYQIFLDDVCGQPEIRSYLSRF

SEQ ID NO: 251171 - protein, 26 aa, Zea mays
  Clone ID: MRT4577_160654C.1.pep
NSRKVLGCYSTVYTTDCRPGVRHRTC

SEQ ID NO: 251172 - protein, 58 aa, Zea mays
  Clone ID: MRT4577_160655C.1.pep
VMAPICICPSNGFLSVFFPPPVLCQKRVVVVGWVNPKFVGVNFRGVMFLNFLGKKCGP

SEQ ID NO: 251173 - protein, 58 aa, Zea mays
  unsure (1)..(58): unsure at all Xaa locations
  Clone ID: MRT4577_160656C.1.pep
MATKILALLALLGLLGSATNAFIIPQCALGPKGIIPQVLPPNNLMGFEQSSXQASRYQ

SEQ ID NO: 251174 - protein, 58 aa, Zea mays
  Clone ID: MRT4577_160657C.1.pep
MFYPCCKKKKKEKKKKKKKKKKKKKKKKKKKKKKKKKKKKKKKKKKKKKRGGRQLLTS

SEQ ID NO: 251175 - protein, 94 aa, Zea mays
  Clone ID: MRT4577_160658C.1.pep
PCPSSSCLCGCGHARAQTRSALMIAPLSQVHFFLQVVTPGHLAAHGRSQPCCIGLDPRTEPWGCREVGVRPRLPHTRRGLSPRTGCQRMEHASE

SEQ ID NO: 251176 - protein, 98 aa, Zea mays
  unsure (1)..(98): unsure at all Xaa locations
  Clone ID: MRT4577_160659C.1.pep
HEDYPSVVRALXMGXPHSTHRLRHYLSTKIFKITCITPVANHIEPRREQANALCQVLLPSHATDLPAMDILHYLLPSIHNLLKDLHALDPAHTEALQI

SEQ ID NO: 251177 - protein, 68 aa, Zea mays
  Clone ID: MRT4577_16065C.1.pep
SCRTGTPTRSSSGCTARGSSRRGSSRVYLPSPPLWIGCERGATTRARVEEEGGCCADTADSELLSCFI

SEQ ID NO: 251178 - protein, 71 aa, Zea mays
  unsure (1)..(71): unsure at all Xaa locations
  Clone ID: MRT4577_160660C.1.pep
NPVQEEPETXTAAMAPTEMKPMADMRLPTGKSHCXDGRQSHKGNKKAXNVVETLEIYNCYVLQQRHLYICI

SEQ ID NO: 251179 - protein, 49 aa, Zea mays
  Clone ID: MRT4577_160661C.1.pep
KKKKKKKKKKKKKKKKKRKKKEKKKKKKKKKKKKKKKKKKKKKKKGRPF

SEQ ID NO: 251180 - protein, 34 aa, Zea mays
  unsure (1)..(34): unsure at all Xaa locations
  Clone ID: MRT4577_160662C.1.pep
MQAVSVLLVMVMLSPVDDPSLVEHVPHRXHXNGE

SEQ ID NO: 251181 - protein, 165 aa, Zea mays
  Clone ID: MRT4577_160663C.1.pep
LEAGRAPPPSTLPVSRPCPASSPAQYAARSGLRSSTMRRWLLACSHAPFGSAALGDLAPPPRAPTASPPTHRLPRLAARLCLLLQRRSAPPVWAIFVALVDHPTAVAESNSTRKYFATTVMDFWQWFVSESVAGISRDAPDPSSISRASKKVDKNTLSTGSVQSI

SEQ ID NO: 251182 - protein, 57 aa, Zea mays
  Clone ID: MRT4577_160664C.1.pep
AYVSQWALEPTKFQNERQIWCGGNGHLSTLGVGLLFTTLAPPYVTRPAKDSVKEIHS

SEQ ID NO: 251183 - protein, 46 aa, Zea mays
  Clone ID: MRT4577_160665C.1.pep
FIKLFHHFSPFPCCPLFTQSLSYQYSSNTVNYTTINTLYLLFHLLL

SEQ ID NO: 251184 - protein, 106 aa, Zea mays
  unsure (1)..(106): unsure at all Xaa locations
  Clone ID: MRT4577_160666C.1.pep
MDKNGVKFREALCSKAGAQIFSEGALDYLGNPXNLVHAQSILAIWACQVVLMGFGEGYRVGVDPLAECVDKAYPGGAFDPLGLGYDPDNAGGVPVNDLQEGRHVMV

SEQ ID NO: 251185 - protein, 118 aa, Zea mays
  Clone ID: MRT4577_160667C.1.pep
SLHAALVFFFVLSLFLRSLGVFYFFGLNKDHLEKKTGCAIPTSFLINCITSNLTKKRGTLLTSRCKERGLIAQNKNHFVAQTHNATGSLMTHCLWKNPSEYISNGVAKVVIPQKGGHG

SEQ ID NO: 251186 - protein, 52 aa, Zea mays
  Clone ID: MRT4577_160668C.1.pep
ASTVGWFRPRSVRRVHNVVTQRSSCVPVVVKRDLPGASHSQRGVGWVAAYAV

SEQ ID NO: 251187 - protein, 99 aa, Zea mays
  unsure (1)..(99): unsure at all Xaa locations
  Clone ID: MRT4577_160669C.1.pep
MESIHNHRAPMSTTTLYLLRLLAHYACVANATFLRARSLPPIAHIAHSHLASMFDTVCENLLLXPYKIQLAMATCYIPRSPLAQQSIDLSKVHSLAQTI

SEQ ID NO: 251188 - protein, 77 aa, Zea mays
  Clone ID: MRT4577_16066C.1.pep
PSLRVLISGIVFTVVVLLPIMRPNLPFVSAKHTLVTYNITLSLITKTNQGPRCFQICIHFTKLRQVSHGRKLRQHAI

SEQ ID NO: 251189 - protein, 106 aa, Zea mays
  Clone ID: MRT4577_160670C.1.pep
MDAGDESLQRYKESLGLGGGTDISDPNDPRACVILSLTMDSPGRPPGTIDLSTPGSETTLKDKPFNIKEGAKFTMSAKFKVQQEILSGLHYVQADKRKDIRVLQGL

SEQ ID NO: 251190 - protein, 96 aa, Zea mays
  Clone ID: MRT4577_160671C.1.pep
VIAVVSILAACDESGSLALGKRIHRHVRQRKLSRSTLVCNALMDMFCKCGCVNRADYIFDTEIVEKDLVSWNIIIGGFAMHGPGEKALELFAQMEQ

SEQ ID NO: 251191 - protein, 158 aa, Zea mays
  unsure (1)..(158): unsure at all Xaa locations
  Clone ID: MRT4577_160672C.1.pep
MLPGLYAGDDTVTISSLRWTAHYRLPSSREPSNQLNAYRYATNPTLQPYNIHHASTSDIXNIHNTGASYSEXLFHTLPYKHYLTQSMQTQLPHSLELTNLDAYYXLHRTLPFIRITDLYHASYXAAAHLPFSLLSADYQQXTLPFNHMRAKYYHAYRQ

SEQ ID NO: 251192 - protein, 115 aa, Zea mays
  unsure (1)..(115): unsure at all Xaa locations
  Clone ID: MRT4577_160673C.1.pep
AETAANRLGAVTRTDEVETREYTINLHKSLHGCSFKNKAPNAXINEIRKFXAQNAMGTTDVRIDAKLNKHICNTAIRSATRRVLARIARKLNVEPDPMAXLYSLDKVDDIPPDGL

SEQ ID NO: 251193 - protein, 143 aa, Zea mays
  Clone ID: MRT4577_160674C.1.pep
LGTSRPAGPQSSGPLVPSSCGGRHCASATVPVDRHLHSAPHLPPAPLRAARKQRRRPPPRTQAALRPRFAACFGNGADLWRSQRRRPLMTKLNNLPHFGLVSKTCKRVFRNLQYDFHFGLKSSDDVHLLAATCKDKSSTRTID

SEQ ID NO: 251194 - protein, 141 aa, Zea mays
  Clone ID: MRT4577_160675C.1.pep
RPQGPPPLFEGGGPLGPVGPRARWVCRPSAPGFPCLVGPPGGPCEISGQVSPRRPPRWPAPSFGAPPSGVCTRGSHFPPVPRPLGLENPWTLLIPGTLFLKKKKKKNKPKKKKKKKKKKKKKKKKKKKKKKKKKKKKNSRR

SEQ ID NO: 251195 - protein, 150 aa, Zea mays
  Clone ID: MRT4577_160676C.1.pep
GRAQSSGPLVPSSCGGRHCASAQCPSTATCTLRRTCRLRRCAQRASNAAGRPHARKQLCALALQLASAMALISGAPNEDGRDATVTDCRTDPEQGEPPPGPPQAAPAAPAPSSHLIASPPSRAVDDKTKQPATFWSCLQDMQEGLQELTI

SEQ ID NO: 251196 - protein, 458 aa, Zea mays
  Clone ID: MRT4577_160677C.1.pep
MTSLLLPPPQAAAAAYGCCHCLLLASTTVPARSGCVGRASRITLALRCLPITGHRLRSRKVACQATTETEPEGNGDEEEKKEFGDDASSPSVYNVAEANGPGENDSSIDNKKDETTNAEAALLSSGDTVQDMDGDATSTNGIQENVEVIEVASGSPLPGMKQQLDDSVRIPKATIDILKDQVFGFDTFFVTSQEPYEGGVLFKGNLRGKPAKSYEKITSRLQNKFGDEYKLFLLINPEDEKPVAVVIPKQTLQPETTAVPEWFAAAAFGLVTIFTLLLRNVPVLQENLLSTFDNLELLKDGLSGALVTGLIIGVHEIGHILAARESGIKLGVPYFVPSWQIGSFGGITRIVNIVRNREDLLKLAAAGPLAGFSLGFVLLLLGFVLPPSDGLGLVIDPTVFHESFLVGGLAKLLLGDVLKEGTQLSINPLVLWAWAGLLINAINSIPAGELDGGRRLKN

SEQ ID NO: 251197 - protein, 61 aa, Zea mays
  Clone ID: MRT4577_160678C.1.pep
GGTNRPFFPLARNTRFYILEWSIHEPNKHTPSDDPAQLGKHRIVLTLGLFYRIGSPKPPRW

SEQ ID NO: 251198 - protein, 92 aa, Zea mays
  Clone ID: MRT4577_160679C.1.pep
AVGNCFALRKDHETALKNFQRSVQLDSRFAYSHNPPVQNTHDHIECEHMQILSQAVPDVYENIMKLYRSPLHLDQRHYKASYDLADVFFLCS

SEQ ID NO: 251199 - protein, 53 aa, Zea mays
  Clone ID: MRT4577_16067C.1.pep
MNLPIKTKDLPKNLQANQVPLKEYLGKMLALVKKESPKSQSLEALPIDQRTLP

SEQ ID NO: 251200 - protein, 93 aa, Zea mays
  Clone ID: MRT4577_160680C.1.pep
VLFTNLLCLNKGGVLFKGNLRGKPAKSYEKITSRLQNKFGDEYKLFLLINPEDEKPVAVVIPKQTLQPETTGDKNLSVPSVASVVLRVVRYFA

SEQ ID NO: 251201 - protein, 177 aa, Zea mays
  Clone ID: MRT4577_160681C.1.pep
HVRDVGVVIVIVSAGSVRPYYAVSHVAREDGIVSAYGLSGPYVFAEAVDASLCSFGEERFRLCGIVMLGFASVSYDSSQTHRSSLRAIPSGAFYGVDVPSAHCSSSSSIPLGMGASVWRRRGLRPGPSVHVGRGALPGLFIFGGREQFRDECMVGLGSTLSRGVLRRRSSPGRVALS

SEQ ID NO: 251202 - protein, 118 aa, Zea mays
  Clone ID: MRT4577_160682C.1.pep
MRTRVVVLSRCLLQLLPWPLPLVAIKDSKLARPADPTAIKVGFCFWALFWLAGSATVSTTTPALAGGGEAVAVDARSAVAVTDDDFVCATLDWWPPEKCDYGTCSWGLASLLNLVSQQ

SEQ ID NO: 251203 - protein, 240 aa, Zea mays
  unsure (1)..(240): unsure at all Xaa locations
  Clone ID: MRT4577_160683C.1.pep
MAAGLLLKMVGFCFWALFWLAGSATVSTTTPALAGGGEAVVVDARSAVAVTDDDFVCATLDWWPPEKCDYGTCSWGLASLLNLNLSNKILVNAVKAFSPLKLRLGGSLQDMLIYDTGDTRQAPCAPFVKNASAMFGFSQGCLPLRRWDELNAFFQKTRPRIVFGLNALNGRVPMPDGSLGGPWNYTNAASFIRYTVSRGYDVHGWELGNELSGSGVGARIDAXQYAADVIAPKHIVDSAY

SEQ ID NO: 251204 - protein, 86 aa, Zea mays
  unsure (1)..(86): unsure at all Xaa locations
  Clone ID: MRT4577_160684C.1.pep
VHSVSLSFSLFHGKMPLSKPFPKFRAFTGDQFHVQLKLTRFMLPPXXPPYSTHDGMMVISCPVSHLKTNLHFLKISKGDTQIQVFH

SEQ ID NO: 251205 - protein, 82 aa, Zea mays
  unsure (1)..(82): unsure at all Xaa locations
  Clone ID: MRT4577_160685C.1.pep
QPAIRLVAWWPPGFKYVATSQPRSMGSSGQLAKVQGYVCMIPHSCRGVQVLCPQVRQFVLLAAHRALVHWXGDEGMQDLQFS

SEQ ID NO: 251206 - protein, 143 aa, Zea mays
  unsure (1)..(143): unsure at all Xaa locations
  Clone ID: MRT4577_160686C.1.pep
EKIGLLKEKDDALQKYNELNDQNRILHNQLEALHIRLAEKERNIAGXSSHRTDNSHAEDDLQSVISYLRRSKEIAETEISLLKQEKSRLQIELESSLKSAKEAQXTVARSADSARALMFKDEEFSXLQIQVREINMXRESNIH

SEQ ID NO: 251207 - protein, 266 aa, Zea mays
  unsure (1)..(266): unsure at all Xaa locations
  Clone ID: MRT4577_160687C.1.pep
MGSTSAFVIRWINFFTMILALLVVGFGFWMSTHDDECRRTLTVPVIALGGVIFLXSLVGFLGAWKNISCLLWTYLIMLFVVLVAIMVFTVLAFIITNSGSGHTVPGARYKEYRLQDYSSWFVKQLDDTEKWARLKSCLVKTDDCNSLSRRYKTAREYKLADLTPMESGCCRPPAECGFPALNASYFDLSYHPASANADCKLYRNARSVRRYDCSSCKAGVAQYMKTEWRVVAIFNVILFVILSFVYFVGCCARRNAGGGDAKGRGR

SEQ ID NO: 251208 - protein, 178 aa, Zea mays
  unsure (1)..(178): unsure at all Xaa locations
  Clone ID: MRT4577_160688C.1.pep
SISNVLCRYKEYRLQDYSSWFVKQLDDTEKWARLKSCLVKTDDCNSLSRRYKVTPVLSFTCFSPSLGSTLLELCSLFAAVAFVEILITSPQLRVQTAREYKLADLTPMESGCCRPPAEXRLDAHLNLFFSLVVSVVSQARASSQDCSGFFRCGFPALNAXYFDLSYHPASANADCKLY

SEQ ID NO: 251209 - protein, 49 aa, Zea mays
  Clone ID: MRT4577_160689C.1.pep
MAGVDVARHAHSPAHHAVAARDHVALRRVLEALPPARRPEEIRTEADSV

SEQ ID NO: 251210 - protein, 114 aa, Zea mays
  Clone ID: MRT4577_16068C.1.pep
AVPLPRCASRYHATLTGPHAYSKFYMISCPGSHQHSPNQGPIVVSHPSLFPSIGCLPLPMVTGFLLMMPDATVGISFMIFPWQIVRSDYQCFRYDPDQCIRTNMHLINVYLSTP

SEQ ID NO: 251211 - protein, 98 aa, Zea mays
  Clone ID: MRT4577_160690C.1.pep
QFQPQLLSSRHRPRAHCHLQFPVAGMASVHLSGPRVVAAAKPAALGGLLLTPSLVVPKGLRAMGLLLRAVTVVSPKYSFIKPLVDRVLVKIKTFDAKF

SEQ ID NO: 251212 - protein, 45 aa, Zea mays
  Clone ID: MRT4577_160691C.1.pep
KHFNVLNVKFKLTEKLPPLNKRAFILMDNKGNFLVPFYIKKFFSF

SEQ ID NO: 251213 - protein, 657 aa, Zea mays
  Clone ID: MRT4577_160692C.1.pep
MAGVDVARHAHSPAHHAVAARDHVALRRVLEALPPARRPEEIRTEADSVAEEARAEAVSAVIDRRDVPGRETPLHLAVRLCDATATEMLMAAGADWSLQNEQGWSALQEAICAREEALARVIVRHYQPLAWAKWCRRLPRVVAAMRRMRDFYMEITFHFESSVIPFISRVAPSDTYRVWKRGANLRADMTLAGFDGFKIQRSDQTILFLGEGSEDGKVPPGSLCMINHKDKEIMNALEGAGAPASEAEVQQEVAAMSQTNIFRPGIDVTQAVLLPQLTWRRQERTEAVGPWKAKVYDMNHVLVSVKSRRVPGAMTDEEFFSSSNDNDTESEGFDDVLTEEEKKQLEAALKMDSPDAGGEDQSDSFAGPRHSCFEPREREIPIEGMSVSGNVESKHDKKGWFSNWGKRAQVSKPERVKKMAPPRSSLCVDEKVSDLLFESPSNAQTRPGRHSVDVVRADDNRRIRERDSRRYVPSAENGHRRKEGSKESEYKKGLRPVLWLSPNFPLRTEELLPLLDILANKVKAIRRLRDLLTTKLPPDTFPVKVAIPVVPTIRVLVTFTKFEELQPLEEFGTPPSSPDKSKSPAVQPPSSSWIQWIKAPYYRQMNLFTAPGPSSRVEDIHHQDPFAIPSDYVWTPPEEKKKKTQENKNRSKKGRNG

SEQ ID NO: 251214 - protein, 89 aa, Zea mays
  Clone ID: MRT4577_160693C.1.pep
MKIPQEESSSLSKQWWTKCLYNTGRRLGCQPATPQEWRGGGCQLLQCTFAKCSIVASLFVIEVSLASQWGDLDCPRLGPALVAVPGITG

SEQ ID NO: 251215 - protein, 654 aa, Zea mays
  Clone ID: MRT4577_160694C.1.pep
MAGVDAARYAHSPAHHAVAARDHAALRRVLDALPRARRPEEIRTEADSVAEEARAEAVSAVIDRRDVPGRETPLHLAVRLCDPTAAEMLMAAGADWSLQNEQGWSALQEAICTREEALARVIVRHYQPLAWAKWCRRLPRVVAAMRRMRDFYMEITFHFESSVIPFISRIAPSDTYRVWKRGSNLRADMTLAGFDGFKIQRSDQTILFLGEGSEDGKVPPGSLCMINHKDKEIMNALEGAGTPASDAEVQQEVAAMSQTNIFRPGIDVTQALLLPQLTWRRQERTEAVGPWKAKVYEMNHVVVSVKSRRVPGAMTDEEFFSSCNDNDIESEGFDDVLTEEEKKQLEAALKMDSPDAGGEDQSDSFAGPRHSCFEPREREVPIEDMSVSGNGEGKHDKKGWFSNWGKRSQVSKSEGVKKMASPRNSLCVDDKVSDLVIESPSNVQTRPGRHSVDVVRPDDNRRIRERDSRRHVASAENGHRRKEGSKESEYKKGLRPVLWLSPNFPLRTEELLPLLDILANKVKAIRRLRDLLTTKLPPGTFPVKVAIPVVPTIRVLVTFTKFEELQPLDEFTTPPSSPDNSKSPAVQPSSSSWIQWIKAPYLQNLSTAPGPSSRVEDIQDPFAIPSNYVWTTPEEKKKKTQENKNKSKKGRSGA

SEQ ID NO: 251216 - protein, 95 aa, Zea mays
  unsure (1)..(95): unsure at all Xaa locations
  Clone ID: MRT4577_160695C.1.pep
GPTHASTHASEAPWSDFCETMNATHLELPKNLHGSPVNVANFXARHDXNPFSHAELQLQNFLIVLLFPGRTDSPINXSSENMDVYSRLALVNSLR

SEQ ID NO: 251217 - protein, 133 aa, Zea mays
  unsure (1)..(133): unsure at all Xaa locations
  Clone ID: MRT4577_160696C.1.pep
GKGTIDXKGVTLASXIAERRKEYLAAYLDQDILILGAVLQKAQEIEIANYAMLXIRINITRVLTISSLAMTIFRAHYYDEQARIYIPSVNADSFIRAGYYGGHADVXYIPYGKNLLYYDVNSLXPFIMQSCDF

SEQ ID NO: 251218 - protein, 137 aa, Zea mays
  Clone ID: MRT4577_160697C.1.pep
PFPFSFPPQAAEASILVLFVFLIPQPPAPRQAGLRFLLVLREELRVFLFRVAVLFLLVFGTNWLGWWSCVSVELVGDFCLCVLSGQAFPLGCWNNTPLALDRVVVRVCGGPPPLSVFFAKAFMGFCVPKTSLKPHCT

SEQ ID NO: 251219 - protein, 310 aa, Zea mays
  unsure (1)..(310): unsure at all Xaa locations
  Clone ID: MRT4577_160698C.1.pep
MGEEEGAPTVAAAAESAPPHLLLICFPGQGHVNPMLRLAKRIAAKGLLVTFSSISRVGAMLAASVGVSAGGDGVPVGRGRXGSSSWTXEDPGPDLDDLLRHLAKDGPPAFAELLERQADAGRPVACVVVNPFMPWAVDVAADAGIPSAVLWVQSCAVFSLYYHHVHGLVEFPPEDDLDARFTLPGLPEMSVADVPSFLLPSNPYKLLVDAIIAQFHTIDRASWVLVNSFTELEPDVAAALPGVTPGVTPWPPELIPVGPLIEVGGGRDDDEGAVRXDLMKAVDGCXXWLDAQPXXSXVYASVGRCCLNPV

SEQ ID NO: 251220 - protein, 27 aa, Zea mays
  Clone ID: MRT4577_160699C.1.pep
RLSTLFSICTRSENITSRLITSTSHVG

SEQ ID NO: 251221 - protein, 125 aa, Zea mays
  Clone ID: MRT4577_16069C.1.pep
PRVRPTFKVRKEKLGDRITALQQLVSPFGKTDTASVLHEAIEYIRFLHDQVASLSSPYLGCGRPVVQQIQQRRQAKDDGGAAAKEDLRSRGLCLVPVASTTTYAVAAGGETAPEFWLPNFGGTLR

SEQ ID NO: 251222 - protein, 493 aa, Zea mays
  Clone ID: MRT4577_1606C.1.pep
MASPFSVPSLIMEEEGRFEAEVAEVESWWGTERFRLTKRPYTARDVVLLRGTLRQSYASGEMAKKLWRTLKARMSLPRAERARAPYVDFLKPIIADGDTGFGGATATVKLCKLFVERGAAGVHLEDQSSVTKKCGHMAGKVLVAVSEHVNRLVAARLQFDVMGVETVLVARTDAVAATLIQTNVDARDHQFIVGATNPGLRGQSLAAVLSAGMSAGKSGRELQAIEDEWLAAARLKTFSECVRDAIAGLGVAGQEKQRRLQEWDRATGGYDRCVSNDQARDIAASLGVTSVFWDWDLPRTREGFYRFRGSVAAAVVRGRAFAPHADVLWMETSSPNVAECTAFAEGVKAACPEAMLAYNLSPSFNWDASGMTDAEMAAFIPSVARLGYVWQFITLAGFHADALVTDTFARDFARRGMLAYVERIQREERINGVETLEHQKWSGANFYDRVLKAVQGGISSTAAMGKGVTEEQFKDPRPTTGSSGLQVMAKSRI

SEQ ID NO: 251223 - protein, 89 aa, Zea mays
  unsure (1)..(89): unsure at all Xaa locations
  Clone ID: MRT4577_160700C.1.pep
PRVRYIKPISESAKSNGGSAKSNDTINANVKSNTGIVANTDAKSTDEQTDTGSVDCSGDYSAVSKQNIGRVAVCIQRLESTMXRCKSGK

SEQ ID NO: 251224 - protein, 54 aa, Zea mays
  Clone ID: MRT4577_160701C.1.pep
PEGAFKTSRHHDPLRFNAQYGYTYLHLYICPTKSSTQEIVQARFHVPHQYDFPM

SEQ ID NO: 251225 - protein, 71 aa, Zea mays
  Clone ID: MRT4577_160702C.1.pep
VVVIRITIGIRAYAPFVLYTEITSLHKCVFDKCRPSVIVAVRMAKDSGGRRMKIHRGQENHVTKSSKTVKN

SEQ ID NO: 251226 - protein, 170 aa, Zea mays
  unsure (1)..(170): unsure at all Xaa locations
  Clone ID: MRT4577_160703C.1.pep
MSRKRNCFSRESILVVLYGYRLTAKASHGGKPCSIFSAYVMAHKGNVTSDVTNNPEDGPEAYNNPAVHSCLIEYTAMAMEVHGLDYDPRIEDIDGDALMRVGGGKMHGRHWIIDGXIDLSSTPTLSQNQSATSNNLHGSPSPSTNQSNHPPHGQSSLSGDCEIQCEKLGL

SEQ ID NO: 251227 - protein, 60 aa, Zea mays
  Clone ID: MRT4577_160704C.1.pep
RVRAGSPLRRTGSPLLGQSLERFRVQGTVGFLQRLKWMSGLLNVRLSVSWWGDWVSLARI

SEQ ID NO: 251228 - protein, 83 aa, Zea mays
  Clone ID: MRT4577_160705C.1.pep
AGKIVLAFYGKTTTVSTPGAGLTGPSLETCAETVVVFPKNAGKIVLAGEETDLLVGLQNDGESILTDVAVHSTLHLPFDHNMY

SEQ ID NO: 251229 - protein, 56 aa, Zea mays
  unsure (1)..(56): unsure at all Xaa locations
  Clone ID: MRT4577_160706C.1.pep
SSYQNWLGVIFILKIYMGSTAPAGSHLEWWERHKPLGKVWMEFAXXDXXHSDSHHS

SEQ ID NO: 251230 - protein, 125 aa, Zea mays
  Clone ID: MRT4577_160707C.1.pep
PILFSFWGDTFWDSFLVFFRAPVDGGYLFFSSPRGKKIPLGVLYCVPLFPGVFSFFYTAVPIVFPALKRALLATPFIFVWSPLWPPRFFPFSFWLFFFFWFLQDCNFFPDTTFSLFSPLFSCVSF

SEQ ID NO: 251231 - protein, 91 aa, Zea mays
  Clone ID: MRT4577_160708C.1.pep
CVGNNLYQLVFMMTTVAWPSSLDDSSRAWASSLIMLRPSQFITVNAVYVVASGILGAKGEEAAPTVPQRLTMQHDVELDDLPVSSPAVCSK

SEQ ID NO: 251232 - protein, 99 aa, Zea mays
  Clone ID: MRT4577_160709C.1.pep
RRVGASLVAAGDLFVSVGEDGLAGLTEADKRGAVAVVADQDLNIEGTLACRALVIVDDILTALRVLPACLYSRPSMNMAIIGVTGTDGVTTTTHLVKAM

SEQ ID NO: 251233 - protein, 61 aa, Zea mays
  Clone ID: MRT4577_16070C.1.pep
VQLVTTTITQYLLRLLTCDQSGSLVIYDGAQVITAFFSLYKLPCIRRQGRFYLSLHSLSFC

SEQ ID NO: 251234 - protein, 123 aa, Zea mays
  Clone ID: MRT4577_160710C.1.pep
DLICYQSLLCPLCDQHDDSINHLLVGCSFARLFWFELFRPFGLQGFIPGQDIDDFDLWWCSNSARLDGLSQKGFDSLVALGAWMLWEHNNEVVFNLTSPSLVVARRLAREEAFLWSLAGAKGV

SEQ ID NO: 251235 - protein, 221 aa, Zea mays
  unsure (1)..(221): unsure at all Xaa locations
  Clone ID: MRT4577_160711C.1.pep
VPPGSAGITQDSDXWTKPILFXYSPSSPLSKNSTFGQMDVMPTAPPSSMFTSYGLKERCAAAETLSLVARILNRSRARLNSVLSKNNSSVVEEFFRTLVDSVPDLTEHIHRTSARMLLHIDGYPDKIANAKWEVKELGLEHNGYVDLLLGEFKHYKTRLDHGGISRELQHLLLEYGVKSISEVLVEGLSRVKRCTDEGRALMSLDXQVLINGLEHIVASNV

SEQ ID NO: 251236 - protein, 160 aa, Zea mays
  unsure (1)..(160): unsure at all Xaa locations
  Clone ID: MRT4577_160712C.1.pep
LPTLCDGAILLEFIPSVLVRRGVTPGHGRGVKVRLTAANDDDDFEAAFRDLCEDSEKQPVWFXFYRRRSGSPVLAAEGPSARIKXVRCRPWGKWAAEVPVPVRGVRVWLGTFATAEDLARAXDHSARDLRGATTRLNFPSNSKRRSAVAKAAPRVNEPEH

SEQ ID NO: 251237 - protein, 146 aa, Zea mays
  unsure (1)..(146): unsure at all Xaa locations
  Clone ID: MRT4577_160713C.1.pep
LLPYAAWVKNETLRFEINGDPXKEDEAKANGRGMGRIRPSTGKKMNGEVRSVPAFDFAEWLRQTVTEQDYVVMKMDVEGTEFDLIPRLFDTGAICLVDELFLECHYNRWQKCCPGERSPKYENTYEECLDLFSSLRESGVLVHQWW

SEQ ID NO: 251238 - protein, 60 aa, Zea mays
  Clone ID: MRT4577_160714C.1.pep
VPAFGVSGKSRPCSNPRLQTRFSNRQTPTHTPKLSTLTFCGDRGYRSTCGWSTGRVLRIA

SEQ ID NO: 251239 - protein, 546 aa, Zea mays
  Clone ID: MRT4577_160715C.1.pep
PPPGSSAWPRAGSRFPRPPRSPHSRSHSRVRHLSPLPRGGGSASAPRRRPPPPPPYAATGTAGEAVGEFRKRLRVADVKGGEDEGAAWVGKELAVRGWVRTCRAQRTITFVEVNDGSCLSNMQCVLTPETEGYDQIDSVTTGASVLVEGVVASSQGGKQKVELKVSKITVIGKSDPTSFPIQKKRASREFLRTVAHLRPRTNTFGAVARVRNALAYATHKFFQDNGFVWVSSPIITASDCEGAGEQFYVTTLLSNSTEGGSLLKDIPATKDGRVDWSQDFFCKPAFLTVSGQLNGETYASALSDIYTFGPTFRAENSNTARHLAEFWMIEPELAFADLNDDMACATAYLQYVVKYILENCKEDMDFFNTWVEKGIIDRLNDVVEKNFVHLSYTDAVELLLGSKKKFEFPVKWGLDLQSEHERYITEVAFDGRPVIIRDYPKEIKAFYMRENDDGKTVAAMDLLVPRVGELIGGSQREERLDYLEARLDEQNLNKESYWWYLDLRRYGSVPHAGFGLGFERLVQFATGIDNIRDAIPFPRVPGSAEF

SEQ ID NO: 251240 - protein, 79 aa, Zea mays
  Clone ID: MRT4577_160716C.1.pep
DAGQCSSLSRAGRPVALFTGGYFCIYTTIVERQQPNNWTPNWTSTTVMPRMSTELIHGYIIKSDLKVTAMWTLSSVTVG

SEQ ID NO: 251241 - protein, 172 aa, Zea mays
  Clone ID: MRT4577_160717C.1.pep
IIDRLNDVVEKNFVHLSYTDAVELLLGSKKEFEFPVKWGLDLQSEHERYITEVAFGGRPVIIRDYPKEIKAFYMRENDDGKTVAAMDLLVPRVGELIGGSQREERLDYLEARLDEQNLNKESYWWYLDLRRYGSVPHAGFGLGFERLVQFATGMDNIRDTIPFPRVPGSAEF

SEQ ID NO: 251242 - protein, 77 aa, Zea mays
  Clone ID: MRT4577_160718C.1.pep
IFLIYGFFFHQHTLWMNRLVVFSVSKHFSSIQCFAAIPRGCLCIPCMIRTILPPLFFHGHAARMAFQSLLLTSPSMT

SEQ ID NO: 251243 - protein, 555 aa, Zea mays
  Clone ID: MRT4577_160719C.1.pep
MDQGLMPDHMNKGVSQEHSSDEGYETPTDPCPSIDRAARRQLHLDLNYDPQECERSSPEFISLSEANSELSKKNKYHHHLGTGGYKRQVSKWRQEDAEKKVAGLPTPFEKLGERTTNWIHARKPRETEAGVSFDDPNVEEVAKNIYAMAAKQSQGSFKPQRERDILMAGLGNPEHPGRMTTPQLQIIPAAQSLASTDCTTVPSSVASTGNKPSRDSRQSKKSKFPLPKLVSTFEKKKSKATTAGTSRFLKGIGRDLTSRTVDLAEHEESADKAKAMAAKIKIPTKTDYKNVPKHYVPARSILTLEKLRKVPVGIKRLHDWYMRTSSVGIDAISVHIPDHVFIETRRATLFALMQHDQQEIMYGTKPDANAGKRIGYLNPILICEESHTFRIDKDNEELKGKTDEEVEHRINTMKKDFEARYATYIANAMLKFQDREAIMAPYNFKDHWICFLIYPKVGKCHKQPQGSVLHGFNACEFMRINGRYITNPSKEFQKGNPENLTEAVLYGIVEDLCTFILKKVIPAEGKYHDASSTLAMPEFRILTEVSILSLKRDSY

SEQ ID NO: 251244 - protein, 61 aa, Zea mays
  Clone ID: MRT4577_16071C.1.pep
LVLLGTGLSFQWASLFCPVNRCMSISFSFARVCYTVESFTPRPFVSLFRPKHVQYKVQFVS

SEQ ID NO: 251245 - protein, 78 aa, Zea mays
  Clone ID: MRT4577_160720C.1.pep
ALMSEHASVMVGDSFELADLGNGEMHIICKLDDISLSMSFVDRFGDGGHLSSIEHHSKDLGVALRRIAGDGSMPLLDR

SEQ ID NO: 251246 - protein, 75 aa, Zea mays
  unsure (1)..(75): unsure at all Xaa locations
  Clone ID: MRT4577_160721C.1.pep
SSTYIPSXLQSISRTPHLHTLASPXTXNPSLSPXRXSXXNXITHSPHAXXLXNNTTPPHFRCTXCNTHSPSLKSQ

SEQ ID NO: 251247 - protein, 108 aa, Zea mays
  Clone ID: MRT4577_160722C.1.pep
GFAHIRNLDGGVLPPLGLAHDGRATGSREGPESVPRPIPPPAPKPPPLPTPKPPPPPPPSPPPQRAPPTIPPPAPKPQAMPPPSHPPPPSPPPIPSPPPPHAPPPIPR

SEQ ID NO: 251248 - protein, 97 aa, Zea mays
  Clone ID: MRT4577_160723C.1.pep
WGPPLGLGILVPWDGPKPPPGLVPLVKGILFCFLVLGMVPISFPRGCSPPQGFLLVWFLFNLFGRKKKKKKKKKKKKKKKKKKKKKKKKKLERGACT

SEQ ID NO: 251249 - protein, 298 aa, Zea mays
  unsure (1)..(298): unsure at all Xaa locations
  Clone ID: MRT4577_160724C.1.pep
MIKRRYFRQDHGDNSGSSSSSSSDCDSDNDLAEEAVSSEEXVEEQEEEEAVKEESGEEEEGELEQQIVEGSSGYQSEDNSWNDVDGASIDDDEHSSPRDEERHEISLPIMKSSGANADSAKSADNTDDAVDADFPNCILKCKSVFKCKLCPRIMCLNVEMVKIHLKSKRHARSEKLLGEGRLKLMLNSDGELEEEQETHAERHARTIALSQQVQKQKKDSGRQRQNRRKKKRXLGLIWKRHRTTKNNAKLNEVGLAEASKFFCSFNCCVPKLCSGHTVRIFKYPRVFSSAVPRFGLNC

SEQ ID NO: 251250 - protein, 888 aa, Zea mays
  Clone ID: MRT4577_160725C.1.pep
MRSSFLSESPCDEQRIHGYGFNPQSWLQVERGKLPKSSYSPSSIESLIKIAEPHVVPLYKPLDYVEVLSRIHEELEQCRPSELPGLYLVQSQVFRGLGEAKLRQRSLHSAWRCASSVHEKVIFGAWLRYEKQGEEIISARPASCQKCCREFGLLDVASEMPVRNFEVIGSWETSSSSQVSSMVTFQVQDGRVTCDRCKIASLSIPFCSMLNGPFNESQLELVDLSENGISLEGMRAVSEFSSTCSLGDLPVEILLEILVFANTFCCDRLKDACDRKLASFVSTRQDAVELMPLAFEENAPVLAASCLQIFLQELPDCLADDLVISLFLGATAQQQLIMVGHASFLLYCLLSEVAMNIDPRTETTVLLLEKLVQLAVTPTQKQIAFHQLACIRLLRKEYSEAEHQFEVAFSAGHVYSIAGIARVAGIQGQKALAYEKLSSVITSNLPLGWMYLERSLYSEGDRKLADLDKASELDPTLTYPYMYRAASLMRKKDAKHALEEINRLLGFKLALECLELRICLYLALEDYKSAICDIHAILTLSPDYRMLEGRVAASKIGTLLGAHVEQWNTAECWLQLYERWSSVDDIGSLSVIYRMLESDAAKGVLYFRQSLLLLRLNCPEAAMRSLQLARHHAATEHERLVYEGWLLYDTGHYGEALQKAEESISIQRSFEAFFLKAYVLADSGVDPSYSATVISLLEDALKCPSDRLRKGQALNNLGGVYVDCGKLDSAADCYTSALKIRHTRAHQGLARVHFLRNNREAAYEEMTKLIEKAKNNASAYEKRSEYCEREQTMTDLQTVTQLDPLRVYPYRYRAAVLMDSHKENDAIAELSRAISFKADLHLLHLRAAFHEHIGDVPSALRDCRAALSLDPNHQEMLELQKRVNSQEP

SEQ ID NO: 251251 - protein, 47 aa, Zea mays
  Clone ID: MRT4577_160726C.1.pep
MCGETDPIRRLNRSSLYTAPSLLPRSIALIFFLSRPLGGITGPGGTT

SEQ ID NO: 251252 - protein, 87 aa, Zea mays
  Clone ID: MRT4577_160727C.1.pep
PRVRAQLHLQIQWYIQHTFPVLAIQNAATDFDCAYNPSLYVQVSRKQFELKKKNKKKKKKNKKKKKKKKKRKKNKKFIQKRKTKGLL

SEQ ID NO: 251253 - protein, 90 aa, Zea mays
  Clone ID: MRT4577_160728C.1.pep
LKGLLAFLVKPLLPRLSAFLSNMKSRSAGKLWELQHEIEVYRKTVIAQWRALDLDVVLTPMLAPALDLNAPGRATGAVSYTMLYNCLDFP

SEQ ID NO: 251254 - protein, 49 aa, Zea mays
  Clone ID: MRT4577_160729C.1.pep
HNVFQLSAVLSELPIPILAHNITKALMNMLHKRTHLYKICIMNYYEMLN

SEQ ID NO: 251255 - protein, 75 aa, Zea mays
  Clone ID: MRT4577_16072C.1.pep
VQLVTTTISQYLLRLLTCDQSDSLVIKTTINLRFIGAQVITTFFSLYKLPCIRRQGRFYLSLHSLSFLLANAATP

SEQ ID NO: 251256 - protein, 51 aa, Zea mays
  Clone ID: MRT4577_160730C.1.pep
RTGRLTYEPREPRIKNSAECKNTGPGYSSKQTTDERSIKIKTPALDDAHAV

SEQ ID NO: 251257 - protein, 252 aa, Zea mays
  unsure (1)..(252): unsure at all Xaa locations
  Clone ID: MRT4577_160731C.1.pep
MDLKLAPPPHANLRLLPRCPKAASASIVTVAPSTSCSSSAEAGGDAPPRSLVVAVRAAASSGSGRVGRQLHCCIVKAGACGDVTDRYLTCVLLDMYSKCGRIDEARRVFDGLPRPHRTTVVAWNSMLAAYVLHGRSEEALELYQKMCRTRVAMDQFTFSTMLGVFSRLGLLEHAKQGHAGLIQRGLPLDIVGNTALVDLYCKWXRMEDARNVFERMPRRNLISWNTLIAGYGYHGMGDKAIEMFERLIAEGA

SEQ ID NO: 251258 - protein, 158 aa, Zea mays
  unsure (1)..(158): unsure at all Xaa locations
  Clone ID: MRT4577_160732C.1.pep
GRDKRIHFPPASKIQFTTNFCKIKISPIWKARIEPKCRFFVWTMLYNIILTADNLQKRGWPCNPICCLCNLSQETMPHLGKDCPFXVEVWNMILSWALYDWWKRLRNRCCKESKKIFDGLLISFWWNIWLERNNRIFHRLQRSAIQRNVIFTTATSAW

SEQ ID NO: 251259 - protein, 174 aa, Zea mays
  unsure (1)..(174): unsure at all Xaa locations
  Clone ID: MRT4577_160733C.1.pep
KNSFPSGKVSTALNDLDDTILWRWSYSSSSAYKIQFTTNFCKIKISPIWKARIEPKCRFFVWTMLYNIILTADNLQKRGWPCNPICCLCNLSQETMPHLGKDCPFXVELYDWWKRLRNRCCKESKKIFDGLLISFWWNIWLERNNRIFHRLQRSAIQVMQLVKDQIVSFSVCNW

SEQ ID NO: 251260 - protein, 178 aa, Zea mays
  unsure (1)..(178): unsure at all Xaa locations
  Clone ID: MRT4577_160734C.1.pep
MYLRSTRYICRCNSLFLTNSSLYYADCGSTVFCSGQALKNIAPTLFMKACQALTNNRWMHFCSPYTHEEEIKEFISLXGKVSTALNDLDDTILWRWSYSSSSAYKIQFTTNFCKIKISPIWKARIEPKCRFFVWTMLYNIILTADNLQKRGWPCNPICCLCNLSQETMPHLGKDCPFL

SEQ ID NO: 251261 - protein, 226 aa, Zea mays
  Clone ID: MRT4577_160735C.1.pep
MKLLQAGYTVRATVRDPANVGKTKPLMDLPGMTGWMYFVSKTLAEKAALAYAAEHGLDLVTIIPTLVVGPFISASMPPSLITALALITGNAPHYSILKQVQLIHLDDLCDAEIFLFENPAAAGRYVCSSHDVTIHGLAAMLRDRYPEYDVPQRFPGIQDDLQPVRFSSKKLQDLGFTFRYKTLEDMFDAAIRTCQEKGLIPLATAAGGDGFASVRAPGETEATIGA

SEQ ID NO: 251262 - protein, 92 aa, Zea mays
  Clone ID: MRT4577_160736C.1.pep
MEDNDKSPPKDYYKILEVDYDATEELIRLNYRKLALKWHPDKHKGDSAATEKFQEINEAYNVLMDPAKRFEYDFTGIYEIHKYTLREYLARF

SEQ ID NO: 251263 - protein, 108 aa, Zea mays
  unsure (1)..(108): unsure at all Xaa locations
  Clone ID: MRT4577_160737C.1.pep
VLLKFLRWRAEAAPGGGTVREEQVRGELEQDKIYMGGVDRTGRPIIVGLLGGVDWGDXXXAXFKSFVVYXXXLXCAWFPLGLVGFLVFLFFLGCGFCLWWFCVFFGVF

SEQ ID NO: 251264 - protein, 90 aa, Zea mays
  Clone ID: MRT4577_160738C.1.pep
MYQAIPYSAGQPWPRPAPTIGPDVAEEEGLLAASQQQASTPAEAAARVEEGEVRRAVAECPVLVVGVRGCCLSHVVKRLLQGLRVNPAVH

SEQ ID NO: 251265 - protein, 162 aa, Zea mays
  unsure (1)..(162): unsure at all Xaa locations
  Clone ID: MRT4577_160739C.1.pep
FGRPPKVPPPPLGGATTKVDFFKKGRLPPKGQLYNPYLGRGFAPQGFPFKPPFPWDPPREGEGRLISRRENFPKGVFFPPPGSAKKRKKKGKSILLFQKGLTFGVGEESPLKRKGEKIFLGKHGVKEKSPLNKVFQGWGGGKGIWAPRGKKLKGGPPGWPVX

SEQ ID NO: 251266 - protein, 62 aa, Zea mays
  Clone ID: MRT4577_16073C.1.pep
GINKWSMLETNVPVYSLKTIGLYPQNRENYSQMHSHSCLRHELMFFQKKKEQGQTSSPMFDT

SEQ ID NO: 251267 - protein, 72 aa, Zea mays
  Clone ID: MRT4577_160740C.1.pep
GGTRRLPIKFPVGSRLYAASCIRFVHGGGCLFFAWEGSAGGRNLHPVFFFFFISPPFNHPPFFLVHFSFFPL

SEQ ID NO: 251268 - protein, 47 aa, Zea mays
  unsure (1)..(47): unsure at all Xaa locations
  Clone ID: MRT4577_160741C.1.pep
EQRVQRDGADEALNKLRLEGVHVLVQVAVAVAQVLXTKRSVVASCRI

SEQ ID NO: 251269 - protein, 92 aa, Zea mays
  Clone ID: MRT4577_160742C.1.pep
RTRGPRSRTTGTRRRLAPTAYAAAAAAAAEAPLPMTPRPTIHSFTGQRQPARRLTPTRVAKCQHSSLQVMVGQPPGPPRSAAVRPTVGHRRA

SEQ ID NO: 251270 - protein, 131 aa, Zea mays
  Clone ID: MRT4577_160743C.1.pep
GATVLVGKMQQPTSRLVATGTEQAVNSDGIPAAATAAAACGSSSSASTFKTCVCARAVLLLPLRLCPLWPVHAVQMHWPWPEGGHSSAHENERQGGFFFFFFRNKMSSSSTSRVLITPQVLQRFFGWTHTR

SEQ ID NO: 251271 - protein, 104 aa, Zea mays
  Clone ID: MRT4577_160744C.1.pep
GGVGFCSQSHEWRSVQTQATATVRRRDPREVLRGPWVHMSHSSHYFSKEAVGGGGNSECRVGLVGSSGASRCPWVQVLLLLLLLGPCPPAAWGWPAARAPPGGP

SEQ ID NO: 251272 - protein, 91 aa, Zea mays
  Clone ID: MRT4577_160745C.1.pep
MASFCRAAAAAGARSAALRSRSPTARPFLAATSPLAPPRLNRPLVAAAAALASLESLVPLHSAVAAARLRSCIAAGSASWSCLSQDFALPR

SEQ ID NO: 251273 - protein, 46 aa, Zea mays
  Clone ID: MRT4577_160746C.1.pep
SNEVFLRIANGKRPPFLKTRTLEGATRANSLSFRKKAAPWANGRRG

SEQ ID NO: 251274 - protein, 213 aa, Zea mays
  Clone ID: MRT4577_160747C.1.pep
MDRHRWCDSDNDMEVPRQYVSRGMHTKSSSGNSLQSSFHKPSKANQALKRSTSQKDFFHSRDSSSFVFLPLIMQSHSSITDDESRSSLSFHSRNQKAVCAVYGLDKEHGIDDGAGNVLYDVMRKEVRQAVEEIRNQLEEAMTKSEPSEKAINSDAQPTQVITQLRRSYTSKLEESEKRKQELLAQLAAEEHHGHELTKIVRELLPTPKKTANL

SEQ ID NO: 251275 - protein, 44 aa, Zea mays
  Clone ID: MRT4577_160748C.1.pep
SRAPGGALGWLIDAILKASKLLVLYEFLNAKHVVDHGPYTCCGS

SEQ ID NO: 251276 - protein, 215 aa, Zea mays
  Clone ID: MRT4577_160749C.1.pep
RPPTRPRTGSGKSTLIQSLFRIVDPAVGQIVIDGIDIRTVGLHDLRSRLSIIPQEPTMFEGTVRSNLDPLGEYSDDQIWEALDCCQLGDEVRKQELKLDSPVVENGENWSVGQRQLVCLGRVILKRSKVLVLDEATASVDTATDGLIQRTLRRQFKETTVITIAHRITSVLDSHMVLLLDNGVAVEHDRPDKLLEDKSSLFSKLVAEYTMRSVLT

SEQ ID NO: 251277 - protein, 269 aa, Zea mays
  unsure (1)..(269): unsure at all Xaa locations
  Clone ID: MRT4577_16074C.1.pep
MRSSVAAAMPALLLLLVPCLLHGADXIFQDHKPLXTSVFSFGGDDFADTGSSLRPSSSAPLIESRRDGEATVSRRTSGDGRVILDFAANDAYDLPSVPSYLELEDTSHNFSKGANFAVAGATALGGHVGSSVSSFLQHRPPTPLSSFGAQIGWFEQLRPSLCATPERCDECLGKSLFVAGFGWNDYLLLLAANKTVDETRTHARTVVKAIADGVERLVKLGAKRVXVPGILPMGCAPVILGLYASPAESGHDRYGCLVRFNDLARYPTS

SEQ ID NO: 251278 - protein, 94 aa, Zea mays
  Clone ID: MRT4577_160750C.1.pep
PRRPGLAAGGCQYFSGLAGAQDSHRPARAPGAPGPPEVLVVRRGGARGCRRADFSSGTRLTELPASGRRWDPASAVMRQDELVRDRSGSWSGAE

SEQ ID NO: 251279 - protein, 62 aa, Zea mays
  Clone ID: MRT4577_160751C.1.pep
HFCVPSFVSCAVSVESSSSVHDLVLPYFGQDRRFYPFCYKWGPVELCFHYDTSIVPFHGLSS

SEQ ID NO: 251280 - protein, 90 aa, Zea mays
  Clone ID: MRT4577_160752C.1.pep
PSQPAVMARLFFLLLFPLLHSSVTGLRRSDFPPSFLFGAGSSSYQIEGAYLEDNKGLSNWDVFTHIQGASKGLNHAYGDLRHLSNSIIRK

SEQ ID NO: 251281 - protein, 44 aa, Zea mays
  Clone ID: MRT4577_160753C.1.pep
WVPGPPPRPPPPPPPPPPPPPPPPPPPPPPPPPPPLKKKKGLGN

SEQ ID NO: 251282 - protein, 347 aa, Zea mays
  Clone ID: MRT4577_160754C.1.pep
MAPKLVFVLPVVLLALALQAILRPPPPKLCGSPGGPPLTSPRIKLRDGRYLAYKEDGVQRDKARYKIITVHAFDSTKDFPSPVSKELVEGLGIYLLAYDRAGYGESDPNPNRHVKSEALDIEELADQLGLGHKFYVLGASMGGYSVWGCLQYIPHRLAGAALVVPIINYWWPSFPAELSKQAFNRLIVPEQRTLWIAHNIPSLLYLWMTQRWFPSSAAAMHHPEIFSKHDMEVLQKMMAMPRTIENKSRQQGIYESIHRDLLVAFGTWEFDPMNVTNPFPQNEGSVHIWQGREDRLVLVELQRYIAKKLPWIKYHEVPEGGHMFVMVDGWTDRILKALLLGEEPLDV

SEQ ID NO: 251283 - protein, 151 aa, Zea mays
  Clone ID: MRT4577_160755C.1.pep
ASSIQPRHHHHGGGTGYLTACFALMVGPEGRAVGVEHIPELVATSTENIKKSAAAPHLNDGSLSIHVSDGREGWPELAPYEAIHVGAAAPQIPEALIEQLKPGGRMVIPVGTVFQELKVVDKKLDGTVSIRDETSVRYVPLTSKDAQLHAS

SEQ ID NO: 251284 - protein, 142 aa, Zea mays
  unsure (1)..(142): unsure at all Xaa locations
  Clone ID: MRT4577_160756C.1.pep
RPAAAAPALRETSTQAAARTDLLLPTPSLLRARLLAHHEEAPGAPSRPGADYRHHLRGAFIALERGPPRGAAPCRAPPTEPERTPAXLLNRRLRAVPVTEALIPALRAPGRPRRRLHTTLFSPRSARRGATMPQALSILADM

SEQ ID NO: 251285 - protein, 305 aa, Zea mays
  Clone ID: MRT4577_160757C.1.pep
GSASGSVRRPRPHSPPAQLRCAISNPLLPPSRTSPSISSPADSSSLQPPSTAGRKWPRVSPLTPVKNLGVVYPAPSSSPWRSGASDKNKSMVEQLQRYGVIRSTKVAEVMEAIDRGLFVPPGGSPYHDSPMPIGYNATISAPHMHAACLELLEKNLQPGMRALDVGSGTGYLTACFALMVGPEGRAVGVEHIPELVATSTENIKKSAAAPHLNDGSLSIHVSDGREGWPELAPYEAIHVGAAAPQIPEALIEQLKPGGRMVIPVGTVFQELKVVDKKLDGTVSIRDETSVRYVPLTSKDAQLHAS

SEQ ID NO: 251286 - protein, 79 aa, Zea mays
  Clone ID: MRT4577_160758C.1.pep
SQKSGEMMTFFSSLGNVPSSRSILISGAPSPCACICVRDLLVNCHGHPRTPHAVILSAKEIPYPPKQAVSHGCTGDYVQ

SEQ ID NO: 251287 - protein, 80 aa, Zea mays
  Clone ID: MRT4577_160759C.1.pep
HGHLHIIHIQDACTYIRFVEGLMFFHLILSYLVLATDSSSRSNRLIRHIGLLSNIKRPPIILWRDGHVYESMRTLVESSV

SEQ ID NO: 251288 - protein, 70 aa, Zea mays
  Clone ID: MRT4577_16075C.1.pep
ICLVKVPFGPIYAQVNKQVPSRISRSSRPSTSLRFRQTSSPSHQLVVGCLGWPRLHYVSFDLYYVNGPGL

SEQ ID NO: 251289 - protein, 45 aa, Zea mays
  Clone ID: MRT4577_160760C.1.pep
PKKKVRHHVQDRTVGVNHGGSSRRNHYGSDLYLTVAAIPVSAHGL

SEQ ID NO: 251290 - protein, 203 aa, Zea mays
  unsure (1)..(203): unsure at all Xaa locations
  Clone ID: MRT4577_160761C.1.pep
MKHAACYEDLLLHSLLAALPEYYIPSPHLALMDREAAVFLALGLLCSGAARGCXPXCRVPDMPAPASVSTTSTNILERCPIDALKLXRCAPMRSFSXVELPQHDXCCPVLKGLLDLNAVLCLCTAIKDTILCIHLNVPLNLRLILHYWGKISPXDFTCPQLSLASACSAPSHDYIYEHVGLVRYYRITLTDSILSLDLLRLDL

SEQ ID NO: 251291 - protein, 112 aa, Zea mays
  unsure (1)..(112): unsure at all Xaa locations
  Clone ID: MRT4577_160762C.1.pep
REYLSNLTKKQPPPFREKCAKADPDSLKLLQKLLAFDPNDRPTALQAFAHPYSKGPPGVTREPSRHPITKMQFQCQRYKATQQDVKVLICQEILXYHPQLSKAYMNWTCKTN

SEQ ID NO: 251292 - protein, 71 aa, Zea mays
  Clone ID: MRT4577_160763C.1.pep
PPKAFQNFLSKNIQILPLTPPKRRSEASAIIISKAPNHRASPRKMPQNVSTQKIFGKSIEPTIANPTAKCR

SEQ ID NO: 251293 - protein, 124 aa, Zea mays
  Clone ID: MRT4577_160764C.1.pep
MDVLLGSGRFLARRPPLALVPRCSRGSPDKSGSDKGETSADWDKAWSAFKKKGKRTLFSDFSPDKYVTWNPRRSEYPLSEEVDPIKRTERSNLMLWTSPQFTLVGAIIIVLTLLIYTLVVPPPK

SEQ ID NO: 251294 - protein, 95 aa, Zea mays
  Clone ID: MRT4577_160765C.1.pep
TYKNPGPKMLQPPGGVPKHPETHHKGDPPTRAGTPQRGKQKQSEPGHTGAQPGPRGETNTGQPGPKGKKPAAQKGKPGPTREPKGKNQGGPRDDP

SEQ ID NO: 251295 - protein, 62 aa, Zea mays
  Clone ID: MRT4577_160766C.1.pep
SMSDLKMPHDFLLCCHAHRVASPRSHLKYGHRCTHSLCSMTLFSHSHMLSTEGGAPQGPDLS

SEQ ID NO: 251296 - protein, 72 aa, Zea mays
  Clone ID: MRT4577_160767C.1.pep
SGSVTTHDDFGGVGHACVIYRLERVRVHQAAIWCTYTNLRSTYVPTVLAIVCFLIRQQICCVQYAKCLHQCP

SEQ ID NO: 251297 - protein, 79 aa, Zea mays
  unsure (1)..(79): unsure at all Xaa locations
  Clone ID: MRT4577_160768C.1.pep
MVAICLHCCERRVLRLTPVPSTNLFVVSRSTTRVEPLSRPIVDLSSGNTXLSXELRRYFSSNEKHLPAVSDPEIDSAYK

SEQ ID NO: 251298 - protein, 106 aa, Zea mays
  Clone ID: MRT4577_160769C.1.pep
MPLLICHRLLLLLLFWVAASHGDSSDDGAYDPSMCLNQTYTCGEVRISYPFYLAGETKDLKGNANSYCGYPGLGILCDDDKPILQLDGIVNYTVKSVDGATATVSL

SEQ ID NO: 251299 - protein, 62 aa, Zea mays
  Clone ID: MRT4577_16076C.1.pep
FRGMISKPAPVSRPPGWPQCLLVKRVQPTTQGPAALGGGFTLGQASPFGESQANQGRRSHGG

SEQ ID NO: 251300 - protein, 70 aa, Zea mays
  unsure (1)..(70): unsure at all Xaa locations
  Clone ID: MRT4577_160770C.1.pep
CTQAASTSRSRCGASPTRRRTRYSTATASGPAARRRRSAKTICLTDHMQXXLHIPVYVVVSPHKKRSWRD

SEQ ID NO: 251301 - protein, 139 aa, Zea mays
  unsure (1)..(139): unsure at all Xaa locations
  Clone ID: MRT4577_160771C.1.pep
MPRRGETAVVPIDVASAGGGRGDERPKRERHRSHGPGRHGPHRSRPPPPPPPAFRPFRRWFPFLVPLFIVANIVLFVLTMYVNDCPAHARATGAAIGGSVGESATAQGCWLAPELGRFAFQSFKENPLIGPSSXTLVGN

SEQ ID NO: 251302 - protein, 120 aa, Zea mays
  Clone ID: MRT4577_160772C.1.pep
APSPSIGFAGQKVTSSAGLGDIVHIDPDFFRYLRFDFESRGKLQLEGRSQREPSAMCYQVKCGSCGKSTWAGCGRHVASVHRQIPQGQHCACRDWPGVAPAGDKAAAAEGPSSTSVCTIL

SEQ ID NO: 251303 - protein, 124 aa, Zea mays
  unsure (1)..(124): unsure at all Xaa locations
  Clone ID: MRT4577_160773C.1.pep
DHRKALADREFEALQDRISGKMINFRRVSCINGTVPLSPSLMSAEELCSMCKXLYMQFVEDGKERLVVGSLDLNQCLWLPDELTGKRPGVRPLFPLSTLLQNTYDQNIFLIVVIGIFELALVIA

SEQ ID NO: 251304 - protein, 136 aa, Zea mays
  Clone ID: MRT4577_160774C.1.pep
MSDAGSCDGAAASGDAVDDNIHGQPQQANEEQASPAPTSRISVRKAVEVIQTFDEYKRWLITEIGFGGMLKLPLLQKLNLKFSAWTMSKVCVEPRAIVLSETEILKFFAEDIHKVFGIPCGHWSVKGRDGFIKPEA

SEQ ID NO: 251305 - protein, 66 aa, Zea mays
  Clone ID: MRT4577_160775C.1.pep
ADKILSSSARKKKKTKYIFRQETRPEQSIPSWRLRNGSSEEPSGMVKRNSGLSWSICTELDAPVRC

SEQ ID NO: 251306 - protein, 173 aa, Zea mays
  Clone ID: MRT4577_160776C.1.pep
AGMRPGCGPRAPSRRGLYGRRCTPLTFVQALLSSCRRFRLSVVGGHRFFFFSREGHLWGGGRRLCLRPLRRRGGGVRAIESNDVLLRPFHLVGPAPGRVLLFAGRWRGCLRGRHSGRAVQMARRAPENLHPYADLYTEREFGYHTVRSARARSSWNFTYCDMTLIRRAIPVSN

SEQ ID NO: 251307 - protein, 196 aa, Zea mays
  Clone ID: MRT4577_160777C.1.pep
MLRSTLLLALTSTLALASPVLEPRGLQANAEQVVLNGVSWGANKLSHVGTDDAGQVGTLTKWDWTDCGSPSDALQIDSIKISPDPPKPGQDLTIVASGRAQSKIDFGTYADVTVKLGLIKLLTKTFDVCDELDNANATLRCPIAPGTHSITQTVALPREIPRAKFQVDALVYTQDEEPAACINLWINFLVPDLQED

SEQ ID NO: 251308 - protein, 130 aa, Zea mays
  unsure (1)..(130): unsure at all Xaa locations
  Clone ID: MRT4577_160778C.1.pep
QAVPCDKKYLRIXDDTLTGFASSVDIPPKEPMESLISLGQDLCNKPVVRLPLDTGLFESXEGEGSNAHVGFFFPPPPFFLAGGYARLISSSTNKIPLCFSMCSSRRFGVSFFNFPPLSVKKEKVCEIKTV

SEQ ID NO: 251309 - protein, 63 aa, Zea mays
  Clone ID: MRT4577_16077C.1.pep
KAGAQIHLYFPTLNKTGRRAINTGSKEGSSHNIFIREGAVGLEPPQKNNPPPKNRGERRTCAH

SEQ ID NO: 251310 - protein, 47 aa, Zea mays
  Clone ID: MRT4577_160780C.1.pep
GRILSLGAGTRRAATTLRTIAGRHHTVPQSRSLIMCYACAYSMITGA

SEQ ID NO: 251311 - protein, 155 aa, Zea mays
  unsure (1)..(155): unsure at all Xaa locations
  Clone ID: MRT4577_160781C.1.pep
MDREIRAHVXGALLVFKAYTHHRKGLVRFQSLXDFEEGNGDHKGGVTEVIHDPDRGELLXRXTFRQPFKDEYQKEVFVLLEGMYTPQHLYXDFLATLCISNGLPLTRIAEVASVCIVHDLHEDCGVLQRGSEEYLIXLQHKPDNRTSESYLPSDD

SEQ ID NO: 251312 - protein, 55 aa, Zea mays
  Clone ID: MRT4577_160782C.1.pep
PSSCPFSLKLFQWRSLPHHPCSGLGRSSYLAYTCIQQSSVLVGAPQSIKIAPHLE

SEQ ID NO: 251313 - protein, 194 aa, Zea mays
  Clone ID: MRT4577_160783C.1.pep
SRPTRRRHQVSNNLKYPEMGARDNGEGRDEKRGTGSDYVPARDSFSSQGESRVPKRLGKKESKDNSPRTTKSSASRQAQNKLQHKGLNNVQNKPQKQKKTVSAAKAVDVRKPDITRIPSRPPSELSEETDDIISDAGTVDDRGTEEAKEINVLDEAPRCDQSTGTDDEIPDIEDKVVDHGKSVVDQAMRISAEI

SEQ ID NO: 251314 - protein, 45 aa, Zea mays
  Clone ID: MRT4577_160784C.1.pep
SSHRTMTLARVDDLEQIHDDSHVQAHPRRNARIVSLTERPHLCAD

SEQ ID NO: 251315 - protein, 672 aa, Zea mays
  unsure (1)..(672): unsure at all Xaa locations
  Clone ID: MRT4577_160785C.1.pep
MATYEPKNILITGAAGFIASHVTNCLVRNYPHYKIVVLDKLDYCSSLKNLNPSRASPNLKFVKGDIASADLVNHLLVTESIDTIMHFAAQTHVDNSFGNSFEFTKNNIYGTHVLLEACKVTGQIRRFIHVSTDEVYGETDEDAVVGNHEASQLLPTNPYSATKAGAEMLVMAYGRSYGLPVITTRGNNVYGPNQFPEKLIPKFILLAMRGLPLPIHGDGSNVRSYLYCEDVAEAFEVVLHKGEVGHVYNIGTVKERRVIDVAKDICRLFGLDTEKVIRFVENRPFNDQRYFLDDQKLKRLGWXERTPWEEGLKKTIEWYTTNPDYWGDVTGALLPHPRMLMIPGVERHNWTEDIKSLTSSPAEASTTAPATSAKRTTAAPQKPLYKFLIYGRTGWIGGLLGKICDKQGIPYEYGKGRLEERSQLLEDIRNVKPTQVFNAAGVTGRPNVDWCETHKQDTIRTNVVGILNLADVCREQGLLMINYATGCIFEYDAKHPEGSGIGFKEEDTPNFTGSFYSKTKAMVEELLKEYDNVCTLRVRMPISSDLNNPRNFITKIARYDKVVNIPNSMTILDELLPISIEMAKRDCRGIWNFTNPGVVSHNEILEMYKKYINPDFKWTNFTLEEQSKVIVAPRSNNEMDASKLKAEFSQLMSIKDSLIKYVFEPNRKVPAN

SEQ ID NO: 251316 - protein, 102 aa, Zea mays
  Clone ID: MRT4577_160786C.1.pep
IITECIEINVTISSKYLSHRGSLITKYKINIKRTKDHPWRKSQLGKRHLDQIKLLALRLLLSHLFFSFNELLLSYFYLLVTSILGHRLFYSDAWADAWADAW

SEQ ID NO: 251317 - protein, 673 aa, Zea mays
  unsure (1)..(673): unsure at all Xaa locations
  Clone ID: MRT4577_160787C.1.pep
MATYEPKNILITGAAGFIASHVANRLVRNYPQYKIVVLDKIDYCSNLKNLNPSRSSPNFKFVKGDIASADLVNYLLITESIDTIMHFAAQTHVDNSFGNSFEFTKNNIYGTHVLLEACKVTGQIRRFIHVSTDEVYGETDEDAVVGNHEASQLLPTNPYSATKAGAEMLVMAYGRSYGLPVITTRGNNVYGPNQFPEKLIPKFILLAMQGLPLPIHGDGSNVRSYLYCEDVAEAFEVVLHKGEVGHVYNIGTVKERRVIDVAKDICKLFGLDTEKVIRFVENRPFNDQRYFLDDQKLKRLGWAERTPWEEGLKKTMEWYTTNPDYWGDVTGALLPHPRMLMTPGVERHNWAEEIKSLASSPAEASTIAPATSTKSISDAPQKPSYRFLIYGRTGWIGGLLGKICEKQGIPYEYGKGRLEERSQLLEDIRNVKPTHVFNAAGVTGRPNVDWCETHKQDTIRTNVVGTLNLADVCRKQGLLMINYATGCIFEYDAKHPEGSGIGFKEEDTPNFIGSFYSKTKAMVEELLKEYDNVCTLRVRMPISSDLSNPRNFITKIARYDKVVNIPNSMTILDELLPISIEMAKRDCRGIWNFTNPXGAVSHNEILEMYKKYINPDFKWTNFTLEEQAKVIVAPRSNNEMDTSKLKAEFPQLLSIKDSLIKYVFEPNRKVPVN

SEQ ID NO: 251318 - protein, 344 aa, Zea mays
  unsure (1)..(344): unsure at all Xaa locations
  Clone ID: MRT4577_160788C.1.pep
NEGRCIITDHGHFVLFNIYGPAVDGDDKERVRFKLLFYKILQKRXERLLALGKRVFVVGDLNIAPASIDRCDAAPGFEKQMFREWLRSMLREHGGPFFDAFRSKHPERTGAYTCFNQKIGAEEYNYGSRIDHILISGSCLHRCDSVEDHSIFCCHVEECEIMNHFKRGNSENLSKWKGGRSSKLEGSDHIPVYILLKEIPELPVHNIPPSAARYLPEIRGRQQSIVSFLDKGKIYELQNAANLIQSEDTVLDSYCSDGLENTILAKKGLATGITEFAKGGNLPSLMCKGTDLNQWINEGLMGISHVSQKKHCLVPSLCHKRKLNATYHPNQQSSHFFQRPGQRQ

SEQ ID NO: 251319 - protein, 57 aa, Zea mays
  Clone ID: MRT4577_160789C.1.pep
MASSKLVLSSTAFAGKAVKVLSSSAFGDARLTMCNSAANAKAAAASGSSSYGTERMM

SEQ ID NO: 251320 - protein, 56 aa, Zea mays
  Clone ID: MRT4577_16078C.1.pep
LFFFFFVFCALFYLFFLYLLLFFFFARRGDKKTFPKGGKAIERMIPHLGRTSCSFK

SEQ ID NO: 251321 - protein, 61 aa, Zea mays
  Clone ID: MRT4577_160790C.1.pep
MSGWDEGSVFYSDQAQVPRSGPGVNPASRLTRQSGRLKCKECLRGFTGPTSNFPYRESLLH

SEQ ID NO: 251322 - protein, 92 aa, Zea mays
  Clone ID: MRT4577_160791C.1.pep
TRLREALERDISASIHADIVNVSATSRRKRRRRKSNQKSKQIAKGVSEADSAADSTSDDACGNTHRRRHQLKASSKASYEDLDEVVALMDAI

SEQ ID NO: 251323 - protein, 155 aa, Zea mays
  unsure (1)..(155): unsure at all Xaa locations
  Clone ID: MRT4577_160792C.1.pep
GHHSDRADCSERGPFALHYIVARDXGTPEPKTIKVPEGFDYELYNRNDINRILGPKASCISFKDSACRCFGYMVSKKKYIYTIDDDCFVAKDPSGKDINALEQHIKNLLSPSTPFXFKTLYDPYREGSDFVRGYPLSXRGGCXSAGSHGLWVNIL

SEQ ID NO: 251324 - protein, 46 aa, Zea mays
  Clone ID: MRT4577_160793C.1.pep
MAAPKLATLALAVLLAATVVAPPAAVRAAMSCSTVLSRLTQRVSIT

SEQ ID NO: 251325 - protein, 51 aa, Zea mays
  Clone ID: MRT4577_160795C.1.pep
LCLPGLVLTVCYRQSSPRWLNKEAVSVKKEIPCTVVPNGCIFQGRVSPLCR

SEQ ID NO: 251326 - protein, 87 aa, Zea mays
  Clone ID: MRT4577_160796C.1.pep
PETRSADVASAKPAEFAASTAPARDVLQGAPDPGGAGVDADTPCSRVATTRGTPARQRAPGRRSLAGCTRVAAAWSEAPIVVAAVMP

SEQ ID NO: 251327 - protein, 81 aa, Zea mays
  Clone ID: MRT4577_160797C.1.pep
ELFCDGFIRMMVFLSAIPALFSGAQQGVWDPPEFTVLRPKSQGMGEIPQGPQLRFYPCRNDTDATGGSPPPPAIANRMQRK

SEQ ID NO: 251328 - protein, 47 aa, Zea mays
  Clone ID: MRT4577_160798C.1.pep
MAAAAEHAVEYISSEELDVAASPNAKAAWLVADLYSKVCVSDFEALN

SEQ ID NO: 251329 - protein, 332 aa, Zea mays
  unsure (1)..(332): unsure at all Xaa locations
  Clone ID: MRT4577_160799C.1.pep
PRQPRVRPRVFPRVRPRVRGRVGSTSQPFVESYQPFIAQVAGFFIVEDRVFRTADGLLSESQVDTMLETAISKLTLILEEQFSRIHAANHXXLIKGYVSLFGATLKKYGYRSMSLTEILDKTRDKYLELLLSDCRKQLNEAFSRDSYERMVIKKQNEYDANIAAFQLDPIDGVPNLPYVAPFSSSVPNACRIVRSFIEELVSYLSLSGGVNVYDVVKSYLDKFLIETLNDGFLKLIHGGSLEFPQVVQIAGNIAVLERSCDMFLWHAARLCGVPRCLLEKPHSGLSARAVLKASQNAAYNXIXLLLVNSKIDEFMLQLTSINWTPDEAPEHA

SEQ ID NO: 251330 - protein, 55 aa, Zea mays
  Clone ID: MRT4577_16079C.1.pep
NLCKVESNVGCSVKYEQSENAEFSLKIASVFVLACRLLQSTSQGKLDYWAVTIRL

SEQ ID NO: 251331 - protein, 573 aa, Zea mays
  unsure (1)..(573): unsure at all Xaa locations
  Clone ID: MRT4577_1607C.1.pep
MASPFSVPSLIMEEEGRFEAEVAEVESWWGTERFRLTKRPYTARDVVLLRGTLRQSYASGEMAKKLWRTLKAHQAGGTASRTFGALDPVQVTMMAKHLDTIYVSGWQCSSTHTSTNEPGPDLADYPYDTVPNKVEHLFFAQIYHDRKQREARMSLPRAERARAPYVDFLKPIIADGDTGXFGGATATVKLCKLFVERGAAGVHLEDQSSVTKKCGHMAGKVLVAVSEHVNRLVAARLQFDVMGVETVLVARTDAVAATLIQTNVDARDHQFIVGATNPGLRGQSLAAVLSAGMSAGKSGRELQAIEDEWLAAAQLKTFSECVRDAIAGLGVAGQEKQRRLQEWDRATGGYDRCVSNDQARDIAASLGVTSVFWDWDLPRTREGFYRFRGSVAAAVVRGRAFAPHADVLWMETSSPNVAECTAFAEGVKAACPEAMLAYNLSPSFNWDASGMTDAEMAAFIPSVARLGYVWQFITLAGFHADALVTDTFARDFARRGMLAYVERIQREERINGVETLEHQKWSGANFYDRVLKAVQGGISSTAAMGKGVTEEQFKDPRPATGSSGLQVMAKSRI

SEQ ID NO: 251332 - protein, 144 aa, Zea mays
  Clone ID: MRT4577_160800C.1.pep
ALVTALGVPLRVEYLLQVGDGQDLYDRQEDSQDYTPTSTCWSSHRRQLPHVHVVPRVTVLYTNAHYDIIYPHRRDGPPVPSIDERCCQQTALVQRPTAESSGQQIAQRDSCSGTGESSSQHIAQVEISTDENSDQHAELKLKKT

SEQ ID NO: 251333 - protein, 105 aa, Zea mays
  Clone ID: MRT4577_160801C.1.pep
MIRLLVVVLWSLERHRTIRTASVAVAAGTAANGSAVAGVQSHPQPSVAASKTPAMAWWSSRRGPWSSRCCRRRHSSQGTRAPLHCPQEQRSRSCSSRRSKCTYHR

SEQ ID NO: 251334 - protein, 59 aa, Zea mays
  Clone ID: MRT4577_160802C.1.pep
RPSSNTWVLAGLCWNTGVFETSVTMVPLQKDVLIGLDPHVQENHPFLFPASKCCGPDCL

SEQ ID NO: 251335 - protein, 121 aa, Zea mays
  unsure (1)..(121): unsure at all Xaa locations
  Clone ID: MRT4577_160803C.1.pep
MFLLLEYNIFXWTFLIKTNPIPNLGIWNSGLLTPVNXGPKKLFSYXSGIKPLGGXWVQFRIRYYTFALDFVVFDVETVFFYPWAIRFYVLGVSVFIEAFTFVLILDAGLDYARGKKALEWC

SEQ ID NO: 251336 - protein, 84 aa, Zea mays
  unsure (1)..(84): unsure at all Xaa locations
  Clone ID: MRT4577_160804C.1.pep
LRKLYDEEKCELLDQVQDXSFKADTLSKEKISALEQVDDWPNKFSEWKKKAQSRFTQHQNTGKELQIQLELKSKEAYEKDEQIN

SEQ ID NO: 251337 - protein, 56 aa, Zea mays
  Clone ID: MRT4577_160805C.1.pep
MYTAREKIQEDKGLEPSGFEDSGGHAFFDLENGTQELKSDLKDLVHERVLFRWDVA

SEQ ID NO: 251338 - protein, 77 aa, Zea mays
  Clone ID: MRT4577_160806C.1.pep
NGVAALLDRDELIMHAMCQFGGCYARSSFIVIDRPWVMECGASVIYVLVIELRNPCECSWICRGLSPVGEVRCGLPR

SEQ ID NO: 251339 - protein, 101 aa, Zea mays
  Clone ID: MRT4577_160807C.1.pep
CEVRTIAWAQDETGSVVDPAWGGYRKQPARIRWRGKQTTWIPRATKQAPGYRGKIKAPSPGGLVPPRQGRPLCRCGRGYGGCNGHTVYRKHNRGGKNTVGG

SEQ ID NO: 251340 - protein, 212 aa, Zea mays
  Clone ID: MRT4577_160808C.1.pep
MQEACNRTTVVYPFGFIASGMEAQAHTSCNRRASYYVLETAPPLAPMPCLLDRVTSAATRGSPARDPTVPIKCNDHGSVSRRGSKAGHSEGFDSRPRAHIVRDDPGYVRYMAEARATLPRLGDVEAPPRSRSSMSSEAEVESEPLGRARRRPSAKARAESEPWGRAKRSLSSSGAEPESEPWVGRSGVRHLPGLSPSPSPGSGGAEFAVFRG

SEQ ID NO: 251341 - protein, 36 aa, Zea mays
  Clone ID: MRT4577_160809C.1.pep
PSSCHQRLSYTTLSDLALALLYGTVFEIGHVLLVIQ

SEQ ID NO: 251342 - protein, 396 aa, Zea mays
  unsure (1)..(396): unsure at all Xaa locations
  Clone ID: MRT4577_16080C.1.pep
MRPNIITEAGIPTRLNQWWSSIPFVTSGVILICGVIYLLCLLIGYDSYVEICFLPSAVASHFQVSSASSMFLQNGTLFFLHVLMXYSLLVXMISETHILCKKTXNLYNARYAWILLVLFQFLASNVPLLGYXLASGSSSLAFAGFIFSMIVIETSLSGVQSRSVFGLFNVPAKWYSFFLHVLXYSLLVTXISETHILCKXLNLYNAXTYGLFNYLLPGPSFYSKIEGLSALSVCVRRPGFIMCTGGTTYGQLPTYSNTSAAPSALISGNFLRNISSWMPSRHISTAQEGEDTRFPGRARTLGSVGTEPTAREASAHLHARLLDNTTPSDPLTNTQHTAVNTVRADATVTAEQVDTFDEELKKLVGMGFEKTQAEVALAAADGDPNVAIEILMSQQG

SEQ ID NO: 251343 - protein, 47 aa, Zea mays
  unsure (1)..(47): unsure at all Xaa locations
  Clone ID: MRT4577_160810C.1.pep
LTCLILXLLKWHSPGHFIIAVSDDYNLCMYNSHHNPILNTFSPHINT

SEQ ID NO: 251344 - protein, 138 aa, Zea mays
  unsure (1)..(138): unsure at all Xaa locations
  Clone ID: MRT4577_160811C.1.pep
MARTKQXTARKPTGGXKAPRKQLATKADRKSGPATGGXKKPHRFRPDTGALREIHKYHXSTELVIRKLPLQRLVREIAQDLKTVLHYQSSAAFALEQADEGYLAGLLEDTKLCAIHAKDRTIMPKGIHVVRRIRVRSA

SEQ ID NO: 251345 - protein, 86 aa, Zea mays
  Clone ID: MRT4577_160812C.1.pep
DFIRLDETNAPDAMKRIFVTMASFSRTLPCADVRGSSVSHFDHTVVVLPQRAQGLVPPDLYCLRLAEASCTRLRVSHAIRLWITLA

SEQ ID NO: 251346 - protein, 121 aa, Zea mays
  unsure (1)..(121): unsure at all Xaa locations
  Clone ID: MRT4577_160813C.1.pep
NFSKRTPLRFGKWGAWFPMGFVGMPFPVAVKMVPVKKGGLSIFLGVEKLKPASRPKIFFFKSLKQKNSFPFFFKGVRTEQNRTGFTHRGFYNIGGFFCKKPLATLRXXKKKKKKKKKKKKK

SEQ ID NO: 251347 - protein, 63 aa, Zea mays
  Clone ID: MRT4577_160814C.1.pep
ACKSSTQVISHVLPSSSNFFTMLAFSPPPKQALLKMDNLHSLLHKSFPMSCRAQVNSFTMVGL

SEQ ID NO: 251348 - protein, 93 aa, Zea mays
  unsure (1)..(93): unsure at all Xaa locations
  Clone ID: MRT4577_160815C.1.pep
MAPKKDGVPAPSSKPVKSXCGKQKKKKWIKGKLMEKVNNSVLFDQASYYKLLFEVPKYKQITXPFYSXRPMINGSLARRAIKDLMARVLILLV

SEQ ID NO: 251349 - protein, 297 aa, Zea mays
  Clone ID: MRT4577_160816C.1.pep
LFDLTKSATYANISCSSSYCSDLYVSGCSGGHCLYGIQYGDGSYTIGFYAQDTLTLAYDTIKNFRFGCGEKNRGLFGRAAGLLGLGRGKTSLPVQAYDKYGGVFAYCLPATSAGTGFLDLGPGAPAANARLTPMLVDRGPTFYYVGMTGIKVGGHVLPIPGSVFSTAGTLVDSGTVITRLPPSAYAPLRSAFAKAMQGLGYSAAPAFSILDTCYDLTGNKGGSIALPAVSLVFQGGACLDVDASGILYVADVSQACLAFAPNADDTDVAIVGNTQQKTHGVLYDIGKKIVGFAPGAC

SEQ ID NO: 251350 - protein, 74 aa, Zea mays
  Clone ID: MRT4577_160817C.1.pep
YNFPVFFFRFVLSLSWVCRSFIPFLWSHLDRCRVVFFFFCHKKGVYFKVSHQLLNAIYEFVLVPPLIFFKFPPF

SEQ ID NO: 251351 - protein, 99 aa, Zea mays
  Clone ID: MRT4577_160818C.1.pep
MGFYAQDTLTLAYDTIKVRTYRTWPMGASSPRLARARHDFAMTSHDARARALCMQNFRFGCGEKNRGLFGRAAGLLGLGRGKTSLPVQAYDKYGGVFAY

SEQ ID NO: 251352 - protein, 80 aa, Zea mays
  unsure (1)..(80): unsure at all Xaa locations
  Clone ID: MRT4577_160819C.1.pep
PTKADHHRGATGGGGGYGDLQRGGGXHGEAQQQHKXQGAKMTGLKAATAATFGGSMLVPAGLILAGTGIALTEATPVLEI

SEQ ID NO: 251353 - protein, 396 aa, Zea mays
  Clone ID: MRT4577_16081C.1.pep
MRPNIITEAGIPTRLNQWWSSIPFVTSGVILICGVIYLLCLLIGYDSYVEICFLPSAVASHFQVYRFYTSVLFHGSLLHVLFNMLALVPLGTELERIMGSVRLLFLMLLLATTNAILHLTIAFLVAYNPLYHVPNLVNECSIGFSGVIFSMIVIETSLSGVQSRSVFGLFNVPAKWYAWILLVLFQFLASNVSLLGHLCGILSGFAYTYGLFNYLLPGPSFYSKIEGLSALSVCVRRPGFIMCTGGTTYGQLPTYSNTSAAPSALINGNFLRNISSWMPSRHISTAQEGEDTRFPGRARTLGSVGTEPTAREASAHLHARLLDNTTPSDPLTNTQHTAVNTVRADATVTAEQVDTFDEELKKLVGMGFEKTQAEVALAAADGDPNVAIEILMSQQG

SEQ ID NO: 251354 - protein, 127 aa, Zea mays
  unsure (1)..(127): unsure at all Xaa locations
  Clone ID: MRT4577_160820C.1.pep
PTRSDWRAKGIDIIYDKTYNGDYELDNGEENMRFTEETRQXYVDLASADILTTAIRSXMNVSIEGSTELVAPDLTSLXNXDKDLELLISDLTVIDLDDLKVNTVYIAYSDESSVIQTLLKIVRSSST

SEQ ID NO: 251355 - protein, 151 aa, Zea mays
  Clone ID: MRT4577_160821C.1.pep
KPPFRWLGRAPLNTENGVPVAVPPPGKMASKKRAFRKKLPNLDMHRSNLDSKNKKKAKLVQSSGDVLTNCQLPVRSRLGQGKQNGFVYGPFPPSGARKHGLDGGNKPGPTPPPQDWESPSASFRPQYQNPGGFSPSILFCSLGPNYGFSTL

SEQ ID NO: 251356 - protein, 124 aa, Zea mays
  Clone ID: MRT4577_160822C.1.pep
CTITGVAGSPARAPSRRRGHYSGSMQGSSKMDLSEITALDLVQTNQKDYRLTPTNVYSLHPHGEILICDRWSVLLRPTVRTGNSLVAGKTLYASQDNVAINLTSYFVPGGWVCNQPVTLTPRVE

SEQ ID NO: 251357 - protein, 79 aa, Zea mays
  Clone ID: MRT4577_160823C.1.pep
KEALIDGTEEAEWQDSSGAMPRTRCAPSSVSMPCQLAYGEVGYGLVEPVGARIQLVSFAHKSPTFAPIFRACSSSLARA

SEQ ID NO: 251358 - protein, 84 aa, Zea mays
  unsure (1)..(84): unsure at all Xaa locations
  Clone ID: MRT4577_160824C.1.pep
AVVTTQRTXFFFFFFFFLVVFFFFFFFFCLSVVFYLLFLLFVFKKKNRGCGSTGRILEELLVSRIEIVRGREGFRGGGGXRIIL

SEQ ID NO: 251359 - protein, 79 aa, Zea mays
  Clone ID: MRT4577_160825C.1.pep
RTALALGLRKKHRVYVYPRRKHNNSSATKNKDWVNTRHYPITGTREELQNVLCKNSTKGETLWLFDSGYHGQKNGETDV

SEQ ID NO: 251360 - protein, 64 aa, Zea mays
  Clone ID: MRT4577_160826C.1.pep
SNLYNLEETNRAVVRSIILCLCQQHVKCKVACQFNVDVLLCVFSLYSYRLQKQARERYNLFLRM

SEQ ID NO: 251361 - protein, 86 aa, Zea mays
  Clone ID: MRT4577_160827C.1.pep
RNSMVFLTHSISSDFMALKLPLKEKNSSLCTHHAHVSFQTFFASTSGELVELNCNKPSRQQGTKASSSARLSTKAHLGPTQRRYQF

SEQ ID NO: 251362 - protein, 69 aa, Zea mays
  Clone ID: MRT4577_160828C.1.pep
IVTFSRLFLWPVERKNARQTDLVYVHLTSTLNWHATLHFTCCWHRQDNTTDYGLFVSSRLYKLNYDNLF

SEQ ID NO: 251363 - protein, 48 aa, Zea mays
  Clone ID: MRT4577_160829C.1.pep
SFFLAVHGFPRLKQKSFRTRSLKPARLPSWESHEFRAKSPTQIESVCR

SEQ ID NO: 251364 - protein, 95 aa, Zea mays
  Clone ID: MRT4577_16082C.1.pep
RKNPHEADDIDFYLHASCYPDSTPTFPTDALTTITCPYCIPARQKLMMPFVSYATYPMCKIMPPSKIDTSKNSEHVPSCCIITSMGAWSCSHHGN

SEQ ID NO: 251365 - protein, 65 aa, Zea mays
  Clone ID: MRT4577_160830C.1.pep
DKINNWRETALILTSILFAAVVFWFIGIFVPSVDRFNEESEYGLTAAERSSIRPLLGENEPRTSD

SEQ ID NO: 251366 - protein, 154 aa, Zea mays
  unsure (1)..(154): unsure at all Xaa locations
  Clone ID: MRT4577_160831C.1.pep
KIAIVFKAQGCLQMSCPHVSSCRWSTCRECGPAXESNRXRQEDQVGAGGQKARIDRHVTFRIIEGSVIVIPSGLPTALFAAEVMNLAVLCLEVIASVVDKVFLSRSNRTLQNMDRPRNLLAFGRHQEQQVVLVFAAHKHTVFLLGPQSHRVSSV

SEQ ID NO: 251367 - protein, 162 aa, Zea mays
  unsure (1)..(162): unsure at all Xaa locations
  Clone ID: MRT4577_160832C.1.pep
MEAAMRDMDSGRQVLSANLTEYQLAIAVSLLVHETVLFVLGLPLLILQRLELLDKXYKTHKRTNTFDYQNRCEWSLIMYHVCGNLAXMILSHPAFKIMGTKSCFPLADXREVDVKRLFTFVLEDNILYWKHRALHTKWLYKHDYIEHHXYATPCALTSEDAH

SEQ ID NO: 251368 - protein, 41 aa, Zea mays
  Clone ID: MRT4577_160833C.1.pep
ASTSYQYPHDIARPRRRCYLQHCDKHESPRHRRGSTCSSRV

SEQ ID NO: 251369 - protein, 180 aa, Zea mays
  Clone ID: MRT4577_160834C.1.pep
MSTEKKQLNPMRDIKVQKLVLNISVGESGDRLTRASKVLEQLSGQSPVFSKARYTVRSFGIRRNEKIACYVTIRGEKAMQLLESGLKVKEYELLRRNFSDTGCFGFGIQEHIDLGMKYDPSTGIYGMDFFVVLERAGYRVSRRRRCKARVGIHQRVTKEDAMKWFQVKYEGVILNKSHAS

SEQ ID NO: 251370 - protein, 79 aa, Zea mays
  Clone ID: MRT4577_160835C.1.pep
PPAAWQLESHHTWPRYEGDPPHPWRATSQPDLHPPSVRLVSEEHATRPTGLLTGDTELHRERCNVYYNEAMLGTIRSLR

SEQ ID NO: 251371 - protein, 69 aa, Zea mays
  Clone ID: MRT4577_160836C.1.pep
QLTSRRPPFIFFCKTAHVSEIRIYPPIYSQIHRCSHWHSSPLLKHHGSSQSCHSATIAPPAMHSCAPCS

SEQ ID NO: 251372 - protein, 84 aa, Zea mays
  Clone ID: MRT4577_160837C.1.pep
VQPPVKKLPTHLLANKLPRDTRPQAAHGSRLTEKRARDARITRGARKNFRARLGHMAELSSVNSCWPRMCLLPSFSSCPVGQEG

SEQ ID NO: 251373 - protein, 177 aa, Zea mays
  Clone ID: MRT4577_160838C.1.pep
SVRAGVWKDATKATRGDGGLCGSAQSSQSRQPAQRFGSSRDRRSGDIESKRPKSPPGGFILVEDGLRIRQGQRRTPAPDPIRPNSEEAAIKRSRKIDNDEDDSMSLPTPPPDVGAGVLWVEVLQESLGSAVDLSSAQVAATTDNRPPAHCFTFGDESTTGQLPPPKVRCSGIRRPLR

SEQ ID NO: 251374 - protein, 54 aa, Zea mays
  Clone ID: MRT4577_160839C.1.pep
GCTFYRFTDSFLLHSKFFFFLSRNLNYYPWLYIFNTVNANTLPLSIVIGSHPIS

SEQ ID NO: 251375 - protein, 108 aa, Zea mays
  Clone ID: MRT4577_16083C.1.pep
FLEKCFWGLRFLQFRSQLPVQKIKLLNPYGNPKPNQPQNFGGFGAYLTWFGYRLVGTLTAHKAHEAKTWGFLPVFPFSKPFFYREKQNNFWKKPKQLFAPWEMNTGGN

SEQ ID NO: 251376 - protein, 82 aa, Zea mays
  Clone ID: MRT4577_160840C.1.pep
MMMTRAHMGPMEGATVNEMVRRLVEDGRGGRQVHLSEAEIRQLCVEGKWVLLSKPNLPRIHAPLKMCGNRRLSIIYVCIHLG

SEQ ID NO: 251377 - protein, 144 aa, Zea mays
  unsure (1)..(144): unsure at all Xaa locations
  Clone ID: MRT4577_160841C.1.pep
NYSDTLSTQCTEAGSLWQASGPCTVITAGPADFASPVSPTGPAPPHAPMDGRGPTVLTSPTDGAATRAYPLLGARACGLAMTGALLLAVLAACTPCVFLXALSGRPLFPXCAPPAPSARCARSPWCSPPCGLLPRASGGLFPRC

SEQ ID NO: 251378 - protein, 209 aa, Zea mays
  unsure (1)..(209): unsure at all Xaa locations
  Clone ID: MRT4577_160842C.1.pep
MTPAQDIAGSISQISRSVSNSLNISTSPTLSFHSPPSTFRQPPSANSRDGRTPNLPGTSHAQQLAKQLKPFDTKDIKVLLLENVNEAGVDILRGQGYQVEAIKASVGEDELIEKIRDIHVIGIRSKTKLTKKVLEAAKNLIVIGCFCIGTNQVDLQTAASKGIAVFNSPFSNSRSVAELVISEIIALAXQLTDRSMEXHNGTWDKVSKG

SEQ ID NO: 251379 - protein, 104 aa, Zea mays
  Clone ID: MRT4577_160843C.1.pep
KFFPPPPVWGFFKFGGEKTPFFFFVFSGALPPPRVFPPWGEIFLSPKVWGGLNKGPPSFWASSGLPPRCLAPLFCSLHRIFFTNGLVSFNSPRGFVPSLSPPQP

SEQ ID NO: 251380 - protein, 64 aa, Zea mays
  Clone ID: MRT4577_160844C.1.pep
DVGYIGPLVSYRCEQVGCYHAQPKEARSLSKIRSRTRVFEATSAVLSLLNVIAQKSLPWKDDLL

SEQ ID NO: 251381 - protein, 117 aa, Zea mays
  Clone ID: MRT4577_160845C.1.pep
SRVRTPPATATSSAPPPACLPPPTSRRSSTPPAVLPTSSRSRSSPPPRSVPSAAAASTRSPPSVASSPAPSSCPFSSRPTAHTAAAVAEPSTNSPAACSTNCPPARRRLGLGAPWSQ

SEQ ID NO: 251382 - protein, 137 aa, Zea mays
  unsure (1)..(137): unsure at all Xaa locations
  Clone ID: MRT4577_160846C.1.pep
THASAHASGDMTALSGAHTVGQARCATFRDRIYNDANINATFASLRQQTCPQAGGDAXLAPIDVQTPEAFDNAYYKNLMARQGLFHSDQESFNGGSQDALVKKYSGKAAXFXXDFAXRLLRIGANQPGSRRSKGKVK

SEQ ID NO: 251383 - protein, 41 aa, Zea mays
  Clone ID: MRT4577_160847C.1.pep
FFFFFYFFFFLVGFYFFCFENNQTITFTMNHIAFQNLRFSC

SEQ ID NO: 251384 - protein, 131 aa, Zea mays
  Clone ID: MRT4577_160848C.1.pep
LAAPLPLIKFVKNVLLLAVPADPILGTRCVERSSGRQWSAPVVHSMVVAGHTNRSSAPVNLATRRSARRGTFSGYNVSRSPPPPHTQEVGDVIIGDQSISAPTSRLSSYGDTGRILLALLSKSTSPNPRFT

SEQ ID NO: 251385 - protein, 65 aa, Zea mays
  Clone ID: MRT4577_160849C.1.pep
MEAGEIGGALVFILAAAAAVAAAVSVGAVDFSRPLTGTRIRCSHPSYFSLPHPSRSDGRFTAHVI

SEQ ID NO: 251386 - protein, 49 aa, Zea mays
  Clone ID: MRT4577_16084C.1.pep
RTIRLRRYTRLLDRHSLYRRTTRTCTTVPVRCLEVYTAIRHSLSTTRYN

SEQ ID NO: 251387 - protein, 39 aa, Zea mays
  Clone ID: MRT4577_160850C.1.pep
LGVTAFLRWAKIIFLLHIELQLIHDLYWVHRENNVPLTL

SEQ ID NO: 251388 - protein, 202 aa, Zea mays
  Clone ID: MRT4577_160851C.1.pep
MAPRAGGQTYGFPIYCASWLPLAHIIKPSPSADDVVDADASPAPSSPPPPPMVVLGGGGGEGRSGVPNALVVAALDPAAAGAPPALSPEPVFRLGTEEQVPYRMAVHPRGDGVLCAFPNGCRLVRWESPEGDDPHSLVLRSDQEALVKLNDVGLQLAVSFSGEGSILATGGEDGHLRVFKWPGMETVIEEPDAKTSVKDLSF

SEQ ID NO: 251389 - protein, 198 aa, Zea mays
  Clone ID: MRT4577_160852C.1.pep
MSSDPSLHLPSPVAPPDAAAVDPQSAEPPEVMHRTRAVDFLGRRTPIVYQNDNGPCPLLAICNVLLLKNVISMNPDAEEVSQQRLLSLVAERLIDPNIAGQVKDEEYVNNREQNIADAIDLLPCLTTGIDVNVMFRKIDDFEFTRERAIFDLLDIPLYHGWIVDPQDTETATAIGSKSYNALASGLVEFSHVNHRRNN

SEQ ID NO: 251390 - protein, 42 aa, Zea mays
  Clone ID: MRT4577_160853C.1.pep
DSSIHRAQLLPYNESVDTITHGRYLYIRCDHEKILEANTRLF

SEQ ID NO: 251391 - protein, 374 aa, Zea mays
  unsure (1)..(374): unsure at all Xaa locations
  Clone ID: MRT4577_160854C.1.pep
MAVVNPTNLAIDDDDDDTPISFKRTSNSTKTARPTPSKHEGSSGGNGAPVRIPKPVSPNPQKNGATGASRPLHMKPPSSSPNHRPSGSGQPNSLAQHSSKANSIDMSKLKRPLVKDERSDDSDDEVPIGLRRKVEEKKLKGVDTRVQKTDDSDDDDKPLGLKINSSRMSSNRVNKPVLQRTVPKVEQPDEDSDDDKPLASRLPSNAGPKSGGDVSEDSEDEKPLAARFSKVAGSGNPKIASSSKGLTSDTNGQQSLGKRPLXIVIKQVQLLRRLNLQTXASAIVRREIKTDDNTPLAQRLKMGESSKGKSSAKSVFKKSPASVKKDIKKMKGKGKLKKNMKNSQFSKIMKVPPGSGGGKKWTTFEHNGVIFPSP

SEQ ID NO: 251392 - protein, 86 aa, Zea mays
  Clone ID: MRT4577_160855C.1.pep
MKLLFCCWLVLPIFNGAAYIYEAHVRRYFKIGSYVSPSYSERHRRVLQMTSLDARSADMVRVRVCLIITSGLANTSRKESKDGMGP

SEQ ID NO: 251393 - protein, 173 aa, Zea mays
  Clone ID: MRT4577_160856C.1.pep
MGVLGTLARNLDALVGPGVMLLYPLYASMRAIESPSSLDDQQWLTYWVLYSLITLFELSSWKVLQWFPLWPYMKLLLCCWLVLPVFNGAAYIYEAHVRRYFKMGTYVSPSYGERQRRVLQMMSLDARKSVERFIDTHGPDALDRIIRAAEEEAKREKPELFRVETEASLPSVG

SEQ ID NO: 251394 - protein, 156 aa, Zea mays
  Clone ID: MRT4577_160857C.1.pep
MGVLGTLARNLDALVGPGVMLLYPLYASMRAIESPSSLDDQQWLTYWVLYSLITLFELSSWKVLQWFPLWPYMKLLFCCWLVLPIFNGVAYIYEAHVRHYFKIGSYVSPSYSEHHRRVLQMTSLDVCRSVERFIDTHGPDALDRIIRAAEQEAKRT

SEQ ID NO: 251395 - protein, 83 aa, Zea mays
  Clone ID: MRT4577_160858C.1.pep
ASLRAAATTMIVHIANSTYYISLQASYKVALLVAALGIRQPMGLSIKMLSLMSELHLYDIANVTGVAADHSDCITPAYVLDFT

SEQ ID NO: 251396 - protein, 63 aa, Zea mays
  unsure (1)..(63): unsure at all Xaa locations
  Clone ID: MRT4577_160859C.1.pep
LVGSCLGTRIIYERKFLMECRNSPVAKTPPKDLPIIPVVTSATSDEPPMQASXSHLHSSPEDK

SEQ ID NO: 251397 - protein, 46 aa, Zea mays
  Clone ID: MRT4577_16085C.1.pep
KGLFIRNEQRRMKHMLRCFPLFLFQRKESFHVKCMIVPYCPLPPAV

SEQ ID NO: 251398 - protein, 48 aa, Zea mays
  Clone ID: MRT4577_160860C.1.pep
PFCPVEVNGDHVSVYVHEWLLTLTGLITDLTHLGHHLSVFILVRCNPV

SEQ ID NO: 251399 - protein, 97 aa, Zea mays
  Clone ID: MRT4577_160861C.1.pep
RSVLLLATDNGFYIALMSGRTAYTQQSYKYSDSFPFKPIYNNWRASFHVTAMSTSSNRSAIFMSRNTGLSEHFVEFDFLYPTEGIHRRLDNGLRITA

SEQ ID NO: 251400 - protein, 61 aa, Zea mays
  Clone ID: MRT4577_160862C.1.pep
PWCSPQFRCPFFLCFKTLRFLPPLIVLPLLARNNLEEGQATAFFSVLAVTSRWCVEGTVIK

SEQ ID NO: 251401 - protein, 105 aa, Zea mays
  Clone ID: MRT4577_160863C.1.pep
PASLPSPLSPSVPAHPPCPWTVAGTAAPPGTGQPRVAGSHRGARGYLRAVDLPAAWLSVPAGNLSIFQCGQGCATCYQERGPGHNTASSWPVAVAMTVLGPCATS

SEQ ID NO: 251402 - protein, 271 aa, Zea mays
  Clone ID: MRT4577_160864C.1.pep
ALPLLTLRPSLITIPPPPHLSLLSPPPPNPPRRGGDPTGRIWIDLLRHRAPQITSSTPPLSCALPRTAASRARLSSRASGRPAPTTSRPVRGSATRLLHPPHQSVVTAAASAAHSHGCNELSSPPHRLEALPLFRATSVTGHRSAASPPLPPLAAASDPPLARRSSSRRAPGRPPPRRAPGPEQEDLAKKLVIKVVPSQLEQQPLGQNKALVAPHCTPVLVDSGEGRSKRFISRFTSINPRKILLLFATLSSVGTTILIYFTLAINSKAEA

SEQ ID NO: 251403 - protein, 244 aa, Zea mays
  Clone ID: MRT4577_160865C.1.pep
RKIKTQARNVLPPPARRRKWWWWLVGVSRRLGLRFAVDRQREVDQYRCPHARQRCEQEENLPRVDGREPANESFAPPFPRINKNRCAMWSDQRLVLTQGLLLQLRRHNFDDKFFRQILLLLLAAAAAPPLHPVRTLTRQGPDHLRTPRAAFIRRLRKALDIQYRIIGSSVHARDRGALPTGSLELEADINLLSFLHFPTDSKHSTTLLSIYLSSESGVGVGRSRSVRLDIPPRRAGRRRRREEG

SEQ ID NO: 251404 - protein, 38 aa, Zea mays
  Clone ID: MRT4577_160866C.1.pep
KNLCQLLLHVLVLVKLTSPLRRSQVLLHVASWFAYMFV

SEQ ID NO: 251405 - protein, 95 aa, Zea mays
  Clone ID: MRT4577_160867C.1.pep
SESQADGHAITMHHRSYTHEAILDRAAHMCALIDQTNGRDQAIYMSRYIHMPIYIYRGHCSTELFTKHCSHTLFTGSGLSRRDLVSLHGHETEHL

SEQ ID NO: 251406 - protein, 79 aa, Zea mays
  Clone ID: MRT4577_160868C.1.pep
DGSTRPRRHVGIIGPPYCISVLKQKDDQGQDMSDRIVLKDLMTDSMTTDRGMLVGLFGPYLKIRIYREGHRRPSAGFGG

SEQ ID NO: 251407 - protein, 179 aa, Zea mays
  Clone ID: MRT4577_160869C.1.pep
GTSRPAGAAIVLSPHDAHKEPPSPVHVEFLYGSSSPLMASLLRHWNCSLGAADFLPPVSRPAPNPTFCARPSPVRPGPRCPNRGKEACARLSPPVRASPIAWLTGAPLLRARPTEPWPWRPARNRPCPCVPPVKCPLADSHASPPLAMATCYSASYRSVQQGSRRVDPPPAAVGRALSV

SEQ ID NO: 251408 - protein, 185 aa, Zea mays
  Clone ID: MRT4577_16086C.1.pep
MSSAAGEDALSSDKGKKREEDGTDGRSQRQEGVEVADGKVDLGDLYGAAAGWVEARTSCPHIGTMPPAGADDLARVPSPDSPCSRCNHPAENWLCFICKDVLCSRFINKHMLCHHQETGHCLALSFSDLSVWCFSCDSYLDVQAILELRPVYEVAHLLKFGQRPPFRSLDVQDSGTGESGSVSRA

SEQ ID NO: 251409 - protein, 175 aa, Zea mays
  unsure (1)..(175): unsure at all Xaa locations
  Clone ID: MRT4577_160870C.1.pep
VGREAGREGAMEQGEEDGDWMMEPAAGKKGGAMIDRKKRFSEEQIKSLESMFATQTKLEPRQKLQLARELGLQPRQVAIWFQNKRARWKSKQLERQYAALRDDYDALLSSYDQLKKDKQALLNQLEKLAEMLREPGGAKCGDNAGAARRDDVRLAVXGMNMKDEFVDAGGASKLY

SEQ ID NO: 251410 - protein, 56 aa, Zea mays
  Clone ID: MRT4577_160871C.1.pep
QEHMTCSYKNSTNALSIKMDYTLYTCANKLNGTHAYSTYTRATNLSDCPEYTRNWA

SEQ ID NO: 251411 - protein, 109 aa, Zea mays
  Clone ID: MRT4577_160872C.1.pep
MRLKCDHLLRIPDCLIFSVLQRHSSAPPVSDSTPSLSRRSLSLAARARLSAPSSHPCLTGAFAAERLTPRRLAIKARPASATTAPLCPSRPLTPRLPEPSQSSFAPFPP

SEQ ID NO: 251412 - protein, 67 aa, Zea mays
  unsure (1)..(67): unsure at all Xaa locations
  Clone ID: MRT4577_160873C.1.pep
FHIIIKKKNPPPPNISTLXKKITLILYAHFIPINTTIYNSCTSQDRPIHGPPTLPPRSRSWASAGRP

SEQ ID NO: 251413 - protein, 79 aa, Zea mays
  Clone ID: MRT4577_160874C.1.pep
IHSLVCGQTELLGRDIFNISLKTLIRRGGGNHLPFTIKRKIIPGQKKKRDGWHFHPPLREQPAKQGTKKFTPGEGGFGL

SEQ ID NO: 251414 - protein, 106 aa, Zea mays
  unsure (1)..(106): unsure at all Xaa locations
  Clone ID: MRT4577_160875C.1.pep
EWKMVRPDLGRIEKWVLRKAFDDEEQPFLPKXSQHVFQLLLLNLPXKIXHSDRHLKRFCLXHILYRQKEQFSDGVGYSWIDGLKAHATSNVTDKMLANVKFIFPHN

SEQ ID NO: 251415 - protein, 49 aa, Zea mays
  Clone ID: MRT4577_160876C.1.pep
EPPPSLAAINPYKFIITPINLNMGMPPGRRSWDRSITPWTSETFTGGPL

SEQ ID NO: 251416 - protein, 87 aa, Zea mays
  Clone ID: MRT4577_160877C.1.pep
MAAWVQAAATLMQPAKIGGRAPFASLPSRPSSQLACRAFGVHTWAGRMTSSLHDGGGGSRLSGPRACRGPGLPVGSTRTRRTWCRGG

SEQ ID NO: 251417 - protein, 66 aa, Zea mays
  Clone ID: MRT4577_160878C.1.pep
ASLLSSQSPERHLISSPKGSSHHRTASSSSSFSSSTELEHSISEDCMLEKNSGSGYFEHSARVAQH

SEQ ID NO: 251418 - protein, 71 aa, Zea mays
  Clone ID: MRT4577_160879C.1.pep
AISINRRRGEVLAGAPASTLDLSRQRLCQAAAAAHSRLLTRRLVHLLVFGARAAAAGRGAWSMPRGSPMWP

SEQ ID NO: 251419 - protein, 88 aa, Zea mays
  unsure (1)..(88): unsure at all Xaa locations
  Clone ID: MRT4577_16087C.1.pep
TPRGPATVRFLQAGVVPDIVFVKRIVSSNKLNLFFLYTISLHPPQIIPRVCYHGWWGVSSQKKSKKTPKKEGRPPTXSAVDPGNNSGP

SEQ ID NO: 251420 - protein, 255 aa, Zea mays
  Clone ID: MRT4577_160880C.1.pep
MATAAASQVAFSAPVGRSDRAVRSSGIQGINSLSFSNKSWIGTALACDSKAAAHSRHLCRAVQQSSKSKVSVAPLDLESAKEPPLNTYKPKGPYTATIVSVERAVGPNAPGETCHVVIDHGGNVPYWEGQSYGIIPPGENPKKPGNPQNVRLYSIASTRYGDSFDGKTASLCVRRAVYYDPETGKEDPSKNGVCSNFLCNSKPGDKIQMTGPSGKIMLLPETDPNATHIMIATGTGVAPYRGYLRRMFMEDVPNF

SEQ ID NO: 251421 - protein, 152 aa, Zea mays
  Clone ID: MRT4577_160881C.1.pep
NPDQKSGSQGPPCRDFLDGGFAPQGEKAGEKIVISIRARVGRPQMGVNKGEKFARFFRVAPKKAKLPPFVLFFGLGGEKFYPSSPPRALVLGGEDMIGGGGKQSWGPPRNRLVLTNSAFSRSFFAPPQGFFVYISYNKGVGAPLYIGVNPPG

SEQ ID NO: 251422 - protein, 54 aa, Zea mays
  Clone ID: MRT4577_160882C.1.pep
RKPGCEPQKVGQVDQVLQRQHQGIQELATMIHANSSFFLSRFGQTAATHNRPKH

SEQ ID NO: 251423 - protein, 51 aa, Zea mays
  Clone ID: MRT4577_160883C.1.pep
HRAGGKTAGLNKINLFEKIPFFGGVIIKKRAPNVPFYKIFALFVCKGAPPL

SEQ ID NO: 251424 - protein, 70 aa, Zea mays
  Clone ID: MRT4577_160884C.1.pep
SGRLSFRGFCFLNFVLPGFCFSNFVLPYRCKNAPLPYLALFMRKGKIASKKKKKKKKKKNKKKNKGRPPT

SEQ ID NO: 251425 - protein, 66 aa, Zea mays
  Clone ID: MRT4577_160885C.1.pep
VWSGYLNVVVALWELGGRELLLDWSIIRLVEVWFVFLMVFREVSLGVVVGFHKLMTVTKAWGVLVL

SEQ ID NO: 251426 - protein, 88 aa, Zea mays
  Clone ID: MRT4577_160886C.1.pep
MQIFVTTLTGNTITLEVESSDTIDNVKAKIQDKEGIPPDQQRMIFDGKQLEDGRTLADYNIQKESTLHLVIRLRSGIIEPSLMALARK

SEQ ID NO: 251427 - protein, 235 aa, Zea mays
  unsure (1)..(235): unsure at all Xaa locations
  Clone ID: MRT4577_160887C.1.pep
IISFSQIHRTGDMSLLPDSVKFASYMMEEGKKPSVAAIQGLALGGGLELTMACHARISTPEAQLGLPELTLGIIPGSGGTQRLPRLVGLPKAIQMMLQSKFIMADEGKEQGLIDALCSPDELIKMSRHCALEIANGGRPWVKPLSRTDKLGSPSEAHAALSMARQQVKKIAKNMPQYQACLDVIEEGVLFGGHSXVLKEYKVFKELVPSPTARALVHIFLAQRLSTKVPGVTDVH

SEQ ID NO: 251428 - protein, 149 aa, Zea mays
  unsure (1)..(149): unsure at all Xaa locations
  Clone ID: MRT4577_160888C.1.pep
MDAASSHDAKDGSREDDELNRANGEVPAEEMLSDDYYEQDGEDQIESLHRGGMKQSSCSTSGGAAKSGSRQMKMSKYNAYDDDEYNDENDDDSDADDDPADMDFEPDGETDKATDKDKFMDSENSDXRDDDDLELSDDEDDFVENHDSN

SEQ ID NO: 251429 - protein, 144 aa, Zea mays
  unsure (1)..(144): unsure at all Xaa locations
  Clone ID: MRT4577_160889C.1.pep
KQRRLPYSDCCATRQGEADXQLSPASGAIGSSASPDPRARTQPRPRKTVSASPDPRARTQPRPRKTVSASLDPRARTQPRPQKTVSASPDPRARTQPRPRKTVSASPDPRARTQYRPRRSHRLARPWARTDHVTGGYIITLPLA

SEQ ID NO: 251430 - protein, 39 aa, Zea mays
  Clone ID: MRT4577_16088C.1.pep
SVVAAEVLRGPAYEWDRQRLGEIMKACIIIHSMIIEDEG

SEQ ID NO: 251431 - protein, 169 aa, Zea mays
  unsure (1)..(169): unsure at all Xaa locations
  Clone ID: MRT4577_160890C.1.pep
GRDSGKQRRLRYSDCCATRQGEADSRQXPASGAIGSFASPDPRARTPPRPRKTVSASPDPRXARTQPRPRTTDSASPDLRARTQPRLRKTVSASPDPRARTQPRLRKTVSASPDPRARTQPRPQTTVSASPDPRARTQPRPRTTXLRLARPQGSDSTSTSDDGLRLARP

SEQ ID NO: 251432 - protein, 157 aa, Zea mays
  unsure (1)..(157): unsure at all Xaa locations
  Clone ID: MRT4577_160891C.1.pep
MAIMGSTSEKMYLYQPSPASGTIGSSASPDPRARTQPRLRKTVSASPDPRARTQPRLRKTVSASPDPRARTQPRLRKTASASPDPRARTQPRLRKTASASPDPRARTQPRLRKTASASPDPRARTPPRPRKTXLRLARPQGSDSTSTPEDGLRLARP

SEQ ID NO: 251433 - protein, 44 aa, Zea mays
  Clone ID: MRT4577_160892C.1.pep
PPPQGGVLPEKGPPRREGVGQNFLSIGKNVHPLDVQFPGQSPFG

SEQ ID NO: 251434 - protein, 76 aa, Zea mays
  Clone ID: MRT4577_160893C.1.pep
RAVGAVITLLKDKLPAATYKVLTDYHSTTVKLLALQAAATDDEEDCTSDRMRERKEDLEERLMPELKSLVLGTNKE

SEQ ID NO: 251435 - protein, 258 aa, Zea mays
  Clone ID: MRT4577_160894C.1.pep
ENSVARTTPTAVPPARVRLTAAESSLRRHRKLRLARPQGSDSTSTSEDGLRLARPQGSDSTSTSEDGLCLARPQGSDSTSTSEDGLRLARPQGSDSTSTSEESPPRLTSGSDRPRRRVEAVLPVEISLNAIRFARQNDLIVMDYYNSMMDNIDEVTDRRVIALGAIEKDKIKVARAYNKKVKAKSFQVGDLVWKTVLPLRSKDRKFGKWSPSWEGPYKVKHVMSGNAYLLQTLQGKDLPKALNGHFLKQYHPSMWQDA

SEQ ID NO: 251436 - protein, 69 aa, Zea mays
  Clone ID: MRT4577_160895C.1.pep
SNDSSDISNGNIIEPTWETLSANEQLQFEEHKEQPPPHAIDAAIIGSARGAPLPSSIPGAKSEPRRKSH

SEQ ID NO: 251437 - protein, 79 aa, Zea mays
  Clone ID: MRT4577_160896C.1.pep
FRYTPRARSPRGSRRLCEIHSTPACCAICRSRSSVSPRENPRAVLGEISADAFLDVVAAPHPWLLYLRTAPGADSPFLL

SEQ ID NO: 251438 - protein, 56 aa, Zea mays
  Clone ID: MRT4577_160897C.1.pep
WHSLTVCIDLMGRRTLSPVRVDASAVYGSQVLVGVCALPRVARCNLCRQKEFHVPL

SEQ ID NO: 251439 - protein, 42 aa, Zea mays
  unsure (1)..(42): unsure at all Xaa locations
  Clone ID: MRT4577_160898C.1.pep
ILFFRRHALWRDPSIRLPQLNLSLVDSCPARXXSPGNAMSAK

SEQ ID NO: 251440 - protein, 176 aa, Zea mays
  unsure (1)..(176): unsure at all Xaa locations
  Clone ID: MRT4577_160899C.1.pep
SSCRRFFFHPTPSASLSRHTSASALLQAASNCASLGAGSELSAYLDSDTVQKYDDDFNLLMXWQDHKLTYPSLSMLAKDVLIVPISTISSESDFSLTGRIIEERRRRLTSEMVEMLTCIKDWEEGNARTQHTVENKELEDSFSDLYLDDEQVPVDTLGSSQSQSQTPTDPQPHVQD

SEQ ID NO: 251441 - protein, 94 aa, Zea mays
  unsure (1)..(94): unsure at all Xaa locations
  Clone ID: MRT4577_16089C.1.pep
RLHTAAWLSSSLLAPHLRAAASFAPSWGTVVESGGASRSMPALSSFSSERGTMCVADTEPCLEVLTQSPEAQASRRATXPMYSRSHFAMLLPAT

SEQ ID NO: 251442 - protein, 115 aa, Zea mays
  Clone ID: MRT4577_1608C.1.pep
SLILEAYSPLVASITLININNSSTDSTIATSSQTTHNQITHIVLNQQHSPTVAQCLLFWTNLPSEKVTERIAAPLDRVVQCKHDVVLHHRYATSLVPPSHPHRVLRFPTRGRIVP

SEQ ID NO: 251443 - protein, 76 aa, Zea mays
  Clone ID: MRT4577_160900C.1.pep
TQANAQILQKQTGPEFTVTNNSGGGGGLLVQGNKQCERGPPNGGLKQSTIHAPAPKKLNRGKRGKKAGCPNCPAHP

SEQ ID NO: 251444 - protein, 657 aa, Zea mays
  Clone ID: MRT4577_160901C.1.pep
MTEDRAHKVADEPAASGRQRPERKKRKWDQPAEDLVSAAVTAAAVSGMPVMNFGALSAVVLPGVTAYGAATLPSVVPVPYSLPPHIAPSVLQNAAAAAQKLSQAKIPDEVIAREIVINDADPSVRYKLTKRQTQEEIQKCTNTVIITRGEYHPPNLLPDGEKPLYLHISAGSQLKDTAESIKAVDRAASMIEEILKQGTTSESISVPFSSSTGQAVRPFSASVFLGFDADPSLNITARIRGPNDQYINHIMKETGVTVVLRGKDSENLGSCHSEASQQPLHLYLTSMHLKNLEAAKVLAENLLDTVAAEFGASRISSSKVYGAVPPPQQLLAGVDTSGTKSDVHYIVGPNVLSGATHSFASTGVIAPVVAPAVTVQSGAPTYSGVPLPSNMAYPIPPANGGAFYSGYGDIYPQATPLQQLAFTLKHASSSATQAVPVTSTPTSMATKGNSILDAEMDKRSRRKFQELPVSKGPATESQNSQQGSKFVKTGLDSSGNIGSSSIAPPKKVHPGSNGMLPAEEADMPSHLSISTKMLPPPLKSMLPLPPRSMPPPPPKSMPPPPPKFPSDEFLSRNENKFFPLKEPTAPPRSFDAISVLPSERRPREPKEEKTKGTPVSDTLLKLIDYGDDDDDDDIDVTDNIPKGNPTPGSEQKPFWAV

SEQ ID NO: 251445 - protein, 196 aa, Zea mays
  unsure (1)..(196): unsure at all Xaa locations
  Clone ID: MRT4577_160902C.1.pep
KVLAENLLDTVAAEFGASRISSXKVYGAVPPPQQLLAGVDTSGTKSDVHYIVGPNVLSGATHSFASTGVIAPVVAPAVTVQSGAPTYSGVPLPSNMAYPIPPANGGAFYSGYGDIYPQATPLQQLAFTLKHASSSATQAVPVTSTPTSMATKGNSILDAEMDKRSRRKFQELPVSKGPATESQVFSLTLSEAHRWQ

SEQ ID NO: 251446 - protein, 191 aa, Zea mays
  unsure (1)..(191): unsure at all Xaa locations
  Clone ID: MRT4577_160903C.1.pep
MDECSCFLSSFQNSQQGSKFVKTGLDSSGNIGSSSIAPPKKVHPGSNGMLPPEEADMPSHLSISTKMLPPPLKSMLPLPPRSMPPPPPKSMPPPPPKFPSDEFLSRNENKFFPLKEPTAPPRSFXMQYQSCHLNDDQGSLRXKTKGTPVSDTLLKLIDYGDDDDDDDIDVTDNTPKGNPTPGSEQKPFWAV

SEQ ID NO: 251447 - protein, 723 aa, Zea mays
  unsure (1)..(723): unsure at all Xaa locations
  Clone ID: MRT4577_160904C.1.pep
MTEDRAHKVADEPAASGRQRPERKKRKWDQPAEDLVSAAVTAAAVSGMPVMNFGALPGVVLPGVTAYGAATLPSVVPVPYSLPPHIAPSVLQNAAAAAQKLSQAKIPDEVIAREIVINDADPSVRYKLTKRQTQEEIQKCTNTVIITRGKYHPPNLLPDGEKPLYLHISAGSQLKDTAERIKAVDRAASMIEEILKQGTTSESISVPFSSSTGQAVRPFSASVFLGFDADPSLNITARIRGPNXDYVILVLFDHFVTSTSQLILLITQFMCCCLSIFXRSNHKAFSGIPIWMGETAFLLLVLVLFCYYXDQYINHIMKETGVTVVLRGKDSENLGSCHSEASQQPLHLYLTSMHLKNLEAAKVLAENLLDTVAAEFGASRISSSKVYGAVPPPQQLLAGVDTSGTKSDVHYIVGPNVLSGATHSFASTGVIAPVVAPAVTVQSGAPTYSGVPLPSNMAYPIPPANGGAFYSGYGDIYPQATPLQQLAFTLKHASSSATQAVPVTSTPTSMATKGNSILDAEMDKRSRRKFQELPVSKGPATESQNSQQGSKFVKTGLDSSGNIGSSSIAPPKKVHPGSNGMLPAEEADMPSHLSISTKMLPPPLKSMLPLPPRSMPPPPPKSMPPPPPKFPSDEFLSRNENKFFPLKEPTAPPRSFDAISVLPSERRPREPKEEKTKGTPVSDTLLKLIDYGDDDDDGDIDVTDNTPKGNPTPGSEQKPFWAV

SEQ ID NO: 251448 - protein, 47 aa, Zea mays
  Clone ID: MRT4577_160905C.1.pep
RPQPATSTESHGSTPNWTVDIMIPPVSSNYRPHQYSLTAPGTIPPFI

SEQ ID NO: 251449 - protein, 64 aa, Zea mays
  Clone ID: MRT4577_160906C.1.pep
KKIPVLFGPRPRKFFWLYFSKKITNCPPQNFVGPIVKLNPFFFGKGLGPKLFFYLKSPLKKPFS

SEQ ID NO: 251450 - protein, 114 aa, Zea mays
  unsure (1)..(114): unsure at all Xaa locations
  Clone ID: MRT4577_160907C.1.pep
MLDMLWDDVVGGPRPETGLETFAGHTARPLVMNKDADGGXLXRAQSTPSTSTTSSTPSLSSTPRGVGNVCRRVLTPAXNLGVQVMVGHVCHRPQPAAPTSETGLYGDETXTATA

SEQ ID NO: 251451 - protein, 280 aa, Zea mays
  unsure (1)..(280): unsure at all Xaa locations
  Clone ID: MRT4577_160908C.1.pep
MAQAWAFLLPVLVLGSYVTSLFFPSYISNPLCGGDGGRSLFLCAQAPKDQDPSPAVSTMYKTAFHFQPAKNWMNDPSGPMYFNGIYHEFYQYNLNGPIFGDIVWGHSVSTDLVNWIGLEPALVRDTPSDIDGCWTGSVTILPGGKPIIIYTGGDIDQHQAQNIAFPKNRSDPYLREWIKAPNNPVLRPDEPGMNSIEFRDPTTGWIGPDGLWRMAVGGELNGYSAALLYKSEDFLNWTKVDHPLYSHNGSIMXXXCPXXFFAVLXGNTXGLDLSAAIPQA

SEQ ID NO: 251452 - protein, 59 aa, Zea mays
  unsure (1)..(59): unsure at all Xaa locations
  Clone ID: MRT4577_160909C.1.pep
FGAQAREARAQGPSDHRQEGAKGGSQGPGRDQPAPRAQAPXAGEKTTTQQGGRQRGARD

SEQ ID NO: 251453 - protein, 34 aa, Zea mays
  Clone ID: MRT4577_16090C.1.pep
LKQSSQLPDADWRQPNATPLFDACTARDKTRTDN

SEQ ID NO: 251454 - protein, 70 aa, Zea mays
  Clone ID: MRT4577_160910C.1.pep
QTLKFKKIGFFHPSTYIYHICMDTYNSSSPSPSTRVVSSIDYKQHNTLLFYRFSDPWADSFFYPVIPYRF

SEQ ID NO: 251455 - protein, 108 aa, Zea mays
  unsure (1)..(108): unsure at all Xaa locations
  Clone ID: MRT4577_160911C.1.pep
YRSSSEASHVHEAQLKNELSMIKRSNSEYHRKIQSLEQENEDLTIRVQTMEKGFXSKCPTLKXEPCKALXGRDNHAPIHSKIELLETKLSHAFDENKMYIAQHNIPMP

SEQ ID NO: 251456 - protein, 56 aa, Zea mays
  Clone ID: MRT4577_160912C.1.pep
CHACGQTEGVDISRCGAALPVSERRPSPTTNMTTVYTVPRVFNASASSVSRIRWWE

SEQ ID NO: 251457 - protein, 73 aa, Zea mays
  Clone ID: MRT4577_160913C.1.pep
CHQDYRGHECHSPRRKPRKCLAPQSYLGHGFIASPWKEERSGGEGRRTLARIASAQVERALELPAPLIAAAEY

SEQ ID NO: 251458 - protein, 89 aa, Zea mays
  unsure (1)..(89): unsure at all Xaa locations
  Clone ID: MRT4577_160914C.1.pep
DDEEEQPQCVETDKGCQRQSKRSRNGIDETICTMRLRQNIGQNSSPDIYNPQAGSITTATSLDFPXLWLLKLSAQYGSLRKNAMFVPHY

SEQ ID NO: 251459 - protein, 85 aa, Zea mays
  unsure (1)..(85): unsure at all Xaa locations
  Clone ID: MRT4577_160915C.1.pep
DILPPHNIKHVDTFKPTXLPSHXYIQHPYQLNPYRYYSIPKXIPDPKDINPQSSYHYYYPTSNPTMIPNPXYNLPFNLNKIHNPN

SEQ ID NO: 251460 - protein, 63 aa, Zea mays
  Clone ID: MRT4577_160916C.1.pep
THLQLQKKTMLSVPFLKASGEYPHYSKFTGDVYQSSLFASWGNSKKGPPRSPFQKFAQPEWKM

SEQ ID NO: 251461 - protein, 83 aa, Zea mays
  Clone ID: MRT4577_160917C.1.pep
QTSICLPQHQWPQAHGPPPPLFRNVVGPTPGYEGAPPRQGIGEALPRELGNCDGNGYPRPGTLSFLFVAPGNNNKLGTCGVFL

SEQ ID NO: 251462 - protein, 143 aa, Zea mays
  Clone ID: MRT4577_160918C.1.pep
QQITFQQTSKKNHQANGPTKKKTPPAKRGGEPDKGNKKEKGGEGEGHRKRKTWRKKRKKKGKKKEKRGRPLERGGEKGGGASRTERGAGPNPPGEGGRPASFPKTKPASFSGGGRTPDKMGGNRQHRKTRNIWGQQEKKRGPA

SEQ ID NO: 251463 - protein, 109 aa, Zea mays
  Clone ID: MRT4577_160919C.1.pep
MVCGELACTYAALILSDDGMTITAEKIVTIVKAANIKAETYWPALFAKLLNKRNVEDLILSRGSGGGADPVAAATPAGGAADAAAPGVEEKKAEAKEESDDDMGFRPFD

SEQ ID NO: 251464 - protein, 61 aa, Zea mays
  Clone ID: MRT4577_16091C.1.pep
PLNFKDNISDYSLKPVSNVINNFNSIIKPALIFNYPTSHTYIYNFMFQHLYFTINYFIFFI

SEQ ID NO: 251465 - protein, 64 aa, Zea mays
  Clone ID: MRT4577_160920C.1.pep
TKGGGGKHSKVHSKFQSIQTLIPQFIRGKQTGTATSDGAPREDWKLRPLCCFTPFGGGALLGRP

SEQ ID NO: 251466 - protein, 87 aa, Zea mays
  unsure (1)..(87): unsure at all Xaa locations
  Clone ID: MRT4577_160921C.1.pep
AYHNGRSFSTFDKDTDSAITNCALSYRGAFWYRNCHRVNILGRYGDNNHSQGVNWFHWKGHEHSIQFAEMKLRPSTXRHLEGRRNQA

SEQ ID NO: 251467 - protein, 76 aa, Zea mays
  unsure (1)..(76): unsure at all Xaa locations
  Clone ID: MRT4577_160922C.1.pep
PCLVAPXCLFVPPRLXXGGFASSRXVXXWXFPPXGLLLLLGLFGLLVXFCVWRXGXRXVLVLVPPLVXLVXXXAVL

SEQ ID NO: 251468 - protein, 76 aa, Zea mays
  Clone ID: MRT4577_160923C.1.pep
PELITARGDTFLYLSDSWLNCTTQCFLDRIYSICTNATGTNIANYCSLIAVVLPAVPVPGRTWILSRILHRLILHI

SEQ ID NO: 251469 - protein, 143 aa, Zea mays
  Clone ID: MRT4577_160924C.1.pep
MAVEDAPPTNLITEKSLMKDASEEPVQTNEPSEQPLKTEEIEKPQQSEKIATDTRGSEVSTEEMLELESNATKLNKDQSELEGLSSGRNPPNFQSNPNAGQRSESKGIVAEKAADHIMEAEDDVDAEHSSESQSVAPAEVRKE

SEQ ID NO: 251470 - protein, 108 aa, Zea mays
  unsure (1)..(108): unsure at all Xaa locations
  Clone ID: MRT4577_160926C.1.pep
WTHARXEKEDMPXGPXMGDMLTLRTGDLLLLSGAAKGCSGWGSGRKPVLTTCLHXPRKAPGPRTRALAXTXISRMYHSTRTRLPNATVLSARRNTNAAYNLRRVDFPT

SEQ ID NO: 251471 - protein, 143 aa, Zea mays
  unsure (1)..(143): unsure at all Xaa locations
  Clone ID: MRT4577_160927C.1.pep
SVAQVNDLIHIADGAFNRSQILAAEKAILNSMEWNLTVPTPYHFLLRFAKAAGSADEQVKIELLFCSLFCSVIILKSCVTAXQLQHTINFFGELALMDYGMVMTNPSTAAACAVYAARLTLGRSPLWTETLKHHTGLNEQQIM

SEQ ID NO: 251472 - protein, 49 aa, Zea mays
  Clone ID: MRT4577_160928C.1.pep
THSHYCKLAPSLSNPSFLIYNFRLVCCVNLSPDTNFAQKTTYFHSCPKL

SEQ ID NO: 251473 - protein, 121 aa, Zea mays
  Clone ID: MRT4577_160929C.1.pep
FYIAGHFQLIMAFRTTSAHSKTTVIVGDRSLDVADLEVIKLESLTAKDPAEMAKLLIAAENQGFFYISCDERLSGKISECLRTSYLNSHEFFTKPLDEKMKAFREDANCCYKRAGMESFGI

SEQ ID NO: 251474 - protein, 104 aa, Zea mays
  Clone ID: MRT4577_16092C.1.pep
MAEPQPRTSTSDPRSHDHHLDLKYRLPPVDTRTIIELSIDDYIYPNTNLYNVSGLPPLPNLAQDLCRLKCLKHKTGEVFTALLTTTSCDSDTKEDEQASMVMSL

SEQ ID NO: 251475 - protein, 138 aa, Zea mays
  unsure (1)..(138): unsure at all Xaa locations
  Clone ID: MRT4577_160930C.1.pep
LARYGLFISRVRGQGYDGASNMRGQFHGLQRLVLDENPYAFYIHCFAHQLQLVVVSIAKCCDSVYDFFNYILLIVNTVSASCKRKDLLLQRHHDKIVEELDSGXIFSGRGKNQETCLGRSGDTKWGPHYKTLVRIFLC

SEQ ID NO: 251476 - protein, 43 aa, Zea mays
  Clone ID: MRT4577_160931C.1.pep
LRASYRHPSSADSKINATIWRSTHSEASATPSASPPSRPTWRS

SEQ ID NO: 251477 - protein, 118 aa, Zea mays
  unsure (1)..(118): unsure at all Xaa locations
  Clone ID: MRT4577_160932C.1.pep
TKFARPQDGPAHFAGRSLVLGRSDKRAGPACXATIEEIGRDKSLIADQAKEKMDKGIETVQCNFNTXRTGQANPGMLDRIEDEDYETPGKLNSIGEIRTRDATSLLIQRYDKGSLKGY

SEQ ID NO: 251478 - protein, 50 aa, Zea mays
  Clone ID: MRT4577_160933C.1.pep
LAKVTIATCYVVSSEQNLLNALYISLKACLRLLSGRGRPFLSILTLTWTL

SEQ ID NO: 251479 - protein, 93 aa, Zea mays
  unsure (1)..(93): unsure at all Xaa locations
  Clone ID: MRT4577_160934C.1.pep
PPGRVPGAGARTGASNHAEDLGKVPVAGSMAGCIGGGPRRYFGTEVEKEEEYTXDYTYIMKHRTNPMTTDIFGDCIFEPYTLDDREDTVGAKE

SEQ ID NO: 251480 - protein, 57 aa, Zea mays
  Clone ID: MRT4577_160935C.1.pep
MPAAAAMTTRRVVLEVLRSASRDAFQVAFSFAARPPVSTMLKPAITKPLYHHHHDND

SEQ ID NO: 251481 - protein, 57 aa, Zea mays; identical to SEQ ID NO: 251480
  Clone ID: MRT4577_160936C.1.pep

SEQ ID NO: 251482 - protein, 135 aa, Zea mays
  Clone ID: MRT4577_160937C.1.pep
MQNFEQVGASSSVPVTTGSFDGSRLHDTSGHHLMTSLPSVGRPLLGTHAAEAPAISLSVGSEQTTSLLGGGTELPCTVKLRIWRHEMKNPFITLGPEACLLTIPHAVLCRCPMFLLSPKCSCVSPPLTRSCAAAS

SEQ ID NO: 251483 - protein, 266 aa, Zea mays
  Clone ID: MRT4577_160938C.1.pep
MGLCFWHSRPTFLRVYRKKSTEGFSSVPYVVALFSCTLWILYALVKTNSSPLLTINAFGCVVEAAYILLYLVYAPRGARLRALASFLLLDVAAFSLVAVVTVVLVAEPHRVRVLGSVCLAFSMAVFVAPLSVIFVVIRTKSAEFMPFTLSFFLTLSAVAWFLYGLFTKDPYVTLPNVGGFFFGCIQMVLYCCYRKRKPASVVVLPTTTAAAAVAQQLEAEMELPLAAHQHQLAVAVLPTCAAPVLAELQKLEEAMGSPRKGGVKAI

SEQ ID NO: 251484 - protein, 222 aa, Zea mays
  unsure (1)..(222): unsure at all Xaa locations
  Clone ID: MRT4577_160939C.1.pep
MNELVHACRPTFLRVYRKKSTEGFSSVPYVVALFSCTLWILYALVKTNSSPLLTINAFGCVVEAAYILLYLVYAPRGARLRALASFLLLDVAAFSLVAVVTVVLVAEPHRVRVLGSVCLAFSXAVFVAPLSVIXLARSTHICVYLIYICMHLIDVHAGPCCAYVXHQFVVIRTKSAEFMPFNXSFFLTLSAVAWFLYGLFTKDYVTVRSPNRHATHDYDLRT

SEQ ID NO: 251485 - protein, 113 aa, Zea mays
  unsure (1)..(113): unsure at all Xaa locations
  Clone ID: MRT4577_16093C.1.pep
MRLFRPNNGTDPLSLNLWDPXEGLPFGSXKENXRLLRSIPRTISDTATFGGARSDCTETPEADVSTADVPWLKKDDVKVKVEXGSALXISGKLXKVQEEXTDTWHLVDRSKGR

SEQ ID NO: 251486 - protein, 36 aa, Zea mays
  Clone ID: MRT4577_160940C.1.pep
FFFFFFFFFFFFFFFFFFFFFFFFWKPRNLRSRKRA

SEQ ID NO: 251487 - protein, 136 aa, Zea mays
  unsure (1)..(136): unsure at all Xaa locations
  Clone ID: MRT4577_160941C.1.pep
FGIRKGAELLVMVVGXSLCLSAGIAAQKTCTADIDAKCGDATSDGWEGEFFSGITKIRYEGATNKKALSXQLRGSEKGLIESRREDWKYHIRAVWRAISPCGMRHRWRRQLWGHTHDTPPAGKTRGVRVPADDAVG

SEQ ID NO: 251488 - protein, 181 aa, Zea mays
  Clone ID: MRT4577_160942C.1.pep
MIIPKKNRNEICKYLFKEGVLYAKKDYNLAKHPQIDVPNLQVIKLMQSFKSKEYVRETFSWQYYYWYLTNDGIEHLRNYLNLPSEIVPATLKKSAKPPGRPFGSGPPGDRPRGPGRFDGDRPRFGDRDGYRGGPRGAPGDFGGDKSGAPAEFQPSFRRPGFGRGGGSGSGFGAGPTSSSME

SEQ ID NO: 251489 - protein, 49 aa, Zea mays
  Clone ID: MRT4577_160943C.1.pep
QRRVRGAPGDFGGDKSGAPAEFQPSFRRPGFGRGGGSGFGAGPTSSSME

SEQ ID NO: 251490 - protein, 54 aa, Zea mays
  Clone ID: MRT4577_160944C.1.pep
EKFAAGAAKFARYNKKPPFPSGEIQTWVGLVLPGGLAKHAVSEGAKGVPKFTPS

SEQ ID NO: 251491 - protein, 172 aa, Zea mays
  Clone ID: MRT4577_160945C.1.pep
FDVFAAAEGVLYAKKDYNLAKHPQIDVPNLQVIKLMQSFKSKEYVRETFSWQYYYWYLTNDGIEHLRNYLNLPSEIVPATLKKSAKPPGRPFGSGPPGDRPRGPGRFDGDRPRFGDRDGYRGGPRGAPGAPGDFGGDKSGAPAEFQPSFRRPGFGRGGGSGFGAGPTSSSME

SEQ ID NO: 251492 - protein, 179 aa, Zea mays
  Clone ID: MRT4577_160946C.1.pep
MIIPKKNRNEICKYLFKEGVLYAKKDYNLAKHPQIDVPNLQVIKLMQSFKSKEYVRETFSWQYYYWYLTNDGIEHLRNYLNLPSEIVPATLKKSAKPPGRPFGSGPPGDRPRGPGRFDGDRPRFGDRDGYRGGPRGAPGDFGGDKSGAPAEFQPSFRRPGFGRGGGSGFGAGPTSSSME

SEQ ID NO: 251493 - protein, 50 aa, Zea mays
  Clone ID: MRT4577_160947C.1.pep
PIFVSSSSIHVNLCPKSASRFSSSRRLEPNLTMSLIRRSNVCRSLLPLPL

SEQ ID NO: 251494 - protein, 93 aa, Zea mays
  Clone ID: MRT4577_160948C.1.pep
RYEDYPLDRCIRGMERAFNLPDTRVLRLYGFRHRSLTTAKVRRVTDPAHQPARGEGGRAQHGRQVHLENISYTYLYVRVLISSFFAFSFDLSY

SEQ ID NO: 251495 - protein, 58 aa, Zea mays
  Clone ID: MRT4577_160949C.1.pep
ITRTRGPLVLTIPIKDLPDQDNQTVQKPTSVIPQPDEPGAPPHTGLPGPEPHPLVDHR

SEQ ID NO: 251496 - protein, 54 aa, Zea mays
  unsure (1)..(54): unsure at all Xaa locations
  Clone ID: MRT4577_16094C.1.pep
VFXSSTEPSVVLPGGLTDSAFLPARLTLLLYSLLNTNSLSNTLIGKTRTVKMHC

SEQ ID NO: 251497 - protein, 63 aa, Zea mays
  Clone ID: MRT4577_160950C.1.pep
MATVSAAVVTTIVARAAIARPTALWLPALRATSEMVPCSYAKDAAPLSNSGLMLVAARPNLAR

SEQ ID NO: 251498 - protein, 90 aa, Zea mays
  Clone ID: MRT4577_160951C.1.pep
SSSRAPLTPMACAPFSSRAQPLAQSLRASSFLAELLPTRAAVSVPPSSFSHGAPALGARCFCGLCSAPSSPARSLLPARPCARPNAELPM

SEQ ID NO: 251499 - protein, 178 aa, Zea mays
  unsure (1)..(178): unsure at all Xaa locations
  Clone ID: MRT4577_160952C.1.pep
MEVRGGVGQGSAARHPTTPAPSRAAARVQAGDALPLPIRHTNLIFSALFAASLAYLMRRWREKIRSSTPLHAVGLAEMLAIFGLVASLIYLLSFFGIAFVQSIVSSGDDDEDFLVGSGAPASAAAPSRQHAQAPAPCELLGSPAAAPEKMPEDDEEIVASVVXAGKVPSYALEARLGD

SEQ ID NO: 251500 - protein, 107 aa, Zea mays
  unsure (1)..(107): unsure at all Xaa locations
  Clone ID: MRT4577_160954C.1.pep
PPSIRNSYSSYTPILGRHSLHLLLSFPSSNTYNLHXPWISLINNMXLNLLLCRQLTTSILVSNTIHRQTISINIICWSSLKPSFKFHRKRLTICPYFVLTIHTTTKP

SEQ ID NO: 251501 - protein, 34 aa, Zea mays
  Clone ID: MRT4577_160955C.1.pep
KKKNKKKKKRKKKKKKKKKKKKKKKKKKKKKVCT

SEQ ID NO: 251502 - protein, 74 aa, Zea mays
  Clone ID: MRT4577_160956C.1.pep
VDGCVKIEFQNSSWCSRLGRVFGFYGQGFPFPFNMLNLFVSHAVLRPFLQASVLFITLWDLVLIPLCLFLESQV

SEQ ID NO: 251503 - protein, 95 aa, Zea mays
  unsure (1)..(95): unsure at all Xaa locations
  Clone ID: MRT4577_160957C.1.pep
EHXSRRPPLVVWCFFFVRSSFYRSSAVDNVFTVDASDTLPMLPGTKPPVAEQATTRRARGRPGYTKKQHLRRGPGPPSSQRPGLRTNARQGIAFI

SEQ ID NO: 251504 - protein, 80 aa, Zea mays
  Clone ID: MRT4577_160958C.1.pep
RTVILAVPCAQRVAESTCKSQPCKMIYVILTGVPLVFIGCLHLGRVLGSMLFHQHSNGKEKKVSDMKILIVSSHISRRQN

SEQ ID NO: 251505 - protein, 107 aa, Zea mays
  Clone ID: MRT4577_160959C.1.pep
PSQLAEPEESQGNIKELESLCNPIIAKMYQGAGADMGGSDGMDEVAPAGNGGPGPKISRVAQSVCVQSRVSAHVSARVHVSCLYLWWSPLRVSALVPFCCVATLIGY

SEQ ID NO: 251506 - protein, 98 aa, Zea mays
  Clone ID: MRT4577_16095C.1.pep
GLQSRVATDLTCRGESFPADDAYGSKRSCRGALFYANFDILLRVSHIQSFMRVYHDVTYEKPWTDVGLANLVPKAVISATKQRVLTCQDHGFCTESLY

SEQ ID NO: 251507 - protein, 60 aa, Zea mays
  Clone ID: MRT4577_160960C.1.pep
SSFTQNPSLCNECVDLLQYLGSRHELIQRRFLCDNFLSLYYPVLSSRPCILKIPSPCDHC

SEQ ID NO: 251508 - protein, 171 aa, Zea mays
  Clone ID: MRT4577_160961C.1.pep
KRKKGGLPLPPLLSQRGPAYGSKPGLSRGEAKGPNGEGSPSVSSVGGRKKREGILKPARFVFGGWEPKSGFGDMGFCEGGPLYAIVRGAESEIRALRGGVLGPPLVWVPLPWARGLGPACPLAPTQGASLFLCWAREMKTMKQIKHKTKRALLFIGINKKNKNKKQQNKNK

SEQ ID NO: 251509 - protein, 133 aa, Zea mays
  Clone ID: MRT4577_160963C.1.pep
TCWCLNRRRQHQAGRLCCSPFSFHLLQASFSLVLRASLLLYFSFFFCCVSPRGLAFPARWRNMLFFFFFFLLLEKQCCRRWFMWRKVKAAARALVVALDGVSDAVVLFLSCSRISDKYHIIISSQKKKKKKRP

SEQ ID NO: 251510 - protein, 37 aa, Zea mays
  Clone ID: MRT4577_160964C.1.pep
VDPHVVFNAQRCYHIGLRCVVRGRTLTKAPLDMRCSV

SEQ ID NO: 251511 - protein, 88 aa, Zea mays
  Clone ID: MRT4577_160965C.1.pep
RHPNANQTKTKELENNPATKYEAYMLARHAHKSSPGTTRREHDLPRRRRPKRFMTHTALPSAISCDEPMAEPAPPKSRPAGNAPPPPT

SEQ ID NO: 251512 - protein, 56 aa, Zea mays
  Clone ID: MRT4577_160966C.1.pep
MSDGTATCIDIILAIILPPLGVFFKFGCGVEFWICLILTFLGYLPGIIYAVWAITK

SEQ ID NO: 251513 - protein, 56 aa, Zea mays
  Clone ID: MRT4577_160967C.1.pep
MSDGTATCIDIILAIILPPLGVFFKFGCGVEFWICLILTFFGYLPGIIYAVWAITK

SEQ ID NO: 251514 - protein, 56 aa, Zea mays; identical to SEQ ID NO: 251513
  Clone ID: MRT4577_160968C.1.pep

SEQ ID NO: 251515 - protein, 259 aa, Zea mays
  Clone ID: MRT4577_160969C.1.pep
MPRVCGIVGSCVCVCVCRAYDRAAIKCNGKDAVTNFDPSIYAEELEPAASTGGGGDDHNHNLDLSLGSSAGNKRGSLDDGGGGGGGGDDETSDQRVPMAFDVDWQTAAPRSTKAKLDASSKQPQTQMLPPPPPAVLRVAHQLPLPFGPRHPQSQFLSNGGDPGTSGGLSLAIGGAGGGHWPPQLQHLQQQRLHGAWANGGGTSWPPPPHPHPHPHPPPPSTAATAAAASSRFPPYVVTTTQGPAGWAQKNGFHSLARPT

SEQ ID NO: 251516 - protein, 91 aa, Zea mays
  Clone ID: MRT4577_16096C.1.pep
GLQSRVATDLTCRPSLGTLGLKWFGGIEECLNPDRSKTPPIHLNPLQSVSFLEYPNQAVGGRVSQLMTRMEVRDHVEGHCFMEILTFFCKF

SEQ ID NO: 251517 - protein, 56 aa, Zea mays; identical to SEQ ID NO: 251513
  Clone ID: MRT4577_160970C.1.pep

SEQ ID NO: 251518 - protein, 62 aa, Zea mays
  Clone ID: MRT4577_160971C.1.pep
KKKKKKKKKKKKKKKKKKKKFQKKKKKKIKKKKKKKKVKKKKKKKKKKKFCLARGAFQRGNF

SEQ ID NO: 251519 - protein, 160 aa, Zea mays
  Clone ID: MRT4577_160972C.1.pep
LKVVPSMIKRFKQHLVCGFPDTTKCAMVPEVVSKDMYAYLKRNTRLVLSVESEEGGQKDGDATEPEQKVHEPSLGTKHKQAKKKATQAAISSLVVSVHPTQNQKCGKSVAAMFCKTPEEFVADWHKNKNTQSTFEACTMKGKEAKHICYDHVADFLYENK

SEQ ID NO: 251520 - protein, 144 aa, Zea mays
  unsure (1)..(144): unsure at all Xaa locations
  Clone ID: MRT4577_160973C.1.pep
LLVLVQCRDCGKQVYLGGFDTAHAAARAYDRAAIKFRGVEADINFSLEDYQDDMKQXFILLYGACSEKDTCNFFFPSSTXMGHLSKEEFVHVLRRQSTGFPRGSSKYRGVTLHKCGRWEARMGQFLGKKYVYLGLFDTEEEAAR

SEQ ID NO: 251521 - protein, 56 aa, Zea mays; identical to SEQ ID NO: 251513
  Clone ID: MRT4577_160974C.1.pep

SEQ ID NO: 251522 - protein, 105 aa, Zea mays
  unsure (1)..(105): unsure at all Xaa locations
  Clone ID: MRT4577_160975C.1.pep
TRTSIGTLNSCAGLAKYPKKGIRMDSGKKTDKKSRGXCFMXLANSTHHMPTXYTLYVDFKDVXSGGPDALYTRHKKVEACXADKARLEERLKTGENRRVFTKLRF

SEQ ID NO: 251523 - protein, 112 aa, Zea mays
  Clone ID: MRT4577_160977C.1.pep
RLFAGVGALGASAGSLLVLCCAGVSPFAVVGLGRVLRLACCSALVLVLVRAWGSGGALGGVCRPGGVLAPFCVLGFLLAAALSGFAGAAAAARLALGCVPLLPLPASFRFSR

SEQ ID NO: 251524 - protein, 67 aa, Zea mays
  Clone ID: MRT4577_160978C.1.pep
GGGRRGGEAGAAVANRDISKGERLYYDYNGSEHEYPTHHFGDVTTRRGNLRPCPPLQLQLHSCQNFV

SEQ ID NO: 251525 - protein, 158 aa, Zea mays
  Clone ID: MRT4577_160979C.1.pep
AVRVEELFLQHRRRRKDGQRRQASPADGILVGERAAAALARPIRELRQARAQRESARRRQGQRRLRGGKRRGGRARRCGEEVQGEERWLAAPWDPEERDPWPGIPQAQVVADDPRLAGLWRSGLGEGSIHDMSLVAVCSDLIRVITGGLMCASLLLSG

SEQ ID NO: 251526 - protein, 666 aa, Zea mays
  Clone ID: MRT4577_16097C.1.pep
MGAAALDFEYKRRGGMPLLGFPPGAVVDGPEVWRRDAYGFAVRPQHLQRFREYAKIYKEEEEERAHRWRDFLDRLADAANVPTTPSVSPYASTGDPASGAGQAQENSGIGIHCDDEEEGSENAEHNNNLESPKESDASAESREANGKSEDLKDVTNLDKLQEKTGSSSSTEAIKALEGLMETNGDFEELKDLNGSSEELEEENNGNMEKLVELFLDKGLLDELKPIKVESQRRVRAALSIIDKMMSSRVVKGGNGANGIHGNDGAQLTSIEEEGRTAEASDDGDPAEVESCVAEKVELGQETTHDSTGTALDGGNDGSYFPWREELESLVRGGVPMALRGEIWQAFVGVGARRIPGYYNKLLDDRTETLDEKDLVDPVVNEQGSAPRKVTQPEKWKGQIEKDLPRTFPGHPALDEDGRNALRRLLTAYARHNPSVGYCQAMNFFAGLFLLFMPEENAFWALVGVIDDYFDGYYTEEMIESQVDQLVLEEVVRERFPKLGPALVTTKDAGDAITLLQSLAGSTFDSSQLVLTACMGFQSVREMGLQELRKKYRPEILTAMEERSKDRGSWKDKKGLATKLYSFKHDPSYVCSPVKSKEGLDGSKVNGETGPANLETYLSTSSILDNDLDQGVDLQDQVSWLKVELCKLLEEKRSADLRFGLYFFLNT

SEQ ID NO: 251527 - protein, 154 aa, Zea mays
  unsure (1)..(154): unsure at all Xaa locations
  Clone ID: MRT4577_160980C.1.pep
VVAVLLVFVYSLEGADERGDLAPTLLQQLRARLLDHVVAPTPLAPPTPSSHGCPGTSALPPPSRPPPPPAXIXPSQPSRTCPPPRLPLLLRQRWPPAPAPATEPLLSWAIPPPPRPSRLXAAMTIXAPAPATEPLLSWATPPPPPPPSRLRLWR

SEQ ID NO: 251528 - protein, 416 aa, Zea mays
  unsure (1)..(416): unsure at all Xaa locations
  Clone ID: MRT4577_160981C.1.pep
MKVNTKIKLEPVMAPSSSLPRSASELPDXRHRSAPTRRTTPSPCPPHLGCPYRARRSATXTPPTXTHRRSRPPRSRTTSRSRRRRPPPRRTTRRCGRPSASXQRAARAFRRSRSRARVRTVKXRRGTGLSARXPAARSLMRRRRRLPRXPPAGAKTSSSNXPATAPWAACRTSRGSSATMTITTPRSSPRRSYTRTRCRSLLRRRRLPPPPQPRRRRRRWSRPRKERLCRRCRRLSSSPQPQPRRRRRRRWSRPRKKRLCRRRRSLSSSPPXTXRTRRRWNRPRKKRLCRRRRRRRPSXRSSSGRRGGGQVRDGXRRRSRSRRRRRTRRRRQXRFQGSRVRTALEARAESEQPRRREVARSNDVIXRRRARSCWRSVGARSRRSSAPSRLSSTPRRTATTRPPASRSTTTATSRLK

SEQ ID NO: 251529 - protein, 113 aa, Zea mays
  unsure (1)..(113): unsure at all Xaa locations
  Clone ID: MRT4577_160982C.1.pep
PCSDASPAASCAPPRSRRCSAPPLGDAAAPTPLAPPTPSSHGCPGTSALPPPSRPPPPPXXSPPSQPSRTCPPPRLPLLLRQRWPPAPAATTEPLLSWAIPPPPRPSRLRRRR

SEQ ID NO: 251530 - protein, 133 aa, Zea mays
  Clone ID: MRT4577_160983C.1.pep
MAGGFGSGGAAAGRAELYEGKITGYFILACIVGSFGGSLFGYDLGVSSGVTSMDDFLVKFFPDVYRRKQAHLHETDYCKYDNQVLTLFTSSLYFAGLVSTFGASYVTKRHGRRASIMGRGVYADPSSFCDAIC

SEQ ID NO: 251531 - protein, 137 aa, Zea mays
  unsure (1)..(137): unsure at all Xaa locations
  Clone ID: MRT4577_160984C.1.pep
LPNIQXXRXXPSXXCAXXLRGXACRXLREEPXDRQEXYHXXEVXSPPTTIDNXSRPRILGXEEGIPPXPSXXAQIFXLGXQXXEDWXRTXLXXTTXXSXKXEXHPXSLVXXRLXXEXXCXXXXVKNXXDSARTXXTL

SEQ ID NO: 251532 - protein, 93 aa, Zea mays
  Clone ID: MRT4577_160985C.1.pep
PRNFSWKNSPGTCLLTLSFDFADGKGQLKTDVQTACLTCRFFRPLFVQGICPVGDQSWGPCGLPIITGYKPFLLTLSTSIENLALILPPENAY

SEQ ID NO: 251533 - protein, 49 aa, Zea mays
  Clone ID: MRT4577_160986C.1.pep
LKKKKKKKKKKKKKKKKKKKKKKKKKKKKKKKKKKKKKKKKKKKKGGPF

SEQ ID NO: 251534 - protein, 152 aa, Zea mays
  unsure (1)..(152): unsure at all Xaa locations
  Clone ID: MRT4577_160987C.1.pep
PPPPPKGXSPPQKVGPGPVGKGPNLPIQKPQVWGPPPPPGPIAPRFQGPRGFPGAGPGGSPPPVFAPPPPLYLLVPPRAGGGPRGSGWAQPRAPGIKNKGGPXVNPNGPPPGGXAPPPRPKRGPXPPAPXVRTPPPVPMFGDFPKQTQGGGF

SEQ ID NO: 251535 - protein, 77 aa, Zea mays
  Clone ID: MRT4577_160988C.1.pep
GGQVLGGFFLGSCFFGNPPCRKVYKGCFLSKGFIWRQQKTVLPMRNRGSSFLAFTAGTDTTIKICTDVRLRPGSRPG

SEQ ID NO: 251536 - protein, 70 aa, Zea mays
  Clone ID: MRT4577_160989C.1.pep
MALLPRTARLALLSTPRTNSAAAAAGASPTCPAPYGGAPPPTMTKTAEGVDSKVDDLMNWTQMEINRTMT

SEQ ID NO: 251537 - protein, 133 aa, Zea mays
  unsure (1)..(133): unsure at all Xaa locations
  Clone ID: MRT4577_16098C.1.pep
MGKDDMIESGAGGGEFAAKDYTDPPPAPMIDAAELGSWSLYRAVIAEFIATXMTLYITEATGIGYKHHTDASPSDAYATCDGPRVLTIVWXFGGMIFNLDYCTVGISAGHINPAXPIGLFLGRKGIPGARACS

SEQ ID NO: 251538 - protein, 69 aa, Zea mays
  Clone ID: MRT4577_160990C.1.pep
RSTKEDAVQARHAQKVVLDAEDDGVGLIQSRAEAHVNGLAHPPRWKVTLTLEPRPIQHPKLERHALVAV

SEQ ID NO: 251539 - protein, 187 aa, Zea mays
  unsure (1)..(187): unsure at all Xaa locations
  Clone ID: MRT4577_160991C.1.pep
SHVYHXRGFWAMKANNGGVXPKADKPAAGAEPKVYPVDDXKPRVASTRKPNPTKLRSSITPGTVLILLRSRFMGNIVELLMHLNSGLVLVYGPFKINGIPIRGVNQTYVIATXTKGDISGVDGLKLDDKLFSIEKKHNEKKTEGDXFETENEAFKFLTECKKEDQNAVDAALIKAIEGVQELKAYLG

SEQ ID NO: 251540 - protein, 63 aa, Zea mays
  unsure (1)..(63): unsure at all Xaa locations
  Clone ID: MRT4577_160992C.1.pep
GPRNPGTRXGISPQTXAAASIFXLANXLEGPGRTXLLTTQHPEGRSTLXTLCSVSRGRHADXL

SEQ ID NO: 251541 - protein, 70 aa, Zea mays
  Clone ID: MRT4577_160993C.1.pep
MCLPRFLVINETIILNQIHHLIDYQKTGHAHDRRHRQATSTTYHDAHISSPPSTPYIQTHARGNISHRHA

SEQ ID NO: 251542 - protein, 166 aa, Zea mays
  unsure (1)..(166): unsure at all Xaa locations
  Clone ID: MRT4577_160994C.1.pep
PHIVTSSPLATDNPPALRCRLIRYLLSGDGAPCLDSFTYNELENGVLWEGYGKWVTQGPGDADIGANPSVQXGGEDESVDYTAEIVDDIGDTFPLQEQPTFDKKSFVSYIKKYIKNXTAVLEPEKRDELKKGVEGATNFLLNTLIDLQFFVGESMXDDASERFTYY

SEQ ID NO: 251543 - protein, 113 aa, Zea mays
  unsure (1)..(113): unsure at all Xaa locations
  Clone ID: MRT4577_160995C.1.pep
HSHELVYLVCLLCFTEQKVRQVCIKRGVSMGKNFCGLCKLYNHDVSKQQYHCNGYRISRXKRRENSVHCSKRGSSYTIALKNRHAYAEGAMHHDCPICFENSVETTKDISELP

SEQ ID NO: 251544 - protein, 258 aa, Zea mays
  unsure (1)..(258): unsure at all Xaa locations
  Clone ID: MRT4577_160996C.1.pep
GQVYKCDLREHVXLSPEFFGTKFDVILVDPPWEEYTHRAPGITDHTEYWTAEEIMNLKIEAIADTPSFVFLWVGDGVGLEQGRQCLKKWGFRRCEDVCWVKTNKKNAAPSLRHDSHTLLQHSKEHCLMGIKGTVRRSTDGHVIHANIDTDIIIAEEPTDGSTKKPEDMYRIIEHFALGRRRLELFGEDHNIRPGWLTLGKNLSYSNFNKEAYIRSFADKDGKVWQGGGGRNPPPEAPHLVVTTPEIESLRPKSPPAKN

SEQ ID NO: 251545 - protein, 84 aa, Zea mays
  Clone ID: MRT4577_160997C.1.pep
VVPPPRERMSRALFLSPRQKMRVGPSPEFVNAGKDRYGSTDYEEFMTHHPPPNLHGRKPLHRLKLAQYAVRSLPGISLAGGPNK

SEQ ID NO: 251546 - protein, 52 aa, Zea mays
  Clone ID: MRT4577_160998C.1.pep
SYEGAASISMPSIYVDMCSSNFTDTYTYTLINIVSPPFTYRSVHTHASSKAT

SEQ ID NO: 251547 - protein, 59 aa, Zea mays
  Clone ID: MRT4577_160999C.1.pep
LYMLQLHGGGLGISTSPVSYGRWTFWTLMTRWIRDISKDDTEVACLVEIWTMDALGLRQ

SEQ ID NO: 251548 - protein, 222 aa, Zea mays
  Clone ID: MRT4577_16099C.1.pep
GHPALDEDGRNALRRLLTAYARHNPSVGYCQAMNFFAGLFLLFMPEENAFWALVGVIDDYFDGYYTEEMIESQVDQLVLEEVVRERFPKLAKHMEFLGVQVGWITGPWFLSIFINMLPWESVLRIWDVILFEGNRIMLFRTTLALLDLYGPALVTTKDAGDAITLLQSLAGSTFDSSQLVLTACMGFQSVREMGLQELRKKYRPEILTAMEERSKDRGSWKD

SEQ ID NO: 251549 - protein, 63 aa, Zea mays
  Clone ID: MRT4577_1609C.1.pep
QQQVIASKRLDLAIVAHSSTAHSTVPQVITIQGETVCHCNSNISLCSPLMGDHNNLTKRAQLA

SEQ ID NO: 251550 - protein, 98 aa, Zea mays
  unsure (1)..(98): unsure at all Xaa locations
  Clone ID: MRT4577_160C.1.pep
LLVEGFFSLLLLVGNPFNGSFEGLRRSNQGPRPQAAVAQKKNRPARVDEGKERQENRREELVVXQKRGVGHGHGEGTEEHGCHGERREGEGIRKPRVR

SEQ ID NO: 251551 - protein, 209 aa, Zea mays
  Clone ID: MRT4577_161000C.1.pep
MSNPRVEELPDEEPKKTTVQEHEDDSSDDSEVEEVGEGQLPAGSTVIHNRNEKKARKALEKLHLTRIPGITRVTLRRPKNILFVINTPEVYKSPNSNTYIVFGEAKIEDVNAAAQQAAAAQLASQNAEDHSGHNHGEPSKAVEADEKKEDKEDDEDEEEEEEEEVDASGLEDKDIELVMTQANVSRNKAVKALKENDNDIVNSIMALSI

SEQ ID NO: 251552 - protein, 97 aa, Zea mays
  Clone ID: MRT4577_161001C.1.pep
LIKCPQDSPEIEVGYPPLLPTVDPGLFVGFPFETLLCLGPAQPMKGEPSEFYSIQCPVANLSKGQASLLRVRELLWNASSSFVPPRGVNVFASPPPQ

SEQ ID NO: 251553 - protein, 39 aa, Zea mays
  Clone ID: MRT4577_161002C.1.pep
TFYLHISRKKTWPFTCKRGIILPGAGEKPQRNYYLPPVN

SEQ ID NO: 251554 - protein, 86 aa, Zea mays
  unsure (1)..(86): unsure at all Xaa locations
  Clone ID: MRT4577_161003C.1.pep
SPPTASSYSPYIPEYVGDQHPTTSVASASHLPSLLXQLPPPPPIXPAPNHDQQPERHLQPKQQPDLWEQSEAPTVNITVPKSRQIY

SEQ ID NO: 251555 - protein, 68 aa, Zea mays
  unsure (1)..(68): unsure at all Xaa locations
  Clone ID: MRT4577_161004C.1.pep
LHTGXKCLSGSVHSCNQAEMPSCQQLTKVLVDACALDQTHRLCQNSKCSIKIMQEKNIQKRANYQYAP

SEQ ID NO: 251556 - protein, 69 aa, Zea mays
  Clone ID: MRT4577_161005C.1.pep
FPNAPGHTQFKQQHYFQNLTKHTYLKGRFDMITFVTIPLALADYIMLMIGRGVYNMYHGVGKKERSSTG

SEQ ID NO: 251557 - protein, 91 aa, Zea mays
  Clone ID: MRT4577_161006C.1.pep
RLDLFLCRQVLHHAVLEVDAVDILPIGFCSRWKSINTLILQGVVLHLKLCFDPSVSATCTSCGDGRSRRGDRTHGGRRLCGRQRCRRRAFE

SEQ ID NO: 251558 - protein, 147 aa, Zea mays
  Clone ID: MRT4577_161007C.1.pep
MARVRSTARVTRDGEEAEAAKTAPISEVMKRSGLVELGDVSDEGAPAAEVEQVGAEEGGSEDDYIVVPSKPSHLEFGRSIVTEDDMTKLMKLGYFSEAKKELIRFGGEEITLMPEKDEVVVFKSFFKAGLRFPLNEMIADVLRKFGI

SEQ ID NO: 251559 - protein, 113 aa, Zea mays
  Clone ID: MRT4577_161008C.1.pep
ENLQLLEDLVSDLSLIRRDPCLNLLGGDSIVAVGPFPLSSSIASCFFLEVDAVDILPIEFCRRRKSVNTLILQRLSLKNKLCLFQMFLTSTKQMLRVFNFVELEEFDLLVTEA

SEQ ID NO: 251560 - protein, 82 aa, Zea mays
  unsure (1)..(82): unsure at all Xaa locations
  Clone ID: MRT4577_161009C.1.pep
SARAAPPPSPAHXGGAPPPTSKRGALTPLLQSSTHSIHAREKEKRESIELDTSDERTRNIVYYIENIKTRHLPYHLSQLYYH

SEQ ID NO: 251561 - protein, 67 aa, Zea mays
  Clone ID: MRT4577_16100C.1.pep
PAMLHSSVQCVSFIPLSSEPHPAAISFGLLPCIQYSSLWPGNCSRPFSRLFFFALASINVICLGKKK

SEQ ID NO: 251562 - protein, 75 aa, Zea mays
  Clone ID: MRT4577_161010C.1.pep
PAPTPGTGHPRAGPVPRALAEEPPGERGLPCLVRTGGGPDAPARLRGGLPATGLAASVPWRCLAVQRAVLKPERR

SEQ ID NO: 251563 - protein, 118 aa, Zea mays
  unsure (1)..(118): unsure at all Xaa locations
  Clone ID: MRT4577_161011C.1.pep
HTQATYKVLFNSNNTSPGATKLFSLLILFALSTFLYHATFFPKCAQDPIAFLLPPYLTSIIASICENPTLQPFWLKQAITLSNIPLSPLLFQQSPALXLVHTLVQTMRAHQLHQLVLP

SEQ ID NO: 251564 - protein, 38 aa, Zea mays
  Clone ID: MRT4577_161012C.1.pep
MICLKKKKKKKKKKKKKKKKKKKKKKKKKKTKRGPVSS

SEQ ID NO: 251565 - protein, 60 aa, Zea mays
  unsure (1)..(60): unsure at all Xaa locations
  Clone ID: MRT4577_161013C.1.pep
GHGHDEPYYIPAQPLYNXPPPTHPPPPPXPLSAAAPPPPPPPAPPAPAPPPPPSFSLPPP

SEQ ID NO: 251566 - protein, 85 aa, Zea mays
  Clone ID: MRT4577_161014C.1.pep
WGCIGGCPLGYWRRSIVHTFMYWQVFQALYNTSLEFQPITRSSWLDNRPWVCYPYILGCHSVPPNAHFCDPNMVVLVDRQVDLLP

SEQ ID NO: 251567 - protein, 159 aa, Zea mays
  Clone ID: MRT4577_161015C.1.pep
MEALAAAFATGLVLALAAAPAGAETDPDDAAALANLYTSWNSPSQLAGWSASGGDPCGAAWQGVACSGAGVTEIKLPGTGLDGSLGYELSNLFSLKTLDLSNNNLHGSIPYQLPPNLTNLNLGSNNFNGNLPYSISNMASIEYLNLSHNSISQQLGDIF

SEQ ID NO: 251568 - protein, 104 aa, Zea mays
  Clone ID: MRT4577_161016C.1.pep
MVTKTNFKHLYWPVTHQLTPPPINGCNIRPGEIFATGTLSGPEPDPLGCLLELTWNGQKKKPVGNLTPKFLKNGNEVIFTEFSKGKGSNIGFGTCPGKVLRALP

SEQ ID NO: 251569 - protein, 65 aa, Zea mays
  Clone ID: MRT4577_161017C.1.pep
PSRDFILNEVVHVRAKHADMLFCWGGGCLVGMKLSMVQGKSVVFFLWKGRIRGLSCLCCQGFPSI

SEQ ID NO: 251570 - protein, 62 aa, Zea mays
  Clone ID: MRT4577_161018C.1.pep
MGHHEEDDRGSQDAIKAMYNAEKRGKRQVMIRTSSKEIIKFLTVMQRHGYIGESEYGDDPRA

SEQ ID NO: 251571 - protein, 56 aa, Zea mays
  Clone ID: MRT4577_161019C.1.pep
SLAPVGVLVRGSSWLWLLPCFFVPLVVLVRSLLPGALSFVFSLPVRVASPRAFRPG

SEQ ID NO: 251572 - protein, 72 aa, Zea mays
  Clone ID: MRT4577_16101C.1.pep
MQCSNRCGKKKKKKEKKKKKKKKKKKKKKKKKKKKKKKKKKKKAAHFKEPKLTNPIMQPYNYSIMSPKSNSL

SEQ ID NO: 251573 - protein, 87 aa, Zea mays
  unsure (1)..(87): unsure at all Xaa locations
  Clone ID: MRT4577_161020C.1.pep
LRGLDLNGRGFLTTANIKTLFKDVRGKXIEEGTYNLCLKNVRDEIWTMVKPENPLRILLXNLFFCKQGGTVPSLLLNFRGSWPNTTR

SEQ ID NO: 251574 - protein, 72 aa, Zea mays
  Clone ID: MRT4577_161021C.1.pep
PNQLKSSQIRRRGTRSSVSNKTQLIIVSVANQTTSQIFDAIGLLHKFNNGIYKQDLYNTNAIPKSCRTSSII

SEQ ID NO: 251575 - protein, 52 aa, Zea mays
  Clone ID: MRT4577_161022C.1.pep
LNLKFNAHLQDRMILSFKINEHLNLKTLGPHPLDLFSFFFFFFFFFFFFWTR

SEQ ID NO: 251576 - protein, 116 aa, Zea mays
  unsure (1)..(116): unsure at all Xaa locations
  Clone ID: MRT4577_161023C.1.pep
MVIKEHQQKWVIDRLDLEHNHDLRPADSNNMFSGHKYMTEMEKGVIRTLNHNNIPTRKMIAILSYLRGGMTALPYKKKDVSNYRTKLNKEVTGNDMTQALQFXRKTQKEDPNFFYR

SEQ ID NO: 251577 - protein, 104 aa, Zea mays
  Clone ID: MRT4577_161024C.1.pep
RNDVELMSKGILPCLLAPHQLATTKEGFLPSHMTWEGKKPFLTMVCFTTTNFFVKNWPTTTGKFSTFYYGVPGPLPNLEQQTFRIHFFSGEKGIADSTVKATGF

SEQ ID NO: 251578 - protein, 37 aa, Zea mays
  Clone ID: MRT4577_161025C.1.pep
PTRPGKYFPVPTPALSTYQVATLPLNAFIEIDFIPTL

SEQ ID NO: 251579 - protein, 181 aa, Zea mays
  Clone ID: MRT4577_161026C.1.pep
MDVFTKQVLPMPHQRDPNYPSSSTSSSSSSSSSTPPSRPHHRAQPQPQPHNLPQSPRPVPRTIDTTPFPTTFVQADTTSFKQVVQMLTGAEQPANNDATAAGAAAAAAANGGGAGAQAASGGPCCRPKKPSFKLYERRSSLKNLKMIAPLAMGSPPSPSPSSRRAAPEILSPSVLDIPSLR

SEQ ID NO: 251580 - protein, 77 aa, Zea mays
  Clone ID: MRT4577_161027C.1.pep
GPYFGAQLTQKAYGITFTSPAQSSNSSILSTTMLYCSWSHCLDIDTTSPMTCSCFLIVMPPVPFFAQMTTPRSPWIT

SEQ ID NO: 251581 - protein, 75 aa, Zea mays
  Clone ID: MRT4577_161028C.1.pep
RKMSSSLWLYIGTHINGDSDFSPHILMGQRVIYAHTCNTYPTCITITSKFGLKTTPGRFANPHELSLGSDYLSAR

SEQ ID NO: 251582 - protein, 109 aa, Zea mays
  Clone ID: MRT4577_161029C.1.pep
KKMFKLYKGCPHKGTKANEGAKTKRPFPYWGLPTKQAISPKPNSSPPLKKRSLVNLKKNYGGNTNGETRDGGSLSKGGNTGGIKNRRSLKRPIRGGGPHLWGGFPRGKA

SEQ ID NO: 251583 - protein, 75 aa, Zea mays
  Clone ID: MRT4577_16102C.1.pep
MARLALALLLLLTVAVCVWTGAGASHLALGLGLLCFMDRRMECRGTVAECLDQEEGLDLAAVPAYVECHRRALYC

SEQ ID NO: 251584 - protein, 114 aa, Zea mays
  unsure (1)..(114): unsure at all Xaa locations
  Clone ID: MRT4577_161030C.1.pep
MGKAGRWLRSFLSGKKDRQAAPPKDKRWSFRRPPPAAQEGTTADQHHGHXAAARSAGAGXVDELDFDQKKHAVAVAVATAAAADAAVAAAHAACVVARLSSRAEPGFVPSACLV

SEQ ID NO: 251585 - protein, 71 aa, Zea mays
  Clone ID: MRT4577_161031C.1.pep
HRIYKMPPYIMVLALRNRVVQRLVLSSSSATLSAPSHTEPAGRSLLTGCPVSTHLAAEHELDEHDHLEHAK

SEQ ID NO: 251586 - protein, 98 aa, Zea mays
  Clone ID: MRT4577_161032C.1.pep
LCHFCHEQGHLLGALPIARSVAGRGSELSLVQGAVPAAPEGESKMSPRATAPHLVYISHWSAHRSSGGSLEVIDTAKHASLMLALVSMLCMGPSVCEC

SEQ ID NO: 251587 - protein, 53 aa, Zea mays
  Clone ID: MRT4577_161033C.1.pep
RLQNDLTILKCLAWFFPFIKTIKICKVSYCSINSQKPMCSNQICLKLSSCSLF

SEQ ID NO: 251588 - protein, 114 aa, Zea mays
  Clone ID: MRT4577_161034C.1.pep
IAALNPAHGRCPPKQKTPSRKGQQQADPSIPMLALVLCPRPLAMLHCTELKLRKRLRQLGEAELPEPAAHAHRVAALDVHHLDPAAVHAHARPLLLRPAGARGPVHQRAAVGPQ

SEQ ID NO: 251589 - protein, 76 aa, Zea mays
  unsure (1)..(76): unsure at all Xaa locations
  Clone ID: MRT4577_161035C.1.pep
YIKNLTAVLDPEKADDFKKGVQGAXTKFLLSKLKDLQFFDAEPMKDDAFVVFDYYKDVPTNPTFLYLSHGLIEINC

SEQ ID NO: 251590 - protein, 98 aa, Zea mays
  Clone ID: MRT4577_161036C.1.pep
PKKKTFQGGKLTWKGRGMSKYLLITRYGIRRHQCPAQLIQGLLGPRDCWITKKHPITFPMAKQPGNKKSLGLFSKNFSCLVGCSICGSKNRVDFKPYL

SEQ ID NO: 251591 - protein, 126 aa, Zea mays
  unsure (1)..(126): unsure at all Xaa locations
  Clone ID: MRT4577_161037C.1.pep
EFPAGPTRTPTQPPRPXPYPQPHPCPGQEPYPSPCQMHGTCSVCSTPILGQCVKFLRHQCSPTATPYCSPKSQSLLKQCYQQLTQVEPQHRYQAIYGLDLQSILQHXPQSGQVAELLAAHIAHQLT

SEQ ID NO: 251592 - protein, 128 aa, Zea mays
  Clone ID: MRT4577_161038C.1.pep
GGLKPAPPQGKKIKNGPGRQSQIWAFNGRSLFFYKGGGAWGKPQGGGPAQPKKSKPFLKPNPPEGGGKKPPLVLGGQTGQPLWSFHLFGPAAPKVGKGKNPPGAFGGGGTPGPPPWLTRVKKVNPPGS

SEQ ID NO: 251593 - protein, 400 aa, Zea mays
  unsure (1)..(400): unsure at all Xaa locations
  Clone ID: MRT4577_161039C.1.pep
NMESTSTILDVHGVGWKNFSKIARDLVRCMQKIDGDYYPETLHQMFIVNAGPGFKLIWSTVKGLLDPKTSSKIHVLGTKYQSRLLEAIDASQLPEYFVDSCTCSNHGGCLRSNKGPWRYPSIWKLVXQVDVEXKLAKYLVKXPTDIGSIILRALKLPERIRVTSNAEKEADVDDLXSPVAPEDVEYPSLAPVREEARESGSTTYSGSIGMSRMADKVXDTTVDTTLXNETRQVNTEQGSLINGGLLAPAGQRAPNDAVGNDDGFLKYISRRVVAIFLEVLSFLRFFIRRRQHSENVHSHTATAPSSLANLQTIKEDRVNPCLERLDRLESMFNQLSKKPPELPEDKDRAIQDSFDRIKSIEFDLQKTKKVLHATVIKQMQMAETLEAVTEPDLRRRKFCT

SEQ ID NO: 251594 - protein, 260 aa, Zea mays
  unsure (1)..(260): unsure at all Xaa locations
  Clone ID: MRT4577_16103C.1.pep
MATSKLAAFVVLAAFLAGPAACEGASICFNGWLRTPRFCPRGSRLNRRQRGASPSGLGLGYGYYNNRRSPSYCPRAEGIVRGAVSEAVAANPGIGAGLIRLFFHDCFVRGCDASVLLTXPTPXNNDTEREGPPNKNSLRGFEVIDTAKRAIEAACPGRVSCADIVAFAARDASYFLSNRRINIRMPGGRYDGRESFANETDQLPGPFSNVTELQASFAAKGLTSDEMVTLSGAHTIGRARCMFLSSRFSEMDPAFAASSG

SEQ ID NO: 251595 - protein, 96 aa, Zea mays
  unsure (1)..(96): unsure at all Xaa locations
  Clone ID: MRT4577_161040C.1.pep
KNLVLERKISDAXASXLARQCRSGPEKERSLYAFFELATESCNPSTSMRPNARQLLQRLQEIAQRMDARTDWRLYIHTECLRGTVCEKSTTARHAG

SEQ ID NO: 251596 - protein, 542 aa, Zea mays
  Clone ID: MRT4577_161041C.1.pep
MAASASTTLFSPCALTSKLGAGHASYGSVRRANVRRRGRLSVVAVQTGPQKPSPLSSQAAAAEDEADALQKLLKREYKYGFVSDFESFSIPKGLSEATVRRISELKAEPAWMLDFRLAAYRRFLTMVEPTWSDNEYAPVDLQSICYYSAPKTKPKLNSLDEVDPELLNTFDRLGIPLSEQKRLANVAVDAVIDSTSIATTHREALMAKGVIFCSISEAIREYPDLVRRYLGSIVPPGDNYYAALNSAVFSDGSFCYVPKDTVCPMEISTYFRINDKETGQFERTLIVADERSTVSYLEGCTAPAYDSNQLHAAVVELVCENGAEIKYSTVQNWYSGDEEGRGGIYNFVTKRGRCKGRGSKISWTQVETGSAITWKYPSVELVGDDSVGEFYSVALTKDCQQADTGTKMIHKGKNSRSRIISKGISAGKSRNCYRGLVLMNSSAENAYNSSQCDSLLIGDNAAANTYPTIQVGCTSGRVEHEASTSKIGEDQLFYFQQRGVDHEKAVAAMIGGFCRSVFEHLPYEFAQEVDALMNLKLEGSVG

SEQ ID NO: 251597 - protein, 103 aa, Zea mays
  unsure (1)..(103): unsure at all Xaa locations
  Clone ID: MRT4577_161042C.1.pep
MGTNIFSLLMLLAITTCAANATIVPQCSHAPIATLLAPYLSXIIASTCENPTLQPYWLEQSISSGNIPLSXLADXQLPALSLVQTSLQTIESQQLAQLVLPLI

SEQ ID NO: 251598 - protein, 151 aa, Zea mays
  unsure (1)..(151): unsure at all Xaa locations
  Clone ID: MRT4577_161043C.1.pep
FLGARGRDAPKRNPKRDPKRKPPPGKTGGRAGKKGKKRKGAGPRGGGNGTGNTRGXLGKAGCEGGLKGGGKGPXGGQTGGKTGGKGPLFKPPNGENGQKXEGGKTGERGGVPPPKGGKRGGQGGGKGGXKGGQGGPGKGPFKRAARGEGTF

SEQ ID NO: 251599 - protein, 96 aa, Zea mays
  Clone ID: MRT4577_161044C.1.pep
EGPFTGKEPAPFFLNGGQGTQKRRALSGFSPKGRGISFLRRAARVFPFSKWGNKFSQPPCKEDPPPLLLFNYRKLLPYKNQKRRTKGKKKKKKKKK

SEQ ID NO: 251600 - protein, 167 aa, Zea mays
  unsure (1)..(167): unsure at all Xaa locations
  Clone ID: MRT4577_161045C.1.pep
MLKEMLIFTRGGLILWSYCRALGTAALKGSPINDLIHFCILXGGMRRRQLRPGRLRPSRGTFHNYCRYLVFVNEDEKILHLLYDDDLLAAARXRRSPTLXPERNSYHDYEEIFRADPPTMPMLCTEEMNEPWEDLSIRPQTALTQKNAEPKGRVGESRGVADNKGRL

SEQ ID NO: 251601 - protein, 81 aa, Zea mays
  Clone ID: MRT4577_161046C.1.pep
CVVGRRLLPLSNQVGQRCNICCSVKKIRNPILTLYLGPHALEGKPYDLKIHHFPLFYYGHHRLFLCRFLTEALCKKVEVPH

SEQ ID NO: 251602 - protein, 152 aa, Zea mays
  unsure (1)..(152): unsure at all Xaa locations
  Clone ID: MRT4577_161047C.1.pep
QLDVCYHERDDQPIDHTEGARLNGHDVQQFXTSTKWHAAPTIXVPSDCXLIVKYIVIGHTRQDXTMMNLFGIWICTLIYYTLHRFLLDIETTTYXWNTAHYLVNGGHHTHPMDSLMHVSGXTATAVXCFPFWNLAYIFEAAYTTPGLIGGSM

SEQ ID NO: 251603 - protein, 97 aa, Zea mays
  Clone ID: MRT4577_161048C.1.pep
SSFIEVLQNIPSPTFKLPDLVSNFAKKGLDVDDLVTLSAAHSFGQAHCSFVNGRLYPTVDPTMNATYAAGLKTVCPPPGSGGGDPVISNNRVTDPNA

SEQ ID NO: 251604 - protein, 288 aa, Zea mays
  unsure (1)..(288): unsure at all Xaa locations
  Clone ID: MRT4577_161049C.1.pep
SALPLPLPPPAVAAPSRALRALILSRGGAAAVCSSLRRGGTPACLVRRLCSHHSAAAAATALEEARRGRKQLGMTPALYDYLLANVRDXPILRELREETAAMRGSQMQVSPAQAQLLSMLVQILGARRCIEVGVFTGYSSLAVALALPESGHLVACERDDRCLEVAKKYYQRAGVAHKIDVKHALAADSLRSLLDCGEASSYDFAFVDADKRMYEEYYELLLKLVRVGGLIVMDNVLWYGRVADLLVDDQKTISIRNFNKKVLEDKRVDISMVPIGDGMTICRKLVDT

SEQ ID NO: 251605 - protein, 82 aa, Zea mays
  Clone ID: MRT4577_16104C.1.pep
FNHWKLFDGREEWKSGGFCFKPRYKCLRDALTSNDWDDSHDGVIVRELKFLILSCFNDVKVLVTSRMCNKVAHHLATIGSDR

SEQ ID NO: 251606 - protein, 95 aa, Zea mays
  unsure (1)..(95): unsure at all Xaa locations
  Clone ID: MRT4577_161050C.1.pep
HAYNQVAAAKLAAYLQQQXFLPFNQLSXENPGDYLXAQQLLPFNQLDXSPGGCLLHQQLLPFRLQGVANIAAFLRQQQLVAFYPQGVGNIYGLLG

SEQ ID NO: 251607 - protein, 77 aa, Zea mays
  Clone ID: MRT4577_161051C.1.pep
SSIMILWFEGEMTILACGFPFMNIRRWAVTVLLIFVLAVDVIKCGVDYGDCKLLCDLTLIPEMARTCVYYNNWKVAW

SEQ ID NO: 251608 - protein, 124 aa, Zea mays
  unsure (1)..(124): unsure at all Xaa locations
  Clone ID: MRT4577_161052C.1.pep
LHVQCTSSPSDAQLTLQQRQEFLEVIKSNLAAAQQXMKFYADTNRSFRQFQIGDMVYLKLXPFAQTSVAHRSCAKLTFKYFGPFKIVDKTGSTAYKLLLPELAVIHPVFHVSQLKQHMPNFAPV

SEQ ID NO: 251609 - protein, 55 aa, Zea mays
  Clone ID: MRT4577_161053C.1.pep
GRQGRHEVLQPNLVACFVLISHSEMLLPSSARSKNLLGAANRDQANIWVSYCLIP

SEQ ID NO: 251610 - protein, 67 aa, Zea mays
  Clone ID: MRT4577_161054C.1.pep
LYPCIDLPSFCAPLGAPVSKVYLGQIFPLASFRHLLSFCNFFVPRSGSFRFQMSTKKKQGRPPTDEL

SEQ ID NO: 251611 - protein, 57 aa, Zea mays
  Clone ID: MRT4577_161055C.1.pep
RPTSFLTCQGRARAGEASAPAQLQPITWTQRGYTGPAPGALLHATNVAMNEPEAKSG

SEQ ID NO: 251612 - protein, 92 aa, Zea mays
  Clone ID: MRT4577_161056C.1.pep
VAGQKKKEVSLVLASVHAISNLARQGDPQQLAVLLYACFIQVLVEGACTSSRLRWPSISSLLHASAYSCKWQFAMLLEIPSTYKISAAPSSR

SEQ ID NO: 251613 - protein, 500 aa, Zea mays
  Clone ID: MRT4577_161057C.1.pep
MSTFPPPPPSAARSPVARVRLDHLVPFDGAFTPAYARAVEAVAASLTRHGAAAVDLPAADAAVVRCALESARAFFCDRSGLYVYRAGRALDDGELSPACMSDAFRCLGKTARAALCAIARNLRLRSDAFSHLLDDNPLPLDEVSASELMVSFSHGHPQSSQAPMVGLRPSMAEVDRGFVTLVASDHPGIEVCNPNGHWYPADVGSSPDVLLLLTGRALSHVTAGLRLNSQYRIINNENRASLMFRLMPRANAILDCSPISAAGHCTPQIHRPISASQFMDDLRAEENVYHHLEAPPESQGNFVNEPSLRSVLSDPLSGAFLEDAMVLPCGHSFGGLMLKKVLELARCSICNGDVDEASLFPNLAAVALRAVATVVKMEDDRRLFHNAALRKRRKEVTEHMDAQRRNGSSKDSIELGLEAESPRAFKGVQYPFVVGERVLIMGNKRTPDKFVGKEAVVTSQCLNGWYLVKAVDSGESIRLQYRSLRKAGELQVQALLQSRR

SEQ ID NO: 251614 - protein, 47 aa, Zea mays
  Clone ID: MRT4577_161058C.1.pep
PKRVLYLKESPPPDVVHTIGGISSINQLNCQITFRLYKSTRKLGIAI

SEQ ID NO: 251615 - protein, 214 aa, Zea mays
  Clone ID: MRT4577_161059C.1.pep
MASKIVKQAGAPAANEFELSVAQALVDLESSVPDLKQLRALQISAAKEVELGAGKKAIVIFVPVPSLAGFHKIQARLTRELEKKFSDRHVVFVAQRRILPVPTRRTNGKQPRPRSRTLTAVHDAILDDLVYPTEIIGKRLRQKVDGSKTLKVFLDAKDATSLEYKLDTFSAVYKKLTGKAVTFEFPANAEFTNENEKEKRAYTHCMEFAFLNKN

SEQ ID NO: 251616 - protein, 66 aa, Zea mays
  Clone ID: MRT4577_16105C.1.pep
MRILRGAFIRPSKGYSRIRYKSFLGGAVPICNFLDGMSISSLFSSRSVYWGSAYNGLVPLDRVRWL

SEQ ID NO: 251617 - protein, 107 aa, Zea mays
  Clone ID: MRT4577_161060C.1.pep
KSNPSYRWMVHHGAKFRKATSIFANSLDAAKPGPAKVLRQPNPGQPSVRTIGPFVPAKDGGVSKDNPPCPSLECLYRLPAKSAIFASFGSGCTLPAEEMRELALGLE

SEQ ID NO: 251618 - protein, 48 aa, Zea mays
  Clone ID: MRT4577_161061C.1.pep
DQLEKESQHTRAFMIYKRMWKRNDHRNMAHFWTTLSLLLEILILESMN

SEQ ID NO: 251619 - protein, 62 aa, Zea mays
  Clone ID: MRT4577_161062C.1.pep
LNLQVRSFLCTYSCAFENSVLPNELIVLRNEGKDQQGHGEGLGGVEGQQGRSDQCGGPNRRL

SEQ ID NO: 251620 - protein, 90 aa, Zea mays
  unsure (1)..(90): unsure at all Xaa locations
  Clone ID: MRT4577_161063C.1.pep
MPLPRAGMNQPADHPAPKSHLVGPRDESCSLHHLGISSPHSSKTSCNLTCTTGAARLGSPHVAHTRRPSXETPLRDRLSTASSPRAATSE

SEQ ID NO: 251621 - protein, 37 aa, Zea mays
  Clone ID: MRT4577_161064C.1.pep
MLMFLPIGSLYIQHNVVRILAYRDPNSLGRCPQKRTT

SEQ ID NO: 251622 - protein, 85 aa, Zea mays
  Clone ID: MRT4577_161065C.1.pep
EEEEDSDRSKSSLRSNPGGEVVGCNCRFMDTFLVQQWPRCSPALAWVCMTRETNPPSSFPRAWNEGSSSLSLSFFHFHKLYIVCR

SEQ ID NO: 251623 - protein, 398 aa, Zea mays
  unsure (1)..(398): unsure at all Xaa locations
  Clone ID: MRT4577_161066C.1.pep
MTPLRYAASPHLQPPFLGYKSSNVDGRSRTRQQAMIAERSSSSSTSGRGGQLEDRIREQLLNAELSPSSYDTAWAAMVPAPGSLAASRYPQCVDWILRNQRSDGSWGLDPSLRKDALSSTLACVLALRTWGVGEEHVGKGLRFIGHNSTSVTDCDKCDTPAGFNVIFPGMLERGIGMGLEIPLAHADLDAILRLRDTELKSIAASGRSKAYMSYVAEGLGDLLDWDQAAMAYQRKNGSFFNSPATTAAAAIHNGYNKRAIGYLDALISESGSSSSVPAVYPRKVHSQLRMVDTLERMGISPSFSYEINAILDMTYSSWLRNDDEVMLDMATCAMAFRLLRMHGYHVSSDALAQFSEESSFHDSIEAHLNGTEGVLELYKASQVQILEEEPVLESIXSW

SEQ ID NO: 251624 - protein, 124 aa, Zea mays
  unsure (1)..(124): unsure at all Xaa locations
  Clone ID: MRT4577_161067C.1.pep
ATPGPSLSLSXHYPPGGSPAAHDDPAAGARRARAAGVRLVHGSGGGGGXGPALKAHRSTSPVCRISTLSLPLVPAWHPPRGRSCAPPSPQHTLPKKYKSNAPQARQEINRLLLIHDIRSCSYFY

SEQ ID NO: 251625 - protein, 317 aa, Zea mays
  unsure (1)..(317): unsure at all Xaa locations
  Clone ID: MRT4577_161068C.1.pep
RTRGFLVQFMLSRAGSSKIDKSLQVYLRHNRYDIFHDIMLLENQLPWMVVEAVMRFMPQPSTIPKSFVHRMRRCMMPYDHREPPEPKPFIWYEDYNPPHLLGLLRYYIVGRRCECDIDDDEEEKPEPKNMSFSASAMDLAEIGITLKANKTMQLIDXISIVRKQGLFXELCLAPLSLDRDRASYLVNMAAHEXVRGGEFWRCXEEDSAVCSYVLLLANLVYREEEVQELRERGIIQRGGGLTNEEALCFFTNFQNLRMGPRYYRIMQDIAIYRENSLIKTKIHGFLHNHKKAIAAVVTGIGAVGGIIGTLLSIKKSI

SEQ ID NO: 251626 - protein, 43 aa, Zea mays
  Clone ID: MRT4577_161069C.1.pep
RLRTQLFKLPSLYQHRFYGWSMYSDLNQNLDIVALRYSYENNT

SEQ ID NO: 251627 - protein, 103 aa, Zea mays
  Clone ID: MRT4577_16106C.1.pep
FKILEKPLLPPPFCPFFNNKGKGPPKVLGAPRCPRFVSKKFVWPLPKDVNPGKTVPLKKLHPFRPPTGFIGGGRQCGLIQISFPKKKKGEKTENTKKKKKPRE

SEQ ID NO: 251628 - protein, 111 aa, Zea mays
  unsure (1)..(111): unsure at all Xaa locations
  Clone ID: MRT4577_161070C.1.pep
RTPLKGSPPILDACTGRSRRHVAEKKREXKRKRRGRLGPLAKCTRSPLRGNHHHPRRGLIAPRYKGGVPIRPFQAGRTLLGKARFGAAPSLVYYAHAGEKGDCAPHPHSQL

SEQ ID NO: 251629 - protein, 127 aa, Zea mays
  unsure (1)..(127): unsure at all Xaa locations
  Clone ID: MRT4577_161071C.1.pep
MIEQQPPLPQPRDXMREALVKEDKEKAEDAAEDKEKAAVLKNGSRIGPMNGLVATRSISGTPPLCWEETAREIQDVSDAYRRETERPVYVIPLEPADDVELIRWCMHRLXSYFITYLMLTMLFLDII

SEQ ID NO: 251630 - protein, 54 aa, Zea mays
  unsure (1)..(54): unsure at all Xaa locations
  Clone ID: MRT4577_161072C.1.pep
GLSLPYXRSVHDLLSNKICLYYVNLRRISWKKKKKKKKKKKEKKKKKNRPTSSN

SEQ ID NO: 251631 - protein, 64 aa, Zea mays
  Clone ID: MRT4577_161073C.1.pep
GNPPLGFLPPKKPPKKQGFMFTLGCPNMGKNYSRPQFEFLGGAQKHRGVTCGTNWAGKHPQKIA

SEQ ID NO: 251632 - protein, 60 aa, Zea mays
  unsure (1)..(60): unsure at all Xaa locations
  Clone ID: MRT4577_161074C.1.pep
GGGPRGGRFRSHAARHTGPVLPGGCVGCGPGFLCGLLVCPRPGVCSCRCHNKNXXXXKRK

SEQ ID NO: 251633 - protein, 57 aa, Zea mays
  unsure (1)..(57): unsure at all Xaa locations
  Clone ID: MRT4577_161075C.1.pep
PEAGEFNAKXKELESLSNPIFAKMYQGAGADMGGSGGMDEDAPAGNGGPGPKIEEVG

SEQ ID NO: 251634 - protein, 134 aa, Zea mays
  unsure (1)..(134): unsure at all Xaa locations
  Clone ID: MRT4577_161076C.1.pep
TLPRPLGTRKRFLFLNRRAITXNXVLNAWAGYFGNKGIKVVFSNGQLALVPMKLGGMAKSVPFVATPKGRGRGLFPRPVRAGIVGFPNVGKFSLINRLLKRKMCPAEPXRPGLTGKLKWFRFGTDLKLLDSPGI

SEQ ID NO: 251635 - protein, 102 aa, Zea mays
  Clone ID: MRT4577_161077C.1.pep
DLGSSEECQSTDDVSKLRKELQETLAVYDKACANLVSVKKKIQVLSIECSEEARKVEHALEWEEALKQTVSDEKAKQLEVISEVEQAGKSFTREAYSRYKTE

SEQ ID NO: 251636 - protein, 71 aa, Zea mays
  Clone ID: MRT4577_161078C.1.pep
HDRLVNGLREAAIAIEKHAAQLCALAEDSHQPHYVKLVQALCSEHNVQLATVPNAKTLGEWSRLCKTDSEG

SEQ ID NO: 251637 - protein, 63 aa, Zea mays
  unsure (1)..(63): unsure at all Xaa locations
  Clone ID: MRT4577_161079C.1.pep
RLGHKFGLMFAKXRAFVPWFVGEGMEEGEFXRAXEDPAALEKDFQEVGAEFHXGEDGAQGVEF

SEQ ID NO: 251638 - protein, 36 aa, Zea mays
  Clone ID: MRT4577_16107C.1.pep
GRLSPKASCSGNFFKVWGKKASRFWNLKPPSFKVEG

SEQ ID NO: 251639 - protein, 110 aa, Zea mays
  Clone ID: MRT4577_161080C.1.pep
MKFNIANPSTGCQKKLEIDDDQKLRAFYDRRISQEVSGDALGEEFKGYVFKIMGGCDKQGFPMKQGVLTSGRVRLLLHMSEIGAVGFTAWQVGESCYNPNRLILSVTCTM

SEQ ID NO: 251640 - protein, 50 aa, Zea mays
  Clone ID: MRT4577_161081C.1.pep
MAASSSIASTASGTSGTPGTSGTSGTSGTAGAAGAAGTTGTCAACGSSGS

SEQ ID NO: 251641 - protein, 77 aa, Zea mays
  Clone ID: MRT4577_161082C.1.pep
REHPNGPRHPWRAQTREMHLGACAIAQMHGYYHMNDMVMDDQPTTLELQVTAHVEGPLDPKTDNHCSENGAKVDPSL

SEQ ID NO: 251642 - protein, 42 aa, Zea mays
  Clone ID: MRT4577_161083C.1.pep
RHKGVKQVYLTWSGRINIVTVNDWLCCSFHSMRNASFFLMFL

SEQ ID NO: 251643 - protein, 70 aa, Zea mays
  Clone ID: MRT4577_161084C.1.pep
RMRALRLLGIRETRSMDMIMVDNMTPTETSPVCTIGTYPLCLSPRAWVLGSDQTMLSFRCNVRMRESSLE

SEQ ID NO: 251644 - protein, 52 aa, Zea mays
  Clone ID: MRT4577_161085C.1.pep
MSAVTGHIVCSSSQRHQDEWLSMSVRLYSALQFMCGLMSANVLINPPLGKFH

SEQ ID NO: 251645 - protein, 127 aa, Zea mays
  unsure (1)..(127): unsure at all Xaa locations
  Clone ID: MRT4577_161086C.1.pep
LDIFFIIERFSPPKGXPQKKRPQXLCRPAPSSSKKKGPQGPSDPPQKSPPILKAGAPPPMKQTAAPGAEGPPQAHQQGEPQRPPRGKPGTPPGPAPNQKTLWGPPXGPPEAPPEIPPGGHGGPPTFP

SEQ ID NO: 251646 - protein, 125 aa, Zea mays
  Clone ID: MRT4577_161087C.1.pep
PIPLPLAASLPGQPLPWLVTPLSSSTPLGLLLSRSELCLHRGLCSYLFPVVWLHASSCAAFWRTVGGPGTLQHHPSHLYSLHHTWAPSLISHTAYGPPSTADCSPLTLSLLTPPTLSRLSLPRRR

SEQ ID NO: 251647 - protein, 254 aa, Zea mays
  Clone ID: MRT4577_161088C.1.pep
MASVQVSGAGVGAAAFSVKGKASTGALRLRSTLTFGEVCPARRAFRGLVVRAATVVAPKYTTLKPLADRVLVKINSSEEKTTGGILLPTTAQSRPQGGEVVAVGEGRIIGDKKVDVSIQVGAQVVYSKYAGTEVALNDHSHLVLKEDDVIGILETDDVKDMKPLNDRVLIKVAEAEDKTPGGLLLTETAKEKPSIGTVVAVGPGPLDEDGERLALSVSAGSTVLYSKYAGSEFKGADGTNYIVLRASDLMAVLS

SEQ ID NO: 251648 - protein, 58 aa, Zea mays
  Clone ID: MRT4577_161089C.1.pep
MLQSIIKNIWIPMKPYYTKVYQEIWIGMGLMGFIVYKIRAADKRSKALNTTAPAPGHH

SEQ ID NO: 251649 - protein, 36 aa, Zea mays
  Clone ID: MRT4577_16108C.1.pep
MSPSEPTREESVHMAKLAQHAARYEDMVEFMERVAR

SEQ ID NO: 251650 - protein, 91 aa, Zea mays
  Clone ID: MRT4577_161090C.1.pep
SPRLQKGGRFFWCSHPTSSPVREWSTNFPLAQFKELSLSAPMVWAQHGWCRQGAPPPPPICFGGAEDTVSFYICTVLGSVIMYVCMALSAV

SEQ ID NO: 251651 - protein, 908 aa, Zea mays
  unsure (1)..(908): unsure at all Xaa locations
  Clone ID: MRT4577_161091C.1.pep
MSGHDSKYFSTTKKGEIPELKEELNSQYKDKRKDAVKKVIAAMTVGKDVSSLFTDVVNCMQTENLELKKLVYLYLINYAKSQPDLAILAVNTFVKDSQDPNPLIRALAVRTMGCIRVDKITEYLCDPLQRCLKDDDPYVRKTAAICVAKLYDINAELVEDRGFLEALKDLISDNNPMVVANAVAALAEIQDSSVQPIFEITSHTLSKLLTALNECTEWGQVFILDSLSRYKAADAREAENIVERVTPRLQHANCAVVLSAVKIILLQMELITSTDVVRNLCKKMAPPLVTLLSAEPEIQYVALRNINLIVQKRPTILAHEIKVFFCKYNDPIYVKMEKLEIMIKLASDRNIDXVMIKLASDRNIDQVLLEFKEYATEVDVDFVRKAVRAIGRCAIKLERAAERCISVLLELIKIKVNYVVQEAIIVIKDIFRRYPNTYESIIATLCESLDTLDEPEAKASMIWIIGEYAERIDNADELLESFLETFPEEPALVQLQLLTATVKLFLKKPTEGPQQMIQAVLNNATVETDNPDLRDRAYIYWRLLSTDPEAAKDVVLAEKPVISDDSNQLDSSLLDELLANISTLSSVYHKPPESFVSRVKAAPRADDEEFADTAETGYSESPSQGVDGASPSSSAGTSSNVPVKQLAVASPPAMPDLLGDLMGMDNAIVPVDEPAAPSGPPLPVLLPSTTGQGLQISAQLTRRDGQIYYDISFENGTQGVLDGFMIQFNKNTFGLAAGEALQVTPLQPGQSTRTLLQMNPFQNISPGAPNSLLQVAVKNNQQPVWYFNDKIPLHVFFGEDGKMERAGFLEAWKSLPDDNEFTKEFPGSVISSIDATVERLAASNVFFIAKRKNANMDVLYLSAKMPRGIPFLIEVTAVVGVPGVKCAVKTPNREMVPLFFEAMEALTK

SEQ ID NO: 251652 - protein, 71 aa, Zea mays
  Clone ID: MRT4577_161092C.1.pep
TQLFFYGHILPPPFTTSAFHEEVALMHLPIQSFSHSFVDFTFELLILTSLLYLHAPRFSYTAPALTIFSHF

SEQ ID NO: 251653 - protein, 105 aa, Zea mays
  Clone ID: MRT4577_161093C.1.pep
ERASFLEAWKSLPDDNEFTKEFPGSIISSIDATVERLAASNVFFIAKRKNANMDVLYLSAKMPRGIPFLIEVTAAVGVPGVKCAVKTPNREMVPLFFEAMEALTK

SEQ ID NO: 251654 - protein, 74 aa, Zea mays
  Clone ID: MRT4577_161094C.1.pep
ARFAWSSGILNLACSSPLTPPRPRPITVHRFRRGQVPAPVHAAAVLRPVSRVIFVLFSSGQRTLPPTRGPDRMG

SEQ ID NO: 251655 - protein, 98 aa, Zea mays
  Clone ID: MRT4577_161095C.1.pep
AWKSLPDDNEFTKEFPGSVISSIDATVERLVASNVFFIAKRKNANMDVLYLSAKMPRGIPFLIEVTAVVGVPGVKCAVKTPNREMVPLFFEAMEALTK

SEQ ID NO: 251656 - protein, 151 aa, Zea mays
  Clone ID: MRT4577_161096C.1.pep
MSGHDSKYFSTTKKGEIPELKEELNSQYKDKRKDAVKKVIAALTVGKDVSSLFTDVVNCMQTENLELKKLVYLYLINYAKSQPDLAILAVNTFVKDSQDPNPLIRALAVRTMGCIRVDKITEYLCDPLQRWLKDDDPYVRKNGAICVGKLY

SEQ ID NO: 251657 - protein, 119 aa, Zea mays
  unsure (1)..(119): unsure at all Xaa locations
  Clone ID: MRT4577_161097C.1.pep
EVLLEFKEYATEVNVDSVRKAVRAVWRCAIKLERAAKRCISVLLELIKIKVNYVVQEAIIVIKDIFRRYPNTYESIIATLCESRFVKVALXSLDTLDEPEAKASMIWIIGEYAERIDNG

SEQ ID NO: 251658 - protein, 59 aa, Zea mays
  unsure (1)..(59): unsure at all Xaa locations
  Clone ID: MRT4577_161098C.1.pep
RVPAXGCRWXCLWLSLPLWXPASGCARLRAFRASLLRSSPSVLLLLXPRASCLAASFGS

SEQ ID NO: 251659 - protein, 107 aa, Zea mays
  Clone ID: MRT4577_161099C.1.pep
ETGDTSTLMEVPCRPMRRKFRIDMFECHVLSSLEDIDNWHATYCVVKSATGLIGLLVRSLNLWLHLVLVERLFFCSFFIILLFIFFILFLFFFYFFLFFIFIYFFFI

SEQ ID NO: 251660 - protein, 58 aa, Zea mays
  unsure (1)..(58): unsure at all Xaa locations
  Clone ID: MRT4577_16109C.1.pep
MSDSAEHHXGSMVSAGAAKTYPQXAGTCRKNRFIVMKNRPXQVAEVSNSKTGKHGHAK

SEQ ID NO: 251661 - protein, 78 aa, Zea mays
  Clone ID: MRT4577_1610C.1.pep
RDSTSMAAAPPAAEAALLLLLALLALAAVALRRGDALSLDLYDVTCPEVEAAVTAAVRQAMANDRTVAAGLLRMHFHD

SEQ ID NO: 251662 - protein, 93 aa, Zea mays
  Clone ID: MRT4577_161100C.1.pep
IVCKRLKTPPLGKGTFKGPPPGRWPGGLNQRHGPFGGETPKLGWGGRGKKAPGANLDFYLKGFNHKSAQGNFSPLVFKTNAKTKCVNKKVLFY

SEQ ID NO: 251663 - protein, 50 aa, Zea mays
  Clone ID: MRT4577_161101C.1.pep
TSNRGQFYSLAIVHINEHDVTSLRVLHFQPKQIHSLYYLSWCRASLLTLL

SEQ ID NO: 251664 - protein, 58 aa, Zea mays
  Clone ID: MRT4577_161102C.1.pep
IASGRPFFFCLTRRRGRKGTPCTIRMNQTVVGPTATYFISAGRTDRYMTAGGYSPLRL

SEQ ID NO: 251665 - protein, 157 aa, Zea mays
  Clone ID: MRT4577_161103C.1.pep
MLPMSNVSANPSQLTIFYGGSVCVYDSVPPEKAQAIMLIAAAAAAAAATKSSAAPTVKPPMVPAATVAPAAVVSPVLTRSPSLQSTSVATGQPQVVAEPSSRCKLQADLPIARRHSLQRFLEKRRDRVVSKAPYSTAKSSDGMESPRIEVTAEGKAQ

SEQ ID NO: 251666 - protein, 239 aa, Zea mays
  Clone ID: MRT4577_161104C.1.pep
MLYSEVDSSIQRDRTREELQVGEMDLLERNIKTETEETRKEQERKEEEAEAEAEAGERKTQEPPQQGQGLSLSLANGSGRSGMLPMSNVSANPSQLTIFYGGSVCVYDSVPPEKAQAIMLIAAAAAAAAATKSSAAPTVKPPMVPAATVAPAAVVSPVLTRSPSLQSTSVATGQPQVVAEPSSICKLQADLPIARRHSLQRFLEKRRDRVVSKAPYSTAKSSDGMESPRIEVTAEGKAQ

SEQ ID NO: 251667 - protein, 68 aa, Zea mays
  Clone ID: MRT4577_161105C.1.pep
KCQEAQFRIPFKFIIFLSSLVSVSNFNVINKMCHLSECASVYMIDLDPSAGSKTAVLLGSVLSHLDIN

SEQ ID NO: 251668 - protein, 119 aa, Zea mays
  Clone ID: MRT4577_161106C.1.pep
KKKKKENNTNTKKQKKTEQKKGKDKEKKKKKQKKKPKKRKRQKKTRRTKTRTPQKEQGAPTHQKQTARTDNRHESAANKDTRANNKDRRRNNRRHTPRDRPRVHGRVGGRVGGRVGGRV

SEQ ID NO: 251669 - protein, 52 aa, Zea mays
  unsure (1)..(52): unsure at all Xaa locations
  Clone ID: MRT4577_161107C.1.pep
LRRRXHIDAGVRFSGPARHASSEHQGQRVRTVTDVVSNREGIQSLQPQNPLI

SEQ ID NO: 251670 - protein, 80 aa, Zea mays
  Clone ID: MRT4577_161108C.1.pep
ISHCVKTYKQQPVRIHFDVTKSAGTRRTLQVSIKGEVMAIVHQYNCVKACFAGHDHKGGHSVDSHGVHHRTQEDTPRQPQ

SEQ ID NO: 251671 - protein, 67 aa, Zea mays
  Clone ID: MRT4577_161109C.1.pep
SPRENNHISTPLHNSTPLTSSTPLATIISALSNRNATTRYKTRTHIDTAIHNILNTMALMELHLTHL

SEQ ID NO: 251672 - protein, 105 aa, Zea mays
  unsure (1)..(105): unsure at all Xaa locations
  Clone ID: MRT4577_16110C.1.pep
PRHRALPHRLRARAQLVRWARRVGTTPHCMNDLTVKHCCMCHTESFNDLPNDRLLTQTNSAASRANXLPIAGVXYSSTGYTSAALSPYCDAEDIHDIDFLPDNRI

SEQ ID NO: 251673 - protein, 185 aa, Zea mays
  Clone ID: MRT4577_161110C.1.pep
MDAASIAAAAAAVATPPPGPAVTVQVPRGQVDLIDFIDWTGVECLNQDSSHSIVNALKQSLRDDEGLYLASDSDEQLLIYIPFMQVVKLHSVLFKGPEEEGPKTVKLFSNKEHMGFSNVNDYPPMDTLELSSDHLIENKPLPLNLTVFIEDNQSGSDVSKIQRIALYGTTVDTTNMKDLKKIEEH

SEQ ID NO: 251674 - protein, 151 aa, Zea mays
  Clone ID: MRT4577_161111C.1.pep
EFKVFRAAVLRACRRLVLGAPGPLYSGPGGPTFFHRGDPGVSPPVSRVLPPGPLSPFWAGCLSGPRGPRFSPLAPALLAFLAPALPPFLTRGARWVCPLRPGCSVHPPGAPRPLFWLFFLPFWPRFPAFPAMLGVFFPAFFFRVSRFRAPK

SEQ ID NO: 251675 - protein, 194 aa, Zea mays
  Clone ID: MRT4577_161112C.1.pep
MDAASIAAAAAAVATPPPGPAVTVQVPRGQVDLIDFIDWTGVECLNQDSSHSIVNALKQSLRDDEGLYLASDSDEQLLIYIPFMQVVKLHSVLFKGPEEEGPKTVKLFSNKEHMGFSNVNDYPPMDTLELSSDHLIENKPLPLKYVKFQNVRSLTVFIEDNQSGSDVSKIQKIALYGTTVDTTNMKDLKKIEEH

SEQ ID NO: 251676 - protein, 199 aa, Zea mays
  Clone ID: MRT4577_161113C.1.pep
MDAASIAAAAAAAAAAAVATPPPGPAVTVQVPRGQVDLIDFIDWTGVECLNQDSSNSIVNALKQSLRDDEGLYLASDSDEQLLIYIPFMQVVKLHSVLFKGPEEEGPKTVKLFSNKEHMGFSNVNDYPPMDTLELSSDHLIENKPLPLKYVKFQNVRSLTVFIEDNQSGSDVSKIQKVALYGTTVDTTNMKDLKKTEEH

SEQ ID NO: 251677 - protein, 262 aa, Zea mays
  Clone ID: MRT4577_161114C.1.pep
MRCAASPAPSILLPRLLSPRSRRLRLYLLRQATRQAGSSGAPLIYEEDGFQNIPPLRSSRSFWKPTQAMDAASIAAAAVATPPPGPAVTVQVPRGQVDLIDFIDWTGVECLNQDSSHNIVNALKQAMTQILKGINSYRSSLKVPLSENKNAPVIRSVPFTITPIIMYSESGSRLFGFIGAGATLGQLFGSLFAASMAWLGPFLLLFSSLLMELAALSSKGMCIDENHASAELCQIGAGQAPNTMADDEISASNGDNDEWSEV

SEQ ID NO: 251678 - protein, 99 aa, Zea mays
  Clone ID: MRT4577_161115C.1.pep
AAAAATAACCRSRHGGVQVRVGTMEEEAVRRDALSAARAAAGSTWQTQSSTSIPGIPCMTMLALTTSRPYLNVLSPLSHLLQEIPQRTLPKILIIFLSS

SEQ ID NO: 251679 - protein, 76 aa, Zea mays
  Clone ID: MRT4577_161116C.1.pep
ARLTSGAIYSASGVNFPRKASYYNSIPHDHPVDRSTNIQPRSTKQRKAGGYKPNKKRKEQVDRPHLNVWTRFWYHK

SEQ ID NO: 251680 - protein, 196 aa, Zea mays
  Clone ID: MRT4577_161117C.1.pep
MNAASTAAAAPAPAATVQVPRGQVDLIDFIDWTGVECLNQDSSHSIVNALKQSLRDDEGLYLASDSDEQLLIYIPFMQVVKLHSALFKGPEEEGPKTVKLFSNKEHMGFSNVNDYPPSDTLELSSDHLIEMGLGLSFLQNKLLPLKYVKFQNVRSLTIFIEDNQSGSDVSKIHKIALYGTTVDTTNMKDLKKIEEH

SEQ ID NO: 251681 - protein, 50 aa, Zea mays
  Clone ID: MRT4577_161118C.1.pep
DSTSFFSFFFSNPNKYTRATPRPAQLSTQDYSQVPLDLCVGSLPIHGQTE

SEQ ID NO: 251682 - protein, 90 aa, Zea mays
  Clone ID: MRT4577_161119C.1.pep
PTRPGIIGACFSEAKTCQQSVEIRRKLASLILKSREDRIGLLKMEEEILQDIECLGKKLQMQELLFSHNNYIFIRLLLGVAIFFILSKFI

SEQ ID NO: 251683 - protein, 212 aa, Zea mays
  unsure (1)..(212): unsure at all Xaa locations
  Clone ID: MRT4577_16111C.1.pep
MPPPPRRLPPRLAHRRCGIAAASTLLFLLLLLSAPPTIAQHHRHHATGDGVVISQADYQGLQAIKHDLSDPYGFLRSWNDSGLAACSGAWAGVKCVLGSVVAITLPWRGLGGMLSARGLGQLVRLRRLSLHDNAIAGPVPSSLGFLPDLRGVYLFNNRFSGTLPASIGGVRXLQAFDASNNRLHXAVPAAVANSTRLMRLNLSRNALSDAET

SEQ ID NO: 251684 - protein, 57 aa, Zea mays
  Clone ID: MRT4577_161120C.1.pep
HHVFGQLHHVRVPKGDQVVGVSQGAEDVVHQLHVEILTIAALVVQQVLLGVSVLDLD

SEQ ID NO: 251685 - protein, 32 aa, Zea mays
  unsure (1)..(32): unsure at all Xaa locations
  Clone ID: MRT4577_161121C.1.pep
TVXTYFFFFITDLIKGWGKRQTFLIICIIRQY

SEQ ID NO: 251686 - protein, 113 aa, Zea mays
  Clone ID: MRT4577_161122C.1.pep
MARGETQQTKVHFKGSDDFVIFIDDVETYQKWKTDKSVPLAHFISSFKIFCTHGQGAQGTLDAASKAALENEFGTSVDDDVIKQILEKGETQNTEFPERQGSKNDSKGPMASH

SEQ ID NO: 251687 - protein, 60 aa, Zea mays
  unsure (1)..(60): unsure at all Xaa locations
  Clone ID: MRT4577_161123C.1.pep
AIRNAEELGKLLVGVTIAHGGXLPNINPVLLPKKTAEKASSGGSKEAKSPKKAAKSPKKA

SEQ ID NO: 251688 - protein, 104 aa, Zea mays
  Clone ID: MRT4577_161124C.1.pep
EVPWRDAGDLGLGAAAATLERRVELAAPAIGSRRVPATEAAPAVAPAVLYARISVRLSETAVPVSRRRADASARQHGGESGCEWSVGDDDAFAAVACAVDDAFE

SEQ ID NO: 251689 - protein, 102 aa, Zea mays
  Clone ID: MRT4577_161125C.1.pep
VVTTRRDIEVCRTRGHILVIGEYHVLIVLRAVSKTNFRFGQSLMEHLGVEVNISFDVRPPCPHLTRHGGYRCKRGCEESSVMGSERGSPMSRMCLQYRAHSG

SEQ ID NO: 251690 - protein, 166 aa, Zea mays
  Clone ID: MRT4577_161127C.1.pep
MRLEKCWFCSSTIYPGHGIQFVRNDAKVFRFCRSKCHKNFKMKRNPRKVKWTKAYRHLHGKDMTQDTTFEFERKRNRPERYDRNLTEQTLKAIPLITKIRHDRMGKHISNRHKPGKRKEMEKDSKELEQDIGMLPKKLIINHLAAEKTKVKVEVVQQQTEDNAMEE

SEQ ID NO: 251691 - protein, 157 aa, Zea mays
  Clone ID: MRT4577_161128C.1.pep
MKRNPRVTSSRRKCRKAHFTAPSSVRRVLMSAALSSELRHKYNVRSIPIRKDDEVQVVRGTYKGREGKVVQVYRRRWVIHVERITREKVNGSTVNVGIHPSKVIVTKLKLDKDRKALLDRKARGRAADKAKGKFTAEDVAAAAGGATATGASLQEID

SEQ ID NO: 251692 - protein, 76 aa, Zea mays
  Clone ID: MRT4577_161129C.1.pep
LCGARGGQSQTRLLSLLLLLQTCPTHDTTPSSPPCRHDSTLHQVLRDELTRLYSKTCRVMRSYSTDDSRMRRDWYM

SEQ ID NO: 251693 - protein, 250 aa, Zea mays
  unsure (1)..(250): unsure at all Xaa locations
  Clone ID: MRT4577_16112C.1.pep
PRGRPGFEQCVHPLIDALFSGYNATVLAYGQTGSGKTYTMGTNYSGEENCGGIIPQVMDTIFRKVDTSKDGSEFLIRASFIEIFKEDVFDLLDANQAAVRLDAGSMAKASAPGRVPIQIRETATGGITLAGVTEAXEVKSKEEMASYLTRGXSSSRATASTNMNMQSSRSHAIFTXCVEQKRTSGTSDKSANGDYDILSSKFHLVDLAGSXRAKRTGADGHRXLKEGIPINKGLLALGNVISALGDEKXK

SEQ ID NO: 251694 - protein, 45 aa, Zea mays
  Clone ID: MRT4577_161130C.1.pep
KYESMDSRLILVAVSHSWSHQIGARLILQTSSINFLLAGLIAVML

SEQ ID NO: 251695 - protein, 80 aa, Zea mays
  Clone ID: MRT4577_161131C.1.pep
TTVAVQEKGTAEFSASVGALELLFVEEYRLTLALQDLHGVGGVVDTVLLLELSVRRCASSGIRVVSVCSEKSHELGLMFG

SEQ ID NO: 251696 - protein, 742 aa, Zea mays
  unsure (1)..(742): unsure at all Xaa locations
  Clone ID: MRT4577_161132C.1.pep
MEVVALVSGGKDSCFAMMRCMDYGHKVVALANLIPLDDTVDELDSYMYQTVGHQIVVSYAKCMGLPLFRRRIRGSTRDQGLRYSVTAGDEVEDMFALLSEVKRRIPSISAVSSGAIASDYQRLRVESVCSRLGLVSLAYLWKQDQTLLLEEMIRRGIVAIIVKVAALGLKPSSHLGKELAELKCHLLQMNENYGINVCGEGGEYETLTLDCPLFRNARIILDDSEVILHSADSIASVGILHPRAFHLEQKPDSSDRIGDGSAVQESSSCVYEVDEVTTHDDVGEKQALGPAVDAYTNIDLCISKTGNNLRSMSCWIQDPSRASEGLKADLIAVLSRIENQLKEEGLGWVNVLYVHLYISSMKEFGLANEVYVSFITEKKCYLGVPSRSTIELPLVQAGLGKAYVEVLVSNEVVKKVLHVQSISCWAPSCIGPYSQATLYEDILYMAGQLGLDPPTMKLCLGGPRAELELALQNSEAVANAFSCSIYISAIHFLVYCSAQLTSSEKEEIEQTLKSSYITRLDRSKGGSYPTVLYVFASDLPKGARVEVKPILYVPSTDDWVAAEETETGVPLPAPSKTWTDCTAPYSALRDSCCQVHTTGGRICSAVVSITDDIASKICSAAGQLHHGEENLKIMARFCAFQIAKTLADNRFSWDSVTMLRLYYSVDLAVAADAVSGAFXRALAELAQDNPSMRTDVPFYNVVPVAGAGRSACANDIMACELLASNVSSAKSIPAEPFAVTPA

SEQ ID NO: 251697 - protein, 62 aa, Zea mays
  Clone ID: MRT4577_161133C.1.pep
HGVPNFLRLSKYILITYVNLSTCGMILSVLCFFWLLSDCSFIVLINTVSIFKLLGELLKFDS

SEQ ID NO: 251698 - protein, 831 aa, Zea mays
  unsure (1)..(831): unsure at all Xaa locations
  Clone ID: MRT4577_161134C.1.pep
AFSGAEIKDQLLRMKLQDTAEEIAKRLGQCPLAAKVLGSRMCRRKDIAEWKAALKLGDLSDPFTSLLWSYEKLDPCLQRCFLYCSLFPKGHGYRPEELVHLWVAEGFIGSCNLSRRTLEEVGMDYFNDMVSVSFFQXMLWNLKKLRVLSLSFHNSNKLPKSVGELKHLRYLDLNRTSVFELPRSLCALWHLQLLQLNGMVERLPNKVCNLSKLRYLRGYKDQIPNIGKLTSLQQIYDFSVQKKQGYELRQLKDLNELGGSLHVQNLENVIGKDEALASKLYLKSRLKELILEWSSENGMDAMNILHLDVLEGLRPPPQLSKLTIEGYRSDTYPGWLLERSYFENLESFELSNCSLLEGLPPDTELVRNCSRLRINIVPNLKELSNLPVGLTDLSIDYCPLLMFITNNELGQHDLRENIIMKADDLASKLALTWEVDSGKVRRVLSKDYSSLKQLMTLMMDDDISKHLQIIESGLEEREDKVWMKENIIKAWLFCHEQRIRFIYGRTMDMPLVLPSRLCELSLSSCSITDEALAICLGGLTSLSNLKLKYNMALTTLPSEKVFEHLTKLDTLVVTGCLCLKSMGGLRAAPSLSFFYCSDCPFLELARGAELMPLNLDGDLHIRGCILAADSFINGLPHLKHLSFDVCRSSPSLSIGHLTSLESLRLNGLPDLYSVEGLSALHLKYLTLQDVANLTVKCISQFRVQESLTVSTSVLLNHMLMAEGFTVPPNLDLSYCKEPSVSFEEPANLSSVKCLGFWYCKTESLPRNLKSLSSLESLSIGCCPNIASLPDMPSSLQRISIVNCPVLKKNCQEPDGESWPKISHLRRTHINC

SEQ ID NO: 251699 - protein, 170 aa, Zea mays
  Clone ID: MRT4577_161135C.1.pep
EIACMTFAFGPNRSRRAFFKDSILQEEADPRATISPQHLIISSSLYNEKIHVAKSLRAQGGITLSCMRTSGPCHRESSACGAFCCLDPWPRSIAMAVSVSGFGPGVEEAAPGTPLRCVYHLAEARRCPRFLSSETASSSERQGPRQGGRGVVMMRGISSWRVMVAPGPAG

SEQ ID NO: 251700 - protein, 49 aa, Zea mays
  Clone ID: MRT4577_161136C.1.pep
TKKKKKKKKKKKKKKKKKKKKKKKKKPLLAKGAKKFNELKKKKKNFPLI

SEQ ID NO: 251701 - protein, 503 aa, Zea mays
  unsure (1)..(503): unsure at all Xaa locations
  Clone ID: MRT4577_161137C.1.pep
LGPRGGGILLLSTLTLLWLNHMVENLPDKLCNLRKLRHLGAYSSYTHDFVNEKPICQILNIGKLTSLQHIYVFSVQKKXGYELRQLKDLNELGGSLRVKNLENVIGKDEAVESKLYLKSRLKELALEWSSENGMDAMDILEGLRPPPQLSKLTIEGYRSDTYPGWLLERSYFENLESFELSNCSLLEGLPPDTELLRNCSRLRINSVPNLKELSNLPVGLTDLSIDCCPLLMFITNNELGQHDLRENIIMKADDLASKLAXXWEVDSGXLXRVLSKDYSSLKQLMTLMMDDEISKHLQIXLKXGLEESEIXYWRKXNIIKAWLFCHEQRIRVIYGRTMELPLVLPFGLVSIVLSSCSITDEALAICLGGLTSLTTLRLEYNMALSALPSEEVFEHLTKLDLLDVRGCWCLRSLGGSHAAPSLSRLYCIDCPSLDLAGAVESMSFNLAGDLYICGCILAADSFINGLPHLKSLSIACCRSFPSLSIGHLTSLESLSLLRLPDLC

SEQ ID NO: 251702 - protein, 403 aa, Zea mays
  unsure (1)..(403): unsure at all Xaa locations
  Clone ID: MRT4577_161138C.1.pep
IHLKNMDDTEFLALFKHHAFSGAEIKDQLLRTKLEDTAVEIAKRLGQCPLPAKVLGSQLCRKKDIAEWKAALKLGNLSDPFTSLLWSYEKLDPRLQRCFLYCSLFPKGHRYGPEELVHLWVAEGFVGSCNLSRRTLEEVGMDYFNDMVSVSFFQWYGWYYVMHDILHDFAESLSREDCFRLEDDNVTEIPCTVRHLSVRVESMQKHKEIIYKLHHLRTVICIDSLMDNASIIFDQMLWNLKKLRVLSLSFHNSNKLPKSVGELKHLRYLDLNRTSVFELPRSLCALWHLQLLQLNGMVERLPNKVCNLSKLRYLRGYKDQIPNIGKLTSLQQIYDFSVQKKQGYELRQLKDLNELGGSLHVQNLENVIGKDEALASKLYLKSRLXELILEWSSENGMDAMNIL

SEQ ID NO: 251703 - protein, 53 aa, Zea mays
  Clone ID: MRT4577_161139C.1.pep
IGFLFLNLTFNLMGRGKTIMPCQKNGTYSFIIIPEQKGLTKQGGGTLPTPLAY

SEQ ID NO: 251704 - protein, 70 aa, Zea mays
  Clone ID: MRT4577_16113C.1.pep
ASITRPDLSLIGCATNFPLQPMYSFKDALRPGINQLQDFSPDAYPCGTSNSQSIMCATFFFSSTVCLYIR

SEQ ID NO: 251705 - protein, 62 aa, Zea mays
  Clone ID: MRT4577_161140C.1.pep
IAQVFFLLAIITRLRKFADLQDSVLFTAVLADEQANSNASRGRAHGHITNSETKTSALHLGG

SEQ ID NO: 251706 - protein, 50 aa, Zea mays
  Clone ID: MRT4577_161141C.1.pep
LQMSISLFTGCSYFSPPMYSCRSGSGEPQTPGFVLRPSTMDTGEPNSAGY

SEQ ID NO: 251707 - protein, 60 aa, Zea mays
  unsure (1)..(60): unsure at all Xaa locations
  Clone ID: MRT4577_161142C.1.pep
AMLIPQIPSLFLLREKKLTXRRPSTSTRHCSVRLSPMRKIPPLPAVGVWAGLRSTRPRIR

SEQ ID NO: 251708 - protein, 525 aa, Zea mays
  Clone ID: MRT4577_161143C.1.pep
MAVAPMDCAAGSISLGHKVLGRFGVPNSSRLRWVGYDRKPRTDQLIARAVSVDRTQLDFSNPDWKKQFQEDFDKRFSLPHLTDVIDVEPRPTTFSLKSRAPLENANGTMQGSWNGYVNDDDRALLKVIKFASPTSAGADCIDPDCSWVEQWVHRAGPRKQIYFEPQYVKAGIVSCGGLCPGLNDVIRQIVLTLEKYGVKNIVGIQHGFRGFFEDHLSEVPLSRHVVQNINLAGGSFLGVSRGGANISDIVDSIQARRLDMLFVLGGNGTHAGANAIHDECRKRKLQVSIVCVPKTIDNDILLMDKTFGFDTAVEAAQRAINSAYIEAHSAFHGIGLVKLMGRSSGFITMHASLSSGQVDICPWAEVPFTVDGPNGVLRHLEHLIETKGFALVCVAEGAGQEYFQKSNATDASGNMVLSDIGVHLQQKIKSHFKDIGVHSDVKYIDPTYMLRAVRANASDAILCTVLGQNAVHGAFAGFSGITTGVCNTHNVYLPIPEVIKSTRFIDPNSRMWHRCLTSTGQPDFH

SEQ ID NO: 251709 - protein, 91 aa, Zea mays
  Clone ID: MRT4577_161144C.1.pep
MEYERRGGRGDRTGRYGATDRSQDDSGENRSRDHDYRDMDYRSYPREYGSQEGKHEYDDSSEEQSAEIRGQLQSHGVQAREVRLMRNKSSG

SEQ ID NO: 251710 - protein, 115 aa, Zea mays
  Clone ID: MRT4577_161145C.1.pep
NNPPPGQIRGGRIFKRCFFPQGFFLNPFSGGAFGEKFKNFFFFFPPSKMFFQGASLGTLFFCLKKTHIWGRLFSSNNQGPVFGFFPKPSPGLFCFYAPPVFFFFGGKSSPFFFGG

SEQ ID NO: 251711 - protein, 36 aa, Zea mays
  Clone ID: MRT4577_161146C.1.pep
GQVVKGMDVVKAIEKVGTRNGSTSKVVKVADCGQLS

SEQ ID NO: 251712 - protein, 94 aa, Zea mays
  Clone ID: MRT4577_161147C.1.pep
DGGVKMGVGQTIRGVVRIFTVAVTIVVVAVPEGLTLAVTLTLAFSMRKMMKDKALVRRLSACETMGSATTICSDKTGTLTLNQMTVVEAYFGGK

SEQ ID NO: 251713 - protein, 70 aa, Zea mays
  Clone ID: MRT4577_161148C.1.pep
MAPSSKQNAVQAAVSIALLLTSHLAAGAEEAEAEGIAPLNTCETPIAWAPCFVKTWVCVPLCVGLRHTLL

SEQ ID NO: 251714 - protein, 79 aa, Zea mays
  unsure (1)..(79): unsure at all Xaa locations
  Clone ID: MRT4577_161149C.1.pep
VAVTREQGRGTSRHRRGHLHNIPFIXXTKQTSTESLLRLEVGSMGRGRTRWGMGMLLKKIQAPPQLGCLGGTWSASAQE

SEQ ID NO: 251715 - protein, 85 aa, Zea mays
  unsure (1)..(85): unsure at all Xaa locations
  Clone ID: MRT4577_16114C.1.pep
DNYKRDERVDYLLIDDRTGEDEGLIAVQRPKFPCGEYIQHPLAPLGTKPHVEQGTVHAQIVIFSGDWSSGILTEHXLQNAYSEII

SEQ ID NO: 251716 - protein, 91 aa, Zea mays
  Clone ID: MRT4577_161150C.1.pep
HYKPRHLLADGTIILAKMGNNHLSGKMRQPVSYAEILDTPLAGDLWAKRGPESKPELRKLELPLNLLDRESLVGRDSNNDEGKRGHGQAPK

SEQ ID NO: 251717 - protein, 168 aa, Zea mays
  Clone ID: MRT4577_161151C.1.pep
LTKVIKILQEMNKRRSSREKKKEEEIDVETKGPRNGYAWTKNRRCHLPRPYCMRACIFHSSAQLLLDLIPSHCKLHACISISSIGRPAGRSRVLFIPVVLPTVRPCTARFTAAARGCRWWSGMPRVTTKPRSVRPCTRSGKLSLALVPLNRSAASWSWTTAWTAPPTC

SEQ ID NO: 251718 - protein, 86 aa, Zea mays
  unsure (1)..(86): unsure at all Xaa locations
  Clone ID: MRT4577_161152C.1.pep
LQHNQLIHFKXLFVLLKTYTMSIQEEHSKQDHDMWVDGIDCDARGFEPHVSEIFYMRGSSIDVKMVXDPIRLEYKIDIHVNMVKSR

SEQ ID NO: 251719 - protein, 89 aa, Zea mays
  unsure (1)..(89): unsure at all Xaa locations
  Clone ID: MRT4577_161153C.1.pep
RGRPGFQFLTLASYXSGLPRPLTRQRRSCLLTAAETRTSSSRLLTTSPPAAREDLLLTRPLGTIGKVLSSIDADTTEENIRGLRKLRCW

SEQ ID NO: 251720 - protein, 102 aa, Zea mays
  Clone ID: MRT4577_161154C.1.pep
LVTMHCGSKNAPRGVLVLLLLHLSLAPTKGTDHLLQMDTSTADGLYIIARELGHAATRILCGETCVFLACYTAAMGCQWIGQICMIVISWTIAICMLRGDND

SEQ ID NO: 251721 - protein, 73 aa, Zea mays
  Clone ID: MRT4577_161155C.1.pep
ASRTRWRWGSGLLMRETTGRRPGLWEARSMYTRQVWPAVAATTAAACDYDENNDNVEDCYMTKCVCGRLMLLF

SEQ ID NO: 251722 - protein, 87 aa, Zea mays
  unsure (1)..(87): unsure at all Xaa locations
  Clone ID: MRT4577_161156C.1.pep
RREKGCNALMEYSGSYLDELSLLDYGXLRFLPSVIDVXVIVNDRLTIDPNTNSWNTKLHNMTDYKVYELKDCIGAIHNLQLNKKSLI

SEQ ID NO: 251723 - protein, 155 aa, Zea mays
  Clone ID: MRT4577_161157C.1.pep
SYGRLGSSRPAGIIALVDAPGRGLEDARDAFVRLAAERPFESTLRLFAAALCHVLGHHEEGGQWLHDSAVPDLSRLDHKNQFAQAVLAATIGSAPRAVVGSEELVLVSALGLLERSMWSIFTHGDLPARLHVLAFMAFLRAVVARKLHRDDATPN

SEQ ID NO: 251724 - protein, 177 aa, Zea mays
  unsure (1)..(177): unsure at all Xaa locations
  Clone ID: MRT4577_161158C.1.pep
RRGGPGRARPGXRPRXEPRRTAGAAGXXXAAGEGXXGXPAGPRXPPGGEAAXEAPNXGPGPPGGPKTAGPDTTEEKEDKEGAETNXXEPGQGRXRGQPSRDXRNARRGEXGGRGERKXKRXXQQRXXGDXENRXEXGXQGEXXRXGPRNPEGRXKGGGQQXXXGHEXGXGAGGPQEE

SEQ ID NO: 251725 - protein, 62 aa, Zea mays
  Clone ID: MRT4577_161159C.1.pep
IRLEREPNFDFKHMDDDEGTLFKKAGLQTEGIEQAVAGLNTNKQLLLTEWPKKYSGRNRYLN

SEQ ID NO: 251726 - protein, 63 aa, Zea mays
  Clone ID: MRT4577_16115C.1.pep
SVWSIRGRAVTEHWLHPVGNMLSAWGGKITTGTVEVQIQPALLCTWAVTNNSSLDPALVPERQ

SEQ ID NO: 251727 - protein, 234 aa, Zea mays
  Clone ID: MRT4577_161160C.1.pep
GTSKPAGKIFFPTPSRHTSSLPPLPFSSRRLHARQSLAPCHGTRHPCSRVLLPQAGEQELFPLVTELPPTAGLPSPLGSFLQGRVPSLQQPSTSTAMAPFPSDAPLQLVPLLPSVFPVRAQKLSSPLRAGQPTPLPFFFHGRPLLLAIYGQKIFSPSSLFSAPQGELGRAHGAPPLPAVASSSLRSALRTRRACYPRAAAPCELPPQQPSPQSPCQRSWCSAGNAATAGRCTPA

SEQ ID NO: 251728 - protein, 58 aa, Zea mays
  unsure (1)..(58): unsure at all Xaa locations
  Clone ID: MRT4577_161161C.1.pep
DPRXRAPVXGGPRRAAXGELPELPDAVPDLQRRRLRPVRLPEARQRACRRNTTHCFRP

SEQ ID NO: 251729 - protein, 85 aa, Zea mays
  Clone ID: MRT4577_161162C.1.pep
STSVAADMHELERKLCIVGLRCIQMKPQDRPTMSEVIEMLECGTHGLGLQMPSRPFFCDDDDPNMPAADSYHFSSELTAISEEDG

SEQ ID NO: 251730 - protein, 846 aa, Zea mays
  unsure (1)..(846): unsure at all Xaa locations
  Clone ID: MRT4577_161163C.1.pep
MVPNPKPSVQTRFVLDVMATKEEEADRWEKMMAKMDRLAEKQAAEEHILIAQQMERTEKVVAELRLEQMAHDLESADLLGENRFRGGVPRPVPPEPQQRCVEEMELPTTAVPRQPFPRFDGGATDLFIKGLKHKLQAPVQSHVPSSVGRVVFLARLQQRIMDKQRQKSLKGASPSKFVATGSRTEVRGGTGMAELSKERLVKEYRRQNVLDLGAYDMILGFDWLQSHSPMNFDWKGRIVSFVDRGQLVQLVGDSDDVREVKEVSKMQVEKWLKGNEIWVLAVLEEVQVADNPVDCKELQGLLEEFKDVFELPIALPPSXSFDHHIPLVPXIRMGESEEFKTVFKTHQGHYQFRVMPFGLTNAPATFQCAMNMVLAPYLRKFVMVFIDDILVYSPSWQSHLEHLRLVFAALRSHRFFLKHKKCVFGRTELTYLGHIISSNEVATGPQKTTAMVNWPRPTTIIQLRGFLGLTGYYRRFVQGYGGIVRPLTRLLKKGMFWWTEEAVVAFERLKQAMVTTPVLALPDFMLPFAVETDACDDGVGAFRVVYKQGKENKVADALSRVGYCMAISVVSVVQLVWLQEVLNSYVTDGEAQTLLAQLSVHSLDEHGFSLSQVVIRKEHRIWLGNNSALRTKIVAKGEWIHPAGLLQPLPVPQGAWRDITMDFIEKLPKSYGYDTILVVVDRFSKYAHFLALKHSFTAAQVAQLLLDNVVKLHGLLQSIALYGYDPPFVVAPLIPSDTDNSVAQVLVERAHFTEMLKDQLAVAQNRMKLKADRLRSERKYELVPLEIVDRRLVKKGNRAIPHVLMPLLGDKPILQGADVTHKADASTDEGVEMAREEDVQELADVE

SEQ ID NO: 251731 - protein, 76 aa, Zea mays
  unsure (1)..(76): unsure at all Xaa locations
  Clone ID: MRT4577_161164C.1.pep
MPSCEGNCGRESXCNCESDGGGGYMNPDMVEEVTTTTTIMCVAPSKGGLEAPDGVDNCGRKSGCDSCTCDPCTCKR

SEQ ID NO: 251732 - protein, 192 aa, Zea mays
  Clone ID: MRT4577_161165C.1.pep
MEEGIRADSGEKERWSAEETENCSTASLSRQARRGQGVHVSHPVLEGKPNANHLLPKCTPSKRKYQRSESSLTIIIKVSKVLLIKEDPKAALNRRVTNKNKSKEPRQPASAEQVLCPDPIDGPTVKLTTPRVPLINQLRAFHSTLMVALLSRVVTQRIGPEVRRHTTWQMTPWGLRGLEARPNKRDHRGYKA

SEQ ID NO: 251733 - protein, 94 aa, Zea mays
  unsure (1)..(94): unsure at all Xaa locations
  Clone ID: MRT4577_161166C.1.pep
SSSSIDLLWIWQRTLEQTIASCSAPHVTIAVSAQLYDSVYIITIGCHQKKKKKKKKKKKKKKRGRGKKKKEGGGGXGGPGLGSGAWGVLVFFWG

SEQ ID NO: 251734 - protein, 88 aa, Zea mays
  Clone ID: MRT4577_161167C.1.pep
RPVRGAPLSPSSSLTAPAATPPRPDPPQQWPPSCSSCAGKVVSGSVDQSDQSYLDDGQIADGWVLTCHAYPTSDVVIETHKEEELTGA

SEQ ID NO: 251735 - protein, 150 aa, Zea mays
  Clone ID: MRT4577_161168C.1.pep
MATVLGSPRAPAFFFSSSSLRAAPAPTAVALPAAKVGIMGRSASSRRRLRAQATYNVKLITPEGEVELQVPDDVYILDQAEEDGIDLPYSCRAGSCSSCAGKVVSGSVDQSDQSYLDDGQIADGWVLTCHAYPTSDVVIETHKEEELTGA

SEQ ID NO: 251736 - protein, 57 aa, Zea mays
  unsure (1)..(57): unsure at all Xaa locations
  Clone ID: MRT4577_161169C.1.pep
QLLRIIHADICYPPLQPPPFFFFYKKXTYFRWVFKQGCFFQLLQNLIHLFLNFGALF

SEQ ID NO: 251737 - protein, 42 aa, Zea mays
  Clone ID: MRT4577_16116C.1.pep
FSFGWVNKKPTALHPQPSNIPLTLSTILLSPTSPIPYIIILY

SEQ ID NO: 251738 - protein, 150 aa, Zea mays; identical to SEQ ID NO: 251735
  Clone ID: MRT4577_161170C.1.pep

SEQ ID NO: 251739 - protein, 70 aa, Zea mays
  Clone ID: MRT4577_161171C.1.pep
KKRHVYFILSNNEMRKYFYQTVGAPCFQVLEYVASLLEMPESELAELSYKNATKLFSYPGSKVQDEPKHI

SEQ ID NO: 251740 - protein, 67 aa, Zea mays
  Clone ID: MRT4577_161172C.1.pep
SSFNVVGLQVAGEGASASMTFRNAPVRLGVLAVAWDERHGVWCAVPGPGHVGAPGPVKNVLRGRSGS

SEQ ID NO: 251741 - protein, 64 aa, Zea mays
  Clone ID: MRT4577_161173C.1.pep
NVSNKCVQLLVTAWNLTWKFQVITHTTKLGTPSCHEAQVPENRHYPQHIWGKILFHFHVFMDQV

SEQ ID NO: 251742 - protein, 150 aa, Zea mays
  Clone ID: MRT4577_161174C.1.pep
MATVLGSPRAPAFFFSPSSLRAAPAPTAVALPAAKVGIMGRSASSRGRLRAQATYNVKLITPEGEVELQVPDDVYILDQAEEDGIDLPYSCRAGSCSSCAGKVVSGSVDQSDQSYLDDGQIAAGWVLTCHAYPTSDVVIETHKEEELTGA

SEQ ID NO: 251743 - protein, 320 aa, Zea mays
  unsure (1)..(320): unsure at all Xaa locations
  Clone ID: MRT4577_161175C.1.pep
MAQAPARAASAVRLFDAHCHLQDPRIAAVAPALIRAAGASGVARFAVNGTSEKDWHLVKQMAEDHPAVVPCFGLHPWCVPERSPDWMNLLRRFFAETPEAAVGEIGLDKGSHGKTINFGEQVXTAKSYHKVEVFQRQLELAKELERPVSVHCVRAFGDLLEVLKQTGPFPAGVLLHSYMGSAEMVSALANLGCYFSLSGFLTGMKSTKAKHMLKSIPLDRILLETDAPDALPRLDNVSVSPVHVHSSDADTEKHHMDSESQAANASNESLNHPENIHIVLEYVASLLEMPESELAELSYKNATKLFSYPGSKVQHEPKDI

SEQ ID NO: 251744 - protein, 114 aa, Zea mays
  Clone ID: MRT4577_161176C.1.pep
KIALLLGLGEPLQPGGGGATHHSHPKLKLHNSFKPRNGAPPQTKGTLGQTSLTPQKKHSLGLETLKLPDRQTRREPLLEPVGPVRLLDPKGVEGPGAAPLEPDGVPGPLDPHRP

SEQ ID NO: 251745 - protein, 60 aa, Zea mays
  Clone ID: MRT4577_161177C.1.pep
CSYVALRVCAYRVIELGFWIFYVIKHSWNGGMREAIEVCEHVSIIVALSRHPHRPRSIRT

SEQ ID NO: 251746 - protein, 45 aa, Zea mays
  Clone ID: MRT4577_161178C.1.pep
LQLHIASLCLCGIISIDKALCEGQTYIRRQLRQQGLSLRGSVAVL

SEQ ID NO: 251747 - protein, 59 aa, Zea mays
  Clone ID: MRT4577_161179C.1.pep
HYIMGNNGQSRPHSYNNVHIKSLRTQHSLTDLYKAPCQEICHNPASATSHASSFKSDMK

SEQ ID NO: 251748 - protein, 164 aa, Zea mays
  unsure (1)..(164): unsure at all Xaa locations
  Clone ID: MRT4577_16117C.1.pep
MKAGENQKKNKGGRGGRGGGGGGGGAPGGTGPTPXGPRRKRGPPAXKKKKKKQKRGQPQGPTKGQTGPTTXPPRKPGPPGPAPGPPSRPHQPPRGPGGPPGPNQQKGQKASHKPGGGKGGQKNQTPAGRPNKVKAGSAGTARRPQGGEPGPLRAKGRRGTGGAP

SEQ ID NO: 251749 - protein, 62 aa, Zea mays
  Clone ID: MRT4577_161180C.1.pep
KRQDKQSHNIINSLYYPGKTETIMNYKCTFGLIEDKKYKRDAKASTSQCEQYEGTVHLFIGT

SEQ ID NO: 251750 - protein, 75 aa, Zea mays
  Clone ID: MRT4577_161181C.1.pep
APQCVPPVSMGSSIHEHDHTRRRADFGTATRAPVGSVPSLSASFLAFLSYALPAFRACPHPLPLAPIGSRNVARA

SEQ ID NO: 251751 - protein, 93 aa, Zea mays
  unsure (1)..(93): unsure at all Xaa locations
  Clone ID: MRT4577_161182C.1.pep
RADLINGLYSLNHXWNNIRSPSNNMHRIWKNPWNNARTCILPSXKDYCETALSFRKRINPLPRLPAKGIXRTSNLYALKXIANVCNRGINATP

SEQ ID NO: 251752 - protein, 74 aa, Zea mays
  Clone ID: MRT4577_161183C.1.pep
MKRIATSTSSVWMEHVGIKGDATWTREQQRISRCTGDANPIRRHAGCLAAMEETSEMRLVGSSVLARIQARSPL

SEQ ID NO: 251753 - protein, 104 aa, Zea mays
  Clone ID: MRT4577_161184C.1.pep
YATQTASGLPTADGEASRRRAVSTTYNTSDGEAAATPRRLRRGCRGHVAQATPGEPRRYCREQAAQAATPAAAQGREQPRREYNAAPRAARLHRRERRGRSRLA

SEQ ID NO: 251754 - protein, 44 aa, Zea mays
  Clone ID: MRT4577_161185C.1.pep
RPRESVEAYANSAELAPACRVNGLSRQGLRAGVKRLPARNPRVR

SEQ ID NO: 251755 - protein, 123 aa, Zea mays
  Clone ID: MRT4577_161186C.1.pep
YQIVFSQYMGLYAWKLILKKKKKKKKKKKKKKKKKKKKKKKKKGPLGRPLWGRFPPLWGPFKGDPSSGWHSKLGRIQVHRCSQGKIVYTIDIGKPLGFLNLFALGKIPFWPIEEIPKKPPPNQ

SEQ ID NO: 251756 - protein, 106 aa, Zea mays
  Clone ID: MRT4577_161187C.1.pep
PKPQKETGGRGPTIFPPTKKRVEHGPKNPYKGDPNPSRGQKFLQGGNQGESGPFLLEQKKDPNWHPGKRGEPTLWAGLKGGPQMAGLTQGGPNPLLKPDDPPKNAQ

SEQ ID NO: 251757 - protein, 84 aa, Zea mays
  Clone ID: MRT4577_161188C.1.pep
NVPKKKKKKTPSYPPITKNPPQPNHPTVLLVSNTHTHTSPKIPTTPGAPKNKPPFTTPKPFQKGGTPKSPTFPTIQIKSPLRTP

SEQ ID NO: 251758 - protein, 104 aa, Zea mays
  Clone ID: MRT4577_161189C.1.pep
TPETVFTWHGPHMLCLLGPRIERASRPLHLVIPPIPGGSRVCMPYSLIFFPHIRLCDRLVRAPVHVARCGLPPLVQIENSNFLACVEWGQACPCDPKKGHTFDS

SEQ ID NO: 251759 - protein, 105 aa, Zea mays
  Clone ID: MRT4577_16118C.1.pep
LHVKSGAIDPLMLHLGDLTEIHLPHKASLDKARDLRVLIFSANSCRGNDCAGQQEWKMSAETQEQKIIWCASRPTPSLTRCVWFSFLNQFAAKNLKSHPNGTTPE

SEQ ID NO: 251760 - protein, 69 aa, Zea mays
  Clone ID: MRT4577_161190C.1.pep
ADSLSGNGSDGAICRVSPVHEERITHEQVPFTWNLYAYFGPSEVTHLKSLTTAHQDDAPDEPQPSGLAQ

SEQ ID NO: 251761 - protein, 69 aa, Zea mays
  Clone ID: MRT4577_161191C.1.pep
PPPFFFFFFFIFFFLYIISFPFQWFIHVMAHTATHGQWPHYATHPPSRRKQSNPEGSQPLHYIIAVTKK

SEQ ID NO: 251762 - protein, 70 aa, Zea mays
  Clone ID: MRT4577_161192C.1.pep
LDFSEDHINGTGTHPCHSAIDVLKNSDTWLEDDQLEAILHPACMTLTENQWFRIHEVSPESAFSYESTKV

SEQ ID NO: 251763 - protein, 70 aa, Zea mays
  unsure (1)..(70): unsure at all Xaa locations
  Clone ID: MRT4577_161193C.1.pep
FLGHGKKGLRSFRTAGPAHCGIAAPVAKQKKKRQGELRGGGAASSSNAAAAAVQAXQAKAGSGRVGGRVG

SEQ ID NO: 251764 - protein, 87 aa, Zea mays
  Clone ID: MRT4577_161194C.1.pep
RAGFLGRPAPELQIPRSGEGYQRIITIFGMPHKTLSLEILQREELGGQSARFRLLCHFDSWRREGPLGRCSYTSGLIKGCNERDKEA

SEQ ID NO: 251765 - protein, 88 aa, Zea mays
  Clone ID: MRT4577_161195C.1.pep
QKSGGWPPPSSVQHPKGEPPPPWVRFPGWSVSHGSFNLPMCLGGLGPSPHMGVVKESPVRVMSGARVGLIMARLCWGGVLPRIWPNHE

SEQ ID NO: 251766 - protein, 90 aa, Zea mays
  unsure (1)..(90): unsure at all Xaa locations
  Clone ID: MRT4577_161196C.1.pep
LGGKSGKVHLQLALSSGCSRVPCPIRAFTEEAVEAPKGFVAPQLDPSTPFPIFGGSTGXGLLPQRAQXVEEFYVXIRWTSPIEHVFEMPT

SEQ ID NO: 251767 - protein, 48 aa, Zea mays
  Clone ID: MRT4577_161197C.1.pep
VFFFFFFFFFFFFFFFFFFFFFFFLGKTNGGIIKPILNHPGQGEKGSP

SEQ ID NO: 251768 - protein, 96 aa, Zea mays
  Clone ID: MRT4577_161198C.1.pep
PSLEKKETDRPMWLCLRKERKKERKANKKECLFPSFVKKKVNLDLRTTTDTSIQGSNRECHCESGKKAESTASSGSSHATAAPPTGHAPDGKNPGS

SEQ ID NO: 251769 - protein, 103 aa, Zea mays
  Clone ID: MRT4577_161199C.1.pep
PLCGPPSPQAWVPFVSLLLVASLALVRGGVLLVAPESAPVLLRVLRLLVGALLLRLPLARLFRRVAVVFGFRVDGFPCLVPRRCLVAPGVASPPACARRAPAR

SEQ ID NO: 251770 - protein, 89 aa, Zea mays
  unsure (1)..(89): unsure at all Xaa locations
  Clone ID: MRT4577_16119C.1.pep
PFPQKKGLGPPEPFWGRARVCVATKRGGPPPGRGPPFKNRELGRSGVPFVVGEXGSPPGPGGGGPPPGRFPPDGPGWVKKKECGAPFSS

SEQ ID NO: 251771 - protein, 193 aa, Zea mays
  Clone ID: MRT4577_1611C.1.pep
RPGRGALPPARSSELHGAFPAPPWCPDPATPCWSSSQPRTRTASTPAAAWYSRCSPSRGPCTQPCTQQQAPDPLRVRVLLVPRRRLCDLDISNAMSQTLGEPLDSVVLAAQVPSALACSTGCPVDLCSHGAMSLTLIAVDVVPRAWLVRRKAQVDMHACAGPKILSYRQVVRLVFLWINLFILWWMLCMCVYE

SEQ ID NO: 251772 - protein, 65 aa, Zea mays
  unsure (1)..(65): unsure at all Xaa locations
  Clone ID: MRT4577_161200C.1.pep
AAAWIPMSPAPCMHEQSHASQLVGEQRLGCKYIYCQNARSSTAIXCTNYCKRVIYNEQGEFGLVL

SEQ ID NO: 251773 - protein, 73 aa, Zea mays
  Clone ID: MRT4577_161201C.1.pep
QTQKGTRTDRKQERGVRGRRCGDRSLTPAHYESCSSSSAFLDREATTRAVCSCIELHRPKCTARFVGLAHALR

SEQ ID NO: 251774 - protein, 90 aa, Zea mays
  unsure (1)..(90): unsure at all Xaa locations
  Clone ID: MRT4577_161202C.1.pep
RSCPRXAWIRSCSLRRHRPRPSSVALTPAAPAPPAPDCPGIARRWPPYPFGGPARHQPPRNHRPSRPRLQSSSCGQRSLLSIIHCSLLFL

SEQ ID NO: 251775 - protein, 55 aa, Zea mays
  Clone ID: MRT4577_161203C.1.pep
VTHIGKGVRHNSFFVFARSRQQDKGFVFVPGLIVLATPITQGSIPHVVYNIVVDE

SEQ ID NO: 251776 - protein, 165 aa, Zea mays
  unsure (1)..(165): unsure at all Xaa locations
  Clone ID: MRT4577_161204C.1.pep
AAKVTEENIATLFINCGQVVDCRMCGDPNSVLRFAFIEFTDXRSDDEREMCARTIYCTNIDKKVWYLHSCYYHYVFILSWFCFNTRXTQADLKLFFESICGEVFRLRLLGDYHHSTRIAFVEFVMAESATAALNCSGVVLGSLPIRVSPSKTPVRPRVPRHLMSY

SEQ ID NO: 251777 - protein, 61 aa, Zea mays
  Clone ID: MRT4577_161205C.1.pep
LALAPSPTFTHTSCACGCQQPTPPHLLQPVLLPPSVHLPTTEHLPPPVHLPALVHPPLVLH

SEQ ID NO: 251778 - protein, 131 aa, Zea mays
  Clone ID: MRT4577_161206C.1.pep
PGSHVSSINQLMREQLSNQDTARTHHSPHKKGVGLCHFFTSGRGVALRRPSPIEPSTCDAGGHLKHEDTGKTTTTPPPTARARTLPLPAWNLDLDEPRRVATRRAASRREPCTRGRAAGRLLIGAAGLDEL

SEQ ID NO: 251779 - protein, 199 aa, Zea mays
  unsure (1)..(199): unsure at all Xaa locations
  Clone ID: MRT4577_161207C.1.pep
AALFINCGQVVDCGMCGDPNSVLRFAFIEFTDEXYIHIQPCFSLLTLCNGSTVYRVKNIDVPEGARAALNLSGTVLGYYPVKVLPSKTAIAPVNETFLPRSDDEREMCARTIYCTNIDKKVTQADLKLFFESICGEVFRLRLLGDYHHSTRIAFVEFVMAESATAALNCSGVVLGSLPIRVSPSKTPVRPRAPRQLMLS

SEQ ID NO: 251780 - protein, 84 aa, Zea mays
  unsure (1)..(84): unsure at all Xaa locations
  Clone ID: MRT4577_161208C.1.pep
PKWGYKKVXLEPRIXNILGPRFPPPYKKPPRVPPVEGMVKTAIWCLQARPQIRPFMGKVSKILEGSVKIPEPVKPTIFWVQGAL

SEQ ID NO: 251781 - protein, 106 aa, Zea mays
  Clone ID: MRT4577_161209C.1.pep
MPKHPELEDKNVPNLHVMKAMQSLKSRGYVKEQFAWRHFYWYLTNEGIQYLRDYLHLPPEIVPATLRRSRPETGRPRPKGLEGERPARLTRGEADRDTYRRSAVPP

SEQ ID NO: 251782 - protein, 131 aa, Zea mays
  Clone ID: MRT4577_16120C.1.pep
WALRVAYDFVCPVNVVTGPYPAFQSTMGLFASISYWRRVVCFVCAFICVHPPSSCFRLPLPGIPTHVGMVKIKHPYASYSRFGPLFLLCPLRPVSRFSFGLATGTPPLVTSGPGSIEPAGSRLSSRIPSLR

SEQ ID NO: 251783 - protein, 57 aa, Zea mays
  Clone ID: MRT4577_161210C.1.pep
YDAIAIKCLRYVLFLRVVGFSIYSLKYDKHNCRHIIINSHMYTQLVIEESIHEYQLL

SEQ ID NO: 251784 - protein, 86 aa, Zea mays
  Clone ID: MRT4577_161211C.1.pep
CQASPCSNRTQGLASNMKLKFVQYLEMHGGLALQGATLLVTKPVKDGHGNRKEVLAFGHGAFHGTMRFERQAFMERRTNHLEMNGF

SEQ ID NO: 251785 - protein, 63 aa, Zea mays
  Clone ID: MRT4577_161212C.1.pep
LGKPKVFPVSMLLKPGQLILFWWPNKKGNAWDLRVRKVGTSRTAAPFFCFFYFIFIYLLYKCM

SEQ ID NO: 251786 - protein, 128 aa, Zea mays
  unsure (1)..(128): unsure at all Xaa locations
  Clone ID: MRT4577_161213C.1.pep
PTAMFLHVFHGALKKKKMGGWGLPPLGGGGPELPIGKHPIFGGGGGFPLDPIPCKQSRIFFPGRSFARXXSGFLILIKPGVGPPFGVDDHPNSLWLRGVFSLGGAGNALPRGPGFTSSCRWEFGGAWG

SEQ ID NO: 251787 - protein, 124 aa, Zea mays
  Clone ID: MRT4577_161214C.1.pep
YDDDRYDGGRSVDSRDTYYGAGRDRYARDRHLPATDHHSGDRYSGADRYTSSGFAIERSYERDGGRSTGTYYRDDPRGTGGYGRGGSRGGGGGPARFGGSYRDRPAPYDRPSRGGAARAYDDRY

SEQ ID NO: 251788 - protein, 173 aa, Zea mays
  unsure (1)..(173): unsure at all Xaa locations
  Clone ID: MRT4577_161215C.1.pep
RKARARRPTNASGAGLTKSDTDPNREQDTTHGKSRSHDHEGDGHANTDXHPADXTPEXTTEXAGRGGDAKEXEKRGXKXXGNPSDDGEXHRQRTKDXEAHGGKQQQQQAPTKETXPRRADPARDANRQPNKXDPDEKDAAGRSRPTRAHHDGGPDKAEKXSQXNPGTTGRNRD

SEQ ID NO: 251789 - protein, 100 aa, Zea mays
  unsure (1)..(100): unsure at all Xaa locations
  Clone ID: MRT4577_161216C.1.pep
PPQGDLPGVPPVDPPWLTEMGPLFFXLKETNPFFFFPQKRPKEKKPPMGGEMEKFRRPQTKAPGLEKEKDRGKKVYPPPPVFLPGLKKGGPFFGPQKMGL

SEQ ID NO: 251790 - protein, 287 aa, Zea mays
  unsure (1)..(287): unsure at all Xaa locations
  Clone ID: MRT4577_161217C.1.pep
PAGSVLLACTADRALAPPLCRTSRRPTLLKNSGIDRSSSSGPRPAPTDPNGGGAASRVPPRPXSPSSPPPSPTSSWPPSPTARPPPXPPPPHPPAPPPAHPPPPAAPRAPLRLPPAXPPRPXAASPPPSTAPAPPAPLPPSPPPAPPPAPPHPAAPPARPRGRPPXPPRSLTRTSRRTRSPSRASSSSPRRRPLSSRRSAPPRRGARRRPAPTSSPRRGSPARAPWAGSGRRRAGSIFTSTRACPRGATASSTPAAPQRPPRGATSTRLGSGPSLSWISPCPCTAPS

SEQ ID NO: 251791 - protein, 298 aa, Zea mays
  unsure (1)..(298): unsure at all Xaa locations
  Clone ID: MRT4577_161218C.1.pep
WATLVVRHXILRHAFLLPHTLAHQCRLHLALDLQLTSALSCLPSCSQMVAREFLPPQHRQLAASLVQLQLVESLSVCAMQLARPRPCRAPPLLHVSWSGSRSARDAAVPWCSLLDPASSSLSLAVRVLPGSCAYRRRPQSLARKVFPSRRLLPLAVKRDELVPSSSQRLSPACRASSRLWSRPLNSPTPCCQSDYRRYCVPRCALVGGAVCCAPASALVASANSGRRGICSVLAPCASALLPGPAWPPACSTVLSISSSYVSASCTITSSTMPSPALTRRASSRCDSRTIYSSNGILM

SEQ ID NO: 251792 - protein, 235 aa, Zea mays
  unsure (1)..(235): unsure at all Xaa locations
  Clone ID: MRT4577_161219C.1.pep
AREKKKKKKKKFLHSHPXEDTQPPTVLSLPPHAILLSGSPWRQAGSSAPSRHGARHPCSSVLLPHRPQLVVVPLVLLGDALLPHAGEQAFFLPPSELHPWLLLSLPSAPPQLSYTWTRASPSLLLSWPSQPLLGARQRFPHSDLLPWRSAPRSLHRSPAGFPLRALCSTAPLLPNAGVLPPFSAPSPNLLVASTMESSSFSTAVAAPLPSAPLWCAAPSPPLNTVXSDSSSAPPF

SEQ ID NO: 251793 - protein, 123 aa, Zea mays
  Clone ID: MRT4577_16121C.1.pep
MQTAYNCTKGTHPFDFDASSMEAQAHTSCNRRAGYYVRETAPPLAPVSCILDRGIGAVTRGNPAHGPAVPTRHAGHGAGDTFGRRSGRRFTSAIMSVSKKGPGKGILRKGSFPAKEAGPEPSY

SEQ ID NO: 251794 - protein, 64 aa, Zea mays
  unsure (1)..(64): unsure at all Xaa locations
  Clone ID: MRT4577_161220C.1.pep
MAAATMAITSRALICKLADGTTDVFGEGRITMRNTAANPKPAAFSSPCFGADRVLXLGTLSGSP

SEQ ID NO: 251795 - protein, 81 aa, Zea mays
  Clone ID: MRT4577_161221C.1.pep
SGSGGRCPLRLTTVRSLAQVPSELDLRLSAPEDVCKVLKSSWIRRVWGAWVQPGDHVAVVMFNTVAMALVVQRSTSVRHGI

SEQ ID NO: 251796 - protein, 63 aa, Zea mays
  Clone ID: MRT4577_161222C.1.pep
HSSLLDTSTLKCKNEPNCECCTLTQNLSDSTWYLPCLKKAKSDTQTQTRHRHPHPCPCNNGIV

SEQ ID NO: 251797 - protein, 79 aa, Zea mays
  Clone ID: MRT4577_161223C.1.pep
AGRRSSCCSLVSSPAGSSSYCISRTARARAVMAHCSGCKGIIHSALLCSAARMIVVQAHVHLYGLSGTMLPVDHPAEFL

SEQ ID NO: 251798 - protein, 82 aa, Zea mays
  Clone ID: MRT4577_161224C.1.pep
QRRRNPARTQDQGYTYQERGVLDRGAAELNEVTPAKPTDILGPELTPGQIVDRPPDLHVPLLRVVPTNQATEPDVQGPSKSC

SEQ ID NO: 251799 - protein, 135 aa, Zea mays
  Clone ID: MRT4577_161225C.1.pep
VSVAGTIFDRPSPVLTGIQATFVLPEDPACILWRIEGTQTIGARAMLPVWQMLRLPNDRAAPCEEAPPRSRVGGPERDRGGGPLWVHALEGGCRRGVSSGRRKSVWQIMEEGRQKIRHHEKRSEGGFPAGLEGPN

SEQ ID NO: 251800 - protein, 58 aa, Zea mays
  Clone ID: MRT4577_161226C.1.pep
MSSIPATTLAVILSVLFCAAAGSAVHNDLPDYVIQGRVYCHTCRAGLATTATKSLASP

SEQ ID NO: 251801 - protein, 71 aa, Zea mays
  unsure (1)..(71): unsure at all Xaa locations
  Clone ID: MRT4577_161227C.1.pep
YTYAYREPMLTQCGHFFCWLCQXRRLTLXAHSSERLMCKALVDEDNLVPLYXRGKDRVDPKANDMPNGDIP

SEQ ID NO: 251802 - protein, 87 aa, Zea mays
  Clone ID: MRT4577_161228C.1.pep
MTTSPPRARLLAMALALAFACVLLVRSADAATPGGSAYGCNPATDRTCRPEGVGVVLPDGGIDLDGDGDEDELPQFDPHFTILGHAQ

SEQ ID NO: 251803 - protein, 242 aa, Zea mays
  Clone ID: MRT4577_161229C.1.pep
MASSERVYEDFVPPHKTEREPATHTLTVNLYGQGFKKEHVRVQMVHSQRRLIVRGERPVDVNRWRRFGLELLVPDGCDAKAIHARFENGVFRVTMPAVPPEQVPVVASAAKQDGGDRAARGREDNKHETPRKQEARQRVVSSARDPGGSSSKNDGAGGGSSAPPSSCQGFLSNPKMATTVACRGARPHQPRHLCQEQRLAVNSVLARAYVWYTGCGNDSWTQLVKTPRVRYVSRRSHGWPME

SEQ ID NO: 251804 - protein, 163 aa, Zea mays
  Clone ID: MRT4577_16122C.1.pep
MASSYYSLMLLLLLAATAVAEEAAAEASGGGGNATETSPTAYEMLERYGFPRGILPAGVTGYELGADGAFEVYFPRACEFLLARTWLVRYEARVSGSVAAGSLTALRGISVKVLFLWLGVGEVDRAGETLSFYIGPVATSFPIDDFAESPRCRGYDAEAAASS

SEQ ID NO: 251805 - protein, 92 aa, Zea mays
  Clone ID: MRT4577_161230C.1.pep
HYMACCLLYRGDVVLRDVNAAIATIKTKRTIQFVDWCTTVFKVGINYQPPTVVPDGDLAKVQRAVCMLSNTTAVSEAWARLDNKFDLMYAKR

SEQ ID NO: 251806 - protein, 340 aa, Zea mays
  unsure (1)..(340): unsure at all Xaa locations
  Clone ID: MRT4577_161231C.1.pep
MAATQSCQAAACFPAAVAVDEEHGHHSHQLKGGAQEEAENDNKPELRRGPWTVDEDLTLVNYIADNGEGRWNNLARAAGLKRTGKSCRLRWLNYLRPDVKRGNFSADEQLLILDLHTRWGNRWSKIAQHLPGRTDNEIKNYWRTRVQKHAKQLNCDANSKRFKDAMRYLWMPHLADDVDTIAAANDDDEDHHHHXASSSCITXAQHLQQAAAAAGGAANDLAAGAYDVRQLHALPSSGMAATSSSDSLASESYDDGGLLFANLRAGEMLMDGGDWAAQQEADQGLWPPPPPTSDLDQSVVQAAGAGAGQFQDMELSGWVQGFSESITDNFWALEEIWKMQ

SEQ ID NO: 251807 - protein, 363 aa, Zea mays
  unsure (1)..(363): unsure at all Xaa locations
  Clone ID: MRT4577_161232C.1.pep
MATTQSCQMATTQSCQSRSSACSKAAACFPAAVAVDEEHGHHSHQLKGGAQEEAENDNNKPELRRGPWTVDEDLTLVNYIADNGEGRWNNLARAAGLKRTGKSCRLRWLNYLRPDVKRGNFSADEQLLILDLHTRWGNRWSKIAQHLPGRTDNEIKNYWRTRVQKHAKQLNCDANSKRFKDAMRYLWMPHLADDVDTIAAANDDDEDHHHHXPPRPAPPPGPAPAASCCRGXALPTTLLRAPTTSASCTRCXSGMAAVPTTATTSSSDSLASESYDDGGLLFANLRAGEMLMDGGDWAAQQEADQGLWPPPPPPPSDLDQSVVQAAGAGAGQFQDMELSGWVQGFSESITDNFWALEEIWKMQ

SEQ ID NO: 251808 - protein, 100 aa, Zea mays
  Clone ID: MRT4577_161233C.1.pep
GSGMGATPHVPPAAHGPCGGRCAARRQVLRRCVHALQMAGDPQVQMLRRRVYVPCAAWLATCICRLYACSWRSHRDPGDLGQRAAPSWCRSGSSATLKVG

SEQ ID NO: 251809 - protein, 183 aa, Zea mays
  unsure (1)..(183): unsure at all Xaa locations
  Clone ID: MRT4577_161234C.1.pep
MSSPENGAAPEASGKKKKKAEEEEVVAKVPFLKLFSFADRWDCVLMAVGSLGACAHGASVPVFFIFFGKLINIIGLAYLFPTTVSGRVAKYSLDFVYLGIVIFFSSWTEVACWMHAGERQAAKMRLAYLRAMLDQDIAVFDTEASTGDVINAITSDTLXVVQDAISEEVGNFMHYISRFLAGF

SEQ ID NO: 251810 - protein, 177 aa, Zea mays
  Clone ID: MRT4577_161235C.1.pep
MVDADEMPQPIYAENKPCAEIESRRHSPTLMLAVVTKVLDDDDLLAEILLRVVFPTTLVRAALVCKRWYHHASDRRFLRRFRKLHPPCLLGFYVVFKGARFIPMQPQPPELAAVVRHVAGYRFGNLIDLKDCRNGIVLTRDRKQGVLTYKVPLCPERGMPTVPPLPRTQGGSIFLFR

SEQ ID NO: 251811 - protein, 230 aa, Zea mays
  Clone ID: MRT4577_161236C.1.pep
AAKHQYSASTPADDTLCSSLRPCSSPARLLASLPSSAFSSSSPFPLRPCRFSARPWKSQPPASSVESGRSSLLLCSSAARASRRAPAPALTRAPALSVRPPSPHLSPLSALCPVSSMAAPGPYLSSALPSTPARPSLLFSLLGRSIARRCPWPPSSFLLTPISLPCAREVDSDPGPSSDLAPVHRPRALLLVDAIIASDSILLRCVGRACRGQATNLPQHEHDIALESNP

SEQ ID NO: 251812 - protein, 209 aa, Zea mays
  unsure (1)..(209): unsure at all Xaa locations
  Clone ID: MRT4577_161237C.1.pep
MGRVKLQIKRIENNTNRQVTFSKRRNGLIKKAYELSVLCDIDIALIMFSPSNRLSHFSGRRRIEDVITRYINLPEHDRGGVVRNREYLMKMLGKLKCEGNIAEQLTPNKEPINSNVEELQQEIKTYQHQMEVLKEQLRSDNIDXSMNDFETCEKFLMDTLTCVEERKKYLLCNHVAPFDPSASNMQQHVDVRRCLVSLIIMVGTHNYFR

SEQ ID NO: 251813 - protein, 83 aa, Zea mays
  Clone ID: MRT4577_161238C.1.pep
SVDPDDVGNPDCNGERNIADHTTYAHGTPLPGDVSRQLEPYQGQVEYTSVAILCRRLPGLNTAMRYYYLLRCMICYAVVHRRR

SEQ ID NO: 251814 - protein, 112 aa, Zea mays
  unsure (1)..(112): unsure at all Xaa locations
  Clone ID: MRT4577_161239C.1.pep
MALPQLRELYLLRTKLAELPNGQLGLTLLRLLDLWQNHLTTVPYGIRSITDLIALDLCDNHITPLXTXLGLPDANLDVLELHGNPVRSIGRTLLQRGTKAPLKYLKEKLPPE

SEQ ID NO: 251815 - protein, 56 aa, Zea mays
  Clone ID: MRT4577_16123C.1.pep
RSVFLFVVLGCFNLVCLPLRSCLMGCLMVCVVPMLYYKYVVVAPVFLGCFGPPRFF

SEQ ID NO: 251816 - protein, 830 aa, Zea mays
  Clone ID: MRT4577_161240C.1.pep
WLFLLLCCDSRSMADGAIVVAICQYGGEFTSGPSGNLIYRGGEAHAVDVTHDSSLESFKDELSKVFHVDVTDMSLKYFLPNNMKTLITISCDRDLQRMVGFTANAAHVDVFLISRQENRSTITHSGATSGSVASGDKRKRPTPKNKVIRSSKPATSAACNALQAITDNVRQPISVITENEDNRVFQLEFGNDITFTTTAGGASFTSDILDQQKLVLVDNIPKEAVSLFDDAFNPYVSSEIMHEPPQEPNNPIVLWDDIIKGVGQEFDNVKDFRAQLCKYAIGKGFVYRFIKNETTRVTVKCGAEGGCTWRLHASESSRNKKFIIKRLTDEHTCGGGSGEGQRRATRQWLTTIIKEKLHDNPKFKPKELVKELFEEYGVTLTYSQVWRGKEVAEKELYHAVRETRDQLPWYCQRLEETNPGSISVLSPVLDMKTRRFFVALHACLHGFINGCRPLLFLDKVPLKATNEYKLLVAAAVDADDGVFPLAFNVVEDENYDSWGWFLMHLKIALQTHNYPCNGMTFLSNGQMGLDAAVSHVFEDGEHAFCLHHIIEEFKGELRKGPWSQQIREGMVEDFTRAAQACSIEDFNASIESIRNISSEAADWIIASKPEHWSDAIFRGFRYDHFSLNIVDAFDNWIPAKKESSIVLMVDSLRIKIKEVIESRLEACKVWQGPLTPTMEYKVQDEMLKAGKMTVLCSSDTVFEVRGNAVFVVNIGNWECTCRRWQLSGLPCMHAIAVFNRLGRCFYDYCPKFFRIESYHLTYSGIIFPIPDLDSVDFSAGANLLPLPPKRRTSDKPRRKRSNPNKISTLTRLCSRCKQTGHNKATCEVQF

SEQ ID NO: 251817 - protein, 66 aa, Zea mays
  Clone ID: MRT4577_161241C.1.pep
AWFYSLRPSLTSALLNVDTVSEGAHRALLLRVLLPFIPICYYQPTSHFGVETDEPILWISITEGPL

SEQ ID NO: 251818 - protein, 115 aa, Zea mays
  Clone ID: MRT4577_161242C.1.pep
GGEGAPPLRWKTPRKKDRNPRPGPDKTFFLIRKPTNGPFPRVKPPPGFFSKGPADQLESLPFKRAPPGGGVSFPSHPPRWQGPAMGRGNPLGPTILSASFYPSVPPKKIRGGPFT

SEQ ID NO: 251819 - protein, 57 aa, Zea mays
  Clone ID: MRT4577_161243C.1.pep
LSGACLGSVFELAVEDVCPPAFWLFRLNLLVPYIFWSPLIFIDPMESLNPDFFLVIS

SEQ ID NO: 251820 - protein, 53 aa, Zea mays
  Clone ID: MRT4577_161244C.1.pep
RCISSYFVSVRMSSWFTVSCIEGRVPLSSSFVINQSSEQQCPRKAMNFRAERT

SEQ ID NO: 251821 - protein, 61 aa, Zea mays
  Clone ID: MRT4577_161245C.1.pep
ARNQLILHMPSDTQEIDMYGTLIFFFFFCRKPNHFIYSVYYMNRSRTVSNDNMSVIIIRTY

SEQ ID NO: 251822 - protein, 67 aa, Zea mays
  unsure (1)..(67): unsure at all Xaa locations
  Clone ID: MRT4577_161246C.1.pep
RHSANPLSSSQARWHFSRXMHACIHARESTEVCGYAHRRFTVNFVLVTHIYNIYVVCIVLLNDSICN

SEQ ID NO: 251823 - protein, 125 aa, Zea mays
  Clone ID: MRT4577_161247C.1.pep
FFSPDIGDELGKWYGPDRRIFLPEGLLDRSEVPDYLNGEVPGDYGYDPFGLSKKPEDFSKYQAYELIHARWAMLGAAGFIIPEACNKFGANCGPEAVWFKTGALLLDGNTLNYFGNSIPINLIVA

SEQ ID NO: 251824 - protein, 242 aa, Zea mays
  Clone ID: MRT4577_161248C.1.pep
VNGGSSGCNGGLMDDAFEFIIKNGGIDTEDDYPYKAVDGRCDVLRKNAKVVSIDGFEDVPENDEKSSQKAVAHQPVSVAIEAGGREFQLYHSGVFSGRCGTQLDHGVVAVGYGTENGKDYWIVRNSWGPNRGEAGYLRMERNINVTSGKCGIAMMSSYPTKKGANPPKPAPTPPSPPTPPPPVAPDHVCDENFSCPAGSTCCCSFGFRNLCLVWGCCPAEGATCCKDHSSCCPPDYPVCNIR

SEQ ID NO: 251825 - protein, 106 aa, Zea mays
  Clone ID: MRT4577_161249C.1.pep
PRVRLIGEGRVMELYSVLGALFHVSAIRDREFSSKPDVGQQCFSEASSRRPADLLSSFTTIKSVMNGLYDGLKDVLLILLKNLDTREKVLEYIAEVINKNASRSGM

SEQ ID NO: 251826 - protein, 46 aa, Zea mays
  Clone ID: MRT4577_16124C.1.pep
CTRSMFTCRARACSLCPAGRLESVYLCAPVRSSLLIAEKAVYFLFS

SEQ ID NO: 251827 - protein, 169 aa, Zea mays
  unsure (1)..(169): unsure at all Xaa locations
  Clone ID: MRT4577_161250C.1.pep
DEAFWCFVGFMRKARHNXRLDEXXGIRRQLKIVSQIIKRKDSHLYRHLQKLQAEDCFFVYRMVVVLFRRELTFEQTVCLWEVMWADQAAIRAGIGRSTWGRIRLRAPPTDDLLLYAIAACVLQRRKLIIEKYSSMDEILRECNSMAGQLDVWRLLDDAHDLVVNLHDKI

SEQ ID NO: 251828 - protein, 268 aa, Zea mays
  unsure (1)..(268): unsure at all Xaa locations
  Clone ID: MRT4577_161251C.1.pep
LVTXKDIWTEEEDIVLIQAHKSFGSHWSTIAKFLPGWPENAIKNHWNSTKRSLGSKRRLKKKKSQQAPPGQLSVLEEYIRSLESDSSSAAPPAATSRPAIGRPRRAVHTSAVPEMELHLSAPNNQDAPVRHQPRAISQGNPMLPDLNVSYDPEETHYMGYPMYDPAAAPQLQLVSQEPRQATFTWLPFGGPRMALNGEHASGPSSYDVGGSSGNAGYYSEAGPSNVGGSGGDGQADDDTTNNDDLDLASREFFMPSCDEVRLGLARFK

SEQ ID NO: 251829 - protein, 63 aa, Zea mays
  Clone ID: MRT4577_161252C.1.pep
GIGNLKREVPSMTHGPLIWEGTLKPVETQKIFPPRGKFPLPKLWRYAFKRQPFFETGRLKKFF

SEQ ID NO: 251830 - protein, 575 aa, Zea mays
  unsure (1)..(575): unsure at all Xaa locations
  Clone ID: MRT4577_161253C.1.pep
MKALRRSSTSSSPSSSSSPTAASSPPSSSWIHIRSLLAAAASSSSSSSFAAAAAGSAVAVVSAAVAAPSSSSPASSSPHSDRGGIKSPWSRRKRKRALSREQWESLFSANGKLRDGGKKFLKKVRSGGIEPSIRSEVWPFLLGVYDLNSSEEERNSVKIKKRKEYEKLRRQCQQILNGYKGNSLKAITEVNNEVCSSLEGTADGSESPCFEDANAIRAPVSLEELKPEQNEVDQPENIPCAVVECIEEDADELAYAYPCIAESESSDSESSDEDDPGRMSVSGEENCDPDPKFIRSTSFKADLFRSSRTPEDFATWQRIIRLDAIRSNSEWIMFSGNQAEVPKERALQSAASVGLKDYDHLEPSMIYHAARLVGLLEAYAVYDPEIGYCQGMSDLLSPIIAVMEADDEAFWCFVGFMRKARHNFRLDEVXGIRRQLKIVSQIIKRKDSHLYRHLQKLQAEDCFFVYRMVVVLFRRELTFEQTVCLWEVMWADQAAIRAGIGRSTWGRIRLRAPPTDDLLLYAIAACVLQRRKLIIEKYSSMDEILRECNSMAGQLDVWRLLDDAHDLVVNLHDKF

SEQ ID NO: 251831 - protein, 69 aa, Zea mays
  Clone ID: MRT4577_161254C.1.pep
PFTQRGGPNSLGYLRRGPRFFNPLAVATPLVAPFLQQQQQLLPPTQFFLRAPALQHPMVGGAFFRLQMR

SEQ ID NO: 251832 - protein, 91 aa, Zea mays
  unsure (1)..(91): unsure at all Xaa locations
  Clone ID: MRT4577_161255C.1.pep
MLCHRVSTSSSEEQEDQAHLLLXPGTEDAEAVALGLXDFPSAGKAMRDDEDSFVWLAATDSSCPRFPLLDAGARGGWGRESSFSPIAAQIH

SEQ ID NO: 251833 - protein, 192 aa, Zea mays
  Clone ID: MRT4577_161256C.1.pep
MAASGGLEQWQKDGFFQAAEEVQESADLMESVYRTWMRERSNGSGSEEVDDLQRELQTALGTAKWQLEQFERAVSSSNDKYSLEEGTVARRRQFVVAIEDQISRVEKEINGSLMDNGGQGLNWVKLDDEERDDLVAFLSAPAEFYSEMKSTDISDRVLSRQKNVPVGRNDQSDPPLIIKDIYVLLLRVMFVV

SEQ ID NO: 251834 - protein, 522 aa, Zea mays
  unsure (1)..(522): unsure at all Xaa locations
  Clone ID: MRT4577_161257C.1.pep
MHRTLSMAVSVFSSSAAIFDKMNKDKHSENSQGESKDNILHSVGEGTGQPKNQNLHVSQSRRSSMRISNFSMKRGPSMAMRAPSVAIRAPSISLRGPSMSSRASSVSVKEDQISPKKSDEETESVLVKLSARQITLLLSSIWAQATSPENTPVNYEAIAHTYSLLLLFSGSKASTFEALTQSFQVAFSLRSYALTEADSLQPSRRRSLFTLSTAMIIFSSRAYNVLPLIPICKQMINDRAADPFLHLVDESRLTAVKDSSNDPSKIYGSPEDNNNALKSLSEIELSESQSRECIVSTIMNNIANMLDAELHNVRSQLLSDFTPDDMCPTSTQFFEVHADNPSSGSYETGHHQEGLLIDLGNDHDAFGEASESAEASASSIPASDLLSIDQLLETVGAEPAPQAGVVSADIGFKDMTSHCEALTIGKQQKMSAFMSFQQSVQAAGLPSSQPNQMELDLSQDLQLPQAGAHSTNPFXLMTAFRDIHSTRXPNGDNAQPGQDFQQQSLKLPAASPYDNFLRAAGC

SEQ ID NO: 251835 - protein, 60 aa, Zea mays
  unsure (1)..(60): unsure at all Xaa locations
  Clone ID: MRT4577_161258C.1.pep
RGFPLKAGGWPSPXYIFSLGLLLNCLHSGSIFLPQNNSHVRLHLLLPPYLSTLCSSSSIY

SEQ ID NO: 251836 - protein, 105 aa, Zea mays
  Clone ID: MRT4577_161259C.1.pep
KRRGGGANFIFHFFLGRKHSFYTLGRSGPFQIHTGRPFYTLTNSTRLPRAVVSYTLNWLKKTRPVFKPSTRPYLLLFLGKPLNQAPGSLFSYTHHNRETKNPPEG

SEQ ID NO: 251837 - protein, 59 aa, Zea mays
  Clone ID: MRT4577_16125C.1.pep
MIWGANSFFLKGQFFKGLDPIFQRKKGGLFCLEKNTKRVSGKEALINLGGKKAGDHFSK

SEQ ID NO: 251838 - protein, 46 aa, Zea mays
  Clone ID: MRT4577_161260C.1.pep
FYIVFTNMFMYTGGGLGNKEDSSIRTHKSNTTDLGERGQGQAQWSD

SEQ ID NO: 251839 - protein, 58 aa, Zea mays
  Clone ID: MRT4577_161261C.1.pep
MRRPSARHSAHGESHVTFMIDKCDGILGLGYPEISVGKAPENWSSMQERELLAEDVFS

SEQ ID NO: 251840 - protein, 94 aa, Zea mays
  Clone ID: MRT4577_161262C.1.pep
SARGNIQGLFYRSCLEAARRDCCAAQVCCLASKHLSSGGGLSGWCKFGLDEGLEKILEKIQMLGCKPNTLYVLNVEDKDNNDLDNEYRQRFKEE

SEQ ID NO: 251841 - protein, 53 aa, Zea mays
  Clone ID: MRT4577_161263C.1.pep
VHERRRLRAQGPRGASYDAPAQRGPLRRWARGGRRPRRLLFTLSFSLRFIYKI

SEQ ID NO: 251842 - protein, 61 aa, Zea mays
  Clone ID: MRT4577_161264C.1.pep
DNVYMDGIGGRQGQIQTMYMLLRIHTVKNKNRHCIYGPMTSNGTDPCTMSFNTMCTFDHSL

SEQ ID NO: 251843 - protein, 152 aa, Zea mays
  Clone ID: MRT4577_161265C.1.pep
FGSRQELARNPRLDLFFVKDLNKEQRLELESGTFDAVLCTVSVQYLQSPEKVFAEIFRVLKPGGVCIVSFSNRMFYEKAISAWRDGTAYSRVQLVTQYFQCVEGFTQPEVIRKLPSAGGSPSSPLDAVMRLFGVAGSDPFYAVISYRNFKPM

SEQ ID NO: 251844 - protein, 105 aa, Zea mays
  Clone ID: MRT4577_161266C.1.pep
RGEFVLWQQAVWSRVTVGLGGHHTAWGQVAAPAHGDWVWIVSSQGFCLKQLFEGALCRSLSTAHLDGFQLIHGAMRPSLRPISEHLHHPPKKPPSAVPSHLPGHH

SEQ ID NO: 251845 - protein, 106 aa, Zea mays
  Clone ID: MRT4577_161267C.1.pep
MARQGVVASMHALALLLGAFAAIPTGVQSIGVCYGVNGDAATAANAQTYNQNLINHVGQGTPKRPGPIETYIFAMFNEDQKTGAESERHFGLFNPDKSPAYPINFS

SEQ ID NO: 251846 - protein, 334 aa, Zea mays
  Clone ID: MRT4577_161268C.1.pep
MARQGVVASMHALALLLGAFAAIPTGVQSIGVCYGVNGDNLPPASDVVQLYQSNGINLMRIYFPDANALNALSGTSIGLIMDVPNTDLASLASDPSAAAAWVQSNVQAFPSVSFRYIAVGNEVSGGDTGSILPAMQNLNAALANAGLGGSIKVSTAVQSDVTQGFPPSQGTFSQGYMAPIAQYLQSTGAPLLCNVYPYFSYVGNPAQIDLSYALFTSPGTVVQDGSNAYQNLFDALVDTFVSALENAGAGNVPVVVSESGWPSAGGDAATAANAQTYNQNLINHVGQGTPKRPGPIETYIFAMFNEDQKTGAESERHFGLFNPDKSPAYPINFS

SEQ ID NO: 251847 - protein, 80 aa, Zea mays
  unsure (1)..(80): unsure at all Xaa locations
  Clone ID: MRT4577_161269C.1.pep
LFSNILLCGGSXSILLLMDLLKNEALAETAQAATVKARAAXNASDVRFXXGMXEEHLASLVSFQQMWLSKAVYEEHGVSY

SEQ ID NO: 251848 - protein, 85 aa, Zea mays
  Clone ID: MRT4577_16126C.1.pep
PRVRPRVRPRVRLNITRKISEDNQSVLVYCFSWVVIFVVLLVMKTVCVLILGWILFDSVLTVKNILGMLLAVMGMVVYSWAVEAE

SEQ ID NO: 251849 - protein, 63 aa, Zea mays
  unsure (1)..(63): unsure at all Xaa locations
  Clone ID: MRT4577_161270C.1.pep
QWSLSLKASSRASMATWNNPLMRPSIARRREXKGKAGDGMRSCRWMGLTGCRGMGCGTGRDAR

SEQ ID NO: 251850 - protein, 136 aa, Zea mays
  Clone ID: MRT4577_161271C.1.pep
MATEPPPAAEKKKAPLPKVVTLNKALKLAQTWVDKMSASEPDEPNDKDFEGRPPKLGLGAKAAPGVKRVVPTDPVERRLLGKVNAQKRKALEDDDRNAQVANEASDDDEPESRTSAFNKKRPVPSVTSTPLGKKAK

SEQ ID NO: 251851 - protein, 170 aa, Zea mays
  unsure (1)..(170): unsure at all Xaa locations
  Clone ID: MRT4577_161272C.1.pep
KKHPPPPPCWRGAQPVFLKKKKAPFSRKNGPPPPGAPPRGPGVGPVGGGPDPGRGPPPNPGEPGGGGGPGGAKPDXPPGPGFLPASPRSRVSPTSLIRGRLGGPPPSHPSVSXPPETPPGSXGPSTRGPMXPHPPGAPQDRFPPGGQVKFPARPVGVQGLLPQRFFQIPP

SEQ ID NO: 251852 - protein, 42 aa, Zea mays
  Clone ID: MRT4577_161273C.1.pep
ITAVKTQLHNYLTKGANYINLHISTTFSQTVITENCYYYFHL

SEQ ID NO: 251853 - protein, 60 aa, Zea mays
  Clone ID: MRT4577_161274C.1.pep
GSTRQVIIAVIPSSSIWPSEVEMVADDQSIDVTSSSLRYVHCTVVEDLKVHYGFLKHSCI

SEQ ID NO: 251854 - protein, 94 aa, Zea mays
  Clone ID: MRT4577_161275C.1.pep
YCKDVLHTLMSSCLKLTCKTELWVSTRNAYIAFEGPCLISDIVLCWFAFSMSVCSMERQECCLFASVPETEKCVPSPSFVLLITLKTMEPHASA

SEQ ID NO: 251855 - protein, 113 aa, Zea mays
  Clone ID: MRT4577_161276C.1.pep
KGREDVKENASKERKQCNPRAIFFFHLSTAQIAGRSPTIVFISLSSKPFTRATSIFTLSVSSSCTRKGTIVNTSCLAPTFTKGFTGHSKGEQGTKDSKSEFHFFFCLMPGPGR

SEQ ID NO: 251856 - protein, 105 aa, Zea mays
  Clone ID: MRT4577_161277C.1.pep
GVLPKIGLTWRLFKTVCILFSQSIGQIVEKKKKKSQVAPIDPSIPLIPKGRIAKPSVRGAKGKAPDAKRANIPSPSSHFMQLFDSGFGLVLCVVCVAENFFFQVV

SEQ ID NO: 251857 - protein, 76 aa, Zea mays
  Clone ID: MRT4577_161278C.1.pep
LPFFFFFFFFNSGKRIYRACRTSHHFYKLIFFFKGTQHQPGKFESFLLKKKKNLQNLKNKKGGKKKVFCVKTKKKF

SEQ ID NO: 251858 - protein, 55 aa, Zea mays
  Clone ID: MRT4577_161279C.1.pep
YPGERGGLIVLFNTLHMCLTWLRYLNNEFMIAIHAFIAPSSFFIKSRSSVAPHSF

SEQ ID NO: 251859 - protein, 84 aa, Zea mays
  Clone ID: MRT4577_16127C.1.pep
FLIPPPSQSPLSSTPPYSTHYTSSIPTSNPNFTHNHSHTINLLTFHIFSINLYLKHNYTPYILTLTLTTSILIFPTFLIHIPIH

SEQ ID NO: 251860 - protein, 55 aa, Zea mays
  Clone ID: MRT4577_161281C.1.pep
PSSSFFFFFFFFFFFFFFFFFFGRQKEIFLILAPGGLFRISGYTKRIAFLKSKVT

SEQ ID NO: 251861 - protein, 67 aa, Zea mays
  Clone ID: MRT4577_161282C.1.pep
MAFQLYFIVPRFHCLLGYSSPRSSVAELFVLMVGINKVSYQGILCDYIGSDTNTFIVTTTTLILFSG

SEQ ID NO: 251862 - protein, 816 aa, Zea mays
  Clone ID: MRT4577_161283C.1.pep
MLPAVAAASPGLSHLPRYHHLGRRFHLRRHRLLPAIPARLSCGATHARRLLLAGAFAKGEGSSGQDVDHSAGATNSGSAYLGLFVRLLGLDNDTRDREHAVCTLYQYSLGGRKSIDEIMQFPGCIVLIISLLKSESILACEAATGLLRNITSVHIYRKMAGESGAMEEIINLLCKSTITPKILEQCLCTIWNFSIDEKWRYKVLKSDVLMKIVGYLDEEDIQVKEAAGGIISNLALSSSSHGALVEVGVIPKLVHLLQTKEDDYKIIRKEAKSSLIQLATDDCYYSLIIEEGLVRVPLVGSAAYKAFKPLPHSWPSFPDGSKIQRSSHPPKYGATELLLGLSVNENDTKPDEAKINAMIGRSNQQFLARVGAIELDDQGQEESGSEKNDMYTILPWVDGVARLVLILGLEDVSAIKKAARAMGDASINEHMRTSFKEAGAVKPLLQLLKHKDVHVREAGAYALEKLCVSATVCHNIKTEGGLELLVNIVKDRHTPVELLEKIIYILSRMFDMGICMVAVPDTEGYKDSENSAKTSVNQEMSSELIFDFDAISHLTEVLKEASPRLQAKVCCVLDHIAASEQHATAMTAACTGSVIEAILEIGVIHGTRSDSENFEIPSVVIKELSEAVSAAVRLLSKLLNFDLFIRSINGEKITSLLRRTLKSNFPLQSKDCLAACLIKLESRAGLSGDHGVSSIDMEITIYETIPRLIEQMMISLSFENKRSAVIELNKIISGGVLEYTRAVADSGGIFPLVKMLEEADGDALEAILSILYNLSMDPENHPAIIAAGAVPLLKRIVRTEAPQWSSAIQLLRTLPV

SEQ ID NO: 251863 - protein, 158 aa, Zea mays
  unsure (1)..(158): unsure at all Xaa locations
  Clone ID: MRT4577_161284C.1.pep
AKKASTAAPAAISSPRKTRSGTSGKRVALVSAPPKAAVAKKVKASAAKGKAKEPAGSKAKGNGEAPSAEGSAKTIIVEACKQCSSFKIRAEAVKNGLESAVTGITVVINPEKXRRGCFEIRQXGGEVFVSLLAMPRPFTKMKSLDMDQVISDIAKKLA

SEQ ID NO: 251864 - protein, 72 aa, Zea mays
  Clone ID: MRT4577_161285C.1.pep
LGSLFPINLILISCWFLTAVLVGCLLRTGQLAPVVWPSFPCSVCRPSSSLLVPMIVSIVLFVWSPRFVSFAI

SEQ ID NO: 251865 - protein, 180 aa, Zea mays
  Clone ID: MRT4577_161286C.1.pep
PRGRGVNTSSPYSPEPERAHMAEKVSTLVVTLNHGCCRCFTRIRKTVCKLQETEDIRAISFDEVSGTVTISGAFDPLVLPCKLRRKAGCVIRDIQLVAAELKLTPQRPAMPSKPPGPAPAPPCCCGMCICGCGGYGYGYGCRCQFVDHPPCYEGLPLRQYPKIEVTCDCEEASSAACKIV

SEQ ID NO: 251866 - protein, 137 aa, Zea mays
  Clone ID: MRT4577_161287C.1.pep
VLRARVLAETEDIRAISFDEVSGTVTISGAFDPLVLPCKLRRKAGCVIRDIQLVAAELKLTPQRPAMPSKPPGPAPAPPCCCGMCICGCGGYGYGYGCRCQFVDHPPCYEGLPLRQYPKIEVTCDCEEASSAACKIV

SEQ ID NO: 251867 - protein, 66 aa, Zea mays
  Clone ID: MRT4577_161288C.1.pep
KGPAGSCCCYCWCWTTVLCETDLLVRSYFVFFFFSFKLSFFACSFVQNMCSGKKKPKAKLHLHIYT

SEQ ID NO: 251868 - protein, 62 aa, Zea mays
  Clone ID: MRT4577_161289C.1.pep
LFAVVAQVESGPYPGHYVSLVENPQAPGNLIWENVGDGWKIRPNRHCWVPPLTTQVPPVGGE

SEQ ID NO: 251869 - protein, 86 aa, Zea mays
  Clone ID: MRT4577_16128C.1.pep
KHKQLGLGDFRIPLPSSVDWGYTTTKWGGPGNPLKASTQNLIPGPFAQGGQKPQQMSKKITIVLTQRGGGQKKNLAHETPWPSNLI

SEQ ID NO: 251870 - protein, 56 aa, Zea mays
  Clone ID: MRT4577_161290C.1.pep
FGGSEIVVAGKFDSATLDQIESVITATSANTQLVLEILAQMDDLQDFLSKDKHADP

SEQ ID NO: 251871 - protein, 63 aa, Zea mays
  Clone ID: MRT4577_161291C.1.pep
SSAKREKRYFVLGALNHSHARRWHLFMGGFESSRSFLISVSPLLFNLDNLWGFHPLILSKDHF

SEQ ID NO: 251872 - protein, 298 aa, Zea mays
  Clone ID: MRT4577_161292C.1.pep
MGDLPEPEAAMAVPEPSSSLALRVFYLRVSRCEVDESMLDTLALTHTPLTPDTILDVSGAEHQPGMGKGNGSVSFCLRRDRVDKRSGEATFVCTATVRVSGSVRFEVQSKDERIVVGILEACDVDSKGTKSWAMKCQAATQRGSGFLRCGGEKRDTKPPVVEVYVAGVFRGTPVVFTKATQLRFRRRRQVRAFMDPIPECREQVEETHHPEESGYRCYKPDPNWDDDDVDDDSLYMRSDGTDDGEEYSELSWFTAGVRVGVGISLGICLGVGIGAGLVVRSYQSTSRTLKRRLISNLL

SEQ ID NO: 251873 - protein, 41 aa, Zea mays
  unsure (1)..(41): unsure at all Xaa locations
  Clone ID: MRT4577_161293C.1.pep
QLCACAQWKGLSSKLMSEMELFQIIMSRRLPIIIILFEPFX

SEQ ID NO: 251874 - protein, 114 aa, Zea mays
  Clone ID: MRT4577_161294C.1.pep
RVLIDNQAAEEGYRNFEVISHPSKRLRVSVKREAGPHSEDESVAPVVGVKREETHEEATTSFSLHGAFLKPCFTGKRQERKPKKQMKRRRGGPTAAAAALISWRSKRIRKKKQL

SEQ ID NO: 251875 - protein, 59 aa, Zea mays
  Clone ID: MRT4577_161295C.1.pep
PGFILATEFGASLYFLAKKNMTLGKAALVTVGGLTAGATVGSALENFLQDLKPSCHPGM

SEQ ID NO: 251876 - protein, 68 aa, Zea mays
  unsure (1)..(68): unsure at all Xaa locations
  Clone ID: MRT4577_161296C.1.pep
MQSTLSWSCPGKVALITVGGLAAGATVGSAVENFLQVDIVPFLSIHSPAVVVSEFILSXQLLISLFVR

SEQ ID NO: 251877 - protein, 68 aa, Zea mays
  Clone ID: MRT4577_161297C.1.pep
AVVTREETGFFFFFFFFFFFFFFFFFFFFFFFFFWTTLQIPPNQKRLQSLWAPNHKRGGGAKTYQFYG

SEQ ID NO: 251878 - protein, 90 aa, Zea mays
  Clone ID: MRT4577_161298C.1.pep
IVIQTENESRELLSSSFDLSVKKIKEDEAFFFLFLLLGTAKWGSKDETTLVSPPTPLNFIVFPTTCYPKLFLMCFTHHILSILNVMAGLY

SEQ ID NO: 251879 - protein, 234 aa, Zea mays
  unsure (1)..(234): unsure at all Xaa locations
  Clone ID: MRT4577_161299C.1.pep
RSSYTNLHVSIEPAVIPSEGAYQGKAALVTVAVHEALAANNSVLAYFMHDQAAVDQFESPFVMXLVQSLSHRRAGKCAINSIRCGSVKPVKSAGAGAVPQWMQATMKNAPITFETPSSSSLGIQSCVYGALMVFTYASGSSTSLPSAYTSPDVPGFILATGFGASLYFLAKKNMNLGKAALITVGGLAAGATVGSAVENFLQVDIVPFLGIHSPAVVVSEFILFSQLLVSLFVR

SEQ ID NO: 251880 - protein, 56 aa, Zea mays
  Clone ID: MRT4577_16129C.1.pep
ENPPSWRWLFYIDRHIPSPNKAVYFQTYNQTLSPTPTDPCNKYSTQALTPPTKSLS

SEQ ID NO: 251881 - protein, 182 aa, Zea mays
  unsure (1)..(182): unsure at all Xaa locations
  Clone ID: MRT4577_1612C.1.pep
FSPPGPGPPRFSRLVPPALGQIRVPFPLSFPPPKKRSSPGVFSPPGQRGRPPPMERWPMGFPQIPPFXNGPPGFPRGSPGVKTPGXFGQIFPPPQNQRPGVFNFXFPTKGPPRPPRIFGGYPKFFFLGGGGPPPLNGVFLIGSRPGGQFPFFLGRAGGKKFFIFFYPPAVPKISTPCARAGF

SEQ ID NO: 251882 - protein, 197 aa, Zea mays
  Clone ID: MRT4577_161300C.1.pep
MNVNVSRKQISAHLQKHRKKVEKELRNSNANNSSHGIGGASNSRPSRIFEIGHGSKFQYNRPDVQPEHRSDESVSVEQTETIEETQSNRLYEAMRRALQLGSVFEEPQLPNIDPPAGKDAREVEEVEMTMRDGNYRDAGTDAFGDKNEASGTHSSDDNNAKVKSKDDSADKLVSCHDELRPVVTLVTYSDSEDGETL

SEQ ID NO: 251883 - protein, 276 aa, Zea mays
  Clone ID: MRT4577_161301C.1.pep
MATATTLSFSGGGGGTTLLRGHVALASGRCCTFPRSRWRPPRLSASRADDSSPAPFEMTVEDALKLLGVAEGASFDEILRAKNAVLASCKDDQDAVAQVEAAYDMLLMQSLSQRRAGKVANNRIRFADVKPVKSAGAGAVPQWMQATMKNAPITFETPSSSSLGIQSCVYGALMVFTYASGSSTSLPSAYSSPDVPGFILATGFGASLYFLAKKNMNLGKAALVTVGGLAAGATVGSALENFLQVDLVPFLGIHSPAVVVSEFILFSQLLVSLFVR

SEQ ID NO: 251884 - protein, 276 aa, Zea mays
  Clone ID: MRT4577_161302C.1.pep
MATATALSLSGGGGGTPLLRGHAALASGRCCAFPRSRWRPPRLSASRADDSSPAPFEMTVEGALKLLGVAEGASFDEILRAKNSVLASCKDDQDAVAQVEAAYDMLLMQSLSQRRAGKVANNSIRYADVKPVKSAGAGAVPQWMQATMKNAPITFETPSSSSLGIQSCVYGALMVFTYASGSSTSLPSAYTSPDVPGFILATGFGASLYFLAKKNMNLGKAALITVGGLAAGATVGSAVENFLQVDIVPFLGIHSPAVVVSEFILFSQLLVSLFVR

SEQ ID NO: 251885 - protein, 162 aa, Zea mays
  Clone ID: MRT4577_161303C.1.pep
MAGPSVPAAALAALLAVAALTCCAVAEPPPSERSALLAFLTATPHERRLGWNASTPACGWVGVTCDNANSTVVEVRLPGVGLVGAIPPGTLGRLTNLRVLSLRSNRVLGTVPDDVLQLASLKALFLQQNLLSGPIPTGIQKLGGLERLVLSHNNLSGSIPFA

SEQ ID NO: 251886 - protein, 80 aa, Zea mays
  Clone ID: MRT4577_161304C.1.pep
FPRMSPAGARGHRRYVFATIPLPVSIAAPQGPPIRYRPASGGGSRRSSLSRLPGSIRAIIFSSVSQRICASDSVSKQKME

SEQ ID NO: 251887 - protein, 134 aa, Zea mays
  Clone ID: MRT4577_161305C.1.pep
GMHLLPREPFIKAALTMDRPNPKPSARNVPIRLQEEDDPVPIAVEEQRVLVQRGRDGALQVADLRRTEPENRTINRSIKGTAPAKSDGDISRLGALPTSIIRQFPGPVLDPVARVQAYLLFPFPSSAQRRFERS

SEQ ID NO: 251888 - protein, 89 aa, Zea mays
  Clone ID: MRT4577_161306C.1.pep
WDQAPRPAKSKPVSSALCHSDTVFFGSSSELVRGMNDQNLVACYKLFLCFEHLCLYACSSLSHCPILPTSEFMGLCEKLSGRRGSADYN

SEQ ID NO: 251889 - protein, 204 aa, Zea mays
  unsure (1)..(204): unsure at all Xaa locations
  Clone ID: MRT4577_161307C.1.pep
MSMSKLARGWADLPRDLLESVPARLPVPDLVRFPAVCTAWQSVHAAAAXGFGRPXPSSPWLMLPFNPTARAGGVAKLSVARFLSLAEGRVYVIRQPAPAARDRLCVGSSADGWLVTADARSELSLLNPITGAQLRLPPAATLPFVDARRGADGRVESYGLRSCFADGGGCGEEALVPTETLGPDRLRTRYTKGPSSCRRRERCP

SEQ ID NO: 251890 - protein, 194 aa, Zea mays
  unsure (1)..(194): unsure at all Xaa locations
  Clone ID: MRT4577_161308C.1.pep
MAGADSSILDKPDPLLDPRLQAPTHDGPTGHREESRHPKQGYGSVTITPGPVKGMHHVPLLPPSPRYHGSVFDHVGSRTRNLDMSMSSLGKLPKLPLTVFDGDNKKKRXTXCESYFDMYEVEPEAWVKVAYMYLAPHVACWFQSVERKQPSLSWPLLYRLLHERFGRDXYQSLLRQLFRIHQQTPVTEYQPRFV

SEQ ID NO: 251891 - protein, 97 aa, Zea mays
  Clone ID: MRT4577_161309C.1.pep
VRPAMHACENLRRVLRPVQLVLVTSGCSVIARPHGKHLQLAIVGGPVDQGHPVVYGVGAAGDIRVDPYKGVQLAVLSRMHQVSSVPALAAVEAQLAR

SEQ ID NO: 251892 - protein, 59 aa, Zea mays
  Clone ID: MRT4577_16130C.1.pep
DMPGNYLMASDYTGGPYNVPKERCLQPTLPCLRKLHMTHKLHKRDTRRNLARPTRSLGA

SEQ ID NO: 251893 - protein, 48 aa, Zea mays
  Clone ID: MRT4577_161310C.1.pep
TPTNSLVACKRACPGPTVHQLYFTLDVLKFKRGRNLFPHPSQEGGGGG

SEQ ID NO: 251894 - protein, 47 aa, Zea mays
  Clone ID: MRT4577_161311C.1.pep
PPPPTQTNKKKKQSSNISSFNLHTYIYLQIPSTSIYQYNTHLTIIKH

SEQ ID NO: 251895 - protein, 47 aa, Zea mays
  Clone ID: MRT4577_161312C.1.pep
GICRVLPYIFIFPLHSDPHKKISSSIGLCFIFYRLYTSYDVILHSDS

SEQ ID NO: 251896 - protein, 162 aa, Zea mays
  Clone ID: MRT4577_161313C.1.pep
MATETFLFTSESGNEGHPDKLCDQVSDAVLDACLAQDADSKVACETCTKTNMVMVFGEITTKATVDYEKIVRGTCRNIGFISDDVGLDADRCKVLVNIEQQSPDIAQGVHGHFTKRPEDIGAGDQGIMFGYATDETPELMPLSHVLATKLGARLTEVRKNGT

SEQ ID NO: 251897 - protein, 155 aa, Zea mays
  unsure (1)..(155): unsure at all Xaa locations
  Clone ID: MRT4577_161314C.1.pep
QPPKRPQGRERAQHKTQETEEKPPRKNTEHRRRQKTGTRLFERGGKDSRESRAXQAHRWTQKQPRDMADNGRHAKLRPGRGKKGQTRTDMGLYSEMRKTGGRPETAGHNARRTAHPRTXRDNKKAPAKATGYFQKKKGRERCKPNTGTNNKLRRA

SEQ ID NO: 251898 - protein, 54 aa, Zea mays
  Clone ID: MRT4577_161315C.1.pep
RLSGSSTKIYGCSHTAIFVRPIGLCPWHTSRRPCFLNYILVGPVVVNKTSGILV

SEQ ID NO: 251899 - protein, 139 aa, Zea mays
  unsure (1)..(139): unsure at all Xaa locations
  Clone ID: MRT4577_161316C.1.pep
MPHRRSRRAAPQPGTRDAPEKNAPQPARQDPPPNTDRNGGGSMLGGVECTIAQRMTVXTXSAMEHRXVIAVLRHRTNHDETVDSETAAAAPAPPVMNADAGTIHSRAFQHXVNNYGSEIKKRDVYLDMLNERHREAESA

SEQ ID NO: 251900 - protein, 40 aa, Zea mays
  Clone ID: MRT4577_161317C.1.pep
FIEKPHPFLINSYLISPQTSTPALGKVPTQPSCCRVQAPT

SEQ ID NO: 251901 - protein, 109 aa, Zea mays
  Clone ID: MRT4577_161318C.1.pep
RERCGTHGLKKPTWKATPQLMGDPEPNHYLSAHQLISRNVNMRPNTLRIRGRDYEEPPPSNIYPPTTILFRGWAKLGHVPASIMQTKPPIPLLGNKMPIGPLIAPSCFG

SEQ ID NO: 251902 - protein, 48 aa, Zea mays
  Clone ID: MRT4577_161319C.1.pep
KKITITNFNLLMNNTHRNGISQFSNFDNVTHLFIYNYKPLTPYRFGIN

SEQ ID NO: 251903 - protein, 89 aa, Zea mays
  Clone ID: MRT4577_16131C.1.pep
MAIVPAPATTTAAAILCLCEVLFCAAADDPNLRDYVIQGRVYWDTCRARFVTNVTAYMGGSTARLKCKHFGTRKLERAISGVTSATGTY

SEQ ID NO: 251904 - protein, 61 aa, Zea mays
  Clone ID: MRT4577_161320C.1.pep
NAGLLNSREGQLQNPGRVNRETLFALTKKKKKPKKKKKKKKKKKKKKKKKKKKKKKKKGDA

SEQ ID NO: 251905 - protein, 217 aa, Zea mays
  Clone ID: MRT4577_161321C.1.pep
SGPGPPNLLIHPSPSPSRDPCTPPLQVLTSRIASHACAVRPPSPQPAGLATSPHLTQAHCTHTARLHLHSPRISRPRGPSCGAHVRVSLAHVRHLSLRGGPTVPRNIADRLAAVLDQHRGAPLLRRRGQPPRGPRHAAVGRRRQRDALRSTTPSSPHALRSWTLLRSISFHCVFYSMLPLLYYTHTADSIDYHKALALLLASRDENENTCMSCPVHV

SEQ ID NO: 251906 - protein, 49 aa, Zea mays
  Clone ID: MRT4577_161322C.1.pep
GGGPRAPECYPGMCFPMISRCVVNGAGQAPFVPWRNRAPCLMKCVCPGS

SEQ ID NO: 251907 - protein, 241 aa, Zea mays
  Clone ID: MRT4577_161323C.1.pep
RPGPPNLLIHPSPSPSRDPCTPPLQVLTSRIASHACAVRPPSPLLLAAATATLVLLSPSSAQPMPSPAAAPGPAGGTGIDSACLNSLLNMSDCLPYVSQGSTARRPDAPCCPELAVLVGSNPVCLCELLSGAADSYGIAVDYGRALALPGVCRVATPPVSTCTALGYHVRVGPAAAPMSGSPSPMSGISPSGEGPQFPGTSPTASPPSSTSTAARRSSAGAGSHLVALAMLPLAAAVSGML

SEQ ID NO: 251908 - protein, 37 aa, Zea mays
  Clone ID: MRT4577_161324C.1.pep
HNQFIFIQTDSNRTSHICFTLKTTLNTRTKLKSPHNI

SEQ ID NO: 251909 - protein, 148 aa, Zea mays
  Clone ID: MRT4577_161325C.1.pep
GAFFFFFFVWQIWDFNLGRSRHHDEKSALEVGYGSNHGGFMIKSYSDMLKEISSGTTKDLEDIYESRYCSTAEDIMSSNICQLSSKNVRSSLPSLFRTLKDACLVCTVPIQHMWGGVHCSNHYSSKVQSSKVKEGQILLRLKGVIRIE

SEQ ID NO: 251910 - protein, 234 aa, Zea mays
  Clone ID: MRT4577_161326C.1.pep
MVVAAMRRPCAVPALLVAAATATLVLLLLLSPSSAQPVPSPAAAPGPAGGTGIDSACLNSLLNMSDCLPYVSQGSTARRPDAPCCPELAGLVGSNPVCLCELLSGAADSYGIAVDYGRALALPGVCRVATPPVSTCTALGYHVRVGPAAAPMSGSPSPMSGISPSGEGPQFPGTSPTASPPSSTSTAARRSSAGRQPPRGPRHAAVGRRRRQRDALGRRLLRSSPQIAQLDIVA

SEQ ID NO: 251911 - protein, 38 aa, Zea mays
  Clone ID: MRT4577_161327C.1.pep
HPDTFGTRIMYAFYVTVSRISPSYLRTIISIVETYNID

SEQ ID NO: 251912 - protein, 66 aa, Zea mays
  Clone ID: MRT4577_161328C.1.pep
SKLSIKCLIKIFSNGSAGLGFSGPPNKPNNLLCQLHQINFLKIDQSQIEPKQNIKASPPCYDASSP

SEQ ID NO: 251913 - protein, 57 aa, Zea mays
  Clone ID: MRT4577_161329C.1.pep
DVLERRRSTHEEARARSYVLSLLLSRSLLPQLLMLNANTTILLTLTLVDPTYSLERN

SEQ ID NO: 251914 - protein, 87 aa, Zea mays
  Clone ID: MRT4577_16132C.1.pep
PAPVSVLFPCWSLYIFMGQGIYIFGLHVQKNVRDALNFALDEKMSADPYDFLMEEKELLAWVKGYPLNGLRLCGGLILTCFFKIEKR

SEQ ID NO: 251915 - protein, 113 aa, Zea mays
  Clone ID: MRT4577_161330C.1.pep
SFYPQVALNINAFLQQKQGLGFYPQDVANNVCFLQQQQLLPFNQLAFTNPTTLLQQPTIRGAILYNLYELYCNNKVLMLLKPSRERVRGQELLHPERVPDRRQQVPGLNGWPF

SEQ ID NO: 251916 - protein, 181 aa, Zea mays
  Clone ID: MRT4577_161331C.1.pep
MFASRPVVHPLEVAAPAHPVQQPAPGVLMKDLPGMPGTPGGLGLRVLQLLFAAISLAVMSSTADFASVSAFCYLITTTVLQCVWSLTVAIVDIYALLVKRCLRNRRAVTLFSIGDGITWLVSLSGACAAAGITVLIDADLIMCSENPCASFQTAVAMGFMCCFSLLPSFLLNFYSIASSHG

SEQ ID NO: 251917 - protein, 718 aa, Zea mays
  Clone ID: MRT4577_161332C.1.pep
MSQEKKAVAEMKLSLSEEKNLSFIESISKTNTEKITREILEGLSEDTGDSDSYDVESGGEDSEDRSWRPSHSVFGKSAIKQSHLDNMRGRNFRDMSIVRADDGERTVPTPEENEVVIFQSFFKAGLRFPLSKFVVEVLKIYQVYLHQITPEAIIRMGIFVWAVKSQGLEPNAKSFCNIHELVYETKPWGFGARSGSSCPVPTFRKRWPEDWMKEWFYVKNDLKAREDIKDIIMRPIWQRFGLRKPKEHIAFRVWPLVEKWEMPKETIAKPDEGGLVRMKFTFRYEGKFVEPDDDWLKCIEATSDELPGPYSKAEDTALSVAFGGWKKKRLNRVFDAIGFVYPDYRYPLRGQKRKGTVSVKEVASAAPSEPAPKRKKKAKELTATSKAAIIEEPKAEGTKISEILSPSVEVGLPQAQKGPAVTPKRKRMVNVLDVLETIKSSSSTPKKVAEAQKAQIETTASRTETTKHQAKIETGPSESAKEKSLETEGENTKEILKQILTEKTLSSTPEASSKLPDYIVRHASGKMLSEEEKREAHRYAQKLKYPKGALIFNGSGEEDFLYCLPDSKEISVCREMARSFGFPTLEDGLSVLSKDELADSLAYNSLKGLILSNALRAQKSAEDEGCTMALNNLRSEVIELRNEGLDKDKILNSLLNKIKEDEATSKAQAEAQKCEIENLQKQLAEAKLKCATAVADRDASDYWKNHWEKTTAELRTSK

SEQ ID NO: 251918 - protein, 63 aa, Zea mays
  unsure (1)..(63): unsure at all Xaa locations
  Clone ID: MRT4577_161333C.1.pep
TGNLSCFLVIRQMDCTSTYLALAISCQNPFLXSCFHHHLTKRLILSFLRYFMPNALNHPFFFH

SEQ ID NO: 251919 - protein, 843 aa, Zea mays
  unsure (1)..(843): unsure at all Xaa locations
  Clone ID: MRT4577_161334C.1.pep
MSQEKKAVAEMKLSLSEEKNLGFIESIAKTNTEKITREILEGLSEDTGESDSYDVESGGEDSEDRPWRPSHSVFGKSSIKQSHLDNMRGRYFRDMSTVRADDGERIVPTPEDNEVVIFQSFFKAGLRFPLNRFVVEVLKIYQVFLHQLTPEAIIRMGIFVWAVKSQGLEPNAKSFCNIHELVYETKLWEKWEMPKETITKPDKGGLIRMKFTFRYEGKFVEPDDDWLKCIEATSDELLGPYSKAEDTALSAAFGGRKKKRLSRVFDAIGFVYPDYRYPLRGQKRKGTVSMKEVASAAPNEPTPKRKKVKVVTHRPCYIEPAIVPKFVCEASSATEAKKPIPAQKTEELTATPKAERIEESKVXDKNIRNFXLRQKLECHKLRKXVVTPKMKRMVNVLDVLETIKTSSSTPRKIAEAQKAQIETTASGAEDTKHQAEIETGTSGSTKEKSLETEGETTKETLKQILSEKTLSSTPEASSKLPDYIVRHASGKMLSEEEKREAHHYAQKLKYPKGALIFNGSREEDFLYCLPDNKEISVCREMARSFRFPTLEDGLSVLSKDELADSLAYNNLKGLILSNALRVQKSAEDEGCTMALNNLRSEKQLAEAKLKCATAEADRDASNYWKNHWEKTTAELRSSKERCYEKSMKCVETIKTSFASVGAYSNEGNFVLGDPEGPIDWINGEAEAFEEILSGRGDICAFSGARGIATILERGGCEHVKSLAQTEATLSIEGIKDPSAEASLVGGKFFTDIWENGGREMAREIIRKSEKGTHDAREAAEAAEKSAELERRIAALSPPPEPAEPMADPGAEEEDEITKVAEAIMDEVVARLLNEAAEAVLREE

SEQ ID NO: 251920 - protein, 202 aa, Zea mays
  unsure (1)..(202): unsure at all Xaa locations
  Clone ID: MRT4577_161335C.1.pep
ETIKSSSSTPRKIVEAQKAQTETIASGAEATKHQAEIETGTSESAKEKSXKPKEKXKETLKQILSENTLSSTSEASSKFPDYIIRHASGKMLSEEEKREAHHYAQKLRYPKGALIFNGSGEEDFLYCLLDXKEISVCREXGKKLXFPTLEDGLSVLSKDELADSLAYNSLKVRKKPFVCLKLRVLIFLIQHFFCRALFLAMP

SEQ ID NO: 251921 - protein, 489 aa, Zea mays
  unsure (1)..(489): unsure at all Xaa locations
  Clone ID: MRT4577_161336C.1.pep
MHIGEPDLASMVATRAQAGGAGIATPLPSADGLLARICRLGAMGCARDALDGMRDRDVVSWTTLMSGYAAAARPRDAVSLLRAMGCSGVRPNAVTFSAAACACARLADAELGRQVHAQVEIAGCARDTVVATALVDMYGKSGGVEDARAVFDAMAAPARNAVSWGAMLAVYAQNALGNEAVELFAELRTCGGGMAPNHFMLASVVSACAGMARLGIGRCVHGAVLRLGYGNNDVISVALVDMYSKCGRYLFSGFGSGRIKQPSVVTYTSIIVAAAKYGRWTCALTLFNEMVDQGVQPNDVTLLGVMHACSHSGLVDTGLQLLRSMQSRYGVAPCPSHYTSAVDMLGRAGRLEEAFELAKEAQLEGNHALKLXDSLLSACRTHKRLDLATMAGQRVYEFNNQQDVAAGLVVMSNAYISAGQIDNAAAVRSSMRLRGIRKDPGCSWIEVKDTPHVFYAGAVSCAGAWADKVLMLLDELESKMRERGYRGRL

SEQ ID NO: 251922 - protein, 90 aa, Zea mays
  Clone ID: MRT4577_161337C.1.pep
EVKHELDDIDGLTGGKADQGGDTFLPELQGRPPEFPRLADGVRRVQGGQGRPDLLLRGPGKAEPQVGLKLAPPGFLKNHLNQPNGLVTPP

SEQ ID NO: 251923 - protein, 168 aa, Zea mays
  unsure (1)..(168): unsure at all Xaa locations
  Clone ID: MRT4577_161338C.1.pep
MASANRWTLEIVSPEAPXRLFRAAVMEWYTLXPKVAVSHDSAGAQPVKDYGXSLASDRQIDFTSLMTVNFMKEKLKFLDTLQVXCKNTLIDGAGISDAIXHATSHIKVEPRNTGRIVSNVESTYKLLTCVDVNDEIAKGKESITAICKGAXVYLISDPDAYYYTSGLR

SEQ ID NO: 251924 - protein, 90 aa, Zea mays
  Clone ID: MRT4577_161339C.1.pep
PDPGHRSRCSRHVSPRLPTPFGDRIARCPFFLLLARRLTWPSRPGGLSDQGPEEQRGEAGGRAPLDRPASGVADGRERGSRVTTHARCRP

SEQ ID NO: 251925 - protein, 65 aa, Zea mays
  Clone ID: MRT4577_16133C.1.pep
HIQYCRVSVWHQSIFHPIIAVHLLISTCIYSRQSLVQYLRSYDTVSLKSKAQTALDRQCLIASLL

SEQ ID NO: 251926 - protein, 77 aa, Zea mays
  Clone ID: MRT4577_161340C.1.pep
ENFHKGAIFRAFANERRTSARIAPTVAAKANEPGWAPRRPPPRDLVKYAQSCMDTPVCRNNRKGWDQFRGKKTPAAR

SEQ ID NO: 251927 - protein, 137 aa, Zea mays
  Clone ID: MRT4577_161341C.1.pep
FADYNIQKESTLHLGLRLRGGMQIFVKTLTGKTITLEVESSNTIDNVKAKIQDKEGTPPDQQRLIFAGKQLEDGRTLADYTIQKESPLHWGLRLRGGMQIFGKTLPGKTITLKGEPPDPFDKAKAKTQNRGGIPPTH

SEQ ID NO: 251928 - protein, 62 aa, Zea mays
  Clone ID: MRT4577_161342C.1.pep
PTRPPTRTLTPTIYANAHSPTLHVRIKRKGGQNTSLTETNQLSWAPVTPASLARVGPALRVD

SEQ ID NO: 251929 - protein, 80 aa, Zea mays
  Clone ID: MRT4577_161343C.1.pep
FCDTMYFNTHDTICSSGPVITFEGACTSKIMLQLFVQDFYSCHRPFTQASRSQPHWEILPGAQPDCPQLHGSFQHFINHS

SEQ ID NO: 251930 - protein, 74 aa, Zea mays
  Clone ID: MRT4577_161344C.1.pep
TLAGSYGKPGDAMSLATLAAFAIAHVLSACVLVTAVFHVAFGHLILSVTAGLMVLGHIIKLRSALYAAAQPLAS

SEQ ID NO: 251931 - protein, 130 aa, Zea mays
  Clone ID: MRT4577_161345C.1.pep
PDGIAGDGTSNRALIYVLARYYLRGRGPCRPHSHNLALLQPSTIKYKHHIVPPAHMTTRCTFAKHLIQIPLLQRTTYTIQVSITTPIAPMPATRSCARHTSTLKVQLPTNNRQTLSITPQTIQPIITQPL

SEQ ID NO: 251932 - protein, 74 aa, Zea mays
  Clone ID: MRT4577_161346C.1.pep
MSYYSQHARVGVPPYLGYPGKDRYPPDGYPPSSYHPAAHCYPSDGYPQNGYATQYAQTRAQELQMNWPFFMERC

SEQ ID NO: 251933 - protein, 105 aa, Zea mays
  unsure (1)..(105): unsure at all Xaa locations
  Clone ID: MRT4577_161347C.1.pep
PRVRPLVRPVLLTNCNFAATYMWYLLNPRWDATIHVENVPDFXATNSCYCPVLKQLASAVIRDYYLNADRTKTLSDGSSTLKYRNPEYLLTLNYLTFYLSLVYAK

SEQ ID NO: 251934 - protein, 87 aa, Zea mays
  Clone ID: MRT4577_161348C.1.pep
AKPDSQLDFQASTETPLPSPLEASFITFSFPFLLDLPDFLFLLDFSGTGEAGRGSASSPFSTDEPFISSLIDPASTSGSTTDIRVSV

SEQ ID NO: 251935 - protein, 113 aa, Zea mays
  unsure (1)..(113): unsure at all Xaa locations
  Clone ID: MRT4577_161349C.1.pep
DNCHCMNGTQPYVSFTIDKLMFKQRETTSSXPSDHMYNLRRQTYSYKKSTYPRSSSDQRDHKTAPAVLHYDNKYKTERHTNPTHLTAQPMXHANEKADQTAVSCDTKISPHPY

SEQ ID NO: 251936 - protein, 90 aa, Zea mays
  Clone ID: MRT4577_16134C.1.pep
MGLLGRRPWLLLLALASAAVAVAVEASEGDADPLYRYEILPPSLIRCLASLSLPLPRVAGALCRRSPICSEMGHFGSEVGAGGATTIVAL

SEQ ID NO: 251937 - protein, 200 aa, Zea mays
  unsure (1)..(200): unsure at all Xaa locations
  Clone ID: MRT4577_161350C.1.pep
AGIPGSTPRPEEFYDVKERDDILIDKLDAIEKKIEGKLELLDHTFGKKGRALEEEIKDLVEERNSLSEKSRRPMYRKGGQIAKFTALLATGNYNGVVGFAKAKGPTAKIAIQRAYEKCFQNLHYMERYEDHTIAHAIQAKYEKTKIYLWPXPMRSGMSAAGRTVETVLYLAGFSNVKTKIIGSRNPLNVIKALFIALNAI

SEQ ID NO: 251938 - protein, 61 aa, Zea mays
  Clone ID: MRT4577_161351C.1.pep
IWTIIRTRFHYKLSILYSGIDMLFSLATYTPYYKPTSIIQYLHHQIYTYQLTIKSNITISI

SEQ ID NO: 251939 - protein, 70 aa, Zea mays
  Clone ID: MRT4577_161352C.1.pep
QCIVDMSTRRVVCLDTPRRGSCNSSRHGAHIDGVRLQLRRSTFQLDTVRVGSDLSGCVVERVTVRVGGRV

SEQ ID NO: 251940 - protein, 511 aa, Zea mays
  Clone ID: MRT4577_161353C.1.pep
MAAAVARSRAAAAWVRLLSLRPHSLAGSTALPRHGHHLGSRITPPRRHLAFSASSGDARPHQKFQSEWVVHELLAEVERERQRERQDRRAKDGKDQEEEPEEDEEDYMGVKPLIEKLERRKTKDMAAGEGFWEPTDSDSDEDDERYTPDAIKQRVDEFERKCKRHEEFLQSFAEADTLDEAHKWMTKINNFEERHLKLPLEYRVIGDMMNRLKDATGKERFVLLQKLNRAVRIMEIKEAYDPSNPANFGIIQHQQVGSPEDVVLNAGFDKEKQMIQGAELEDVDEEFNDVKERDDILIDKLDAIEKKIEGKLELLDHTFGKKGRALEEEIKDLVEERNSLSEKSRRPMYRKGFDVKVIDVNRTCKVTKGGQIAKFTALLATGNYNGVVGFAKAKGPTAKIAIQRAYEKCFQNLHYMERYEDHTIAHAIQAKYEKTKIYLWPGPMRSGMSAAGRTVETVLYLAGFSNVKTKIIGSRNPLNVIKALFIALNAIETPKDVQQKFGRTVVESYLL

SEQ ID NO: 251941 - protein, 76 aa, Zea mays
  Clone ID: MRT4577_161354C.1.pep
RTLEAVSELSLSSEHATLPGRRQQLRTDVQYDTATLRYLTVVKALFMSTMPKKDSAVQTPSLDKSKGTVFEIPWFF

SEQ ID NO: 251942 - protein, 104 aa, Zea mays
  unsure (1)..(104): unsure at all Xaa locations
  Clone ID: MRT4577_161355C.1.pep
FYPLYESEYFVIEFEPFVPHILSVIEYPHSPSLILWLIQSPLIRRGRCIVLFRQVLSHQRARXXXQQASDILRSSPLPLPXPPPPRSSFFLPSXPTSLPXNXXE

SEQ ID NO: 251943 - protein, 69 aa, Zea mays
  Clone ID: MRT4577_161356C.1.pep
ARNSVRAVFSNTILLGPTVVFPSSGCFKPVPAVVPTSSYNMTNKLVESPPELDDRPRNLISTASCNTLK

SEQ ID NO: 251944 - protein, 48 aa, Zea mays
  Clone ID: MRT4577_161357C.1.pep
KELNITKEAIGCRRPTNITYETTGDNSIRTIHSYWSRRRTSCILYEGG

SEQ ID NO: 251945 - protein, 52 aa, Zea mays
  Clone ID: MRT4577_161358C.1.pep
INHPPPPVRKKKNKKKKKKKKKKKKKKKKKKKKKKKKKKKKKKKKKKKKKKN

SEQ ID NO: 251946 - protein, 214 aa, Zea mays
  unsure (1)..(214): unsure at all Xaa locations
  Clone ID: MRT4577_161359C.1.pep
RPGMNGINDCPEGETRGAKELVVKLIVAHLTAVVAFCHLQSLRNERLVSIEPVLFLLSPFTVAVQTALGISLIQFYFIDSLARSPQSLSSHVRTYTRQWSILFARKPQSGPKKDDDTRSQPAEACVNXGRLLVMSATLLQFVATIFLYRRRWNLYGWESLSIVDHRTFELSVGGAAATVLSILLVLRLPGFXEAPSIPYTQEHGTTPEQKLLFC

SEQ ID NO: 251947 - protein, 187 aa, Zea mays
  unsure (1)..(187): unsure at all Xaa locations
  Clone ID: MRT4577_16135C.1.pep
MALRTLASKNALSFALGGAARPSAASARGVTTVALPDLSYDFGALEPAISGEIMRLHHQKHHATYVANYNKALEQLDAAVAKGDASAVVQLQGAIKFNGGGHVNHSIFWKNLKPISEGGGEPPHGKLGWAIDEDFGSFEALVKKMNAEGAALQGSGWXVWLALDKEAKKLXVETTANQDPLVTKGAS

SEQ ID NO: 251948 - protein, 77 aa, Zea mays
  Clone ID: MRT4577_161360C.1.pep
YSRTLTGRLPSILAPSNLLKKVIRMLQIYRSQPYTFYRISMQNVRFSVQSAKSFHFEALATYKDIHVSVKEHSISNE

SEQ ID NO: 251949 - protein, 94 aa, Zea mays
  unsure (1)..(94): unsure at all Xaa locations
  Clone ID: MRT4577_161361C.1.pep
EKKKKTPKTTKRARTAKKGNRSRRRRKRRPRTKPPAKTTQRXNAQIPRRKRRTNAAIQRPGHRTAPRNRXEKXRXTKARVKGPRNEKKNPXSPG

SEQ ID NO: 251950 - protein, 48 aa, Zea mays
  Clone ID: MRT4577_161362C.1.pep
IGASFKRAPKAGVHCNSCSLTSHNLSKTHARRRYPFRIANFYPLSSSV

SEQ ID NO: 251951 - protein, 227 aa, Zea mays
  unsure (1)..(227): unsure at all Xaa locations
  Clone ID: MRT4577_161363C.1.pep
MAVALAGRHVPTRAQRPCPAPDLRLPVLAAAAAPAPRVPVSLSLPLPLRSRLIAAVATKEPELGGGGSGAGDGAGGGGGGSGSDPXGEEVRKGRGGXKMGHELSMSQKLSLAYAALVGAGGVMGYMKSGSQKSSALVLYFVHTQLPVRPVFASSIGLSISGXALLSVMGSRFKKSXKMFPAGVVSHVSLVMVGGYXHGIFFFWFLMQFCSALVSFRDCFFTPLWMIC

SEQ ID NO: 251952 - protein, 341 aa, Zea mays
  Clone ID: MRT4577_161364C.1.pep
MRDQRTEEATGFIPNIDEYDQNSAVRSNGLGSRQSALPASGGKESLVLGYVRGASEIRSRRLIAQGPHAGSGPRPSEKTQNVSGNTNMQKLPIHVTGDAVAFDHQVPMEKVADARNGHVKTAQANDVSMMTDKSKDLIQPSSMLQAQKASGAAGSNTTGQPEGGPDSRTVFVSNVHFGSSKDALSRHFNKFGAVLKTHIVTDGVTGQSTGSAYIEFLHKESAEQALTLNGTSFMSRILKVVRKSSTEVTQLPVLPRASWGSPFASRLIRTAYPRPNYPGAIRGRLSLRGAARSLQWKRGVADSGDVGKPSPTAPGNQLVTPATRNFTYTRTEPKTNAGAMA

SEQ ID NO: 251953 - protein, 101 aa, Zea mays
  unsure (1)..(101): unsure at all Xaa locations
  Clone ID: MRT4577_161365C.1.pep
TSLCTYKAESQSLHRWLAKFCPLLPPPRSTIANAFSPDGKTLASTXHCIQTELKDIYFVSXGDHTAKLIDCHIGKCLKVLSGHHSIQTELKDIYFVSYQPH

SEQ ID NO: 251954 - protein, 77 aa, Zea mays
  Clone ID: MRT4577_161366C.1.pep
GSVWHEPRPVLPTLLRPWLPSRAGVGALCSGLRPAFLPSPGVLSSRFLAPLSLRVSLNISGAPPLRSGLRFPSSGGS

SEQ ID NO: 251955 - protein, 77 aa, Zea mays
  Clone ID: MRT4577_161367C.1.pep
MFLHALFMVQAMAALASSKEADWNAMRLREKELAAVKINPADVEIIASELELDKKIAERTLREHKGDAVAAVRFLLR

SEQ ID NO: 251956 - protein, 108 aa, Zea mays
  unsure (1)..(108): unsure at all Xaa locations
  Clone ID: MRT4577_161368C.1.pep
TPPDGARRGAEKRDGPGPDTETGKKTRDPPXKDDQTDHKGTRTTNSXNGAAGAGGRTKNVDXXXXETQXQAKNKNXTXDXRANAEANXRTTGTGKEXATPGRKTSGSS

SEQ ID NO: 251957 - protein, 69 aa, Zea mays
  unsure (1)..(69): unsure at all Xaa locations
  Clone ID: MRT4577_161369C.1.pep
ARNPDQAPIPKVKKIKRGGRPIFPMFPFLTQAXVPGKGPLKNLPKPLRNPLGKNLLPVISGPPKRTPTL

SEQ ID NO: 251958 - protein, 96 aa, Zea mays
  Clone ID: MRT4577_161370C.1.pep
PNTGFYFFFKTQTGGFWFKKSWGWPLAVIQIGPAKTGPLKGFPGLSYTSTHSINPLIFPTRARVLNYLKKTPPGFFKKIRPASSRAPFLRVDPCHM

SEQ ID NO: 251959 - protein, 63 aa, Zea mays
  Clone ID: MRT4577_161371C.1.pep
FGPYFIPGLPKHDPSSRVGLDPPSGLIFRHDLTRPFGPGWPNLFFFVSGRALDSYFGEPFSDE

SEQ ID NO: 251960 - protein, 139 aa, Zea mays
  Clone ID: MRT4577_161372C.1.pep
GAGAPRLQVLGAFRFNPLGGPPSHSREMAGFRSSEAGSRLIAFPRPKGVAGMQHRAGREGLPIGNFPAPSALGGICCKGGGIIFPPAAPSSNKVLVFCRRAPPPKKTPFFSREKKKKKKKKKKKKNPPKKKKKKKHPPP

SEQ ID NO: 251961 - protein, 278 aa, Zea mays
  unsure (1)..(278): unsure at all Xaa locations
  Clone ID: MRT4577_161373C.1.pep
PAGKIARLEPHLHQNKLTQSFATIWAAKIIDIRVDTAESDILADIKKGLRPDAGAEKTLPTLLLYDQEGLRLFEQITYQEEYYLTNAEIEVLETYTDKIAQCISPGSIVVELGSGNLRKVNILLQAIDRLGKDIEYYAVDLSLPELERTFKEIPIEGYSHVKCFGLHGTYDDALEWLKSPAVEAKPKTILWLGSSLGNFKRHEVPPFLAGFGKVLQTGDTMLIGIDSCKDPKRVFHAYNXPRRXVTHRFILNGLKHANDLMGETAFNLDDWEVIGEYD

SEQ ID NO: 251962 - protein, 156 aa, Zea mays
  unsure (1)..(156): unsure at all Xaa locations
  Clone ID: MRT4577_161374C.1.pep
MRGLTRAAKRAGEMAFNAGGGAVNWFPGHMAAASRAIRDRLKLADLVIEVRDARIPLSSANEDLQPVLSAKRRILALNKKDLANPNIMNRWLNHFESCKQDCISINAHSSSSVNQLLGFAELKLKEAISKEPTLLIMXVGVLNVGKSALIHSIHRI

SEQ ID NO: 251963 - protein, 135 aa, Zea mays
  Clone ID: MRT4577_161375C.1.pep
IQSSSPPAKDLSWPPRLPIASFSNRTPSLLMLGSPSRASAVITPSTRRALASRQIRLPTSGEHRVQNNSGSTLKPRDKSPRPSCGVPPHQRIHQCWRKRLKGESTLSSASSGLFDPLLAQCRNEKNPKPNLRPHR

SEQ ID NO: 251964 - protein, 56 aa, Zea mays
  Clone ID: MRT4577_161376C.1.pep
KAPTLGNPMGGNGLFLDALLVVKVKKKKFIFYLNKKPKKNSPSSSFWALLGGGLDN

SEQ ID NO: 251965 - protein, 104 aa, Zea mays
  unsure (1)..(104): unsure at all Xaa locations
  Clone ID: MRT4577_161377C.1.pep
TKPYESPXKTGREGSIKSDCATCGAGHALPVDXRVLTLSAAXRVGPRWLSLRGGDAAFGRASSRXQVRPPRXTRVRVRACXREGEHSCPRSGPRSWSPAWASAP

SEQ ID NO: 251966 - protein, 118 aa, Zea mays
  Clone ID: MRT4577_161378C.1.pep
GGAGPPGLAFLSSHPDIVSWGLGCELYTELGSPPCPFWGTKKIPCSNPRVGGEVRDFSRTRTGAPPGKKRGTRSWLRVSKKGGSGVLQTFSSSYNKYQKRNQIKQQTKKKKKIRKKIP

SEQ ID NO: 251967 - protein, 128 aa, Zea mays
  unsure (1)..(128): unsure at all Xaa locations
  Clone ID: MRT4577_161379C.1.pep
YLLTPKVALGPFGRCTLPFAARKMARAPKTKEASCMIMERKXHTPRGTQSKKGXDSLXPGATRRYXRKRSRYGGQTKPGFHRXAKTTKXKIVLKMPCXICIHYSQNXIMRCXRFEIDGDNKGKDTSLF

SEQ ID NO: 251968 - protein, 829 aa, Zea mays
  Clone ID: MRT4577_16137C.1.pep
PRGRPGSSLHNYETVRSYAGRSLTKLLKRWPSLISNCVLTLTGNLRDPKAPEHVVLGSCSILISQTVLRHLTTDSVSLSSFIMGILESSHHESLKCQKAITELFVTYNIRFSGISRSFFKTPENQADKPGFLSLISQINALGFETNGLHWRYNLMANRVLLLLILASRSESGIYSQMLAKIAGHFLRNLKSQLPHSRMLAISALNTLLQGSPHKTSAQNSKQPIDHPEDCNISSTEEILNEIIREEGFMNETLNSLSHVHIISDNDGSSKASYGASSFQSGSDKAITYFYFDFSASWPRTPSWISLLRGHTFYSSFARIFKRLIQQCGMPVISSLQSTLEEFLISKERPRQCVAAEAMAGMLHSDIIGNLECENNWLMAQLHKIMLAPSVESAPEWAACIRYAVTGKERAGTRAPVLRQKVLECLCTPLPHSMATSVLAKRYSFLSVALIEISPPKMSPAEKQYHVKILDELLDSMNHSSAQVREAIGIAMCVTTSNMRLSGLFGTGCSPQGLHGDVSMIEQTGNKYWSERLTDGANELAVSIQNSTQSKQLESTSDSAEDSMDDREQADAKRMETIFHFMIASLKSGRSSVLLDTIIRLVYPILSLQETSNKDLSLLAKSAFELLKWRILHRPFLETAITSILPLVSDPNWRTRSALLSYLRTFTYRHTFILSGSEKSQIWQTIENLLVDNQVEVREHAAGVLASLMKGIDEDLSKDFRERSYAQAQHIFVARRRNLKFSVGTIHGAVLALTASVLSVPYDMPSWLPSNVSLLARFIREPPPIRSTVTKAVAEFKRTHADTWSIQKDAFTEDELEVLRDTSSSSSYFA

SEQ ID NO: 251969 - protein, 144 aa, Zea mays
  Clone ID: MRT4577_161380C.1.pep
GKTIPLEVESSDPIANVKAKIPAKEGISPAPHRLIFPGKQLKNGPPLAESNIQKGAPLPLVFPLPGGIIEPSPQGFAPKYTQAKIISPKFYARLPPRAVNSPKKKCGPPPPLRAKKKIKNLSFPNRFLAWFGSPNPSFKPFLTA

SEQ ID NO: 251970 - protein, 45 aa, Zea mays
  Clone ID: MRT4577_161381C.1.pep
RTRLLGGAFEDAEITHVDDTVDPVRDMETISEDLRLKFSLDFVDL

SEQ ID NO: 251971 - protein, 60 aa, Zea mays
  unsure (1)..(60): unsure at all Xaa locations
  Clone ID: MRT4577_161382C.1.pep
IQVCIYCHQKCWCSIVCESGLKLAGLKVVFVTVXYRTSPLRKSACHGTQPKKKKKGGLXD

SEQ ID NO: 251972 - protein, 138 aa, Zea mays
  unsure (1)..(138): unsure at all Xaa locations
  Clone ID: MRT4577_161383C.1.pep
RTCHVDRKTQELYLWIYYFFLLLYYYIHILFYLYIIIFYICCICLILLHHNEEAKIAREVEAHEKRIKKELEXEKQGLLNRKKEEQMXREMERHDHERCNEERFMRERQRKEENSIXQQRRILITIMVDKKCYNVSLL

SEQ ID NO: 251973 - protein, 39 aa, Zea mays
  Clone ID: MRT4577_161384C.1.pep
ALFFFAELKTTILVLTAVNSWCFIYDNEPWSSYNCQNEP

SEQ ID NO: 251974 - protein, 39 aa, Zea mays
  Clone ID: MRT4577_161385C.1.pep
SQKILFILRDFSCPNKHTYRPPLCLSRNGVTDIIYSKIK

SEQ ID NO: 251975 - protein, 137 aa, Zea mays
  Clone ID: MRT4577_161387C.1.pep
MGKMRALFSRSRSGGRASRSSSTKSSSTPPSPARSPSVREDEMERVFRKFDANGDGRISRAELAALFESVGHAVTDDEVSRMMEEADSDGDGYISLAEFAAINAAPDAAVEEDLRHAFRVFDADGNGVISPDELARV

SEQ ID NO: 251976 - protein, 88 aa, Zea mays
  Clone ID: MRT4577_161388C.1.pep
NTCIKPFAKNIKPIGGKIKTDTKQKPRGANTKSQHRSIQPKPQGPNEKNYENKTATNVYDDVSGRAGDGAGNRPKGPQKAPPRAANDA

SEQ ID NO: 251977 - protein, 88 aa, Zea mays
  unsure (1)..(88): unsure at all Xaa locations
  Clone ID: MRT4577_161389C.1.pep
EEDEGKGAGNRDYSDQRDLILCLLSNKRMATLXQFKGRSLVSIREVSMNDGNEIPSCKGVTLTMDQRESFRSAAPAIKDGINKLKDSY

SEQ ID NO: 251978 - protein, 125 aa, Zea mays
  unsure (1)..(125): unsure at all Xaa locations
  Clone ID: MRT4577_16138C.1.pep
RDSQFIVSPKCIPLSNFLNPCDWERXGVTHVIPLLQLPPFPSGLHSWGFRTDGPSERLPNLAGNRDAPWAAPFGAAFGAVSRGVTLTLACSLAPALVPVPSAFFPPFAGFPRGALRGALPWGLRF

SEQ ID NO: 251979 - protein, 109 aa, Zea mays
  unsure (1)..(109): unsure at all Xaa locations
  Clone ID: MRT4577_161390C.1.pep
MCRRKTSEPKEENVTLEPIVCEGQFDFRVAHICVYINDTFIHVTDIYGRETYVRITGGMNVYADRDESSSYAAMLAAQDVASXCKELGITDLHINLLANGGSKTNTDGP

SEQ ID NO: 251980 - protein, 99 aa, Zea mays
  unsure (1)..(99): unsure at all Xaa locations
  Clone ID: MRT4577_161391C.1.pep
CTAVAAAAASIADLSHVPRRKTDVQNDFDPIYPSSELQKLSRSSNTLVQDSNCFLIDVKCLGCSSVATAFPLSQTAAILPVCATALXLPTGRKAEVTEG

SEQ ID NO: 251981 - protein, 115 aa, Zea mays
  unsure (1)..(115): unsure at all Xaa locations
  Clone ID: MRT4577_161392C.1.pep
MGSARHGGLLRRQRRGLGDVQAAAQEHQEHPEQLPIHGHLPFEHGSRRRHHGRRARRQNQPFPXTTTRGSFRQIHDRYSGVLQSIRAGHRRVARELKVLRAVRRLSRTCLVVACS

SEQ ID NO: 251982 - protein, 516 aa, Zea mays
  unsure (1)..(516): unsure at all Xaa locations
  Clone ID: MRT4577_161393C.1.pep
MGEANATGTPATATVRVLAVSRVAPAPAPAAADPVVVKLSFFDTPWVVLPPIQRVFLYELPGGDGEFTAAVTRLKSSLAATLAVYLPLAGKLAYVAGTGDVVVDCVDDPGVAFVEAEADAGIDTMDVRRLASDEAHDIPAFLALVPELPTKVLPAPVLSVQATRIPGGGLALGLSVHHAVADGQAVWRFMGAWASAARDGSPVTKSLPAPHYSREAVHVPNGDEFARQMLKMVAPNLPAVRSXTIAMHGTPAAPFFCASVTEPLACVHAGGHXVADYDFSQRFRLARRTFYLGGDDIRALKLRISALAEAXPRPRTTSSPTAEARRSRXSTFVALSALGWTSFVRCKGLGAGDDTYLVFLADLRARMDPPVADGYLGNCIKGCLATADAGDLLGERGLLVACRAIQAAVAEMEAAPLAGSERWIQKMMGLPFARLANVAASPRFRVYEASDFGFGRPARVELVSMNNDGEMVLVGGRGDGEVQLSVSLDPARMEDFKAHVFATSAAPSDSAAAAAN

SEQ ID NO: 251983 - protein, 42 aa, Zea mays
  Clone ID: MRT4577_161394C.1.pep
TAYDCSISIAPLDADIIWVPQYHNLIHAFQSAYYSCKCYSTL

SEQ ID NO: 251984 - protein, 98 aa, Zea mays
  Clone ID: MRT4577_161395C.1.pep
GDHSWHLFRKTRDISGPGSYRLSAKLSSVQETQLGSRRILSSPQAVQMWTCQEQTRSICIPLQGTMSQPIHNRWVQSKPSIYSFVSNLALKLGQSVST

SEQ ID NO: 251985 - protein, 57 aa, Zea mays
  Clone ID: MRT4577_161396C.1.pep
HANEKKKQLGTTQSSAMGRGHTKLTNLPTCPPPSSSDGTAISLLCSQMLSSCLKPDD

SEQ ID NO: 251986 - protein, 292 aa, Zea mays
  unsure (1)..(292): unsure at all Xaa locations
  Clone ID: MRT4577_161397C.1.pep
MFHGGRPLSLRGSLKALEADIHHANTLAHAIHRAYGGACVQMRLSYSSMAPIFLNLIQWMDCSCSLSYTLPSYLGLLEVLVYKVYVDEDASISTIERRASLKEFYSMLTIHXKLVIKKLFFSVQDFFLLMLLLLLQQWFNIVLGPHGMQLSYTLSXQLEDNLMDKDCKDKGWSAAAAAGGGGGRKLVAEDDREDECGICLETCTKMVLPNCNHAMCINCYRDWYTRSQSCPFCRGSLKRVRSRDLWVLTGDDDVIDTVTLEKENVKHFLSFIDSLPLIVPDNMLLVYYDYLV

SEQ ID NO: 251987 - protein, 504 aa, Zea mays
  Clone ID: MRT4577_161398C.1.pep
MSWLNKIFKGSVNRVSRGHYDGDWHEGHSSDHTRDTYDDSDNEDIDRAIALSLAEEDQNKGKSVAIDTDYNLEEDEQLARALQESLNAESPPRQNVPIEDVPVPQWNIPVERVPPRQYVPANEPTPHVYPRGGSRICAGCQNPIGHGRFLSCMDSVWHPQCFRCFACNKPISEYEFAMHDDQPYHKSCYKEFFHPKCDVCNNFIPTNRDGLIEYRAHPFWMQKYCPSHEDDGTPRCCSCERMEPREIKYITLDDGRKLCLECLNSAVMDSPECQHLYMDIQEFFEGLNMKVEQQIPLLLVERQALNEALEAEKNGHHLPETRGLCLSEEQVVRTILKRPQIGPGNRILDMIIGPYKLSRRCEVTAILILYGLPRLQTGSILAHEMMHAYLRLKGFRNLSIEVEEGICQVLSHLWLESEIIAGSSSNVASSSEASSSSSSSAPTSSKKGAKTEFEKKLGAFIKHQIETDSSEAYGGGFRAGYPAVERYGLKRTLDHMKLTGSFPY

SEQ ID NO: 251988 - protein, 80 aa, Zea mays
  unsure (1)..(80): unsure at all Xaa locations
  Clone ID: MRT4577_161399C.1.pep
MRRASVHLHLILAXFFLLSVLTAASSIIGTYCVPNWSIPHNPLPTFLYFITRLTFFIMPRLPLPNLNRRYCLHLPHILFY

SEQ ID NO: 251989 - protein, 54 aa, Zea mays
  Clone ID: MRT4577_16139C.1.pep
ERPPGQVLFFFFFFFFFESKTGDSFCCPHFLSFFFSYRERGGLQTKKQQPVNVT

SEQ ID NO: 251990 - protein, 185 aa, Zea mays
  Clone ID: MRT4577_1613C.1.pep
MRSSSSSGAEPESEPWGRAMRSFLWRLRPDLAAVSLTMSSGTAVGAAQAALSPCQAAIERTPPLAPASKIAPIASAEATAEVDTSGEAAAAAEAVNLESTLSGIDKLLLDMAEEETAAAAEKVMDAVPDKGKKIADVAMEENDFDLRNLVGQELSEAEKKELQEYGISCGYHPGAMLFGGIDEGA

SEQ ID NO: 251991 - protein, 117 aa, Zea mays
  unsure (1)..(117): unsure at all Xaa locations
  Clone ID: MRT4577_161400C.1.pep
GALVSXGRAALAVAGVLCAVAALAAAPLASFVRASSLLFFPAXXGWVLGRVSAFCASWDAVXPLSWRLKLGWTAFCGPAGPKGQAVCGLCIWVKNRATGASFVAWFVVQCCLGGLVL

SEQ ID NO: 251992 - protein, 202 aa, Zea mays
  unsure (1)..(202): unsure at all Xaa locations
  Clone ID: MRT4577_161401C.1.pep
MSWLNKIFKGSVNRVSRGHYDGDWHEGHSSDHTRDTYDDSDNEDIDRAIALSLAEEDHNKGKSVAIDTDYNLEEDEQLARALQESLNAESPPRQNXLLRMCQCLNGIFLLSGCLLDSMFQQMNQPHMFTHGVDXRICAGCQNPIGHGRFLSCMDSVWHPQCFRCFACNKPISEYEFAMHDDQPYHKSCYKEFFHPKCDVCNN

SEQ ID NO: 251993 - protein, 128 aa, Zea mays
  Clone ID: MRT4577_161402C.1.pep
GRLNCPGGFFYGRAFGSRNWGKNFKIWAPRGPPKKILRPPFFPPVGCSLLPPYNGQGGLGAHPPCFWGTPCFFLNPVPPLFKGKKGHFSGARGPPLVGGGPVFLVFPKNPERGVCPFFWAPRLFFSGF

SEQ ID NO: 251994 - protein, 170 aa, Zea mays
  Clone ID: MRT4577_161403C.1.pep
RALQGDGAAPAPGGRDVTSPPRVAFLTLEAGWAGTTPPPALPSMSRLGSFLSPPDSCLLPLVLFPTSSGIWPRTYSSPSRFPVSAFFILRAERVGWGGRCSRIKRKGGKKKQRFLSVAGGSPVSHWLCGHWPSGTRNSSSVWGFRITSRSRGMPFANTVVQKRCLLLSDE

SEQ ID NO: 251995 - protein, 117 aa, Zea mays
  Clone ID: MRT4577_161404C.1.pep
HDFLFLGFRNLSIEVEEGICQVLSHLWLESEIIAGSSSNVASSSEASSSSSSSAPTSSKKGAKTEFEKKLGAFIKHQIETDSSEAYGGGFRAGYPAVERYGLKRTLDHMKLTGSFPY

SEQ ID NO: 251996 - protein, 90 aa, Zea mays
  Clone ID: MRT4577_161405C.1.pep
STSKGGHYILLHNIIIVRAVCSRVVVGHVHVDIHKHALVIIVWSFIHTCDVRESRVQIGCVSDVVEVGVVVEELRRRRCRRSPRGSWAAL

SEQ ID NO: 251997 - protein, 110 aa, Zea mays
  unsure (1)..(110): unsure at all Xaa locations
  Clone ID: MRT4577_161407C.1.pep
SGQWLDCALSLSPGHDVSDGCVRLSKVSSPGGCVPSFRQQPVLVHVLPFVLNCLYVFLLLIFASSSQFVAVSPTGGCGSPPGFPAAPQKGVPPPSKKXFFFFFFSPFFFL

SEQ ID NO: 251998 - protein, 126 aa, Zea mays
  Clone ID: MRT4577_161408C.1.pep
AAPGARRCPPRQAPARPPPSPRAASLASPRRPRPLQRGSPSTTRRRRWPRRRRRTRPRRRSRARTRRRTRAPPTTASRRPASRRRRRGGSGTRTRYAPADAAAGTGRRRRGPPRTGPGISPAGGGT

SEQ ID NO: 251999 - protein, 28 aa, Zea mays
  Clone ID: MRT4577_161409C.1.pep
TGASKMNGVLEAFYYGSVCVGVRCVDRE

SEQ ID NO: 252000 - protein, 37 aa, Zea mays
  Clone ID: MRT4577_16140C.1.pep
PPSFGPPPPWGGEEKKPPPRRGPPPPGKKRPPEKPRP

SEQ ID NO: 252001 - protein, 128 aa, Zea mays
  unsure (1)..(128): unsure at all Xaa locations
  Clone ID: MRT4577_161410C.1.pep
MTAAYDKTNHWSTPSWDGASCILREVYPXSVNIDTLKMHXRPKDGRGQLEIAMXNLVXTHAADKIIYASETIKQIARQHRPVATFVTKPDLEDSGYXSHENLSLRENDQNVSTGTRKNNSHGMSKTGE

SEQ ID NO: 252002 - protein, 153 aa, Zea mays
  Clone ID: MRT4577_161411C.1.pep
MSQSGATVSQDCITAFNDLKLNKKYKFIVYKLSDDYKEIVIDKASESRDWEDFRETLVNATAKSRTGAVGKGPRYAVYDFEYNLASGDGIRNKITFIAWSPDDAGIQPKMIYASSKEALKRSLTGIATELQANDTDDIEYDSILKTVSKGLAA

SEQ ID NO: 252003 - protein, 164 aa, Zea mays
  unsure (1)..(164): unsure at all Xaa locations
  Clone ID: MRT4577_161412C.1.pep
GRWAMLATLGALTVEWLTGVTWQDPGKVELVDGSSYLGQPMPFTILTLIWIEVLVIGYIEFQRNAELDPEKRLYPGGSYFYPLALGADPEKKERLQLAEIKHGGLAMVAFLGFPVQAPPPGKGPLNNWAPPLRDPLHTPIFDTXGGSFLARHWSAPSIDRNVVF

SEQ ID NO: 252004 - protein, 128 aa, Zea mays
  unsure (1)..(128): unsure at all Xaa locations
  Clone ID: MRT4577_161413C.1.pep
CEGNDTQAGRRLVSYGLRFHLHQGPGRSRGVDAYVPWDGLRQERQPAVVQRRRRRVRLQKRCRLLAAIRPAPAAAAAAICAGLRRRLLDLRAPGAPHATAVPLVLDDGAPPGRRXGLGAVPGRPGCLA

SEQ ID NO: 252005 - protein, 41 aa, Zea mays
  Clone ID: MRT4577_161414C.1.pep
KSHGYFLLFFKLKMPFVGNLNCSCSHALDRWKFCLNLLSNG

SEQ ID NO: 252006 - protein, 100 aa, Zea mays
  Clone ID: MRT4577_161415C.1.pep
IISICNTVDIPSIPLIVSLIVHPFNTLISVGSSAFRSMMIRPIPHVLRIKVFAICSASDRVSCYRSSILAPPLSSFMRVGNRSSACSNKPRCMRYVSEVY

SEQ ID NO: 252007 - protein, 77 aa, Zea mays
  Clone ID: MRT4577_161416C.1.pep
KGEARIPGSTPSGRKEPRPPPPVFQMPLLAKKCQRQVKNFNIPVAPFNQDVSPPSQKFWQLCLSIYRWCQLQLAEIF

SEQ ID NO: 252008 - protein, 77 aa, Zea mays
  Clone ID: MRT4577_161417C.1.pep
SIIVSVCIHIKIRRYITVATALILCVSFIMHSIHLIVSINNIDFFVESIRFVPRVFSSIALCVFLVQGLLDALSVHI

SEQ ID NO: 252009 - protein, 106 aa, Zea mays
  Clone ID: MRT4577_161418C.1.pep
DRQGLLFQVTAKEGRPVTRKGAVPPGWQFGQTFEGGQFLGLTARGGGASYWKISSGPVDLFFFFFFFGGDDRGHAKKKNPEENAENENEPPPRVYLRKEKALGALF

SEQ ID NO: 252010 - protein, 87 aa, Zea mays
  unsure (1)..(87): unsure at all Xaa locations
  Clone ID: MRT4577_161419C.1.pep
QQQSNNGTKIFSLLMLLALSACVANATIFPQCSQAPIASLLPXYLPXMIAQXCENPLFTYSSTSIQKHNLYTLVLTSPPYFVRIVQT

SEQ ID NO: 252011 - protein, 157 aa, Zea mays
  Clone ID: MRT4577_16141C.1.pep
KRGGGNFVKTPFYRSLTFILFKPPWEGPPNKTCKKTRACLLGAAFFKQGGRPARGPSFWKDPLVFPFWPPAIGELDESLGDFEPPFFGEEFSAPFFGGPLFRGHRAPFFCKGRPLFGGGFFNSKIPKNLFLFRKKKFFFSPKNFLSPPKNPKGLENL

SEQ ID NO: 252012 - protein, 112 aa, Zea mays
  unsure (1)..(112): unsure at all Xaa locations
  Clone ID: MRT4577_161420C.1.pep
MPMLKAIKQLNVHDVPSILPVVLKRFQSXKHCKIIICVTFPDILVMDPFVTKSGEKPHLKVMYVVAVHVVTKNVSFSGHXISYVKNTHGTRLGIEESKVHAVPVKHLMSEGA

SEQ ID NO: 252013 - protein, 105 aa, Zea mays
  unsure (1)..(105): unsure at all Xaa locations
  Clone ID: MRT4577_161421C.1.pep
GVLLLEMMQGRRPTDEKFSDGTTLHEFVGRAFRNNNNNNNMXEVVDPVLIQGNETEVLRDCVIPLIEIGLSCSVTSSKDRPGMDRVSSEILAIKKVLSSKHGKLK

SEQ ID NO: 252014 - protein, 103 aa, Zea mays
  unsure (1)..(103): unsure at all Xaa locations
  Clone ID: MRT4577_161422C.1.pep
GAGPVAILEPDRSPGSSSSSVMLEKLNRFHTFLEAICQVQSRXVLVDKQQAVDLSVMVEELVAPVYRDTVEMLKATEDVGVSYVRPEDVKSRIQRLFKAMAKS

SEQ ID NO: 252015 - protein, 101 aa, Zea mays
  unsure (1)..(101): unsure at all Xaa locations
  Clone ID: MRT4577_161423C.1.pep
EPWYLNASLAGSDGGATVGTKVSAYPPCPRPDLVAGLRAHTDAGXLILLLQDDQLSGLQLLRGGDGREWVDMPSLHHNFLFNVSNQLEVVTNWLDKSAVHL

SEQ ID NO: 252016 - protein, 93 aa, Zea mays
  Clone ID: MRT4577_161424C.1.pep
SRLNSRELEKGNHNRLDCLTKPLPLPDRAAHARPPAPAPEARADQLAAAAAASSALWSPSAAAGSSWKAVMGKARPSPAGVRNPILVNWSRRT

SEQ ID NO: 252017 - protein, 82 aa, Zea mays
  unsure (1)..(82): unsure at all Xaa locations
  Clone ID: MRT4577_161425C.1.pep
QGPGRTGPPPPQATQAREXGPGPPKKKPXPPPTRAARPPEPQXGXXPERAPXQGEPSKESXXPQREGRNAAGSPDDRGXPRA

SEQ ID NO: 252018 - protein, 186 aa, Zea mays
  unsure (1)..(186): unsure at all Xaa locations
  Clone ID: MRT4577_161426C.1.pep
MSLICSISNEVPEHPCVSPVSNHVYERRLIEKYIAENGTDPINNQPLSEEQLIDIKVAHPIRPKPPSATSIPAILKALQDEWDAVMLHSFTLRQQLQTTRQELSHALYQHDAACRVIARLTKEVTAAREALATLKPQAGLIVPQAVPSSQPSVVGAGEPMDLGELVGMTPEIIQKLQDXATVLTTE

SEQ ID NO: 252019 - protein, 147 aa, Zea mays
  Clone ID: MRT4577_161427C.1.pep
HASAGLPFDGARESSLSGSSTFTSDSFENKLSSVNSSKDRSSGEYTYSERTDVSDMQVKSVSSSDIRISVSSALSTSSHGSGGEDSESFGDIYVWGEVICDTISRSGSDRSAYSPGTTTDVLVPKPLESNVMLDVSYVACGVKHAAL

SEQ ID NO: 252020 - protein, 99 aa, Zea mays
  Clone ID: MRT4577_161428C.1.pep
TFYLGFYFPQLLFFSSSLHTHHNYLGKRRQHTNPEGPSPGLQPGPGSWNNFPPVLARARSLHPHALRGEPPGDAAVGPLGKEPPVLSGVAGAENNAGDL

SEQ ID NO: 252021 - protein, 216 aa, Zea mays
  Clone ID: MRT4577_161429C.1.pep
MEFFDETLASAAVEKPALNGVVAEEEQVPITHPAKSHAAVAAENPTPISSVANGEGEGVPGAHTAAKSYAAVAVLAEIAALRAAKLDLEAKLDEARRENKFLAEETHRIEGIFPQVRAEATITAATSAEEIAVLRTKVDRFKTEKGEHELDKQSHDKLAKEVDAVRQEKHKLEEEIRALKASATAAVAAEKPTPISSVANGEGVPGAHTAGKSYAA

SEQ ID NO: 252022 - protein, 60 aa, Zea mays
  Clone ID: MRT4577_16142C.1.pep
RRNHTDEHPISFTHLTHMKPPSQIRDCCYALLSPTICQAKRMIPCKPTSLLAHPHHSIKN

SEQ ID NO: 252023 - protein, 282 aa, Zea mays
  Clone ID: MRT4577_161430C.1.pep
MEAILERPKYECLLFDLDDTLYPFSAGINLACRKNIQDYMRHHLHIEESQVADMCLDLYKEYGTTMAGLKALGYEFDNDEFHATVHGTLPYHNLRPDPVLRTLLLSIPQRKIVFTNSDKAHAEEALCRLGLQGCFDGVICFETLNPCNGPSAFRDGNGMLFPDETSPNPDLADLNESDGFRPISPILCKPSVEAMEAVTRIANVDPKKTIFFDDSTRNIASGKAAGFHTVIVGRPTLVPGADHALESIHNMKEALPEIWDGQDRSESDALLSPTAVETPVAA

SEQ ID NO: 252024 - protein, 104 aa, Zea mays
  Clone ID: MRT4577_161431C.1.pep
QETEHNLFASTSLLSSSQDIPKTWRSWITYPCKIIWPVLYCWKDIQLLLLAKYIFILAEVICQKSHSCPSLLFGVRNTLQRTILFVTNIKFEILLSRLLSLTMG

SEQ ID NO: 252025 - protein, 29 aa, Zea mays
  Clone ID: MRT4577_161432C.1.pep
IIGDVFDTCGGSYLQLLNDTRLSIYFTEI

SEQ ID NO: 252026 - protein, 102 aa, Zea mays
  unsure (1)..(102): unsure at all Xaa locations
  Clone ID: MRT4577_161433C.1.pep
NGKRDKRRDIKRLSCFELSQNPTVTRGVHHICWSCISSXLQYQSYYQECPVCETVVQXNHHGLVTAEERRHTEHRSRRYQGLRSRKRASGQSRHPEVAGQQP

SEQ ID NO: 252027 - protein, 97 aa, Zea mays
  unsure (1)..(97): unsure at all Xaa locations
  Clone ID: MRT4577_161434C.1.pep
GELHFPRDYXFKPPKVXFRTKVFHPNINSKGNICLDIFKEQWSPALTISKVFLSICSLLRDPNPDDPFVPEIAHMYKTDRAKYESPARSWTQKYAMG

SEQ ID NO: 252028 - protein, 40 aa, Zea mays
  Clone ID: MRT4577_161435C.1.pep
TGFKNRISTAQQGGTTFFKTSGFFNTNWFYRKALSFQILI

SEQ ID NO: 252029 - protein, 103 aa, Zea mays
  Clone ID: MRT4577_161436C.1.pep
LSGPVGEDMFHWQATIMGPSDSPFAGGVFLVNIHFPPDYPFKPPKVSFRTKVFHPNINSNGSICLDILKEQWSPALTISKVNCLHCLYCEFWLHSDPPESGRF

SEQ ID NO: 252030 - protein, 101 aa, Zea mays
  unsure (1)..(101): unsure at all Xaa locations
  Clone ID: MRT4577_161437C.1.pep
DEHRLLVYEFMPRGDIRKHLVRRGXYFQPVSWNLKKKVAVGAAKRLGYLFRAEAKDIYRDVKNLNILPDTYYFSKXIYNFGLAEDGSFREKSHVFTKFMGT

SEQ ID NO: 252031 - protein, 73 aa, Zea mays
  Clone ID: MRT4577_161438C.1.pep
KQEKKPFKNTENIKNSHLKKSAFLTEVSQKENYAGAKFSDPPSPSVLPKPPSHWMGSTVENSNQNRELMAVHL

SEQ ID NO: 252032 - protein, 38 aa, Zea mays
  unsure (1)..(38): unsure at all Xaa locations
  Clone ID: MRT4577_161439C.1.pep
ILPSFDKVVPPSIMHLXIGELISIYSELCRLESPPPLI

SEQ ID NO: 252033 - protein, 56 aa, Zea mays
  Clone ID: MRT4577_16143C.1.pep
DLTVFLHGQTLKAHVWFNFQTQIYQLHPGLTTARDQNNKACTNLPEASQELQTIKT

SEQ ID NO: 252034 - protein, 98 aa, Zea mays
  Clone ID: MRT4577_161440C.1.pep
KKTWNQLHIPLGGANIKPRTRWPQTGGASSCLLYPTETFSEQIPKILSMIYTMALINGCGDGLCLGVPSHETGFSSQVGELALRGLGQVFVEGEAKAP

SEQ ID NO: 252035 - protein, 635 aa, Zea mays
  unsure (1)..(635): unsure at all Xaa locations
  Clone ID: MRT4577_161441C.1.pep
MTERVKLTKETKLFEEKKVADPYIAGFIEFMAKTNTEKITKEMQEGLFEDTGDSDSYDVESGDEDSEDRPWRPSHAVFGKLTNKQSDLENMRGRYFRDMSIVRAGRDNNVPAPEENEVVIYRSFFKAGLRFPLSKFVVEVLKIYQIFLHQITPEAIMRMGIFVWAVRSQGLEPSAKCLYSMHELLYETKATGKEQYHNNFSCYGFIARPNSSHPAREDIKEIIQHPILSRFDLRRSKVEIDDVVEACQRAFSTVCSFIGTRDLIQEHIAFRVWPLVESWEMPKETTADSGEGGLVRLKYTFRFREKFDEPNDDWWKCIEATSDELLGAYSKAEDNALSAAFGGRGKKRLNRVFDAIGFVYPDYCYLLGGQEKKRKIVASVTPTEPVPKSKSAEEPTVMPKTHIVKAVKDKVDKAEEPKVEEIIRMPKILSPPTKANLPKMQKAFAATPKRRRMANVLDAVLETIKALSPAPAKKIAQTEAKSQAEAETGQAEAEATQTQAEVKTGPSVLIKTKPNAPEEKAVEQIAPEKIEIPAPEALIENIDYIIRHASGKKPSEEEILEARHYARKLKYPKEALIFNGSNEDDFLYCXLPDNKEISVCREIGRSMGFPKLEDDLSILSKDELANSLTYNSIKV

SEQ ID NO: 252036 - protein, 140 aa, Zea mays
  Clone ID: MRT4577_161442C.1.pep
SQPFFFFFFFFFFFCFFFFYCLYFSFFLENQHNPGGEELTHKGGKNDPSCGRKKNILEAGLKHSQKGGQPKHPRAEGRSLAPKDCFLGQPGGVPPTTGTIPPLNKKGRKAPTTGITGKPLGPKNTKCQGSGPGPSAHPEN

SEQ ID NO: 252037 - protein, 293 aa, Zea mays
  Clone ID: MRT4577_161443C.1.pep
VYLSSSSCCGSSYHLCIWISRVSVCNARTLQEGRICAKRVVVQNFLCTGEAQFRLADPNWPMAQPEIPAFEDWETTGNTPYTQKFEDVRKGKKTGIPAQTNDPRRNPEHPRKSPLHATAYKTDPQDQGPRNPPHRPRPETDQQRHSDRPTHREPAPRRHANPQREQGSNAVAPRSPYRTAAGSASPMQSNNQSKPNHRSTAMQAPERRHSSEGHSQHTPGRSRMKPGSYEPEEVAVPPFGEWDDANAASGEKYTGIFNRVRDDRLSPTSSARQPSTARREENKVQQKCSCCIL

SEQ ID NO: 252038 - protein, 38 aa, Zea mays
  unsure (1)..(38): unsure at all Xaa locations
  Clone ID: MRT4577_161444C.1.pep
EPHPHGVLEDGAGSTKQDQACLFTVGXRMFTAPSRLTG

SEQ ID NO: 252039 - protein, 108 aa, Zea mays
  Clone ID: MRT4577_161445C.1.pep
FILGIEWKKFFVGLFYAKGIVLEKIGIEVKQSKKERRKCAWVQLAKKGKVIKEFFSKKKLFGLNWGKCCGKNWGTLFFRKKKGREFKNSRLRFLRKKENKNLAFFLFL

SEQ ID NO: 252040 - protein, 101 aa, Zea mays
  unsure (1)..(101): unsure at all Xaa locations
  Clone ID: MRT4577_161446C.1.pep
VLQYRIYLQTHVLLRDLHPMLLLLRGCLRHRSKLPGLLAVKPLGELALALTIAQSHFCSLLHAGAFMGMRRPISVRWTLLRRPGPXLLWXXFYLLDSGAIS

SEQ ID NO: 252041 - protein, 49 aa, Zea mays
  Clone ID: MRT4577_161447C.1.pep
RVRASESSPADSCRAQLDPALPAAMRESRRTVSVCLRAHASIPTPRGGS

SEQ ID NO: 252042 - protein, 57 aa, Zea mays
  Clone ID: MRT4577_161448C.1.pep
SDHKAGFDGFAEKPRECQGAPQEPRSHAQDPDARKDRDSSDKVAAGWNVRVQIWDLC

SEQ ID NO: 252043 - protein, 71 aa, Zea mays
  Clone ID: MRT4577_161449C.1.pep
AKFINTGNRVCVYVLPANSPLIEQKNSSTLPHIVSTQQKKQKGRRVLRGIQVLTLRSAMRTCIASSYSCAT

SEQ ID NO: 252044 - protein, 95 aa, Zea mays
  Clone ID: MRT4577_16144C.1.pep
MSTAVSSRRLATIGVIGALTLQFVASATAGPIALPGCPENCGGVQVPYPFGIGRGCFHEGFNLTCDEAQHPAKLLLGDGAEVLDIFLPDCTATAH

SEQ ID NO: 252045 - protein, 103 aa, Zea mays
  Clone ID: MRT4577_161450C.1.pep
LSKESPSANIGLENSPTPCVQRLHVRSLTRPPPVPLAIALLLSWSLPPAPDSLSFAGTAKPWASGLTRTNRPSDQPKSTCQVEEASEVRPYSLVDEKKRARKN

SEQ ID NO: 252046 - protein, 36 aa, Zea mays
  Clone ID: MRT4577_161451C.1.pep
LLSYARFCKVPGGTRLSAQRRCATTCYELSIVIPAG

SEQ ID NO: 252047 - protein, 114 aa, Zea mays
  Clone ID: MRT4577_161452C.1.pep
HCRVCGAALEPLLRFLRYIYNVEMASILQLFSSALLKKNSGFVPGGKGMPTVRCMHAVYVGLRQSDRDERLAVRSAGRSARTVATGETQARPRRPRAGHFGCLSTGPAHACMGL

SEQ ID NO: 252048 - protein, 35 aa, Zea mays
  Clone ID: MRT4577_161453C.1.pep
HSSRASDLPRAIEASSHSCLRNSEAQRSVRFWIRR

SEQ ID NO: 252049 - protein, 48 aa, Zea mays
  Clone ID: MRT4577_161454C.1.pep
CPRRWRPATSPPYFCRYQCYRGFLFVVVTGPGARGLAPLLALVLPDLV

SEQ ID NO: 252050 - protein, 58 aa, Zea mays
  Clone ID: MRT4577_161455C.1.pep
RSSSRTSRAFRGSSVTEAPASAAAAFFGSDGRASAASMIGAGWGFGVSGCVVSPCQGL

SEQ ID NO: 252051 - protein, 53 aa, Zea mays
  Clone ID: MRT4577_161456C.1.pep
IKGADPASMHVCSKLGRKIQSGVALDHAGVVGEFVEIAAPNHEPAIVVRLLRG

SEQ ID NO: 252052 - protein, 116 aa, Zea mays
  Clone ID: MRT4577_161457C.1.pep
EYRLSSRNLESLDCQTSRSGSPSSLVARHLDMASVVFVFVLNRGHAVHSRCALEVNCLAAGSRRGGRGRALLENALGGTGIAVGVHRDSLFGKVSRRSIDWAERRWRNRCPWHGAW

SEQ ID NO: 252053 - protein, 61 aa, Zea mays
  Clone ID: MRT4577_161458C.1.pep
LAYTRFQVHISFSSHGPRKTAGRPPDHLVNLGEGWWPVLSRTLTPAQRLGRWMRYCLLARE

SEQ ID NO: 252054 - protein, 63 aa, Zea mays
  Clone ID: MRT4577_161459C.1.pep
LKWQREYVHSRNISRRSFLEIIFVFSFLIWEQLLCKCYVLCTQTRHSQHIKMKHIALTLSLFT

SEQ ID NO: 252055 - protein, 158 aa, Zea mays
  unsure (1)..(158): unsure at all Xaa locations
  Clone ID: MRT4577_16145C.1.pep
TFYHLCCHFEGFLHTSVHVYLPFPFRYAGHVFALPGSRSELHASSATSSAAVHEFRIPHRALLGLHSYCPVHFDAFHSVLVDLTLHIVYLKARVATLPKXKSESRSAGPRFRSYIISYXVKALLTSRKLLLEELKKISGAIGKTVEELDVADLNLGRY

SEQ ID NO: 252056 - protein, 122 aa, Zea mays
  Clone ID: MRT4577_161460C.1.pep
MMAVTSLQLRPTPRLLPARNSSTGTGPRMAALSCRHNQSTNVQGRTGLRSHVTTRRDALSFVSSALLAALFVVAGAAEARTSRLENKKKALEKLREKALGRKEENGATGGKKMPPPTNLLIR

SEQ ID NO: 252057 - protein, 226 aa, Zea mays
  unsure (1)..(226): unsure at all Xaa locations
  Clone ID: MRT4577_161461C.1.pep
MASVGGDAKKSLTQWLREKGFDEEAIGRMSKRCRNLPNLDAGEASGVWDYLLNDVKIEQRKLRYVVTKCPKVLTMSVNDKLVPTVQCLTTLQAKPGEIAQAIVKFPPILFHSVEEKLCPLLAFFQTLAISEKQLAKLLMVNPRLISYSIQAKFSQTVDFLVGLGINREVMIGKILTKEPYIMGYSIDXRLRPTAEFLKSQXGLQGSYLQRVIMXFPSILSRDVDKT

SEQ ID NO: 252058 - protein, 80 aa, Zea mays
  Clone ID: MRT4577_161462C.1.pep
HNFSSFHVYMRVGFFSFSYLETSTIDYLNETNKGEFTLMTCSSLSDLPTKLYSTAELNMVQESLSAKLYGKCLVNLSERT

SEQ ID NO: 252059 - protein, 41 aa, Zea mays
  Clone ID: MRT4577_161463C.1.pep
LILLVTFMSMRMIKLWTVCMIRSAISKDHWRYHNNGIHTGC

SEQ ID NO: 252060 - protein, 73 aa, Zea mays
  Clone ID: MRT4577_161464C.1.pep
HHQNYLVWCSSCTIKQIHTFWSKLCPIISVAICSGEGYALCQVFPWIKVMSLDVLSIAVAHRSYVALHILSYI

SEQ ID NO: 252061 - protein, 113 aa, Zea mays
  unsure (1)..(113): unsure at all Xaa locations
  Clone ID: MRT4577_161465C.1.pep
TAPESFSNVNQWLNEIYRYPRENVTQLLVGNKCALAENKVVFFEAGKALFDDIGNPFLXTRAKDPPNVEKAFLPLAGEIKNRMASPPPPSGVSRPPPVQMRGHPVFQQNNCGF

SEQ ID NO: 252062 - protein, 308 aa, Zea mays
  unsure (1)..(308): unsure at all Xaa locations
  Clone ID: MRT4577_161466C.1.pep
MSAAAVLCRLGLRLRRLSTLSELPAVAAGAPQPQHPTSKDAYFAAVHHLSTIVRRDFYLERTLNRLRLPSPFPTDLALRVIRAAAPAAPLHATRFLSWLRAKPSFAASAEHFDALLLPLARARLFPHLWSLASDMRGLGLPLSPTTFSAVISSYGHSRLPDQAVEVFNRLPRFGRPQTTEVYNALLDALCANGNFTGAYKLLRRMARKGVAPDRATFSTLVDSWCAAGKLXEAQAFLDDMAGRGFRPPVRGRDLLVDGLVRAGHLEQAKAFALRMTKEGILPDVATFNSLAEALCNAGDVDFAVSLLA

SEQ ID NO: 252063 - protein, 113 aa, Zea mays
  Clone ID: MRT4577_161467C.1.pep
GRGPGFPGGSPGWFPVSPGGGEGGAPNRSYFSPSAPREKRFALSAPPGGGSFTPPRGKGENSPPRNGGDKKCFFRPLKERGVGTLSRPRGGSLSLPPRGCFSRRPRQGPARPF

SEQ ID NO: 252064 - protein, 66 aa, Zea mays
  Clone ID: MRT4577_161468C.1.pep
EKITPFKSFPHCEFTGLLIFRVPPPPPQLCPGSATFSAPLFFFLPPGIINALPGEFRLGIFRSLVF

SEQ ID NO: 252065 - protein, 44 aa, Zea mays
  unsure (1)..(44): unsure at all Xaa locations
  Clone ID: MRT4577_161469C.1.pep
VXXKKKKGEKKKKKKKKKKKKKKKKKKKKKKKKKKKKKKKRGRF

SEQ ID NO: 252066 - protein, 139 aa, Zea mays
  unsure (1)..(139): unsure at all Xaa locations
  Clone ID: MRT4577_16146C.1.pep
AGNPGGPRGPRPRGGPKENPRTSRPGXTXRGXANQGRAKEPPNGERPTTGPXPHQXPKGAXTGXXXDGRPPTXQPAKGPXGGRXPGRRPNXGGGAKGTGGKPQENRPXPARSPHTGQRPTGRGEPPPEGARGARPPTRQ

SEQ ID NO: 252067 - protein, 114 aa, Zea mays
  Clone ID: MRT4577_161470C.1.pep
PGLWGISWGGFSPPLGPSVVGGSPKSVSHIGGGAFLCFCKKKGCACLIFFFSPFLGGFWPRVFLVFWGTPLILENPSVFPVFLKGVLGPCVKPSFLNPGFSRAPGFFCPFNPPP

SEQ ID NO: 252068 - protein, 50 aa, Zea mays
  Clone ID: MRT4577_161471C.1.pep
LTEFYYRGDEAISPKKSLCVFETSVIHLPNEYFRGLVHLALLLELEFTDS

SEQ ID NO: 252069 - protein, 84 aa, Zea mays
  unsure (1)..(84): unsure at all Xaa locations
  Clone ID: MRT4577_161472C.1.pep
PMTFQRHRIPGKRPSYWSSPHPAXVGIQQAHLRRPRVSTERLGSRAPATGMVRAARHLSPRWLASRATPISPPAGRAHASADAW

SEQ ID NO: 252070 - protein, 55 aa, Zea mays
  Clone ID: MRT4577_161473C.1.pep
MSHQATAMMSGGGGAGQFGDTTLTKVFVGGLAWETHKYGLRAYFHHFGDVGEALC

SEQ ID NO: 252071 - protein, 78 aa, Zea mays
  Clone ID: MRT4577_161474C.1.pep
TCVSLDMSYQEVNVVSPSVLKCRLNMIYCQAPLPIPCFRFKHVTVTGSLRYHRVYKQVIQHPLTYIGSYLVYNGQTFF

SEQ ID NO: 252072 - protein, 95 aa, Zea mays
  Clone ID: MRT4577_161475C.1.pep
TLRVPTVTCSVVTIKITCQSPMYARKSLRRHARTPIPWGLGPGRRRCVRTASLAGLLGLLRSSSLRLGGRLLGPTRSRSRSLRHSKRRAPREQQP

SEQ ID NO: 252073 - protein, 370 aa, Zea mays
  Clone ID: MRT4577_161476C.1.pep
MSLCSKLFALLRKSRALATSTAAAAAATTSATASANGMEEAVAAAGPLRTRVCIIGSGPAAHTAAVYAARAELKPVLFEGWLANDIAAGGQLTTTTDVENFPGFPDGILGADLMDRCRAQSLRFGTKILTETVTTVDFSARPFRVASDDTVVHADSVVVATGAVARRLHFAGSDAFWNRGISACAVCDGAAPIFRNKPIAVVGGGDSAMEEANFLTKYGSQVYIIHRRSDFRASKIMQARTLSNPKIKVVWNSEVVEAYGGADGGPLAGVKVKDVVTGEVSDLQVAGLFFAIGHEPATKFLGGQLELDSDGYVVTKPGSTHTSVQGVFAAGDVQDKKYRQAITAAGSGCMAALDAEHYLQEVGAQEGKTD

SEQ ID NO: 252074 - protein, 263 aa, Zea mays
  Clone ID: MRT4577_161477C.1.pep
QIHPVVSRLCASIQGTSPARLAECLGLDSAKFQPRLTESSNQDTSMMLLSVIDDEDERYRGCEPLRLSCPSCSGTFDCPPVSSLITSASATSVSDPIEGKDATANFWRHMRCPRCLDNTVESKFSPSMLANQMKRQADNFISLYYKGLQMCDDEGCKYSTHSVNLRVMGDSERGTVCPNYPRCNGRLVRQYKESDLYRQLSYFCYVLDATRCLEKLDQKARLPFEREFVAVGQTIKLALLEIQKIRDRCAFGWVQLKDLAVSI

SEQ ID NO: 252075 - protein, 82 aa, Zea mays
  unsure (1)..(82): unsure at all Xaa locations
  Clone ID: MRT4577_161478C.1.pep
SNTNNRGENENAIKRRGEADARKMERIPKPKEGEGVKRLKLETGAGAAIRVLDHAMDINGPRGRCLPRKATXDWQLGQTELY

SEQ ID NO: 252076 - protein, 57 aa, Zea mays
  Clone ID: MRT4577_161479C.1.pep
SQGSPAPGPDEQKLSMDNERPCWGPPPTLCHLSLKTLNLRNQQGSRSVYMILRENVN

SEQ ID NO: 252077 - protein, 60 aa, Zea mays
  Clone ID: MRT4577_16147C.1.pep
LRSSPIRSARSPSPLPPRDGGVVTGDGARQRRLCARCGHRRWEVAGLQRGGILGHARRGG

SEQ ID NO: 252078 - protein, 121 aa, Zea mays
  unsure (1)..(121): unsure at all Xaa locations
  Clone ID: MRT4577_161480C.1.pep
GRVGANRXSRFVYAGAASGSRRFLPYFPFDSVVKVDVSDGSARLWSVAGRKFVGEPVFVPTGSGEDDGYVLLVEYAVYDHRCHLVLLDARKIGERNAVVAKLEVPKHLTFPMGFHGFWADE

SEQ ID NO: 252079 - protein, 39 aa, Zea mays
  unsure (1)..(39): unsure at all Xaa locations
  Clone ID: MRT4577_161481C.1.pep
FSLGIINPSNQILLITGLRVDDXSWQDLLGRVNFQPRYN

SEQ ID NO: 252080 - protein, 56 aa, Zea mays
  Clone ID: MRT4577_161482C.1.pep
LIGFVLVQLACVHLWGNNIHFIRKQYHHNIYHIFSYSTLEAYDRGMKNKQFSANHN

SEQ ID NO: 252081 - protein, 70 aa, Zea mays
  Clone ID: MRT4577_161483C.1.pep
NPNLVQGRLWKWQHGPLKGGRFPPPYWKENPWLIFNGFPNFFSPRVPPFRLVKTPKTFFFPKVGKPGFFW

SEQ ID NO: 252082 - protein, 51 aa, Zea mays
  unsure (1)..(51): unsure at all Xaa locations
  Clone ID: MRT4577_161484C.1.pep
NFXHASNQILFRNCWDRNCIGNINHLRYSKQLLQEILSFLSFTTSKHKYLI

SEQ ID NO: 252083 - protein, 59 aa, Zea mays
  Clone ID: MRT4577_161485C.1.pep
MSVCERSYDRRVSKSPPSVSRSAAWESVVGVWVATYSAKVTEPSAERAAPAATTQWDVS

SEQ ID NO: 252084 - protein, 79 aa, Zea mays
  Clone ID: MRT4577_161486C.1.pep
SPPSVAWMGARSPVLRYAGVDRLLTSRFSGRPGCLALRGRLSPIRGSPRSPRFCFSPPTVVLRWLYNVVNHFGSELPPL

SEQ ID NO: 252085 - protein, 122 aa, Zea mays
  Clone ID: MRT4577_161487C.1.pep
GRFFFFFFREGTLLYNFSIVPFLYFFKKTHLSFKIQTERNNANHKRERASPKTPITHQHLKRGGPTQNPKPFRGTWPSTLGTLASFSPPLNSLIRPLFGQPYPPDFAKHPPEGGGQPDQPFP

SEQ ID NO: 252086 - protein, 53 aa, Zea mays
  Clone ID: MRT4577_161488C.1.pep
MAKIKIGINGFGRIGRLVARVALQSDDLLLFALNFLFIMADFMFYLFQICIFF

SEQ ID NO: 252087 - protein, 65 aa, Zea mays
  Clone ID: MRT4577_161489C.1.pep
SLNPGWKAPASPCVVPSKYLSPPRGPFTPPFSFKKKKKKKNKKKKKKKKKKRKKKKKKKKKTKKR

SEQ ID NO: 252088 - protein, 134 aa, Zea mays
  unsure (1)..(134): unsure at all Xaa locations
  Clone ID: MRT4577_16148C.1.pep
KGEKGGAPSPFTLRQKRERGTGRNFSITPQLTKSPCVKKRPKGGKTGPPQGKRGPNPPPSEKSTHPPKGXRPPKSRPERPPKGKEIFKNCPQGGPPPRTNLLIFKIFFFGVFFFLIFFFFFFFFFFFFFFFFFF

SEQ ID NO: 252089 - protein, 73 aa, Zea mays
  Clone ID: MRT4577_161490C.1.pep
KQRGTFTLLSVFRGIGFLFPKKLLQLPPYQKKRAFFGKPTQPLNPPLPPKKTLTFCPTKPKKDLSFPMGNCCL

SEQ ID NO: 252090 - protein, 109 aa, Zea mays
  Clone ID: MRT4577_161491C.1.pep
SRRDLQPSIVPMAAAIRGSPTRAAAPTQPRAVLRVASSAAPASSSSARPRRGAVAEAAMQPAKADAAEVASPAAALEMANGAERSLLERKNILRPHRSDPPITEPPQRR

SEQ ID NO: 252091 - protein, 88 aa, Zea mays
  Clone ID: MRT4577_161492C.1.pep
AFDRSNIFALDSNEKNTCAREHQLLQELQFHKSSLSSQPPRQFLNRGIYRGATSSWLPAWRRLWSLCAVISMRSSGGLRRAYAEAIRA

SEQ ID NO: 252092 - protein, 61 aa, Zea mays
  Clone ID: MRT4577_161493C.1.pep
TAGIRSTHSCGMSLDLRPNWNGKSASAECYLHLLGSYNYCRLRLLVMANNLCLLALSRDAD

SEQ ID NO: 252093 - protein, 91 aa, Zea mays
  Clone ID: MRT4577_161494C.1.pep
MEGKTGQLRCCFVAIVLVLGLVLEQSQQAEARGKWCCETATGKYHFNRCVDSGWVDNIGFCASNAGCIIMEDRCGGRWPVPARDALSLDVI

SEQ ID NO: 252094 - protein, 50 aa, Zea mays
  Clone ID: MRT4577_161495C.1.pep
NPRVTHGYPLTRWVRVWAKSQTRHGYGFFNGHTYFSRVRGLGRQNPEGLY

SEQ ID NO: 252095 - protein, 122 aa, Zea mays
  Clone ID: MRT4577_161496C.1.pep
EQVFVSIMEGKTGQLRCCFVAIVLVLGLVLEQSQQAEARGKWCCETATGKYHFNRCVDSGWVDNIGFCASNAGCIIMEDRCGGRWPVPARKRRTSSHAFHSSFTFYFILILFSYIYRFVNLF

SEQ ID NO: 252096 - protein, 28 aa, Zea mays
  Clone ID: MRT4577_161497C.1.pep
CFPQLGARLYFFGYEEIYTSRYMKLLYT

SEQ ID NO: 252097 - protein, 91 aa, Zea mays; identical to SEQ ID NO: 252093
  Clone ID: MRT4577_161498C.1.pep

SEQ ID NO: 252098 - protein, 82 aa, Zea mays
  Clone ID: MRT4577_161499C.1.pep
VSSPGLWPSFSCFMGASFKRSVRFQCHQGLVAFCLLSCGHPVCRRQERLEGPFALRVSLHTVCRLIYAHESQIHRRVTCMCA

SEQ ID NO: 252099 - protein, 82 aa, Zea mays
  Clone ID: MRT4577_16149C.1.pep
FPLAGRNAVTPMIIPMTRPVMESWTHLFTKRRWSPPRHRYSPVVYRQMVAPEELLPPVYIRNEVPPPSVSHSRVQPAMKSMS

SEQ ID NO: 252100 - protein, 104 aa, Zea mays
  Clone ID: MRT4577_1614C.1.pep
KVAQKSIISLTLQGPNTTFFVLQGDIHGTDTLDCEEFVTVLLHIKKMSNDEYLPKAFEFFDKDGNGFIEMSELMETLSDGELKPDEQLVNDIIQEVDKDKVSTQ

SEQ ID NO: 252101 - protein, 90 aa, Zea mays
  Clone ID: MRT4577_161500C.1.pep
MEGKTGQLRCCFVAIVLVLGLVLESHQAEAGGKWCCETATGKYHFNRCVDSGLVDNIGFCAGNAGCIIMEDRCGGRWPVPARDALSLDVI

SEQ ID NO: 252102 - protein, 108 aa, Zea mays
  unsure (1)..(108): unsure at all Xaa locations
  Clone ID: MRT4577_161501C.1.pep
ISVLAISGRPKGGTDLLKGGAKHNRKVLSDNIQDITKPAIRMLDTKGGVMHITVLIYYETLERLKISLENMIPNAXSYTDHAQRKTATGMDVVYALKRQGRTLYSFSG

SEQ ID NO: 252103 - protein, 112 aa, Zea mays
  Clone ID: MRT4577_161502C.1.pep
ETLDIINSEGAGTQSAKKKQQSVSHCCLAHALNRSESWMQRFIDRFPRCLRAAATIKRLNHHSRPDQHKARKRSINHCAQTPPVDGSDKKKTLTSMQNKDGTTQETPARDHM

SEQ ID NO: 252104 - protein, 169 aa, Zea mays
  Clone ID: MRT4577_161503C.1.pep
CVLPGVPDGHILKGFAVAALGESVYVIGGRLCRRERGAAAGECQDTDVAVRADVLRYDARRGEWHHCAPLLVPRFDFACAPCRGRICVAGGQCSLSGARGTAAAEVYDAEKGQWSALPDMSTLRYRCVGVTWQGSFHVVGGFAETTLTAASSDARRRTTVLQSSALERS

SEQ ID NO: 252105 - protein, 181 aa, Zea mays
  unsure (1)..(181): unsure at all Xaa locations
  Clone ID: MRT4577_161504C.1.pep
MSHKTQEPVITKTSDLSLQEAKWITLKKIEYVDQVGKERTWEVATRKTRGKSGVDAVAMGNILXTHPSPPQLCSXQYRPPLDAYTIEWPAGLIDAEETAEEAAVREFKEETGYDCKVLSVSPAQAADPGMTNANMQLAMVEGSLSENXEEPEQRLDDGEHIQREIIPLAXLYGRLVEYSKR

SEQ ID NO: 252106 - protein, 108 aa, Zea mays
  unsure (1)..(108): unsure at all Xaa locations
  Clone ID: MRT4577_161505C.1.pep
QVAEALKTQGGQLIIPVTLLHVAAFALGYWLSRLSTFGESTSRTISIECGMQSSALGFLLAQKQFTNALVVVTSAVSVVXCMALGRSVLAVYWRNKWLPANDKNDFKE

SEQ ID NO: 252107 - protein, 197 aa, Zea mays
  unsure (1)..(197): unsure at all Xaa locations
  Clone ID: MRT4577_161506C.1.pep
MADPRLYPTESGSDDRRDAAYPGSERRLYNPYQDLNLPYRQLYDLPTSPEFLFQEEAVAQRRSWGENLTYYTGVGYLGGAGAGAALGLRDAARGAEPGEPAKIRANRVLNSCGSSGRRVGNTLGVIGLMYAGIESAMGAARDRDDWINSDVAGLGTGALFRADNGPRSAVVAGAVGEGLAGAAXAAKQGGKRYLPXL

SEQ ID NO: 252108 - protein, 102 aa, Zea mays
  unsure (1)..(102): unsure at all Xaa locations
  Clone ID: MRT4577_161507C.1.pep
YQHVIYEFNCFLPSLWCSIGSXLEQLWRGGNXIIQRCCHXRVCDLAHLTRMCSKEMWDPPSCVNKVRIFXGGLGWDSGRWCLCCWGFSRRKLLFMGTTSGLF

SEQ ID NO: 252109 - protein, 98 aa, Zea mays
  Clone ID: MRT4577_161508C.1.pep
KKKIKKKKKKIIKKKKKKTQKKVYTQPNSYFLFLSFTTTYFINILHPTQTTNISICLSLFYTILITTLYPIYFFSFFSYYILLFSLFILFFYFKPSIP

SEQ ID NO: 252110 - protein, 73 aa, Zea mays
  Clone ID: MRT4577_161509C.1.pep
MSSVVLGATGRENKTSWPEVVGMSIKEAREIILKDMPNANIQVLPVGSLVTQDFRPDRVRIFVDIVAQTPTVG

SEQ ID NO: 252111 - protein, 413 aa, Zea mays
  unsure (1)..(413): unsure at all Xaa locations
  Clone ID: MRT4577_16150C.1.pep
MDAAPATSAVAVAVAVIFAVVASLPVLLRLLYASAGGKTNPKAPLPPGSFGLPFIGQTLSLVRALRANTADDWLRRWLAMYGLVSRLRLFGCPTAFLVGTSANKFIFASAAVTAKTPESFARMVGRRTIRXXVGDEHRRVRAMMMQFLRVDAVKRHVASMDGEVRRHLDAEWRGRGTVAVMPSMKSLTFDVMCTAIFGLGTGAVRRDLWTEFQELVRGIWAVPVNLPFTAYSRCLAASQRGRRAVAGVIQERRAKLERGESSXASDVVTLMLTEGLPDEEIIDNVMFLMVAAHDTTAALLTFLIRQLDADKEAYDRVVQEQEEIARSKVAGEALSWEDLGRMRYTWLAAMETLRMVPXPVFTMTRKTVDDVEYGGYLIPKGWXVIHAXNMTHWDPAIFPEPGRFDPARFENPS

SEQ ID NO: 252112 - protein, 361 aa, Zea mays
  Clone ID: MRT4577_161510C.1.pep
MLRAARYLLGSPGASGFGSRSTAEEVTPDLGATTAIITGATSGIGAETARVLAKRGARVVIPARSAKAAEDVRARIVAECPAAAVLVLPLDLSSLASVRAFADRFLALGLPLHLLINNAGKFSHGQLALSEDGVEMTFATNYLGHFLLTKLLAGRMAETAAATGVQGRIVNVSSSVHGWFAGDWAEYLHLVTRRKIPYDATQAYAVSKLANVLHTRELAARLQEMGANVTANCVHPGIVRTRLNRDRDGVLTDLVFLLLSKLLKTIPQAAATTCYVAAHPRVAGVSGRYFADCNEALPSPAATDRHEAARLWRVSEAIIDGCTNSQPQRDCTTSPLLRLLPAQTQSQSPTGASSSPRRRAC

SEQ ID NO: 252113 - protein, 142 aa, Zea mays
  unsure (1)..(142): unsure at all Xaa locations
  Clone ID: MRT4577_161511C.1.pep
MGATIFSILMLLAIFACVANATIFPKYSQAPIDALIAPYLPSMTASMCENPALQPYTLQHAIPPGNLPRSPPFFQQSPDLSLVQSLGQTIRPPQLQQLLLPLIRQVVLANPPPYSXQQQXLPLNQLFIQNSAACFHHQLLQP

SEQ ID NO: 252114 - protein, 199 aa, Zea mays
  unsure (1)..(199): unsure at all Xaa locations
  Clone ID: MRT4577_161512C.1.pep
MWAGRPYDATQAYAVSKLANVLHTRELAARLQEMGANVTANCVHPGIVRTRLNRDRDGVLTXRELTARSQLADSFVXSEWSDELNKCLCXDLVFLLLSKLLKTIPQAAATTCYVAAHPRVAGVSGRYFADCNEALPSPAATDRHEAARLWRVSEAIIDGCTNSQPQRDCTTAPLPRLLPAQTQSQSPTGASSSPRRRAC

SEQ ID NO: 252115 - protein, 108 aa, Zea mays
  unsure (1)..(108): unsure at all Xaa locations
  Clone ID: MRT4577_161513C.1.pep
MLGRATRTTPEWYTCIYCAPKIDLSSVAKMLYAFYTYLHGFSARLTPKEVRDLACEEGVLTEDPEATVELHTTLTLEVLGIXRTEXLSTKALTVGDGHLRVLKTSLWA

SEQ ID NO: 252116 - protein, 64 aa, Zea mays
  Clone ID: MRT4577_161514C.1.pep
DHHLFTQVCQSWYPSQIAPPDRTGLRSKCVTKKHATLCPCPVPCAHRYLPHQFQLTSVHPLFLA

SEQ ID NO: 252117 - protein, 52 aa, Zea mays
  Clone ID: MRT4577_161515C.1.pep
LVGRSVVCSLELIFGHPIHRLSMWEEGYLYICLCVSLPSKKHRVSWSRRCRM

SEQ ID NO: 252118 - protein, 138 aa, Zea mays
  unsure (1)..(138): unsure at all Xaa locations
  Clone ID: MRT4577_161516C.1.pep
MAAKIFRLLMRLDLSASAATATIYPQCSQAPIATFITTYLSPAAYSACENPVLQPYRIQQAHAASILPLSPLFLQXQHERLLQQXPQVHAEAQNIMAQQLQQLVLRNLAAYYQQQXHLTFNQLAALNTADYLQQQLPF

SEQ ID NO: 252119 - protein, 113 aa, Zea mays
  unsure (1)..(113): unsure at all Xaa locations
  Clone ID: MRT4577_161517C.1.pep
MGSYSAKNLGVANEVVQVSWVAHLLLYLHXPLGGAIVVYXAPIVVVYMCSNPVEFPLAEPMKISFRFAREQVAAVNLWVPHVSPTSXYVDIFPKGFLSSVFTKFRSTQKHKQK

SEQ ID NO: 252120 - protein, 33 aa, Zea mays
  Clone ID: MRT4577_161518C.1.pep
SGHDRPSDPIEIASCELPVVRQLVVGMGQRACP

SEQ ID NO: 252121 - protein, 180 aa, Zea mays
  unsure (1)..(180): unsure at all Xaa locations
  Clone ID: MRT4577_161519C.1.pep
VPRGPAGDPLGKPQKSVRKRRESWGMDTHVGKLIDSVGSIFRGSDVLLWCDPDIIAGFESEVAEAANEEQKTESLMRLSWALVHSRQPEDVNRGIGMLEASLXTAASSPEEPREKGESAAAHGQSVSMRSLGPRDRVKGRRQAALNMTVTSPGRTCAPDHRNFSPESSCRHTAWSGPSAP

SEQ ID NO: 252122 - protein, 275 aa, Zea mays
  Clone ID: MRT4577_16151C.1.pep
MASDVPMTPELEQIDGEIHDIFRALQNGFQKMDKIKDSNRQAKQLEDLTVKMKECKRLIKEFDRILKDEESNNPPEINKQLNDRKQSMIKELNSYVTLRKTYQSSLGNNNKRVELFDMGAGSSEPAAEDNIQMASAMTNQQLIDAGRNQMDQTDQAIERSKMVVAQTVETGAQTAATLTQQTEQMKRIGNELDTVHFSLKKASQLVKEIGRQVATDKCIMAFLFLIVLGVIAIIVVKIVHPNNKNIRDIPGLAPPAQNYQIHNRRLLWAEASIGL

SEQ ID NO: 252123 - protein, 116 aa, Zea mays
  Clone ID: MRT4577_161520C.1.pep
PTRTTHASSQTITVLNNKENITYNTNVFLLNQTAPSTPPCTPPTPTPISTNTITHLLYFFNPLQIPTPLPSPFFLPSTFSSPPLLMTHISHPLSNTFSLTQTSPTNTTTPTSTTTT

SEQ ID NO: 252124 - protein, 76 aa, Zea mays
  Clone ID: MRT4577_161521C.1.pep
SLGSPGIQGRAPANYFIKGPGSLAKNKTTKAGPSKVVFPVFSFCGKLKGFQASLDLRVLVLFLESQTPWCFQMGPG

SEQ ID NO: 252125 - protein, 148 aa, Zea mays
  unsure (1)..(148): unsure at all Xaa locations
  Clone ID: MRT4577_161522C.1.pep
RPAGRILRGDGKGVWNYMFLHQTTPVRXRILVDDFPVHFFKDLTXIQAACLYRTRIFMVFGITTRSDILAATIGARVTTTTFIMTAILLVDRIGRRTLYLSRLSSIIASLACLRLGLTVAKRSMTLQSATCSIVLCIATVFNFIASFS

SEQ ID NO: 252126 - protein, 91 aa, Zea mays
  unsure (1)..(91): unsure at all Xaa locations
  Clone ID: MRT4577_161523C.1.pep
PPVKXKKGASSEEIKKAIKAAFEGPPKGIIGSAEEDLVSPAFPGESRSGIFYPKAGIAFNAPFIKVVFWWDKKWGSTTRVFALIPPMFKTQ

SEQ ID NO: 252127 - protein, 98 aa, Zea mays
  Clone ID: MRT4577_161524C.1.pep
GLHDRHGRRSVNGRSRLTSGAYRFGVVGSHPILIGEVRSGIVYLNLVRRSRDQKLLCVPVHMKLYLIWTAQIRSCGQGSQIPLCPNHLSHEPLDFYKQ

SEQ ID NO: 252128 - protein, 66 aa, Zea mays
  Clone ID: MRT4577_161525C.1.pep
PPAKENNCQHLALIAKDNYTIQEYMVIKTSGLEKFEACNAPRRVTGKATRAALHPPDQPGRFSTLP

SEQ ID NO: 252129 - protein, 53 aa, Zea mays
  Clone ID: MRT4577_161526C.1.pep
ARFDRADTYCCSRAKQYSWHKIVTIVSRGVCFESKVLSLPNQQVNWRFIVYFG

SEQ ID NO: 252130 - protein, 93 aa, Zea mays
  Clone ID: MRT4577_161527C.1.pep
MTGLYDMLKTTWARENGSVGTEQRKILVGPIPGGVSPSVSDGDDLATVRMQADGILSLAENPNYAHLRDITAQETLRERFDIPRVPASCTSTS

SEQ ID NO: 252131 - protein, 32 aa, Zea mays
  Clone ID: MRT4577_161528C.1.pep
LGMASALETLCGQAFDAKKHHMLGVYLQRSWI

SEQ ID NO: 252132 - protein, 465 aa, Zea mays
  Clone ID: MRT4577_161529C.1.pep
ENSDSTVRLMRDQIIMARVYSALAKSKNKNDLYQKLQTRIRESQRAVGDAYADAGLHHSAPEKIIAMGQVLSKAREEVYNCTAITQRLRAMLQSADEQVRSLKKQSTFLSQLAAKTIPNSIHCLSMRLTIDYYILPLEERKFPRSENLENPNLYHYALFSDNVLAASVVVNSTIMNAKEPEKHVFHLVTDKLNFGAMNMWFLLNPPGKATIHVENVDEFKWLNSSYCPVLRQLESAAMKEYYFKADRPTTLSAGSSNLKYRNPKYLSMLNHLRFYLPEVYPKLDKILFLDDDIVVQKDLTGLWDVDLNGKVNGAVETCGESFHRFDKYLNFSNPHIARNFDPNACGWAYGMNIFDLREWKKKDITGIYHKWQNMNEDRVLWKLGTLPPGLLTFYKLTHPLDKSWHVLGLGYNPSIDRSEIDNAAVVHYNGNMKPWLELAMTKYRPYWTKYIKYDHPYIRGCNLSE

SEQ ID NO: 252133 - protein, 68 aa, Zea mays
  Clone ID: MRT4577_16152C.1.pep
ALPSPRSFAQNLTAVPREPLPEGKPGALFQIVKCFKSRHFVPRTHPALEPLLKRILSNLKEATFLSKI

SEQ ID NO: 252134 - protein, 124 aa, Zea mays
  Clone ID: MRT4577_161530C.1.pep
SNACGWAYGMNIFDLKEWKKKDITGIYHKWQNMNEGRVLWKLGTLPPGLLTFYKLTHPLDKSWHVLGLGYNPSVDRSEIDSAAVVHYNGNMKPWLELAMTKYRPYWTRYIKYDHPYIRGCNLRE

SEQ ID NO: 252135 - protein, 128 aa, Zea mays
  unsure (1)..(128): unsure at all Xaa locations
  Clone ID: MRT4577_161531C.1.pep
FPARRTQPXIVIEYPSFIYLIKTIFKDXXFIKDEAHYFFHHLISSIIYFHSIQVSHHNLNLXNTLLHSTYSTHFNIFNFNYSKSSILHSHPKSTLQTPTYISPKILFTNXYYGNISNFISCNLTLYFT

SEQ ID NO: 252136 - protein, 45 aa, Zea mays
  Clone ID: MRT4577_161532C.1.pep
LYFLETIGDPCGFLLARAMAKLNTRLQEYLKSRSSNQRWLARTSI

SEQ ID NO: 252137 - protein, 141 aa, Zea mays
  unsure (1)..(141): unsure at all Xaa locations
  Clone ID: MRT4577_161533C.1.pep
RCCRALRMRWLWLHKSDPGRPWANLPFQIPRKAKAFFDTVLISEVGNGAHTLFXTDKWLLGQRVSDLAPRLFEIIPKRIVNNRSVLAASTEGNRTSADTGADAGRAEGAHPQAREEQSAEELPADRPETQDCLTPSSMASS

SEQ ID NO: 252138 - protein, 54 aa, Zea mays
  Clone ID: MRT4577_161534C.1.pep
APEGKLDVASTNFITYSTLVTLFQYHLLLTIRKSFFQQFLARQQKHNLKVLPNL

SEQ ID NO: 252139 - protein, 51 aa, Zea mays
  Clone ID: MRT4577_161535C.1.pep
QPSYYIFSFIYILYVRHIIIQHKPYLVANAMELFLTIIMFICARVLKLQNY

SEQ ID NO: 252140 - protein, 202 aa, Zea mays
  Clone ID: MRT4577_161536C.1.pep
MASRRVLHLLTASRGISSTPHLASLGWINKIKDTFTGKKAADSPFPPSESFNLNMFADSMEMARKVGTFKNFVSGRCSEATVVAACEKHAAVLRYLATIDPIGEKLKTSDKISATKHCNCTIADVEHILAKYTWAKDAQKKIEKLKEEGKPVPKTFTEVQNLMGNTAFDLGRANLEKSGQISRNALCPCGSKKRYKKCCGAS

SEQ ID NO: 252141 - protein, 85 aa, Zea mays
  Clone ID: MRT4577_161537C.1.pep
VGSVHGLDKVGQIITVLFLVVANNTSIPGVAVLGSASIRGNGDNNASPMYNCGAIVLLSDQPFDEEPALRLGLSFNMYMSMGTCL

SEQ ID NO: 252142 - protein, 460 aa, Zea mays
  Clone ID: MRT4577_161538C.1.pep
MSNMLRARRRLDLLQVVLFAAVLLVVVADAGVTSQYRRKLEATVEMPLDADVFRVPPGYNAPQQVHITLGDQEGTAMIVSWVTANELGSSTVMYSEASPDPEKMELRAEGTHTRYDYFNYTSGFIHHCTLTNLKHSTKYYYAMGFGHTVRSFCFTTPPMPGPDVPFKFGLIGDLGQTFDSNTTLSHYEANGGDAVLYVGDLSYADNHPLHDNTRWDTWARFVERSAAHQPWVWTAGNHELDLAPELGEHVPFKPFAHRYPTPFWYSVRVASAHVVVLASYSAYGKYTAQWEWLRAELARVDRAATPWLIVLVHSPWYSSNGYHYMEGETMRVQFERWIVAAKADLVVAGHVHAYERSHRVSNVAYDIINARCTPVRTRDAPVYVTVGDGGNIEGIADNFTQPQPSYSAFREASFGHATLEIRNRTHAYYAWHRNQDGAKVVADGVWLTNRYWMPTDDDIN

SEQ ID NO: 252143 - protein, 67 aa, Zea mays
  Clone ID: MRT4577_161539C.1.pep
RWWLRRSSSQCPSITFLDPVAQSFCFYFSLQEAVAASGEPPRVVGGVAVQGALRAVRRGRPARAAAA

SEQ ID NO: 252144 - protein, 303 aa, Zea mays
  unsure (1)..(303): unsure at all Xaa locations
  Clone ID: MRT4577_16153C.1.pep
MASDVPMTPELEQIDGEIHDIFRALQXFMTSLPRLCCFWTAPWRSSRRLTGQRXNGFQKMDKIKDSNRQAKQLEDLTVKMKECKRLIKEFDRILKDEESNNPPEINKQLNDRKQFMIKELNSYVTLRKTYQSSLGNNNKRVELFDMGAGSSEPAAEDNIQMASAMTNQQLIDTGRNQMDQTDQAIERSKMVVAQTVETGAQTAATLTQQTEQMKRIGNELDTVHFSLKKASQLVKEIGRQVATDKCIMAFLFLIVLGVIAIIVVKIVHPNNKNIRDIPGLAPPAQNYQIHNRRLLWAEASIGM

SEQ ID NO: 252145 - protein, 464 aa, Zea mays
  unsure (1)..(464): unsure at all Xaa locations
  Clone ID: MRT4577_161540C.1.pep
WGLCLSAAAWASSCXALVLLGGGGADAGTTSSYRRKLEATVEMPLDADVFRVPPGYNAPQQVHITLGDQEGTAMIVSWVTANEPGNSTVAYGEDPARMERRADGAHTRYDYFNYTSGFIHHCTLRNLKHATKYYYAMGFGHTVRTFWFTTPPKPGPDVPFKFGLIGDLGQTFDSNITLSHYESNGGDAVLYVGDLSYADNHPLHDNNRWDTWARFVERSVAYQPWXVWTAGNHELDFAPELGENTPFKPFAHRYPTPYRAAGSTEPFWYSVKVASAHVVVLASYSAYGKYTPQWAWLQAELARVDRKTTPWLVVLTHSPWYNSNNYHYMEGETMRVQFERWLVDAKVDLVLAGHVHSYERSHRVSNVAYDIVNGKSTPVRNADAPVYVTIGDGGNIEGIADNFTRPQPGYSAFREASFGHATLDIKNRTHAYYSWHRNHDGAKVVADGVWFTNRYWMPTDDDTN

SEQ ID NO: 252146 - protein, 38 aa, Zea mays
  Clone ID: MRT4577_161541C.1.pep
PDRIVGQTRSLVVVWDVTGCPTRGSSREFRPGSCRRHS

SEQ ID NO: 252147 - protein, 234 aa, Zea mays
  unsure (1)..(234): unsure at all Xaa locations
  Clone ID: MRT4577_161542C.1.pep
MAILGELGTEILIPVCGVVGIVFAVAQWFIVSKVKVTPGAASAAGGSKNGYGDYLIEEEEGLNDHNVVVKCAEIQTAISEGATSFLFTMYQYVGMFMVVFAAVIFVFLGSIEGFSTKGQPCTYSTGTCKPALYTALFSTASFLLGAITSLVSGFLGMKIATYANARTTLEARKGVGKAFITAFRSGAVMGXFLLSSSGLXVVLYITINVFKMYYGXDWEGLFESITGYGLGGSS

SEQ ID NO: 252148 - protein, 76 aa, Zea mays
  Clone ID: MRT4577_161543C.1.pep
CERMQCGSSVQVLRTGLASMKQVYMMYAWKATEHGVSLHAQCLVYWPMSGSMCKSSLHYCHRLCSPMPIQVSVYHS

SEQ ID NO: 252149 - protein, 372 aa, Zea mays
  Clone ID: MRT4577_161544C.1.pep
MEKSVGDLTALLQAMQLQNESIKQALDANTAVVRDLSSWKPQIETEVLNLRQDVGSLSDKLDELMAIKDQHHTAPKVFDREPLEPGFSPSTSLGLSLHQATHGHSDHHHAPLHQSNGLGVVTTLTPPPVTVTSKISPQEAFRTPLVHPIDPYLSPYQPRLAAALPQLIFPPFDGHHPKMWKAKFCARFERDQHNSLIRQFFHIRQNDTEELSTSSGNATTALKQPSRSLITGNSSSVVAQSDGQRKQQPMVANSLGGLTKSGTDERKASVLMAYRKAKGLCYKCGLHWGPTHKCSDTVPLHIVEKLWQLLDQPVSPDNSHVSQEDSGNDLMVLSFHAVHGTEAPQTIKLMATLFSKKVLMPRGALPPSSVNP

SEQ ID NO: 252150 - protein, 128 aa, Zea mays
  Clone ID: MRT4577_161545C.1.pep
SVITSSPLQARQQQLHSFSESKSEDEAYSTQPPGRGGGGLTNGSWPVRSPAQIYQVRRSSVDLRGVGRASFLVGQGGMTRQRRSKERNLGRSNRPKSNQPSRITYEEKAHPAVIQAHKQAHKSAQRFH

SEQ ID NO: 252151 - protein, 83 aa, Zea mays
  Clone ID: MRT4577_161546C.1.pep
MQSSLKPAGSGVLQLLVCFLLLYSRPSSCSDINAHDGQGQVGSEQLWTFQGLFASVFQYLQLLFHHIVPQGMFWTDDIAYELM

SEQ ID NO: 252152 - protein, 72 aa, Zea mays
  unsure (1)..(72): unsure at all Xaa locations
  Clone ID: MRT4577_161547C.1.pep
MPILEIQLLFFFPCDFTFFRWGILKPMKGPXFYTVFTSKSILFQNLIQFQYIPISSFISLSNSHVPIAHPNT

SEQ ID NO: 252153 - protein, 78 aa, Zea mays
  Clone ID: MRT4577_161548C.1.pep
EISGKAIFFVKNEGPKIRFQFFIFCFDPKSWGVVSIFWTFGEKVILFLGENFLVQGLKKLVLVIKGFPCPLQSWNKKV

SEQ ID NO: 252154 - protein, 43 aa, Zea mays
  Clone ID: MRT4577_161549C.1.pep
LSRSRVYITSAFFSYIKILRNTLTKAPPGHNAVPGGVLKLKVV

SEQ ID NO: 252155 - protein, 102 aa, Zea mays
  Clone ID: MRT4577_16154C.1.pep
IFHHGTLPENLSWQAMSTPCCVSRFTFLPRFAVSFCQASPGVVSDNSAPGGEHAEVDDGLRGHHTTPSRLRGSSMMDCLDWYTHHVAIWSNAELHPGATTTG

SEQ ID NO: 252156 - protein, 98 aa, Zea mays
  Clone ID: MRT4577_161550C.1.pep
AFFMQVDGTLNKLTTLREYIDDTEDYINIQLELFLSSGTVCLSLYSLVAGVFGMNIPYTWNDGHGYIFKWVVLVSGLFCAFIFVSIVAYARHKGLVGS

SEQ ID NO: 252157 - protein, 209 aa, Zea mays
  Clone ID: MRT4577_161551C.1.pep
AHKSRSPLPQPRPAPPAASAPIHGCATRDRLPFPCAKRDRAHKSRDGMAALPRSPNSARLPLSLRDLRWIGESMDPRIAGLPNPPRIPPAEASFYGDESRAPSSNHRPFITVTPAKGSGSARSIFLSPPTTAIHCIRIPSFLPSVQVQQPARAFLQETESIRVPKLAALPASKKTCGMELELGMAPPSARRPTPMTIDQQQQQRHLAEG

SEQ ID NO: 252158 - protein, 46 aa, Zea mays
  Clone ID: MRT4577_161552C.1.pep
PFTVCMTKLNITLSDIVLQSLNHFLIPTIKIGVEVFPMTLVRMMSK

SEQ ID NO: 252159 - protein, 384 aa, Zea mays
  Clone ID: MRT4577_161553C.1.pep
MAAAGAGTGSEGKKRGASRSWILLDAAGEEQLLDADKYAIMRRVDINARDLRILDPLLSYPSTILGRERAIVLNLEHIKAIITSNEVLLRDPSDENVIPVVEELHRRLAPSSATQHDGKENLSGQHDVEGAEEDESPFEFRALEVTLEAICSFLDARTTELETDAYPALDELTSKISSRNLDRVRKLKSGMTRLTARVQKVRDELEQLLDDDDDMADLYLSRKLAGASSPVSGSGGPNWFPASPTIGSKISRASRASAATVHGNENDVEELEMLLEAYFMQVDGTLNKLTTLREYIDDTEDYINIQLDNHRNQLIQLELFLSSGTVCLSLYSLVAGVFGMNIPYTWNDGHGYIFKWVVLVSGLFCAFIFVSIVAYARHKGLVGS

SEQ ID NO: 252160 - protein, 66 aa, Zea mays
  Clone ID: MRT4577_161554C.1.pep
QACLACTKNLNVCKLRTMSQKTAICQNNVLGTIQKEATLKIMIPVILPEQPTVLLSQQLHHLISET

SEQ ID NO: 252161 - protein, 51 aa, Zea mays
  Clone ID: MRT4577_161555C.1.pep
FRRIYETTGDKEIRRTVCQNHLHSCCRSSAGGGSWLEHALRAGAVRSDEWP

SEQ ID NO: 252162 - protein, 43 aa, Zea mays
  Clone ID: MRT4577_161556C.1.pep
TPSRANRWSFQLAPSRSKCQLVLRENVRKQKSVSCKPNPLSAH

SEQ ID NO: 252163 - protein, 72 aa, Zea mays
  Clone ID: MRT4577_161557C.1.pep
GCLVGAQVELQPLSKSRLFTKTSLLPRGTIHHLYEAKCLWQPKLSTCYKPSVHSNKNGCGTFYECCLICHLI

SEQ ID NO: 252164 - protein, 85 aa, Zea mays
  unsure (1)..(85): unsure at all Xaa locations
  Clone ID: MRT4577_161558C.1.pep
XXXGWXDXGXYEKDIKEWXXXGGXNGSLRXDXEXSNGXNXXXINXLKXXXXXKXKXXGINYXDLXXLESGXXIEEXGGXKIXMKY

SEQ ID NO: 252165 - protein, 73 aa, Zea mays
  Clone ID: MRT4577_161559C.1.pep
CSISSLCMLSLSSILLYHCLLFSLEAMSLHALGRLSCESLILIETVLLLGRELNDKACCQGSQTPQNSSKLTG

SEQ ID NO: 252166 - protein, 89 aa, Zea mays
  Clone ID: MRT4577_16155C.1.pep
PGGDPMGVHLLPRHQTWEPATPSAAAAAVATRLQCHQGLRQFPDSIRGRIGASGSAHFSRRLVGAKPPEEGERGPTGRQELGRRPRIPP

SEQ ID NO: 252167 - protein, 250 aa, Zea mays
  Clone ID: MRT4577_161560C.1.pep
PAGDIRGPCPLINSLANHGYLPRDGRNVRVEEVLAGMNAVGLSKPLGAAFANPIFQERAPSKFHDDQVTQRSLLQKLWQTVTDPWSVLGKFGMRKPGQVDSEGHRVLNLDQLGLPNTVEHDISLTRRDHQQGDNITLQKDLVEDLLASSKDGKVITVDDLVEFRKKRIARQKEDNPGVQYGAFENDLACAEIALILNVIGTGDRVECSYARAFLQQERLPIDEGWKKESFGIVSLITERDKVKKELMDQS

SEQ ID NO: 252168 - protein, 88 aa, Zea mays
  Clone ID: MRT4577_161561C.1.pep
PASGRVKPTWAPSPAARQPRPPPPTTQAWTAPGNRTTHDRLDGLSGDYTTAPTEQRYGVLEEREACYDQMLNLIGWDNHYQAADENQK

SEQ ID NO: 252169 - protein, 55 aa, Zea mays
  unsure (1)..(55): unsure at all Xaa locations
  Clone ID: MRT4577_161562C.1.pep
RFFRGGAVPSRRDHVFGVGXXKSSPRGQHRHGRHHGLFPLRSHLHHVSFLLQPFS

SEQ ID NO: 252170 - protein, 135 aa, Zea mays
  unsure (1)..(135): unsure at all Xaa locations
  Clone ID: MRT4577_161563C.1.pep
PPALEGALKVKEVALMPTEGMSPGEIKHGPLALVDKNLXIIVIATRDACFSKQQSVIQQLLSRRGGLKIMCFRGNAPAVCPNGGSCKVIKVPQVADCFQPVINIIPFQLLGDHLTVFRGFDVGPPRNLAKSVPPQ

SEQ ID NO: 252171 - protein, 62 aa, Zea mays
  Clone ID: MRT4577_161564C.1.pep
MWAVRPIRFIWVCPLSRRPGLSALFLRVVCFFPLSADNIFSPGSSMTLITASSYAFRYTERC

SEQ ID NO: 252172 - protein, 81 aa, Zea mays
  Clone ID: MRT4577_161565C.1.pep
PTNIILEDTDIICQPIQQYNTITRRKKKILQCTITLTLSHCTTSIKNPTTSTYYKLQSITRTRSWTWMKATYLSISTLKQI

SEQ ID NO: 252173 - protein, 69 aa, Zea mays
  Clone ID: MRT4577_161566C.1.pep
QGKGAHQVPVFPLEKEVVSGIWKSTLNLGSAVALGVVLLWLTCYLSGQVSLILTGEGPLGVLSRHERQL

SEQ ID NO: 252174 - protein, 68 aa, Zea mays
  Clone ID: MRT4577_161567C.1.pep
RLRSALGSRPSCLSHAARCRHSAPASTAPLRGPSHATRGYVARQHALPRARPPARLLPCACSAAPRCL

SEQ ID NO: 252175 - protein, 60 aa, Zea mays
  Clone ID: MRT4577_161568C.1.pep
ITGIEISQMDDYLRLYVHLNSTCIVLQHQAHLGLYRMTTSVGVSHGTFTRFVIDSGSDMH

SEQ ID NO: 252176 - protein, 54 aa, Zea mays
  Clone ID: MRT4577_161569C.1.pep
KRTKPMASDGWGVETVYCTNGAVSCWSRTSTPSGRLFPLRRGCPKYYGAGTSWT

SEQ ID NO: 252177 - protein, 141 aa, Zea mays
  unsure (1)..(141): unsure at all Xaa locations
  Clone ID: MRT4577_16156C.1.pep
VFSFGVVLLEIVTGRKPVASPGIEAPPVVLRHSVRGVMEAGTEWAFFDQSFRGFFQRXLVQVLKLGLVGPSNAPSIVLSMAKVAQFLKTVRVNLLPYRRGRGHIAQISWFPRKGILDFFPQMKVPPPLFFVWFFPVAQLHL

SEQ ID NO: 252178 - protein, 71 aa, Zea mays
  unsure (1)..(71): unsure at all Xaa locations
  Clone ID: MRT4577_161570C.1.pep
ALFQQFPWGHXLAQNIRAHHLQHLVLANLVAYFKNQHFFPFNQLAALNFVFNLHHHQLPLSQFFVAYPQQF

SEQ ID NO: 252179 - protein, 114 aa, Zea mays
  unsure (1)..(114): unsure at all Xaa locations
  Clone ID: MRT4577_161571C.1.pep
GRSQEPGVGENESSTANAGFLMMRILHNRLTSSAGGXTTSDRRRTPARXPMSPWLTXEDVSHFSSVFERTGFTGPINYYRNMYRIWXLAAPLADAKVRWPTHXIVGYSDLMYHY

SEQ ID NO: 252180 - protein, 57 aa, Zea mays
  Clone ID: MRT4577_161572C.1.pep
RRRGCLPLHLSEHVVTSVRTHSGPLYVSYLLSVPLTLLVSPTADGYLTPTELRAAAD

SEQ ID NO: 252181 - protein, 186 aa, Zea mays
  Clone ID: MRT4577_161573C.1.pep
MDEAQVVESKDGTISVASAFAGYQEAVQDRDHKFLTKAVEEAYRGVDCGDGGPFGAVVVCNDEVVVSCHNMVLKHTDPTAHAEVTAIREACKKLGKIELSDCEIYASCEPCPMCFGAVHLSRIKRLVYGAKAEAAIAIGFDDFIADALRGTGFYQKANLEIKKADGNGALIAEQVFEKTKEKFQMY

SEQ ID NO: 252182 - protein, 62 aa, Zea mays
  Clone ID: MRT4577_161574C.1.pep
MRTIAARNTHDSLSFSRRHFKWPVLGKSKSHGAATFGDEEYMKSSEAEDDDETTMAFSSACP

SEQ ID NO: 252183 - protein, 95 aa, Zea mays
  Clone ID: MRT4577_161575C.1.pep
LRREQFPGYAPEMIASAFSSSSCRRLLPAEKVDAMHWKWKASDGDPFARIWVLPVDLVLTSVILAVGQLGKVLTHAMDGWKEGGLALAVDDHLTR

SEQ ID NO: 252184 - protein, 50 aa, Zea mays
  unsure (1)..(50): unsure at all Xaa locations
  Clone ID: MRT4577_161576C.1.pep
FGAASVLQAMQRXHAALASAGLAGNVRVATAVKMDAIENSSPPSSGVFKD

SEQ ID NO: 252185 - protein, 57 aa, Zea mays
  Clone ID: MRT4577_161577C.1.pep
WKFRTTFLTPLVEKYNFFFKPGPPFVGITLPLKRVKQKPLLQMGNWSHFFELWVKLI

SEQ ID NO: 252186 - protein, 91 aa, Zea mays
  Clone ID: MRT4577_161578C.1.pep
LAKAGNNICRRRLFFGCSQPRAPIDGILFLQLPRNSTLEATLTHQLLLPYDAYRTFYNDITENSPHCRPYIFKEDHYTRSCLYKQREPNLG

SEQ ID NO: 252187 - protein, 141 aa, Zea mays
  unsure (1)..(141): unsure at all Xaa locations
  Clone ID: MRT4577_161579C.1.pep
PDLLHLVEMGVLLVKELSLWRXGRGFLLPHXNTHESVIFVPFLFRGLGLLVSSFFRGLLDYYSLNLXHLNPNSVLQVATFVHLCEAFLGIASHFVLWRYLYHCKSGMAGGXPXVVGGASLELRQGRKTGYLDISLKDSIKV

SEQ ID NO: 252188 - protein, 66 aa, Zea mays
  unsure (1)..(66): unsure at all Xaa locations
  Clone ID: MRT4577_16157C.1.pep
HIPSIFTVRLERSEKGNHPRSSDACLFSDLSASFISSDAAQHTKWSVSLCSSXGPFRILMISVFLG

SEQ ID NO: 252189 - protein, 73 aa, Zea mays
  Clone ID: MRT4577_161580C.1.pep
LSTSTIIRGASQPRAALFGRSLHSEASDLRQYSYIVIGASQLSFQNVLFITRVFECTIINRKLLKLTEDIQTF

SEQ ID NO: 252190 - protein, 92 aa, Zea mays
  unsure (1)..(92): unsure at all Xaa locations
  Clone ID: MRT4577_161581C.1.pep
FRLFNVSTVDVXETGINEHLNLSPEIANEIKQAEAQIKRRMGIGSHISERRLIDGLNRMGMNESIVRRALLIMHQRDEVEYKRERHVIVRKA

SEQ ID NO: 252191 - protein, 49 aa, Zea mays
  unsure (1)..(49): unsure at all Xaa locations
  Clone ID: MRT4577_161582C.1.pep
VLSRQQAEAQIKRRMGIXXSHISERRLIDGLNRMGMNESIVRTCRVSYA

SEQ ID NO: 252192 - protein, 88 aa, Zea mays
  unsure (1)..(88): unsure at all Xaa locations
  Clone ID: MRT4577_161583C.1.pep
MKTDLALLKFLSPLLGMKEMRSLMVGLYVVRKTTIFFKFKLGEIDTTIPTMGFNVETVEYKNINXTVWEGGGKVTITPXLWRHYFQNT

SEQ ID NO: 252193 - protein, 108 aa, Zea mays
  Clone ID: MRT4577_161584C.1.pep
VINHQPYDSKADVFSFAIVLWELITSKIPYDTMTPLQAAVGVRQGLRPGLPKKTHPKLLDLMQRCWEADPSDRPAFSDILAELEDLLAQAQGTSGKTVQDPSNSNAKD

SEQ ID NO: 252194 - protein, 53 aa, Zea mays
  Clone ID: MRT4577_161585C.1.pep
YQYLYTIKESNCLNFISTYSYSIKCKSRTTVVICHFKKSADSKCIVFVSQICT

SEQ ID NO: 252195 - protein, 65 aa, Zea mays
  Clone ID: MRT4577_161586C.1.pep
RFRNIGKDGPRSIKLERERLTPIPDIFSQSSDLPHLGFELPIMRKFVLLVYKKKKKKKKTSSRSR

SEQ ID NO: 252196 - protein, 74 aa, Zea mays
  Clone ID: MRT4577_161587C.1.pep
PIYTKNQKGIGLQAINKKRPANNLRLLLTKAIKNEWADVNYKHKKIAKHCLVANKKNLTRSDSLCCGRQPFTKL

SEQ ID NO: 252197 - protein, 69 aa, Zea mays; identical to SEQ ID NO: 218043
  Clone ID: MRT4577_161588C.1.pep

SEQ ID NO: 252198 - protein, 95 aa, Zea mays
  Clone ID: MRT4577_161589C.1.pep
LTTVNVFFLLDFRESPNPAIQLAELVFRWSRASRRQWFQEIAAAESLPGIRGSSAATPTTATIRSLRLTRWHALETGFVGCIVHVNAGFAVVVVI

SEQ ID NO: 252199 - protein, 149 aa, Zea mays
  unsure (1)..(149): unsure at all Xaa locations
  Clone ID: MRT4577_16158C.1.pep
SGDSYGHREPGCAPPPVYWAGGGYGNVVHVAHEVCDQRPXTTVWGGXVLVAPTEAVAAITATXRPHHCCGGSQAGTRLPAPGCGGGGXPPVRHQTYRIYCRAGXEDHYWLDYRDWRGCLVRTDRDDDPHPWXIRDIKYSTRVNDEERYA

SEQ ID NO: 252200 - protein, 128 aa, Zea mays
  unsure (1)..(128): unsure at all Xaa locations
  Clone ID: MRT4577_161590C.1.pep
TRGQARVRLGTIETDRVSTHYNSMMTLTPGGHEEDRXLYKEARFTXPGRANMLCMHGKAALPKMHVGHRIRKTEGDYXRLQWTPKDAARLGRAEPALMLEVVAYILDVDSDKISLWWSKAHYYGDTPL

SEQ ID NO: 252201 - protein, 115 aa, Zea mays
  Clone ID: MRT4577_161591C.1.pep
NQSKKDIKEFKEKNKVNKVVVMCTTNSERYSNVVAGLKDTMDELLASLDKNEAEIWPSTLYAIACVHEGVPFVNESPQNTFVPGLMELAIKQNSVIGGESLGPWPWPWSRPCSAC

SEQ ID NO: 252202 - protein, 47 aa, Zea mays
  Clone ID: MRT4577_161592C.1.pep
HKLEEWATHAPGAHTLHANTTSKRPHPVIHRRVLNQGHILVTRENRH

SEQ ID NO: 252203 - protein, 57 aa, Zea mays
  unsure (1)..(57): unsure at all Xaa locations
  Clone ID: MRT4577_161593C.1.pep
YNIIXYNPHHSIQXXQTTTTSSQNPKNNIYFTFKFYKYFHPYAASFNVNGIIAYLVP

SEQ ID NO: 252204 - protein, 130 aa, Zea mays
  Clone ID: MRT4577_161594C.1.pep
IHARVFKQTVSAQNNIHNAHRNGAFGPSVVSSVSHQNGSIVTGGSNIAQAQPAQSIFHPDPSTVSVTSGSFCPSSLGKHHLQVFPERSGNMSGVKAAKLSSFKPQAYMNLYNHGDNADTAAANIAWDYMR

SEQ ID NO: 252205 - protein, 85 aa, Zea mays
  unsure (1)..(85): unsure at all Xaa locations
  Clone ID: MRT4577_161595C.1.pep
KAACMVAPKSIISYPQVWKGQGSRKWKLYQNDGFFVQFEAPALRKIWFVPSPKKKGRPLCRSPXALDIGIHEVLPRIFKEAALAP

SEQ ID NO: 252206 - protein, 48 aa, Zea mays
  Clone ID: MRT4577_161596C.1.pep
ESSFNSHGILMHIIKNDSLHEVGTYLNLVQLLRRTIYRKHPTAPDWLA

SEQ ID NO: 252207 - protein, 71 aa, Zea mays
  Clone ID: MRT4577_161597C.1.pep
IYHIVERTTCHQLSNRSIRCLANGWVANAHFYALFMKPEHPIGPVWALAFSSWSALYLSFFGCGGAKGSRP

SEQ ID NO: 252208 - protein, 133 aa, Zea mays
  unsure (1)..(133): unsure at all Xaa locations
  Clone ID: MRT4577_161598C.1.pep
ASPEREPTAPPAEKKPAATTPAEEEXPPQEKAPAGHKPKADKRRPAGRXAAREGGGGKKGRQKAKKSGATNKTNSDKGPQQAPPESGNPAKARASTNTNNDDRXEKHDGEADKRARDNKQPSTTAREXQTTDR

SEQ ID NO: 252209 - protein, 51 aa, Zea mays
  Clone ID: MRT4577_161599C.1.pep
EDHPRCNFSTARHEKQWELPCKNRVKLPINIKISLEHHDFKYIQPRVQCGN

SEQ ID NO: 252210 - protein, 107 aa, Zea mays
  Clone ID: MRT4577_16159C.1.pep
ARVDQALRPDSSPPTSIPACARGLADSDHPRRRLAHRCDPRDLPYVLDHLTGAISPPIVILPTESTCSSPSKDLSKKRTRSKLPRLLLRISPQPQQLKVPFRKWLMV

SEQ ID NO: 252211 - protein, 82 aa, Zea mays
  Clone ID: MRT4577_1615C.1.pep
IHFFGGPITKVQGGKFLTVPTGKTWGYTTLLPWEEIPIWPARLILTNPCPSSLAKGTPPGTANETRPVGVLQARGAGRFPPP

SEQ ID NO: 252212 - protein, 44 aa, Zea mays
  Clone ID: MRT4577_161600C.1.pep
WARSNITWSINATPNPKLGFPTYYRARFSFPISSLLPPTLQPPC

SEQ ID NO: 252213 - protein, 71 aa, Zea mays
  Clone ID: MRT4577_161601C.1.pep
SVPLYNTVGDSLTGLLILEMRKHSFGPCIKILSSFRKRLYKHGALMWKSKTLGPIYTLKWNPRSIRMERLT

SEQ ID NO: 252214 - protein, 45 aa, Zea mays
  Clone ID: MRT4577_161602C.1.pep
MATRPYRYSRLIKNKPYPKSRYCRHVPDLPNKSYDFGMKRKAPDE

SEQ ID NO: 252215 - protein, 123 aa, Zea mays
  unsure (1)..(123): unsure at all Xaa locations
  Clone ID: MRT4577_161603C.1.pep
MTVKKLITRSGVGRHQEGHDHGALKXAGAHIYTXLHLVFNNQDFNMVITNWTTGDPTTPVVLIMKDGWNAFWLPVGPTVHANICQGHLNTNTTIGAFMTGRITLQRRILYLELHYETAIKPIY

SEQ ID NO: 252216 - protein, 48 aa, Zea mays
  Clone ID: MRT4577_161604C.1.pep
SYPLILYTFRPLFFFFYLFIIFLIFLFFSPTLHFFLFKATTNYHRCGM

SEQ ID NO: 252217 - protein, 37 aa, Zea mays
  Clone ID: MRT4577_161605C.1.pep
SPPVYKISPSLVAELYSYRIMPLTKKVEVAYLLRRLD

SEQ ID NO: 252218 - protein, 332 aa, Zea mays
  Clone ID: MRT4577_161606C.1.pep
MVAAEDPEHFFAASPPLRDAAVVAASLQEFVARNSHASSDGVGRRRIVCVTSGGTTVPLEQRCVRYIDNFSSGHRGAASTEYFLKAGYAVIFVHRRGSCQPFSRFLPDDSFLHFFDVTTDSKVQVAESQATVVKRAIGDYRKATEGGSLLKLPFTTIFEYLQLLKMVATSMSCVGLHGMFYLAAAVSDFYVPWDSMAKHKIQSAGGPLDMKLSQVPKMLPVLRNHWAPLAFCVSFKLETDPDILVQKAETALSKYRMDVVVANLLATYKEEVVIISNGKSNTIRRCSKGEDLEEHIIKLLEKSHSKYIYSSTEGCSKNDYEKLIPLGIKSLA

SEQ ID NO: 252219 - protein, 51 aa, Zea mays
  Clone ID: MRT4577_161607C.1.pep
PVNSVCMRCSIPFKLCRDMTLIQSYKRHLSALFRGICLSFPQSGSESSETS

SEQ ID NO: 252220 - protein, 114 aa, Zea mays
  Clone ID: MRT4577_161608C.1.pep
LPVLRNHWAPLAFCVSFKLETDPDILVQKAETALSKYRMDVVVANLLATYKEEVVIISNGKSNTIRRCSKGEDLEEHIIKLLEKSHSKYIYSSTEGCSKNDYEKLIPLGIKSLA

SEQ ID NO: 252221 - protein, 117 aa, Zea mays
  Clone ID: MRT4577_161609C.1.pep
PTPRPLVTLLPRHRTGRINQLQTSHGNGTTAREPVLETYGLRGSRLRRPPRGGLRPRRQCTRRRYRIRYQVQGPCRGSGRVRALEGRAPGKLQVNLQRRPRSPSEPDGRCLPGEETM

SEQ ID NO: 252222 - protein, 123 aa, Zea mays
  Clone ID: MRT4577_16160C.1.pep
SPRFSWFHALLLFLIFFIVFFFYFILLFFFSFFLFFTVGGGGYLGLVEKKYSKGRGFEKQPLKRLLGPGGGEEAEGGGSTYTLVDPLAAKEALKNFWKPLLLALDKGEGEIRHHPPPFSLEKF

SEQ ID NO: 252223 - protein, 29 aa, Zea mays
  Clone ID: MRT4577_161610C.1.pep
PTRSRTRRQTFETLYNMTFNSEFEQYYGE

SEQ ID NO: 252224 - protein, 67 aa, Zea mays
  Clone ID: MRT4577_161611C.1.pep
NNGLSNDESAGRMPTPRTLQHWELHCVDGKDANSKQLLPLSLLAFSFSSPLFSLVHSSGQSSHSKLP

SEQ ID NO: 252225 - protein, 58 aa, Zea mays
  Clone ID: MRT4577_161612C.1.pep
ILYRYHQIKIIISDGWASKHGHFRRGDPKYIIFYQLFVFPCCYFFFFFYFFFFFFFFF

SEQ ID NO: 252226 - protein, 98 aa, Zea mays
  Clone ID: MRT4577_161613C.1.pep
TLIVNCRVADDVVCVDVTRAVTIRLCQVILLMSGVVGPPVRWPSSAVYIRRASSSLLLPVGLDRHVRLLGERLGGACSSATAAVVERSHICRATGTAS

SEQ ID NO: 252227 - protein, 121 aa, Zea mays
  Clone ID: MRT4577_161614C.1.pep
NQAPASKAPIPPWLHLHSCSAAVRLYRATAGVDPAVQARLAAVPPPSLPSYPTASLYLVPFYLPCRFLQSPTLPAAAVCNLLGTVPRFGLLTLCFGVHGYSTKRASAFGLAARHSMHAAMG

SEQ ID NO: 252228 - protein, 82 aa, Zea mays
  unsure (1)..(82): unsure at all Xaa locations
  Clone ID: MRT4577_161615C.1.pep
GVQSAEMATDDGAIYATSNRVTTARXAVLETAAHTLNRTVQRENSGARYYTETLNTLNRLSDGLYTADDRRGNFHHTSELRA

SEQ ID NO: 252229 - protein, 109 aa, Zea mays
  unsure (1)..(109): unsure at all Xaa locations
  Clone ID: MRT4577_161616C.1.pep
MAATASLTTTAPSPPALLKASAPLLISFRPVSRHCKNLCIKTKATENDQSAKKHQKVKSILCQDCEGNGAIVCTKCEGNGXGKREILCGNCNGAGFLGGFLSTFDETAQ

SEQ ID NO: 252230 - protein, 153 aa, Zea mays
  Clone ID: MRT4577_161617C.1.pep
MAMMVDPPNGMGNHGKHYYTMWQTMFEIDTKYVPIKPIGRGAYGIVCSSINQETNEKVAIKKINNVFDNRVDALRTLRELKLLRHLRHENVIALKDIMMPIHRRSFKDVYLVSELMDTDLHQIVKSSQPLSNDHCQYFLFQLLRGLKYLHSAG

SEQ ID NO: 252231 - protein, 129 aa, Zea mays
  Clone ID: MRT4577_161618C.1.pep
MAATASLTTTAPSPPALLKASAPLLISFRPVSRHCKNLCIKTKATENDQSAKKHQKVKSILCQDCEGNGAIVCTKCEGNGVNSVDYFEGRFKAGSLCWLCRGKREILCGNCNGAGFLGGFLSTFDETAQ

SEQ ID NO: 252232 - protein, 88 aa, Zea mays
  unsure (1)..(88): unsure at all Xaa locations
  Clone ID: MRT4577_161619C.1.pep
SPSCPITGPTPVASPLTFRPTTVSCVLRLISTFHSSLSICVDLRXDYSYSDGLGDFFFLGRTSVDGFPAWGVGILAPSPLFTLLDRLH

SEQ ID NO: 252233 - protein, 47 aa, Zea mays
  unsure (1)..(47): unsure at all Xaa locations
  Clone ID: MRT4577_16161C.1.pep
CSWIEVLALQAAAPGGRGPGHPPGSRAPPRTRLXPDPPPPRSAAEAA

SEQ ID NO: 252234 - protein, 129 aa, Zea mays
  Clone ID: MRT4577_161620C.1.pep
MAATASLTTTAPSPPALLKASAPLLISFRPVSRHCKNLCIKTKATENDQSAKKHQKVKSILCQDCEGNGAITCTKCEGNGVNSVDYFEGRFKAGSLCWLCRGKREILCGNCNGAGFLGGFLSTFDETAQ

SEQ ID NO: 252235 - protein, 109 aa, Zea mays
  unsure (1)..(109): unsure at all Xaa locations
  Clone ID: MRT4577_161621C.1.pep
RSXGKKGDEXSRXAEPKEEQRXSXEEEEQXPTXXXNXXXXEAXRXXEEGAPXXEGXXGAXQXXQEXXNRXXXAKRXXGQXAPXAXXPXXAQPPEXXAXXQETRRAAEGP

SEQ ID NO: 252236 - protein, 73 aa, Zea mays
  unsure (1)..(73): unsure at all Xaa locations
  Clone ID: MRT4577_161622C.1.pep
VRRYRQVKSGIKEVSVIMIWRXHPNRLVTDAYKIIAVLLLRKCYASLCDKMFLAGTFSALQKMDRPEYLLASE

SEQ ID NO: 252237 - protein, 70 aa, Zea mays
  Clone ID: MRT4577_161623C.1.pep
PDHFNLNLLTWPHEVDLLIILGCTIYLGIGGTRAPDLPYSTCIDTSTWRPVLLSSRYIPDNSYSYFHLND

SEQ ID NO: 252238 - protein, 77 aa, Zea mays
  Clone ID: MRT4577_161624C.1.pep
ACQKTHGQFTITQTKGDKKPTPFTHQKLPNLLTPTKHPPSLNPTKKTPQPKLKPQPPGILLSLKKPGNNPILPPPDK

SEQ ID NO: 252239 - protein, 474 aa, Zea mays
  Clone ID: MRT4577_161625C.1.pep
MLAVSPSPVRCADAEECGGGGASKEMEETAVGPVSDSDLDFDFTVDDIDFGDFFLRLDDGDDALPGLEVDPAEIVFADFEAIATAGGDGGVTDQEVPSVLPFADAAHIGAVDPCCGVLGEDNDAACADVEEGKGECDHADEVAAAGNNNSDSGEAGCGGAFAGEKSPSSTASSSQEAESRRKVSKKHSQGKKKAKVDWTPELHRRFVQAVEELGIDKAVPSRILEIMGIDSLTRHNIASHLQKYRSHRKHMLAREVEAATWTTHRRPMYAAPSGAVKRPDSNAWTVPTIGFPPPAGTTPRPVQHFGRPLHVWGHPSPTPAVESPRVPMWPRHLAPRAPPPPPWAPPPPADPAFWHHAYMRGPAAHMPDQVAVTPCVAVPMAAARFPAPHVRGSLPWPPPMYRPLVPPALAGKSQQDALFQLQIQPSSESIDAAIGDVLTKPWLPLPLGLKPPSVDSVMGELQRQGVANVPQACG

SEQ ID NO: 252240 - protein, 115 aa, Zea mays
  unsure (1)..(115): unsure at all Xaa locations
  Clone ID: MRT4577_161626C.1.pep
MGISRDSMHKRRATGGKQKAWRKKRKYELGRQPANTKLSSNKTVRRVRVRGGNLKWRALRLDTGNYSWGSEAVTRKTXRSLDVGYNXASNNELGRXQTLVKSAIVQVVAAPFKQW

SEQ ID NO: 252241 - protein, 57 aa, Zea mays
  Clone ID: MRT4577_161627C.1.pep
ITLLNWTESTNHLDSRQGVPSQLAHLLSPSSSRTTTRPKGLRLSTHPAYIQPARPST

SEQ ID NO: 252242 - protein, 127 aa, Zea mays
  Clone ID: MRT4577_161628C.1.pep
MAASMITSPIVAPTSVPSLSRRGSSFAVVCSGGKKIKVDKPLGLGGGLTVDIDANGRKVGKKGVYQFVDKYGANVDGYSPIYTPEEWSESGDRYAGGTTGLLIWAVTLAGLLGGGVLLVYNTSALAG

SEQ ID NO: 252243 - protein, 57 aa, Zea mays
  Clone ID: MRT4577_161629C.1.pep
PVTRVDPNSSRLSGTVSAFCDDHHKAIVSYHFTTIGCKLQKELETQGSRQDSHHIRR

SEQ ID NO: 252244 - protein, 81 aa, Zea mays
  unsure (1)..(81): unsure at all Xaa locations
  Clone ID: MRT4577_16162C.1.pep
KGLPNPKRVAQNPVFAFKTAFCFXIKNLPPLIPKGLGPTIRPINGPLKCNGNTPPQINAGLGYYKKYCKKFGFNQGPTLPF

SEQ ID NO: 252245 - protein, 557 aa, Zea mays
  unsure (1)..(557): unsure at all Xaa locations
  Clone ID: MRT4577_161630C.1.pep
MASTCLAPASLSTPLLSDSIARAPAANGLATNHRHHHDDDSDGAAAVSVCDDGGGDPFAFLSEDRPPRDRGPSPADPFRNGTPAWGGGVYAWSRTLLLLPVALVRLALFGLSIAIGYAAHVGGFLRGWAYTHGRPRVGDGPRPAWRLRLMWITRMSARCILMSFGYIWIRNAVRPARRELAPLVVSNHISYIEPIFFFYELFPTIVSSESHDALXPFVGTIILXMQVIYVDRFSPASRKAAVNEIKXRKAACNSFPRVLLFPEGTTTNGRFLISFQHGAFIPGYPVQPVVVRYPHVHFDQSWGNISLLKLMFKMFTQFHNFMEVEYLPVVYPPEIKQENALHFAEDTSYAMARALNVLPTSYSYGDSMIMARAVEAGKVNCSNYMVEMAWVKDVYGVSTAEAMDLLEHFLAMNPDNDGRVKAQDFWAHFGLDCSPLCKKIFHYFDLGIKESITFRQFLVGCAHLRKQPLFQGSCETAFEKCRGPETSEISRAQLADLLRLSMLLPSGDRMLDLFKTFDIDGDEKISKDDFMTCLGRFPFLIAFFAAPINGEVYIEIV

SEQ ID NO: 252246 - protein, 120 aa, Zea mays
  Clone ID: MRT4577_161631C.1.pep
LFCLFLGWLCRFFFFSKHRKFFYIGRRPTHRIYWGPEETGNSTKPTGASTTQPSGLIGVLAPCMGTIHSLHQIGWEEPKKMFILKEGLKPNRPIKFPNALVAWLPNQMETIPSVGIKALD

SEQ ID NO: 252247 - protein, 268 aa, Zea mays
  Clone ID: MRT4577_161632C.1.pep
VVHYPHVHFDQSWGNISLLKLMFKMFTQFHNFMEVEYLPVVYPPEIKQENALHFAEDTSYAMARALNALPTYYSYGDSMIMARAVEAGKVNCSNYMVEMAWVKDVYGISTAEVMELLEHFLAMNPDNDGRVKAEDFWAHFGLDCSPLCKKIFHYFDLDIKGLITFRQFLVGCAHLRKQPLFQGSCETAFEKCRGPETSEISRAQLADLLRLSMVPPSDDKMLELFKTFDVDGDEKISRDDFMACLGRFPFLIAFFAALINGEVYIEIV

SEQ ID NO: 252248 - protein, 83 aa, Zea mays
  Clone ID: MRT4577_161633C.1.pep
SPPYGEIFGFFQPPLRFFPGERWGALFRQRGGSPKGKKDDLFSPFRGSQGCQKFGPFLVNQPPSGGVSPPNGAPPGLVKGGSP

SEQ ID NO: 252249 - protein, 133 aa, Zea mays
  unsure (1)..(133): unsure at all Xaa locations
  Clone ID: MRT4577_161634C.1.pep
ARVRPRRRFVVRFTNKDITAHISCAIIGGGMGLASAYXHELPRYELEIGPTNYAAAYCTGLLFARRVLKTHCLDKEYDGNVEATVXFFSXXSSYHKKTFRALLDVGLIMTTTWNQRFDALNGAXLDGGLDLPH

SEQ ID NO: 252250 - protein, 87 aa, Zea mays
  Clone ID: MRT4577_161635C.1.pep
PSSIKHNKNKNIHENRFAGYHVPDQLFARTLQLHKPRLGWSAILPMPGYGFQNKRGEHSVLQSRAGMKIHKGEVILYRWGGIAGSVR

SEQ ID NO: 252251 - protein, 32 aa, Zea mays
  Clone ID: MRT4577_161636C.1.pep
ASDPARRAVLIYLFFFYEGTVKHRDPRNEILH

SEQ ID NO: 252252 - protein, 84 aa, Zea mays
  unsure (1)..(84): unsure at all Xaa locations
  Clone ID: MRT4577_161637C.1.pep
MGQSASQHGLTRTSVRSCRDGLQAVGACWYLLGVQRASKCLEEQCLQAAGCTHSXAMACSAPLYYGGSPSRGVGSGDRLAWAAN

SEQ ID NO: 252253 - protein, 119 aa, Zea mays
  Clone ID: MRT4577_161638C.1.pep
KNLTKYAIYPSLIFYKPMKRENTEKAKLKNHLRIMDGQGGNLFKGPKTCSYKKITYSTHGKSFWGTNIIGGTSLIRMLEGPVLSRGFFFFKTSLFLKKKGFFFKKNGVSPWLEGELPLG

SEQ ID NO: 252254 - protein, 93 aa, Zea mays
  unsure (1)..(93): unsure at all Xaa locations
  Clone ID: MRT4577_161639C.1.pep
PHRRSSRPPPATSSSSRRTSPRASRAPRVAPISRRGSHXPPHPRHRHRPRGPHPAPPLRVARPHQVRCANLLFSRRRXWHARDGVWRANYEET

SEQ ID NO: 252255 - protein, 32 aa, Zea mays
  Clone ID: MRT4577_16163C.1.pep
TRSNDITAVFPTLCVCPYLIISPCTGLDTTTT

SEQ ID NO: 252256 - protein, 148 aa, Zea mays
  unsure (1)..(148): unsure at all Xaa locations
  Clone ID: MRT4577_161640C.1.pep
PTRPPTRPPTRPSALSSLGPTALLICALLCTFLSSEVGFVRQATALGINYGQVANNLPPPAQVVQLLSSLRIGKVRIYDVNPXVLTAFAGTGIELVVTVPDDLVPGMASSXSQALQWVSAXLRPYFPATRVKGIAVGNEVLRAKTNKK

SEQ ID NO: 252257 - protein, 83 aa, Zea mays
  unsure (1)..(83): unsure at all Xaa locations
  Clone ID: MRT4577_161641C.1.pep
MPREDRATWKSNYFLKIIQLLDDYPKCFIVGADNVGSKQMQQIRMSLRGKAVVLMGKNTMMRKAIRGHLENNXTLEKLLPHTG

SEQ ID NO: 252258 - protein, 173 aa, Zea mays
  Clone ID: MRT4577_161642C.1.pep
PLFYQSLRRLKHLLKFHQYSLRFKLDAARGKLPNYVVIEQRYFDCKEFPANDDHPSHDVARGQRFVKEVYETLRASPQWNETALIITYDEHGGFYDHVPTPVVKVPQPDGIIGPDPYYFKFDRLGVRVPSFLISPWFEKGTVIHEPNGPEGTSQYEHSSIPATVKKLFNLRAN

SEQ ID NO: 252259 - protein, 156 aa, Zea mays
  Clone ID: MRT4577_161643C.1.pep
RAPRGPSHPPFRSWPPKGSFLRFFPPISQGRIFLRPLWARGPRLTRRPSRGPPGSLRGWACKGGPPRPPPVGGPPPRKKVFCLLLLPLFGLEVEVSLLWGLGGQIRLTRPLGFSCRGPLGPRFSPFFFFLGALAPFPRVCFYGVILVGAVGSLWAL

SEQ ID NO: 252260 - protein, 100 aa, Zea mays
  unsure (1)..(100): unsure at all Xaa locations
  Clone ID: MRT4577_161644C.1.pep
SAPTPTHLRGVLASXALSPHNVMNALLEALFGGVGKGFTNKVVKIKKYLAVAEPYEGAQTLLSQGIWAFGGKCFPDALKDGSVGLKALYDGDILDKETIV

SEQ ID NO: 252261 - protein, 149 aa, Zea mays
  unsure (1)..(149): unsure at all Xaa locations
  Clone ID: MRT4577_161645C.1.pep
KVLACVGXPLNKGGVGFPWGVVGAKQKQFFXKIKGWGHVVFAFXPVWGFGTGKVSPPAQGQEGAAPLRGWVKTHSRPWGGGFFRVLFGGFVTFWDCKKVTAPPDVEGFFVGGGFFKAGVFGIINGGPVKAALKGSLKTNKLFFWSPPPC

SEQ ID NO: 252262 - protein, 78 aa, Zea mays
  unsure (1)..(78): unsure at all Xaa locations
  Clone ID: MRT4577_161646C.1.pep
SKQKKHLLSYLLSLTKIACNRVRXELAEWQLNPPAGFKHRGSDNIXKWLIAVTGAAITLYAGETYQLQGDFSEHYPME

SEQ ID NO: 252263 - protein, 81 aa, Zea mays
  unsure (1)..(81): unsure at all Xaa locations
  Clone ID: MRT4577_161647C.1.pep
SFFPFFANNQIFPNSFNPPEIPDKLGLHSFRQRLWSLQSPXCSPGLGFVXGLDWLSTTIAPNSLIVQRGLVPLGAFGLCFL

SEQ ID NO: 252264 - protein, 118 aa, Zea mays
  Clone ID: MRT4577_161648C.1.pep
NHCTGAGEATVDTGYMGYPALLLLLMQPITLNTLHRQDRTVLTIVSIYFTYFTPYPPYQLFPNRTQPTPSRAGTDGPYLRLLCIARTARPGRPGAAGAPAVPHAAHHPGHRVPGPVHP

SEQ ID NO: 252265 - protein, 482 aa, Zea mays
  unsure (1)..(482): unsure at all Xaa locations
  Clone ID: MRT4577_161649C.1.pep
MHESLSNGAGGTPPLPNGRAAAAGAARSRLGRDGPPSELDVMKEKFSKLLLGEDMSGTGKGVPSALALSNAITNLAASVFGEQRKLEPMAPDTKERWKREVGWLLSVTDLIVEFVPTRQTAENGTTMEIMSTAQRRDLAMNIPALRKLDAMLIGYMDNFVDQTEFWYEKGGDNKRDDDKWWMPTVKVPSEGLSDVTRKWLQYQKECVNQVLKAAMAINAQVLVEMEIPEIYIESLPKKGKTSLGDAIYRSITEETFDPLEFLAGMDLSTEHKVLDLKNRIEASTVIWKRKMQTKDSKSSWSSIVSFEKREQFEERAETILHLLKLQFPGTPQSQLDISKIQYNRDVGYALLESYSRVLESLAYSVMSRIEDVLSADAAAQNLTASEAARRALESTSAEXRGAEAGRQGGAXKLNEAPASMTLFDFMGWHFDQDELMKRREDGTLDADGEAMLLKKAPSMAPKKFSYVDSLSSGGMRSPSARH

SEQ ID NO: 252266 - protein, 126 aa, Zea mays
  Clone ID: MRT4577_16164C.1.pep
MLVNVFTTATIAACTLLATPTLANPIDTLPAGLESHLQTRANDVTVKFWDSTTCRTSRSRKSFNSGHCIKALAGKDHAVSMQERKSTKCHMIRYREKNCVGYSEKVFNLNDCFNIGDEWDSLQFQC

SEQ ID NO: 252267 - protein, 306 aa, Zea mays
  unsure (1)..(306): unsure at all Xaa locations
  Clone ID: MRT4577_161650C.1.pep
DKWWMPTVKVPSEGLSDVTRKWLQYQKECVNQVLKAAMAINAQVLVEMEIPEVYIESLPKKGKTSLGDAIYRSITEDTFDPVEFLAGMDLSTEHKVLDLKNRIEASTVIWKRKMQTNKDSKSSWSSIVSFEKREQFEERAETILHLLKLQFPGTPQSQLDISKIQYNRDVGYALLESYSRVLESLAYSVMSRIEDVLSADAAAQNLTATEAAXGGCWSRRTCSRRGSXDAKEELEKLNEAPASMTLFDFMGWHFDQDELMKRREDGTLDADGEAMLLKKAPSVAPKKFSYVDSLSSGGMRSPSARH

SEQ ID NO: 252268 - protein, 107 aa, Zea mays
  unsure (1)..(107): unsure at all Xaa locations
  Clone ID: MRT4577_161651C.1.pep
FKQPFTPLKIPILIKTFIPTPHYIIHKLSYNHYKKLKYNIFNPTNQHHFLYLPHNPPPPPKKKKKIKFKKIKFXLKKKKKKKKKKKKKKKKKKKKKEKKKKKKKKSL

SEQ ID NO: 252269 - protein, 80 aa, Zea mays
  Clone ID: MRT4577_161652C.1.pep
GFYSPLCAGLLEWVLMLCSSSKMESLCPSMLGKSPPPSGLFKNTMWNSPRVDLPKLVPLFPVRCREPIGELNYFVSVSPP

SEQ ID NO: 252270 - protein, 69 aa, Zea mays
  Clone ID: MRT4577_161653C.1.pep
RHLWVGLGWPEVLLERRGRGVDGMGTIIERVRWQGLQLLVASYGEMEREACACSPKGANEVVVDEREVH

SEQ ID NO: 252271 - protein, 110 aa, Zea mays
  Clone ID: MRT4577_161654C.1.pep
GLKGSPQWSAPLREAAGKPANGGNKARGTGQKAGARAPATVGVSLRVPAPCAALQGAVQWAFRLPVRLGRRSGGPSVGGGPLFRPLSSGGCFGVGKKKKMPPALSLVTAV

SEQ ID NO: 252272 - protein, 58 aa, Zea mays
  Clone ID: MRT4577_161655C.1.pep
QGRSRTPGGHGRGGVALSHRRARAADPHREPPDATGARPKSHAGRPDGRRNDGPPPGP

SEQ ID NO: 252273 - protein, 86 aa, Zea mays
  Clone ID: MRT4577_161656C.1.pep
FGRKQCSRFQMCVYDGLCYSFFFLYVSFSRVSSLQQLRDMLISSLKLKFFCSVYLSYTQICIVSANDQILTHFLVIRAKKKKKKAP

SEQ ID NO: 252274 - protein, 137 aa, Zea mays
  unsure (1)..(137): unsure at all Xaa locations
  Clone ID: MRT4577_161657C.1.pep
RELCGASAKDLSRPGKVILEEVAAAATAEGRLEDVVAVVAPLAAPPAPTLSPAAAELTLIAAAVVGAMEGVXAYPPARHPADPTDDXLAPAGEGGDARVRCSRCSEDSRCSRFASADFEWGRMGFFGAAAGPEGGLG

SEQ ID NO: 252275 - protein, 190 aa, Zea mays
  Clone ID: MRT4577_161658C.1.pep
KRNPPLSLVDYEIKDRSATPQPPPEGRTVSTQNLRRIFTGVIEIDGQEHNICGSGNGALSSLADALRSLGIDLDVVDYNEHTIGTSKDAKAATYIGCTAAQSSHKVWGVGIHQDVVQASLIAMLSAASSFLSSRPTTPIPFRPKRSNTLEIPTPGSSPTHGSKKENGTSVVDKLEAAVNGEQADVQSAGV

SEQ ID NO: 252276 - protein, 105 aa, Zea mays
  Clone ID: MRT4577_161659C.1.pep
PIMLAICCLMSTIAISALAVHSLNAASICFICRLVVAEEVVGFLAQINILIVVHQIVSVGVLVADDFDEVRMLLVGMLSPRPAMALWLCMPAPLPPRVRGPAPSE

SEQ ID NO: 252277 - protein, 37 aa, Zea mays
  Clone ID: MRT4577_16165C.1.pep
PPPVMGDPPGGGSFGFKKKGGDLRGGFSLTWIAPSLI

SEQ ID NO: 252278 - protein, 42 aa, Zea mays
  Clone ID: MRT4577_161660C.1.pep
ASGILGGPKNESPTVISPMQYKKRFRKAMSKYFLTVPDQWSS

SEQ ID NO: 252279 - protein, 509 aa, Zea mays
  Clone ID: MRT4577_161661C.1.pep
IRPPFVRSLASIFSASIDLAWTGSCDLQHDLPQAFTKIDENVSFNLDSPKYSNLVTPVRIHSFSSTLGLRQRERTGLVPASLHLSSFKSAEYFGAMRSILKDPMPNMRRSCSQRSPGTIEKLNVVLARKPTYISSTSNIINDGARLLLPQTGYEHDVVVAVYEDEPTSIISYAMTSEEYVEQVTHRLNSSLSFSHQPNTNGISSHGLEASSPSQGDHLHSKGTHFKLSFDDDSPISPDKTKFSVICYFAKHFAALRKKCCPKDIDYIRSLSRCKRWNAQGGKSNVYFAKTLDERFIIKQVTRTELESFVEFAPQYFKYLMESLASGSPTCLAKIVGLYQVGVKSLKTGKEVRMDLMVMENVFFERKISRVYDLKGSLRSRYTAGDSKVLLDANLIEALHTKPIFLGSKAKRRLERAVWNDTSFLALADVMDYSLLVGIDEEKKELVIGIIDYLRQYTWDKQLETWVKASGILGGPKNESPTVISPMQYKKRFRKAMSKYFLTVPDQWSS

SEQ ID NO: 252280 - protein, 33 aa, Zea mays
  Clone ID: MRT4577_161662C.1.pep
PEVMTTYIENIGKQSDYDDNRRNFTETGKVSSR

SEQ ID NO: 252281 - protein, 72 aa, Zea mays
  Clone ID: MRT4577_161663C.1.pep
CVCPRFFWSHFFPVSSSVYWLPVQWAPSGYGSPPFGHVRVPFSGALFVLRGGTPLILHKTPPKKKKKKDDVF

SEQ ID NO: 252282 - protein, 128 aa, Zea mays
  unsure (1)..(128): unsure at all Xaa locations
  Clone ID: MRT4577_161664C.1.pep
MHSIAATTFGTIVSGLLCAVDGADGEIHVPHYVIQGRAYCDSXRATLVTNVTEDIDGAKAKLQCKDFRSGKLXRSIHRWTDVNGTDIIQLKDSHEEDICXVILVESPLKDCDHSPADRDRGGDLITTN

SEQ ID NO: 252283 - protein, 211 aa, Zea mays
  unsure (1)..(211): unsure at all Xaa locations
  Clone ID: MRT4577_161665C.1.pep
DAWVGALLNVKGFFVFLAINFGXEQRMGLDHAXVVLLLSSIINTFMAGPASAGIVRQQRRAYHYRSRCLEDLSLAHELRMLVCTHGATSVYSMLTLSHLSRGRAPVVAVYLLHLVELATSRKYAITQQLYHARDGGDDEDEWGYAREIEHVASAVATFTYDNAILVRQMTAISSLGSMDTDVRNCVEDARASLVIMPFHKEQRYDGRMVCR

SEQ ID NO: 252284 - protein, 402 aa, Zea mays
  Clone ID: MRT4577_161666C.1.pep
MPLPLPAPRSFPSQPLSRSQDQPAVPPALSVRLSSARIATAQEQQQAAMILRSAAASFALLLLVIPAAAQDGGDASRFAAPASWAFPNPRLRASYAALQAWKRTAIFSDPSNFTANWAGPNVCAYNGVYCAPLPGTGPHDGAVLVVAGIDLNHADIAGYLPASLPLGVPDLALFHINSNRFCGVVPPTFAHLRLLHELDLSNNRFVGGFPEVVLSLPALRYLDLRFNDFEGPIPPALFDRPLDAILLNSNRLRDPIPANLGNSPASVVVLAHNALGGCIPPSIGRMADTLNEIVLIDDQLTGCVPPQVGLLRKLTVFDVSDNRLQGQLPSAIANMAAVQELDVARNRLEGAVPAGVCALASLRNFTYADNFITSRPLCAKATADGAWNCIPGAPAQRPPAQC

SEQ ID NO: 252285 - protein, 66 aa, Zea mays
  Clone ID: MRT4577_161667C.1.pep
ISLPGGSLATLNDVQRNFVNATKTFLACNDVARSDYSICSLRPVKFITRSPLLGITPNVSDRSQCC

SEQ ID NO: 252286 - protein, 61 aa, Zea mays
  Clone ID: MRT4577_161668C.1.pep
LGCSGPRWFQRPEALPAPRYRGVVQIRGVQLPLRGAIFVKKKKIVAPPPLRGWLTKPQLNR

SEQ ID NO: 252287 - protein, 80 aa, Zea mays
  Clone ID: MRT4577_16166C.1.pep
LRKMCKEGAYWGTVAGVYVGMVWGGLVRRPDFRGQQQGQGGALSGALISGASNRDRGKVVKEAITAGAVATAVEFIKCIT

SEQ ID NO: 252288 - protein, 36 aa, Zea mays
  Clone ID: MRT4577_161670C.1.pep
HALLAGPGVLVVLLQYEELSLAADTSGLQLPSTRPW

SEQ ID NO: 252289 - protein, 144 aa, Zea mays
  unsure (1)..(144): unsure at all Xaa locations
  Clone ID: MRT4577_161671C.1.pep
MSTLSRLLTLATTPTTTASSSSSLVPPPSALPRVLLPPLPAPPXPLPPLPLLALLARPAPPTRPPPLPPLVPLPPPAALLPTPPWPLLPPRALPPRPPHLPLLPPLSPAPTTDVASPLLSSLPPVSLWLLCKGRTKLLGVWLMC

SEQ ID NO: 252290 - protein, 83 aa, Zea mays
  Clone ID: MRT4577_161672C.1.pep
GGTFCWRPTGTLGGTTPILPGRWCSPSCRSCRFLHEAPRLFWKKLLVWSGLVWCACVLSCFFMGPAFFLVLPLVYLLNRQSQS

SEQ ID NO: 252291 - protein, 267 aa, Zea mays
  unsure (1)..(267): unsure at all Xaa locations
  Clone ID: MRT4577_161673C.1.pep
KNSSQAKVEELTRKVAEATKKFEVEAVKHEIFEIERSRAQRNDDELRASKERCYEVSLECSRKLKDNFVKVGAYSSQXDSTAATLMELSSGSAGKSKXFEEIHSDRGDFYAFAGAQGATSILEKAGCEHTKAVAQSNSPSXVDDIKNPSTEASTLGGKFYSKIWLKGRREVIDEAMKRNKKESHDASEAAKRAEEAAKRARLMAKLSPPLEPYDLEANPFLKEALETMKIANEAVDEAVNKLLNEAAEKVLKKTRTFIALISSMITN

SEQ ID NO: 252292 - protein, 93 aa, Zea mays
  unsure (1)..(93): unsure at all Xaa locations
  Clone ID: MRT4577_161674C.1.pep
AVTTTMLAHCLHSPIDSLLPTYLXTDINTLXENPTLQHYRIQQAFTDGILRTSPXFLQQSSSVLHQLPQVHLLSQNIMTQLLLQLVLANIAAY

SEQ ID NO: 252293 - protein, 82 aa, Zea mays
  Clone ID: MRT4577_161675C.1.pep
FGRLVTASRCGRGRARRQVLLMAGGLVDPDTRLGRHRVSARRRGVVGSRYVLRQQSPRALAHQAGREKQWQQLIVNYIKNRF

SEQ ID NO: 252294 - protein, 96 aa, Zea mays
  Clone ID: MRT4577_161676C.1.pep
DLTTFGAEQNTPSTRQGTQGTQKMKGERNVQKALYTREGYKNTITSFSCHIQFKAPLEVQLLDAYCRQQREEYWKEYQNQCNDRQKNREGFKLMRD

SEQ ID NO: 252295 - protein, 47 aa, Zea mays
  Clone ID: MRT4577_161677C.1.pep
PNQKSTVIVHRIRVKKLAVYFLMTHAKLLINTHHCASRTQLSPRTCN

SEQ ID NO: 252296 - protein, 54 aa, Zea mays
  Clone ID: MRT4577_161678C.1.pep
YEHQGMVPPDAVSSSSSPRICGTCAMAVVMRASRAAHQVEPLQPRRHKYQLVSS

SEQ ID NO: 252297 - protein, 30 aa, Zea mays
  unsure (1)..(30): unsure at all Xaa locations
  Clone ID: MRT4577_161679C.1.pep
TNEFTAQSFLNNGLQLXRGKSLGYRPCKVX

SEQ ID NO: 252298 - protein, 94 aa, Zea mays
  Clone ID: MRT4577_16167C.1.pep
SVSSTFLVLGTTPFPVSMGMPRRASSSQLANQPAVLAPKINRCRFENGLEPKPLGRTLVVVQGLNSVFHTQEFLLAQCSLIPKLPLGMEKFVWV

SEQ ID NO: 252299 - protein, 51 aa, Zea mays
  Clone ID: MRT4577_161680C.1.pep
HMGRPTQVCVGFYGHFVNSTSILRGLNRCNTDQRMMIKTKILCLCLSEVST

SEQ ID NO: 252300 - protein, 469 aa, Zea mays
  Clone ID: MRT4577_161681C.1.pep
MGWSAGLWWLLAAVWVVVAAAATAEGEVAVGAAPRRHAYASMMYMGTPRDYEFYVATRVMMLSLRRLSPNADRVVIASLDVPPLWVQALKNDGVKVVSVKNLKNPYEKQENFNRRFKLTLNKLYAWSLVSYERVVMLDSDNIFPQNTDELFQCGQFCAVFINPCIFHTGLFVLQPSMNVFKNMLHELSVGRENPDGADQGFLASYFPDLLDQPMFHPPANGTKLRGTYRLPLGYQMDASYYYLKLRWSIPCGPNSVITFPSAPWFKPWYWWSWPVLPLGLSWHEQRRENLGYSSEIPLVLIQAVLYIGVIAVTRLARPSLSKMCYNRRMEKNTMFLLSLLRIVAAWSILAAYTIPFFIIPRTVHPLLGWPLYLLGSFSLSSIVINIFFLHPITVLTTWFGFIGALVVMAFPWYLNGVVRALAVFAYAFCCAPLIWASLVKTMSSLQVLIERDAFRLGEPNQNAEFTKLY

SEQ ID NO: 252301 - protein, 412 aa, Zea mays
  unsure (1)..(412): unsure at all Xaa locations
  Clone ID: MRT4577_161682C.1.pep
NSRVDPRVRLNKQDFKFTEHQTTLLLAADSIGKKIQYNXEARAALGEFKEAIEDLTKALEFEPNSPXFTRKRTKNIAKLVRKRDKLNMSQNRGGYCSTSTLAGSPTSSPNEDRVSSGISLSWQDVYNIAVKWRQISEPCDPALSXLALVQREVXIALRKLFKLIQGXAKAYHLRGILYHGMGRHRSAIKELSVALTYESSSIEDIDKLKKIEIASSCSDLYHVVGETYWVATRCDSMAFRGRRLEGTRITTQNIGKTGFDFAIRTPCTPSRWEEYDEEMTAAWEAICEAYCNDTNPTRDPGVLDAVKDAILRMTYYWYNFMPLSRGSAVVGYIVLLGLFLAANMDITASIPPGVQVDWEAILSPDPGTFVDAVKPWLYPSTKISRCLKDYTDVSCAFSTTGSVVAALTSVDP

SEQ ID NO: 252302 - protein, 36 aa, Zea mays
  Clone ID: MRT4577_161683C.1.pep
WASCFPKKKKKKKKKKKKKKKKKKKKKKKKKKKKKK

SEQ ID NO: 252303 - protein, 441 aa, Zea mays
  Clone ID: MRT4577_161684C.1.pep
QLYLDLAYPEKLLNCLEKAIQIDSRFAKAYHLRGILYHGMGRHRSAIKELSVALTYESSSIECLYLRASSHHAIGEYKAAIKGYDDVLDLELDSMDKFVLQCLSFYQKEMALYIASKANLEFSQFNIDDDVDPLFKEYWCKRLHPKNVAEKVYRQPPLRISLRSGRLNKQDFKFTKHQTTLLLAADSIGKKIQYNCHGFLPNQRQDVYNIAVKWRQISEPCDPVVWVNKLSEEFNSGFGSHTPMLLGQAKVIRYYPYYQRVLETAKTIMLDLKYVNNAEDRAIFLTDIDKLKKIEIASSCSDLYHVVGETYWVATRCDSMAFRGRRLEGTRITTQNIGKTGFDFAIRTPCTPSRWEEYDEEMTAAWEAICEAYCNDTNPTRDPGVLDAVKDAILRMTYYWYNFMPLSRGSAVVGYVVLLGLFLAANMDITASIPPGVQVVW

SEQ ID NO: 252304 - protein, 72 aa, Zea mays
  Clone ID: MRT4577_161685C.1.pep
YGAVIHIEQTHSSYQCIIYIFYTISNYRARSHIALFRMLIALPKKQGRLHLFLPLCSTTFKSLTLWFGPFST

SEQ ID NO: 252305 - protein, 150 aa, Zea mays
  unsure (1)..(150): unsure at all Xaa locations
  Clone ID: MRT4577_161686C.1.pep
MAPPSPHALVIPYPAQGHVIPLLELAHALVDRGFTVTFANSEFNHRRVVAAAXAGVGVADAAGXRRGIRLVAVPDGMGPGEDRNDIVSGLYPVSRAGAHGRPRGGRTSIRAPAANGRQAARKGRAHHLASWRTTTSGRGRSKWRGRPASG

SEQ ID NO: 252306 - protein, 103 aa, Zea mays
  Clone ID: MRT4577_161687C.1.pep
FLSLRLWLSMPGGVLKMFWGLPPTQRALLMSVKTGMAVLTTQRLDVLPDPYKVAISTYYWRVPVLGQYGVTPQEPSLGETPEEAPRGASGPSQWTFLGGGDEA

SEQ ID NO: 252307 - protein, 101 aa, Zea mays
  Clone ID: MRT4577_161688C.1.pep
MFFFLAALAFLLQQQLLPFHLQAVANIVAFLRQQHLMPLYRGGGGEINAFLQQDQLLPFYPQNVRNIAALLPQQQLLAFSQHAVTNATTLLEPATIGGGVF

SEQ ID NO: 252308 - protein, 77 aa, Zea mays
  Clone ID: MRT4577_161689C.1.pep
KKWGSKTTMILFSWPGNSIITVQTNCTSIDTRAKRYGDQLGERAAAAAAAKRLAHLILINVAACSTGTSGSTVQPGA

SEQ ID NO: 252309 - protein, 60 aa, Zea mays
  unsure (1)..(60): unsure at all Xaa locations
  Clone ID: MRT4577_16168C.1.pep
ICFXXNDXXSXKDSDADDXXTXTSLDHPLXPMSKQSSSYSDRDXTEEESEXXDDLXSLQG

SEQ ID NO: 252310 - protein, 48 aa, Zea mays
  Clone ID: MRT4577_161690C.1.pep
YKLCSLITTAPIVRPLSLIIAKSSFFRLHIHYLPAILNANVISVTLFN

SEQ ID NO: 252311 - protein, 446 aa, Zea mays
  unsure (1)..(446): unsure at all Xaa locations
  Clone ID: MRT4577_161691C.1.pep
MDSAAAALLDSASASASSANAAGKEMPTARHIAHRTAHNMSSSSLRKKSDLALLRKVPCAPLRRLLDNLQEVLLATKLALLLPAVLLAIAARIFHFGQEWVFVLSLIGLVPLAERLSFLTEQVAFYIGPTVGGLLNATFGNVTEVIIAIFALYQGKVVVVKCSLLGSVLSNLLLVLGTSLFFGGLANLGTEQLYDKMQVDVSTGLLILGVLCHSLPLMLRYAVSSGEHAESSWDSGLELSRACSIVMLLAYVAYLFFQLKTHRQLFEPQPQEVEDGDDSVSQDEAVLGFSSAMIWLGVMTLMTALLSEFVVSTIEAASESWELSVSFISVILIPIVGNAAEHAGAVIFAFKNNLDITLGVSLGSATQISMFVVPLSVLVAWIMGVPMDLDXLVTAFTLQDGSSHYLKGLLLVFCYIVISLCFFVLRQHGNGSNDDQLGVASKPWRI

SEQ ID NO: 252312 - protein, 459 aa, Zea mays
  unsure (1)..(459): unsure at all Xaa locations
  Clone ID: MRT4577_161692C.1.pep
MDSAAAALLDSASASASSANAAGKEMPTARHIAHRTAHNMSSSSLRKKSDLALLRKVPCAPLRRLLDNLQEVLLATKLALLFPAVLLAIAARIFHFGQEWVFVLSLIGLVPLAERLSFLTEQVAFYIGPTVGGLLNATFGNVTEVIIAIFALYQGKVVVVKCSLLGSVLSNLLLVLGTSLFFGGLANLGTEQLYDKMQVDVSTGLLILGVLCHSLPLMLRYAVSSGEHAESSWDSGLELSRACSIVMLLAYVAYLFFQLKTHRQLFEPQPQEVEDXGDDSVSQDEAVLGFSSAMIWLGVMTLMTALLSEFVVSTIEAASESWELSVSFISVILIPIVGNAAEHAGAVIFAFKNNLDITLGVSLGSATQISMFVVPLSVLVAWIMGVPMDLDFNLLETGCLFLAILVTAFTLQDGSSHYLKGLLLVFCYIVISLCFFVLRQHGNGSNDDQLGVASKPWRI

SEQ ID NO: 252313 - protein, 88 aa, Zea mays
  Clone ID: MRT4577_161693C.1.pep
RTHYTTQLASDQHHAHTPTELAVALHAHTCTTAMTRTHMRWDYSNKLPLILVSRSALTGASVLHRPWLAAPSPPYSYEQSRAKWPRLP

SEQ ID NO: 252314 - protein, 132 aa, Zea mays
  unsure (1)..(132): unsure at all Xaa locations
  Clone ID: MRT4577_161694C.1.pep
PTKKKKKKKKKKKKKKKKKKKKKKKKKKKKKKKKKKGGGPFKKKKFNSRGMEKKNFFKXKKNKIRGRVLKKGERKKTGGKQKKMXEKKPLFPKGEKKKKAPNKSLLKKLANLKGKRNPPFKGKKNRGGGGVT

SEQ ID NO: 252315 - protein, 84 aa, Zea mays
  Clone ID: MRT4577_161695C.1.pep
QTKNMMSPGLRQKLQCSPVRIQCTILFNVQDYAILLERKNFICTDPPQPIAYLSESPAPWKNRHERAKSAMKIPTRETTTAEFP

SEQ ID NO: 252316 - protein, 80 aa, Zea mays
  Clone ID: MRT4577_161696C.1.pep
MAKYTTRTSSNCNLADREYVLIPEQGVVQEEAYPEPAAEDLSAAPGTLQVMVDDVTWPSTLPPGWTVEWDAASTGEDQEE

SEQ ID NO: 252317 - protein, 90 aa, Zea mays
  Clone ID: MRT4577_161697C.1.pep
ATVPAHCFGWSFPLSQVVSLHVYDESCSVEHSRGALCRSPEFSIYRPCSSPVPCPEHSSQLGCSTRQAIPSPQSHLLCLGSPSVKYILSS

SEQ ID NO: 252318 - protein, 57 aa, Zea mays
  Clone ID: MRT4577_161698C.1.pep
LFVPICLKMYEVRFLLMPAPCRFVQILHIQKRGSLSLKFDVCYLWYLLFITNFFSFL

SEQ ID NO: 252319 - protein, 82 aa, Zea mays
  Clone ID: MRT4577_161699C.1.pep
GQHDVCDCLLEQEEFKDEVVLILNQAGKRVSGNDGSYSSSGSWSEVGSGGSSEVRAGVMIVLAHGHVVGAASVGGRVDERVT

SEQ ID NO: 252320 - protein, 35 aa, Zea mays
  Clone ID: MRT4577_16169C.1.pep
SSLTAYLRFDGALNVDVNELETNLVPYPRIHFMLP

SEQ ID NO: 252321 - protein, 33 aa, Zea mays
  Clone ID: MRT4577_1616C.1.pep
VPVAEQQVELAVVLERLIIHIRHVHDQRHRTRG

SEQ ID NO: 252322 - protein, 56 aa, Zea mays
  Clone ID: MRT4577_161700C.1.pep
IFYRLILFLRPPLFFVQALALWFSVFNFYEGFLVAVAFFVFGYTVLVKKPFYFFGS

SEQ ID NO: 252323 - protein, 167 aa, Zea mays
  Clone ID: MRT4577_161701C.1.pep
MAALLRLTAARSALPRRTLAPHRRLHTRKFMTNRLLSPKQFVLEVIHPGRPNVSKAELKERLAKIYEVKDPDCIFVFKFRTNFGGGILCHGRRRNRCRPTPPPRLHLSALCLPRVLLRSTTTASRSTFSALPAPPTLLGFPEDLIGFPKSGDSIPVVHRQAPNLAKI

SEQ ID NO: 252324 - protein, 121 aa, Zea mays
  unsure (1)..(121): unsure at all Xaa locations
  Clone ID: MRT4577_161702C.1.pep
MSTEEDVVPDVPVIDVPEEVPAAQQDEAPKANKGAKDNKAPTEKKLSLGSKPAAHSPXLKGLDRXIAGLKDTMVSSSGTCLKLMEAKHAGKLRTNFRXQITVQLMNLADAXGKLTRVKNSF

SEQ ID NO: 252325 - protein, 52 aa, Zea mays
  unsure (1)..(52): unsure at all Xaa locations
  Clone ID: MRT4577_161703C.1.pep
MFGCTDTKQVYKELQEYIAAYPDAFHRVIGFDNVRQTQCVSXYIAYXPPGSE

SEQ ID NO: 252326 - protein, 149 aa, Zea mays
  unsure (1)..(149): unsure at all Xaa locations
  Clone ID: MRT4577_161704C.1.pep
HTNKLSPPPLPPLTTTXQRTPPXNPPPPDHQPNKPHNHPTPHHSKTTQTPPPPHHPPPPSTHHHPRNPPPIPTPPPXPPPRPPPXPPPPHAPPPPTTPPPNHTPPPPXPPHHPTPHPPPPTPTPPPPHPHQTPHTPPPTPTPPPPPPPP

SEQ ID NO: 252327 - protein, 122 aa, Zea mays
  Clone ID: MRT4577_161705C.1.pep
FQPDKQSESAYSPLMFNTRSTYLMCKRCRVCPDEILRSRIVKFLHRGNKKPTVTGREKTEEKKNGAQILPHDTKKACGKIRAGSLQEEHNNSRAAVRESTQEIKVKPKLYFYIVSIVPRTTT

SEQ ID NO: 252328 - protein, 62 aa, Zea mays
  Clone ID: MRT4577_161706C.1.pep
PPPQKKLTPKKVGNPAAFLGSPLAPTITGSTIYLDNGLNPKELALDNPPLTTKAHSRQTRGS

SEQ ID NO: 252329 - protein, 38 aa, Zea mays
  Clone ID: MRT4577_161707C.1.pep
LTKASLPEQIRSKYADTYVSVQCRCTAISGKRMLCRCF

SEQ ID NO: 252330 - protein, 138 aa, Zea mays
  Clone ID: MRT4577_161708C.1.pep
PPEGFPNCPGRKNFPKPGAGFLGKNGISSPPPPPQKGPPAGRAMGVFLFGPPLGSLGFCLGPWRFKFQCFFFIPPPPQGICRFLVKKKTLLPGGGTGRKGIKIFFFRGAVFCTQNGLSPVWGRFFCFLGCRAGKDSQF

SEQ ID NO: 252331 - protein, 61 aa, Zea mays
  Clone ID: MRT4577_161709C.1.pep
PVAKFYFPSPQSRIIHEKRPGFIPPGVENGGSPAPPDSGLNQIKCRKPLVPKSCPLVVRNR

SEQ ID NO: 252332 - protein, 63 aa, Zea mays
  unsure (1)..(63): unsure at all Xaa locations
  Clone ID: MRT4577_16170C.1.pep
VHVIADQFFSWXKEYFDGVFTPFKKSNPIPEVYNVPVKVVVADIIHYFFFKSVINVLIEFYAP

SEQ ID NO: 252333 - protein, 41 aa, Zea mays
  unsure (1)..(41): unsure at all Xaa locations
  Clone ID: MRT4577_161710C.1.pep
MVIDLAAGGRIKKTKHTAPKSDDVYSQXLLLKLYRFLIRRT

SEQ ID NO: 252334 - protein, 348 aa, Zea mays
  Clone ID: MRT4577_161711C.1.pep
MRVVVTGATGYLGGRLCAALAGAGHAVRALVRHSSDVSGLPRDIEMTYGDVTDAESLAVAFDGCDVVFHVAAAVEPWLPDPSVFFKVNVGGLENVLKAVKRTPTVKKIIYTSSFFAIGPTDGYVADETQMHRGKEFCTEYEKSKFLADRIALQAAADKVPITIVYPGVLYGPGKLTTGNLVSRILIERFNGRLPGYIGDGYDRESFCHVDDVVNGHIAAMEKGRVGQRYLLTGENMSFVLIFNMVANITNTRAPMFHVPLWLIEAYGWISVFVSRITGKLPLISYPTVRVLRHQWAYSCDKAKMELGYTPRNLTEGNSNIKVVPKEIKLICWAFSMLKPATLDHQCIS

SEQ ID NO: 252335 - protein, 91 aa, Zea mays
  Clone ID: MRT4577_161712C.1.pep
MQISGETASASVNSSSLSDLSNVTNATLYGFEDYHGVDIGVVKAARLWYSCVGGELLLEIPLEEGDTRLGFAISRTEEVFVFTSTRRSTHS

SEQ ID NO: 252336 - protein, 79 aa, Zea mays
  Clone ID: MRT4577_161713C.1.pep
GKKRSRVSTVDLLLAMLGATNGITWGKGKPRGATGIGMLVMSDWRSHWDMSRDKGWAGYLFERATGQETGANSIWYRGG

SEQ ID NO: 252337 - protein, 38 aa, Zea mays
  Clone ID: MRT4577_161714C.1.pep
PNNTFNRENQFDFRHLKLALKREEQKNLLKPDDFTKTE

SEQ ID NO: 252338 - protein, 288 aa, Zea mays
  Clone ID: MRT4577_161715C.1.pep
PRVRPRVRSELEKLVKDASTTVVEGKEGAPLQSTTLLLKCLKILENATFLSDNNKTHLLSMSRKLSPKCRSLSFVGVILNIVELLSALSLLQKPSTVSRKADPKNTKVCNGACSADSRGLSLLNHHCKCNNSKKKSILLNRRRQYCSSTKSEASHVTLSSSSDVSQSERILNCSSFSSNGTSSGSFGVKHINGASLKLNVRMDRSKAYPVRGSTGWISMKAQTSDWNSREMAKKRRLSENVLTDLSNGGDDPFAFDDIDQEPSNWDLFGPKRKSPQKRAKRTNGEVLD

SEQ ID NO: 252339 - protein, 371 aa, Zea mays
  Clone ID: MRT4577_161716C.1.pep
MAAATFSAAGRRLLSTAAAAAEKTELPVPIARLRQLARAGRLDDIDATLAPLFPSHPVAALSALSTLGLPDRASALLGTMTSPNTAHLNAVLGPLLRRRRLAGLVPSILAAHASVPRDAVTDSILAKSLCLTSGADSALHLLRKPSSGAPPSLQLFTTIIDSFYKQRLPHRAEEMWRAMVQDHGIAPDTAAYNALLTYKSTNGTVDEVKEVIRVMREEASLRPDVGSYNALMRAMARHKRLDEAVEVYRSLEAGKKADVVPDCATYSCVVGALCGAGRWSEAEDVFYAGVKRRKVADLGTVRVLVRGLKDAGKGRAARRVVVGLCKKFPEMFDGPWRELEVAAGLNSSGKEDDDVEDGADEKLAMTRATVA

SEQ ID NO: 252340 - protein, 108 aa, Zea mays
  Clone ID: MRT4577_161717C.1.pep
EGYTNNQQKGKNDQPMQHRYMKAPPAPPAEKNMWNLNKGKDIIQDISTEENLTKEGRVQITDSEEEDTSDLLGEELFAAGMNIGMYDTHKKWDTGEKDADANERATYD

SEQ ID NO: 252341 - protein, 85 aa, Zea mays
  Clone ID: MRT4577_161718C.1.pep
ELLKQKQYSPMAVNEMVPLIFAGVNGHLDTIPVNKILQWESDFLAHLKTNESELLATIDKEGAISKDTEAKLRDVTQSFVKSFLG

SEQ ID NO: 252342 - protein, 95 aa, Zea mays
  Clone ID: MRT4577_161719C.1.pep
QKARVKTGRFGVSLNRSGVRWGPLEEWRERKKMRGGRRKRGKGERRGEEKRKKKKKKKKKKKKKKKKKKKKKKKKKKKKKKKKIKKKKKKKKKKL

SEQ ID NO: 252343 - protein, 112 aa, Zea mays
  Clone ID: MRT4577_16171C.1.pep
SICFSCLELNVCYAPDPCKKWLLVCFKLISFSGCPNPPCVIVSSRFMPGTHFKLPKFQYFVEILAGRRMFFVKTLAMSCAILENLGGNVSRDGSTEYTSNNLLSREILICHR

SEQ ID NO: 252344 - protein, 92 aa, Zea mays
  Clone ID: MRT4577_161722C.1.pep
QHMFFGLLLSCKTLYFYKVVHALFLCLPSPSSCGCTFYFLIPSSQSVARSGHPEEPKSNDVSNNRSCPLSVFGARPHTRGYPSRCFWVEWCF

SEQ ID NO: 252345 - protein, 652 aa, Zea mays
  unsure (1)..(652): unsure at all Xaa locations
  Clone ID: MRT4577_161723C.1.pep
MTLPCAGGCEIQASGINYRIAVSTRPLKVWSRSDDDVHSQDHHSVVRQVLRDVSCRARPGELLAIVGPSGAGKSTLLEILAGRLSPXRRPTCYASTAPXHSADLRRVSAYVTQQDVLFPLLTVRETLLFSARLRLGARLPSKDMHARVEALLDDLTLRRVAATRIKDLSGGERRRVSIGVEAVRDPPVLILDEPTSGLDSASALHIVGALRAMAEARGRTVLLSIHQPGARIVKMFDSVLLLAAGSVLHHGTVDQLRALLGDAGLHLPPHVDDVEFAIDSVDALRRHASSSLQAPSSGDREGRCTLQRLFQLHGKQVADAPVAVTMMASRYANSRAREVAVLSQRFFKNVARTRQLFACRTVCMLVAGLALGSIFYDLGQDKVAERVGLFAFLLTFLLSSTTEALPIFLQERDILARETASGAYRVSSYAVANAVVFLPFQLALAVVFAAPVYWLAGLRRTAAAFGYFLLVIWLILYTANSVVVCFAAAAPDFVVGNAAIQGVMGSFFLFSGYFIARSAMPGCWVFMHYLSLFKWPFEALLVNEFAGGGRCVVRALGECVATGDEVLRREGLGEECRWRNVGVMVAFMAAYRVLGYAVLRVRCSLALNKKGAVAAGPPGLGLSRRLRRQLAIIGTAAWPSPSSSSTPSLPVN

SEQ ID NO: 252346 - protein, 38 aa, Zea mays
  Clone ID: MRT4577_161724C.1.pep
LSSTQLGFPKTPSISLFQTSVLLHVYLPVTPCTAVFYK

SEQ ID NO: 252347 - protein, 162 aa, Zea mays
  Clone ID: MRT4577_161725C.1.pep
MQQQMPMPPAPAAAAAAAPPAAGITTEQIQKYLDENKQLILAILENQNLGKLAECAQYQAQLQKNLLYLAAIADAQPQPPQNPAGRPQMMQPGIVPGAGHYMSQVPMFPPRTPLTPQQMQEQQQQQQFQQQQQQVQALTFPGQMVMRPGTINGMQQQQPYAG

SEQ ID NO: 252348 - protein, 132 aa, Zea mays
  unsure (1)..(132): unsure at all Xaa locations
  Clone ID: MRT4577_161726C.1.pep
DFSATSPPASVSAPVALLWLSLAEGSELAPPAVSCLLPRPSAGIGAACCSSAAARAGSACIGCCCCIPLMVPGLMTICPGNVRACTCCCCCXNCCCCCCSCICCGVNGVLGGNIGPAYSALLPPGTIPGCII

SEQ ID NO: 252349 - protein, 65 aa, Zea mays
  Clone ID: MRT4577_161727C.1.pep
RTEGQSCCINQQWLGSQTRGRHYTDYLTGKNKWNVPFITQGDSTMIKKGTRHERNLFLRQGPSHG

SEQ ID NO: 252350 - protein, 257 aa, Zea mays
  unsure (1)..(257): unsure at all Xaa locations
  Clone ID: MRT4577_161728C.1.pep
KKKKKKNTKKKTNKKKKNEXKKKKKKKQKKNKTKKKKKKKIKKTKKKKKTKKKKQKKKKXKVKKIKKQRKKQKXKQKKKKKTKRTKKKKKKPKKKGKKKKQQKXKKKKKKKKKKKKKKKKKKNKKNKKKKKKKKKKXKKKXKKKKNKKKKKKKKKKTKKKTKRKRKKKNKXKKXKRKKKRXXKXKKKKKKKKKQKNKXKNRKKEKSKKKKKKNKKKKKEINKKNKNNXKKKNKIKKKQETNKTIKKKKPYKKKKKRK

SEQ ID NO: 252351 - protein, 270 aa, Zea mays
  Clone ID: MRT4577_161729C.1.pep
THASDSLTSAPPPPISPQISSRWASPPPPPPARPSSSSPYPGSSSVLRRRRSSRSPSRTTPAAPSSSRSSASASTAWCLSPSPAPSTPPSSLIGTGWSFLKPFLQDKEKKVLMVVIPLQVAANIAAAVVGETGPFLQGWVTWNQIFLFVDVACCCAVLFPVVWSMRSLRESSKTDGKAARTLAKLMLFRQFYVVVIGYLYFTRIIVYALRTITNYKYRWVSVAAEEVSTMAFYMFMFYMFRPAERNQYFALDEDDEEAAEMVLREQEFEL

SEQ ID NO: 252352 - protein, 123 aa, Zea mays
  Clone ID: MRT4577_16172C.1.pep
FRLGRRRASCRALGGSGTRPYMPSSVPQRAFLEPAGGVRRSGQAAGGLASARRSVCSGPSMPQPFWTRSWERGSACLPPRRTVEAAILVCGWGFLVRRTLSGTIGANEGWVLGWDCKVRRRRG

SEQ ID NO: 252353 - protein, 56 aa, Zea mays
  Clone ID: MRT4577_161730C.1.pep
GPGLHSGPNSREQRIPTMVPAFSPSILGSRHASMTSKGKYNIDYYSRVSVLIGEGN

SEQ ID NO: 252354 - protein, 230 aa, Zea mays
  unsure (1)..(230): unsure at all Xaa locations
  Clone ID: MRT4577_161731C.1.pep
MGLAAAARAVLLLLAVAGVLLRPAAAEIKQESFKDDSRGSILFEKFGFGPHGMVSISVTGAKASSALAKPDPAQLGFFLLSDESLFEAIYDQPAPTDLNPNPESSPTCVLASPYVKPLFTFAEVDDNGFHNQTFPITHPDEYSLFFANCAPETSVSMEVRTDMYNTNLDGTRDYLSVGMASVPTIYAFFAVCYVVFXLAGWLYVTXYXNXXSXQXXHHLMSGLLVARMLY

SEQ ID NO: 252355 - protein, 129 aa, Zea mays
  Clone ID: MRT4577_161732C.1.pep
NPRPKRPAKGITSSAGKRGLNSNPKSQKAKEAAKFNPPPLKRPAKGSTSSGGEEGLDSTPESQEAKEAKMETPPPNRPAKDTPSSPGKNGLNSNPKYQKGGKKGPTWSQGAQGSNKKKIMGPPMAPRLF

SEQ ID NO: 252356 - protein, 448 aa, Zea mays
  Clone ID: MRT4577_161733C.1.pep
MGLAAAARAVLLLLAVSGVLLSPAAAEIKQESFKDDSRGSILFEKFGFGLHGMVSISVTGAKYSSKLAKPDPAQLGFFLLSDESLFEAIYDQPAPTDLNPNPESSPTCVLASPYVRPLFTFAELDDNGYHNQTFPITHPDEYSLFFANCAPETSVSMEVRTDMYNTNPDGTRDYLSVGMASVPTIYAFFAVCYVVFLAGWLYVTLHRNRLSAHRIHHLMSGLLVARMLYCISAAEDQHYIRTAGTPHGWDVMFYLFQLVKGVILFAVIALIGTGWSFLKPFLQDKEKKVLMVVIPLQVAANIAAAVVGETGPFLQGWVTWNQIFLFVDVACCCAVLFPVVWSMRALRESSKTDGKAARTLAKLMLFRQFYVAVIGYLYFTRIIVYALKTITNYKYRWVSVAAEEVATMAFYMFMFYMFRPAERNQYFALDEDDEEAAEMALREEEFEL

SEQ ID NO: 252357 - protein, 136 aa, Zea mays
  Clone ID: MRT4577_161734C.1.pep
SSLLISSSSPDIGETSDQVQVDSCQYLISSHTGDCRVSCPDNSSLDTSGKAHDEERLDQALITKHDSGMMPSTSNQTSLDATVGTESSAEYMKQDVSHCDDFNIRVNDQSLNQALRNQHGDAVPLPDMVSLDAKVD

SEQ ID NO: 252358 - protein, 252 aa, Zea mays
  Clone ID: MRT4577_161735C.1.pep
GYLEAGRESWLLPLALSSFLLVLLLLAPGAAAQPWQSCGNTDNYSANSTYQSNLASLAKALPANASRSATLFAEGSAGALPDAVYALALCRGDINATACGACITTAFQDAQQLCAYNKDAAVFYDACYLRFSNKDFIASATNNGDATVLMNSQNVSSPVRAFDAAVAVLLNATADYAAANSSRRFATGEEGFDATDPTIYGLTQCTPDMSPAECRTCLRSIISDMPQYLSGRRGGRIIGMRCNFRDDLYSFF

SEQ ID NO: 252359 - protein, 64 aa, Zea mays
  Clone ID: MRT4577_161736C.1.pep
KKKKKKKFNKKKKKKKGGRSKSYRGVKRNTFYIIAILYKSTKFNYINRGVLNLKDSEIPLSYLT

SEQ ID NO: 252360 - protein, 92 aa, Zea mays
  unsure (1)..(92): unsure at all Xaa locations
  Clone ID: MRT4577_161737C.1.pep
VNHRVRPCVRPRVRQAAALVTLLVLMIIKLAIGILAHVDSFAHIGRFHSGFLLGYVLIISLHYGWMQRXPCPSTSTSTSTRXLVYQSALLAV

SEQ ID NO: 252361 - protein, 106 aa, Zea mays
  unsure (1)..(106): unsure at all Xaa locations
  Clone ID: MRT4577_161738C.1.pep
CWXAINDGKDLHVSVTMPSIEVGTVGGGTQLASQSACLDLLGVKGANRESPGSNARLLATVVAGAVLAAELSLISAQAAGHLVQSHMKYNRSSKALAEETDKPKKC

SEQ ID NO: 252362 - protein, 556 aa, Zea mays
  unsure (1)..(556): unsure at all Xaa locations
  Clone ID: MRT4577_161739C.1.pep
MSPKKTHREEVPVQPRAFVLEIGTEELPPRDVVEATEQLEKSLVNTLEKRRLTHGXVHTYGTPRRLAIVVENLSMKQTEVEVELRGPPVAKAFDEEGNPTKAAEGFCRKNNVSVDHLYRRIDGKTEYIYARVRESARFADEVLTEDLPTIVSGISFPKSMRWNSNIVFSRPIRWILALHGDFVVPFYFAGISSGNQSCGLRNSSLANFKVETAESYLGTVEKAGILINMQERKEKVLHASTVLAQGVGGDFIAPDSLLQEVVNLVEAPVPILGRYDDSFLELPKDVLITVMQKHQKYFAVISKSTGDLLPYFIAVANGAISKEVVRKGNEAVLRARYEDAKFFYKMDTQKKFSEFRGQLSGILFHEKLGTMLDKMTRVENTVAELALILGINERTVPIIKDAAALAMSDLATSIVTEFTSLAGIMARHYALRDSIPEEIAEALFEITLPRSSGDVFPRTDAGIVLAVADRLDSLVGLFGAGCQPSSTNDPFGLRRVSYGLVQILVENKKSFDLRRALTLLAGVQPIAIESDVIDEAVQFVTRRLEQLLVHIIYLDL

SEQ ID NO: 252363 - protein, 87 aa, Zea mays
  Clone ID: MRT4577_16173C.1.pep
VARRVRSDTMSCGSDVCGDRCSFRGCEEFRRSWPSKVTADDSVAPARSSDVAAPASWIDRKLLVDPKMMFVWDKIGEGAHGKVYKGK

SEQ ID NO: 252364 - protein, 116 aa, Zea mays
  Clone ID: MRT4577_161740C.1.pep
GSRDLILWFYLLHLKHVIFIWHCIYTFTIAGYHHILASPTQVQKKGERNQQGYLNIMERRRLVPTLFGGRKTNLSVKGVCICNLHLASFQIDSCYELPETTPNHHHNHTSRLTPLN

SEQ ID NO: 252365 - protein, 73 aa, Zea mays
  unsure (1)..(73): unsure at all Xaa locations
  Clone ID: MRT4577_161741C.1.pep
MSDLDIQIPTAFDPFAEANAGDSGAVAWSKDYLHLRHPERXNGCKNLTTAQGLKKEFRFXKILNDFKKEFCLQ

SEQ ID NO: 252366 - protein, 370 aa, Zea mays
  unsure (1)..(370): unsure at all Xaa locations
  Clone ID: MRT4577_161742C.1.pep
PGSLLVLHRGRREVHDAFAAAAXPRATEDAATSDAAAYRPGLNITSARLVPRTTWLRKEKTENVGEWKARVFDVHNVVFSFRTLKAASAGRKDFTFELAGDEDGDEDDDEFLPLEIRDDDEDGDFLVADIPPPPARRSCYVPGRRSVAGPPSHLGTPQRRRNSVDVPRRLPACASVGRXRTASSPGTQVRRRRRVEPSXKEEETIKTLRPSVWLTEDFPLSVDEFLPLLDILASRVRAVRRLRELLTTKFPPGTFPVKVAIPVVPTVRVVITFTKFVPLTEPEEFFTPMSSPSLLASPGPGSITAKPDAQKSSSXPEVXLEELETEGRETCRRSRTTPXPFTVPSDYAWVNXLXSKNHDXKSSKSKKGKS

SEQ ID NO: 252367 - protein, 150 aa, Zea mays
  unsure (1)..(150): unsure at all Xaa locations
  Clone ID: MRT4577_161743C.1.pep
GKAGTHARRRSGIQPTHPRVRPPIPLLPTPKRTTATTKRSEISKPTGLISAXTPKRRQAKGPPTPKPTPPTYTPSPKPPTPKPTPPTYTKSPKPPATKPPTPKPTPTKNTXLSKSCEPKPTQATTTPTTKPPTRNQTTPTTTRGPKRHND

SEQ ID NO: 252368 - protein, 86 aa, Zea mays
  Clone ID: MRT4577_161744C.1.pep
QARTLSQHDRFWRLTSRSRDNFRKSIFAPAFALDYTSPAAQNAFFRIKKSPLTLPQKLTKENGESERERFPWKFLPRAKVIGIFKS

SEQ ID NO: 252369 - protein, 94 aa, Zea mays
  Clone ID: MRT4577_161745C.1.pep
LWVSGPTKPQPSSFPQKGMATSRSAVKPKTKPPGLPGAEPNQLGRYPNGQVGSTPPDPPAVFSGPGVNHFSPVGPGVAHEQLQLKNGPGAAEGC

SEQ ID NO: 252370 - protein, 95 aa, Zea mays
  Clone ID: MRT4577_161746C.1.pep
TRRSLVLSGAPLGACADRAGGRRISAAAGGWRFLLGTQPPPLPISGLRSGQRAAPIRSNPIQPNHRSRHVPSRSPPYAGNLLKEPSYSETPSRKA

SEQ ID NO: 252371 - protein, 154 aa, Zea mays
  unsure (1)..(154): unsure at all Xaa locations
  Clone ID: MRT4577_161747C.1.pep
INILLRPTSNIESAIQYQQWPTKDTAFLCFLMLLDVLTRGAYATHCSQALIGSFISPYLSTPVRXDMLKTPRIPPYWTLQAIAGGIIXPLIPLXFLLEASTLLQPIPGAHIVAHHMGAQHVQHLALXDHAGYSEQPQFLLFKPPAALIYASVLR

SEQ ID NO: 252372 - protein, 47 aa, Zea mays
  Clone ID: MRT4577_161748C.1.pep
SAIKLDWAFNWSLHQSWSMIGCCTAAVYAHNKLKVYPIDLIPMSYHD

SEQ ID NO: 252373 - protein, 100 aa, Zea mays
  Clone ID: MRT4577_161749C.1.pep
PRVRPRVGLGAPPIGPPGGNPYSSFTPPLSLGLPATRFPGPLPVVFFFFPPPRFCFLTKGPLFGPPCFTKNPFFYFGPFPLSRPVFSPFRALGKKFFPGF

SEQ ID NO: 252374 - protein, 319 aa, Zea mays
  Clone ID: MRT4577_16174C.1.pep
SVAPARSSDAAASASWIDRKLLDDPKMLFVGDKIGEGAHGKVYKGKYGDQIVAIKVLNRGSTPEEKATLEARFIREVNMMCKVKHENLVKFIGACKEPLMVIVSELLPGMSLKSYLHSIRPSQLDTHTAISYALDIAHAMDCLHANGIIHRDLKPDNLLLTANRKKLKLTDFGLAREETVTEMMTAETGTYRWMAPELYSTVTLRRGEKKHYTNKVDVYSFGIVLWELLTNRMPFEGMSNLQAAYAAAFQQKRPALPEETPQELVFIVQSCWVEDPAMRPSFSQIIRMLETFIMTIHPPPLSEPNEGEESEETRSSLEQ

SEQ ID NO: 252375 - protein, 75 aa, Zea mays
  Clone ID: MRT4577_161750C.1.pep
CVRTVVLGLHVSHALSEPPVMEVLIYVPSPQLAVSNTVEAPGPLVQSHVYTHDKTANNNVTVMVCGTSKKTSKKT

SEQ ID NO: 252376 - protein, 105 aa, Zea mays
  Clone ID: MRT4577_161751C.1.pep
MLSPSTSGFPPSPLPSKAATNATATRCRAAPSGDASLCAFRAHHSAGHALHTNPALMPALAACARLPSAVAEAEAEQIHALLVKSGGSRAGSHVQAFTSLISRLL

SEQ ID NO: 252377 - protein, 85 aa, Zea mays
  Clone ID: MRT4577_161752C.1.pep
TDNMTLPYPYCRLSLIMDSTTWRVSNVRHLSGMATSRAATTVACFRLLPLRHHDLRDVNNIGCRRSISTLRSRYDAPCQGRSLPT

SEQ ID NO: 252378 - protein, 41 aa, Zea mays
  Clone ID: MRT4577_161753C.1.pep
ARTPDPGWVHRPSEIYLMFKSPCLAVSPMIADDSGCTDARN

SEQ ID NO: 252379 - protein, 166 aa, Zea mays
  Clone ID: MRT4577_161754C.1.pep
PRVRPRVRVDANDHPQHLLNHLSQNIVQTGFDRSVAFCNQEKQRNEESLPSTSHWRSIKQHVLSHGSSRPFSRKHSSDTSLSDSTSVPAEGGPMLVNIPRTTKQGVEYGRPPSVSSSTLVELTTRLDFFKERRSQLMEQLHSLDLGHGSTSHGFPYKPSSPWNSPK

SEQ ID NO: 252380 - protein, 857 aa, Zea mays
  unsure (1)..(857): unsure at all Xaa locations
  Clone ID: MRT4577_161755C.1.pep
MAASAAAAPGSAERQARGGAASAIGNAVFKSGPLFISSKGIGWKSWKKRWFILTRTSLVFFKNDPSTLPQRSGEVNLTLGGXIDLNNSGSVVVREDKRLLTVLFPDGRDGRAFTXEAESSKDXFRWKTSLEEALAQAPNAALLMGHNGIFRNDTTDVYEEAIPNWREKRPTKSLVVGRPILLALEDIDGSPSFLEKALCFLEKHGIKVEGILRQAADVEEVDRRLQEYEQGRTEFAPEEDAHVVGDCVKHVLRELPSSPVPASCCTALLEAFRLDIKESRIKSMRAAISETFPEPNRRLLQRILKMMHTVASHTAENRMTPSAVAACMAPLLLRPLLAGECELEDDFDMSDDSAAQLIAAANAANSAQGIVTTLLEEYESIFNDEHFRCSLSPDSQTGDSGSEESTDDETVDIKDNGFHDAENDVDQELDDAERVNGKSSETDSACVHADLHDYKEVNGNDSDAELSVEDNTFEPNVNLNDTPLSRLIENGKKPSNLASSHETPLSVGEILLSLDAGVPLPGRXLNIPRTDTLANPXGIQQHVKRTNLWGRSNARKGQRSELVDPSSEEELAIQRLEVMKNDLQVRIAKEARSNAILQASLERRKQALHERRVALEQNVSRLQEQLQAERDLRAALEIGLSMYSSQFSSSHSMDSKTKAELEEIALAEADVARLKQKVAELHLQLNQQRQHQYGSSVDANDCPPHLPNHLSQNTVQTGFDRTVAFCNQEKQRNEESLPCTSHWRSIKQHVLSQGSSRPFSRKHSSDTSLSDSREASTSVLAEGGPLLVNIARTTEGVEYGRPPTVPSSTLVELTTRLDFFKERRSQLMEQLHSLDLGHGSASHDFPYKPSSPWNSPR

SEQ ID NO: 252381 - protein, 576 aa, Zea mays
  unsure (1)..(576): unsure at all Xaa locations
  Clone ID: MRT4577_161756C.1.pep
MADQVTIISPRDPWPFSTVTAEDLEDLVAEGLLCRLSDERQLEWIPPASGTAPSPPPGYVVSFVSFHERGFGVPASCFMRAILYNYDMELHNLSPNSISQAAIFVALCEGYLGIAPHWDLWTHLFSVELFASPTGVRRVRAAVRXRLHSPAEAVTGVAVHPXSSRPRTKGGSAGCLXLTVGISVRLQEVGWHKPSRPRVPEDAVDRAARRVAAEEKKKKDAEKARAHERTRARDALEKLRRRQEREGLPREPSPETPDDDDDEDDDEDDDMAARLGLSPGLRLGQESSGQPPSGLASSVPRVGTPRSRPDERGQTEGVLDPSAGEVEVTPGSQAEASVSREPSATPAAQEGDPQVAVATPRKSVSRASKVPKARVMPKLAARRTSAVSSGVEIRETSPQARLIMARSGKRSHGLTDLAPRKALKTASASAASVTPGLAVQLAFSQGAPQRGALAAPTVVERVPEAGSSVEAAIVLEEAAGANVAPGPPDMPPVPAPTAAGAAAVQVGEQPVAADAEVAEASALGASEEGGMCWNLLSAARKPTGVNNVGSRVTREMANSSIIQASHGHCVGVFIGT

SEQ ID NO: 252382 - protein, 43 aa, Zea mays
  Clone ID: MRT4577_161757C.1.pep
LPYTLRICNSLETAISLNLIKSRCRHLSWREKEKNKGGRRLIA

SEQ ID NO: 252383 - protein, 57 aa, Zea mays
  Clone ID: MRT4577_161758C.1.pep
KVKECGLLSSPLIDWDFFVLASSRTWAFVWFIIAQVHFWGINFYFVVEGSRNGLGVF

SEQ ID NO: 252384 - protein, 36 aa, Zea mays
  Clone ID: MRT4577_161759C.1.pep
SVAFHGVILQVYQGDSCHGWISMMRSSRHLPPPTRQ

SEQ ID NO: 252385 - protein, 63 aa, Zea mays
  Clone ID: MRT4577_16175C.1.pep
CHALGGFLNLLVHTGNHGPGGKTQERRTIPNAFRPLRGKKREGAGNYRQSQPGIEKKRGGTGN

SEQ ID NO: 252386 - protein, 108 aa, Zea mays
  Clone ID: MRT4577_161760C.1.pep
KKSLLWCICLNTVNSLVKKAPKRSLPHNWHSRCICARTLVSLSLSSRLGDAVYRRVLVGASTCRCIGLRHLPVQYHRSALPAQGHQVHPLCRQSKSSKHLPHALQERQ

SEQ ID NO: 252387 - protein, 104 aa, Zea mays
  Clone ID: MRT4577_161761C.1.pep
VGAQIPPPQGSFPQARPKGAQMAKGHPECPQTVVARASCFFGKASPTTIMVILMNEPPTHWLNVKLLILLPLQTFFFLILSQCACLPCIYPLVHASQGGRPGLN

SEQ ID NO: 252388 - protein, 106 aa, Zea mays
  Clone ID: MRT4577_161762C.1.pep
TTCGLARVVSRRVEGSGHQNAMGGAHFFCGDTLDTATFDIPRHPRSVAPLHTGAERVLSHRRRNDALNKRSQEPDTGNRDKEVERRYFIMTWNQGNLHSMQPHIDA

SEQ ID NO: 252389 - protein, 144 aa, Zea mays
  Clone ID: MRT4577_161763C.1.pep
CSTRAHLSLAQTVSCSRAAFPRPREIPSGPIARLPARAPEISSQARAQKMRGGRGLLQRLLGWGHPSGGCGGFATPRSLMAGFFGGANPVDDPLITNPVGRMMHTISSPLFSGMMQPILMNPFGSVVQPSWVGPSMVAPPWQFQ

SEQ ID NO: 252390 - protein, 230 aa, Zea mays
  Clone ID: MRT4577_161764C.1.pep
MEDVDVSRQLKQMTNFIRQEAVEKAAEIEAAAAEEFQIEKLQLVEAEKKKIRQEYDRKEKQVGIKKKIDYSMQLNASRIKVLQAQDDLVTDMLESARKELLCISRDHPTYKKLLKTLIVQSLLRLKEPAVLLRCRKEDLQLVDLVLESARNEYADKAKVYPPEIVVDRQIYLPSAPSHYQAPGPSCSGGVVLASRDGKIVCENTLDARLQVVFRKKLPEIRQSLFGQVAA

SEQ ID NO: 252391 - protein, 118 aa, Zea mays
  Clone ID: MRT4577_161765C.1.pep
GFFQAAFRPCLSDPYYFVPACTLGSCFRVVLILTQKARSILPVLLTMFKREISLQVHATRSYLNRAWSEFTALMTRRPLPSGPCFESVTEPSLDFGEYSAGGGPWAGKFVLLLVFCNM

SEQ ID NO: 252392 - protein, 124 aa, Zea mays
  Clone ID: MRT4577_161766C.1.pep
MEDVDVSRQLKQMTGFIRQEAVEKAAEIEAAAAEEFQIEKLQLVEAEKKKIRQEYDRKEKQVGIKKKIDYSMQLNASRIKVLQGQDDLVTDMLESASKELLCISRDHPTYKKLLKTLIVQVSRT

SEQ ID NO: 252393 - protein, 336 aa, Zea mays
  Clone ID: MRT4577_161767C.1.pep
MAGVRLVGVRPSPGRLERWVGSLPDAGSRGGRPTLPIRGVRSYFIRSIPPLGRVERGVRKARTSRPAMGGDLYALDFDGVLCDSCGESSLSAIKAAKVRWPSLFEQVDAAMEEWIVEQMYTLRPVVETGYENLLLVRLLVEIQIHSVRKSSVADGLSIQEILENWSKLKPTLMDEWQEDRESLVDLFGRVRDDWIENDFSGWIGANRFYPGTADALKLSSSEAYIVTTKQSRFAEALLKELAGIDFPSERIYGLGTGPKVKVLQQLQQMLQHQGLKLHFIEDRLATLKNVIKEPALDNWNLYLVKWGYNTQKEREETEAIPRIQLIDLPDFSRQLK

SEQ ID NO: 252394 - protein, 92 aa, Zea mays
  unsure (1)..(92): unsure at all Xaa locations
  Clone ID: MRT4577_161768C.1.pep
RRPLCKLVDMYEHLLGEEALLAGCIFTLDDLCHLANADRVGGDRRSAGLMESGMNVTKWWDTGSRQDCXVRFIELQRPSSDDAPFCCPSIAN

SEQ ID NO: 252395 - protein, 57 aa, Zea mays
  Clone ID: MRT4577_161769C.1.pep
DALSVTRDAREAGSRTHRALPSRAAAGASAAAAGKSLQPGERHDRYKAEADHVTSGH

SEQ ID NO: 252396 - protein, 90 aa, Zea mays
  Clone ID: MRT4577_16176C.1.pep
TAGPSTWMAATQAAVSEYISCCSASDHPEKLSLSSSPFISLRWTIWLTTGSRAMPMSSYWPRERRRFAMSDSTKSQAEMRGAECTARSTS

SEQ ID NO: 252397 - protein, 68 aa, Zea mays
  unsure (1)..(68): unsure at all Xaa locations
  Clone ID: MRT4577_161770C.1.pep
MAKIKNGINGFGRIGRLVARVALERDHFXLVXPDQPFISTDYITYMVQDCTLYGPGKHHEIQVEGFKT

SEQ ID NO: 252398 - protein, 48 aa, Zea mays
  Clone ID: MRT4577_161771C.1.pep
MDTVSAYEVTTIFDRADNARPKSLGLPTFEGEEQEGAEQLPPRIPMPG

SEQ ID NO: 252399 - protein, 104 aa, Zea mays
  Clone ID: MRT4577_161772C.1.pep
RGGERDRTVLILSTLYRDNSASLVRYQQSPVSGASPDVYPWPPMEGVCSLASCVGHIWGWIPSSSSPVRTSEPSHCVSQPHRSERYAITGLCICSLSLRHTSGQ

SEQ ID NO: 252400 - protein, 35 aa, Zea mays
  Clone ID: MRT4577_161773C.1.pep
NVGNMIPSYFHAVANANNYCVWNKHGLRVPQGARR

SEQ ID NO: 252401 - protein, 42 aa, Zea mays
  unsure (1)..(42): unsure at all Xaa locations
  Clone ID: MRT4577_161774C.1.pep
TPTAPLHHLACPQIYXPTCCAMIPCPPKRSIFAWHQLLAPRG

SEQ ID NO: 252402 - protein, 92 aa, Zea mays
  Clone ID: MRT4577_161775C.1.pep
SAAALGRGDVFMTVLRAKPTAKVTQGGTVRPASMLLYTRSLPSLFTLSGMTTRIATSEPELLTTARPDLTGVLVDREAYERPSSVEERAQGA

SEQ ID NO: 252403 - protein, 65 aa, Zea mays
  Clone ID: MRT4577_161776C.1.pep
GVKGPESYPPGGRLTNGVPGCPPPRVLGRTFFGGKNGNPNFKHKLQFWGEGPGSPGFLGTPNGKT

SEQ ID NO: 252404 - protein, 129 aa, Zea mays
  Clone ID: MRT4577_161777C.1.pep
LPSRHGWACFAVTSPSPRGGCFSMWKDRTERNTGARAFSSTPPVGLDRPTASASVASTTSPSTRYQTEVTGGRPPYAGVSAVALSLCRAYLGDLDFLYPWCFRVPAARATRRATDRYGSMTKALDGELA

SEQ ID NO: 252405 - protein, 49 aa, Zea mays
  Clone ID: MRT4577_161778C.1.pep
GKRSPRLAPPAPGHKLILFLTTKSSHSVVVSLVQCYNSAPSPSQVGGEV

SEQ ID NO: 252406 - protein, 125 aa, Zea mays
  Clone ID: MRT4577_161779C.1.pep
NTRFYHLSKMLILTSSGGTAWLARASVCFVVQLVIAVRCPSYQTLAALAAHPRFRPARHKDAGTRQRSHLWLTPRLAAAVPDKQLPQPAAPPSRGLARASCPAPYTASRPAPRTRLPLRLHRGDA

SEQ ID NO: 252407 - protein, 146 aa, Zea mays
  Clone ID: MRT4577_16177C.1.pep
ETKHGDSAEAGSSGTPPAGGFGGGAGAGAGAGAGAGGGGATRYRECLKNHAVGIGGHAVDGCGEFMAAGEEGSIDALRCAACGCHRNFHRKESDNSPAGGGGVAPPDPAAALSPAAITAYGAAVAAHHHQFSPYYRTPAGYFLHQQ

SEQ ID NO: 252408 - protein, 34 aa, Zea mays
  Clone ID: MRT4577_161780C.1.pep
SCIAGATRASAEMKKVLYHYLEQKTGLERVLIRH

SEQ ID NO: 252409 - protein, 60 aa, Zea mays
  Clone ID: MRT4577_161781C.1.pep
TTTQTEAPHQNHLLHGGRVATWAHRYNGQNSGTPKPTATSDTHSTSKPPDANPLMPPTPC

SEQ ID NO: 252410 - protein, 36 aa, Zea mays
  Clone ID: MRT4577_161782C.1.pep
PAQGRGWSTGLERRHRHCRLPLLQFRGGAYSIRSAE

SEQ ID NO: 252411 - protein, 95 aa, Zea mays
  Clone ID: MRT4577_161783C.1.pep
IGYLEAGRVPVLTNDGEPRPAAAVGQRMTRIMLAILEAYASDDRRHLDYGRIAASEEFRRYANLVQELQRADMTQLPAEERLPFFLNLHNAMAIH

SEQ ID NO: 252412 - protein, 60 aa, Zea mays
  unsure (1)..(60): unsure at all Xaa locations
  Clone ID: MRT4577_161784C.1.pep
RPYXRTRTTQQKQNKXTWPRSRSRQFSSGFHQKADHVDQTFNSLYXRSPLPLDRQXEHPT

SEQ ID NO: 252413 - protein, 142 aa, Zea mays
  unsure (1)..(142): unsure at all Xaa locations
  Clone ID: MRT4577_161785C.1.pep
ISIHIGQDGIQSENACXELYCLXHGIHGDGHMHGDKTIGRGDEDFNIFFSDNGAGKHIXRGVPGELETTVIDDERTGTYRQLLHPEQPIRGKEDGAHNFARGHYTIGKDIVELCLDRIKKIAHNCTGVQGFLAFNTVGGRRA

SEQ ID NO: 252414 - protein, 95 aa, Zea mays
  Clone ID: MRT4577_161786C.1.pep
AMSIHNRQKAHSWISEPMRLPRAEVDKPLHDRTAPTPTLSHATGSESSTDLDLRGGGVLEAEALAPAPLLARLLEQHLAVPLLAAPPAEVDPDAW

SEQ ID NO: 252415 - protein, 48 aa, Zea mays
  Clone ID: MRT4577_161787C.1.pep
SYCVSWDEFKKDLNPRSVRRLQSTDTSKVPRHGARTAKQNILERRVRD

SEQ ID NO: 252416 - protein, 488 aa, Zea mays
  unsure (1)..(488): unsure at all Xaa locations
  Clone ID: MRT4577_161788C.1.pep
VSDAAFARFSSRWLSQIGFVMADYKYSLRGLDAGSADYPVKLSKVHLRSAKKLLKLCEVNGGFYVKAGQYVSSLRQVPKEYSSTLSCLQDQATPSKFQDIKAVIEQNFGKELYXHVHRGRLHNNQDVAVKVQYPGLEQRMKIDIMTMSFLSKMVSWVFPDYKFDRILIEFEKSMTMELDFTREAKNSERTASCFRKNSVVKVPYVFWQLTTREVLTMEFCYGHKVNDLDFLRKTDISPTKVAKALIELFGEMIFVHGFVHGDPHPGNILVSPEGHGKFSLVLLDHGIYRELDQKFRLDYCRLWKALILLDSNKILELGEQFGVGKYAKYFPVIFTGRTIESKSALGTQMSGEEQRRLKEDLNSLGMDDISSFMESLPPDFYVILRTDGLLRSILGNLGAPRHVRLLTYARCAIHGLEKQHKMESDVQLCSGAIRRMFLNVKTNVIYLRLRVIIEIAVLLAKANGAKQKVLNTLRQMLLEISQGFHRLI

SEQ ID NO: 252417 - protein, 117 aa, Zea mays
  unsure (1)..(117): unsure at all Xaa locations
  Clone ID: MRT4577_161789C.1.pep
MWDFISNTMRGNMYGXQALYQFLDIWYLHSRRKRLFCIDKGANNSDHDLNTDIFNCFVFCQVFNEVNSMEMDRVNVFPGILDNNVFVMVLGSTVQFQFVIVPRLSSLDNTTPLNLSQ

SEQ ID NO: 252418 - protein, 251 aa, Zea mays
  Clone ID: MRT4577_161790C.1.pep
MLRRRRAPLLLAAAGAGAALAATSPSGENGRSVASALHQGIARSSRSVYTIGFVMADYKYSLRGLDAGSADYPVKLSKVHLRSAKKLLKLCEVNGGFYVKAGQYVSSLRQVPKEYSSTLSCLQDQATPSKFQDIKAVIEQNFGKELYDIFLEFDEHPIAAASIAQVHRGRLHNNQDVAVKVQYPGLEQRMKIDIMTMSFLSKMVSWVFPDYKFDRILIEFEKSMTMELGFTREAKNSERTASCFRKNRVGK

SEQ ID NO: 252419 - protein, 74 aa, Zea mays
  Clone ID: MRT4577_161791C.1.pep
DIMSPDEALPHVSLFARPRRRRLLGQYHWSPTLSEGRATSILSGVPCCSGSSSRPLKAPCHIPPGQRAVWGGYP

SEQ ID NO: 252420 - protein, 60 aa, Zea mays
  Clone ID: MRT4577_161792C.1.pep
QLSIYEFPHAPTHHIEFVLPVHIPHYIIVDKTKKGACSILHRQDQLTLYLTAKRLINIHI

SEQ ID NO: 252421 - protein, 207 aa, Zea mays
  unsure (1)..(207): unsure at all Xaa locations
  Clone ID: MRT4577_161793C.1.pep
CQDKFLAIDYTXEISVFSXATPGAWTLLPSLSPPAGLCHRSYLESNGELHIVGAMVSTSHETQTFTYSSAIYACNLHDRTPEWSRVKDIGDQTLFVSKRFNGSFSGTSVSEYKENTIYFSEPLYGDPYDMVHRLEIVDVVTGRSEVKPVHEKMQGSEILGWIRPNLWKGGGYSEHKEKSQIEGTSNVTGSPKHDVEIKSVVVQSKNT

SEQ ID NO: 252422 - protein, 31 aa, Zea mays
  unsure (1)..(31): unsure at all Xaa locations
  Clone ID: MRT4577_161794C.1.pep
IAFDPSHLSYLXLHLDIMISSQHVAYQPALF

SEQ ID NO: 252423 - protein, 662 aa, Zea mays
  unsure (1)..(662): unsure at all Xaa locations
  Clone ID: MRT4577_161795C.1.pep
MAAVQDESLEFMDQVEDITIEDDRLVSVVALDEMTIADDSGLHRDVEEVDGTNHVVEDEQDPRDVDVGAVLEEKRMLDSSVATPVDLTEDSVVPTSPVPCPETSTDPSHPDHSSVSQDDGDVLEDTAGIGDSTAEEEHIFVPQASVSEAVSEDDNRTAAEVDTNCEVSIGSDICEREQDEHVVPFQDLAAFEELVAPLATGDDLPLPSEVLEPPDQEAGPREREDVTTSTGLDLQPNEQNEIEEDRAPETPTNSVATQRSDRMFLLERKRSLSLSLDGSVASEMEGSEPSTVDQLKSALQAERKALGALYAELEEERNAAAIATNQTMAMINRLQEEKAAMQMEALQYQRMMEEQSEYDQEALQLLNELVSKRAREKQELERELELYRQKVQHYEDKERRRTASFKANGVSPSGSGTSVSSSGEDSDGHSDDYCELGDSPDGGNVQSSSDAALSSMRDQDDGTKHLAALDDSLTYFEVERLSILEELKTLEERLFTLEDDDINTSKEVTGHSSSDXIYHTMAFSRRSTFSPXQAKIRRKGLXSRGKSLLPLFDAVGDEACDRMPPSAGAGEADQADDAATKPASVLVKEQERLAIIEEVDHVYERLQALEADKEFLRHCIKSLKKGDKGMDLLQEILQHLRDLRSVELHVKNAGGAMAANSA

SEQ ID NO: 252424 - protein, 96 aa, Zea mays
  Clone ID: MRT4577_161796C.1.pep
ETGEPAVLFFETTGRKKKIGTLRTLPRGRKYIHHNLGGNQKSRDLENVSPHTLFEGQDQQDEGPPHCLQEQTNLWVKGRSKAVNRSWDALRGGAPL

SEQ ID NO: 252425 - protein, 197 aa, Zea mays
  unsure (1)..(197): unsure at all Xaa locations
  Clone ID: MRT4577_161797C.1.pep
CVLACTPTEARNSARAGTNCPIPPGWNWTYEFQLKDQIGSFFYFPSLGLQRAAGGFGPITVNNRATVPVPFDQPHGDITLFIGDWYTKGHVXYDSALVPDGLPYEIVGVEPGETYRFRVHNVGVSTSLNFRIQNHNMRLVETEGTYTNQPNYTDLDIHVGQSYSFLGTMDQNASTDYYIVASPRFVGNPRWHEMAGV

SEQ ID NO: 252426 - protein, 107 aa, Zea mays
  Clone ID: MRT4577_161798C.1.pep
SYKTHTKGAVEKGSKVPMLGGGGGKRCKNGMTVRRLSWQRDTPPNMQRSIRPSQLQHSVLRDGVGFGSAFHTRTQRQGSTLKAFLNQSQFHRTWAEFGGLILALLFR

SEQ ID NO: 252427 - protein, 267 aa, Zea mays
  unsure (1)..(267): unsure at all Xaa locations
  Clone ID: MRT4577_161799C.1.pep
RQFLFSSFGNRTGLVCPPLSLPWDXRDGIQMRMNSWQDGVTGTNCPIPPGWNWTYEFQLKDQIGSFFYFPSLGLQRAAGGFGPITVNNRATVPVPFDQPHGDITLFIGDWYTKGHVELRNMLDDGQDLGAPDAILINGRAPYRYDSALVPDGLPYEIVGVEPGETYRFRVHNVGVSTSLNFRIQNHNMRLVETEGTYTNQQNYTDLDIHVGQSYSFLVTMDQNASTDYYIEANARFVGNPGWHEVVGGVARPSVLQLPKIGRIWSAP

SEQ ID NO: 252428 - protein, 1113 aa, Zea mays
  unsure (1)..(1113): unsure at all Xaa locations
  Clone ID: MRT4577_16179C.1.pep
MVSQAPVAGASLAASLCKKSNRVARVLAYALLEWILIALLLANGVFSYLISRFAAFFGLAPPCALCSRLGVDSLFETRPPHHRGAEPLRRLLCDAHAAELSRLGYCSAHRRLADAGDMCEDCAAAAAPGKALLSWMGRSELGERDLACACCGVALESGFYSPPFLLTTSAPRGSDCGLKQEEEAAMPNGDVVVVSKEGPVIELFDDKPFVEDDSIGVLAAEVVANVERPVALESIDSLVVTMGTVSSQSGGEGKEAVDHGVVRQNNVDMENTVSSNEEKIMPSDDKVDVVDRLIDEQIVAVVLVPACIEATLDGGINADKTVDAFADHQSLEDDSGLEVKDQKISFEDEVFEGEQXIHHLPNLTGIEQRACARNSGELAPHYLXIIGNEDSRSAAYVKRTLPVEASKHVAIRENKGKPTXVLSLEGVGFNTXCSREHADEELQGERTAQAGLEQECDSVPIDYGEHGSLTSYAHTDDEQDEAMQKVTSVTRIEEKQVQQAEVNQELDSIPKCSREHADEELQGERTAQAGLEQECDSVPIDSGEHGCLTSYAHTDDEQDEAKQKVPSVTRIEEKLVQQAEVNQELDSIPKRSREHADQELEVERTAQAGLEQECDSVPIDSEEHGCLTSYAHTDDEQDEVKQKVTSETADVLHYAADTFNVNTNSWKEDIEEDPTEAALTAIHQICYEPLTSIVKFSLDHSVSEEDREPDTPTHIEGICDSQELLDSKAVVSDAKSVDSSVATLSTDLESTELVSVDQLKSALASTRKSLNTLYSELENERNAAAIAADETMAMINRLQEQKAAMQMEAIQYQRLMEEQSEYDQEALQRLNELVVKREKEKQDLERELELYRHKVHLYEVKVRKMSRHKADDQNGSSSASSSAEDSDDLSQSFYEGDESSHGINGSNGSIPTDVVLQETARHLVTLDGSLADFEEERLSILEQLKVLEDKLFDLEDEESDNMKHFSEENHLSGASNGFSDDDSCFKLHDKRKNVTYRGKKLLPLFDDATVEAGNVPQGNDAQHSTEVTLDLAREQHKLAIANEIDQVHERLHALEADREYIKQCVRTLKKGGKGFDLLQEILQHLRDLRRIEQRASARNSGELSPHYLHHHTD

SEQ ID NO: 252429 - protein, 48 aa, Zea mays
  Clone ID: MRT4577_1617C.1.pep
EYSTIPTSVQLRLSPTIFFISLRYRLEKIFYLYISFLNNLLYISSSIL

SEQ ID NO: 252430 - protein, 180 aa, Zea mays
  unsure (1)..(180): unsure at all Xaa locations
  Clone ID: MRT4577_161800C.1.pep
GRRAARAHRRIRRRFLRGGLRRGWGGGIRGGGGAGRAAPTVQDLLRAASVATARLHDLDIFDAVKITLDAGPPELPGTTNVVIEVVEVANPLTGTAGVYSKPEARSWSLEGSLKLKNLFGYGDIWDASGSFGWDQTTEVGVGVCLPRFKSIPTPLMARASLSSQDWXLKVSSYKERLLGL

SEQ ID NO: 252431 - protein, 527 aa, Zea mays
  Clone ID: MRT4577_161801C.1.pep
MAAAADSASDQNPKDAERHVLTAESDADFSEEDYDEDGEEEYEEEEELDGPAAAAAERERMQSVLRRLSSDPVGIRVHDVIIKGNTKTQDELIEAEVAELLRAAPTVQDLLRAASVATARLHDLDIFDAVKITLDAGPPELPGTTNVVIEVVEVANPLTGTAGVYSKPEARSWSLEGSLKLKNLFGYGDIWDASGSFGWDQTTEVGVGVCLPRFKSIPTPLMARASLSSQDWLKFSSYKERLLGLSFGLLSTRNHDLSYNLAWRTLTDPSRVSSKAIRRQLGHNLLSALKYTYKIDKRDSHLRPTKGYAFQSTSQVGGLWNSKGLRYFRQEFDVRGAVPLGFYSAALNVGVGAGVILPLAGGFMNSTSSVPERFYLGGNSSPVCSLGGPSSLLGFRLRGVGPTEARRHVLNNSESGSADPGRDYLGGDLAVSAFADLSFDLPLKIFRDAGIHGHAFLTAGNLAKLSEGEYKNFSASEFRQTFRSSAGVGIILPTKLFRVEVNYCRILKQAEHDSAKTGIQFSFSSPM

SEQ ID NO: 252432 - protein, 85 aa, Zea mays
  unsure (1)..(85): unsure at all Xaa locations
  Clone ID: MRT4577_161802C.1.pep
MAITGSHNFIPKASMTTAIDILDVKRQVRILXTVTCHSNLVQHYDPSEDXYNVFLLIEQCKGTYLLNTHFTSSCSYPEDDSTVAL

SEQ ID NO: 252433 - protein, 72 aa, Zea mays
  Clone ID: MRT4577_161803C.1.pep
MRSQLERPLLGGTPSGRRYDDLSSSTITPRIWPGVQHHPGAGVEDGDPREEHPSLTRRSSPVENFNRHTPAG

SEQ ID NO: 252434 - protein, 95 aa, Zea mays
  Clone ID: MRT4577_161804C.1.pep
KKNERKIGLCFGGDPLRGDFCEFQSTGGRFTLALRGPTWPYRGWFYSSRAAFLQLGYWENRGVPQLFPFGAHPLLPRGGHCKGALTAGLFKGFAH

SEQ ID NO: 252435 - protein, 42 aa, Zea mays
  Clone ID: MRT4577_161805C.1.pep
NYLLTVWFNGSLQVFKKTRWLGKVGWNMIKGTIISANGSEGC

SEQ ID NO: 252436 - protein, 151 aa, Zea mays
  unsure (1)..(151): unsure at all Xaa locations
  Clone ID: MRT4577_161806C.1.pep
KELGTIQSIYTNLASESQSSSTYAIGFTSADFIIWDLXNEXKMAQXSCGGWRRPYSYYLGTVPXYQXCFAFXXDHDIHIHRXWAPTHDKKLLAQVLHLXFLGXEVHSLCFIDXAGLSDPENXSDLLMASGCXDGSVRLTVFCLVVLGGGFS

SEQ ID NO: 252437 - protein, 88 aa, Zea mays
  Clone ID: MRT4577_161807C.1.pep
MVWGLGGCFGGVAVAAVSPVAAGRKQSASEGGAEAKQQQQQRVAPREEEQQAAASVAGGRKERKKKDGEKASVVVMHQFPFHSRPGLL

SEQ ID NO: 252438 - protein, 77 aa, Zea mays
  Clone ID: MRT4577_161808C.1.pep
SSLPLIVHQLSVRCTPLQALPSQSFSLNQNCQLQHKAHSSQSTAMMAPISRSEGGSQQQWQCSPCGSDHSSSSPSTL

SEQ ID NO: 252439 - protein, 157 aa, Zea mays
  unsure (1)..(157): unsure at all Xaa locations
  Clone ID: MRT4577_161809C.1.pep
MVPPGLGSHVDGAAWAPGRSDSHPKDAALKGNSTLNFRTKPCIGYGIRGEKKXQQPRGVNKVLCMSVQQASXTKVAVAPIESENAKEPPLHXVKPKEPYTGTIGYVERLGGPIAPGETCHGVIDHGGNVAHWEGQYYGIIPPGENTKKPGSTNTERL

SEQ ID NO: 252440 - protein, 49 aa, Zea mays
  unsure (1)..(49): unsure at all Xaa locations
  Clone ID: MRT4577_16180C.1.pep
RRRVRSIFIGMNTETTNASATVAVWSFLHYCKAXFNQSLIRLPLHTDPA

SEQ ID NO: 252441 - protein, 136 aa, Zea mays
  unsure (1)..(136): unsure at all Xaa locations
  Clone ID: MRT4577_161810C.1.pep
CGGGGKPLAPLQXATXXRVRXTRFDTQKXWAXXLSXSSXXSSSGGSRRGHRGPKGPPGRVSSPFQEGSKGSAPXXPGRXMWXFIPWSGPXXQPFFDXSSAPDIXXAAXXDGVVXXPXSXXXXSSXPSFXXPIAXGR

SEQ ID NO: 252442 - protein, 68 aa, Zea mays
  Clone ID: MRT4577_161811C.1.pep
DPYAAARSMDIPWLNTAQKQQNRKKRMLYGRWLFLHWHIQRAMQAYARETYYCKHTSCGTVACLHKET

SEQ ID NO: 252443 - protein, 77 aa, Zea mays
  Clone ID: MRT4577_161812C.1.pep
LRGIGLFITSNSRSNTNTISSRTLYSTNTTSIHRKLIRSNTNKSSTSNRNIAIHLKTRLISNNRSKLTRNLNTINKT

SEQ ID NO: 252444 - protein, 73 aa, Zea mays
  Clone ID: MRT4577_161813C.1.pep
VPHRQAYFGPLLSWNLNHGAGPLLSSGAYLGSVSSAAPVRHAMVCKIRKRGVVNRRSTFICYHRLSPDKHKKC

SEQ ID NO: 252445 - protein, 80 aa, Zea mays
  Clone ID: MRT4577_161814C.1.pep
EFFQLSDCFKFFIRAPCLKSARIFTTSIIGGRFELVTAKCVVCSNGQHSVFIKTVGYIVFFCFFDFCEKLFFFFCGLVFF

SEQ ID NO: 252446 - protein, 119 aa, Zea mays
  Clone ID: MRT4577_161815C.1.pep
LPWGAMPYYYIPQVQGLMEIMGRDWGELYCWTPRGSSLFRVPGGRGYWEFLPKGLGDFWWGNVVPARELGLLGKPDKGGSFEPGPKPRLTNLVLYRSRKLAPEAKFLWMDVGARVKFFQ

SEQ ID NO: 252447 - protein, 129 aa, Zea mays
  Clone ID: MRT4577_161816C.1.pep
PPPPPLGFCWGFPPNLSPRKGFFLATRPGGMGGQQPGLGFQERGLFSKRHPFVYFRPPQNNGGRAQGVPYGPPPGIPIFEPQRGQNCGQSYPRGRVRVLIFAPERQKTLFFFWGGGGDPLPQGAKKIFF

SEQ ID NO: 252448 - protein, 550 aa, Zea mays
  Clone ID: MRT4577_161817C.1.pep
MAAHATLPFSCSSTLQTLTRTLSSRGAHQLRGGFLRLPSLAALPRLAHPYRRHVSASAAAAPNGASVEGEYDYDLFTIGAGSGGVRASRFASALYGSRVAICEMPFATIASDELGGLGGTCVLRGCVPKKLLVYASKYSHEFEESRGFGWTYETDPKHDWSTLIANKNTELQRLVGIYRNILNNAGVTLIEGRGKIVDPHTVSVNGKLYTAKHILVSVGGRPSMPDIPGIEHVIDSDAALDLPSKPEKIAIVGGGYIALEFAGIFNGLKSEVHVFIRQKKVLRGFDEEVRDFVAEQMSLRGITFHTEQSPQAITKSNDGLLSLKTNKENFGGFSHVMFATGRRPNSKNLGLEAVGVEMDKNGAIVVDEYSRTSVDSIWAVGDVTNRVNLTPVALMEGGAFAKTVFGNEPTKPDYRAIPSAVFSQPPIGQVGLTEEQAIEEYGDVDVFVANFRPLKATLSGLPDRVLMKILVCATSNKVVGVHMCGDDAPEIIQGIAIAVKAGLTKQDFDATIGIHPTSAEEFVTMRSPTRKIRKSSTDQVESKDEVVSKQ

SEQ ID NO: 252449 - protein, 93 aa, Zea mays
  unsure (1)..(93): unsure at all Xaa locations
  Clone ID: MRT4577_161818C.1.pep
MATKIFSLLXLLALSTCVANATISPQCXQATIASLLPPYIPSFIPTTXPNPXLTTFRPDQAITMSNMPLSPLPVSQSTSISLVQAEEPLRDPR

SEQ ID NO: 252450 - protein, 100 aa, Zea mays
  Clone ID: MRT4577_161819C.1.pep
GGKGEGGGFSNLGYSGGFFYPTGGKCGLPNFFWSPGVMGEVFLAPGPWAWKIVPKLAGERGSPLVVGGDVSGKPVVQGGIAGGALLGRVGETKQTARVWV

SEQ ID NO: 252451 - protein, 113 aa, Zea mays
  Clone ID: MRT4577_16181C.1.pep
RVPLQPAPWVSGPIPGPGGGGMGRRLTGSRRSWSVFFALLQRFCAFSAHVWALPLLLCAFVCALVVPFFFVSEDLPPAFFSVPSPGCVIVALGLGLLFVVPFSLVYWPVLWPM

SEQ ID NO: 252452 - protein, 205 aa, Zea mays
  unsure (1)..(205): unsure at all Xaa locations
  Clone ID: MRT4577_161820C.1.pep
LKGSMQIFIKTLTGKTITLXEESSDTIDNVEAKIQDKEGIPPDXQERLIIAVKQLEDGRTLADYNIHKESTLHXVVRLKGGMQIFVKTLTGKTITLEVESSDTIHNVKAKIQDKDGIPPDQQRVIFAGKQIEDRRTLADCNIKKESTLHLELRLRGGMQIFGETLSGHTITLEVXGXDTIAHXRRKIQDKEGIXPDQHQLMFCWP

SEQ ID NO: 252453 - protein, 56 aa, Zea mays
  Clone ID: MRT4577_161821C.1.pep
VSSMRHGPAWRMYRFLKVSLVKCAGSTSTLAGFSFALILDALAVLYGSTLASQLVS

SEQ ID NO: 252454 - protein, 121 aa, Zea mays
  unsure (1)..(121): unsure at all Xaa locations
  Clone ID: MRT4577_161822C.1.pep
GKGNPEALKEVPVGXKALKEGEKLDEEANVDWPNDAVAAGKDSQVDKKAKPFVEEVQRAECEEEACRRANRAPLALLPNDANRTNRKSNKNANAASAAPTEENVLDRRRRRTQTSYEACNG

SEQ ID NO: 252455 - protein, 104 aa, Zea mays
  Clone ID: MRT4577_161823C.1.pep
RKRGGFQQVVWTIFSCGARACFGLYWSHKSIKYQGMPTPHTNHGLATEGDTDCWERTNTKSLGFLNISEASGKSSTGHTKIHVPPHGENVPAPACPYSDALLFS

SEQ ID NO: 252456 - protein, 101 aa, Zea mays
  Clone ID: MRT4577_161824C.1.pep
ALITKCSLSRNMHYRVHCSHRRAGLTNTMYGSIPPHNPVEPVPHGEPSGSVPVVRHRDQDSPLDAIRGRQDEDDLHGSDHPQLQLGLSYTSPYTHALAQKR

SEQ ID NO: 252457 - protein, 101 aa, Zea mays
  Clone ID: MRT4577_161825C.1.pep
QPSAPRRSRSVDMPLYDVGHVDTRLSVGTMDPGTPLHRLRYLVGKYAHKTGYRSFNVTMHSLDSTATAMLVMRNPTEKAEKSMERTLLVVNLHKGGPHRYW

SEQ ID NO: 252458 - protein, 38 aa, Zea mays
  Clone ID: MRT4577_161826C.1.pep
DFFYTLLDFLSLNRNWSLGELFLHLVRAHSNILSYKCT

SEQ ID NO: 252459 - protein, 259 aa, Zea mays
  Clone ID: MRT4577_161827C.1.pep
MASVASARCYGLLLPPSFAGARCCSRPSSSLRLRPRWGLRRPRTPLACVAPPDSAEPQTDEQAVKAESIQEDAPTSTPEDAGLPALPNKDLNRRVALLSTLGAVALFASQRLNLSEASLKDLAANSVPYEEALSNGRPTVVEFYADWCEVCRELAPDIYKVEQQYKDRVNFVMLNVDNTKWEQELDEFGVEGIPHFAFLDKEGNEEGNVVGRLPKQYFLDNVVALASGDPEIPHARVVGQFSSAESRKVHQVADPRSHG

SEQ ID NO: 252460 - protein, 115 aa, Zea mays
  unsure (1)..(115): unsure at all Xaa locations
  Clone ID: MRT4577_161828C.1.pep
KTNVNEYIAGAKVKLECKHFGTGKLDRSIHGVTHRNGTYTIQLMDSHEEDIGXVVLVESPHKDCXDQVHADRDRAGIMLTMNVGINELLRSWKSLGXLKDLPLIIYASLLKQLDS

SEQ ID NO: 252461 - protein, 82 aa, Zea mays
  Clone ID: MRT4577_161829C.1.pep
LVVKKPKGNPVWYLLTQGRDWVHTIFYPGGGGGQISINNCGGKTLALTCPQEQTTFLLVCGGGATFFPARWRKFLFSWRNCF

SEQ ID NO: 252462 - protein, 156 aa, Zea mays
  Clone ID: MRT4577_16182C.1.pep
LGPSRPAGTHPSSSSLLSFSHQVVRHAEDRTLVRGETSNRKPEGSLTSLPKPNRKGKKSIVEEKRKKIIKEHKQPTGASQGKQTGENPSQQTPPPSLAGSGRRLLRRPTIAWYGDPTPQSGPLGLLCHSLTERTDWNGAGSLARRVPAGVGETRRG

SEQ ID NO: 252463 - protein, 52 aa, Zea mays
  Clone ID: MRT4577_161830C.1.pep
KKILVKALFWRPCRCPKRLVFRYWKELCCFFLLSHPVLQPQSLVHPDKLEAR

SEQ ID NO: 252464 - protein, 60 aa, Zea mays
  Clone ID: MRT4577_161831C.1.pep
IYIYHNSQINSIILPNKFYTIPQHKLSYCIFHIRIIYKNSSITIYIFNQLIQFYFFNFIS

SEQ ID NO: 252465 - protein, 94 aa, Zea mays
  Clone ID: MRT4577_161832C.1.pep
IRLEPAAAAAFSFYFQLQGRHGRHRVRESRVWRDPAAAWGDTMGEWNGTDILACDCLPSYSYIDNSAMDATNSMSNTAYVKAKESTEEVIMGEF

SEQ ID NO: 252466 - protein, 39 aa, Zea mays
  Clone ID: MRT4577_161833C.1.pep
LIFKSRPAINNNYIFHTIKSHRQILLQVVPQHLCPNPFH

SEQ ID NO: 252467 - protein, 33 aa, Zea mays
  Clone ID: MRT4577_161834C.1.pep
KLYKRVSIEAIQGLNGVKNGRVLHDIGCVLYNE

SEQ ID NO: 252468 - protein, 88 aa, Zea mays
  Clone ID: MRT4577_161835C.1.pep
NYVLPVQNKHLLSYNTIVSLNTIILFQNCNYTSKHGLTCLCRGGVHDTDHSSYYKGHQAQGEHRGVLLPHDLVSPQSATSVSFPAGLY

SEQ ID NO: 252469 - protein, 92 aa, Zea mays
  Clone ID: MRT4577_161836C.1.pep
YRLHRLARGCHRRLLEQSCIHSFMTRVFLLTIRFVRVVATPSCLCRGGVHDTDHSRYYKGHQAQGEHRGVLLPHDLVSPQSATSVSFRDPAG

SEQ ID NO: 252470 - protein, 137 aa, Zea mays
  Clone ID: MRT4577_161837C.1.pep
GATPHIYCPHITLITTTKPSYTNTHDMTEYTHSFHPMSLYIFLISDTGSTAWLGAATAVYWNRVVSTPSIRFVRVVATPSCLCRGGVHDTDHSSYDKGHQAQGEHRGVLLPHDLVSPQSATSVSFPAGFFFWSPNPL

SEQ ID NO: 252471 - protein, 83 aa, Zea mays
  Clone ID: MRT4577_161838C.1.pep
LGAATAVDGNRVVSTPSIRFVRVVATPSCLCRGGVHDTDHSSYDKGHQAEVEHRGVLLPHDLVSLLKVQLQFLPFRSRAAPSR

SEQ ID NO: 252472 - protein, 425 aa, Zea mays
  unsure (1)..(425): unsure at all Xaa locations
  Clone ID: MRT4577_161839C.1.pep
CCADENSTAPAFLDVLREPCSCPSSTATAPXLISCARSSQASSSSRLPGSRRSTAXSCTRAPPLCLEFSLPRAXQAANPPWSCSRRALGPCHGRRQAPRTSSPARSSASCSARVAPSGPXSMAGASPSGPXSSTRILCASSSWSSPLRLAPARSSPSSPSLLQSSSWPRVLAPSSPDFLAPCSPPXPGPSLSTKTAVSAXRSSSSAXPRMACCSLPSSDHAAPCGAHPAPCAGSPFPYVSMAEAPXSSPSSPALIHGRATGSSPAQHSSCVAASSPSTPSGFLALLFSGCRSCLPLSSTTAPGHCTTTCLLLLSSSARVGMRSPASLPASAELANAPSRRTPATSPCHAYFPVVGARQRPLFLHFVGHVFPPHTPPAPLAMAWMTDVSALVSCSSNHWLVGCALCRAHRVFGALSRMPSLSSPKS

SEQ ID NO: 252473 - protein, 76 aa, Zea mays
  Clone ID: MRT4577_16183C.1.pep
RSSLLIVSCIDRSVCVRACVALLFLLVTSCALPPADVRACHSCCQRFLMSYTRAVCKYIVRTRFLLNKYPSTRVLL

SEQ ID NO: 252474 - protein, 80 aa, Zea mays
  Clone ID: MRT4577_161840C.1.pep
LGAATAVDGNRVVSTSSIRFVRVVATPSCLCRGGVHDTDHSSYDKGHQAEGEHRGVLLPHDLVSPQSATSVSLVCSRPGR

SEQ ID NO: 252475 - protein, 145 aa, Zea mays
  unsure (1)..(145): unsure at all Xaa locations
  Clone ID: MRT4577_161841C.1.pep
RGKPGNRGKPGPATPPGPLPRKRGGGGPFFPGGGVEGXVPPSPGSRSTFTPTLRQGLGGGTRLAGFHWLRPPSFSLATTCILGVAPLYLRGGHLWALCQPQTGFAGPPGIPVGASLRTWASLGRLAFSPQNPGFPLRGDPRRPRG

SEQ ID NO: 252476 - protein, 142 aa, Zea mays
  unsure (1)..(142): unsure at all Xaa locations
  Clone ID: MRT4577_161842C.1.pep
IISLIVFCFYCLLVLVELFMFYLTAXLTQCGFSLAPKPFFSNLDAIITFAILGTFIASIVTGLLVYLGGLLYIVYRLPLVECMMSGALVSATDPVTVLSIFQELGTDTNLYALVFGESVLNDAVAISLYRSMASMRTHHSGK

SEQ ID NO: 252477 - protein, 63 aa, Zea mays
  unsure (1)..(63): unsure at all Xaa locations
  Clone ID: MRT4577_161843C.1.pep
MRGCTSKKKKKKAPKKKKKKKKKKKKKKKKKKKKKKKKKKKKKKKKKKKXKKKKKGPPGAGPL

SEQ ID NO: 252478 - protein, 34 aa, Zea mays
  Clone ID: MRT4577_161844C.1.pep
NLCLWPSCAGQKSTIAFIILVSHSLNAYICKVSR

SEQ ID NO: 252479 - protein, 101 aa, Zea mays
  Clone ID: MRT4577_161845C.1.pep
LLHPRRFISAVACASLPVEATRHRARAARLSSSCSLIAGERSHERGGDDGGRAMEKLFYKTSAGSPTRTWRPSATRTKASTPTTESFEEEKVYSGNHAYNI

SEQ ID NO: 252480 - protein, 51 aa, Zea mays
  Clone ID: MRT4577_161846C.1.pep
VVYGLHRMLCVSSSATMVATAADLHSGCQLLTGPFCRDEHPPGRQLTSYTT

SEQ ID NO: 252481 - protein, 78 aa, Zea mays
  unsure (1)..(78): unsure at all Xaa locations
  Clone ID: MRT4577_161847C.1.pep
EKAPEEIGNNPMLPSMNLHVVFGVFQSSCVSLGIQPVHLSGSRLWSTNSNIPPRDCVHSSFASEICEXVMSCQRLKSL

SEQ ID NO: 252482 - protein, 162 aa, Zea mays
  Clone ID: MRT4577_161848C.1.pep
HSFLCSSRHSSQHFFLRPQPFSAICAWLPEAAELDSSSCAVVLLHVRPFVSSSPWLLQILLASFPAPSACRHPARLYHGRCAVFTRWPCVAAHTRPTPRFLCTPWLRAPNCVLRSSLALAAGHHQPCLRILCPRLVHSVAREVLDVMAELKIVAVLMAVKTY

SEQ ID NO: 252483 - protein, 559 aa, Zea mays
  unsure (1)..(559): unsure at all Xaa locations
  Clone ID: MRT4577_161849C.1.pep
FTRPLLLIFSLAFYSSPTPPPPSLPLPSSLRFASLPFFPCESSDHRRATPGGNEPYRSRRAPPPRMASPARPAAASVSGAFGLSPDPKRCSFDQALRHXRLLMSFVNYHEHEKVSKEIVTDAIESCMKKQADNLLNSLEVISGRLSQLELYCYKLERSIGELRSDVMDYHNEANLNFQCLDKQVKEVQKSVQVVQERQELAETQKEMTKLQIVHEDSAQKSERSSPSVFINRENEVALVPLHQVNAVQSPPVQFQSCSGLILQQLMPVQDQQRSNQTAVYCMRGQSHLEHRQAQMFEAAGQSLQTHTRKTQPPTVVEVSQVTSQAPEFYPHPQHQWQHQTGQQVFSQARQPQPHVLQQQYSNIQQGPAQMVQLQTSSPHAHSTPQVTVVYPPYGPHQSACGNAEARSGGIVVPPSYSTISSSHRKHQQLHSLGNGSFVPQPSKVSPCGLASYTVQGNAQTYSPAYXGPSSNPATIVXVLNQQAHCSAPMVLHHLGPSQSVQNHPIGIADKVARMGYPKDQVVDGLALRMVDAGQPAECNTLPDRLSSVTHAVAPQAWSG

SEQ ID NO: 252484 - protein, 68 aa, Zea mays
  Clone ID: MRT4577_16184C.1.pep
GEFKAEGNSKFTYTVLEDGCTKHTGEWSKTVFEYQTRKAMRLPIIDIAPYDIGGPDQEFGVDIGPVGF

SEQ ID NO: 252485 - protein, 91 aa, Zea mays
  unsure (1)..(91): unsure at all Xaa locations
  Clone ID: MRT4577_161850C.1.pep
SFLSLTASISGAEESLSGEGTIPVHNCQVTAFATPIDNSPIIVSSSRDMFLLVWDLTNPFHSTSVSYATSXYLIPFRRLTVHSLLIQYFFL

SEQ ID NO: 252486 - protein, 100 aa, Zea mays
  unsure (1)..(100): unsure at all Xaa locations
  Clone ID: MRT4577_161851C.1.pep
STTGGFDAGVSHDGQTREHTLLAFTLGVNQMICCCIMMDATTPKYSKARHDEIDKEVSSXLKKAGYHPDKIVSGPMAGFEGHNMIEKSTHLDWDKCPNLF

SEQ ID NO: 252487 - protein, 248 aa, Zea mays
  Clone ID: MRT4577_161852C.1.pep
QPQHQWQHQTGQQVFSQARQPQPHVLQQQYSNIQQGPSQMVQLQTSSPHAHSTPQVTVVYPPYGPHQSACGNAEARTGGIVLPPSYSTISSSQRKHHEAAPIYVQSNTVSVPLTEQHQQLHSLGNGSFVPQPSKVSPCGVASYTVQGNAQAYSPAYGSPSSNPATIVAVLNQQAHCSSPMVLHHLGPQSVLNHPIGIAEKVARMGYSKDQVEGLALRMVAAGQPADHNPLHDRLSSVSHGVAPHAWSG

SEQ ID NO: 252488 - protein, 479 aa, Zea mays
  unsure (1)..(479): unsure at all Xaa locations
  Clone ID: MRT4577_161853C.1.pep
RSRRPPPTRSMASPARPVAASVSGAFGLSPDPKRCSFDQALRHKDFQENRLLMSFVNFHEQEKISKEIVTHAIESCMKKQADNLLNSLDVISGRLSQLELYCYRLERSIGELRSDVMDYHNEANLNFRCVEKQVKEVQKSVQAVQEKQELAETQKEMTKLQIVHEDSAQKSEGTAPSVFMNRENEVALVPLHQVNAVQSPPVQFQSCSGLILQQLMPVQDQQRSNQTAVYCMRGQSHLEHRQAQMFQAAGQSLQTHTRKTQPPTVVEVSQVTRQAPEFYPQPQHQWQHQTGQQLFSQARQPQPHVLQQQYSNMPLRASALPQCRSHGAPCGPRXPNSTTTGASSQRKHQQLHSLGNGSFVPQPSKVSPCGLASYTVQGNAQTYSPAYGSPSSNPATIVAVLNQQAHGSSPMVLHHLGPQSVLNHPIDIAEKVTRMGYSKDQVEGLALRMVAAGQPADHNPLHDRLSSVSHGVAPHAWSG

SEQ ID NO: 252489 - protein, 82 aa, Zea mays
  Clone ID: MRT4577_161854C.1.pep
LCRNVYVCVYTAPVLIYLLKGQYYTLKVTGFYCIFKKKISKRKKKKNRAKRDLFWLSLIMLTCYLYSSALRMAKQGGKVIFS

SEQ ID NO: 252490 - protein, 98 aa, Zea mays
  Clone ID: MRT4577_161855C.1.pep
MPFDLSMYLLKVFCVFQVNGVGKTAVTVEYPERPGQPLCEYYAKNGTCKFGSNCKFDHPREGGFVPVTLNSGGFPLRLGEKECSYYMKTGHCKFGATC

SEQ ID NO: 252491 - protein, 78 aa, Zea mays
  unsure (1)..(78): unsure at all Xaa locations
  Clone ID: MRT4577_161856C.1.pep
CRTATVRLCCLRYIPSRIHALAFGHGEQALLGSSGQAAALTYVRYSMRRTCLEKKILPTDRYSSDDRRRRXHTCSFYM

SEQ ID NO: 252492 - protein, 63 aa, Zea mays
  unsure (1)..(63): unsure at all Xaa locations
  Clone ID: MRT4577_161857C.1.pep
AVSSWPFLAVASRIRRTFRFLLKGLDASYNXSWGEEAYLSTCLASIFSRGLXATQDSCELILV

SEQ ID NO: 252493 - protein, 141 aa, Zea mays
  unsure (1)..(141): unsure at all Xaa locations
  Clone ID: MRT4577_161858C.1.pep
GGAGPPPSRGRPGVAPRGPRSPPRRPPGRLRGGPVGPXPEPKGPTRPAGRPPXPGPCQAGRRTIAYLPLPXPAWGGPAPPGPGGGGGPRPGPPPQNNCFDELRGARKGTWCGSSSDRRQSYLFYYLFLLSLLPLFIFSFFL

SEQ ID NO: 252494 - protein, 50 aa, Zea mays
  Clone ID: MRT4577_161859C.1.pep
LRCSSIFLRISCINSGREGGDAEQEAEEEGGSPSLVANAGRHSCGSDRIA

SEQ ID NO: 252495 - protein, 81 aa, Zea mays
  unsure (1)..(81): unsure at all Xaa locations
  Clone ID: MRT4577_16185C.1.pep
MGDRAEMSRQAYDCYHLFCKIYXHHLSASCIFVHDSYGCSHISALHXLKTMDMVNITNVLDEPXHLTPTGLLIGPTKYMVI

SEQ ID NO: 252496 - protein, 98 aa, Zea mays
  Clone ID: MRT4577_161860C.1.pep
MWRLEGAQKAGTLTCFTTRSVGWFKVALFADLLYDEDAWTDWCPAQDATSDRVIAVIHDAENLGEVRNDDSRTLQFNYGSFKHKALDKSLTKKGFLKH

SEQ ID NO: 252497 - protein, 368 aa, Zea mays
  unsure (1)..(368): unsure at all Xaa locations
  Clone ID: MRT4577_161861C.1.pep
MVTNQDAEAAAPGAGATVDPMRLASRWRSRPEWNCASAELEAEPSELNTINSSGLFSVVSTDKLSVKYLGSHHHGHDVGVVQADRPAPTRRAVYYFEMGVRNAGYKGQTSIGFTSESFKMRRQPGXYILEDKMRQQSVSDKLNLEPDISHWIVRSYLLHYGYQDTLNAFDTANATDRPTSRQNGHAEPHEMYGLSHRKLLRQLIMSGDIDSTFKRLREWYPQVIKDEQSVICFLLRSQRFIEYIRAEQLEVAVKYGRANLASFFTHKAFEGLLKDSVALLAYEKPTESCLGYLMDSSQREFVADAVNAAVLSTNPTVKDPESCLYSCLERLLKQLTVCSFERRAFNNYQGDAFLLHKEVQNYERSRRS

SEQ ID NO: 252498 - protein, 283 aa, Zea mays
  Clone ID: MRT4577_161862C.1.pep
MRLASRWRSRPEWNCAVPELEAEPSELNTVNSSGLFSVVSTDKLSVKYLGSHHHGHDVGVVQADRPAPTRRAVYYFEMGVRNAGYKGQTSIGFTSESFKMRRQPGWETNSCGYHGDDGHLYRGQGKGESFGPKFTSGDIIGAGINYLSQEFFFTKNGTLVGAIPKEIKGPLYPTIAVHSYGEELTVNFGKEPFCFDVEGYILEDKMRQQSVSDKLNLEPDISHWIVRSYLLHYGYQDTLNAFDMANATDRPTSRQNGNAEPPEMYGLSHRKLLRQVSLETQFN

SEQ ID NO: 252499 - protein, 111 aa, Zea mays
  Clone ID: MRT4577_161863C.1.pep
TDIQETKRNIGIRLELPLSILIVGVGNADFKQMEILDADNGKRLESSTGRIATRDIVQFVPMREVQGGEISVVQSLLEELPGQFLQYMRTRGIKPQRAPGLASAPVYPPQQ

SEQ ID NO: 252500 - protein, 127 aa, Zea mays
  Clone ID: MRT4577_161864C.1.pep
VCYKNESNQVTILRYATDLQSFGFFQRRSVEEFMKFTSKMVIERSELASRCSVKEQEYLCHVYNRSDRLCSVLISDHEYPHRVAHTLISRILDEFVSTVPSAKWKTTEENSVAFPQLNVYLGKYQNP

SEQ ID NO: 252501 - protein, 96 aa, Zea mays
  Clone ID: MRT4577_161865C.1.pep
FIYKKKKKKKKKKKKKKKKKKKKKKKKKKLKKKKKKKKKKSPLGCSPCLGAISTPLAAVPGGSGLGPKLGVFLALVVSWGNLFSVPLSPPLPARTL

SEQ ID NO: 252502 - protein, 131 aa, Zea mays
  unsure (1)..(131): unsure at all Xaa locations
  Clone ID: MRT4577_161866C.1.pep
MEPLVFVLLLVAMPLRGSDGAWCVCRPDVSDAALQKTLDYACGHGADCAAVLPTGPCYSPTTVRAHCSYAANSYFQQNSQANGGATCDFGGTANLTDTDPSSGTCKYPATXRSRDKRQRHRHGHGAARLGE

SEQ ID NO: 252503 - protein, 127 aa, Zea mays
  Clone ID: MRT4577_161867C.1.pep
LHFNFAMKRPGSPVEEMSPSKLAKVEHEYLFYAVCNKKHRFFVPHQQCTFGGLVISKVMIDSGCNTLLLPLEREGMVPDLKLLFPFETHSWKLRSSNGVGGTSAVLHIESVQHIEVALRPGGRSIKV

SEQ ID NO: 252504 - protein, 59 aa, Zea mays
  Clone ID: MRT4577_161868C.1.pep
AHEWAIAASDHLGWRKKGGHSNDISLSEDGVAADQRIGRVDHSQSSLINRPISGDMDSP

SEQ ID NO: 252505 - protein, 51 aa, Zea mays
  Clone ID: MRT4577_161869C.1.pep
ICHGIIMLHSWLIFLSAYAHAYVVILLINNNNNRTHKLQRIKQASVERTRG

SEQ ID NO: 252506 - protein, 151 aa, Zea mays
  Clone ID: MRT4577_16186C.1.pep
PPASPLRHPHGCRCPPCILLPRACFGCAASLRKHSFFRCFVPQVEEGSGMATPLMLLKTKLQEVKDCWSQYGTIHAKIFYKREISPLLPSSCRYVPNCAESTLCRRTNEYVVWEGILTLSWLGRCNPLGILLEDIGIMLREEDVAQQEPFL

SEQ ID NO: 252507 - protein, 94 aa, Zea mays
  Clone ID: MRT4577_161870C.1.pep
RTLIYTNIQREGPKNLRKGPPLLLSFKHTTTFLVKDTKQNSLNVPTHLFKLNVGNLLFSSLPFRLLQEGNRGNNTNVGSLAKLNRGICGSLRFV

SEQ ID NO: 252508 - protein, 87 aa, Zea mays
  unsure (1)..(87): unsure at all Xaa locations
  Clone ID: MRT4577_161871C.1.pep
LKLPSEILYHQECIPPTRTLAYGEYSAAVGQGGARLQPAGAHHARRRQRHRRERRHALLGDRQLKKRRXXXFGRFXEXGXGEGXGGG

SEQ ID NO: 252509 - protein, 160 aa, Zea mays
  Clone ID: MRT4577_161872C.1.pep
ASPPFSCLALFLPRALITEVAAMVKTTWETGEDTVVAGVGAEAAGSTSNLFAPHGPELPSSPCRRDRSGEQPWCLCACLDPCLDVSHLVDLGFFGDFVLGVGLRSCVPWWLTLEISFLCPTSSFPESPSRFPLDPAGAVPFPSSTQGHRHLLLVLLNRPV

SEQ ID NO: 252510 - protein, 147 aa, Zea mays
  unsure (1)..(147): unsure at all Xaa locations
  Clone ID: MRT4577_161873C.1.pep
GPEFRGGPQPSGPTKPEGGLRTGPELLLNPVLFCRTEAEKCLLETXINSIRLSLKVKQADEWETIFAKKFFRFWSMGAEAFQGLGRKPVQGYDISFLLPNYHGGAMLKPKLIDLIGQLMEVFAREISGLKLSVTTSGRLGATEFLKQ

SEQ ID NO: 252511 - protein, 102 aa, Zea mays
  unsure (1)..(102): unsure at all Xaa locations
  Clone ID: MRT4577_161874C.1.pep
SSDNGFFGYNQLRLSDELGGQAKPVPKRQGLLTGDTKPTKTLYNVNFNNIRTKVHILRTIFNXYDKITNICIKRNIQMVQYETLEEATVAAYNTNKIPIYSN

SEQ ID NO: 252512 - protein, 79 aa, Zea mays
  Clone ID: MRT4577_161875C.1.pep
GRGRPRRAPAAPPAGLRPTTPDPRRPEGEAAPPWEASGRAPTQSSRPAQQQGGPTPVRPRSGLAHNNQVDHAPPSEHRA

SEQ ID NO: 252513 - protein, 115 aa, Zea mays
  unsure (1)..(115): unsure at all Xaa locations
  Clone ID: MRT4577_161876C.1.pep
LLSCEMSNRTVYVSDQTTSGNDSXMYEGIDFYSDITRSRXEELNMDLVRKCMEPVEKCLRDAKMDKSSVHDVVLVGGSTKILMVQQLLQDLFNGTELSENINPDEAVGYGDAVQA

SEQ ID NO: 252514 - protein, 91 aa, Zea mays
  Clone ID: MRT4577_161877C.1.pep
QAPAEPAPSSSSFIVRSRRRHHFPPQMHARVADARCRLLAMETAAERCVFVRFRGSGARAHLMPLEHHRLSLRTEFLIQPLHGLPGAAAQP

SEQ ID NO: 252515 - protein, 361 aa, Zea mays
  Clone ID: MRT4577_161878C.1.pep
MKALILVGGFGTRLRPLTLSFPKPLVDFANKPMILHQIEALKEVGVTEVVLAINYRPEVMINFLKDFEDKLGITITCSQETEPLGTAGPLALARDKLADGSGQPFFVLNSDVISEYPFAELIKFHKCHGGEATIMVTKVDEPSKYGVVVMEEATGRVERFVEKPKIFVGNKINAGIYLLNPSVLDRIELRPTSIEKEVFPQIAADQQLYAMVLPGFWMDVGQPRDYITGLRLYLDSIRKKSAAKLATGAHVVGNVLVHESAKIGEGCLIGPDVAIGPGCVVEDGVRLSRCTVMRGVRIKKHACISNSIIGWHSTVGQWARIENMTILGEDVHVCDEVYSNGGVVLPHKEIKSSILKPEIVM

SEQ ID NO: 252516 - protein, 361 aa, Zea mays
  Clone ID: MRT4577_161879C.1.pep
MKALILVGGFGTRLRPLTLSFPKPLVDFANKPMILHQIEALKEVGVTEVVLAINYRPEVMINFLKDFEDKLGITITCSQETEPLGTAGPLALARDKLADGSGEPFFVLNSDVISEYPFAELIKFHKSHGGEATIMVTKVDEPSKYGVVVMEEATGRVERFVEKPKIFVGNKINAGIYLLNPSVLDRIELRPTSIEKEVFPQIAADQQLYAMVLPGFWMDVGQPRDYITGLRLYLDSLRKKSAARLAAGAHVVGNVLVHESAKIGEGCLIGPDVAIGPGCVVEDGVRLSRCTVMRGVRIKKHACISNSIIGWHSTVGQWARIENMTILGEDVHVCDEVYSNGGVVLPHKEIKSSILKPEIVM

SEQ ID NO: 252517 - protein, 92 aa, Zea mays
  Clone ID: MRT4577_16187C.1.pep
NQPSLNGLRNLNSAQQPETGRAIAHPHLFTGAWAPGVRFAPMPRASFFSLAQIHAGEGRTWCGLAQLGRSTLVNAGLGADSPSSGEVVGARG

SEQ ID NO: 252518 - protein, 130 aa, Zea mays
  unsure (1)..(130): unsure at all Xaa locations
  Clone ID: MRT4577_161880C.1.pep
MCLSSLDSTNSASLGCIGKTTVEHTRAGGLGTDARSKVRMSHGFADDFSKSLKRNPNGHSIGXVLGDDSEXLPVSGLLLRICLRRGXNTSATRDRHELNGELTLSNKWYGVVKTPSYFDAKVDELRPGTE

SEQ ID NO: 252519 - protein, 92 aa, Zea mays
  Clone ID: MRT4577_161881C.1.pep
RRGSATARAPWRLVYKAIGTRLSLVDISWKEWMLFVYRSSRPLPLIIRAENRLPPSVQDRLTGTLLAKRQNVPGLIRPCADSRLRHGLEHPG

SEQ ID NO: 252520 - protein, 75 aa, Zea mays
  Clone ID: MRT4577_161882C.1.pep
SLCSFFLLRRPRNVPLFEKTERHQKYILQHIACDSTEYAKQKVAPSTHSDIFEPNMRTIARKNWHLEHLARNTYS

SEQ ID NO: 252521 - protein, 34 aa, Zea mays
  Clone ID: MRT4577_161883C.1.pep
EVITQDSYIQNVSGRVDRARYTGSSTCRARQLSL

SEQ ID NO: 252522 - protein, 109 aa, Zea mays
  unsure (1)..(109): unsure at all Xaa locations
  Clone ID: MRT4577_161884C.1.pep
AFDPATETTHFPFHDRISITGPWIVNSRALHPHLELATQCSLEAHLSRVKASTVATVVSAVTTLVSDQMLPWANANINPVGQALIQYTXADMAXSILAHITILSMATQH

SEQ ID NO: 252523 - protein, 50 aa, Zea mays
  Clone ID: MRT4577_161885C.1.pep
CTTTIIPFFGDQFFWGSMVHARGLGAPPIPVEQLQLHSLIDAIKFMIDPK

SEQ ID NO: 252524 - protein, 73 aa, Zea mays
  unsure (1)..(73): unsure at all Xaa locations
  Clone ID: MRT4577_161886C.1.pep
MSSSAAMEAIDELVQLSESMWXAASLXADDDPSIENTSRRPSTFLKKNAAALDNIEAGKSVVLNNLMGNPMLC

SEQ ID NO: 252525 - protein, 98 aa, Zea mays
  Clone ID: MRT4577_161887C.1.pep
VRLRLYLRLCAQESAHSRTGCRVNWPPRCRGCGCAPCACARPEPLRPCRHRGRGSGPRAAGAAGRRGSTHNRWVRTHRAAEYVVAAAIRKRADVWADA

SEQ ID NO: 252526 - protein, 82 aa, Zea mays
  Clone ID: MRT4577_161888C.1.pep
IRTSSRTSSKSLYDKLHSPYINGLICKFKSEKPGQSMLLLYKVDKDMPCLHVPCCARGTTASSYTTVRSSSHSPTRKLRTRG

SEQ ID NO: 252527 - protein, 86 aa, Zea mays
  unsure (1)..(86): unsure at all Xaa locations
  Clone ID: MRT4577_161889C.1.pep
MRRSGRFLQEERVILLEVEDEVVIDFKPXSKCRVDLCLRSLHTSLPVVFKVQTSSPLKFLISTLCGVMSPLSLVSIHVVRGVPLHL

SEQ ID NO: 252528 - protein, 36 aa, Zea mays
  Clone ID: MRT4577_16188C.1.pep
ANDVVDVAVEPGVSARERAVQRGPRVHGEADVDECV

SEQ ID NO: 252529 - protein, 51 aa, Zea mays
  Clone ID: MRT4577_161890C.1.pep
NYPSSLGCSVTVKYRNLGYELLSLGLFHFLLSLCMYSWRSRGRWGFRSRRS

SEQ ID NO: 252530 - protein, 142 aa, Zea mays
  Clone ID: MRT4577_161891C.1.pep
FYTDFPPHEKEKVYKFATPSTMKPTKWSYPGGGLNQIPGECTISGDVRLTPFYSTSHVMEKLKEYVEDINERFETVLDTRGPVSKYILPDENLQGRLEITFDGDVMNGVACNLESRGYHALCKATTKKKRREYLQFTLLVAQ

SEQ ID NO: 252531 - protein, 133 aa, Zea mays
  unsure (1)..(133): unsure at all Xaa locations
  Clone ID: MRT4577_161892C.1.pep
VRVRDGWMDADASPRVKVRAATDATRQLSEFTTTLPYSSGPHRFQRLACLCHAIGKQNNIHTCKPHAACRQTVGGWVGGWSWTVVPFCSAAAGRDVPTATVARTGSGRCMQMLMQPMHSKLLLHAXSTLCCAL

SEQ ID NO: 252532 - protein, 50 aa, Zea mays
  unsure (1)..(50): unsure at all Xaa locations
  Clone ID: MRT4577_161893C.1.pep
CEKNVVESLSHDGCKMKVSFTVQPSVGLTLPFFSIQNDEKEMDYQSXTIV

SEQ ID NO: 252533 - protein, 447 aa, Zea mays
  Clone ID: MRT4577_161894C.1.pep
MASPASASLKEAVGSLDRDGFVGLLSNLIGETAHLQNDPPTYRPQEERVAQHVVDVLRPVSADTGGGPLLVRKISYAEGRSNVIVEYPGTVPGRVVSFVGMHMDVVPANGSEWDFDPFSLTFDSEDKDKLRGRGTTDCLGHVALVAQLMRRLGEVKPPLKHSVIAVFIANEENSSVTGIGVDGLVKDGLLDKLKTGPLFWIDTADKQPCIGTGGMIPWHLKATGKLFHSGLAHKAINAMEMNMEALKVIQKRFYTDFPPHEKEKVYKFATPSTMKPTKWSYPGGGLNQIPGECTISGDVRLTPFYSTSHVMEKLKEYVEDINERFETVLDTRGPVSKYILPDENLQGRLEITFDGDVMNGVACNLESRGYHALCKATKEIVGHVEPYSITGSLPLIRELQDEGFDVQTAGYGLLKTYHAKNEYCLFSDMAQGFQVFLSIISQLEEEV

SEQ ID NO: 252534 - protein, 123 aa, Zea mays
  Clone ID: MRT4577_161895C.1.pep
IICFTGKMRIRTNRSYFQVPEHRVVVDCLPKCHDQVDCLPECHDLGYHFRERRSQVAGATDVKPGIRIGMPLPAVRHGDGKTDFFVAHAQMDRVIWRTEVDSTGLGGRTRKFFWSPRPRDHLF

SEQ ID NO: 252535 - protein, 38 aa, Zea mays
  unsure (1)..(38): unsure at all Xaa locations
  Clone ID: MRT4577_161896C.1.pep
KESGTNGQNRRCREWEGSRHTSPGSKKSNAGATQXAXA

SEQ ID NO: 252536 - protein, 74 aa, Zea mays
  Clone ID: MRT4577_161897C.1.pep
AGNRGLFLLSLIRLGQTHTSLSVPSSITDFFNRIRNRPRRRRRLALYSPADVYLSDNKSTCTAAHKSNAGSLFL

SEQ ID NO: 252537 - protein, 160 aa, Zea mays
  unsure (1)..(160): unsure at all Xaa locations
  Clone ID: MRT4577_161898C.1.pep
MSRRRRGGSDSDGEDNSFLYRYPLPSXPPQQASQREAAASPGXGGSGGLAPSKSTVYVSNLDFSLTNSDIHLLFSRFGRVARVTVLKDRESRRSRGVAFVLFVLREDAAAAAAEMHGKVLNGRTLSASIADDNGRAAEFIRRRVYRDKSRCYECGEEGPL

SEQ ID NO: 252538 - protein, 89 aa, Zea mays
  Clone ID: MRT4577_161899C.1.pep
IGAKKSQKTLWGPKKPNQGPGGPNIPPRGKTIKEKGGGLSSKPGPPHLWNPQVGQQGPQSPPLKIPPFFPPTHPILNPTKSPLKTPRPA

SEQ ID NO: 252539 - protein, 98 aa, Zea mays
  unsure (1)..(98): unsure at all Xaa locations
  Clone ID: MRT4577_16189C.1.pep
LDASCWFRCSFWYECSWHGGTRTTGRFSSASGVPSALCFPVLFSVPLPPPALWSLFSNGGVTAPPPAQGCCRLAAPPAPAPGRPXVALARLAXGSCAA

SEQ ID NO: 252540 - protein, 65 aa, Zea mays
  Clone ID: MRT4577_1618C.1.pep
HKGVFVFRQKSILYQSAFNYIRMYQDSIEHNLLSFVVILYLNFVDLLWYYKVQILCFLVKLGCYS

SEQ ID NO: 252541 - protein, 232 aa, Zea mays
  Clone ID: MRT4577_161900C.1.pep
HVVINKSRFTQRNLLRIFPRSTRITSSNYNPLMGWRYGVQMVAANMQGHGRKLWLTQGMFRANGGCGYVKKPDALMRSKPLDFDPRAELPVKTRLRVTVYMGDGWRFDFRKTHFDRCSPPDFYARVGVAGVAADTRMEQTRVAMDSWVPAWDHEFGLFPLAVPELALLRVEVHESDNHQKDEFGGQTCLPVWELRPGIRSVRLSDHKGQPLPSVKLLMRFDFFPASDSNSTQ

SEQ ID NO: 252542 - protein, 68 aa, Zea mays
  unsure (1)..(68): unsure at all Xaa locations
  Clone ID: MRT4577_161901C.1.pep
ARHGSGDWSTVLPRQRDKRKGEETSPRIGVELIYESDVVPQWLVVSGAILLSYVFFAQKKKERAAAXK

SEQ ID NO: 252543 - protein, 93 aa, Zea mays
  Clone ID: MRT4577_161902C.1.pep
LGPNLPKKTGFKPWFLPPDFSGLQVQTFFFFSPLPRGVIAKFSPPLGPGGPRGTGHGEYAPPGKGTGLNLAPRRKVAYHLAGGLWALCPGPWV

SEQ ID NO: 252544 - protein, 108 aa, Zea mays
  Clone ID: MRT4577_161903C.1.pep
MAMQEPTSAPTHLHDATEASLALSALQLDFTGVSAIATLRVAVTGSTHNRRYLELRLTPGPPEWPGAGNLFQEAFSGEIFIHYIRELRKDDHPILTVLMVGSHALRSS

SEQ ID NO: 252545 - protein, 355 aa, Zea mays
  unsure (1)..(355): unsure at all Xaa locations
  Clone ID: MRT4577_161904C.1.pep
CCGEHGSPQESTNSYIKEMLQVSKFLRVINLQGIDIGESLPTAIGNVAHLQYLGVTACSRYMASMSLXKIEQVDEYLYGRITQVPVAPKKIGQLPSMKQRVASFXLPKQVGAXQYSTTCCYFDPDKDNGWDSSTFEKMAHLQSLHVWDSKYNGVNAEALSAVIDKANFLEHLDTLTLDVHDIPLSVFTSSSLRRLRTLILDGKLDMLVLQSXKGVKIXFPNISFLSLAKTEVSQNFINKLGKLPSLTTLILDIKSYKDDQDQLAFQAGGFTSLTKLILSDLEIVKLEIKKYALPELTDLEVELYYDDIEIEVYGEHEFVKKIEQVDEYLYGRITQVPVAPKKIGQLPSMKQRVAS

SEQ ID NO: 252546 - protein, 54 aa, Zea mays
  Clone ID: MRT4577_161905C.1.pep
NWGKSLERKKKRKTSAKTHMASPLGLGHTTFHGKELTTKPLTVLLQGQLITLSR

SEQ ID NO: 252547 - protein, 70 aa, Zea mays
  Clone ID: MRT4577_161906C.1.pep
GGGESFYTPLRCFPETPFFFGVPFQNFLSVPHIKNLVFFSFGGGDFFIPPQVGQMGGFLSAFVCTANTQE

SEQ ID NO: 252548 - protein, 84 aa, Zea mays
  Clone ID: MRT4577_161907C.1.pep
QDAPCSTSAPPPESTPSACKIPRSHLLKKTHPVDSHHTLPSLVKKLGFLHSGFCSLGCFPSEVFHESPGAAGPAAPSVAFRLWV

SEQ ID NO: 252549 - protein, 55 aa, Zea mays
  Clone ID: MRT4577_161908C.1.pep
QLTRLRAQAQRAQNTTQHLGYYRYGTGVAKLDGNFSKGRGVLSFSFLLGRAETKH

SEQ ID NO: 252550 - protein, 93 aa, Zea mays
  Clone ID: MRT4577_161909C.1.pep
IGQLEGRVDLESEDVELVAVNDPFITTDYMTYMFKYDTGHGHWKHNDITLNDSKTLLFGDKPVTDFGIMNPEEIPWGEAGADYVVEATSVFTD

SEQ ID NO: 252551 - protein, 162 aa, Zea mays
  unsure (1)..(162): unsure at all Xaa locations
  Clone ID: MRT4577_16190C.1.pep
SSLASPPRPTHGLRRQHCRRRRGPAAPPLILFQPYLQALPSPPPPSHPLLGHLVPAGHAARRGLPNTVHRRAQLLLGYDHAHKMVPVLLHVDRLVCEALLMGKHDDEVFDDAAILPAXPHERAVDRFWGKFVETKFCQPFWLANWAEGEAPKGAQKEAKENL

SEQ ID NO: 252552 - protein, 108 aa, Zea mays
  Clone ID: MRT4577_161910C.1.pep
VFFFFFFFFFFFCLFFFFFNQDPFFTKNPAHRLVLFGHYWGPGKKKYPRRAQIFRNPCPTRGNATRAPFKNFSEGKTNLQLRPPNADFYSFFPPAPNFGPTLFGNPWK

SEQ ID NO: 252553 - protein, 310 aa, Zea mays
  unsure (1)..(310): unsure at all Xaa locations
  Clone ID: MRT4577_161911C.1.pep
KVGDTAQVSPFPHSYSASAPSEQNGDQSNSSRYCLVASKQMDPRAVXFGTFLTVWVRNEIRDDVRNLKVSCVGRGLMGYLGNKGSISVSMCLHQTSFCFVCCHLTSGEKEGDELRRNSDVLEILRKTRFPRVRGAGDVRSPETILEHDRVIWLGDLNYRIALSYCSAKALVEMHSWKQLLEKDQLRMQQRYGRVFQGWKEGRIYFPPTYKYSFNSDRYAGEGRHPKEKRRTPAWCDRILWHGNGLSQLCYVRGESRFSDHRPVYGIFLAEVGVVRQRRRNNAGYFGSRVEVEELLPRSRSYRLRDEVLLS

SEQ ID NO: 252554 - protein, 143 aa, Zea mays
  Clone ID: MRT4577_161912C.1.pep
GKTNMDWGGSKRIKNQPKYLGLMFCPQRNQTILVEKKRLPTPPKKDHQGGRGGGPPKGPNPNKFFFLFPFFLLEATPGNSFLLLGGASQRVFSLYPQCHKGAGAGARKTQGGLKRDRATTCPHCLNRIFTVSGGSPGKSMDMG

SEQ ID NO: 252555 - protein, 145 aa, Zea mays
  unsure (1)..(145): unsure at all Xaa locations
  Clone ID: MRT4577_161913C.1.pep
PRLPRRRRLAGWGLDASGGAGLPTGSAAGTDYCQRPLRGLPRRPPRRPAPIAAGRLRFHERGPVLPPGGGPAPLRPPPPPRXLSRRAARRGRXARPXPPPPASSPSPGGWTSRATSYSPQPPPCSRSAPATPSLSCGSRGVRPRA

SEQ ID NO: 252556 - protein, 89 aa, Zea mays
  Clone ID: MRT4577_161914C.1.pep
AIMHEQSNQCYYWNTVTGETSWDIPNGLASGAATASVPSDVGYSIEAQAHVLPHSTLEAYPSDMSVGNGTSTFANFGMACGSAQVTQDA

SEQ ID NO: 252557 - protein, 271 aa, Zea mays
  unsure (1)..(271): unsure at all Xaa locations
  Clone ID: MRT4577_161915C.1.pep
MGCWRSSLRSGPHAAEKPPRHRHRPPPPPPPTNGPTSSLNAQQAAPPARASGEVPALAEFSLAELRAATAGFAPGNIVSESGEKAPNLVYRGQLRGPGGAPPRAVAVKKFAKLAWPDPKQFAEEAKGVGGLRHRSMANLIGYCCDGDDRLLVAEFMPNDTLAKHLFHWENQTIEWAMRLRVAYYISQALEYCSTKGWPLYHDLNAYRVLFDENGDPRLSCFGLMXNSRDGKSYSTNLAYTPPEYLRNGRVTXRSVIFSFGTGLLELLRGKA

SEQ ID NO: 252558 - protein, 40 aa, Zea mays
  Clone ID: MRT4577_161916C.1.pep
MPDMEHIFELQIPLAGPHSIIGRAVVVHADPDDLGKGGHE

SEQ ID NO: 252559 - protein, 53 aa, Zea mays
  Clone ID: MRT4577_161917C.1.pep
SCVEISALCQLEAVVMEPVVRTGSRVKVIRSFMPPTQILLPPACRLKRIRTSG

SEQ ID NO: 252560 - protein, 55 aa, Zea mays
  Clone ID: MRT4577_161918C.1.pep
TRVFSARERSGGRPALPGRDGLARDPGSGGTRIIPPCRRTYSMVYPCWSSSVWTT

SEQ ID NO: 252561 - protein, 286 aa, Zea mays
  unsure (1)..(286): unsure at all Xaa locations
  Clone ID: MRT4577_161919C.1.pep
MVDVAALTDDVLAEILLRVPSPRDLARASVSCSSFRRVISNPHFFRRFVALHAAPPLGVFXLPRLGRRGXGSQFQPALPSHPSAPLARALASSADFCFNFLPPPASDWLVRDSRDGRFLLDRVRDGSTAFTEVAICDPLFRRYRLLPPIPNDLAASVENPYFQRGGDGQLQSRSSEIFLVSRSNDSVSENDTTFTVIWMACCRGKLVAFFYSSESQQWCALSPPEHYALSTRRVMGVRLGQRNHAHGCFYWMLALTHRWLVLDTHKMDFLHRGHLTYPDRPCDDVQ

SEQ ID NO: 252562 - protein, 59 aa, Zea mays
  Clone ID: MRT4577_16191C.1.pep
VPPEAVASRQSCVPEVPLGHNPTLLTLLSASTLYFLILLYLFLLLLLLIPPLLLTTLIQ

SEQ ID NO: 252563 - protein, 451 aa, Zea mays
  unsure (1)..(451): unsure at all Xaa locations
  Clone ID: MRT4577_161920C.1.pep
MDIKDMKTRGKTLTERYEMGKLLGKGAFGKVHYARDLESNQGVAIKIMDKDRVLKAGLSEQVKREITTMRLVEHKNIVRLHEVMATRNKIYIIMEYAKGGELLDKVKRSGRLTEAXHTDTSNSSLXALDHCHSRGVYHRDLKPENLLLDENGDLKVSDFGLSAFSESRRTDGLLHTVCGTPVYIAPEVIKKTGYDGAKSDIWSCGVVLFVLAAGYLPFQGPNXMMEIYRKIHDRDFRCPXWFSHKLKRLLYKILNPNPSMRPSIQEIKESTWFRKGPREISAVNEKVLSENXPPXNAAPVLASRRKEIAHEDMKSLVATNLNAFEIIALSAGLDLSGLFIKECRKETRFTSDKPALAIIAKLEDVAKALNLRIRKKDNNTVSIQGRKEGGNGVLKFDTQIFEITPSCHLVQIKQTSGDLLEYEKLLEEGIRPGLKDVVSAWHGDDLQQKQK

SEQ ID NO: 252564 - protein, 179 aa, Zea mays
  unsure (1)..(179): unsure at all Xaa locations
  Clone ID: MRT4577_161921C.1.pep
CCIFLLQKHVSLLCCGGRLTNKAVITIAXNRPSFTCCRLCIIPPNTPXDILTPXPVYARFSAIVEXCTGLMQISVRGLLTDSVLKSIEAHADRIEMLSIVFVGNRXLGLHYILYGCKXFEELXIMDCPFHDKPLXLANAVNLETMPSLWMXTYSMTLGSCLXLALKMPHLSAGVMNDPR

SEQ ID NO: 252565 - protein, 228 aa, Zea mays
  unsure (1)..(228): unsure at all Xaa locations
  Clone ID: MRT4577_161922C.1.pep
MACLTDLVNLNLSDTTEKIIAEYIWIGGSGMDLRSKARTLPGPVTDPSKLPKWNYDGSSTGQAPGEDSEVILYPQAIFKDPFRRGNNILVMCDCYIPERITEIAGVVVTFDPKPIPGDWNGAGAHTNYSTESMRKEGGYEVIKAAIEKLKLRHKEHIAAYGEGNERRLTGRHETADINTFSWGVANRGASVRVGRETEQNGKGYFEDRRXASKWNPYVVTSMIAETTI

SEQ ID NO: 252566 - protein, 40 aa, Zea mays
  Clone ID: MRT4577_161923C.1.pep
PPPPPPPPPPPPPPPPPPPPPPPPPPPPKGLWENPFSLRV

SEQ ID NO: 252567 - protein, 365 aa, Zea mays
  unsure (1)..(365): unsure at all Xaa locations
  Clone ID: MRT4577_161924C.1.pep
MASLTDLVNLDLSDCTDRIIAEYIWVGGSGIDLRSKARXPQAIFKDPFRKGNNILVMCDCYTPQGEPIPSNKRYKAATVFSHPDVAAEVPWYGIEQEYTLLQKDVSWPLGWPVGGYPGPQARDRSFPSSTFIDCMRVICWRKRQGFAKLSTVRCIFYLIFLXGPYYCAAGADKAFGRDVVDAHYKACLYAGINISGINGEVMPGQWEFQVGPSVGISAGDEIWVARYILERITEMAGIVLSLDPKPIKGDWNGAGAHTNYSTKSMREAGGYEVIKEAIEKLGKRHREHIAAYGEGNERRLTGRHETADINTFKWGVANRGASIRVGRDTEKEGKGYFEDRRPASNMDPYVVTGMIADTTILWKGN

SEQ ID NO: 252568 - protein, 45 aa, Zea mays
  Clone ID: MRT4577_161925C.1.pep
SSLRIRVFPWCYLQPQVGPGPGARLFYDSSPCLCFHWACVKNQKV

SEQ ID NO: 252569 - protein, 105 aa, Zea mays
  Clone ID: MRT4577_161926C.1.pep
PAGSETLLQKDTIWPLGWPIGGFPGPQGPYYCGIGAEKSFGRDIVDAHYKACLYAGINISGASVRVGRETEQNGKGYFEDRRPASNMDPYVVTSMIAETTIVWKP

SEQ ID NO: 252570 - protein, 54 aa, Zea mays
  Clone ID: MRT4577_161927C.1.pep
NASFDIVCCEPIAHCYLLLERNLWLSSLHLLLKICKTVRVPLNLVTRAEFIKRN

SEQ ID NO: 252571 - protein, 68 aa, Zea mays
  Clone ID: MRT4577_161928C.1.pep
KKKGGPLPFKNNGRVVFTPGSREGWVFNGGPLTKRDIFPKSNVGPLVYLRKTTPCFLNFQFLGTNFAI

SEQ ID NO: 252572 - protein, 355 aa, Zea mays
  Clone ID: MRT4577_161929C.1.pep
CLTDLVNLNLSDNTEKIIAEYIWIGGSGMDLRSKARTLSGPVTDPSKLPKWNYDGSSTGQAPGEDSEVILYPQAIFKDPFRKGNNILVMCDCYTPQGEPIPSNKRYKAATVFSHPDVAAEVPWYGIEQEYTLLQKDVSWPLGWPVGGYPGPQGPYYCAAGADKAFGRDVVDAHYKACLYAGINISGINGEVMPGQWEFQVGPSVGISAGDEIWVARYILERITEMAGIVLSLDPKPIKGDWNGAGAHTNYSTKSMREAGGYEVIKEAIEKLGKRHREHIAAYDGGNERRLTGRHETADINTFKWGVANRGGSIRVGRDTEKEGKGYFEDRRPASNMDPYVVTGMIADTTILWKGN

SEQ ID NO: 252573 - protein, 111 aa, Zea mays
  Clone ID: MRT4577_16192C.1.pep
SNRGRGGSAENKFRMSLGLPVASTVNCADDIVAKNLYIISVKGIKGRLNRLAYACVGDMVIDTVKKGKPDLTKNVMPTVIIRQRKPLRHTDSVYMYFEDNAGAIVNPNGEM

SEQ ID NO: 252574 - protein, 389 aa, Zea mays
  unsure (1)..(389): unsure at all Xaa locations
  Clone ID: MRT4577_161930C.1.pep
MACLTDLVNLNLSDTTEKIIAEYIWIGGSGMDLRSKARTLPGPVTDPSKLPKWNYDGSSTGQAPGEDSEVILYPQAIFKDPFRRGNNILVMCDCYTPAGEPIPTNKRYSAAKIFSSPEVAAEEPWYGIEQEYTLLQKDTNWPLGWPIGGFPGPQGPYYCGIGAEKSFGRDIVDAHYKACLYAGINISGINGEVMPGQWEFQVGPSVGISSGDQVWVARYILERITEIAGVXVTFDPKPIPGDWXNGAGAHTNYSTESMRKEGGYEVIKAAIEKLKLRHKEHIAAYGEGNERRLTGRHETADINTFSWVRFSPVPNCATAVPWRIAETRVPANCCCLCRXGVANRGASVRVGRETEQNGKGYFEDRRPASNMDPYVVTSMIAETTIVWKP

SEQ ID NO: 252575 - protein, 385 aa, Zea mays
  unsure (1)..(385): unsure at all Xaa locations
  Clone ID: MRT4577_161931C.1.pep
MACLTDLVNLNLSDTTEKIIAEYIWIGGSGMDLRSKARTLPGPVTDPSKLPKWNYDGSSTGQAPGEDSEVILYXQAIFKDPFRRGNNILVMCDCYTPAGEPIPTNKRYSAAKIFSSLEVAAEEPWYGIEQEYTLLQKDTNWPLGWPIGGFPGPQGPYYCGIGAEKSFGRDIVDAHYKACLYAGINISGINGEVMPGQWEFQVGPFVGISSGDQVWVARYIPERITEIAGVVVTFDPKPIPGDWNGAGAHTNYSTESMRKEGGYEVIKAAIEKLKLRHKEHIAAYGEGNERRLTGRHETADINTFSWXASNCATAVPWRIGETRVPANCCCFVPLQGVANRGXSVRVGRETEQNGKGYFEDRRPASNMDPYVVTSMIAETTIVWKP

SEQ ID NO: 252576 - protein, 357 aa, Zea mays
  Clone ID: MRT4577_161932C.1.pep
MASLTDLVNLDLSDCTDRIIAEYIWVGGSGIDLRSKARTVKGPITDPSQLPKWNYDGSSTGQAPGEDSEVILYPQAIFKDPFRKGNNILVMCDCYTPQGEPIPSNKRYKAATVFSHPDVAAEVPWYGIEQEYTLLQKDVSWPLGWPVGGYPGPQGPYYCAAGADKAFGRDVVDAHYKACLYAGINISGINGEVMPGQWEFQVGPSVGISAGDEIWVARYILERITEMAGIVLSLDPKPIKGDWNGAGAHTNYSTKSMREAGGYEVIKEAIEKLGRRHREHIAAYGEGNERRLTGRHETADINTFKWGVANRGASIRVGRDTEKEGKGYFEDRRPASNMDPYVVTGMIADTTILWKGN

SEQ ID NO: 252577 - protein, 34 aa, Zea mays
  Clone ID: MRT4577_161933C.1.pep
AARLDHAQRQLVHVQVFFSAVMTWSRSRVISPAR

SEQ ID NO: 252578 - protein, 617 aa, Zea mays
  Clone ID: MRT4577_161934C.1.pep
MACLTDLVNLNLSDTTEKIIAEYIWIGGSGMDLRSKARTLSGPVTDPSKLPKWNYDGSSTGQAPGEDSEVILYPQAIFKDPFRRGNNILVMCDCYTPAGEPIPTNKRYNAAKIFSSPEVAAEEPWYGIEQEYTLLQKDTNWPLGWPIGGFPGPQGPYYCGIGAEKSFGRDIVDAHYKACLYAGINISGINGEVMPGQWEFQVGPSVGISSGDQVWVARYILERITEIAGVVVTFDPKPIPGDWNGAGAHTNYSTESMRKEGGYEVIKAAIEKLKLRHREHIAEYIWIGGSGMDLRSKARTLSGPVTDPSKLPKWNYDGSSTGQAPGEDSEVILYPQAIFKDPFRRGNNILVMCDCYTPAGEPIPTNKRYNAAKIFSSPEVAAEEPWYGIEQEYTLLQKDTNWPLGWPIGGFPGPQGPYYCGIGAEKSFGRDIVDAHYKACLYAGINISGINGEVMPGQWEFQVGPSVGISSGDQVWVARYILERITEIAGVVVTFDPKPIPGDWNGAGAHTNYSTESMRKEGGYEVIKAAIEKLKLRHREHIAAYGEGNERRLTGRHETADINTFSWGVANRGASVRVGRETEQNGKGYFEDRRPASNMDPYVVTSMIAETTIIWKP

SEQ ID NO: 252579 - protein, 107 aa, Zea mays
  unsure (1)..(107): unsure at all Xaa locations
  Clone ID: MRT4577_161935C.1.pep
HACRYSFGVILLELITGKASRAXPASDDGSVDIVKWVRRRANVADGASRILDPSIASAAAQKGMQATLELALRCTSVMPDQRPAMDEVARSLQALCFSVHPQAPLLT

SEQ ID NO: 252580 - protein, 229 aa, Zea mays
  unsure (1)..(229): unsure at all Xaa locations
  Clone ID: MRT4577_161936C.1.pep
MACLTDLVNLNLSDTTEKIIAEYIWIGGSGMDLRSKARXDNRFPALGGPPGILVVVTRRHLSLIPELIRXLLFGLYIHQSSAHHYHCNYFCFSVLLRSKIILIWLVLVQTLPGPVTDPSKLPKWNYDGSSTGQAPGEDSEVILYPQAIFKDPFRRGNNILVMCDCYTPAGEPIPTNKRYSAAKIFSSLEVAAEEPWYGIEQEYTLLQKDTNWPLGWPIGGFPXPXGPYY

SEQ ID NO: 252581 - protein, 54 aa, Zea mays
  Clone ID: MRT4577_161937C.1.pep
MSSARDTSSRFPLHLLVWNNDYEQLEKELRDQNAEALDPRGRTLLHLAVSVGHV

SEQ ID NO: 252582 - protein, 56 aa, Zea mays
  Clone ID: MRT4577_161938C.1.pep
CPSFLLFPHPKTLRKSTFPLTVLYHLIEIYFLKEVLFQKEIGKGGKVVLKWRKERT

SEQ ID NO: 252583 - protein, 52 aa, Zea mays
  Clone ID: MRT4577_161939C.1.pep
FARKNALIAAFSYTIADSMASSPAIMNDRSARHAPRTHYTLIASCTNTIFGE

SEQ ID NO: 252584 - protein, 256 aa, Zea mays
  unsure (1)..(256): unsure at all Xaa locations
  Clone ID: MRT4577_16193C.1.pep
MTSSVAGTMDIEMPLGNNLWSENMGVDEDNEAITRANKEISAEPTPLDQDSESTEQAEDVVDLTELKEKVIGAVPFPPQRLDGWMQQWPTIYVVPGDLAAGKTDPYAPATVCFEPLFGPARRVTDGMAKLERYKLCCLRKLIVGRSPSPAGTGTRPAEPAVWKPEVHEPMLRSCVDAMTRLLPRIRASYSIASSMDTIAGDENTVREVKMLLYXNPEVAAVMGSTLAEKCCWTAASSSTCRWQAEQQGNATTTTTM

SEQ ID NO: 252585 - protein, 153 aa, Zea mays
  unsure (1)..(153): unsure at all Xaa locations
  Clone ID: MRT4577_161940C.1.pep
MANKGKATFDVNYNPEDGPEAYSNLAVYSRLSEYIAMSREVYVPDYDPRTMDIDGDVLMRVGGXQRHGWCEQGPXELKPSHTTSAGQLXHWIQQLQAQLEEERRKRQEMEARMMAERMTRLADQQRMAEMFQYMQSLATAQGFAPPPPLFPPA

SEQ ID NO: 252586 - protein, 120 aa, Zea mays
  Clone ID: MRT4577_161941C.1.pep
GAEPIPYSPVFFLLNSPVPTTRPDFFGAGHETRAHVGGPNRKGPPPPVSAREGPKKGGRSTHVRPFMHAHWTHPHLLKGGDGNPPGGDNPSPLGGVYLTPPRGGFKKKGKEPPVGLGGGA

SEQ ID NO: 252587 - protein, 86 aa, Zea mays
  Clone ID: MRT4577_161942C.1.pep
MAMRRNMETRTAVAANPKEMALALVTVATASAPLVAAAASSLATTSAAGSDAVPEPAIPIPAHGLVMLPATARGCWLPIREHLRSF

SEQ ID NO: 252588 - protein, 62 aa, Zea mays
  Clone ID: MRT4577_161943C.1.pep
FWKNVPQGAATTCYVGLNPQLKGMTGKYFADCNEEKTSAHAKSDALAKQLWEFSEELIRSAK

SEQ ID NO: 252589 - protein, 110 aa, Zea mays
  unsure (1)..(110): unsure at all Xaa locations
  Clone ID: MRT4577_161944C.1.pep
TAPKPGRPTRPVELKFVGLRVFNSYWVNEDRPYRSFKIILGDFANKAIKTDPGINWFCNLVHKNRRLRGLTXEGKKNRGLLGKGQTHNRTRPXGRATWKRNQTFSFRRYR

SEQ ID NO: 252590 - protein, 89 aa, Zea mays
  Clone ID: MRT4577_161945C.1.pep
PAGATIKAENKQKREAEVLAARKKCRLAMKREKKAERMAHAGPGRSISPYTNKEDKTSMASSGSVVLVLVGASAHRAGATAEASSNAPI

SEQ ID NO: 252591 - protein, 61 aa, Zea mays
  unsure (1)..(61): unsure at all Xaa locations
  Clone ID: MRT4577_161946C.1.pep
GEHQSKKLNYSYLANKYXYLVTGFYXYRWCDSFQFAXADNXETFREAINRHHHFIALQMLL

SEQ ID NO: 252592 - protein, 62 aa, Zea mays
  Clone ID: MRT4577_161947C.1.pep
RVSFDVRLAQPVRSIQQSIEYCSKHYRPQRIPCSASVCIDKASKLFHELMHSIHQDLPFKHQ

SEQ ID NO: 252593 - protein, 86 aa, Zea mays
  Clone ID: MRT4577_161948C.1.pep
KGAGAQIEYGWYRQGVSQPRVCTQAPMNCAKAPQKREQVCDCPGAEGMDSAEGAPPYICFSRCGNFFPLYLLYFPLHVLWFFIFSY

SEQ ID NO: 252594 - protein, 57 aa, Zea mays
  Clone ID: MRT4577_161949C.1.pep
STKQGPKPKRGLINDGQIAKDLFFSCLDNTDQNLMFGVGQKKHLGGGVPRMPLFWGG

SEQ ID NO: 252595 - protein, 33 aa, Zea mays
  Clone ID: MRT4577_16194C.1.pep
SYIPTADTIHVLNQIVKNGLNLVLLVIPPRAQI

SEQ ID NO: 252596 - protein, 51 aa, Zea mays
  unsure (1)..(51): unsure at all Xaa locations
  Clone ID: MRT4577_161950C.1.pep
VRVGAYLITPSEATEQRLNNKXFQEIRAPCSSWAFCERNKCVHYSTMLTCS

SEQ ID NO: 252597 - protein, 70 aa, Zea mays
  Clone ID: MRT4577_161951C.1.pep
THYNEWSFHTLSKTICCFMYYLFTLTLFFFTLKNKLHLPTFFVYDSSSLSYFFSTKKNSYTLYLLVTCKF

SEQ ID NO: 252598 - protein, 65 aa, Zea mays
  unsure (1)..(65): unsure at all Xaa locations
  Clone ID: MRT4577_161952C.1.pep
TPKGELGSSRPXGDQSIRLVYFSPVAFISKFTLTHHPNIAYSXEXHXIYVNTTSXXKXLSRXXPS

SEQ ID NO: 252599 - protein, 122 aa, Zea mays
  Clone ID: MRT4577_161953C.1.pep
MCRQMSDKGSRGRSDRVPRMVREDAIIHFTEPVTFGVFGCADRTVRAWSRTVLAFPSDDPQCLTSVYAVFLSEATWVSRTVHRKGPDSPRLGDFPKKLLLSEIIYGIPDSRFRILVDELMHL

SEQ ID NO: 252600 - protein, 79 aa, Zea mays
  Clone ID: MRT4577_161954C.1.pep
IKKPFFSPLFWGGGLPSEKGTLRFFKKKKKKKKKKKKKKKKKKKKKKKKKEKKKKKKKKNKKKKKKKKKKSLYLPGRPL

SEQ ID NO: 252601 - protein, 146 aa, Zea mays
  Clone ID: MRT4577_161955C.1.pep
EGPQHRLCHKEGHKAYQCKAKTGDKQKPSSKISNTYINKVDKKVATPYLIKKKKNKKVIAIMANKQANKGKGGQTHMGAKGNYFNHEKHQEGLDPEREVRSPMDFWEFGDLANLGCISRDASYWIKSIVKCVSVYFGPKFPHPCLK

SEQ ID NO: 252602 - protein, 124 aa, Zea mays
  unsure (1)..(124): unsure at all Xaa locations
  Clone ID: MRT4577_161956C.1.pep
MDVDSRMATESDSDSDARGGSGSGSETPTASPSPSASPSPSAPGTPTAAVASPAPVAGPRPAPGYXVVDAAMDKKEDGPGSRCGHTLTAVPAAGEEGSPGYVGPRLILXGGCTALEGNSXHPRR

SEQ ID NO: 252603 - protein, 75 aa, Zea mays
  Clone ID: MRT4577_161957C.1.pep
CSAPPDLDPNGGSVSCAGPSPSVSSASCRAPVPVRAVANPFQLCPWPRPLPLNQLSKGRVPRCLGSPTLMFPSLL

SEQ ID NO: 252604 - protein, 143 aa, Zea mays
  unsure (1)..(143): unsure at all Xaa locations
  Clone ID: MRT4577_161958C.1.pep
WADLCACRSVILCPSSSRAKPLKKPPDRPAVRVKNPKALDLSEEGRKSGLATSEGXHEKTKKPTLIVRSEGVITSHGGGXYSTLEEGLPPXFITTIDASMXVNPXEEAPGLATRAKEPRIESEVAESVNDIYHGPVGVATLND

SEQ ID NO: 252605 - protein, 72 aa, Zea mays
  Clone ID: MRT4577_16195C.1.pep
RRVYLYQLCRCAQSVFSVASLNSPVCSLCRLAGPTLFMRCMPLGCRVLSSLLVEPDMTQLGDCSCPFSCSSS

SEQ ID NO: 252606 - protein, 53 aa, Zea mays
  Clone ID: MRT4577_161961C.1.pep
QPMPHPFYNSPFFGFICKLGIGKLWSGADDITGRKCSHKEGFASGWFSLELYV

SEQ ID NO: 252607 - protein, 144 aa, Zea mays
  unsure (1)..(144): unsure at all Xaa locations
  Clone ID: MRT4577_161962C.1.pep
DDGDDHGFSGXPTNLDGDXEGEKDAQHKRKLTSKWKPTTKGTLKRTYRVRSTDEGRRILKEIASVLSQDDHFVDASSHKGCQIRRESAHGESVCCYNVRALFXDSLPTPHLLLEITPFPAGQLTDNDYRKAERLEMVLRLSTSI

SEQ ID NO: 252608 - protein, 162 aa, Zea mays
  Clone ID: MRT4577_161963C.1.pep
SRAVPCSAASLLAGRSSQPSSSWSPAFFYARPELLWCRIRLPGRLASCSPRPRPYSSSPSRAPLPWSRPSSSSPARRAVAPCSASFSTRLLPRRGVLCALPNPDAQSSSSAFLNELAPTTAALPAELPLLARALLPWPRVPGSALPSAAVAELVPGARVSCS

SEQ ID NO: 252609 - protein, 60 aa, Zea mays
  Clone ID: MRT4577_161964C.1.pep
QLVHACNFFNLYMLDGALGAVRMSSVRDNGAKSGLTYSNTDSHVFTSSLSSLVTSNITER

SEQ ID NO: 252610 - protein, 72 aa, Zea mays
  Clone ID: MRT4577_161965C.1.pep
ASEWLWQTLRWVLHGAHLLPAHIISVLVPLERSHYCVSYDLERMLEPQDAQESKRMDFHGAHSLCTSSLQEV

SEQ ID NO: 252611 - protein, 73 aa, Zea mays
  Clone ID: MRT4577_161966C.1.pep
DLYNIIFYFLIQFNQIKLLTNIVCSPLKTIKNWHQDPISNDKVILGSKKNAYHTSRRRGLGAFLAASVFAFSA

SEQ ID NO: 252612 - protein, 126 aa, Zea mays
  Clone ID: MRT4577_161967C.1.pep
MRRPHAAATALAALLLVLCLAAALTRHGSGICQQAGRTPTRKMLLAMTSFDDDDAAASPSPSGHHRHPHHHHQHHHHHHHHAGRRRWNRRQGTIPPPSDAGEAEAVDPRYGVQKRLVPSGPNPLHH

SEQ ID NO: 252613 - protein, 70 aa, Zea mays
  Clone ID: MRT4577_161968C.1.pep
RKHRQPLARHCKSGLSWASRCVSILLLAVCGVDVSHRRPTGLCIDVPWCTGRKKGLTQRSVFDAWSTGFR

SEQ ID NO: 252614 - protein, 67 aa, Zea mays
  unsure (1)..(67): unsure at all Xaa locations
  Clone ID: MRT4577_161969C.1.pep
MGKICCIGDGYAGGPTMDVIALKSPDIEVGAVDISERRIEGWNSDTLXPFYEPGHYFFVSPRQRTEP

SEQ ID NO: 252615 - protein, 131 aa, Zea mays
  unsure (1)..(131): unsure at all Xaa locations
  Clone ID: MRT4577_16196C.1.pep
EIHVEFKELALEFGLKPWGRVPALGWEPPFISGLADAGIESLPFVGAMAVSHFXGRQSFVPLGSVEELLAAFDSKRDELPPPVIVWEWGWTKSPETWNGRSAMLAVLAFLVLEVTPREGFLPPWGILPLFP

SEQ ID NO: 252616 - protein, 101 aa, Zea mays
  unsure (1)..(101): unsure at all Xaa locations
  Clone ID: MRT4577_161970C.1.pep
SYSYLMVLAACPARIYKGDGDGRGRRRSRSSRRVLRAVRFSLLILRHRRSCYXXLFYSPGGSLPPSLCISSDPVLFNFDKREGEKWKSTRSPLLTVRPPIM

SEQ ID NO: 252617 - protein, 205 aa, Zea mays
  unsure (1)..(205): unsure at all Xaa locations
  Clone ID: MRT4577_161971C.1.pep
LRHEGPPCSSRPQTGAGAGGWKRPKGHEKHPLVPRTGSRTRHLPPQRRPRGFAPAPAPAAGASPRRRGVQEREREREREKERTKLRERHRRAITGRMLAGLRQHGNFPLPARADMXNDVLAALARAAGWTVQPDGTTFRSSNQPLLPPPPQLHGAFQVASVETPALINTLSSYAIGTSLDSQVSALQTDDSLSPSSLDSGVADRT

SEQ ID NO: 252618 - protein, 73 aa, Zea mays
  Clone ID: MRT4577_161972C.1.pep
GGKFSRSPPRREKTGKPFAGGEGSMRRKRFCFRRETCSWDWSNSWVIFKTSEKKGQAVVYWGWKKKHLGGQKN

SEQ ID NO: 252619 - protein, 92 aa, Zea mays
  Clone ID: MRT4577_161973C.1.pep
RYLANHTNVVSTQEHSRIGNVVLVGSPWLGGVHYFKAFVYAILLRHSPSVRASECASGCQRHYARSTAYKAGRRCEIDYRTCDLKNDLNDHH

SEQ ID NO: 252620 - protein, 87 aa, Zea mays
  Clone ID: MRT4577_161974C.1.pep
TKQKMGYYYPTKNITNGGKKNVLQDPERSKKNLKGYSKINLAKRTAHEALTPCFTPRVLWVVTTAKGGILEKSITLGRPAQTMHLKG

SEQ ID NO: 252621 - protein, 38 aa, Zea mays
  Clone ID: MRT4577_161975C.1.pep
IVGYVETPRGLRTFKTVFAEHISDECKMRFYKNWHKSK

SEQ ID NO: 252622 - protein, 32 aa, Zea mays
  Clone ID: MRT4577_161976C.1.pep
HVKGVYMPGEKIISVFCTLGLKTLKSYNKRNV

SEQ ID NO: 252623 - protein, 120 aa, Zea mays
  Clone ID: MRT4577_161977C.1.pep
TDVRGIKSFIGMAGYYRRFIEGFSKIEKPMTALLGNKVEFKWTQKCQEAFEAMKEKLTTAPVLVLPDVHKPFSVYCDACYTGLECVLMQEVKAKCVLGPFLSILVIECQLKCLNVNLCHG

SEQ ID NO: 252624 - protein, 87 aa, Zea mays
  unsure (1)..(87): unsure at all Xaa locations
  Clone ID: MRT4577_161978C.1.pep
FTLLHPIVSRIQKRGQGAGAGGDEGRTAEGAGPRVXAGDGKVKTFPVIAVPKEKLVDTNGASDAFVGGFLSQLGLCKGNEDCVRAGC

SEQ ID NO: 252625 - protein, 239 aa, Zea mays
  unsure (1)..(239): unsure at all Xaa locations
  Clone ID: MRT4577_161979C.1.pep
MNRVLTADDGKRWNWGASALLTAFVMTVPTLVVILLGGSTAGAPVVWVRTAMAGFRQGPDDFSLPYTSTRTAHDRLHGGLLAAGFDQEACHSRYQSAMYRRNPGRRPSEHLVSKLRRHEAVQRRCGPGTAAYSSALEQLKSGKNAGASPADPECRYLVSSSYRGLGNRILAAASAFLYALLTDRVLLXLSNEMGELFCEPFPDTTWLLPWXSFPLWNFSFDTQRYGRMRERRAQNKRRR

SEQ ID NO: 252626 - protein, 76 aa, Zea mays
  Clone ID: MRT4577_16197C.1.pep
LYIYFCYIYSQFYPSPYQLNARGLCHCSIPLCSYKSTHCVLHKPKMLQFKPTKKMRADLHIYLSQANMLSSSACHV

SEQ ID NO: 252627 - protein, 64 aa, Zea mays
  Clone ID: MRT4577_161980C.1.pep
KQTGPSKLNSSGTVLRATYATKYVSASKPYDRSFMFRCSLMSPAAGNDCTTHGCDRSLKATQNL

SEQ ID NO: 252628 - protein, 300 aa, Zea mays
  Clone ID: MRT4577_161981C.1.pep
MDTTLDAEIQECHQRSSLLSPKVPKIVQESPALCSSDASPGVRVETLESLIRAEACRRSSFRTLEEEHMLGPIGVKLKPANLLMQLITCGSISVKEHRGFGFIPTYRPRFTQVEFPSSVFSTPVALRHLDKIPCNTRTIGTRAPESERFSGSLVETKMQDESRRGISSLKRSSSYDEDRVYRAAHSKSDTENSCESGSFRCLPQTIRIISCKQSRNGTILSPFSDVRNSSSQQEYSTRSSPLGSSKSASNRMTDPSLGKVDSFHKEKDMIKIEERLPSGARVIIQSAPLCEDSDGSNESL

SEQ ID NO: 252629 - protein, 105 aa, Zea mays
  Clone ID: MRT4577_161982C.1.pep
LWRLFWALFKSWITTLKDAKEQVKLLVTHLMGHRISLGITVLITELLIKRSIIDPQDDTYEDEYMKENIDENIDEDADKPDDNHESDYGSAKEKAWKEKSSVRRI

SEQ ID NO: 252630 - protein, 58 aa, Zea mays
  Clone ID: MRT4577_161983C.1.pep
LFAISLNDVTCMSLAKNSNQHEVCQTLLLFNMNSQIVPDIVCSVQLEAFKKQLMKSLS

SEQ ID NO: 252631 - protein, 75 aa, Zea mays
  Clone ID: MRT4577_161984C.1.pep
PGPRHTLLVFSSPSVCTTRIQYELLIDVCLRHLSSTVPSVLFTVHTVCSSHVFSSISTCSVWACNGNASTQGVHP

SEQ ID NO: 252632 - protein, 116 aa, Zea mays
  Clone ID: MRT4577_161985C.1.pep
LEGLGFFYPKNPNPRGKKGAPLPTVNHDMRRTQKWGGGGLNIFLSSHRAQITPSGGGDPPPPPGSDIKGAHPRRRGKDVPKKGPTALGKGRGAEAIPLGRPINFGEAPPPRPGPKK

SEQ ID NO: 252633 - protein, 96 aa, Zea mays
  unsure (1)..(96): unsure at all Xaa locations
  Clone ID: MRT4577_161986C.1.pep
ASTGSRTARWSLAPLLRHPARAASVDLLLRRRRRCLHTRCQAISSDESSERGSQYAVIKTTLPIKAGVRAVWNGMSAGRDGTGLARRRLGEQSDXT

SEQ ID NO: 252634 - protein, 75 aa, Zea mays
  Clone ID: MRT4577_161987C.1.pep
TNLCAIAAKRVTIMPKDIQLDPASAGRGPKRHIFCHQCPIRRCRDMLGSVVWVTVESSSNELCYQFSKKKKKKKK

SEQ ID NO: 252635 - protein, 52 aa, Zea mays
  Clone ID: MRT4577_161988C.1.pep
ARGARPELVMKMTLFCEGLLLGWPSCLKVLKRSTLSIEQASGSQTHLCPSQR

SEQ ID NO: 252636 - protein, 63 aa, Zea mays
  Clone ID: MRT4577_161989C.1.pep
LMLVSSLIGHPGLCTLCSRAVSFGELWPDTNFSQVACCVHFLAQLGFELGSPSTGRPCGGVPP

SEQ ID NO: 252637 - protein, 156 aa, Zea mays
  Clone ID: MRT4577_16198C.1.pep
LLKGGRKPAAFLQLHPFVPFVLSTMELRIISAMCCARLELLFAPSSPKMPTAHDESCCKDDYHHPICLSRRLRAHRPLSRPQTTAGATDYGLGRRIARACLRTANTSDHSLTVSLCLPRRPMKDEPSHSMIDVPVATDYHSLQPPLILSRNYFHGT

SEQ ID NO: 252638 - protein, 72 aa, Zea mays
  Clone ID: MRT4577_161990C.1.pep
AYYLIGIEFRDVKRSMNCTVNIYPKKMVSEQPCGRIGSLEIYMYHKLIVLDQSTENRDPSPLLPPKKKKKKK

SEQ ID NO: 252639 - protein, 469 aa, Zea mays
  unsure (1)..(469): unsure at all Xaa locations
  Clone ID: MRT4577_161991C.1.pep
RPRPRGTHSGPYLSXIHLSVVRGMRVAVCGVIGSGKSSLLSSILGEIPKLCGHVRISGTAAYVPQAAWIQSGNIEENILFGSQMDRQRYKRVIAACCLKKDLELLQYGDQTVIGDRGINLSGGQKQRVQLARALYQDADIYLLDDPFSAVDAHTGSELFKEYILTALATKTVIYVTHQVEFLPAADLILVLKDGHITQAGKYDDLLQAGTDFNALVSAHKEAIETMDIFEDSDSDTVSSIPNKRLTPSISNIDNLKNKMCENGQPSNTRGIKEKKKKEERKKKRTVQEEERERGKVSSKVYLSYMGEAYKGTLIPLIILAQTMFQVLQIASNWWMAWANPQTEGDAPKTDSVVLLVVYMSLAFGSSLFVFMRSLLVATFGLAAAQKLFIKMLRCVFRAPMSFFDTTPSGRILNRVSVDQSVVDLDIAFRLGGFASTTIQLLGIVAVMSKVTWXQVLILIVPMAGACMWM

SEQ ID NO: 252640 - protein, 158 aa, Zea mays
  Clone ID: MRT4577_161992C.1.pep
MHIEIVQAVEFLGRLLNQKVEQESINTFKEKLVELLKHRFQDHWDPQQPYKGNGYRAISNFNGQLDPILTLASIEVSIQPSSIHTHLPREFVLWIDPFSVSYRVGDHGNIMTLFEDRSHGRISFETPSPVLFQPRISTPIRISPPNSPSDKDQSRTNK

SEQ ID NO: 252641 - protein, 42 aa, Zea mays
  Clone ID: MRT4577_161993C.1.pep
CVVIQLFVALIFQSMYNKIRRGVPLYKYEAVQLLFQFIKKKK

SEQ ID NO: 252642 - protein, 257 aa, Zea mays
  Clone ID: MRT4577_161994C.1.pep
MSMATKQATLPRSGAFSKGYNFAYAWEKNAPVTEEQNAAISALSHAVAERPFPVNLEDGGTAVPEKESALEEAGAMDAVLVNTHQFYKWFAELESAMKSETEEKYRLYESTLEERVNTCDGILQQVDGTQNLFEELQSLHSSVAIKTQTLHDACDQLLVEKQRLIGFAEALRSRLNYFDELENASTSFYSQTMNIGNEQFLPLLKRLDDCILYVENNPLYAESAVYLVKFRQLQSRALGMIRSHVLSTLKAASSQVQ

SEQ ID NO: 252643 - protein, 101 aa, Zea mays
  Clone ID: MRT4577_161995C.1.pep
HTALGGVLLKHAQELSRCSSGRSSLANFLSASIAEYVPKISCKLSEDILRCVSAVYCKLASRPLSQEEEEARSETPPFTPSLSVSSASSSFSLKKQHPVRG

SEQ ID NO: 252644 - protein, 62 aa, Zea mays
  unsure (1)..(62): unsure at all Xaa locations
  Clone ID: MRT4577_161996C.1.pep
MRYRRYYPRLCALLPFLVSATNAFIIPQCSLAPSAIIPQFLPPVTSMGXEHPRVQAYRLQQA

SEQ ID NO: 252645 - protein, 66 aa, Zea mays
  Clone ID: MRT4577_161997C.1.pep
DHQSSHPLRSTASGEPATRLTSTQRREQEEQGEGSVRAARPIHGQLRRHAARGDVVGGLRRVGRAL

SEQ ID NO: 252646 - protein, 75 aa, Zea mays
  Clone ID: MRT4577_161998C.1.pep
HPQGYLKARDYKTKLAPTFQLLVPPSAGVILNGQLKFPRERLQPFKKKKTSFCFRLLLFFLKGAYGIRVHKSFGA

SEQ ID NO: 252647 - protein, 62 aa, Zea mays
  Clone ID: MRT4577_161999C.1.pep
SLLPVYVFTAPPWSEHSWHLAPFLPLLISDHYLSSTSLFHATSNLNSTSHLHIHALLLLQPV

SEQ ID NO: 252648 - protein, 65 aa, Zea mays
  Clone ID: MRT4577_16199C.1.pep
RALSMFTLSFRASTSSFVVRVVTLAPCFSSGSGSCRPRPRLILDRPLLCRPRHRRGHGPHRLSLE

SEQ ID NO: 252649 - protein, 59 aa, Zea mays
  Clone ID: MRT4577_1619C.1.pep
KVVTAYILGRTKYSTIPTSDQLRLSPTIFFISLLYRLEKIFYLYISFLNNLLYISSSIL

SEQ ID NO: 252650 - protein, 72 aa, Zea mays
  Clone ID: MRT4577_161C.1.pep
KISKPGIKKNPFLGKSPGAKKMERLKGVITGEEPVSLWGKNFQESFFMLDPFNLISKFYSTDLVQEIYPTPP

SEQ ID NO: 252651 - protein, 168 aa, Zea mays
  Clone ID: MRT4577_162000C.1.pep
MDGGGSGNASGGSGGASTCCYYALLGIRKNASATDIRAAYRRLAMKWHPDRWASDPGAAGEANQRFQRIQEAYSVLSDKGKKAMYDAGLFDPLDDDDQDFSDFMQEMLVMMDSVKNEKPDTLEDLQKMLEDIVKGDGGGGSGAGGRAPTDGARRTRVAPYPQPQRARR

SEQ ID NO: 252652 - protein, 135 aa, Zea mays
  Clone ID: MRT4577_162001C.1.pep
HESTRSVAIFGYRQYVERLGNIALLASSSPDSWDFLMTHETTTRSCLERVGKVGGPAADDVFDDSTVNDTTTSWPESKLIGPVWASDQHDGRIKSRGRPTRDFKEHDGQSASSQVRIRTTDVMTIANRKIDNRRN

SEQ ID NO: 252653 - protein, 93 aa, Zea mays
  unsure (1)..(93): unsure at all Xaa locations
  Clone ID: MRT4577_162002C.1.pep
IKFNGPGLYNTTDWNDNAVALLNLIALHPIFVSXGGVIEDRTDRIALHISSLNGMWNGTCTVALNSARVVCSLSATCPLDLPLPYGPFLLFPS

SEQ ID NO: 252654 - protein, 55 aa, Zea mays
  Clone ID: MRT4577_162003C.1.pep
TDPNFRPFGTGDFFPLFPMFFLKKKTDFYKIHAFQEALPIFFAKMLKLLKMKRHG

SEQ ID NO: 252655 - protein, 112 aa, Zea mays
  Clone ID: MRT4577_162004C.1.pep
RGYSIEGALFFFFLVKTKMCSLDDKLLKTQRYRLLVIVICRAMHIRGCATGHTDSLMSYITYAHKRGAYTTRYSICNGPPTISMRICRTTRTIPGCIIILVLTSYAAWRGRS

SEQ ID NO: 252656 - protein, 81 aa, Zea mays
  Clone ID: MRT4577_162005C.1.pep
MATIVNPSITLMSHFFDTTAASGVTPTDYFHRTYTTTYYICRLQKSDRLKLRSPRQTAPPYLMMSIVGNRVTYSAYADEEP

SEQ ID NO: 252657 - protein, 264 aa, Zea mays
  Clone ID: MRT4577_162006C.1.pep
GAVDAQPLPIFNPQSSSPSSSSSRDPSLLARDRLSLRPWSSPLLDALAFPPAPAFVAPPVPQPRRIVPLLLSVHGCARPPLQAAPWDLPRTSIPSTPVLSSSTSVCLVASLFSPSGRRSSAQAITAPSVQHVVVHCKLADSPFFTVIASSRCSSSLRPAALWWPPVPSSYSTGVRLGPPCRVAFCCGHLVVDARSPPLASSTVPGPYRCPLISLSIVLTPYFKKEVLFSPEDLHRKNEGWYINTWSTYGKYIQMNLGTSFTDRF

SEQ ID NO: 252658 - protein, 432 aa, Zea mays
  unsure (1)..(432): unsure at all Xaa locations
  Clone ID: MRT4577_162007C.1.pep
HQSTVPGPYRCPRVRKKKDDELMKRIKQDPYTEYAVIECYDTLLDILYSIIVVQSDKKVVDRIRESIKDSIHRKSLVKEFRLDELPQLSAKFDKLLNLLKEYDENDPVNRNTHIANLLQDIMEIITQDIMKNGKGILKDEGQKQQLFAKLNLDSLKHVAWREKCIRLQLLLTTKESAIYVPTNLEARRRITFFANSLFMRMPRAPPVRSMMSFSVLTPYFKEEVLFSPEDLHRKNEDGISILFYLRKIYPDEFRNFLQRIDFEVKDEEELKDKMDEICNWASYRGQTLTRTVRGMMYYRKALEIQCLQDMTDPAKVDRDRSIGSYQELQYDIEMAQAIADIKFTYVVSCQVYGMQKTSKDLNEKGXQNILSLMIMNPSLRVAFINEVEAPTRNGATEKTXYSVLVKGGGKYDEEIYSIKLPGNPTDIVEGKP

SEQ ID NO: 252659 - protein, 96 aa, Zea mays
  unsure (1)..(96): unsure at all Xaa locations
  Clone ID: MRT4577_162008C.1.pep
ANARASITTLEAAPXNSPNSSALFHTVAHASSPVLLTTPSDLLRSHTSSTLAPTRGFSIVHHTDFDVLHLPSYIVASRSLTRAMSKSVDVTERSST

SEQ ID NO: 252660 - protein, 91 aa, Zea mays
  Clone ID: MRT4577_162009C.1.pep
GPGVLAEIWVWAQSSHIAADRSGWSFGYTWPGLAFHVDAGLEYMSRFVPCGISGKWVRSLRREVGDGTVLPADGVIHDQLVGCLATNNGFY

SEQ ID NO: 252661 - protein, 39 aa, Zea mays
  Clone ID: MRT4577_16200C.1.pep
SKVGGIIYFEKLFQVQWHLIYYLYVRFYFDFDDVYLRRR

SEQ ID NO: 252662 - protein, 58 aa, Zea mays
  Clone ID: MRT4577_162010C.1.pep
AKPIDSNGKLREVGYINLSKMLSRQYLARLSAQRLKPKQANPTYQELRPHPWWNLVTT

SEQ ID NO: 252663 - protein, 66 aa, Zea mays
  Clone ID: MRT4577_162011C.1.pep
CYARAPSAVQGPVSNGYTMATHISCLLKVVGVLGVSQTGPLQRQCSQTAMASLARRSLWSTIATAG

SEQ ID NO: 252664 - protein, 97 aa, Zea mays
  Clone ID: MRT4577_162012C.1.pep
VASAMMLTRLSCWRRRVSIFTQAASGMLQHPVGGQNHSCTLISADSVPKSGAGLGESPSGGQLPDHRFCALWLLPALTEHVCSRAVTEEVLFSPNRC

SEQ ID NO: 252665 - protein, 75 aa, Zea mays
  Clone ID: MRT4577_162013C.1.pep
SNSAPHPQARAPGRRWGLRPQAAWIIRQSLLSVHEWIATMLNWFNIRRVCYSVWNKCAFEPSTIPDPPPCMGCRY

SEQ ID NO: 252666 - protein, 223 aa, Zea mays
  unsure (1)..(223): unsure at all Xaa locations
  Clone ID: MRT4577_162014C.1.pep
MASPTQRHYFTCTWWQEYXPNKTLVIKDVHVAPPHADKVRDXIVFPVLCXTDHYSWHWKDPDAIFPCILGHEAALIVERRSSQRVSDSAXDDCVLPCYQTQLNXCKFCTAADNXLCGEARIGTRVIVMMNDMYVKCSVNGXPFXHFMVTSTFSHYSAXRDVSVAKINPQAPLYKLCLLGCAVPTELGAXRNTAKDESASAVAAFDLATAGLADAEGAKAAGAS

SEQ ID NO: 252667 - protein, 64 aa, Zea mays
  unsure (1)..(64): unsure at all Xaa locations
  Clone ID: MRT4577_162015C.1.pep
KQHPNVVAYSNWGTPQISRFTNKTXPRDNXLVSKSIAEKEHDTYXILPDIYASDHSHLGIMLKL

SEQ ID NO: 252668 - protein, 39 aa, Zea mays
  Clone ID: MRT4577_162016C.1.pep
IHTQTIPGGVFESHRRDKRTRTQELYYPISSNVLTRRHG

SEQ ID NO: 252669 - protein, 119 aa, Zea mays
  Clone ID: MRT4577_162017C.1.pep
GQKKKKVWGRGLNPPKTGAKANKAMGREGKKSRGDQRKQKGATFQKSLGESPFCKKIFSPFAPGCLEGPRFCRFLVGAVPWGPYSIKGPALTQTGAANLPPPGWLGGPPALGPIRAYEP

SEQ ID NO: 252670 - protein, 118 aa, Zea mays
  Clone ID: MRT4577_162018C.1.pep
LVNSLGLELKISGTTYSVELACKIFEDRLVGKGDLRLKLMRKGLLPRSNGSAEQNDIDLREKLSRNHKLPNYDSRGHAAESRASYDMRDEPPELSSRYSSREDVLGSRHSSVVSRVLY

SEQ ID NO: 252671 - protein, 83 aa, Zea mays
  Clone ID: MRT4577_162019C.1.pep
MASSSASSRHQVTITLGRSGQVVKRRTISDDINGDEMPLSGKKRSVRDRLGSNVSDSDFYGSQQRNKRQQTEINSSHGDDGSG

SEQ ID NO: 252672 - protein, 42 aa, Zea mays
  Clone ID: MRT4577_16201C.1.pep
SAEPMYLFPPVTQSVFFLLSPADDDIVAGGYQRNAPSSSCVL

SEQ ID NO: 252673 - protein, 120 aa, Zea mays
  Clone ID: MRT4577_162020C.1.pep
ICRSRPQSFITRGAPDTPRSQPYAGKATISVDTVQRTNGITPSSAPLPKVPVMAEAPLTVTGLLNSLGLEKYIVLFQAEEVDMAALRQMGESDLKDMGVPMGPRKKILLAVGPQSKQRQI

SEQ ID NO: 252674 - protein, 352 aa, Zea mays
  Clone ID: MRT4577_162021C.1.pep
MASSSASSRHQVTITLGRSGQVVKRRTISDDINGDEMPLSGKKRSVRDRLGSNVSDSDFYGSQQRNKRQQTEINSSHGDDGSDRLVGKDDLRLKLMRKGSFQRSNGGAEQNTMDLREKLSRNHKKLPRYDSRGHAAESRASYDMRDEPPELRSRYSSREDVLGSRHSSVVSRVPYARSVDDLLKLDPSRKSYPSWTDDGLRHRSPERILNVRSDMYPRIAYDQIRPMPPLRSAGSSRPQSFITRGAPDTPRSQPYAGKATISVDTVQRTNGITPSSAPLPKVPVMAEAPLTVTGLLNSLGLEKYIVLFQAEEVDMAALRQMGESDLKDMGVPMGPRKKILLAVGPQSKQRQI

SEQ ID NO: 252675 - protein, 136 aa, Zea mays
  Clone ID: MRT4577_162022C.1.pep
VPMFLLPSRSPRLFFFDSSTCGVHFTSPFTFWWWGSVVFFFPGALPFPPTPCPRTCPWVGVQRPLHGLRAWPCPPGVALFFSPPRPIICCLLCRCAFSSPSPSGVVCVPPPPRVRVAPFLFPPPLPPPLFVLFVFL

SEQ ID NO: 252676 - protein, 143 aa, Zea mays
  Clone ID: MRT4577_162023C.1.pep
MTATIDRRLSTLNPNAPVFDPVDFREVEDFSPKWWDLVTTSKWFRDFWLSANSENEFLGGDDFSVMEEEFEEMIASSDGGSMADTVTEADVASYLKMLLNIAESTKEKIYRSKVSSCSPKYNQKKYMNPNFNCRRNHHIYQPR

SEQ ID NO: 252677 - protein, 174 aa, Zea mays
  Clone ID: MRT4577_162024C.1.pep
MASSSASSRHQVTITLGRSGQVVKRRAMSDDINDGELPLLGKKRSVRDRLGSNVSDSDFYESQQRNKRRQLESNSSHGDDGSDRLVGKGDLRLKLMRKGSLPRSNGSAEQNDIDLREKLSRNHKLPNYDSRGHAAESRASYDMRDEPELSFRYSSREDVLGSRHSSVGSRVPYA

SEQ ID NO: 252678 - protein, 83 aa, Zea mays
  Clone ID: MRT4577_162025C.1.pep
ASILLIWFLRHFLAQEIETLYLVHAHSLEHSHVRLVHMVPNSALKCADIRSTSHVILSAIDCEQQVITSPSPPSPISLQSPQL

SEQ ID NO: 252679 - protein, 39 aa, Zea mays
  Clone ID: MRT4577_162026C.1.pep
KRCSALTIICCSALHYTSTPTFGEFMHIIPHNLLSYDLL

SEQ ID NO: 252680 - protein, 66 aa, Zea mays
  unsure (1)..(66): unsure at all Xaa locations
  Clone ID: MRT4577_162027C.1.pep
RCIRGGLILGGPALKNVFLFFWVGKGRPFMPSSEWGWSGHRAVIGRKVWLEGXAHLRPNFSFSXXF

SEQ ID NO: 252681 - protein, 54 aa, Zea mays
  Clone ID: MRT4577_162028C.1.pep
FLLYKPIKRLKPILIWNRWSTFSPFMSNCSFRSLLTLTLPPMVMRDTLLLNHRR

SEQ ID NO: 252682 - protein, 81 aa, Zea mays
  Clone ID: MRT4577_162029C.1.pep
FLFFFLVFGFFFFLFLIFLSLIRYAPGIFLKFLNNLKTLGPTCYDRLFPFTDQGTCLTKICLFLVNKAIPKAYQGLQTCPL

SEQ ID NO: 252683 - protein, 95 aa, Zea mays
  Clone ID: MRT4577_16202C.1.pep
PAGFGTSFKMNAFCIKSLILILCLFTTCTLAEWKRCGLEYEITERCCQEATGTTKTHYCWGDMRYHCDVGPFAGDPWETFTDCCKDHDVPVETCP

SEQ ID NO: 252684 - protein, 97 aa, Zea mays
  Clone ID: MRT4577_162030C.1.pep
KLQIPTLLSEVPLSQENIQCKPPREKCEKHLKTYLEAFKIIETNHRVMALHEILHDTRIKKRDGLVLKVNFKKAYDKIIEIFFCLNALTRNVVIGFK

SEQ ID NO: 252685 - protein, 132 aa, Zea mays
  unsure (1)..(132): unsure at all Xaa locations
  Clone ID: MRT4577_162031C.1.pep
MSPLKEKLGVEDAPELQLNRIRITLXSKNVYNLXEKACAXDLAKGAKDKHLRVXGPVQIPNKVLHVINRKSPCGGRTNTWERLEDRIHKKVFELITSPDGVKQISSINIYPGXEVKETIADLERPAIYSRCF

SEQ ID NO: 252686 - protein, 54 aa, Zea mays
  Clone ID: MRT4577_162032C.1.pep
KLELSPFSVSLFFFFVVKFLFILISTPLPSVSFYTRGFRRIQLISSLLIVSSRW

SEQ ID NO: 252687 - protein, 53 aa, Zea mays
  Clone ID: MRT4577_162033C.1.pep
ANVNKGITWDSQPLLEFLENPKKYIPGTKMAFAGLKKAKDRNDLVTYLEEATK

SEQ ID NO: 252688 - protein, 333 aa, Zea mays
  Clone ID: MRT4577_162034C.1.pep
MGGETHLSVQELAASLGALPPEFVRSEQDQPGATTYRGAAVPDAPVIDMSEPGFGARMAAAAREWGLFQVVNHGVPSAAVAELQRVGRAFFALPTEEKERYAMDPASGKIEGYGTKLQRDLEGKKTWNDFFFHVVAPPEKVDHAVWPRSLAGYREANEEYCRHMQRLTRELFEHLSLGLGLHGSAMAEAFGGDGLVFLQKINFYPPCPQPELTLGVAPHTDMSTLTVLVPNEVQGLQVFKDGQWYEAKYVPDALIVHIGDQIEIFSNGAYKAVLHRTTVNKEKTRMSWPMFVEPPGELVVGPHPKLVTEESPAKYKAKKYKDYQHCKINKLPM

SEQ ID NO: 252689 - protein, 333 aa, Zea mays
  Clone ID: MRT4577_162035C.1.pep
MGGETHLSVQELAASLGALPPEFVRSEQDQPGATTYRGAAVPDAPVIDMSEPGFGARMAAAAREWGLFQVVNHGVPSAAVAELQRVGRAFFALPTEEKERYAMDPASGKIEGYGTKLQRDLEGKKTWNDFFFHVVAPPEKVDHAVWPRSLAGYREANEEYCRHMQRLTRELFEHLSLGLGLHGGAMAEAFGGDGLVFLQKINFYPPCPQPELTLGVAPHTDMSTLTVLVPNEVQGLQVFKDGQWYEAKYVPDALIVHIGDQIEIFSNGAYKAVLHRTTVNKEKTRMSWPMFVEPPGELVVGPHPKLVTEESPAKYKAKKYKDYQHCKINKLPM

SEQ ID NO: 252690 - protein, 92 aa, Zea mays
  Clone ID: MRT4577_162036C.1.pep
GGDCSFFNRYFFFFFFFFFFPSKAKIFWGPRFYFFFLTPNQTPYKNLGKGENIHWGPPPPNTQRLKGNPARGAFFWAPNRPFGRPVRVPKGG

SEQ ID NO: 252691 - protein, 79 aa, Zea mays
  Clone ID: MRT4577_162037C.1.pep
VKGTLPETDLQIISWLGMPMYDVDFGWGKPAVMSRADSVRGGLVYLTSDGPTGGGGVRGRVCMEAANMKELERLLYAKL

SEQ ID NO: 252692 - protein, 147 aa, Zea mays
  unsure (1)..(147): unsure at all Xaa locations
  Clone ID: MRT4577_162038C.1.pep
RPNVVRLHEAAASKTXFYMVLEFVNGGQLFXDWIAITVETDXHEGXRRLWQRLIHRLSSCHDRGVYHPDLSXREALVHRKGTIKISDFGLCALPQHFGSDGLLHTPCGSPYYIATEVVLNRGSHRFLSDLWSSGVILYXMLGGCLPF

SEQ ID NO: 252693 - protein, 75 aa, Zea mays
  Clone ID: MRT4577_162039C.1.pep
LLYHLPIHACICIAYAHCACQPTKFDSITDLDEYEIEYTRSRDRIDACEYMRIPHLYITNTNQIMFTKKKKKKAA

SEQ ID NO: 252694 - protein, 154 aa, Zea mays
  Clone ID: MRT4577_16203C.1.pep
MLQDKVDGDGTTADTAARTLLSIFQHSSERIAHCFGSSNQTAAQNVNDEPQPSLDSFEQTVLNLEEIQDDGQSINVAPPYIEGPACRIKLKRGRGMRNFQREIIPGLLLGRQEICEDLEVIGYAPKKARSRKPRKGPGASSAQPRPCKRGAVKR

SEQ ID NO: 252695 - protein, 360 aa, Zea mays
  Clone ID: MRT4577_162040C.1.pep
MGGAKAEDKPAAAAAEDWCYQFGNKDAFDLKPPKKSPIALRTVVFAMTMLCGISICSMCMKQLGSDGWSRVVKIEVVEQPCNKSIAPLSEAQFVRYPQPITYSREECKCNAVRSFAIISSHRSGSGWFETLLNSHMNVSSNGEIFSRKERRSNISSIVDTLDKVYNLDWNSSASKNECTAAIGFKWMLNQGLVANHADVVDYFNRRGVSAIFLFRRNLLRQLVSQVANNHDRLLKQLNGTHKAHVHTKREAHILARYRPRLNTTSLIWQLKRADEYTRDALENLNNTRHMSVYYEDVVRNRTKLLDVLDFLGVPRRKLVSRHVKIHTKPLSEQIENWDEVYSALNGTQYEGFLNAADYLV

SEQ ID NO: 252696 - protein, 159 aa, Zea mays
  unsure (1)..(159): unsure at all Xaa locations
  Clone ID: MRT4577_162041C.1.pep
MSADRQTIIEVNRSLRNIKNELENLLERGVIDDSVYDTINVALPPESSLSGPLRTATGAANKTAAKAVSPAPTPSPAPSAKAAPTKAFNDLKIKSSSPAPPAYDQTPPPGLPTRNVKXTVAHARALYRYAASDGRDLTFEKDDRIAVYEYMNQDWWMGR

SEQ ID NO: 252697 - protein, 35 aa, Zea mays
  Clone ID: MRT4577_162042C.1.pep
GGLLISHHQYIISGTPTNCARCYPIHRILRCMSPI

SEQ ID NO: 252698 - protein, 256 aa, Zea mays
  unsure (1)..(256): unsure at all Xaa locations
  Clone ID: MRT4577_162043C.1.pep
MGGAKAEDKPAAATAEDDWCYQFGNKNAFDLKAPKKSPLALRVVVFAMTVLCGISIWSICMKQLGSNGWSRIVKIEVVEQPGNTSLQVXSEAQFVRYPQPITYSREECKCNAVRSFAIISSQRSGSGWFETLLNSHMNVSSNGEIFSRKERRSNISSIIDTLDKVYNLDWNSSASKNECTAAIGFKWMLNQGLVANHADVVDYFNRRGVSAIFLFRRNLLRQLVSQVANNHDRLLKQLNGTHKAHVHTKREVSNAS

SEQ ID NO: 252699 - protein, 89 aa, Zea mays
  Clone ID: MRT4577_162044C.1.pep
LIRVRTGLEGRFQEPGLKGPLWEEVSARMAVAVYGRSAERCKEKWENINKYLRKAKESGKKRPAHARTCPYFNELDRLYSRLGQAKQAS

SEQ ID NO: 252700 - protein, 52 aa, Zea mays
  Clone ID: MRT4577_162045C.1.pep
RRRGRPHDGGVRFNLIYSGSQLLQRELDLSTRGEGRDGAHVHQADQPADRQE

SEQ ID NO: 252701 - protein, 395 aa, Zea mays
  unsure (1)..(395): unsure at all Xaa locations
  Clone ID: MRT4577_162046C.1.pep
MHAPATGRSICSSMFILRSFPVFPSRRGRSNPFPRFSFPPRLLFSSLALTGSHTHPPPLCRHTKTALHRHSPRPRVAVVRHRCRRFPSTVPLAPAHAIRHRGLAMAPAPASLSAPNALSLPAPARVTSGRWNRSLSVSAAARSVTRVVSVASAAAVTAQRRLVAAAAATEMAPTASGEDGSKPFVEEMRAVAMKLHTKDQAREGEKEPQAPPVAKWEPSVEGYLRFLVDSKLVFQTLEAIVEAVPWYAEXRNTGXLERSEALKKDLEWFRQQGHTIPEPSPPGTTYATHGEVLAEXLEELSEKDPQAFICHFYNVYFAHTAGGRMIGKKVSEKILDKKELEFYKWEGNLSQLLQNVRNKLNQVASSWSREEKDHCLEETEKSFAYSGGLLRHIFT

SEQ ID NO: 252702 - protein, 164 aa, Zea mays
  Clone ID: MRT4577_162047C.1.pep
MAPAASGEEGSKPFVEEMRAVAMKLHTKDQAREGEKEPQAPPVAKWEPSVEGYLRFLVDSKLVFQTLEAIVERAAVPWYAEFRNTGLERSEALKNDLEWFRQQGHTVPEPSAPGTTYASLLEELSEEDPQAFICHFYNVYFAHTAGGRMIGKKVNRPTPTLLRK

SEQ ID NO: 252703 - protein, 46 aa, Zea mays
  Clone ID: MRT4577_162048C.1.pep
MPSIIRVMDVIKDKTPEEIRKTFRIKNDFTQKEEDEIRMENQWAFE

SEQ ID NO: 252704 - protein, 80 aa, Zea mays
  Clone ID: MRT4577_162049C.1.pep
VSSRAPTFAMIRLPCTPALSPVSSPAAASTTVTTTSGPSSHAGACPVHDRAPGARTPCRRSIAHVGHLYLFARCPSSSVA

SEQ ID NO: 252705 - protein, 68 aa, Zea mays
  Clone ID: MRT4577_16204C.1.pep
TACKCPRFYYQQLDHPYSVTTFAPQNMDSHLGTEKGIMVHSVVNLLRWTEIPHGQDKVTSGAFNFFCS

SEQ ID NO: 252706 - protein, 84 aa, Zea mays
  Clone ID: MRT4577_162050C.1.pep
ECLERGDRIPEVMVNRSGGNWSMTSSPWRALWGRYSASLIWGTCASSPTAVAWLKSASVADAAAASLTLARSHHQLEVLSQTRP

SEQ ID NO: 252707 - protein, 79 aa, Zea mays
  unsure (1)..(79): unsure at all Xaa locations
  Clone ID: MRT4577_162051C.1.pep
NQPXGQQGTTGKRGEGPKPEGPEXPQGRNDGRKAANEREDEEGTRDXPNGHSAEAGRAKNPKKGXRKDPAKKTPNNPPA

SEQ ID NO: 252708 - protein, 451 aa, Zea mays
  Clone ID: MRT4577_162052C.1.pep
MISQFFVLSQRGDHIVFRDYRGEVPKGSAEIFFRKVKFWNDDEAEEAPPVFNVDGVNYIHVKVAGLFFVVTTMVNVSPSLLLELLQRIARVTKDYLGVLNEDSLRKNFILVYELLDEVIDFGYPQTTSTEVLKSYIFNEPIMVDAGRLPPLGPAAMFMQGTKRMPGTAVTKSVVATEPGGKKREEIFVDIIERISVTFSSSGYILTSEIDGTIQMKSYLTGNPEIRLALNEDLSIGRTGSSSYDYRSSSGGGTVILDDCNFHESVHLDSFDIDRTLTLIPPDGEFPVMNYRMTQEFKPPFRVTALIEEAGPARAEVLLKIRADFSASATANTIVVQMPVPAYTMRASFELEAGAVGQTTDFKEGSRRLEWNLKKIVGGSEHTLRAKLTFSQESHGNITKEAGPVNMNFTIPMYNASKLQVRYLQIAKKSKAYNPYRWVRYVTQANSYVARL

SEQ ID NO: 252709 - protein, 68 aa, Zea mays
  Clone ID: MRT4577_162053C.1.pep
MVLVVALSLLVLGALPNAKRKLAECGVARHRFLSIGGVLCFVHAPFCAVYYASASAAAREARRDAPHV

SEQ ID NO: 252710 - protein, 93 aa, Zea mays
  Clone ID: MRT4577_162054C.1.pep
QFYIQLRVQLVVSCFWTVTPVLQSQTTSSASGTPCSGISLTEHTRCRDRVLISRATILTSLAINKCWPLFLACDLLNVAEHQAWYARYFPSFA

SEQ ID NO: 252711 - protein, 94 aa, Zea mays
  Clone ID: MRT4577_162055C.1.pep
YLIAARSFCAAIMDNRSSSLHLVAAPGLAAALLLLAAGGGTPSAAASCDQVTSAVVPGLVHPIGNAQSPSALRCRVERSVNSQESSVVDRQATC

SEQ ID NO: 252712 - protein, 80 aa, Zea mays
  Clone ID: MRT4577_162056C.1.pep
RVVFRVDPGEGALVQKTLRFLRPFKHNLFWFFFLSPEWSWGPKKKKKKKKKKKKKKKKKKKIKKKKKKKKKKYSALLPLL

SEQ ID NO: 252713 - protein, 32 aa, Zea mays
  Clone ID: MRT4577_162057C.1.pep
LFSRIFKFIKAIFPFRFIKTAYLSFFFFHIIH

SEQ ID NO: 252714 - protein, 271 aa, Zea mays
  unsure (1)..(271): unsure at all Xaa locations
  Clone ID: MRT4577_162058C.1.pep
GKDISNTSNRQXHIPESVNQDAEEVLYTGRPNSSMGQSLRDLENDRADFQSTPHDPHSVAGEANLLQHNVPRDSDLSPLGLLWSELEGRPKQPLSSNVLSVNERRNPKPTTPKDIPPVNMRQGPLSRMNEVSSVRDEWPANFGRLDNMNDANISGRIHQVEAEHHLNFDGHLLLQQIRREQQQQRQEQLMAHNNLEFSGAFPGQVFDPLNQHRQPMNQQIPDVEHLLRIQFELEQQQQRQLQQEQHQRQLQQQRQAQLLQRQQQQQQQQQH

SEQ ID NO: 252715 - protein, 885 aa, Zea mays
  unsure (1)..(885): unsure at all Xaa locations
  Clone ID: MRT4577_162059C.1.pep
RNRPHALQDAEEVLYTGRPNSSMGQSLRDLENDHADFQLTPHDPHSVVGEANLPQHNVPRDSDLSPLGLLWSELEGHPKQPLSSNVXMGFSSLGSARXVPSNNLTVAFGIAIRHQQYRGLWSVLQRTARRARGSHRCSTMPPNLQTVAQVVRARRRKRRKESRLTLXQLEQHQQRKEQLMARSNLEFSGAFPGQVFDSLHQHRQPMNQQLPDVEHLLRVQFELEQQQQHQLQQEQHQRQLQQQRQAQLLQRQQQQQQQQMILEQLLQQQLQGSNFGPTNMVDQVLLREHVLNELHQQPHHLQRQHDAAIEQLIQAKFGHGLHREHHNDMLDVLSRSNQRQMLPLEQQILLGLQHEQEQQLKSQQLANALRQHSGREEEMHLSGVWPMDAAAQFIRSGTSPNQIHSRFDLLENLQRSSSFDHHEHLDRSLSLHEQLHMGGQGIRSLERTGSLPGGGPGPNPDVINALTRHHGLRQLETHGDVYPLGQMPMLPSGVHPQQHRHQEQLPGSHIGRLERHWSDANGQLQNSLMQSSHINQLQMEVEKQRRNVEMNLSVDNPHAWAALMNKERNAEQDLSDMIHKKLALQSQQSLGFPDVSVPASFGRKDHFVQPVVESPLRSVDMXSFEESLSERSLYAKSGQLAQEGSANLGTLPNSIENTGNFNLRPGSGSMLEQKHFLGIDDVQSDFPETTGGRTSANQLVGSVNELTRGKRQGSSASLAGDDPNLSDEAVSKWSDSGMSKGSSHSLLKRSTSQHTTTSQSVSADLSVIRLKKAGLASSDENKMESGLASVAQGMEGCVISNKETGAYGMPSATNNPDASGQSFSEALKSSRKPPLQYDASESADGGPGGKGAKKKTKKGKQIDPSLLGFKVHSNRIMMGEIVRDD

SEQ ID NO: 252716 - protein, 43 aa, Zea mays
  Clone ID: MRT4577_16205C.1.pep
PLTKIKNRDRTCLGNFNLRPYSHESHQIFFRSTPIANPVSSIC

SEQ ID NO: 252717 - protein, 418 aa, Zea mays
  Clone ID: MRT4577_162060C.1.pep
MAEPANRRMEAVRRHLLLPSPAPLRPNPLSSLAEVEPSPVIIGGMVLDIHAKPSVPPHHGTTVPGMVKYISGGVARNIAECMSKLGTQPFMISVVGNDLAGDFLLKYWRSAGLCTEGILQVDNVATPVVSNVFDGTGELIAGVASVQAVENFITSSWIYHFRNHIANAPLVMLDANLSPESLKAACIMAYEFGVPVLFEPVSVVKCRRIAPVAEYITCTSPNEIELVAMANSLSPSVKYNFHKIEQFKEKADTVEYIFEMLSPAMFFLLEKGIKLLIVTLGSNGVFVCCKEHTNFMKDQHKCKQTPFSRQLPEKIHGCFPSNNLANLCRESSSRTCVFHLPAISASVISLTGAGDCLVGGVLSALCAGFDIIRSVAVGVAIAKASVESEANIPDDISAASIADDAQSVLHSAKVLWCK

SEQ ID NO: 252718 - protein, 137 aa, Zea mays
  unsure (1)..(137): unsure at all Xaa locations
  Clone ID: MRT4577_162061C.1.pep
MSAAEARSSGTRRSRVQLRGHADERIPHEKRIAPGNAKPSATVIALSXATLLAXTRLGCDACRSGXQRDQNLQLHLRSHNNAGAKREAGRAPRTRXPVYLCPEAHSVHHSQCRALSDLTEIKNHYXRRHGEKKFRCD

SEQ ID NO: 252719 - protein, 46 aa, Zea mays
  Clone ID: MRT4577_162062C.1.pep
SHPILVTGLTKALYWSHGELETELDSPSESGPGHALPYPAGAYQLY

SEQ ID NO: 252720 - protein, 84 aa, Zea mays
  unsure (1)..(84): unsure at all Xaa locations
  Clone ID: MRT4577_162063C.1.pep
LERMLLESFKDRHRHSAQAGSIASFYNKREEGSISSRVQRLTKXRFLNPPSXLLLKVHDLYPKWVCLIESCVTMLFRELLKIKD

SEQ ID NO: 252721 - protein, 85 aa, Zea mays
  Clone ID: MRT4577_162064C.1.pep
SGTLCSSGGICFCPLCEIKAPVAKSSGVLLKQFVTLASLKEQFFLSPLVSLFFRLFGSAAPFVPLVWCPNHHGTVFNYFMPQCCS

SEQ ID NO: 252722 - protein, 101 aa, Zea mays
  unsure (1)..(101): unsure at all Xaa locations
  Clone ID: MRT4577_162065C.1.pep
KIFDVSEWAICQGMACRPNTHRXSFHVNMVGLEKSQRCNSSRFPWDFDAEMMDEDEEAFDLWLEQALASGLFCETSKRRKSWSPFKLHQKKGKKQWRRTSC

SEQ ID NO: 252723 - protein, 98 aa, Zea mays
  Clone ID: MRT4577_162066C.1.pep
ETEVWLYLIITHFTMPLNGCFLMQQLQWHSTLQALCNGQNILSETKETVGCGLSSNTYARSAIIGYKLYNTLYLAMDNVQVHAMDTSVCGLRNVRTHD

SEQ ID NO: 252724 - protein, 58 aa, Zea mays
  Clone ID: MRT4577_162067C.1.pep
LAFFNFEWALLFLFCSLLVWFMSLRNSYYVPLILFFSTIFETVVFHYFVLFYFFNVFT

SEQ ID NO: 252725 - protein, 106 aa, Zea mays
  Clone ID: MRT4577_162068C.1.pep
HEAEPLHCYTAASSHNELKQRKRADKQRNYSTPPLLDRCCFSPIRTSRCVCYRSPAAQATQDERGAGAAVQVGGGAAEVEVGRGGHHGFGAVVVEEAPEQVPVDGH

SEQ ID NO: 252726 - protein, 206 aa, Zea mays
  Clone ID: MRT4577_162069C.1.pep
MAAQFFLLAATAAVGRLEPAGKKKKKKKKKKKKKNIIHNTHRSTHIHSFFYYTTTNMGKPAKIGEWGGYAGDRRDLRATPDRLIEVKVTADNSSCIRSISFIYIGADGKPYEEGPWGFGHAGTEYKIDLRFDESLTEISGTTGPAYNIDNLVKSLKFVSNKRTYGPYGRDEGTPFRVKVMNNGHVAGFFGRSGDCLDAIGLYVNPN

SEQ ID NO: 252727 - protein, 111 aa, Zea mays
  unsure (1)..(111): unsure at all Xaa locations
  Clone ID: MRT4577_16206C.1.pep
MGTATAAMDRNVDGEQGKRKKKGGFRTMPLILASEVCDRFATAGFGANLITYLTQQLHLPLVEASNTLTNFSGTSSLTPILGAFAADAFAGRFWTIIAGSVXVYQLGMVGV

SEQ ID NO: 252728 - protein, 151 aa, Zea mays
  Clone ID: MRT4577_162070C.1.pep
MGKPAKIGEWGGYAGDRRDLRATPDRLIEVKVTADNSSCIRSISFIYIGADGKPYEEGPWGFGHAGTEYKIDLCRFDESLTEISGTTGPAYNIDNLVKSLKFVTNKRAYGPYGRDEGTPFRVKVMNNGHVAGFFGRSGDCLDAIGLYVNPN

SEQ ID NO: 252729 - protein, 168 aa, Zea mays
  Clone ID: MRT4577_162071C.1.pep
APQGPPGVVLLAGGEGFKAPGFPKIFGHHPEPPFFFGRPHLFYLRKVGGDGFLVFPLGQPLGRWVKGHSRGPLIPPPPPMVWFPGRKGRKPVSPFFFPVFFSGLPSRFFFVPAIKKGGGGGYFPPLLGFFVSGAFFKFPFPRAPCFGLGEFSVVPGPPYTGWFFHFFS

SEQ ID NO: 252730 - protein, 127 aa, Zea mays
  Clone ID: MRT4577_162072C.1.pep
VRESRVYYSYGTCPKSSLQANDKTGGNGKEARGIAVETIDDPAPTRLFPTRTRTERKCRWRRAPAPAPAPDPGPGPGGGARGSRGSGRGSPRGGAPAQPPLSAAAPPPPPTPLGSRPPAAHASADAW

SEQ ID NO: 252731 - protein, 77 aa, Zea mays
  Clone ID: MRT4577_162073C.1.pep
RGKRERKAVDSRATAASCCRRTTQGLLVASTSGRVCEGEEEEEEERESFEAPALTTAPGSRRGAGPYCQRGRAASTL

SEQ ID NO: 252732 - protein, 94 aa, Zea mays
  unsure (1)..(94): unsure at all Xaa locations
  Clone ID: MRT4577_162074C.1.pep
MSARCAAAARRRAPARAPAPPAPPPGAPAPPPLSAAAPPPPPTPPGSRPPAASPRTSPXPPPSSAPPAARPWSAPPTPRPAPWGLRVWSCSRPG

SEQ ID NO: 252733 - protein, 155 aa, Zea mays
  Clone ID: MRT4577_162075C.1.pep
DSTENYYSCGSRKKATGGARRSHPAETHNLTEKRRRRKIDDKLKTLRQLVPGCDDKSNQASILDQTIQHINSLQQQIQVQPKAISLGCDAIKPPAVYPVVLPQGTAVAAAGELLPPAAALPPAVLAMAARGHVRPGLAPLHHLRRWCLSVPFFQW

SEQ ID NO: 252734 - protein, 46 aa, Zea mays
  Clone ID: MRT4577_162076C.1.pep
TGPEFLPEQPPALVGSPQKKKKKKKKKKKKKKKKKKKKKKKKKKKE

SEQ ID NO: 252735 - protein, 396 aa, Zea mays
  unsure (1)..(396): unsure at all Xaa locations
  Clone ID: MRT4577_162077C.1.pep
MAEICCEAAAAAAGSDQKGECAGSRAARRRRMEIRRLRVVAEEASAKRRRLEADEEDAVGGRAPRYGVTSVCGRRRDMEDAVTARPEFINGHHFFGVFDGHGCSHVATSCGERMHQIVAEEATAAAGSSVSDETARWRGVMEKSYARMDAEAVVSRETAGPAPTCRCEMQLPKCDHVGSTAVVAVVGPRHLVVANCGDSRAVLSSGGATIPLSADHKPDRPDELERIHAAGGRVGFWDGARVFGMLAMSRAIGDSYLKPFVISDPEVLVVERKDGEDEFLILASDGLWDVVSNEVACKVVRTCLRNRAPRGGREQSSPTSNLSPRQSSASGGSSSSSGXRRLVRPAATARGXSDGESAEDRACAEAAILLTKLALARQSADNVSVVVVNLRRRPRS

SEQ ID NO: 252736 - protein, 53 aa, Zea mays
  Clone ID: MRT4577_162078C.1.pep
VLRHGSYFLKVLNTAIRLYRQVCVHREVRYISCHACKYIYDEQHLGPIYILVR

SEQ ID NO: 252737 - protein, 166 aa, Zea mays
  unsure (1)..(166): unsure at all Xaa locations
  Clone ID: MRT4577_162079C.1.pep
HNLRRGIRKADYTRDYAFIECNDPGAADNPHGNLDGRGRIGSQIIEGFAKGAPGGSGGKRECPGTGPXPGTNRGFNCECEGHWARDCWANNCKNKCXRCRKRRHIQRNXQNITRNIRRERSSSRPPXPRRRRSHSRSYSYSRSXSRSRSPTGSPRDRRQNRSERIT

SEQ ID NO: 252738 - protein, 70 aa, Zea mays
  Clone ID: MRT4577_16207C.1.pep
GAAEYGGVIKNNVNPPGGANSRKLGNLATDDRISYTFDRTPCSPHIHRDLFCSPKPSCDHHFEDLDAHDT

SEQ ID NO: 252739 - protein, 55 aa, Zea mays
  Clone ID: MRT4577_162080C.1.pep
GNSFWAQGGSGSKGLVQCSSSLFDETVASLSGTDGNRLIYAMPICICIKVLIKTV

SEQ ID NO: 252740 - protein, 171 aa, Zea mays
  unsure (1)..(171): unsure at all Xaa locations
  Clone ID: MRT4577_162081C.1.pep
MEAPTLLWLLXVSLASCLLYKLLEPNSSRSEKARRRAPGPAPLPLVGNILELRGEPHHAXLARLAETHGPVMSLRLGTTDAIVVSSAAAARDVLQRYDNVLAARSVTDAGRALGNHERSVIWLPATSQLWKRLRXVCTNHLFSARXLEATRATREXRRVRQLVVMPGPHRR

SEQ ID NO: 252741 - protein, 206 aa, Zea mays
  Clone ID: MRT4577_162082C.1.pep
LNSYRRSVGSGAVIGNLRGTALASLGNTGFYVLRLRLYVLRWRGGFPTHLFRWIDHLTLARKRHIGQLFAVWTIFGQKFLARPTVNAQCTHGIGNLGHCIHLSLPPQARLSPAQWFIRNNKGAAACTSYTFLAHHPRNSPRQENNPRNQQEDPRPGGSSLPASPAEERTEETTSFSRGVGYRRLRRRGWRRGETGETAGEEGGQAG

SEQ ID NO: 252742 - protein, 157 aa, Zea mays
  Clone ID: MRT4577_162083C.1.pep
SPHSRQKAPHRPTLRCLDCLWAEISGSPHCQRPMHPWHPQPRTLHPSLTTTSSKTLACSAVYQKQQRGGGLHELYLLSSSSSKLAAAREQPPKSARGAVSGRIFAPREPGGGEDGGAMKERTSFSRGGGLGGGFRQLRRRWRGWRRGETGEGGGQAG

SEQ ID NO: 252743 - protein, 81 aa, Zea mays
  Clone ID: MRT4577_162084C.1.pep
QLGALDPFVFFPPRKIFLFCLLGIPSPPSFFYPPPLLPFSPPFVAYPPTLLPFQQFLPFVPLSFTNPGAFFQKEIFWGAIF

SEQ ID NO: 252744 - protein, 70 aa, Zea mays
  Clone ID: MRT4577_162085C.1.pep
LFPFIQAKICPLVRWNPFTLYLAHNYQYVSLVNLQMWLLPYEYALVQGVHPVWFIRLDVLMLYPRSICIL

SEQ ID NO: 252745 - protein, 251 aa, Zea mays
  unsure (1)..(251): unsure at all Xaa locations
  Clone ID: MRT4577_162086C.1.pep
MVKAYPTVNEDYLKAVDKAKRKLRGLIAEKNCAPLMLRLAWHSAGTFDVATKTGGPFGTMKNPAEQAHGANAGLEIAIRLLEPIKEQFPILSYADFYQLAGVVAVEVTGGPDVPFHPGRQDKPEPPPEGRLPDATQGSDHLRQVFSTQMGLSDQDIVALSGGHTLGRCHKDRSGFEGAWTSNPLIFDNSYFKELLSGEKEGLLQLPSDKALLSDPSXFRPLVDKYAADEDAFFADYAEAHLKLSELGFAEA

SEQ ID NO: 252746 - protein, 367 aa, Zea mays
  Clone ID: MRT4577_162087C.1.pep
MNKRPRDDHSFASAPKRQYGAGGGYGPQQGYSEERSSARRVADHYSARSNQTLEERENSPIIHLKKLNNWIKSVLVQLYARPGDCVLDLACGKGGDLIKWDKAKVGYYVGVDIAEGSIKDCMTRYNGDTDQQRRKRFSFPARLICTDCYEARLDEYLYEDAPFDICSCQFALHYSWSTEARARQALANVSALLRPGGIFIGTMPDANVIIKRLRESEGLEFGNSVYWISFGNEYAEKKFPASRPFGIKYKFHLEDAVDCPEWVVPFHLFKLLAEEYDLELVLMKNFHEFVHEYLQKPEFAELMRRLGALGDGRQDQSTLSQDEWEVSYLYLAFVLRKRGQPPTQRRASNANRGKMFLTEGDIEVLGV

SEQ ID NO: 252747 - protein, 74 aa, Zea mays
  unsure (1)..(74): unsure at all Xaa locations
  Clone ID: MRT4577_162089C.1.pep
MLYPASTPRDGPEIQKDLEVQDNALHKIHKDVASKHQAPXQYTIHAGENYLGLSDLKMLNDGANTYKIIGPRLA

SEQ ID NO: 252748 - protein, 186 aa, Zea mays
  Clone ID: MRT4577_16208C.1.pep
TISLSPRSRLGQSNTQGGGGQYQDQIQSELREKGIVIDRSKVDHRRHDIGSKRTLPEPDGEEAAAAAAQSSASRSLGSSQERYFPRRRQQQIELGGSGGGGHDHDDRYYSPAAVPAPGRYHEQAEQQGAVYSSTTMAYYDDVGTHSASSSLHPGDSAAAAVPVATESPHQRLPLEAGSAGCSFAVG

SEQ ID NO: 252749 - protein, 258 aa, Zea mays
  unsure (1)..(258): unsure at all Xaa locations
  Clone ID: MRT4577_162090C.1.pep
GRVGGRVGGRVGGRVGCAPLMLRLAWHSAGTFDVATKTGGPFGTMKNPAEQAHGANAGLEIAIRLLEPIKEQFPILSYADFYQLAGVVAVEVTGGPDVPFHPGRQDKPEPPPEGRLPDATQGSDHLRQVFSTQMGLSDQDIVALSGGHTLGRCHKDRSGFEXGAWTSNPLIFDNSYFKDXSSLILCCTLLVKLKTTLIDRELLIGEKEGLLQLPSDKALLSDPSFRPLVDKYAADEDAFFADYAEAHLKLSRLGFAKA

SEQ ID NO: 252750 - protein, 39 aa, Zea mays
  Clone ID: MRT4577_162091C.1.pep
NHQHELNPTIYKGCRENGFHAFASGNRHHGSAKNKSKSH

SEQ ID NO: 252751 - protein, 180 aa, Zea mays
  unsure (1)..(180): unsure at all Xaa locations
  Clone ID: MRT4577_162092C.1.pep
VFRPRAGPXRRRSAPPFPRFXVRPXPPXAXWVAXLAXGXLRPRXGPXGXXGXSSSXSXFGLXRGGXGAPAGXXXAXXXXXPXFFAFWXPFLLLXLGGPXPXXASSLXXXALXPRPLXGLLFXLFSACVSFFCSLRGXPXXPAXVLLFVVGVSXXAXRXSSLSSXPRPPPLGRPGVFGPAK

SEQ ID NO: 252752 - protein, 75 aa, Zea mays
  Clone ID: MRT4577_162093C.1.pep
SFQNWDLLRHNEPEECGGCRRPAGLVFLLSAFLLNEDVTNSAEDVVCMLSWFIFLFYLSIYNIYRRRFDMKRNTD

SEQ ID NO: 252753 - protein, 252 aa, Zea mays
  unsure (1)..(252): unsure at all Xaa locations
  Clone ID: MRT4577_162094C.1.pep
MAAKCYPTVSDEYLAAVAKAKRKLRGFIAEKNCAPLMLRLAWHSAGTFDVATKTGGPFGTMKCPAELAHGANAGLDIAVRLLEPIKEQFPILSYADFYQLAGVVAVEVTGGPEVPFHPGRQDKPEPPPEGRLPDATQGSDHLRQVFSTQMGLSDQDIVALSGGHTLGRCHKERSGFEGAWTANPLIFDNSYFTELLSGEXKEGLLQLPTDKTLLTDPAFRPLVDKYAADEDAFFADYAEAHLKLSELGFAEA

SEQ ID NO: 252754 - protein, 69 aa, Zea mays
  Clone ID: MRT4577_162095C.1.pep
HTYNTANLFLLGSTFLSGAAYYSAEVFLISTPTHVFISLYRGIVNLYLPRTRVINLPDLLIDALQSTIK

SEQ ID NO: 252755 - protein, 113 aa, Zea mays
  unsure (1)..(113): unsure at all Xaa locations
  Clone ID: MRT4577_162096C.1.pep
RGRVGGRVGGRVGGRVGDIGALSGGHTLGRCHKDRSGFEGAWTSNPLIFDNSYFKELLSGXKEGLLQLPSDKALLSDPSFRPLVDKYASDEDSFFADYAEAHLKLSELGFAEA

SEQ ID NO: 252756 - protein, 97 aa, Zea mays
  unsure (1)..(97): unsure at all Xaa locations
  Clone ID: MRT4577_162097C.1.pep
MAPSQPKTRLFVGINKGHVVTKRKLPSRPSHRIFYNNDRGSYXRGLIMYVAGFASYEKRITELLKVGKDKPAHELAKKKLGTHTRAHKXREEMAGVL

SEQ ID NO: 252757 - protein, 266 aa, Zea mays
  unsure (1)..(266): unsure at all Xaa locations
  Clone ID: MRT4577_162098C.1.pep
MARSSSPARMAMLLLLLSALAVLFPPAVADDLLSVDFHAASCPQLDRIVRTAVQAALRREIALAAGLLRIFFHDCFPQGCDASVLLKGNATEQTMGPNTTLQPRALQLIDDIRAKVHAACGPTVSCADVTALATRAAVVASGGPSYPVPLGQRDSLAPAPEDDVNALPSPTTASVPELLAAFRGRGIRDVADLVALSGAHTVGRAICPFFQDXADSQGDDXARQLKADCARDPNRLQQLDVVTPDAFDNVYYXTLTSSRGVFTFDM

SEQ ID NO: 252758 - protein, 57 aa, Zea mays
  Clone ID: MRT4577_162099C.1.pep
GHQNSLEWMPVFFVKLLLGGLQHPTIAAGLGGIYIVARFFYFKGYATGVPDNRLKIG

SEQ ID NO: 252759 - protein, 91 aa, Zea mays
  Clone ID: MRT4577_16209C.1.pep
TIMVYQGKLFDPFVFPKTKTGLLTPKAREKGDKNFWPFFLAKAFHLKSQNLENEVVLVVVMDFTWVGPSLYLYPTSQKRAPRPGGAPGNFR

SEQ ID NO: 252760 - protein, 106 aa, Zea mays
  unsure (1)..(106): unsure at all Xaa locations
  Clone ID: MRT4577_1620C.1.pep
LGHSCRVPQLSCPPSLTKLCSLDXRHCQLKPFHKRKPATLLMWAPVVRLRREQPLLILCRSQGLVFMQHTPPPCNGSRVQKKKNSSRWCNLREPEQQWIVNPAMYH

SEQ ID NO: 252761 - protein, 170 aa, Zea mays
  unsure (1)..(170): unsure at all Xaa locations
  Clone ID: MRT4577_162100C.1.pep
MAEVEDVSNRMEAQLRVHAAEDDADLPLPALFDRASHLHSLASSSSLDQEGIRKGVDLLRRCDDMVSKLGLFSSNETKEDVSTANLKYLLVPYYLGEMTEQVEQEDRIPVLKASQDHLKEFISVCEALELIPEDELQLYRQXSLKQGQTEEHKRLPGSSGKRLQKRRLQE

SEQ ID NO: 252762 - protein, 94 aa, Zea mays
  Clone ID: MRT4577_162101C.1.pep
ASTIIIYRAASHPLNKRSTTTDWTLTSVTDGLCHPTQRKLLTVHQTSSEATPWLNDRTRPRPGMQIELLQQIAHSNARCIAEADSLSRLLEGHQ

SEQ ID NO: 252763 - protein, 71 aa, Zea mays
  Clone ID: MRT4577_162102C.1.pep
VTGGTKPEYTVDVWSGNHPYYVGDTSALVVMDSQIEKFRKKWGHVKEYWPEDQWREMHPDGDPEFEPEGDN

SEQ ID NO: 252764 - protein, 49 aa, Zea mays
  Clone ID: MRT4577_162103C.1.pep
LGSRLDEEILVAEVMSYDSRKHHYLLLLIALAQFALFTWLGNITVNWLI

SEQ ID NO: 252765 - protein, 56 aa, Zea mays
  Clone ID: MRT4577_162104C.1.pep
MKYVLVTGGVVSGLGKGVTASSIGVLLKACGLRVTSIKIDPYLNTDAGTMSPFEHG

SEQ ID NO: 252766 - protein, 58 aa, Zea mays
  unsure (1)..(58): unsure at all Xaa locations
  Clone ID: MRT4577_162105C.1.pep
LGLVALAVGAXGVVXGVVVRGPGVAAVVASXLFLRRCLLXPLPVFPVPKSLGRVGRPG

SEQ ID NO: 252767 - protein, 87 aa, Zea mays
  Clone ID: MRT4577_162106C.1.pep
TSSGALGTWDGPYSTVRHRTRAKLTDVRSGGAMTRTDRPGGTHSASPTFGYGGHTGQGRHPGADHMAHRDQHKPQGPRADTCRLPGP

SEQ ID NO: 252768 - protein, 111 aa, Zea mays
  Clone ID: MRT4577_162107C.1.pep
RIRHFPSFPVLWSVSARTLLDRLIHETCLVGVTLLTHLRQAGPCRCEKWSRLSGRHMLLSAAPGAISSVLLQASSSGRGNADTRGRLRFRDTEGLTRLAGHSRWFKTNDKK

SEQ ID NO: 252769 - protein, 124 aa, Zea mays
  unsure (1)..(124): unsure at all Xaa locations
  Clone ID: MRT4577_162108C.1.pep
MKNVAKCDTWCELQNPANHRVFERKLRPKPSGGGHVCLGVTPPVARSPCLPHADPQPPPFAMGFLDALYRVVMRRNAVYVTFVVAGAFAGERAVDYGVHKIWEMNNLGKRYEDISXLGQRPAEE

SEQ ID NO: 252770 - protein, 63 aa, Zea mays
  Clone ID: MRT4577_162109C.1.pep
MGFLDALYRVVMRRNAVYVTFVVAGAFAGERAVDYGVHKIWEMNNLGKRYEDISVLGQRPAEE

SEQ ID NO: 252771 - protein, 156 aa, Zea mays
  Clone ID: MRT4577_16210C.1.pep
RPGFLVLIPRVPRDPRQAHFLVARAGVLAGVRLPVAPPREPAHLLLPLRRRGRAVRLPLDDTKTWPEDLLPLRPVGRLVLDRNVDNFFNENEQLAFGPGLVVPGIYYSDDKMLQCRVFAYADTQRYRLGPNYLMLPVNAPRCAHHNNHYDGAMNFM

SEQ ID NO: 252772 - protein, 63 aa, Zea mays; identical to SEQ ID NO: 252770
  Clone ID: MRT4577_162110C.1.pep

SEQ ID NO: 252773 - protein, 57 aa, Zea mays
  unsure (1)..(57): unsure at all Xaa locations
  Clone ID: MRT4577_162111C.1.pep
KKKKKKKCPLAXQSAPXPADRQPCCLTNTDXVPARPLPLSNXXLLSAHGTVPAPPTA

SEQ ID NO: 252774 - protein, 108 aa, Zea mays
  unsure (1)..(108): unsure at all Xaa locations
  Clone ID: MRT4577_162112C.1.pep
PTPTKQHTDSTAGDKAGSSASTRHTSCRPHTTVTPRATSXTNTTDTTPQSXSATRTEKRTKPKITWNRCTSSTSMNSQQHSHNNDRHSDQQHDATAPPHPSLXXRWAD

SEQ ID NO: 252775 - protein, 49 aa, Zea mays
  Clone ID: MRT4577_162113C.1.pep
AGGQLTLYTTIIHTLCQGMRAQHKLMVNCSLLCRRSPPLKMKPPPKYCV

SEQ ID NO: 252776 - protein, 29 aa, Zea mays
  Clone ID: MRT4577_162114C.1.pep
LQPGLMAAEGNSCPTKPRTANLTLENKVQ

SEQ ID NO: 252777 - protein, 56 aa, Zea mays
  Clone ID: MRT4577_162115C.1.pep
GSCRGPTPARSDRRQSAKVTLIIYEAGGHGEVRILGSRMTRKRRLLMVTGPSRRWS

SEQ ID NO: 252778 - protein, 93 aa, Zea mays
  Clone ID: MRT4577_162116C.1.pep
GGRSRVVVDVFRLLFTEHAVHVLSSEDQVTASWAPAAGPRVPLGSFSVSWVYPRIGSDSREYAYASVICELTWRGLKAGAQAASSRWRVTAEA

SEQ ID NO: 252779 - protein, 72 aa, Zea mays
  Clone ID: MRT4577_162117C.1.pep
MWSRGSGDGPLSFQQEKLGDICFSLRYVPTAGKLTVIVLEAKNLKKMDVGGLSDPYVKVHLLQGGKKVRKKK

SEQ ID NO: 252780 - protein, 80 aa, Zea mays
  unsure (1)..(80): unsure at all Xaa locations
  Clone ID: MRT4577_162118C.1.pep
TRSRVTWADWVGRLLGGDRSSNYSRITTXQWVEGGYHITXXXQXHHKEEKEXHXRTYDTGSKEERXDQERGNNQGRIDGN

SEQ ID NO: 252781 - protein, 279 aa, Zea mays
  unsure (1)..(279): unsure at all Xaa locations
  Clone ID: MRT4577_162119C.1.pep
SPRTTRNFFQPNFFFPXTYGSXPPLPPEGFSFFCERNSTDPFFFHAPPXFFFRPPQYPPPPRRWYFXGRFFFKGVSSPPPPCGGGETSAPSPFFXSPLPQRKYSFLPPXIPPPKSAIHGPPLKTPGGLPPXIPPPPPPRGPPPPPXFKNFFLTTNLSPPPRPPFIXGFSSGPPPXSHRGVFPFFFSFVLTSPTHPPRAGGTPTPPPVHFLELSPPSEPPPSPGNFFNPPTPSPKRPSPKKTKKKKKKKKKKKKKKKKKKKNPTKKKKKKKNTTPEKKKK

SEQ ID NO: 252782 - protein, 119 aa, Zea mays
  Clone ID: MRT4577_16211C.1.pep
SKQYSEGIETESKTKSCVEKEPCKEGMKLWIYLSKKRKLKPNHSGEQSPRPRYRYLFSFAIHSLEPLNRILKQAAKESPMGMHGGRVIPSGRWVVSCVLSWQGHFLQVHQIEILLFWET

SEQ ID NO: 252783 - protein, 69 aa, Zea mays
  Clone ID: MRT4577_162120C.1.pep
IIECRNHIYVDTSECVLGTSHPFSSHIMFFIELLPTGHVNRSQVGSVSYAYRSRKIRNEYVSARDLGQF

SEQ ID NO: 252784 - protein, 181 aa, Zea mays
  unsure (1)..(181): unsure at all Xaa locations
  Clone ID: MRT4577_162121C.1.pep
MRERNSIHIGQAGIQGGNAGXELYCLKHGIQPDGQMPGDKTGGGGDDAFNTFFSETGRXKHDPRADFGDLEATAIDEVRTGAYRQVFHPDERISVNEDAANDFARGHYTIGKXIADLCPDRIRKLSDNCAVLQGFLVCTAAEGGTGSDHESLLLERLSVDYGKNSPVEVTVYPSSQVSTSD

SEQ ID NO: 252785 - protein, 88 aa, Zea mays
  Clone ID: MRT4577_162122C.1.pep
PRGRPGNDVSSQLVYRLAAEATGEAIWEAPRDDAATVAHGACGFAENLQHLPSVAAPSPSLSRSCLTAAGPVRCPWTPTPSMPRTPHR

SEQ ID NO: 252786 - protein, 666 aa, Zea mays
  Clone ID: MRT4577_162123C.1.pep
MPPKSKASAAAEPVAVEDLFASLHRHIEAGAFKQAAKVADQVLKAAPGDEDAVRCKVVAYIKADEIDKALAAIRAAERLPIDLSYYRAYCCYRQNKLHEALELLRGQEETSAVLQLESQIFYRLGRMNDCMSSYEKLKKFKIDSMDLKINIIAALVAAGRASEVQAAMKALKVDLTTRALRDTRSFELAYNSACSLIENKKYSEAKEQLDLAKRIGKEELMVEDYGEADIEYELAPVSAQLAYVQQLQGQSQEAMQTYVNMINGQSADLSSLAVATTNLISIKGTKDTADSLKKLDRLIGTTTAPNQLHLVENLDYKLSPWQKEALYSARVLLLLHANKTEQAHELVRGLLGMFPDSVFPVLLQAAVHVKEKKIHKAEDVLSQYAEKRPENSKGLLLALAQIAANANHFQLAADSLSRIPDIQHMPATVATLVALKERLGDSNAAASVLDSAINWWKNSMTEDNKLDILTREAAAFKLSHGRDEEACLLYEELVKSHGSIEALAGLVMTSARTNLEKAEQYEKKLKPLPGLKGVNVESLEKTSGARHVEGPQDMKVDVPEEVKKQKAKKRKRKPRYPKGFDPANPGPPPDPERWLPRRERSSYRPKRKDKRAQVRGAQGAVSRETSATNVGASSKGSQTTNSSKTPAVNAEQPKTSNKSRKKKSRH

SEQ ID NO: 252787 - protein, 276 aa, Zea mays
  unsure (1)..(276): unsure at all Xaa locations
  Clone ID: MRT4577_162124C.1.pep
MPPKSKASAAAEPVAVEDLFASLHRHIEAGAFKQAAKVADQGQALHLLPPSAVRVSCPNPRSNLIPTGSAVLKAAPGDEDAVRCKVVAYIKADEIDKALAAIRAAERLPIDLSYYRAYCCYRQNKLHEALELLRGQEETSAVLQLESQIFYRLGRMNDCMSSYEKLKKFKIDSMDLKINIIAALVAAGRASEVQAAMKALKVDLTTRALRDTRSFELAYNSACSLIENXKYSEAKEQLDLGXRIWEEELMVEDYGEADIEYELAPGSAQLAYVQQL

SEQ ID NO: 252788 - protein, 217 aa, Zea mays
  Clone ID: MRT4577_162125C.1.pep
MDSIDADLARTQEERRKMEEALAAGAPMAVSSVTFDTDLYGGGGADPNRFAGYDTSIPASEDDAAEDDTELANPAPRRLAAYTGHAIAAADLPRSADDDDGLPKRSQRIIDREDDYRRRRLNQIISPERHDPFAAGEATPDPSVRTYADVMRDAALQKKKEDLLREIAKKKKEEEEKEKERKAAAPEQPAAATKRRNRWDQSQDGDAASGAKKEKTS

SEQ ID NO: 252789 - protein, 279 aa, Zea mays
  Clone ID: MRT4577_162126C.1.pep
WVPRGRPGLAISRLRGQIEYELAPVSAQLAYVQQLQGQSQEAMQTYVNMINGQSADLSSLAVATTNLISIKGTKDTADSLKKLDRLIGTTTAPNQLHLVENLDYKLSPWQKEALYSARVLLLLHANKTEQAHELVRGLLGMFPDSVFPVLLQAAVHVKEKKIHKAEDVLSQYAEKRPENSKGLLLALAQIAANANHFQLAADSLSRIPDIQHMPATVATLVALKERLGDSNAAASVLDSAINWWENSMTEDNKLDILTREAAAFKLSHGRDEEACLLYE

SEQ ID NO: 252790 - protein, 135 aa, Zea mays
  unsure (1)..(135): unsure at all Xaa locations
  Clone ID: MRT4577_162127C.1.pep
MSRRKTREPKEENVTLGPTVREGEYVFGVAHIXTDLSGRETLVRITGGMKVKADRDESSPYAAMLAAQDXAQRCKELGITALHIKLRATGRQQTKTPGPGAQSGLRAVARSGMKIGRIEGVTPGPTDSTXEKGGR

SEQ ID NO: 252791 - protein, 137 aa, Zea mays
  Clone ID: MRT4577_162128C.1.pep
KPPVLAGGPRNGRSTGLRSPPGIWGTGPPSAWEHDPPDRDGPLPKPKTAWTNGGWDLEGSSGSGGGSPGVKNEEAQFKASEQFFGQVRPGQCSPGVKKILLCPTRKGKQEGGAKNVLARFRFRPYPEFVPGKKQFPF

SEQ ID NO: 252792 - protein, 196 aa, Zea mays
  unsure (1)..(196): unsure at all Xaa locations
  Clone ID: MRT4577_162129C.1.pep
MSRRKTREPKEENVTLGPTVREGEYVFGVAHIFASFNDTFIHITDLSGRETLVRITGGMKVKADRDESSPYAAMLAAQDVAQRCKVLTHLSVCVFKDDIVLIITLKPRITXSALVLLYIRISDLCPVFCLQELGITALHIKLRATGGNKTKTPGPGAQSALRALARFGMKIGRIEDVTPVPTDSTPKKGGRRGRRL

SEQ ID NO: 252793 - protein, 94 aa, Zea mays
  Clone ID: MRT4577_16212C.1.pep
ITMDPTKFRPSSGHDTTVTTTNAGAPVWNDNEALTVGPRGPILLEDYHLLEKVAHFARERIPERVVHARGAFAKGFFECTHDATSLTRADFLRS

SEQ ID NO: 252794 - protein, 150 aa, Zea mays; identical to SEQ ID NO: 201540
  Clone ID: MRT4577_162130C.1.pep

SEQ ID NO: 252795 - protein, 150 aa, Zea mays; identical to SEQ ID NO: 201540
  Clone ID: MRT4577_162131C.1.pep

SEQ ID NO: 252796 - protein, 68 aa, Zea mays
  unsure (1)..(68): unsure at all Xaa locations
  Clone ID: MRT4577_162132C.1.pep
STSPIPTPLLFLSLDSDQLTEVRFIWFLRPSXXRRPGSPRRSGSSCRPSRPRITLPLPFLAPASNPNS

SEQ ID NO: 252797 - protein, 150 aa, Zea mays; identical to SEQ ID NO: 201540
  Clone ID: MRT4577_162133C.1.pep

SEQ ID NO: 252798 - protein, 124 aa, Zea mays
  unsure (1)..(124): unsure at all Xaa locations
  Clone ID: MRT4577_162134C.1.pep
IMSEQAVGQTVIPQPEIGVARCHHLRKLPQFTEVGRTEPCKRGLSVQLLQPPSCAAKVRRRLHIDNSPPPPEIMQALRPDSGGPTASRCPHCSPQVTERAHFKTCTLDAARGIGSIXENAPPPP

SEQ ID NO: 252799 - protein, 99 aa, Zea mays
  unsure (1)..(99): unsure at all Xaa locations
  Clone ID: MRT4577_162135C.1.pep
SAVPAQQTLESGLYLFVECRLTKRIWEEVVVWTTVEGLSPSNWDRSESVXWWTPLATTQDCTSFLILVNWIVWRQRNARIFDHKSSTCPQILAAIISEA

SEQ ID NO: 252800 - protein, 196 aa, Zea mays
  unsure (1)..(196): unsure at all Xaa locations
  Clone ID: MRT4577_162136C.1.pep
MSRRKTREPKEENVTLGPTVREGEYVFGVAHIFASFNDTFIHITDLSGRETLVRITGGMKVKADRDESSPYAAMLAAQDVAQRCKVLTHLSGCVSKDDVVLIITLKPRITXSALVLLYIRISDLWPVFCLQELGITALHIKLRATGGNKTKTPGPGAQSALRALARSGMKIGRIEDVTPVPTDSTRRKGGRRGRRL

SEQ ID NO: 252801 - protein, 150 aa, Zea mays; identical to SEQ ID NO: 201540
  Clone ID: MRT4577_162137C.1.pep

SEQ ID NO: 252802 - protein, 150 aa, Zea mays; identical to SEQ ID NO: 201540
  Clone ID: MRT4577_162138C.1.pep

SEQ ID NO: 252803 - protein, 162 aa, Zea mays
  unsure (1)..(162): unsure at all Xaa locations
  Clone ID: MRT4577_162139C.1.pep
GEKKGPRTGGERGEKEGRGGEGGSQKKGDTGRGPPGEKRGEARGLPRINSKGGPPKFPQKKQKTGGKKGDPKKTGAKKHCWGAKKKGKAPGPGLRAEKAALPPPPRGARGAPPGIIPGXPKGQKPQGENFPEGPTGKKGSPEGNPNKGGTNPKGAPKKPDLQ

SEQ ID NO: 252804 - protein, 59 aa, Zea mays
  unsure (1)..(59): unsure at all Xaa locations
  Clone ID: MRT4577_16213C.1.pep
AAIYVELYQIFLXGSHHLHLPNIIPMIKTMAESNTNADQIETLIGNNHNLPELPDHESI

SEQ ID NO: 252805 - protein, 48 aa, Zea mays
  Clone ID: MRT4577_162140C.1.pep
MGSHDPRAKRESRLMGGDKDDGYDYGNGKEEGVEADLQEFQDFDEFED

SEQ ID NO: 252806 - protein, 215 aa, Zea mays
  unsure (1)..(215): unsure at all Xaa locations
  Clone ID: MRT4577_162141C.1.pep
MSRRKTREPKEENVTLGPTVREGEYVFGVAHIFASFNDTFIHITDLSGRETLVRITGTILKPWLCTTXWQLYMVLTEMCXLNPVCGMKVNADRDESSPYAAMLAAQDVAQRCKELGITALHIKLRATGGNKTKTPGPGAQSALRALARSGMKIGRIGKEVLDLSRAGWPVLVSPALFHNALVLYTDAAFVLCAEDVTPVPTDSTRRKGGRRGRRL

SEQ ID NO: 252807 - protein, 169 aa, Zea mays
  Clone ID: MRT4577_162142C.1.pep
LQDIRNKVFPIKKINADSPKSLTTLPAKRKQRSLSSLVVDTPRSVVKRTGLTGKRTKAKRKTVASSAASPINNGTMQLPTKFENRDQKTDKSCASQSTNVASAANKTENQDQKKTRKTSAKQSTRAATSANRKQQNTDVDVSSKPSSENRKNGTTADKDELRKYSKIPR

SEQ ID NO: 252808 - protein, 55 aa, Zea mays
  Clone ID: MRT4577_162143C.1.pep
NFFFFFFFFFFFFFFFFFFFFFFLWKKNFFPRSHPGGAQQGENQKKGAPLKKNQK

SEQ ID NO: 252809 - protein, 59 aa, Zea mays
  Clone ID: MRT4577_162144C.1.pep
FNLCKQTSHPSLIIHTYLPTKFYHNTQVISFTTITFSTSKITPLKNTLHPFPTKCFPTP

SEQ ID NO: 252810 - protein, 144 aa, Zea mays
  unsure (1)..(144): unsure at all Xaa locations
  Clone ID: MRT4577_162145C.1.pep
AIXRSAWLRGGTWSMXNGVSYAIXFFSRSILDKGTGTPCYPYTSLKVTCFAWFVMFSFGVLAPDLSGWHADFGGECSYKTSLAAKLTRINRLGIRRQXEGLEGSKNTLALSITMIQQMYQHNLYQLLCRXXSFXTVCKKTXHAG

SEQ ID NO: 252811 - protein, 94 aa, Zea mays
  Clone ID: MRT4577_162146C.1.pep
PRVRPRVRPRVRPRVRGRVGVGHLCDQSSPLVSQHLVSIRLKTELVDLVCPFALGGARLPLSYEKWERLLLFFQGSPWLQRELWSLAESLTRPI

SEQ ID NO: 252812 - protein, 102 aa, Zea mays
  Clone ID: MRT4577_162147C.1.pep
KKRFFINSRVIRLTGTKRRHAGCLLNKGPQGVLNPWMGSLKTVKPLRGEFLKGELLKFSPIIRGNGENENSVFPQGKFFLKVGKFYKGGDPTGPPILPGTKG

SEQ ID NO: 252813 - protein, 99 aa, Zea mays
  Clone ID: MRT4577_162148C.1.pep
LKLAAPPIELRLLVPFWGLGETISGGGRFPLAANAFRKVFSGHASKDVLLGIANPRLGWVIGAPFVLTVVWIVWFPCLKVLVNGFGSIPLSPRAPFKAV

SEQ ID NO: 252814 - protein, 125 aa, Zea mays
  Clone ID: MRT4577_162149C.1.pep
KKKIFFSFNQLFTLNLVAYLQQQLFPFSQVGFAFFQQKQFFPFNQLAALNPAVYLQQQILLPFSQLATASRVSFLTQQQLLPFYQQFGANPATLLQLQQLLPFVQLVLTNPAASYQQHIIGGALF

SEQ ID NO: 252815 - protein, 238 aa, Zea mays
  Clone ID: MRT4577_16214C.1.pep
MDPTKFRPSSSHDTTVTTTNAGAPVWNDNEALDDTKTWPEDLLPLRPVGRLVLDRNVDNFFNENEQLAFGPGLVVPGIYYSDDKMLQCRVFAYADTQRYRLGPNYLMLPVNAPRCAHHNNHYDGAMNFMHRDEEVDYYPSRHAPLRQAAPPTPLPPRPVAGRREKATIRKPNDFKQPGERYRSWDADRQDRFVRRFADSLGHPKVSQELRSIWIDLLAKCDASLGMKIATRLNMKANM

SEQ ID NO: 252816 - protein, 63 aa, Zea mays
  unsure (1)..(63): unsure at all Xaa locations
  Clone ID: MRT4577_162150C.1.pep
NPRAVDNHGRFHVITLTDXXEDHLNPALLFSLRFCVEDSPRACPGALVLSCEDNFFSNSYYLS

SEQ ID NO: 252817 - protein, 133 aa, Zea mays
  Clone ID: MRT4577_162151C.1.pep
VCEVIRREAQHCDCLQGFQLTHSLGGGTGSGMGTLLVSKMREEFPDRIMVTYSIIPSPKVSDTVVEPYNATLSVHQLVENTDQTFCIDNEALYDICFRTLKIASPSYAELNHLVSATMSGVTTCLRFPGQLNA

SEQ ID NO: 252818 - protein, 136 aa, Zea mays
  Clone ID: MRT4577_162152C.1.pep
TKYFGKLFPYFKQQKFFPLNQLFTLNPVVYLQQQLFPFSQLVIAYFKQQQFFPFNQLAALNPAVYLQQQILLPFSQLVAANRVSFLTKQQLLPFYQQFGANPATFLKLQQLLPFVQLVLKNPGASYQQQIIGGALF

SEQ ID NO: 252819 - protein, 135 aa, Zea mays
  unsure (1)..(135): unsure at all Xaa locations
  Clone ID: MRT4577_162153C.1.pep
TKNGSFPANSMYKFLVGSGMKVTQRXWQMKVPLKIKXFVWFLKKGFILTKDNLVRWNXNGSKVYFFCDKLETVRHPFFGCHYGSLSLACGSLGVWWHPSNTRVSLVLRLVQNEARQTQFACFDGTLRSLVEKFGS

SEQ ID NO: 252820 - protein, 91 aa, Zea mays
  Clone ID: MRT4577_162154C.1.pep
LSKKKFFPFNHLAAMNPAVYLQQQILRPFSEQVAASGASFLTQQQLLPFYKQFGANPAPLLQIQQLLPFVQLVLTNPGASYQKQIMGGAPF

SEQ ID NO: 252821 - protein, 63 aa, Zea mays
  Clone ID: MRT4577_162155C.1.pep
TPPTTLLPKRTTQVLPFFDPFTSPSSHKSISHFWNPYQRTNAEPTEKATQGLPIEIEPLQPST

SEQ ID NO: 252822 - protein, 100 aa, Zea mays
  Clone ID: MRT4577_162156C.1.pep
MVIVVAYFQQQQLFPFNQLAALNPAVYLQQQILLPFSELVAASGVSFLTQQQLLPFYKQFGANPATFLQLQQLLPFVQLVLTNPAASYQQHIIGGALLLD

SEQ ID NO: 252823 - protein, 120 aa, Zea mays
  unsure (1)..(120): unsure at all Xaa locations
  Clone ID: MRT4577_162157C.1.pep
MAASMISSSALAVAPQGLPPLGRRASSFADNCSKNKIKTDKPYRIGGGLTDNADANGRKGKGKGEDQFNDKYGXNVDGYRPIYNEDDXAPTGDVYGSGTTGLLIWAGTLAVILGGGALLV

SEQ ID NO: 252824 - protein, 75 aa, Zea mays
  Clone ID: MRT4577_162158C.1.pep
FLIFHFFFFCRLWFTTTTDLPASCRAFGSVSSLSELHGTWHAVAEVATHGLGEDDDPRMACPQRTTPSLGDNGRS

SEQ ID NO: 252825 - protein, 71 aa, Zea mays
  Clone ID: MRT4577_162159C.1.pep
IDLEVAASFYMHTSGIASLAITLFCSESAMASRFVGSVTEMSAAARFARRIKILPKKKAPNFAFLVSAGRL

SEQ ID NO: 252826 - protein, 89 aa, Zea mays
  Clone ID: MRT4577_16215C.1.pep
MERGGHGNWLEQGAEMEVREGWRQIAGRGGRRAKAGEGAGHPGGGEEMGRRPPTERDWRPRKKARPPGKRGGHGSSREGDVSLGATSRD

SEQ ID NO: 252827 - protein, 63 aa, Zea mays
  Clone ID: MRT4577_162160C.1.pep
MSDFADRALTAGIGGFVGTGQTSPMLALRRAVPYKCRLAWVTNDIYTKEDGEGQMKHGALPAE

SEQ ID NO: 252828 - protein, 126 aa, Zea mays
  Clone ID: MRT4577_162161C.1.pep
SPPKILGSFFQAFLVLFIKSSSGGQLRCFHFPPWGFFFLNPTPPSFWGLLIWVFFVLPFFSFAPPLFQFWGPPFFPKAQDPGGAPPWFLVRSFFPSKKKKKKKKKKKKKKKKKKKKKKKKKKKKKK

SEQ ID NO: 252829 - protein, 105 aa, Zea mays
  Clone ID: MRT4577_162162C.1.pep
HPSHNAHYMSTISGLTPICEKPYLMLTRMFPNAISRRGCVKHDPRLAKATNTQQNEPKICPFRENDGVLKPVSAKSSKNTPEPRKTFKQQMRLPAPWCLNESCNP

SEQ ID NO: 252830 - protein, 59 aa, Zea mays
  Clone ID: MRT4577_162163C.1.pep
GPSERPKDRFLGERNRTQGILLVLVPKCKRIGSSAKGMQVLSDLSFCKSTAPTRVCTRR

SEQ ID NO: 252831 - protein, 64 aa, Zea mays
  Clone ID: MRT4577_162164C.1.pep
PLAPSVLFFFLMPFWLLGFFFLRKKKNNRHSSYGGTGTEFTRSHKSPNLFRGWAIIQIFPQTQS

SEQ ID NO: 252832 - protein, 56 aa, Zea mays
  Clone ID: MRT4577_162165C.1.pep
ERTPEFTINLHKHVHVCTLYKNAHNAIKEMTQFAQTAMGTNSIRFDVRLNQHIWCS

SEQ ID NO: 252833 - protein, 979 aa, Zea mays
  unsure (1)..(979): unsure at all Xaa locations
  Clone ID: MRT4577_162167C.1.pep
IYDWIKSTGTIRVDPEDEKRRAQRNPMYQVKTYKNLNNKCMELRKVCNHPLLSYPFLNHGKDFMIRSCGKLWNLDRILIKLHKSGHRVLLFSTMTKLLDIMEDYLQWRRLVYRRIDGTTSLEDRESAIVDFNRPGSDCFIFLLSIRAAGRGLNLQSADTVVIYDPDPNPQNEEQAVARAHRIGQTREVKVIYMEAVVDNISSYQKEDELRNGGSGDLEDDLAGKDRYMGSIESLIRNNIQQYKIDMADEVINAGRFDQRTTHEERRMTLETLLHDEERYQDSVHDVPSLQEVNRMIARTESEVELFDQMDEDFDWTGDMTKHHQVPKWLRVNSNEVDAVVASLSKKPSRNMSSGGIALDTNETLEXKRGRPRGTGKYSIYREIDDEDLEESDEDSEERNTASLPGEGEVGEFEDEEDNDDSVPDNKDESEEEEPMNDDVYEFTEGLRGRKANRMEEAGSTGSSSGSRRLPPPVPSSSSKKIXSLSALDARPGTLSKRTPDDLEEGEIAMSGDSHMDLQQSGSWNHERDDGEDEQVLQPKIKRKRSIRLRPKPNAEKQEDRSGEGAFPQRAARQQDAVHPIVKQKRNMSSRKVSPASRSGKLSHLSGSGEGSAELSKENWSSKAIDSTAPEFGGTKMSDSMQRKCKNVISKLWRRIDKEGHQMIPNISSWWRRNENSSFRGPAGSTLDLQKIEQRVDGLEYGAVTEFIADMQQMLKSVVQHFSYRHEVRIEAETLHNLFFNIMKIAFPDSDFMEAKNAMSFSNPGSGAAAAPSSSKHAAPSLKRSRASASASASEAEQQHGSGHSSRHNQPSEAVPPSRSHSSRSERDPRHGGSRDQHLQDGAAGLLHPSDMFIVKKKRQERARSGXVPFQLGPRRRTXSPANPGRPGPAPSPRGARTPXSRGIHRHTRLSSRXSAGSGWGSGGAHSDHQAGASSSAPGIGDIQWAKPAKRLRTDXSRQRRPSLTVGSSLASYGCVNAST

SEQ ID NO: 252834 - protein, 39 aa, Zea mays
  Clone ID: MRT4577_162168C.1.pep
YFLCPNHLLSRRDLLNEAWGLRLPCLLTAPRALPLRQEF

SEQ ID NO: 252835 - protein, 365 aa, Zea mays
  Clone ID: MRT4577_162169C.1.pep
RNCFTGSSSGSRRLPPPVPSSSSKKLRRLSAVDARPGTLSKRTPDDLEEGEIAMSGDSHMDLQQSGSWNHERDDGEDEQVLQPKIKRKRSIRLRPKPNAEKQEDRSGEGAFPQRGTHLAFQGDGHYDSQFKSDLDARAFPAARQQDAVHPIVKQKRNMSSRKVSPASRSGKLSHLSGSGEGSAELSKENWSSKAIDSTAPEFGGTKMSDSMQRKCKNVISKLWRRIDKEGHQMIPNISSWWRRNENSSFRGPAGSTLDLQKIEQRVDGLEYGAVTEFIADMQQMLKSVVQHFSYRHEVRIEAETLHNLFFNIMKIAFPDSDFMEAKNAMCFRILEAAVRIRIIKRGQARQHPASETSSGRSLPRG

SEQ ID NO: 252836 - protein, 71 aa, Zea mays
  Clone ID: MRT4577_16216C.1.pep
NKEEIDPFFKPPVSTWAVGGANHFPPNFFAGRKFFIIASKVVPTGGGTGPFGRRPECSYLCLKPLGGGVAA

SEQ ID NO: 252837 - protein, 56 aa, Zea mays
  Clone ID: MRT4577_162170C.1.pep
HTHLQLNMQQESHDERTLLLHWSQTDIKQILDIIQHLLGQTEPICNETRKYLLMDL

SEQ ID NO: 252838 - protein, 55 aa, Zea mays
  Clone ID: MRT4577_162171C.1.pep
TKEDYLPVFDPILFIPQEDEDEPKKGMISLMAYVPRSAVQASDSRIDGLVPKVGR

SEQ ID NO: 252839 - protein, 140 aa, Zea mays
  unsure (1)..(140): unsure at all Xaa locations
  Clone ID: MRT4577_162172C.1.pep
MAMGLASATAAALFRSALSAPHGAGARVRPQLLFPFLAPLHGGGEGGFFXXXXXGXAKGKKKKGPXSGNLPAALGVXIRGARESLGGGQQEPVPENFPFELLGEEGVSGVLLGGGYLGEXVGGAGRLPLLRGGPVFGVEG

SEQ ID NO: 252840 - protein, 92 aa, Zea mays
  unsure (1)..(92): unsure at all Xaa locations
  Clone ID: MRT4577_162173C.1.pep
ASSYDPKFGGFGSAPKFPRPVEDYIMLYKFHKYMEAGKEIEALNIKKMVTHTLDCMARGGVHDHIGGGFXRYSVDECWHVPHFEKMLYDQGQ

SEQ ID NO: 252841 - protein, 76 aa, Zea mays
  Clone ID: MRT4577_162174C.1.pep
VMLRRHRRHARSSVQKLVWIVAWPTLSSSSIIIWQTAPFMLDDPRHSPCFLLSLSLSLSLSGSHRLHRELVVYWDL

SEQ ID NO: 252842 - protein, 78 aa, Zea mays
  Clone ID: MRT4577_162175C.1.pep
LVVGQPARPPTRREEGMFGDSGRTPPLCSSPRSNNGISMHGPCCTLGNCARRLVSFCPLLLNSVMVLWYYTSRCQLCC

SEQ ID NO: 252843 - protein, 146 aa, Zea mays
  Clone ID: MRT4577_162176C.1.pep
MSSTPATSPNRYGSGASDRWRLCPLVAPDSLVQHRTCTVHYPPPPPSKATGTTAKTSNRRSRMRSRLLKVAIASHRSMLIVKLKAYAISVGCHFIKADKWLTLSKDEVFVKLYGVKTSNRGAFVQLCNIVDLTDEDRLVARIFPWS

SEQ ID NO: 252844 - protein, 70 aa, Zea mays
  Clone ID: MRT4577_162177C.1.pep
NREKWAGGENYKTKNFSWAYGRWYETNRHPKGNIKKITLTLAVWDDSTTLKLGISRRVKILRKEKPACVG

SEQ ID NO: 252845 - protein, 44 aa, Zea mays
  Clone ID: MRT4577_162178C.1.pep
QLDHQTPGHFKYGNTPVCVCNKDVSCGQKKPTAKKKKKKKKKKE

SEQ ID NO: 252846 - protein, 107 aa, Zea mays
  Clone ID: MRT4577_162179C.1.pep
PEGTPLFTNKNFLSCKALYPPKNSLLWDGWGTRLFRKFLFPPPFPKARFSKSEGGGCGNGFYLGFPQTSGCSPGKQGEKIMRLKFFAQKKKKKKKKKKKKKKKKKKK

SEQ ID NO: 252847 - protein, 165 aa, Zea mays
  unsure (1)..(165): unsure at all Xaa locations
  Clone ID: MRT4577_16217C.1.pep
PGIYXYSDDKMLQCRVFAYADTQRYRLGPNYLMLPVNAPRCAHHNNHYDGAMNFMHRDEEVDYYPSRHAPLRQAAPSTPLPPXPVALRREXKATIRKPNDFKQPGERYRSWDADRQDRFVKRFADSLGHPKVSQELRSIWIDLLAKCDASLGMKIATRLNMKPNM

SEQ ID NO: 252848 - protein, 72 aa, Zea mays
  Clone ID: MRT4577_162180C.1.pep
LEVWRHVPGVQELLSSHFPSSSSTCMPASSHADYNMHHACIFILSLMHSDMVPELKPLNQYKNSNYILTSCD

SEQ ID NO: 252849 - protein, 37 aa, Zea mays
  Clone ID: MRT4577_162181C.1.pep
WFWLPALVAVNVTPPVLYYTPRYKRICRIVKKNNSCQ

SEQ ID NO: 252850 - protein, 85 aa, Zea mays
  Clone ID: MRT4577_162182C.1.pep
VGYCRHFCVFLKLCAYCQSTQSIGQYRVQNPLHAVKRIGRSCYKVRPAFHHITCRRGRGPPPSPKHPISDVLLPQSSLHIVTRAA

SEQ ID NO: 252851 - protein, 83 aa, Zea mays
  Clone ID: MRT4577_162183C.1.pep
NPQKRPTWFLLWPCPRPCGVHWLCFVVLSPEYNPPFIARGRIPPPYLSPLWSPKIITLFLRPLFLFLSGRNVICFGKSTHIPF

SEQ ID NO: 252852 - protein, 51 aa, Zea mays
  unsure (1)..(51): unsure at all Xaa locations
  Clone ID: MRT4577_162184C.1.pep
PTKKXQLCNFKFFCSKKKNSMFSKSPEEIFSERHNLNNYQLSMEHCTHKFI

SEQ ID NO: 252853 - protein, 65 aa, Zea mays
  Clone ID: MRT4577_162185C.1.pep
MIDDSDKENAAIKEFRLKHLFANHETAANRIKVLELLKNKPLKLKHYNLRRILKNYPNMNLTKKR

SEQ ID NO: 252854 - protein, 148 aa, Zea mays
  Clone ID: MRT4577_162186C.1.pep
LREELPDVLCKDHSFDIYREDIVFRDPLNTFKGLGNYKRLFWALRLTGRVFFRASWVEVVSIWQPAENSILLRWTAHGVPRVPWGGWDAHARFDGASVYKLDRNGKIYEHKVHNVATNPPAKSKVLPVHELVRSLGCPSTAEPTCFDF

SEQ ID NO: 252855 - protein, 49 aa, Zea mays
  Clone ID: MRT4577_162187C.1.pep
FPLLVMDKPITPKPPSPYKPYLHLNTGPNFAPPDWLTTPPNRPKKELNG

SEQ ID NO: 252856 - protein, 241 aa, Zea mays
  unsure (1)..(241): unsure at all Xaa locations
  Clone ID: MRT4577_162188C.1.pep
MSQLLHLPDLAAPRTRMGSALAAGARVKQGEAGTARGRVLRVADPVRRECLVPVPPPPVLXPGEARRRRRRRRRXDEERQRYYLNLGYAIRTLREELPDVLCKDHSFDIYREDIVFRDPLNTFKGLGNYKRLFWALRLTGRVFFRASWVEVVSIWQPAENSILLRWTAHGVPRVPWGWWDAAHARFDGASVYKLDRNGKIYEHKVHNVATNPPAKSKVLPVHELVRSLGCPSTAQPTCSDF

SEQ ID NO: 252857 - protein, 68 aa, Zea mays
  Clone ID: MRT4577_162189C.1.pep
ACRLLSLLFLYMRSCSCSDVCLKMSGIVYLWLCCILYLNHACVLLTCPYFVSSCPADSENQASVNCST

SEQ ID NO: 252858 - protein, 52 aa, Zea mays
  Clone ID: MRT4577_162190C.1.pep
DRKVIAHQSVLLTLQSDVTVSRVVAHSRVEPTPLAVQLSVSPSKDTPGSPKI

SEQ ID NO: 252859 - protein, 153 aa, Zea mays
  unsure (1)..(153): unsure at all Xaa locations
  Clone ID: MRT4577_162191C.1.pep
MAAKRYALLVLIALYESATHALIXVQQCSLAPRAIITQGLPXATLMGFEHLPVHANRQQQALAHSDLPFSKPNCNHLSLPHLTIQAIAAQQALQVLPALIHLAMVNPDGYLHEQMLASDPLALANVDAHHQHQQLQQFLPTLSQLAMVNADAY

SEQ ID NO: 252860 - protein, 43 aa, Zea mays
  Clone ID: MRT4577_162192C.1.pep
SQLDPLILTHIQILNHFFFYTIIHIPIDVSNNSFYLLLNSLLK

SEQ ID NO: 252861 - protein, 106 aa, Zea mays
  Clone ID: MRT4577_162193C.1.pep
NGVNPGVPNTGGGNTPPPKLILVPPKKVVVPPRRRNKNSNPLNRPPAALVQVSSACRICQRRVPALTSSRLMPPYPFFFFYSCIWLSFFLDLNQTSVISQFSNEWG

SEQ ID NO: 252862 - protein, 87 aa, Zea mays
  Clone ID: MRT4577_162194C.1.pep
VERLVGFLQTRSLRLALLPGHPSQSPQVVPSRSVRRLPSQPRQGSLPGHGDVSARGPGPGQLEAATAPNARRHESPVAFALCKFVQY

SEQ ID NO: 252863 - protein, 78 aa, Zea mays
  Clone ID: MRT4577_162195C.1.pep
GTPLTDEYDQTSYYSASQSYNWTAETSIPRPSTDRQYGSPSGLIAGIRNASRSQVRRTIMNSRSTHGSIQFSILWSHM

SEQ ID NO: 252864 - protein, 89 aa, Zea mays
  Clone ID: MRT4577_162196C.1.pep
RQSRRNHDDRFHPYCGLPQITTRVTCRRGTIAHKMACAEESTCTLTPIGPPLYKYPLNKLKRGINSQEAGQSRARYCVGSDADNAAACT

SEQ ID NO: 252865 - protein, 39 aa, Zea mays
  unsure (1)..(39): unsure at all Xaa locations
  Clone ID: MRT4577_162197C.1.pep
IXTRWLSTDKLHYTGSLKTGAVLLTKKKRKFLKIFAIFF

SEQ ID NO: 252866 - protein, 71 aa, Zea mays
  Clone ID: MRT4577_162198C.1.pep
YLFCVGAHANRQYASPIGRIYYYVNWSTSIRVYHKVFLIHLSQCGHLNMDHLIKCKYCLSSQSGGHLPTLT

SEQ ID NO: 252867 - protein, 59 aa, Zea mays
  Clone ID: MRT4577_162199C.1.pep
LDLLYGYLSIIDQIECSENSIAMNTTGFEHGILPTQLTFISPVLSTLVRPMSVALIGSY

SEQ ID NO: 252868 - protein, 44 aa, Zea mays
  Clone ID: MRT4577_16219C.1.pep
LFVDSLGHPKVSQELRSIWIDLLAKCDASLGMKIATRLNMKPNM

SEQ ID NO: 252869 - protein, 126 aa, Zea mays
  unsure (1)..(126): unsure at all Xaa locations
  Clone ID: MRT4577_1621C.1.pep
ESTASERRTXVSRWEIVPVATPFYICPPPFFRPKLPKQAGMPDDENEVESAFKRAMPWLADDFALKDVQNALFPGLSLVQWMAMQQNPQMLATASPAVQSQYLTSNALGMDGISSVSEDPTKRLTM

SEQ ID NO: 252870 - protein, 565 aa, Zea mays
  Clone ID: MRT4577_162200C.1.pep
MAAVNCLYVAAASTAASAAALQWWASSLLDGDAGAGEDGAWLGAVLRSKVTVALLANLAVHVFLVIILALKTLFFVQLTSIETRKVLEHIINYVIYKGTFLPLVVPPTSQQIILWSTWLVILCSLKMFQSLARERLEKLNASPSVTPSKYFRVYSALLLVLSADLLWMWLCAGFCSFCNSKLFWLLFFEPLSIAFDTLQSTMVHGFQLFDIWQHHLMESGADFLDLQKSYKQAAGSFSEWRGKLTRNFGFAIDLISLLMSLGHYSMIFWLRGMAFHLVDAVLLLNSRALIDSFFERIKAHIKLRKALSSLDGALPDATYDEICAYDDECAICRGPMGRAKKLSCNHLFHLACLRSWLDQGLMEGYSCPTCRRPLLLSSEGQRRSTTAEVANVQRIAEQLTMGMNQQRVPGNEHPVEQQNPSDAVWRGAGLDASWIPPWSSPVMDHPSSSSAVRSVGLTGVQMMMTQLASVTDNYGHADGTWNLWPEPMAGSSLVPSTSSISGTASASGLRLRGSAGISNGSLSEVLTMVDRVREVLPHIPDELILEDLMRTNNINATVNNLLLMQ

SEQ ID NO: 252871 - protein, 268 aa, Zea mays
  unsure (1)..(268): unsure at all Xaa locations
  Clone ID: MRT4577_162201C.1.pep
MVVNGRPLKRARARVEARDFARFPAAGDCGAAGTFREAVRGFLAKHARLLPLPSIFSPAAAAAPPHLLIWRVSLRVGEAGEEESGGGVELNVVEEDVLRSRSVYCDQCRVVGWSGHPVCVKRYHFIIENDSSHLSGRRRTCCLRCGTPMAAGESRVNGREGGSRFLTGRDIMSLWDRLCKVLHVRKXLVMDISKKHGMDYRLLHAVISGHPWYGQWGYKFGAGSFALTSDTYRNAVDMLSSINLALYFSHRSQIRTPLQNTIALYWAL

SEQ ID NO: 252872 - protein, 147 aa, Zea mays
  unsure (1)..(147): unsure at all Xaa locations
  Clone ID: MRT4577_162202C.1.pep
XINKLPGDKLGRVVHIIQNREPSLRDSNPDEIEIDFETLKPSTLRELESYVATCLRKKTHKKVSGKSKDEQMAEKKQELEKRLQDVTGQLGSAKKAAKKVEDAAAGKLDAAVVPPAGHLSSSSSSSDSSSSSSSDSSSSDSSDSEAG

SEQ ID NO: 252873 - protein, 543 aa, Zea mays
  Clone ID: MRT4577_162203C.1.pep
RPGNKRRKNTDQSTKPTDLPNRLCGAESEQADNVGAKSTLPQIAVEPHCAAKHSKGDPQIAKQGVVARQNGAETMKGHENQFGISFCVASTETEKRVTCLAQRGTCLGTQYDGPSTKGMYDCSVQDTPMDDDVELDNVACIIAVDKYVNGRGKTQENYTRKEAAQRKDSSENQGQNDALELDNLRMEMQADERPLEPGNKRDRKWQKNVYGLGSASGQKETLSRRENPRSDRGMVHSNDSKTIYYRKGGTEVDNVDDHPLEKQDHQDTSSDGSKKRSRPVDNASGGNRPYLDENKKRNLREDGRYAHYEDWRSERNTAADTSGYKAQSEEKPVWTNTRTGSREHSLDRQRIECGDSYRGTYNNRQRHEWLHPHASGNSSRIGWDDRRQWSSSRSPFPWAEFGGDRSCSRAHPRGSKYRTGGRHDHPRYLGLGTPQHGTSRPHQRMGWDRDTTFHDHQHGRRPPHHTMGWDRAPFRDHQHGEYDDSRYGEYDATDNGPDSAHRPYTAAGVAGRSAPSYQLAGGYGEGSRAWRPVTDKYAPWPLP

SEQ ID NO: 252874 - protein, 255 aa, Zea mays
  Clone ID: MRT4577_162204C.1.pep
PPHLLIWRVSLRVGEAGEEESGGGVELNVVEEDVLRSRSVYCDQCRVVGWSGHPVCVKRYHFIIENDSSHLSGRRRTCCLRCGTPMAAGESRCALCNFDMDGEEIEECAYLHLDDPTHLLHAVVHANGYGHLLRVNGREGGSRFLTGRDIMSLWDRLCKVLHVRKVTVMDISKKHGMDYRLLHAVISGHPWYGQWGYKFGAGSFALTSDTYRNAVDMLSSINLALYFSHRSQIRTPLQNTIALYWALSNRQLVTI

SEQ ID NO: 252875 - protein, 70 aa, Zea mays
  Clone ID: MRT4577_162205C.1.pep
VLCLRLCPGSCPKKAGKKKAENTVLYVKLEKLYSCAKIKILREIGPFTDLGLKEAKDLVEKAPHFLKKSL

SEQ ID NO: 252876 - protein, 300 aa, Zea mays
  Clone ID: MRT4577_162206C.1.pep
MALASVAKVVLGSIAFCVFWVLAVFPSVPFMPIGRTAGALLSAVLMIVFHVISPDDAYASVDLPILGLLFATMVVGSYLKNAGMFKHLGTLLAWRSQGGRDLLCRVCVVTALASALFTNDTCCVVLTEFVLELAAERNLPAKPFLLALASSANIGSSATPIGNPQNLVIAFNSKISFPKFLLGILPAMLAGMAVNMVMLLCMYWKDLDGSGSGMDLDGKRMEAVEEGAVVVVEPSPKQQQQQLGGSNGYMSPLMTENISTKHPWFMQCTEQRRKLFIKSFAYVVTVGMVIAYMVGLNMSG

SEQ ID NO: 252877 - protein, 167 aa, Zea mays
  unsure (1)..(167): unsure at all Xaa locations
  Clone ID: MRT4577_162207C.1.pep
MTDTQIAACGSVGGPYLGAHRQCDYITVAGLSVRHDLTGNVPSHMSSARLXLAHFASYGXEIETXPLXLDKPTRTLLGSALSVYNTPEGAHASLRDSVXAIDIHQLVCLLAIHGKKAKQGQSQSFWTCQPAARPXHQMLSAGPQDIXGGLGLGSQMGAQYGSPGSDM

SEQ ID NO: 252878 - protein, 240 aa, Zea mays
  unsure (1)..(240): unsure at all Xaa locations
  Clone ID: MRT4577_162208C.1.pep
MARIAPLLLVALLSLAVQLPPSAACPSCPKPKPPPPPPRKLTPPPSVPCPPPPHSPKPTPPHTPTPKPTPPHTPTPMPTPPHTPTPTPTPPHTPMPPHTPTPAPTPPHTPTPPHTPTPAPTPPHTPTPMPTPPHTPTPVPTPPYTPTPPSPIPPTPTPVTPPSPVPSPTPSPPSGKCPVDTLKLLGCVDALNGLVHAVIGSSASDTCCPLLXGVSGVDAALCLCXTIELRXAHINLVLPI

SEQ ID NO: 252879 - protein, 77 aa, Zea mays
  Clone ID: MRT4577_162209C.1.pep
SSLFGGRPILCLRGHQRDPVVLTTATEDRYLLCSDDTIHLVFLIRPQRRQFKPHYPSSEVRFMSPRGTPYHRSWKSL

SEQ ID NO: 252880 - protein, 163 aa, Zea mays
  Clone ID: MRT4577_16220C.1.pep
SGIYYSDDKMLQCRVFAYADTQRYRLGPNYLMLPVNAPRCAHHNNHYDGAMNFMHRDEEVDYYPSRHAPLRQAAPPTPLPPRPVAGRREKATIRKPNDFKQPGERYRSWDADRQDRFVRRFADSLGHPKVSQELRSIWIDLLAKCDASLGMKIATRLNMKPNM

SEQ ID NO: 252881 - protein, 130 aa, Zea mays
  unsure (1)..(130): unsure at all Xaa locations
  Clone ID: MRT4577_162210C.1.pep
PPPNQIPETRAREPRNGKPKRGPPNRTPGGKTGHREPKTKAKKQRNGRKGPGKRRHPGSGPPARAPVKRREKGTPPGQEACPNGGKHQPGRXPLGPQAGKQRAGATRGNNSGEQPEXSPARGRVQTPPGA

SEQ ID NO: 252882 - protein, 62 aa, Zea mays
  Clone ID: MRT4577_162211C.1.pep
HNCFLFAFEIHFSLGNDEEQLVRVSENHVKISNETLKSSDSKSHELSFHFHFGIVVMFLCIS

SEQ ID NO: 252883 - protein, 75 aa, Zea mays
  unsure (1)..(75): unsure at all Xaa locations
  Clone ID: MRT4577_162212C.1.pep
GGNPHSISPMVFSFHAWGILAWMTPPXYLGQLLSFSSKETMKAGGSARPRGDVRVLGGQKALEEHPVLRRRGGRE

SEQ ID NO: 252884 - protein, 89 aa, Zea mays
  Clone ID: MRT4577_162213C.1.pep
TSGEGKRQSHHNLMDSWVPNKPAQALSDKRDSIASGLKPPVDKGARLNSCKKRLGFSGHYDPDPKKVAQSTAGHEICLYQFIFTTLLFP

SEQ ID NO: 252885 - protein, 176 aa, Zea mays
  unsure (1)..(176): unsure at all Xaa locations
  Clone ID: MRT4577_162214C.1.pep
MADADKEESGLTLLDKISDKLHRRGGRSSSTPCSDHHRSPRTAAVKGNIYSIFRRQKPIDSAPGSGXEHDLSLXRNKTISXGLLPRPTAFWLLLEVLHYHLLMLLYHWLILTLAILFLWSNATTLITXSPANIPEMKIPHDTAVNAAHCLIYEIYMMFATLMHIAQGHDLNKFLIV

SEQ ID NO: 252886 - protein, 57 aa, Zea mays
  Clone ID: MRT4577_162215C.1.pep
RIENRNTLKWLRPSPRRSGRSTTEPFYMHAVRRGTALILPPGKQGLAISAISLRRTL

SEQ ID NO: 252887 - protein, 151 aa, Zea mays
  Clone ID: MRT4577_162216C.1.pep
MDHGGGGGGGGRSSSRLRDRLARMFRPGSLLRSTCNNNTASTSSSSSCSAAVGAAADGVTASKPPPSSACSSSRALLAADSAISRDRDSFLTSSRRDYATVVGRTESFSNALDRVHRRAGAAEQSLSPPARLSMNASPLMESKKKSPLHGH

SEQ ID NO: 252888 - protein, 250 aa, Zea mays
  unsure (1)..(250): unsure at all Xaa locations
  Clone ID: MRT4577_162217C.1.pep
GGPSQQAIDRSAYFLLTPSINILLLQQTKPVACSSSRPSIGASYAYVYVHHARRRGEEGIQDRDGDQHRRPHRGHGPGGGGGGADGHGEPVHRVRGVRRAAAHRDLXPTSRPWSSSWAPPPSRRSSRPSPSSSACGRRARTRRPRCSCRCWAPPCRRCCTRPPARRSRPAPTCPTAQPTAGASTSAPPTGAAAAATSADRCISPSTSRSPRPSPCPSPRWSGALEERRPAVDSDSDSSSDGCDHSCRHKH

SEQ ID NO: 252889 - protein, 254 aa, Zea mays
  unsure (1)..(254): unsure at all Xaa locations
  Clone ID: MRT4577_162218C.1.pep
LNTRYCRRGLVDPLHYQLMNHTFPIFHHLIDRAIMTERKRRKMEDRKRKIGGXGXRSCRPRXRQPAXQFKQSHPQGHQHQHQRQHQXSSSRGSSLRSSSSTARXNQQGGNQYQRQNXSTSPSCPSNQSEQPSSLVQGGGHGCFHYGQQGHXATHFPKKAAQQQSAPNATARQNAPQQGVSNRRQPRXPNXGKVKHLEADTVQETPGVALGTVSVESHSTNVLFDTGATHPXVTASWVETHTXVAPMYPPMRVRT

SEQ ID NO: 252890 - protein, 37 aa, Zea mays
  Clone ID: MRT4577_162219C.1.pep
EEMSSSDQNLAATPASSDGAEPSPGGRPTAVSSRLLH

SEQ ID NO: 252891 - protein, 174 aa, Zea mays
  unsure (1)..(174): unsure at all Xaa locations
  Clone ID: MRT4577_16221C.1.pep
MMFSSQVDAFSPSQFTASQNAAADSTPNKFRGALGTMPLTVKQIADARLAGTGEKGAPFVVDGVETANVRLVGMVSGKAERNTDVSFTLDDGTGRIDFIRWLNDAADSAETAAIQNGMYVAVIGSLKGVQDKKRATAFAVRPITDYNEVTLHFIQCVRMHIENTXSKVGSPAHT

SEQ ID NO: 252892 - protein, 69 aa, Zea mays
  Clone ID: MRT4577_162220C.1.pep
TRGAGALCITTRMLQAECEPDQYVPGIARHLDAASPAAPQHGLLIDCELEVKQANALISTVLYIRRVIK

SEQ ID NO: 252893 - protein, 101 aa, Zea mays
  Clone ID: MRT4577_162221C.1.pep
MTLFGAVSIAITTIFHCTAQQNIAGPSLEWSVPLMPWPAAASVFLNVFLITTLKVRSYQRFGIWSLVTIVFYVCYGVHSTYSAEENEIANAMIHHANLDIS

SEQ ID NO: 252894 - protein, 110 aa, Zea mays
  Clone ID: MRT4577_162222C.1.pep
PFTHHASYWLRSGYGQTLAFPIFLEVSIISSYMHRLPGVNFFIFFHLGLQTQRTQKFLVFSDLFPFSYLYIPLEMYVFLFGVQKKRLLIKIVIKTHKQFFFFLKKKKIIN

SEQ ID NO: 252895 - protein, 122 aa, Zea mays
  unsure (1)..(122): unsure at all Xaa locations
  Clone ID: MRT4577_162223C.1.pep
QPHLYATTLTLFLHSSTFPRGSTYYLSSPLHLPSSSAFNHALLTIHMTHSKSYPSNTSSTTTYHPYRTPFLGPLFHXPPIYLTNYLTIYYILFTYLLSSNPQTLTHNLHLHVIHSHSDILVT

SEQ ID NO: 252896 - protein, 100 aa, Zea mays
  Clone ID: MRT4577_162224C.1.pep
EIIGMTLSLCSIILFNLLICCSPLPLYSTHSCSLMSITFTPASFTVHTNDPHPHILPLLKFYLAPYVDTDICYISNDPEAGERFAAALSTSLMTEGVSFL

SEQ ID NO: 252897 - protein, 111 aa, Zea mays
  unsure (1)..(111): unsure at all Xaa locations
  Clone ID: MRT4577_162225C.1.pep
PRRLRARCAGSRAGVAPRPEVAVCPKHPPQASVPPXCSNASFPVRRXIXHSLHCXRPPSTSLSSICSLLRQKVGPDLTXYLENPGRRRPNEPTPVLDRCIAVGKLRPTSAS

SEQ ID NO: 252898 - protein, 109 aa, Zea mays
  Clone ID: MRT4577_162226C.1.pep
SLQWLGGLFSPSALSSGCVGGGSLLWVDFALLPWLLPLGCLARWLVPLFIGSRGCLPGWCLVVFWGLFSVWLLLLVSVLFLACVGGLRWAFVFTSPPVGVGGGGYLLGV

SEQ ID NO: 252899 - protein, 138 aa, Zea mays
  unsure (1)..(138): unsure at all Xaa locations
  Clone ID: MRT4577_162227C.1.pep
SYTLQHAITGSNIPQLPWLIQHSTTLSTLQXSLLQTIXSQRLHQLVLPVNNQVDLANLSAYSEQQQSLLFNQLSTLNPAAYLHHQLLPLNHLATVYSQQLQLLPCNQLVTLNPTAYLQHQILLPCSQLAAANRASFFT

SEQ ID NO: 252900 - protein, 68 aa, Zea mays
  unsure (1)..(68): unsure at all Xaa locations
  Clone ID: MRT4577_162228C.1.pep
FYDVFWRGLFSEFYRFFRPYDGRVTNLRRVTYVVLDEADRMFDMGFXEPQVMRIVDNVRPDRQTVMFS

SEQ ID NO: 252901 - protein, 89 aa, Zea mays
  unsure (1)..(89): unsure at all Xaa locations
  Clone ID: MRT4577_162229C.1.pep
RFLAVSVLLXXXXAXXVPPPPVFAXXRRXXVXSSXLRCXGGGRPLXGGAXRAXWVPXXXVLXPXLSLLSLSSSSLGLGLSLAMAREVGR

SEQ ID NO: 252902 - protein, 75 aa, Zea mays
  unsure (1)..(75): unsure at all Xaa locations
  Clone ID: MRT4577_16222C.1.pep
EKATIRKPSDFKQPGXRYRSWYADRQDRFVRRFADSLGHPKVSQELRSIWIDLLAKCDASLGMKIATRLNMKPNM

SEQ ID NO: 252903 - protein, 117 aa, Zea mays
  Clone ID: MRT4577_162230C.1.pep
DLLGGQENLWINSKKLRGHSTSLLRKKKQAKVEGGLAKLAKKAPLLFPLSVRVFGRHLFFFSPHFQARRSFTLHRTPASKADPRGPLEPAGVKGHPPDKAEIAPGIASRGNRKTRPG

SEQ ID NO: 252904 - protein, 55 aa, Zea mays
  Clone ID: MRT4577_162231C.1.pep
QDVWILHFTPERQGRSAAKGSSTFNIEDQTILYSFQQHPLNGTLNLENVIGFSYI

SEQ ID NO: 252905 - protein, 231 aa, Zea mays
  Clone ID: MRT4577_162232C.1.pep
GVVEGAAMIVLVFALLVVCGLARWCSTASDEQLRLDDCRLTTKQGTHYDLNKLLQSGESWPVNLTTSRPTPPSTTIETILLSPCAKLPVDPSAQSCPDGTLVCLLVYNQLSFADRRLQQLIPLALDHPDPTVQVSTSDHNKQSLLVNMIGATYNHIQQTTVMRLICSAQADPPTTIYDPVKGALNITWTTPAACPSSQEPPSIGGSSHAFKNLLVFFVLLFLAYLVPWNMV

SEQ ID NO: 252906 - protein, 38 aa, Zea mays
  Clone ID: MRT4577_162233C.1.pep
GAEHISLSQTLMDRDIAVTFSSQRIHLRGEPIVVSVLH

SEQ ID NO: 252907 - protein, 67 aa, Zea mays
  Clone ID: MRT4577_162234C.1.pep
PQTMEVESFTLIVITTHDKKKADCQKNSSSTSPRQKGWLTARPYGWLTPYPATDKRRLAACRKAWLR

SEQ ID NO: 252908 - protein, 136 aa, Zea mays
  unsure (1)..(136): unsure at all Xaa locations
  Clone ID: MRT4577_162235C.1.pep
MLSHHCDFVYQSAFYTYRSCIKAGRKFPGFRTTVDXQTRTRKLADFFGQTYHETTTRWATAPHGPFACGYCRMNEQKHTDPPYYGLGPIQLTHKYNYRLAEQALNLNLVGHPDLMTIDPMVAFKTAIWFWMTPQTP

SEQ ID NO: 252909 - protein, 48 aa, Zea mays
  Clone ID: MRT4577_162236C.1.pep
ITGFGIQFKGSYRTTPKSLKGLYFHPRKNSYNMGVRLNHPLLTAYYKT

SEQ ID NO: 252910 - protein, 114 aa, Zea mays
  unsure (1)..(114): unsure at all Xaa locations
  Clone ID: MRT4577_162237C.1.pep
PGRPHASGSVWAPLRYDKSPPGGVSHAWAXDYWQMQXQSGDNVSHLTDXHGDRKTNPRGQGGTRGVPVEKDHRHATRRGPQCDPKEPQKSASAPEGKNKERGSASYGAHERQEW

SEQ ID NO: 252911 - protein, 104 aa, Zea mays
  unsure (1)..(104): unsure at all Xaa locations
  Clone ID: MRT4577_162238C.1.pep
HISGCKYFLKYNVIGXGESXLYEPEGFSFYXRNGVNNFKIAXFLRALLLGVVPFARKKNAPDHLIVVSPVYIWGAFMFLHAHXKEKRFLYPIYSLICAAPAVLT

SEQ ID NO: 252912 - protein, 100 aa, Zea mays
  Clone ID: MRT4577_162239C.1.pep
SVQFLIWFCVLYIFADERHHGVVRLVVPGQLRSAHWYLLGFSRYSEQIAMIRGEHRQARPLRHVPRYYKAAEESRDEEAEGRLAAGVATVTGGSCRRCCR

SEQ ID NO: 252913 - protein, 163 aa, Zea mays
  Clone ID: MRT4577_16223C.1.pep
PGIYYSDDKMLQCRVFAYADTQRYRLGPNYLMLPVNAPRCAHHNNHYDGAMNFMHRDEEVDYYPSRHAPLRQAAPPTPLPPRPVAGRREKATIRKPNDFKQPGERYRSWDADRQDRFVRRFADSLGHPKVSQELRSIWIDLLAKCDASLGMKIATRLNMKPNM

SEQ ID NO: 252914 - protein, 53 aa, Zea mays
  unsure (1)..(53): unsure at all Xaa locations
  Clone ID: MRT4577_162240C.1.pep
CVRCCIPGLPHRVISLHVLGSRHLDHPVICPPWAAAMGPSGPEXKCXLFFFGL

SEQ ID NO: 252915 - protein, 568 aa, Zea mays
  unsure (1)..(568): unsure at all Xaa locations
  Clone ID: MRT4577_162241C.1.pep
MSRDHAKREIMTSEKPTGSERTLSTESGNKYKEESSSSIKSHRRGDKKKMIRKXVYYETDSSSPSTSDTESXXTTSKCHERKKYTRXPLLFVPLGKTPYFDGEDYCMWSDKMRHHLTSLHESIWDFVEFGAQAPKVGDEDYDSDEAAQIRHFNSQATSILLVSLCREEYNKVQGLKNAKEIWDILKTAHEGDEVTKITKRETIEGELGRFVLNKGEEPQAMYNQLKTIVNQVRNLRSTKWDDHEMVKVILRSLVFRNPTQVQLICVDPRYKQMSPEEVIDKFVSFELMIKDSKHIVNLEQGTTSTPEVQPVAFKATEEKKEESTPSRLPIDASKLDNEEMALIIKSFRQILKQRRGKDYKPRSKRVRYGVKGKKKEKKRYYKKKGGEAHMGREWDSDESSIESSSDEDVANIAVNKGILFPNVGHKCLMAKDGKKKKVEKYENLSKDLSICNNSISCLRDENASLIFKIEKLNVCNDSISSFRIENGNLNAKNKELNVCKASTSIVENVAICTRCRDVNIEAIGDHLAMIKQQNDHIATLNAKIAEHELENEKFKFAKSMXNGRRPAL

SEQ ID NO: 252916 - protein, 185 aa, Zea mays
  Clone ID: MRT4577_162242C.1.pep
TSFFFFFFFFFIFFFFFFFFFFFFFFFGGDQGLVFAHQIPPRMGFPPPPDRLTNIPPFINPRFFFLALVGGWAYQPPETEIPKKIPRVARTRLGGRPFFSPPFPNPWSLGRNPLRGKSHTLGGRTKGTQPGTQLGGNKGKSGSRGKMVFPHKFQQKNNPKQKRENPGGPKGGPTHNNMGWAHWPL

SEQ ID NO: 252917 - protein, 112 aa, Zea mays
  unsure (1)..(112): unsure at all Xaa locations
  Clone ID: MRT4577_162243C.1.pep
DTIAIKPRPELIAXSTHAGAMLFVGTHEYLTRKIIIGEVHGTSFHWWTLPAYLYQLLFGKTPFKGSSNRATLINVIGHQLLLPDXPGVRFYATDLITGMLVKDPQQRLAYKP

SEQ ID NO: 252918 - protein, 187 aa, Zea mays
  unsure (1)..(187): unsure at all Xaa locations
  Clone ID: MRT4577_162244C.1.pep
LKYTTSSDEGSSSDNEDDLXFSFANLNMDQKKKLNELIETINEKDDLLECQEDLLVKENKKFVKLKNAYALEVEKGENLTRELSICNNSISCLRDENDSLVSKIEKLNVCNDSISCLRDENASLNAKINELNICIPSTCTVENVTICARCRDINIEAIDDHLAMIKQQNDHIAKLNAKIAEHELENE

SEQ ID NO: 252919 - protein, 648 aa, Zea mays
  unsure (1)..(648): unsure at all Xaa locations
  Clone ID: MRT4577_162245C.1.pep
MSGDHTKREIMTGEKPAGSGRTLSRESGNKYKEESSSSIKSHRRGDKKKKMKKVVYYETDSLSPSTSGTKSSTTSKRHERKKYTQAPKVGDKDYDSDEAAQIRHFNSQATSILLASLCREEYNKHEGDEVTKITKRETIEGELGQFVLNKGEEPQAMYNRLKTMVNQVRNLGSTKWDDHEMVKMSPEEVIGRFVSFELMIKDSKYIVNLEQGTTSTPEVQPIAFKAMEEKKEESTPSRLPIDASKLDNKEMTLIIKSFRQILKQRRGKDYKPRSKRVCYRCGKSDHFIAKCPYTCESDRDGDKKGKKKMEKKYYKKKGGEAHMGREWDSDESSTDSSSDEDTTIIVINKGLLFPNVGYKCLMAKDGKKKVHSRVTPKYTTSSDEGSSSENEDDLVSLFANLTMDQKKKLNELIETINEKDDLLECQEDLLVKENKKFVKLKNAYALEVEKCENLSKELSICNNSISCLRDENASLVSKIEKLNVCNDSISCLRDENASLNAKVNELNICMPSTSSVENVTICTRCRDDNIEAIDDHLTMIKQQNDHIATLNAKIADHEIENKKFKFARSMLYNGRRPGIKDGIGFQQGSQSNVKLNAPKKLSNFVKGKAPMVKDSEGYILYPANYSEHKIRIIHARKPQCXSHHAFMY

SEQ ID NO: 252920 - protein, 83 aa, Zea mays
  Clone ID: MRT4577_162246C.1.pep
GIMRLTMPPGLMPPGMMPSLFPPMLMPSVVSSMLIPPMLAVPQCYSDSLSPIIQPQPFPFLFSPPAVAISPLFFPPPFVGAAF

SEQ ID NO: 252921 - protein, 56 aa, Zea mays
  unsure (1)..(56): unsure at all Xaa locations
  Clone ID: MRT4577_162247C.1.pep
LQKDASATPKSPPXKDXRKTFEQPNQPDSKDTTSKAPKKRPPAASKKNSNPPKPDP

SEQ ID NO: 252922 - protein, 88 aa, Zea mays
  Clone ID: MRT4577_162248C.1.pep
MMICKVLVITVFCVLTVAFPSLDIDSINEELQDSIFDILNSTSDFQLASYEPSTSPPEDSTYQESNTDFMQTTYSRSIQISELSNGAE

SEQ ID NO: 252923 - protein, 232 aa, Zea mays
  Clone ID: MRT4577_162249C.1.pep
PIELKRLHFQQCEPVEPPAKHPRVEQLPPNNMLLQRSMSSTAERSAEILRSPVRAPLGIPFCSASVGGARKFPPPPIVTGEDHFNSCFEDGGLFSTELLHRRMEKTAETLGLAGVTMHSAELLNIALDEYMKNLIRSSVELVGGSVQRDARKGTLPHKNQVYGNRINGVWLPNHVHMQSGSGSSGTTNEIGSNQLISVSDFKVAMQLNPQHLGENWPVLLEKICLCSSEEND

SEQ ID NO: 252924 - protein, 848 aa, Zea mays
  Clone ID: MRT4577_16224C.1.pep
QQQQPLRVRVPPGCWGERGFARIRHEAYVHVLRFRSAVYLVRCSPRIVAVALAAQIYCFDAVTLENKLSVLSYPLQGAPGVNIGYGPMAVGPRWLAYATNTPLLSNTGRLSPQNLTPSPGVSPSTSPSSGSLVARYAMESSKQLASGIIDMGYKTFSKYRQELLPDGSNSPLSSSPGRRSGKIPSSVHPLEADNAGMVVIKDFTSKAVVSQFRAHTSPISALCFDPSGTLLVTTSVHGHNINVFRIMPTCVANGTGATRYDWTASHVHLYKLYRGMTSAVIQDISFSHFSQWISIVSSRGTCHIFTLSPFGGDASLQPQNSHSDGPPLAPCQSRPWWSKPSFLMDQQLHQVPSTVTNSVVSRIKNNNSGWLNTVSNVAASASGKLSVPSGAVTAVFHNSIYQGSLPVPSKANALEHLLVYSPSGHVIQHELLPSSGSESSGSSPRVGSGHNSQLQDDEMHVTAEPIQWWDVCRRTNWPERDENIANIVLYNQRSSMMAMDVSDCEDSEHSDSTASNDGISGKEIMRVRERSSWYLSNAEVQINSWRIPIWQKSKICFYVMDHPAAESVESVSSGGEIEIEKLPLHEVEIRRRELLPVFKQFLYSERHSSDRNVANGRSNANGGFQNVLSVINDVQYGSVKDNGEYETKSVAPLSGFYTDTRETVNTNGLATQTFSGPGSAVNLQQVGKRNSIESPNAAILAGKAENDSNGYISTPPETNASIRSLSSYSLLDGSVNGMPSPANSASCKPETTNNSVLSNVASTDVTNGCLTTVDSGQQEASDSHSSVEFTQYFQEGYCKISELDDCRELTEAVTDADSSSSHCEREKPEEDGDNDDLLGGVFAFSEEG

SEQ ID NO: 252925 - protein, 457 aa, Zea mays
  Clone ID: MRT4577_162250C.1.pep
MNLAAFSSTLATLPWYEMPSINSSATFSSSLLRRSLCASLRTISHMASAAAPTSAPVATTENGAAKAIEQRPVQVAERLEKFKTTIFTQMSMLAIKHGAINLGQGFPNFDGPDFVKEAAIQAINAGKNQYARGFGVPELNSAIAERFLKDSGLQVDPDKEVTVTSGCTEAIAATILGLINPGDEVILFAPFYDSYEATLSMAGANVKAITLRAPDFAVPLEELEAAVSKDTKAIMINTPHNPTGKMFTREELESIAALCKENDVLLFSDEVYDKLVFEADHISMASIPGMYERTVTMNSLGKTFSLTGWKIGWAIAPPHLTWGLRQAHSFLTFATCTPMQAAAAAALRAPDSYYEELKRDYSAKKAILLEGLEAAGFIVYPSSGTYFIMVDHTPFGFDNDIEFCEYLIREVGVAAIPPSVFYLNPEEGKNLVRFTFCKDEDTLRGAVERMKTRLRKK

SEQ ID NO: 252926 - protein, 133 aa, Zea mays
  Clone ID: MRT4577_162251C.1.pep
FDSKLAGSPRGHRTPGAVDTTKPIRYQVPWLKNRTTNGESGDIDTNPRPRFPNPVRPKQAQVTSLQYSLHRAQPTAPAWARINRAADTDGARPTSEIEERLAGVPEDALANAGQEYVQGKAHTGESKGAKSGG

SEQ ID NO: 252927 - protein, 78 aa, Zea mays
  unsure (1)..(78): unsure at all Xaa locations
  Clone ID: MRT4577_162252C.1.pep
WLVLLSCWSVGLALQWWLLLLLGLFSLCWCLVPGSVLVLLFGGRGFCFLGCLPCLLLWASPFFCGFPVFCVAVCAXVG

SEQ ID NO: 252928 - protein, 39 aa, Zea mays
  Clone ID: MRT4577_162253C.1.pep
FLKKIWIHSGVQSSQQYMIWLHTVNISGSGLGQDPARTT

SEQ ID NO: 252929 - protein, 71 aa, Zea mays
  Clone ID: MRT4577_162254C.1.pep
LPHLLQIQPIEPHLNSPLQHDSQHQYQTTTPHGAHLIPSTERQLTTLPTFTAQLQHRAPPHLRAHHTHDVL

SEQ ID NO: 252930 - protein, 46 aa, Zea mays
  Clone ID: MRT4577_162255C.1.pep
SPAIGQLKFISLPVVSQRTRLEKTLVDAHLNHLAEQPPIASRRNSE

SEQ ID NO: 252931 - protein, 171 aa, Zea mays
  unsure (1)..(171): unsure at all Xaa locations
  Clone ID: MRT4577_162256C.1.pep
MAGAEVANGVHDGALDLEEGRGGGVDGAGCESSEQDGAGRRPMFSVPFVQKILAEALGTYFLIFAGCAAVAVNLRTGGTVTFPGICAVWGLAVMVMVYSVGHISGAHLNPAVSLAFATCCRFPCXQVPANSAAQKTRATAASLTLRLLFGSAREHFFGTVPAGSDAQALVG

SEQ ID NO: 252932 - protein, 45 aa, Zea mays
  unsure (1)..(45): unsure at all Xaa locations
  Clone ID: MRT4577_162257C.1.pep
ALSTCRXILKLMGGEVQYIRESERSGFLIVLEQPQPRPAAGREIV

SEQ ID NO: 252933 - protein, 58 aa, Zea mays
  Clone ID: MRT4577_162258C.1.pep
NTSTSALYTQYVGRKRCTATRLGSKAVASRSYRRGRQCQVLSSAGPGHLLQQIGHVVR

SEQ ID NO: 252934 - protein, 99 aa, Zea mays
  Clone ID: MRT4577_162259C.1.pep
QTPYKNCSFAIYFFFPPNFFFLYIALTFPFLEGKFNPPFFLFFFKGLPFFWGNTKGTFKAKASGELFKRGPQGTRLLFFFFYKSLPRSQTLTVKFTLAT

SEQ ID NO: 252935 - protein, 163 aa, Zea mays
  unsure (1)..(163): unsure at all Xaa locations
  Clone ID: MRT4577_16225C.1.pep
KRKSRVNGSVERHRNRQHASQNPGRRVFTPDASNKPQANLKVPRLVTSTSTTKLERFPPPHLDASIGYSLDSSVDGATEEFFSSSVVEIKKMPSLIFGHVKSYLNSSKKGMHSKARPSLNMAPPTVLIGAFRPYSFGQPMEVXRRKNREQFRSKGRNAVGAVK

SEQ ID NO: 252936 - protein, 131 aa, Zea mays
  Clone ID: MRT4577_162260C.1.pep
TTRPVLPEVHSVDVVILMFLLVLNSSPVSRVICSRAIHTVFLGLVTAPIDSLTSPWPSHLEQLCIWGHATVVWRYGQPPRRPSDSRFLRPSSREHQSLAMAFNYYRSTWCGSAAANKNNEEIEACAVLVAT

SEQ ID NO: 252937 - protein, 101 aa, Zea mays
  Clone ID: MRT4577_162261C.1.pep
VLDTSAVLGYHASHSRYSKPCAGLTMGLWHLENAGDITLRSVGNSVHGMGHAHASSSPSTVLTRSHCRRHSLCPSSGWGRALAGGLQLSWPFLLDRGPRRC

SEQ ID NO: 252938 - protein, 181 aa, Zea mays
  Clone ID: MRT4577_162262C.1.pep
MAFNYYRSTWCGSAAANKNNEEIEACAVLVATLRKKRRWGGSVVGHKMKNRDRIGGDIQLNNDYFIERSLFNPEQFRRRFRMQQSLFLEIEDKLAAANKFFRQKRNAAGVLGFSSRQKCTVALRMLAYGGPADFLDEGLRMGESTVLQTIKEFAKTVLQTFFCLACFFPPLDGSSDSSDVK

SEQ ID NO: 252939 - protein, 96 aa, Zea mays
  Clone ID: MRT4577_162263C.1.pep
QEGSDQYLLQDLVLVPSRSSLDGPLWWLPGCGWCEKKSIQYQAQVAIIGSSLRSHKESLVVLVRQKLPYRVRQERGVSQSEASRLFRVAAPLRFGH

SEQ ID NO: 252940 - protein, 60 aa, Zea mays
  Clone ID: MRT4577_162264C.1.pep
CHQRLEWRLTILRVPFLEATKLELKIYLEDNMSSTLPYRYSNLKSIIVMTLAGGVHLKTE

SEQ ID NO: 252941 - protein, 214 aa, Zea mays
  Clone ID: MRT4577_162265C.1.pep
AALAALSSSFASASSTITILESLCSADLVLSSSFATTSSIAAVLESSCSAALAPLPSSASALSPDLTSSVPACFTAPTSSSFASSASSILASSSDEPLAPFSEALFCWSALVFATATSLLSPASSILVLSFLSEATTSVGVPPFATAFNSITGARSAPVIRVTLIAPAAQADEVLPRPPLKIESEQTLASPKLSRCSRSSNASNLAGKSDVKQQ

SEQ ID NO: 252942 - protein, 99 aa, Zea mays
  Clone ID: MRT4577_162266C.1.pep
MGAREVGITRGHVWEYGLIPIDTHPSTLNSSRDYQFHSNNNPNTQIFMKTEILVSNTHLPPSIRTWGGNNNFNTRTTFLQEPSSIRTWGEDWRYQASND

SEQ ID NO: 252943 - protein, 1806 aa, Zea mays
  Clone ID: MRT4577_162267C.1.pep
MHGGGRRWSLVGGSGAIVGVERLHVVHQCCVEWSIAASEEVDSIHFSFYSDDEIKRISIKKITKSERLDAKNLPVPGGLLDPAMGPINDIDICKSCGQHSVRCPGHFGHIELAKPLFNPLLFMSLKNLLHVTCFHCHKFRLNKEQVDRYVNELELLVKGDIVCAKNLEDSVEEAYLSKEDENMNKTTSGDNSSSVKDKKTWTSIQLKEVLSIFSKIMKKRQKKCAKCDMKSPTISSPIFGWLVKDTKASAVRTNAIADFKLKGDGDIHNSGETGVSGLEEESSSPGMVSKDSINEVRGLSDDTIKELVASSGKKHLLPTEVESILKDLWKNEARFCMLLCDFQKNMSSEPEKRRGYEMFFLSSLLVAPNRFRPSTSSSLGIMEHPQSVLLSKVQESNLALQHNNASSNHMDVLQRWMDLQRSVNVLYDSSKGLARSEKNAHGIRQLLEKKEGILRQKMMGKRVNYACRSVISPDPYLAVNEIGIPPVFATRLTYPEVVLYALFNILYDSIWHNFVYVCVLTCFALCDRDDNGMGKAGGWGSKNLPYTHPQCDSRATTAMQAVLLCKRASKPSDPSDYDPTTDTTMKVTPWNTKRGRVGGRVGADIHPGATHYRDNNSMYKLQAVPAKRRSIAKMLPASRGSICQPGRDPNCEFESKVVYRHLQDGDIVLVNRQPTLHKPSMMAHFVRVLPGEKTLRMHYANCSTYNADFDGDEMNVHVPQDEISRAEAMNIVDANKQYIGPRSGDAVRGLIQDHIVGAVLLTKPDTLLSREEYSQLVFGSCVPSSNCGSHHPAKVSAIEDYDTLELVHPAIWKPRPLWTGKQVITTILNHLTKGCPPFTVEQKGKIPKEYLKEDPSAQKEKEDPSARKEAHSAKKGKREDPSAQKEKDSSVNKEKQEKIQKQKQKDRSELVLYIHNNELIKGIIDKAQFGKYGIVHTVHELYGAYTAGILLSTFSRLFTLFLQLHGFTCGVDDLLLLPEKDKLRSKILSGSEVRSNEVHWKFTGADEDHKGDLVKLHMEVEKAVRSNGESDTATLDNDMKNALNGITTDVNKILFPDGLQKPFPGNCLSLMTTTGAKGGPVNMNQISSLLGQQELEGKRVPRMVSGKTLPCFPPWDISSRAGGFISDRFLTGLRPQEYYFHCMAGREGLVDTAVKTSRSGYLQRCLIKCLESLKVSYDHTVRDADGSIVQFCYGEDGVDVLKTSFLNEFKELADNRKAVLAKLGGCSKDPTLSKCNGYITELPPKLIDKAEEFLKHSKECCRYNIEAKELKELLKVKFLSSLVDPGEAVGVVAAQSIGEPSTQMTLNTFHLAGRGDMNVTLGIPRLKEILMTASDNIRTPVMKCPLLEHISEDDAKMVVAKLRRVRVADVVEKIEVCTVPFYNSNGRVSTLYKLQMKLYPQDQLESGLTIDECQATLRTVFVEAMEHAIEKHLDLLYKINEIRAVKIEDTEGSLLNGDEESQSRHADGGDTGTSDDDDQNDNDVDLGTDAEKMKRQEKDEMEYDDDTETEEGMGSESEESDEDPAESGDDSQEADKEHTISKSETTSVDDLPYSVKKGKKSKDDRGTAKLEEKNQNEGRLDDQKQGQIKKRRKKLKHTIHVESSDLDFEIHYAFHDEPHILLAQIAKKIARTILVKACNNIDHCKIVKPMHNHTRLETAGVNFEVVWNLSEYISVNDITSNDIHAMLKTYGVEAARGTIIKEVSGVFEPYGINVDMRHLSLIADFMTLDGGYRPMNRLGIGQFSTSPFGKMTFETATKFIVDAATHGEADFLECPSASVCLGKPPKVGTGIFGLLQNLELEQPKNI

SEQ ID NO: 252944 - protein, 73 aa, Zea mays
  Clone ID: MRT4577_162268C.1.pep
SPGIHPWATNSAVIVLLLVAAAVLSCAGGARGFYLPGVTPGGFLQKDPIAVKANQLSSIKTQLTDSYYSVPFC

SEQ ID NO: 252945 - protein, 84 aa, Zea mays
  unsure (1)..(84): unsure at all Xaa locations
  Clone ID: MRT4577_162269C.1.pep
QDRAGINXLVDELSFRAAAXXXXCXFFFNFRSVHSQKTFFLARKTKRTGAKIIHRYCSDPTGGDGGQYQRFEPYIINCTVKGRL

SEQ ID NO: 252946 - protein, 115 aa, Zea mays
  Clone ID: MRT4577_16226C.1.pep
RKMCSKQNIQCAIVCRGWLSWNKAVWNRSSGTYFSRSWCCREVAIACRNTSSLALVCTYTVRPICFVPYFRDIWVVLDLVPWQPYLLTASARACECSMFICTYTLCFFWEKGKKM

SEQ ID NO: 252947 - protein, 88 aa, Zea mays
  Clone ID: MRT4577_162270C.1.pep
FYCMFATKLMLCVNELFSKLCTHDSFNAVQSRALIPQQSCCMLLVLCDGVLVSCNQSCMQLLVIWKVPFLENLGFMSSIFVAIVIFVR

SEQ ID NO: 252948 - protein, 53 aa, Zea mays
  Clone ID: MRT4577_162271C.1.pep
RLVSLILQAIDFPLPHTVADVLQLRIKLRLRLKLQVRPVQLLITSIDDHGYDY

SEQ ID NO: 252949 - protein, 68 aa, Zea mays
  Clone ID: MRT4577_162272C.1.pep
TCCMSRFPGIPYTRSPSDPFLSLFSLSNVRQMLFILCHVYQPGGLCESFPPPTPTSTSVSIRTPRIGP

SEQ ID NO: 252950 - protein, 101 aa, Zea mays
  Clone ID: MRT4577_162273C.1.pep
RPNAVPVSASCSSPILRIIASGERASQCGFRLHISGPMDKQEPVANVEQKIGLSRKPKELVITHYRIIVFCPFLPCLLCLSILSTIYLSLLPIRMRMQLCP

SEQ ID NO: 252951 - protein, 71 aa, Zea mays
  Clone ID: MRT4577_162274C.1.pep
PVVPRPLQIRSFSVHVVFVPQKAVGGNDTKAPLVAVEFFCTIESPALIYQLHYPERINSFWHAPLLGSPWL

SEQ ID NO: 252952 - protein, 70 aa, Zea mays
  Clone ID: MRT4577_162275C.1.pep
ESSSHSIQEFLHFAHFLHSTNVQRHSSVDLCYCDVMNSLLGGQPLPRACLLMKVIGARSLRNRPLPVLLV

SEQ ID NO: 252953 - protein, 750 aa, Zea mays
  unsure (1)..(750): unsure at all Xaa locations
  Clone ID: MRT4577_162276C.1.pep
MALDTGTVAAGAIDEAYEFSAPRFFDFITEETEEAVRAAESWFEAARSHAPSPFNPRIKESRAEAKVAVLCDFAEAEEPAPEAVPVEVAAGSVSVHGADAIDGAPCPEAISESPPASHPAQEEKDKSPQSFEFLSATDLSVKSDGGAASTPKMQXRVLLLLLPKLPLQFXCDSSSVNTGARTPKTQANMCRAGTMAASTNAKGSVIKGGCDLVGTGKAATAGAEIAQANQAVKRQKLDDGRARQILNVKTKVLPHKRRTDLDVSNEVRRSREDMCSLKEATTYVSTAELVKKFESGTRKLSITHSRSRSRDDAALQGRPKLVLTRPKEPEFQTSQRIRAVKVKSSAEIEEEMLAKIPKFRARPFNKKIAEAPSFPPLPRKPPQISEFSEFHLKTMERASRYADTCSEVSCADTXPESNKPLKSTQRKPPQLHTAXRSRSLXAIPTTEIDEAGDKAEIARATRASEKILESKGDIGVFVHPKSQVTAPKEFRFCTDVRLGPPSVADLFDKLSLHSECSSNSNRQGVPRCTIPNPFSLQTEERGQLKERQLEAQLLQKKVEEEKARVHKANPYPYTTDYPMVPPKPEPKPCTRPEGFQLESLVRHELEQQRLMEERQRMEREEAQRRIVKAQPVLKEDPIPLPEKERKPLTEVQQFVLHVDERAVHRSEFDSMIKEKEKTYKRLREENEFAQKIEEEKALKQLRRTMVPHARQVPKFDKPFRPQKSTKQVTRPKSPQLQVDERGARRHALIR

SEQ ID NO: 252954 - protein, 210 aa, Zea mays
  Clone ID: MRT4577_162277C.1.pep
PRVRRRPKLMLTRPKEPDFQTSQRVRTVKVKSSAEIEEEMLAKIPKFRARPFNKTIAEAPSFPPLTRRTPQIPEFNEFHLKTMERASRYADTCSEVSCADTIQSQNKTLKSRQAKPPQLHTAMRARPPSVKSFQELELEELDKAPKFKAKPLNKRILESKGDIGVFFHPKSQVTSPKKFHFSTDVRLGPPSVADLFDKLSLHSECSSNSN

SEQ ID NO: 252955 - protein, 88 aa, Zea mays
  Clone ID: MRT4577_162278C.1.pep
PERVTASGGEVSRLNLCGGQEVGPLRCWPGGLCLSRSIGDTDVGEFIVPIPHVKQVKLPNTGGRLIIASDGIWDALASESAAQACRGL

SEQ ID NO: 252956 - protein, 51 aa, Zea mays
  Clone ID: MRT4577_162279C.1.pep
MSSHKTFRIKRFLAKKQKHNRPIPQWIRMKTGNKIRYNSKRRHWRRTKLGL

SEQ ID NO: 252957 - protein, 309 aa, Zea mays
  unsure (1)..(309): unsure at all Xaa locations
  Clone ID: MRT4577_16227C.1.pep
RYRPSRANAXIXINSWRIPIXWQXSKICFYVMGYPAAELVESVSSGGGEIEIEKLPLHEVEIRRRELLPVFKQFQYSDRHSSDRNIANGGFQNALSHISNAQNSSVKDNGEYETKPVALSGFYADTRKTANTNGLARQTFSAVNLQQVGKCNSIESLNTAIVSGKAENGNNGYISTPPETKASIRSLSSYSLLDGHVDGMLSPNSASHKPETTNNSVLSNAASTDVQNGCLTTVDSGQQEASHSHSSVEFTQYFQEGYCKISELDDCRELTEAVTDADSSSSHCEREKPEEDGDNDDLLGGVFALSEEG

SEQ ID NO: 252958 - protein, 229 aa, Zea mays
  unsure (1)..(229): unsure at all Xaa locations
  Clone ID: MRT4577_162280C.1.pep
MAFAASEGNLSPALPLATLIGRELRGDGSERPHVRYGHSGFAKRGEDYFLVKPDCLRVPGDPSSSFSVFAVFDGHNGVSAAVFSKEKLLEHVMSAVPEGISREDWLQALPRALVAGFVKTDIDFQRKGETSGTTATLVVVDGFTVTVASVGDSRCILDTQGGEVSLLTVDHRLEENAEERERVTASGGEVSRLNLCGGQEVGPXRCXASGLCLSRXIGDTDGGEFIVPI

SEQ ID NO: 252959 - protein, 58 aa, Zea mays
  Clone ID: MRT4577_162281C.1.pep
HMVQRRMRHIHGLVREGPNSVLLVNDLGHATHCLAGSSRHTPCSQTRTTLLALRVVMR

SEQ ID NO: 252960 - protein, 430 aa, Zea mays
  Clone ID: MRT4577_162282C.1.pep
MAFAASEGNLSPALPLATLIGRELRGDGTERPHVRYGHSGFAKRGEDYFLVKPDCLRVPGDPSSSFSVFAVFDGHNGVSAAVFSKEKLLEHVMSAVPEGISREDWLQALPRALVAGFVKTDIDFQRKGETSGTTATLVVVDGFTVTVASVGDSRCILDTQGGEVSLLTVDHRLEENAEERERVTASGGEVSRLNLCGGQEVGPLRCWPGGLCLSRSIGDTDVGEFIVPIPHVKQVKLPNTGGRLIIASDGIWDALSSESAAQACRGLRAELAAKLVVKQALKTSGLKDDTTCVVVDIIPSDHCSTPPALSPKKNQNKLKHLIFGKRSHSSVGKLSKSASLGSVEEIFEEGSAMLEERLGSNFPPKANLPPFRCAICQVDQEPFEGLMTDNVGGCCSTPSTPWGGPYLCSGCRKKKDAMEGKRSNRSTTCR

SEQ ID NO: 252961 - protein, 74 aa, Zea mays
  unsure (1)..(74): unsure at all Xaa locations
  Clone ID: MRT4577_162283C.1.pep
IQDKXGIPPDXQRLXCXGXQLEDGRTLXDYXXQKESTXHLVHRLLXGKQXFVXTXXGXTITLEXEXADTIDNGX

SEQ ID NO: 252962 - protein, 50 aa, Zea mays
  Clone ID: MRT4577_162284C.1.pep
LPRSPLPFRFSDDQVLRLCCVSFLSLSICFSSSTALALALLACSSAARDP

SEQ ID NO: 252963 - protein, 69 aa, Zea mays
  Clone ID: MRT4577_162285C.1.pep
HYMLNPATFISFSTRILIWRVIYKRAMCPLNLFIILDQFCSLLSDYELAFAYTHPHNNACLRSGAFCNK

SEQ ID NO: 252964 - protein, 81 aa, Zea mays
  Clone ID: MRT4577_162286C.1.pep
HYSRTPARLVSSIHVALQDSVSAIVVDCCTTRGTEADRYDYCEGCRRNGAHAPRSPLPRCECRQRVSPYSSTEASRPDAWV

SEQ ID NO: 252965 - protein, 37 aa, Zea mays
  Clone ID: MRT4577_162287C.1.pep
SYFFKPAHSSVYVPVPFRCRCKSCSRGSFMYRRTLSC

SEQ ID NO: 252966 - protein, 128 aa, Zea mays
  unsure (1)..(128): unsure at all Xaa locations
  Clone ID: MRT4577_162289C.1.pep
RLHNSCRSAIPATRAGPTAAARPHLARKQRQHQEQGVEREPPTMVQWGPFSWLFPPRXMDDPGTRXSTGSAAGTTRRRRRILRLVALSVSHIDVLVESLSHPKMYASYPVTMAPFSQFNVKDGRLVEA

SEQ ID NO: 252967 - protein, 118 aa, Zea mays
  unsure (1)..(118): unsure at all Xaa locations
  Clone ID: MRT4577_16228C.1.pep
LHHVRGILLFLVLWFISGLLYCEALFIELISLVALFVLYSVCYFYSLFFSVLNLFIFLLSFFVFFDFFCFYIFCFYLFFVLLFLFIILLFVIYFFILFFXFFYMFVVXFYFIFFFFFF

SEQ ID NO: 252968 - protein, 109 aa, Zea mays
  unsure (1)..(109): unsure at all Xaa locations
  Clone ID: MRT4577_162290C.1.pep
PNSHPAAARHHTRDGTGKDGPGXNTEXGKKTRXXXXKDXQTDHKSTHTTNTXKGGAGTATSTKKXDXXXGEXQXQTKNKNXTXXXKANPEAXRTTTTTGDEKATPGPKT

SEQ ID NO: 252969 - protein, 56 aa, Zea mays
  Clone ID: MRT4577_162291C.1.pep
KTPRGPGPQGMPCRFFSPGPLGSPLPGPGRAPRDSFYPPRKIITPIGFSVQFPVWS

SEQ ID NO: 252970 - protein, 65 aa, Zea mays
  Clone ID: MRT4577_162292C.1.pep
QRKITDGPHHHAPKPPPSCRTSAGTESQSATQECSVAGVAPPVVKGTQGLAKVRRRRRRGPCEDA

SEQ ID NO: 252971 - protein, 249 aa, Zea mays
  unsure (1)..(249): unsure at all Xaa locations
  Clone ID: MRT4577_162293C.1.pep
MVFLLRHWRPRGRTGSTSSSSTMAPTIPADAITISSSLSEQPVSNTLVIVSSSGSDQPVSNXSSTCPRRPSPLAPSPSSQTHAPAVAAATRPGTXAEPAPXSTAPSVVPVLSSTVVTAASFADGSRAEATSRRRPTAAARQQCSSPRSVLSVRAPGGVAPSPAPARPSSGGGDDEATSRPKRKAXTESGASTTSARSSLPWPSSAGTTWACSPRSPCFSRSSAPTAASSAAAWMPSSFLIRCTSSRKST

SEQ ID NO: 252972 - protein, 44 aa, Zea mays
  Clone ID: MRT4577_162294C.1.pep
DAWADACADALSDAWEIASLGDTYKMMLINKSYIYILYFIIPIL

SEQ ID NO: 252973 - protein, 93 aa, Zea mays
  Clone ID: MRT4577_162295C.1.pep
SRGTWFLSPLPKIPLLPPNPTYTFCSAAPARPLHAPPYLSLRSASPTAVPPPDPSRNLGGGPPLSPRPHRMLPRPTTSSSRARCSSFHGNGSS

SEQ ID NO: 252974 - protein, 54 aa, Zea mays
  Clone ID: MRT4577_162296C.1.pep
CPYSKLPQLGCAHLVGGGVGIDIILFAVDLLALFFCINKYYFLLFWFLGPLHIG

SEQ ID NO: 252975 - protein, 124 aa, Zea mays
  Clone ID: MRT4577_162297C.1.pep
MATRVWLTALLLGFLVAASPFTSRGNSSAPVPPPPILSLLPRFPPLRSAPLVVNSGARSVRAASPARGNGDDRARLGCGGLGRARLGVHRWFRKGLEALVGCVEWVLGSFGWQSFGKSYVMRLT

SEQ ID NO: 252976 - protein, 51 aa, Zea mays
  Clone ID: MRT4577_162298C.1.pep
DGSYGVPSGLIYSFPVTCSGGEWKIVQDACLLMPRVNSTTSREQLPPQCFE

SEQ ID NO: 252977 - protein, 159 aa, Zea mays
  Clone ID: MRT4577_162299C.1.pep
AAVAVLQCRGPLSAAPPGFLRLLTPSLCFPASRSSQSGVLPTVIYLLFGNRRHSEGTYYCRLTRPRPLLSTFTHQVDRSLDRASTCMSNVMNAVVRASLQSQLLSCFVTASLTAASRLPTEDPSSLRDILQLAGIATPLVFQRKKLPREDLAPPRSTKG

SEQ ID NO: 252978 - protein, 100 aa, Zea mays
  Clone ID: MRT4577_16229C.1.pep
PRPPRVRPASARKSSWYLSNAEVQINSWRIPIWQKSKICFYVMDHPAAESVESVSSGGEIEIEKLPLHEVEIRRRELLPVFKQFLYSERHSSDRNIANGV

SEQ ID NO: 252979 - protein, 77 aa, Zea mays
  Clone ID: MRT4577_1622C.1.pep
RKTQNPQSIFVHSMEEERTYGTVVVRLPQAAESASPCAPADTRTIAMYSITDLLCLWERRRVPDSLRSRFLLSVKWW

SEQ ID NO: 252980 - protein, 170 aa, Zea mays
  Clone ID: MRT4577_162300C.1.pep
PSVRPASAHASAHASAHASVIIWGNHSSSQYPDVNHATVKTSTGEKPVRELVSDDEWLNGEFITTVQQRGAAIIKARKFSSALSAASSACDHIRDWVLGTPEGTFVSMGVYSDGSYGVPSGLIYSFPVTCSGGEWKIVQGLPIDEFSRKKMDATAQELTEEKTLAYSCLE

SEQ ID NO: 252981 - protein, 231 aa, Zea mays
  unsure (1)..(231): unsure at all Xaa locations
  Clone ID: MRT4577_162301C.1.pep
MTNAAGTAPHPTPPTPLQQQQHQPPKDQQQKALALNAFRLKGIGDRIRFHLKGVSVPPVAELAHLIYAFARGIDFAVSAGDIPLTAGDIPEILRKVYELRKETIIQSSLMILAISCKNACSNKWFQPADSRDILRMVNELSGNFCTSTGQAASDSTVLEIISQIMPRYYPRLKFERLITSIEAKVGYDILMADFFIERSLSRDXKIRLIVVQXGNLDASSCVSSPPHVSFL

SEQ ID NO: 252982 - protein, 67 aa, Zea mays
  Clone ID: MRT4577_162302C.1.pep
SGRSRSRTSSTRGAICLVDELFLECHYNRWQKCCPGERSPKYDNTYEECLDLFSSLRENGVLVHQWW

SEQ ID NO: 252983 - protein, 316 aa, Zea mays
  unsure (1)..(316): unsure at all Xaa locations
  Clone ID: MRT4577_162303C.1.pep
MASDGSGVVTVYGXRRGAAGAAEXPKSSTFSVKVGLAQMLRGGVIMDVVTPEQARLAEEAGACAVMALERVPADIRAQGGVARMSDPGLIRDIKRAVTIPVMAKARIGHFVEAQILEAVGVDYVDESEVLTPADDAHHINKHNFRVPFVCGCRDLGEALRRVREGAAMIRTKGEAGTGNVVEAVRHVRSVAGAVRALRGMDDDEVFAYAKRIAAPYDLVMQTKQLGRLPVVQFAAGGVATPADAALMMQLGCDGVFVGSGIFKSGDPARRARAIVQAVTHYSDPTILTDVSAGLGEAMVGINLNDPKVERYAARSE

SEQ ID NO: 252984 - protein, 71 aa, Zea mays
  Clone ID: MRT4577_162304C.1.pep
NWSYRPDHTWFDNVPDLELNIDNAEHYCIRVDGLRSLYAWCGTKFTVTAFDHDDDIIMLSHVYDRSIYTTL

SEQ ID NO: 252985 - protein, 47 aa, Zea mays
  Clone ID: MRT4577_162305C.1.pep
GPREGGSTRARGFIRRGGAAARRALLRATTTTRCAVSSAVLQAESPR

SEQ ID NO: 252986 - protein, 70 aa, Zea mays
  Clone ID: MRT4577_162306C.1.pep
RPSYTSRSPSLAFCDPKSLLLMCLMDLDYINSLIGGGFSFQNPNASKTCMCGKSFATAKEFEAASNACYI

SEQ ID NO: 252987 - protein, 51 aa, Zea mays
  Clone ID: MRT4577_162307C.1.pep
KLDSLIFNYIIYSASNSFPSIYGDFPKSHYSCCLKQIYYNILIHNSLHSYY

SEQ ID NO: 252988 - protein, 325 aa, Zea mays
  Clone ID: MRT4577_162308C.1.pep
APSAAKEAYQESAKRLRAELDMASALENVNELYQHEVRQRKAIEETLARQAQEMEEMKRQHGVASKELHDVKEQRLVLERQVTEMASAVQGYEEKVAAAETLNTAEFSYSELEQATQGFDEGLKIGEGGFGSVYRGFLRNTAVAVKLLDPESMQGPSEFNQEVAVLGRVRHPNLVTLIGACREALGLVYEYLPNGSLEDRLACTNDTPPLTWQVRTRIICEMCSALIFLHSNRPHPVVHGDLKPGNILLDANLVSKLGDFGICRLLMMSQSTTTTTMPVATTKLHRTTTPKGTFAYMDPEFLSTGELTPRSDVYSLGIIILRLLT

SEQ ID NO: 252989 - protein, 111 aa, Zea mays
  unsure (1)..(111): unsure at all Xaa locations
  Clone ID: MRT4577_162309C.1.pep
MMIPARHMPPMIVRNSAAAYGSSSALSLGQPNLLLDNQQLQLLQQQHLLDQIPATTAESGDNMGRGGGGVSDPLLGDEFESKSGSDHVDGGXSVDKLQDXPTQRPNKKKRL

SEQ ID NO: 252990 - protein, 82 aa, Zea mays
  Clone ID: MRT4577_16230C.1.pep
GHGRPDHPSCLPGDHTYPDGGGRASSFCAWIWSLTALQLPIDGTCDLVLSRIESYTLGMAKTDCAAKLLIYTNMRRYLHMYI

SEQ ID NO: 252991 - protein, 179 aa, Zea mays
  Clone ID: MRT4577_162310C.1.pep
MTGTYEASDRPPPPNSAGYRTDKVRRKRLTAQKRKEIKEAFDLFDIDGSGTIDARELNVAMRALGFEMTPEQIGQMIAEVDKDGSGTIDFDEFVHMMTDKMGERDARDELHKAFRIIDQDANGKISDMDIQRLAIETGEHFTLDEVREMIEAADEDGDGEIDLEEFMKMMKRTDFGSGF

SEQ ID NO: 252992 - protein, 270 aa, Zea mays
  unsure (1)..(270): unsure at all Xaa locations
  Clone ID: MRT4577_162311C.1.pep
STRYWRSRRAAAXIGICSLIWWLIQKRGIGYADVGLSYEAAVDGGQYWRVITSAFSHVSVVHLVFNMSALWSLGAVEQLGQIGLGVQYYLHYTLVLVVLSGLLVLGFYHVMIQRFKVEYFRRVTAVGYSCVVFGWMTILAAKQPSSKLNIFGVLSLPISFAPFESLIFTSIMVPQASFIGHLSGIIVGYSIAWGLVHGMNNYWAVTMLGWTALVFVLSLKRTGSMELSFIEIEPVTDPSLPSVGVVATRNGRSRTLQMDALSGRRVADIV

SEQ ID NO: 252993 - protein, 214 aa, Zea mays
  unsure (1)..(214): unsure at all Xaa locations
  Clone ID: MRT4577_162312C.1.pep
MTGTYEASDRPPPPNSAGYRTDKVRRKRLTAQKRKEIKEAFDLFDIDGSGXDVLVMXVYIYKHMRMCSPMAAAVTFTFHLLASSXTIDARELNVAMRALGFEMTPEQIGQMIAEVDKDGSGTIDFDEFVHMMTDKMGERDARDELHKAFRIIDQDANGKISDMDIQRLAIETGEHFTLDEVREMIEAADEDGDGEIDLEEFMKMMKRTDFGSGF

SEQ ID NO: 252994 - protein, 202 aa, Zea mays
  Clone ID: MRT4577_162313C.1.pep
MKRKHGRKPADKKADPSESTSPESASSSSTEASDSPRNQAEEDNPPLVDAGAAVPEPPSPPPAQPSEPPRKPSATAPANPPADITYSRPKVGAVYGRVKLKFKSSKTVDSPLRPQQQDSLEAQVLPADAGASESAAVPEVVKGADAEKATVVMDGQQAEGQGLESSDADKEKGFQGSRRHQDQVGGAAFCKSNTPDRKSPIT

SEQ ID NO: 252995 - protein, 39 aa, Zea mays
  Clone ID: MRT4577_162314C.1.pep
FVWYNTRLLVTRDTNPFTGSWITYHNAMIIIEQILDCRH

SEQ ID NO: 252996 - protein, 77 aa, Zea mays
  Clone ID: MRT4577_162315C.1.pep
PARDPRVRVSKGPREISAVKEKVLSENEQFKFSRGVLCFWSILIQLEDNFMVSFILNAFVTNYFLVRLVLSFQFLYN

SEQ ID NO: 252997 - protein, 51 aa, Zea mays
  Clone ID: MRT4577_162316C.1.pep
FFGKMTQDDIYNSIVLNCEPCCTSVVTIVENASQSPRGSHTQRFRPFVSVG

SEQ ID NO: 252998 - protein, 63 aa, Zea mays
  Clone ID: MRT4577_162317C.1.pep
GTGAEAEEGGRFFGWFREAFPYIRGHRGSTFVVNISREVIFKPDHYRILHDISFLHGLGIKFV

SEQ ID NO: 252999 - protein, 84 aa, Zea mays
  Clone ID: MRT4577_162318C.1.pep
KILPVISQRGRGFVFFKSKSLFRIFVGVGPLSRGEGVGLLPGWIQWFPEWYVLLVPSCRGRGQAVFLTMGGGWIDINGRSLLFV

SEQ ID NO: 253000 - protein, 52 aa, Zea mays
  Clone ID: MRT4577_162319C.1.pep
ISHQPVNRFGAEGTPEAAAGRGHSRKCLLSFSRKNYCRDGFMVSTPEGAVST

SEQ ID NO: 253001 - protein, 59 aa, Zea mays
  Clone ID: MRT4577_16231C.1.pep
FKETEVRPVFGPFPSSCSRGAPPPPRPKKKKKKKKKKKKKKKKKKKKKKKKKKKKTREG

SEQ ID NO: 253002 - protein, 63 aa, Zea mays
  Clone ID: MRT4577_162320C.1.pep
VSGLHAQGPTSPEIRVLKDIDKVGSSFGPFCFQEKDEIVPKGEEYQKKIKKNPKKKKKGGRRM

SEQ ID NO: 253003 - protein, 123 aa, Zea mays
  Clone ID: MRT4577_162321C.1.pep
CLSDCRTGATSVLLPQACALIPKAGLSQNLWVGGQGGDLQKERRKSPGHGVFQKTLSKSGNTWAPPCYGVIPKIPSLAHKIIERAWGPRTGIKTPAWGCQDRNPLPPARGTGPGGPRAQFRAF

SEQ ID NO: 253004 - protein, 71 aa, Zea mays
  unsure (1)..(71): unsure at all Xaa locations
  Clone ID: MRT4577_162322C.1.pep
PLVRKKKKKIKKKKKKKKKKKKXKKKKKKKKKKKKKKKKKKKKKKKDRPNLKKSKFYFPFLATNYFFFWFP

SEQ ID NO: 253005 - protein, 180 aa, Zea mays
  Clone ID: MRT4577_162323C.1.pep
MAARLPLLVLAVVAASLLAADARPCHTFFVAFRADPNPSRGDDAVPHHLGAPHVATVITVFRVRRLGPHVPHGHRNHHHLHSIPANVRIHRPDLPHPAAGPQERARDIFVVVIGLLFGVACGALTAASVYLVWSMVAGAAAVSAYDELYDDEDEASDIESPKKVGYVIIQELEVDEGGKN

SEQ ID NO: 253006 - protein, 90 aa, Zea mays
  Clone ID: MRT4577_162324C.1.pep
QQKEASIALKVHLYIGAFLYRKHHRSSVCRHTAETLPKTQLQQLDCSSQHVALRHYLVAQHKTLQTMKRSSWYLAFCLHPNIATFYQLVM

SEQ ID NO: 253007 - protein, 68 aa, Zea mays
  Clone ID: MRT4577_162325C.1.pep
PLYIYVGAPGEEDLCSVGLSPEAVSVLLSSTLVVEPVSTFNYVAETCVLPKKKKKKKKKKYSALLPLL

SEQ ID NO: 253008 - protein, 84 aa, Zea mays
  unsure (1)..(84): unsure at all Xaa locations
  Clone ID: MRT4577_162326C.1.pep
SSSKMQSKLSPVLRTGARWQEHSGLHFSFSYHXXPXLVLCIGIYXYTKLILNSYLINFLLFSSXNSKPXFFNXXXXPSHFXXTH

SEQ ID NO: 253009 - protein, 37 aa, Zea mays
  Clone ID: MRT4577_162327C.1.pep
CTSFASCSNWIFGIVALKTMLILAPELSQRTICVFSL

SEQ ID NO: 253010 - protein, 117 aa, Zea mays
  Clone ID: MRT4577_162328C.1.pep
MAAAVRLLPLLGRLLVVGEIRRSPDYLRRIIPHLPSHPKLAAAVSSLYFPLFPSSVTFLHNLLIRAFAAFSSPRLFFAVYFCLHRSGHLPDHFTFPPLAKFASKFPFFPRTGAHVHA

SEQ ID NO: 253011 - protein, 163 aa, Zea mays
  unsure (1)..(163): unsure at all Xaa locations
  Clone ID: MRT4577_162329C.1.pep
GRPSVLPAPANPPGGVRVGPNKCGWSASPPPTRPHIFDYGTAPGHYPFFYTWNTTAYSYMLXAGGGIHYSYLWPVHPSTRYYYRYTGSPSGLXFFRTPAPRLPLRFXVPADLGHTGWSESTLKHVDLADYDALLLPGDLSYAVLVHPRGHSYLAARGSRMAQT

SEQ ID NO: 253012 - protein, 81 aa, Zea mays
  Clone ID: MRT4577_16232C.1.pep
CAFMPFLVPRIHNKLLYYLWRSKELRLSSSYFKASCTLNFREDLSHLYLQRCHLNHPLNIENMTGSSIYSFTLLSSIYFNI

SEQ ID NO: 253013 - protein, 207 aa, Zea mays
  Clone ID: MRT4577_162330C.1.pep
MSKKRGLSLEEKREQMLQIFYESQEFFLLKELEKMGPKKGVISQSVKDVVQSLVDDDLVLKDKIGTSVYFWSLPSCAGNQLRNTYNKLESDLSNSRKRYMDLVEHRDNLKRGREDSEEREAALEELKTVELHHKKLKEELAAYADSDPAAVEAMKDATDIAHSAANRWTDNIFTLQQWCSTTFPEAKEQLEHMYREVGITEDFEYLQ

SEQ ID NO: 253014 - protein, 126 aa, Zea mays
  unsure (1)..(126): unsure at all Xaa locations
  Clone ID: MRT4577_162331C.1.pep
FADYEATRPEGPGAHHFKQGISPDGERVWYHRGRGSMNGDLPLLLESIKGPVPDTFWLFRIDGPCHGFSHDGKRIAFDGLPGLYEDNSDCFGGRRRVFXGNAVPTAWDWKRKGYIYTSDGPNLYSE

SEQ ID NO: 253015 - protein, 162 aa, Zea mays
  Clone ID: MRT4577_162332C.1.pep
MGLWDSLLNWLRSLFFKQEMELSLVGLQNAGKTSLVNSIATGGYSEDMIPTVGFNMRKVTKGNVTIKLWDLGGQRRFRTMWERYCRGVTAILYVVDAADRDSVPIAKSELHDLLTKQSLSGIPLLILGNKIDKSEALSKPALVDQLGLESIKDREVCCYMIS

SEQ ID NO: 253016 - protein, 83 aa, Zea mays
  unsure (1)..(83): unsure at all Xaa locations
  Clone ID: MRT4577_162333C.1.pep
CRLLLLPLLVLLVCSFXRTWYLFCEAAAEETPALAMADEKPKEGVQTENNDHINLQVAGQDGSVVQFKIKRHTPLSKLMKAYC

SEQ ID NO: 253017 - protein, 90 aa, Zea mays
  Clone ID: MRT4577_162334C.1.pep
IVHNSGSAPYLRYEGIYPLTHKPSPVDLHGTQQLKFSLRTMVHLPCPTRSTAVYEVVALSREAAQHAVLPLSRREPAHPSPQPVLEVGVA

SEQ ID NO: 253018 - protein, 70 aa, Zea mays
  Clone ID: MRT4577_162335C.1.pep
YSRLFILQSPWEQVLFPILWDLIPLISPTFFSYFSSNSFCSSSNFLCKRRPISFKYFSNNIFNTFFPFIF

SEQ ID NO: 253019 - protein, 92 aa, Zea mays
  Clone ID: MRT4577_162336C.1.pep
TLRGAQPSTQILFGVSCAMNLLIYSILPRNPLLSFLFGSMRQIFEVVQAVVRVFGKGMEMGPPRLLSESILVERGRPLKRKVGTILKRYSGK

SEQ ID NO: 253020 - protein, 86 aa, Zea mays
  Clone ID: MRT4577_162337C.1.pep
CACSSSGYAIVPQLILILLRSTQHSLLRDTSQEFDRLTQRSTMIVRMNVMHVIDAYVSQRYDIVLNSIAESTLNSIRQQEEYAPTS

SEQ ID NO: 253021 - protein, 71 aa, Zea mays
  Clone ID: MRT4577_162338C.1.pep
MAERGGERGGERGGFGRGFGRCWRGDRGRRPRGPRGPAQGAKEWVPGSKLRRLVQGNQVHQVQGDQLQLVP

SEQ ID NO: 253022 - protein, 55 aa, Zea mays
  Clone ID: MRT4577_162339C.1.pep
CCMVLVSHFASAGQFPFRTYRIERGPGKPLLHWRRCKPMCWAQELHQACNSPSVP

SEQ ID NO: 253023 - protein, 46 aa, Zea mays
  Clone ID: MRT4577_16233C.1.pep
EGVRDINTTFAQALKIGTQLLHKHLVVHFAVLLPPVFFIWEGLVQK

SEQ ID NO: 253024 - protein, 87 aa, Zea mays
  Clone ID: MRT4577_162340C.1.pep
MQASDRFNINSQLEHLQAKYVGTGHADLTRFEWAVNIQRDSYASYVGHYPMLAYFSIAENESIGRERYEFMQKMLLPCGLPPERDED

SEQ ID NO: 253025 - protein, 125 aa, Zea mays
  Clone ID: MRT4577_162341C.1.pep
VGVPGGPASPARDDSAPTSRATKPPHVARGELPTSPAATTLTGWFAAAATMPLDWTAAAATLCCVSMCRLRLVASLCFVPCDISLLVRWGKEPGGKGLKLCSFSGRKLLPSLGAVPCEVPKTEEH

SEQ ID NO: 253026 - protein, 128 aa, Zea mays
  unsure (1)..(128): unsure at all Xaa locations
  Clone ID: MRT4577_162342C.1.pep
VLIKDGYSRLSSNLKFLNMIQSKFLLTTQLSVEGPIRMKEEYVEGLIAIPRINEESLPEQLKGLLGQTAGALQQLPSPIREAASEGLKLPLXIIRDAAGAPDVLTRLEGPQPSPGDGTADAVISEYES

SEQ ID NO: 253027 - protein, 226 aa, Zea mays
  Clone ID: MRT4577_162343C.1.pep
VRGRVGVRVGAAARSGQPTPPGRGRGTVEEKWSTSEPHMLGVLRRAALAAASSPAADLRQFQCAYHRSSERLSPIRDQEVSYGLNWAIAGKGVIVKDKVLHNLETSELQKGGATYPDFLSGIPLHVRGDVIGGVPGVSKAQFAKLLKLVTFHLSSISCLYVQDGAIGSSAECDAKVRVITDNPSAVMLLSNVLWKIPDRAISHDTSPLTIYATSSISNNVKTVLGS

SEQ ID NO: 253028 - protein, 275 aa, Zea mays
  unsure (1)..(275): unsure at all Xaa locations
  Clone ID: MRT4577_162344C.1.pep
MAAAVALTPAYPAFLPVPFRVRRDGRVRLSPRRPRYSAGRCRAMAQTFQGGAAASYAREMERLSAKESLLLAFKDAGGFDALVSGKTTEMQRIDVNERIVGLERLNPTPRPTTSPFLEGRWNFEWFGDSSPGAFAARLLFERSPTSVAHFMGLDVLIKDGYSKLSSNLEFLDTIQSKFLLTKXEESLPEQLKGLLGQTAGALQQLPSPIRDAVSEGLKLPLSGSFQRLFMISYLDEEILIIRDAAGAPDVLTRLEGPQPNPGDGTADAVISEYES

SEQ ID NO: 253029 - protein, 47 aa, Zea mays
  unsure (1)..(47): unsure at all Xaa locations
  Clone ID: MRT4577_162345C.1.pep
GYLQCTLLQRXXGGFVLIPPARHASAISKVTHVKRKRMRNTAGSFPG

SEQ ID NO: 253030 - protein, 421 aa, Zea mays
  Clone ID: MRT4577_162346C.1.pep
EIITYPSHYKLSAKFHDYFLLHREDQEVSYGLNWAIAGKGVIVKDKVLHNLETSELQKGGATYPDFLSGIPLHVRGDVIGGVPGVSKAQFAKLLKLVTFHLSSISCLYVQDGAIGSSAECDAKVRVITDNPSAVMLLSNVLWKIPDRAISHDTSPLTIYATSSISNNVKTVLGSGTQYANGFAVADIERSSLILCGKAFADSAIVKDALTAMTAPILSARGGLPVPGWILNFGGSTVLLFAPVEIMMSCVEIHNALLSIDCGAVISSKGSTVLFPTKASREQKLLTKPTAVIIVSSDSSGAIPSVCKLSPGQAAYHFLAGYHDGKFVPAYNRAPSPADPLALASSLFSHLKEDDTPSYLINAKHSGKYIDGNGFMKLLKLALSHDLPDIKTEGSRVGELKGKYRSFLSSKFGQCLPEEFSF

SEQ ID NO: 253031 - protein, 299 aa, Zea mays
  Clone ID: MRT4577_162347C.1.pep
MAAAVALTPAYPAFLPVPFRVRRDGRVRLSPRRPRYSAGRCRAMAQTFQGGAAASYAREMERLSAKESLLLAFKDAGGFEALVSGKTTEMQRIDVNERIVGLERLNPTPRPTTSPFLEGRWNFEWFGDSSPGAFAARLLFERSPTSVAHFMGLDVLIKDGYSKLSSNLKFLNTIQSKFLLTTQLSVEGPIRMKEEYVEGLIAIPRINEESLPEQLKGLLGQTAGALQQLPSPIREAVSEGLKLPLSGSFQRLFMISYLDEEILIIRDAAGAPDVLTRLEGPQPNPGDGTADAVISEYES

SEQ ID NO: 253032 - protein, 104 aa, Zea mays
  Clone ID: MRT4577_162348C.1.pep
YVEGLIEIPRINEESLPEQLKGLLGQTAGALQQLPSPIRDAVSEGLKLPLSGSFQRLFMISYLDEEILIIRDAAGAPDVLTRLEGPQPNPGDGTADAVISEYES

SEQ ID NO: 253033 - protein, 50 aa, Zea mays
  Clone ID: MRT4577_162349C.1.pep
DRVDFLIFWYAYHVLFRIFEHKRILALSLGNITLNVFHYGFPKVVFSDLG

SEQ ID NO: 253034 - protein, 108 aa, Zea mays
  Clone ID: MRT4577_16234C.1.pep
FPATPARPGGFQGSLGPPSPHLWQMVVTFSPFQNVFPISDDPPKPFLSPPPQKEFSPPSPGGAPRWDPSPPEIFNPLKFGRRLPPGLNLFPLGGGGFFRRLFVFLRTL

SEQ ID NO: 253035 - protein, 54 aa, Zea mays
  Clone ID: MRT4577_162350C.1.pep
KQILNVGALFSLKGNRSVLLFHFWRDPNPIRRILLLGVPTFQLTTNGKPCHPLT

SEQ ID NO: 253036 - protein, 87 aa, Zea mays
  Clone ID: MRT4577_162351C.1.pep
KQWQTTHFHFLNLNHYTFCKIPLNLLVFLHIINTVNKSLLFRFFVLVIYAHFCNGTGRPFLPCLFYIFVRKWLLSDPNRVLLAAIAW

SEQ ID NO: 253037 - protein, 62 aa, Zea mays
  Clone ID: MRT4577_162352C.1.pep
GGPDQPVCSLIWVALKKKNFVIILAGIQSFRAFDDSFFRLSHLFFWVGIFYPVGFTGYPVGP

SEQ ID NO: 253038 - protein, 69 aa, Zea mays
  Clone ID: MRT4577_162353C.1.pep
MASGTMDLSSTAFAAKAVNMPTSTAFPEVRVTMGKMRKKAKTAKASGSPREPPDRMLNLRPMWAQSTRY

SEQ ID NO: 253039 - protein, 208 aa, Zea mays
  unsure (1)..(208): unsure at all Xaa locations
  Clone ID: MRT4577_162354C.1.pep
SRPGPGYVTIFXWNGPQALGEMYVAFLDKRHNTFENIPYFATVRFDNFGGKVNNWLTFSEXHTFTSXSYGTGVXFGPGPCSPGLDCADPTXNSLYETYTAGHTVLLAHAEDVXDLYNXHNERDDSHIXGLTLDLMCPGPYGTSSPDKQVLTKGXDINLXWFLXPCVTGDHPFSVRPLDMERLXPFFTEEQTEKLRGSYNMXGLNYYPS

SEQ ID NO: 253040 - protein, 82 aa, Zea mays
  unsure (1)..(82): unsure at all Xaa locations
  Clone ID: MRT4577_162355C.1.pep
GTCFAGPCVENGKRVSWWMVDIGQEHQXVHIFLASDLMVANAVDNGMANCLXLMCNYYTVRQDGSTAFMRSWAFPRAEFRAY

SEQ ID NO: 253041 - protein, 61 aa, Zea mays
  Clone ID: MRT4577_162356C.1.pep
FDSTLLLKRSDYHTEAGNSATYTVCGLVMVTTETKKTTPAAYSWGWKDPLALHAPDCVLIT

SEQ ID NO: 253042 - protein, 118 aa, Zea mays
  unsure (1)..(118): unsure at all Xaa locations
  Clone ID: MRT4577_162357C.1.pep
MASLAFGSTVAAAVAATSGRTRPARRSVLVVPPAASRGGPAPAKEEKGLGETIFGFIFKKDQLVETDPLLNKVGAAPAAGXSRAKTTAGKKAAGGDDSGSGGGFNLGGLGGLFAKKSS

SEQ ID NO: 253043 - protein, 61 aa, Zea mays
  Clone ID: MRT4577_162358C.1.pep
FVFFFFFFFFIKKKAMLLLLLTRRVDTLWLPQRRCHKMCAWRCIHAIPLICPNTWAIFYKF

SEQ ID NO: 253044 - protein, 79 aa, Zea mays
  Clone ID: MRT4577_162359C.1.pep
GHGTASLVFVYVPTSTMRLEQRLYAYHRKAPQWAAARSSRKGQSRNQWWQGQLPAPPSAGSWARVSTTAEERRWQNYCI

SEQ ID NO: 253045 - protein, 90 aa, Zea mays
  Clone ID: MRT4577_16235C.1.pep
GGKMVHVDWKYLVSYYAYSEATGDEIGIPRGIPISHFQEIRRHKCSYMNWNYLLSYYAYPEATGNEIGITRGITITHFQEIKKAKCSYMN

SEQ ID NO: 253046 - protein, 41 aa, Zea mays
  Clone ID: MRT4577_162360C.1.pep
NIYALHGLPHLQRCSHRVLVVPYQYLCLPGNGLCYLIIIIT

SEQ ID NO: 253047 - protein, 94 aa, Zea mays
  Clone ID: MRT4577_162361C.1.pep
KRAPLVFFFFFFFFFFFFFFFFFKGGENKTIFPFCANGCKVLRFLSLKHNGASILHFFSFFFTNNQFSPPLNLSLGLNTAATSFLAENGTIVKK

SEQ ID NO: 253048 - protein, 150 aa, Zea mays
  unsure (1)..(150): unsure at all Xaa locations
  Clone ID: MRT4577_162362C.1.pep
MLMQGAVVVTDCTPTGVASLSSSVRCRLGPAGGHTGKRRRLRPSKRAPTTYISTDVATFCAMVQRVTGADEADLQSXAAGXLTLASSCRTSASSCSYRRRDTRXRVAAAPYTPAPPAAAAEQQPLYPMLXDSWNVMYGKKTEVVSALTDQ

SEQ ID NO: 253049 - protein, 106 aa, Zea mays
  unsure (1)..(106): unsure at all Xaa locations
  Clone ID: MRT4577_162363C.1.pep
RRVQACVDSGLGSRLWAACARGVPGSLCWRAVAGRHRGATGGGGGCGDLQRGGGVHGEAXQQQKQGAVMAALKAATAATFGGSVLVLSGLILAGTVVALTVATPVL

SEQ ID NO: 253050 - protein, 113 aa, Zea mays
  unsure (1)..(113): unsure at all Xaa locations
  Clone ID: MRT4577_162364C.1.pep
SPHLRVGVSASPALPCAAWQQXTASSQASGQGSFIFLSPRRPTXISXTFSFDRLGLRAAAGVGGAGAXSLAPTSSCLSGRGGGGHPGGGRRCGLRACVGLLRTWRLCLLPSSG

SEQ ID NO: 253051 - protein, 98 aa, Zea mays
  Clone ID: MRT4577_162365C.1.pep
SARVWIISCPVSDVPAAYPGIYCELCHHPFGRESVLLLGFIDTQAAIHCCVSMTDDSGEQCLPAAHSSTSRDSLDDGSLSDFNIPGSDRCFLGALKTS

SEQ ID NO: 253052 - protein, 66 aa, Zea mays
  Clone ID: MRT4577_162366C.1.pep
LIGVAGLSKRCGTMRYCYRRRYRSLIIFLEETVWAQLLCSNDRHGADDNQLDLHADNDLQTIQAHA

SEQ ID NO: 253053 - protein, 46 aa, Zea mays
  Clone ID: MRT4577_162367C.1.pep
WFFFFFFFFFLCLGLNNLQCRGPNVAVAQRIKTNPPHTPNYPETNR

SEQ ID NO: 253054 - protein, 78 aa, Zea mays
  Clone ID: MRT4577_162368C.1.pep
FLEWPFSNLPIPAPSFPPPFFFSLSSFFPITQISPRFFIFSSRLDQATDLFLCFGSKFLFPIPFFLIRVWLLIPGPGF

SEQ ID NO: 253055 - protein, 48 aa, Zea mays
  Clone ID: MRT4577_162369C.1.pep
LFLVDLGRIWVDCGRLGTALVGADALAPWAPPLLPLPPPSVQSDLFLP

SEQ ID NO: 253056 - protein, 81 aa, Zea mays
  Clone ID: MRT4577_16236C.1.pep
LSPAQRPLLIPIKGAPPPIKKGPGATKGPSLSPFGERGGPSSFPPLRGGHLFSPPLCKGPRVFCTPSGIKKSKGAVFFVSY

SEQ ID NO: 253057 - protein, 41 aa, Zea mays
  Clone ID: MRT4577_162370C.1.pep
IYIVIFKIIGANHLCVCAQEMMVQCSKVVLEGANYYSLGSE

SEQ ID NO: 253058 - protein, 190 aa, Zea mays
  Clone ID: MRT4577_162371C.1.pep
DVANAGGAKPLTPGGRVVHHNHGKFTAGEWKRAHATFYGGRDGSGTTAGACGYKDTRSEGYGVQTVAVSSVLFGNGAACGGCYEVRCVDSPDGCKPPGAAAAAAALVVTATNLCPPNEQQSADSGGWCNPPREHFDLSMPAFLQIAEEKAGIVPVSYRRVACARQGGIRYAIAGNKYFNMVTVTNVGGAG

SEQ ID NO: 253059 - protein, 53 aa, Zea mays
  Clone ID: MRT4577_162372C.1.pep
GTKGTTRGALAQRPETLSPTGSKRLTQKSKLRASLVTRLTLTHFKPKNPLLTL

SEQ ID NO: 253060 - protein, 127 aa, Zea mays
  unsure (1)..(127): unsure at all Xaa locations
  Clone ID: MRT4577_162373C.1.pep
VTCVGHRLYWESRGIPHLIRFETNSLFPIWGILKEAETDRPSQHFLRLNGFWDAPCSPSXKAHXVVVLLNFTYTIARAVSPGPLDLLLFLLSTTAAFARFSFXNGECVGVXVTGLRALHPKKLKKVD

SEQ ID NO: 253061 - protein, 55 aa, Zea mays
  Clone ID: MRT4577_162374C.1.pep
RVKPGGPKEGPTSILLGGPHCPFSKGKTCWAICFNKSANPRGKGFWFLGPRGVFF

SEQ ID NO: 253062 - protein, 87 aa, Zea mays
  Clone ID: MRT4577_162375C.1.pep
GNSLSSLPFAIYIRAAREWSCTLYACLLFSSACSTCNICLFISNARSLSMTVRMDDNSHWLYFFFSEASTNRKENQGVCLDDCSLYH

SEQ ID NO: 253063 - protein, 71 aa, Zea mays
  Clone ID: MRT4577_162376C.1.pep
SLSTICLDTREFNNTTASYAIHLHMMSEWPVPSTCLTPPRAYNPDVSGKDRHPRPGEQRGTSITFFLGWTA

SEQ ID NO: 253064 - protein, 206 aa, Zea mays
  Clone ID: MRT4577_162377C.1.pep
MFVKAMAGPAVLNERILSSMSQKHVAAHPWHDLEIGPGAPEFFNCVVEIPRGSKVKYELDKASGLIKVDRVLYSSVVYPHNYGFIPRTLCEDNDPLDVLILMQEQVVPGCFLRARAIGLMPMIDQGEKDDKIIAVCADDPEFRHYTDITDLPPHRLQEIRRFFEDYKKNENKEVAVNEFLPAKDAINAIKYSMDLYGSYVIESLRK

SEQ ID NO: 253065 - protein, 174 aa, Zea mays
  unsure (1)..(174): unsure at all Xaa locations
  Clone ID: MRT4577_162378C.1.pep
MAGPAVLNERILSSMSQKHVAAHPWHDLEIGXVEIPRGSKVKYELDKASGLIKVDRVLYSSVVYPHNYGFIPRTLCEDNDPLDVLILMQVFXNGEKDDKIIAVCADDPEFRHYTDITDLPPHRLQEIRRFFEDYKKNENKEVAVNEFLPAKDAINAIKYSMDLYGSYVIESLRK

SEQ ID NO: 253066 - protein, 255 aa, Zea mays
  Clone ID: MRT4577_162379C.1.pep
MRWTRYLGLFRWTRQPAPEPWTAAVNSRPLRHLATRLFSLSPPGQGRDHPIGSVMAGAAALNEGILSSVSEKNVAAHPWHDLEIGPEAPEVFNCVVEIPRGSKVKYELDKISGLIKVDRVLYSSVVYPHNYGFIPRTLCEDSDPMDVLVLMQEQVVPGCFLRARAIGLMPMIDQGEKDDKIIAVCADDPEFRHYKDISDLPPHRLQEIRRFFEDYKKNENKEVAVNDFLPAEDAIKAIEHSMDLYGSYVMESLRR

SEQ ID NO: 253067 - protein, 91 aa, Zea mays
  Clone ID: MRT4577_16237C.1.pep
MTPPPYPLDEIKGPPGVGSPGPLKFGGGPPKGTPKTPPPPPGNIPLGVPKSTPEPGGVIGVFERVHPSDPALGAKAPKDVKIQGVWSPPPE

SEQ ID NO: 253068 - protein, 273 aa, Zea mays
  unsure (1)..(273): unsure at all Xaa locations
  Clone ID: MRT4577_162380C.1.pep
MAGPAVLNERILSSMSQKHVAAHPWHDLEIGPGAPHLSGRVVEIPRGSKVKYELDKASGLIKVDRVLYSSVVYPHNYGFIPRTLCEDNDPLDVLILMQEQVVPGCFLRARAIGLMPMIDQXVSPSPDRIVFAMFTLGHIFFPCNFETTXMLVLTFDQATIRPFYRIXNIVLVNXSVPRLNSCILFNRCSTSXGEKDDKIIAVCADDPEFRHYTDITDLPPHRLQEIRRFFEDYKKNENKEVAVNEFLPAKDAINAIKYSMDLYGSYVIESLRK

SEQ ID NO: 253069 - protein, 68 aa, Zea mays
  Clone ID: MRT4577_162381C.1.pep
LVHNLLPDYISTPSILPPETAALSESSDFHQYTSRTIHQRVKNLFMIKVHEILGNKAQFSDSYMSAHQ

SEQ ID NO: 253070 - protein, 71 aa, Zea mays
  Clone ID: MRT4577_162382C.1.pep
LCPYSGELGAVVFAAEQAFPSLPSHRLRSEETGGSEFRLSVRRLRLLSTTPDAGRPESARTAGDQLPIESR

SEQ ID NO: 253071 - protein, 120 aa, Zea mays
  Clone ID: MRT4577_162383C.1.pep
KQGVNGNSGKKHCLEKRAGFIPTKTGDRDGQFYFYPRGRLPPRKAFNHPTCFREGPPPPWVGNPFKKIFSFLVKKRDDPPFSGGRPPLLREQKVLDIQPAGEGILKKLFLNQTWGPRLGL

SEQ ID NO: 253072 - protein, 135 aa, Zea mays
  Clone ID: MRT4577_162384C.1.pep
HWVPRGRPGILPTRRRLPLPPVSRPCYAADTFAQFNLTMLDAAYNITGVSSAVLPHALLSHLSPPPHALAADSAFRRLCLCASPARITHIIPRVSMNVPNSGDRVACRCFTLIPTDEAQRSVSCGATAERTGRRP

SEQ ID NO: 253073 - protein, 69 aa, Zea mays
  unsure (1)..(69): unsure at all Xaa locations
  Clone ID: MRT4577_162385C.1.pep
IHSIVLLYLLQIXFEVVETNLAFFHSXVGVAIFVSPSSPFGMQIALSSGTSAKNKAKMRKDFILSLLSF

SEQ ID NO: 253074 - protein, 93 aa, Zea mays
  unsure (1)..(93): unsure at all Xaa locations
  Clone ID: MRT4577_162386C.1.pep
EIFVLAGTKPGLVDKRQVSTEDGASXAEESNVASIDTSAKAGFNITPLFRKIAAPLPGMETSSAKLEDMADVNPDSTCSQSNSQHQEGHACAC

SEQ ID NO: 253075 - protein, 106 aa, Zea mays
  Clone ID: MRT4577_162387C.1.pep
PAPTQTERKLPSSLPRPKEMTTCCKPGPQLQKLSGWPARNLWLRRGSQDNALSDKDGDNEAERPTTVKILSLHRNGNSGILPAKGNYSIHRVLSTCVTPTRRLILP

SEQ ID NO: 253076 - protein, 56 aa, Zea mays
  Clone ID: MRT4577_162388C.1.pep
NQTNGLTDVAWHSKGVLDSHVQKSNQFSTFLGVNNVFRTTQGLSMDKNLGDSTPAN

SEQ ID NO: 253077 - protein, 81 aa, Zea mays
  unsure (1)..(81): unsure at all Xaa locations
  Clone ID: MRT4577_162389C.1.pep
SFPMPAHRAGGGFFGRDTSAILAATLVLWAVCGGFEIGVRGRRELAPLATCFAXFQAVNTVCRGSVFRDPFFMNTGXSLFH

SEQ ID NO: 253078 - protein, 46 aa, Zea mays
  Clone ID: MRT4577_16238C.1.pep
LNTHLHKGANPQQQPSSFNPIYNTHITINNIQTTQINKCSTPTLIF

SEQ ID NO: 253079 - protein, 411 aa, Zea mays
  Clone ID: MRT4577_162390C.1.pep
MHPSRRRSIHLKASRDMESSPLLQLPAARVEALSLSGLSAIPPEYVRPADERAGLGDAFDLARTHANDHTAPRIPVVDISPFLDSSSQQQQRDECVEAVRAAAADWGVMHIAGHGIPAELMDRLRAAGTAFFALPVQDKEAYANDPAAGRLQGYGSRLATNTCGQREWEDYLFHLVHPDGLADHALWPAYPPDYIAATRDFGRRTRDLASTLLAILSMGLLGTDRGDALEKALTTTTTRTAADDDLLLQLKINYYPRCPQPELAVGVEAHTDVSALSFILHNGVPGLQVLHGARWVTARHEPGTIIVHVGDALEILSNGRYTSVLHRGLVNREAVRISWVVFCEPPPDSVLLHPLPELVTEGHPARFTPRTFKQHLDRKLFKKKQQHKAKAEEEDGGNGDHHRHEPPPQTN

SEQ ID NO: 253080 - protein, 80 aa, Zea mays
  Clone ID: MRT4577_162391C.1.pep
LPPLRPEDLHLPVTPRNKDQRVGVHVQHRYRAQPLLHAYSRACISLHILSLDDNHARLYTQVFDHLLYKRVVSCFGQDVW

SEQ ID NO: 253081 - protein, 104 aa, Zea mays
  Clone ID: MRT4577_162392C.1.pep
GPFFFFFFFFFFFFFFFFRGRANPCTRAVAPLVQINQSLSIRYMAQHTRSRIQAGSRTCPQPAAQKKLAGVPFLREYWNGRRGGGGVSFLFLVALATSSPSPAG

SEQ ID NO: 253082 - protein, 46 aa, Zea mays
  Clone ID: MRT4577_162393C.1.pep
SVLMMTKYAGFFSHSEAMVDRDAEQIDTAEITASWEVEEMAWTFVT

SEQ ID NO: 253083 - protein, 142 aa, Zea mays
  Clone ID: MRT4577_162394C.1.pep
MVTSTTAAAVLSPPSVAGLRLAPSPRVRVAFRAAPARRSVAARAELSPSLVISLSTGVSLFLGRFVFFNFQRENVAKQVPEQNGKTHFDAGDERAKEFSGLLKSNDPVGFNLVDVLAWGSLGHIVAYYILATSSNGYDPNFF

SEQ ID NO: 253084 - protein, 71 aa, Zea mays
  Clone ID: MRT4577_162395C.1.pep
RPTRCMSNDTLPCRCAHDDGFLREHGGYDHPRQERMRLWPSKVGAEAAVTTSPRRERRRWILEARVTAAAT

SEQ ID NO: 253085 - protein, 142 aa, Zea mays
  Clone ID: MRT4577_162396C.1.pep
MVTSTTAAAVLSPPSVAGLRLAPSPRARVAFRAAPARRSVAARAELSPSLVISLSTGVSLFLGRFVFFNFQRENVAKQVPEQNGKTHFDAGDERAKEFSGLLKSNDPVGFNLVDVLAWGSLGHIVAYYILATSSNGYDPNFF

SEQ ID NO: 253086 - protein, 142 aa, Zea mays; identical to SEQ ID NO: 253083
  Clone ID: MRT4577_162397C.1.pep

SEQ ID NO: 253087 - protein, 192 aa, Zea mays
  unsure (1)..(192): unsure at all Xaa locations
  Clone ID: MRT4577_162398C.1.pep
MFLHIAACNVPQGNSSDQQVQHPPWIRDCKRNLASAHASADAWADAWENRKETPPPPRLPFQYSRRKGTPASAMVTSTTAAAVLSPPSVAGLRLAPSPRARVAFRAARARRSVAARAELSPSLVISLSTGVSLFLGRFVFFNFQRXNVAKQVPEHNGKTHFDAGDERAKDFSGLLKXSHDPVRLKILDVLDW

SEQ ID NO: 253088 - protein, 134 aa, Zea mays
  Clone ID: MRT4577_162399C.1.pep
PAVLHPIIASGHIPVIATVAADEAGQAYNINADTAAGEIAAAVGAEKLLLLTDVSGILADRDDPGSLVREVDVAGVRRMVAEEKVGGGMIPKVECCIRAIAQGVRTASIIDGRVPHSLLLEILTDEGTGTMITG

SEQ ID NO: 253089 - protein, 125 aa, Zea mays
  unsure (1)..(125): unsure at all Xaa locations
  Clone ID: MRT4577_16239C.1.pep
RPRRPVSVQGGENKAXXLWLRALCDXXSPNXCXMRGCXXLKGXTPXTLRXVGYPQXFTXXRXXAXXCGTVDVGGDYLXVREKXPFXXKXXRXCXIRGKGXFSSGGLPRQGEFXXVVFLRALYTXX

SEQ ID NO: 253090 - protein, 63 aa, Zea mays
  unsure (1)..(63): unsure at all Xaa locations
  Clone ID: MRT4577_1623C.1.pep
DPIERLLFFLFSXXKKGTIKFSFGGYTRLHLYPNYRQHYSINLFTDYGPNPVHINKMSGRSIP

SEQ ID NO: 253091 - protein, 107 aa, Zea mays
  Clone ID: MRT4577_162400C.1.pep
AAASTVGVVGGASERIMADGDTPADVTTAGSDRSPAEDAPVRADLSICLTLRARMHGLCLPDWPAGPVWLPQRQCRAVRSAIVLLVNDRSILRPGGAVYLLTSPSHI

SEQ ID NO: 253092 - protein, 142 aa, Zea mays
  Clone ID: MRT4577_162401C.1.pep
MATSTAAVLSPPSVAGLRLAPSPRRAARVAFRAAPARRSVAARAELSASLVISLSTGVSLFLGRFVFFNFQRENVAKQVPAQNGKTHFDAGDERAKEFAALLKSNDPVGFNLVDVLAWGSLGHIVAYYILATSSNGYDPNFF

SEQ ID NO: 253093 - protein, 276 aa, Zea mays
  Clone ID: MRT4577_162402C.1.pep
VSLKTVTFPVSLCHAHWHCHVLLAAEVAVKELIHKECKKKEKNEFTQEVYILREVQHTNVVRFNGACTKPPQFCIITEYMSGGSLYDFVHKQHNVLNLTTLLKFAVDVCRGMCYLHERGIIHRDLKTANLLMDNDHAVKVADFGVARFQDQGGIMTAETGTYRWMAPEVINHQPYDSKADVFSFAIVLWELITSKIPYDTMTPLQAAVGVRQGLRPGLPKKTHPKLLDLMQRCWEADPSDRPAFSDILAELEDLLAQAQGTSGKTVQDPSNSNAKD

SEQ ID NO: 253094 - protein, 73 aa, Zea mays
  Clone ID: MRT4577_162403C.1.pep
RLKCMVLEFKKENRTRRLVQKGRVEFLHERKTARLWCVEISQQARNLPFCQSKHLASPVCRQQPVFYIKKHGQ

SEQ ID NO: 253095 - protein, 56 aa, Zea mays
  Clone ID: MRT4577_162404C.1.pep
GDSGRAISLLGEKDGALDTGCASCLKPGLHGTHGGRLDVETFRDSRSGHLPHAWPP

SEQ ID NO: 253096 - protein, 70 aa, Zea mays
  Clone ID: MRT4577_162405C.1.pep
RWKVPRGGVQDYKGRNSRKKTVGVSVLPRVPQVPCPAPCGGGDVVLERGSPTWCCSFKGFCSPEVRQTTS

SEQ ID NO: 253097 - protein, 75 aa, Zea mays
  unsure (1)..(75): unsure at all Xaa locations
  Clone ID: MRT4577_162406C.1.pep
TVNQAHSRVGGGGAGXYAGGPGGGGYGGGPRDGGYGGGAAYAGRRKGGAAANEGGGGYAGRPKGGGAGYGGGGGG

SEQ ID NO: 253098 - protein, 46 aa, Zea mays
  Clone ID: MRT4577_162407C.1.pep
RLGYIVFLTGKSRLEYRGSIAVTVILCYIADYIHSMERKKAAVRSS

SEQ ID NO: 253099 - protein, 85 aa, Zea mays
  Clone ID: MRT4577_162408C.1.pep
KKTRYLQPRILTWSGRNKLWDHILKLITLCMGLISTTRRCVHSAKHLRSQMASFLTGEGPEESVRGRNIYNGIHTEACPKPTALH

SEQ ID NO: 253100 - protein, 82 aa, Zea mays
  Clone ID: MRT4577_162409C.1.pep
QRFHQIVMWLKKRAKNSSVVDIITLLSACVPNTLCFSSHCILMHLVVNLSVDEVGSYLDLVGLFRRNIYRKPLRCLYWREER

SEQ ID NO: 253101 - protein, 64 aa, Zea mays
  Clone ID: MRT4577_16240C.1.pep
SRSPPRNQLSFTATKKKRKGNKVLLSPTPQIVLSPSQARAPNTMKPNTKSSRHTPQTTERTCKT

SEQ ID NO: 253102 - protein, 73 aa, Zea mays
  Clone ID: MRT4577_162410C.1.pep
FSLNNMVPLCIRLGCLLERINSDKSHCHVDGPHVCLFKYGPHVYLLEGVPIEVIQRADIVLEDIHSKKPTRRV

SEQ ID NO: 253103 - protein, 443 aa, Zea mays
  Clone ID: MRT4577_162411C.1.pep
MGEVAALRQLVGQVQELWDLYGANGNPVPRWYLPDFEHGSIKDDYCGGSSGYNSELLKIMETNQSPPCKRPRRDRNREKAPSSNKIEVMEQEIWRDFPEDLFETVIARLPVAAIFRFRTVCRRWSSLLGSDSFSRQYSEAPHGLPWFYTITHENSNNNVAMYDPLLKKWHHQSVPLNHTKIVIPVASVGGLVCLLDLSHRNFYICNPLTQSLKEIPPRSVHGWSRVVVGMVLNGRSSSDGYKVMWLDIDGTCEVYDSTKNVWSCPGTFPPSIKLPLALNLRSQPVAVGSMIYFMCAEPDGVLSYDVSTGIWRQFAIPLPLHLTDHTLAEFQGRVMLVGLLCKNAATCICIWELQKMTLLWKEVDRMPNLWCLEFYGKHMKMKCLGNSGLLMLSLKAKHMNRLVTYNLLKREWQKVPDCMLPWSRKRQWITCGTAFDPVPCALV

SEQ ID NO: 253104 - protein, 115 aa, Zea mays
  unsure (1)..(115): unsure at all Xaa locations
  Clone ID: MRT4577_162412C.1.pep
LLLWGPPNFTGLNRGFTRVGRVKPWPPPPNWPSSKXAXTERPYHRMGPLNGHWDTPCNPXMXAGRAVVPRIKPGAFGGFLTPDPFAFFRSFSAXFAVFPFFALHVGLPSRFRFKA

SEQ ID NO: 253105 - protein, 50 aa, Zea mays
  Clone ID: MRT4577_162413C.1.pep
WGGGGMFRIYLFFSLKPRDGSLNFAVHRPHVISTLPLVNTKPPLFFHRYW

SEQ ID NO: 253106 - protein, 263 aa, Zea mays
  unsure (1)..(263): unsure at all Xaa locations
  Clone ID: MRT4577_162414C.1.pep
ERSSDKKKSNKHVDSSVPVFNLEDIEEGVEGAGFDDEKSVLMSQMSLEKRFGQSAAFVASTLMEYGGVPQSSTPESLLKEAIHVISCGYEDKSEWGTEIGWIYGSVTEDILTGFKMHARGWRSVYCMPKRPAFKGSAPINLSDRLNQVLRWALGSVEILFSRHCPLWYGYGGRLKFLERFAYINTTIYPLTSLPLLVYCILPAICLLTGKFIMPEISNLASIWFIALFLSXFRPGILEMRXSGVGIDEWWRNEQFWXVIGGIS

SEQ ID NO: 253107 - protein, 72 aa, Zea mays
  Clone ID: MRT4577_162415C.1.pep
GVGPGVRPGVRGGVGHLFMFQSFWEGEVVVFMFRFMGNPGMFMQACVCRAKINKEVGLNLTTPRGGGIGFGI

SEQ ID NO: 253108 - protein, 105 aa, Zea mays
  unsure (1)..(105): unsure at all Xaa locations
  Clone ID: MRT4577_162416C.1.pep
RVLRMRASCVLTAWRLAYSGARVKPCATTXKMAXAARTSILCARAYTSRLGYXGYTKSVCTXSISACAMPFPEXRQLHQGHIMNIEMSVYSRAYQSGTSKRLLCG

SEQ ID NO: 253109 - protein, 137 aa, Zea mays
  unsure (1)..(137): unsure at all Xaa locations
  Clone ID: MRT4577_162417C.1.pep
XXXXXXQXXXXXXAXXXXXXTXXXXXXXXXDKTQRXXSPKNKRHKXTQXXAGGRRRQEASXXRXPGXGPPGTTGAHKTSDGGKSHKXSQGRKPKTKKXXXTRPQEKGPXXKKGRRXAXXQGDKGQKSHTQGPRGPQA

SEQ ID NO: 253110 - protein, 120 aa, Zea mays
  Clone ID: MRT4577_162418C.1.pep
MAAAARNLVLRHLRLAASPASSVALRPAAALQGALSGRRWMSSEDAKGSFLDKDEVTERTIKVVKNFQKIDDPSKVKADAHFKDDLGLGSLDAVEVAMSLEEEFGFEIPDNEADKIDSIK

SEQ ID NO: 253111 - protein, 89 aa, Zea mays
  unsure (1)..(89): unsure at all Xaa locations
  Clone ID: MRT4577_162419C.1.pep
WLPLFRSAHTLNHISPKSIRLHLRXNMHIDDKTLTGNTITLDVESSDTIDNVKAKIQYNEGNPLDQQRLIYAGKQLDDVLTAAVYNIQN

SEQ ID NO: 253112 - protein, 135 aa, Zea mays
  unsure (1)..(135): unsure at all Xaa locations
  Clone ID: MRT4577_16241C.1.pep
QNXRAQQPQQPXXANXXAXXQQXQXXPNNQXXAXNXAGGGQQQXPXSQXXXAXPQQXXPXNQXAAXNXXXXXQQQQXQPXSQXXXXSXXAXXTQQQXXPXXXHXXXNXGTXXQXQQXXPXNQXXXTNPTXXXQQP

SEQ ID NO: 253113 - protein, 31 aa, Zea mays
  Clone ID: MRT4577_162420C.1.pep
EFVSLQLFGKKPSSSSGNHGLSKASINTCFA

SEQ ID NO: 253114 - protein, 181 aa, Zea mays
  Clone ID: MRT4577_162421C.1.pep
TSIGSRTDAHPLPSIIRLRCQNFPLSRVARRRPAVLLADTAPPAAKMPFKRFVEIGRVALVNYGKEYGRLVVIVDVVDQNRALVDAPDMVRCQMNFKRLSLTDIKIDIKRVPKKTTLIKAMEEADVKSKWENSSWGKKLIVQKRRASLNDFDRFKVMLAKIKRGGAIRQELAKLKKVAAAA

SEQ ID NO: 253115 - protein, 74 aa, Zea mays
  Clone ID: MRT4577_162422C.1.pep
EPGVLRRSGGPGNFGTPPCGITSFFKGGGNKGWGYSGEKLVPGKNCYPLKIPKKKRAKPKRLKAGGPKKEGDPN

SEQ ID NO: 253116 - protein, 111 aa, Zea mays
  unsure (1)..(111): unsure at all Xaa locations
  Clone ID: MRT4577_162423C.1.pep
LEPAGHSPHPVAASFGNPIKGHRGPGWTATQEELCGLYHHTSSPEDVFRHFGEHRGSIGKELTTDXQKIYQQCHPDKDNLCLYDLSNETWDATLTVERRPPVVPHPVLEKN

SEQ ID NO: 253117 - protein, 74 aa, Zea mays
  Clone ID: MRT4577_162424C.1.pep
NADAGMVNMVPIRPLVVKPFFEYPPLGSFAGRDIRQTVVVAVFKSGEKKYPPGAMVSKEASKKKGCVWLVRSLL

SEQ ID NO: 253118 - protein, 61 aa, Zea mays
  Clone ID: MRT4577_162425C.1.pep
SLSNIRRVCDGEEDSSHCTIACSKKRRTCYECGIPGHLSSNCPNKKDPEFISDEKNTNVDS

SEQ ID NO: 253119 - protein, 223 aa, Zea mays
  unsure (1)..(223): unsure at all Xaa locations
  Clone ID: MRT4577_162426C.1.pep
MPRGHPHPLPRRGRLLQFAAAASGLLLLTLLVLLPAAPPWEHTTAPASLLHAAIAAHPLPNSYARPCADHLALSLHRLRASLSSLESGDVPAALHLASGSLQCQYDCSHLLSLPAFRSHPLTSRFLNSLAPQTLNAALKPPPSSAPAAAFPARIRPDATVCKPNSGVKPCGYSTVQAAVDAAPNHTAGAGHSAIAXGAGTYKENVVIPYEKXNILLMGQGMGA

SEQ ID NO: 253120 - protein, 102 aa, Zea mays
  Clone ID: MRT4577_162427C.1.pep
QRRKTEKSLLSLQRRLATTSAEELKNNGCQKTYASAGKSGDTSSANASMMNMQQIITKLTTQCSEKAFELEAIFFLNLYCDSMKLKYLEIVLLTIVCVFLGQ

SEQ ID NO: 253121 - protein, 112 aa, Zea mays
  Clone ID: MRT4577_162428C.1.pep
GLGLPRDLYSILMGQGNPTAMDPWVPSSVDEVRSAVNARDEQGSSQTLIVSESISALSIQLIVSFSFGLPFIGGQVHSLLAVILSGLFNQKPIHPGKFPLIHCLLRNFRISS

SEQ ID NO: 253122 - protein, 66 aa, Zea mays
  Clone ID: MRT4577_162429C.1.pep
RAKPIPHLYRLKRCLFFPNLTTLSKKNTLSLQQSPPKTGGGHHPSNNFFLIQGRNHSPIFSKLSLN

SEQ ID NO: 253123 - protein, 118 aa, Zea mays
  unsure (1)..(118): unsure at all Xaa locations
  Clone ID: MRT4577_16242C.1.pep
MAPSGWRRSAAARFACRPATVCLLLEIDVAVLTLAQAMNDLTHVTHKVYFDIEIDGKPACRIVLTLFGXKTVPITRENFRALCTCDKPVGHSGKDLHYKGSKFPIIIPSFMLQRGDST

SEQ ID NO: 253124 - protein, 170 aa, Zea mays
  Clone ID: MRT4577_162430C.1.pep
NRRKAHPMFCKPGVTGTVTATNFCPPNLALPEGGWCNQQRPHFDMAQPAWEKIGVYGGGIIPVMYQRVPCVKRGGVRFTINGHDYFNLVLVTNVAAAGSIRSMDVKTSNSTGWTRMARNWGANWHSLAYLTGQALSFRVIDTDGQTIEFANVVSQGWKFGQTFASGLQFK

SEQ ID NO: 253125 - protein, 212 aa, Zea mays
  unsure (1)..(212): unsure at all Xaa locations
  Clone ID: MRT4577_162431C.1.pep
CCWKKLPFLQGLSILEKLAAPLAPLIVGRTGAQLFLTDGDPSKAPLLLQMASDCDDKNYISALAAFKNRVLYANVSYDHMVGWRTSSLRREKNLIKPSHRSLDGYKHIVNVEYWTAVSSEGPHFPSKAARAKEAAQRSPNRENTEEYHQMMDEXVGWKKVDVNFHSSFWPYSAHNNIHVKNEWLHNAGAGVIAHVADSIKQQESRPCLPANL

SEQ ID NO: 253126 - protein, 43 aa, Zea mays
  Clone ID: MRT4577_162432C.1.pep
HSLFGSRLDLHFILIKGTLVIHRYFCLYLMIKNDWPCCAFIFF

SEQ ID NO: 253127 - protein, 107 aa, Zea mays
  unsure (1)..(107): unsure at all Xaa locations
  Clone ID: MRT4577_162433C.1.pep
MSQPTKPQQPRFMSDLDVXLPSALXDPTAEENDDDXSTVPVNSRHYGHVLIQQRNAXNSLTTDHYLKKEFRYXKILKDLKNXFCCNETVVHDPXLGQCIHLQGDHRK

SEQ ID NO: 253128 - protein, 173 aa, Zea mays
  unsure (1)..(173): unsure at all Xaa locations
  Clone ID: MRT4577_162434C.1.pep
ATRPGSFSKAPGLNWHHRGRRIQICRKPVSSSSIKGKFCCCVFGDXTSKSKQGPEHLLVLVHGIMASPKDWTYGEAVLKRRLGDXFSYMCRFMXKWMLKKVYAXSLSTASSTNSYTKTFDGIDVAGRRXLEVVNKMPSLRKISFLAHSLGGLFARYVIVLLQLVVGIKECMLE

SEQ ID NO: 253129 - protein, 54 aa, Zea mays
  Clone ID: MRT4577_162435C.1.pep
TLSGPRSSSHIVNCLADRRLVVSDLFMIVSFLQVLKNISIGKSQMSMRPPSVSW

SEQ ID NO: 253130 - protein, 71 aa, Zea mays
  Clone ID: MRT4577_162436C.1.pep
ACEIEKKKEEEKTIVKSYMLGKLLSLILCTIITNMFFFYLSHHFGPYIGFNWAKFGLFNYDMFDKTVAWVD

SEQ ID NO: 253131 - protein, 208 aa, Zea mays
  unsure (1)..(208): unsure at all Xaa locations
  Clone ID: MRT4577_162437C.1.pep
ATRPGSFSKAPGLNWHHRGRRIQICRKPVSSSSIKGKFCCCVFGDXTSKSKQGPEHLLVLVHGIMASPKDWTYGEAVLKRRLGDDFFIYASSTNSYTKTFDGIDVAGRRLANEVLEVVNKMPSLRKISFLAHSLGGLFARYAIAILHSVSVETKNAGQSSALIVXQQEGQQNQDVLQXGSIAGLQPINFITLATPHLGVRGRNQLPFL

SEQ ID NO: 253132 - protein, 100 aa, Zea mays
  unsure (1)..(100): unsure at all Xaa locations
  Clone ID: MRT4577_162438C.1.pep
CSSIDEKNIWRGSFSKAPGLNWHHRGRRIQICRKPVSSSSIKGKFCCCEFGDXTSKSKQGPEHLLVLVHGIMASPKDWTYGEAVLKRRLGDDFFIYGKAC

SEQ ID NO: 253133 - protein, 388 aa, Zea mays
  unsure (1)..(388): unsure at all Xaa locations
  Clone ID: MRT4577_162439C.1.pep
MDTSKSKQGPEHLLVLVHGIMASPKDWTYGEAVLKRRLGDDFFIYASSTNSYTKTFDGIDVAGRRLANEVRPLKFVXRKKLPFLQGLSILEKLAAPLAPLIVGRTGAQLFLTDGDPSKPPLLLQMASDCDDKNYMXEEQNHLEAKFIILLKHNVPFSLFDRSALAAFKNRVLYANVSYDRILPCKNRFLNYWLPPPKLSLLLFLFFVFLIFLVPDMVGWRTSSLRREKNLIKXSTSRADSTDSLLVTLNXRHLNRSSCCISSACMQPSHRSLDGYKHIVNVEYCSPVSSEGPHFPSKAARAKEAAQRTPNRENTEEYHQMMEGKYQFCSPHRICFFFLNELCDTDSXTEEMLHGLQKVGWKKVDVNFHSSFWPYSAHNNIHVCLVLLE

SEQ ID NO: 253134 - protein, 50 aa, Zea mays
  Clone ID: MRT4577_16243C.1.pep
GNPYQIPSNQYWTRAFCFPQQIRVTNFKVLNSSAKGEHSNNDPTRPPTRP

SEQ ID NO: 253135 - protein, 247 aa, Zea mays
  Clone ID: MRT4577_162440C.1.pep
LLRKKRRTYWDLFLLVLINFFDTCLYVFPPNYQLPFLQGLSILEKLAAPLAPLIVGRTGAQLFLTDGDPSKPPLLLQMASDCDDKNYISALAAFKNRVLYANVSYDHMVGWRTSSLRREKNLIKPSHRSLDGYKHIVNVEYCSPVSSEGPHFPSKAARAKEAAQRSPNRENTEEYHQMMEEEMLHGLQKVGWKKVDVNFHSSFWPYSAHNNIHVKNEWLHNAGAGVIAHVADSIKQQESRPCLPANL

SEQ ID NO: 253136 - protein, 39 aa, Zea mays
  Clone ID: MRT4577_162441C.1.pep
HGDRTEDYLPPSKDWRRTGKLTDPNQSYIHASLFISHLC

SEQ ID NO: 253137 - protein, 64 aa, Zea mays
  Clone ID: MRT4577_162442C.1.pep
KQLFSLHDRWNCYTTTEDAVVDKKAPPAASPAQQQVFTMSRGSTLRSNSDSAEGHMSASRPGST

SEQ ID NO: 253138 - protein, 72 aa, Zea mays
  Clone ID: MRT4577_162443C.1.pep
PIPGVPRVPPIVISPLAFEAPPDYGPVPNLSCRPLNPGPLRSILVPKFLEGLWACHPISFVCKPGGSIPQNI

SEQ ID NO: 253139 - protein, 90 aa, Zea mays
  Clone ID: MRT4577_162444C.1.pep
PAGTARSRLFPFLIRGGDATQRRPRVRTAARSWAGPCGYGLPLTAPSARQSVKASGTFGRYRSLRLPPRHGEPREAIDDLMLDVSPAPDL

SEQ ID NO: 253140 - protein, 83 aa, Zea mays
  unsure (1)..(83): unsure at all Xaa locations
  Clone ID: MRT4577_162445C.1.pep
KKEELKGSSRERRRRMSPLVAAPVRVFVDQDRPGGGALEELLEARLWERKRKKVVPHLVKPLLIRXRLXTSQNHQDDTDLEQP

SEQ ID NO: 253141 - protein, 143 aa, Zea mays
  Clone ID: MRT4577_162446C.1.pep
ASRSRGLSSFLTLIHSHIPPFLEIHRESSNCHTTPDSSIPVDTDYSNRFQLCAEGYTLPTSPVSAISPSRDPNAGSLSLPVRPNLNGYPEGVRPPPCPNRTKLSPSLSSRCSPAFLTLGLDRTSSDRVTAHTVSSGCTIKEYR

SEQ ID NO: 253142 - protein, 109 aa, Zea mays
  Clone ID: MRT4577_162447C.1.pep
IQDETKIPNLSQPKISQSFLDQARGGKAMAVSETNDAPLVAGNQPTEEEVPVERPAPPEDQEGERLRSLRFGQKAAAQALLLAAVLEDPGLLPRACNVIVFLWGNLNQI

SEQ ID NO: 253143 - protein, 578 aa, Zea mays
  unsure (1)..(578): unsure at all Xaa locations
  Clone ID: MRT4577_162448C.1.pep
AKNLWEVHSVFIFLSDGSIFVLCPVVPFGSDYSKKXFQEIYEDVNAFGLKSSNPNVVTNSHLAIAWLEATFPDLLHQSTDTSFLMSKAHAYAPLDDSLTLQGPLCTVCEESNESESKSSSCEGKAVGFMYSSAGKDSVLVTAWGSGLLQVDALADEIQPRWNIGVPSRLNVDSHGQINNVAMICDSNSQDPLALRSHRPSSTGSNVKSNIEAVWMGHSPPLLRLAIVDLALPKTPNDNSLSLFADPLVPERFYCAHGGGLDMVTLHFLPFSYPEMSSTPPSVHPVLTTGNSETSSPFLSGFVTIADAYGHVQLAGITCLGECFVVEMKGWKEPAPLQLDLESKIVKDVEPPATGMISKELIAGPDPPILPSSSSLKSLTPDSIEGKSTLHHYIKVFHEYYVEYGHKVFIELKEHADYLKTEMEDKQKRLEAVKKSLISVEAKDGDINKRIDRAFKVYELLEKRIDSFKMLPAANKKPLTQAEQEFKSQLDRFADVELDALRSSIAALSARMKRFAQQSTGSAASTGMVPWQAQRAGRSHISESQMSLLKSSLEKLSLLNEENSLKLRLIDHELKNQER

SEQ ID NO: 253144 - protein, 152 aa, Zea mays
  unsure (1)..(152): unsure at all Xaa locations
  Clone ID: MRT4577_162449C.1.pep
QGAPRGGGATPNARRRSPRQAPPRPPARPREDGEXKDRGGDGRDEXEAQDXRGHQRREGGEPPXXGGGREEDXREPXKGGXTQPGGPAQAPTPRERXQRGTAXGKATAXEGAXPGPRGGPGPRQNRGEPRPQHRGKAPQRGPKXGARGPPPP

SEQ ID NO: 253145 - protein, 85 aa, Zea mays
  Clone ID: MRT4577_16244C.1.pep
WPIFLLFQQLKGGGGEKLLKRVKKGVSQPLILLTNGKVIEFRPLLNKKCYDCKRRSVIFFIFPPPGFFFLFFFYFFFFFFKLFFF

SEQ ID NO: 253146 - protein, 70 aa, Zea mays
  Clone ID: MRT4577_162450C.1.pep
ARMKRFAQQSTGSAASTGMVPWQAQRAGGSHVSESQMSLLKFSLKKLSLLNKKNSLKVRLIDHELKNQER

SEQ ID NO: 253147 - protein, 42 aa, Zea mays
  Clone ID: MRT4577_162451C.1.pep
RAHIARLPRMDFYECNVPDHSPVSYLTAWKLQLQPPSLDSTP

SEQ ID NO: 253148 - protein, 63 aa, Zea mays
  Clone ID: MRT4577_162452C.1.pep
GAPPKKKDRLPLGEIKHAGLPMVPFLGFPVQAPPPGKGPLPNWAPPLRAPLPPPFFDPLGGSF

SEQ ID NO: 253149 - protein, 64 aa, Zea mays
  Clone ID: MRT4577_162453C.1.pep
GDPVIRGFSFLGEGGIRACMECIARFKEWLEGVQMNGALGTNPCYGTWALCSRIIVFQVMEIQE

SEQ ID NO: 253150 - protein, 87 aa, Zea mays
  unsure (1)..(87): unsure at all Xaa locations
  Clone ID: MRT4577_162454C.1.pep
VHESCLPTHQKRASDLITGSCEPPCGCWDLNSSPLEGXSVLLTAEPSLQLTSLFLKHQDASGTFSFLCHTFRTRGSTREFRTGPAGV

SEQ ID NO: 253151 - protein, 64 aa, Zea mays
  Clone ID: MRT4577_162455C.1.pep
SSEFVSSNIQNPIFSLHFAPNLKVRDQLKHAVGTTNPPAKYLHLGAPININAYSEAHIANRALL

SEQ ID NO: 253152 - protein, 104 aa, Zea mays
  unsure (1)..(104): unsure at all Xaa locations
  Clone ID: MRT4577_162456C.1.pep
GPYKQHARGRRPQQTSAGPQDPPRANRPARCTAPGWGACAHVSVDLAPESLQDANLNHIRRGRLFARCPERLLVSLLDEMASDAASRACPIERKXPLFQPIYDH

SEQ ID NO: 253153 - protein, 53 aa, Zea mays
  Clone ID: MRT4577_162457C.1.pep
QTGQKQSLGQSHNFGPRQLRKAPPLTLRCQNEFERTLVFSLNHDVNYCSIDKE

SEQ ID NO: 253154 - protein, 137 aa, Zea mays
  unsure (1)..(137): unsure at all Xaa locations
  Clone ID: MRT4577_162458C.1.pep
GGQHQEAPGKKPDGNSRAQGKPRGNTARTTDTERQKHRATTNTTRTKKNRDKHGSEQENAARAPPXXXXXPAEGPEPPPRGPPPKPPPPPPEPAAPPEPXPPAEPAPPXRGPPPAEPPXXRPPPGPPAAXHGRRGTG

SEQ ID NO: 253155 - protein, 124 aa, Zea mays
  Clone ID: MRT4577_162459C.1.pep
KRSKLRAGPAISAMDMTTAAARWSFPARLQLLTRRRLCLTASSAAPLTSVSGFSWADVLRIAVERLRSHESYLTGKMAFVLRCKCDLDRGEHYVKITVDDDALWYIYMGFTMHIIAPPLFRING

SEQ ID NO: 253156 - protein, 90 aa, Zea mays
  Clone ID: MRT4577_16245C.1.pep
LPDSYVCASIDDIQPHRPTHTNEPTQPPHNRRRQATLPPNGNTTSTSSPTRKQTQSNPDGRTSRHNTYPANQPQRAATILLKHNSATEAD

SEQ ID NO: 253157 - protein, 61 aa, Zea mays
  Clone ID: MRT4577_162460C.1.pep
SENKDKTMAVLLHPHQGTILHGCCLHGQSMHVLLDTTIVIRNGVDKPTQQLCKSPICLLAS

SEQ ID NO: 253158 - protein, 113 aa, Zea mays
  unsure (1)..(113): unsure at all Xaa locations
  Clone ID: MRT4577_162461C.1.pep
MDHKAWLWRKKSAERELEKEKVLLLEKSLQDLNEQLSFAHSECVEKDAILAKQSKVAEEAILGWEKAEAEALAIKTQLDDTLDEKMAMXHRIPQLDEALNVALAERDSLPRET

SEQ ID NO: 253159 - protein, 273 aa, Zea mays
  Clone ID: MRT4577_162462C.1.pep
MTCTPRTREPPTQPLSISGHASAKHTQTAAPTILTRLLPLRALSCFPRPMATPTTTPATMRAVQYDACGGGAAGLKHVEVPVPSAKKNEVLLKLQAATINPVDWKIQKGDMRPLLPRRLPFIPVTDVAGVVVDVGPGVKGLTAGDQVVAMLNSFNGGGLAEYAVASANLTVKRPAEVSAAEGAGLPIAAGTALQALRSIGAKFDGTGKPLNVLVTAASGGVGLYAVQLAKLANLHVTATCGARNMDLVKSLGADEVMDYRTPEGASLQSPSGR

SEQ ID NO: 253160 - protein, 93 aa, Zea mays
  Clone ID: MRT4577_162463C.1.pep
PPKNLWILCRKTSIHKDVSTQLVERPKEEGFDVSKLPRTPQDDPPPKKDPAPPDTKGVWWSKSLFGKRLPVPARGRAPVLCFQFHQIKPALSE

SEQ ID NO: 253161 - protein, 106 aa, Zea mays
  unsure (1)..(106): unsure at all Xaa locations
  Clone ID: MRT4577_162464C.1.pep
AHFFFILVKRYVLIFFLFFFFXTIIHIHQIRNSLVSIPTATIPNTLCMQAGTQLHKACLTFHMYRHIHRQPVCTTNVAHLSLCTQLNIGHGHTPKKTVRVGRPGFS

SEQ ID NO: 253162 - protein, 107 aa, Zea mays
  unsure (1)..(107): unsure at all Xaa locations
  Clone ID: MRT4577_162465C.1.pep
NKGKGHAAMLDNNKHPRMGKPQEXPNPEYAERDRXEVEQYDETGDEIRTMQDGTTIDKNLTTEEEKGANRMLEKTRKQTEEGKKEKEKAEEEGEAAEGPNDQKEKTR

SEQ ID NO: 253163 - protein, 109 aa, Zea mays
  Clone ID: MRT4577_162466C.1.pep
KGATKLKFKKKGQVKNPSTKKNKNITKSKSSPTKTDLKKGPQGKGNPPQGSNQTIQRERHGKTSFQGKNPHPIFYKTKGNKRGPKYEGLLQKKKHWVLKPPSKTGESPP

SEQ ID NO: 253164 - protein, 155 aa, Zea mays
  unsure (1)..(155): unsure at all Xaa locations
  Clone ID: MRT4577_162467C.1.pep
MRPESVRERVACAEKLGVPRNTGMFKSALWAVYCVGPNSIGAKLDVIKATLGCSEAELTLVVRKSPPILRMSEGKLSRALKFLKVDVGLKLQYILLRPAILAFSMQRRLMPRHYFIKILKAKGLVKENVDFYNALCLTEXRFAQKFIDPYNQSIA

SEQ ID NO: 253165 - protein, 371 aa, Zea mays
  Clone ID: MRT4577_162468C.1.pep
MLRLQHHFLSSIRASSHRHCSLLSIATTATSPDRFVAEEYLVTTCGLTPAQAGRASKGLTHLKSPVKPDAVVAFLAGVGLAKDDITAGIARYPRLLCSKVDKTLTPRFAQLMSLGLSPSQISRLITIVPNIFVAPKKISHLQFYLSFMGCFDRVHSAIRINPMLLSRNLEDVVKPNIAFLLQCGLTVSNVLEFPLLIGMRPESVRERVACAEKLGVPRNTGMFKSALWAVYCVGPNSIGAKLDVIKATLGCSEAELTLVVRKSPPILRMSEGKLSRALKFLKVDVGLKLQYILLRPAILAFSMQRRLMPRHYFIKILKAKGLVKENVDFYNALCLTEKRFAQKFIDPYNQSIAGLADAYAAACAGKMPHED

SEQ ID NO: 253166 - protein, 57 aa, Zea mays
  Clone ID: MRT4577_162469C.1.pep
LFYPMHRYEAPPFPARSRELHPKHRASVRDPRVGAAIRYGLEHLYHYLMALDAPRAE

SEQ ID NO: 253167 - protein, 243 aa, Zea mays
  unsure (1)..(243): unsure at all Xaa locations
  Clone ID: MRT4577_16246C.1.pep
MARAALLPVALLLCLALAAGANAERKPVGFYGLKNKKGDFSIKVTNWGATLVSVLVPDGQGNLADVVLGYDTLRGYVNGTGSFGATVGRVVNRIAKSRFVLDGKAYRLFRNDGNNSIHGGHRGFGKVIWTVKEYVRGGDTPYITFFYHSFDGEQGFPGDLDVYVTYQLSGPYELSIRMNATAATKATPVNLANHAYWNLAGPXSGDVLEHELQLLASRYTPLDEPKIPTGQVAPVAXTMYDFR

SEQ ID NO: 253168 - protein, 40 aa, Zea mays
  Clone ID: MRT4577_162470C.1.pep
FLGLYRGLGCLLRGLGHLLSGLVLLVTAAGRLLSHVYHTV

SEQ ID NO: 253169 - protein, 48 aa, Zea mays
  Clone ID: MRT4577_162471C.1.pep
INWYYTTFEWSPSEPQLTIYLHSGGLQAGAGNLLMFFHNRVVLPSASN

SEQ ID NO: 253170 - protein, 45 aa, Zea mays
  Clone ID: MRT4577_162472C.1.pep
MGTTPCLVKAVETDYSLPLACMIKDVPLGPEPDADAAPVARCGLY

SEQ ID NO: 253171 - protein, 157 aa, Zea mays
  unsure (1)..(157): unsure at all Xaa locations
  Clone ID: MRT4577_162473C.1.pep
RAAIWPRTCHPSTGCGDARVTIRNTAAKXKPPGASGRPRHRPNGSPDLPPPXYLDSKLPDDKGFDPXGWDTDPDNLGWFFFLTTPPPEGTCSGVXVMVIPEVLTKRGVXRNRSETTEAMRITAGSQTLSEGGMDYRGNTRIIDAERILGIWAWQARI

SEQ ID NO: 253172 - protein, 53 aa, Zea mays
  Clone ID: MRT4577_162474C.1.pep
MISDNEQSEVPECIVGDLPEQQPGEGCPHYTQCSGGDAGNMEDFEEFQDYDEF

SEQ ID NO: 253173 - protein, 78 aa, Zea mays
  Clone ID: MRT4577_162475C.1.pep
PRVREKKKKIKKKKKKKRKKEKKKKKKKKKKKKKKKKKKKKKGRQFLRFKVYLPVISRYLFFYSVTKFKLTGLLFKSF

SEQ ID NO: 253174 - protein, 36 aa, Zea mays
  Clone ID: MRT4577_162476C.1.pep
IPLVASLVSKIIAAYLMPPIESGSVHISEFEPRLVY

SEQ ID NO: 253175 - protein, 85 aa, Zea mays
  Clone ID: MRT4577_162477C.1.pep
ASLSSSLGARSDDGDPAPGCSFQRVAPRGFKNEEKGGHRPGKSMRQAARTGVRREERQSVQGVPERRAAPVARSGSATMGTAPPR

SEQ ID NO: 253176 - protein, 271 aa, Zea mays
  Clone ID: MRT4577_162478C.1.pep
LGTSRPAGTTPDSTLLALPSPQSVDKAEASGLRQVEGAPIDSASRAGSPHRTPTPDTIPFRRRIDFSSSEPAAGADGDPAGPGSAYSDTGKQDCPSAVCSEEVEGFHGSYPYLPRGTRCEKKGVDRGPPARSRAMDRTANAVLDIEGLPQPPDKCCSGSPKMIRALSRKGSNRMEMKGGDELQQQEDLTRKLIIKVVPSQLEQQRALVHCTPCAPVLLIDSAEGRSSRRFGRLITPVNNPRRILLLFATLSSVGTTILIYFTLAINSRAEA

SEQ ID NO: 253177 - protein, 280 aa, Zea mays
  unsure (1)..(280): unsure at all Xaa locations
  Clone ID: MRT4577_162479C.1.pep
GTLESGRRRFTTPDCTLLPSASAFATSPTSPSVWSCPRLPSPQSVDKAEASGLRQVEGAPIASASRAGSPLRTPTPDTIPFRRRIDFSSSEPAAGADGDPFQPDLDRPTPTPALFGKINKTALQLSARKKWEGFHGSYPYISASRTRNPLREKGSGQGPPPRLGHSRAMDRTANAVLDIEGLPQPPDKCCSGSPKMIRALSRKGSNRMEMKGGDELLEQEDLARKLIIKVMPSQLEQQRALVAPHCTPCAPVLLLTPRKEEQQXVWXAHHXVXTPRRILL

SEQ ID NO: 253178 - protein, 221 aa, Zea mays
  unsure (1)..(221): unsure at all Xaa locations
  Clone ID: MRT4577_16247C.1.pep
MAGKGDGPAIGIDLDTTYSCVGVCYYYRVKMIANDQRNRTTPSYVIFTDXERLIXDADKNQVRMNRINTDMXDRKRLVXRGLADASVQRDIKLSAFKVIPGPGEKPMIADHDKGXRNMIAAEQIISXMVLIKMCEIAEDYLGSTIKNAVXVTDPAYFNDSQMHVTNDAAVIAGLNVLRIINEPTGAAIAYDLDNKATSDYENNVLIFDLVRGTFDVSLLTI

SEQ ID NO: 253179 - protein, 23 aa, Zea mays
  Clone ID: MRT4577_162480C.1.pep
LALFSLTSLTRGFVRTSSGRTFN

SEQ ID NO: 253180 - protein, 92 aa, Zea mays
  unsure (1)..(92): unsure at all Xaa locations
  Clone ID: MRT4577_162481C.1.pep
SFRVSEMFFGFGPVPTHSVAFHVMVNVIFSTPATVTAKLASLLNCPPLFWQASVKKDRAWFWWXKSKPTKYHGRSQAFSRFPQGLSRTFPSL

SEQ ID NO: 253181 - protein, 100 aa, Zea mays
  Clone ID: MRT4577_162482C.1.pep
SPLPSSPRHGFARGGFSPCSARGLASPPALSTAFEKPIGSQPMGFLLFRRSAVSRQLWSFFRIFLGSYMACSSRYWHHCSLGLQLVNGRVCQAGCLVTCR

SEQ ID NO: 253182 - protein, 41 aa, Zea mays
  Clone ID: MRT4577_162483C.1.pep
CQLKFQKTTTWCMLLSLTGFMHFFPYILSCASREQAVTYIL

SEQ ID NO: 253183 - protein, 120 aa, Zea mays
  Clone ID: MRT4577_162484C.1.pep
DTSQEPGSVEHFISAHIRRRTHRLSSKIQERKDSIHNIAWITHAWKILYTPHVSVRNFLTAISCYLLFTFLLVSRRFCSSFLTPSIFAADGFVDVLLSLGASYLPCAKTTLGFSALMETI

SEQ ID NO: 253184 - protein, 274 aa, Zea mays
  Clone ID: MRT4577_162485C.1.pep
MVQIVKHRDLSPKDFLMEEGAASSVPRGSYRPAPGAATMHAAQQHTLVQTSRALSGAAHGGALSAARELLRNPPSSTASPGAMRQWREDVDRLPVRQEPRETLRAFISRFTKVRGTIPRISDASIITAFRQGVHDKKMLEKLAMHDMETVTTLFTLADKCARAAEGRAWHSAPQTGVTQTGGSSATTHGGGKKKKKNRGHDRPQSGAPVAAAAAGGWDKRSKRPQQQGSDSASCPVHPNSRHSASECREILKLAKRINERLDAGLARRRSTKVM

SEQ ID NO: 253185 - protein, 75 aa, Zea mays
  Clone ID: MRT4577_162486C.1.pep
GRCDCVWGCQRHRVSLTLLVMWSLSLPLRRLWSSCRTLLPFRYVKQAIILFLRMRISGRRVPSLVRYGGLLGNMI

SEQ ID NO: 253186 - protein, 132 aa, Zea mays
  unsure (1)..(132): unsure at all Xaa locations
  Clone ID: MRT4577_162487C.1.pep
IYITFFCPPPSNHFAIWWCFCRRLNLFPPPSFALPTQIFCSPGSPPRPPFVSPPQPGRGGTLPGPWVHSPRPPCVGFRPPPRPXXVSFYLGNSLNPPPPSPFCISPVXMXSPPPPVVSPIFLGGSSKIFGFF

SEQ ID NO: 253187 - protein, 170 aa, Zea mays
  Clone ID: MRT4577_162488C.1.pep
LLHCDMVLLDEEGNSIHATIYPPFIEKFRPLIKEGSVYNMTYFRVRASNNLYKPVPNDIMITFTNWTKLEQGIEIPPAFPTLTYSLTHIDQIHSRIDHKDYYTDAIGIVTSVSNGSPHRSKGQQASSLKRNISICSARCGPPGCAVLGGAQASRFPGGRVFQIRQNSPQI

SEQ ID NO: 253188 - protein, 118 aa, Zea mays
  Clone ID: MRT4577_162489C.1.pep
YIVKFVCIGVFCVGDKVYMHSSGIYRLMLIRRKINSGEAWMVLYFEFGALASVHSSLCHLLLFMFFSEYTITHKGKHPKVLLLMCFSNYIGCSVRQPLTLNFSPKLFLPIDEHIYITT

SEQ ID NO: 253189 - protein, 112 aa, Zea mays
  Clone ID: MRT4577_16248C.1.pep
GYLEAGREGFGPPDSYLILSERAVRLRRGGRSRLLLGRVAPADLQGSLGWWRGLLERAGAGTRGCCRRRAMTTARGRSARDDGRAGSPQNNKQFAMLCFPFICSFRKIRSIF

SEQ ID NO: 253190 - protein, 62 aa, Zea mays
  Clone ID: MRT4577_162490C.1.pep
YLESTVTFVGILSSKSGVILGIQMITCLVTRDSELTVDTNKYILQNFVVELFQLVDVFCISL

SEQ ID NO: 253191 - protein, 102 aa, Zea mays
  unsure (1)..(102): unsure at all Xaa locations
  Clone ID: MRT4577_162491C.1.pep
AAVLGKSRVHQXFVLTEILPITIEELAKNKNLKAKPDIQTTHAECEMESASAPGSAFGFNVVLTAXTPDSDDPNEKPGSDDDSQDESGSSNYEEMHIGCMHL

SEQ ID NO: 253192 - protein, 140 aa, Zea mays
  Clone ID: MRT4577_162492C.1.pep
CFGRAGDREKMAFSHASVKIQGVKPNPITYCSLVNGYSKAGLLDKVAGVIRQTENTNVVLDTPFFNCVISAYAKSGDIKIMEEMLQLMKEKRCKPDRITYATMIQAYTAHGMDEAARLLEMEAERFDKRLLGSVSDIDGK

SEQ ID NO: 253193 - protein, 75 aa, Zea mays
  Clone ID: MRT4577_162493C.1.pep
AVHGGVRGVLLPGVWRAGLVACVASVVFHGLVLGHAVLEAVVAVTPRKGTQATIVRSTAATSASMSATATARWPA

SEQ ID NO: 253194 - protein, 234 aa, Zea mays
  unsure (1)..(234): unsure at all Xaa locations
  Clone ID: MRT4577_162494C.1.pep
DKDYSFXLANQLGFAENKDFVELMRLYLTIHTDHEGGNVSAHTTHLVGSALSSPYLSLAAGLNGLAGPLHGLANQEVLVWLQKMKKAIGNDLSDQAIKDYLWSTLKAGQVVPGYGHAVLRKTDPRYVSQREFAQKHLPDDPMFKLVSQVYKIAPGVLTEHGKTKNPYPNVDAHSGVLLQYYGLTEQNYYTVLFGVSRALGVLPQLIIDRAVGAPIERPKSFSTEAYAKLVGAKL

SEQ ID NO: 253195 - protein, 160 aa, Zea mays
  Clone ID: MRT4577_162495C.1.pep
MNADKLAKLQNQVRIGGKGTPRRKVKKVSAKSSGDDRKLSAALQSLKVQPIAGVDEVNMFKEDGKVIHFSNPRVQAAANANTFAIHGRSTEKELAELIPSILNQLGPDSMAALKKLAESFKQAQGEDAAAAGEDDDEIPDLVESFDKAEIQEEKKEESSA

SEQ ID NO: 253196 - protein, 196 aa, Zea mays
  Clone ID: MRT4577_162496C.1.pep
HSSLLSPQIPSAPMLSCRNPCSLLATLLDPLHALHGRQADAPLFPAPALYMEGKSVPKSSEITARGRDCGLDPRSPLLSRCTWKANPKPRSPLRTRCTWKEVPVLKSDMRSQLLADGIAASIRALPCSRVVHGRRTRSPALPCERVVHGRRCRRPNRIRALSCYAPIKCQAGTPQQPKIIFALSIHLLLPGTAQDH

SEQ ID NO: 253197 - protein, 108 aa, Zea mays
  unsure (1)..(108): unsure at all Xaa locations
  Clone ID: MRT4577_162497C.1.pep
WGFFFFFXXXXXXXXXXXXXIYNGNSRIKSNSAVKRAPCETFFRRSVRLGVSWLWFSNIPSAALSAEKVLTFSLNLDYLAALLGYHVSLCLLHWKTTSLPPRCTHDRT

SEQ ID NO: 253198 - protein, 66 aa, Zea mays
  Clone ID: MRT4577_162498C.1.pep
SFIRAFISLLEAHNFFGPFYLIPGTFFIHSWPFSFNPLFHFGVLISLPVLVLRFSCGFCGHLCTFP

SEQ ID NO: 253199 - protein, 115 aa, Zea mays
  Clone ID: MRT4577_162499C.1.pep
ATRAADETAQDMVYHILYEDGHHDAYHMEIHIRTLSSELKGKHTAMYQYMYHYRNFSSKFTAKLTKDLKEDLKVLQVVLHDTHHLNYHVHGTEYGTKHSTRHMWRLMRMHMIVNK

SEQ ID NO: 253200 - protein, 83 aa, Zea mays
  Clone ID: MRT4577_16249C.1.pep
RSMGAGYGIGRTGVGAMAPPNEMGARRGMAIGPGAGAIYGGGMGMNRTMGMVMGMNQQHMMMGMNQQPMGMGIGINQQLMGGN

SEQ ID NO: 253201 - protein, 52 aa, Zea mays
  Clone ID: MRT4577_1624C.1.pep
KEIQRLDLLTTTVELVIMSLWNHCNRCVFDGCSPDLASLLALSIGIWRLWSR

SEQ ID NO: 253202 - protein, 48 aa, Zea mays
  Clone ID: MRT4577_162500C.1.pep
QHTLPFQKQPNLLTTPLSLSNSIPIYQTSPLLLPYILPFNPLTFPLPF

SEQ ID NO: 253203 - protein, 199 aa, Zea mays
  unsure (1)..(199): unsure at all Xaa locations
  Clone ID: MRT4577_162501C.1.pep
MTPTANLLLPAPPFVPISDVRRLQLPPRVRHQHRPCWKGVEWGSRMVSSFVXVARNLGKTLRAFQPTIRELQDVSREFRSTLEREIGIDEVSXSTNYRPTTMNNNQQPAADPXVKPEPAPYTSEELMKVTEEQIAASAAAAWNPQQPATSQQQEEASTTPRSEDAPTSGGSDGPAAPARAVSDSDPNQVNKSQKAEGER

SEQ ID NO: 253204 - protein, 238 aa, Zea mays
  Clone ID: MRT4577_162502C.1.pep
MTPTASLLLPAPPFVSISDVRRLQLPPRGGHRPRPCWKGLECGSVQTRMVSSFVGSRTRRRNVICASLFGVGAPEALVIGVVALLVFGPKGLAEVARNLGKTLRAFQPTIREIQDVSREFRSTLEREIGIDEVSQSTNYTPTTMNNNQQPAADSNIKPAPAPYTSDELVKVTEEQIAASAAAAWNPQQPASSQQQEVYTTPSEDAPTSGGSDGPAAPALAASDSDPKQVNLDKAETQR

SEQ ID NO: 253205 - protein, 243 aa, Zea mays
  Clone ID: MRT4577_162503C.1.pep
MTPTANLLLPAPPFVPISDVRRLQLPPRVRHQPRPCWKGVEWGSIQTRMVSSFVAVGSRTRRRNVICASLFGVGAPEALVIGVVALLVFGPKGLAEVARNLGKTLRAFQPTIRELQDVSREFRSTLEREIGIDEVSQSTNYRPTTMNNNQQPAADPNVKPEPAPYTSEELMKVTEEQIAASAAAAWNPQQPATSQQQEEAPTTPRSEDAPTSGGSDGPAAPARAVSDSDPNQVNKSQKAEGER

SEQ ID NO: 253206 - protein, 62 aa, Zea mays
  unsure (1)..(62): unsure at all Xaa locations
  Clone ID: MRT4577_162504C.1.pep
LKVGCLVIIHLICNSILPCVSNPDGQYQEGRLYRSTCLYSSQEDSYVTTTGDESSFESXIDW

SEQ ID NO: 253207 - protein, 96 aa, Zea mays
  Clone ID: MRT4577_162505C.1.pep
IKPNINRLHRKSRKKRRERNPFAFIRKSITLIHLRSYSCGCFKIKRLPSCRRCLQKAVHYLTHGRLEADLHVDPSYRLPSVCTLDVLCCPHHAVIC

SEQ ID NO: 253208 - protein, 63 aa, Zea mays
  Clone ID: MRT4577_162506C.1.pep
LKVGCLVIIHLICNSILPCVSNPDGQYQEGRLYRSTCLYSSQEDSYVTTTGDESSFESPIDWD

SEQ ID NO: 253209 - protein, 200 aa, Zea mays
  Clone ID: MRT4577_162507C.1.pep
APLRVVELGVTHIPREVFEDYLRDIAPRYTAETYRLLTHNCNNFSHEVAQFLVGTGAGVPDYILNLPAEVMSSPMGPLIMPMIQNLESTLRSNVAPQTTQFVPTPASVSAPTEAPASERKAPAPAEKASKEAPTPAPAKKEAPTPAADPLGSARGKVQEEVMKEFAAIMASGTLRASEAAALAMRRVMERHGDGATMQQG

SEQ ID NO: 253210 - protein, 49 aa, Zea mays
  Clone ID: MRT4577_162508C.1.pep
GRSTDQIMSSYSQTRSLSLQVSACFRELRSQDITVSRITRPRHGVGVFE

SEQ ID NO: 253211 - protein, 90 aa, Zea mays
  Clone ID: MRT4577_162509C.1.pep
CLAIRVLFLSAVQSQPLKALYYRRVKFVHQSTLLLVVSITKLTPVLMDVAYREPTRPNLDRELQLLTLMLSMPCVSSAFQKLVAPYLQRS

SEQ ID NO: 253212 - protein, 130 aa, Zea mays
  Clone ID: MRT4577_16250C.1.pep
PRSLPLLFSVLPSWPFWPVPVPALWLLACSSLGLVPCLCWSVPFCSRPAVCCGSSSPVAAVCPLLPVLLCCSLFCWAWCRSRSCFAVPAPPVGVALGSAACVGLGARAVLLLFVLRGPAPGGCCVCCFWR

SEQ ID NO: 253213 - protein, 103 aa, Zea mays
  Clone ID: MRT4577_162510C.1.pep
FLLGRLNNMGACNRIANKTRRIKHTTSSQSLTTAKPRTEYHNIYSHTCWTLLSVTTELNSFRQTQTHAHARHDTSLGLESFSLLALTMVATALPLLTTWKDNF

SEQ ID NO: 253214 - protein, 67 aa, Zea mays
  unsure (1)..(67): unsure at all Xaa locations
  Clone ID: MRT4577_162511C.1.pep
RPKKKKKKKKKKKKKKKKKKKKKKGRAGSKRGPTLTVRLHMSTAIAFCYSGHLIFIIDSARXIYTSS

SEQ ID NO: 253215 - protein, 92 aa, Zea mays
  Clone ID: MRT4577_162512C.1.pep
GGAPNMSKGAGGNKREGIHRPGRARESPRGFGRGPGLAGATLQTGGHDTQTHMIRVIKQENRTDPGIKKKKGVGGFCGRTRGPGGQAGGGRP

SEQ ID NO: 253216 - protein, 60 aa, Zea mays
  unsure (1)..(60): unsure at all Xaa locations
  Clone ID: MRT4577_162513C.1.pep
RFAGASMNPXVSFGLALDRWXFGNQCVYXVGPLIAGGLAGVIYELLFISHTHDQLPSTMY

SEQ ID NO: 253217 - protein, 89 aa, Zea mays
  Clone ID: MRT4577_162514C.1.pep
DSHCWRGRQLWFTEGAAALSLNLPSCAPQEQGSVTSLEQAGPGRKMQPVSRGCVPARVRETGVSFVGCLMRWCQYLLGARKLQLCPENK

SEQ ID NO: 253218 - protein, 116 aa, Zea mays
  unsure (1)..(116): unsure at all Xaa locations
  Clone ID: MRT4577_162515C.1.pep
PWRRHATPSLRSAASSRTSRARDSPPCRRRRGTPSPSPXAPRGRRSARARAAYPPPPLDLPHAADPRRHRQXPRRRARGRPRPSPSRSAPSATPPATVAAASRRLSYRPPSAPGPA

SEQ ID NO: 253219 - protein, 84 aa, Zea mays
  Clone ID: MRT4577_162516C.1.pep
GRARRGRRPGAPAPAPAAAAGSPRTLLSRAPPLAGPPARGSPPVSAPPPAAGPPPPPRPAPAPATATTRPPTSRPAPAPVAYSS

SEQ ID NO: 253220 - protein, 139 aa, Zea mays
  Clone ID: MRT4577_162517C.1.pep
GASAAVHAGLQAQQAVPALLQEPALGAPGLLPRRARPHHRVPRPGAAQETDPRGLTTGAVAFSLARSTGRDRRGVDLVPSPPLAVATPSVISRCAVMAWYRALVQISSVFFIWGEGECRIGKEAVVYVWGRMNGAIESL

SEQ ID NO: 253221 - protein, 168 aa, Zea mays
  Clone ID: MRT4577_162518C.1.pep
TTASFPILQPPKKTELICTIALYHSRTAHLLTDGVATANGGPDTRSTTSRPARQGHPAGIRFLGSRARPRVRGPVCARVGASAAAEAPTPASAAPAGTRPAAAAGSPRTSASRAPPPAGPPARGSPPASAPPPAAGPPPTPRPAPAPATATTRPPTSRPAPAPVAYSS

SEQ ID NO: 253222 - protein, 149 aa, Zea mays
  Clone ID: MRT4577_162519C.1.pep
MERDFLGTIGHEQLQQQQQQQQRQRAAAEDAAARKESAHFGGGGVPPMDWSFAGRAGAAPAVMSFRSAPREEQRGELAYPKQQASRVLTPQRSFGAESHGSVQYAAAARAAYGGQPPQQHQHAPNGARVIPMSSPFNPTIPCSGFRVRL

SEQ ID NO: 253223 - protein, 96 aa, Zea mays
  unsure (1)..(96): unsure at all Xaa locations
  Clone ID: MRT4577_16251C.1.pep
TERLHAALKIENGHHQLNNQRHQKVPKEADAVPQQNLKLQEQIRPLKASDTDAATTNERQAQPASEAPKEXGKSHNXIAIAAAARANLTDAIILLY

SEQ ID NO: 253224 - protein, 47 aa, Zea mays
  Clone ID: MRT4577_162520C.1.pep
LTRSPTRTPTRTTSLSLTRPASPAYLFKRSVRNNLRVQLSYIAGTPL

SEQ ID NO: 253225 - protein, 82 aa, Zea mays
  Clone ID: MRT4577_162521C.1.pep
LSLPSTRPRPRGHIHTQGLATPSTGTPMGTIGMPSATAQSHRNRPACEHTSQYPARIMGTPDPPSAGGASMRDHASRARLPT

SEQ ID NO: 253226 - protein, 92 aa, Zea mays
  Clone ID: MRT4577_162522C.1.pep
PGSSGTLAPAAPGGAVPQYLGVEQPASFPRGAPRATSRTPAQGLVLSLPPPCLVGFHPLSLLLLPLGLADRCYAAKGGSAKDEGRAAAGRQL

SEQ ID NO: 253227 - protein, 35 aa, Zea mays
  unsure (1)..(35): unsure at all Xaa locations
  Clone ID: MRT4577_162523C.1.pep
HGPQLYEYVKDNLQISCQIFHRPLAAQIHLEPXSE

SEQ ID NO: 253228 - protein, 70 aa, Zea mays
  Clone ID: MRT4577_162524C.1.pep
GNHPSPWFWSPPPGGPGSFYKKIFRPRRPIADHPIQFIGPLGGGGPFLFRPPACRINEKKPQAGGGLTPF

SEQ ID NO: 253229 - protein, 91 aa, Zea mays
  Clone ID: MRT4577_162525C.1.pep
KKNLSLAPTPPRGNFCKFPSPWGPFNHPFRGPISPFGGSFKNQWPGVLNLFTWKNPALPHFSPLEENPLFAVWLLPEKPPPDPLSKHVAHL

SEQ ID NO: 253230 - protein, 170 aa, Zea mays
  unsure (1)..(170): unsure at all Xaa locations
  Clone ID: MRT4577_162526C.1.pep
MEQDQSPAVDSADSGAAAFDFATGNAPSSAVTSGSAVAPDGGAQAADTSAYQAEHTELNGTTGDMSNYQSAGAAENGTAVTEIGEPVPEPSYEEAVLSAEEARLWSVVTANCLDFNAWTTLIEETEKNAENDILKIRKVYDSFLAEFPLCFGYWKKXADHEARLDGVNEF

SEQ ID NO: 253231 - protein, 79 aa, Zea mays
  Clone ID: MRT4577_162527C.1.pep
LDSTRQGLHALAFSRLQPGTPRASLQPVTPCANLQPGTPRASLQVILLTLASLFSLIIFGLCFLFRAFIFSVGFSCNDV

SEQ ID NO: 253232 - protein, 151 aa, Zea mays
  unsure (1)..(151): unsure at all Xaa locations
  Clone ID: MRT4577_162528C.1.pep
MEQDQSPAVDSADSGAAAFDFATGNAPSSAVTSGSAVAPDGGAQAADTSAYQAEHTELNGTTGDMSNYQSAGAAENGTAVTEIGEPVPEPSYEEAVLSAEEARLWSVATANCLDSNAWTTLIEETEKNAENDILKIRKVYDSFLXEFPLCF

SEQ ID NO: 253233 - protein, 51 aa, Zea mays
  Clone ID: MRT4577_162529C.1.pep
RTFIPKSKPPVTVCHTEHMVTHVFEDLRKRKTPTGSKYWTRKNMSCSHPLY

SEQ ID NO: 253234 - protein, 89 aa, Zea mays
  Clone ID: MRT4577_16252C.1.pep
DLKTGTVKVTAVGWSEHPPKFTMWPRTLIAHCCFFNSHSKYEMHCYRKSLAILKATPLLSKENGPVLSQVHTGEVIALLSCKLCNAKFF

SEQ ID NO: 253235 - protein, 95 aa, Zea mays
  unsure (1)..(95): unsure at all Xaa locations
  Clone ID: MRT4577_162530C.1.pep
LRGGSSVLGILNFITFLISIPILGGGIWXLAARSSSTDCLRLLQWPIIIVGLGLMVISLMGFAGACYRQTWLIRLYLFAMCFRHPRASLVDGLRL

SEQ ID NO: 253236 - protein, 92 aa, Zea mays
  Clone ID: MRT4577_162531C.1.pep
VKTIFGILKHTKGGPFKSQKIGCYKAGTLRVHHKKDSLPAVQSHFQGVLIPGFESTPLHLGGTNPRLGPGLHGAPKRPPPCPKGALFLGGGA

SEQ ID NO: 253237 - protein, 68 aa, Zea mays
  Clone ID: MRT4577_162532C.1.pep
RPVMLSLKHHLIFGCGCYFYGRFKKNKVRFLNQLEQHCFDLCMNKKACPLCKVQATSLEYSTLMLFYG

SEQ ID NO: 253238 - protein, 93 aa, Zea mays
  Clone ID: MRT4577_162533C.1.pep
FFHRSSHHTWAVYKTTVGPNNIIRHSLISVPGVTTLLSSTLVLFFLSYVIIPTTSIFFLFFIVDIFVFFLSILSLFLLIFLHILFLIFFYTIF

SEQ ID NO: 253239 - protein, 110 aa, Zea mays
  unsure (1)..(110): unsure at all Xaa locations
  Clone ID: MRT4577_162534C.1.pep
FCLLMLHALSXACRANATIFPQCSQAPIASLLPPYLPSMIASVCENPALQPYRLQQAIIAGSSLQQPMAQLQPPFSAHLTLQQTITPQHLQXLLLPVILAMVNPVAYLQQ

SEQ ID NO: 253240 - protein, 92 aa, Zea mays
  unsure (1)..(92): unsure at all Xaa locations
  Clone ID: MRT4577_162535C.1.pep
TWIEILRVDNLVITGKGNLDGQGPYVWSXRTLTXKYDCKNLPNSLVMDFVNNGEVSGVTLLNSKFFHMNMYRCKDMLIKDVTVTALGDSPNT

SEQ ID NO: 253241 - protein, 131 aa, Zea mays
  unsure (1)..(131): unsure at all Xaa locations
  Clone ID: MRT4577_162536C.1.pep
MDCIVVCSVLCLARPGKEHKTYSLVIAPEGKDNILLGLKAKDMRSVRCADRNDTPDKGGEKEKNRFALPDHTEXGEAKRNDLNAEXALDTDGNEMRGAEHYYSRGEEGRDQTISRGEDAPDLNDWRGDSKA

SEQ ID NO: 253242 - protein, 101 aa, Zea mays
  unsure (1)..(101): unsure at all Xaa locations
  Clone ID: MRT4577_162537C.1.pep
FLPLCVXSXFXVXXASSXXACXFXXPXXXXPLAXXXXLXRGSSXWXXXWXXLLPXCXXCSXXPXAXAFXGVXXLXSLCAXXXCCFSSXALPSLXXVFXRCV

SEQ ID NO: 253243 - protein, 63 aa, Zea mays
  Clone ID: MRT4577_162538C.1.pep
RPLQLKWSMFPHHDVCERVCETGCPGVQLQLMVVLSTSEGCLFFHSVLYCALLSRRRLEVRGG

SEQ ID NO: 253244 - protein, 60 aa, Zea mays
  Clone ID: MRT4577_162539C.1.pep
MEAPIIYYNRSEYIETDTGNKVSRKSIICGSQNIILGGKTIIQTDCVIRGDLRRTGGGHA

SEQ ID NO: 253245 - protein, 55 aa, Zea mays
  unsure (1)..(55): unsure at all Xaa locations
  Clone ID: MRT4577_16253C.1.pep
GXIWQXXNADQAKSSRDPIWXSKINANSKSMXRXDCLXGASRXXLEALLLYXXKX

SEQ ID NO: 253246 - protein, 690 aa, Zea mays
  unsure (1)..(690): unsure at all Xaa locations
  Clone ID: MRT4577_162540C.1.pep
MSSAAKDQLQQMSTTYDSLLLELNMIWDEVGEPDMARDRMLLELEQEWLDVYRRKVDQANRCRAQLRQAIADAEAELAGICSAMSEPPIHVRQSNQKLHGLREELNAIVPYLEEMRKKKVERWDQFVDVIEQIKKVASEIRPSDFVPFIIPXVDQSDLSLRKLDELTKELQSLQKEKSDRLKQVMEHLSTLHSLCEVLGVDFKQTVNEVHPSLGEADGSKNLSNCTIESLASAASRLRELKVQRMQKLQDLASSMLELWNLMDTPLEEQQMFQNVTCNIAASEHEITEPNTLSTDFLSYVESEVLRLEQLKASKMKDLVLKKKTELEDHRRRAHLIGEEGYAAEFSDEAIEAGAVDPSLVLEQIEAHIATVKEEAFSRKDILEKVERWLNACEEEAWLEDYNKDDNRYNAGRGAHLTLKRAEKARILVNKIPGLVDVLTTKIVAWEAERGKEFTYDGVRLMSMLEEYMIVRQEKELQKKRQRDQKKIQDQLKAEQEALYGSKPSPSKPQSTKKAPRHSMGGANRRLSLGGATMQAPKTDILHSKTARAAKKAEDLGALSPSSRGLDIAGLPIKKLSFNASTLREAETPRKPFAQIMPGNNVSPMPTRPISSATEEENKTPRTFVGGLNAKTPATVTAPMQMAMTPAVANKVIATPATLFQEKADSPALPADIEYSFEERRLAVYLARQVA

SEQ ID NO: 253247 - protein, 42 aa, Zea mays
  Clone ID: MRT4577_162541C.1.pep
KSTTRASRLHILARGAVNAQLGPRDPGGCYTGRPRISTRGFR

SEQ ID NO: 253248 - protein, 29 aa, Zea mays
  Clone ID: MRT4577_162542C.1.pep
SLNFFFFFFFFFFFFFFFFFFFFFFFFFF

SEQ ID NO: 253249 - protein, 66 aa, Zea mays
  Clone ID: MRT4577_162543C.1.pep
TRNADGHCRCSQGHYESAVTRTGFSEGTLLRLTRPRYESRWTRALRKPASRVRLTRHALYANDYDG

SEQ ID NO: 253250 - protein, 49 aa, Zea mays
  Clone ID: MRT4577_162544C.1.pep
VGGWTVVYDGLTFVTVRSAGHMVPSTQPQQALELFKHFLANTKLPSEPF

SEQ ID NO: 253251 - protein, 67 aa, Zea mays
  unsure (1)..(67): unsure at all Xaa locations
  Clone ID: MRT4577_162545C.1.pep
LQPXVKPSGDLSFRVLIRAQGNRDSASYLIARLYTQALPHLVELRLTWVLYTAWIFQILFINIGILC

SEQ ID NO: 253252 - protein, 50 aa, Zea mays
  Clone ID: MRT4577_162546C.1.pep
YGSLCVYYFLYFACSFPPVAPCRCGPYSSCSVATSSGLSRFLNLFVDKSE

SEQ ID NO: 253253 - protein, 173 aa, Zea mays
  unsure (1)..(173): unsure at all Xaa locations
  Clone ID: MRT4577_162547C.1.pep
MGINGEEWEETVLGDGVGRRKGGAEASGLVASSSFAEGMGEFVLRSMDARFSGSVDDDEYVSSRQPVFGHSKSTATTSGTIKGQDNVFVRSYSDRLLKCDLTLDMLSENEKIKITERLVKIQNDGTVEVDVTRSALVASELSETDAFGCVPHDIEEVTPVIXKSVPKLKMLYL

SEQ ID NO: 253254 - protein, 132 aa, Zea mays
  Clone ID: MRT4577_162548C.1.pep
ASLLSVPTEQQRPSPGRAALPQRACTDAGSVSGKLSYEIFSLLESKFLFGNGSMSGTPGQPGPGKDRDKGRVRVLAINGCGPGPSDALLASAALARLEERPSPLRRVFGDATLKDTVAPVLVPSYDLATVAP

SEQ ID NO: 253255 - protein, 232 aa, Zea mays
  unsure (1)..(232): unsure at all Xaa locations
  Clone ID: MRT4577_162549C.1.pep
MAAIPSLLRRRLAIVVATTAMLVLLPSPSVAGDPDLLQDICVADLTSTVKVNGYACKAAAAVTADDFYFSGLGGAGNTSAXPTAPAVTGANVEKVPGLNTLGVYMSRIDYAPGGGVNPPHTHPRATEMVFVLQGTLDVGFVTAANNRLVARTLAPGDVFVFPRGLVHFQRNAGDGPPPVLSAFNSQLPGTQSLAAALFAASPELPDPVLAKAFQVGTKEVDKIKARLAPKKA

SEQ ID NO: 253256 - protein, 51 aa, Zea mays
  unsure (1)..(51): unsure at all Xaa locations
  Clone ID: MRT4577_16254C.1.pep
KKIHAPHPPXTNPQQPSLAASRRLLLLQPARAVLRSKLPLRVLPVAILWFN

SEQ ID NO: 253257 - protein, 131 aa, Zea mays
  Clone ID: MRT4577_162550C.1.pep
ICPKVSVLILAVIVQLKIFLTVVASFPASRPPCIKLPSVSILCSKPSAQARVLALPLVLQLAEFLCYLLSALESAHELSSAGCSFPQPCTPSRELLPVRVGVSPLEPWLPRAPHRVYNWVCPAPLFSRMLG

SEQ ID NO: 253258 - protein, 90 aa, Zea mays
  Clone ID: MRT4577_162551C.1.pep
KGVFFKSVLVWLRTGFSHYAFFKTRASNLILGCPYKKVFLCKEGVVNFDFYKRPPLFSFPFSPFFFFFFKSIKIFFFFFFFFLPSCAVDR

SEQ ID NO: 253259 - protein, 71 aa, Zea mays
  Clone ID: MRT4577_162552C.1.pep
TGAETRGAGPATSRRCQAGGSLRRGTGKQLLLYNPSRSRRLLLGDPIRLRGRHASREISLINKCTAAAGCT

SEQ ID NO: 253260 - protein, 593 aa, Zea mays
  Clone ID: MRT4577_162553C.1.pep
MARPPQEAIDTFVSITGADEVTAVRVLEEHGHDLNEAVNAYFNEGDRTTTRINQNPVPATASYDDMMELDEPLDPMFNRPLFPRTLGNPFALLDPGFADITAGDIFGRGPRVTQPRDVRQIPIEVKDSNTQTGSSGQGPIIEDVTGRESFYGPEVHGTVIVDEDDEDLPLTLSAQDPKIPSSALHPNHFMPSAPPVVDVSDHNNDIEEEMIKAAIEASKREADGMKNVLSSGQSENMSRGRGDHELARAVSLSLETAERERALRQEGMYVADHSPDLSDKEGGQGGSGISERRGLTTGEVGTSEQTVDEENFQEDNEDGEEQPLVRTRSRRLRGRTIEPAETVQRADSPPSSPQPHVQIGHQRNVGFPSVEWGGISSEERDEALMLEAAMFGGIPEGAPYPFSFPAHGRSTHYPLVARPPSPSLTAQRLLREQQDDEYLAALQADREKELKAVQEAELRRVEEAAAREAALERQKKEEEEKLKKQREEEELESKLAAKQASLPKEPLQNDEGAVTVVVRMPDGSRRGRRFLKSDRLQYLFDFIDISRTFKPGTYRLARSYPRRAFTELESQMSLSDLGLTSKQEALFLEKLSA

SEQ ID NO: 253261 - protein, 56 aa, Zea mays
  Clone ID: MRT4577_162554C.1.pep
LTTRQRLLMGRQSSHYYLPIQRLIKFISATKTNFYVTSNLLDHYQKPNLYTFITTI

SEQ ID NO: 253262 - protein, 87 aa, Zea mays
  unsure (1)..(87): unsure at all Xaa locations
  Clone ID: MRT4577_162555C.1.pep
LLFWVLLLAVSSAAPVGLCRASWVPLRLVCGVLLGACPPVGSVRPRFPRXGCAASRGGGPPSVVRAPPRWRFGRGFTRGLVIRGYGP

SEQ ID NO: 253263 - protein, 196 aa, Zea mays
  unsure (1)..(196): unsure at all Xaa locations
  Clone ID: MRT4577_162556C.1.pep
MAGQSSYSRLAADEAAAAISADDYDSKKLRLLGYEPQLKRNLSLLSNFSVTFSIVSVLTGITTLYGTGLEFGGPVTMVYGWPIAGAFTIVVGLAMAEICSAYPTSGGLYFWSARLCTERRWGPFASWLTGWFNIVGQWAVTTSVDYSLAQLIQVIILLSTGGNXNGGGYLGSKYEVIPIHAAILLGPRVIHSLPIG

SEQ ID NO: 253264 - protein, 236 aa, Zea mays
  Clone ID: MRT4577_162557C.1.pep
FRSVPFVLVSTELGNPTGVVHINVDKADQPLPLTTVFHKLIPLETTPYTLFQTIIGNGYPIALLDEEKILLIGKKITAIGLCQAKDAESVEITSCPEIPFFLSELTKDEMQAQLASRARILFWGSIALGTLSVCLVGHAIYRGWTRIKLRREARQARQMFEEAEDAIHRDDSSDDDEIGDGQLCVVCLRKRRRAAFIPCGHLVCCSECALTIERTPHPLCPMCRQDIRYMMRVYDS

SEQ ID NO: 253265 - protein, 36 aa, Zea mays
  Clone ID: MRT4577_162558C.1.pep
GAKIYPSPDPAQCGKPTALGTPYVVSWKPLLIGCNA

SEQ ID NO: 253266 - protein, 133 aa, Zea mays
  unsure (1)..(133): unsure at all Xaa locations
  Clone ID: MRT4577_16255C.1.pep
HKDDDGFFLDFIWDYALTHLGDXQAARGRVYDFHIACEVHPLINGHYPQIMHXSMNRSGLPQHSLPEHAKLENRSXDYIXINEYTSIYMNDQKLYHLTPNNYSGHXHDHYTAVHNCIPIGPHANSKLLFIAPT

SEQ ID NO: 253267 - protein, 87 aa, Zea mays
  Clone ID: MRT4577_162560C.1.pep
AYKATHHQWSPLLLVASALAVSADPGRTALERGCRPISVGWPRIRLRERLGHPGARLMGAGARGAPHAGRRQASRDVGTRPRSSAPP

SEQ ID NO: 253268 - protein, 205 aa, Zea mays
  unsure (1)..(205): unsure at all Xaa locations
  Clone ID: MRT4577_162561C.1.pep
KHGPCRLGLALESSLSHSPPRIHLCFTSSAQRASLGRTIYRSIARASWSRKEQSLLSTEIVNRGVXPSGPDAVSSAFSVRVRRRLPDFLKSGTLVVRLGXHYLXSHXVDLASXPMIVLXSAAXLGSLSRYELWSKVXGEATYDLSTVLAFLGVLGLTIYVYIMYRPRPVYLIDFACYKPAGELKVCKAALIDLARKSGKLDEDSL

SEQ ID NO: 253269 - protein, 98 aa, Zea mays
  unsure (1)..(98): unsure at all Xaa locations
  Clone ID: MRT4577_162562C.1.pep
MGTGILSFLALLTLTASSTNAFIIPQCPLAPSIIITHFLPSITSMGFXHLAAQAYRLQQAIAASVLQQPISQLQQQSLAHLTIQTIASQQHQHFLPSL

SEQ ID NO: 253270 - protein, 61 aa, Zea mays
  Clone ID: MRT4577_162563C.1.pep
PHFNIPRLKKGGIPSSFPAYSYIGSPQIFPTNKYYTCCTSGSPKKPGSKSHLITSLYISKH

SEQ ID NO: 253271 - protein, 72 aa, Zea mays
  unsure (1)..(72): unsure at all Xaa locations
  Clone ID: MRT4577_162564C.1.pep
ALVELNVIKNLVVXGALGGFNAHASNIVVAIFIATGQDPAXNVESSQCITMLEAINDGKDLHISVTMPSIEV

SEQ ID NO: 253272 - protein, 610 aa, Zea mays
  unsure (1)..(610): unsure at all Xaa locations
  Clone ID: MRT4577_162565C.1.pep
MGEAESVRGYIKDPPKAGSHWEKRSKNRLNRFSDRLNRFLPGGSRSTELLSRRLDRFQNRLSREKFQLNRFLKNICYDFSDSSDCQTGFAYPPPSRRLSAALVQEQTVEGVIRQCPVYYVSEVLTPSKCNMTELEKIAYAVVMSSRKLRHYFEAFKVWVTSDRGLGELFRNPEASVRIAKWAAELSGYHINFEPRAAIKSQVLADFVVDWTGPITQPDPSTEKVWTIHCDGAWCHAGAGAAAVITSLAGVKHRYAARLSFALESDRCTNNIAEYKAVILGLRKLRALGVTTCIIRRDSKVVASQVEKDYAAKDPALMQYLAAIRSLERQFKGCTLQHVDRAKNEEADALAKAAARGESLPSDVFYHVIGTPAVRSPEGLQITNDSEGHRIVNLIMTEDWRAPITLFLQGYYHPIDINEAKRLKHRSRDFALIEGQLYKKGVSQPMLKCVTETEGVQILREVHSGTCGSHAGPRALAAKGLDIVGPLPTAQGNLKFTFVAVEYFTKWIEARAVSTITSKTAQKFFWQNIVCRFGVPSELTVDNGKQFDSQDFKDFCFSIGTKLAFASVYHPQSNGVVERANGKIFTAVKKMLLDXKKGRWADLLPEAVCAL

SEQ ID NO: 253273 - protein, 178 aa, Zea mays
  unsure (1)..(178): unsure at all Xaa locations
  Clone ID: MRT4577_162566C.1.pep
MASKARGSSGRGRAKDPALMQYHAAIRSLERQFKGFTLQHVDLAKNEEANALAKASARGESLPSDVFYHVIGTPAVRSPEGLQITNDSEGHRIVNLIMTEDWRAPITLFLHGYYHPTDINEAKRLKHRSRDFTLIEGQLYKKGVSQPMLKCVTETEGVQILREVHIGTXGSHAGPRAL

SEQ ID NO: 253274 - protein, 88 aa, Zea mays
  Clone ID: MRT4577_162567C.1.pep
PTLPPFMTRTGDSLTTSIWRGGTKQPRHIGSLIDPGITVPRGFGHYRMDGSLERSKLLCGGGHFTSVCRRKSNPAEPGGAPSLSGFFR

SEQ ID NO: 253275 - protein, 421 aa, Zea mays
  Clone ID: MRT4577_162568C.1.pep
MASKARGSSGRGRAKDPALMQYHAAIRSLERQFKGFTLQHVDLAKNEEANALAKASARGESLPSDVFYHVIGTPAVRSPEGLQITNDSEGHRIVNLIMTEDWRAPITLFLHGYYHPTDINEAKRLKHRSRDFTLIEGQLYKKGRWGLDIVGPLPTAQGNLKFTFVAVEYFTKWIEARAVSTITSKTAQKFFWQNIVCRFGVPSELTVDNGKQFDSQEFKDFCFSIGTKLAFASVYHPQSNGVVERVNGKIFTDVKKMLLDEKKGKWADLLPEAVWALNTTECRATEVTPFRLLYGSEAMTPQEIKHGSPRTVSSAVPNVDEPTSKDLIDGDRVFALQALNKYQAQTKAWRDHTVIPREFSEGDIVLVRTARTESRGKLEPKWEGHFIVKTKASPSAYRLTTPSGEDLEHSWNIDNLRKFFV

SEQ ID NO: 253276 - protein, 53 aa, Zea mays
  Clone ID: MRT4577_162569C.1.pep
ILSPLHIKLSHSTKTIGHVDEYVVIPAIKNPLTTSNINHYSSNHSTAQTAFTE

SEQ ID NO: 253277 - protein, 108 aa, Zea mays
  Clone ID: MRT4577_16256C.1.pep
RSACSVVLHWQNQHGLRGLYSLQEITLEFRRWLVAWPRFINEFSSKPLLKPRQCPCLYEIVVPRASGRAGVQRTALLASAQTQLRIRAGAAHKDGTCLCPAVAVLVPA

SEQ ID NO: 253278 - protein, 45 aa, Zea mays
  unsure (1)..(45): unsure at all Xaa locations
  Clone ID: MRT4577_162570C.1.pep
GGPTTQRXFGLRXDPXHRAYSXSAFAPNTTSAPXRSTSLSRHTLA

SEQ ID NO: 253279 - protein, 40 aa, Zea mays
  Clone ID: MRT4577_162571C.1.pep
LRRTVIQRIGPPLKDKAVDPVVGLTTVDTEGLIFQSFLAC

SEQ ID NO: 253280 - protein, 61 aa, Zea mays
  Clone ID: MRT4577_162572C.1.pep
GKGTCRIHNNEINNVLVCTPFAPKGNAHQNSCNLTSVGNGGLLRPAYVQVQTSCQPSLTFW

SEQ ID NO: 253281 - protein, 158 aa, Zea mays
  unsure (1)..(158): unsure at all Xaa locations
  Clone ID: MRT4577_162573C.1.pep
KAPRSKXHRHPPKDPXAGKKENKPRGRKSQAXXQPXARQAXKRGRRPGXXXAAKPNXAAEAGRQAQXRPSXGAEAGEXAGGPRESPSXKXGRGXKXKXXXRSXTXETEGPPPETKEKEGKEPGQTKRKHAXXPXTXPGKPXAEDGTKXXAPPGRQGPX

SEQ ID NO: 253282 - protein, 85 aa, Zea mays
  Clone ID: MRT4577_162574C.1.pep
FPLEVPLKSITPPNCHISICNNKGVQGKKKVFVLTPKMGWEIRKTYLLKIPYANIEVCPYALKKAQHSCLHPKGSVVNIRKFSFS

SEQ ID NO: 253283 - protein, 71 aa, Zea mays
  Clone ID: MRT4577_162575C.1.pep
PTRPNNGRTLLSDGALRGMGAEGEINTRGIHARGPKTVEGLLTTRWIMPGSGHVVNGDNDIAYTHKNLRLL

SEQ ID NO: 253284 - protein, 98 aa, Zea mays
  unsure (1)..(98): unsure at all Xaa locations
  Clone ID: MRT4577_162576C.1.pep
SXXLTFFCLLSLLRLPFMETXXWMLSSPFYLRRESCVDLFACKRLQFLLWNELLEPSFALLSLGGVKLVRFPLGNRLLDASLVVYVLRXLVWCRSSAF

SEQ ID NO: 253285 - protein, 69 aa, Zea mays
  Clone ID: MRT4577_162577C.1.pep
QLIFRQTLLYFLCSTMSISPYETYSPYCGLQVFYRNYSLKPLILITKQLQTRHSTLKFRFQRQNKIQPN

SEQ ID NO: 253286 - protein, 101 aa, Zea mays
  unsure (1)..(101): unsure at all Xaa locations
  Clone ID: MRT4577_162578C.1.pep
AVNSRSDVQIVLGGKKIKAAIGFGQKYEVATDEQNHQALHFLRHHLSSTLKNEYMSDRKSSNLXMHCNNVFERFKYKVLSQAPQXGAQQDWTHLRYIDFKT

SEQ ID NO: 253287 - protein, 82 aa, Zea mays
  Clone ID: MRT4577_162579C.1.pep
IIVPVLRSLRSKLFSYMLSLTVRPDYCSAGRPLDSLECNCQSCQRCDLSPTDATQLSELIYIHRPPESAAIHATALHVQKAE

SEQ ID NO: 253288 - protein, 77 aa, Zea mays
  Clone ID: MRT4577_16257C.1.pep
MFVYGLAKERLARRMAHDTDRYDFVHYMLQGSETLRFEEMVSQSQILLLAGSETTASSLSGMLYYLLINPNVLARLT

SEQ ID NO: 253289 - protein, 115 aa, Zea mays
  Clone ID: MRT4577_162580C.1.pep
MGSVSHKTGTFLFTSESVGEGHPDKIADQVSDAVLDACLAEDPLSKVACETATKTGMIMVFGEITTKAKLDYQKIIRGAIQDIGYDDSSKGFDYKTCNVLVAIEQQSPDIAQGLH

SEQ ID NO: 253290 - protein, 39 aa, Zea mays
  Clone ID: MRT4577_162581C.1.pep
FLSYHNQEQLDVNVKSNARRRLRSELRRRQARHRSTRVD

SEQ ID NO: 253291 - protein, 363 aa, Zea mays
  Clone ID: MRT4577_162582C.1.pep
RTRGLAPKALAAYHQPALILHQRRRHGPPPVAAVTASKPVLKDPKKYQEWDSMTAKFAGAANIPFLLLQLPQIVLNTRNLLAGNKTALFAVPWLGMLTGLLGNLSLLSYFAKKKETEAVIVQTLGVISTYAVLVQLAMAESMPVPQFVATSVVVAAGLILNFLNYFGWLPGTLLLMWEDFITVGGLAVLPQVMWSTFVPFIPNSVLPGIISGSLAVAAVAMARMGKLSNAGVKFVGSLSGWTATLLFMWMPVAQMWTNYLNPSNIKGLSAFSMLLAMLGNGLMIPRAVFIRDLMWFTGSAWASVLQGWGNLACMYCFNSISGEVFFATSAGLLLWLGFTLWRDAIAYGNSSPLSSLKELFFGK

SEQ ID NO: 253292 - protein, 46 aa, Zea mays
  Clone ID: MRT4577_162583C.1.pep
LATVPTLPDEAGHHAVASVEAHGAFHRLGKVGASSPGPWQCFGRVG

SEQ ID NO: 253293 - protein, 413 aa, Zea mays
  unsure (1)..(413): unsure at all Xaa locations
  Clone ID: MRT4577_162584C.1.pep
MSSPSVASLRLPMLPASPPLSRRAIAGVTPSAAAPRALLLQPLAPKALAAYHQPALLLHQRRRHGPPPVAAVTASKPVLKDPKKYQEWDSMTAKFAGAANIPFLLLQLPQIVLNTRNLLAGNKTALFAVPWLVRPPIRVSDSTSSGMLTGLLGNLSLLSYFAKKKETEAVIVQTLGVISTYAVLVQLAMAESMPVPQFVATSVVVAAGLILNFLNYFGWIPGTLLLLWEDFITVGGLAVLPQVMWSTFVPFIPNSVLPGIISGSLAVAAVAMARMGKLSNAGVKFVGSLSGWTATLLFMWMPVAQMWTNYLNPSNIKGLSAFSMLLAMLGNGLMIPRAVFIRDLMWFTGSAWASVLQGWGNLACMYCAXCARLSFXIHVTFLQHQLGFTLWRDAIAYGNSSPFSSLKELFFGK

SEQ ID NO: 253294 - protein, 326 aa, Zea mays
  Clone ID: MRT4577_162585C.1.pep
VLELAGFSTRPSPCSSSPSSSPWSFFPSRARRRCWPPAPSSPSRFSVGRCSSPPHGASSAPSSSRCSLPWRPSGSTSPRPLLGPSVLTHRCALSSHGCCAPCSSKPAEPLPQSELTPAIAPSGDRTLLAVPVELAGRATSRARLCAPVASSLRKPTPCRCAPIFLPLCSADRTAPARAQPSCFPRAALCARLHVSLLAGAPFLLPHSVFVSVAPICARLWPSNTPSSLFAMALVVASLCAAVAWWVLVAGMVGATQDLGTLSFHYAQRHAFCARRRFPVHHNAVIPCRALDVVLVMVGSGGRHRRPSILSIATLIRYCSVLREKEI

SEQ ID NO: 253295 - protein, 129 aa, Zea mays
  unsure (1)..(129): unsure at all Xaa locations
  Clone ID: MRT4577_162586C.1.pep
ALAPSAIIPQFLXQTTSTGXERPAVQAYRLQLALAASALQQPIAQLQQQSLVHLTLQTIATQQHQQQQFLPSLIHLAVXNPVTYLQQXLLACNPLALANVTAYQRQQQXLHHGMPELSQLAMVNHAVYL

SEQ ID NO: 253296 - protein, 79 aa, Zea mays
  Clone ID: MRT4577_162587C.1.pep
LFRTEACIMVSSINSTSCWLSLCFPNPRWQFWRVIRVVYAIIMLRACMRAMPCHAKRWAINWAGLYLHRQEMEILVRAA

SEQ ID NO: 253297 - protein, 62 aa, Zea mays
  Clone ID: MRT4577_162588C.1.pep
LISNLKEGTTNDGLLVERCWVCQSKLVECISPSLAHSRYSSKRANNGIVPPVRVGRAGNSEP

SEQ ID NO: 253298 - protein, 127 aa, Zea mays
  Clone ID: MRT4577_162589C.1.pep
SARVSLYKLPEGKGWMTQLLSVACVSLAAKMEETAVPQCLDLQVGDARFVFEAKTIQRMELLVLTTLNWRMQAVTPFSYVDYFLNRLSGGNAALRNCLFQSAELILCAARGTSCIGFRPSEIAAADK

SEQ ID NO: 253299 - protein, 475 aa, Zea mays
  Clone ID: MRT4577_16258C.1.pep
MGRHGVDQIGAVAAFVWVTLLPLLLVCVVWPGAQAGHTSEYRRQLGSAIDMPLDADVFRPPSGYNAPEQVHITQGNHDGTAMIISWVTTSEPGSSTVIYGTSEDNLNYTANGKHTQYTFYNYTSGYIHHCTIKKLEFDTKYYYAVGIGQTVRKFWFLTPPKSGPDVPYTLGLIGDLGQSFDSNVTLTHYESNAKAQGVLFVGDLSYADNYPYHDNVRWDTWARFVERSVAYQPWIWTAGNHEIDFAPELGETKPFKPFSHRYPTPYKASGSTAPYWYSIKRASAYIIVLASYSAYGKYTPQYKWLEAEFPKVNRSETPWLVVLMHAPWYNSYNYHYMEGETMRVMYEPWFVKYKVDVVFAGHVHAYERTHRISNVAYNVVNGLCTPIPDQSAPVYITIGDGGNQEGLATNMSQPQPSYSAFREASFGHAILDIKNRTHAYYTWHRNQDGSAVAADSMWFTNRYWEPTDDSADDFQ

SEQ ID NO: 253300 - protein, 60 aa, Zea mays
  Clone ID: MRT4577_162590C.1.pep
GPPLLGYSPWVVPPACDLASLLTQFGLCYCPWGSFDGIRGEAFFSDRNSITAPCGVFPPP

SEQ ID NO: 253301 - protein, 39 aa, Zea mays
  Clone ID: MRT4577_162591C.1.pep
RDPGMFFFNFLTIPTLLQSFPITLDFRSWLIYVNRRRLW

SEQ ID NO: 253302 - protein, 76 aa, Zea mays
  Clone ID: MRT4577_162592C.1.pep
GGQRSKITKLSGLALRSQISGLCLSTRRGVLRFFARFSSVGSFALFLLERGFCPISPMLGCSSLFSPYITSRSFTP

SEQ ID NO: 253303 - protein, 260 aa, Zea mays
  unsure (1)..(260): unsure at all Xaa locations
  Clone ID: MRT4577_162593C.1.pep
TSSPMRPVACSVQRTTQISKHLQHTMSASQPTSAAPWRTEFLSHIKKMDSPTFVLSTLHHHDSSSVTPRSRTVVYRGTWAEIPVNPKNQAPLNPPLYESDLLTITTDARMEKVPELSPDGKNVPQTGGGGPVEAVFWVTETQTQWRMRGHAYLLGQDIDDPSASHVRGEIEQHMRKKSDDNSIPWNWGKEITAHFGNLSPGMRGSFRNPPPGTKXDEKPDAGLGLGQKVEDLDDRFAERXSXCVXXPTRVIRWTYPTRRW

SEQ ID NO: 253304 - protein, 160 aa, Zea mays
  Clone ID: MRT4577_162594C.1.pep
MSGGIARGRLAEERKAWRKNHPHGFVARPETLADGSANLMVWSCTIPGKQGTDWESGYYPLTLHFSEDYPSKPPKCKFPQGFFHPNVYPSGTVCLSILNEDSGWRPAITVKQILVGIQDLLDQPNPADPAQTDGYHLFIQDPTEYKRRVRLQAKQYPALV

SEQ ID NO: 253305 - protein, 101 aa, Zea mays
  Clone ID: MRT4577_162595C.1.pep
FPAGVAVVSLLGRAFWFPSFLLCWCFGPVSCFQFSARPSGLFGPFSRLFFGLPVLVHSGSLGAPFVLWAPFVYLLVVSCLCAPVSFVASHRGVFLVPSVTR

SEQ ID NO: 253306 - protein, 160 aa, Zea mays
  Clone ID: MRT4577_162596C.1.pep
MSGGIARGRLAEERKAWRKNHPHGFVARPESLTDGSVNLMVWNCTIPGKHGTDWEGGYYPLTLHFSEDYPSKPPKCKFPQGFFHPNVYPSGTVCLSILNEDSDWRPAITVKQILVGIQDLLDQPNPADPAQTDGYHLFIQDPAEYKRRVRLQAKQYPALV

SEQ ID NO: 253307 - protein, 76 aa, Zea mays
  Clone ID: MRT4577_162597C.1.pep
VFIRLKKQHHSIFFNTDITRLAIAHKQRGGRSWGPRSRTRARDVLALRIVPPWFFSLAVPLPPMIHIACRSLPLSA

SEQ ID NO: 253308 - protein, 138 aa, Zea mays
  Clone ID: MRT4577_162598C.1.pep
LAFLPSSCHCQPAGQKKEGHMGGARGPPTSWRAVAAAALALWLLPAALALAVLWLPLLCCAVAAVRFLRVRRKLVASGRSRGGCCDGDGDRDRDRVPDETTMVRAGGRLRLLHRYLDDQVELVVGVGVHDDQEEHEQG

SEQ ID NO: 253309 - protein, 90 aa, Zea mays
  Clone ID: MRT4577_162599C.1.pep
ASAPAGSRQPAKDGTNVKAATQRIAKNPLKNETEWSLHVPQSGSLVVVIRGPRSAPALIRRQASQGDVPMIVGYAVLHRAISKSVSSVVI

SEQ ID NO: 253310 - protein, 91 aa, Zea mays
  unsure (1)..(91): unsure at all Xaa locations
  Clone ID: MRT4577_16259C.1.pep
GLKAYRKNDGSILILSHKKNAISIXNGAEXMCMPATTVEQLVDAVKQTVLANKSWVPQTGKGSLYIRPLIIVSSAVLGHALAPEYSFMISV

SEQ ID NO: 253311 - protein, 83 aa, Zea mays
  Clone ID: MRT4577_1625C.1.pep
QTNGAVPDVLQQGRLLVVDYATCSSSAWWGSSVKTSMICAGGDGVISSCNGDSGGPLNCQASDGRWQVHGIVSFGSRLGCNYY

SEQ ID NO: 253312 - protein, 109 aa, Zea mays
  Clone ID: MRT4577_162600C.1.pep
FFFFFFFFFFFFFFFQYFFFFFKPTQGVCKSAKCHAQTKRGSPPAGFTYSNLPRGEKRGTKLNGGVKQRVHTQFEGLRFFFNRTPPGYPPWLPPINPPDPLLILLGGAR

SEQ ID NO: 253313 - protein, 85 aa, Zea mays
  Clone ID: MRT4577_162601C.1.pep
ELTSLRLDLFFSFLHFTVVCYYYHSNAFLFVSRLRDVFLFLSAAGTNGRGTTRGIFFKKSAGNLVPNTGYFNSGITGATRENLRG

SEQ ID NO: 253314 - protein, 95 aa, Zea mays
  unsure (1)..(95): unsure at all Xaa locations
  Clone ID: MRT4577_162602C.1.pep
GACTGVRVGDPCXKGFLAVPVIKHCGVSSTSVSHYKXXVSIIWEGDMPGQCHRATVMQKIMYPVGTTLRRSKHEHVVTSLSRLHLSYLYNLPVCV

SEQ ID NO: 253315 - protein, 141 aa, Zea mays
  Clone ID: MRT4577_162603C.1.pep
PRVRPRVRPRVRPRVRENLTAVLFHYDGNVNGWNDLPWSKSVIHIAASNQTKWWFAKRFLHPAVVSMYQYIFLWDEDLEVDNFNPRRYLNIVRSEGLEISQPGLDSKLSEIHHRITGRKNTGTFHRRVSRAYKRCLREGPP

SEQ ID NO: 253316 - protein, 54 aa, Zea mays
  Clone ID: MRT4577_162604C.1.pep
IYNEERDGCLIKIGLTILEIKDVEASFHVTLIVIEKSCLGKIEKTLVGNQESTS

SEQ ID NO: 253317 - protein, 70 aa, Zea mays
  Clone ID: MRT4577_162605C.1.pep
TMAFFGHDFSSVRTRTYNVQPAGWAQKKNKGEINRRTTPGDLGGQITEGVVDKNTLGERKTARLRLGDIF

SEQ ID NO: 253318 - protein, 90 aa, Zea mays
  Clone ID: MRT4577_162606C.1.pep
QGSSFSSATVSLIFSVVRHSHPWVCNARTESRSGHIVLFFDMEFWRESLSPRVAMLLPVGVRVKCAHVHSIIIGGCLNHGRLSSRIACAH

SEQ ID NO: 253319 - protein, 84 aa, Zea mays
  Clone ID: MRT4577_162607C.1.pep
RIIRRLRVNLFATMYLYSSTILHLHTEQTELTKQTAKIVHCHARLRTTTTCRASSLRCFCRLIQILVSPLYQIRLLSRCNLHIC

SEQ ID NO: 253320 - protein, 76 aa, Zea mays
  Clone ID: MRT4577_162608C.1.pep
HWRFLAHPVDDVLPWRYFLKLSLTGDNFKRQMDSTLNDACVYKLIMDLLKADMNKCQRYNALYLFRTLSEAQMANG

SEQ ID NO: 253321 - protein, 66 aa, Zea mays
  Clone ID: MRT4577_162609C.1.pep
GCFFLFVRMAFNSKKILCHDKAITDWGVEKKKKNPLKNKTSTGSAHFPLFFHRGCKPPPIPQEKTL

SEQ ID NO: 253322 - protein, 555 aa, Zea mays
  unsure (1)..(555): unsure at all Xaa locations
  Clone ID: MRT4577_16260C.1.pep
MGRHGVDQIGAVAAFVWVTLLPLLLVCVVWPGAQAGHTSEYRRQLGSAIDMPLDADVFRPPSGYNAPEQVHITQGNHDGTAMIISWVTTSEPGSSTVIYGTSEDNLNYTANGKHXSFDTKYYYAVGIGQTVRKFWFLTPPKSGPDVPYTLGLIGDLGQSFDSNVTLTHYESNAKAQGVLFVGDLSYADNYPYHDNVRWDTWARFVERSVAYQPWIWTAGNHEIDFAPELGETKPFKPFSHRYPTPYKASGSTAPYWYSIKRASAYIIVLASYSAYGKYTPQYKWLEAEFPKVNRSETPWLVVLMHAPWYNSYNYHYMEGETMRVMYEPWFVKYKVDVVFAGHVHAYERXKQLHTINFFCCKWLGYFFPLCYGLLRVILSRMSSLCAGEIFIGCKPNEYTHXPLKKLLRIMCIYVCRHISASFQLNLLGFSTLVMTVSXLSLDADXFSDXHRISNVAYNVVNGLCTPIPDQSAPVYITIGDGGNQEGLATNMSQPQPSYSAFREASFGHAILDIKNRTHAYYTWHRNQDGSAVAADSMWFTNRYWEPTDDSADDFQ

SEQ ID NO: 253323 - protein, 203 aa, Zea mays
  unsure (1)..(203): unsure at all Xaa locations
  Clone ID: MRT4577_162610C.1.pep
MAAVSLLTRKYNQYYAARPVLTTMITNAVLGGIADTVAQTLTAVRERAVRKKGGPGKDDFLAIEIHDLDKRNPFNENDLIPDSKKLPPPFDFERTTRFMSYGFLMSPIQHRWFRFLSATFPVTKTATWMPALKRVAFDQFLFAPAGLAAFFTFMTIAEGGGKRAVQRKFQDVYVPALKANYMVWPAXQIINFRVMPIQYQIPF

SEQ ID NO: 253324 - protein, 40 aa, Zea mays
  Clone ID: MRT4577_162611C.1.pep
MLTCAVAPPAGPCMPMFTPGAPGVGQYMFYCQSPSAFIIP

SEQ ID NO: 253325 - protein, 99 aa, Zea mays
  Clone ID: MRT4577_162612C.1.pep
VKDADGALSSGLGKESREYAVCRGLGHRRAAMFSECSSSPREVDGGKAEKSAMVCTAGRRSWTLAPGRYYEGEATCEKQRKKRREEMKLFVRWKVRQRR

SEQ ID NO: 253326 - protein, 110 aa, Zea mays
  Clone ID: MRT4577_162613C.1.pep
PSLSSCRYLKCISERALATTTFDPAQLLAMLWAVSAATPRSDEYSAAGFLISPPVGPPRRLTRSRPRSARGPVDRGSRRRRSTRSLRAGPPTRPVDGSSYLGVDERDRGG

SEQ ID NO: 253327 - protein, 91 aa, Zea mays
  Clone ID: MRT4577_162614C.1.pep
MAPAMGLKRPAAAAAAAGGGAAAAQTVTLSAPAVRGPVRAAVRHAEATAPAAKVPATAAATAEIARDGVLCLDEVDGRRWSYVVDAAGAAV

SEQ ID NO: 253328 - protein, 136 aa, Zea mays
  unsure (1)..(136): unsure at all Xaa locations
  Clone ID: MRT4577_162615C.1.pep
GRGRKXKKQRXREEEKRTKEETKKDREKRKEKEKDQQREDRGRGGEXQDRXXPNPQQNHTGAKESHEEGSEQXKKTGKERTTRKERRPQPEETPNTRHRKXQNRAKGNPTPGRGRPEGQANREHRDTTRPATSHGR

SEQ ID NO: 253329 - protein, 141 aa, Zea mays
  unsure (1)..(141): unsure at all Xaa locations
  Clone ID: MRT4577_162616C.1.pep
KWTKKKQSQKKKKKKKGEQKKKRXRGGKKEKRGHREKKEGVRHHKKKVTKGKKKKKKEPEENTERDNLNSKKAGGGKRGGLKEREKTHKVMGPKKKKFLRCVRGRKGPHTKKGAHLERPQKRLGKPAQGKVEAEGAKHGGM

SEQ ID NO: 253330 - protein, 36 aa, Zea mays
  Clone ID: MRT4577_162617C.1.pep
SVFPIAFELVHCEFIAHNIIGMMIVSKKLIIACPSA

SEQ ID NO: 253331 - protein, 46 aa, Zea mays
  Clone ID: MRT4577_162618C.1.pep
LKRLVEQKFQDNTQNKTFLHHEHSTDFVNVKSTLIAQAPQTEGFHQ

SEQ ID NO: 253332 - protein, 45 aa, Zea mays
  Clone ID: MRT4577_162619C.1.pep
REAEVNFCFLVCVCECRLWHQFLLTVLYPSLIIKYPVCHCISGNR

SEQ ID NO: 253333 - protein, 121 aa, Zea mays
  Clone ID: MRT4577_16261C.1.pep
VDCHYDPDRVSRYKHCPDYGGCRAPKGSYGRDTPGHCLSMDTAHVSIVQSSDMKEMGLICAGDMTPMAAAAVSARRRMVLTCRSTYTLRLPAMTSPMASGSATTTTDHGTTNGSTSTFRSM

SEQ ID NO: 253334 - protein, 89 aa, Zea mays
  Clone ID: MRT4577_162620C.1.pep
RVGLELVGKLGMPVLQQKWESADHHTGVTMRRDQEASLGRLLRELPDIHGQEATGPFQGAKPVVPHALMTGATLGERLSVRGKRGTLCS

SEQ ID NO: 253335 - protein, 162 aa, Zea mays
  Clone ID: MRT4577_162621C.1.pep
MRHVKQSKSNVGNADLIRTIHSSCQDGSSSSPAPAPSSSAPAGLPPLTVFDPCLMHYCCYGGACEKASDFAHRCSCRDGYSNLLNDTSYPCYRQCSLGPDCKGLGIDVINGSTPSSSPPAPFSFTVKKSGAGASAAPAGTLLALLAFFGLQAIWAVFGSAFF

SEQ ID NO: 253336 - protein, 65 aa, Zea mays
  unsure (1)..(65): unsure at all Xaa locations
  Clone ID: MRT4577_162622C.1.pep
NHPPTHKQTTNTTTXPPPXTTTTNTSTIPPNHPTTNTTIKFPXPTHSYCTTTLTSKPHIRISPTP

SEQ ID NO: 253337 - protein, 220 aa, Zea mays
  Clone ID: MRT4577_162623C.1.pep
MEGASRPPLRALACLWLCAVAAALLPHGASAAGGECGNVSCGMGTCSESSDYAFGFACECKPGWSRYHLAGLQFPFLPCVIPNCTIHSSCQDGSSSSPAPAPSSSPPAGLPPLTVFDPCLMQYCGDGGACEKASDFAPRCSCRDGYSNLLNDTSYPCYRQCSLGPDCKGLGIDVINGSTPSSSPPAPFSFTVKKSGAGAAAAPAGTLLALLAFFGLQAIW

SEQ ID NO: 253338 - protein, 150 aa, Zea mays
  Clone ID: MRT4577_162624C.1.pep
MCLAPPAAAMATEELQEGDELCPDYYHSSDDGRGQRRLQPHRWSGRKPCCLRTDDENAACKVRRPGSLSAPVAIVVPVTAVATTTEDDDDEAAFVPPHVALEARRRRSEGRVASSMCEGLGRTLKGRDLQFVRTAVLRMTGFIESCPDED

SEQ ID NO: 253339 - protein, 132 aa, Zea mays
  Clone ID: MRT4577_162625C.1.pep
PGSASFFLAASRQPPARFSRSFFAQTRVVLLVGLPPPDPHGRFLSTPPPPARKWGIPPQGAQLLLKLSSAPQFHGWHKGQVTFAPAFKYCRNSDHLPWWVYGVSTGLEKQLRAPAWFDRILWFGKGIHQVRF

SEQ ID NO: 253340 - protein, 80 aa, Zea mays
  unsure (1)..(80): unsure at all Xaa locations
  Clone ID: MRT4577_162626C.1.pep
PTPKKPKEANTPARPGAHQPIKTRHRFNCATRNKGASKHYGRKNGSSHTPQQPQERKKPRNTREPRKQPRSQARWPXGAQ

SEQ ID NO: 253341 - protein, 44 aa, Zea mays
  Clone ID: MRT4577_162627C.1.pep
CALDLTLWYVGMTWRCAFLIYVLRSMWCNWAVCVFDLRHDFRFS

SEQ ID NO: 253342 - protein, 108 aa, Zea mays
  unsure (1)..(108): unsure at all Xaa locations
  Clone ID: MRT4577_162628C.1.pep
LTKLRYTTHYCDKYPHTARLAPATPVILTTSISNNFLLKPQSLAXSVINETFKXLILCSSSNPTXGLVFPKELLEDNPSIGRKHPTLLNLSDEIYXHIIYPPAKHTNF

SEQ ID NO: 253343 - protein, 96 aa, Zea mays
  unsure (1)..(96): unsure at all Xaa locations
  Clone ID: MRT4577_162629C.1.pep
GIHVWRMPGFPEIFVNDSCLLFGGGTLGRPWGNAPGSAIIRVALEACVXASNKGGDLAREGNHIIKAPCXRSVEISSPCEVWKEIKFAGFEAWDPL

SEQ ID NO: 253344 - protein, 143 aa, Zea mays
  unsure (1)..(143): unsure at all Xaa locations
  Clone ID: MRT4577_16262C.1.pep
RAHGAQHCGKCALVNNIMTGNLIHRHDKIKREAGISGNIKIFTEDEIERITNNFSTLIGKGGFGEVYRGTLDDDNEPVAVKKYINEDSREVFMEEVRIHSKIGHKNVVKLIGYCIGESTLMIAMQXMPTGNLPDLLHSEITHT

SEQ ID NO: 253345 - protein, 249 aa, Zea mays
  Clone ID: MRT4577_162630C.1.pep
LCDHRACARGAGTLAASYVHPPLFLSVSLYAAERVAAIRYVASRWCPAAVRGNFYFWAVRTYGLDAGSELLGARVYLLLARIRDSLPFAWYGQAAASPVHCFRGKGRDPTVACACKLLGKVNSSMFIVRKDGRYSSMWVLVLVDQIRSAFLNFEMSIATTSCLPIPLLQYPMHHLISRFWISPWQQKTLVTEEFQWKHTAGRFSVLDLLSIVTLFSFLLARVSGTPDPYIQRFNRRWTIDGAAFCRSWS

SEQ ID NO: 253346 - protein, 116 aa, Zea mays
  Clone ID: MRT4577_162631C.1.pep
SGLCDPARIHKRLPPGRLDTGTSWQAIPDGIRRGRTAALELALHQEVSRRGLSNCTGARGLAMRDGYYGNDAGSPVLRGIHAALALATAPEPQRQADPVVTDHVARGDAVPSCPRP

SEQ ID NO: 253347 - protein, 74 aa, Zea mays
  Clone ID: MRT4577_162632C.1.pep
MPINRIALGSHQEVYHPGALKAAFAEFISTLIFVFAGQGSGMAFSESSAVRSYPCACNTGSIGPRLAFNEQLAS

SEQ ID NO: 253348 - protein, 84 aa, Zea mays
  Clone ID: MRT4577_162633C.1.pep
MPINRIALGSHQEVYHPGALKAAFAEFISTLIFVFAGQGSGMAFSESSAVRSYPCMQHRLDSLYTARPTNSFTTSSKLFFKHLV

SEQ ID NO: 253349 - protein, 180 aa, Zea mays
  unsure (1)..(180): unsure at all Xaa locations
  Clone ID: MRT4577_162634C.1.pep
MGDHPVAGEHHHPSAATALGALLLLPSELLHEILLRLAVPELLRVRSVARPLSSLISSPDFRRLYHLSSASSGPGPAAAWLLLFKKLPPRDAAIRGFHGPSGRWFRIPVSAILAPAVPPGEDLYFLAASGSSFLFAANGRRELVVVDLTARAARXLPPYPLGPRGTSSWRQFDLKLDDDP

SEQ ID NO: 253350 - protein, 93 aa, Zea mays
  Clone ID: MRT4577_162635C.1.pep
MFISRTIAQFVTSPAGLARGWSLGLAAADAAHGSATAGGAQGSSYGRIYKRRRTDGAQVCKDLQSVTASSPAPCSAVSLHAPDIYQAKKISSG

SEQ ID NO: 253351 - protein, 70 aa, Zea mays
  Clone ID: MRT4577_162636C.1.pep
HQTIIRFTKPYSVLHHGEQRTNKYKKHMYEDSWLTKLPSSWFFLDETRAMTCNRHIRKILHISRTTRLGK

SEQ ID NO: 253352 - protein, 54 aa, Zea mays
  Clone ID: MRT4577_162637C.1.pep
NIDLYDRFFPGCYQLDSVPRVALHIWKGESVNEYIRRLRDTCTRCFQIQVAVNR

SEQ ID NO: 253353 - protein, 62 aa, Zea mays
  unsure (1)..(62): unsure at all Xaa locations
  Clone ID: MRT4577_162638C.1.pep
PNFFASLPFKLCFLNFIWRPYLPLLINHLDCNFPEGFLFLHFSFLGTHIPYLSHTSCCLPXC

SEQ ID NO: 253354 - protein, 271 aa, Zea mays
  unsure (1)..(271): unsure at all Xaa locations
  Clone ID: MRT4577_16263C.1.pep
GYLEAGREGSLVAWPEKSLLAAVAGAEERESLTLTCARYNREYRHPCCTHRAQHCGECALVNKIMTGNLIHRHDKIKREADISGNIKIFTEDEIERITNNFSTLIGKGGFGEVYRGTLDVDNEPAAVKKYINEDSREVFMEEVRIHSKIGHKNVVKLIGYCIGESTLMIVMEYMSKGNLNDLLHSEISIPLDVRLGIAIGCAEALSYMHSMHVSSGNLVCHGDIKPANILLDDNLTAKLXDFGISGLSXXGVTRYTTTVXGSIGYMDPIYI

SEQ ID NO: 253355 - protein, 105 aa, Zea mays
  Clone ID: MRT4577_162640C.1.pep
DQTLSRKGRPSVSIKDRTESRLADLGPFNWPHASSWVSFASVGPIPEQLARTGSGEMARVACTLRGKRLEGGVLYSRKHGGHHGESYVYQLGQRLDGGVLCSRVT

SEQ ID NO: 253356 - protein, 66 aa, Zea mays
  Clone ID: MRT4577_162641C.1.pep
SMPSNSHNHLAYHIMPRLDFSKSEDGHQFLYIIEHLRSVELNLLLHQFLQGFYMGAAEVAGHQKPE

SEQ ID NO: 253357 - protein, 42 aa, Zea mays
  Clone ID: MRT4577_162642C.1.pep
GPPTGGGPLTKKNPSFIDSIWFPLFVSVPLILFNNLFLWGRG

SEQ ID NO: 253358 - protein, 49 aa, Zea mays
  Clone ID: MRT4577_162643C.1.pep
NWNNQHLKHLLVMKHKLILYRGIQLKRFYASCMDDGTSNIWCMKQDKPY

SEQ ID NO: 253359 - protein, 40 aa, Zea mays
  Clone ID: MRT4577_162644C.1.pep
MAAPPCCSSTLLPGARPCPLSSALPAAHGMDASPLSCCHG

SEQ ID NO: 253360 - protein, 72 aa, Zea mays
  unsure (1)..(72): unsure at all Xaa locations
  Clone ID: MRT4577_162645C.1.pep
LTGXAGRXTYRAXXPHXXCSPTKNXLLRGATXXXWGXARXXLAGHVXLRSXNVDLXXARSXFCWXXEALRRR

SEQ ID NO: 253361 - protein, 110 aa, Zea mays
  unsure (1)..(110): unsure at all Xaa locations
  Clone ID: MRT4577_162646C.1.pep
AQRGNRGSKSGKMEAGRTDNESRNYWKTERTEKLQKMGIDRATYMKIQPQAEYPSATDQEXDTVCSLEEEGEKADVVMMAVVTSIIGLKTDHIFTDEEEMLEHLLDYMDD

SEQ ID NO: 253362 - protein, 154 aa, Zea mays
  Clone ID: MRT4577_162647C.1.pep
TQGKQRVLIGVRRGHTRAAQIEVELAAVFHRAHRGRDTKGFHGCCCSMTKGEVGVRLWSGASCRWRRAPGEGDSGRHRRGSRLGFGIAMGGTRRVEMSSWWPTSREGAALGRRLAVAEQGSSRRRGRALLLKRAWGQFSGGWIAHVEGIPAGLE

SEQ ID NO: 253363 - protein, 161 aa, Zea mays
  Clone ID: MRT4577_162648C.1.pep
GSSILVLDQIIQASGSFIIFMLGSTQLLSSVKKWGGRRPRGMTEDQGASRDGARVYGARRAEGFSREEVGDFSARLLDGEGSAGPEHHSSATGRPGRRSRLGQAPRRTTRTSCTAGRRRAGEAARGTGEELAPEMEVELGRRGSSTALERAGEIRERAMGD

SEQ ID NO: 253364 - protein, 47 aa, Zea mays
  Clone ID: MRT4577_162649C.1.pep
RKDSQGYASLMGIKVRLTKFQRLSFAEKLTSIGSLSQTFTSQVKYFS

SEQ ID NO: 253365 - protein, 125 aa, Zea mays
  Clone ID: MRT4577_16264C.1.pep
VQRKPFFLPFLGCPAREKGLVFTLGGGGQTGITFSPLQRKAIFFFFKRAHTYTGERVQILVFLFGPWEGDKRLWGPWELLKFFRGFFFAGMGFPGLFVQVKNPQKYFNGPFSQKKKPQGEGKKKK

SEQ ID NO: 253366 - protein, 137 aa, Zea mays
  Clone ID: MRT4577_162650C.1.pep
AGLSLISSLCKTGIKEDNQIPRNGNASTVSSLNSYHLMQHISDKSFKNNKEVANAPGLAWDNTKLVLLIDDHLVSISHSGTLSDHPSLGSFTSIILGSTRLLSFASRVTNHIMLRLDFSKNLDGHQFEHIIEHLRSA

SEQ ID NO: 253367 - protein, 133 aa, Zea mays
  Clone ID: MRT4577_162651C.1.pep
FRFPGSHTSILCIIPHTPPRTCWPHRPALLLAGAPLPCFSLSHGRPPPFLQQAMAAVLSLSFLSWLWTSADPSLPWRPLFPFPTVSWILDAGAAFPWCCPLLWRSSLFQTTTPLSPTPVVHHVLNKMSQRAAP

SEQ ID NO: 253368 - protein, 49 aa, Zea mays
  unsure (1)..(49): unsure at all Xaa locations
  Clone ID: MRT4577_162652C.1.pep
RQNHKQEKHHTQQHKHXSSNSNXQLNEPQHHNNPPLHTQSQQPKQQEHE

SEQ ID NO: 253369 - protein, 79 aa, Zea mays
  Clone ID: MRT4577_162653C.1.pep
CLLGEHLPFWHLFDSPILASSISIILRSIQTLSSTSRDQLTYHLTKGRGLALGLSFMENKRKRGSCCCRIRGGLLLLVP

SEQ ID NO: 253370 - protein, 167 aa, Zea mays
  unsure (1)..(167): unsure at all Xaa locations
  Clone ID: MRT4577_162654C.1.pep
FXXHXSLPVPRHLGSLSSSDTGHFLPLRRSIPTLRAQASRHQGRTSSPPLGSLHHARSAPATFPHGHRLPNSMPCSSPLCSTQQTGRACPGLHCSRPLGAQDPLLPTPPLAARWSSRPRRVRPNIAASSTSICAAPVVTSSNPGEDPLFSLCLFLSGTCIRRRLIKC

SEQ ID NO: 253371 - protein, 67 aa, Zea mays
  Clone ID: MRT4577_162656C.1.pep
LAMQFFSILGPALAVVPLQHTSLPAKFVLKAIVMHGSSEACSGSADSTCRRPHDRCVRLGRDPKPVT

SEQ ID NO: 253372 - protein, 40 aa, Zea mays
  Clone ID: MRT4577_162657C.1.pep
QNAAQLILMPVPIHIVDNIPPYLHVLTSEIKLLTHISQRF

SEQ ID NO: 253373 - protein, 274 aa, Zea mays
  unsure (1)..(274): unsure at all Xaa locations
  Clone ID: MRT4577_162658C.1.pep
MARAAARLLPIFLPWRRPPPPRLLRRGFLNPSSPRTSARVDTLVLPGDERLPFPSPPRLPNQLRPDYGSGGGGGAPSTIAAIVTSLGGGPAAVGIVRISGPDAVAVADRVFRPAGTRRASTPWQPRSHFVEYGLALDADGSVIDEVLVVPMLSPRSYTREDVVELQCHGNDLCLRRLLRACLEAGARLADPGEFTLRAFLNGRLDLAQAENVSRLISAKSAAAADSALAGIQGGFSTLVKSLRSGCIELLTEIEXARLDFEDEMPPLDPVMLVS

SEQ ID NO: 253374 - protein, 82 aa, Zea mays
  unsure (1)..(82): unsure at all Xaa locations
  Clone ID: MRT4577_162659C.1.pep
AFYYDVTALAASQCLTCGLSTFATCHGCPAAIICDGVSVLLIDPYHIGPAAGILCNFFAACKADPGYWDXILQGCLQIIYAK

SEQ ID NO: 253375 - protein, 68 aa, Zea mays
  Clone ID: MRT4577_16265C.1.pep
DAFHGDRDDCCVHDGAVLVLWEWCKGENQSWKILPWGPEANSDVFYAGGPHAVLVFCKVCGEDYSLTV

SEQ ID NO: 253376 - protein, 50 aa, Zea mays
  Clone ID: MRT4577_162660C.1.pep
GLSCCKGCGGQWYGGPRQAIAACDHCGEMVLVAALAERTQEHKEAYSLAA

SEQ ID NO: 253377 - protein, 193 aa, Zea mays
  unsure (1)..(193): unsure at all Xaa locations
  Clone ID: MRT4577_162661C.1.pep
MPDTEGGHAAVARQLDLVAPPAAPATTTSSRATATARHDDEEEDGFTFAAVAVPCPVYAVFGRPRWSPQKQRQQEEEEEEGPAGTGAATARRVPLGRLLLEERWCDDGAPSVSGKQPADAAEAELDGVPAETYCLWSPASPEXSSRRASPARCRTRGSSAGLSVLPWQRQRRVAAGRTSSCSWPGGEDRERRG

SEQ ID NO: 253378 - protein, 151 aa, Zea mays
  unsure (1)..(151): unsure at all Xaa locations
  Clone ID: MRT4577_162662C.1.pep
ERIVVWMQNLLAKTQTQELIVCYINYLXESLPSPMGKSALLCASLASKXTLSYTIVAHKFYLKPEQNIVKVVEGQPAQCITVFPAXMDMQPXPGPLRSLRDVLVEVYHPVFEYGNVRVGFAETILETWFVSGQSTGTRAILCVYATCAMCG

SEQ ID NO: 253379 - protein, 128 aa, Zea mays
  Clone ID: MRT4577_162663C.1.pep
MVSCSSSPRPPIPLLLLFLLHFSSVLAVSAPSASQQAGTDGGGGNVSETAAWTPRLRKTFLDGGIEHWHGRRLVGRFQVCAVCTCCGGPHGMCIPAPCCYAINCNIPNRPFGVCSFTPRTCNCLNCHL

SEQ ID NO: 253380 - protein, 48 aa, Zea mays
  Clone ID: MRT4577_162664C.1.pep
AGTDGGGGNVSETAAWTPRLRKTFLDGGIEHWHGPAAGGRFQVCAVCT

SEQ ID NO: 253381 - protein, 28 aa, Zea mays
  Clone ID: MRT4577_162665C.1.pep
NIFSINCFYKKIGTNPLFLVPVLFKNEY

SEQ ID NO: 253382 - protein, 219 aa, Zea mays
  Clone ID: MRT4577_162666C.1.pep
LQDLGIIPDDRFCGCLLSVAANTPAEELGKVISCIERSNVQLGAVVKLLVDRSSSESFREAARELLRSSRGVVKMPYCNCLMDLCVNLNQMEKACALLDAAQQLGIYANIQTRTQTQWSLHLRGLSVGAALTTLHVWMNDLYTSLQTGNEGLPPLLGIHTGQGKNTYSDRGLAAMFEAHLKELDAPFHEAPDKAGWFLTTNVAAKQWLESKAASELVTV

SEQ ID NO: 253383 - protein, 75 aa, Zea mays
  Clone ID: MRT4577_162667C.1.pep
RDPHRIPVNRRSWGAHRPRAAQASSAAISRPRLGVTTLQGWNTTTPARADASRGGGHIRAGGPSVQQRGAPTICA

SEQ ID NO: 253384 - protein, 149 aa, Zea mays
  Clone ID: MRT4577_162668C.1.pep
MSRMADKVVGSNRRYNSTGNEIRQFNTEQDSLTNLPAPAGWRAQGFLKYISRRVIAIFLKRRRQHLANDHPHTASAPSNLADLQTIKEDRVNPCLERLDRLELMFNQLSRKPPELPQDKDRAIQDSFDRIKSIEFDLEKTKKVLHASYG

SEQ ID NO: 253385 - protein, 36 aa, Zea mays
  unsure (1)..(36): unsure at all Xaa locations
  Clone ID: MRT4577_162669C.1.pep
TTSYLMDFHFKXPIHXXNDDLFYKPYHPKQLSTILS

SEQ ID NO: 253386 - protein, 84 aa, Zea mays
  Clone ID: MRT4577_16266C.1.pep
LILFLFINFGNIIISRQYNNEEIITINHKNQSVDINKLYRHLKQINPSIKKIPLIQKLNSKLEIPIETNNFYKHNQDKIGNTTK

SEQ ID NO: 253387 - protein, 63 aa, Zea mays
  Clone ID: MRT4577_162670C.1.pep
MTRSRLPELTCMHTCVTFVSGIYLGDVGHEPVKSGLALHEAIDQLLVATVVITCGSRVDDASA

SEQ ID NO: 253388 - protein, 141 aa, Zea mays
  Clone ID: MRT4577_162671C.1.pep
PARQQLSALLPQALAEFFHGALDASPFTRCPCIPARPAPSHGHRRATRSYLPSPSSSGCCPFLFLVVESSSMDANSSSPLLLLFSMDESPSICPSPRFLYNRSSTSNLCNPGETSCLRYVYSPPIPIFDYLLYMFVCLWWR

SEQ ID NO: 253389 - protein, 104 aa, Zea mays
  Clone ID: MRT4577_162672C.1.pep
TPSNVGWCHPFTVGDKLSGLLTTILVGCYRLYALHSCLLTRPPGGGGGAHACLLPFHSIHVPGARPLVCRCTNVLMGLEAGEPLVADGVTHAVPHVLEPPYSGD

SEQ ID NO: 253390 - protein, 72 aa, Zea mays
  Clone ID: MRT4577_162673C.1.pep
DHSSCCPPHYEINERTILNQITENGDDSNSIIPSSARCVMRESFLYSSSPNCLRCFSTKITNISTHIHTISI

SEQ ID NO: 253391 - protein, 48 aa, Zea mays
  Clone ID: MRT4577_162674C.1.pep
HGEKRRNGLEHHSIGGFYPQTGLHGPWGRTLGGLRAYRPSFNPICGLN

SEQ ID NO: 253392 - protein, 176 aa, Zea mays
  Clone ID: MRT4577_162675C.1.pep
MTTTTMTTTTTAAPDLSLHISPPSPPEPRLLLGLELDDDTAAAVAAKAATKKADDAAMREYNNLRQVQRRQLHQPSQTAGHGFKRGTSGSAAAGAGGRRSSRAPRMRWTTALHAHFVHAVELLGGHERATPKSVLELMNVKDLTLAHVKSHLQMYRTAKQQGADRPCVAVAGHGHA

SEQ ID NO: 253393 - protein, 102 aa, Zea mays
  Clone ID: MRT4577_162676C.1.pep
RRQPWRTTPLHGRRSLAMDEPNAASSFASGGRRLSSMSSTASRGSCLDLVVPARQRFSMPSSFASPHRQGPLARELPLQPSPAHAPSLPSSVDFCRSPSLRT

SEQ ID NO: 253394 - protein, 66 aa, Zea mays
  Clone ID: MRT4577_162677C.1.pep
TTTTTLITTKPPKYHPLTKGKVNTLITSSPSTMLSTPTAATITILHDLLLHLFYSIIQNPSSSIRL

SEQ ID NO: 253395 - protein, 115 aa, Zea mays
  Clone ID: MRT4577_162678C.1.pep
VQAFLFLLCSFYGRAPHVRRSSLAPSPPLELAPVELTCARRLPCSSPMDASFLICVQGFPSHGRPQPHGRPRLALPPSPPQARLGMEAGHRTQHTNLTGHTLCFSPLSAAPVSSS

SEQ ID NO: 253396 - protein, 87 aa, Zea mays
  Clone ID: MRT4577_162679C.1.pep
LLTLLVAAFFAGRLGRRKATSRPLGFFPRRGPSRTAGLLPPLASFAAGFFLRPWAHIRCGMLGVSTVVVMNAKRCDMRVRGISSPRR

SEQ ID NO: 253397 - protein, 70 aa, Zea mays
  Clone ID: MRT4577_16267C.1.pep
FNWGSIPPSTYSTLMMLAIIYKKMTRMCLLFFLSKITSPSTITAILPIRTTPSSQSLETPDTPTNDLRPI

SEQ ID NO: 253398 - protein, 141 aa, Zea mays
  Clone ID: MRT4577_162680C.1.pep
RLLGTQPPSPHACLSSSARPRRLLLPCSATTSRRPCAAPSLLVGHQDGVSTRRVPPMAIPNPSRDPLLCWPLSPSPGVLPYPRAGSTWRAHPPVPDEFITSFRATPSSMVPSCSLESAVVISKSLCCFTSSCSYRFLLIPC

SEQ ID NO: 253399 - protein, 74 aa, Zea mays
  Clone ID: MRT4577_162681C.1.pep
GTVVLLMYSSPVSVPNIGLFDSNYVYMYVRDVRRNLICVKRNKSRDGCRVFSVMLKPGIVVMRINIVLICDMVR

SEQ ID NO: 253400 - protein, 50 aa, Zea mays
  Clone ID: MRT4577_162682C.1.pep
EGVFNEPSRSAADYINKKNLQFNFLAQAQTKKKKKRGGRRLVTSSPGELF

SEQ ID NO: 253401 - protein, 97 aa, Zea mays
  Clone ID: MRT4577_162683C.1.pep
MALALSPACQQPSALLPQALAEFSMVPWMPAPLLDAPARFLACSPSHHPSSARPWRTEQQPPSSMTSSPPFPCPCRLFSSRQPWCVVRLSEDLSFLL

SEQ ID NO: 253402 - protein, 136 aa, Zea mays
  Clone ID: MRT4577_162684C.1.pep
APILQSLAGHPCSLDVSPMAPSPSCHGRPSLLQLDAPPWSSPLPSVQRPPCCPWYGRRPPLLLPWIAPLPSPSPSTSPMVAQPSSPSHLCCCPWYGRQPPLLLLWIAPLPSPSPSTSPMVAQPSSPSHLCCSHSDL

SEQ ID NO: 253403 - protein, 122 aa, Zea mays
  Clone ID: MRT4577_162685C.1.pep
RRLKKIEETKVPDEEIEAPSSSEATPVIRKKDAKFPQKLPVLPEAAEPAKKGKEKLVDVSDSSSENGAGYAESFATQHETAEIREDFEKLAQKVDSLTSRVSLMMKEREQLPHSSKHESRLE

SEQ ID NO: 253404 - protein, 193 aa, Zea mays
  Clone ID: MRT4577_162686C.1.pep
AVVTTQSTRAKFLAHRLFPSSRFSIWLDSKLRLQTDPILILEYFLWRHGYEYAISNHYDRHCVWEEVAQNKKLNKFNHTIIDQQFEFYQADGLTRFNPSDPSRLLPSYVPEGSFIAREHTPMSNLFSCLWYNEVDRFTPRDQLSFAYTYLKLRRTNPDRPFRLNMFKDCERRSIAKLFHHRTEERHNSAQLTR

SEQ ID NO: 253405 - protein, 136 aa, Zea mays
  Clone ID: MRT4577_162687C.1.pep
HLTLAYVNSPPVFSRPEWVHATREHSTPPSSHWPGWYTLLSPWCPPCFREYSTPPSSLLPRRVQATLAISPLPVRASCSGIGPTEAKLTHDEACGQLKGPRSASLLSVRSLIDTDRRPFLLNVWSHIIISFPKPCT

SEQ ID NO: 253406 - protein, 138 aa, Zea mays
  Clone ID: MRT4577_162688C.1.pep
MHVFPDGTRLRVSLQNPGLGHLSSVFLFPTIKMSRGGSAGGGQSSLGYLFGSGEPPKPAVAPAVSAPPAAAGAPPAEKPPAAKPDGTSQIAAGVTSQTNNYHRADGQNTGNFLTDRPSTKVHAAPGGGSSLGYLFGGN

SEQ ID NO: 253407 - protein, 253 aa, Zea mays
  unsure (1)..(253): unsure at all Xaa locations
  Clone ID: MRT4577_162689C.1.pep
CLRCGHDQNPHEDKGSQNDNGAATSTLSTRARRCRGATGNSDAXGQGGVAGGARRGRERTEGAGRKNCGAASRAQGARSKERRGGREAGGRGXGACARQQAGRRHEQRGAGEGDPREIDGRAAASXESHGRGIRAGAGRSSGXGNTRGWGELGEEDRGAQENRTPSKNTAGRSSAGRHGASSGKLHGGVRGAGRRRARAEGDAHGWRAQGAWPGRGRAVSSMAAAWWRELGGNAGEDEVGERWGWQPGTGCER

SEQ ID NO: 253408 - protein, 110 aa, Zea mays
  unsure (1)..(110): unsure at all Xaa locations
  Clone ID: MRT4577_16268C.1.pep
QKDQRGGSIYSSPKRGPGFRHINPQGGHYLGCFPMPNDFDQRFPPQEWRGAKHSRAFFFRGLLPPVGAPGPPVSNREQTIXSPSPPNMLEAPLTRMERKPIGGGNCLLRV

SEQ ID NO: 253409 - protein, 49 aa, Zea mays
  Clone ID: MRT4577_162690C.1.pep
GFAISLVLKALAFFHFYANLLEAELLSLPSQKAEFLSNFTEASVALWQC

SEQ ID NO: 253410 - protein, 144 aa, Zea mays
  unsure (1)..(144): unsure at all Xaa locations
  Clone ID: MRT4577_162691C.1.pep
MARGVARAVSFGRRATTGWCSYRRVTVAVCIGNLVAVLLVLRSLTAPASFAPTAPNRGEVVQYTEEQIRWVEESIRIRREAEPVELVLAVKKLRKKLAQEVKRREELSLVLKQKFIXDIARGLHEVGDNSSLAQQREVVESWRV

SEQ ID NO: 253411 - protein, 89 aa, Zea mays
  Clone ID: MRT4577_162692C.1.pep
VRMELQLQTQGQRENVQFLGRNITRFESICVNVHAIEETWHKTSPYISHQNYTNIQVSGSKDAKCNDLGAKYNLQWLPPNASISSLLKL

SEQ ID NO: 253412 - protein, 60 aa, Zea mays
  Clone ID: MRT4577_162694C.1.pep
CPDASFTGRNIALMYVMPVNQDYIELEHKAPIRCIFTILSDSRHTGRLLDKTTVQIVHST

SEQ ID NO: 253413 - protein, 664 aa, Zea mays
  Clone ID: MRT4577_162695C.1.pep
MADKATVLPLRDPWPFSTVTVVDLQALIAEGLLRPLSGGPQPEWLAPRSEADLTPPPGYVVSFTPFHERGFGMPASHFMRALPHYYGVELHNFNPNSIAQAAIFVAVCKGFLGIDPHWDLWTHLFSAEFFAASTNVKKAGVDLEGSRMSSTPLSTDDLLRRIAGTVGRLDTGVLNQPPMRPDHGYVSLGLRNFKISRSPVPEDAAGRTACRLVAEKDKEKKDAEKARACERMRAREALEKRRRRQARDGLPLEPSPDTPEDDDDDDDEDDDMAARLGLSPDPRLGQRSSSQPPGGPAPPAFGAGMPGSRSEERRQAEGVLDPLAEIIGVTLGGQVEPHAPQEQVPVPAVREVGPSAVVTSPGQAAPSAPRVSEAEAASKPAAGQPSAGPAETGAREVSPQARLALPRSGHPSVGAQEARAVMGQASQVDPPVGAAIMSGEAVDAAAASSPPALLPALTSIPVGAVADSPTEPPVAADVEMAEMPPPPAPLALVIPDPPIFDHEEGRPLLPTLELADMSTAKSLFLCRESSVWESLRSQWAVASQAEEMQQRQLEPGQVTSERDQFWSQAAEAVSRAEALRGQLAAVTERQAEATARAGTLSEGLVVAVGSAWSAQAMASQQHARAKGFEMALNESVKNCKALAQAAEQKEADRMAMSEDISAFC

SEQ ID NO: 253414 - protein, 66 aa, Zea mays
  Clone ID: MRT4577_162696C.1.pep
QCESQHLSCLWVGQFVLLSLVRFTAVVDDFVGRRHSHGVIPTCSRPRGRCPVSSSPPRGCPRPPRA

SEQ ID NO: 253415 - protein, 115 aa, Zea mays
  unsure (1)..(115): unsure at all Xaa locations
  Clone ID: MRT4577_162697C.1.pep
GGVGQCVCSCLVSGGGDPRGAVVVAVRAAGRPLPAVVPASGVFLVPPHSVPGFLCPGGPPVPLRVPARRGVPLRLLAVPLVAGXATRVSALVGAAVVGSGGGGVCSCCLSVPLSF

SEQ ID NO: 253416 - protein, 207 aa, Zea mays
  Clone ID: MRT4577_162698C.1.pep
MGGGGGGNSRELDQTPTWAVASVCGVIVLISILLEKGLHHVGEFFSHRKKKAMVEALEKVKAELMVLGFISLLLVFGQNYIVKVCISNHAANTMLPCKLKEAAVPGKKKAAAAAEHLGGVLDWPPPYYAHNGRMLAEASMATKCPEGKVSLISINALHQLHIFIFFLAVFHVSYSAITMALGRAKIRAWKEWEKEAAGQDYEFSNDP

SEQ ID NO: 253417 - protein, 68 aa, Zea mays
  Clone ID: MRT4577_162699C.1.pep
YTMQNEPTEQLKLKGNHMVAGAVDIAMFRKAALDDVKRFREAVMEIGEEDDEDEVEKCEKENDGYWSE

SEQ ID NO: 253418 - protein, 73 aa, Zea mays
  Clone ID: MRT4577_16269C.1.pep
PQCAGLALSSGNNAEYFFFFFFFFFFVFFFSYLMLILHGHVLNCLRNSHLRILHYLGPTHQAPRLSLSARDGC

SEQ ID NO: 253419 - protein, 73 aa, Zea mays
  unsure (1)..(73): unsure at all Xaa locations
  Clone ID: MRT4577_1626C.1.pep
GTHMATGHRQGTQARGGEKGYERMMRTAQPMEKLTDTSPXERHQVTHSNHEXPNNPRDTQRAAPNITEERTAK

SEQ ID NO: 253420 - protein, 98 aa, Zea mays
  Clone ID: MRT4577_162700C.1.pep
NQRTKTPTKTAQKGNPPPKLKTRTPNPGPHQHQRGVTQPPGTGGRTQIIRNKRPWWVLGSTNQGATKTGLFRAARLGADELGGGDHVGQGRLHPRGLG

SEQ ID NO: 253421 - protein, 515 aa, Zea mays
  Clone ID: MRT4577_162701C.1.pep
MGGGGGGGNSRELDQTPTWAVASVCGVIVLISILLEKGLHHVGEFFSHRKKKAMVEALEKVKAELMVLGFISLLLVFGQNYIIKVCISNHAANTMLPCKLEAAAVEGKDGHGKEAAAVVAGKKKVAVAVPGKKKKKAAAAADHLGGVVDWPPPYYAHNARMLAEASMATKCPEGKVPLISINALHQLHIFIFFLAVFHVSYSAITMALGRAKIRAWKEWEKEAAGQDYEFSHDPTRFRFTHETSFVRQHMNVLNKFPASFYISNFFRQFFRSVRQADYCALRHSFVNVHLAPGSKFDFQKYIKRSLEDDFKVIVGISPPLWASALIFLFLNVNGWHTMLWISIMPVVIILSVGTKLQGIICRMAIDITERHAVIQGIPMVQVSDSYFWFARPTFVLFLIHFTLFQNGFQIIYFLWILYEYGMDSCFNDSEEFVFARLCLGVVVQVLCSYVTLPLYALVSQMGSTMKQSIFDEQTSKALKNWRAGAKKKAPTGGSKHGGGGSPTAGGSPTKADGDA

SEQ ID NO: 253422 - protein, 62 aa, Zea mays
  Clone ID: MRT4577_162702C.1.pep
VRSQNVSHESLFKETASLMVSPIFLTLFIGYRRSLLYCFTPKTRLFLVILQVICLLNMTSTT

SEQ ID NO: 253423 - protein, 119 aa, Zea mays
  unsure (1)..(119): unsure at all Xaa locations
  Clone ID: MRT4577_162703C.1.pep
EGIAGAGLADMDWSGATGDDLGGALGEADWDRPAGTVSEYCSRLTVQGYYSKWARRLQRHVYYYRTDYVISSMGILGMGCLWKRGAIHGAYMTGLNRAFLNDXLMXSFKERMTGTARQS

SEQ ID NO: 253424 - protein, 77 aa, Zea mays
  Clone ID: MRT4577_162704C.1.pep
SFGFSHAFSVYLHYSLLLRAIIAYMLAKLLDVFMTCDLSSFYKARKLAVTHDHGPINSGGKPMNEDSNDENRDNIRV

SEQ ID NO: 253425 - protein, 53 aa, Zea mays
  Clone ID: MRT4577_162705C.1.pep
MVGTSAVTVRRQPGSVEHCTLQGMVDSVTWPTTLPPGWTDEWDAAPAGEEQEE

SEQ ID NO: 253426 - protein, 167 aa, Zea mays
  Clone ID: MRT4577_162706C.1.pep
IFLRRGFQRSASSSHAHSTSSMAADRVPPHLLQPAALLVLPSCDVELALDDRPCPSSLICVQGFPSHGAWSSSLDSMPSAPAELVLAPASSLDGGALPFLQQAGVPLSIIFSAWFLASSPCSSARPGPVPFFHSCGKHQPLPTPTSLSYGRCPSLVSGGRPPLLLPW

SEQ ID NO: 253427 - protein, 108 aa, Zea mays
  Clone ID: MRT4577_162707C.1.pep
LRTERNGLAATIAEKKHPRNKTGTTRRPKTMPNLHKKRRANTLLSNGKNIAPWLIFNIGNHQRKGAGALDPRGALLIPWETGQRRTPYPPAGSNRSINETTLGTPKRR

SEQ ID NO: 253428 - protein, 58 aa, Zea mays
  Clone ID: MRT4577_162708C.1.pep
VRNYSARLTRLKKRLSRVCWFIRNQGKAYQISKTHFAEELTSSGSLCQNFTSQVKYFS

SEQ ID NO: 253429 - protein, 180 aa, Zea mays
  Clone ID: MRT4577_162709C.1.pep
LSVIFSVALISLIFSLRRGFQRSASSSHAHSTSSMAADRVPPHLLQPAALLVLPSCDVELALDDRPCPSSLICVQGFPSHGAWSSSLDSMPSAPVELVLAPASSLDGGALPFLQQASVPLSIIFSAWFLASSPCSSARPGPVPFFHSCGKHQSLPTPTSLSYGRCPSLVSGGRPHLLLPW

SEQ ID NO: 253430 - protein, 72 aa, Zea mays
  Clone ID: MRT4577_16270C.1.pep
GHCAGTGPDWPGIPRPTASDGRQRHAFIGLGFRERPEAYDFQAALHDHMKYPSVHQTCYESHNLQNYVFFRV

SEQ ID NO: 253431 - protein, 111 aa, Zea mays
  Clone ID: MRT4577_162710C.1.pep
VAFKIQILFRFLSTMMVEDSVFISEKFGDPNRLIPSWGSPTTRHMLALTLLHMSTIPMDPPPHEQVRATREHTTPFRRSFARRVRAPLAISPLPGARFSFHVWISRVQAYP

SEQ ID NO: 253432 - protein, 35 aa, Zea mays
  Clone ID: MRT4577_162711C.1.pep
PPATGTGRGGAYKNTGGLTTTHGQDSRHTSTSQVQ

SEQ ID NO: 253433 - protein, 81 aa, Zea mays
  Clone ID: MRT4577_162712C.1.pep
ELVKQQRGDGESPLQPKTIRARLSDETGAHRKRSNVLVIRALLQGSMGGGEGAAGCHLWRDGDVLCSSEQEGTSTMLPARG

SEQ ID NO: 253434 - protein, 55 aa, Zea mays
  Clone ID: MRT4577_162713C.1.pep
QSSIKKLKMEYTYIRRPSPPALSTIHNRTNLQPGINTTLVLLNDDHLVSISPPGI

SEQ ID NO: 253435 - protein, 593 aa, Zea mays
  unsure (1)..(593): unsure at all Xaa locations
  Clone ID: MRT4577_162714C.1.pep
MMQSRDVDKYLNKADNINHVLMNSGDISKIGGHCLHGTHGLGTRLDSDAQSSSPGENMNNKIRRPIEICTFDAQGRCKKGKSCISLHEREGFGSAKTGLLAPAGSGNHRGSEGGSQVQHISDLKVHQFKDSEGLSKDEMCRNLIYAFGKDNQMSVHLAGKHSSPIPGVSQRMPASIGHSLAQNPLVHEKNNRFMGHHIDVAAENYLDAGGTYPRLDGGIFQFDIDKESSVSDSHVSRTYLSDYPYKSFGLSISSDPLQLSEKLSAYGGVTNTIPNIHQKEHHSCHASYSSHSLTGSRNPCFATSEHTFGSPSLLATSHLGIQSHHLFTSDIEKADLHRCLDVGKGYGTSSSGPAYSASGKPEPSMTPVGPHSPIKNEVWETSVPFVPSFSFPDSTTASESQYDPFVDYVEPPKVGNTNNLKPSTISCNITSQHTDQYAVTDKSLNCNDKLTRNITAKGSNEPAYFIAPDRGCSSSLDDTIKVKACDRKKDAVDYNEKTRDFRFHLAEHIKELVKPIWKKGNLSKDAHXNWLVXKSVEKVVDSIEPNQVPTTEELITKYIATCGPKIEKLVKAYVDRHSTCHPTIKYSSSEMGA

SEQ ID NO: 253436 - protein, 128 aa, Zea mays
  Clone ID: MRT4577_162715C.1.pep
LTYHIMLRLDFSKNEDGHQFEYIIEHLRSVELNLLLHLFLQEFYSWEQQRWLGELGWATMGLVLGEGDGRGAIHGNKRGGWRPYHGQQGGRWTEGRGELQGGASSCSREGRPWQEGEGAMGEMSREQG

SEQ ID NO: 253437 - protein, 78 aa, Zea mays
  Clone ID: MRT4577_162716C.1.pep
RGESTFFFFLLGGHPFKLLGGPSRPTEEVFGWWARPSPNAESEDLMSLNRGGGPWLSLYVAKFECDKPKTIRRFSLNF

SEQ ID NO: 253438 - protein, 89 aa, Zea mays
  Clone ID: MRT4577_162717C.1.pep
KKIVQSGSFKREGSDSVDVGSSKQKQTFHLSRDEKPGVLKPIKEQNLTERRASFSLKKPNIPSSPRSDSWNESGERKNDQHISKSGTNI

SEQ ID NO: 253439 - protein, 79 aa, Zea mays
  Clone ID: MRT4577_162718C.1.pep
SSLHIREVTGSESINTQLRISTHMPYVALNLCICQLTHGFLKTRPGPRQLRAQYPTIQPLVRWIHDTLAISPLPLRAGL

SEQ ID NO: 253440 - protein, 68 aa, Zea mays
  Clone ID: MRT4577_162719C.1.pep
CSQSPQSVLRRSLWRVCSGRCSCGGFRQIHIRGKTVHQVHSYRQQSNHITRAARAIRSHRSSSHRRRE

SEQ ID NO: 253441 - protein, 94 aa, Zea mays
  Clone ID: MRT4577_16271C.1.pep
SVGPTGFKLFPSLLGPGWLCEIFVWSGFCPGLRLFLYFTRLLYIAIGGGLVGFPLGWQGWRAGPGRSGLGRSGRAFWFPGGGVRGLSPFFGGLF

SEQ ID NO: 253442 - protein, 151 aa, Zea mays
  Clone ID: MRT4577_162720C.1.pep
MLGFSMENKRRRGAMASCCRKENRHPWKKRSAAMADEGPARLAALGTREQPLGSSSTSRRGQRRHGEEDEGRRRAHQQEGKEQGGRRWGCASMGGVGVGHGRWWSALACCRRGFAQGGIQEELPWGGEQMATSCRWRSTGGAGEGSSQERL

SEQ ID NO: 253443 - protein, 155 aa, Zea mays
  Clone ID: MRT4577_162721C.1.pep
MEREPAVEEEDDEEEEVACECCGFTEECTAPYIAGVRARFGGRWICGLCGDAVGEELGRAGTPPISPAEALDRHARACRGASAPPSPAGSPDGLIAALRLLLRRRLGSPPASRKARSTPSSPTRDAADPGVSALAAGASRSSLARTGSCFAALVE

SEQ ID NO: 253444 - protein, 63 aa, Zea mays
  Clone ID: MRT4577_162722C.1.pep
DRYRVPITSLTTTPHPNLKNSLYNSHIKNNFDIPSTKDNPYFSTHLSAHNAQKETHNTHYLQF

SEQ ID NO: 253445 - protein, 246 aa, Zea mays
  Clone ID: MRT4577_162723C.1.pep
HWDPRGRPGPSSPSLPQALAELPHAILFPGVHPCGNHHLGAPLPAPPMAAPPGSLPARPLSRGWCRPFLQHVVLPPLAPSSPTPEMPLLLHQPLLLLNASADHHLPWRRSSPISSCQGAVAELALPQPWTPSGHPSPISPRPHPLAAAPSYSWWLSLLPWMLAVLPSLVLTSAPCVGWPVAPALDYPHARPRYNSDSHETPSCRALDVFDRISQQAVPSPFLQQVDAPSPSLVPMADHLCCSHGDF

SEQ ID NO: 253446 - protein, 136 aa, Zea mays
  Clone ID: MRT4577_162724C.1.pep
QPVPRPTRVYVPACCRDPCTGSSSSLLGTQPKQAGDFVRWWRPAPKWWILGGLSALLAAAACAGRWRRNNSCVLLAQRAKAKLMATKKLWRTGKRERDHSGGGGGGSNSNSTQLKNPRAAGGSGKKGRDETRGWVL

SEQ ID NO: 253447 - protein, 59 aa, Zea mays
  Clone ID: MRT4577_162725C.1.pep
QDDLGACFGVLWIVLRLRSAATLQVFWCLLIKATIYINSVRKCLKKKKKKKKKKKREGG

SEQ ID NO: 253448 - protein, 41 aa, Zea mays
  Clone ID: MRT4577_162726C.1.pep
VVLKTPCPFKKKKKKKKKKKKKKKKKKKKKKKKKKKKPPPP

SEQ ID NO: 253449 - protein, 118 aa, Zea mays
  unsure (1)..(118): unsure at all Xaa locations
  Clone ID: MRT4577_162727C.1.pep
MFNMAPLLTXLFAFTRARIISVHEKRRLSEHNNNCSPKKTDEAAPAXFLAGVGKGREYNTLEMKHRELXSGKTIDXGKKMRRALALXDNIRRQALQLKNKARTXSTTEPSVSETQMPG

SEQ ID NO: 253450 - protein, 40 aa, Zea mays
  Clone ID: MRT4577_162728C.1.pep
PRVRGRVGVRLTCPVTHAISAVGFSLAMHFVLERILINYQ

SEQ ID NO: 253451 - protein, 89 aa, Zea mays
  Clone ID: MRT4577_162729C.1.pep
VRRNKRRQQTHIRRGGRKKTSRLTTKQIGAPTKKGTADRREHVDGRRQARQRGGRREQAQRGRSARLQGRARGHLADQERTLELLHPQV

SEQ ID NO: 253452 - protein, 51 aa, Zea mays
  Clone ID: MRT4577_16272C.1.pep
NTAYPACSFTGYWGNQFIVHSVIANWSTDHGPPDFQEPLSREPCFPTKNTF

SEQ ID NO: 253453 - protein, 119 aa, Zea mays
  Clone ID: MRT4577_162730C.1.pep
RNFKLKLVIIANTCPPLGKSEIEDYAMRAKVPVPPSHGKNVALGTPWGKNFGVCSPTIIDPGDSKNTKTTPGDQKKSPPRRGIFRHLFFCLVKHPPPPSKLSYSEHCLKLNFCPGVLPL

SEQ ID NO: 253454 - protein, 109 aa, Zea mays
  Clone ID: MRT4577_162731C.1.pep
KPWSSLGRPPRPAPGVLRGPPRGGGGIATPANGAPTGGVPFATAIKPAPPARGWGPKVKRTPPPRGIKKKTGFKKNPVNCTPHYRSKVAPGVHVHLCKGLPVMSVSCRN

SEQ ID NO: 253455 - protein, 495 aa, Zea mays
  Clone ID: MRT4577_162732C.1.pep
MAPALTSNPPSFRPLTSPLRRRAATVPCRVGKPGKDSSAADDATGPNKRPNLFADFGNAKSLIQAFPSQSLFAGGGRGRKDPQTVFVAGATGQAGVRIAQTLLRQGFAVRAGVPDLASAQELARLAAAYRLISPAEARRLNAVEAGFGDPDAIAKSIGPAAKVVVTVGSAEKGPEGGGVTTDDALRVVRAADLASVAHVVVVYDEGAASGGLGGGGSTYNVLDGFTSFFSNLFSREQALTLSQFLAKVAETDVRYTLVKASLTDDYTPESYYAQLVLTKEGVSPSDTGKVSRSQIAALVADVFSNVAVAENKVVEVSTSSSATAKNIAEAFTAIPEDRRRTEYLEAAAKAQAEEETLASERANKKAEAAASKSEADTKTTPSEEAAATPSAVNGAQASLENLLSRAKVISADFSWEKFSTQFADVTTPLTSSLEKEPNKAQIATVRGQEKAKKLAPRIAVVKPAAQKAKQPDPKPEVRALFGGLFKQETVYVDDD

SEQ ID NO: 253456 - protein, 89 aa, Zea mays
  Clone ID: MRT4577_162733C.1.pep
PVAVTSARLGSSSITKISGIYLALHLIRPFLAFLPEVPSSDLKIPFREKTLSTVICFLILVVCNPLLLYNIYSSTESDPIYTMPLILIL

SEQ ID NO: 253457 - protein, 50 aa, Zea mays
  Clone ID: MRT4577_162734C.1.pep
KRPPHYYFYFIKLNILIFLLFCIYLYLILLYYLIFNYFFLFFLLLVVTRR

SEQ ID NO: 253458 - protein, 155 aa, Zea mays
  unsure (1)..(155): unsure at all Xaa locations
  Clone ID: MRT4577_162735C.1.pep
TAGCYISTRVKLTTIARVTDGLPLYEGLDDSRDLKDDDLYKQQAKLXNKNLNRGQHEPSRMPIETGPYRFHXDAYHMIYRLSTWMWGLHQYLEDLKNESEKGNGRQRETAARPYAFIKVDAFIQKTKKLYLDTRTQRNLAKLNDELYEAHQIMTR

SEQ ID NO: 253459 - protein, 68 aa, Zea mays
  Clone ID: MRT4577_162736C.1.pep
AFRCLAKFPTLHPNITLGWENLIRVLGMENRNFTIWQPDFLSHNSTWSRVRPPVQNPSTFASNVSHIG

SEQ ID NO: 253460 - protein, 119 aa, Zea mays
  Clone ID: MRT4577_162737C.1.pep
IAKGFMLLQFADRRTYILAHRYRTTPTTRTQSMTWHGTPANDHSQTERNVQTTKGVHTCDTPDTSYSLTIPYNPHTWGHVGALTYIISSHCAHPGYLLELPMNAGAANSFMAPPTEFCP

SEQ ID NO: 253461 - protein, 101 aa, Zea mays
  unsure (1)..(101): unsure at all Xaa locations
  Clone ID: MRT4577_162738C.1.pep
NKKDVFTANSALDESLHGGSKEGGKGELTLNVTVSYSGGERARLVMRAKGNYRMELNASLYDDMSVNDMANKGVTFAXLNRIGESTSTLDTFGLMFKDTAT

SEQ ID NO: 253462 - protein, 48 aa, Zea mays
  Clone ID: MRT4577_16273C.1.pep
PAGTPFFRSVCFATLYPEGKTGSLFASRFLGLTTSRAPARSISTQQSV

SEQ ID NO: 253463 - protein, 69 aa, Zea mays
  Clone ID: MRT4577_162740C.1.pep
MAAISREGWAWGGSLHGLLGWAPWDMDEQEAVQSKEPKIEDAVGREASRSRASQQGRRQRIPARPASRV

SEQ ID NO: 253464 - protein, 49 aa, Zea mays
  Clone ID: MRT4577_162741C.1.pep
RLNFHYCLRFLASYRLSCWTRILVWYICYVYPFNQFVVLFRFGKNPAKK

SEQ ID NO: 253465 - protein, 287 aa, Zea mays
  unsure (1)..(287): unsure at all Xaa locations
  Clone ID: MRT4577_162742C.1.pep
MGEEKKTGKGGGGGGGDKKKDAGAGAAPQPIVLKVDLHCAGCANKVRKAIKHAPGVESVTPDMAAGKVVVTGPADAVQLKERIEARAKKPVQIVSAGAGSPKKDKEKKADGGEKNAAKEKGGGDAEKKKADKKXEAVMEERKMPTRRRAAAAAIRRPXEKGTGKPKEEEEEEEKPKEPXKEETVTLKIQLHCDGCMDRIKRRICKIKGVKDVAFDAAKDLVKVTGTMDAAVLPAYLREKLSRDVEVVAPGKKDGGGGGDKKGKGAGDGAEKKNKKKDGGAEGKNDRA

SEQ ID NO: 253466 - protein, 103 aa, Zea mays
  Clone ID: MRT4577_162743C.1.pep
GRGRAHQERGGHGRAPNRGSTRVVHGHGDGAGLRETMACWLQGDGQGMASTLLQERASWQGTAGGRPWNQGRERQGERDGGGDHQGTFGHQGEAAGAHGAMGR

SEQ ID NO: 253467 - protein, 216 aa, Zea mays
  Clone ID: MRT4577_162744C.1.pep
EAARRRPTRRRVPTSPRRRRRSPRRSFTSRLFKSGDPRLVTVCLLALQLNDGLFFLFFQETVTLKIRLHCDGCIERIKRRISKIKGEVFLGIRRSFIRIPRESSKGFESLFRGDLKIGPDNFVRPFHSIPGVKDVAFDAAKDLVKVTGTMDGAALPAYLREKLSRDVEVVAPGKKDGSGGGGDKKDKGAGDGGEKKKDGGGGGGGGAEEKKDKAGA

SEQ ID NO: 253468 - protein, 104 aa, Zea mays
  unsure (1)..(104): unsure at all Xaa locations
  Clone ID: MRT4577_162745C.1.pep
QNKIITWDNTKLVLLIDDHLVSISHSGTLSDHPSLGSFTSIILGSTRLLSFASRVTNHIMLRLDFSKNLDGHQFEHIIEHLRSVELNLLLHVIXQGFTPYRTXQ

SEQ ID NO: 253469 - protein, 134 aa, Zea mays
  unsure (1)..(134): unsure at all Xaa locations
  Clone ID: MRT4577_162746C.1.pep
TADNTRFLREMASQQFPQQGGRGYQQGPRETSYMDFSETRLPLFVKAEDPLEADEWLRVIEQKFGLLRCSETQKPLFAAQQLRGPANTWWXXNFVAVQPANHQITWEEFKVAFREHYIPEGVLHMKXEEFMKLG

SEQ ID NO: 253470 - protein, 109 aa, Zea mays
  Clone ID: MRT4577_162747C.1.pep
FVQAFRPAKKFFPKIVFRGFHRAREISYKRAGPCSRPLGDSPVDLKKSFLGKWGFCPQICKGFGFKNGHSVFFLTLFQTPSTPGLVPKKKKKTTTAGKNRKESHKKTTM

SEQ ID NO: 253471 - protein, 179 aa, Zea mays
  unsure (1)..(179): unsure at all Xaa locations
  Clone ID: MRT4577_162748C.1.pep
MSTSSRPVTPAPHGLIHPLPTSAPSNRISARDDSRKVLNDEDSYPERPGEPDCPYLLSSRCKFKSKCKFNHPKEMVNALGTRTDNEXRPSEPVCSFYAKTGKCKFGAVCKFNHPKLEDIKTSSLIAKETIYRATTDAAAHIGGTDDSVPAKTHAPIAPAEAHNAKGLPIRPVCIYQMVV

SEQ ID NO: 253472 - protein, 226 aa, Zea mays
  Clone ID: MRT4577_162749C.1.pep
QNKIITWDNTKLVLLIDDHLVSISHSGTLSDHPSLGSFTSIILGSTRLLSFASRVTNHIMLRLDFSKNEDGHQFEHIIEHLMSVELNLLLHLILQGFYSISHTSTHIKPHISRVLTRTSKTTKGFRDHHGSSRGGRPWEQRRGWGHPLAAERGGHCLLQGRASSYSREGRRPWQEGERARLGTIARGGWGGLERGPGRGCGWGRAWRKPGTAGEGSRSSAGRAWCV

SEQ ID NO: 253473 - protein, 63 aa, Zea mays
  Clone ID: MRT4577_16274C.1.pep
MTLGETASSYAGIILHEDGISVTADKISTLLETAQVQVDTYGPTLFAKLAEKKDLVDLIANAA

SEQ ID NO: 253474 - protein, 88 aa, Zea mays
  Clone ID: MRT4577_162750C.1.pep
AVDQMGWVDGRAFEYVHERTTDHCGNAEHPCIHDQPKVLLQELPLLKPVVGMPCELKADQHTHLKLLCQLLTDDICKAYRNVDDEGIQ

SEQ ID NO: 253475 - protein, 69 aa, Zea mays
  Clone ID: MRT4577_162751C.1.pep
LSQIFQIGSARPPSFDHGLLSLGSFPLDLNKRMYDYECCSLACYESRAFSSYRFRSGSVSPPAPLACIV

SEQ ID NO: 253476 - protein, 92 aa, Zea mays
  Clone ID: MRT4577_162752C.1.pep
HPFDRSAPHSKENEDTQQPVALTLAGLPRREDAEACAFYMRSGTCGFGARCKFDHPPRQRQLKKRRKYPVSGCGTMRIALLMLDAVTAMVGA

SEQ ID NO: 253477 - protein, 256 aa, Zea mays
  Clone ID: MRT4577_162753C.1.pep
CPHPHRAQDAVGFGLLHHFLPTPAIFLTAAPSPEDDAPFLLCRWPMLPLLLHPHLALQPWAPPTMVLASSSRSYLQRWLPSPPRGVFSVAAPCVITLASALDYSAMEVAAPSFPDLPPSVQSSASLLLSLPWTPPLPQLTPSSRHGARPCPNSVASVSPSLCWWLASHLPCVGRLPLRSRRWRSSLLQLVLMAMPLFPRSELAQLPSHLCSPLSVSVRAAARRGRPMSSTRTRCLMGGLNWSSLFSIRDPQVFAQR

SEQ ID NO: 253478 - protein, 43 aa, Zea mays
  unsure (1)..(43): unsure at all Xaa locations
  Clone ID: MRT4577_162754C.1.pep
XXLXKXGXXXGCGRXRMXVNLKTNXEHXLRSRLEGGXGWSLLV

SEQ ID NO: 253479 - protein, 91 aa, Zea mays
  Clone ID: MRT4577_162755C.1.pep
AKTHAPIAPAEAHNAKGLPIRPGEVDCSFYMKTGSCKYGSICRFNHPDRSVVDIAFMAPVQATLPFPATTKKTEEVSCIRMWYHANRTVNA

SEQ ID NO: 253480 - protein, 89 aa, Zea mays
  Clone ID: MRT4577_162756C.1.pep
PSSPWRLPPHAKPSLLMAAVPAPSYGACPQSSSPAALCPPPSSPSRVFPWCPGCQPLYLMPLLGSWHVRPAITQAQLVHGARNNSPLHP

SEQ ID NO: 253481 - protein, 326 aa, Zea mays
  unsure (1)..(326): unsure at all Xaa locations
  Clone ID: MRT4577_162757C.1.pep
SSRAAATAGGGETSVLDLPELAMDCILDQRVRAELRSMAAVCRXMRERCRGDHLWERHMTNRWGRVLGRAARDAGRTHLASASESRAAGGGGGGKRRRWLAALSCVCPVVSWMRPRADGGKSSAPVLDDSIMSWYLSVESGKFWFPAQVYNREHGHVGFMMSCYDAALSYDFHTDTFRARYPPHGRRTVVLEDGVQWDRVRAPPVDTLAHDLHTSDCLHELRPGDHIEIQWRRNKEFPYGWWYGVVGHLESCDGSEHFCRCHLSDTVVLEFNQYTPGSRWRQALVKRKEHREEGNEGDGFYGGIRKLRGNDDISKWRQLWPTDVLE

SEQ ID NO: 253482 - protein, 131 aa, Zea mays
  Clone ID: MRT4577_162758C.1.pep
MARVACTLRGKRLEGGVLYSRKHGGHHGEGNVYQPGQRLEGGVLYSRKHGGHHGEGNVYQPGQWLDGGVLCSRLAGTRSGLEKPVGELTYARVKCYICRVVGDPQLGINRFGSPNFSDMKTGSSTLIVDNK

SEQ ID NO: 253483 - protein, 80 aa, Zea mays
  Clone ID: MRT4577_162759C.1.pep
NAGPDNIVHQQKVLTRKPRDHHYKLGRVWANQPLCQTHETDTNRLDHLLDFGARATVSNRRVLLHSAGTFNVGTPARVQF

SEQ ID NO: 253484 - protein, 50 aa, Zea mays
  Clone ID: MRT4577_16275C.1.pep
SSAQLLWVRPSVSHCRLHYDPGLCALSRSWVRLINLRPYQQERDVLVLLV

SEQ ID NO: 253485 - protein, 224 aa, Zea mays
  Clone ID: MRT4577_162760C.1.pep
MEEDYVFKIVVVGDSAVGKTQLLGRFTRDEFFLDSKSTIGIEFQTRTVDIARHRVKAQIWDTAGQERYRAVTSAYYRGALGAMLVYDVTSRRTFDHATRWVAELRAHADKSIVVMLVGNKADLARDARRRAVDTDEAAAFAEEQGLFFSEASALSGDNVERAFLTLLREIHAIVSRKTLDAAAETGGTTDVLALKGTKLSLADEISIMETSALRTASGGSCSCT

SEQ ID NO: 253486 - protein, 130 aa, Zea mays
  unsure (1)..(130): unsure at all Xaa locations
  Clone ID: MRT4577_162761C.1.pep
TIVVLSRLTLLELVIQIMLVGDVHLRTDNCNFQXQLLVSNATSDGMYITNLGEACDXLSLLPRGIVALXNPGHNIVLHVTDYGTMACTKSHDENVCHAIHGGHSVGTSTNHFYTYASDAFDLIHCDPRTE

SEQ ID NO: 253487 - protein, 61 aa, Zea mays
  Clone ID: MRT4577_162762C.1.pep
IVRTRTCLKATRVSSTKHIWLPFSLIWSADSSHRPTPRILPVQVIHRSFKECPLASSDAWS

SEQ ID NO: 253488 - protein, 197 aa, Zea mays
  Clone ID: MRT4577_162763C.1.pep
LMDLLSIGSSPSQNGTPVTDFGHPGQESKPVPGVPEAVDLLGSLSPAESKPTPVVPKDMDLLDGLSSNTSISGHENTTHPSITAFQSATLKITFDFKMKLGNPRETTIHATFTNLTSSTFTDFIFQAAVPKFIQLRLDPASGNTVPANGSGSVTQGLNITNNQQGQKPLAMRIRMSYKVNGEDRLEQGQVSNFPSGL

SEQ ID NO: 253489 - protein, 60 aa, Zea mays
  Clone ID: MRT4577_162764C.1.pep
AIIIFSSIHSGVLWYACHMHIYYGQVLRVIRLMHGVSIHVCIQILARMHASCGCFADQTS

SEQ ID NO: 253490 - protein, 99 aa, Zea mays
  unsure (1)..(99): unsure at all Xaa locations
  Clone ID: MRT4577_162765C.1.pep
FNQGAPTTHGGHFKSAYGXDPQKPATATEANKEDPTNXQPPDMPDKQTGLLPGDAHDSTPPGAEPGEDSSDAPASSTLKKGRDANATTDEACPKKDRTT

SEQ ID NO: 253491 - protein, 70 aa, Zea mays
  Clone ID: MRT4577_162766C.1.pep
MSRKLSASIDAFILEEGVRQPDRHQLLRLPAPHRSWTPSSSSFEDSRSSLWSRSVTRSLCLRLRHKPSRS

SEQ ID NO: 253492 - protein, 381 aa, Zea mays
  Clone ID: MRT4577_162767C.1.pep
IIMSSICPFAGATTGGGVCPVKSDKSNTGVCPAKSDKSISGVCPVTGKDHGSKLKESGDHGEEKGTDPRVVPAKCPFGYDSNTFKLGPLSCIVCQALLHESSKCKPCAHKFCKACISRFKDCPLCGADIEGIEPDAELQALVDRFIDGHARIKRSHAAGDVEAADGKNKVIYEDVSMERGAFLVQQAMRAFRARNIESAKSRLTMCADDIREELKSSEDNLDLCSQLGAVLGMLGDCCRTLGDVPAAITYYEESAEFLSKPPAKDLELVHTLSVSLNKIGDLRYYDGDLQSARNYYARSLDVRRNAVKEHSAVASQVIDLATSLAKVADVDRNLGNESTAVEGFEEAIRCLEKLKLDSEQTSLEQRRLSVLDFLHNQLADK

SEQ ID NO: 253493 - protein, 69 aa, Zea mays
  unsure (1)..(69): unsure at all Xaa locations
  Clone ID: MRT4577_162768C.1.pep
VPTINGSLSGRLKELFPQPLYQKVGLGLFCLSYWPAKLLQIWPSHSCSPPTALTIIFILEYKLLPNTIX

SEQ ID NO: 253494 - protein, 198 aa, Zea mays
  unsure (1)..(198): unsure at all Xaa locations
  Clone ID: MRT4577_162769C.1.pep
IIMSSICPFAGATTGGGVCPVKSDKSNTGVCPAKSDKSISGVCPVTGKDHGSKLKESGDHGEEKGTDPRVVPAKCPFGYDSNTFKLGPLSCIVCQALLHESSKCKPCAHKFCKACISRFKDCPLCGADIEGIEPDAELQALVDRFIDGHARIKRSHAAGDVEAADGKNKVIYEDVSWERGVFLVQQAXXRAFRARNIE

SEQ ID NO: 253495 - protein, 94 aa, Zea mays
  unsure (1)..(94): unsure at all Xaa locations
  Clone ID: MRT4577_16276C.1.pep
GAQXXEAXREGRDRRCLFYVHDNGXCXGFFFFFRPXTGRERGEAEGPPPRALGLPLPRCQRLQDVRLECRCADMRRVVRRCAVXLPIPFGDGLV

SEQ ID NO: 253496 - protein, 154 aa, Zea mays
  unsure (1)..(154): unsure at all Xaa locations
  Clone ID: MRT4577_162770C.1.pep
IIMSSICPFAGATTGGGVCPVKSDKSNTGVCPAKSDKSISGVCPVTGKDHGSKLKESGDHGEEKGTDPRVVPAKCPFGYDSNTFKLGPLSCIVCQALLHESSKCKPCAHKFCKACISRFKDCPLCGADIEGIEPDAELKXLXDRXIDGHARISD

SEQ ID NO: 253497 - protein, 65 aa, Zea mays
  Clone ID: MRT4577_162771C.1.pep
VIDLATSLAKVADVDRNLGNESTAVEGFEEAIRCLEKLKLDSEQTTLEQRRLSVLDFLHNQLADK

SEQ ID NO: 253498 - protein, 104 aa, Zea mays
  unsure (1)..(104): unsure at all Xaa locations
  Clone ID: MRT4577_162772C.1.pep
CCTLTVPDRPLGFLGMFRGAHTVRDXSNAGCKLAELFAINDTPLYHDRLVKSYMRIGFKAPHEADRSSITDLGHILVWGGRGTKMDAAIEEDTIEWGDTFRLQD

SEQ ID NO: 253499 - protein, 83 aa, Zea mays
  Clone ID: MRT4577_162773C.1.pep
AASRGQFPGGYECLLLQVPRHVRLGVHLVAEALWSRLASQRSQGESVGPPWHWPWSQASELAARGLRLLSSEFELRRVIRSTI

SEQ ID NO: 253500 - protein, 42 aa, Zea mays
  Clone ID: MRT4577_162774C.1.pep
MALQTIHSSPDLLPFSQLAGVSPATLLTQPQLLPFYQHAAPK

SEQ ID NO: 253501 - protein, 105 aa, Zea mays
  Clone ID: MRT4577_162775C.1.pep
HSQGPPTKKTRKTKLKQMQLLGGGITKCGPAKAGGKLYSQSAACLLLLRLRRRAATYSSCVSRCCLPALGEQKIPPSVLFFHPVSVCTFSLGCCWGRGTFYYIML

SEQ ID NO: 253502 - protein, 100 aa, Zea mays
  Clone ID: MRT4577_162776C.1.pep
LDYLIFIKEVNWARRSPGLESCPDVADRQIRVGIHTVSQVMMIVDVPKLMNILPNFVLMIRKSINREEQSLPSVTFISMKDSVFRDSMNTIRFLPSLDSK

SEQ ID NO: 253503 - protein, 58 aa, Zea mays
  Clone ID: MRT4577_162777C.1.pep
AAKVIPRLAYLCILFVRARPGITHVSNESIIPGPVWSAGQEQIRVHSPHPVIDSMACG

SEQ ID NO: 253504 - protein, 93 aa, Zea mays
  Clone ID: MRT4577_162778C.1.pep
AFGGNTQEWSPVRGLDDLADVIVGTGETLVAGAERRRAPLIGPGRIRSGGRRRRLSKWISLFGWLLSSGSQSYACLDRRERRISGGKERRREK

SEQ ID NO: 253505 - protein, 271 aa, Zea mays
  Clone ID: MRT4577_162779C.1.pep
ALQFIWCPLWSTFLCARPATLLSSSLLCQSPCLWSFFSARLLARLAAQLPGAVPSPSPSPSLSPCSSPIAPPQPVTLSHGVHRAGPPCSLLPRGRPATSYLSARLLPRHAVLQLGFPLHGAPEHSGSLLELAQLPAAVTSAQRPAPWVLALLAAILLDPLHGARSSRVSSSTALSSASNWVLLCPGRRSQSLVDRAPLCLLVVAPSCSPSFDMPPRPRLVSVARLPVSFLAMSSSLPVLSNSPCGWNLRARCHRHHGRLPVRCVPRLQPTH

SEQ ID NO: 253506 - protein, 47 aa, Zea mays
  Clone ID: MRT4577_16277C.1.pep
ANLVTSLVLVWVLFMNDILDVIQWKLVLSFSALRLVDAEQLVSCPLS

SEQ ID NO: 253507 - protein, 100 aa, Zea mays
  unsure (1)..(100): unsure at all Xaa locations
  Clone ID: MRT4577_162780C.1.pep
MLASPNPVATTVMPKPVRSPLDPSQIQYASKKQQQAVAEIVEQLTVDASTLKGIKDHFIQXMRKGLAKDGETIAMVPSYVLDRLNGTVTGSYLTLDVGGT

SEQ ID NO: 253508 - protein, 53 aa, Zea mays
  Clone ID: MRT4577_162781C.1.pep
TLRKEKQTFFTNILFFPPNTFVNPKKFVYYLLGQNLFLFRRLIKNCRLKWATG

SEQ ID NO: 253509 - protein, 91 aa, Zea mays
  Clone ID: MRT4577_162782C.1.pep
VHDLAACDKRVRVVGRQLDNTGQPAQHDLPSRNLPRSQGSSFLRAVRAQSALSGARSGPGTLLFLVQEPEQGFNYPRPALVCRGHNSKRRP

SEQ ID NO: 253510 - protein, 127 aa, Zea mays
  unsure (1)..(127): unsure at all Xaa locations
  Clone ID: MRT4577_162783C.1.pep
KPGTPSGPAREFRAQYPRPPTRPRFMVRFSKEQRTKNWXHRREDIKANKIXAIHILRKNNLALRPETSADIKNGRNSTXNPFACMGISXNRPITGGMKPGKPRSRRMPSMPPLDNDNWKXARSKAMP

SEQ ID NO: 253511 - protein, 186 aa, Zea mays
  unsure (1)..(186): unsure at all Xaa locations
  Clone ID: MRT4577_162784C.1.pep
MEGVMTTRSKHRCHEEDQEMTMVELRRGPWTLEEDNLLMNYTACHGEGRWNLLARCSGTYDPFLCGRINLSASSXCCVCVCMLELGLKRTGKSCRLRWLNYLKPDIKRGNLAPEEQLLILELHSKWGNRWSRIAQHLPGRTDNEIKNYWRTRVQKQARQLRVDANSAVFRDAVRXYWMPRLLEKTM

SEQ ID NO: 253512 - protein, 362 aa, Zea mays
  unsure (1)..(362): unsure at all Xaa locations
  Clone ID: MRT4577_162785C.1.pep
MSQRKGAMAAAVTASKHREDQEAMMVELRRGPWTLEEDNLLMNYIACHGEGRWNLLARCSGLKRTGKSCRLRWLNYLKPDIKRGNLTPEEQLLILELHSKWGNRWSRIAQHLPGRTGHQIKNYWRTRVQKQARQLRVDANSAVFRDAVRCYWMPRLLEKMAAHHHGDGELPPPLHPSHNIAGTASSRSPPAHXSQQEDPSSSAPAASGHYXQQVDPSPSTSTTSGSTTSAALPPVPCFSESELRWVVDQYGAAYGYTDDLDLDGGAGVVDDDSAAAAALDSLGLDGLDLGPADGGVYSDATLLDYLNATCAGGTTVMTMMGGVHGAAGGGDGHYGPAPWRTDELGQAARKLGDPQHQWRGGI

SEQ ID NO: 253513 - protein, 77 aa, Zea mays
  Clone ID: MRT4577_162786C.1.pep
DAAYEHQSGRGDNSSLEPQRVFSRGGPHHGIGAAVFVLYASHQSPAQLRSRARLTPADALQILLHARLAHQSVLPAH

SEQ ID NO: 253514 - protein, 134 aa, Zea mays
  Clone ID: MRT4577_162787C.1.pep
PPPPRWAPWSPRLVQAVVFGCIPVIIADDIVLPFADAIPWEEIAVFVPEDDVLRLDTILTSIPMDEILRKQRLLANPSMKQAMLFPQPAEPRDAFHQVLNGLARKLPHAKDVFLKPGQKVLNWTEGTQDDLKPW

SEQ ID NO: 253515 - protein, 130 aa, Zea mays
  unsure (1)..(130): unsure at all Xaa locations
  Clone ID: MRT4577_162788C.1.pep
PRVRKKKKALSDGPVHGWTTRCVAYADGAGTHHGVWSIITRSMFQSMLIHRGYRWCQGALYTYDAFIEAVSKFPGFGTTGDXQTRRRELDDFIVQKFHETTSGWATAPDGPFAWGYLPVKELKQTDPPYY

SEQ ID NO: 253516 - protein, 48 aa, Zea mays
  Clone ID: MRT4577_162789C.1.pep
WRKENRTRASRGEKAAAAPVRRCQSCGRRARVCDCLFGGLLTRSPSFS

SEQ ID NO: 253517 - protein, 44 aa, Zea mays
  Clone ID: MRT4577_16278C.1.pep
PVALHTIRIPFFYLTFYNLLLGNYWGSINQTCDHSLNYSQYVLH

SEQ ID NO: 253518 - protein, 125 aa, Zea mays
  unsure (1)..(125): unsure at all Xaa locations
  Clone ID: MRT4577_162790C.1.pep
GAPGGTRPGXASARXGAGPXXXTRPRXTGRPXRPTRKPGAXGGPPXASHXTAGGGRXXPRPPRGPRRARSPRTPRRPRRPPPGPGGARGRGXTARXXPAPTARGRRRGAGPRPPAGXPRAPXAPP

SEQ ID NO: 253519 - protein, 70 aa, Zea mays
  Clone ID: MRT4577_162791C.1.pep
VCSVCGCPMSTLVEIIEIACCCTWVVLGTVVLGAHWSRLSVPSTDTYALFRKGVYAPPGVPSGTVTEAQL

SEQ ID NO: 253520 - protein, 74 aa, Zea mays
  Clone ID: MRT4577_162792C.1.pep
AAASTDGDEQDPPHSLLLPLHIHLHLCASAISDQMIVRRLTRHRRGKRWRYPREAHSLNPPIKNRSQKEESQVR

SEQ ID NO: 253521 - protein, 149 aa, Zea mays
  unsure (1)..(149): unsure at all Xaa locations
  Clone ID: MRT4577_162793C.1.pep
PASGRLQSSALRKLCIKACPVSDAGMNKLAEGCPRLVKVKVKKCRRVTSECAEHLRASRNGALAVNFDTPGGAGELQDGRSVDDSGALDNAXVMFCPRIWMIXGPDLSSGSSGRPSRWKALMGALMLRSFSVSIFQRQPRGACSTSHES

SEQ ID NO: 253522 - protein, 131 aa, Zea mays
  Clone ID: MRT4577_162794C.1.pep
SRPAWGFVHMTSHSRLDPDELSPVKIYLPCDTNSNRARHVGLRRARASSYGRPPFPIPALILLNMSLAENNLLYEMVPSKRELLLPIYPWRQMIPVAAPAQVPPLRLPCHPSEPRHSLPLQDDCNHPRLRP

SEQ ID NO: 253523 - protein, 150 aa, Zea mays
  Clone ID: MRT4577_162795C.1.pep
GKKNCGPGAQSASPLSRGVSFFLLAAGVSGFPTGQWAVGPSRLLCVCLPLRGPRLYALGFRFVCCLELLPVSPFPRVSPLSLLAPSSLPPRYRGTWSAPGPRSPVPGSPPASAFVYFPSPPPNGGPRPFTGFRFSLGPAGCPVFCGPWSV

SEQ ID NO: 253524 - protein, 43 aa, Zea mays
  Clone ID: MRT4577_162796C.1.pep
PHVMTNLGEKLTDEDVDEMIREADIDGDGQVNYEEFVQMMTAK

SEQ ID NO: 253525 - protein, 71 aa, Zea mays
  Clone ID: MRT4577_162797C.1.pep
NLFRVEAQGPALMGHHFCFFMKINICRRLSKRTGAGQEYEGGGKKKTTPQLKPFMKRMSQRYTCFSDKKPT

SEQ ID NO: 253526 - protein, 144 aa, Zea mays
  unsure (1)..(144): unsure at all Xaa locations
  Clone ID: MRT4577_162798C.1.pep
QGFPSHKRRQPTASEPKRGDTTEEGRRRTHANASLEPQERPPHTPQKPTKSRNERDNKLGGQTATPKTSKQEKTSQTRNRQMXRGARPTPHQKTXXXXXXXPPPHQKXXXXXKNRKNKAARPXKKTKGRRAQERAAQXAGXAAK

SEQ ID NO: 253527 - protein, 34 aa, Zea mays
  Clone ID: MRT4577_162799C.1.pep
CRTRDLRVLTFPISRFTATQNGDVRDILVINLHG

SEQ ID NO: 253528 - protein, 70 aa, Zea mays
  Clone ID: MRT4577_16279C.1.pep
MAGGNLFGRALSYVVNELLVEGLANNRAFQRFAVKTNRTLESLSSKAKEVREELSEQLKEARGQKDHFKQ

SEQ ID NO: 253529 - protein, 54 aa, Zea mays
  Clone ID: MRT4577_1627C.1.pep
SYSWGHLGTHARRCLCFTVGALAVGIDKAARARHGHVWGKDKPQRIRIHFHRLQ

SEQ ID NO: 253530 - protein, 117 aa, Zea mays
  Clone ID: MRT4577_162800C.1.pep
RKKKTKKPFLNKKKKKKKGENIKKSKRTKKNKKVVPSIHPILTSPSIQLLSFSISTPKFTSLPIFLQLIDLQNLSFTQLNCLSQNPPSTTCLNTQNARTDHPSQQFPTHNGQWYNPF

SEQ ID NO: 253531 - protein, 392 aa, Zea mays
  Clone ID: MRT4577_162801C.1.pep
MLLRMRNKRRRYIACAAAVIGMFHYETYMNKASYRIPAQSGYAWVMQTLGNRTSCYNMFRMSRNVFDKLHSVLVECYGLTSTRRMSSLEALGLFLWICGAPQSLRHAEDRFCRSLETCSRKFDKVLNSVNKLAADIIRPVDPKFTCVHPRLQSPRFSPFFDNCIGAIDGTHIPVVVPTTKVVQHTGRHGYTSQNVMAVCDFDMRFTFVVAGWPGSVHDMRVFKDAIGKYGDRFPHPPEGKFYLVDSGYPNRIGYLAPYKGTKYHLPEFRQGPMPRGRKENFNYAHSSLRNVIERSFGVLKMKWRTLLDLPRYPMAKQSRIIIGCMALHNFIRGSFLGDKDFELCDHDENYVPEVGESSTQEQEQVAGSVQGEEDRNMNQFRDWIADGLFNKL

SEQ ID NO: 253532 - protein, 73 aa, Zea mays
  Clone ID: MRT4577_162802C.1.pep
QHWPSPNHPRGSSRNCCPNHLPASFHWCRQPRRHWLRRWPCWSPRPRCLHFVSGEFISHLGHDARFLFDRTTS

SEQ ID NO: 253533 - protein, 111 aa, Zea mays
  unsure (1)..(111): unsure at all Xaa locations
  Clone ID: MRT4577_162803C.1.pep
EEPXPPPGAPFALFLSKKGWKLDLHLAPLFFFSPPLGPLFGLGFGFGKPVLGLLTRPVVPRFGGTRFFFFFFGPPNLFSLGWGNPVGFCCPSLFRGWGLPPFWCAGFLSLV

SEQ ID NO: 253534 - protein, 292 aa, Zea mays
  Clone ID: MRT4577_162804C.1.pep
MEAIVGVRAPPRGRAWAALEKPPRAACCARVPTARLAVAADRPRRLVLLGADTRRAADPALRCAAQSAGTGKVHYSADDALILQQKAQDVLPYLDGRCVYLVGMMGSGKTTVGKILSEVLGYSFFDSDKLVEKAVGISSVAEIFQLHSETFFRDNESEVLRDLSSMHRLVVATGGGAVIRPINWSYMKKGLTVWLDVPLDALARRIAAVGTASRPLLHQESGDPYAKAYAKLTSLFEQRMDSYANADARVSLEHIALKQGHNDVTILTPSTIAIEALLKMESFLTEKTMVRN

SEQ ID NO: 253535 - protein, 47 aa, Zea mays
  Clone ID: MRT4577_162805C.1.pep
RCHALFFLALFSTMVLHVCLYFPTVRLTSQQKHMRDMIRSMSIPGTH

SEQ ID NO: 253536 - protein, 211 aa, Zea mays
  Clone ID: MRT4577_162806C.1.pep
KTLPIPWSIRFRIAADIATGLLFLHQAKPEPLVHRDLKPANILLDHNFVSKISDVGLARLVPQSAADVTQYRMTSTAGTFCYIDPEYQQTGMLTTKSDVYSLGIMLLQIITARSPMGLTHHVENAIERGAFQEILDPTVTDWPVEEALEFAKLALRCAELRKKDRPDLGKEILPELNRLRNLGHEYETSQVSCASTNCSSSAPYSFNNDDI

SEQ ID NO: 253537 - protein, 97 aa, Zea mays
  unsure (1)..(97): unsure at all Xaa locations
  Clone ID: MRT4577_162807C.1.pep
MVISIDLNSVQGVLSGVSRASGWQHLASVTTLEPLDIVGMSMAILFAFELDLRIRGLCTGLICGLKSQACXLLVVTVRVDWSKLPDAMKHEKASYVA

SEQ ID NO: 253538 - protein, 190 aa, Zea mays
  unsure (1)..(190): unsure at all Xaa locations
  Clone ID: MRT4577_162808C.1.pep
ARLPSPPRASDASPLRTPCHIPPARPXPVSAXTPHPPLHAPQYSSXPTPSMPASLDPPLLTHGRPPSLPLGSGSPVLPASAPPSTSTSTSLDLPAPAAPIVIRPRLTSTSLDLPTRGPDPRGRAVTPAGSRPSRPVXESKETPSPTRXPKPPPPGRRRPFQAEIAAELPRSGPIPPPEIVDLRPMWVWGY

SEQ ID NO: 253539 - protein, 95 aa, Zea mays
  Clone ID: MRT4577_162809C.1.pep
ASKLGAVCAVESLLAELYLREQELSERGIGTHAHSEYGASAGPVCPALGNPGLERMLCQRSRHTCCVRCDDLRRGHGELCHPCAVWTGWTAREIA

SEQ ID NO: 253540 - protein, 79 aa, Zea mays
  Clone ID: MRT4577_16280C.1.pep
MSGVGSGRPPAAQKILQSLRPPLSFATPSRSPFAAPDDYHRFPTPAAATAPAATSGGVGAGAPPRDTIEEGLVIRTPVR

SEQ ID NO: 253541 - protein, 85 aa, Zea mays
  unsure (1)..(85): unsure at all Xaa locations
  Clone ID: MRT4577_162810C.1.pep
GTHHAKRCPVYIIKDXQRHRKNIINYNSRXVTNKRARRVPSRSAALVAGLHAPTQECFSTFLNPLTPALTSKPMTTLFETQGGRL

SEQ ID NO: 253542 - protein, 122 aa, Zea mays
  unsure (1)..(122): unsure at all Xaa locations
  Clone ID: MRT4577_162811C.1.pep
PCAXGPRPVRPPXXRGXXXARXWXPXXAXVAXAPFFAXXLRRSRRPWXGGWRRLSXXXXRAPPCXXXXAAXPXXXXXXPLXXXXPAXXXPRRSXGVRPALXRAPAXXXAACPSPLAGPPKAA

SEQ ID NO: 253543 - protein, 147 aa, Zea mays
  unsure (1)..(147): unsure at all Xaa locations
  Clone ID: MRT4577_162812C.1.pep
KKKKKKKKKKKKKKKKKKKNFSLFFLIEKGRGLDNNKKKETVKFLSPTKFPAEFRAPRRGPSVSGGRVRGLGPRXVGITGGNGGGWGGFGGIWPTTEGLGNXGPSKGRENGGGFSKFPTKKNKRKGRGQGKGGTGGPGGSKGKGPNG

SEQ ID NO: 253544 - protein, 145 aa, Zea mays
  unsure (1)..(145): unsure at all Xaa locations
  Clone ID: MRT4577_162813C.1.pep
GGGGFFFFFFFFTQTRPIFIKNKSIEPETRVLVLRIRFLKKKNKKWGSGGGGVFFFFYXXHGRRRAGERGAAPPPPSXXXXXPPXXGSRAPNKPQTTPAAANGGPTKNXXHSPRPDRRERRPXGXTXKPXRGPSAPNKEXRGDAG

SEQ ID NO: 253545 - protein, 58 aa, Zea mays
  Clone ID: MRT4577_162814C.1.pep
SCFYVENKIADHLQNWKSELMNRVGQKAIVHFVLSSMMVYLVMAVDLPPWVIIEIGKI

SEQ ID NO: 253546 - protein, 57 aa, Zea mays
  Clone ID: MRT4577_162815C.1.pep
RPSHVVEVFVRVTGREVGTASSLDLKIGTLGLSTKKIGYDIAKETANDWRGLRVTVK

SEQ ID NO: 253547 - protein, 94 aa, Zea mays
  Clone ID: MRT4577_162816C.1.pep
KGYVLNNSTAVSKSTTTEVMRLLSTFYITLVNTIPGIAVVILSSLMTLLSNSITLKCRNPFLLIPVYSMGVPLTQVFLTFWPRLCTNVCPDNLK

SEQ ID NO: 253548 - protein, 109 aa, Zea mays
  Clone ID: MRT4577_162817C.1.pep
YRSILFAYLRGTAVRRRLFRRRIRFLRVRRSVGLTRVTRITVRDFRRGVCRFGSDWLVLVTISTSRRRGKNMTPMGSLHDSNTPRAGASDRYKQNAYKHKHINQPKGPD

SEQ ID NO: 253549 - protein, 115 aa, Zea mays
  Clone ID: MRT4577_162818C.1.pep
MEPAKLAAFLAVAAVAYAVAVAPAAAEYSGGATAPESCQTQIMYFTNCLARDEIRGQCCSVVESRECLCQLKREVALPCSLHRHHQRRCSKEGSPPRSVKLAELQRLPCFKTLKC

SEQ ID NO: 253550 - protein, 97 aa, Zea mays
  unsure (1)..(97): unsure at all Xaa locations
  Clone ID: MRT4577_162819C.1.pep
VAAGECLGGSADRVPSRITTEGSRPAAXTQQFFPPTTTAAQQATSTAYRGVTFYRRTGRWESHIWDCGKQVGFISFETCKDFSGEIGNVLVFFRSSV

SEQ ID NO: 253551 - protein, 70 aa, Zea mays; identical to SEQ ID NO: 253528
  Clone ID: MRT4577_16281C.1.pep

SEQ ID NO: 253552 - protein, 67 aa, Zea mays
  Clone ID: MRT4577_162820C.1.pep
MGSGLQPVQFAVDCPDLEASLSHVDAHACTSSVLLSFPNEVERVLRTKEEGRPGSQGSNQVIGSVGI

SEQ ID NO: 253553 - protein, 316 aa, Zea mays
  Clone ID: MRT4577_162821C.1.pep
MATGQISSTPPSFFNFLKEGLLLPSHNRRLFAAVFTVIAASTCLLLVGNDLVVQPLAVELNLDTKALNSTDFRSPDLLPLIRKTQADTRALLLTSTAYFLFGAVIRSAIQIVVLFAAVSTYSGELHTIGSLLGRVKAQVKGPVLTFAFVYALEITYVALLVAMSILVMVLMIKKYYGLFFVGSLLLLALFVFLVYFSFLCSMSVVVAVAEPGCYGAGALGRAWRLLKGKRTRVMLFISVTGVLAAALTPMYTLAKRRELTNMAAGLLLEFLYVILMSALQLFATCTMAAFYYECKGSTEASAAEYVKVSTKEQIAA

SEQ ID NO: 253554 - protein, 112 aa, Zea mays
  unsure (1)..(112): unsure at all Xaa locations
  Clone ID: MRT4577_162822C.1.pep
CCCRVGRGLYDYTVRDIDGKXLLLYKXTDMVKLTASEDSHCELTTGNPTELSKVYEKVKTQRCEILLLPCNQFGAQEPGTTPEIKQTARTRFIAESSIRDMDDVNGPNTATI

SEQ ID NO: 253555 - protein, 119 aa, Zea mays
  unsure (1)..(119): unsure at all Xaa locations
  Clone ID: MRT4577_162823C.1.pep
NPGTQPXHHRGAXDPKNGXHXGRKXGGKGRDAKKPNPXTXAGAKXXGPDRXDGGKGARRNHNXTEAAGGGNAXPXAAKGAXXGDGHGGGDKNTXGXAXPPKGXXPPPPPAPRKPRRPAG

SEQ ID NO: 253556 - protein, 96 aa, Zea mays
  Clone ID: MRT4577_162824C.1.pep
PSPPITLSLSLSSLCWFSNTTLHPTTLASPFLSFPIIPRIPIATAPRPTQTHLPSSLPFSARRGHRPDCTVPDDQAMGKSMPKGYGVLRGPRYGRT

SEQ ID NO: 253557 - protein, 105 aa, Zea mays
  Clone ID: MRT4577_162825C.1.pep
SSLVVCRPLFFFFLIEVIIQQPWLASKSDTYRGARFRGRGHGPLGGGSERTGWANTVTWPIPGAGKCGRQWAPTRPDFHVALGPLTGTYRLAFTSDSLRSNTVFL

SEQ ID NO: 253558 - protein, 41 aa, Zea mays
  Clone ID: MRT4577_162826C.1.pep
RQLNSLVIFMQQYHFYKKNDLDTSSLSQKGHQMIADLSLQQ

SEQ ID NO: 253559 - protein, 46 aa, Zea mays
  Clone ID: MRT4577_162827C.1.pep
ILLLDQVRRYCLSTYSRGVPSRRGRYRVPRGSVIQGGICYRRTLLN

SEQ ID NO: 253560 - protein, 195 aa, Zea mays
  unsure (1)..(195): unsure at all Xaa locations
  Clone ID: MRT4577_162828C.1.pep
YFXCLFKSFTRGGSAPASXYKLLMFRLKLKRPXVVVPPAFAPPQQVLLGDTPKAATAPXLYNHVDNLLVFGELSEDVGGALGGGAFGVAPRRGAANEDINLRRGPRRARRRVGSGGRSRGCPPSRSSSSLSWSAPALPSEDAAAAVAADASSSNFRFCPFAARALARALLLFAAPRPSEVDGRRGEACRSSSCRV

SEQ ID NO: 253561 - protein, 61 aa, Zea mays
  unsure (1)..(61): unsure at all Xaa locations
  Clone ID: MRT4577_162829C.1.pep
XIIMFPSXXXPSSXRLIRXRLHSFQHXLIXLXIXQIMLIQTXXXRTXXLIIVSLMIFIGSX

SEQ ID NO: 253562 - protein, 55 aa, Zea mays
  unsure (1)..(55): unsure at all Xaa locations
  Clone ID: MRT4577_16282C.1.pep
DSTHQLHGIFXAASFGGTNIDPTAWEDKKCPGESRFPAQVPYCTVCFDPQSSTLV

SEQ ID NO: 253563 - protein, 93 aa, Zea mays
  Clone ID: MRT4577_162830C.1.pep
PGYLGWQTYDYRMICPPRQNLRTTLFWGQFLSGDGVVCGPCGLNFSPRVCPPPGVLRLGASGLGGALVVAAGLGGGGRSFLLGPVGPGLWVAF

SEQ ID NO: 253564 - protein, 73 aa, Zea mays
  Clone ID: MRT4577_162831C.1.pep
GRKTQIFFFGIRIRFPRLVLVGKAQTLFFFFYRGARAQPKYFSWQWLDLGIGNRNLYLYQFYFFLEGLELGVG

SEQ ID NO: 253565 - protein, 38 aa, Zea mays
  Clone ID: MRT4577_162832C.1.pep
RSIWAGPSGFSSGVRPLWSFSMSALALVGGRCIDAPFV

SEQ ID NO: 253566 - protein, 67 aa, Zea mays
  unsure (1)..(67): unsure at all Xaa locations
  Clone ID: MRT4577_162833C.1.pep
QPLFSCRWWVXWDPANVFWNIYIYMDXGSDAAPPCVASQVVVSVPPLPNTHGCLLGLNGGMVFIARA

SEQ ID NO: 253567 - protein, 93 aa, Zea mays
  unsure (1)..(93): unsure at all Xaa locations
  Clone ID: MRT4577_162834C.1.pep
LAVVVTVAGLLFGGRLLALASLRVSLAGSRPCEVECAASXSLVSRLEDCFKYCSICWGTCNCVPSEESFGMDKCPCYRVLSTGHESRTSSKWP

SEQ ID NO: 253568 - protein, 47 aa, Zea mays
  Clone ID: MRT4577_162835C.1.pep
AVQETKRKSFKLKHDYYYFPSDVVQASLDNVRARDQNKSFPVGRVRS

SEQ ID NO: 253569 - protein, 46 aa, Zea mays
  Clone ID: MRT4577_162836C.1.pep
DEARVINAPGRRTIVALILTLLAIIASLALHHTLLLQCFLMSTLPL

SEQ ID NO: 253570 - protein, 214 aa, Zea mays
  Clone ID: MRT4577_162837C.1.pep
MTSVVHSVSGDHRAEDQNQQKKQAEPGDQQEAPVTSSDSQPTVGTPSTDYVAPYAPHDMSHAMGQYAYPNIDPYYGSLYAAAYGGQPLMHPPLVGMHPAGLPLPTDAIEEPVYVNAKQYNAILRRRQSRAKAESERKLIKGRKPYLHESRHQHALKRARGAGGRFLNSKSDDKEENSDSSHKENQNGVAPHRSGQPSTPPSPNGASSANQGRQS

SEQ ID NO: 253571 - protein, 79 aa, Zea mays
  Clone ID: MRT4577_162838C.1.pep
AADDALAVVLSGRCVVVVVRVGLPVEVTAVLGDVGDELHTNVRVVVLLVGTRVRPNNVNDLSVVRITHRCRSTRARPPW

SEQ ID NO: 253572 - protein, 215 aa, Zea mays
  Clone ID: MRT4577_162839C.1.pep
MTSVVQSVSGDHRAEDQSHQKKQTEPGDQQEAPVTSSDSQPTVGTPSTDYVAPYAPHDMSHAMGQYAYPNIDPYYGSLYAAAYGGHPLMHPTLVGMHPAGLPLPTDAIEEPVYVNAKQYNAILRRRQSRAKAESERKLVKGRKPYLHESRHQHALKRARGAGGRFLNSKSDDKEENSDSSQKEIQNGVAPQKGGQPSTPPSPNGASSAYQAPSRE

SEQ ID NO: 253573 - protein, 67 aa, Zea mays
  unsure (1)..(67): unsure at all Xaa locations
  Clone ID: MRT4577_16283C.1.pep
VFXLFLFILXXXVXGKEVLXIELCXHLXKIVALPTPCXXXKXHKKXXXXGXPCCSVVXXXFHKLLLW

SEQ ID NO: 253574 - protein, 98 aa, Zea mays
  Clone ID: MRT4577_162840C.1.pep
PLSPPQVTRIGSFAHTQVDIISTVQYHHYQHSQPHPAKTLRAWHTSCCLSAVALGYIIRAFPSNASAVPWAVCPSSNQSRRPSLHFSLCAYHSSLYTS

SEQ ID NO: 253575 - protein, 322 aa, Zea mays
  unsure (1)..(322): unsure at all Xaa locations
  Clone ID: MRT4577_162841C.1.pep
MESAMFAGCWLLAASLVLATLASPHRLGAAAGEGSETKWHVVSVNSLLPSTVCTPTKAAPSSSALTVVHGHGPCSPQESRRGAPSHTEILGRDQDRVDAIRRKVAAVTTAASSSKPKGVPLQVGWGKYLDTTNYFTSLRLGTPATDLLVELDTGSDQSWIQCKPCPDCYEQHEALFDPSKSSTYSDIACSARECQELGSSHNCSSXXCPYEITYADDSYTVGNLARDTLTLSPTDAVPGFVFGCGHNNAGSFGEIDGLLGLGRGKASLSSQVAARYGAGFSYCLPSSPSATGYLSFSGAAAAAPTNAQFTEMVAGQHPSFYY

SEQ ID NO: 253576 - protein, 81 aa, Zea mays
  Clone ID: MRT4577_162842C.1.pep
LRERGEGTDSALCALDSGVHELTATAGFLRHHDEGRRHTMANDQLPHTSARLLVTISNFGMYLTAENYYMRLYLLCGYNHQ

SEQ ID NO: 253577 - protein, 58 aa, Zea mays
  unsure (1)..(58): unsure at all Xaa locations
  Clone ID: MRT4577_162843C.1.pep
MASEWEMAMGVELGMGMGTYHYHHNAXSITTAPMSSHHSGGASYSTPHHHHYYGMPPT

SEQ ID NO: 253578 - protein, 93 aa, Zea mays
  Clone ID: MRT4577_162844C.1.pep
RFAWGTSANIAERLPMWSSSGCWLPLPARGVQCSRRGWARRPTGGGRCARRVAALCAEDRRRDLRPRAQCGGGVGERRLGLEEGRPGRPRGGQ

SEQ ID NO: 253579 - protein, 44 aa, Zea mays
  Clone ID: MRT4577_162845C.1.pep
RTAHKKESKCLGMLTEARNFNIAYYHQRNLRTPSPNVLQCNRFH

SEQ ID NO: 253580 - protein, 31 aa, Zea mays
  Clone ID: MRT4577_162846C.1.pep
SYLPKWLRHKNTSAEMNIPSTQIFVSNIVCH

SEQ ID NO: 253581 - protein, 122 aa, Zea mays
  Clone ID: MRT4577_162847C.1.pep
LIHLTYTLHKARREFSMLEMLVDNLMHRWLQEVSSSFILCVSVWHLWFTQQLQHRGLHVMLFFSRSGSHLFFPCNSKIICYLHSFYGCHCCRSDHHQANIAHTDPDMRVLLSIFLRVLQHSL

SEQ ID NO: 253582 - protein, 77 aa, Zea mays
  unsure (1)..(77): unsure at all Xaa locations
  Clone ID: MRT4577_162848C.1.pep
GCLPGPXGPILCINNCRLFGSAATMNMCSKWHKEMITYHDQSKLAEYCIDSIANGNDAVIEPVVAGINNVIAVAQFE

SEQ ID NO: 253583 - protein, 103 aa, Zea mays
  Clone ID: MRT4577_162849C.1.pep
VSASISVLWAHAFCIHTLPPSVKRRTPYPLRLFRICPFARSTTQRTLSTIFKTLTSPSLYSSTKPATIIYYPRFQNTCISHHLYYLTATRLMHSFHLWPFRIS

SEQ ID NO: 253584 - protein, 185 aa, Zea mays
  unsure (1)..(185): unsure at all Xaa locations
  Clone ID: MRT4577_16284C.1.pep
AFVPPLRFRRCPSXXXXPSLXPVLXPXPPCXXPLXXFXSXPPSXPXPPPXXALXXALALXVXVVCGXXLXXVXWRRGXLRAXVVVXLXPSRRAAXRPXXGGGCXXXWXXRLVLPLPPXLSPXXPSXLLSLXVFXSXPSXSPXPLVGSARSPLRXLLFPXXPXPKHDQXPTLLVSLPLLRPPGRPR

SEQ ID NO: 253585 - protein, 111 aa, Zea mays
  unsure (1)..(111): unsure at all Xaa locations
  Clone ID: MRT4577_162850C.1.pep
QHSQTHQSKRTNNNLTTVATEILALLALLALLVSATNANIIPQCVLAPSAIITQFFSSLTXMGFEYSAVXNYMLQLAFAGSVLQQPIYQLQEQSLAHLNLLTISTQQQQQF

SEQ ID NO: 253586 - protein, 136 aa, Zea mays
  unsure (1)..(136): unsure at all Xaa locations
  Clone ID: MRT4577_162851C.1.pep
MEATLAFSKDSPPISIICAAKFVGLPLTMDPSLXGFAPTLRFASGESLHGVNPILLYIASGATIPCFSGKNDIEFGHVVEWLEYVPIFLSGSEFENACLFVDGFLASIKEYQNLVRWFNSIDSEYSDTLNEILAAY

SEQ ID NO: 253587 - protein, 83 aa, Zea mays
  Clone ID: MRT4577_162852C.1.pep
IFRFLVHTVTTLPREAHRALGLNQIAVVWPVHSPPMRTPACTRGPSDSGHPRHRVAPRCDRQSLPEPTLPFAGPISPPVSRAN

SEQ ID NO: 253588 - protein, 202 aa, Zea mays
  unsure (1)..(202): unsure at all Xaa locations
  Clone ID: MRT4577_162853C.1.pep
MEATLAFSQDSPPISIICAAKFVGLPLTMDPSLASGFAPTLRFASGESLHGVNPILLYIASGATIPCFSGKNDIEFGHVVEWLEYVPIFLSGSEFENACLFVDGFLASRTFLVGHGLTIADIVVWSNLAGIGQRWESLRKSKKYQNLVRWFNSIDSEYSDTLNEVLAAYVXKRGIGKSPAPSLKEKVHVSXDPSAPEVDLPG

SEQ ID NO: 253589 - protein, 130 aa, Zea mays
  unsure (1)..(130): unsure at all Xaa locations
  Clone ID: MRT4577_162854C.1.pep
PLENGCPGXFVFPLHSRSPKIFWGGDGTKGPIPVERGVYSGKHGSPGFFFGENGQGPKTFFPFCGVNXELKTFVPALLEAGKNGDPKGAPRGFFVEGAPYVSVLKPLLGFSGKQGAPVPVKRFLPVRNVP

SEQ ID NO: 253590 - protein, 62 aa, Zea mays
  unsure (1)..(62): unsure at all Xaa locations
  Clone ID: MRT4577_162855C.1.pep
PQPRPTSLAGRPTPSFLSISXXXTRVPPCFXIFXPPPRAFPXXPKLLRWVSLPGVLACTATS

SEQ ID NO: 253591 - protein, 62 aa, Zea mays
  Clone ID: MRT4577_162856C.1.pep
ILASHGQFGFKSFKKENGHAFNNFFFQARCSTSPKHLKTPFYWHLNALFNPLTMVFSAFWGK

SEQ ID NO: 253592 - protein, 46 aa, Zea mays
  Clone ID: MRT4577_162857C.1.pep
AMCVGVTVKTTTDSKALVVFSFETQETESRQALVCGSLAGVLTPEW

SEQ ID NO: 253593 - protein, 362 aa, Zea mays
  Clone ID: MRT4577_162858C.1.pep
MDAFLSCLDDGPTASPPRAAPPPSPALSARDLYSFICSGPLVDRIGYTKEKVADSIGRWLRCGVEVARLLRLDELQLSEAEKARVYQFYIPVFLWCEDQVIEHRAKYSEGDDIPPLVIGVSAPQGSGKTTLVFALDYLFQVAGRKSATLSIDDFYLTAKEQNELRDRYPGNALLELRGNAGSHNLQFSVETLESLMKLTKEGIKMKVPRYDKSAFGGRGDRADPSVWPEVEGPLEVVFFEGWMLGFKPLPNEVVKAVDPQLEVVNNNLEAYYDAWDRFIDSWIVIKIREPSSVYQWRLQAEIAMRADGKPGMSDEEVMDFVSRYLPAYHAYLPKLYKEGPNGSKPDHLLVIDINEGRNPIWG

SEQ ID NO: 253594 - protein, 71 aa, Zea mays
  Clone ID: MRT4577_162859C.1.pep
NSHFLLYYSLCTTHHTWRSLLFFLPTNQHNPLNTNNFYLSTLLLHPTVHFSILNLLPLNLTNSYTYNLPLI

SEQ ID NO: 253595 - protein, 54 aa, Zea mays
  Clone ID: MRT4577_16285C.1.pep
LDSVGELSFRLRQETQSTLTAALLFNHTANRVMKRTHGKHTNSILETSIVNASF

SEQ ID NO: 253596 - protein, 58 aa, Zea mays
  unsure (1)..(58): unsure at all Xaa locations
  Clone ID: MRT4577_162860C.1.pep
TTTNNCFFIKFYLVGCGQXYSIPXIITILIXSXHYPHHSHKTPTTLFXSINXHXSHHL

SEQ ID NO: 253597 - protein, 161 aa, Zea mays
  Clone ID: MRT4577_162861C.1.pep
PPGAPFPPPKGAKSGGPPRGGPPQKKGDPPGPRNWAEGFSPGSKGSLQGPRPFFPPRFQRVPKTPPAPKGPPPPKGPGRRAPAQGGGTGVPPEPPGGGGPQALPGKGSQKRGPAPGGPPPQGGQKPRPKKPGVFLLIFPGSPLFEKPGFPSFGNPNRFCGG

SEQ ID NO: 253598 - protein, 49 aa, Zea mays
  Clone ID: MRT4577_162862C.1.pep
KKCPFFFFKKKKKKKIKKKKKKKKKKKKKKKKKKKKKKNKNQGGRSRYR

SEQ ID NO: 253599 - protein, 42 aa, Zea mays
  unsure (1)..(42): unsure at all Xaa locations
  Clone ID: MRT4577_162863C.1.pep
IERVMHFLWNMIGVGLTRLFVCRPLGXTYKDDTILYTKRKCT

SEQ ID NO: 253600 - protein, 250 aa, Zea mays
  unsure (1)..(250): unsure at all Xaa locations
  Clone ID: MRT4577_162864C.1.pep
RPRPRGLLQRSRSGLAQVLEADIQHANTLAAGFSRDYDGACLQMRMSYSPAAHFFLFLVQWTDCSLAGALGLLRILIYKVYVDGSTTMSTHERKASIREFYAVIFPSLMQLXQGISDVDDRRQKAACTERYRRRDEDEGKRPVSEADIEREEECGICMEMNGKVVLPSCSHAMCIKCYRQWRSRSQSCPFCRDSLKRVNSGDLWMLTDCRDVVDMATVTRENIRRLFMYVEKLPLVAPDNIFYAYDSHVK

SEQ ID NO: 253601 - protein, 238 aa, Zea mays
  Clone ID: MRT4577_162865C.1.pep
RVPSLVLTARSLKQLDSAADFSRDYDGACLQMRMSYSPAAHFFLFLVQWTDCSLAGALGLLRILIYKVYVDGSTTMSTHERKASIREFYAVIFPSLMQLPKGISDVDDRRQKAACTERYRRRDEDEGKRPVSEADIEREEECGICMEMNGKVVLPSCSHAMCIKCYRQWRSRSQSCPFCRDSLKRVNSGDLWMLTDCRDVVDMATVTRENIRRLFMYVEKLPLVAPDNIFYAYDSHVK

SEQ ID NO: 253602 - protein, 105 aa, Zea mays
  Clone ID: MRT4577_162866C.1.pep
LLPSRRLLSSLSSPSRSSPSTASSEPRRTLYALVAPGTPMAELATCQDKPQTPLLLHGHELDVPFFLSSPISLYRPLGPCTCLSIAQAQETCPWVGARVFPGWPR

SEQ ID NO: 253603 - protein, 226 aa, Zea mays
  unsure (1)..(226): unsure at all Xaa locations
  Clone ID: MRT4577_162867C.1.pep
QVQLPPATRLDSRAARCLLLCTLPTSTSTSSSAATTPPPWPRRAWPPSSTSSATCTARPPPRCRRRPRPRTTPSAATRRRCPRGPGRRAGTRAPARSAXQRRRRRGVPDRXPSTTTTRSRARSRSSGNPPSMRRRASTGAHCRCSERPLRSRRWTRRRRRRRSCERRPSCAACVRSDCSSNRPAQSSCPIRGFKAWRWRRREARTRRPRRTSRARNKRRQTRRTTR

SEQ ID NO: 253604 - protein, 186 aa, Zea mays
  unsure (1)..(186): unsure at all Xaa locations
  Clone ID: MRT4577_162868C.1.pep
IRHEGISHEKHSDVPSIFSNIIVGSDPDKSXTHTRVLTSMALGLFASKLPVSSWQVVLSPLANHLMSLSGVQRQVASMIIVSWFKDLRGRDPVSVGTLLAFLSSLKEWLVDLLTCSDPALPTKXFXLPYSELSRTYTKMRNEANNLLHLIDSCAAFKDYSSSLNLNTDVLTVDDAINFASKLFVTI

SEQ ID NO: 253605 - protein, 77 aa, Zea mays
  Clone ID: MRT4577_162869C.1.pep
EKKNLATLSIRNLIKKFPPVMNAAQSCLFQLGQQTFRFSEVKENLEPCFLQQFFKKENNLFQESFYFLSPHYTWKLL

SEQ ID NO: 253606 - protein, 49 aa, Zea mays
  Clone ID: MRT4577_16286C.1.pep
NLMFTEKFQEEICHGIEIDQPVFQCIYFNTSCKESIYSSQLANRQYMIT

SEQ ID NO: 253607 - protein, 180 aa, Zea mays
  Clone ID: MRT4577_162870C.1.pep
RAARLLQAAGFFLAQIMPSSLLLDAPCSASGGCPSPHGAACLPPQHRACPLLFITMQQAQLSTLAPVATPPCSSPQFISRRLLVAETSLLDPASPSRVPSSLLGLRSSPPCQVMAPWCSSSLFNSSSSRPSVRAAVRRAWPVSSSPRATLVSAGLAAIRVQLTSFDGRLSSSLLIYSSSS

SEQ ID NO: 253608 - protein, 30 aa, Zea mays
  Clone ID: MRT4577_162871C.1.pep
TQYVPVHSNIMKTPKKATSDCHWLFIHKTS

SEQ ID NO: 253609 - protein, 219 aa, Zea mays
  unsure (1)..(219): unsure at all Xaa locations
  Clone ID: MRT4577_162872C.1.pep
RGACALGPVLIATVPPNRIVLPQQSEHLPLLLIPNLHGHTFLQSCPTKENPIPTVSIGHGECDPKTTTANLIYKLAGIXLTAXDRFDKEAAQMNNSSFKYTXSLDQLKGERDIGITIDIALWNFETTKYYCTVIDAPTHRDFIKNMITGTSQGDCAVLIIDSTTDGFEAGISNDGQTREHALLAFTLDSEXMICCLNQKDATTPKHSKXAPYDDIAKEI

SEQ ID NO: 253610 - protein, 106 aa, Zea mays
  Clone ID: MRT4577_162873C.1.pep
SGKNGGLVISPSPAEVHVTSSSSRSFGWCPLFRVVELPWIHVTKQTTFECAGDVVFGHLRPKRQGICGMGRLHSDRALGTIQLSSPYKHKPQQAYRSKKKKEKNMK

SEQ ID NO: 253611 - protein, 147 aa, Zea mays
  Clone ID: MRT4577_162874C.1.pep
MASGERVYEDFKPPHKMEREPATHTLTVDLSAQGYRKEHIRVQMVHSHRCLIVRGERPVDGNRWSRFRLDLPVPDGCDAKAVHARFDNGVVRVTMPGVQQPEPVLPVVAGTADQQQQQQETPLPKHAGTAAAAGDDARARAETRRRQ

SEQ ID NO: 253612 - protein, 138 aa, Zea mays
  unsure (1)..(138): unsure at all Xaa locations
  Clone ID: MRT4577_162875C.1.pep
RPLRNACSDSKNXPAKEAGSFTAQVIILNHPGQIGAGYAPVLDCHTAHIACKFTELIEKIDRRSGKSLEATPKFVKSGDSAIVKMIPSKPMCVEAYTDYPPLGRFAVRDMRQTVAVGVIKSVEKADKQEAGKVTKAAV

SEQ ID NO: 253613 - protein, 205 aa, Zea mays
  unsure (1)..(205): unsure at all Xaa locations
  Clone ID: MRT4577_162876C.1.pep
ANASVIFGCGAQQVXVLGSSNQALGGVLGFGEANTSMLSQLTTAGKVKKIFAHCLDTIKGGGIFSIGDVVHPKVKTTPLVADKPXTFHFEDDLALHVYPHEYFFANGNDVYCVGFQNGASQSKDGKDIVLMGDLVLSNKLVIYDLENRVIGWTDYNCSSSIKIKDDKTGATSTVNSHDLSSGWKFHWHMSPVLLLVTTVCSYLIC

SEQ ID NO: 253614 - protein, 54 aa, Zea mays
  unsure (1)..(54): unsure at all Xaa locations
  Clone ID: MRT4577_162878C.1.pep
LYHTDVYLCEDNAHTXVFAHIFGHEAGGITQSVGEGHTDVCPPDHHLPVFTRGT

SEQ ID NO: 253615 - protein, 75 aa, Zea mays
  Clone ID: MRT4577_162879C.1.pep
SLFFFFFFFFFCFFFFFFFFLAPPKGPHKKKGQGARNKIVPQFRGDKRSKTLTQIGPEPQNKKRGDDGQPPPLEP

SEQ ID NO: 253616 - protein, 58 aa, Zea mays
  Clone ID: MRT4577_16287C.1.pep
HWAVQNGLHLSRSTVVYFKHNDMASIASTLEKLTRGNKRAEKIRRYIIVESIYQVQCF

SEQ ID NO: 253617 - protein, 60 aa, Zea mays
  Clone ID: MRT4577_162880C.1.pep
EFLREMVDSELGAGNVLKGQEALKGHWATGSCHSHRGLLKGLLLDNDGIIQRLRRMPIND

SEQ ID NO: 253618 - protein, 45 aa, Zea mays
  Clone ID: MRT4577_162881C.1.pep
IRLERDFAIGSFFSHWSEDYHRGVTYKPGGAANRRENITRSADVD

SEQ ID NO: 253619 - protein, 118 aa, Zea mays
  Clone ID: MRT4577_162882C.1.pep
LAVYSQQQQKNPEKQPPKLGGAHPFAQKPLSGNPTNSRLKKGPPPRGPSGKKATLPLKNKGDKGQPLGQLKKGRPGTPQMRAKRGPLDPDPKNKHGHPPTTAKRAGNQPTCKNKPNKG

SEQ ID NO: 253620 - protein, 71 aa, Zea mays
  Clone ID: MRT4577_162883C.1.pep
ILGIIFILKTHFLINFPDFITLWTGPHLLKSAGALRKISETQATPAQDGGLNPRKPRVSFITRVLCVVTTA

SEQ ID NO: 253621 - protein, 97 aa, Zea mays
  unsure (1)..(97): unsure at all Xaa locations
  Clone ID: MRT4577_162884C.1.pep
MAASTTAAAALLLLLLSLAAAANMSIVSYGERSNEEARXRMYAECMAMHGRTYNAGRGEERRYQEIRDNLRYIDAHNNNVDARVHXSFRLXLNRFTD

SEQ ID NO: 253622 - protein, 150 aa, Zea mays
  Clone ID: MRT4577_162885C.1.pep
VGGAQQFVDRSKVRILLCDGDATSSREVLRLLCNCSYHVTCAKSPRQVINILNYEGGEIDIILAEVDLPVSKCFKMLKYIARNKDLRHIPIIMMSNRDEVSVVVKCLRLGAAEYLVKPLRTNELLNLWTHVWRRRRMVKGTMLTHLNLCV

SEQ ID NO: 253623 - protein, 411 aa, Zea mays
  Clone ID: MRT4577_162886C.1.pep
MPGAIHAPVEDAITVLPWRHRHGGNEQRDRGWECGKAIWWMDMGMVDAGGTKVEIGDGGGKGGYATIAQHALGQSSSTGGGRSWRRRWWRCPAGHAVDGGGEGSELLHQQLLKCHEVRLGDWTSGDSRRINRCGDGGGWCWSWRHVIGLASPIPDCYGGCSATVPTVLQYPRELFAGWGYAELDGFSLSLQVDAERTYHQNAADILNKLHDEMLYAKHHNESANHYDEQSSEPESDAGPAQVHSRSTSEDPVLTKPSESTGNSQEVQFLGEVIHPFDAQADGELSLAVGEYVVVRQVAANGWSEGECKGKAGWFPSAYVEQRDKAPASKIIVLLAFSLVGNSCNETEAAVRQGKDEAAGLADQQMDWGHVERIGHRVTDSAAQLSNLWVASSVRGSAPPAALASTSRDLHP

SEQ ID NO: 253624 - protein, 896 aa, Zea mays
  Clone ID: MRT4577_162887C.1.pep
MAHPASSGILGCVTLLCIFSSAAAVGSNATGSGQIRLDCGASSSTSTDADGRSWDSDASSKFAPSLNGVAATASSQDPSLPSPTPYMTARVFTSNYTYSFPVTPGRMFVRLYFYPTIYGGNHAPADAYFGVTAANLTLLQSFNASQTSLSLGVAFFVREYSVNVTEGSLDLTFSPSTHHNGSYAFINGIEIVPTPDLFTTPTPTLSNGGNPDPFPILAGTGFETMYRLNVGGQAISPGGDTGFYRSWVNDVPYIYAAGFGVAFGKDDNLTISYRPTVPNYTAPVDVYATARSMGPNAQINLNYNLTWILPVDAGFYYLLRFHFCEIQYPITKVNQRSFFIYINNQTAQQEMDVIAFSGGIGRTVYTDYVTVTAGSGQTSLWVALHPDLTTRPEYFDAILNGLEVFKLQNYGNNSLNGLNPPLPSVQPNNGNGEPSVRRKGAAPAPAAIAGAVGGFAVLLIAAFGACIVCRRKKAANKESRKPDDGHWTPLTDYSKSRSNTSAKTATTGSRTSTLPSNLCRHFSFGEIQAATKNFDQASLLGKGGFGNVYLGEIDSGTMVAIKRGNPTSEQGVHEFQTEIEMLSKLRHRHLVSLIGYCDDMNELILVYDYMANGTLREHLYNTKRAALSWKKRLEICIGAARGLHYLHTGAKHTIIHRDVKTTNILLDDKLVAKVSDFGLSKTGPNNVDNTHVSTVVKGSFGYLDPEYFRRQQLTEKSDVYSFGVVLLEVLCARPALSPSLPKEQVSLADWALHCQRKGVLGQIIDPHLQGQVSPQCFLKFAETAEKCVADRSVDRPSMADVLWNLEFALQLQGSAEDSGSVVVVTDGTTASSSNRSSPLIVSRLHSDEPPTDSTTTTTTTSSTTTLSMMGRSLASVESDELTPSSVFSQLMHPGGR

SEQ ID NO: 253625 - protein, 330 aa, Zea mays
  Clone ID: MRT4577_162888C.1.pep
KGDYDGALEHLVLASMTMVANGRDIEVATIDVAIGNTYLALARFDEAVFSYQKALTVLKSARGDDHPTVASVYVRLADLYHRTGRLRESKSYCENALRVYAKPAPGAAPDEIAGGLMEIAAIYEALGDLDEALKLLQRALRLLEGSPGQWSTVAGIEAQMGVLYYMVGRYADSRNSFESAVAKLRAIGERKSAFFGVLLNQMGLACVQLFKIDEAAQLFEEARAVLEQECGASHPDTLGVYSNLAAIYDAMGRVEDAIEILEHVLKVREEKLGTANPDVDDEKKRLAELLKEAGRSRNRKQKSLQNLFGTNSQRAKKEAGRRWSNFGFRS

SEQ ID NO: 253626 - protein, 141 aa, Zea mays
  unsure (1)..(141): unsure at all Xaa locations
  Clone ID: MRT4577_162889C.1.pep
MLLEEPFRLASVLSPAKTKVFPSLTSIRGTLGPISHSVRDYSXCAXTGMSVARVDLSCMDGAYHQESLDIFRQAXRXVNNMGPVMLDTLEPEIQVHNSTXSHIDIKAVNXVIITPDIXELVSAEILPIKMGDVAKAVSNCD

SEQ ID NO: 253627 - protein, 180 aa, Zea mays
  unsure (1)..(180): unsure at all Xaa locations
  Clone ID: MRT4577_16288C.1.pep
QRSAETSGDGATLPRTLTPLHHRPWDPSRRPPARPWSTSLRLTPPHSPASLSPPRSPSAPPPSPPTCSISAPAAASCSSSPCRIPPLLSSSASSPSAPPYPSLLSSRSPPSPASSSSLTASSSSPTRSSRAPSAASAPCAASPPSPXAASSSXPSSCSVAISRKKLLRVDFTLHDADELD

SEQ ID NO: 253628 - protein, 161 aa, Zea mays
  Clone ID: MRT4577_162890C.1.pep
YPNCHVCILERQKEQEPTAQDTTRLQHAAGVAHRTTDTGPHHHYDPKHTLFTPRYSHPVTGHVHATVTATTYRSTCETHTHTETDAKNNRSVLNNKIHRDTAMYARERGTPTRAHADPLSPGPHRWVHTAPLTGLHGLRKNKKLLPLAGRLLLTSRNRTLR

SEQ ID NO: 253629 - protein, 54 aa, Zea mays
  Clone ID: MRT4577_162891C.1.pep
EGLFLLCCTRVFECPIRRIRSCLFHHIGMDGLCALLKFGKVRFMVIFITSWSLM

SEQ ID NO: 253630 - protein, 50 aa, Zea mays
  Clone ID: MRT4577_162892C.1.pep
RTNIIRWAQSIGVQSYILSIPRGTRSGLFIGSNGPQFILKSIETQSPLCT

SEQ ID NO: 253631 - protein, 89 aa, Zea mays
  Clone ID: MRT4577_162893C.1.pep
LENAAGDDDVVVRSMLSADLVCGSRGRGCRLRMCISSGSKSSRRSTYTMCTTVSCPTGPPFFSGTFSMAAAMRNRPIRRRELVFFIPGR

SEQ ID NO: 253632 - protein, 74 aa, Zea mays
  Clone ID: MRT4577_162894C.1.pep
LSSLAGRKLLGGNCECRETSLDFYHHRAPDTQISLYGSRSYSAKSNNKSYAEKLTVALHHKHQLELRETNHKQK

SEQ ID NO: 253633 - protein, 171 aa, Zea mays
  Clone ID: MRT4577_162895C.1.pep
MFCKTPKEFVADRHKNKNTQSTLEACTKKGKEAKQIVNDHVADFLYENKIPLHVVNSRSWEVMLESIGQFGPGYRGPSYHDVRVPWLDRVVERTTTLRSKHEQAWKEYGCSIMSDAWTDTRQQHLINFLANSPARTFVLASVDASSEVASAELLADLLEKQIDSVCREHVV

SEQ ID NO: 253634 - protein, 104 aa, Zea mays
  unsure (1)..(104): unsure at all Xaa locations
  Clone ID: MRT4577_162896C.1.pep
MAAKICRLLMLIGLSASVATAAMFPQCLQASIAFLLPPYLSPAVSSMCENAHVHPYRIQQAIXTGILPFSPVVLQHPTVLLQQLPPVHLVAQNMRAHQLQQTVL

SEQ ID NO: 253635 - protein, 67 aa, Zea mays
  Clone ID: MRT4577_162897C.1.pep
LTPPLSLSFCFNPPSPRWSWRRERGQASLCRLLRGPLPDTIRGTKCITPFREVLCYIIFFHSIYYIY

SEQ ID NO: 253636 - protein, 122 aa, Zea mays
  unsure (1)..(122): unsure at all Xaa locations
  Clone ID: MRT4577_162898C.1.pep
MAMDPDAVAKALPEHYYRTFDTNRAALVGLYHETSMLTFEGQMFQGPSAIAGKLGSLHLQACEHQIVTVDWQPTRPHGGMLDFYYGYIHTGLYEHSIKVCXMXHLLTAAGSLLMQNDMFRLN

SEQ ID NO: 253637 - protein, 304 aa, Zea mays
  Clone ID: MRT4577_162899C.1.pep
MAAARGINQLLKRILHNQSAGPWLLSSFRGNHEESSAGLRALALLGVGASGLLSFATIASADEAEHGLAAPDYPWPHAGIMSSYDHASIRRGHQVYTQVCASCHSMSLISYRDLVGVAYTEEETKAMAAEIEVVDGPNDEGEMFTRPGKLSDRFPQPYANEQAARFANGGAYPPDLSLITKARHNGQNYVFALLTGYRDPPAGVQIREGLHYNPYFPGGAIAMPKMLNDGAVEYEDGTPATEAQMGKDVVSFLSWAAEPEMEERKLMGVKWIFLLSLALLQAAYYRRMRWSVLKSRKLVLDVVN

SEQ ID NO: 253638 - protein, 66 aa, Zea mays
  Clone ID: MRT4577_16289C.1.pep
GFEHHLAYIQALTPPLSARSSKFSTVNMVVRSIIRPPERARQCNNYPPSSQRCQSQSAEGFRLPPP

SEQ ID NO: 253639 - protein, 511 aa, Zea mays
  Clone ID: MRT4577_1628C.1.pep
MAVLTLVNILISFAACAEALRRADFPQGFVFGTASSAYQYEGAVNEGQRGPTIWDTLTRRPGRVIDFSNADVAVDHYHRYKEDVDLIKDIGMDAYRFSISWSRIFPNGTGEPNEEGLNYYNSLINTLLDKGIQPYVTLFHWDLPQALEDRYGGWLNSQIVDDFVHYASTCFKEFGDRVKHWITFNEPHNFAIEGYDLGIQAPGRCSILSHIFCREGKSSTEPYVVAHNILLAHAGAFHTYKQHFKKEQGGIIGIALDSKWYEPLSDVDEDTEAAARAMDFELGWFLDPLMFGHYPPSMQKLVGDRLPQFSARASMLVSGSLDFVGINHYTTLYVRNDRMRIRKLVMNDASTDAAVIPTAYRHGKKIGETAASGWLHIVPWGMFKLMKHIKEKYGNPPVIITENGMDDANNRFSKLEDDLQDDKRIQYHKDYMSNLLDAIRKEGCNVHGYFVWSLLDNWEWNSGYTVRFGLYYIDYNNNLTRIPKASVEWFRQVLAQKTAGLEYSGSTVASS

SEQ ID NO: 253640 - protein, 304 aa, Zea mays
  Clone ID: MRT4577_162900C.1.pep
MAAARGINQLLKRILHNQSAGPWLLSSFRGNHEESSAGLRALALLGVGASGLLSFATIASADEAEHGLAAPDYPWPHAGIMSSYDHASIRRGHQVYTQVCASCHSMSLISYRDLVGVAYTEEETKAMAAEIEVVDGPNDEGEMFTRPGKLSDRFPQPYANEQAARFANGGAYPPDLSLITKARHNGQNYVFALLTGYRDPPAGVQIREGLHYNPYFPGGAIAMPKMLNDEAVEYKNGTPATEAQMGKDVVSFLSWAAEPEMEERKLMGVKWIFLLSLALFQAAYYRRMRWSVLKSRKLVLDVVN

SEQ ID NO: 253641 - protein, 38 aa, Zea mays
  Clone ID: MRT4577_162901C.1.pep
LLVSGDRSSKRMFLPCFTLRNKCVSSRWFFLDKIVEFF

SEQ ID NO: 253642 - protein, 491 aa, Zea mays
  Clone ID: MRT4577_162902C.1.pep
MAAARGINQLLKRILHNQSAGPWLLSSFRGNHEESSAGLRALALLGVGASGLLSFATIASADEAEHGLAAPDYPWPHAGIMSSYDHASIRRGHQVYTQVCASCHSMSLISYRDLVGVAYTEEEGAGNPAGKRPRPQPRRVRVRGASGIGIATRPSHAHAVTPPDPSPRAAARRSSASPPAPHPVESSMAAARGINQLLKRTLYNQSAGSSPLFSFRGKHEESSAGLRALALLGVGASGLLSFSTIASADEAEHGLAAPDYPWPHAGIMSSYDHASIRRGHQVYTQVCASCHSMSLISYRDLVGVAYTEEETKAMAAEIEVVDGPNDEGEMFTRPGKLSDRFPQPYANEQAARFANGGAYPPDLSLITKARHNGQNYVFALLTGYHDPPAGVQIREGLHYNPYFPGGAIAMPKMLNDGAVEYEDGTPATEAQMGKDVVSFLSWAAEPEMEERKLMGVKWIFLLSLALLQAAYYRRMRWSVLKSRKLVLDVVN

SEQ ID NO: 253643 - protein, 49 aa, Zea mays
  Clone ID: MRT4577_162903C.1.pep
PHSRVMDNIKMSTNGHPKCSSPALATLKQSSMSSQNSEMKACTPNVTEI

SEQ ID NO: 253644 - protein, 84 aa, Zea mays
  Clone ID: MRT4577_162904C.1.pep
LFFFHISNKHTTLVLIYRCDGADKLPHLLPWLIRGFSSSHYVLHAYESSRHFNRLSYEGVSRLRMIYVERRCQHLVVLRQPSCF

SEQ ID NO: 253645 - protein, 58 aa, Zea mays
  unsure (1)..(58): unsure at all Xaa locations
  Clone ID: MRT4577_162905C.1.pep
YPHVPKIKGSLKAPSKFVFPPPVVVGXFGPTSVPKKKKKVPEPKKELAEKMGFSLFVD

SEQ ID NO: 253646 - protein, 52 aa, Zea mays
  unsure (1)..(52): unsure at all Xaa locations
  Clone ID: MRT4577_162906C.1.pep
SCSSGTAGECSGCLLSFLYFLPGDNNSKWVKHWVKXGYYYYHNLETQEXGWD

SEQ ID NO: 253647 - protein, 70 aa, Zea mays
  Clone ID: MRT4577_162907C.1.pep
TGNRACCLQQINKKSWGLKPLPPRVINAHFFYAGETPASKTFYIMLYTGPRAIAYFPAPFGVFTYSTGTS

SEQ ID NO: 253648 - protein, 98 aa, Zea mays
  Clone ID: MRT4577_162908C.1.pep
MKVRAAVKRLCRFCKVVKRRGIVFVQCTANAKHKQRQGFSTIAEAAAVSCVHLPPPPPASGSASAAAFAEASKVARQEMSMKFNWRLGLAALFKNGEK

SEQ ID NO: 253649 - protein, 115 aa, Zea mays
  unsure (1)..(115): unsure at all Xaa locations
  Clone ID: MRT4577_162909C.1.pep
AVPAAGDGGGDALVVCGGLVSDMDCPLHLVLRYDVCRNRWAVMARMLAARSFFAGGVVDGRVYVAGGYSADQFELSSAEVLDPAGAGAWRPVASMGANMAXVDSAVLDGKAVRDL

SEQ ID NO: 253650 - protein, 110 aa, Zea mays
  unsure (1)..(110): unsure at all Xaa locations
  Clone ID: MRT4577_16290C.1.pep
VTLTIWTXAFXFPKTXHAMWSLISSMKCYHHFFGLEYHLHLFNILLVPYFNIVPMXNKIFNIFQSTLFLSSPYTSTDVYYAPIFPVLGHDYFHNXTGNILTFPDLFHLTL

SEQ ID NO: 253651 - protein, 98 aa, Zea mays
  Clone ID: MRT4577_162910C.1.pep
MKVRAAVKRLCRFCKVVKRRGIVFVQCTANAKHKQRQGFSTIAEAAAVSCVHLPPPPPASGSASAAAFAETSKVARQEMSMKFNWRLGLAALFKNGEK

SEQ ID NO: 253652 - protein, 152 aa, Zea mays
  unsure (1)..(152): unsure at all Xaa locations
  Clone ID: MRT4577_162911C.1.pep
YDSAGQIASRVTMDATKDRPCSSHHTTATTTNAGAHVRNDNEALTAGPGGPILLEDYQQNERGGHFDXRERIPERERHARGXAATGLIPVHPDEKALTCANXLSAPGVRTLEIELSSTATHERGTXQTIRDPSGYQRRXYNPEGNWDXLLGN

SEQ ID NO: 253653 - protein, 49 aa, Zea mays
  Clone ID: MRT4577_162912C.1.pep
IPAPCINGTSQSPCKKKKKKKKKKKKKKKKKKKKKKKKKKKNSRECAGT

SEQ ID NO: 253654 - protein, 71 aa, Zea mays
  unsure (1)..(71): unsure at all Xaa locations
  Clone ID: MRT4577_162913C.1.pep
VCELNAKSSRHFKSNGKTHRTGPDXYIDFEHLSKYHIKSLEEQLRIEQQIGTKRSQIHYKFTPVSLGTSFL

SEQ ID NO: 253655 - protein, 77 aa, Zea mays
  unsure (1)..(77): unsure at all Xaa locations
  Clone ID: MRT4577_162914C.1.pep
MSYQQGYPPPGTAAAYPPPGHQQQAYXAAAGYVPAGSXQYPPXAPTPPAAADTETAXGFLKGCCAALCCCCLLDACF

SEQ ID NO: 253656 - protein, 139 aa, Zea mays
  unsure (1)..(139): unsure at all Xaa locations
  Clone ID: MRT4577_162915C.1.pep
CCSXRFXEXLLDRAQXEITPGPSILMCYNYNPYAQYYLCFLTSFADSRWAGVRLISRDIILEAQSNDKMECHHGSCQLSTPHIHSHKVILSVSCEYLRALFQSGLHERYAFCFLASDAGCRTPYLCCFSLRTXGHVVNV

SEQ ID NO: 253657 - protein, 91 aa, Zea mays
  Clone ID: MRT4577_162916C.1.pep
HRHHTGIAAPPTAAAAANARLSRQSRSDVSGRSQPNREYCDERGGLLQENLLEHGIRPRGRRRRVPRRRRRAHSALGQGEIPARPNLARTR

SEQ ID NO: 253658 - protein, 89 aa, Zea mays
  Clone ID: MRT4577_162917C.1.pep
KQEHPGALKTKISWVQGPPPSGFRKPAKGAQLKLCRSPKGPPPAWGVNLAKFFPGKPIPQLGGSHCPPGQKPPCFLPGGRRCPPQGGVF

SEQ ID NO: 253659 - protein, 84 aa, Zea mays
  Clone ID: MRT4577_162918C.1.pep
NFMGKILGKSGGGQKPFRKTTYSGGNGPKETNWPLVKFLAPAARGGWPGATFKFFGLTGGFFFPGKPLGFKTNKAGFIKGLKTV

SEQ ID NO: 253660 - protein, 66 aa, Zea mays
  Clone ID: MRT4577_162919C.1.pep
MAMRTALTSLPALLLLSEEERAKESVYIQKMERERQEKLKKRLEQEKADSDKAKPADTDKKAEGST

SEQ ID NO: 253661 - protein, 205 aa, Zea mays
  unsure (1)..(205): unsure at all Xaa locations
  Clone ID: MRT4577_16291C.1.pep
MNHGGGADNGVSPGNVPXATTARRXVPAALERRVRAAELFMRCAACGLAVLAAALLGADRQTRTFFSVEKAARFTDMQSLVFLVIANGMAACYSLLQGGRCLVSILTGGGVLINRPMAWAIFSCDQVMAYFTISAVAVAMEAAMIGKYGSQQFQWMKTCHLYKRFCAQAGGAVACAVAASLNMVGVSLVSAFNLFRLYGSGKGRK

SEQ ID NO: 253662 - protein, 87 aa, Zea mays
  Clone ID: MRT4577_162920C.1.pep
MAMRTALTSLPARLRAPAPPAATGGRRLLSDGKGRVLSEEERAKESVYIQKMERERQEKLKKRLEQEKADSDKAKPADTDKKAEGST

SEQ ID NO: 253663 - protein, 117 aa, Zea mays
  unsure (1)..(117): unsure at all Xaa locations
  Clone ID: MRT4577_162921C.1.pep
AVRPTTLDLYLLQHKPFSXRPLTIGXHKHCPFLFTRLGKTTLTHHMGYSIYCLXSAQXVSTLYYACFPXLSLLKATTMFPXLTIPWIEPFYYISVSKNAYNTXDKLFGXDTLKAYWN

SEQ ID NO: 253664 - protein, 124 aa, Zea mays
  unsure (1)..(124): unsure at all Xaa locations
  Clone ID: MRT4577_162922C.1.pep
LDRCYLPHTQTAKTMSSGETTYPLPPLHIITMGAKRFRCPTEPLRSSIIGIKPARIHENTXNTPPCSELXITKYLYRNPARPHXTSMLPEIAHNLSTEITALDLNRDQNTVXPPPQRKHNLRIG

SEQ ID NO: 253665 - protein, 45 aa, Zea mays
  Clone ID: MRT4577_162923C.1.pep
PHFRPKDHHVLPVLAQDVMRALYQRVYFHRVCHCFPPKTVSHKPR

SEQ ID NO: 253666 - protein, 66 aa, Zea mays
  Clone ID: MRT4577_162924C.1.pep
ERQLRALSSRVKIYHEYKHKCMQHSGNKKHMTMCHTDYDLSRICKVKLSLPDRQYRMTPINRPLQD

SEQ ID NO: 253667 - protein, 265 aa, Zea mays
  unsure (1)..(265): unsure at all Xaa locations
  Clone ID: MRT4577_162925C.1.pep
MLARKKKKKKKTAGYIIGHAVRLAYLYYCTCSPAPGSHEYQPRRAAAMQNLLSGASHETLPDSFIFPAEQRPPASAAAVALPVIDLSGPRDEVRRAVLEAGKELGFFQVVNHGVPEQVVRDMEACCEEFFRLPAEDKAAFYSEDTSKPNRLFTSTTYGTGGERYWRDCLRLACGFPVAADARDAWPDKPDGLREAAERFVASTRRLNLELLRLLCEGVGLRPDYFEGDLSAGDVXVVNVNHYPPCPDPGRTLGLPPHCDRNLITL

SEQ ID NO: 253668 - protein, 100 aa, Zea mays
  Clone ID: MRT4577_162926C.1.pep
LEKIGATRVVPKPLDPSFQLAVVVFAQTKLPMSKFQESLPGFRNFFLSKLTNFFVTPGNFFGYGFSKVMSKSKFFSPDYESEPVDSPPPFLSRLNKRGPL

SEQ ID NO: 253669 - protein, 167 aa, Zea mays
  unsure (1)..(167): unsure at all Xaa locations
  Clone ID: MRT4577_162927C.1.pep
HRSLIWRSRVSSAGSLSLSLVCTFEVVRTXSSILLYIAHLALRLVPMRKVPAVFSRGTSSSSVPLVGVYGTVFAFGMAMLQKKQVHASRSFRGGVGVPSNELLRSCSTLGRGGRARLAGSTCPPEACSLRVGRAASGHVFSQPSYAALIERRCRFAPRGMCIGVPGR

SEQ ID NO: 253670 - protein, 78 aa, Zea mays
  Clone ID: MRT4577_162928C.1.pep
QESLIIRTSATSVCCTNVWINDKDVPMLNKLSVSPTGQWGPAANQRERPHIQVSIWFCSIEGDCRSGHITVCVDTVVF

SEQ ID NO: 253671 - protein, 65 aa, Zea mays
  unsure (1)..(65): unsure at all Xaa locations
  Clone ID: MRT4577_162929C.1.pep
XPTGKTDPGKWDTKSPPERPFYYVFKKRTGQPNLKGSHIRDPGGGGGXPPHYFLKCSSKRARGGG

SEQ ID NO: 253672 - protein, 128 aa, Zea mays
  Clone ID: MRT4577_16292C.1.pep
MGISRDSMHKRRATGGKQKAWRKKRKYELGRQPANTKLSSNKTVRRVRVRGGNVKWRALRLDTGNYSWGSEAVTRKTRILDVVYNASNNELVRTQTLVKSAIVQVDAAPFKPGYLTHYGSDIGRKKKG

SEQ ID NO: 253673 - protein, 403 aa, Zea mays
  Clone ID: MRT4577_162930C.1.pep
MYVVKDIGGAIGLMAVALVLLGTWPVVLAVLERRGRLPQHTFLDFSATNFMAAVLIALTFGQIGPASSTPNFLTQLTQFKNNWASVLFAMAGGVTLSLGTLATQYGWAFVGLSVTEVMASSLKVVIGTTLNYFLDGRMNKAEILFPGVGCFLIAAILGSLVHASNAADNQEKLANNNASNAAAAADEEKDLTKHLLELEIQSQEAEPDAGTAGFLVGLEEKRSIKVLGSHTLLGLGIVVFAGIFYALFAPAFNLATNDQWHTLPAGVPHLAVYTAYFYFSLACLAVSAALNVWLLYRPMVGVPSSTLAAYVLDGDGRGLAMLAGMLCGLGNALTFMAGQAAGYAAADSVQALPLVSTFWAVALFGEYRRSSRRTYTLLASMLLMFTVAMVLLMASSGSRSIIH

SEQ ID NO: 253674 - protein, 233 aa, Zea mays
  Clone ID: MRT4577_162931C.1.pep
MYVVKDIGGAIGLMAVALVLLGTWPVVLAVLERRGRLPQHTFLDFSATNFMAAVLIALTFGQIGPASSTPNFLTQLTQYGWAFVGLSVTEVMASSLKVVIGTTLNYFLDGRMNKAEILFPGVGCFLIAAILGSLVHASNAADNQEKLANNNASNAAAAADEEKDLTKHLLELEIQSQEAEPDAGTAGFLVGLEEKRSIKVLGSHALLGLGIVVFAGIFYALFAPAFNLATNDQ

SEQ ID NO: 253675 - protein, 90 aa, Zea mays
  unsure (1)..(90): unsure at all Xaa locations
  Clone ID: MRT4577_162932C.1.pep
VVEVFSRIDXRFDLMXGKRAFVQWYVGXGMEEVEFXEAREDLDAFVRVWGXVGDEFWEGEFEHQGAQLFKMDWNGVVRVLFFWDHLLCLE

SEQ ID NO: 253676 - protein, 72 aa, Zea mays
  unsure (1)..(72): unsure at all Xaa locations
  Clone ID: MRT4577_162933C.1.pep
KKYFPQPGLEAPTGLFLGPNKNMVKQAXPGALIRGKKRFGNKTIKKSGEAFFAFPFEKAIPPGKSKMVVKNI

SEQ ID NO: 253677 - protein, 140 aa, Zea mays
  Clone ID: MRT4577_162934C.1.pep
MADQETPVAVEAPTPVLGEPMDLMTALQLVMKKSGAHDGLVKGLREAAKAIEKHAAQLCVLAEDCDQPDYVKLVKALCSEHNVHLVTVPSAKTLGEWSGLCKIDSEGKARKVVGCSCVVVKDYGEESEGLNIVQEYVKSH

SEQ ID NO: 253678 - protein, 129 aa, Zea mays
  unsure (1)..(129): unsure at all Xaa locations
  Clone ID: MRT4577_162935C.1.pep
TKNKSIELRPHYDXLKXGTDVPTPNXXLAPTAXXCIXDXXNLGWIXXXIGXNNFLNDPVQVKFIXYDXRXLGXFVXDXFEXASSAPAADXSXFXTPXRFXFXSXPRAXGLQPGGXXXSRAAATAGGRRL

SEQ ID NO: 253679 - protein, 96 aa, Zea mays
  Clone ID: MRT4577_162936C.1.pep
LQNHQSKIVIISKKKKKKKKKKKKKKKKKKKKKKKKKKKKKKKKKKKKNNRNKKKKKHRERGVHKRNLVWIFPIFQLPLKLPWPTFKGAQSAKTVA

SEQ ID NO: 253680 - protein, 88 aa, Zea mays
  unsure (1)..(88): unsure at all Xaa locations
  Clone ID: MRT4577_162937C.1.pep
MAESTARTVXDVNTDEFVKAYSGHLKRSGKMELPEWFDIGKTARLKERAAYDSXFFYIRAASIARKIYLREGIPAGGFQKIYGDRLRN

SEQ ID NO: 253681 - protein, 133 aa, Zea mays
  unsure (1)..(133): unsure at all Xaa locations
  Clone ID: MRT4577_162938C.1.pep
MMLYTCNRRRCDPAVDPAIQLXSEHGFEGTVRCNDSVKFMNTATTYRENSXRYQGILLKDDMVTPGDVAKYRPTPDQVPGCTLKFLHRRIPSCXTEIMLLLLRQVXVEGTQNLNVINQASNMWQVCFYYARTL

SEQ ID NO: 253682 - protein, 70 aa, Zea mays
  Clone ID: MRT4577_162939C.1.pep
PTRPPTRPRTRGRTRGRVIRRYCCNRRHLRMLMLQWTTRDIQKHRGPLIHRLVGVIVQCPLRALKLLQCS

SEQ ID NO: 253683 - protein, 60 aa, Zea mays
  unsure (1)..(60): unsure at all Xaa locations
  Clone ID: MRT4577_16293C.1.pep
MALPNQGTVDYPSFKLVIVGXGGTGKTTFAKKHITGXFENKYEPTIGVKNHSLDFTTNCG

SEQ ID NO: 253684 - protein, 153 aa, Zea mays
  Clone ID: MRT4577_162940C.1.pep
MSGVQSKAARLQKEWKEKLSADRERKTATSLCLKHSEVPASMMKQFNALMEMQEVMFAEMRETYKNDIKEMLLKRTAPWVKHLEERIGQQEGDAISERPKPGEKVEELSSGTDEDTENLTVRSKKGKQDAKPLNSSHVLKSSLEREGEALHHG

SEQ ID NO: 253685 - protein, 33 aa, Zea mays
  Clone ID: MRT4577_162941C.1.pep
SLCHCFQDFYFSQLLAFHLNSKKLMCNEDFLFL

SEQ ID NO: 253686 - protein, 599 aa, Zea mays
  Clone ID: MRT4577_162942C.1.pep
MPGFAQRLAGIPWRSIARQGLSRVFLVAKAYCVIHIANEHLCSVALVRGASMLPALNLADDVVAVDRVSVRFGRVAPADIVLMISPEDPRKWLIKRVVGMQGDSITYLVDPGNSDSSRTIVILNELELCAEGVVFSVRPTKKSWKNISNISCGEKVKGQFCGKHTDEEVILRNAATIKDMENILPIVWAVTQSELVRSNPRVMKAGEHQEDKEGECFVRFGHGGGLTPFGITVKVGTCEERKRFGIWVSRRSQMEVRCQTSFCQNEDGFPKLLRACTVRLEIRSQPEYDGREFVEHGTEKCVVTVYIGSSLHHVEWSVTAAGHRFKDTCQVVARKALRTLCQLYEEEVADTPLRFFPPFQRDRPVWMARMRALEGQQLLEDDPSVVYLTAYLLTLDAQRCRKLNRKLHVDLTSAQARVAALESREAIVVEALKQAKDEHIQKLMEAYLVTHNQRRALRTQEPAPSNPVQPRRAEDPQILEGHPVSIRGDKKTWELPEGAIVLEGIPVFPQAMNKQEHPESSQDPSLELFEPFSVKKIPAPLREIKEEAASTPPAPPPSEELQEPVPLEEEFDPVLPSQSPPEEVINISSLLTHPGDVSD

SEQ ID NO: 253687 - protein, 297 aa, Zea mays
  Clone ID: MRT4577_162943C.1.pep
MDESGVTKEIGLLGLVIVSHLSPRGSGALQVVSELLGWPQDVALSLIQKFLSPNYFIKKVLAFIPSFQKCFPPFLLSEVRWRCVAKTSFCQNEDGFPKLLRACIVRLGIRSQPEYDGREFIEHGTEKCVVTVYIGSSPHHVEWSVPAAGHRFKDTCQVIARKALRTLCQIYEEEVADTLLKFFPPFQRNRPVWMARMRALEGQLLLEDNPSVVYLTAYLLTLDARYDFLARHHRQMIARAEDAEKRIRQLHVDLTSAQARVAALESREVIAVEALKQAKDEHVQKLMEAYLVTHNQR

SEQ ID NO: 253688 - protein, 325 aa, Zea mays
  Clone ID: MRT4577_162944C.1.pep
MEVRCQTSLCQNEDGFPKLLRACTVRLGIRSQPEYDGREFVTVYIGSSPHHVEWSVTAAGHRFKDTCQVVARKALRAMCQIYEEEVADTPLRFFPPFQRDRSVWMARMRALEGQQLLEDDPTVVYLTAYLLTLDTHSSPCNCLGDALESREVIAVEALKQAKDEHVQKLMEAYLVTHNQRRALRIQELASSNPVQPIKAEDPQILKGHPVSTRGEKKAWELPEGSIVLEGIPVSPKAMDKQEHPESSQDPPPELLEPLTMKKIPAPSLEVKEEAASTPPAPPPSEELQEPVPLEEEFDPVLPSQSLPEEVINISSLLTHPGDVSD

SEQ ID NO: 253689 - protein, 34 aa, Zea mays
  Clone ID: MRT4577_162945C.1.pep
RVKLVGCMFKCDIYIIVKNWGSQNLGFVLSWMVF

SEQ ID NO: 253690 - protein, 360 aa, Zea mays
  Clone ID: MRT4577_162946C.1.pep
VRCQTSFCQNEDGFPKLLRACTVRLGIRSQPEYDGREFVEHGTEKCVVTVYIGSSPHHVEWSVTAAGHRFKDTCQVVARKALRALCQIYEEEVADTPLRFFPPFQRDRPVWMARMRALEGQQLLEDDPTVVYLTAYLLTLDAQYDFLARHHRQMIARAEDAEKRNRQLHVDLTTAQARAAALESREVIAVEALKQAKDEHVQKLMEAYLVTHNQRRALRIQEPASSNPVQPIRAEDPQILEGHPVSIRGEKKAWELPEGAIVLEGIPVSPKAMDKQEHPESSQDPPPELFEPLTMKKIPAPSLEVKEEAASTPPAPPPSEELQEPVPLEEEFDPVLPSQSPPEEVINISSLLTHPGDVSD

SEQ ID NO: 253691 - protein, 87 aa, Zea mays
  unsure (1)..(87): unsure at all Xaa locations
  Clone ID: MRT4577_162947C.1.pep
RVPGGACPLLARLLPPAGGRPPPCARFLCWSFVQGLFFLPLCLCGRVPSPFGGGLSSCCSGPVSARCWPAYAPVALPGRVCXKKNXX

SEQ ID NO: 253692 - protein, 94 aa, Zea mays
  Clone ID: MRT4577_162948C.1.pep
VVAVPLLPRVGAGAVRDDAAAALARRLRVLRLRPNRPRAPPPHAPLLPPPPLTPSAPTCHPQPNHTNPSNLRWIHHRRIRREPIYNHGMMNPTT

SEQ ID NO: 253693 - protein, 97 aa, Zea mays
  unsure (1)..(97): unsure at all Xaa locations
  Clone ID: MRT4577_162949C.1.pep
SAGASTIAPAATRSCPTAIAASTPSSSRQPGRRRRRCXSTRSGGRGVGSAWCFSDPEMRRRRRVASYKAYSVEGKVKASFRRGFRWIKAKCSELIHG

SEQ ID NO: 253694 - protein, 77 aa, Zea mays
  unsure (1)..(77): unsure at all Xaa locations
  Clone ID: MRT4577_16294C.1.pep
SSIGRLPLVLLCSTFSSEDSRKSDAVSCRRLEGWXLYDGPRWGIIYAASCTHLHHSVCALSSHVDCRPKFVVSHLAR

SEQ ID NO: 253695 - protein, 52 aa, Zea mays
  Clone ID: MRT4577_162950C.1.pep
GIEQSKHVREQHRLRKERKVAHSITLYAEKVNSGRIRRYYMGRILVICKLKS

SEQ ID NO: 253696 - protein, 45 aa, Zea mays
  Clone ID: MRT4577_162951C.1.pep
RLTCPIVPPKLTSLADDSQLHDFQNLIPTQINHIAYTYHFSQLLS

SEQ ID NO: 253697 - protein, 400 aa, Zea mays
  Clone ID: MRT4577_162952C.1.pep
RPGFLDVQAAPSNAASAHASAECKLIDRYEAPPFAQSVYPLLADLYHIFADIPSIGRAMVSAQKLLTQVHKGEPISSDMLSDVYVFRIAIEALRMGLNSAARSQIDTGDKHGSNDLDFSKLQSDEKCHILLVQALRSQLREFGSVVAIVDASCLAGIRRHWNTPVPSEITQLASRCFNHYGAENDDKIEVPSADDTDKKSWISEKPVVAVGAGGTALLGFSSLSKSLQASAFLKMAPYKSPAVLKYGLMQLQRHAAIVLSKILPHGVVTAGSKASALQFTASAEKIRAVTHTVISSAERTSLLVMRTSFYEIMQKRHRQPFRIFPWATFGCSMAACAGLVMHGDGIECAAEAAPSVPMIASLGRGLESLRLTSQEVRQTKGQNVKEALRALMSSLKKSAK

SEQ ID NO: 253698 - protein, 123 aa, Zea mays
  Clone ID: MRT4577_162953C.1.pep
GNRLERRQGRGPLGIPDGAKRGKAPRAKKGGNPRAFQRGTWRKSPKRRSLRAAPEKKMGGTEQEVRLGTQKRAPLGPPEGRRYLFSLFLFWFFFFFFFFFFFFFFFFFFFFSQDLVLTYNENP

SEQ ID NO: 253699 - protein, 57 aa, Zea mays
  Clone ID: MRT4577_162954C.1.pep
AKKLLFPSSSPVARSYLKRSPFGNLGFFCPKSPPNPPFVVLHQVPLYSTFAVYCSIL

SEQ ID NO: 253700 - protein, 128 aa, Zea mays
  unsure (1)..(128): unsure at all Xaa locations
  Clone ID: MRT4577_162955C.1.pep
GQIALMRWITDXLDAKEVSFVQNGLYLKVQVTLVRFQAKQHGFAHSIRPVTNFNELALHFIECMYVHLENVRPKMKDQFPRAVQANVSAHEMQAQVAHTVQTNVPAYMPFSGGVREHHVDFAPEVNQG

SEQ ID NO: 253701 - protein, 209 aa, Zea mays
  Clone ID: MRT4577_162956C.1.pep
MAPLSWRHHTLLQALLHRGPLSERDFHAVFAGVSGKNPATHQQLFNDTLLKINKDLAYLQFELRACMNQYDGMVYYGVVNNIADEESKLGTKYSVPQIAFYKGLLEAIVQEAGNDGSITSIDALNVRLDNQVAVLDGSQDSQSRLPSSIKNFSMSQKEKTLDELIRDRWLSYTATGKIGLGTRSFLDLRSWFRGNDIPSCVVCNEACIK

SEQ ID NO: 253702 - protein, 208 aa, Zea mays
  unsure (1)..(208): unsure at all Xaa locations
  Clone ID: MRT4577_162957C.1.pep
NPPNAYRNGQETLGFRRRRRCRCGCRPRLHRWQRQGRRNSLAAWRLTGEGIHGHSMFFDALVQLIPPRFYLSADDDVRPYYQGLSKAAKAAMKAQSRANIKAARRARLDPASPPSSTLDLLKKTVADQEAEEKKEEEEDNSQDGSQKSDDEATSEGGDDDQDXEEGDEEEQAEDEKEEMQXPRQQXSEDRSVTYEELRERLHRRITEL

SEQ ID NO: 253703 - protein, 93 aa, Zea mays
  Clone ID: MRT4577_162958C.1.pep
MSSLLNKAKDALGKSGGSGSGHTEGGQQQSSIEKGVSGQAHTQIDNLTDRAGFGDKYDDKINKFADGQINNQIPGGAGNNAGGSSGGLGGLGK

SEQ ID NO: 253704 - protein, 58 aa, Zea mays
  Clone ID: MRT4577_162959C.1.pep
SDSRDSAPAVSRIQSTRGYTAPSARLVASLRFALLSTHTRLRHDIGGATLPVAGSAAS

SEQ ID NO: 253705 - protein, 369 aa, Zea mays
  Clone ID: MRT4577_16295C.1.pep
MFSQLPSVVLTSAICKTSIKADSRTLVLEKKPCWAVRSRSHQIGSITRRDISPPRPIGMAALLLRRLAGTHRGRVPLGAAAAAACGGATLFYASSSPTVAHLEETGKAAEQVALNPDKWLEFKLQEKATVSHNSQLFRFSFDPSTKLGLDVASCLITRAPIGEEAEGRRKYVIRPYTPISDPDSKGYFDLLIKVYPDGKMSQYFASLKPGDVVEVKGPIEKLRYNPNMKKQIGMIAGGSGITPMLQVVRAILKNPNDNTQVSLIYANVSPDDILLKRELDRLASSYPNFKVFYTVDKPSTDWRGGVGFVSKDMVLKGLPGPAEDSLILVCGPPGMMNHISGDKAKDRSQGELSGVLKDLGYTAEMVYKF

SEQ ID NO: 253706 - protein, 54 aa, Zea mays
  Clone ID: MRT4577_162960C.1.pep
SQHRISVHQSQTRRGTAYNRKYTYTVTGHGVRIRERKNCRPVWIRQPVRFGGRV

SEQ ID NO: 253707 - protein, 96 aa, Zea mays
  unsure (1)..(96): unsure at all Xaa locations
  Clone ID: MRT4577_162961C.1.pep
YRLSIFFFLENTGELRIIILRKERFKVDRITTPRPNPQASPTRGKLDGPYETLFKVTIIPKLSKCFAPALLQLINXSTNNIFVKPTEGLTPSKRLE

SEQ ID NO: 253708 - protein, 94 aa, Zea mays
  Clone ID: MRT4577_162962C.1.pep
VCCIVALRISTGEPYREQRMSHSARRSASRRRPRPLPPRRSSWSPEQRGSPLVTQPILFLSWLAHRVLRPVRVPSAIALTRVCVVAGSLWCSVV

SEQ ID NO: 253709 - protein, 93 aa, Zea mays
  Clone ID: MRT4577_162963C.1.pep
MAPAPAALSAANALSLLAPARVSSGRWSSLSVSVSARPVTGVVSVAAATAQRRLVAAAAATEMAPAASGEEGSKPFVEEMRAVAMKLHTKDQA

SEQ ID NO: 253710 - protein, 143 aa, Zea mays
  Clone ID: MRT4577_162964C.1.pep
MMKHSSSLCLLFLLALCTTLLACGLVQAQVLFQGFNWESCKQQGGWYNRLKTQVDDIARAGVTHVWLPPPSHSVSPQGYMPGRLYDLDASKYGTAAELKSLIAAFHGRGVQCVADIVINHRCAEKKDARGVYCIFEGGTPDDR

SEQ ID NO: 253711 - protein, 151 aa, Zea mays
  Clone ID: MRT4577_162965C.1.pep
MSGRKKTREPKEENVTLGPAVREGEHVFGVAHIFASFNDTFIHVTDLSGRETLVRITGGMKVKADRDESSPYAAMLASQDVAQRCKELGITALHIKLRATGGNKTKTPGPGAQSALRALARSGMKIGRIEDVTPVPTDSTRRKGGRRGRRL

SEQ ID NO: 253712 - protein, 195 aa, Zea mays
  Clone ID: MRT4577_162966C.1.pep
RSGGGRDLLLCFQFVACCLLVLLYSLRSGSASSAGHGPRSYPVIGCLLAFYENRRRLLDWYTEMLAASPTQTIVVDRLGARRTVVTANPANVEYILLGNFGNFPKGKPFTDVLGDLLGNGIFNVDGDKWFAQRKLVSHEFSARTLRELEIAVLEAEALDRLVPAMEAAAEPGGGAVDMQDVLRRFAFDVICRVSL

SEQ ID NO: 253713 - protein, 519 aa, Zea mays
  unsure (1)..(519): unsure at all Xaa locations
  Clone ID: MRT4577_162967C.1.pep
FNSTPKPTLPNSPTPPPRRVEIAQAFASSNSTTQPTRRSNGEHGARAGGDPRRLPRRLRLRRRYLRVPXEGARREGGKGDSIWDVFTDDKEHVLDRSNGEIAVDHYHRYKEDIELMASLGFSAYRFSISWARIFPDGLGGKVNDQGVAFYNDLINFMISKGIEPYATLYHWDLPNNLQKTLGGWISDKIVEYFALYAEACFANFGDRVKHWITINEPLQTAINGYGIGIFAPGGCQGETARCYLAAHHQILAHAAAVDVYRRKFKAAQGGEVGLVVDCEWAEPFSENVEDQIAAQRRLDFQLGWYLDPIYFGDYPESMRQRLGSDLPTFSEKDKEFMRNKIDFVGVNHYTSRLIAHLQNPNDVYFYQVQQMERIEKWNSGEKIGERAASEWLFIVPWGLHKSLNYIAKKYNNPAIYVTENGMDEEDDQSATLDQVLNDTTRVGYFKGYLNSVAQAIKDGADVRGYFAWSFLDNFEWAMGYTKRFGIVYVDYKNGLSRHPKASALWFSRLLKGEAGTGTS

SEQ ID NO: 253714 - protein, 90 aa, Zea mays
  Clone ID: MRT4577_162968C.1.pep
RKPCHNPRQTPPARLRKPRRERRNPQRKLPACPCKPRRELTAICPPPQSTPTKATIPNGNRSPRCDASPRKPRRELSAIRPTHLQLQGGA

SEQ ID NO: 253715 - protein, 432 aa, Zea mays
  unsure (1)..(432): unsure at all Xaa locations
  Clone ID: MRT4577_162969C.1.pep
KKKKKKKKKKKKKKKTHASEGTSGAFASPPPHHHHHHHKSTIPKLTFPNSPTPARRVEIVHALASGSSTNKPTGRSNGEHGARAGGDPRQLPRRFRLRGRHLRVPXEGARKEGGKGDSIWDVFTDDKERVLNRSNAKIAVDHYHRYKEDIELMASLGFSAYRFSISWARIFPDGXLGEKVNEQGVAFYNDLINFMISKGIEPYATLYHWDLPNNLQKTLGGWISDKIVXHCRHLKRVVXCMITEVFLTRKXWLHMRFFSTQPFCFKSVCSLICCFFTSFSPXNIXEYFALYAEACFANFGDRVKRWITINEPLQTAINGYGIGIFAPGGCQGETARCYLAAHHQILAHAAAVDVYRRKFKAAQSGEVGLVVDCEWAEPFSEKLEDQIAAQRRIDXQLGWYLDPIYFGDYPESMRQRLGSDLPTFSEKDKNSS

SEQ ID NO: 253716 - protein, 107 aa, Zea mays
  Clone ID: MRT4577_16296C.1.pep
PDATNHLVQSPSPPLGAPGGRVYPNHRADLGASGGAPSNGPRRRGGPRKAEQLRCDATRCQHPPPFEPTFSLCLFSGGRGEQLFVSGPIPVVFLSLLLIQGGGLDLF

SEQ ID NO: 253717 - protein, 68 aa, Zea mays
  Clone ID: MRT4577_162970C.1.pep
MGSTGREPEVTRADFPDGFVFGVATSAYQVSTRPPPSPSHPAGPPSLAVPSRPAACLRLAYACTPRDS

SEQ ID NO: 253718 - protein, 118 aa, Zea mays
  unsure (1)..(118): unsure at all Xaa locations
  Clone ID: MRT4577_162971C.1.pep
CAGFLPSAXLFRVSAARRCAASGCFLGVLGPGSPCVALVGVFAPWACPSGVFVCGCPGXVXFSGFSSVGCXXVFALACLSFLVAXCLVPPPGXLRGCAALSLLRASCGGLCLVVVVAA

SEQ ID NO: 253719 - protein, 96 aa, Zea mays
  unsure (1)..(96): unsure at all Xaa locations
  Clone ID: MRT4577_162972C.1.pep
RTLADYNXQRQSTLHLVLRLIGGMQIFGKTLTGKTITLEVESSDTIDNVKAKIQDKEGIPPDQQRLIFAGKHLEDGRTLADYNIQKESTLHXVLRL

SEQ ID NO: 253720 - protein, 191 aa, Zea mays
  Clone ID: MRT4577_162973C.1.pep
LPRAAVALLAMAGAPDSTSLLLSSPSARWCVSCAGSDSARRLSLRTRRVSQLVISLLASAPAPSSCSPIDVCAWLLFSSPAYSSPELLLYELALGHGRRRRHLPFGARRALSPSRGALSLPRAVPAPARSRLLMLGAPLCSAPPRRVPLPSHGGWSLLHSFLVPRPPPWIPSSRAPALLSVCARAGLGVLR

SEQ ID NO: 253721 - protein, 85 aa, Zea mays
  Clone ID: MRT4577_162974C.1.pep
MSNKIPIADNSKGRTKGLFSFLGLTGTVCATSFSIFGFLFDVFSLGAVSCFSFLFSFFVEFVELSRLLSREEVGLTSNNFDSAYL

SEQ ID NO: 253722 - protein, 78 aa, Zea mays
  Clone ID: MRT4577_162975C.1.pep
GDWLDGGAAGLDDMKRQEQLKEAEDMYMIYNYCTDSKEVPRWLPHGMWVGVERVQVMVIRLLFHFFASLLEEREQEQL

SEQ ID NO: 253723 - protein, 228 aa, Zea mays
  Clone ID: MRT4577_162976C.1.pep
MAEGRSEPLRLGSTAPNFKAETTAGPIDFHEFIGDSWAILFSHPADRTPVCTTELGAFAKLEPEFARRNTKLIGLSADSIESHDEWVKDIDEVTGSNLKFPIIGDKERKVALLYDMLDHQDATNVDQKGIAFTIRSVFIIDPKKTIRLILSYPASTGRNTAEVLRVLDSLQTGDKHRVTTPINWVPGDDVIVHPSVSNEQAKDLFPDFRIVKPYLRFTPLAKEKTSAA

SEQ ID NO: 253724 - protein, 126 aa, Zea mays
  Clone ID: MRT4577_162977C.1.pep
AKEGMSAVFGEISSKPVTAGLRKVTDDMKSKNRADRSGVVSSTAPAPAAAPEKTSRAGSFSFKSGPPKLELQMGRKWVAENQVGKKTLAIDDCDSRQSVYVYGCKDSVLQVNGKVNNITGDKCTKV

SEQ ID NO: 253725 - protein, 93 aa, Zea mays
  Clone ID: MRT4577_162978C.1.pep
MQGAWETGVLQRAPNTISPLISVTNEESYLLGGTGGTDGGSFILLGTPLSIPGSLSCSLEMDGSRRGPQSAGAAGTPYGTSLQWEGRSVLAAV

SEQ ID NO: 253726 - protein, 56 aa, Zea mays
  Clone ID: MRT4577_162979C.1.pep
NPFKPNFQKTFFFWILGPFKQPRKPLFTPFFLPPPLNPHQLFNFNFWREKKKFFFF

SEQ ID NO: 253727 - protein, 112 aa, Zea mays
  Clone ID: MRT4577_16297C.1.pep
LQAHLEETGKAAEQVALNPDKWLEFKLQEKATVSHNSQLFRFSFDPSTKLGPDVASCLITRAPIGEEAEGRRKYVIRPYTPISDPDSKGYFDLLIKVYPDGKMSQYFASLKP

SEQ ID NO: 253728 - protein, 112 aa, Zea mays
  Clone ID: MRT4577_162980C.1.pep
PKGDFWILTQGSLPPTRSLSRRSLKLSQRVFKRPTRLPPPYNCCSGPPKRRCQIFGLANRGASFFRGVTESSQFLASPRLVVKRPFVFLKPPLGAALLKMGPLDNFSGALVA

SEQ ID NO: 253729 - protein, 204 aa, Zea mays
  unsure (1)..(204): unsure at all Xaa locations
  Clone ID: MRT4577_162981C.1.pep
PRTWPGSHLDAVKRMVEEYRRPLVKIEGASXTVAQVAAXXARXXARVELDESARGRVKASSDXVMDSMMNGTDSXGVTTGFGATSHRRXKEGGXLQRELIRFLNAGAFGTGDDGHVLPAAATRAAXMLVRINTLLQGYSGIRFEILEAIAVLLNANVTPCLPLRGTXITASGDLVPLSYIAGLVTGRXXSTAVAPDGRKVGAAE

SEQ ID NO: 253730 - protein, 134 aa, Zea mays
  unsure (1)..(134): unsure at all Xaa locations
  Clone ID: MRT4577_162982C.1.pep
ADRNIPFREKXCYTGICLLIILVCGQLPLYGIHXETEADPFYCMRIMLASNRDTAMELGITPIVTXGMVMQLLAESKIIEADNSVRDDGALLNSAQQLXTLLTAIREAVAYXLSRMHGSXVSQLLTGNAILIIL

SEQ ID NO: 253731 - protein, 259 aa, Zea mays
  unsure (1)..(259): unsure at all Xaa locations
  Clone ID: MRT4577_162983C.1.pep
IGTLEAGRELSLRSLWLGKGSVLPGSALFGAAALASSDLVTRQAGELDACPGYAASNXWTRGGXTADLALAGTACNVYGDDLTDLKLEVEYQTENRIHVKIYDAAEQVFQIQESVWPRPQSEGDVDPASSALVFTHTANPFSFAISRRETNETLFDSSAASLVFETQYLRLRTRLPESPNLYGLGESTDDFHLNTTNYTRTLWXRDAYGTPPGTNLYXSHPXYFDHRGENGTPRVFLASSQGMDIXIDDTRRQFLEYTL

SEQ ID NO: 253732 - protein, 97 aa, Zea mays
  unsure (1)..(97): unsure at all Xaa locations
  Clone ID: MRT4577_162984C.1.pep
EDCPSMTGTQKKIMFTIDKLIYKIXVKQHQALASDQMDNLIFQLYLYEKSRSPASYFNPVYQKNTRAVLHDDNTYHSECHSNPTELTIHPMEYGNEK

SEQ ID NO: 253733 - protein, 84 aa, Zea mays
  Clone ID: MRT4577_162985C.1.pep
ADQILNNLHVHPPACHLTCQSLGCIASCLPGNCCGNHQSCHHSSICQLHFLGTLNSARSIDKPRIIEPNQIRPASFASLTELSL

SEQ ID NO: 253734 - protein, 37 aa, Zea mays
  Clone ID: MRT4577_162986C.1.pep
FPRPLSITACSDTYPPLCTCRPIVSITCRRCPSSAGP

SEQ ID NO: 253735 - protein, 145 aa, Zea mays
  unsure (1)..(145): unsure at all Xaa locations
  Clone ID: MRT4577_162987C.1.pep
FQFDLQKYFITILLHSYMHLNRFTFCFYHKXXATQXKXXXQXXQRSQXQQSXNXXAKRXRTXXPRXPXXXXANKRKKXXXXKTTGRAGGTXPKRQXXXPXRRGRAPRQSXPXRRQGRGGRGXXXGKXGXXXXTXXXAXXXXRXTR

SEQ ID NO: 253736 - protein, 470 aa, Zea mays
  unsure (1)..(470): unsure at all Xaa locations
  Clone ID: MRT4577_162988C.1.pep
MQPSKVSMPQDQELPCGGQPLAIVSALSAGSFGGAAGAXDAAAGDDGNQPVEPRRMMDELDAAAGDGGGGGGDEAGAAVFICPISLEPMVDPVTLCTGQTYERANISRWLALGHRTCPTTMQELWDDALTPNATLRQLIAAWFSRRYTRFKKRSADFHGRAADLVGSLRGTAVPRRQPLKGQARVAALRELRTLAAAHQSVTKAIAEAGGVALLTSLLGPFTSHAVGTEAVAILVSGVLLDADTKAALMQPAKVSLVVDMLNEGAADTKINCVRLIRILMVERGFRPETVASLSLLVGVMRLIRDKRHPDGVAAGLELLNSICAVHRPARCMVVSIGAVPQLVELLPELATECVEPALDILDALSAVPEGRMALKDCPRTIPNAVRLLMRVSEACTRRALSMLWTVCRMAPEECAPAAVEAGLAAKLLLVIQSGCAPELKQKASELLKLCRLNYTDTLFISKCKLTRTIQ

SEQ ID NO: 253737 - protein, 133 aa, Zea mays
  Clone ID: MRT4577_162989C.1.pep
MDVGVLKETQGIEHGHFSQASAGPRCHVLHHLCDRYGANGERCNTSSIAVDTVNTGATVPWGDTIFSVEVKNRCPCAVRNVRLDGGGFATTVDVDQAAFRADGGGGGSGVYLVNGDEPIASMAAVSFQYAWDR

SEQ ID NO: 253738 - protein, 274 aa, Zea mays
  Clone ID: MRT4577_16298C.1.pep
YDIKVELNLSFSEAANGCIKQVSYHAKNVCDSCGGRGHLPNAKIYVCPSCKGLGRVTMYPFTSVCSSCRGIGKVIKDYCLTCQGSGVVGGMKHVTLDMPAGLDSGDTINVPEAGDSGGLGVQSGNLHIKIQVEIDPLFTRDGADIHVDKRISFTQAMLGGKVEVPTLNGKTEVKIPKGVQPGQVVVLRGKGLPNPSGYLGDQYVRFRIHFPSVVTERQRMLLEEFAVEEAAKEHNTFVAGNWWELVAENMTKQNVMVGIGILLLIHLMLSKAMN

SEQ ID NO: 253739 - protein, 65 aa, Zea mays
  Clone ID: MRT4577_162990C.1.pep
GVTKGGAKRHQRALRDHMQGITKPVIRKVPRRRGAKRISGLSGDDTRGVLKIFLENVIPDVRTYT

SEQ ID NO: 253740 - protein, 51 aa, Zea mays
  Clone ID: MRT4577_162991C.1.pep
FMLRMVRALGAVMAFNAHAALTSPKTMMTCYTCAPIYNMIEYARACNKHAL

SEQ ID NO: 253741 - protein, 41 aa, Zea mays
  Clone ID: MRT4577_162992C.1.pep
VVTVFKSNYKSPSLKSCYPKWRSKCFFGSISLEIPTMMMAP

SEQ ID NO: 253742 - protein, 112 aa, Zea mays
  unsure (1)..(112): unsure at all Xaa locations
  Clone ID: MRT4577_162993C.1.pep
PRVRGDTMECLRSMFMLLLLMPIIRLNMRGSYALIIWKDLLIITGSKXPHVLQLXANKEPGFKXRDILLLHMSRESLRTGEIPACSVHGRETATVHRVINVHEHYDTVNMDI

SEQ ID NO: 253743 - protein, 47 aa, Zea mays
  Clone ID: MRT4577_162994C.1.pep
ITPSPKNYSDVYLTPRDFNPNTIESVATPFHPSISIQPNTPLMTQHL

SEQ ID NO: 253744 - protein, 72 aa, Zea mays
  Clone ID: MRT4577_162995C.1.pep
FFFFFFFFWVGVFFFWVFFFLGPKHPWGGFFLFGFGKQPSRSPPTDTLKKTPLKLGGNSVFKYLAVGSSFLN

SEQ ID NO: 253745 - protein, 132 aa, Zea mays
  Clone ID: MRT4577_162996C.1.pep
GAPPGWRSCSWTCPRPRWGEVDGAGGVHGDSDSSSSSSPSSCVSSDGRSSSGGGGSSPGGSKSPMVIGACTRCLMYCMVAKKDYPTCVNCKQPCLVDLLHGEAGRVGGGARQAAAAADDGDKKKQVHRRKRR

SEQ ID NO: 253746 - protein, 95 aa, Zea mays
  Clone ID: MRT4577_162997C.1.pep
FLYPFFFFFFFCFFFFFFVFFVYYYHTSRRLVSSNPLELFYGTTPNIGTHKTAGPSGSKSIQDRNNRTTGGGGTTLRFWRTKGSLQGRKKEIQAW

SEQ ID NO: 253747 - protein, 31 aa, Zea mays
  Clone ID: MRT4577_162998C.1.pep
DLSCDFCVRHSIRLTWYIVNMHQALANPTRY

SEQ ID NO: 253748 - protein, 81 aa, Zea mays
  Clone ID: MRT4577_162999C.1.pep
ESKPGVLIILQVQRSTVGGNRSKTSTTQSHERSTTFALFADMKLHCSKDYSWWMSKSSFSIYCLGKAKSLVATIYQLESTT

SEQ ID NO: 253749 - protein, 58 aa, Zea mays
  unsure (1)..(58): unsure at all Xaa locations
  Clone ID: MRT4577_16299C.1.pep
LKXELVRLASSYPXLQVFYTVDKPSTDWRGGVGFVSKDMVLKGLPGPAEDSLILVSSS

SEQ ID NO: 253750 - protein, 326 aa, Zea mays
  unsure (1)..(326): unsure at all Xaa locations
  Clone ID: MRT4577_1629C.1.pep
MTGIPEGIWVLKLALNCFMYSLQKEQGGIIGIALDSKWYEPLSDVDEDTEAAARAMDFELGWXTSITISILPSRLVPMXCSTQLLLIILIVKLSKCEYRFLDPLMFGHYPPSMQKLVGDRLPQFSARASMLVSGSLDFVGINHYTTLYVRNDRMRIRKLVMNDASTDAAVIPTAYRHGKKIGETAASGWLHIVPWGMFKLMKHIKEKYGNPPVIITENGMDDANNRFSKLEDDLQDDKRIQYHKDYMSNLLDAIRKEGCNVHGYFVWSLLDNWEWNSGYTVRFGLYYIDYNNNLTRIPKASVEWFRQVLAQKTAGLEYSGSTVASS

SEQ ID NO: 253751 - protein, 131 aa, Zea mays
  Clone ID: MRT4577_162C.1.pep
SFVAARKLIPNKHIIVDSVFYIAKAKSIKIEGVCSGSQLGTKLGENYGHTWFPGGNGLPSRIAHNNRTRILNGQGRGAEIGGLLTIIGLGSLAPFQSGKLVSPLALWIRQSAGRSCFGFGRLSAFLVNKLV

SEQ ID NO: 253752 - protein, 119 aa, Zea mays
  Clone ID: MRT4577_163000C.1.pep
MEAALRGIRAKLTEHREKVISGLLLGSAVALGWKSSEQQREIQSLLAEKSSLRATNASMSAAMWAWREELFALAAAPSSPISASRLRHIYGEEEPAPLAPAPAPPGANDGKEEEPISIA

SEQ ID NO: 253753 - protein, 135 aa, Zea mays
  unsure (1)..(135): unsure at all Xaa locations
  Clone ID: MRT4577_163001C.1.pep
KAGGRARTGTAGPTHPTIGYVSQRTLEGPWDLQTGDXQSAKRTRRNPTEEGSTIGDAIYAGHRDXNTLLRDIRSGKCTTQIAAQRDGTYVSVARSRNYDLTRGRDNAHNLTDARTLEIRGTCKARGNRVASNWGK

SEQ ID NO: 253754 - protein, 227 aa, Zea mays
  Clone ID: MRT4577_163002C.1.pep
MNIRQSMLQLNESSSDDDEEISFAEYHIFHQPSHSKRKHGGSIPGHLVKFRDRQAGHARMYQDYLADNSTFSLTDFRRRYRMSRDLFKRIMVAVEDHDDYFKFKFNAASTPGLSCFQKVTAVFRMITYGVAADATDEYVRIGESTVIESLKKFVKAIIKVFGDEYLRAPNEMDTSRLLAIGQERGFPGMLGSIDCMHWKWKNCPSSWHGMYSGHLHEPTIILEAVAS

SEQ ID NO: 253755 - protein, 30 aa, Zea mays
  Clone ID: MRT4577_163003C.1.pep
TSRGVRLFGFLIGIGVKQILSRDYFPSFAK

SEQ ID NO: 253756 - protein, 42 aa, Zea mays
  Clone ID: MRT4577_163004C.1.pep
SSTNEQGAGPGEMAGTGHLEARPHLFLIGKVDYKAWRVLIGI

SEQ ID NO: 253757 - protein, 85 aa, Zea mays
  Clone ID: MRT4577_163005C.1.pep
LVACIATCCSCRQSAYSCPKPSPLPSLLRPPLLPTRPSHLLPKRVVAIQEGARIEKINTSKMRKEMLDLTRQDRDGEVSVKDAVA

SEQ ID NO: 253758 - protein, 42 aa, Zea mays
  Clone ID: MRT4577_163006C.1.pep
LEAGRGLIVLRRDRCLQTLLPQRFNLSPYPIHIAALRVQVTH

SEQ ID NO: 253759 - protein, 65 aa, Zea mays
  Clone ID: MRT4577_163007C.1.pep
CLRVRPRVRPLFFKRGRATHTPTHPLLMTSLNVTYYCSFRAPPRQLFFLLLALALRLSFSPSYHC

SEQ ID NO: 253760 - protein, 85 aa, Zea mays
  unsure (1)..(85): unsure at all Xaa locations
  Clone ID: MRT4577_163008C.1.pep
KNVLRKEPMSKDIAEDDAFFFNDKFTSKFFKVKIGXVVAQRESEPENLETRQRVEEYRKPQIEAAIVRIMKSRRTLDHNNIVAEV

SEQ ID NO: 253761 - protein, 55 aa, Zea mays
  Clone ID: MRT4577_163009C.1.pep
PRKHGQQPRGRHSGRARASCRDQLASELPWARQPQMGRNGVAAKGTDPPEADSEV

SEQ ID NO: 253762 - protein, 96 aa, Zea mays
  Clone ID: MRT4577_16300C.1.pep
AGRVGLDRLASSYPNFKVFYTVDKPSTDWRGGVGFVSKDMVLKGLPGPAEDSLILVCGPPGMMNHISGDKAKDRSQGELSGVLKDLGYTAEMVYKF

SEQ ID NO: 253763 - protein, 117 aa, Zea mays
  unsure (1)..(117): unsure at all Xaa locations
  Clone ID: MRT4577_163010C.1.pep
SPDQHXKRXXRCLLXXGPGPXAGTLXXTSXNXAXXSDRPXXXAAPXGETAXSXHKXXXPXGKNATXEPXTRKESPPEKXXHXXTXDPHDGSDKAHNPEAQHGATAGGKRRGDAPETG

SEQ ID NO: 253764 - protein, 48 aa, Zea mays
  Clone ID: MRT4577_163011C.1.pep
IEIALTATPMPSFYKEPTPANVELKKIPPTRTKSPKLGTSKNKFISKT

SEQ ID NO: 253765 - protein, 56 aa, Zea mays
  Clone ID: MRT4577_163012C.1.pep
YLQLARRRGCERVNTIQCEQYGGTVHLFIGTGHSPVKLHPCPWTLVYKQLKLRRSN

SEQ ID NO: 253766 - protein, 61 aa, Zea mays
  Clone ID: MRT4577_163013C.1.pep
YNHDRICAIWDPFVLPIKKYPKLNTTEKKLRIAQYLIIQSGTSLDSLTAFDIFFPSVRTLA

SEQ ID NO: 253767 - protein, 66 aa, Zea mays
  unsure (1)..(66): unsure at all Xaa locations
  Clone ID: MRT4577_163014C.1.pep
IPYFKRAFEHFCMHADSRDVLEHLKSNLGLRNVHLQAYRGALQRFGNTSSNSICYXLAYLEDKGRN

SEQ ID NO: 253768 - protein, 46 aa, Zea mays
  Clone ID: MRT4577_163015C.1.pep
AVHAQGPRRFLAYGQLCVGDYPHVHGHLEREEVGVRAVVPRRVYKR

SEQ ID NO: 253769 - protein, 62 aa, Zea mays
  Clone ID: MRT4577_163016C.1.pep
MAATVSSFPVVNMEKLETEERDTAMAVIFPAPALVGAAEEDRAEAAYPSFVFEAMKSAIATA

SEQ ID NO: 253770 - protein, 103 aa, Zea mays
  Clone ID: MRT4577_163017C.1.pep
PARRTQWNRRWSSDSGVKSSRAPITTSSVDATTGLLERCRIPLTQLVEPNSGGSPSTTPLSQAARLCGGDSSPDSLSCGGFDESCTKDKKEGRRCPGSYLSRP

SEQ ID NO: 253771 - protein, 317 aa, Zea mays
  unsure (1)..(317): unsure at all Xaa locations
  Clone ID: MRT4577_163018C.1.pep
MAPASSFPIIDMGLLAGEERPAAMDLLHDACENWGFFQVLDHGISTELMDEVEKMTKGHYKRVREQRSLEFASKTLQDGGRAAENLDWESTFFVRHLPEPNIAEIPDLDDDYRRVMKQFASELERLAERLLDLLCENLGLDKGYLTRXAFRGSNGAPTFGTKVSSYPPCPRPXLVKGLRAHTXDAGGIILLFQDDXVGGLQLLRGGEWVDVPPMRHAIVANVGDQLEVITNGRYKSVMHRVLTRPDGNRMSVASFYNPGADAVIFPAPALVGAAEEDRAEAAYPSFVFEDYMNLYVRHKFEAKEPRFEAMKSAIATA

SEQ ID NO: 253772 - protein, 105 aa, Zea mays
  Clone ID: MRT4577_163019C.1.pep
HTRCALLSIGCHFIHVVIVSLCYTFHSLSSGSSCLSNIIASMAQIHGQKLASLKLSDLKAPSHPLKDWVIMMKIHVTWTKNTRTIFMDILFSSFVLLYSYPFLPL

SEQ ID NO: 253773 - protein, 77 aa, Zea mays
  Clone ID: MRT4577_16301C.1.pep
FLYPCLSLSVFGSCCQKGGENPISSLWFFLFCGSFGFLLDYFRFRPLLWFVLYHCMKQNCWIVIQRNMMVFWPSSFV

SEQ ID NO: 253774 - protein, 45 aa, Zea mays
  Clone ID: MRT4577_163020C.1.pep
LRAEKKATTCRRFVFEDYMNLYARHKFEAKEPRFEAMKSSAIATA

SEQ ID NO: 253775 - protein, 98 aa, Zea mays
  unsure (1)..(98): unsure at all Xaa locations
  Clone ID: MRT4577_163022C.1.pep
ALYDSFVIFFNSGIAQINCHLTTCGRSLVIRSKCMNGKNAISDQLGIAEQEHDDVQXRRQALGASGASSAPIRSNKCVAFQPSHEHPRSSHARFDEPE

SEQ ID NO: 253776 - protein, 54 aa, Zea mays
  Clone ID: MRT4577_163026C.1.pep
KSTIKCRFKKKKKKKKKKKKKKKKKKKKKKKKKKKKKKKKKKKKKKKKKGGGGV

SEQ ID NO: 253777 - protein, 95 aa, Zea mays
  unsure (1)..(95): unsure at all Xaa locations
  Clone ID: MRT4577_163027C.1.pep
VDVKNRQVKAKQVTFPRRKTEQPYKNSAKTDNPFEKPSLYQESKPPGDXSPNVVEPGALKAPEEPLERPVQERYEGEGRFPGARPHRHREDHGSR

SEQ ID NO: 253778 - protein, 63 aa, Zea mays
  unsure (1)..(63): unsure at all Xaa locations
  Clone ID: MRT4577_163028C.1.pep
QQPSNYGPMKSGNFGGSRNMGGPYGGGNYGPGGSGGSGGXMVEGADIELLPTYHGLHCINRRG

SEQ ID NO: 253779 - protein, 88 aa, Zea mays
  Clone ID: MRT4577_163029C.1.pep
DTGPRVNRSPLAEPTADRRDRIWWPAGGARGEPTQLVQRRARRPKRGEREREAGAAAGGWDEGEEPRKPAAANEEGTGQRTLGAGSGG

SEQ ID NO: 253780 - protein, 92 aa, Zea mays
  unsure (1)..(92): unsure at all Xaa locations
  Clone ID: MRT4577_16302C.1.pep
MRVRVLLLILSRLVNGHAVIHXPIKSLHLNNVLHVPQAQKNLVSXSSFSSDNNTSFEYFLDHFLIKDLVTGKVLLQGRCEDGLYPLPMSSRW

SEQ ID NO: 253781 - protein, 115 aa, Zea mays
  unsure (1)..(115): unsure at all Xaa locations
  Clone ID: MRT4577_163030C.1.pep
RGRHYLGQGIIVDGSKMIYDARQMNDYKAPHFSMINEADARSTQQHDSIMGXDREVPRTXLITXTQVGGISTNERIKAIAETEQADILDPCLNRXWRIKLNTMCSHASEEARAKV

SEQ ID NO: 253782 - protein, 92 aa, Zea mays
  Clone ID: MRT4577_163031C.1.pep
SEDVCIQGRLLGFKQESHRPGEDTGRDAHAEHEDEEGQQGKSLAEGHHNDKLFVNNRALADARKLLLEGAENGAQGHLLLQLNDYKDNKNGD

SEQ ID NO: 253783 - protein, 84 aa, Zea mays
  unsure (1)..(84): unsure at all Xaa locations
  Clone ID: MRT4577_163032C.1.pep
MAAKILGLLMLLALCASADTDTIFHECIQVTISMFHYYTPXPTSVLQCGLEHPSKQAYMLQQAIAACVLQQPISQLQQQSLVTS

SEQ ID NO: 253784 - protein, 85 aa, Zea mays
  unsure (1)..(85): unsure at all Xaa locations
  Clone ID: MRT4577_163033C.1.pep
AKGPYPVKVTRSGLPCILNPSVLIFWATLPRLPIFPLVSFFFPVAYIIHCLIAALNTPSWVYCRHSGRHHPISTVFFLGSXENVC

SEQ ID NO: 253785 - protein, 140 aa, Zea mays
  Clone ID: MRT4577_163034C.1.pep
TELVTFRSVFQFSELLFQAESTPFPASRTRLTLTEPSSVLRQGPQQVAVAGSQLSSSDRGLVSSVGDAARTATRLGVASAWFKHEETHALRRAAALSFVAADRVTGSGSTADTSQRAVSEWGWRQWSLGEWGWRRCSVGA

SEQ ID NO: 253786 - protein, 184 aa, Zea mays
  Clone ID: MRT4577_163035C.1.pep
MAPSDKIMEHRKEKIRKFMQLQQKEDDELFFVIVPAILQCLNDEKRPVHTSEYTGAKKMKEILEGHESWCKSEFRMEPEIFKATCNYLRREGLLRDTRRVTIEEQLGMFLFMISHNASNERLKKTFQHSGETVHRHIKAIFNIIPTLTHKFLKLPSSNQTHPKIATDPRFWPFFRKQEALLQVI

SEQ ID NO: 253787 - protein, 68 aa, Zea mays
  Clone ID: MRT4577_163036C.1.pep
HVARSWLTRPKHTMAAHSFHQLFTNALDGSSMGGGRKGHILIYCDCVPNCKDRLNTRNMSGAPIAGRD

SEQ ID NO: 253788 - protein, 43 aa, Zea mays
  Clone ID: MRT4577_163037C.1.pep
SGARALQRHTITLEFYVYNQIYDNKFRPYINHVHLYCMNLVII

SEQ ID NO: 253789 - protein, 52 aa, Zea mays
  Clone ID: MRT4577_163038C.1.pep
NTSHSVTYDRRSQPDPILVGLFKHGWCISTITESLLLNLFIFFQLIYYLTLQ

SEQ ID NO: 253790 - protein, 73 aa, Zea mays
  Clone ID: MRT4577_163039C.1.pep
CRNFSMLRSLPFGLVVFLLSSLVCSISSFFKFASYFISSQVPAETAFWLSCIGNTCTPCSMLSPPIVSGRVTK

SEQ ID NO: 253791 - protein, 44 aa, Zea mays
  Clone ID: MRT4577_16303C.1.pep
NRKGLKVVRIGGQPTDYGAQLLCILSGANINRSLTTYWTKTYTR

SEQ ID NO: 253792 - protein, 60 aa, Zea mays
  Clone ID: MRT4577_163040C.1.pep
RTNQLKVLMHELKFHTSFRNIVVWLIIKLRIYNIQRCNFGICKSTQGYSKNVVTLTLLCA

SEQ ID NO: 253793 - protein, 63 aa, Zea mays
  Clone ID: MRT4577_163041C.1.pep
CSLHNNTYPLPKLFTDLTETLQSHPVLLSLLSTNPTINLLSMTRPVIDPSMRTAESESCITFF

SEQ ID NO: 253794 - protein, 60 aa, Zea mays
  Clone ID: MRT4577_163042C.1.pep
IADAPIHKVGRARCTNWSRPSRANPLTMVGHAWDPTTRALSCIMDYRRPSIIWTTATTCY

SEQ ID NO: 253795 - protein, 119 aa, Zea mays
  Clone ID: MRT4577_163043C.1.pep
KKTKPEGAGPSKGPQQDMTFDHGLPKNLLRRFFFSHPVGQNKKSENPPSSIIKKTPEIANLGPKENLGVELLTIPSKKGGKLIHLYTIFPPILGGGAHKPCHKAAQKSQTAEYKKNRAM

SEQ ID NO: 253796 - protein, 73 aa, Zea mays
  Clone ID: MRT4577_163044C.1.pep
RPSPPWYQGCPARSCSSGPRERVSACIRSLLGQFAPTAWVAWPRPSISMSWAMFLVTFSPSLSLLSSADKTAH

SEQ ID NO: 253797 - protein, 38 aa, Zea mays
  Clone ID: MRT4577_163045C.1.pep
YIYILFFIRMNGLQSMEHIFIKLMSAFTPYSYSAEINA

SEQ ID NO: 253798 - protein, 73 aa, Zea mays
  Clone ID: MRT4577_163046C.1.pep
YLRIISLLECTVVCSEGTDTYNASSVLGSSHVCAAEARASCMDSVLQSKCPSSFFVQLSSYVRQYSSATLPVV

SEQ ID NO: 253799 - protein, 140 aa, Zea mays
  unsure (1)..(140): unsure at all Xaa locations
  Clone ID: MRT4577_163047C.1.pep
NTGRTTLPPHPSGTIKGPLLSHHCHPKGVGLLILLGGSQNPVTATIFPNCSKALIVSFFPPYLXSGVXSDCKNPIFKPSRIQQAITVGIXTLXPLFLHQXISLIXKLPLGHXLPQTIRAHHLQQLVLANLVAYFKKQKFF

SEQ ID NO: 253800 - protein, 102 aa, Zea mays
  unsure (1)..(102): unsure at all Xaa locations
  Clone ID: MRT4577_163048C.1.pep
MTGPPTGDHWGGPNGDHHSRPGIPDPDAWRIVRHRPPXGRPMVKALHDLQPRQLEGHEKVHDWRQIDVERPDRHIKRPVXELQRSLKQEQNHVLVQPKEREG

SEQ ID NO: 253801 - protein, 89 aa, Zea mays
  Clone ID: MRT4577_163049C.1.pep
FVHVMGDARVCPHHVRALGVQILIMPNPFLFFPLNPSRGALFFFLASVSPRVGYGPPPLFPVKMPVFWRLVCGPLLLPPVFFFSRAGPP

SEQ ID NO: 253802 - protein, 53 aa, Zea mays
  Clone ID: MRT4577_16304C.1.pep
PSPQQIGELSNCPTAIISLPSLVSAGLSCSPLQLKSKECECDCVSELLLLLFT

SEQ ID NO: 253803 - protein, 157 aa, Zea mays
  unsure (1)..(157): unsure at all Xaa locations
  Clone ID: MRT4577_163050C.1.pep
MAPLKLYGMPLSPSLERVVTVLNDKVLDLEIVPVDLTTGACKHPDFLVLNPFGQILVLDDGDXGLLKSLEINRYICSSYLSEGTIPASTATRLLAXWMCDXEDYHDFFPNAXALSFQLLVRPXILGGAHEAVVVDKHVDNLXAMVVELYDALLASNM

SEQ ID NO: 253804 - protein, 66 aa, Zea mays
  Clone ID: MRT4577_163051C.1.pep
ENYRNGNKIAHCKGHGRVVWPCNPRYSKMARWTSRAKRANLRESPMARSLMARKIKALVNPAGRKA

SEQ ID NO: 253805 - protein, 155 aa, Zea mays
  unsure (1)..(155): unsure at all Xaa locations
  Clone ID: MRT4577_163052C.1.pep
PQVTVSISFLGLAGYYQRFVKGFSMISTPRTHFLXKDVKFEWSKKCQXSFEQLKALLTKAPVLVQLEFGKEFVIFSDMSLNNLGCVLMQEGKVIAYATKQLKLHEKNYPMHDLELVAIVFALKIWRHHLFGEKCHIITNNKSLKYLMTQXDLNLQ

SEQ ID NO: 253806 - protein, 108 aa, Zea mays
  Clone ID: MRT4577_163053C.1.pep
MAVLSSLGGCGCGCDKENAPPPSSAARGIVVKRQAMKRSGGGSKAVPRRRTPLRDITRLFVTAQCPPPSAVLLVLSDAALPEAVRPGAGTSDRIAVRQASHSLRMGFR

SEQ ID NO: 253807 - protein, 141 aa, Zea mays
  unsure (1)..(141): unsure at all Xaa locations
  Clone ID: MRT4577_163054C.1.pep
STRSVRYGIVFVVNKFRLYLGLPTADTVNSKGYTGAKNLYLLXKKGIMGRFNKLKLGCPGDIILGSLQNGGPHLKRNLMVEFLLHHRWPRHWKDCFYMFNPYQAGVKGKPLGDMKGYAKGDLLLGVGPVLPKLLLHLGNTM

SEQ ID NO: 253808 - protein, 176 aa, Zea mays
  unsure (1)..(176): unsure at all Xaa locations
  Clone ID: MRT4577_163055C.1.pep
AACDHSLAENALKLLVQMEEQSCNPDIXKTYTPLAELCCRRKWVKTLLFLICHMFRKDHHPXDFSTYTLLVCWLCRNGRLTQSCLFLEEMVLKGFTPQQATFDLVLEKLKNMHMLSAVRKIQLLRMHTEGTRCRSGVPSYLREDGHDRHCYAVLSNTSEAESSIDGKEVPRAVHIL

SEQ ID NO: 253809 - protein, 72 aa, Zea mays
  Clone ID: MRT4577_163056C.1.pep
VPTTEHFLLVPYKPIEAEIRPWTPPAPEQGVRRTISVYCSLRVDPWLLYAGHVLSSRQSFHRHQCVNARADY

SEQ ID NO: 253810 - protein, 85 aa, Zea mays
  Clone ID: MRT4577_163057C.1.pep
MVLLINSGVQCGPLEKWKKKKKKKKKKKKKKKKKKKKLKKKKKKKKKKKKKKKKKKKKKKKKKKKKKKKKKKKIKKKKKKKKKKL

SEQ ID NO: 253811 - protein, 90 aa, Zea mays
  Clone ID: MRT4577_163058C.1.pep
MEYLPDVYEKPEAIKGLAGRCMSGRKLGVCRPSAPSIRRPRAGAVVAKYGDKSVYFDLDDIGNTTGQWDLYGSDAPSPYNPLQSKFFETF

SEQ ID NO: 253812 - protein, 56 aa, Zea mays
  Clone ID: MRT4577_163059C.1.pep
IRVMLLFVTVYTLLVSARLATSGPTKRSCSRILGSLRNPGPRIKELSRRFLSSALP

SEQ ID NO: 253813 - protein, 49 aa, Zea mays
  Clone ID: MRT4577_16305C.1.pep
HYMRLDRSYCFHEHIFSVSIDRCISFKVNGQQIVYMLVPNTILRYQLYC

SEQ ID NO: 253814 - protein, 73 aa, Zea mays
  unsure (1)..(73): unsure at all Xaa locations
  Clone ID: MRT4577_163060C.1.pep
MAGNGAIVESDPLNWGAAVAELAGSHLDEVKRMVGRXGESVVKIEGSTLRVGQVADVACVKDASGAPVQLYEE

SEQ ID NO: 253815 - protein, 102 aa, Zea mays
  Clone ID: MRT4577_163061C.1.pep
VAMPSSSSSAATTPMAEASSEDLSGTVAAAELRPGDTVEFGVSRMLLVCVQDMQRLGYFGGGVGWVPGAEEVPEPEGELVVFEAFFITGLHLPVHRFVSEVL

SEQ ID NO: 253816 - protein, 96 aa, Zea mays
  Clone ID: MRT4577_163062C.1.pep
TISDRMNMYPTSNQLISKTKCIFLSLLPRVHDQTRGDHILVALTNTLQSHLLCRRYLGAIIETRGAQEGDPDTIDDADLRYNQAGVDDGELGQRWR

SEQ ID NO: 253817 - protein, 297 aa, Zea mays
  Clone ID: MRT4577_163063C.1.pep
MHLVAGAIGNLAPKLLRLLRDEYSLQKGVRKQVQFLSEELESIHAALRKVAAVPPDQLDEQVKIWARQVRDASYDMEDALDTFLVRVEGRPEPNCGHGRLKGAAKRMGRLFKKANAHRHVASVIAGIKMQLQEVAERRARYRVDEVVATRPAAASAIDPRLEAMYKQATQLVGVDGAMGDLVLLLSLEVSILGVGGLGKTTLAKAVYDNLKSQFDCGAFVSVGRNPDLKKVFRDILIDLDKHKYTAEVNLSIFGETQLIDEIRELLESKRYDLASYKNAHSIHQCNLSCHSRYSQFR

SEQ ID NO: 253818 - protein, 125 aa, Zea mays
  Clone ID: MRT4577_163064C.1.pep
PPNGGDRLISMQMLNEPCLSSVRRPCDSSHVPAGQVPGIHSPLHIERKCSRTLFCFLLLIKVSCIADMLMTYASRVKRRVNLLTPDSNGGNSFPPLCFLAHHGVTKLLERDYRLPACLPVKPNLV

SEQ ID NO: 253819 - protein, 78 aa, Zea mays
  Clone ID: MRT4577_163065C.1.pep
RFLLFASRNPDAQPDRQHLLINCHAKCCTKPQAETIPPGKNAPFIVDTFRWIYHYSVTYLVIETYLVKTESTCGLLSP

SEQ ID NO: 253820 - protein, 88 aa, Zea mays
  Clone ID: MRT4577_163066C.1.pep
LLQHGKPDLVQLLGDQHSRLGPQRAVRPGRRDPARRPRLGGRHRRGQRQDRALHAETRAGPGPAAPRERERRRHGLGQADPRALELVR

SEQ ID NO: 253821 - protein, 68 aa, Zea mays
  Clone ID: MRT4577_163067C.1.pep
MANISSPMTKLLRLAKYGVVGRREVLESGDMAVLLRNAKAGDKVSARALLHLILDGDEGDASKKACRY

SEQ ID NO: 253822 - protein, 71 aa, Zea mays
  Clone ID: MRT4577_163068C.1.pep
MERVSVLNDALKSMYNAEKIGKRQVMIRPSSNAIIKVLTVMQRHGYIGEFEHVDDHRAVKIVVELNGTLNK

SEQ ID NO: 253823 - protein, 52 aa, Zea mays
  unsure (1)..(52): unsure at all Xaa locations
  Clone ID: MRT4577_163069C.1.pep
IFHRPSTHTHSNLTRRLNRTFQNXNQDPSEQVPSMSSIFRSYISSFGQMNSK

SEQ ID NO: 253824 - protein, 38 aa, Zea mays
  Clone ID: MRT4577_16306C.1.pep
NTRRGVLTENRRDPNMFIHQVRNPRLRRHHQTNHEPAG

SEQ ID NO: 253825 - protein, 125 aa, Zea mays
  Clone ID: MRT4577_163070C.1.pep
EGFLFGGHKIGKNWHVVQTFAHRHLYNVSENDVAQHNAPAYQENECCEENASRQAVSDNIYEKPLSRDDEQGLIFEAAEIAQLVQENGQKVYGSDSEEEDDDDTILEYCSEAEEGATNDVDSDDE

SEQ ID NO: 253826 - protein, 91 aa, Zea mays
  Clone ID: MRT4577_163071C.1.pep
VPLWCYCPPIYSFFFHPFFLVSSFRVFLSAFVSDVVGFRGRWFLATHTFSLTHMSGVSTESTRLRIQISGAVVLMIRIIFFRGLSVGRRRF

SEQ ID NO: 253827 - protein, 121 aa, Zea mays
  unsure (1)..(121): unsure at all Xaa locations
  Clone ID: MRT4577_163072C.1.pep
RTARPTKAPAXEERQGRAGQEPPAQERRERGXTVAAAMGKQITXRSQVNHQPNAXSCCSCHRPPGTTTENKIQIGGPPPHACPSVXPRNEASRFNRIFTSCECRIVCNLTNNGVRVVHVAS

SEQ ID NO: 253828 - protein, 57 aa, Zea mays
  Clone ID: MRT4577_163073C.1.pep
DHRRCHLFAHGSPPHGEGVPCFIKLPEEGVAFAPWSERGKCRRLAMAKIFGLWSLEW

SEQ ID NO: 253829 - protein, 162 aa, Zea mays
  Clone ID: MRT4577_163074C.1.pep
PNLRISTSSDVTGVEIAGALKNVLAIAAGIVEGMSLGNNCMAALVAQGCSEIRWLATKMGAKPTTLSGLSGSGDIMLTCFVNLSRNRTVGLRLGSGEKLDRIMGSMNQVAEGVSTAGAVIALAQKYKVKMPVLTAVARIIDNELTPTKAVLELMNLPQVEEV

SEQ ID NO: 253830 - protein, 196 aa, Zea mays
  Clone ID: MRT4577_163075C.1.pep
MAAGTKTVDYAAERALAKDFLTNFAGPHGEPKYQNILQDIANRKIRAAQIELDDLFHYKDVDEEFLQRVTENTKRYIGIFAEAVDELMPEPTEAFAVDEDRDILMTQRVDEGADGGADGTDPLQRMPPEIKRFFEVYIKAFSKVTPLTLRQVKASHIGQLVKISGIVTRCSDVKPLMQVAVYTCGCPGNCCLYASL

SEQ ID NO: 253831 - protein, 213 aa, Zea mays
  unsure (1)..(213): unsure at all Xaa locations
  Clone ID: MRT4577_163076C.1.pep
MTALLAKKVEFKWTPACQESFEMLKQKLTTTSILVLPGVHKPSQTIVMLRTPDWDQILGDISKGVTTRSRLAKFCEHYSFVSSIEPFRVEEALQDPDWVLAMQEELNNFKRNEVWILVPRPKQNVVGTKWVFRNKQDEHGVVTRNKARLVAKGYAQVAGLDFEETFAHVARLELIRILLAYAAHHFFKFFQMDVNNAFXNGPIKEEVYVEQTL

SEQ ID NO: 253832 - protein, 112 aa, Zea mays
  Clone ID: MRT4577_163077C.1.pep
PQPSERTRVACSTVFRTGDSGVIEHQQTLSLVEVVVELRRDRTRRRGVPAGRCWGKRRRRACLLVPVGRAARRCFPPPSPSTKRFRTFSLQSGARLDSTLSSPRRVTGSTQD

SEQ ID NO: 253833 - protein, 50 aa, Zea mays
  Clone ID: MRT4577_163078C.1.pep
SVGALSTSVSVACLRLIKAAHRGCVVLLCKNFVAPRNHVDHQQSVLTHPW

SEQ ID NO: 253834 - protein, 100 aa, Zea mays
  unsure (1)..(100): unsure at all Xaa locations
  Clone ID: MRT4577_163079C.1.pep
CNCXXMIWNKDXGTFLACXCMPLWXLGXAIWVYWSXHQWXXVIRSLXLFNPMPPTXXXCXVPVTXPGTXNDXXXYXCPTSNXXVGMXQKGRVLKEKXKXY

SEQ ID NO: 253835 - protein, 34 aa, Zea mays
  Clone ID: MRT4577_16307C.1.pep
AKITLACRVLAGLDKGVLERAITTVLGRFADHIH

SEQ ID NO: 253836 - protein, 237 aa, Zea mays
  unsure (1)..(237): unsure at all Xaa locations
  Clone ID: MRT4577_163080C.1.pep
MAPVKKPKKAKRKISDSGETKIDDSSEAKTKDASKVKRTKSGGSLALLPADLRGPDTEWWYVFLSKHGELHKEAESGGRAPVPSDDEEAFRYFFRTSRRTFEYICSIVREDLISRPPSGLINIEGRLLSVEKQVAIAMRRLASGDSQVSVGAAFGVGQSTVSQVTWRFIESMEERARHHLVWPGQERMEEIKARLEAVSGLPXCCGAIDATHIIMTLPAXESSEDWCDPAKNYSMFL

SEQ ID NO: 253837 - protein, 62 aa, Zea mays
  Clone ID: MRT4577_163081C.1.pep
NQELFQKKGGLRIAQKKRSAPFLAKLIKPWGNLRAPFFGKKIFCRVMYFPPFFGIGVILFEI

SEQ ID NO: 253838 - protein, 71 aa, Zea mays
  Clone ID: MRT4577_163082C.1.pep
EAHAFCQCCRRILTAPLQKKIGESPTFSVYAWRCPARNWAPTLRPDLRSLARPSLLPSDLSFICADELSTQ

SEQ ID NO: 253839 - protein, 315 aa, Zea mays
  unsure (1)..(315): unsure at all Xaa locations
  Clone ID: MRT4577_163083C.1.pep
LGTSRPAGPSPPCRHSPVYCRPVAQSLVAWAFFQRWWAQKSLTPPGPVHKLVDSGQLEFINGGWCMHDEAVVHYIDMIDQTTLGHRVIKKQFKKIPRAGWQIDPFGHSAVQAYLLGAELGFDSVHFARIDYQDRATRKANKGLEVIWRGSRPVGSSSQIFTNVFPVHYSAPVGFSFEVLAENVIPVQDDMSLFDYNVQERVDDFVAAAIAQANVTRTNHIMWTMGXDFNYQYAESWVXNMDKLIQYVNKDGRVHALYSSPTIQTDGVHASIESWPXKTDDXFPHADSTNAYWSGYFTSRPTFKRDSRVYLVRDHA

SEQ ID NO: 253840 - protein, 39 aa, Zea mays
  Clone ID: MRT4577_163084C.1.pep
SFAQPYPSFLTTHSSTKPPEGEERLLPARFLLRSALDSY

SEQ ID NO: 253841 - protein, 149 aa, Zea mays
  Clone ID: MRT4577_163085C.1.pep
MVGSGADGGGGGDDARSKEAAGMMALHEALRNVCLDSDWTYSVFWTIRPRPRCRGGNGCMVGDDNGSLMLMWEDGFCRPRVAECLADMSGGEDPVRKAFIKMSIQLYNYGEGWVLYWVGAVQVQVQAVEFGRSRVVCNFFPTFQSPLPA

SEQ ID NO: 253842 - protein, 103 aa, Zea mays
  Clone ID: MRT4577_163086C.1.pep
MVGSGATGGGGGDDARSKEAAGMLALHEALRNVCLDSDWTYSVFWTIRPRPRCRGGNGCMVGDDNGSLMLMWEDGFCRPRVAECLADMSGGEDPVRKALIQMS

SEQ ID NO: 253843 - protein, 65 aa, Zea mays
  Clone ID: MRT4577_163087C.1.pep
EWYENAYYHSSYTNRTFVEIWRIKHKRGFKIKRERLKTGTFIFKDMGKKKGNWRAKARPYGGLHR

SEQ ID NO: 253844 - protein, 70 aa, Zea mays
  unsure (1)..(70): unsure at all Xaa locations
  Clone ID: MRT4577_163088C.1.pep
RRRXWXXVXRSSXXXXXAGXXCLSXWLXCVXPXXXXXXXPXXACSFXXXXXAXFXXGSXVXXXFXPFPLP

SEQ ID NO: 253845 - protein, 44 aa, Zea mays
  Clone ID: MRT4577_163089C.1.pep
SYSTVNGVLRPASVKVHFSLYFFEKRPIADGLVFSMFLFIFAHI

SEQ ID NO: 253846 - protein, 77 aa, Zea mays
  Clone ID: MRT4577_16308C.1.pep
RSVHCYSFYWMMTFWIRILHTTKPAARMSKLMYYETQQRMRYLLYNFKDHQNCCSIYAWKEIKDCSWCDYRVKHKGC

SEQ ID NO: 253847 - protein, 49 aa, Zea mays
  Clone ID: MRT4577_163090C.1.pep
QTRARTRGRPFLAHGNYTLGGVLSRHVGDVHTDAHAQPISTSDNTLHAD

SEQ ID NO: 253848 - protein, 85 aa, Zea mays
  Clone ID: MRT4577_163091C.1.pep
KRATLLTGEKTSHTLKIINHRELPLKNKDQLFHDGPCTYPKKYCLERQWFLHQTMAPSLNLFKVNDSGKTTPFLFWKCSRAIPGL

SEQ ID NO: 253849 - protein, 90 aa, Zea mays
  Clone ID: MRT4577_163092C.1.pep
PPPPLFKAPKHSLLLIQYKSNTQHSKTQIKATDRIKVHNSTLVFRTCEKIDLFSFVVLVAWLTFFFLSFLLSKPCKQSKRHQLCGGPCGV

SEQ ID NO: 253850 - protein, 89 aa, Zea mays
  Clone ID: MRT4577_163093C.1.pep
CCLCRSRIISYRNGTYRVWLIPGVGSGVLQYEGGHQPLSRRASPLGSGRLELTLGPSRPICDRGLPLPYPMSPSPETSVCPTCPLARSP

SEQ ID NO: 253851 - protein, 69 aa, Zea mays
  Clone ID: MRT4577_163094C.1.pep
PSFTHRHPSCRRTEHMNRAEQMRDSIVKVQLEHYKAGGACRAGSSREGRRGTDTARGLKSAPAVAVPRK

SEQ ID NO: 253852 - protein, 51 aa, Zea mays
  Clone ID: MRT4577_163095C.1.pep
SRDRDIWVDEKGAAESDVSTNISTNLSADKLYTTDPSIERHQEIPSNAIHK

SEQ ID NO: 253853 - protein, 70 aa, Zea mays
  Clone ID: MRT4577_163096C.1.pep
STDLRIYYKRSEVNLCDVLVHTNLCSLKICSFRSPIFLSIWKYRRDNNLMLTNRSSYYASKSYYVLILYS

SEQ ID NO: 253854 - protein, 107 aa, Zea mays
  Clone ID: MRT4577_163097C.1.pep
RNFFGLGAFFGTPGFSFFFSGWYVVWNFEGIRFFQREQVFSLLGKDVKRVSIGEPPPPPGGGGGFPGKTKGAKKKKKKKKKKKKKKKKKKKKKKKKKKKKKKKKNPN

SEQ ID NO: 253855 - protein, 525 aa, Zea mays
  unsure (1)..(525): unsure at all Xaa locations
  Clone ID: MRT4577_163098C.1.pep
GAPKLALAGLHYFQTYDWFMLMTTITLGYIGWMVNLIIHVLQSYTSYPVILLKRAQLYPNNTSMKVYICGCFFMGLSSILLLLEKSPLLYHAYVLCTIFLWTRIVQKFDFLKSVWRELANMPFKYIFNLLTSSVVALLVLEFLVMSFFDRKIYTWCFLVLGILGSTYVALFIQASAALAIYIWLACWFLSVFTLMPAEIPENNNLVIFSGGLIILIGLASRWIKSNSSSFWLYLTRANKRDPQSFXLFCSGYFSRNIFDNGVAIYLTPVPEQRIALTTTVYQLVXAGVAMVLPLFSPPSVLSRLTSIFLGFAPPFLLLSIGYEAVFYSAFAMVLIGWIFVESANLYCSEESGSARRRSLADNSVFGYEERHLRLSDLRIPLLFVILFNVAFFGTGNFASIASFEISSVYRFITVFSPFLMAGLLIFKLFIPFMLVICTFSAITKVVRIPRLGCYFLVILLSDVMTIHFFFLVRNTGSWMEIGNSISHFGIVSAQVVFVLLLFALTNIYTRDILVSSRQLTARKVM

SEQ ID NO: 253856 - protein, 212 aa, Zea mays
  Clone ID: MRT4577_163099C.1.pep
MRKPSKGCNERDVIYHRNDHTDDNGKHFFKILIGDFHKRLVIPVKFAKKIRGKVERNIKLESLGGYTFDVQVAQNLGRIMFQSGWKSFVSAHDLKMFDLLVFKYDGMSRMKVLIFDPSGCEKVPPFFVTKNAMSGGRKREEPLDISSSYADLPMKTPETKKKARKQRDRSRINISPCRSISNSSGGMTSSEDDEAHSVPSCILPRGTILDSM

SEQ ID NO: 253857 - protein, 64 aa, Zea mays
  Clone ID: MRT4577_16309C.1.pep
PRGRVSNYKKSSASNISKLTSSNLLLRCPWFHRREKILVSKKKKKLDNVSFEILVGGCNCCPKL

SEQ ID NO: 253858 - protein, 45 aa, Zea mays
  Clone ID: MRT4577_1630C.1.pep
VLGRLKMLGRVSVGLGGCGRKPSRLVSWSTSWWFENSSLEVHPCF

SEQ ID NO: 253859 - protein, 80 aa, Zea mays
  Clone ID: MRT4577_163100C.1.pep
KNWPNGQSGKKRQNLGKCETVPPPTGCTGVKKLINKTPRGRGVPFFYRGAPGKGALLFFFYPGLWHSSRFWGGPEAHGAF

SEQ ID NO: 253860 - protein, 97 aa, Zea mays
  Clone ID: MRT4577_163101C.1.pep
CYLGDKSRCTFSAITKVVRIPRLGCYFLVILLSDVMTIHFFFLVRNTGSWMEIGNSISHFGIVSAQVVFVLLLFALTNIYTRDILVSSRQLTARKVM

SEQ ID NO: 253861 - protein, 62 aa, Zea mays
  Clone ID: MRT4577_163102C.1.pep
HKGGGGHALRGPILCINNCGFFRSAMTINMCYKCHMDMITKQKQAKLAAVLYNTHKLTAETH

SEQ ID NO: 253862 - protein, 55 aa, Zea mays
  Clone ID: MRT4577_163103C.1.pep
FLCWSSLPGLLLFSRLPGSLCLSPLFLWVWAFPFPPPPRLWFAQERGRPGFRPVL

SEQ ID NO: 253863 - protein, 479 aa, Zea mays
  Clone ID: MRT4577_163104C.1.pep
RVIESLGLQPVRDSLVGTVEQRGISGGQRKRVNVGLEMVMEPSVLILDEPTSGLDSASSLLLLRALRREALEGVNISMVVHQPSYTLYRMFDDLILLAKGGMTVYHGPVKKVEEYFTGLGIVVPERVNPPDYYIDILEGIVKPSLSSGGSVKDLPIRWMVHNGYDVPRDMLQSSSESESTSRGDAGHAPDEPSSVVSLLWGNLRDILGQKKDEYDYNKTSEDLSKRKTPGILRQYRYFLGRCGKQRLRDARIQGVDYLILCLAGICLGTLAKVSDETFGALGYTYTVIAVSLLCKIGALRSFTLDKINYWRERASGMSSLAYFLSKDSIDHFNTVVKPIVYLSMFYFFNNPRSSIWENYIVLLALVYCVTGIGYTFAVFFQPGSAQLWSALLPVVLTLIATQQKDTILADLCYTKWALEAFVIANAQNYSGVWLITRCGSLVRSGYDIEHEALCIAVLIANGVLFRCVAFFCMVTFQKN

SEQ ID NO: 253864 - protein, 95 aa, Zea mays
  unsure (1)..(95): unsure at all Xaa locations
  Clone ID: MRT4577_163105C.1.pep
GGPAVLYVFCSCRRFLPGASPPPPGLGRPPSXPPDLFSLRRRRVPPPLLSCPRPPPPPPVVRPAVPDPPPPPPRSPAPPDKTETGPGRAAPAPAP

SEQ ID NO: 253865 - protein, 103 aa, Zea mays
  unsure (1)..(103): unsure at all Xaa locations
  Clone ID: MRT4577_163106C.1.pep
AVVTXQNTWFFFFFFFFFGRGGTYPTRNFPSLRPLLVPPPFTGASGAGFPCINSPTLGGVPHWARVNPHTWAYQFGETRVFGKKAPGPWHWDPPPGLWGGSTG

SEQ ID NO: 253866 - protein, 155 aa, Zea mays
  Clone ID: MRT4577_163107C.1.pep
MAAAKLALVILVAAAVACTGNSQSPVQLCDYEFVVSTFNENWAGTDSDLTFTVFSTEVVGGVALKTIQSAAGSRFDVGSKTKFTIQGGPCVKPCGLRLEVHKTWWLEIGSDWKCRSVDLLVKRNGAVQWHFYLIFNQWVKDGSPVEYKPAQCPIL

SEQ ID NO: 253867 - protein, 192 aa, Zea mays
  unsure (1)..(192): unsure at all Xaa locations
  Clone ID: MRT4577_163108C.1.pep
PPPARCSARESAPWPSETETFPFQGEILTIVVSLVMNTFYSNEESFLRXFISNSSDALDKMMLHSFNDKSHLDGQADVFIHLDTQKDKDKVYINDRGGGMTQGEPDHQLMYMARHGYNDVLEDPAAGADVSMIGPIRDRFYSSXLGADRCVATSKPDDEEWFVRXAPASWSLTGTRDTKREQIGMGTNITLF

SEQ ID NO: 253868 - protein, 118 aa, Zea mays
  Clone ID: MRT4577_163109C.1.pep
ERKLEPKNQRRRADLQPPWSPAAMASSKSGIPIKAEQDSDGSAQSTADMTAFVQNLLMQMQTRFQAMSENIISKIDEMGARIDELEQSLNDLKAEIGGEGMSTPSKMKEESRPSDSSA

SEQ ID NO: 253869 - protein, 121 aa, Zea mays
  Clone ID: MRT4577_16310C.1.pep
AAVHRRFNFLVAWMFHFSNLILIGENGGLAIVLCRSLPPPCSKSEDRFSCLICGIYIRLSDIITVSRRFVIWIYRRTIYGFTELYISIFFLYRIPYGQILGPPLEVNSVAFPIVYSIFEIF

SEQ ID NO: 253870 - protein, 94 aa, Zea mays
  unsure (1)..(94): unsure at all Xaa locations
  Clone ID: MRT4577_163110C.1.pep
FGICXRMCPCSFGKNGEGGPTPGGVPLKNLKGAKGAKKRGFCQPSGGPVLVFENATKGSTGDPWAGRPLLVSGSFKKKPPAKGPILGALGGGGV

SEQ ID NO: 253871 - protein, 44 aa, Zea mays
  Clone ID: MRT4577_163111C.1.pep
HSQSVYNIVTWTFQKADEDGTFTALPAKTVEERAMVILGIAAAF

SEQ ID NO: 253872 - protein, 118 aa, Zea mays
  Clone ID: MRT4577_163112C.1.pep
EGKLEPKNQRRRADLQPPWSPAAMASSKSGIPIKAEQDSDGSAQSTADMTAFVQNLLMQMQTRFQAMSENIISKIDEMGARIDELEQSLNDLKAEIGGEGMSTPSKMKEESRPSDSSA

SEQ ID NO: 253873 - protein, 130 aa, Zea mays
  Clone ID: MRT4577_163113C.1.pep
ARLHPTRVLGTFGYHAPEYAMTGQLSSKSDVYSFGVVLLELLTGRKPVDHTLPRGQQSLVTWATPRLSEDKVRQCVDSRLGGDYPPKAVAKFAAVAALCVQYEADFRPNMSIVVKALQPLLNAHARATNP

SEQ ID NO: 253874 - protein, 63 aa, Zea mays
  Clone ID: MRT4577_163114C.1.pep
KRKLEPRRERRRADLQPPWSPAAMASSKSGIPIKAEQDSDGSAQSTADMTAFVQNLLMQMVSS

SEQ ID NO: 253875 - protein, 145 aa, Zea mays
  unsure (1)..(145): unsure at all Xaa locations
  Clone ID: MRT4577_163115C.1.pep
LGLLFILCMVAGVPLPGGVVVLLWHLSEXKVGGRQLGGLSVPGRRTNKAPWFRRVVVKKTAAPRVNLPALRKTPYGFRPXFKTEFPAFSERPGDPADVGVLVFGPQGVQTSLARECRARNLXPGGWRXKNKKGAVFHFNNPSFDL

SEQ ID NO: 253876 - protein, 52 aa, Zea mays
  unsure (1)..(52): unsure at all Xaa locations
  Clone ID: MRT4577_163116C.1.pep
RMRFCKLKKDVFKAFSKAKAXGSVFSGLSSSSSCSPPHKYAQRFSRPQFFAV

SEQ ID NO: 253877 - protein, 154 aa, Zea mays
  unsure (1)..(154): unsure at all Xaa locations
  Clone ID: MRT4577_163117C.1.pep
VYSSEWHTGVQPMVRSIFIAHDQTGETRARRCVLCGITCMQEHFSYPYPAYFQFIHLPRMCVQGNPGLTWLGLQGSISLFPGHQCATSXDQSLHPLSHTREPVLACWVQPESFCLPSFIQKASPHPIPKPLVKAGAFLPFILSLTKVAVKTEPK

SEQ ID NO: 253878 - protein, 197 aa, Zea mays
  unsure (1)..(197): unsure at all Xaa locations
  Clone ID: MRT4577_163118C.1.pep
IPALCLRLVCPVSCHTTSIQMEMNAYDSHKTDENFRYLCAPKNGVGKPXKPLHYCISTFHRIIPHLMRHVGEFCHVMCAGIXCIYRHNYCNEKIIHXTPCPSEISMXNAPPNSNFSSFFICTVETFWYYGKYVVLXQIVMRMQVHTAFEKVGSREEPPSNDEKVNYCELLYISCLFCCPHSCIVNCICEPPFSFPSI

SEQ ID NO: 253879 - protein, 250 aa, Zea mays
  unsure (1)..(250): unsure at all Xaa locations
  Clone ID: MRT4577_163119C.1.pep
VYTQKPLLVSGTLVRQVQTHMAFPDLTENYGASHEITIXQAPMSTAHSFAHNIKHCXLTWARSEFEXVLEKTPTAVNAXVTNPGGYATGTXTAADAQXAMDQIAREIECLVTDKXETFQEWITXARLXAEDYSSNRGKQLTFTFXEDAMTSSGAAFWSANKRFPRALESSSSDSRHLNFLVGACILTAETYGIPIPGWAKNPNXLAEAVDKXLMPDLHAKEGVKIETXEEATSLSSASXVDAAXIIEELI

SEQ ID NO: 253880 - protein, 101 aa, Zea mays
  Clone ID: MRT4577_16311C.1.pep
NGELKGFNKEWMVVFPDYEGDIILVGGDPWNKFFSMGPKIFVYPRGGVQGMNPGALNLRPEENGLPNLTERGSAFIFFVKKAPGYQSAFLFKSDNCLCLGN

SEQ ID NO: 253881 - protein, 142 aa, Zea mays
  Clone ID: MRT4577_163120C.1.pep
MAGGKRSKLLQGAPPPPPPPQWSDVRGLLHMRLTDAAAELNVSITYLRRLCRQNGFAQWPGKKIRYMNSTGKKVMLEADDALLDASPSAGLAGTSGLRQAMSAETRNEEEDDEPVANQELTTLNLIDKVGSSSSPSRSDGRS

SEQ ID NO: 253882 - protein, 93 aa, Zea mays
  Clone ID: MRT4577_163121C.1.pep
SSQPSQTNSARLSSRRRLFPYELGIITSGVMCLGSFPMTSVADDFHNLREGLAQARSAIIQLRDLLATKVESDRRLATATRLQATARGFLALA

SEQ ID NO: 253883 - protein, 27 aa, Zea mays
  Clone ID: MRT4577_163122C.1.pep
IFNMPPHAGRIPLEKSLEKSYRTRRRV

SEQ ID NO: 253884 - protein, 33 aa, Zea mays
  Clone ID: MRT4577_163123C.1.pep
GDSIDPRIYFIEECRIYSSGRMPHSEAWDLEKE

SEQ ID NO: 253885 - protein, 54 aa, Zea mays
  unsure (1)..(54): unsure at all Xaa locations
  Clone ID: MRT4577_163124C.1.pep
RALLLSHSEVEFLWWMDSDSMXFTNMAFNLPGNPSGPYNLIMHGWTKMVYNTKN

SEQ ID NO: 253886 - protein, 85 aa, Zea mays
  Clone ID: MRT4577_163125C.1.pep
KKLAKKMPQNPPIPFWIRMGTSNTIRFNAKGRHWGRTKFGFLGSGLAGFWVGRLGFKNYFPFVLSMCQFFCKLTSVVITLFLKFW

SEQ ID NO: 253887 - protein, 78 aa, Zea mays
  Clone ID: MRT4577_163126C.1.pep
MLAPPQEWASDDIEKIKARLWAAKKPVSKIGQPLFGGGFGGSQSGFGPQGGGAQAPGAKYEGVKKWGCGSSRELERLV

SEQ ID NO: 253888 - protein, 40 aa, Zea mays
  Clone ID: MRT4577_163127C.1.pep
SVMNRAGAANSIVSETINERGPAYVHQFVEFATHHVIARV

SEQ ID NO: 253889 - protein, 69 aa, Zea mays
  Clone ID: MRT4577_163128C.1.pep
MDAVDSVVDPLREFAKDSIRLVKRCHKPDRKEFTKVAARTAIGFIVMGFVGFFVKLIFIPINNIIVGSG

SEQ ID NO: 253890 - protein, 52 aa, Zea mays
  Clone ID: MRT4577_163129C.1.pep
QGKWGTFTQNGGGKNKKTRVGFQFPPFLKAPPCSKTQNGDNFWVYFTPRPSQ

SEQ ID NO: 253891 - protein, 139 aa, Zea mays
  Clone ID: MRT4577_16312C.1.pep
YFTPWRSPVLSALFSFPPGDGGGVLSGEMSTNGGDCAGFRLSGALVLLHSGDQITRIPRHLPLQRRLNSSLQNTGSAQGKALVHECGREKSFSSFFWSVRLDHTSITCAFLLAVDHLFQICTFFGDFYFVPSILLRRVI

SEQ ID NO: 253892 - protein, 69 aa, Zea mays; identical to SEQ ID NO: 253889
  Clone ID: MRT4577_163130C.1.pep

SEQ ID NO: 253893 - protein, 43 aa, Zea mays
  Clone ID: MRT4577_163131C.1.pep
RTGRRPTIITCVGVHFSSEKQWTGRALTTADLRTQTNTGYARR

SEQ ID NO: 253894 - protein, 102 aa, Zea mays
  Clone ID: MRT4577_163132C.1.pep
FFFFFFGWFFFFFFFFFFFFFGGETPVLLLGGLKITKNPLPGFWNNGKTDTGGVCYKNTIIEFCNRGKTDPGWGAQFFRGKKGPCIEIPFLLLGEGHKGEGL

SEQ ID NO: 253895 - protein, 423 aa, Zea mays
  Clone ID: MRT4577_163133C.1.pep
MLEDQSCLISRSLPGSCEQESRLAYMTYHLLEITRSKRPPGTLSIEHDVVAALTKRTKSSEHQNSEALDCQGSNGQGDSDSSTLISSIGRDNSINCLARCSRSDYGSIASLNRSFRSLVRSGELYKERRQQGISEHWVYFSLHVQEWEAYDPYRSRWMTLPRMPRNECFMHSDKESLAVGTELLVFGKEILSHIILSYSILTHSWSRGVEMNAPRCLFGSASFGEKAIIAGGMDADGRVLRSVELYNSETKRWTTLPSMNKARRKCSGVFMDGKFYVIGGMASNTEVLTCGEEYDLDRGTWRVIENMSEGLNGASGAPPLVAVVENELYAAQYAGKLVRKYNKRDNSWTTLGELPERPEAVDGWGIAFRGCGERLLVIGGPRVLGGGMIELHSWIPSEGPLQWNMIGSKPSGNFVYNCAVMGC

SEQ ID NO: 253896 - protein, 266 aa, Zea mays
  unsure (1)..(266): unsure at all Xaa locations
  Clone ID: MRT4577_163134C.1.pep
VSAFKLRRPVRMYLDRKTDMIMAGGRHPMKAKYSVGFKSDGTLTALHVDLGINAGISPDLSPFIPAATIACLNKYNWGALAFDIKLCKTNVSSKSAVRAPGDVQGSFIAEAIIEHVASALGADTNAVRRKNLHSVESLTKFYGDAAGDAPTYSLIDIFDKLASSPEYRSRAEAVERFNGGSRWKKRGISCVPITYEVALRPTPGKVSILNDGSIAVEVGGVELGQGLYTKVXQMTAFGLRELCPDADGLLDKVRVIQADTLSLIQA

SEQ ID NO: 253897 - protein, 77 aa, Zea mays
  unsure (1)..(77): unsure at all Xaa locations
  Clone ID: MRT4577_163135C.1.pep
MLSVPXCGSVSAGEQEPALPPDQLRSLYRELSGIPPVYDRLVLVVIDGLPAEFVLVIRRKPPIKKMIIDYVLHSNFN

SEQ ID NO: 253898 - protein, 72 aa, Zea mays
  Clone ID: MRT4577_163136C.1.pep
TKDFFLRLNARTLMAPVHWISSPVHYYDRALRWTQRLITKGHVAQQACDDIPSGNHNGSTVFSGPTQGRCLG

SEQ ID NO: 253899 - protein, 148 aa, Zea mays
  unsure (1)..(148): unsure at all Xaa locations
  Clone ID: MRT4577_163137C.1.pep
DAXRWIAECYCRDSDDQSAEENGEFFFSKLLGMSIIQPEFSDARMVSCQINGFFRECMLSRSGEMEDLVIELADRCNLTTQRSGRHLVISESWDRDKILFESIDFSRIRSMTVFGMWRSFFISKSMKLVRVLDLEDALGLTDENVDQM

SEQ ID NO: 253900 - protein, 71 aa, Zea mays
  unsure (1)..(71): unsure at all Xaa locations
  Clone ID: MRT4577_163138C.1.pep
VQAGGVLQASWYRAVAAHVVPSDQMAPGVSWKAMLSXXCKDSSRSSIVGLYYPQLAVKIPIGANICSPKRE

SEQ ID NO: 253901 - protein, 110 aa, Zea mays
  unsure (1)..(110): unsure at all Xaa locations
  Clone ID: MRT4577_163139C.1.pep
QHQQQFLLALSHLDKANRDGYLLQQVLAFNPLALANVVANHQQQHLDQFLPALIKIGMGNPATYLQQEQLVSSITLGVANAPTYLXQELLKQIVPSITQLAVAKPDAYLQ

SEQ ID NO: 253902 - protein, 168 aa, Zea mays
  Clone ID: MRT4577_16313C.1.pep
MFRGSPKIVALSKAAQKKASPKAAKSKKCGGGVERAAWNVELEKSLVDLLFEHNMPPYRAQNGWSPDAWNKIVSEFHKKHEYVTFNKIQIQEKERELKREYKILKEARKQSGVSWNEKRCMIIAEPTIWDNIITGPRIKILSTSLEEEKVKSHLQSVQAVYSVSVNKA

SEQ ID NO: 253903 - protein, 93 aa, Zea mays
  Clone ID: MRT4577_163141C.1.pep
LLSHDMPCSRTLGFYPAVPALPFFFFFSGCFCGGWFFFFYKKKGASLFLPLQFPYFLQAPGGWLCDHPRLLSLFVRMGVWRGFNCIFPLGRGG

SEQ ID NO: 253904 - protein, 71 aa, Zea mays
  Clone ID: MRT4577_163142C.1.pep
METVVGDLMATELRLGLPGTVDDCSQPQLVKATPPSTPRGKRRATADAVEEAAGAEEASKRDAETAPPAAK

SEQ ID NO: 253905 - protein, 123 aa, Zea mays
  unsure (1)..(123): unsure at all Xaa locations
  Clone ID: MRT4577_163143C.1.pep
MKAARGRHWESRTMNRIQEDLDNLVDEYDRIAATSSGGGSSRTSRIRLFLFPAKPESSSSLGSLLDDSSKSGIWFVVALNSAISGSLGGXPRCASTSSSTSPCLIDPSPARVQLTPVAEHPQI

SEQ ID NO: 253906 - protein, 619 aa, Zea mays
  Clone ID: MRT4577_163144C.1.pep
MAASPQQQGQGGPGSGGWTPEQFWSLLDKADRRFARVRDLPSFGRQEPDEFAKAFRAYTQLWRMQQEHRHRLLDAGLRRWQVGEIAARIAHLYYAQYQRTADTALLSEAFVFYHAVLDRAYFQDADHHLTPAKHLRFLARFLLVALLLGRRSHTVPRLASDIRTLLDDSKKSFQDAEYKEWRHVVQEIARFLRADSPFMNMRPLRYSYAFDPPPDTLRTMPTTIKKRGLVLSDTILCSYYPNEVKFTDLSIDVFRMVQCLEWEPCGSFALNDGYSAHDESGQNQPNLLKDLRDAALPPNPLKTILYRPSVTHFLTVLSTKCEELPSNGIMLIYLSATGEMGTSGFCPDTGENVLSNFNKFDISSLSHTSSKENKEPCLWLGCRETEGSNCIYPGDLIPFTRRPLFLVIDSSTSYAFKSIHGTERGETSAMLLSPSSRSSAAGFSGDSTRHSGSQFTMFLTSPLQAFCLLLGNNGTDIDRELLLLSLNEWAATLVASSSLHSIWVEVLGDPLLRRLLLRFIFCRATHSLFKPTNHKTEFLPTCMPPLPESVDAESMLSQSCVLRVASFFGAASQFSFAEVTTWPDVDPEEAVVTSSSGSANKGVPETARDSDISNSSSSF

SEQ ID NO: 253907 - protein, 97 aa, Zea mays
  Clone ID: MRT4577_163145C.1.pep
MVKAKARVRYEPGPAFEEVKEEAMLDISPTDSTEFWLIQWPKDQIDVLDFHGKELSLKLHSDGNLGNLENSSGKSYEIASFAAQKPDATVFLPSGSE

SEQ ID NO: 253908 - protein, 75 aa, Zea mays
  Clone ID: MRT4577_163146C.1.pep
LFLEACCCYWFLVPAHLGLHMLLPCCWPANPPAFVEAYRRVYSCFVGGFRKCLEFHSVDEIFRWVCVCKFNLIFI

SEQ ID NO: 253909 - protein, 56 aa, Zea mays
  Clone ID: MRT4577_163147C.1.pep
DRSNLLGPRYLKSFICCSGAHVDSCNNLELNVYVFDLWIKNKLRVFMNIKKWCFSP

SEQ ID NO: 253910 - protein, 205 aa, Zea mays
  unsure (1)..(205): unsure at all Xaa locations
  Clone ID: MRT4577_163148C.1.pep
RGETSAMLLSPSSRSSAAGFSGDSTRHSGSQFTMSLTSPLQAFCLLLGNNGTDIDRDAYNKAEELLLLSLNEWAATLVASSSLHSIWVEVLGDPLLARLLLRFIFCGGTHSLFKPTNHNAWGQXLPTCMPPLPESVDAESMLSQSCVLRVASFFGAASQFSFAEVTTWPDVDSEEAVVTSSSGSANKGVPETARDSDISNSSSSF

SEQ ID NO: 253911 - protein, 184 aa, Zea mays
  unsure (1)..(184): unsure at all Xaa locations
  Clone ID: MRT4577_163149C.1.pep
FTLKYQLPXEDLDSLISVSTDEDLDNLVDEYDRIAATSSGGGSSRTSRIRLFLFPAKPESSSSLGSLLDDSSKSENWFVDALNSAISGSLDGIPRGISTDSASVNCLLGLEDQRASQPKLPAGAAAAAVGAGRHPHDVQSVPDSPMLDKNSSFGSTSSAPSLSNLPPLRVRPEDRPSDARIMQP

SEQ ID NO: 253912 - protein, 104 aa, Zea mays
  Clone ID: MRT4577_16314C.1.pep
HASADAWVLKIMIFLSRGVFLFLRLWISQEMRRSKQRRCLTHQITEKHLFVLMMMSQKSLSFGQGGRWINSKGSKDKDIINISRGRESQVTSSVCAGYLFSFSQ

SEQ ID NO: 253913 - protein, 627 aa, Zea mays
  unsure (1)..(627): unsure at all Xaa locations
  Clone ID: MRT4577_163150C.1.pep
MAASPQQQGQGGPGSGGWTPEQFWSLLDKADRRFARVRDLPSFGRQEPDEFAKAFRAYTQLWRMQQEHRHRLLDAGLRRWQVGEIAARIAHLYYAQYQRTADTALLSEAFVFYHAVLDRAYFQDADHHLAPAKHLRFLARFLLVALLLGRRSHTVPRLASDIRTLLDDSKKSFQDAEYKEWKHVVQEIARFLRADSPFMNMRPLRYSYAFDPPPDTLRTVPTTVKKRGLVLSDTILCSYYPNEVKFTDLSIDVFRMVQCLEWEPCGSFALNDGYSAHDESGQNQPNLLKDLRDAALPPNPLKTILYRPSVTHFLTVLSTKCEELPSNGIMLIYLSATGEMGTSGFCPDTGENVLSNFNKFDISSLSHTSSKENKEPCLWLGCRETEGSNCIYPGDLIPFTRRPLFLVIDSSTSYAFKXSIHGTERGETSAMLLSPSSRSSAAGFSGDSTRHSGSQFTMFLTSPLQAFCLLLGNNGTDIDRDAYNKAEELLLLSLNEWAATLVASSSLHSIWVEVLGDPLLRRLLLRFIFCRATHSLFKPTNHKTEFLPTCMPPLPESVDAESMLSQSCVLRVASFFGAASQFSFAEVTTWPDVDSEEAVVTSSSGSANKGVPETARDSDISNSSSSF

SEQ ID NO: 253914 - protein, 410 aa, Zea mays
  unsure (1)..(410): unsure at all Xaa locations
  Clone ID: MRT4577_163151C.1.pep
NPHPKTHGGDKHSKPPSSPFVSLMEPLPSATAAGVGAPGPGPGYPESTESSPRSRRGDSWDEPFPSSAAAAAGGGGRLRLMCSFGPRIVPRPXLPNEDLDSLISVSTDEDLDNLVDEYDRWAPRGRPGGSSRTSRIRLFLFPAKPESSSSLGSLLDDSSKSENWFVDALNSAISGSLDGIPRGISTDSASVNCLLGLEDDSSVHSRSGVTNSAPTEDQRASQPKLPAGAAAAAAGAGRHPHDVQSVPDSPMLDKNSSFGSTSSAPSLSNLPPIRVRPEDRPSDARIMQPTAVEDHFAQMGISEQQLPMYIQAQQQVPIPAMTGMSPSEASSRLFSDDDKSDHGGGGGRKQQPPKQDVPPVVDSTNRAVYYNDRSTPAELKRDMPVGTEAASYRLPVSATDAAAAAAATAA

SEQ ID NO: 253915 - protein, 133 aa, Zea mays
  unsure (1)..(133): unsure at all Xaa locations
  Clone ID: MRT4577_163152C.1.pep
MAVPSPTTTAGVVVGVTTHHRVLLPSARPRAVPSYLRLPVRAQTHAHAHSQRARLADPVAAAAPAPAASTGSPESPASGAVAVKPTALAAKKLGAVVIALVREYDNVDXSYGLCPEDPRAKISLCDALIVRFG

SEQ ID NO: 253916 - protein, 333 aa, Zea mays
  Clone ID: MRT4577_163153C.1.pep
RVGVRFLMEPLPSAPAAGVGAPGPGPGYPESTESSPRSRGGDSWDEPFPSSAAAVAGGGGRLRLMCSFGGRIVPRPTDKSLCYLGGETRIVAVDRHASLADVHARLSRSLLGGRPFTLKYQLPNEDLDSLISVSTDEDLDNLVDEYDRIAATSSGSGSSRTSRIRLFLFPATPESSSSLGSLLDDSSKSENWFVDALNSAISGSLDGIPRGISTDSASVNCLLGLEDDSSVHSRSGVTNSAPAEDQRASQPKLPAGATAVAAAVGAGRHPHDVQSVSVPDSPMLDKNSSFGSTSSGPSLSNLPPIHVRPEDRTSDVRIMQHTAVNFQHSCSSH

SEQ ID NO: 253917 - protein, 306 aa, Zea mays
  unsure (1)..(306): unsure at all Xaa locations
  Clone ID: MRT4577_163154C.1.pep
RVFSDDDKSDHGGGGRKAQPHKQEVPAIVDPTNRAVYYNDRSPPADLKRDMPVGTEAASYRLPVSAPDAAAAAATQVPAGYVLAQMHAPQQHPPPQQHLPPQQPQQPAPQQQIVSAGNQHFIHNPATGTFIPIQSYYHHHPVPQQAPQTVPRQQQAPAFDPNTGMYYLPMQQNAHQPYSMPPGAQATLPPPSXLXDTTPKPTVPIPQMAVRPXLQQPGXYRTTAAATAVPAPNAAPGYAGMAYHHVIQSHHHHPAPQPVANMAGNYGYEFADPTRPQVYYSQAAAPPTLPQYPPIVSPDAGQAEKH

SEQ ID NO: 253918 - protein, 94 aa, Zea mays
  Clone ID: MRT4577_163155C.1.pep
MASPRSAGGDEAIWMKLREAGFDEDAVRRRDKAALIGYISRLESEIYEYQHNLGLILLERKELTSKYEQLKASFEATEIILKRERASQQSADSN

SEQ ID NO: 253919 - protein, 315 aa, Zea mays
  Clone ID: MRT4577_163156C.1.pep
IGYLEAGRPFTLKYQLPNEDLDSLISVSTDEDLDNLVDEYDRIAATSWPGGSSRTSRIRLFLFPAKPESSSSLGSLLDDSSKSENWFVDALNSAISGSLDGIPRGISTDSASVNCLLGLEDDSSVHSRSGVTNSAPTEDQRASQPKLQAGAAAAAVGTGRHPHDVQSVPDSPMLDKNSSFGSTSSAPSLSNLPPIRVRPEDRPSDARIMQPTAVEDHFAQMGISEQQLPMYMQAQQQVPIPAMTGMSPSEASSRLFSDDDKSDHGGGGGRKQQPPKQDVPPVVDPTNRAVYYNDRSLLAGLTRPMPPANNSAWIK

SEQ ID NO: 253920 - protein, 688 aa, Zea mays
  Clone ID: MRT4577_163157C.1.pep
NFGTRQKAGEERSVARAANHPPSSPVRFLMEPLPSATAAGVGGPGPGYPESTESSPRSRGGDSWDEPFPSSAAAAAAAAGGGGRLRLMCSFGGRIVPRPTDKSLCYLGGETRIVAVDRHASLADVHARLSRSLLGGRPFTLKYQLPNEDLDSLISVSTDEDLDNLVDEYDRIAATSSGGGSSRTSRIRLFLFPAKPESSSSLGSLLDDSSKSENWFVDALNSAISGSLDGIPRGISTDSASVNCLLGLEDDSSVHSRSGVTNSAPTEDQRASQPKLQAGAAAAAVGTGRHPHDVQSVPDSPMLDKNSSFGSTSSAPSLSNLPPIRVRPEDRPSDARIMQPTAVEDHFAQMGISEQQLPMYIQAQQQVPIPAMTGMSPSEASSRLFSDDDKSDHGGGGGRKQQPPKQDVPPVVDPTNRAVYYNDRSPPAELKRDMPVGTEAASYRLPVSAPDAAAAAAATAATQAPPGYVLAQMHAPPPPQQPPPQQQPQQPAPQQIVAAGNQHFIHNPATGTFIPIQSYYHHPVHQQAPQTMQRQQQAPTFDPNTGMYYVPMQQNAHQAYGVPPGAQVTLPPPTLVDTTPKPTVPIPQMAVRPELQQPGVYRTTAAATPAPAPNAAPGYAGMAYHHVIQSHHHHHPAPQPVANMAGNYGYEFADPTRPQVYYSQAAAPPTLPQYPPIVSPDAGQAEKH

SEQ ID NO: 253921 - protein, 153 aa, Zea mays
  unsure (1)..(153): unsure at all Xaa locations
  Clone ID: MRT4577_163158C.1.pep
TPQSDHAQLFFMSGFLAAIDPDGENINFISKPLSKSNSAYDKYFKDCDKYDMLRNAYRTSATNIYRCKDGRYFHTHGSMNPDHTQDYLGLPHDMDVATLEAPWGPVRRKGSTDRLARDAASRIRRLQASRHHLLXHRKNQNSEHGRANAHVGL

SEQ ID NO: 253922 - protein, 92 aa, Zea mays
  Clone ID: MRT4577_163159C.1.pep
RPTARPPHPQRLAPMHCTPASSTPSLSSSLFLDRDSDGDKPTSTTPLCLATCGLLHRLVWSFPILDGPVRTPINYPPDRIMATTQERDVAQP

SEQ ID NO: 253923 - protein, 56 aa, Zea mays
  Clone ID: MRT4577_16315C.1.pep
ITLSIFEKVETSTCLHSLKRLKKQAENCTASTDRRNSLYMHMQASDHTHYKLSLID

SEQ ID NO: 253924 - protein, 48 aa, Zea mays
  Clone ID: MRT4577_163160C.1.pep
GAKGPSPIKLFGSLFWPPRLCSLSLPIFFFSGFFRDNFFFQEPTLTLY

SEQ ID NO: 253925 - protein, 98 aa, Zea mays
  Clone ID: MRT4577_163161C.1.pep
LARCFCFFRRTPLSLGGPCRFYRCGTGILSSLPCKGVGVLPPIPRSLRWVFSVLDAVGVVVFFFRGGRWLAATKTASRRASNNQKIAAFPLKRPQNIV

SEQ ID NO: 253926 - protein, 64 aa, Zea mays
  Clone ID: MRT4577_163162C.1.pep
LIYSLRVSSYIGSVFSPSVVSFSSGAIVSTATSWSTISWICDDSRSAAPSSNEAHVPSTFTSEV

SEQ ID NO: 253927 - protein, 88 aa, Zea mays
  Clone ID: MRT4577_163163C.1.pep
SRSLSFPCVQVTPSWHYMMLHRNTLTTMAAPLSTVLRQDKYSCQPTAYISLHGVRRIKSLGELIETMYNNVRSLPQLPNGTRMLFLHI

SEQ ID NO: 253928 - protein, 302 aa, Zea mays
  Clone ID: MRT4577_163164C.1.pep
MSRSLHNRLSKTETRHVREANPGKRSKPSNIVANVASFIPLVKPKVQPTTCVKKDVRVKALETAEAAKRLEEKKRSEREMRKAAAKLEREKLKQEKELKQKEEEEQKKKRGADVATRKRQRDEEERREKERKRKCIEEARKQQKRPIERKHANINKDAHPEGHDNKELQQNSAEAVKGPVKFDEMTGLGGNATNSNNEMVVITDERPAISGPNCQENIPNSIEESYIMTPYKDSDDDDDEDFKHIEHSRRRRKLVPSWARGENLEKILLSNYVLDPRKIFARKRSSDLSEICPAHIPQRGFR

SEQ ID NO: 253929 - protein, 51 aa, Zea mays
  Clone ID: MRT4577_163165C.1.pep
SCTKKTHEWDKTIIEYKTNKPSRLPFLDIAPLDIGGTNQEFRVEVAPVCFK

SEQ ID NO: 253930 - protein, 62 aa, Zea mays
  Clone ID: MRT4577_163166C.1.pep
GHAKYCLASPAQARLLTGSGALIVGSKMVLPFGRVWNPHRVCNLLAKLQTFVPPLKKKKHFL

SEQ ID NO: 253931 - protein, 89 aa, Zea mays
  Clone ID: MRT4577_163167C.1.pep
MEGKEEDGRLGANKFSERQPIGTAVQGAADDEAYKESAPGSVLHPEGIKSWTSNRAGTPRHPTRHHLDRQHAPHRRRDEDIFFFFSPPP

SEQ ID NO: 253932 - protein, 61 aa, Zea mays
  unsure (1)..(61): unsure at all Xaa locations
  Clone ID: MRT4577_163168C.1.pep
YGSXHCLVSNKMLXRAERLRHSLIXXHSKIVXVLALGFYVFIQIDEDEPRHTYKTHTSSVL

SEQ ID NO: 253933 - protein, 78 aa, Zea mays
  unsure (1)..(78): unsure at all Xaa locations
  Clone ID: MRT4577_163169C.1.pep
MTRAARDPYERGTCRRHGRIGXHRKHPGGRWNAGGMHHHRILFDKYHPGYFGKVGMRYFHKLRNKFYCPAVNIERLWS

SEQ ID NO: 253934 - protein, 50 aa, Zea mays
  Clone ID: MRT4577_16316C.1.pep
AKRRKQDLIQLVPLIRLLSFNSVSNPDPNFYDYIRVVLTYTCCTRTVLNP

SEQ ID NO: 253935 - protein, 58 aa, Zea mays
  Clone ID: MRT4577_163170C.1.pep
MSTDDAVVAEVPVTEVPAEVPAAHVAEAPKAQNAPKEEKAPHQKKPSAVQKPEAHTPY

SEQ ID NO: 253936 - protein, 72 aa, Zea mays
  Clone ID: MRT4577_163171C.1.pep
TCICGRSNIPWHIFDAVIGCWTSLQILKIFCDPNLKFYNNLIRTRIECTQEKLSCKRKSGYFTLRPHLFRWN

SEQ ID NO: 253937 - protein, 67 aa, Zea mays
  Clone ID: MRT4577_163172C.1.pep
TSPPAPRRVGGRDCPPPMPLWLRPAQPAHQRWPCSPPSSPPPAGGRDPSSRPPWRPPSPTACGFCFS

SEQ ID NO: 253938 - protein, 93 aa, Zea mays
  unsure (1)..(93): unsure at all Xaa locations
  Clone ID: MRT4577_163173C.1.pep
AGNRILTLHPLRCARLPRSADLTWPCRRWWSTXVVFPPVARPPGSXSSHFLGGAGVRGLEIGGNFIKYTDIGVYLKDAIAPSLDNKCNIKTDN

SEQ ID NO: 253939 - protein, 260 aa, Zea mays
  Clone ID: MRT4577_163174C.1.pep
MPSSSSSAANTPPANVSSKDTLSNVAAEELRPGDTVEFGVSRISSIRVQDMQQLGYFGSGVGRVPGAEEVPEPEGELVVFEAFFTAGLRLPAHRFVVEVLQRFEVQVHQLTPNAVVAMAKDVWAVTSYGGQPSVEVFAKHYCLHWQKRKIGHKIAQFGSCTFTPRTGKTSIEVVELVPCARNKWGNWWDFWFYVSEGEVEDHPGLPVAVMCSHYYVVYPQFEVAEDDEDEGALRCAARMSSGRDLVEEFIGYGVWPLAHG

SEQ ID NO: 253940 - protein, 105 aa, Zea mays
  Clone ID: MRT4577_163175C.1.pep
GVVRFKALFKLGGLVLVSATDSCERIRSRLSCLSLSRKNIFDATHMSIPCEVCIRVGEHVHFISRLIGLRLTLIVRQSRAWMTQVCLECHSAQADTQSKIRRFSR

SEQ ID NO: 253941 - protein, 74 aa, Zea mays
  Clone ID: MRT4577_163176C.1.pep
RMNQHLPLSIQKQNQQPLIPKLLLLLNTPPRLIRPLMIPIRPILSLMWPIKPSNDAVLLTLTAAPNISSRDLFS

SEQ ID NO: 253942 - protein, 62 aa, Zea mays
  Clone ID: MRT4577_163177C.1.pep
RPWILRTAPLRLRPCPAPTDVALEYDDLIYRYHISSLHQRPESDPKLPRRPARILPGRSSAT

SEQ ID NO: 253943 - protein, 44 aa, Zea mays
  Clone ID: MRT4577_163178C.1.pep
RPSLLCALSTFWARLSFKLGQFHYFLIERQSSYHYVQKKKKKSG

SEQ ID NO: 253944 - protein, 66 aa, Zea mays
  Clone ID: MRT4577_163179C.1.pep
TLTYPNYAIPPGGIGGHHCTRNGLVPTSTRTRLWSSGRVQNPKSLQLIRSFAAHVSQLAYTICIVD

SEQ ID NO: 253945 - protein, 332 aa, Zea mays
  Clone ID: MRT4577_16317C.1.pep
MLRGSPKIVALPKAAQRKASPKAAKSKKCGGGVERAAWNVELEKSLVDLLFEHNMPPHRAQNGWSPDAWNKIVSKFHKKHEYVTFNKIQIQEKERELKREYKILKEARKQSGVSWNEKRCMIIAEPTIWDNIITTFPRAKKFRNKSFPIFDALGELYDGHIAQGTWNITSTQPLQNSDDGEKFKTIEVEYEDTNEPQVDARIEQDEDIVIVERVEHRLPKRSDAPTVNQEKETKRVRKDALEGLIGRYLDVKTKQVADEAAQSTKEKEVAQDNDFSIKRCISVLKTMDITRDEKIKAAEVFNTPNYRETFICFNDDEPEVALLWLRGKMGKL

SEQ ID NO: 253946 - protein, 182 aa, Zea mays
  unsure (1)..(182): unsure at all Xaa locations
  Clone ID: MRT4577_163180C.1.pep
LRASPLRDSQYSFSLTTFSPARNLVQIQHVLTAVPSGWTSLWSTDATGVELGTEXKKLPSILLYETXVLKIPALTPNMVAVYTVMSPNCRRAADQQFXLVQKYYRVYKEHIPATLVVPKTAAVMQEISHSSAARPLGISVLIAGDDANAPLLYQDDPSGLYFSCQASLMVDYVSNAKTFLAE

SEQ ID NO: 253947 - protein, 116 aa, Zea mays
  unsure (1)..(116): unsure at all Xaa locations
  Clone ID: MRT4577_163181C.1.pep
MAMFTQASVATRHLMAAAWAPAAKSRXLSSQLALPMSSSRGPAPFRAYTEEAVEAPKGLEGPQLDPSTPIPILGGSTGGLLRMAQVEEFYLMTWTNTKEQVFKMLTGGAAIMREGP

SEQ ID NO: 253948 - protein, 70 aa, Zea mays
  Clone ID: MRT4577_163182C.1.pep
ISGSTSSLAGGRPFLVFFNLLAVLPRITALRRPMLHGHIDISSPCECRKGPTYKVRVHQFVNTLLVPVPY

SEQ ID NO: 253949 - protein, 224 aa, Zea mays
  Clone ID: MRT4577_163183C.1.pep
MAEEKKQGLQLLDFWVSPFGQRCRIALDEKGLAYEYLEQDLGKKSELLLRANPVHKKIPVLLHDGRPVCESLVIVQYLDEAFPAAAPALLPADPYARAQARFWADYVDKKLYDCGTRLWKLKGDGQAQARAEMVEILRTLEGALGDGPFFGGDALGFVDVALVPFTSWFLAYDRFGGVSVEKECPRLAAWAKRCAERPSVAKNLYPPEKVYDFVCGMKKRLGIE

SEQ ID NO: 253950 - protein, 242 aa, Zea mays
  Clone ID: MRT4577_163184C.1.pep
LLLMTLRPVPIFHFSAIQLTETCEATGDGSAPLDAQICTGFSKLISLEVKKGLQKCATFPPSSGQPQQEDCSCSHVGDGLTGAPAFWRSVSLPQPTLKLVSAMKGGREKNGVASSPSENRHVKWAPDVYDPPVTSVCHSVTNSYQRRSKHRKKEKNKQKKRQKGKSKKNQQQSSAQNPSAPQVPGIGPKGVSTTGGQSPADDLSEHEAGIMDYSMGSQEANCGSSFLRESVAKMHFSTAEAS

SEQ ID NO: 253951 - protein, 209 aa, Zea mays
  Clone ID: MRT4577_163185C.1.pep
QDFSEASSAAERVQEVILRVPKIDSESSAGDELANVAGEVEFKNVEFCYPSRPETPIFVSFNLRVPAGRTVALVGGSGSGKSTVIALLERFYDPSAGEVTLDGVDIRRLRLKWLRAQMGLVSQEPALFATSIRENILFGKEDATGEEIVAAAKAANAHNFISQLPQGYDTQASYLPHQPTTFAAGVCMQSFRSLHFSACFCVHTSTNNA

SEQ ID NO: 253952 - protein, 84 aa, Zea mays
  Clone ID: MRT4577_163186C.1.pep
PAGVVVQGADPPEDTVGALLVHTSDDDPSVRDHAAVHDLDIAVVAAVHVPHSPARARSFAGSGLAARPENTCGGQGRSSLRRNR

SEQ ID NO: 253953 - protein, 86 aa, Zea mays
  Clone ID: MRT4577_163187C.1.pep
GVLKQNGLFFPTKKTLAGFIITQGPAGHFLIPFGGQKPPAVLEQLYFFLFENKKEGGRKPNFRTQYPCFSKPAGREMKFIPAPWFN

SEQ ID NO: 253954 - protein, 84 aa, Zea mays
  Clone ID: MRT4577_163188C.1.pep
QDVVYTDWIDRPQPRLDRHTGNGFTVTLGRVRECSVMDIKLVLFGHNTVVGAAGGSIITAKLSVAKGFIAQKGKQSVYAAVSRH

SEQ ID NO: 253955 - protein, 98 aa, Zea mays
  unsure (1)..(98): unsure at all Xaa locations
  Clone ID: MRT4577_163189C.1.pep
MVVSPAERERGIGMAATKLVTLALAGLLAVTVVASPAAVRAAMSSTTVYKTLMPCMPLVQMGGAMPSQSFCXHPQSVVARXNNTPDRSXTICGCLNNV

SEQ ID NO: 253956 - protein, 264 aa, Zea mays
  unsure (1)..(264): unsure at all Xaa locations
  Clone ID: MRT4577_16318C.1.pep
MSTGGRKMRTACVTGGNGYIASALIKVLLEKGYAVKTTVRNPDDMEKNSHLKDLQALGSLEVFRADLDEDGSFDDAVAGCDYAFLVAAPVNLHTKNPEEEMIEPAVRGTLNVMRSCVKARTVRRVVLTSSAAAVTTRPQLQGDGHVLDEESWSDVEYLRAHKPXGXWGYPVSKVLLEKEASRFAEEHGIGLVTVCXGLTVGAAPAPTTRTSVPNCLSILSGDEAAFAXLDATQXATGCLPXVHVDEXCRAELFAAEEGAAAGRY

SEQ ID NO: 253957 - protein, 65 aa, Zea mays
  unsure (1)..(65): unsure at all Xaa locations
  Clone ID: MRT4577_163190C.1.pep
FRTYATIPVQRDKSTRSVTHTTMIRPTEHYTIEPLRQSQIAVHTARRRGAVERLLLVTSSAIXTX

SEQ ID NO: 253958 - protein, 50 aa, Zea mays
  Clone ID: MRT4577_163191C.1.pep
THLILSFMPHGQQYDLELQHLQHMLDWAIIILNMQMITSNKGNLSFFLFS

SEQ ID NO: 253959 - protein, 60 aa, Zea mays
  Clone ID: MRT4577_163192C.1.pep
RCGVKLCTGFEEGLCYVDEFKPLLVPVTELKNPPCRRGCCCLKKKAKAGAKSHRKRGSAP

SEQ ID NO: 253960 - protein, 38 aa, Zea mays
  Clone ID: MRT4577_163193C.1.pep
WSCRGIASAMGRNMWPSISSWRGGTRSSIGDDERVARA

SEQ ID NO: 253961 - protein, 89 aa, Zea mays
  Clone ID: MRT4577_163194C.1.pep
EECYNPNLLVFLPAWHYVLCMVICKLECCHTLEERLPSGLIILTSIKFCLRFLFGLVGFHVSSPQKKKKKKKRATAVQYTGLKMRSAAS

SEQ ID NO: 253962 - protein, 133 aa, Zea mays
  unsure (1)..(133): unsure at all Xaa locations
  Clone ID: MRT4577_163195C.1.pep
RGARVFLFFFLGLCLLGSLGLRRPSGGPXYSSAPPAWXSQLGXLARLPCTPGGGXYLPERPPGPPXSAPPPAXPRRPPSXPXPGPAPLFGRPPPRPAFPPXPPACAPXASRPPPPAPAAPPPPXAPASAGRPA

SEQ ID NO: 253963 - protein, 517 aa, Zea mays
  Clone ID: MRT4577_163196C.1.pep
MACSGCSCEAAVGAMASEAYLEGAPVREARELVAELCRHFYAQGWVTGTGGSITVKVNDPAVPLADRLIVMSPSGVQKERMVAEDMYVMAADGKVLSAPVAKPWPNKPPKCTDCAPLFMKAYLMRGAGAVIHSHGIETCIATMLIPGAKEFRVTHMEMIKGIKGHGYHDELVIPIIENTPYEYELTDSLSEAIAAYPKATAVLVRNHGIYVWGESWINAKTQAECYHYLLDACIKLYQLGIDWTTPEHGSINNPRRPHSILSPEICNGCHAADSSKCVVLDIEGTTTPISFVTDVMFPYARDNVRKHLTSTFDFEETKEDIKLLRIQIEDDLQNGVAGAVPVPPDEGGKEEVINSLVANVESMIKADRKITSLKQLQGHIWRIGFQKKELQGVVFEDVPVALKNWHASGIKVYIYSSGSREAQRLLFGNTTYGDLRKFLCGYFDTTTGNKRETRSYFEISQSLGVDSPSQILFITDVFQEAIAAKNAGFEVIISIRPGNAPLPDNHGFRTIKSFSEI

SEQ ID NO: 253964 - protein, 594 aa, Zea mays
  Clone ID: MRT4577_163197C.1.pep
MACSGCSCEAAVGAMASEAYLEGAPVREARELVAELCRHFYAQGWVTGTGGSITVKVNDPTVPLADRLIVMSPSGVQKERMVAEDMYVMAADGKVLSAPVAKPWPNKPPKCTDCAPLFMKAYLMRGAGAVIHSHGIETCIATMLIPGAKEFRVTHMEMIKGIKGHGYHDELVIPIIENTPYEYELTDSLSEAIAAYPKATAVLVRNHGIYVWGESWINAKTQACFGFRDYQIKDFIWMTLKFPELDHASFRRKNTMYLYHIFMGSLLILQSFVIIIRTDLVLAGGIWGRNSLTPAFCREAECYHYLLDACIKLYQLGIDWTTPEHGSINNPRRPHSILSPEICNGCHAADSSKCVVLDIEGTTTPISFVTDVMFPYARDNVRKHLTSTFDFEETKEDIKLLRIQIEDDLQNGVAGAVPVPPDEGGKEEVINSLVANVESMIKADRKITSLKQLQGHIWRIGFQKKELQGVVFEDVPVALKNWHASGIKVYIYSSGSREAQRLLFGNTTYGDLRKFLCGYFDTTTGNKRETRSYFEISQSLGVDSPSQILFITDVFQEAIAAKNAGFEVIISIRPGNAPLPDNHGFRTIKSFSEI

SEQ ID NO: 253965 - protein, 423 aa, Zea mays
  Clone ID: MRT4577_163198C.1.pep
MAASGGDAPELAVITNACNAASAPEENRLAGDSNTISENAQESLSSLPEQESNDASVNTEKKEPGISKCKSVDEIPKTVAVKRCKNIDSKKVSSNNNNNPSFTGSLVLKKQPAKGGHLFQLCENGMSQDTKTPSTRICINSACKAVFNSDNAFCKRCSCCICHGFDDNKDPSLWLVCSSEIGDQDCCGSSCHIECALKHRKTGCIELGQSIQLDGNYCCAACGKVIGILGFWKRQLVVAKDARRVDNLCSRIYLSHRLLDGTTRFKELHRIVEDAKAKLESEVGPLDGTSSKMARGIVGRLHVAADVQKLCTLAIEKANEWLSSNIQSETKQNDTLPSACRFKFEDITASSLVLVLKEAVSSQYHAIKGYKLWYWNSREAPFTGEPAVFPKDQRRILISNLQPCTQYSFRIISFTEDGKLGHS

SEQ ID NO: 253966 - protein, 60 aa, Zea mays
  unsure (1)..(60): unsure at all Xaa locations
  Clone ID: MRT4577_163199C.1.pep
ALKHGVDGGALVHFIIVKAAWLSDFSWIIKSGSNKSQTKRNTISXVESTSLMMTFMLLLS

SEQ ID NO: 253967 - protein, 75 aa, Zea mays
  Clone ID: MRT4577_16319C.1.pep
ASPLARQARQCRTSAPLPDLVPFPFSRLCSTDRTRIARDNVEEEKVSTLEVSRRGVTGARHTAGFHMFFHRFLIS

SEQ ID NO: 253968 - protein, 703 aa, Zea mays
  unsure (1)..(703): unsure at all Xaa locations
  Clone ID: MRT4577_1631C.1.pep
AAFKQKRQQKAFIKWKTNWCFAATFIVPVLFCPLSSLCPSPVLLRQDLNLLGRHLFSLAHAASGYHKVLEENRKLYNQVQDLKGSIRVYCRVRPFLPGQASPSTVASIDEGNITLVIPSKSGKEVRKTFSFNKVFGSSATQDEVFLDTQPLIRSVLDGYNVCIFAYGQTGSGKTYTMSGPKNMTEQTQGVNYRALGDLFKLAEQRKRTFIYDIAVQMIEIYNEQVRDLLVTDGLNKKLEIRNNSQNGLNVPDASLVRVASTMDPRVRMNVGHKNRAVGATALNDRSSRSHSCLTVHVKGRDLTSGTILRGCMHLVDLAGSERVDKSEVTGERLKEAQHINKSLSALGDVIASLAQKNSHVPYRNSKLTQLLQDSLGGQAKTLMFVHISPESDAVGETISTLKFAERVSTVELGAAQLNKESGEVRELKAQIAQLKSALAAKDLGSEQIISHDTEAFNIKMPSPGFSIKRQGSCDLLSTQTNFRQPLDAVGNIEARANPTLRQKKPSFDLQDLLTANDSPSWPDSNLRVNFQTGDEREVIGGDWIDKVVVNNNXQSVTGRVTMQLYLTSFTRDXSGMREKQYQRNNTRQKDDHEYEEQRSRFYSTNTDDSDDIDMATSDSSESDALWQQLNVQSMDNSISLSGSKVKKPQIKLRDGSDARTPIHSQIPSASRKVANGSNRSVRQPLSRSDSRRLSSNGRQSGAK

SEQ ID NO: 253969 - protein, 42 aa, Zea mays
  Clone ID: MRT4577_163200C.1.pep
KHARRVRDVTLGVPKAGSRHYRVVTSKPTWDWARFNRSSGRT

SEQ ID NO: 253970 - protein, 23 aa, Zea mays
  Clone ID: MRT4577_163201C.1.pep
TSELGSKSTAPLHYSSSPSGRPL

SEQ ID NO: 253971 - protein, 52 aa, Zea mays
  unsure (1)..(52): unsure at all Xaa locations
  Clone ID: MRT4577_163202C.1.pep
KPGPTHASDPTRSTLPNTCIQXHTSSMGRRKLNKLPRPTTPTKLKKPCLYPT

SEQ ID NO: 253972 - protein, 105 aa, Zea mays
  unsure (1)..(105): unsure at all Xaa locations
  Clone ID: MRT4577_163203C.1.pep
FGHPXGEHPGGGGVLPAASGRGARERVLVDVDFRSADEAARPTKENXFCVDFLPXGHVGGGGGLHLLIPXSFLRGGGGLSKRGRNLLPLGLPSSMRAMWLSPYHR

SEQ ID NO: 253973 - protein, 57 aa, Zea mays
  Clone ID: MRT4577_163204C.1.pep
GNKHHLAAGSCVRLALLLPPPALKIFHHPLPSRSNWRSSFGEGQETRALSPMPTNVR

SEQ ID NO: 253974 - protein, 63 aa, Zea mays
  Clone ID: MRT4577_163205C.1.pep
VLWCCYDGHLSGYAKLVVPCNVARLEALLFEAKSEWAEAERAYTQILEINPFDQIVHKRTRGR

SEQ ID NO: 253975 - protein, 82 aa, Zea mays
  Clone ID: MRT4577_163206C.1.pep
SPIKLYGAVMSWNVTMCASVLDEAGSDYDIVPINFGTAEHMIPEQLVRNPFGQVPALHDCDLYLFASRAFCMYAVRINKANL

SEQ ID NO: 253976 - protein, 51 aa, Zea mays
  Clone ID: MRT4577_163207C.1.pep
TGTALGRWRYRDKGRWFWFSYRKVVLWRNGRNKDVARRVSLRKGKKGRPRK

SEQ ID NO: 253977 - protein, 61 aa, Zea mays
  Clone ID: MRT4577_163208C.1.pep
ERSPSTNSEFVAPLIVLNCNKVRLISMHHCAISKPNIRSDRASSSSPIPSLIPIKLSYWGR

SEQ ID NO: 253978 - protein, 43 aa, Zea mays
  Clone ID: MRT4577_163209C.1.pep
TSSYPVRVSELALIPLSSCHVRARESTPAMRALRSPGAWALSA

SEQ ID NO: 253979 - protein, 70 aa, Zea mays
  Clone ID: MRT4577_16320C.1.pep
RFKSQVKSNEIYVLFSHLMYQLFRRILRWVSTSPRMINHSATEVFPGCLQLISGSRIIFTLSYSPSLKES

SEQ ID NO: 253980 - protein, 41 aa, Zea mays
  Clone ID: MRT4577_163210C.1.pep
MAGKGFTAGSEVYYAFISAYEKSENYEMVEKLRKEMSAMGT

SEQ ID NO: 253981 - protein, 40 aa, Zea mays
  Clone ID: MRT4577_163211C.1.pep
TSTGQMIGAVKCSISHLTSILCLFYQILTTFNSVFLILFY

SEQ ID NO: 253982 - protein, 38 aa, Zea mays
  Clone ID: MRT4577_163212C.1.pep
IAVSLPPRHRRTRQSAPASSDPVNRGRPLGRFHGFHEA

SEQ ID NO: 253983 - protein, 32 aa, Zea mays
  Clone ID: MRT4577_163213C.1.pep
LPATQSPQNDVPSRDQSLGVGRRQCTSVGERL

SEQ ID NO: 253984 - protein, 94 aa, Zea mays
  unsure (1)..(94): unsure at all Xaa locations
  Clone ID: MRT4577_163215C.1.pep
SPMKAASRLVIHRGVELGKASAVEAAAVLWCWCVASSEATSRHPTEVSESRPTCRARRGTVLRTGFRVLCSLKRSSRSAXCSLVSLSFXPRAPV

SEQ ID NO: 253985 - protein, 40 aa, Zea mays
  Clone ID: MRT4577_163216C.1.pep
IRGIGQVQNGPTPRCGVPTVESCTQLLLSDPMINLNTTVL

SEQ ID NO: 253986 - protein, 88 aa, Zea mays
  Clone ID: MRT4577_163217C.1.pep
VILGLVTLVLCPHCLLLGDRDRTCSIKRLLATAHLYQQLLMLRSLSCISFVNEQILLRYCTLGTVLEAEDVMNSTATDMPLVALKPLS

SEQ ID NO: 253987 - protein, 68 aa, Zea mays
  Clone ID: MRT4577_163218C.1.pep
TGTIWWFGGWWEAKVFKVFPPGGGLFMVLRGCQRGPPIKKTLPPLRGPVEKSQVFFRVLALKTRVGVS

SEQ ID NO: 253988 - protein, 460 aa, Zea mays
  Clone ID: MRT4577_163219C.1.pep
MGFLACLCRCPQDGDDDEKEGEQFRINHQVASVDYPKSSESSPLKAERVVHMDGAQLIGRHDEATIFTLRQLAEATNNFRQDSLLGRGGFGCVYKATLSNGQVVAVKQLDLNGLQGNREFLVEVLMLNLLHHHNLVNLHGYCVDGDQRLLVYEYMPLGSLEDHLHDLVPDQQPLDWKTRMKIAAGAAAGLEYLHDKANPPVIYRDIKPSNILLGEGYHAKLSDFGLAKLGPVGDKTHVTTRVMGTHGYCAPEYALTGQLTVKSDIYSFGVVFLELITGRRPQDSDRPPEEQDLVAWARPLFKDQKKFRKMADPSLCGRFPKRGLFQALAIAAMCLQEKAKSRPPMREVAAALSYLASQAYDRNNNAAAHRNRAGPSTPRVLDDQIGQDACTLANQQGAQMSMHVGTDHAMPEVKEASCSGSHRGGRGRVTPNGADRERALADANVWAEAWRRQEKASKMR

SEQ ID NO: 253989 - protein, 121 aa, Zea mays
  Clone ID: MRT4577_16321C.1.pep
MSTGGRKMRTACVTGGNGYIASALIKVLLEKGYAVKTTVRNPDDMEKNSHLKDLQALGSLGVFRADLDEDGSFDDAVAGCDYAFLVAAPEEMIEPAVRGTLNVMRSCVKARTVRRVVLTSS

SEQ ID NO: 253990 - protein, 129 aa, Zea mays
  unsure (1)..(129): unsure at all Xaa locations
  Clone ID: MRT4577_163220C.1.pep
PPLPPPPPPAPPPPPPVGTPATISPRREPDGACACRGGRPARGSAGCVVSACMPNTANMCTRMPAHWDGGDLRRPTPPRRXPXPPRXHLPPPDEQPPRRPPSNKPXGEPPAPPPGPPTTYPRXLAPPPP

SEQ ID NO: 253991 - protein, 40 aa, Zea mays
  Clone ID: MRT4577_163221C.1.pep
IPTTRAPSAALPWASSTRCRRRRPLARIWNYTCSPPTSCS

SEQ ID NO: 253992 - protein, 58 aa, Zea mays
  Clone ID: MRT4577_163222C.1.pep
LAQWVLEHAYMVLNWIKFHHHACAKCEQGGCVFIRDIRVYSLGPHAPTRYECSSRFAT

SEQ ID NO: 253993 - protein, 59 aa, Zea mays
  Clone ID: MRT4577_163223C.1.pep
SEIRQYGAIDCKTVRLEKKKKKKKKKKKKKKKKKKKKKKKKKKKKKKKKKKKKKKKKGG

SEQ ID NO: 253994 - protein, 40 aa, Zea mays
  Clone ID: MRT4577_163224C.1.pep
QETHCTAFISQSDTRCISVYRVTLYCFYLTVCRRLCRPVS

SEQ ID NO: 253995 - protein, 59 aa, Zea mays
  Clone ID: MRT4577_163225C.1.pep
AKAECVSSGAKVRCDTSVCSERQTGRFFYHTPTKSCPGGHLTRRGLSAKHYRKWGHPFP

SEQ ID NO: 253996 - protein, 38 aa, Zea mays
  unsure (1)..(38): unsure at all Xaa locations
  Clone ID: MRT4577_163226C.1.pep
KKKGGXKNLLKLQFVIMHRIAGDVVTLFYCLMGEYYLY

SEQ ID NO: 253997 - protein, 76 aa, Zea mays
  Clone ID: MRT4577_163227C.1.pep
EVKGALGRIHRHFFLASSPPLRRPLPLSKGRRYLPKDLPPQLVPVRVYLAQLLPQIQGQAPRLSPWGASNRPGGPS

SEQ ID NO: 253998 - protein, 54 aa, Zea mays
  Clone ID: MRT4577_163228C.1.pep
IAYRQMFKGMYVIIPGLRPVPRLSRIHAFEQVKCINVILILVNIHLCFIECKYK

SEQ ID NO: 253999 - protein, 183 aa, Zea mays
  Clone ID: MRT4577_163229C.1.pep
MALLMEPGAEPLTESEQADLAGIAAIKESAAREYKEQGNQFVRMGRRHYAAAVSCYTKAIAQMEPLSSLDASAAADASVLFANRAHVNILLGNHRRALDDAEQAIRLSPSSVKDLAAAMGKRGVKLGKAAYQELTGVKKPVLDEQGVLHWPVLLLYPEVMSSDFIEDFPDTDTFSPHLDVISS

SEQ ID NO: 254000 - protein, 324 aa, Zea mays
  unsure (1)..(324): unsure at all Xaa locations
  Clone ID: MRT4577_16322C.1.pep
IPPTTASPRLTTIWFRSDSESLPDDMDKNSHLKGLQQLGPLTVLRADMDEEGSFDDAVAGCDYAFLVAAPVNLSAQDPEKGQIEPSVRGTLNAMRSCAKAGTVRRVILTSSVAGVTIRXQLQGDGHVLDEESWSDVEYLRAHKPAGPWGYPVSKVLLEKEASRFAEEHGIGLVTVCPGLTVGAAPAPTARTSVPNCLSLLSGDEAAFAVLDAIESATGCLPLVHVDDVCRAELFAAEEGAAAGRYVCCGLNTTVAELARFLADKYPQYGVKTNLLSGERLEKPRVCLSSAKLVKEGFEFRYRTLDDIYDDMVEYGKALGILPDL

SEQ ID NO: 254001 - protein, 373 aa, Zea mays
  Clone ID: MRT4577_163230C.1.pep
MALLMEPGAEPLTESEQADLAGIAAIKESAAREYKEQGNQFVRMGRRHYAAAVSCYTKAIAQMEPLSSLDASAAADASVLFANRAHVNILLGNHRRALDDAEQAIRLSPSSVKAYYRAVKAALALDLLTDAASFCRKGLEQDPPNEEFKKLLSEVDSKLREQDRQRAKVAQAIAKAKDLAAAMGKRGVKLGKAAYQELTGVKKPVLDEQGVLHWPVLLLYPEVMSSDFIEDFPDTDTFSPHLDVMFSETSPPLPWDDNHVYTRDSIELYYQGGFGKPLSRSEVLRYLLEGNVDSKALPDSLLDGEDEEHDSTKCTTVTSTDSSSKWIKVKEGKTLQEVLQDKGYIVPAIPVFFVVSRKSTFYKDFKAGNWSLP

SEQ ID NO: 254002 - protein, 66 aa, Zea mays
  Clone ID: MRT4577_163231C.1.pep
RLDPHVRQLGYVVHKPFYIFIGVENLGAAFCLDPHVPGSIAKRNYLPTGSVQSESLDWPKYFPKGT

SEQ ID NO: 254003 - protein, 115 aa, Zea mays
  unsure (1)..(115): unsure at all Xaa locations
  Clone ID: MRT4577_163232C.1.pep
KRKETPPPPRXSIPVLAELSPSLVISLSTGVSLFLGRFVFFNFQRENVAKQVPEQNGKTHFDAGDERAKEFSGLLKSNDPVGFNLVDVLAWGSLGHIVAYYILATSSNGYDPNFF

SEQ ID NO: 254004 - protein, 44 aa, Zea mays
  Clone ID: MRT4577_163233C.1.pep
SDLIIDLMPYSCIYLYTLSTTNHLCLPMLYCSLYYLYTVTRTCV

SEQ ID NO: 254005 - protein, 61 aa, Zea mays
  Clone ID: MRT4577_163234C.1.pep
NKVFFFLYFRESFLEFVWYFFLYFIYFFFFFISSYIFFIFLFFIFFFFFFLIYRKSGRKSG

SEQ ID NO: 254006 - protein, 71 aa, Zea mays
  unsure (1)..(71): unsure at all Xaa locations
  Clone ID: MRT4577_163235C.1.pep
HLTGENEGHHLTREGIVSHDGASRAESSALPEFMPVEKAGIMXDFDEPEHLTPSGLTLGGSXYMVIQCVPG

SEQ ID NO: 254007 - protein, 163 aa, Zea mays
  unsure (1)..(163): unsure at all Xaa locations
  Clone ID: MRT4577_163236C.1.pep
RCCRALADIIQGRRYSQVCKHLRKIWTTTFRAMDDIKETVRTAGDSLCRAVSSLTIRLCDISLTSTSEANETMNIVLPYLLSEGILSKVSSVQKAAISLVMKLAKGAGPALRPHLPELVSCMLECLSSLEDQGXNYVEMHAGNAGIKTDKLETLRIAVAKDSP

SEQ ID NO: 254008 - protein, 182 aa, Zea mays
  unsure (1)..(182): unsure at all Xaa locations
  Clone ID: MRT4577_163237C.1.pep
MATKILPLLMLPAVATCAANATCLHECLQAPIASLLPSYLASIIAXVCENPSLQPYRLEQGIVASYIPLSPLLPEQSPALSLVQTLVQTMMAQQLLHLVLPVINQVALAYLYPYYXQQQFLPFNQLSTLNPAAHLQQQLLPFSQLATDYYQQQQLLSFNQLAALYPAAYLLQQILLPFSELA

SEQ ID NO: 254009 - protein, 181 aa, Zea mays
  unsure (1)..(181): unsure at all Xaa locations
  Clone ID: MRT4577_163238C.1.pep
MLTPFAAQQQQVPHELAAPGSQTASPNTKASQLVTSFLTSSQTCVTAQLSNHSHLAYSHTTQALLRPKSFXTKDKVLCLIXRCWDSLRLLXHKHRMASKCTNEVLLVIQNNKTLLDRVTYSASFMLTHITTCYAYXILFEQXNNSLLDAYDHHVIVALXFCRTTADTCVAFSDNIYMIKSS

SEQ ID NO: 254010 - protein, 238 aa, Zea mays
  unsure (1)..(238): unsure at all Xaa locations
  Clone ID: MRT4577_163239C.1.pep
IIDKSIHTAYVRAIRSAQHFIYIENQYFLGSSYEWPSYVNSGADNLIPMELALKIATKIRAGERFAVYVVIPMWPEGVPTSASVQEILFFQAQTMEMMYGVIARELKAMNIEDAHLQDYLNXYCLGNREEPSTDGSPESDKSTDKSAAGLARKHRRFMIYVHAKGMIVDDEYVILGSANINQRSLAGSRDTEIAMGAYQPHHAWSSKKGHPHGQVYGYRNSLWAEHLXMVDDHFKEPS

SEQ ID NO: 254011 - protein, 134 aa, Zea mays
  unsure (1)..(134): unsure at all Xaa locations
  Clone ID: MRT4577_16323C.1.pep
LAKTLPSARARVTRRQSRSRTVRFLDIEGDVAVAAAAAGCMRFPVVEVKDSGGSEESSDASSDLFELESLAALAPVNGISGCRRTFENELPVYGXTIGTGLGHDIAVVRRRRLGTSATVGVRDGNRASELQKLV

SEQ ID NO: 254012 - protein, 83 aa, Zea mays
  unsure (1)..(83): unsure at all Xaa locations
  Clone ID: MRT4577_163240C.1.pep
LSFPGGXPGTGFPGAPRPALSSXLFGFRGXAIGGGWGLFPLXWXPFRGWGVPXGLGWGKNCVYLXIRLEFLFMGGGKLGVACS

SEQ ID NO: 254013 - protein, 84 aa, Zea mays
  unsure (1)..(84): unsure at all Xaa locations
  Clone ID: MRT4577_163241C.1.pep
AFKKKVEEEKATYLTPVRENRAMALNNLQTALPKVFHALEGFSGGGGQAFXGITLFSEVAVFPSGAGSFAICSGPCYEGWDYSL

SEQ ID NO: 254014 - protein, 120 aa, Zea mays
  Clone ID: MRT4577_163242C.1.pep
IYKDLFIHSLLIHISVQPTKLNLCLIYTSLQTQPNKSVCTNTHFSATNQTKSMSDLHKSINTTKQKCLHELTLVLLILARLIRTWLDFYGNNHIVCDSAMFSTIACLGTSMFDRGGTCDG

SEQ ID NO: 254015 - protein, 108 aa, Zea mays
  Clone ID: MRT4577_163243C.1.pep
MPYITSKNYNAREATREHRNKDLTGASIDRATNISTIATTILNDTYMQTIHEKQLQQQDEQNIMDKSHKHPFSYNPNDNNTIRCKQITGGTPSCLTRRTSFTTIKPNA

SEQ ID NO: 254016 - protein, 103 aa, Zea mays
  Clone ID: MRT4577_163244C.1.pep
RPGYKPRPFGVERTLASRWRRARQLQRASRRRRSGSCSGLRDRRSGSYGDVDGGAPEAGTVQRRLRHGLAVASSPADQRLVDPFGGYFSPIVGKMMARCGWSC

SEQ ID NO: 254017 - protein, 82 aa, Zea mays
  Clone ID: MRT4577_163245C.1.pep
ATHMFKIRRILSSGYQQMYFDGRDPVPYVLARTWRLCADAREWYANAPATTSNSFGLLYRLELLYCTIVFLSPSIGDPEICD

SEQ ID NO: 254018 - protein, 167 aa, Zea mays
  unsure (1)..(167): unsure at all Xaa locations
  Clone ID: MRT4577_163246C.1.pep
PGPNQQQAKTTDPSGLRGEESLRGKXGKGLGKGGAKRHLKVLLDNIRGITXPAIRRLTRRGGVNSMYRLIYQERQCXLKXFLENVIRXDILNYTMHSFHNNVINMDLVYALKNQNHTLLFLPGVGVGSGEASHILSPDVLMLQPGSRRSGGKILGTAALPQECCAVS

SEQ ID NO: 254019 - protein, 49 aa, Zea mays
  Clone ID: MRT4577_163247C.1.pep
KKRPCRFVVLPSGGHLGLGYPPCLSQVRRLFIGGARRLPHRCSVPYRCL

SEQ ID NO: 254020 - protein, 27 aa, Zea mays
  Clone ID: MRT4577_163248C.1.pep
ARSSARRHGGGMASLIRNPLHPIQLSS

SEQ ID NO: 254021 - protein, 53 aa, Zea mays
  Clone ID: MRT4577_163249C.1.pep
INVFRMHGVMSYQIWKFVPLSPRYLSFLVTFGNRLGVFHFVNLSCFLTLCFST

SEQ ID NO: 254022 - protein, 369 aa, Zea mays
  Clone ID: MRT4577_16324C.1.pep
VLDRERLSFFFFFSDAWKSLSQLNEQRLHTPWQHKVFTKLLGLHYKILYRPGTDNRVADALSRCVQGELQAISVVVPKWLSEVQSSYLNDAEAQDLLAKLSIDPLAVPHFTLKDGLLRYKTRIWLGADAQLHHRILSALHCSAMGGHSGVPVTYSRVKGIFAWKNLKSSVQQFVEQCQVCLQAKPDRSAYPGKLQPLPVPRSAWHTISMDFVEGLPRSGTADCILVVVDKFTKFSRFIPLSHPYTAASVAHLFMSHVYRLHGFPIAIISDRDPVFTSQFWTTLFKLAGTELRLSSAYHPQSDGQTERVNQCLETFLRCFVSACPKKWSAWLSAAEFWYNTSCHSALGRSPFEVLYGRKPHSLGLSMNAT

SEQ ID NO: 254023 - protein, 82 aa, Zea mays
  Clone ID: MRT4577_163250C.1.pep
MQTPAMSTSTATTTRAMAPAKPPARRHCCSYLLLLLPSTGHRRSVAAWSAKKKNPWLDPFDDGPDEEFDYQGMFSGGKQEED

SEQ ID NO: 254024 - protein, 54 aa, Zea mays
  Clone ID: MRT4577_163251C.1.pep
YGSSSRFVYNFVLGYIFLFLLIMLFRVVRHLCRRRFIFKFVTMACTEDWWSNVK

SEQ ID NO: 254025 - protein, 99 aa, Zea mays
  Clone ID: MRT4577_163252C.1.pep
ERMPWRGGIAHGWVDLTEVNEPKDREGRKRERCRTEQMGTCDWLYRHHHPYYCVSRLVITQPDRRKMPTPSFFLHLCSDLLNGDIQRRQSCENEGRDMT

SEQ ID NO: 254026 - protein, 53 aa, Zea mays
  Clone ID: MRT4577_163253C.1.pep
VCGCAVELSIMCVGSKNLNLCIVCDLNGKGKRRQCVVVSWNRKIFSKVPNMWY

SEQ ID NO: 254027 - protein, 74 aa, Zea mays
  unsure (1)..(74): unsure at all Xaa locations
  Clone ID: MRT4577_163254C.1.pep
MRRHQTSQGRSPYAALCRPPTPDHTKWIGFFSSKQDFIDVVEAIFRGAMKGKLIVSCPLPPERIPRFXLLFKDV

SEQ ID NO: 254028 - protein, 65 aa, Zea mays
  Clone ID: MRT4577_163255C.1.pep
LGECQNPKNGGVGNRSRPGNFSPCKIGGLWGSNKAVPTIQKLKKGRPFIKTLGPLLNSKRDRFPY

SEQ ID NO: 254029 - protein, 152 aa, Zea mays
  Clone ID: MRT4577_163256C.1.pep
MGSVLLPTLRLKSEVDAAIRDTLDKVLVLRFGRATDATCLHLDDILAKSSWDISKFAMVALVDMDSEEIQVYIDYFDITLVPATIFFFNAHHMKMDSGTPDHTKWIGSFSSKQDFIDVVEAIFRGAMKGKLIVSCPLPPERIPRFQLLFKDV

SEQ ID NO: 254030 - protein, 152 aa, Zea mays
  Clone ID: MRT4577_163257C.1.pep
MGSVLLPTLRLKSEVDAAIRDTLDKVLVLRFGRATDATCLQLDDILAKSSWDISKFAMVALVDMDSEEIQVYIDYFDITLVPATIFFFNAHHMKMDSGTPDHTKWIGSFSSKQDFIDVVEAIFRGAMKGKLIVSCPLPPERIPRFQLLFRDV

SEQ ID NO: 254031 - protein, 55 aa, Zea mays
  unsure (1)..(55): unsure at all Xaa locations
  Clone ID: MRT4577_163258C.1.pep
GTPDHTKWIGFFSSKQDFIDVVEAIFRGAMKGKLIASCPLPPERIPRFXLLFKDV

SEQ ID NO: 254032 - protein, 69 aa, Zea mays
  Clone ID: MRT4577_163259C.1.pep
CECIIDLRALHDKQPRYRTRVRYIIHERLSNTLIYWLSAAIPSPLRLERTAQRTKASATRKATAKQKLG

SEQ ID NO: 254033 - protein, 49 aa, Zea mays
  Clone ID: MRT4577_16325C.1.pep
FCFVLPIAKRGDTGLPYWAVQWVYAPPFGFNGTWGKKYAQCGRYKYFPR

SEQ ID NO: 254034 - protein, 308 aa, Zea mays
  unsure (1)..(308): unsure at all Xaa locations
  Clone ID: MRT4577_163260C.1.pep
NTSVLPQEGLQALRQKCPTVPASTTSPTTRRVWRAQAASATRRGRGGAFPRIDRQVNVIFRGHGSQENRRQQKLNDRQVLVATTSAPAPYRWSEHPITFSXADQWLNFDHPGKYLLLVDPXGSSINATFPRTLLGLGVALKDLNESDTPSFGIVPIEGEYSLGNIYMLVTFGTPENYRTKFLRFEVARFDCGYNAIIGRPGLAKFMAIPHYSYMILKMPGPPGIITMCADFQGTTECFRGAIQAALCAGPSTTSSTQADTKAEEDLAIPTNEAQVVTSIRLTEETKRINPGFSDVRTTTIISSSLGDK

SEQ ID NO: 254035 - protein, 115 aa, Zea mays
  Clone ID: MRT4577_163261C.1.pep
VSFMQVVASIAREPSALLSINNSCISLKNLIGLERSLLALSFRLAFSDSDMSTIDLVVSKVLPLLLKAAATNFQFISVHISMGTTASWKTSKPCLIFRIQVTQSAEPVEIEFQCS

SEQ ID NO: 254036 - protein, 588 aa, Zea mays
  Clone ID: MRT4577_163262C.1.pep
MAENSDAAAAVTARLLELAADNDSTALGDLLAVHPSLADEPAPWYSPARGAEPMTPLMVAAAYGSVACIDVLLSPPHLTDPNRASPSSLSTALHLAAAGGASAAPAAVSRLLAAGADPTLLDHLHRRPSDLVALPPNSLPLKNHLLSLLGGRKEWPPDPSLPDIKNGAYASDDFRMYSFKVRACSRAYSHDWTECPFVHPGENARRRDPRKYHYSCVPCPEFKKGAGCRRGDMCEYAHGVFESWLHPAQYRTRLCKDGLACARRVCFFAHTPEELRPLYVSSAGSRSAMGMGLPSPGASFTPPLSPSGGGSGVAGAWPQPNVPALCLPGSAGNLQLSRLRTLMSARSMAVDELLASADYDGLVGSPASLRSARGKTLVPSNLDDLFSAEMAGAAASHSPRYADQGGSAFSPTRKAAMLNQFQQQQSLLSPRATVVPEPVSPMSSRLLSALAQREKMQQQTLRSMSSRDLGSGASVLVGSPVTSSWSKWGIPPSTPDWGADAEELGRLKRSSSFELRSGANGDEPDLSWVNTLVKEPTPEKPSINGTAAKESIASLSQAASHEGIGGEDDTAGVIGGWLEQLQLDEMVV

SEQ ID NO: 254037 - protein, 100 aa, Zea mays
  Clone ID: MRT4577_163263C.1.pep
RTGLTGMIFPKPTLAKEDFIFLTFPNCIGSSNGWNLPYHRSAKKITKLISPVPNAIVCVLGDVLPGIFKSGVFFTKLKKEPYQTNKKYFEKNNPRTPTLE

SEQ ID NO: 254038 - protein, 72 aa, Zea mays
  Clone ID: MRT4577_163264C.1.pep
TSGNNAEYAGCGHPLDVVCRPGLHQSGLMSICIAGCLSPGPRKNDLTIYWVLGPFVRSFTLLVDPGDIYPPQ

SEQ ID NO: 254039 - protein, 1029 aa, Zea mays
  Clone ID: MRT4577_163265C.1.pep
MGADARVRLLLLLLFLLDLGCSNGGGRCSSAQTMLPAQEVEALKGIARKLNKADWDFSVDPCSGLGNWVNVTGLLSSNVTCDCSFNNHTECHVISLELMRQNLSGVLPDEVVNLTYLQNLDLSRNSIQGPIPASWADLPVFNLSLQGNRIFGTLPKELGRMPKLKSIQLEGNQLAGSIPPELGNIISLQRFFISANNITGELPSTFSRLTNMTDFRVDGNSISGKIPSFIKNWQSVNRIDMQGTLMSGPIPPEISLLKNLTELRVTDLSGPRMKFPPLQNALHLTEVVLRNCSIYGEIPSYLGQMQYLKVLDLSFNKLTDKVPENFGAMIALQYLYLTDNMLTGDLPAWMLKNKASNKVNMDISYNDFTGNPPSECQQANVNMVSSFSSSNNNSLQPCLRKNLPCTTRPRHSSLFINCGGKSVVVDGNTYEDDSSQIGTSMYSVSDDKKWAYSSTGDFVGNENADYIARNTSKLNLAYPELYTEARLSPLSLKYYGLCMENGEYTVKLHFAEIVFTEDRTYSSNGKRVFDVFIQGVKVLEDFDIKDESGGVHRATIKFFATNISENTLEIHFYWGGKGTTAIPYRGVYGPLISAISVTKMGRNHHGLSTGVAVAIVIVATCLAVIVLISLYFKVFRKKNIKGNGRQFFYQGRKTATSELQTRAQYFFSLKEIESATKHFDPANKIGEGGFGPVYKGTLANGTIVAVKKLSSKSSQGNREFLNEIGIISALRHPNLVRLFGCCIDGDQLLLIYEFLENNSLGRALFGRTEHQLKLDWPTRYNICLGTAKGLVYLHEESALKIVHRDIKPSNILLDGKMRPKISDFGLAKLNDDCGRVSTRIAGTVGYMAPEYATRGCLTRKADIYSYGVVALEVVSGMSNTNSMSNEEYLHLLDWAERLKQQGKLLEMVDRRLGSDYSQEQALRLLDVALLCTSIQPTQRPRMSSVVKMLCGEIPVEIVPADDDLSEDLRLNIAQSRQSIDNSQTNWSQYSVNNSQTNWSETLSSDRSVLPHSSKDSGYLPSSSSLSVKL

SEQ ID NO: 254040 - protein, 269 aa, Zea mays
  unsure (1)..(269): unsure at all Xaa locations
  Clone ID: MRT4577_163266C.1.pep
RDYPLSLSINKRRRRNYAKGVPDFWLTAMKTNEVLSEEIQERDEAALKYLKDIKWSRIEDPKGFKLDFFFDTNPFFKNSVLTKTYHMVDEDDPILEKAIGTEIEWYPGKNLTQKILKKKPKKGSKNTKPITKTEDCESFFNFFNPPQVPEDDDDIDEDTADELQSQMEHDYDIGTTIRDKIIPHAVSWFTGEAVQGEDFAELGDDDDDDDDEDDDEEXEEDDDEEXDEEEESKPARNWDPVTNRRXAGSVAALQGNAEQPAECKQRSAR

SEQ ID NO: 254041 - protein, 46 aa, Zea mays
  Clone ID: MRT4577_163267C.1.pep
WRQEGQVEHLASKLLIAHLDVRCVEKLVKFQCYCVVLKAGHAWYQI

SEQ ID NO: 254042 - protein, 149 aa, Zea mays
  unsure (1)..(149): unsure at all Xaa locations
  Clone ID: MRT4577_163268C.1.pep
TNPRRRTVNRTNHGPREGQGRRPRRRQVVPXSPASSSASSSEFEFTVTQSPGAKQRSAAQLCPADDLFYKGQLLPLHLSPRISMVRTLLLASASTSSASASDSTSASNSSRDSNGSTSSSFSTDCAALLLPDSAPSSSRPSSAADDDRH

SEQ ID NO: 254043 - protein, 380 aa, Zea mays
  Clone ID: MRT4577_163269C.1.pep
MGGEKETFDTSDLNASLPAAAAALSAEDRAGLVNALKDKLQSLAGQHADVLETLSPNVRKRVEFLREIQSQHDEIEAKFFEERAALEAKYQKLYEPLYTKRYGIVNGEVEVDGVCDEPASENTVEGKEPDAKGVPDFWLTAMKTNEVLSEEIQERDEAALKYLKDIKWSRIEDPKGFKLDFFFDTNPFFKNSVLTKTYHMVDEDDPILEKAIGTEIEWYPGKNLTQKILKKKPKKGSKNTKPITKTEDCESFFNFFNPPQVPEDDDDIDEDTADELQSQMEHDYDIGTTIRDKIIPHAVSWFTGEAVQGEDFGELGDDDEDDDDEDDDEDDEDEEEDDDEEEDDEEESKPARKSGSGRRHKAPQKVSQGNAEQPAECKQQ

SEQ ID NO: 254044 - protein, 55 aa, Zea mays
  Clone ID: MRT4577_16326C.1.pep
APTLGQPVAVLYSLHKGASTLPQMLDPRMGSKLGLRAKPTRANLYLFFPRQNFYG

SEQ ID NO: 254045 - protein, 49 aa, Zea mays
  Clone ID: MRT4577_163270C.1.pep
PTTEKGALPYVFLSYIIFVPSLTCMLNGYCSDFCFPMPTVGDVTTSELW

SEQ ID NO: 254046 - protein, 55 aa, Zea mays
  Clone ID: MRT4577_163271C.1.pep
NYTKWKGLCLILYTTITNMFFFYLTHYFGPYVSFNWANLGLFNYHILDKTVTFAD

SEQ ID NO: 254047 - protein, 52 aa, Zea mays
  Clone ID: MRT4577_163272C.1.pep
IVPILIGKQHFFACSISFLSHFSCAGPLVTYEIPVSVGFLFHPIDCYHITSW

SEQ ID NO: 254048 - protein, 131 aa, Zea mays
  Clone ID: MRT4577_163273C.1.pep
FLFPSCGSFSASLVFASTSRLVGSIGSPLSRLLGAGLSVRWACCLSSLSSLFCLRLCWPFLGAAAALARRVCGCVAGGGCSLCWCAAGASVGSVAVGVGWPASGLRVSPPGPCLGFGSGLGFCPSGLGGCP

SEQ ID NO: 254049 - protein, 54 aa, Zea mays
  unsure (1)..(54): unsure at all Xaa locations
  Clone ID: MRT4577_163274C.1.pep
PAXTRTRIPRHHPRFSAERDDLTRGGFFLDDDKVQNIQKTLENEDSWHYNITLS

SEQ ID NO: 254050 - protein, 159 aa, Zea mays
  unsure (1)..(159): unsure at all Xaa locations
  Clone ID: MRT4577_163275C.1.pep
QHSKSASTVPTIGQTQRVVLTYAPWAFCRALIHEPLPPQCSQAAIANFFPRXLSPRGEYRMRKPNRXPWRIQQAFEGGMXPLSQQASATIXNQSQRIPLVHELEQNINDQQRQQLVIGNLAGNLQQKXSITFNQQAAKNSAGNLQQTRTFNKLDDANHQ

SEQ ID NO: 254051 - protein, 87 aa, Zea mays
  Clone ID: MRT4577_163276C.1.pep
VKVTPLVMPTAPYHGFIAPPLVSPFPPWTPFFCFAGSPPPFLWFSPPEAGCPQIPPFGGPPLPKCLSEGLNPPGAFLDKYVFSLGLS

SEQ ID NO: 254052 - protein, 40 aa, Zea mays
  Clone ID: MRT4577_163277C.1.pep
ESTSIYSFDGTDVQEGTYVLRGLRVAIPTVTTLHTHHQVL

SEQ ID NO: 254053 - protein, 111 aa, Zea mays
  Clone ID: MRT4577_163278C.1.pep
GWGSFIPGQVNLQKKKKKTAPFTRCYNPPQGKDPPPPFSVYPTEKKLPLQFPLPKMHFFYRPTPQNPVKKTLEKGTVKLPNHALVQKGETQPNFRSNGLDPNKKQGSNPPP

SEQ ID NO: 254054 - protein, 122 aa, Zea mays
  Clone ID: MRT4577_163279C.1.pep
GEVFFFFFFRTPKKTKKLVLSIIHPTPFLKKKKDNYRPHKPGSPTLKKNLTIHHFLTKSFFFPKVLALKKKKPQPSKKPSFFKNPKFSNGREKNPPTSFFFTKLGNPTKPIGPYQTLLPKRG

SEQ ID NO: 254055 - protein, 46 aa, Zea mays
  Clone ID: MRT4577_16327C.1.pep
DDDGPRDGLEAEGDAGESGQNDHVGGFVAAERIASSRIPDCERVHP

SEQ ID NO: 254056 - protein, 151 aa, Zea mays
  Clone ID: MRT4577_163280C.1.pep
NKSILSYNVLWLLAVLKVRQKKKKKKKKKKKKKKDPIAPSPSPSPSPSLSPETRRDPGTSRIAADRRDGAAADRSARFGGRPEQFIGHQNEAPKILARADYTIAKDIADLCLDRIRNLADKCTVSHGFLVFNAAGGTNASELGYLLLERLS

SEQ ID NO: 254057 - protein, 93 aa, Zea mays
  unsure (1)..(93): unsure at all Xaa locations
  Clone ID: MRT4577_163281C.1.pep
GCWLQXRAPHSPGPLCLLFRLCSCSRFAPLPAGADMDPNPRAALERQXLRLRERQQFFEDIHQAETEFVFPLSHLHLESQRPPIGSLSSMEVH

SEQ ID NO: 254058 - protein, 97 aa, Zea mays
  Clone ID: MRT4577_163282C.1.pep
PQKALEFPPGNPLMEKLAKRGEAPKNDKFVKDLVMFFFKRGVLPWGFSLEDPNPFGSRIPRMVKLGLSINKDKAPEADPHMPPLEENPGENKMEEGG

SEQ ID NO: 254059 - protein, 77 aa, Zea mays
  Clone ID: MRT4577_163283C.1.pep
VSLNSELYKNLDSDTLHKFEKHFNLKNCRPEHKLTFPVLSILPRDAMSKPVSTESSDSAFTLCGKIIHERQQQLAPE

SEQ ID NO: 254060 - protein, 101 aa, Zea mays
  unsure (1)..(101): unsure at all Xaa locations
  Clone ID: MRT4577_163284C.1.pep
ITCDIEGERXITVRCDDSLLDEIIESDRSSGISVTQDWDSXPGVXLPVASLGGSVTAWHIPXAMTETLGDDSXLQFGGGTLXHPWRNAPGAPANREALEAC

SEQ ID NO: 254061 - protein, 112 aa, Zea mays
  unsure (1)..(112): unsure at all Xaa locations
  Clone ID: MRT4577_163285C.1.pep
GRCLGGGGXGGAGAELVAVELERSSGSVEESRMSEKAVSWLRSAQALGGSRWRLAALRLRCGKGVGLGGPRFIERSRREERERQPEPGAWRPEGRRRVVVQVLYPPGYRCGG

SEQ ID NO: 254062 - protein, 65 aa, Zea mays
  Clone ID: MRT4577_163286C.1.pep
VRLAFLCACDLPVQALPASAGACPSGRFLPARALWCLVGAPRSGSGRACAYLPCSLTRLEPNSVL

SEQ ID NO: 254063 - protein, 81 aa, Zea mays
  unsure (1)..(81): unsure at all Xaa locations
  Clone ID: MRT4577_163287C.1.pep
RLKHELHGEHXLGLQYRGTDTYGGDRWGQMGIIWVYTCDCEECDFDLHPKCALRKKGEEEETKSSTAGCYVCKGSDVCIKA

SEQ ID NO: 254064 - protein, 55 aa, Zea mays
  Clone ID: MRT4577_163288C.1.pep
GARWMLLKEHGSIIHVEGELSWCFRSHNGCYSGGYRLYQLTDSGCSTSLGLTGDA

SEQ ID NO: 254065 - protein, 114 aa, Zea mays
  Clone ID: MRT4577_163289C.1.pep
HGAPEDEPHHPGDLANVAAGTDGVASIKVPDSQIPLNGPNSLCGRAVVDHAPPYDLGQGGHEPSKSPGGSHEGVACGIIGCQASTEPHGRCSSGAPESPVTTRPRTLVPKTAVK

SEQ ID NO: 254066 - protein, 281 aa, Zea mays
  unsure (1)..(281): unsure at all Xaa locations
  Clone ID: MRT4577_16328C.1.pep
LEAGRATPCRPPAYPRSASSSCSRCSAPCPPVARSTCSTRCPVASSLPPHTPVVVAAALLVVSLAAYCSTDPLRTGSMVDFPGFESHLVDLPDPDEMPTHADERERLRGAEVRFHGEVQGPESVAFDPQGXYMGVVDGRVVSWDGEWWVPFATASPRGTQELCGGPMASPLEYLPSEHICSRPLGLCFNKIGDLYIVDAYFGLLKVGPEGGLATPLTTEAEGVRFNFTNDPDLDDEGNIYFTNSRIHYQRRVGDRLIVNITIHDPEIGLELGRLFAWITLL

SEQ ID NO: 254067 - protein, 72 aa, Zea mays
  Clone ID: MRT4577_163290C.1.pep
YFLQPAMFSLLSVKDAVPPDRCWLGLSGQLSLRQLYCPSFFFFFFFILFFFFFFFFFLCDHVLHKPELVITS

SEQ ID NO: 254068 - protein, 107 aa, Zea mays
  Clone ID: MRT4577_163291C.1.pep
LHTLTWLHQGAANTIVDLFFYPPAAYHTANPQFSCYPVDTPTPHGNLFGAQMQKVLMCTFSPGHTIEKILPLPRVAQTQWIAGHARGCQSQDGAYHSEALHAGALLP

SEQ ID NO: 254069 - protein, 52 aa, Zea mays
  Clone ID: MRT4577_163292C.1.pep
ILHPASIHLCHLFCDTISKFLSLVLLLGPPSLSMASHSFFFLLAFPTLWSTP

SEQ ID NO: 254070 - protein, 38 aa, Zea mays
  Clone ID: MRT4577_163293C.1.pep
TPKTRQKGRDTPKLGKENGHELRLINRQHQIGQLKGGG

SEQ ID NO: 254071 - protein, 85 aa, Zea mays
  unsure (1)..(85): unsure at all Xaa locations
  Clone ID: MRT4577_163294C.1.pep
CDNAWLGIDGMTGDIVQRTELRIWDCFSVXKYKRTRTAIAAACMLQRMDDLVSGINKTHAPGASASKQPPIDTVVDAYIEQMITD

SEQ ID NO: 254072 - protein, 83 aa, Zea mays
  Clone ID: MRT4577_163295C.1.pep
ASYLRGVRGASFFLGLVNTKINNFYINVSTHNIGACGAISPSASKIKMTQRAVPTSQVKRCFTRFLTCLPYKATFYWNPAACV

SEQ ID NO: 254073 - protein, 184 aa, Zea mays
  unsure (1)..(184): unsure at all Xaa locations
  Clone ID: MRT4577_163296C.1.pep
MPASLVTSSLLPPCRAAATSARALRSFARRPPPSSAGLVRVRCHAATPPPPEVPGQMTPPEVPGTDRQPLEVPGTNRPPDEVPSIDTPPEFNAPPGVDVPMPGQPAPGPELPGPAMPSPPAPEVPVVPPNPDVPPPQLPEVDPPSPPPEVVPPEPPGTATAPPPXCSSVAPPPSMARAGGRWTG

SEQ ID NO: 254074 - protein, 1067 aa, Zea mays
  Clone ID: MRT4577_163297C.1.pep
MAPSTPTFTLRSILEKDKLNGTNHTDWIRNLRIVLRAEKKEDVLDSPLPEDPGENATAAAKTAYKKAMDANLEVSCLMLACMEPELQMQFETNHEVYDMIVALKDMFQTQARTERFNVSKAFLECKLAEGAAVGPHVIKMVGYSQRLEKLGFPISQELATDFILASLPPSYGNFITNYHMHGAERGLNELCGMLKTAEGDIKKSAGSSGHVMAVQNKPNFKKKGKSQKKKGKGKDTVSKPNQKPKAGPAADAECFYCKELGHWKRNCKQYLASIKDRGGKGTAAAGTLAIHITEIFLADSYINSWVFDTGSVAHICNSMQGMIRSRSVKRGEVDFRLTPPGTPQRNGVSERRNRTLLDMVRSMMSQSDLPLSFWGYALETAAFTLNRVPSKSVVKTPYEMWTGKTPSLSFLKIWGCEVYVKRLQSDKLTPKSDKCMFVGYPKETLGYYFYHRSEGKVFVARNGVFLEKEFLKREKSKQKVYLEEVQDEPVGQDSTSDANVAEQVETSMARESPPQPRRSARLREARGEVLLLGNGEVLLLDNDEPATYSEAMMDPDSEKWHVAMRSEIDSMGENQVWNLVDPPDGVRPIECKWIYKKKKDMDGNVHIYKARLVAKGFRQVQGVDYDETFSPVAMLKSIQIILAIAAYFDYEIWQMDVKTAFLNGNLDEDVYMIQPEGFVDPINAGKICKLQKSIYGLKQASRSWNIRFDEVIKGLGFHQNEEEACVYKKESGSAVVFLILYVDDILLIGNDIPMLESVKASLKKSFSMKDLGEAAYILGIRIYRDRSKRLIGLSQDTYIDKVLKRFNMEQSKKGFIPMSHGKHLSQMQCPAMANERERMSKVPYASAIGSIMYAMISTRPDVSYAISATSRYQADPGEDHWTAVKGILKYLRRTKDMFLVYGGKEELVVTGYTDASFQTDPDELKSQSGFVFTINGGAVSWKSSKQETVTDSTTEAEYIAASESAKEGVWIRKFLIELGVFPNASSPLNLYCDNNGAIAQAKEPRNHQKNKHVLRKFHLIREFIRRGEIKICKIHTDLNVADPLTKPLPQPKHEAHVRSMGIRYLLD

SEQ ID NO: 254075 - protein, 1012 aa, Zea mays
  Clone ID: MRT4577_163298C.1.pep
MVGYSQRLEKLGFPISQELATDFILASLPPSYGNFITNYHMHGAERGLNELCGMLKTAEGDIKKSAGSSGHVMAVQNKPNFKKKGKSQKKKGKAKDTVSKPNQKPKAGPAADAECFYCKELGHWKRNCKQYLSSIKDRGGKGTAAAVPSMSRNIMSPSCLMKDDYSFASENNGCVISKNGMFLAFASIMNGLFILNLDDAPICNISAKRPRPNDLSPTYMWHCRMGHISENHMKKLHSDGFLTSFDFESYETCEACLLGKMTKAPFTGLPERTLDLLELIHTDVCGPMSTTARGGFQYFITFTDDFSRYGYVYLMKHKSESLEKFKEFQNEVENQRDKKIKALRSDRGGEYLSHEFSNHLKSCGIVPQLTPPGTPQRNGESERRNRTLLDMVRSMMSQSDLPLSFWGYALETAAFTLNRVPSKSVVKTPYEMWTGKTPSLSFLKIWGCEVYVKRLQSDKLTPKSDNCMFVGYPKETLGYYFYHRSEGKVFVAWNEAMMDLDSEKWQVAMRSEIDSMGENQVWNLVDLPDGVRPIECKWIYKKKKDMDGNVHIYKARLVAKGFRQVQGVDYDETFSLVAMLKSIRIILAIATYFDYEIWQMDVKTAFLNGNLDEDVYMIQPEGFVDPINAGKICKLQKSIYGLKQASRSWNIRFDEVIKGLGFHQNEEEACVYKKESGSAVVFLILYVDDILLIGNDIPMLESVKASLKKSFSMKDLGEAAYILGIRIYRDRSKRLIGLSQDTYIDKVLKRFNMEQSKKGFIPMSHGKHLSQMQCPATANERERMSKVPYASAIGSIMYAMISTRPDVSYAISATSRYQADPGEDHWTTVKGILKYLRRTKDMFLVYGGKEELVVTGYTDASFQTDPDELKPQSGFVFTINGGAVSWKSSKQETVTDSTTEAEYIAASESAKEGVWIRKFLIELGVFPNASSPLNLYCDNNGAIAQAKEPRNHQKNKHVLRKFHLIREFIRRGEIKICKIHIDLNVADPLTKPLPQPKHEAHMRSMGITYLLD

SEQ ID NO: 254076 - protein, 108 aa, Zea mays
  Clone ID: MRT4577_163299C.1.pep
MDVNERTMWSVMRSQVAMAVELEFLVSGAWCGPAKVPPGTNMTGTYGKDWLDAKATWYGKPTGAGPDDNAGGCGYKDVNKPALNSMGACENMRIFKDGLQWGPCFKNK

SEQ ID NO: 254077 - protein, 162 aa, Zea mays
  unsure (1)..(162): unsure at all Xaa locations
  Clone ID: MRT4577_16329C.1.pep
VPGGTALASRAPHQSRFGQPRHSTQEVVGXPRGPPPGSRPRRGXGDPHTWVAQVGARHPQAGAACPHASDQGQSASPREAHAPSRVQRHHHQGGGPKQREQGGRRXXEXXPQQTPARRGTKANRPRDRXCAPSRMSQERACRAQGVPKREQMRHPRVCDPSL

SEQ ID NO: 254078 - protein, 57 aa, Zea mays
  Clone ID: MRT4577_1632C.1.pep
IIKKILKLKSRSIKRTNFKHFPLQKKGSFGSEINLFTSLPLICKKFGTNFVKTVCLV

SEQ ID NO: 254079 - protein, 1424 aa, Zea mays
  Clone ID: MRT4577_163300C.1.pep
MAPSTPTFTLRSILEKDKLNGTNYTDWIRNLRIVLRAEKKEDVLDTPLPEDPGENATAAAKTAYKKAMDANLEVSCLMLACMEPELQMQFETNHEVYDMIVALKDMFQTQARTERFNVSKAFLECKLAEGAAVGPHVIKMVGYSQRLEKLGFPISQELATDFILASLPPSYGNFITNYHMHGAERGLNELCGMLKTAEGDIKKSAGSSGHVMAVQNKPNFKKKGKSQKKKGKGKDTVSKPNQKPKAGPAADAECFYCKELGHWKRNCKQYLASIKDRGGKGTAAAGTLAIHITEIFLADSYINSWVFDTGSVAHICNSMQGMIRSTSVKRGEVDFRVGNNARVAALTVGTMQLHLPSGFILELNNCYLVPSMSRNIMSPSCLMKDGYSFASENNGCVISKNGMFVAFASIMNGLFILNLDDAPICNISAKRPRPNDLSPTYMWHCRLGHISENRMKKLHSDGLLTSFDFESYETCEACLLGKMTKAPFTGLPERTLVLLELIHTDVCGPMSTTARGGFQYFITFTDDFSRYGYVYLMKHKSESLEKFKEFQNEVENQRGKKIKALRSDRGGEYLSHEFSNHLKSCGIVPQLTPPGTPQRNGVSERRNRTLLDMVRSMMSQSDLPLSFWGYALETAAFTLNRVPSKSVVKTPYEMWTGKTPSLSFLKIWGCEVYVKRLQSDKLTPKSDKCMFVGYPKETLGYYFYHRSEGKVFVARNGVFLEKEFLKREKSKQKVYLEEVQDEPVGQDSTSDANVAEQVETSMARESPPQPRRSARLREARGEVLLLGNGEVLLLDNDEPATYSEAMMDPDSEKWHVAMRSEIDSMGENQVWNLVDPPDGVRPIECKWIYKKKKDMDRNVHIYKARLVAKGFRQVQGVDYDETFSPVAMLKSIRIILAIAAYFDYEIWQMDVKTAFLNGNLDEDVYMIQPEGFVDPINAGKICKLQKSIYGLKQASRSWNIRFDEVIKGLGFHQNEEEACVYKKESGSAVVFLILYVDDILLIGNDIPMLESVKASLKKSFSMKDLGEAAYILGIRIYRDRSKRLIGLSQDTYIDKVLKRFNMEQSKKGFIPMSHGKHLSQMQCPATANERERMSKVPYASAIGSIMYAMISTRPDVSYAISATSRYQADPGFVFTINGGAVSWKSSKQETVTDSTTEAEYIAASESAKEGVWIRKFLIELGVFPNASSPLNLYCDNNGAIAQAKEPRNHQKNKHVLRKFHLIREFIRRGEIKICKIHTDLNVADPLTKPLPQPKHEAHRSLPVILQNIHIITPIKSRDIGLDKTMHPLGPLLQIISEDMHGDLLKKVLFGTFESIVSQVVPKLGGYTPWVHLPKTLGGSCIPSKFLHLRAQAPMVTNEIVIEAMIKGLQPGPTTQYFARKPPQTLEKLLQKMDEYIRADNDFRQRREEAYRYSVRPKICIKTYK

SEQ ID NO: 254080 - protein, 142 aa, Zea mays
  unsure (1)..(142): unsure at all Xaa locations
  Clone ID: MRT4577_163301C.1.pep
SVADGDDIQPLVRDNGTEMPKAEFAGDDAPKAQLPKIVGRPRHTGDIVAMDQNDDYVRDQEQSKRRILTLNYPIVARIWNHXDDIERICHHTFYTELRVAPEQNPVCWXQKHSLNLMVNRXXMTQMMFETFNAPSMYAAIQA

SEQ ID NO: 254081 - protein, 1300 aa, Zea mays
  Clone ID: MRT4577_163302C.1.pep
MAPSTPTFTLRSILEKDKLNGTNYTDWIRNLRIVLRAEKKEDVLDTPLPEDPGENATAAAKTAYKKAMDANLEVSCLMLACMEPELQMQFETNHEVYDMIVALKDMFQTQARTERFNVSKAFLECKLAKGAAVGPHVIKMVGYSQRLEKLGFPISQELATDFILASLPPSYGNFITNYHMHGAERGLNELCGMLKTAEGDIKKSAGSSGHVMAVQNKPNFKKKGKSQKKKGKGKDTVSKPNQKPKAGPAADAECFYCKELGHWKRNCKQYLASIKDRGGKGTAAAGTLAIHITEIFLADSYINSWVFDTGSVAHICNSMQGMIRSRSVKRGEVDFRVGNNARVAALTVGTMQLHLPSGFILELNNCYLVPSMSRNIMSPSCLMKDGYSFASENNGCVISKNGMFVAFASIMNGLFILNLDDAPICNISAKRPRPNDLSPTYMWHCRLGHISENRMKKLHSDGLLTSFDFESYETCEACLLGKMTKAPFTGLPERTLDLLELIHTDVCGPMSTTARGGFQYFITFTDDFSRYGYVYLMKHKSESLEKFKEFQNEVENQRGKKIKALRSDRGGEYLSHEFSNHLKSCGIVPQLTPPGTPQRNGVSERRNRTLLDMVRSMMSQVPSKSVVKTPYEMWTGKTPSLSFLKIWGCEVYVKRLQSDKLTPKSDKCMFVGYPKETLGYYFYHRSEGKVFVARNGVFLEKEFLKREKSKQKVYLEEVQDEPVGQDSTSDANVAEQVETSMERESPPQPRRSARLREARGEVLLLGNGEVLLLDNDEPATYSEAMMDPDSEKWHVAMRSEIDSMGENQVWNLVDPPDGVRPIECKWIYKKKKDMDGNVHIYKARLVAKGFRQVQGVDYDETFSPVAMLKSIRIILAIAAYFDYEIWQMDVKTAFLNGNLDEDVYMIQPEGFVDPINAGKICKLQKSIYGLKQASRSWNIRFDEVIKGLGFHQNEEEACVYKKESGSAVVFLILYVDDILLIGNDIPMLESVKASLKKSFSMKDLGEAAYILGIRIYRDRSKRLIGLSQDTYIDKVLKRFNMEQSKKGFIPMSHGKHLSQMQCPATANERERMSKVPYASAIGSIMYAMISTRPDVSYAISATSRYQADPGEDHWTAVKGILKYLRRTKDMFLVYGGKEELVVTGYTDASFQTDPDELKSQSGFVFTINGGAVSWKSSKQETVTDSTTEAEYIAASESAKEGVWIRKFLIELGVFPNASSPLNLYCDNNGAIAQAKEPRNHQKNKHVLRKFHLIREFIRRGEIKICKIHTDLNVADPLTKPLPQPKHEAHVRSMGIRYLLD

SEQ ID NO: 254082 - protein, 164 aa, Zea mays
  Clone ID: MRT4577_163303C.1.pep
LGTSRPAGVLPPASAPQPAAALQATARIRGSAAAASIHGAAASINRQRVLRTPVIRGKPSIHGAVAAIPPAIHATSIAHTIRAPSIATAMPLPRNPSIHGVVAAGAPQSTPLPPRSPSTDDTHLPSTKLIFLHSTDGTHLSDPVLITIVPLARRPHLTKSLSRP

SEQ ID NO: 254083 - protein, 108 aa, Zea mays
  Clone ID: MRT4577_163304C.1.pep
MGNFHESSNNIWLEDGHILHAECGNGEGDYVESTLDLDYYIGNDDGSFSWGGENFSGSASNITLDIEGDDNIPVLRAELNPMDGDPVEANVNLSERIGNDCGTLIFLA

SEQ ID NO: 254084 - protein, 1188 aa, Zea mays
  Clone ID: MRT4577_163305C.1.pep
MAPSTPTFTLRSILEKDKLNGTNYTDWIRNLRIVLRAEKKEDVLDTPLPEDPGENATAAAKTAYKKAMDANLEVSCLMLACMEPELQMQFETNHERLEKLGFPISQELATDFILASLPPSYGNFITNYHMHGAERGLNELCGMLKTAEGDIKKSAGSSGHVMAVQNKPNFKKKGKSQKKKGKAKDTVSKPNQNPKAGPAADAECFYCKELGHWKRNCKQYLASIKDRGGKGTAAAGTLAIHITEIFLADSYINSWVFDTGSVAHICNSMQGMIRSRSVKRGEVDFRDGYSFASENNGCVISKNGMFVAFASIMNGLFILNLDDAPICNISAKRPRPIDLSPTYMWHCRLGHISENRMKKLHSDGLLTSFDFESYETCEACLLGKMTKAPFTGLPERTLDLLELIHTDVCGPMSTTARGGFQYFITFTDDFSRYGYVYLMKHKSESLEKFKEFQNEVENQRGKKIKALRSDRGGEYLSHEFSNHLKSCGIVPQLTPPGTPQRNGVSERRNRTLLDMVRSMMSQSDLPLSFWGYALETAAFTLNRVPSKSVVKTPYEMWTGKTPSLSFLKIWGCEVYVKRLQSDKLTPKSDKCMFVGYPKETLGYYFYHRSEGKVFVARNGVFLEKEFLKREKSKQKVYLEEVQDEPVGQDSTSDANVAEQVETSMARETPPQPRRSARLREARGEVLLLGNGEVLLLDNDEPATYSEAMMDPDSEKWHVAMRSEIDSMGENQVWNLVDPPDVQGVDYDETFSPVAMLKSIRIILAIAAYFDYEIWQMDVKTAFLNGNLDEDVYMIQPEGFVDPINAGKICKLQKSIYGLKQASRSWNIRFDEVIKGLGFHQNEEEACVYKKESGSAVVFLILYVDDILLIGNDIPMLESVKASLKKSFSMKDLGEAAYILGIRIYRDRSKRLIGLSQDTYIDKVLKRFNMEQSKKGFIPMSHGKHLSQMQCPATANERERMSKVPYASAIGSIMYAMISTRPDVSYAISATSRYQADPGEDHWTAVKGILKYLRRTKDMFLVYGGKEELVVTGYTDASFQTDPDELKSQSGFVFTINGGVVSWKSSKQETVTDSTIEAEYIAASESAKEGVWIRKFLIELGVFPNASSPLNLYCDNNGAIAQAKEPRNHQKNKHVLRKFHLIREFIRRGEIKICKIHTDLNVADPLTKPLPQPKHEAHVRSMGIRYLLD

SEQ ID NO: 254085 - protein, 185 aa, Zea mays
  unsure (1)..(185): unsure at all Xaa locations
  Clone ID: MRT4577_163306C.1.pep
TSILVHKTNVLRLRNIPLLLIFTLFIHKHEFTFKHLCWHSITKILRNGPRAHFPFRLQSDKLTPKSDKCMFLGYPKETLGYYFYHRTEGKVFVAQNSVFLEKEFLKREKSKQKVYLEEVQDEPVSHDPTSDANXQNXETSVARETPPQPRRSARLREARQEVLLLGNEEVLLLDNVEPATYAEAM

SEQ ID NO: 254086 - protein, 189 aa, Zea mays
  Clone ID: MRT4577_163307C.1.pep
NIFKAAYSREIEPLTDKTQWPQVELPFAVGAPLAKGTAGRRRKLTLKGCLEGGQKKKNVEGANEGENGAVPINAKGQKMTRGPMTCIRCGEKGHRQASSKCPLNGTAKKRKWNQPRRNITKAKPRELCTPHRPTSEEILRDSPGRITRSRLAFLLGEGSSSQTSTTNPVRVPATSAPNKMTPKRRLYSG

SEQ ID NO: 254087 - protein, 40 aa, Zea mays
  Clone ID: MRT4577_163308C.1.pep
LLFAGFARVMVSYIKGAFNVLECNGITQIWVQCLMQYCLN

SEQ ID NO: 254088 - protein, 1392 aa, Zea mays
  Clone ID: MRT4577_163309C.1.pep
MGGLAPVRNCDATVQVLGWGGHDTTGTPLRPSQVTNRERSMTQDVGRRRRSSASDSIGDWVLDEMEKGAGAMAPSTPTFTLRSILEKDKLNGTNYTDWIRNLRIVLRAEKKEDVLDTPLPEDPGENATAAAKTAYKKAMDANLEVSCLMLACMEPELQMQFESNHEVYDMIVALKDMFQTQARTERFNVSKAFLECKLAEGAAVGPHVIKMVGYSQRLEKLGFPISQELATDFILASLPPSYGNFITNYHMHGAERGLNELCGMLKTAEGDIKKSAGSSGHVMAVQNKPNFKKKGKSQKKKGKAKDTVSKPNQKPKAGPAADAECFYCKELGHWKRNCKQYLASIKDRGGKGTAAAGTLAIHITEIFLADSYINSWVFDTGSVAHICNSMQGMIRSRSVKRGEVDFRVGNNARVATLTVGTMQLHLPSGFILELNNCYLVPSMSQNIMSPSCLMKDGYSFASENNGCVISKNGMFVAFASIMNGLFILNLDDAPICNISAKRPRPNDLSPTYMWHCRLGHISENRMKKLHSDGLLTSFDFESYETCEACLLGKMTKAPFTGLPERTLDLLELIHTDVCGPMSTTARGGFQYFITFTDDFSRYGYVYLMKHKSESLEKFKEFQNEVENQRGKKIKALRSDRGGEYLSHEFSNHLKSCGIVPQLTPPGTPQRNGVSERRNRTLLDMVRSMMSQSDLPLSFWGYALETAAFTLNRVPSKSVVKTPYEMWTGKTPSLSFLKIWGCEVYVKRLQSDKLTPKSDKCMFVGYPKETLGYYFYHRSEGKVFVARNGVFLEKEFLKREKSKQKVYLEEVQDEPVGQDSTSDANVAEQVETSMARESPPQPRRSARLREARGEVLLLGNGEVLLLDNDEPATYSEAMMDPDSEKWHVAMRSEIDSMGENQVWNLVDPPDGVRPIECKWIYKKKKDMDGNVHIYKARLVAKGFRQVQGVDYDETFSPVAMLKSIRIILAIAAYFDYEIWQMDVKTAFLNGNLDEDVYMIQPEGFVDPINAGKICKLQKSIYGLKQASRSWNIRFDEVIKGLGFHQNEEEACVYKKESGSAVVFLILYVDDILLIGNDIPMLESVKASLKKSFSMKDLGEAAYILGIRIYRDRSKRLIGLSQDTYIDKVLKRFNMEQSKKGFIPMSHGKHLSQMQCPATANERERMSKVPYASAIGSIMYAMISTRPDVSYAISATSRYQADPGEDHWTAVKGILKYLRRTKDMFLVYGGKEELVVTGYTDASFQTDPDELKSQSGFVFTINGGAVSWKSSKQETVTDSTTEAEYIAASESAKEGVWIRKFLIELGVFPNASSPLNLYCDNNGAIAQAKEPRNHQKNKHVLRKFHLIREFIRRGEIKICKIHTDLNVADPLTKPLPQPKHEAHVRSMGIRYLLD

SEQ ID NO: 254089 - protein, 106 aa, Zea mays
  Clone ID: MRT4577_16330C.1.pep
FHSILSKLIYQRAKHPFRELFFTQLLELLCQMHAPRGWWARVSVGYTTPLAHAMSHASTAQHLPRPNPLEVVVHHPLDRARGLAPQKEKQAAQRQAAVFVHELAFA

SEQ ID NO: 254090 - protein, 49 aa, Zea mays
  Clone ID: MRT4577_163310C.1.pep
LSLAIGPRSLKMDSSFRVWQGMVLMKVEFIRWKTWTYGCNSKKKKKGAA

SEQ ID NO: 254091 - protein, 71 aa, Zea mays
  Clone ID: MRT4577_163311C.1.pep
PYRHHLGTLIIFLHLLHLAISSFFTPSLGGCWCQPPTTPNLQPYKHQPPTGNLQLTLNIPPPLTTAYAYFT

SEQ ID NO: 254092 - protein, 1107 aa, Zea mays
  Clone ID: MRT4577_163312C.1.pep
MAPSTPTFTLRSILEKDKLNGTNYTDWIRNLRIVLRAEKKEDVLDTPLPEDPSENATAAAKTTYKKAMDTNLEVSCLMLACMEPELQMQFETNHEMHDMIVALKDMFQTQARTERFNVSKAFLECKLAESAAVGPHVMKMVGYSQRLEKLGFPISQELATDFILASLPTSYGNFITNYHMHGAERGLNELCGMLKTAEGDIKKSAGSSSHVMAVQNKPNFKKKGKSQKKKGKAKDTVSKPNQKPKAGPAADAECFYCKELGHWKRNCKQYLASIKDRGGKGTTAAGTLAIHITEIFLADSYINSWVFYTGSVAHICNSMQGMIRSRSVKRGEVDFRVGNNARVAALTVGTMQLHLPSGFILELNNCYLVPSMSRNIMSPSCLMKDGYSFASENNGCVISKNGMFVAFASIMNGLFILNLDDAPICNISAKRPRPNDLSPTYMWHCRLGHISENRMKKLHSDGLLTSFDFESYETCEACLLGKMTKAPFTGLPERTLDLLELIHTDVCGPMSTTARGGFQYFITFTDDFSRYGYVYLMKHKSESLEKFKEFQNEVENQRGKKIKALRSDRGGEYLSHEFSNHLKSCGIVPQLTPPGTPQRNGVSERRNRTLLDMVRSMMSQSDLPLSFWGYALETAAFTLNRVPSKSVVKTPYEMWTGKTPSLSFLKIWGCEVYVKRLQSDKLTPKSDKCMFVGYPKETLGYYFYHRSEGKVFVARNGVFLEKEFLKREKSKQKVYLEEVQDEPVGQDSTSDANVAEQVETSMARESPPQPRRPIECKWIYKKKKDMDGNVHIYKARLVAKGFRQVQGVDYDETFSLMDVKTAFLNGNLDEDMYMIQPEGFVDPINAGKICKLQKSIYGLKQASRSWNIRFDEVIKGLGFHQNKEEACVYKKESGSSVVFLILYVDDILLIGNDIPMLESVKASLKKSFSMKDLGEAAYILGIRIYRDRSKRLIGLSQDTYIDKVLKRFNMEQSKKGFIPMSHGKHLSQMQCPATANERERMSKVPYASAIGSIMYAMISTRPDVSYAISATSRYQADPGEDYWTAVKGILKYLRRTKDMFLVYGSKKELFVTGYTDASFQTDPDELKSQSGFVFTINGGVVSWKSSK

SEQ ID NO: 254093 - protein, 85 aa, Zea mays
  Clone ID: MRT4577_163313C.1.pep
TYTTNTLLNQTEPNTKNKPEAESSALFSPRSYNGDGWQHTKKRVQKKVTQPSYHNHYHQQFIFSSWLRHNPSNDPNHLKSPKTNN

SEQ ID NO: 254094 - protein, 116 aa, Zea mays
  Clone ID: MRT4577_163314C.1.pep
KEKTKKTNPTYNLAKKTTANLPKTPNKREKKATKGTLPREKKKGKHSNQNLIDPPQIGLTKAILKPRKIGLCLKKPNLMEAKTQFEQAGKPVSKRVGVKHAKTRGKKNNFETQHNK

SEQ ID NO: 254095 - protein, 69 aa, Zea mays
  Clone ID: MRT4577_163315C.1.pep
AQLRPCSRQEWLMAAGMLHHSKLVRYFSDQLHLRFSDQLNLTRSKSGCLVQEPSSEILRSASLTHKRRS

SEQ ID NO: 254096 - protein, 124 aa, Zea mays
  unsure (1)..(124): unsure at all Xaa locations
  Clone ID: MRT4577_163316C.1.pep
PSVRPRVRGRVGLELAWMNNMVDFAFPYLLQFIREYTSKVDDLVKDKIESQKEERAKEKEEKDLVAQQNMYAQLLPLALPAPPMPGMGGPPPPMGGMGMPPMGMXMGMPPMGPGPMPAFGMGGY

SEQ ID NO: 254097 - protein, 65 aa, Zea mays
  Clone ID: MRT4577_163317C.1.pep
ERAKEKEEKDLVAQQNMYAQLLPLALPAPPMPGMGGPPPPMGGMGMPPMGMPPMPAFGMPPMGSY

SEQ ID NO: 254098 - protein, 42 aa, Zea mays
  Clone ID: MRT4577_163318C.1.pep
GEKPKTGDKVEGGKPNFGVILPAKTGSKKTYTIRPFSSNIFI

SEQ ID NO: 254099 - protein, 97 aa, Zea mays
  Clone ID: MRT4577_163319C.1.pep
SPGIVFIILEYASPCRVTYHSFEHPGHTTQHHILTATVPSALQMPTEGERAILQGVDLVDGIGAVIDGELGELAGELEVPVGLRLQRRNGRLRCCSG

SEQ ID NO: 254100 - protein, 206 aa, Zea mays
  Clone ID: MRT4577_16331C.1.pep
AAGGCCSWSRRAATHPPRPASSDASSSSSECLLDSTAPPPPSPSPVRRWLAAAAGSPVFTEDSSFAIGFVLRDCHNGNQMKVAISAKRFRTVMRELMSELENSSLRLKKMQKGKKDGVDFTRRFHKEKRGREIDLVSGHLRDGDSNQDVFAKLPGWVKSDICKSVVSISLCNGDITLFSCSGTAIAHKGYPPYMCLTSASLGRAFD

SEQ ID NO: 254101 - protein, 53 aa, Zea mays
  Clone ID: MRT4577_163320C.1.pep
THYICAQRRLDVTWLSRLTSPKGTTAAYVGSSIQSAPLDYYNSTSCCSYNIKL

SEQ ID NO: 254102 - protein, 56 aa, Zea mays
  Clone ID: MRT4577_163321C.1.pep
LEHKKTNQANINSFLCINITKYTCKHHYILNLTTYSCLNTLHHNISFSFPQPPPTH

SEQ ID NO: 254103 - protein, 35 aa, Zea mays
  Clone ID: MRT4577_163322C.1.pep
GFSRGNKYSHGRSEGQLLLGKGYECCSSSLVGFMA

SEQ ID NO: 254104 - protein, 129 aa, Zea mays
  unsure (1)..(129): unsure at all Xaa locations
  Clone ID: MRT4577_163323C.1.pep
MGLVLHSGAGNKXAFKALIAVKYREIRVELTKDFEMGVYNKTGEFVKMNPLGKVPAMETPDXLIWRRHAIPPYVARLRDDNPLFGSSRIEQAHIDQWMDYAXTEGDPGEAWYLYPTLGYLPYVNTADAT

SEQ ID NO: 254105 - protein, 110 aa, Zea mays
  Clone ID: MRT4577_163324C.1.pep
KNRCWIADRLAKRELSHPEACPLCDQGEETIHHLLVSCVFTRQFWSHIFQALKLPDLAPTLIESSFPNWWRKMSRLVPKERQKGLDSLIILTAWETWKHRNSCVFEFLHS

SEQ ID NO: 254106 - protein, 84 aa, Zea mays
  Clone ID: MRT4577_163325C.1.pep
TGRSQPRGCNRVRPQRSPARRFLPQIKNRGPHHVGAAHKKLGWGFEPKIFGFFPPREVLEAYSPAPWLITHCSNSVWPCHACNK

SEQ ID NO: 254107 - protein, 322 aa, Zea mays
  Clone ID: MRT4577_163326C.1.pep
MATGGQGKAAGYYQYPTSYAGAADEERRWWPWLVPTVLVACIAVFAAEMFVNDCPRHGSTLGGGAGCVAAGLLRRFSFQPLRENPLFGPSSATLEKMGALNWAKVVHEHQGWRLISCIWLHAGLVHLVVNMLSLLFIGIRLEQQFGFVRIGVIYLISGFGGSVLSALFLHSNYVSVGASGALFGLLGSMLSELIINWTIYSNKAAAIITLLFIIVINLAIGILPHADNFAHIGGFASGFLIGFVLLARPQFGWMERSELPQTSQPPKYKSYQYVLWVAALLLLVVGFAIILVMLFTGKNGNDSCHWCHYLNCVPTSRWKCDT

SEQ ID NO: 254108 - protein, 54 aa, Zea mays
  Clone ID: MRT4577_163327C.1.pep
CPLISFHCPSFYNFLTGKTLALPNLFPLHHFPFSPVGLLPKSPAPFAFPNISPA

SEQ ID NO: 254109 - protein, 160 aa, Zea mays
  unsure (1)..(160): unsure at all Xaa locations
  Clone ID: MRT4577_163328C.1.pep
FLFXRAXPXRGGGPAPPGPWPGSAPAGAPPXGVXHEPVPXPSARXAGARASAXPLAPPPCPPXSPPXASPPLPXXPXPRPXPLPSAVRFLFFFXXXPXPSLLVXPTPPPPXPPSPXPPPPPPXPPFPPPSXLXCPHFPPXPPPXPPSSSLSSPPPPLGAA

SEQ ID NO: 254110 - protein, 92 aa, Zea mays
  unsure (1)..(92): unsure at all Xaa locations
  Clone ID: MRT4577_163329C.1.pep
PARDYLLPEKRRVSLPVYXNPVCPMFVRRVEFSSCASPPDLGCVQCKPIKGCVQCKRILMSPKVAWETSPRFGFPVMGFLEQKKHRDPYCMS

SEQ ID NO: 254111 - protein, 188 aa, Zea mays
  unsure (1)..(188): unsure at all Xaa locations
  Clone ID: MRT4577_16332C.1.pep
XYGSQAYGPIVNSRDYFLVSCPYFLVNHNGETSLAGSPVFTEDSSFAIGFVLRDCHNGNQMKVAISAKRFRTVMRELMSELENSSLRLKKMQKGKKDGVDFTRRFHKEKRGREIDLVSGHLRDGDSNQDVFAKLPGWVKSDICKSVVSISLCNGDITLFSCXGTAIAQQGYHLTMCLTSASLVRAFDG

SEQ ID NO: 254112 - protein, 159 aa, Zea mays
  unsure (1)..(159): unsure at all Xaa locations
  Clone ID: MRT4577_163330C.1.pep
EGRPPTGTHGDQARPERHPRKQEPERHAHPAPRHRSGGPRARRRTGQRRATGRSPGRGARARRPRHKRLPTRSXQRTSGGEREPAARRAFGAQPSRHSLGQAGTEASPGGRPADPTSGHGAGAVTPAPGEGSCEGQERDEHCSLKETIFTYYRSGFLCY

SEQ ID NO: 254113 - protein, 79 aa, Zea mays
  unsure (1)..(79): unsure at all Xaa locations
  Clone ID: MRT4577_163331C.1.pep
VGVAMASGIKAAVDPNMHYGGSRSHDSYVLAGKYDYAIEVVGEPXYTQTFCDNLNLAIPGPVPSVIQSVYGVINCVVLL

SEQ ID NO: 254114 - protein, 93 aa, Zea mays
  Clone ID: MRT4577_163332C.1.pep
RPVRVEKAFKVTGRTIVWEGEGVNEIGRDAESGKVRVRIDPKYFRPAEVDLLLGDPTKANTELNWKRKVTFDELVTEMVVADIEGSLSSSTLV

SEQ ID NO: 254115 - protein, 109 aa, Zea mays
  Clone ID: MRT4577_163333C.1.pep
AMTRKNFLQHIVTSCVGSRPPNTDPVRMSPASASITSSPLRPVVSPLTKCTHRRQRRGLRRRAQGRSDRPRSNLEMRVARGEGGSSQEYDRCSCASRIADPNGVSRDGP

SEQ ID NO: 254116 - protein, 120 aa, Zea mays
  unsure (1)..(120): unsure at all Xaa locations
  Clone ID: MRT4577_163334C.1.pep
MRSRLRLGYARIEQKMQRAVQAARPHGNDLKYAVLQHISAPKPAMLPAAFSSFMNASSARLEDRGFETATVAXVLNVYKGKSSVXESWXLWRTTEDSAYDAVKYMTQHSXGSLEAVKPHR

SEQ ID NO: 254117 - protein, 84 aa, Zea mays
  Clone ID: MRT4577_163335C.1.pep
DICSFRCIIVVVQYISPLLLLYFQKVFTCIFSFLYRRALLDSHVSLSVLHCINDSRRAPPRARARGRRPRSGCGGNGSDEGDRK

SEQ ID NO: 254118 - protein, 125 aa, Zea mays
  Clone ID: MRT4577_163336C.1.pep
QKQRDRRPRYHRPPVAPANVPDAARALGRHHDSDSGESPGQHRFPVRLVVYHTPIPTTPYILWRLHLLRATYNASGATAAVADPITTSKTLEHKEISRSEKSISGDDSANQKDTNADDYPIENNL

SEQ ID NO: 254119 - protein, 143 aa, Zea mays
  Clone ID: MRT4577_163337C.1.pep
DESKESRSPRDDDGHGTHTSWTAAGSVVEGASLLGYASGTARGMAPRARVAVYKVCWLGGCFSSDILAAIDKAIADNVNVLSMSLGGGMSDYYRDGVAIGAFAAMERGILVSCSAGNAGPSSSSLSNVAPWITTGGAGTLDRD

SEQ ID NO: 254120 - protein, 102 aa, Zea mays
  unsure (1)..(102): unsure at all Xaa locations
  Clone ID: MRT4577_163338C.1.pep
RGGXGTRKRPAGXPPRQLRXGPTXEGRSEHKVPQXLGQEQEEGFHKVCXXTPPPAGKKEIQPQLEKMKKYAYXSRXSAHXQHLPQWSCHRASGHQPECHARG

SEQ ID NO: 254121 - protein, 105 aa, Zea mays
  Clone ID: MRT4577_163339C.1.pep
SYTLDRIDRGSSPLAVATQRTTEPEPRRDLALSTTAPETAGAVDDGLHSAAPRSGAKGSDDMDAMGNYFGPSGRLFCWTRRQLVGAADEGNVVNAEGRVRGKALA

SEQ ID NO: 254122 - protein, 52 aa, Zea mays
  Clone ID: MRT4577_16333C.1.pep
WLSWLIARCRSSTSAACSVKMWDTTECRIEIYFKGAGGSPLYGRNGKHSLPV

SEQ ID NO: 254123 - protein, 293 aa, Zea mays
  Clone ID: MRT4577_163340C.1.pep
PPAAESGETTACSSRVVPHGGHIVASLRGAARSRRVEAFVVLSARSRRGSRSVVRCVATTGDVPPTVAETKLNFLKSYKRPIPSIYSAVLQELLVQQHLMRYKKTYQYDAVFALGFVTVYDQLMEGYPSNEDRDSIFKAYITALNEDPDQYRADALKMEEWARSQNGSSLVDFSSRDGEIEAILKDISERAKGKGNFSYSRFFAVGLFRLLELSNATEPTILDKLCAALNVSKRSVDRDLDVYRNILSKLVQAKELLKEYVDREKKKREERSEAPKPNEAVTKFDGNLYSTRH

SEQ ID NO: 254124 - protein, 72 aa, Zea mays
  Clone ID: MRT4577_163341C.1.pep
RFLYRFFTVLAIILWYGKLALGAWTIWKLRNRCVFDGWTLSLALSLRLAGKERLFWEVAGAKGLSYLAALLF

SEQ ID NO: 254125 - protein, 51 aa, Zea mays
  Clone ID: MRT4577_163342C.1.pep
APYTSEELMKVTEEQIAASAAAAWNPQQPATSQQQEEASSLLGVVGASSCC

SEQ ID NO: 254126 - protein, 992 aa, Zea mays
  Clone ID: MRT4577_163343C.1.pep
MDSRPRETDAPGDPANGAAPPLAAAVTAATGDVEIIRPRNDKRGYRRVVLPNSLECLLISDPDTDKAAASMNVSVGYFCDPDGLEGLAHFLEHMLFYASEKYPEEDSYSKYIAEHGGSTNAFTSSEHTNFYFDVNSDSLHDALDRFAQFFIKPLMSPDATLREIKAVDSENQKNLLSDPWRMSQLQKHLCAENHPFHKFSPGNWNTLEVKAKEKGLDTRLELIKFYDSHYSANLMQLVVYGKDSLDNLQNLVENKFCDIRDVGRKPFSFPGHPCTPEHLQVLVKAVPIKQGHTLRILFPITPNIRCYKEGPCKYISHLIGHEGEGSLFYVLKKLGWAMSLEAGEGDWSHDFSFFCVVIQLTDVGQEHMEDTLGLLFRYIKLLQNSGTPKWIFDELQAICETGFHYRDKSPPINYVVNISSNMQIFPPKDWLIASSVPSKFSPDAIQNVLNELTPETVRIFWESKKFEGKTKLAEPWYGTSYSVEVVPPSIIQKWVGKAPEEDLHLPKRNIFIPSDLSLRSVEEKVSFPAMLRKTQFSRLWYKPDTMFFTPKAYIKMDFHCPLSQSSPESAVLTDVFTRLLMDYLNDYAYDAQVAGLYYVVKPNDTGFQVTMVGFNDKMRTLLETVIGKIAEFEVKADRFSVIKEAMTKEYENFKFRQPYQQVLYYCSLILEDQTWPWDEEFSALSHLEASDLGIFLPHLLSKTFIECYFAGNIEPNEANNIVQHVEDVLFNAPISACKPLSPSQHLAKRIVKLEKGLRYYYPAMCSNHQDENSALLHYIQTHQDNVKQNVLLQLLALVGKQPAFHQLRSVEQLGYIALLRQRNDSGVRGLQFIIQSTVKDPANLDARVENFLNMFESNVYNMSDAEFKSNVSALIDMKLEKYKNIREESAFFYGEISEGTLKFDRKEAEVAALRELKKEELVGFFNDHVKVNAPQKKILSIQVYGGLHSAEYETIVQNAPPPPSCEITDIYGFRRSRPLYGSFRGGVGQMKL

SEQ ID NO: 254127 - protein, 83 aa, Zea mays
  Clone ID: MRT4577_163344C.1.pep
KRKTREGKKRACHQNLISLSPKRNPPRSLRKKRLRSTSFRCPQFLKLKQGGLSENSIVFFGFKSIKKKLLFRFRAMTQKPECC

SEQ ID NO: 254128 - protein, 294 aa, Zea mays
  Clone ID: MRT4577_163345C.1.pep
MASISSLPFAPLRGAAEWRPSSTAPAVSGAVVLSARSRRGSGSGSGSGSGSGSVVRCVATASDVPPTVGETKLNFLKSYKRPIPSIYSTVLQELLVQQHLMRYKRTYQYDAVFALGFVTVYDQLMEGYPSIEDRDSIFKAYITALNEDPNQYRADALKMEEWARSQNGSSLVDFSSRDGEIESILKDISERAKGKGNFSYSRFFAVGLFRLLELANATEPTVLDKLCAALNINKRSVDRDLDVYRNILSKLVQAKELLKEYVDREKKKREERSETPKPNEAVTKFDGNLYSIRH

SEQ ID NO: 254129 - protein, 310 aa, Zea mays
  unsure (1)..(310): unsure at all Xaa locations
  Clone ID: MRT4577_163346C.1.pep
PESKKFEGKTKLAEPWYGTSYSVEVVPPSIIQVHFWTSLLSAVGLEKYXVLYTAIILQKWVGKAPEEDLHLPKRNIFIPSDLSLRSVEEKVSFPAMLRKTQFSRLWYKPDTMFFTPKAYIKMDFHCPLSQSSPESAVLTDVFTRLLMDYLNDYAYDAQVAGLYYVVKPNDTGFQVTMVGFNDKMRTLLETVIGKIAEFEVKADRFSVIKEAMTKEYENFKFRQPYQQVLYYCSLILEDQTWPWDEEFSALSHLEASDLGIFLPHLLSKTFIECYFAGNIEPSEAXNIVQHVEDVLFHAPXSACKPLSPSQ

SEQ ID NO: 254130 - protein, 63 aa, Zea mays
  unsure (1)..(63): unsure at all Xaa locations
  Clone ID: MRT4577_163347C.1.pep
TRLTLVYLITIYLSILLLLLQTVRLVSYYPTSISSYITSPVVILPYLFPLREIYXKEKKQTWQ

SEQ ID NO: 254131 - protein, 69 aa, Zea mays
  Clone ID: MRT4577_163348C.1.pep
QMRDDDRRGPSIYSLDKETPGQTYCMCVCHILTLQCWGEDHSILTSIAMIWGIKSLIHMAGTSTDKVEA

SEQ ID NO: 254132 - protein, 293 aa, Zea mays
  unsure (1)..(293): unsure at all Xaa locations
  Clone ID: MRT4577_163349C.1.pep
ARLQEPFLALAPLHLHIALVGGADQLPPRPAKQPAVRSKIVPHGVHIVASLCAAARSRRVEAVVLSARSRRGSGSGSGSGSGSGSVVRCVATASDVPPTVGETKLNFLKSYKRPIPSIYSTVLQELLVXQHLMRYKRTYQYDAVFALGFVTVYDQLMEGYPSNEDRDSIFKAYITALNEDPNQYRADALKMEEWARSQNGSSLVDFSSRDGEIESILKDISERAKGKXNFSSKRCVGRXLDVYRXLSLQMVQAKELLKEYVDREKKKREERSEAPKPNEAVTKFDGNLYSTRH

SEQ ID NO: 254133 - protein, 57 aa, Zea mays
  Clone ID: MRT4577_16334C.1.pep
PSSSSSPFLSLSLARALLLADHRRLPSSTGAADLARRRFQLDQLRTSTTCAARRLTS

SEQ ID NO: 254134 - protein, 146 aa, Zea mays
  Clone ID: MRT4577_163350C.1.pep
KVENFLNMFESNVSKMFYAKFKSNVSALIDMKLEKYKNIREESAFFYGKIFEGTLKFDKKKTKVAALRELKKKKLVGFFNDHVKVNAPQKKIFSKQVYGGFHSAEYETIVQNAPPPPSCEKTDIYGFRRSRPLYGSFRGGVGQMKL

SEQ ID NO: 254135 - protein, 240 aa, Zea mays
  unsure (1)..(240): unsure at all Xaa locations
  Clone ID: MRT4577_163351C.1.pep
MAAISSLPFAALRGAAEWRPSSTAAAVSGAVVLSARSRRGSRSVVRCVATTGDVPPTVAETKLNFLKSYKRPIPSIYSAVLQELLVQQHLMRYKKTYQYDAVFALGFVTVYDQLMEGYPSNEDKDSIFKAYITALNEDPDQYRADALKMEEWARSQNGSSLVDFSSRDGEIEAILKDISERAKGKGNFSYSRFFAVGLFRLLELSNATXDQTILDKLCAALNVSKKRSECPEAGRSCHKI

SEQ ID NO: 254136 - protein, 62 aa, Zea mays
  Clone ID: MRT4577_163352C.1.pep
GWGRALVFCVTPHSCSPPTGSYSTTCTQPLLLRHLHIQGAALPGVHKGLRLLLKAGQGLAVL

SEQ ID NO: 254137 - protein, 104 aa, Zea mays
  Clone ID: MRT4577_163353C.1.pep
RTKQLPSHFVCWSQHTAIALISNGRYREQDHQKERSSTSGGPICSRDSRGLSACTIQRDRNTTRDGQHRTDYIKGQMHMVRWGECAWASGVWRRGSMHAHAAVV

SEQ ID NO: 254138 - protein, 111 aa, Zea mays
  Clone ID: MRT4577_163354C.1.pep
GYLEPAENLLLSRHGINVNQPQHTKESTWRRSHGFFGARRRLAHSWRPAREYSRHHKTSVDLARSLLGLGTKGNPAPKKAGNKTTPSDRPMWFPVAAAPDNLHASLLVDNM

SEQ ID NO: 254139 - protein, 68 aa, Zea mays
  Clone ID: MRT4577_163355C.1.pep
NVHKKALMFSFLLPCLDEDRSMDHAPKTSSDPLTELAPVCELQTRGRSLSFSYILFFILLLVLYCHRR

SEQ ID NO: 254140 - protein, 95 aa, Zea mays
  unsure (1)..(95): unsure at all Xaa locations
  Clone ID: MRT4577_163356C.1.pep
MAAATMAIRSRALIEKPAAGTRDVFGEGRISMRKTAAKPKPAASGSPWYGADRVVXLGPLSGSAPRXLNGEFTGXYGWXTRGCRRPEPSQERDLS

SEQ ID NO: 254141 - protein, 58 aa, Zea mays
  unsure (1)..(58): unsure at all Xaa locations
  Clone ID: MRT4577_163357C.1.pep
MVSMGLLKEGVNMDEGTLXIGMEYRTVSGVAGPLVILDKRKGPKYHKIVNIRLGDGAT

SEQ ID NO: 254142 - protein, 905 aa, Zea mays
  Clone ID: MRT4577_163358C.1.pep
MANPTATKHAFKRILTSLLKPGGGEYGKFFSLPALNDPRIDKLPYSIRVLLESAIRHCDNFQVTESDVEKIIDWENTSPKLAEIPFKPARCILMDNTGVPAVVDLAAMRDMMPKLGCDPYKINPLIPVDAVIDHAVRVDVAGTYDALDRNEELEFQRNKERFAFLKWASNAFHNMQVFPPGSGTVHQVNLEYLARVVFNEDGILYFDSVVGTDSHTTMINSLGVAGWGVGGIEAVVAMLGQPMGMVLPGVVGFKLSGKLRDGVTTTDIVLTMTQMLRKHGAIGKFVEFYGVGVGELSLPARATIANMSPEYGATMGFFPVDQVALDYLKLTGRSDETVSMIEAYLRANKMFVDKHEPETERVFSSYLELDLSEVEPCVSGPKRPHDRVPLKEMKSDWHACLDNEVGFKGYAVPKEQQGKVVKFDFHGRPAEIKHGSVVLAAICSSTNTSNPSVMIGAGLVAKKACELGLEVKPWVKTSLTPGSVVATEYLKHSGLQDYLNQQGFHVAAHGCATCVGNSGDLDGSVSAAITENDMVAAAVLSANRNFEGRVNPLTRANYLASPPLVVAYALAGTVDIDFEKEPIGVGKGGNEVFLRDIWPSNQEIDEVVESSVQTHLFKKVYDSIMERNPRWNQLPVPKEALYPWEDRSTYIRKPTYLEGMSMTPPAAPPTVTEAYCLLNLGDSITTDHISYSGKIPEGTPAAKYLLEYGVEPKNFSSYGGRRGNNEVVMRGAFANMRIVNKLLDGKAGPWTIHVPSGEKLYVYDAAMKYKSEGHDMVIIAGSEYGSGSSRDSAAKGPMLLGVKSVIAKSFERIHRSNLVGMGIIPLCFKAGEDADSLGLTGRERYTIHLPTSTAELSPGQDVTVTTHDGRSFTCTLRLDTQLEVTYFNHGGILPYMVRNLAAQMK

SEQ ID NO: 254143 - protein, 909 aa, Zea mays
  unsure (1)..(909): unsure at all Xaa locations
  Clone ID: MRT4577_163359C.1.pep
MAANSTATKHAFKRILTSLIKPGGGEYGKFFSLPALNDPRIDKLPYSIRVLLESAIRHCDNFQVTESDVEKIIDWENTSPKLAEIPFKPARCILMDNTGVPAVVDLAAMRDMMPKLGCDPYKINPLIPVDAVIDHAVRVDVAGTYDALDRNEELEFQRNKERFAFLKWASNAFHNMQVFPPGSGTVHQVNLEYLARVVFNEDGILYFDSVVGTDSHTTMINSLGVAGWGVGGIEAVVAMLGQPMGMVLPGVVGFKLSGKLQDGVTTTDIVLTMTQMLRKHGAIGKFVEFYGVGVGELSLPARATIANMSPEYGATMGLFPVDQVALDYLKLTGRSDETVSMIEAYLRANKMFVDKHEPETERVFSSYLELDLSEVEPCVSGPKRPHDRVPLKEMKSDWHACLDNEVGFKGYAVPKEQQGKVVKFDFHGRPAEIKHGSVVLAAICSSTNTSNPSVMIGAGLVAKKACELGLEVKPWVKTSLTPGSVVATEYLKHSGLQDYLNQQGFHVAAHGCATCVGNSGDLDGSVSAAITENDIVAAAVLSANRNFEGRVNPLTRANYLASPPLVVAYALAGTVDIGFEEEPIGVGKGGKEIFLRDIWPSNQEIDEVVESSVQTHLFKKVYDSIMERNPRWNQLPVPKEALYPWDDRSTYIRKPTYLEGMSMTPPGPPTVTEAYCLLNLGDSITTDHISYSGKIPEGTPAAKYLLEYGVEPKNFSSYGGRRGNNEVVMRGAFANMRIVNKLLNGEAGPWTIHVPTGEKLYVYDAAMKYKSEGHDMVIXIAGSEYGSGXSRDSAAKGPMXLGVKSVIAKSFERIYXGNLVGMGIIPLCFQAGEDANSLPLTRRERYTXIHLPTSTAEISPGQDVTVTTHDGRSFTCTLRFDTQLEVTYFNHGGILPYMVRNLAAPMKIS

SEQ ID NO: 254144 - protein, 76 aa, Zea mays
  unsure (1)..(76): unsure at all Xaa locations
  Clone ID: MRT4577_16335C.1.pep
LSYRLSXFYVTLRRARRLLLLDPWAEHGVSFFFCLSPXWFRRACLCLRGFLFFLLALPLFFLDSPGLPSVFFSRLF

SEQ ID NO: 254145 - protein, 943 aa, Zea mays
  unsure (1)..(943): unsure at all Xaa locations
  Clone ID: MRT4577_163360C.1.pep
DQLLRARLVPDVTTSAKLQPRDDALHRIRVGVGATKHAFKRILTSLIKPGGGEYGKFFSLPALNDPRIDKLPYSIRVLLESAIRHCDNFQVTESDVEKIIDWENTSPKLAEIPFKPARCILMDNTGVPAVVDLAAMRDMMPKLGCDPYKINPLIPVDAVIDHAVRVDVAGTYDALDRNEELEFQRNKERFAFLKWASNAFHNMQVFPPGSGTVHQVNLEYLARVVFNEDGILYFDSVVGTDSHTTMINSLGVAGWGVGGIEAVVAMLGQPMGMVLPGVVGFKLSGKLQDGVTTTDIVLTMTQMLRKHGAIGKFVEFYGVGVGELSLPARATIANMSPEYGATMGFFPVDQVALDYLKLTGRSDETVXHYVQTTLLPYPFHHSDMYIFLLIKQSCIYCIKCDSXSMIEAYLRANKMFVDKHEPETERVFSSYLELDLSEVEPCVSGPKRPHDRVPLKEMKSDWHACLDNEVGFKGYAVPKEQQGKVVKFDFHGRPAEIKHGSVVLAAICSSTNTSNPSVMIGAGLVAKKACELGLEVKPWXLTPGSVVATEYLKHSGLQDYLNQQGFHVAAHGCATCVGNSGDLDGSVSAAITENDIVAAAVLSANRNFEGRVNPLTRANYLASPPLVVAYALAGTVDIGFEEEPIGVGKGGKEIFLRDIWPSNQEIDEVVESSVQTHLFKKVYDSIMERNPRWNQLPVPKEALYPWDDRSTYIRKPTYLEGMSMTPPGPPTVTEAYCLLNLGDSITTDHISYSGKIPEGTPAAKYLLEYGVEPKNFSSYGGRRGNNEVVMRGAFANMRIVNKLLNGEAGPWTIHVPTGEKLYVYDAAMKYKSEGHDMVIIAGSEYGSGSSRDSAAKGPMLLGVKSVIAKSFERIHRSNLVGMGIIPLCFQAGEDADSLGLTGRERYTIHLPTSTAEISPGQDVTVTTHDGRSFTCTLRLDTQV

SEQ ID NO: 254146 - protein, 128 aa, Zea mays
  Clone ID: MRT4577_163361C.1.pep
PNVSTARDSVCAQTVSVASVVSSPSSAPPCLGVVPANSVSSASPRVARGGCPSANPSCCFLRVKTATASSGGHFALFQSHLALGVCAGALGPPKSVQNGVVVPGAPTRVVPLDAFFSCLGLTKRFLGC

SEQ ID NO: 254147 - protein, 70 aa, Zea mays
  Clone ID: MRT4577_163362C.1.pep
QTHYIVTYGPVHLLYAHASFHNHPLPSHFFLYRHFPHPTHNFHLLPIHETPQPFLLHNELIQPLSTPVYT

SEQ ID NO: 254148 - protein, 51 aa, Zea mays
  Clone ID: MRT4577_163363C.1.pep
NTTILRGRPKNMGGRSFNLPKDKHRDLVLFRTHGVQFTFARALIFRETHLV

SEQ ID NO: 254149 - protein, 109 aa, Zea mays
  Clone ID: MRT4577_163364C.1.pep
MALLSAATPISLLALSIAVTLLAPPRSNCCPPYSTSSSSPPPRLWCMLGHHDVPAPMKVRLAAAPWWPSTWSTAMTPCRAPLLPPCPSPRSSCGSFIADMGTEPVRSEC

SEQ ID NO: 254150 - protein, 70 aa, Zea mays
  Clone ID: MRT4577_163365C.1.pep
PPRDGFLLYKETGGEFLVALQNNTTWTVINSNICPLSPNLSSYVTSTAHYLGTSSKNIRPFTILLDRLLA

SEQ ID NO: 254151 - protein, 68 aa, Zea mays
  Clone ID: MRT4577_163366C.1.pep
GSVSALLTVKTPSEDFTAYTPTDVPAISEWQTLLSVAIFLAGTGPVIIVGILASIAPFQSLNEGLSPV

SEQ ID NO: 254152 - protein, 70 aa, Zea mays
  Clone ID: MRT4577_163367C.1.pep
RTRGSFNSCFYFLICFEIKRAFFLGSGTNLLQGLLLEPTFDTQLCTLNTAHISSIYQPTNIKTHPHKNLP

SEQ ID NO: 254153 - protein, 98 aa, Zea mays
  Clone ID: MRT4577_163368C.1.pep
MLPFWLHGTAARMRVAASEKAEAEKILQIKKAEGEAESKYLAGVGIARQRQAIVDGLRDSVLAFSENVPGTTAKDIMDMVLVTQYFDTMREIGASSKS

SEQ ID NO: 254154 - protein, 114 aa, Zea mays
  Clone ID: MRT4577_163369C.1.pep
ACCPLEQPHASGSSGSGRTKAGARATAALGSSHMATTASGSGPGSGTAALCFLVACLLLASPSSFVAGTEAAAAYGAGAGAGAGRKLMQTSAGAMGYPGTNLPPATYPAVPCCP

SEQ ID NO: 254155 - protein, 217 aa, Zea mays
  unsure (1)..(217): unsure at all Xaa locations
  Clone ID: MRT4577_16336C.1.pep
MGKYMRKGKMSGEVAVMEVPGGALLGVRTRSRTLALQRAQRPLDKGDADDAAGQYLELRSRRLEKPHKDHQPLPLPLPPPXPPQPRXAGRKAASTAAAPNALAEDEVEVEVSFGENVLDLDAMERSTRETTPCSLIRNPEMISTPGSTTKSKTSNSTTSRRRMETSVCRFIPSSLEMEEFFSAAEQQEQHNFREKYNFCPVNDCPLPGRYEWARLDC

SEQ ID NO: 254156 - protein, 284 aa, Zea mays
  Clone ID: MRT4577_163370C.1.pep
MGQALGLVQVDQSTVAIKENFGKFSEVLEPGCHFLPWCIGQQIAGYLSLRVRQLDVRCETKTKDNVFVTVVASVQYRALAEKASDAFYKLSNTREQIQSYVFDVIRATVPKLDLDDAFEQKNDIAKAVEEELEKAMSMYGYEIVQTLIVDIEPDDRVKRAMNEINAAARMRVAASEKAEAEKILQIKKAEGEAESKYLAGVGIARQRQAIVDGLRDSVLAFSENVPGTTAKDIMDMVLVTQYFDTMKEIGASSKSSSVFIPHGPGAVKDVAAQIRDGLLQAKLQ

SEQ ID NO: 254157 - protein, 284 aa, Zea mays
  Clone ID: MRT4577_163371C.1.pep
MGQILGLVQVDQSTVAIKENFGKFSEVLEPGCHFLPWCIGQQIAGYLSLRVRQLDVRCETKTKDNVFVTVVASVQYRALADKASDAFYKLSNTREQIQSYVFDVIRATVPKLGLDDAFEQKNEIAKAVEEELEKAMSTYGYQIVQTLIVDIEPDDRVKRAMNEINAAARMRVAASEKAEAEKILQIKKAEGEAESKYLAGVGIARQRQAIVDGLRDSVLAFSENVPGTTAKDIMDMVLVTQYFDTMREIGASSKSSSVFIPHGPGAVKDVSAQIRDGLLQANLH

SEQ ID NO: 254158 - protein, 73 aa, Zea mays
  unsure (1)..(73): unsure at all Xaa locations
  Clone ID: MRT4577_163372C.1.pep
MGQIXGLVQVDQSTVAIKENFGKFSEVLEPGCHFLPWCIGQQIAGYLSLRVRQLDIRCETKTKVFSVAFHFDV

SEQ ID NO: 254159 - protein, 112 aa, Zea mays
  Clone ID: MRT4577_163373C.1.pep
CVGARAAMHLDESVYMPTRGSVARAGSWSRSRCTGWCSGRSRNGVARRDPRGCSRTGNGASRVGCQPRACTRGRGIGSCAARVLEASGRRAAGTPPRSRSSRSRSSCRSRSR

SEQ ID NO: 254160 - protein, 157 aa, Zea mays
  unsure (1)..(157): unsure at all Xaa locations
  Clone ID: MRT4577_163374C.1.pep
RPLNQNRKGGGGGGNFSPTLIPQKKKERGQNIPRGKKNKNKTPQRKNHKSPRKLAPPAEPQGNPPWPGGGPSPGTXPGAPEQQAGRKQTRPPPWPKRSARAPXPPPGKPHAGPGXGSSKGARWGVPXPEQKPWEPRGGPGRGPPQRGGGNPHRGPAP

SEQ ID NO: 254161 - protein, 78 aa, Zea mays
  unsure (1)..(78): unsure at all Xaa locations
  Clone ID: MRT4577_163375C.1.pep
LASAGSQRCVSGIAXCSADLHHPLGFSLTPCSAFRAPPRIQRVGLATSSVASVRPLSRAKISPGCTYFGGPNPAPGPG

SEQ ID NO: 254162 - protein, 69 aa, Zea mays
  Clone ID: MRT4577_163376C.1.pep
ANRDHCVNAMSPGLNINVGALNWFLAPPHHYQLAPTESREHTDTHALGSVCSADTPAALRAHALSANAT

SEQ ID NO: 254163 - protein, 38 aa, Zea mays
  Clone ID: MRT4577_163377C.1.pep
CRALRSRLAPPLARPLRPLLGKPLIARKPPTWGFAGEI

SEQ ID NO: 254164 - protein, 47 aa, Zea mays
  Clone ID: MRT4577_163378C.1.pep
VRSLYTFCRPLGSIKIVPTQICPSHAGDGDLNFPERPPERVSERVDE

SEQ ID NO: 254165 - protein, 141 aa, Zea mays
  Clone ID: MRT4577_163379C.1.pep
QCGGCIVYAVEGHHIAESRNNRAKRQKRERMPVPDNYIKDWRVQDKKATAGESIRICKCTSDMFYLFITKTEVGVGVEVVVAAVVRGGRAPRPPRRSGARSRRSSIPPPSARQSQSASDSKLTPRRRGLPGCTSVSAVAAR

SEQ ID NO: 254166 - protein, 44 aa, Zea mays
  Clone ID: MRT4577_16337C.1.pep
FSCCWDIPKCSGLCHPEVKMLELHQRKKCTGGPTVAAEVSESED

SEQ ID NO: 254167 - protein, 98 aa, Zea mays
  Clone ID: MRT4577_163380C.1.pep
KLNGNVLHSEVRHVLRCRPEHLDLYHAITDSDLVGMAVGCRTGSRYACFIYRWCRVFMCRSRSFLVGSLLLLDPCHLVQFIRVHRPSSKLALPECHSL

SEQ ID NO: 254168 - protein, 60 aa, Zea mays
  Clone ID: MRT4577_163381C.1.pep
TKRVAMDMGLIRDVAGYAPYEKHITELMKVGKDKRALNLAKRKLVTHIRAHKKIEEMAGV

SEQ ID NO: 254169 - protein, 115 aa, Zea mays
  Clone ID: MRT4577_163382C.1.pep
KQLGTAKKSEPLLMGILGTEQEKMLIVLVRHAFISFKLCFTFTFSRTQDDVPRVSGRGVPCVAHHSVADKVPFSKTGHCLAGPSNHQSGSLGTAATPPKLMYLSVKELLLLAVYI

SEQ ID NO: 254170 - protein, 423 aa, Zea mays
  Clone ID: MRT4577_163383C.1.pep
AAGHAPAAAGAAVANSGGVDLTPAARRNKKRKLPVKQLPDRVAALLPESALYTQLLEFEARVDAALARKKVDIQEALKTPPSLQRTLRIYVFNTFANQGPRTIPPPKNADPPTWSLKIIGRVLEDGAELDPASVVPKHNPVYPKFSQFFKRVTIALDPSLYPENPLIIWENARAAAQQEGFEVKRKGDKEFVANIRLEMNYSPEKFKLSQPLMEVLGVEVDTRARVIAALWQYIKAKKLQNPNDPSFFMCDPQLKKVFGEDKLKFAMLSQKISQHLSAPPPINLEHKIKLSGNGAHSSACYDVLVDVPFPLQKEMMAFLANTEKHKDIEACDEVISASIKKIHEHRRRRAFFLGFSQSPVEFINALIASQSKDLKLVAGEANRNIEKERRADFYNQPWVEDAVIRYLNRKPANEGPGGGAGGS

SEQ ID NO: 254171 - protein, 120 aa, Zea mays
  unsure (1)..(120): unsure at all Xaa locations
  Clone ID: MRT4577_163384C.1.pep
TSPKAFFXRSVINGAHYICHSGGHCPMDTYMRPMCQECGLLKCRQAAMHQECVLSEEQIRLNNLMLXEEEQAHATSLPPRAYXPPQILPQLTPEQLGMIEKLISCQHQCNPGSFSDRSSN

SEQ ID NO: 254172 - protein, 206 aa, Zea mays
  Clone ID: MRT4577_163385C.1.pep
SDAWARARVIAALWQYIKAKKLQNPNDPSFFMCDPQLKKVFGEDKLKFAMLSQRISQHLSAPPPINLEHKIKLSGNEAHSSACYDVLVDVPFPLQKEMMAFLANTEKHKDIEACDEVISASIKKIHEHRRRRAFFLGFSQSPVEFINALIASQSKDLKLVAGEANRNIEKERRADFYNQPWVEDAVIRYLNRKPANEGLGGGAGGS

SEQ ID NO: 254173 - protein, 106 aa, Zea mays
  Clone ID: MRT4577_163386C.1.pep
APPLTTRAVRRDENQRCVSLQPRNKKRPAKSSWRFRAYRTLAKKIGALLLNATPHRERQRAWILCWHGTPWTGRWMRLYSYGYTGQPTDDRVHHRSKILHAGHAPR

SEQ ID NO: 254174 - protein, 133 aa, Zea mays
  unsure (1)..(133): unsure at all Xaa locations
  Clone ID: MRT4577_163387C.1.pep
KGLRKTTQGFCLXPACVKRSXITQRWWEAPTTCLGPRLFSSKSKXKSRXPKPKVPPPISPWLEFKREPTNARPMWFVGKIVFPWEDFFEGDFYPFLKFTFVIHQVLIVLFSCKAFAKHGHFFCIPPVPNWKWF

SEQ ID NO: 254175 - protein, 72 aa, Zea mays
  Clone ID: MRT4577_163388C.1.pep
CMIERVHARSYACSLLSLSAIRTPLSLNLDLPLSLLISPMVIFICFLRVVFSFFSTHTTCSCYLRVKFLHFA

SEQ ID NO: 254176 - protein, 40 aa, Zea mays
  Clone ID: MRT4577_163389C.1.pep
RHVPVLPVRYVLQCSKVRGLRPRTGFTVRCGGLWARTNDV

SEQ ID NO: 254177 - protein, 107 aa, Zea mays
  unsure (1)..(107): unsure at all Xaa locations
  Clone ID: MRT4577_16338C.1.pep
LHTIPLLNYTNLYYXPRHALLNTNSQPKXXPKXSHXTHSARTLRSPPIIHPSIHPAICLKDFLNHPQDNLLPSFPLLLTILLILALIMGLITLIIYLLVQPTHPRLY

SEQ ID NO: 254178 - protein, 130 aa, Zea mays
  Clone ID: MRT4577_163390C.1.pep
LFPYFQQQQFFPFNQLFTLNPAGYLGPPLFPFSRVGFAYFQQQQLFPFNQLAALDPPGFLRRQILLPFSPLGAANRGSFLAQHQVVPFFPRVGGNPPPLFQLHQLVPFGPLGLAGPGASFPPPIMGGGLF

SEQ ID NO: 254179 - protein, 170 aa, Zea mays
  unsure (1)..(170): unsure at all Xaa locations
  Clone ID: MRT4577_163391C.1.pep
MTNGETLTDPKAFIVGILPISPLKLHXPKDVLQEVPLGHLQTQNIKGQQLQQLELGNLAGYSEQQQLLPLNQLDELNCATYFQQQLPFSQLAGDXPQQFIAFNQLTGINSGXYVQHQQLPPFSQLADVSPVIFLTQQQXVXFYLHSAPNAGTLIQLQQLLPLNQLALTNP

SEQ ID NO: 254180 - protein, 120 aa, Zea mays
  Clone ID: MRT4577_163392C.1.pep
MRSKANGDTAFKASGKNKTATGGVAKPKRAPTPFFAFLAEFRPQYMEKHPEAKGVAAVTKAAGEKWRSMSDEEKAKYGGKKADAPASKAVNKKESTSSKKTKTNADEEGSDVEDDEEDEE

SEQ ID NO: 254181 - protein, 248 aa, Zea mays
  Clone ID: MRT4577_163393C.1.pep
GWWRSPARCAGRRPTPASSAPVSSLHAHPHHALSKHYPKLRAPASVLCVWPAVCRAAAGQTNKFNLTRPRPRAAAEICRESIPGLEVEHVDISELPLLNTDLEGPGPGAFPAAVEAFRGKVRAADCFLFASPEYNYSISGPLKNALDWGSRPPNCWGDRAAAILSASGGSGGSRSQYHVRQVGVFLDLHFVNKPEVFTRAHQPPSKFDDDGNLVDPDTKDQVTKVLLALQALALRLHLGKLAVAAHSS

SEQ ID NO: 254182 - protein, 50 aa, Zea mays
  Clone ID: MRT4577_163394C.1.pep
CIYSTFTPVARPFSHRKTEVFFLAECWRRQQSPQLHPACAPPCSLFSLST

SEQ ID NO: 254183 - protein, 69 aa, Zea mays
  Clone ID: MRT4577_163395C.1.pep
PPHTKNIHTFTTKTPPPRPKRVYPLISIKNLSPPADPMFIYPSTHYLPSAKVYALNESLLISNFTKHPH

SEQ ID NO: 254184 - protein, 73 aa, Zea mays
  Clone ID: MRT4577_163396C.1.pep
AWEVEGTTEYKNTRPGARPSPALLLLRAGIEHSPHIFPQRWGTQSAHVYPPYIREKIYTKTTPLLTVKRAVQH

SEQ ID NO: 254185 - protein, 97 aa, Zea mays
  unsure (1)..(97): unsure at all Xaa locations
  Clone ID: MRT4577_163397C.1.pep
QRLRLTSLLRFKSRSVCLLNMLACDAAVPASRPLSWPTPGELDXXFAIYLKSIPKPEKLSRLQYLLGISNEKANEMQDAAXEGSLPVAAEEKEKLAF

SEQ ID NO: 254186 - protein, 56 aa, Zea mays
  Clone ID: MRT4577_163398C.1.pep
EADPLSGPLPSFFFTPPTSTRGWVFFFFYQAQTNFRSKKKQNPLVETSKSLALLKK

SEQ ID NO: 254187 - protein, 1011 aa, Zea mays
  Clone ID: MRT4577_163399C.1.pep
MELALASAKPSPRAAGAFPPLIFSPLKPFPLLRFPPRRTAAAALRLRLRLRAAAADAGETSPGEEVFGARRELTGIQPLVEALPPAARTAAELAVAAAAVAAGYGIGLRAGGGSRAVAVAGAAVLGAASVAGAAAVNSVVPEVAAVGLHNYVAGHDDPTNLDNGEVEAIAKKYGVSTQDDAFKAELCDLYARYLYSVLPPGDEDLKGTEVQAIIKFKSALGLDDVDAANMHMEIGRRIYRERLETSDRDADMEQRRAFQKLIYVSNLVFGDASVFLLPWKRLFGVTDSQIDIAMRENAKNLYSVQLKSIGRGLDIGTLIEVRRAQLAYKLSDEIAAEMFREHAKQLVQENISSALDILKSRIPDSLTQAVEEVNIVIKFNSLLTTLSKHPEADNFARGLGPISLAGEDDHQGRADDFKILYKAYATEVLSDGIVDDKKLSPLNELRNIFGLGKREAEGILSDAKAHIYRRTLAKSFNTELASVPSKAAFLQTLCEKLQFDPELASKMHEEIYRQKLQQFVADGELSKEEVEALMAFQVRLCIPQETVDAAHTEICGQLFEKVVKEAIASVDGYNADRREAVRKAAQSLNLKTEAVMTIFSKAVRKLFLSYIQRAKEAGNRIETAKELKKLISFNIVVGRELLADIKGELSPVAETEASSAAAESEGEDGEHEWESLDTLRKTRPDKELKEKLRKSSQKEITLKDDIPLRDRAELYETYLMFCITGETTNVSFGTAISTKKDDSEFLMLKQLGDILGLTRKEAQDVHIKFAEKAFVQQAEVILADGKLTEAKADQLAKIQKQVGLPTEHAQKIIKGITTTKLSSAIEASVARGQIGIQQVRGLKEANFQLDSLIAEPQRESIYRKTVEELFSSGTGDFDEEEMYVKIPADLIISSEKAKSIVQDIAKVRLENSLVQAIALLRQKKRDDVLSSLNDMLACDAAVPASRPLSWPTPGELDDLFAIYLKSIPKPEKLSRLQYLLGISNEKANEMQYAASEGSLPVAAEEKEELAF

SEQ ID NO: 254188 - protein, 284 aa, Zea mays
  Clone ID: MRT4577_16339C.1.pep
MPGSPKVFFASSASRRSGALRRLLSSPAFSAACLFFGLAGFLAAALTLSRSPSITHSRCPDSSRPLSVSVAWDRRPGDGSAAGSAELPASLATGSRGRHKVMAFVGIFTGFGSIGRRRALRRTWLPADRQGLLRLEEATGLAFRFVIGKSNSKNKMAALNREVEEYDDFVLLDLEEEYSRLPYKTLAFFKAAYALFDSDFYVKADDDIYLRPDRLSLLLAKERSHPQTYIGCMKKGPVFTDPKLKWYEPQSFLLGSEYFLHAYGPIYALSADVVASLVALRNNR

SEQ ID NO: 254189 - protein, 98 aa, Zea mays
  unsure (1)..(98): unsure at all Xaa locations
  Clone ID: MRT4577_1633C.1.pep
HWVPRGRPGACQHLRTDLQEHSCFSRCTPQRNTFLLNLWHTSHHNRRSYLAPDTVPSLAATEACYRTRWRKHRAPLEGLCGSPGLRNLNMFTXALDRQ

SEQ ID NO: 254190 - protein, 131 aa, Zea mays
  unsure (1)..(131): unsure at all Xaa locations
  Clone ID: MRT4577_163400C.1.pep
AFNGPPVXNFKPLAPLVEECNEAFFKFDLGFDQVVVLETKTAKGATPNILATPCIPSAASKKLKNLGKLGVGCRLVLSKNPTALLEIGRLIFFTKTFPLPRKMLKKSSLAGEILPVQKWKLECYLVAPKRA

SEQ ID NO: 254191 - protein, 56 aa, Zea mays
  Clone ID: MRT4577_163401C.1.pep
PAGGLRHHPCRRSRGRPARGGQHWLASCICMSGSALCLPHFFTDCSHDLILFHMDR

SEQ ID NO: 254192 - protein, 342 aa, Zea mays
  Clone ID: MRT4577_163402C.1.pep
RLRAAHNRLVPVSLFQKPIVKVKLADLMAATHDFSTSHIVVAGSSRAGTAYRAVLRDGSALTVKRLHSCPLSEKAFRAEMGRMGQLRHPNIVPLLGFCVVEDERLLVYKHMESGALSSVMKKPGEAPLDWATRLRIAVGAARGLAWLHHGFQVPQIHQNLSSSAVLLDEDYDARITDVGLTRLVRMAPGEGGDTSPFLNGDFGEFGYVAPEYASNPVGTMKGDAYAFGVILFELVSGQEAAAVVTDVTGEGFKGTLVDWVNQLKASGRISDAIDKPLRGKGHEAEIQEFLKIAFACTQPRVTERHSMYRVFHALKSIGEGCDVTEQFDEFPLAYNKDDSDAI

SEQ ID NO: 254193 - protein, 64 aa, Zea mays
  Clone ID: MRT4577_163403C.1.pep
PRVLPRVRGRVGETPKEARKPKVVEVPAKEEAPKPNPKNSFDLLPPIKMVLDDWKKLYSNTKTN

SEQ ID NO: 254194 - protein, 113 aa, Zea mays
  Clone ID: MRT4577_163404C.1.pep
RPGNEGPLVWRTGLSGVHRTVSGAPPNSVRCTRGLQLKLATFGNFQRDSAIIHRTVRCTPDSVRCSKEERPPELASLGKRSGCSAIIHRTCPVYTGLSGEPAEQRLLRANGHL

SEQ ID NO: 254195 - protein, 101 aa, Zea mays
  Clone ID: MRT4577_163405C.1.pep
YSESCLPCFVLTYGFLSLPPQAPMRCTRNGTGSCSCKRGAPAFRAPWGILPVIPTGRTSAAEVNNDGSGFKLNPPPLSLYSICSRLWIPPTSLSLFDPRAE

SEQ ID NO: 254196 - protein, 101 aa, Zea mays
  unsure (1)..(101): unsure at all Xaa locations
  Clone ID: MRT4577_163406C.1.pep
VNQRVRSVVDLTVRIENGASYEELKRAIKAASEGALKGITGYVEDDLVATDFSGDSMSSLCDPGGRIAXLNYQFIALVTWYXTQWGHRSPVIELIRQSIST

SEQ ID NO: 254197 - protein, 63 aa, Zea mays
  Clone ID: MRT4577_163407C.1.pep
TTHSPYVVFLRQRNEACFVALPLIYVCNTHFVRKSKRRDYIPLHVCVLSLFIISCGHLTYTNK

SEQ ID NO: 254198 - protein, 82 aa, Zea mays
  Clone ID: MRT4577_163408C.1.pep
AIVTVPYCSRLTPFNTRVVPLQGFQATSGCVRLVLWCTVPLRWLCGRGTSSFSVSLGRCPNCCSCGPGYVLAPSFALCGTCW

SEQ ID NO: 254199 - protein, 100 aa, Zea mays
  Clone ID: MRT4577_163409C.1.pep
RTTAKPLIKVQYIYGQDEQDQTTLHTKAQAGGLFNEDASFDDNNPEPLTYAEALTLIEMPATIACTPYIQTHLRSPCMQDTRIQNICVMRYKAAILSLST

SEQ ID NO: 254200 - protein, 220 aa, Zea mays
  unsure (1)..(220): unsure at all Xaa locations
  Clone ID: MRT4577_16340C.1.pep
FGTRSDHRIAFEILKTPQFPVFRNSGEGPQIFSPASARCLRLRLPPAAPHISKSPTPCSRPRTPPLSLLKIPTRRSRRRRNPKAWIPPRPRARIARPIPGSSVSHALATSARGAGAMPASRIPFKRCTAAVPGVGKPGPAASMPPAKRRRDRVVPSRSRDSMPPPAPHVEEGDXGTXEVYNVELLMAEPKVDSFGPVETALWTQARTAPTDADLYRACRT

SEQ ID NO: 254201 - protein, 126 aa, Zea mays
  Clone ID: MRT4577_163410C.1.pep
ARGDVPLACSVVVVEEERSPPLPRRPPAPFRPPLSIGRWWTTIERMRGDRSKATRPLAPPPRAIGERDMVEDPRLLKQVRELRRLVPACREPCGLGELFQDTATYIEDLQAQVQVMRMLLDKLSDE

SEQ ID NO: 254202 - protein, 66 aa, Zea mays
  Clone ID: MRT4577_163411C.1.pep
CVAGPAQTAAIVLLSISIETGEELPLSSLCRTSVSEWEALRSIGMDTEVCVEPVQLATFCSSLFII

SEQ ID NO: 254203 - protein, 48 aa, Zea mays
  Clone ID: MRT4577_163412C.1.pep
KLVITLDMGLLVAATKYRGEFEERLNKLMKQLKPNEDIIIFRQIMLIR

SEQ ID NO: 254204 - protein, 129 aa, Zea mays
  unsure (1)..(129): unsure at all Xaa locations
  Clone ID: MRT4577_163413C.1.pep
VKGLAYMDLQHCKQQGGCLFXHFQEAVSGTISGGRFFFLRGSFSRLLGDKELLWAIPPVYWIVFRKKRGLLDGPFLSFRGGELVSPFLLEVGAGKATLSIWPQPYLFKKFGLWFQETQKKKKKKKKKRK

SEQ ID NO: 254205 - protein, 158 aa, Zea mays
  unsure (1)..(158): unsure at all Xaa locations
  Clone ID: MRT4577_163414C.1.pep
KEGVKSFPXGKIGGANXVCGQNPTFAKPKRAPLIKMQEPVSLPFALGDMNPFPKGFSLFEQVPITLWSELPVVVEDKIPXMGSLKFSRAPKIPDYEEINPRWPVPTKSPCCRLFLPPVVCLAPLSKRKRDFLCFFRPPRPSRFLWLPHEPLDFCFPGP

SEQ ID NO: 254206 - protein, 212 aa, Zea mays
  unsure (1)..(212): unsure at all Xaa locations
  Clone ID: MRT4577_163415C.1.pep
PARGVVPCSILGRRQCPSRGPQPLSDKKRWSGKGXDGPDIGHAMSSTTYSCVDVRLATAARSWPMDQXNRSTSSYVSXTDSDRLIXSAVFNQVAMNPINTVFDAXRIIGRRIIDASXDHTLXIWLVVSLRDISGSGENALIVVHCEAEDNDCAPEEISSMVPMMMRDXAEAYRXRTIHNGVATVADYFNDSQRLDTKDAGVTAGRNVLRIIN

SEQ ID NO: 254207 - protein, 104 aa, Zea mays
  unsure (1)..(104): unsure at all Xaa locations
  Clone ID: MRT4577_163416C.1.pep
LPISTENTCVWLDMTVCGTHSARIFMDLYTNYVPKTGHNFRALCTAEKGVGXSGKPFHYKGSTLHRVIPEIMCHGKNFTRRNRTGDESIYXEXFPDKKIMRKHT

SEQ ID NO: 254208 - protein, 98 aa, Zea mays
  Clone ID: MRT4577_163417C.1.pep
VGTHPTKKPWSPPRDKPWGGGPPSPLKGGPYLVGPNLLGFWKAQERGLPANKCAPTVFQALGDHGPWHSEIPPPSHTTGGNRFTPGGKVTPQQPPHPG

SEQ ID NO: 254209 - protein, 149 aa, Zea mays
  unsure (1)..(149): unsure at all Xaa locations
  Clone ID: MRT4577_163418C.1.pep
TSACVAYVSSVHVSSCQIQFASSCYYCARSLCERKTSTGQEFQVKDLVHADYGXLDIELAEXKCPXLIACRYXIGPSKHLTYSRIXGXADMTIHTVVLIETLTDLGANVRWCSCNIFSTQDHAGDVIVHDLIGGFAWNVETPDDYWMCT

SEQ ID NO: 254210 - protein, 81 aa, Zea mays
  Clone ID: MRT4577_163419C.1.pep
TDACTHAGTSVRYLKAYPRSLERALLLFGVFFDIGVYRVIVLSGDSFTHPHSRTHNTSHMHNLRSERGLMSGRALTDCVSL

SEQ ID NO: 254211 - protein, 131 aa, Zea mays
  Clone ID: MRT4577_16341C.1.pep
KKGPVFTDPKLKWYEPQSFLLGSEYFLHAYGPIYALSADVVASLVALRNNSFRMFSNEDVTIGSWMLAMNVNHENTHALCEPDCTESSIAVWDIPKCSGLCHPEVKMLELHERKECTGGPTVAAEVSESED

SEQ ID NO: 254212 - protein, 90 aa, Zea mays
  Clone ID: MRT4577_163420C.1.pep
CLVVFSVETAVSYALALGFSRLYVPALYRHGDNLSRAVVPQVLLGDQVSSVAITSGVLSTSLPSPLGGSPRCLCWPRSMIRSVMYGIAGV

SEQ ID NO: 254213 - protein, 67 aa, Zea mays
  unsure (1)..(67): unsure at all Xaa locations
  Clone ID: MRT4577_163421C.1.pep
GILYNFPSVIHPAGQWMFAKPTNANADWLLPNTKPHQAKRDANWRRRXXEALINNVWIPGSGVAKGL

SEQ ID NO: 254214 - protein, 74 aa, Zea mays
  unsure (1)..(74): unsure at all Xaa locations
  Clone ID: MRT4577_163422C.1.pep
VPWGSPGWRLAFXALRGPACGGASGVLPAAVAALAGCAPVPPCGPRRPSSRWGSSSACSRAAAGASLCWARSPR

SEQ ID NO: 254215 - protein, 81 aa, Zea mays
  Clone ID: MRT4577_163423C.1.pep
VLGNMHCVATAATAQNKQFSTGSTNWLTSYKQLNFWAVNQCIGIIFFFELTWYQVKKKKKKAAPKNPCTSYYLKQLRSQNL

SEQ ID NO: 254216 - protein, 78 aa, Zea mays
  Clone ID: MRT4577_163424C.1.pep
MAGPAGMDKEPPPGKGGPGPKIEEVALTVCCQFLAFSSFWLAQFLPRVIVVGRFGFSPLTFFWGGRAFLWGLFFFCTS

SEQ ID NO: 254217 - protein, 227 aa, Zea mays
  Clone ID: MRT4577_163425C.1.pep
MEPGSTPPNGSAPATPGTPAPLFSSGGPRVDSLSYERKSMPRCKCLPLPAVEGWGVATHTCVVEIPAPDVSLTRKVPAYVAVQALASVCAAFALKGVFHPFLSGGVTVPDATISTAQAFFTEFIISFNLLFVVTAVATDTRAVGELAGIAVGAAVTLNILVAGPTTGGSMNPVRTLGPAVAAGNYRQLWIYLLAPTLGALAGASVYTAVKLRDENGETPRTQRSFRR

SEQ ID NO: 254218 - protein, 303 aa, Zea mays
  unsure (1)..(303): unsure at all Xaa locations
  Clone ID: MRT4577_163426C.1.pep
MEPGSTPPNGSAPATPGTPAPLFSSGGPRVDSLSYERKSMPRCKCLPLPAVEGWGVATHTCVVEIPAPDVSLTRKLGAEFVGTFILIFFAXTAAPIVNQKYGGAISPFGNAACAGLAVATVILSTGHISGAHLNPSLTIAFAALRHFPWLQVPAYVAVQALASVCAAFALKGVFHPFLSGGVTVPDATVSTAQAFFTEFIISFNLLFVVTAVATDTRAVGELAGIAVGAAVTLNILVAGPTTGGSMNPVRTLGPAVAAGNYRQLWIYLLAPTLGALAGASVYTAVKLRDENGETPRTQRSFRR

SEQ ID NO: 254219 - protein, 61 aa, Zea mays
  Clone ID: MRT4577_163427C.1.pep
VAGSRTTGRPCHPLWRRSLRRAPVGGGQRQRPSAVSHLEVLVNALAGPGAESCVCGHLPGR

SEQ ID NO: 254220 - protein, 247 aa, Zea mays
  Clone ID: MRT4577_163428C.1.pep
MFREEQLDLVLVPLALAAVAGYHLWLLWAILRHPTRTIIGLNAIARKRWVAAMMANTEKNGVLAVQTLRNNIMASTVLATTAITLVSVISVFIGVTSPASSSSSPSSKAPRLVYGSKAGEVFAAKYLAVSLCFMLAFVCNVQAIRLYAHASFLLGGLPPGPGDEAREEFASYVARTVNRGSYAWSLGLRAFYVSLALFLWTFGPIPMLACSVLMCGLLYFLDTTSSADHGHAHGQQRAGAARKDSTV

SEQ ID NO: 254221 - protein, 58 aa, Zea mays
  unsure (1)..(58): unsure at all Xaa locations
  Clone ID: MRT4577_163429C.1.pep
TVDRASFMTQLQLLTTYQQFGAKPEPVLQLQQLLPSDQLALTDPTAYXQLQIIGGALF

SEQ ID NO: 254222 - protein, 68 aa, Zea mays
  Clone ID: MRT4577_16342C.1.pep
LHRGAPGCVCPHPRDHINPDFTIFSSDDILAIGLKFNEAEFLQLSLLIRHILNFVYTNYHVISKLCNV

SEQ ID NO: 254223 - protein, 111 aa, Zea mays
  unsure (1)..(111): unsure at all Xaa locations
  Clone ID: MRT4577_163430C.1.pep
SAVTTIKTKRAIQFVDWCLHGVKFGFIXQPPRVEPGGDLAKLQRTVRMISVSTSVVEVFCSIDHKFGIMSAKRALRSWYVGXGIEEGEFSQAREDLTALHKEYQEVDAELL

SEQ ID NO: 254224 - protein, 295 aa, Zea mays
  unsure (1)..(295): unsure at all Xaa locations
  Clone ID: MRT4577_163431C.1.pep
MFREEQLDLVLVPLALAAVAGYHLWLLWAILRHPTRTIIGLNAIARKRWVAAMMAVGTMHLPISSIGLASSSHSLSPSSPYPIPLLSCCVHTYHGWRTGRPAXNTEKNGVLAVQTLRNNIMASTVLATTAITLVSVISVFIGVTSPASSSSSPSSKAPRLVYGSKAGEVFAAKYLAVSLCFMLAFVCNVQAIRLYAHASFLLGGLPPGPGDEAREEFASYVARTVNRGSYAWSLGLRAFYVSLALFLWTFGPIPMLACSVLMCGLLYFLDTTSSADHGHAHGQQRAGAARKDSTV

SEQ ID NO: 254225 - protein, 138 aa, Zea mays
  Clone ID: MRT4577_163432C.1.pep
MGYLPSLGGKAAHLVSDLATVFLNPVSGHERERSSHLPEATEGQENRYGDEESEIPNGPDTSSFRAFLMAFMSASSSSNDSMEIIPEQDLEMEYPTLTPVARGIKEKEGVAYYQASLPLETLLTRQADLVVSEKNPAT

SEQ ID NO: 254226 - protein, 112 aa, Zea mays
  unsure (1)..(112): unsure at all Xaa locations
  Clone ID: MRT4577_163433C.1.pep
XEDYACCRFIKLNQSVQGARGIDLHFLSSKXAYHTFLFXXRTIIFCCAAKVRSLAGCCGAHXAVRXAXSFLRRCLARRLXARGRALLTSRCVPLSCPXCRSGRWWARWVGPW

SEQ ID NO: 254227 - protein, 96 aa, Zea mays
  Clone ID: MRT4577_163434C.1.pep
VDLPLVLSHRIISSSCYNWIFPLDLYLLPPFYLFPPSLLNLSSRFSPFAMASTHNSKQRLALAICDFLSASTNDGTLTADDKDSIDVAINCIAESL

SEQ ID NO: 254228 - protein, 59 aa, Zea mays
  Clone ID: MRT4577_163435C.1.pep
DSFFIISSLTVLVYLHAYGALDSVPYCEVSWPWYSLVRHHCVQCAVPLFTSDVASLILV

SEQ ID NO: 254229 - protein, 39 aa, Zea mays
  Clone ID: MRT4577_163436C.1.pep
PSIYCFFKSRIFPYVCSLICPIVNRYFFISLAPLHVSCL

SEQ ID NO: 254230 - protein, 133 aa, Zea mays
  unsure (1)..(133): unsure at all Xaa locations
  Clone ID: MRT4577_163437C.1.pep
SPRARGRGGSALLXSPHPDPCLHCKDLSPFFSGICLPSDSQIPLLLHPPSNTLLSRSLCGAGTRCIFCQGAVQLSRRRVQSHGDRPPPCLLRVPQAVCVQSRGQAMQIVAAYGRRRLIGQRGYRRGRTVWSPG

SEQ ID NO: 254231 - protein, 67 aa, Zea mays
  Clone ID: MRT4577_163438C.1.pep
MSCSSGKCDCGSSCSCGSSCNCMSPNVETAAASSIKTTVLAAPTTKASAGGFEAATEGGGCDCNTCN

SEQ ID NO: 254232 - protein, 51 aa, Zea mays
  Clone ID: MRT4577_163439C.1.pep
VRSSSHSCSARSGLRPGTLRPRPRLLGPACSCDSAVSVVSDRENMCFKSSL

SEQ ID NO: 254233 - protein, 81 aa, Zea mays
  Clone ID: MRT4577_16343C.1.pep
GRSVYLSCVEPHRFRSDSIVPGGSTAGGTTSYFLGTVHPLLSSTNVKCMARLSSVDKVGHSIVLGDRSSNGQPPIPLEVPA

SEQ ID NO: 254234 - protein, 80 aa, Zea mays
  Clone ID: MRT4577_163440C.1.pep
MSCSSGKCDCGSSCSCGSSCNCMSPNVETAAASSIKTMVLAAPTTKASAGGFEAATEGGGCDCNTCKCGTSCGCSCCSCN

SEQ ID NO: 254235 - protein, 81 aa, Zea mays
  unsure (1)..(81): unsure at all Xaa locations
  Clone ID: MRT4577_163441C.1.pep
MSCSSGKCDCGSSCSCGSSCNCMSPNVETAAASSIKTTVLAAPTTKASAGGFEAATEXGGGCDCNTCNCGTSCGCSCCSCN

SEQ ID NO: 254236 - protein, 80 aa, Zea mays
  Clone ID: MRT4577_163442C.1.pep
MSCSSGKCNCGSSCSCGSSCNCMSPDVETAAASSIKTMVLAAPTTKASAGGFEAATEGGGCDCNTCNCGTSCGCSCCSCN

SEQ ID NO: 254237 - protein, 119 aa, Zea mays
  Clone ID: MRT4577_163443C.1.pep
MASTSAVSMAMPVTYASQKRVVPSSDAFFKPLPLRSSKAVTASKLNGRFQVRASMKEKVVTGLTAAALTASMMVPDVAEAAVTPSLKNFLLSIAAGGVVVVAIIGAVIGVSNFDPVKRS

SEQ ID NO: 254238 - protein, 331 aa, Zea mays
  Clone ID: MRT4577_163444C.1.pep
MVVLAKPPVVDQIPLLRSPGPRDSFSGVPVVDLSSHGAARAIVDACERFGFFKVVNHGVAAATMDRAESEAVRFFAQAQADKDRAGPAYPFGYGSKRIGLNGDMGWLEYLLLAVDAASLSDACPVPSSAAFRSALNEYVAAVRKVAARVLEAMAEGLGIADADALSSMVSGAGSDQVFRVNHYPPCPALQGLGCSATGFGEHTDPQIISVLRSNGTSGLQIALRDGAQWVSVPSDRDAFFVNVGDSLQVLTNGRFRSVKHRVVTNSLKSRVSFIYFAGPPLGQRIAPLPQVLAEGEESLYKEFTWGEYKKAAYKTRLGDNRLAQFEKRSNI

SEQ ID NO: 254239 - protein, 96 aa, Zea mays
  unsure (1)..(96): unsure at all Xaa locations
  Clone ID: MRT4577_163445C.1.pep
GTEEXTGXXRETGRGSDPREETNTGNXAQAQKPTEAXXRGTKXNSXRRPPPKSXXGKXATKTEXQXXXXSXXXRXXXRPXXKRQTXXKNTTEGXKG

SEQ ID NO: 254240 - protein, 193 aa, Zea mays
  Clone ID: MRT4577_163446C.1.pep
MAGTKLISLGLLVLIGIGLANAVRVARYSSADGTGTGEGQGGGYVNGGGSGSGSGTGSGDSSPYGAHASAGGGGAGGGASQNGGSGYGSGSGSGSGSSTYSQGGYYSGYGESSNAGGTGGGGGGGQAGGYWNSNAQGSGSGTGSGSSYANRYWDGSSEGGANANGNGGGMGNSQNGGGGGGSGDGSGYGNAYP

SEQ ID NO: 254241 - protein, 95 aa, Zea mays
  Clone ID: MRT4577_163447C.1.pep
CNAADFPKLEFPRDEIIEIIPSSYNNVAKRIKIPGLPESFVRSSPEDIQIPVAPSGAVSPLSGIGTPDVASGAATPQHASAQPLDLKSSHVNPLE

SEQ ID NO: 254242 - protein, 47 aa, Zea mays
  Clone ID: MRT4577_163448C.1.pep
KPVFSFETLKSVFMKLLRCLYFSVHTCFEMYVRFYLEHFSFLFFSKE

SEQ ID NO: 254243 - protein, 155 aa, Zea mays
  unsure (1)..(155): unsure at all Xaa locations
  Clone ID: MRT4577_16344C.1.pep
LKKIRGPSPPGGGKACFGLKGAQGGGVPGKSSTPGKEGPPPRPVFKVPTPRGPPGGPPKRXHVLAPPGWGPPXKKNFFPGPEGPLAGDPLGAPPGKTPGVRANIFVWGGAPLNLRGKNFFFKTPPQKKKKKKKKRKKRKKKKKKPKKKKKKKKEL

SEQ ID NO: 254244 - protein, 63 aa, Zea mays
  Clone ID: MRT4577_163450C.1.pep
HGGDALLTPLPGDLMSAAARAPPPPRALYTPSIKVPFRTHDSNPRLDPVLGFSRHVLSRVMFI

SEQ ID NO: 254245 - protein, 98 aa, Zea mays
  unsure (1)..(98): unsure at all Xaa locations
  Clone ID: MRT4577_163451C.1.pep
QQLLTLNXLAALIPAAYXQQRILLPFSQLAAASRASFLSHLQLLSLYQQLEVIPATLLQLLQLMSFCQLVLTNLCDSFQQHNHGGAPLFDCLISCNFN

SEQ ID NO: 254246 - protein, 50 aa, Zea mays
  Clone ID: MRT4577_163453C.1.pep
LYFLAREKTEPPVCELLVGLNYICRYDRQQNALLDCSSSDFDDCVKWQVQ

SEQ ID NO: 254247 - protein, 125 aa, Zea mays
  Clone ID: MRT4577_163454C.1.pep
GDPFWGDKKPRPQNLNPPPQPGFGGGGGPTQKSGVGKKKTRLQKPKKKPSPPINFGPSKEKTQPPLGRHQAPNKKKNKRARKKRVFNRAWFPLNPLFLLGNKKIILYFRARRGPFFTGGEFLGKE

SEQ ID NO: 254248 - protein, 41 aa, Zea mays
  Clone ID: MRT4577_163455C.1.pep
AKKPKKCKCKLGWYHYVFTVPGNFCLTHCWKSLGKAPIRCE

SEQ ID NO: 254249 - protein, 45 aa, Zea mays
  Clone ID: MRT4577_163456C.1.pep
CQHLLGAFVSPAGSVHSYWVLYLQHIVDALMALIIVSDNPVLFLL

SEQ ID NO: 254250 - protein, 88 aa, Zea mays
  Clone ID: MRT4577_163457C.1.pep
GDWDPRGRPGQTPSPRPRPPSPFPSSLSWVRSTNLLARAWNGPRLDPQGAEERLRRRSPAALDLQVLCPVSRGLICDACGVVSHRWCP

SEQ ID NO: 254251 - protein, 144 aa, Zea mays
  unsure (1)..(144): unsure at all Xaa locations
  Clone ID: MRT4577_163458C.1.pep
NQGGAKGSLAPKAQKLHPPPLGGGGPNXPTPNPRVKRGDPPKFGKKKGGPPPXPXKGQIPPPGGPLQGDPSRDPSWGKKGQKRFPGENGNPLKIPTKKQPENKKGKPGGAKGGTNPTLMGGPPRPPFQRENRARQLHKKTAHPP

SEQ ID NO: 254252 - protein, 146 aa, Zea mays
  unsure (1)..(146): unsure at all Xaa locations
  Clone ID: MRT4577_163459C.1.pep
DSWAPEDGAFVPCIYGCVVGEPDTANRILRQREREEMGLTYTKLVRRLFAKTEMRILMVGLLAAEETNMLYMLKLEETXTTIPTIRYNVEXTEXKSIISTVWDDCGHDKIRPLGRHYMQNTHGLIYVVYSNDKDRVVEARDELLRM

SEQ ID NO: 254253 - protein, 59 aa, Zea mays
  Clone ID: MRT4577_16345C.1.pep
IRSSACTSIGYSGSSKKLMLRELCCTRLGDNVTSRVPWFRRLSTVDGPKYLATDFIIVK

SEQ ID NO: 254254 - protein, 83 aa, Zea mays
  unsure (1)..(83): unsure at all Xaa locations
  Clone ID: MRT4577_163460C.1.pep
MGSNDPNTPSKASKASEQDQPPATTTSSGTASVYPEWARFQAYSAIPPHAFFPPTVAAXQAPPYXLWGAHPIVAPXGTPPPPP

SEQ ID NO: 254255 - protein, 94 aa, Zea mays
  unsure (1)..(94): unsure at all Xaa locations
  Clone ID: MRT4577_163461C.1.pep
MGSNDPNTPSKASKASEQDQPPATTTSSGTASVYPEWPSXQAYSAIPPHAFFPPTVAAXPQAHPYMWGAQPIVPPYGTPXPPPYVMYPPGXVYA

SEQ ID NO: 254256 - protein, 100 aa, Zea mays
  Clone ID: MRT4577_163462C.1.pep
GEEFYQRKRWAQSCPRTRRIYDGVECSGEKSSTPGASTGPNCHMNSRVTPTRTPGTPHWPRISPGRRRGRATLAAMALRSDDGSRHRGGRGAFGRGPRAE

SEQ ID NO: 254257 - protein, 61 aa, Zea mays
  Clone ID: MRT4577_163463C.1.pep
NRGGKKIICGGKNFYTWAKFTTSVPYKTFGGLFCFTQNLQEFTVPHFLGWGTQGEGPLTLF

SEQ ID NO: 254258 - protein, 133 aa, Zea mays
  Clone ID: MRT4577_163464C.1.pep
VLLALQYRGREIFGISEKANGTMIFNAFVLCQVFNEFNAREIERRNVFAGVLRNKMFLGIIAVTIAMQVLMVELLTRFAGTQRLGLAHWGVCVAIAAVSWPIGWAVKFIPVPDRPLREILATRMKTISRIITQ

SEQ ID NO: 254259 - protein, 60 aa, Zea mays
  Clone ID: MRT4577_163465C.1.pep
MASQLAAAVPRFDGLRGYSADRSPVGPQRYLLVGRMRSSSQGVLCNDTGSATALMTRIKC

SEQ ID NO: 254260 - protein, 68 aa, Zea mays
  unsure (1)..(68): unsure at all Xaa locations
  Clone ID: MRT4577_163466C.1.pep
SLLSASSTGGPGPKVLMEEGRPGTGESPRPVPDPCRTTERPRQQKSGLVLGNAAQXXGGLNSRAKGLK

SEQ ID NO: 254261 - protein, 84 aa, Zea mays
  Clone ID: MRT4577_163467C.1.pep
GAPYGDSKKAIRAASEGPPKGIMGYPEGDLVSPAFLGATGSSIFDPKAGIALNAPLVKLVLGYANEWGYSNRVVALTPPMFKPQ

SEQ ID NO: 254262 - protein, 118 aa, Zea mays
  Clone ID: MRT4577_163468C.1.pep
VTVGPILHPPKGSFLLSTLGVYPTECSCGDRQVCCFYHVHEYVANLFLTPQVSKKLVIRNFRRSWTLSHWDILLLSLAVRTLDTGALLLGLDNLCCRSVLLSRYVSTDAPTRSPSVPG

SEQ ID NO: 254263 - protein, 86 aa, Zea mays
  Clone ID: MRT4577_163469C.1.pep
YIYSMKAYHRGPVNIWSQQMQWYHPPYRVYTRAYNDLQRLPTNMQSEIAKVKNCVCLSVTRFTQYLCMSVKYGSRIIIVQPAAQAR

SEQ ID NO: 254264 - protein, 110 aa, Zea mays
  unsure (1)..(110): unsure at all Xaa locations
  Clone ID: MRT4577_16346C.1.pep
TPEXPRXPVGTPPRPQLPPXVAAAGGGGGGLEMASDDERSIAADSWSVRSEYGSTLDDDQRYADAAEVLAASASSANFPSAASDYWFTDLTGTDYSKGAVELARNLADGF

SEQ ID NO: 254265 - protein, 124 aa, Zea mays
  unsure (1)..(124): unsure at all Xaa locations
  Clone ID: MRT4577_163470C.1.pep
RSGSWWFVAXCGVAGRRVLXCWXRXAAIRAGACVAARQPGWGRAVCAGGPDGHAVCRRXGFTKQICAGPRLGPRWPRRQEKFSGVTSVLKGEERWEVVPRCVGEEASVPSVLPSPGGIPTRLLR

SEQ ID NO: 254266 - protein, 51 aa, Zea mays
  Clone ID: MRT4577_163471C.1.pep
SLEEKKTKLGLIWCIANSKGITPHGSPCPPNQSRSKNTCIHLPKIQMYTLP

SEQ ID NO: 254267 - protein, 56 aa, Zea mays
  Clone ID: MRT4577_163472C.1.pep
GVGALNTKQIQEMREFRIPPGTTHAIHDDVPENTRTLSFDQPSGPAHTRGALITQL

SEQ ID NO: 254268 - protein, 53 aa, Zea mays
  Clone ID: MRT4577_163473C.1.pep
ESCPNTMVVFVLHPETQKGNFKTTTPLGAQDNPFLRPVLHCSTISTIGCPILV

SEQ ID NO: 254269 - protein, 87 aa, Zea mays
  Clone ID: MRT4577_163474C.1.pep
SFARWRRARRRGRSRSTYRGQLVNWAHQQCIFVVGPAGPLDPTPERIRGWRTRIANRVLLFIFSTSRSTTACCRPLLQERKLRVRQS

SEQ ID NO: 254270 - protein, 124 aa, Zea mays
  Clone ID: MRT4577_163475C.1.pep
RGRPKRGGARPLRRRRRRDSEIALHAETDRLRLLAGAPELLPDLVPIGLASSLASLLTHDNVDLAAAAASLLVDLTDFEDPSDLAAVQALADALVDANPLDLLVHNLFRFFETDPDEAEAVHNT

SEQ ID NO: 254271 - protein, 162 aa, Zea mays
  unsure (1)..(162): unsure at all Xaa locations
  Clone ID: MRT4577_163476C.1.pep
MSDSEEHHXYKSKADTGAIKTYPQXGGTVRKNGFIGIKNRPCKXAEVFTSKTGKDGHAKCHFDDIXIFNGKKLEDIVTSSHNCDISDENRTEYQLIDIXSEDGFESLITSNGNTKDDLRLPTDETPVAQIKEGLESGKDLVETAQTEMGKEHNCSKKDVMPK

SEQ ID NO: 254272 - protein, 473 aa, Zea mays
  Clone ID: MRT4577_163477C.1.pep
MDAAAVHKRKRPEEADPSAGELDLSAADAVEVLDLRAAKRLLLAFERRLRDNLEARMKYPDDPARFADSEIALHAETDRLRLLAGAPELFPDLVPIGLASSLASLLTHDNVDLAAAAASLLADLTDSEDPSDLAAVQALADALVDANALDLLVHNLSRFSETDPDEAEAVHNTLAVLENLLDLRPNLADKVCGGTKLLRWLLSRVKAREFDANKQYASEILAILLQNSPANQKRLGQINGVDALLQAVAMYKSRDPKTSDEEEMLENLFDCLCCVLMPLENKERFVKAEGVELMIIIMKQKKLAYSSATRTLDFAMTKFPPACERFVDVLGLKTAFAAFMGKIPVNKKNKKESYQEELEERIISLIASLFGGITKGSRRMRLLGKFVENECEKIDRLMELYTRYSDRVKEETERLDSLDLEDLEMDDDERYNRKLEAGLYTLQSVYVSVNCAYSGTHLALWEFPDESKSRITS

SEQ ID NO: 254273 - protein, 64 aa, Zea mays
  Clone ID: MRT4577_163478C.1.pep
FSPPLGSGSSIGGPSARKGTRVRGLELVPVMEGTGRGVGHEAGRVSRRLSCLSASLAVPVTVRA

SEQ ID NO: 254274 - protein, 311 aa, Zea mays
  unsure (1)..(311): unsure at all Xaa locations
  Clone ID: MRT4577_163479C.1.pep
NPYAGFQTPGPSSLRASSPPAPAPLQRSSRSPAPSPGTSPPAPRWCVSVWTTTATPPSLLPQPPRRLWMTSWRTTSRXLDLPDPDVSGDSSSSVIFAAPDDAVXLPPTPLSPSYRSPRPPTPPPTATQTSQSWSKSTSPCLSCMQPTASARAPSASLRRSPRLLRPSSSPRPPPAAYVAPPSGARCAFGSSPXTVTTVXPPSTSRSPPTSMRAASTTGTTSCPQPDPSTTXPRPPPPVRLDHDRVDRPDETVIDPPQLFSSIILARCIIKTLALVAVWHPGGGLRVRKVYSEEYDLAYLSYGRELSDLAHI

SEQ ID NO: 254275 - protein, 82 aa, Zea mays
  unsure (1)..(82): unsure at all Xaa locations
  Clone ID: MRT4577_16347C.1.pep
QSDSINGEPGGIVVITSCNHTKDEXHEVEDFTKRKFGKENVDQGARDASEIFRYIDHVRTYPTIMFGGIEGSQVCTVAFQRV

SEQ ID NO: 254276 - protein, 72 aa, Zea mays
  Clone ID: MRT4577_163480C.1.pep
KKKKKKKKKKKKKKKKKKKILHKKKTCPWANTSLRDNFGDILHPALAGPPCFLKGPINPYRGADYITTGPTF

SEQ ID NO: 254277 - protein, 65 aa, Zea mays
  Clone ID: MRT4577_163481C.1.pep
ILWLQPHHLHKRYLLVNGSPYINPMDVCNHDDASCLCMASRGSPACISVPSSLMVRGCSPPPEIN

SEQ ID NO: 254278 - protein, 107 aa, Zea mays
  unsure (1)..(107): unsure at all Xaa locations
  Clone ID: MRT4577_163482C.1.pep
GPGLENPGPRQNKAFLVQQQVQPFIFRGVSNIVAFLGQQHWKCFYPQEGVNIYAFFLKQKKXPFSPQIVSNIVAFFQXQQQLXPLTQQAGRNPSSLFQPTTNGGAIF

SEQ ID NO: 254279 - protein, 34 aa, Zea mays
  Clone ID: MRT4577_163483C.1.pep
APCSQANPERSPFSLIEDKVGQVVFHEGFIPIQA

SEQ ID NO: 254280 - protein, 57 aa, Zea mays
  Clone ID: MRT4577_163484C.1.pep
IDNKLSTLVVQFLSADTFLICYTINKEMHNRLADRTSVSLFVLFLCTFCFPGSNILF

SEQ ID NO: 254281 - protein, 92 aa, Zea mays
  unsure (1)..(92): unsure at all Xaa locations
  Clone ID: MRT4577_163485C.1.pep
MYNFSLIAGNKGDECIIKLQHKSTGELYAKKFLEDEGPHPVETGIDSNRYFVLRVEDNIYGRMRHDCLSICSRNXSDLNDLQXVLHDHMEYL

SEQ ID NO: 254282 - protein, 45 aa, Zea mays
  unsure (1)..(45): unsure at all Xaa locations
  Clone ID: MRT4577_163486C.1.pep
MTVELLFFLCGNLIFGRHVKLNLLLDNPIVYFRSLRHXVLMYNCR

SEQ ID NO: 254283 - protein, 79 aa, Zea mays
  Clone ID: MRT4577_163487C.1.pep
IFGDTQGNYRGLKKKRGQGKTLKRGGGKKCLKKTKTPPWGWGKKTPNRGACYFRRKRGPSLALRGAEKPIFGGKQKRGR

SEQ ID NO: 254284 - protein, 160 aa, Zea mays
  Clone ID: MRT4577_163488C.1.pep
IRAESAEQRRSSARRELQRRRLGRACRGSSPMEKTEQGRRNPSAWTMEGTRGWQSRLGSEQRQGGAPCEEKSRPWQGRAREERIRARRSSRAGSKRAGELAQGDEHGIRAGPSGRAPAAREERPTEEHGACTEHREMGPERAGWRGRGPPPGSRAHRKKL

SEQ ID NO: 254285 - protein, 89 aa, Zea mays
  Clone ID: MRT4577_163489C.1.pep
VKFDHLFLNLTSVNQLGPVYPEKKKPPFDKKAQLSLKLHLMFRRSFLAFSPCFAQNQSFSKKKKKKKKKKKKKKKKKGGRRLVSSSTRE

SEQ ID NO: 254286 - protein, 352 aa, Zea mays
  unsure (1)..(352): unsure at all Xaa locations
  Clone ID: MRT4577_16348C.1.pep
MAGIRLTPEEPEXPLARHPAPSSHPSSPRQAVAAEVXEMASDDERSIAADSWSVRSEYGSTLDDDQRYADAAEVLAASASSANFPSAASDYCSDKDDQDPGDVEGSMLGLQSYWDASYLEDLANFQEHGHTGEIWFGADVMDTVAVWTKSLCNIIEGKIPSGQDNIKSEVNENLFSNYPVLDVGTGNGLLLQALAKQGFTDLTGTDYSKGAVELARNLAARDGFSSINFLVDDVLETKLDRKFKIITDKGTLDAIGLHPDGRAKRMVYWESVSNLVEPGGIVVITSCNHTKDELLHEVEDFTKRKFGKENVDEGARDASEIFRYIDHVRTYPTIMFGGIEGSQVCTVAFQRV

SEQ ID NO: 254287 - protein, 51 aa, Zea mays
  Clone ID: MRT4577_163490C.1.pep
HAGRARPKGVSFALRLFWSVDRHRAYRSLFLGLARIFIQGLGFGFSVIYSI

SEQ ID NO: 254288 - protein, 100 aa, Zea mays
  Clone ID: MRT4577_163491C.1.pep
RPDRPVLGGSQCYQRPQGGPLASHACSARAEIFLSQGCGLHPVFPQGCGDLEGPQNRITPPHRGNMAPQVPALTPPGGVASKKPPPPRGCGQGKKKKTFL

SEQ ID NO: 254289 - protein, 78 aa, Zea mays
  Clone ID: MRT4577_163492C.1.pep
LWRSQAHISCVMPICNKIKAVCHMREVSWLLFKIPRSRDGSGVTCRTEINLLTVTPMVGNEKILYMNQSVSERQSTDC

SEQ ID NO: 254290 - protein, 173 aa, Zea mays
  Clone ID: MRT4577_163493C.1.pep
MSDSKASNPMRELRIQKLVLNISVGESGDRLTRAAKVLEQLSGQTPVYSKARYTVRTFGIRRNEKIAVHVTVRGPKAEEILERGLKVKEYELRKRNFSESGNFGFGISEHIDLGIKYDPSIGIYGMDFYVCMTRPGERVAKRRRCKSKIGPSHRVNQAETIKWYKNRFEGIVR

SEQ ID NO: 254291 - protein, 76 aa, Zea mays
  Clone ID: MRT4577_163494C.1.pep
MATETETFAFQAEINQLLSLIINTFYSNKEIFLRELISNSSDALDKIRFESLTDKKKGSNGASPGGFPSSHIIPPT

SEQ ID NO: 254292 - protein, 87 aa, Zea mays
  Clone ID: MRT4577_163495C.1.pep
PSALSGSVLCASSDRHTLFTRQGRHPQWPLTYSAMPCGPEAQVSLYSSPHRRVWNSPYVGFRARPLTELSVTLVLFGQGNGSKVRVV

SEQ ID NO: 254293 - protein, 189 aa, Zea mays
  Clone ID: MRT4577_163496C.1.pep
PRVRTDPSSSPSPAFFSHPSPWPWRYASRRCPAQRPARAAAGAACPAWRPAAPASRRAPRPAVRPSAPSPGAPTWQSRRGPASGQEPPCSARCCGQRAAAEAASPQRPVRAAVGGSRRAAGAPSAACGQPGSPACAASSRARPLAMDALPCARSAVAWPPRRARRGGRSAWRRASYAARPRAEDGRRCQ

SEQ ID NO: 254294 - protein, 111 aa, Zea mays
  Clone ID: MRT4577_163497C.1.pep
MENLKEQRGHDAAGANAWMTVPAFGDWDTKNGALPDYSMDFSKIREMRKQNKKELSRASLGGDDDLLAHAQKPQPSIAPPKLGRPRPGPADDHSPTGGKKFLSYFRCCIKA

SEQ ID NO: 254295 - protein, 127 aa, Zea mays
  Clone ID: MRT4577_163498C.1.pep
AITYLHTPQNHPRRVKTRAFKLFDVSLRRLLLPSVPAACASPHCDGNHDAPSRTGEQISPDRVQQVQGEILPVAPPIAHGTCTFHLAVPPLHVLLQALRTRAPSADRRTLLLSLSNTCLPSPSGCHC

SEQ ID NO: 254296 - protein, 114 aa, Zea mays
  Clone ID: MRT4577_163499C.1.pep
MENLKERGHDAAGANAWMTVPAFGDWDTKNGALPDYSMDFSKIREMRKQNKKELSRASLGGDDDLLAHAQAQALKLAATKAPPKLGRPRPGPGDDHFPTGGKKFLSYFRCCIKA

SEQ ID NO: 254297 - protein, 58 aa, Zea mays
  Clone ID: MRT4577_16349C.1.pep
ATRRESAGAYTGRTWHGGVQCRRVSHGMDDSKDQLLYGAKTSLQLHWIKRPNANGMRN

SEQ ID NO: 254298 - protein, 218 aa, Zea mays
  unsure (1)..(218): unsure at all Xaa locations
  Clone ID: MRT4577_1634C.1.pep
MEEDVGNIEARANHTLRQKKPSFDLQDLLTASDSPSWPDSNLRVNFQMGDEREAIGGDWIDKVVVNNNXQPVIGRVTTQLYLTFFTRDXSGMREKQYQRNNMRQKDDHEYEQQRPRFYSTNTDDSDDIDIATSDSSESDALWQLNVQSMNNSISESGSKVKKPQIKLRDGSDARTPIHSQIPSGSRKVANGSSRSVRQPLSRSDSRRLSSNGRQTGGK

SEQ ID NO: 254299 - protein, 104 aa, Zea mays
  Clone ID: MRT4577_163500C.1.pep
DHPAELYDQARENFFAAVGQTEGVSGGKPVWVTETGWPRIGPNSGAAVASLENSKRYWDEVGCSLFGTRNTFWYTLKDANAAQTDLSFAITPKENNTPFFDLTC

SEQ ID NO: 254300 - protein, 115 aa, Zea mays
  Clone ID: MRT4577_163501C.1.pep
MENLKEQRGHDAAGANAWMTVPAFGDWDTKNGALPDYSMDFSKIREMRKQNKKELSRASLGGDDDLLAHAQAQALKPQASNAPPKLGRPRPGPADDHSPTGGKKFLSYFRCCIKA

SEQ ID NO: 254301 - protein, 121 aa, Zea mays
  Clone ID: MRT4577_163502C.1.pep
MENLKEQRGHDAAGANAWMTVPAFGDWDTKNGALPDYSMDFSKIREMRKQNKKELSRASLGGDDDLLAHAHAHAQKPQPSIAPPKLGRPCPAADRRPLHARDHSPTGGKKFLSYFQCCIKA

SEQ ID NO: 254302 - protein, 279 aa, Zea mays
  unsure (1)..(279): unsure at all Xaa locations
  Clone ID: MRT4577_163503C.1.pep
MATPAAEKPEDVEIREVWADNLETEFAVIRDIVDDYPYVAMDTEFPGVVCRPLGTYKSAAEFNYATLKANVDMLKLIQLGLTLSDEHGGLPCXGPDGRPCVWQFNFRGFDPRTDVAAADSIDLLRRSGIDFSRHAADGVDSRCFAELLMSSGVVLNSDVHWVTFHSGYDFGYLLKLLTGTNLPDTLPGFFDLIKIYFPVIYDIKHLMRFSNSLHGGLNKLAELLDVARVGICHQAGSDSLLTALSFKKLKEAYFNGLTEKYAGVLYGLGFEGVETTSAH

SEQ ID NO: 254303 - protein, 76 aa, Zea mays
  Clone ID: MRT4577_163504C.1.pep
ILLRNPRRMFLSTVYISCNCLQRIPGYIKIEGRTATFRIRGHGNYQLQWFRDSAFGLSTFPGLTQCLCEAEVSVLD

SEQ ID NO: 254304 - protein, 111 aa, Zea mays
  Clone ID: MRT4577_163505C.1.pep
MQQRGHDAAGANAWMTVPAFGDWDTKNGALPDYSMDFSKIREMRKQNKKELSRASLGGDDDLLAHAQAQALKPQASNAPPKLGRPRPGPADDHSPTGGKKFLSYFRCCIKA

SEQ ID NO: 254305 - protein, 88 aa, Zea mays
  unsure (1)..(88): unsure at all Xaa locations
  Clone ID: MRT4577_163506C.1.pep
PVTKLPGATCDRCGVAAGVRARAPAQTIRAYTMELEAEVQKLKEQNEELQKKQEEIMXRCXKNQVLXVISNPYARKKRCLRRTLTGPW

SEQ ID NO: 254306 - protein, 47 aa, Zea mays
  Clone ID: MRT4577_163507C.1.pep
MFSDAFRNLKQRPSVLTWGKKKSGSGSILRTQKGVLCNGDHLSVGCF

SEQ ID NO: 254307 - protein, 77 aa, Zea mays
  Clone ID: MRT4577_163508C.1.pep
AFQYFDKDNSGYITKEELEHALKEQGLYDADKIKDIISDADSDNDGRIDYSEFVAMMRKGTAGAEPMNIKKRRDIVL

SEQ ID NO: 254308 - protein, 95 aa, Zea mays
  unsure (1)..(95): unsure at all Xaa locations
  Clone ID: MRT4577_163509C.1.pep
TRTRAVDLREIRRCQSSTELRTRNLPIRXLETEIALNCQTDLRFQYSTDCVLYEAVXAYLVGLFDDTNLCAIHSKRVTIMPTDIQLARRINGDKA

SEQ ID NO: 254309 - protein, 67 aa, Zea mays
  Clone ID: MRT4577_16350C.1.pep
PIDHVLQWSLSDNSSERFKWIIKGFTLMSLLHMYLNITPFRLRVVRGLTNSSTGSFKRIHFQNVLVV

SEQ ID NO: 254310 - protein, 49 aa, Zea mays
  unsure (1)..(49): unsure at all Xaa locations
  Clone ID: MRT4577_163510C.1.pep
RTRGRTRGRTRXEKKKKKKKKKKKKKKKKKKKKKKKKKKKKKKIRGGQV

SEQ ID NO: 254311 - protein, 71 aa, Zea mays
  Clone ID: MRT4577_163511C.1.pep
GQQNVLVLPALCKELNDFTICGASKFGLRALMKIPSFKSLNVEMMIEYIGGHWALTFAIYIGVAHSCMQSL

SEQ ID NO: 254312 - protein, 52 aa, Zea mays
  Clone ID: MRT4577_163512C.1.pep
ILYIFVAICWLLPNFLSQNKSVSLGCEFDLYVLLINICRRLLDAARKFFSWP

SEQ ID NO: 254313 - protein, 228 aa, Zea mays
  Clone ID: MRT4577_163513C.1.pep
MACCFVRVAAAPRLLIYRAAAPRQLPSPLNVFRKGFSEQSVLPVTDSIECFQGPSVPNTPRIPLYDDSVSSSILDTLSNPTGGVPHADPSKSRIMLVDGTSMMYRSYYKILAQLQHGQLEHADGNGDWVLTIFKALSLLLDMLEFIPSHAAVVFDHDGVPYGHYTAMPSKECHMAKGMTFRHMLYPAYKSNRTPTPDTVVQGMQYLKASIKAMSIKVIEVPGVEADDV

SEQ ID NO: 254314 - protein, 167 aa, Zea mays
  Clone ID: MRT4577_163514C.1.pep
MAQVSSTTALACFNHDGNQRSRFPLSLSVSFCWDSGVDARTWHHGAEIGVLGICGQGMVNGGRVRHARRPLEGLPGRAGSGERDLRGEDKSVGKDPRVSARDGRQTHGPSVPESSPSARDIPMADKPAPKIRCTGAVAVAHDYVIHSSTVVSVGTSADGEASLAYRS

SEQ ID NO: 254315 - protein, 198 aa, Zea mays
  unsure (1)..(198): unsure at all Xaa locations
  Clone ID: MRT4577_163515C.1.pep
MASANNDNREAAGILRLLMGMAAAAPASALPRGGGGGGGGGLMVVQHVILDVDGELFSGGVGGGGVPPASKAAIAALKEVKAGEGEGEGEDALGECAICLDAVEGTGKEMPCGHRFHGRCLERWLGVHGNCPVCRRELPAPAKEEEEDSAASAEGGEEERRRPRAAVVVSYLVFGGXGGGAAGXEREEPWNIRIEDVD

SEQ ID NO: 254316 - protein, 191 aa, Zea mays
  unsure (1)..(191): unsure at all Xaa locations
  Clone ID: MRT4577_163516C.1.pep
MASANNDDREAAGILRLLMGMAAAAAPASALPRGGGLMMVQHVILDVNGELFSGGVGGGGVPPASKAAIAALKEVKAGEGEDALGECAICLDAVEGTGKEMPCGHCFHGRCLERWLGVHGNCPVCRRELPAPAKEEEEEDSAASAEGGEEERRRPRAAVVVSYLVFXGGRAGGXRSPEXEEPWNIRIEDVD

SEQ ID NO: 254317 - protein, 50 aa, Zea mays
  Clone ID: MRT4577_163517C.1.pep
TISLCPVCVQAICSPFHECINSTPCPQIFLMNSCIRNVRGVSIKSDSVHF

SEQ ID NO: 254318 - protein, 43 aa, Zea mays
  Clone ID: MRT4577_163518C.1.pep
VHSMVLVTNTLFDYQKSGNLHINCRKRWLLNAIETRQNIRSRV

SEQ ID NO: 254319 - protein, 80 aa, Zea mays
  Clone ID: MRT4577_163519C.1.pep
FLIITRRLNLAPGKPIFLIGGFQTRFGDRWRVNFPGKDQPNRMIWNPPCPMNPPFFPGAPNPVPAGKRAGFPGPTLQNPF

SEQ ID NO: 254320 - protein, 103 aa, Zea mays
  unsure (1)..(103): unsure at all Xaa locations
  Clone ID: MRT4577_16351C.1.pep
DMTRCMTDEESGQQSLGCLNPMLVKRFTEFPPRSSLDPSMYVYNTTTIMHADLENKLDDLTVHQALYGNLLYILYHNYNFMPILFRVNILXDNFIYSTSTVLF

SEQ ID NO: 254321 - protein, 65 aa, Zea mays
  Clone ID: MRT4577_163520C.1.pep
RVFFFFNFSLPAPRGKPENPDRDHGGYQFSQKRGLKKLGGTTDTPAPGGKMVTDEKSTNKHKRKH

SEQ ID NO: 254322 - protein, 147 aa, Zea mays
  unsure (1)..(147): unsure at all Xaa locations
  Clone ID: MRT4577_163521C.1.pep
MALKRINKELTDLGRDPPSSCSAGPVGEDLFHWQATIMGPSDSPYSGGVFFLAIHFPTDYPXKPPKVNFTTRIYHPNINSNGSICLDILRDQWSPALTISKVLLSICSMLTDPNPDDPLVPEIAHVYKTDRPRYEATAREWTRKYAI

SEQ ID NO: 254323 - protein, 132 aa, Zea mays
  Clone ID: MRT4577_163522C.1.pep
AREQVLAHGMGTTARRAETRRQLTARRGHGALGGVTVRARGGSSAMAAWEWLRAGETAEQAERSRRRVALQQARMPTASTRRNLRTRDEAVQNVESRVGRRLNQCRSCAKGSFGSVAEKGTDLRRKRLFSPQ

SEQ ID NO: 254324 - protein, 59 aa, Zea mays
  Clone ID: MRT4577_163523C.1.pep
MAVAGVAPSGYKNSTSTSIGAAKLHDHMNELQIRDDNEVAATIMNGRGTEAGHILMHHY

SEQ ID NO: 254325 - protein, 70 aa, Zea mays
  unsure (1)..(70): unsure at all Xaa locations
  Clone ID: MRT4577_163524C.1.pep
ALPVQPHLCEALSHHWKPPQSVFAKANGMYLHLMNIQXXPCLMLSNYRYQVDYKSTTTTLHNRDGTITLK

SEQ ID NO: 254326 - protein, 338 aa, Zea mays
  Clone ID: MRT4577_163525C.1.pep
MDRLEMQDDSKRSNRPKYSKFTQQELPACKPLLTPAIVISAFLLVGILFVPIGLASLSASQEIVELVDRYDTSCVTVADKVGFIQNTKTDKSCTRTLTIPKHMKSPIQIYYQIGDFYQNHRRYVKSRSDKQLRYKDAAHLTKDCEPEVYSAGGAPIVPCGLVAWSLFNDTYTISVNKKAIVVNKKDIAWQSDKKKKFGSDVYPSNFQNGNLIGGARLNESIPLSEQEDLIVWMRTAALPTFRKLYGRIETDIMENDELTVVIQNNYNTYSFGGSKALVLSTTSWIGGKNNFIGFAYLIVGGFCLFLALVFVVLYMIKPRTLGDPSFLSWNRGTMDYPS

SEQ ID NO: 254327 - protein, 94 aa, Zea mays
  Clone ID: MRT4577_163526C.1.pep
LGVPSRQVAVGSLVVPVFPRAGVRCFCSSLFSFVPAWCFALPFWSSFFLLAPLVCMVSAFSSPRGPFSRAWCCAPPSSYNPPSACFRGLVFIRG

SEQ ID NO: 254328 - protein, 62 aa, Zea mays
  Clone ID: MRT4577_163527C.1.pep
EPPGLHIFSPGQIFFWIFKRKKFYPRKKHCNFYPQLLKHPKKKKLEALQGPGRKYRGDPRGP

SEQ ID NO: 254329 - protein, 175 aa, Zea mays
  Clone ID: MRT4577_163528C.1.pep
MLMDRLEMQDDSKRSNRPKYSKFTQQELPACKPLLTPAIVISAFLLVGILFVPIGLASLSASQEIVELVDRYDTSCVTVADKVGFIQNTKTDKSCTRTLTIPKHMKSPIQIYYQIGDFYQNHRRYVKSHSDKQLRYKDAAHLTKDCEPEVYSAGGAPIAPCGLHAWSLFHDTYTI

SEQ ID NO: 254330 - protein, 87 aa, Zea mays
  Clone ID: MRT4577_163529C.1.pep
FVGGREQPLPKINFKKVFFLENDVFLNLRWGNIPMAPSIFFYFLHCRIGVGPRGFSIYIYIYIYIYIYTPPPPLLIFKDYIKISAFS

SEQ ID NO: 254331 - protein, 79 aa, Zea mays
  Clone ID: MRT4577_16352C.1.pep
KGNPGFFFCNSDFFLQNCLSIATVNFVNLSSGSHLMYECLISVFFPNSKHASPYVCFCLKKKNKSEGSRCREFKLACAC

SEQ ID NO: 254332 - protein, 69 aa, Zea mays
  unsure (1)..(69): unsure at all Xaa locations
  Clone ID: MRT4577_163530C.1.pep
SFGGSKALVLSXTSWIGGKNNFIGFAYLIVGGFCLFLALVFVVLYMIKPRTLGDTSFLSWNRGTMDYPS

SEQ ID NO: 254333 - protein, 79 aa, Zea mays
  unsure (1)..(79): unsure at all Xaa locations
  Clone ID: MRT4577_163531C.1.pep
ASIQSTFNLYKSTLMLXVQDIXTXYYSKSHDSFHIHKLLQQPQPNKHHHHHHHVPFKYFSHNTPIPSTNSSTNSSFSPY

SEQ ID NO: 254334 - protein, 109 aa, Zea mays
  Clone ID: MRT4577_163532C.1.pep
MSSNAGASVAPIGGGAARARSRSFGSSSSNGRAADGNGAGVFVRAGADNEMYVRADKIDLKNLDVQLEKSRSQVWLEHQRSQRTASPRPETPLLEWEIDLAKLDIQNQI

SEQ ID NO: 254335 - protein, 66 aa, Zea mays
  Clone ID: MRT4577_163533C.1.pep
LRRFRGPRNGGEGRRLFIQICRETRTKPLRWMSMHKDWADRMAPMAFPKSRSVPSWSGAGGAWPGR

SEQ ID NO: 254336 - protein, 78 aa, Zea mays
  Clone ID: MRT4577_163534C.1.pep
PKGFPLEKRPMSPTPLIWVSSPLRPPRFFTLCFRVLFCGEILTKNIFPKEKLFSHFFPKLGPKLGSPKNAPQFFEISP

SEQ ID NO: 254337 - protein, 66 aa, Zea mays
  Clone ID: MRT4577_163535C.1.pep
SLDSLLRSPSLNIYLKETKPTARLYKELWGLLHSQNYSIVDRTKKGSCSILHRQDQLYTNFNSKET

SEQ ID NO: 254338 - protein, 69 aa, Zea mays
  unsure (1)..(69): unsure at all Xaa locations
  Clone ID: MRT4577_163536C.1.pep
FIGRLSITTDHHXLYNSLSNYRYVLYSNIILDQXTQSPLRSRFLTFSTDEAILNAIHGMNSKALDCRNI

SEQ ID NO: 254339 - protein, 207 aa, Zea mays
  Clone ID: MRT4577_163537C.1.pep
MGEAMKGVTKAMSQYPEDHCSLTPPPWSFLSSLPLRRDRPQEHETLALAQPIFSMANSNLPRRIIKETQRLLSEPAPGISASPSEENMRYFNVMILGPTQSPYEGGVFKLELFLPEEYPMAPPKVRFLTKIYHPNIDKLGRICLDILKDKWSPALQIRTVLLSIQALLSAPNPDDPLADNVAKHWKANETEAVETAKEWTRVYANDA

SEQ ID NO: 254340 - protein, 167 aa, Zea mays
  unsure (1)..(167): unsure at all Xaa locations
  Clone ID: MRT4577_163538C.1.pep
LQISCNISSQHTNLYAIADKSLNYNGKLTRSITAKEPNEPACLITPDRGRSSSLDDTIKVKACDRKKDAANYNEKTRDFHFHLAEHIKELVKPVWKXGNLSKDAHRLVVRKSVEKVMGSIEPNQVPTTEELITKYIATCGPKIEKLVKAYVDRHNIACHPTFKYSST

SEQ ID NO: 254341 - protein, 120 aa, Zea mays
  Clone ID: MRT4577_163539C.1.pep
SGNDARRTALYNRVLSVLSNGINIGDKHFEFLAFSSSQLRDNSAWMFASRQGLTASDIRKWMGDFRDIRNVAKYAARLGQSFSSSTETLKVHKSEVERIPDITNGTKYIFSDGVGKISAN

SEQ ID NO: 254342 - protein, 104 aa, Zea mays
  unsure (1)..(104): unsure at all Xaa locations
  Clone ID: MRT4577_16353C.1.pep
MNADSAASEEMGIDLVGGGRNTRTKRTAPKCDDVYVKLVAKLYRLLVRRSKTNWNAVILKRLLMSNTNTSPMSMRXLVKLMEXDXDKNIGVIVGTVTDDRRIQE

SEQ ID NO: 254343 - protein, 34 aa, Zea mays
  Clone ID: MRT4577_163540C.1.pep
TTADKNIQISPTFHLSNLVTFEPKPFFIVRKPFK

SEQ ID NO: 254344 - protein, 56 aa, Zea mays
  Clone ID: MRT4577_163541C.1.pep
PLSPLFLWSWGMTFFRSSPGFSLSEAPPRGSSTSRTSKPPPETFFLHWGSLLVLQN

SEQ ID NO: 254345 - protein, 184 aa, Zea mays
  Clone ID: MRT4577_163542C.1.pep
MGALCLLYPSTPPRCPCGARADATAAFAPSPFLSSCAATGAQTRLQLCGRSQRRGGVARVGGGGGGGKGESGKNGAAAFFDEDGVVDDMDGYLNYLSLEYDSVWDTKPAWCQPWTILLTGTGAVACSWVLIQSVVITAGVSFVISAWWYIFLYSYPKAYTEMIAERRRNVASGAEDTYGMEKIQ

SEQ ID NO: 254346 - protein, 81 aa, Zea mays
  Clone ID: MRT4577_163543C.1.pep
PLTFSIIIIFFHLRFHHHLDPFSYKFNLISISDIKLHQIHYATPLIRRPSTLSTTVTLYPLFSPTYPLTYHKDIIVYTLFY

SEQ ID NO: 254347 - protein, 127 aa, Zea mays
  Clone ID: MRT4577_163544C.1.pep
MGALCLLYPSTPPRCPCGARADATAAFAPSPFLSSCAATGAQTRLQLCGRSQRRGGVARVGGGGGGGKGESGKNGAAAFFDEDGVVDDMDGYLNYLSLEYDSVWDTKPAWCVPWTIPLPVVGSCSTL

SEQ ID NO: 254348 - protein, 37 aa, Zea mays
  Clone ID: MRT4577_163545C.1.pep
PQFLSLNLGGHHRVFLHAFADLWTRNGLFCPPFPCQF

SEQ ID NO: 254349 - protein, 78 aa, Zea mays
  unsure (1)..(78): unsure at all Xaa locations
  Clone ID: MRT4577_163546C.1.pep
ITTAYYRGAMGILLVYDDTVXASLNNIRNWIRNIEQHASDNVYKILVGNKADMDESKRAVPTSKGQALADEYGIKFFE

SEQ ID NO: 254350 - protein, 46 aa, Zea mays
  Clone ID: MRT4577_163547C.1.pep
KIKLKKIKKNNLWGSPFNNPTYLPLHSNFYNFFLVLQKNINLPFFL

SEQ ID NO: 254351 - protein, 134 aa, Zea mays
  Clone ID: MRT4577_163548C.1.pep
ARNSARAASKVVELIYSVGWPNPEAALDRVERVVKVHSMERRVDRFKEYMEEVKGRAARLPNKHPRCVADGNELLQFHGTTVSCSLGSGGSHSVCTSSLCNVCRIIRHGFSATRKSRNSGGGVFTTFTSRHALE

SEQ ID NO: 254352 - protein, 74 aa, Zea mays
  Clone ID: MRT4577_163549C.1.pep
VAQPERSLMRILDQQSSEHVEESVIGAMRRSGYIMGRLVGFCSSLWCFWWRVRLERLYPAPWMFAGAEETERPV

SEQ ID NO: 254353 - protein, 98 aa, Zea mays
  Clone ID: MRT4577_16354C.1.pep
DSKGPPSCPRRCGSPPLSLIPLFGFWGPPRSRDLPVARFCAGTNFSVNFVAQILGGFRFDPFFEIGGGTVCLCSIFFLSTFGIHVACCFYVKKENVSQ

SEQ ID NO: 254354 - protein, 142 aa, Zea mays
  Clone ID: MRT4577_163550C.1.pep
FLLDMLQHLEFGRIWCNLISLLFCTSSTRILVNGEPGEYILHHRGLRQGDPLSPMLFILVMEALNAMVSYAFREHILQPIANQHAKHCISFYADDVVLFMRPSHQDISTMIGILDIFGHSTGLKTNISKSSVTPIQCGANEL

SEQ ID NO: 254355 - protein, 196 aa, Zea mays
  Clone ID: MRT4577_163551C.1.pep
MASISSLAALSLLLLVSVGLSDAIRVARYSSSQGAGQGGGNGGADQNGSGSGVGLGSGSGESGADGVYVSAGGGGEGGGWSQYGGTAFGGGSGTGSSSSQYSSGSSFGNGGSTLAGGIGGGGGGGQGSENQGSGGYGTGGGTGSGSSEASSGDPPSATPPYASADASGNGGGMGGGRDGGTGGGKGHGSGFGEGQP

SEQ ID NO: 254356 - protein, 543 aa, Zea mays
  unsure (1)..(543): unsure at all Xaa locations
  Clone ID: MRT4577_163552C.1.pep
MEYERIHQKAQPGALSPTKLRMKILGAHNRVRVITSNSSSRTSPAKTIEASQAQNRLLVCDVLEEVSDSADSTKHPSATNKTEAVEKVQKDXQQWTSVKCRTLPPVRLLSQRXGSSSMIQIHPVRPAEEDSTTECDSGLDNASTSSFEFHGVEKATAATQNPAAGYLSRQTSISSKWNDAEKWIVSRQNVSQKNNXQGRVAEPDSKPDELRRSQGRRCAQNLCSSRAENEESESSFVCSAQHXRGCPSLRISLSWLGMXDVCPVSNAGANSEHHKATDTGSSIEVKPCNDTNDIPTVQSSVSVRDVGTEMTPIPSQEPSRTGTPLGSRTPTRSPNCSVPSTPVGGRSIASPPGEDCTDDGPFFHRKCGVHANELSDTETRLKTRQEIAALGIQLGKMNIATWASKEELELVSAAPSIADLERIRKEYAARAASYEEAENTKHTARFKKEEVKIEAWEGRQRAKIEYEMRRIEEFAERMRSEAMEKMAEKLEMTRRIAEEKRASANAKMNQQAAIAVQKAEKIRQTGRVPGSSILRCGGCFCGP

SEQ ID NO: 254357 - protein, 123 aa, Zea mays
  unsure (1)..(123): unsure at all Xaa locations
  Clone ID: MRT4577_163553C.1.pep
LNKNFFHTSHVLNLGRADNASLRPQLHYFSCNYLXIHESYLVNLVNVLRXFFSHSPXEAYQSRTKALSLIQWQQQSDVPTIAQIXQYHSYHRIINSTASKYNIDLLFSNDXLYLQCAYKTFPN

SEQ ID NO: 254358 - protein, 73 aa, Zea mays
  Clone ID: MRT4577_163554C.1.pep
RTRGKKKKKKKKKKKKKKKKKKKKKKKKKKKKKKKKKKKKKKKKKGGGRFKESKFTSRCLQRNNFFLGPPKLN

SEQ ID NO: 254359 - protein, 82 aa, Zea mays
  Clone ID: MRT4577_163555C.1.pep
GREIIYRAKQLRYDLLSPTTQGFIEQIGKVYDSHNELYNTEHTIYEYERELYYFPQDIIVDCLSVLVPQKTKRINDYKNNIK

SEQ ID NO: 254360 - protein, 50 aa, Zea mays
  Clone ID: MRT4577_163556C.1.pep
LLPLPAGQQHTVTSPQSLKRGGPKSEGCEVNGVFQLGKFAVRPPFKFRPP

SEQ ID NO: 254361 - protein, 128 aa, Zea mays
  Clone ID: MRT4577_163557C.1.pep
DHNLKHALYTLMVTLTIRQQGRNTFSPSQTLQRTNRTLEKDDLDEILAPVVIMGKGIRLDDTDGSARIRESSNRLPPLRAPAGRRKNPLTALPARDERRGGKNFGGTTESPAGSRERRNSEAAWPPRP

SEQ ID NO: 254362 - protein, 114 aa, Zea mays
  Clone ID: MRT4577_163558C.1.pep
GSHFLPSSYLFSPKDKSDVMVSTTCWCIMLASLLAMACAFGPLQVLKMYGIPYLAFVMWLDLETYLHHHGHHQLSLPWYHGQEWSYLRSGLTTADRDYSWINNVHHDIRTHVIH

SEQ ID NO: 254363 - protein, 80 aa, Zea mays
  Clone ID: MRT4577_163559C.1.pep
CDRSCPVESRAAAWCRACRARAGLKRPSVSLQRVWRTGGSIGLEGEGRACSIGACLEFVGVSPRPRSKGPVRAHVLDNIE

SEQ ID NO: 254364 - protein, 61 aa, Zea mays
  unsure (1)..(61): unsure at all Xaa locations
  Clone ID: MRT4577_16355C.1.pep
MDTHIAPANGAASNQTAGCPAXAPVCPMAFTPAHSAETLLSGEAXLGRHLLRRLMHLCIND

SEQ ID NO: 254365 - protein, 134 aa, Zea mays
  unsure (1)..(134): unsure at all Xaa locations
  Clone ID: MRT4577_163560C.1.pep
PGPGKXXKKKKKKKKKKKKKKKKKKKKKKKKKKKKKKKKRRGRGGGPRGPLFPLIPGGKLKGDRGERVGGAIAWIRGDPRYIKIYKFKDFNLGPNMAIGPFFFFGLAFPPLWVISKWKGGERGKTICLDMATGN

SEQ ID NO: 254366 - protein, 50 aa, Zea mays
  Clone ID: MRT4577_163561C.1.pep
DAWDQQKGDIEVFHVSTENQLADIFTKPLDEKTFCRLRSELNVLDSRNLD

SEQ ID NO: 254367 - protein, 161 aa, Zea mays
  Clone ID: MRT4577_163562C.1.pep
EQSGKAILAFCRVAHRTVRCTPYTVRCPISFLNYRSRPLADPGAVGAPDMSGAHRTVRCPLPTVGSATCPAQIARPTVGPGRPLAHRIVRCTPDSPVNFSRTPSANSRERPLRPRQPGAPDTVRCTTGHCPVHHRTVRCPRPKQPVGCTQPTFFSSPSSCF

SEQ ID NO: 254368 - protein, 89 aa, Zea mays
  Clone ID: MRT4577_163563C.1.pep
LISPYTCASLCNGFVRSTECLYNLSTTISNKMQNEHDQRHKHMYATIQSKFRESKTFSSLRIYMCVNMFVWIRVREGEESEVEKNPDVS

SEQ ID NO: 254369 - protein, 61 aa, Zea mays
  Clone ID: MRT4577_163564C.1.pep
FFFFFFFFFFFFFFFFFFFFFFFFFWPKNGFRENLLLGPPFSGAPRKPNRRTTKLKRGKQS

SEQ ID NO: 254370 - protein, 92 aa, Zea mays
  Clone ID: MRT4577_163565C.1.pep
PVVRPRPTLAYSTLWRPNGRGLQSTPLKRSKDQLEYHGVALLFLIPFARNLHSLEPLALTKDVHKESRSKGGISNSHTTQRSQRIRTHKTQT

SEQ ID NO: 254371 - protein, 112 aa, Zea mays
  Clone ID: MRT4577_163566C.1.pep
MNTRPVVLVFLLLVLVITSQFEWKQQIGEAADADPAAARRRQQLHAREDAVKEKIILSQEKNIQQLNQLIESLQRQLLHCRGSNNTVHAAAAVATEASEVEGHEVIEDENRR

SEQ ID NO: 254372 - protein, 77 aa, Zea mays
  Clone ID: MRT4577_163567C.1.pep
GQMESPAAASWPFFSITTTQPVFGRTLYHFFCRLIKQASTGGPGGPTQGAVTRPRARVHFHPFFTGRVNGRDCMHAG

SEQ ID NO: 254373 - protein, 99 aa, Zea mays
  unsure (1)..(99): unsure at all Xaa locations
  Clone ID: MRT4577_163568C.1.pep
TESPKDXSCIGASFALSFCATRSPVRLRSTFLVPVLPAYHIQYSCDHSSHISHDRAHCLAWLPVPALRRTVLLLLCPPLRQMPVHATNLSSFHCFSLPA

SEQ ID NO: 254374 - protein, 34 aa, Zea mays
  Clone ID: MRT4577_163569C.1.pep
LLSVEERLNGLLSSPWQNPQYSICWRNAVLKASD

SEQ ID NO: 254375 - protein, 219 aa, Zea mays
  unsure (1)..(219): unsure at all Xaa locations
  Clone ID: MRT4577_16356C.1.pep
MSISRDSMHXRRATAGKQNAWRKXKRKYDVATQPANTKLTSNTTVRHXRARGGNVQWRALLLDTGNYSWAIEAVTRKTRILHVGYNESDNDLVRTXTLVKSVIEQAXVCRISXWNLTHYGAAHCEYRRIPLSALNDNGDVQDXIXACCRRQDNSSHVTRNLDKRQEGRTLDAHIEEQFARGRMLACISSRPEQCVRSDGYILEGPELEFYLIKLPIEEG

SEQ ID NO: 254376 - protein, 57 aa, Zea mays
  Clone ID: MRT4577_163570C.1.pep
YITTLFMVQACGYTTENTHCEHITTTILGGKIILLKSTQYTLPLVRLPRQPANITLQ

SEQ ID NO: 254377 - protein, 76 aa, Zea mays
  Clone ID: MRT4577_163571C.1.pep
LQDWLFLNESTQGNNSFPKKNLQKQACSLLEGWDGGGHNGDRFHVEYKWTGAKKDSPFLPRIVDHLLPAIWSTAAH

SEQ ID NO: 254378 - protein, 99 aa, Zea mays
  Clone ID: MRT4577_163572C.1.pep
GGTFSLKRGRGGLPKTPKSPKRTLGNQKKTGGGARGKKKPKFFAPGGEPKGGVYPPKGLRGGRVPPSRGIKGGGPPGGGGGGPKTRPLFPKVGVPGRGG

SEQ ID NO: 254379 - protein, 134 aa, Zea mays
  unsure (1)..(134): unsure at all Xaa locations
  Clone ID: MRT4577_163573C.1.pep
DQTILITDCVGTAIATMTTILNGHPKKRGHXLLASELLSSILSLLLWLQFLRLYSTAFLSKYLPGVYFVLLIFLGYMVYATYDVIHRAHHRDMDYIKHPLTLFTDFVTDLVLILLIMLNNSADKSEDKRRKRRR

SEQ ID NO: 254380 - protein, 78 aa, Zea mays
  Clone ID: MRT4577_163574C.1.pep
RSNSWRVPKPIQSETLLKRLIEQEHFSSVHQSLNVLSLPSIVYGLRHVLLSIFLVDTLPLIRTSGIIQGSWYGAYIGW

SEQ ID NO: 254381 - protein, 56 aa, Zea mays
  unsure (1)..(56): unsure at all Xaa locations
  Clone ID: MRT4577_163575C.1.pep
XRLKQNLEIFDWELTEEDRLKISQIPQRKVVQATSLFSEEGEFTSVDPEEMNIAEE

SEQ ID NO: 254382 - protein, 45 aa, Zea mays
  Clone ID: MRT4577_163576C.1.pep
YNLDRINSKYSQYIIYKYRESCRTCFSRRARLLIVLISSLETAFV

SEQ ID NO: 254383 - protein, 77 aa, Zea mays
  Clone ID: MRT4577_163577C.1.pep
PAVFRPVDASVSGPTSFSAVSPCESAISEPVVFAQQANVGAAGCICDRRCLACLGSRDVPTSFLNIPRSRCSKFWGK

SEQ ID NO: 254384 - protein, 730 aa, Zea mays
  Clone ID: MRT4577_163578C.1.pep
MSSLLLRVLLIQLAAVECLSAAIPGCLTQCGGVEIPYPFGVGTNCSRKGFRIKCINGSAGEEIPVLLPTTRYQNIRVLNLSVSPLPEARVLLPVAWQCFNATGGVTGIYSGDVDFNPEGVYRISNTQNELFVLGCDTYAFTKGVRVHNVNARFPYRYFTGCITVSVDEKDPRDGACAGLGCCRVDIPPGITDTSMTFSSTWTRANQTFCPCDYAFIVEKGNYTFKASDLVSHTPDNRLPLDWWTMPLRLDWAIRDNNGDSMTSISCAQAPNEPDYGCRSKHSECTNSTNGPGYFCKCAHGYDGNPYVQSDGECTNINECQDPKSHNCSSGSKCIDTDGGYYCQCNFFRRGQQCDPLIPMAAVALLTTFAAVVLGCVAIVLLQTLNNRKRFNRNGGKLLNAQGITTYTKRELKKITNGYSKRLGGGHFGNVYEGTIVDGRKVAVKCPLRTRVSSHRCHWKNLIRPRRVPLPQQRVEEDGSFMNEIRFQFEVSRHKNLVQLLGCCLETDIPILVFEFVANGSLEDILHSAKKPCTLSLPERLDIAIGSAEAIAYMHSLDNQKRVHGDIKPSNILLDDDLNPKVSDFGSSKLLAIHSYYVRAVAADIGYMDPLYMKTEHFTLECDVYSFGVVLLELITRRRASWYEQDQQGNKILPIEFVKCFKDHGSGCAMYDSRLDFSGEDTQSRCNKRCLDMIGMLAVRCLKEDKRERPTMAEVVEELKRVKVLLLGTHI

SEQ ID NO: 254385 - protein, 190 aa, Zea mays
  Clone ID: MRT4577_163579C.1.pep
MLLCCCTFPQQIQTCAPRSSFHPSCLPRSLLSSGEQGRSKKSKLHRVRAHVFKSKNQSLRSQSHLVDSHGGPADKIPRKDFPCSAAPSLPDAEAVAFWLRFCRRELDVRRAHAVALRSLGSLGVFVSNNLISAYVRFNEVANARKVFDEMPERSIVSWTAMMNGYQKLGCHGEVARLLMDMLIAGVQVTA

SEQ ID NO: 254386 - protein, 354 aa, Zea mays
  Clone ID: MRT4577_16357C.1.pep
MAPHIVVNKTVITFTAVALTILAVTTMMAEARDLSSTSTGGYGEEAMKVRHQQWMAEHGRTYRDEAEKAHRFQVFKANADFVDASNAAGDDKKSYRLELNEFADMTNDEFMAMYTGLRPVPAGAKKMAGFKYGNVTLSDADDDQQTVDWRQKGAVTGIKNQGQCGCCWAFAAVAAVEGIHQITTGNLVSLSEQQVLDCDTDGNNGCNGGYIDNAFQYIVGNGGLGTEDAYPYTAAQAMCQSVQPVAAISGYQDVPSGDEAALAAAVANQPVSVAIDAHNFQLYGGGVMTAASCSTPPNLNHAVTAVGYGTAEDGTPYWLLKNQWGQNWGEGGYLRLERGANACGVAQQASYPVA

SEQ ID NO: 254387 - protein, 368 aa, Zea mays
  unsure (1)..(368): unsure at all Xaa locations
  Clone ID: MRT4577_163580C.1.pep
ILSAATFAAVVLGCVAIVLLQTLNNRKRFNRNGGKLLNAQGITTYTKRELKKITNGYSKRLGGGHFGNVYEGTIVDGRKVAVKCPLRTRVSSHRCHWKNLIRPRRVPLPQQRVEEDGSFMNEIRFQFEVSRHKNLVQLLGCCLETDIPILVFEFVANGSLEDILHSAKKPCTLSLPERLDIAIGSAEAIAYMHSLDNQKRVHGDIKPSNILLDDDLNPKVSDFGSSKLLAIHSYYVRAVAADIGYMDPLYMKTEHFTLECDVYSFGVVLLELITRRRASWXNKISKGTXLPIEFVKCFKDHGSGCAMYDSRLDFSGEDTQSRCNKRCLDMIGMLAVRCLKEDKRERPTMAEVVEELKRVKVLLLGTHI

SEQ ID NO: 254388 - protein, 148 aa, Zea mays
  unsure (1)..(148): unsure at all Xaa locations
  Clone ID: MRT4577_163581C.1.pep
PGPPXITDTSMTFSSTWTRANQTFCPCDYAFIVEKGNYTFKASDLVSHTPDNRLPLEYWTMPLRLDWAIRDNGDSMTSISCAQAPNEPDYGCRSNHSECTNSTNGPGYFCKCAHGYDGNPYVQSDGECTSFWTNMVGGNWLRRRREEE

SEQ ID NO: 254389 - protein, 146 aa, Zea mays
  Clone ID: MRT4577_163582C.1.pep
MVVKEFTVDLNQPLVFQVGHLEEHYQEWVHQPIVSKEGPRFFANDTMEFLTRTKWWAVPVIWLPVVCWLFAKSIRMGHTIQEVILMALFGVFVWTFIEYALHRFLFHIETKSYWSNTAHYLIHGCRHKHPMDSLRLVFPPAGAAII

SEQ ID NO: 254390 - protein, 69 aa, Zea mays
  Clone ID: MRT4577_163583C.1.pep
MKVSVLALWSAAAALLLVAQAPSVAEASLHGGAGLKLGYYKKTCSGVENVVKYHVVKAIKAYRGAGAAL

SEQ ID NO: 254391 - protein, 44 aa, Zea mays
  unsure (1)..(44): unsure at all Xaa locations
  Clone ID: MRT4577_163584C.1.pep
KKKKKKKKKKKKKKKKKKKKKKKKKKKKKKXKKKKKKKKXXXXK

SEQ ID NO: 254392 - protein, 42 aa, Zea mays
  Clone ID: MRT4577_163585C.1.pep
WPLVLKVNFPLGKVACPFKRTPRHGYIWKGLGPLYGSLSFLV

SEQ ID NO: 254393 - protein, 44 aa, Zea mays
  Clone ID: MRT4577_163586C.1.pep
EVHLSIRLMRVNCTLGMLLTLPVTWHKLLYHNTSTLLSSNRHTG

SEQ ID NO: 254394 - protein, 60 aa, Zea mays
  unsure (1)..(60): unsure at all Xaa locations
  Clone ID: MRT4577_163587C.1.pep
AKDLLYICEGPKSXXSLLEAHTNASLDLGLLLAQFKFIILHSSSQLYIRHYIIFSSNATC

SEQ ID NO: 254395 - protein, 88 aa, Zea mays
  Clone ID: MRT4577_163588C.1.pep
IITLGPPKNQGGLKTLFYFLAEHLKKPPPPPHSGVFSLGKNRGRGTPFPWSFKEPQLESPALGGAPPRFIPPARGEPLPPPGGKPGAK

SEQ ID NO: 254396 - protein, 121 aa, Zea mays
  unsure (1)..(121): unsure at all Xaa locations
  Clone ID: MRT4577_163589C.1.pep
MSVPTLLSVADLKSKLGGPVVVDGSWHMPAANRDPYKEFKGNGHIPGARYFDIESIKDKTSSLPHMMPSAEQFAQQVGELGISNDDHVVVYDTVGFFSAPRVYWMFKAFGHKKVSXLDGGF

SEQ ID NO: 254397 - protein, 112 aa, Zea mays
  Clone ID: MRT4577_16358C.1.pep
DSRYQDDLQMTRNLARRRDRDDVDPCCNSSAPNFRLWRKLTKASALFNVLRRTPKHRQVLAPDLLPLTTYLPTTTGSQPHDLAQQRLETGEELWPYGWLLWRLQRTTRPASR

SEQ ID NO: 254398 - protein, 54 aa, Zea mays
  Clone ID: MRT4577_163590C.1.pep
LADSNLNNGLQPGRSEVFLEPQSEEIRLFRLREFGSRDGSEELSQASWRSRRDL

SEQ ID NO: 254399 - protein, 161 aa, Zea mays
  unsure (1)..(161): unsure at all Xaa locations
  Clone ID: MRT4577_163591C.1.pep
MTLPFHRVPSLQSTGISPQPEPAAMGTEEEHPDMDSHRNDAVLLVPVSSPPKALDYCALDLLEPLAADLGHDKTNSIHWLSGNFTPVVEETPPXQTLTVREHLPXCLNEEFVTLGTNPKVAPVARYHWNDGDDMSHAMRMKDAKATYVSRYVKNVRLKEEE

SEQ ID NO: 254400 - protein, 39 aa, Zea mays
  Clone ID: MRT4577_163592C.1.pep
DPNRPLVSYALCKNYKKREGTRAPLWLKDKITVGPFDVS

SEQ ID NO: 254401 - protein, 132 aa, Zea mays
  Clone ID: MRT4577_163593C.1.pep
SHLRRAAQTLAAAAVAAMVAVNRPLVSVKALEGDMVTDAPGIALPPVFGAPIRPDVVRFTHKLLSCNKRQPYAVSRRAGHQTSAESWGTGRAVSRIPRVPGGGTHRAGQGAFGNMCRGGRMFAPTKIWRKWH

SEQ ID NO: 254402 - protein, 105 aa, Zea mays
  Clone ID: MRT4577_163594C.1.pep
ERHCTQSMGHRPGHRVPTPPAGVTGFKEAPLGHHVHGPIHPGHGRPRCQRHFRQRCDRDLSQHVVQYADLLHARVPVLWGRGQPVGFRHHDLAPSATQTAWRPPT

SEQ ID NO: 254403 - protein, 431 aa, Zea mays
  unsure (1)..(431): unsure at all Xaa locations
  Clone ID: MRT4577_163595C.1.pep
PLPLSPRLHSHHRRAAQTLAAAAAAAAMVAVNRPLVSVKALEGDMVTDAPGIALPPVFGAPIRPXDVVRFTHKLLSCNKRQPYAVSRRAGHQTSAESWGTGRAVSRIPRVPGGGTHRAGQGAFGNMCRGGRMFAPTKIWRKWHRRVNINLRRVAVASALAATAVPALVQARGHRIETVPEMPLVISDSAESIEKTSQALKILKQIGAHADAEKAKDSVGIRPGKGKMRNRRYINRKGPLIVYGTEGSKVVKAFRNLPGVDVANVERLNLLDLAPGGHLGRFVIWTQSAFNKLEEVYGSYDAPSQKKKGFVLPRPKMSNADLGRIINSDEVQSVVKPLNKEVKRREKRKNPLKNMAAVLKLNPYLGTARKMATLAEAARVKARKAKLDSKRTKLTPETAKVKAAGKAWYKTMVSDSDYTEFENFSKWLGVTQ

SEQ ID NO: 254404 - protein, 111 aa, Zea mays
  Clone ID: MRT4577_163596C.1.pep
TLQLQRGPRVPFGPEHAHCSRKRTLQGFCSIQRPPFLVPGRFFVHPHVCQVNLVRETFKKPPCKYGGLFFFFLKGMKLRQTFKDPHANGCGVLRLVYPMCAQPPFKRIYRS

SEQ ID NO: 254405 - protein, 90 aa, Zea mays
  Clone ID: MRT4577_163597C.1.pep
MLALESLRTITYSSCHMQHQDYLHVTNWLGLTDNLVIAILHVVSLVGESAPPEMLQKLTYLAIRHHPQIKRVDTVRAYTFGVLYFVEVGS

SEQ ID NO: 254406 - protein, 107 aa, Zea mays
  unsure (1)..(107): unsure at all Xaa locations
  Clone ID: MRT4577_163598C.1.pep
LGAAAVSATNEPMRGXGAIDTDPSLRDPLEGAXIGRMISDLEEPIDNQGPVDTSAXFPIHXRSAPAFIELDTKLSIFETGIKVVDLLAPYRRGGKIGLFGGAGVGKT

SEQ ID NO: 254407 - protein, 402 aa, Zea mays
  Clone ID: MRT4577_163599C.1.pep
MDANGCGENDDARAPLLAGPGRRRNSVASMRGEFVSRLPKKVLDAVDPERPSHVDFSRSKGLLEGEREYYEKQFATLRSFEEVDSLEESNEINEDEELAEQIQSEFAMKISNYANIVLLALKVYATIKSGSIAIAASTLDSLLDLMAGGILWFTHLSMKSINVYKYPIGKLRVQPVGIIIFAAVMATLGFQVFIQAVEKLVVNEAPDKLNQVQLLWLYSIMIFATIVKLGLWLYCRTSGNKIVRAYAKDHYFDVVTNVVGLAAAVLGDRFYWWIDPIGAIVLAVYTISNWSGTVWENAVSLVGESAPPEMLQKLTYLAIRHHPQIKRVDTVRAYTFGVLYFVEVDIELPEDLPLKEAHAIGESLQIKIEELPEVERAFVHLDFECDHKPEHSILNKLPSSQP

SEQ ID NO: 254408 - protein, 60 aa, Zea mays
  unsure (1)..(60): unsure at all Xaa locations
  Clone ID: MRT4577_16359C.1.pep
TTTPRTTPRRERGNRRTGGPGTDHTSKARTHAGPGTEPSKXPRGDDDGTSTGQAPGEDSE

SEQ ID NO: 254409 - protein, 138 aa, Zea mays
  unsure (1)..(138): unsure at all Xaa locations
  Clone ID: MRT4577_1635C.1.pep
QKIRXNSQKGXKVPXASLVRVASTMDVMELMNVGHKNRAVGATALNDRSSRSHSCLTVHVKGRDLTSGTILRGCMHLVDLAGSERVDKSEVTGXRLKEAQHINKSLSALGDVIASLAQKNXHVPYRNSKLTQLLQNSL

SEQ ID NO: 254410 - protein, 126 aa, Zea mays
  Clone ID: MRT4577_163600C.1.pep
LIITTQHAYCTMLIITLCLRCHDSSLGLDITSDFQEAGNYIYIWKTDADISAFACKIDKTPPSTKLIIAGALCTRGNRSRLSIVLDAAGDALHVEDHRVLHAGRVLDRLVELNQYGRLVLRRLTPF

SEQ ID NO: 254411 - protein, 68 aa, Zea mays
  unsure (1)..(68): unsure at all Xaa locations
  Clone ID: MRT4577_163601C.1.pep
FYRVMSPLGKIAPVDPVTIKKSPPKKXVHVVPVDSHDFWFMGFVSYKKAGPTLVGAVSQQGVPPAGGK

SEQ ID NO: 254412 - protein, 113 aa, Zea mays
  Clone ID: MRT4577_163602C.1.pep
LMIVACTRGSSEFGSRRVSHPLLFRLHPLTTPGRTLTSDAAYHMDHDHLLPSSTDLKLDYIGAVPDGAFRLRRKRPNSTRTRLTVPAPNCPGPTLPHVSYDITNHHRWTMLPA

SEQ ID NO: 254413 - protein, 180 aa, Zea mays
  Clone ID: MRT4577_163603C.1.pep
TELVKMASEGNKDVPNEALSVDLSSISGAKRKRGRPRKYEHPAYELPQKVQPLQSAPPLHCSQDGSSMASHTSGGYAHGSWSAQPRNSVNASIQGNSGKDDVLGKHFVGKLTKKIPGFSLITVKVKDNQVLKGWVPDEINLRPITPKDDLAPELPMLRPSHVRKRASAIHMQTALTVPLH

SEQ ID NO: 254414 - protein, 72 aa, Zea mays
  Clone ID: MRT4577_163604C.1.pep
RQHCLLQVGAFAVDAVHGRSLALLEMHSRSQFSGCGAGVGGRSRNDAEARGAHRTKADRCAWVVAATCGDAS

SEQ ID NO: 254415 - protein, 128 aa, Zea mays
  unsure (1)..(128): unsure at all Xaa locations
  Clone ID: MRT4577_163605C.1.pep
NPAKGQKKKGKKPKXNAPKGPAKVTGKGGGNPPXPRPKSPQKRGAHPQTRGQKLGKANGPGXPXNPPGQKGNXPKPNKLGNPQVFPSQXGLKPPPRKLKXPPPKGGNGPPKNQPQRPPSLRNFPKFPL

SEQ ID NO: 254416 - protein, 77 aa, Zea mays
  Clone ID: MRT4577_163606C.1.pep
RLGVTSSIIIFTTRKPTHFGVRIGLQASNSCCVNLESHNVIGTQCPKSKHMYYKQYHHSTTSLTLFIFTELASPACG

SEQ ID NO: 254417 - protein, 116 aa, Zea mays
  unsure (1)..(116): unsure at all Xaa locations
  Clone ID: MRT4577_163607C.1.pep
NPEPKPELWPDPNPEPKPEPNPAPGPAPDPKPELYPGPNPNPDPEPPPKPELXLGPTPEPYPAPNPEPPPNPDPXPTQTPRQDFSPXPQPKPGPPPFPPAAFPLGSGFFPFLLCFN

SEQ ID NO: 254418 - protein, 107 aa, Zea mays
  Clone ID: MRT4577_163608C.1.pep
ASGLLGPDPQKASRLQLSSWRSVGDRQRACGEMLQGWAALDLFLRLLGITFEVSHLISQFLRRKTFFVVIARKKRYKCQNGIGYLNCETRVTVFFILQFTGGKRFIK

SEQ ID NO: 254419 - protein, 64 aa, Zea mays
  Clone ID: MRT4577_163609C.1.pep
SFAADAASQLQGRRRRLTRRRRVGLAALARPSGPVDRQQEPTSPSVCLIPVPVRLSWGIIMYHV

SEQ ID NO: 254420 - protein, 37 aa, Zea mays
  Clone ID: MRT4577_16360C.1.pep
EGGFKNDIRGAFCPHGCLPQCGYVRHDYACPAEKKAT

SEQ ID NO: 254421 - protein, 80 aa, Zea mays
  Clone ID: MRT4577_163610C.1.pep
AKAEPHCLKNLIFPSGRILNLLPVPGFRRCDSSVKLFPDPQDSCFYGLRLPGSPALGGLLQTGSDMVKQVIDGAEGRKSC

SEQ ID NO: 254422 - protein, 58 aa, Zea mays
  Clone ID: MRT4577_163611C.1.pep
FGLLLGPIGHTYLKEQDSTGGSPRKKTHAFYQVIIKQTFRDKMEEGRNKLGGKPIWFF

SEQ ID NO: 254423 - protein, 62 aa, Zea mays
  Clone ID: MRT4577_163612C.1.pep
FTYANKKFSTHYKVTIGADFLTQRGAARGQALHSTRNIDYPTPMPCRDLQVVIFLYTNFRPD

SEQ ID NO: 254424 - protein, 144 aa, Zea mays
  Clone ID: MRT4577_163613C.1.pep
PSQKAGVNPSPVCPGFWGCWPFPPWPPLWGAPLGAGEGELWGFFKPSRAFPPGCFFGPWGFFQKIQSPPPPLVFLSPFWGKVPPPGQSKPPKPFSPLCWVGPPLFFLLNRLLLCSCLGPPGNPPDPNFFFFPPLGKKNPGFPFV

SEQ ID NO: 254425 - protein, 69 aa, Zea mays
  Clone ID: MRT4577_163614C.1.pep
PRVRLAQTTTDLDTPDLATGGGEWLFTPVLTTGNNQRRIIPGNFGLGSAHMNQTWLANNHGLRCLLNSH

SEQ ID NO: 254426 - protein, 300 aa, Zea mays
  Clone ID: MRT4577_163615C.1.pep
ARNSARDFALGVFENAVNRGVQNISFGDLSGNLGRTMYKFKFQIPSYFSLVIRSLAVLEGIAISFNPKYKVLGSSYPWIARKVLTDSSPKLRSTLQTLLYKDGTFQIDRLESLLTESLRARTEQSLVRNEQDVDSTRYAIKQVLSFTLADQGAFVKDLLLQEIAKGIDALGVATLSSATSAAASRLPFGGGPSPLTSLDDEDATNLRNLYRLLLLLSKVSQKENPSPIPEYNSAIEKEGGSTDELALALYGMTSLPEFLPVLSVIPELPPESQQQLLLLPADLTNRILSRALARTIRRLM

SEQ ID NO: 254427 - protein, 30 aa, Zea mays
  Clone ID: MRT4577_163616C.1.pep
LLSLTVFHVEGPDFHHMASVKIINVVQMYR

SEQ ID NO: 254428 - protein, 83 aa, Zea mays
  Clone ID: MRT4577_163617C.1.pep
ILMSFYIPPICFNKLFDIGGHPLEIIFLFDQLQIKILYYAYKVCALHQSYYPISPPALIYLHAMLPCPDTFDSIVLSGHISHH

SEQ ID NO: 254429 - protein, 182 aa, Zea mays
  unsure (1)..(182): unsure at all Xaa locations
  Clone ID: MRT4577_163618C.1.pep
WYLEAAGKKSCLPLADQGAFVKDLLLQEIAKXGSTFEHSMAWMLTREGIDALGVATLSSATSAAASRLPFGGGPSPLTSLDDEDATNLRNLYRLLLLLSKVSQKENPSPIPEYNSAIEKEGGSTDELALALYGMTSLPEFLPVLSVIPELPPESQQQLLLLPADLTNRILSRALARTIRRLM

SEQ ID NO: 254430 - protein, 211 aa, Zea mays
  unsure (1)..(211): unsure at all Xaa locations
  Clone ID: MRT4577_163619C.1.pep
QTRSAHLTVDLNFSIALNSFGSSSFTTANISGQDFPVFTTDPQSPWLLSTSPSLPAQSAQQQLQSPESPHQDFVLFDQLPNRHTTTSLPHQRRHSSHLQNRHQQQPASPAVQNQRVAQLLQAFGRPSSTVNNNRPTNQFYASSAPSSSTTLNKQNRAARPPVPLFSQSTGSVPQQTAXMMNAADVELEEFTAFEGXAHTAFSSPAXASVFD

SEQ ID NO: 254431 - protein, 101 aa, Zea mays
  unsure (1)..(101): unsure at all Xaa locations
  Clone ID: MRT4577_16361C.1.pep
APPTSARGRGLAAKAKQDETARITPXRPPRRRTPPGPPAPPRDEPEAEDGRRRRPRAGEQRRGSDGVAPGVDQHDGVPPEHGLHGVGAPEPLARPEQADGA

SEQ ID NO: 254432 - protein, 54 aa, Zea mays
  unsure (1)..(54): unsure at all Xaa locations
  Clone ID: MRT4577_163620C.1.pep
XQIAELSPPPKSFEPTSDPEAKKEEEITKMAEAILDEAISHLLNEAAEVVLKEE

SEQ ID NO: 254433 - protein, 81 aa, Zea mays
  Clone ID: MRT4577_163621C.1.pep
GRGSFPPGPSHSQIFVLGSSSSSSSSLPSFLPDLPPSRESRSTASAPPHRGSGRKWRARGQPWLRKGPETGVCRSRRPART

SEQ ID NO: 254434 - protein, 48 aa, Zea mays
  Clone ID: MRT4577_163622C.1.pep
REEHYRFLCCNITTYIFDRKFTSYRYAIMPISNLRTLTAGLVCRVNNI

SEQ ID NO: 254435 - protein, 173 aa, Zea mays
  unsure (1)..(173): unsure at all Xaa locations
  Clone ID: MRT4577_163623C.1.pep
KQIILEDLATRTRGSTAVTAIVVDGTDMWIANIGDSRAVLSETGTASQVTVDHEPHTTNERKRIEXKGGFVSTFPGDVPRVNGQLAVARAFGDQSLKAHLSSEPDVKHIKINSSTEFVILASDGLWKVMKNQEAVDLVKSTKDPQTAAKRLTSEALGRMSKDDISCIVIRFRC

SEQ ID NO: 254436 - protein, 25 aa, Zea mays
  Clone ID: MRT4577_163624C.1.pep
GLYSPSSLKFSINYSLSERRSSTRA

SEQ ID NO: 254437 - protein, 60 aa, Zea mays
  Clone ID: MRT4577_163625C.1.pep
RQFFFQPSNQNHWGGLFKGLLITNKNTHGILNAVSWGLMLPMGAISPRYLKTFRRADPSW

SEQ ID NO: 254438 - protein, 59 aa, Zea mays
  Clone ID: MRT4577_163626C.1.pep
FLFFFFFSVDGSWVWVESASRSEEMAISARRWRERRRREVAMAEWSRVVGAASPRHQTS

SEQ ID NO: 254439 - protein, 144 aa, Zea mays
  unsure (1)..(144): unsure at all Xaa locations
  Clone ID: MRT4577_163627C.1.pep
CICSXCLVAALLIFSNRAKVYLETRTSXPRLRWLASLRQAAKRWQTRRWSGKTSQLNLISHSLSLGKPDRYGKEAALCLWLSKLSCCEDIVDDFVFVRRVRLKKDGDDERRCGHLCRFLRKTLVPKCWCCRSRNEAANTVAESL

SEQ ID NO: 254440 - protein, 85 aa, Zea mays
  unsure (1)..(85): unsure at all Xaa locations
  Clone ID: MRT4577_163628C.1.pep
MRVXAPSFACTSXXRAAPLXXRANILSTTXXGRLTEWXIRXLWYSSLLCVNHWXNKAVLPCVQKLFIALSQCPQQLYVXRQVITV

SEQ ID NO: 254441 - protein, 142 aa, Zea mays
  unsure (1)..(142): unsure at all Xaa locations
  Clone ID: MRT4577_163629C.1.pep
PGPGNPGGPPRPGQERRTTEERRREXPPQRPGPGATASRPAPEGPPQRRRKQPPERXARRGSKRRGDATRKRGAESNSQKPRSQPAPSEETKGDPKQPHEPXKAHQRRETEATKATARRRNARTSSSRARERGDSPGQHKQD

SEQ ID NO: 254442 - protein, 80 aa, Zea mays
  Clone ID: MRT4577_16362C.1.pep
MWRLLHQITAIGSAQFTSSAVILQPLDGETAAVSQHNRRVSDRPFTSWRYNVEASSDHTSHQLIILNAEWDAHCTRASTA

SEQ ID NO: 254443 - protein, 77 aa, Zea mays
  Clone ID: MRT4577_163630C.1.pep
GSPPSLGCAGGLAPPCRRAPNLAPPPLCVRAGVFFALKKKKKKKKKKTNKKKKKKNKKKKKKKKKKKKNKKKKKKAA

SEQ ID NO: 254444 - protein, 598 aa, Zea mays
  unsure (1)..(598): unsure at all Xaa locations
  Clone ID: MRT4577_163631C.1.pep
MAASALLTGSPWLRMRLLPDAPARPFRHLHLRRSFSVRASGADGSPAPVRVRFAPSPTGNLHVGGARTALFNYLFARSKGGRFVLRVEDTDLERSTRKSEEAVLADLAWLGLDWDEGPDVGGDFGPYRQSERNSLYKQYAEKLLDSGAVYRCFCSSEELEQMKEVAKQRQLPPVYMGKWASASDAEVQQELEKGTPYTYRFRVPKEGSLKISDLIRGEVMSQSLEHKLQATYVCXIVYREKRSHALISGXFIKVSWNLDTLGDFVIMRSNGQPVYNFCVTGDDATMQISHVIRAEEHLPNTLRQALIYKALGFAMPSFAHVSLILAPDRSKLSKRHGATSVGQYKNMGYLPQAXVNYLALLGWGDGTENEFFTIDDLVQKFTINRVNKSGAVFDATKLKWMNGQHLRSFPHDELIKAFEDRWTDTGILQESESGFAKEAAELLKDGIDLITDADAALTNLLSYPLHTTLSSEEAKPVVQDKISEVAWSLISAYDSGELGQALAEGRDGWQKWVKGFGKSIKRKGKGLFMPLRVLLTGKLHGPDMGGSIALIHKAGVCCAVTPQSNFVTLDERFRMLKDVDWESLAKEQETPAVPAAAS

SEQ ID NO: 254445 - protein, 74 aa, Zea mays
  Clone ID: MRT4577_163632C.1.pep
HPVPRTVRLTELTFALVSNGSTQKTAGAWGRALRPTHHHGEQTKTLGPDRAWPHVNGRSHNVTSGVLRPPIEGG

SEQ ID NO: 254446 - protein, 49 aa, Zea mays
  Clone ID: MRT4577_163633C.1.pep
IRWKAKRRTSELRSCAQGLVKGVVVEGHERGRRFCVAVIRLSASCRILA

SEQ ID NO: 254447 - protein, 236 aa, Zea mays
  unsure (1)..(236): unsure at all Xaa locations
  Clone ID: MRT4577_163634C.1.pep
MMSGGGYSALDDPKASGSVPAATGTDPPAIRFADSNLQTFPPSEARGKISGAYRPPTDADDTFSSKGGGAGSGGXGGSAGLDDAAQGGWFRMFSVAAYKPYFDVDTSDVVERIWESVFPFRGTFTEKTSENPDLYXFNQFPFQMPEYGPFWTCITLIFVAASIATFVTYLSHKWHKKEWNYDINLVTWSAGLFYGYVTFVPPSLYVILKYFSAPAGLVXMWCLYGYSLVIFIPASL

SEQ ID NO: 254448 - protein, 74 aa, Zea mays
  Clone ID: MRT4577_163635C.1.pep
IYSRSQKNAIDTIRVLWATVSSLCGISRARWTHTSGGLSCNPRGSIDVRTSGHLRPTIDMRRSVHLSSSVYLTT

SEQ ID NO: 254449 - protein, 291 aa, Zea mays
  Clone ID: MRT4577_163636C.1.pep
MMSGGGYSALDDPKASGSVPAATGTDPPAIRFADSNLQTFPPSEARGKISGAYRPPTDADDTFSSKGGGAGSGGRGGSAGLDDAAQGGWFRMFSVAAYKPYFDVDTSDVVERIWESVFPFRGTFTEKTSENPDLYGPFWTCTTLIFVAASIATFVTYLSHKWHKKEWNYDINLVTWSAGLFYGYVTFVPLLLYVILKYFSAPAGLVQLWCLYGYSLFIFIPASLLSIVPIEIFRWVIAGVAGFMSATFVAVNLRAHIVNSGERWFLIVAGIFLLQLGLAVLLKLYFFTITV

SEQ ID NO: 254450 - protein, 118 aa, Zea mays
  Clone ID: MRT4577_163637C.1.pep
NACFEPANQMVKCDPRHGKYMACCLLYRGDVVPKDVNAAIATIKTKRSIQFVDWCPTGFKVGINYQPPTVVPGGDLAKVQRAVCMLSNTTAIAEAWARLDHKFDLMYAKRACVHWYVG

SEQ ID NO: 254451 - protein, 56 aa, Zea mays
  Clone ID: MRT4577_163638C.1.pep
QHTIYKSFFHSLQPTATFSTVTAHSNFFYSQSPTKQTLSWSPSPLNAYKDTQNLST

SEQ ID NO: 254452 - protein, 219 aa, Zea mays
  unsure (1)..(219): unsure at all Xaa locations
  Clone ID: MRT4577_163639C.1.pep
MAANGSSSGIDISLPENPGNGNGPWAPGTGDRQPPNVAPAAQPRNLNAISPDFYPHGKRSLSGISVRAFCLGCALVSGLAGAALLAYHGSHLWRPCLFLSTLALFHFLEFYTTAAYNTPVAKVASFLLSNGDQYRIAHTMAFIETFITSYFFPGYQSYTHPPWAIAIGVVLIAVGQTVRSIAMIQAGTNFNHMVQSSKNDXHELVTHGLYHYFRHPLVF

SEQ ID NO: 254453 - protein, 172 aa, Zea mays
  Clone ID: MRT4577_16363C.1.pep
MAAPASEAPEASDFNGGGGGLSTGRKLVPWSSWTEWRFVRDGLFSPFPAAALRRIAAWRSRGSLPIPVDVTAAFVDIRLRDPFFRNGLAGDDALDSEEMLAMLYSMAIMRLVNGFVENPYKKTGLSISELADAVGIPRVLVDIRHESSHRSLPSLRLLRLASIKAFDWLKCI

SEQ ID NO: 254454 - protein, 51 aa, Zea mays
  Clone ID: MRT4577_163640C.1.pep
RKIEHPVPISRSRMSGHKKIAPAASISSSKYYIRYVPGPTCRGSVFLYIPP

SEQ ID NO: 254455 - protein, 353 aa, Zea mays
  unsure (1)..(353): unsure at all Xaa locations
  Clone ID: MRT4577_163641C.1.pep
MEPYVFFWWAKMQIEIAHYVARRDTCKRVKAIYMKTVGPLQSLXWKGEDISMDFIVGLPRTKKXVKTDHPVIVYAQLYIARILSLHGVPKTIVSDRGSGQTEKMNQILEDMLQACVLDFSQKWDECLPLAEFSYNNSYQESIKMAPFEALYGRRCRTPLNWSEPGERCFFRPDMVKEAEDKIQKIIYNMKKAQARQKSYADKRRMPLYFLEGDYVYLKVSPMKGVSRFGIKGKLAPRYIGPFPILERYGPVAYRLQLPETLSAVHNVFHVSQLKKCLRVPDRTIEVTDVVLEPDLTYSEHPIRVLDQKDRVTRRKTLKFYKIQWNQHSEDEATWETQDFLNKNFPGFLASCNL

SEQ ID NO: 254456 - protein, 103 aa, Zea mays
  unsure (1)..(103): unsure at all Xaa locations
  Clone ID: MRT4577_163643C.1.pep
SHGRGGRPPQQQDRGGPKQQSRGGKKKKPGAPPPVRQAKGGRGPKKKGKNPGGGEKKRGPPPXPPGKXQGAGNQAERKKGKGRGVPFPPPTPRGEKGGAHGPP

SEQ ID NO: 254457 - protein, 124 aa, Zea mays
  Clone ID: MRT4577_163644C.1.pep
PARNLPGGFFLNNRTLHPPPTQRKGPGHRTSHNHTAAADTPPGGTQEAPEKTNQGLKGPPKGGEEPEHHETAKTTCRGKHAPGEQSYRHAPRGGKNSPARAGDHATNPQLLPGPPRPPNNRKPP

SEQ ID NO: 254458 - protein, 260 aa, Zea mays
  Clone ID: MRT4577_163645C.1.pep
MQLLSVIAVCGLAASVSARSARSVGRKVEFPRPRVGIPMQNVHPHKRQAAQIINTEASKAFAVNGTAGAIPEVYFDIGESYAGLLPISKAANESRELYFWFFPSENPDACDEITIWLNGGPGCSSLEGFLQENGPISWQYGSGPGPVYNPWNWANLTNMVWVEQPVGTGFSQGKPTATSQEETAEEFLGFFKNFVDTFGLQNRKVYITGESYAGRYVPYIADAMLSKNDSTYYDVKGVMFYDPSVAEDGLPHDIPAVPYV

SEQ ID NO: 254459 - protein, 113 aa, Zea mays
  Clone ID: MRT4577_163646C.1.pep
VVAVLSGCVPVRSVRPASGVLAPHPVSMIRSRCAVQMSHRRRDLTTLRWLTDSSLRRRRRRHARMRLLRRGILHHGVLATRPIPTRDGREEGPKERRRVDGEKENSGLHRLSR

SEQ ID NO: 254460 - protein, 44 aa, Zea mays
  Clone ID: MRT4577_163647C.1.pep
CLVMRQPVLLAILPLYRSVHSVCIRTHRCIGSTAYSLGRPVRVA

SEQ ID NO: 254461 - protein, 474 aa, Zea mays
  Clone ID: MRT4577_163648C.1.pep
MSSASLASSLLCSSSASTSRSATVPRVTRTPLFSKNQYKPPLRPLRSSSVVRRSLQQEQEERVGPASSVSVASGERQEEATASHHIGGVDEAKASGHVGEADKGGQGEGEGEGDGEEKRSTDEQQEVDWKSDEEFKKFMGNPSIEAAIKLEKKRADRKLRELDREPDANPVAGLFRGLVKDQLAREKQRLELAEQTFKALDLNKLKSCFGYDTFFAVDVRRFGDGGIFIGNLRKPIEEVRSKLEKKISEAAGTEVTLWFMEEKNDDITKQVCMVQPKAEIDVQLEITKLSTPWGYLSAVALAVTTFGTIALMSGFFLKPGATFDDYVSDVLPLFGGFLTILGVSEIATRLTAAKYGVKLSPSFLVPSNWTGCLGVINNYESLLPNKKALFDIPVARTASAYVTSVVLAVSAFIVDGSFNGGENALFVRPEFFYNNPLLSFVQLVIGPYADELGNVLPNAVEGVGVPVDPLAFAG

SEQ ID NO: 254462 - protein, 150 aa, Zea mays
  Clone ID: MRT4577_163649C.1.pep
MAAEAQAEGRALPRAPPPPLARGGSSASPEKRGLPIPGFDGVAEEEEERVPEPKRRRAWVAALDSAVAGCGGDGDGGSFSFQHAPGCFVAPEATPKFGSFNPPGDQAELAGLDPKPVGREADAEDSPEAGDEVSAASAPGAEAKDERLMA

SEQ ID NO: 254463 - protein, 87 aa, Zea mays
  Clone ID: MRT4577_16364C.1.pep
NFPSPWRAFKTFLLGAPFPLLGGRFKFHWPFFTTPGGGKTFGFTKLNPFEENPFFPTWVNNKKARPFRLSQLFPTLIGKGPPLLAAF

SEQ ID NO: 254464 - protein, 68 aa, Zea mays
  unsure (1)..(68): unsure at all Xaa locations
  Clone ID: MRT4577_163650C.1.pep
NPGPPWGANPKKGPWGEPPXFLPQKEPPLPKTPKGRGLKNPPQGGGPPNLPSQKGTGGAHTGIKPPPF

SEQ ID NO: 254465 - protein, 95 aa, Zea mays
  Clone ID: MRT4577_163651C.1.pep
PTRPELFLSKFVLSSSDFPARVKVHFSMKLSYKTPEYDHDNETLDSEATEPLTENEVVNHPRKLWDDDCPWAEWYSAEDPVKGNSFMTFTKKIWI

SEQ ID NO: 254466 - protein, 42 aa, Zea mays
  Clone ID: MRT4577_163652C.1.pep
ANQHRHPINGRRKYYSPARGGPIPSKLALTLLLLLLLYCSCT

SEQ ID NO: 254467 - protein, 38 aa, Zea mays
  Clone ID: MRT4577_163653C.1.pep
YLINNGKVTNLYLPKFHLTYPYHTLNLITYSLQILYYN

SEQ ID NO: 254468 - protein, 289 aa, Zea mays
  Clone ID: MRT4577_163654C.1.pep
MTSHGSSHDGNALTHTDGLAREGFPRILWEVLQGAGYTTPPQYAVQQFEKHRVPRCRVRMTLEPHPLQPGWRSLDSESFGYRAEDTIEAIALHGLTTFCGFHPLELATHPIGLFPAEKEDDPMWKDRVEHAKDIWAIYPGQTAHLTVRCMNALYRLQVMRGEAMSHLMALLEATKIMLDNREELMVDLSQEMVEKDLQVEQLSTEIQELEELVGTRENTIEVLEDQLINTQQQLAEANEHLDMHHQEIQDQEANEDVDIEGGDEPASSVDTAGSGRPPSPESSVASFAH

SEQ ID NO: 254469 - protein, 123 aa, Zea mays
  Clone ID: MRT4577_163655C.1.pep
RDRSRERERERERERSLERERERERERGRSLERERERVRELERSREGDRERQRGRDRDRDSRREARASPGAINDSSSMRRNDRSRSQPDRSERGPPQPSSPDRQSRRSSSGKKRSSSDRYDDM

SEQ ID NO: 254470 - protein, 101 aa, Zea mays
  Clone ID: MRT4577_163656C.1.pep
MLHTMATTVTEAAPAQEQHVNGNGEHKTRHSEVVRKSLSKRDHLYQNILETSVYPREAEMMNDVREITGKHPWNLMTTSDEEGLFLNTPITVIGAKKTMGD

SEQ ID NO: 254471 - protein, 93 aa, Zea mays
  Clone ID: MRT4577_163657C.1.pep
IWRQGSTYDNPRGKTRKEGRPKKKRVNPPRDGDWKKFGGKNRLSRGDLRRVHVGGGPTRGKGNLHDGRHPATHGGGNLQNIKNGDKKSRGYER

SEQ ID NO: 254472 - protein, 73 aa, Zea mays
  unsure (1)..(73): unsure at all Xaa locations
  Clone ID: MRT4577_163658C.1.pep
LVLXXXXXNPXKSDNHNXXNEXXXXXGTXSXAXGGIXLWKILCPWTCFYLRNLAXCXVGXHXXNFXSCWGANN

SEQ ID NO: 254473 - protein, 74 aa, Zea mays
  Clone ID: MRT4577_163659C.1.pep
GAFFFFFFISVGLCLSFHTAFITFASTGAFPGARSDRSAEKQEQRICVYICIYACMFVYVWLQVSSQGGKLHQT

SEQ ID NO: 254474 - protein, 74 aa, Zea mays
  unsure (1)..(74): unsure at all Xaa locations
  Clone ID: MRT4577_16365C.1.pep
MASLNPIDLLGNDAREPSQVAVXLTXKVGKAPADVQAAKAAKXTNQACYYSSSIKQSRNAPQRGRIGTGGLHAF

SEQ ID NO: 254475 - protein, 170 aa, Zea mays
  Clone ID: MRT4577_163660C.1.pep
QAFFFFFFFFFCFFFFFFFFFFFFFFSFFLTPARATPRAKSTTPGGAKRGTQLGTKMGETGAKGKPGGKKKSPQNTTQKTNRKKKGGNRGGPKKEKTQMNGGRPTARKPGGKPGLPNPKKKRPKPGEKGAPYWAPFHLPPKKSPAAGGTGFGKRKSPHKGGHTVIPKNRG

SEQ ID NO: 254476 - protein, 107 aa, Zea mays
  unsure (1)..(107): unsure at all Xaa locations
  Clone ID: MRT4577_163661C.1.pep
FQTVIALHIFASPMYDSLQIPYMRDSPGTFSSHHDLFTVTVTGRYLXTVNTLVVAVLPFLGDFMSLTGALSTFXXNLATANDMNPMGKGPKLGAIQKSWHWLNSLGF

SEQ ID NO: 254477 - protein, 57 aa, Zea mays
  Clone ID: MRT4577_163662C.1.pep
SVSIQIFALFSVMVGASSELCMYVVVASMIHDCLVVAFCLVDHWPYLRSGGGIAPGV

SEQ ID NO: 254478 - protein, 85 aa, Zea mays
  Clone ID: MRT4577_163663C.1.pep
GYGGNVVTARHLEISCCSYHLGLKEEQVSSSSNRGSTDLVSDTLVQAFSCGVSGSRCHSGPPPWPVGGPVYIHIVSAKCLEPNSE

SEQ ID NO: 254479 - protein, 94 aa, Zea mays
  Clone ID: MRT4577_163664C.1.pep
KRGLTHGLLLTHYDPCLKNPYGVHPTRRLLISTLWTRGNMTGANMITRPCGPHRSCSPLSVRIDSACPPGSNEASRGLHTRIRRSHRFPPSPCR

SEQ ID NO: 254480 - protein, 130 aa, Zea mays
  Clone ID: MRT4577_163665C.1.pep
GAARRVSWHLRPSRAPARRGFSSPISQLALLLGRALLLTGAPARWPCSSALLTLGLQLVAMARLSHDACPVRPPVTFPLAASSSSTPMSYENCRAGTSMSLIIILIYVKPQTMKMLLCWPRATSSTKCIP

SEQ ID NO: 254481 - protein, 179 aa, Zea mays
  unsure (1)..(179): unsure at all Xaa locations
  Clone ID: MRT4577_163666C.1.pep
MALLLLVMVGVVVGVVVASSLLLRWNEVRYGNGRRKEGGCLPPGTMGWPLFGETTEFLKQGPSFMKQRRLRYGRLFRTHILGCPXVVCMDPELNRRMLLQGEAGGLVPGYPQSMLDILGRNNIAAVHGPLHRLMRGAMLGLVRPAMLRQSLLPKIDAFMRDHLQGWAGAXVDGQAKTKE

SEQ ID NO: 254482 - protein, 197 aa, Zea mays
  unsure (1)..(197): unsure at all Xaa locations
  Clone ID: MRT4577_163667C.1.pep
MRTRVEARMTQVAQLARSLXRPAHRMPASINTPADKENRARRTSKTSSDEESHADPSVLWMRTRTCDNTTIASKTCTNSMEEXAPERPSDTPMTEAXDTLDGCSGADYGXIELLIQSMTLXFEVMXTRNITNSTAKENYMYAASIXILLVFRXPQCCLLLVSDTKESESYAECDALGPERQLLPAYSGQHGPGTLKA

SEQ ID NO: 254483 - protein, 97 aa, Zea mays
  Clone ID: MRT4577_163668C.1.pep
SRTASSPLSDCKRPALDHLSFRRTAYGRSQSCEPPPGHRRSKAHRSWDPCRSHGSSPATEFGRTPAVLQRGRGRDLDVIDGLDRLPSYSHPPSPTFC

SEQ ID NO: 254484 - protein, 52 aa, Zea mays
  Clone ID: MRT4577_163669C.1.pep
RYSFWMVGCPLSWCRSRIPSLIRPPNLARQRRVPPGSSKKRRCIRARVGGRD

SEQ ID NO: 254485 - protein, 102 aa, Zea mays
  Clone ID: MRT4577_16366C.1.pep
QINKEVNSILRGVVGKRMRAMAMREGGESTTGADDLLGLLLESNNTRHEGETGHGQQSAPGMTIEDVIEECKLFYFAGMETTSVLLTWAMVLLSMQREWQDR

SEQ ID NO: 254486 - protein, 105 aa, Zea mays
  unsure (1)..(105): unsure at all Xaa locations
  Clone ID: MRT4577_163670C.1.pep
SIIALSRSKTGGDLVLVLTSTRPHITCLGLNYIPRSPTLDLXNXFPHLMTLVVKNMNEDSLLKNSSGAQKAIECLYITXLHKLQTVPXGIKSKSSLKKLCLHGLH

SEQ ID NO: 254487 - protein, 113 aa, Zea mays
  Clone ID: MRT4577_163671C.1.pep
PPGKEKGFQKNPRAPPKGLLFLKNPLGSPLCFSKKNLGPSPPFLGPKVAGLTPQPLFFPPFCFCLGPPKTNFFFFLARVFSPRNEKPFWFPGFPPRLKMGNPAFGGGNKRGFF

SEQ ID NO: 254488 - protein, 42 aa, Zea mays
  Clone ID: MRT4577_163672C.1.pep
YAFRFITIVVFLQAYSIQEHMYCVYVPTNHLYIRDIICRPLN

SEQ ID NO: 254489 - protein, 69 aa, Zea mays
  Clone ID: MRT4577_163673C.1.pep
MADAVNRGGELLTNLTTGTPWEAVAKEVGTTLGTDSGILRAQISKDVETLVDVIASWTSSNSGPRLLRP

SEQ ID NO: 254490 - protein, 115 aa, Zea mays
  Clone ID: MRT4577_163674C.1.pep
MLDKLWDDVVAGPRPETGLDKLRRAAATQPLAINTAAGEAIKQSPSMPTTPTTPVTPSSSTPPRGGSVWRSVFHPGSNLATKSLGANLFDRPQPNSPTVYDWLYSDETRTRSNHR

SEQ ID NO: 254491 - protein, 67 aa, Zea mays
  Clone ID: MRT4577_163675C.1.pep
HITEYYRSFVTRKASAYHKRSAMKHASSSRLHHGEIGRRCKEKVLLKLLNTNGVIVHVTFVNPVCNY

SEQ ID NO: 254492 - protein, 85 aa, Zea mays
  Clone ID: MRT4577_163676C.1.pep
TQPLLACFEQSMVHTAVCVFVATCALSPISMTPSGSSSSISITSCGTTYCSSKHKFQKQIHQIANNTLLIQYNCNITCSEAINLP

SEQ ID NO: 254493 - protein, 263 aa, Zea mays
  unsure (1)..(263): unsure at all Xaa locations
  Clone ID: MRT4577_163677C.1.pep
GWRQRLSRHRQPVRLFTESRGRVVASIGRGRRRRRAISCCSSPDADGPRPAAPPTSAAPSDGSIQLYSQIERVITEAAKQSREGWGSTGDWTEVEGSWVLRPKSLEPSFVVHFVGGIFVGAAPQITYRFFLECLANRGALVIATPYASGFDHFFIADEVQFKFDRCLRNLDEPVNDLXNVXGXGHSLGSVIHMXLIGSRYAVQRSGNVLMSFNXKXASSAIPLFSPVXLVYXXQSLXPIFLQLASYPTXIDFGAEAAIKQLEN

SEQ ID NO: 254494 - protein, 214 aa, Zea mays
  Clone ID: MRT4577_163678C.1.pep
MLRFPVIVPMAQSFGPIFSQLASYPTIRFGAEAAIKQLENLSPPVVKQLLPLLQQLPPLYMDLIKGREDFIPKPEETRRLIKSYYGISRNLLIKFKDDQIDETSTLAQVLSSEAAISSLLDMSIRSLPGDHGLPLQQVLPDVPPAMADAVNRGGELLTNLTTGTPWEAVAKEVGTTLGTDSGILRAQISKDVETLVDVIASWTSSNSGPRLLRP

SEQ ID NO: 254495 - protein, 451 aa, Zea mays
  Clone ID: MRT4577_163679C.1.pep
MIRMAAASQPPSSALRMHGCGGAASASSAPVRLFTESRGRVVASIGRGRRRRRAISCCSSPDADGPRPAAPPTSAAPSDGSIQLYSQIERVITEAAKQSREGWGSTGDWTEVEGSWVLRPKSLEPSFVVHFVGGIFVGAAPQITYRFFLECLANRGALVIATPYASGFDHFFIADEVQFKFDRCLRNLDEPVNDLPTFGVGHSLGSVIHMLIGSRYAVQRSGNVLMSFNNKEASSAIPLFSPVIVPMAQSFGPIFSQLASYPTIRFGAEAAIKQLENLSPPVVKQLLPLLQQLPPLYMDLIKGREDFIPKPEETRRLIKSYYGISRNLLIKFKDDQIDETSTLAQVLSSEAAISSLLDMSIRSLPGDHGLPLQQVLPDVPPAMADAVNRAGELLTNLTTGTPWEAVAKEVGTTLGTDSGILRAQISKDVETLVDVIASWTSSNSGPRLLRP

SEQ ID NO: 254496 - protein, 46 aa, Zea mays
  Clone ID: MRT4577_16367C.1.pep
FASPLLGVHPAANACGLHTKKILPSPETGSGSRRALKHGEGGGLHL

SEQ ID NO: 254497 - protein, 114 aa, Zea mays
  Clone ID: MRT4577_163680C.1.pep
GREESGSRSREPGRSPRGFLRWGRGRTRQWDGREVDDDARCEGWGRRGLGRQNRTRCGRLQYVLKGVVKIESVVCFISNCSKKLKRKVYYSNIPKCLTRCCESKKLKCAVSTRK

SEQ ID NO: 254498 - protein, 139 aa, Zea mays
  unsure (1)..(139): unsure at all Xaa locations
  Clone ID: MRT4577_163681C.1.pep
QAPTLTPFRLPTQTGHELTATSHVPHPLVHVLLLPMSPPLELDYIGLSPPAAAXRXAENDELKGTERRLGLPGSGSPDRRVVAATATTLDLLPAKGAKRGFSDEAPPPSPVATAGKGKKVAEEEYDEKKVAATPQPAAK

SEQ ID NO: 254499 - protein, 305 aa, Zea mays
  Clone ID: MRT4577_163682C.1.pep
HPSNRSLFAPAPTRTLSPSLPFPLPGSHSHPFRLPTQTAHELTATSHVPHPLVHVLLLPMSPPLELDYIGLSPPAAAAAAENDELKGTELRLGLPGSGSPDRRVVAATATTLDLLPAKGAKRGFSDEAPPPSPVATAGKGKKVAEEEYDEKKVAATPQPAAKAQVVGWPPVCNYRKNTMTTTQLEGSKEDGDAKQGQGFLYVKVSMDGAPYLRKIDLKTYKNYKDLSTALEKMFSGFSTGKDGSSEYRKDGEYVLTYEDKDGDWMLVGDVPWEMFAGSCRRLRIMKGSDAIGLAPRAADKSKNRN

SEQ ID NO: 254500 - protein, 301 aa, Zea mays
  Clone ID: MRT4577_163683C.1.pep
SLPRFHSPFPLPLPLSLSLSTLRLPLPPYRLPYPSHTNGHRELTTLRFDSHSHSPFPLSGSHSPPTGYPTHHTQTATPHLPRPPVHVLLLPMSPPLDLDYIGLSPAAAAAAAHDDLKGTELRLGLPGSGSPDRRVVAATATTLDLLPAKGAKRGFSDEAPTPSPGAASGKGKKVAEEEDDKKVAATPQPVAKAQVVGWPPIRSYRKNTMSTTQLKGSKEDAEAKQDQGFLYVKVSMDGLSEYRKDGEYVLTYEDKDGDWMLVGDVPWEMFADSCRRLRIMKGSDAIGLERRHNSWSLHLWW

SEQ ID NO: 254501 - protein, 96 aa, Zea mays
  Clone ID: MRT4577_163684C.1.pep
LSVVISVEATGLLSLNKEERPTFSRPFMSAKTSPSGLVLLVPPEATSRLSKTPAFVARRAPAFFSALAGSIITLLSSIGILTFSCVGSSVSKAYFL

SEQ ID NO: 254502 - protein, 126 aa, Zea mays
  Clone ID: MRT4577_163685C.1.pep
VNMKKESHVFNLYHHDFCTQKDHAELMIVHRSPVPLGFAQGKPIGGSITSVSPRPSRNLACLKHIQDDGYLLVTYFIGMTVSAVSFRPVLSQSRTVFVAMSYQYIGLHNSIESPFNIGKTARLWAA

SEQ ID NO: 254503 - protein, 126 aa, Zea mays
  Clone ID: MRT4577_163686C.1.pep
APECTRADVPSIADRAFYPTHTMSSIYVHCAVPPSVHILLIRSAFLQTDMCSLRPIITTLHRRSSWSSSLHIKGLMRDEGLEELLLISSKKRCACGMIVVLPHPWYHLHLTPPLPAFASFILKLLD

SEQ ID NO: 254504 - protein, 764 aa, Zea mays
  Clone ID: MRT4577_163687C.1.pep
MPSPSRATPGISADSTIPDDSAPLAARCRSSRNRQLSGASSVSPIRAPIFPPLRQETESRPEKTPIALPTRLLPRSPPTRLLPPSPPSSTFTVVNGYRSNCFMQHIQIFMIVDQQGLFLLKHIQFFLMIEQHVDRPPNNPKHITIQSSQECFSVDIPYAEQSYPCPEVGNPPNVDSQNLINETVQLDSDEDDFMPALKKCNVSESHTRVLRKVVTKRIKHEELPRQRLNVRCNPQDVIASINILNERQREAIRRKGFSNILDMTVDALCSRSHLQWLMDKLDPKDMTIRPGPEKELKITNDIVHLILGVPNHGGGKPLGIDEAVAASNLRAELGLAKDEFNVTFLQDRLRKGEDDDLTIRSAKKWHNRITTNVSTTIYGCSIVVLLYYLDHLHAAAAPQNKIGTPRIKFFDKNTIKALTKVDKRKVHHGAEPFGHCEAGGHGFLLILLNNQPECRTNIFDAPRPAPTPRPTFNIQLPSIKEMMSSKINDLPPRHRSKFTDILAAYDLEVNKSCIAIKDSIDKIIEKQYDIADKFIELIDEVLRAESDNLENETDEPQHPRNSADSAGHTVHATQPTPDMPSQASQLDTQLGVTQFEEIHERQQHIRRVLETCPDESDVVTGQQVPSQDDTLKETTISGTDPLLTELECVRSLWDLLCSKDIDQSRVVIDYGEYSANCIDIYESFAEGKCLENVFMQCFIECVRDDSKNHRRTMTSNRLVLDVNVGNCLHNTLPPLVNLDKCNSVSVPMLSRGHWTLCHNFFQST

SEQ ID NO: 254505 - protein, 96 aa, Zea mays
  unsure (1)..(96): unsure at all Xaa locations
  Clone ID: MRT4577_163688C.1.pep
CCGARRRSRSXAFPVPVPQSPVGVLDAGYLSYKSEDDAAAAATAASHGASGSSSSSPVTSKRRKLTSRXDGXCSDLPKCVPNDQRKLTTLLTLIFF

SEQ ID NO: 254506 - protein, 531 aa, Zea mays
  unsure (1)..(531): unsure at all Xaa locations
  Clone ID: MRT4577_163689C.1.pep
MENYCESIDYYQKPSHAPNKPTTMDEDKDDNNDTGKGKAVLGAGPYHHHHHATAADQQEPESQEEFFSDSESGSESIEIADLKKRMWKDQLLLMKLEGRSGRDRXPSSRSISIPLLTTTRRRRLPCSSRPRTTRSRXSRYRRKAMLRAQDGVIRHMLKMMEACNARGFVYGVVNESGVPVSGSSDSLRGWWKDEVGFERAGPLALSVAAAAGLDDPGSPMAASFLHGLHDIQDSTLGSLLSALIQHCEPPQRSFPLDRGLAPPWWPTGREAWWGTQGEAQAHQGPPPYRKPHDLKKAWKISLLSAVIKHLSPRFDQMRKLVWQSKRLQHKMSARDADTWSKVITQEEALDRHAQRALQITPLEEEEDDDGGPDTDAGGDSPMAAAHVEKRKRKVGGPGHTGSSGVDVGKELLPLPDIDCVPYADRSSIEELMKLYYRCLQGTDDGEHEAKDAVAVRDGGQHNSSIAVAETTQPPPVAHDSMLQGLQRGGTTLPDGSAVHDDDMLSSLLGIADVVDMTDFPNSPIWQWGVYD

SEQ ID NO: 254507 - protein, 73 aa, Zea mays
  Clone ID: MRT4577_16368C.1.pep
PKRPTLYTGRARRVSLFLLLEKHWNTLVVRVSPCLAVSTTHESSCLAFVQIHRRASQIKMPYRGHMYMCRPFG

SEQ ID NO: 254508 - protein, 120 aa, Zea mays
  unsure (1)..(120): unsure at all Xaa locations
  Clone ID: MRT4577_163690C.1.pep
GLSAANPSGRAFLPPGVIISPAIRAQRKGAGSEFKSHTHHRKGPTTXRSLNFXKRNWYLKGVATDVIHDPGRGAPLAKVTFQHPFRYKHQTXLFVPTEGMFTGLVVYCGRQATLSIGNVL

SEQ ID NO: 254509 - protein, 67 aa, Zea mays
  Clone ID: MRT4577_163691C.1.pep
ITGGTSARYCITGNENSWVQALENRGLQMVSTLTICLHKWLFKWHWCSDLQNHLWRSFLCGPYNSIW

SEQ ID NO: 254510 - protein, 376 aa, Zea mays
  Clone ID: MRT4577_163692C.1.pep
LEVEKRLRRHSEDLLRKLGMELSEIKSAFLKSVKDLEKEKKGNRLLEDLCDQFAMGIRNYEEELRVVKQRNVKNYELKFDNSVLHMSELWLDERMQMQNTDVNGELAHKTTITERLSGEIQAFLLSKKAGSSMNNEKHMNDNTRLRRQSLESVHLNGATSAPQFAEDDDDSIASDLNCFELNMHGHMGSRRSGTGAMNVHKRRSEHPHVISAEGLCMSSVPVYLQKGIARPSSSKLQPASKIPEISSQSNARITPAEEQNGSTGTQIIQGSNNGSTMNNPDAHHVDYLGQESFDHFSRTSLFCEGTTSGDLGNVGSPTRQLKYQSTSLDPEITECSPEQPVGVMENTLKAKLLQARLEGRHARLKASGGSSTSRRK

SEQ ID NO: 254511 - protein, 188 aa, Zea mays
  Clone ID: MRT4577_163693C.1.pep
MACSFPPSSATRLHALDAAAAGVKNGRVPLKASVAPAQRSLGCCRATARQEGATQEPSVAASSARAQLDLLEQLTSATPDDTAAGLENGMPPPEPRRRATIREQLSALANGKVDEFTLPLGKRLKEGLKRLNSLTVSQRRNIKRQALLTQVSGRNDSVFFATVGAFVLVPPLAILAIGVLTGYIQLFP

SEQ ID NO: 254512 - protein, 63 aa, Zea mays
  Clone ID: MRT4577_163694C.1.pep
NPLELRDKSMARARLTWKLPWKTRMMASRMPMQRSVGSDCRLVSGGRAKDVGREVVIDDWLWN

SEQ ID NO: 254513 - protein, 214 aa, Zea mays
  Clone ID: MRT4577_163695C.1.pep
MACSFPPSSATRLHALDAAAAGVKNGRVPLKASVAPAQRSLGCCRATARQEGATQEPSVAASSARAQLDLLEQLTSATPDDAAAGKDPYCTQGYKYSVIEPNSHDKRSSSGLENGMPPPEPRRRATIREQLSTLANGKVDEFTLPLGKRLKEGLKRLNSLTVSQRRNIKRQALLTQVSGRNDSVFFATVGAFVLVPPLAILAIGVLTGYIQLFP

SEQ ID NO: 254514 - protein, 71 aa, Zea mays
  Clone ID: MRT4577_163696C.1.pep
SLIGRRTGISLWWCSYYMLVVVLVIFSLIGMSSVFSAGRHHGQCMFNLCSRWWFSRGHSGCAHVDVALSFL

SEQ ID NO: 254515 - protein, 133 aa, Zea mays
  Clone ID: MRT4577_163697C.1.pep
MTQGAADRKLLSSGTILLRCTFVGGDDERGDFTGEQLRYPCKLRRHICAECGMHRGEHGGRPGAGVRVRDEDLPPRKRAVFRARGELQPMVMGLGGGEDEGDGEREGQAWATADAVAKGKRGARRRRAAWREL

SEQ ID NO: 254516 - protein, 37 aa, Zea mays
  Clone ID: MRT4577_163698C.1.pep
YPPCYHTLITTSPFLTPIITDTLSNPLITPPFNLFPS

SEQ ID NO: 254517 - protein, 88 aa, Zea mays
  Clone ID: MRT4577_163699C.1.pep
ADLEGLKAYPGEVAPRGTETQAGHEALYYRHKAQSGLRSSHCLTHTDMMTMKRYWTEITSFRLYMAQLRSSDFVARQPLDECLRVTVS

SEQ ID NO: 254518 - protein, 110 aa, Zea mays
  Clone ID: MRT4577_16369C.1.pep
LGRPTSPYPTAMTAVCETSTSTPTPKTIPVGTRLLSRSLACWNRARRLKKHALPFGQGVNDQQPGFGERSPRRQARQPPTGEAGGAARRHTRGARVGGPDRRGHQDNARA

SEQ ID NO: 254519 - protein, 99 aa, Zea mays
  unsure (1)..(99): unsure at all Xaa locations
  Clone ID: MRT4577_1636C.1.pep
QRPRTRPLXSQAKTLMFVHISPEXDAVGXTISTLKFAERVSTVELGAAQLNKESGEVRELKAQVYFCCYVMLSYFLLPFLYSTYSCSLFMLRLLNLNQH

SEQ ID NO: 254520 - protein, 106 aa, Zea mays
  Clone ID: MRT4577_163701C.1.pep
MATGRAVAVAMVAAAVAAAALPLLVGGAYADCYNYGFTDCLTKDRSLKDYCSYACDRTCAPDAAPRRPVAGLPINCQLACVRDSCSRRRADANDMKACYGQCYDRC

SEQ ID NO: 254521 - protein, 89 aa, Zea mays
  unsure (1)..(89): unsure at all Xaa locations
  Clone ID: MRT4577_163702C.1.pep
RDVCLYICNGPGNKXAWLSDPHEHSFMCGTQEQKNLFAPLFRGGALPWAKLRKKTMCECTTNVVFRNLHSMGACMCGIYQYQKPVTLWK

SEQ ID NO: 254522 - protein, 43 aa, Zea mays
  Clone ID: MRT4577_163703C.1.pep
VRALGAFSDHHEGDGLCIFSMLVVLLDILSNVRCRDPTVDHPI

SEQ ID NO: 254523 - protein, 59 aa, Zea mays
  Clone ID: MRT4577_163704C.1.pep
AVLVRNPGLALQASDPARFQNLMQTLDFRYQALASGIGQHAEQRKIEIEREKSEKANAQ

SEQ ID NO: 254524 - protein, 119 aa, Zea mays
  Clone ID: MRT4577_163705C.1.pep
PAGVSAFSNNRRSGGDHRRPCGTSSHRMQCSAAGISIGRVRRRQLSGSQCVCVQVQARPDKIRIEWHGPCRGMNERSCICISDFLIPNDYLSVLAAPPGPQQLTCLVCREEILSVGKWK

SEQ ID NO: 254525 - protein, 83 aa, Zea mays
  Clone ID: MRT4577_163706C.1.pep
KLKLKLKYKQLNTRRKQNYICLFATAVPKLFLYTVTTKVPTSLFHKFKFGLYILLTWLLNVHIIPSASSSYKQFFFYYSVISP

SEQ ID NO: 254526 - protein, 87 aa, Zea mays
  Clone ID: MRT4577_163707C.1.pep
SPCSGSDSCHLATPLSAVHSALKISAVLCASYEVQLHHDPPGMGLHRRAFDRRRGGGSSRLEARVWGNTPSHRPAVVRKISRPARGT

SEQ ID NO: 254527 - protein, 74 aa, Zea mays
  Clone ID: MRT4577_163708C.1.pep
RHGSGINLVAGGPTFLGGAPPFLFFFFFFFFFFFFFSVRNHPSGVLVRASLVLESVGGSNSLSISSWVHYRCTN

SEQ ID NO: 254528 - protein, 76 aa, Zea mays
  unsure (1)..(76): unsure at all Xaa locations
  Clone ID: MRT4577_163709C.1.pep
MENNESGEQGEEERRNRGRHRRVTKDNCHTRIQLVANHRENYHSPTQXGHSXRGVYQIRPNDWSDILNEHQIQVRI

SEQ ID NO: 254529 - protein, 81 aa, Zea mays
  Clone ID: MRT4577_16370C.1.pep
PRVRPRVRARVRPRVRPRVGSSSARSRALAKLGTAPSSTHKFRCFHKVQAPRITREWNPLWTRSWTWKLSLCHQASRLSSV

SEQ ID NO: 254530 - protein, 64 aa, Zea mays
  Clone ID: MRT4577_163710C.1.pep
GFAGQKVTSSAGLGDIVHIDPDFFRYFVRFDRGGSSVEGRSQREPSASVLPGEVRVVRQVHGAG

SEQ ID NO: 254531 - protein, 70 aa, Zea mays
  unsure (1)..(70): unsure at all Xaa locations
  Clone ID: MRT4577_163711C.1.pep
TRYIRGIESAAAYWVTFSKRLRVLCKKAXDLAVLCDADVSLVEFSDTGKLXSIREPPVLNDIVDRYRPHF

SEQ ID NO: 254532 - protein, 109 aa, Zea mays
  Clone ID: MRT4577_163712C.1.pep
MADYYHGVEQEHFKREEKEHKHKERLGEVGALAGGAFALYEGHRAKKDPANAQRHKIEAGVATAAALGAGGYAYHEHREQKEAHYESRQQEHRVPHGHGHGHGYSYYCD

SEQ ID NO: 254533 - protein, 91 aa, Zea mays
  Clone ID: MRT4577_163713C.1.pep
RRGRCRCRPSSVCTWSAQLHPSVCSTSVTLRQLTSACPGCCRLASAPAPCPPYRPLAARLRIHNRPVSRPGALLGSRPSVAVTGRSQIHRR

SEQ ID NO: 254534 - protein, 163 aa, Zea mays
  Clone ID: MRT4577_163714C.1.pep
MADYYHGGRAMYSNTDECYDAGRHGGSVRAYSRTDEYYDNVDDRMRRPAYGADDCGYGGRQTAVYADEYSRGGRYEGYGVEQEHFKREEKEHKHKERLGEVGALAGGAFALYEGHRAKKDPALGAGGYAYHEHREQKEAHYESRQQEHRVPHGHGHGYSYYCD

SEQ ID NO: 254535 - protein, 45 aa, Zea mays
  Clone ID: MRT4577_163715C.1.pep
MHPMYNICAERDARTMHFTVEVEAGSGKKLCKAKVGAVWNNFKQL

SEQ ID NO: 254536 - protein, 75 aa, Zea mays
  Clone ID: MRT4577_163716C.1.pep
IDGVVIEQHTRDDVCSYLLTRTHVYGARGRIYIEFCMHISIDGMISRFSRSGSSRPSSQALSYATSVGPRRIFRP

SEQ ID NO: 254537 - protein, 566 aa, Zea mays
  Clone ID: MRT4577_163717C.1.pep
MADGDPEPAPAPAPALANEKLHVRAAAYVDETRPPPPLEPSGGPDEEKRPPEEVEAEVEMHPPREPTGEPPVDRPGVEVVADMKANEVEKERGDRAKEKREKDKGKGKEEKEKVDEEAKGKVTAVMKVDGTEKEVKPTRRPAGASAETPILAVPVVAVPCFIAPPGFAGQFAMTHQAALASVTAQAQMHLQSPTPSACSEVPSSPFYMTPRSLVPLQHSPSVTEGNICTPIADKSFSSDSKSHHVVNMVADGFNWRKYGQKQVKSSDNSRSYYRCTNSGCLAKKKVEHFPDGRVVEIIYRGAHNHEPPQKTRFAKERVTPISVPSGGETLRLVNTEIVESSTPTCELERSAISETSEQHLFCSSDCEGDAGNKSEDEHPSAEALPKRRTLEATAPNLTPVRRTVREQKIIVQAGKMSDGYRWRKYGQKIVKGNPNPRSYYRCTHGGCPVRKHVEKAPDDVNNIVVTYEGKHNHDEPFRSSSIPVSVISPSATATEQPNTSSTSDERPPTITQKDANSESDKETTLKFGGEKALESAQTLLSIKTNSDDMKNSVLKETSAAVPVQNN

SEQ ID NO: 254538 - protein, 181 aa, Zea mays
  unsure (1)..(181): unsure at all Xaa locations
  Clone ID: MRT4577_163718C.1.pep
MADYYHGGRAMYSNTDECYDAGRHGGSVRAYSRTDEYYDNVDDRMRRPAYGADDCGYGGRQTAVYADEYSRGGRYEGYGVEQEHFKREEKEHKHKERLGEVGALAGGAFALYEGHRAKKDPANAQRHKIEAGVATAAALGAGGYAYHAEHREQKEAHYESRQQEHRVPHGHGHGXYSYYCD

SEQ ID NO: 254539 - protein, 101 aa, Zea mays
  Clone ID: MRT4577_163719C.1.pep
MEGGEQSCWLLMAGEQEDDGWGKWQPGGAHSRGKIIGQRGARPCPRTGAMGKLEIAGRGTTICCRVRAGAWGREMPWRQQRASAKPCRTPARSWFPCGRVG

SEQ ID NO: 254540 - protein, 472 aa, Zea mays
  Clone ID: MRT4577_16371C.1.pep
MQRRRGHTWAGVGKTAQAAAAHAALFCFTLLLALRVDGRTAYSWWIIFSPLWLFHGIVARGRFSMPAPSLPHGRHWAPCHSIVAAPLLIAFELLLCIYLESIRVRNHPSVDLKIVFLPLLAFEAIILIDNFRMCRALMPGDEESMSDEAIWETLPHFWVSISMVFLIAATTFTLLKLSGDVGALGWWDLFINYGIAECFAFLVCTRWFNPMIHKSPTHGEASSSSAIRYRDWESGLVLPSLEDHEQEKLCGLPDIGGHVMKIPLVAFQVLLCMRLEGTPPSARYIPIFALFSPLFILQGAGVLFSLARLVEKVVLLLRNGPVSPNYLTASSKVRDCFAFLHHGSRLLGWWSIDEGSKEEQARLFYTESTGYNTFCGYPPEVVRKMPKKDLAEEVWRLQAALGEQSEITKCTKQEYERLQNEKVLCRICYEGEICMVLLPCRHRTLCKSCAEKCKKCPICRVPIEERMPVYDV

SEQ ID NO: 254541 - protein, 130 aa, Zea mays
  Clone ID: MRT4577_163720C.1.pep
MADSKDLNSASPNSDTRLTNLSAAEHENLKDDMKKMDEEIQQQQDQMLKVVKKWYLSHFKVDRHQKVVKEREIDTDYMSSVLQQLPTIGDARRQNNCAKHIGNKWVSLAIFWYADGLISRTTVTTIFAKW

SEQ ID NO: 254542 - protein, 661 aa, Zea mays
  Clone ID: MRT4577_163721C.1.pep
MADSKDLNSASPNSDTRLTNLSAAEHENLEDDMKKMDEEIQRQQDQMLKVAKKWYLSHFKVDRHQKVVKEREIDADYMSSVLQQLPTIGDARSVDDIPSIKISFDNRIKSITEDIERMAHALGKTHMPSFLSHKLGAKTIAPNTSATNGFTQPYSGMPMDSYPGRPSPPSSLNGESTLSTTGPSVHNHGPSGPPSDRPAPYAGQSGVTQSPPQGSQVLSDVAGQSEDSTGPSDPPADRPTVQVGPSGAPEVTCDPPSAEGRHKYNRPPKPQELKKSHVPELVWPTKAKPSVRSYPHSKQKEKVKFTFNITKCDKIFDELLKHGNIKLSHVIPPVEQLKGRVYCKWHGSFLHNTNDCAIFRRQIQSAINEGQLRFQKEVKIDRPPVPVTTLEPMSKKAIIRPCAADKSKNKNIVIGDPRTPNMSRGIVTLKAPDKRKTGGTGGQARSDTRSRSPVMRTPDDPGTKAEQSETGADSPAMMAGRSADGQKQQPQTIRPQRSNTSVRKQNTTKTSGRLSRVGPTFGQLLAKYMKKAIPHNRPIKQTKSKGRPVRKQKPTKRTQRVAQPRSPYHPPPGIAWEDTAPAPRSRTVRPKAADRPRHRRGHYQAIRRPVAGRHYRSPCGAEPKVPSTAKRFIIVFGDQKGTNTCRISSGDLLREALTLAR

SEQ ID NO: 254543 - protein, 37 aa, Zea mays
  Clone ID: MRT4577_163722C.1.pep
QKAVGCSEHTLCFKHIPLWACWWFYLHWIGLPPLPLD

SEQ ID NO: 254544 - protein, 96 aa, Zea mays
  Clone ID: MRT4577_163723C.1.pep
YFLTTQTILLGHVRDIFFNLHTLIYLFTTPSGITPPFTNKSLTLPIITHLILARHLLAITRKRQTILGERHLQPITWFEQHESAYNRNALFPDIGV

SEQ ID NO: 254545 - protein, 80 aa, Zea mays
  Clone ID: MRT4577_163724C.1.pep
LSGGHFLNRHLSENVFFSFIDLPKTIICSFIYYFRFTGPLSFILFSYIIPLRLCFRILIFFYILFSFFFFLPSFFFVIFS

SEQ ID NO: 254546 - protein, 53 aa, Zea mays
  Clone ID: MRT4577_163725C.1.pep
HFLMAIKKGSFPHLQSQGRIIFLLCCSGTGKLINHTVHRRPCLFKKRPKCLES

SEQ ID NO: 254547 - protein, 537 aa, Zea mays
  Clone ID: MRT4577_163726C.1.pep
MAADTSKPFFPAAPHSALRPSRSAASRAFPESSYWRAFRSSELLSDAGFPVTDLTFASSVEDRAAPTLAASWSTSVHVFSSDPLEKLRRISVAGDLAFSPSFRCDGALLATGDKKGVVRVFRADKAATGALRTLRAHAAETRVVRYPVAGGDKLHLLTAGDDALLAYWDVPSETPVFSIPAAHQDYIRGGAASPADHNIFATGSYDRSVKLWDARTSNTGPSLSFSHGELVESVLFLPSGGLLATAGGNVVKIWDVIGGGRLVHSVESHVKTVMDLTLGKMVNTGEMRLLSAGIDGYVKSFDFGKLKMTHSLRYPQPLLSVAVSPCGSVVVAGSAKGKIYMRNRKKKAVDEEEQGMKSVGGEIDWVSPEPEKSVLRPNYFRYFRRGQNEKAKEGDFVIEKPKKVKYAEHDKLLRKFRHKDALVSALVKNNPRSVVAVMEELVSRRKLIRCIGNLDNEELGLLLEFLHRNATLPRYAKLLLCLANKVVEMREADIRSDEKLKVHMRNLKRMVAEEIQIQHMLQGIQGMISPMLALATR

SEQ ID NO: 254548 - protein, 69 aa, Zea mays
  Clone ID: MRT4577_163727C.1.pep
PVRLSEVSPAPKGLFSFVPLGATKGCLFNLRLCCCWTNKFPSFERLALICLNQHGLWNNETRYPRQDLF

SEQ ID NO: 254549 - protein, 41 aa, Zea mays
  Clone ID: MRT4577_163728C.1.pep
YAYADSGEPVAFRALKTNKGQIKRLSTRECLARNSSLLKDI

SEQ ID NO: 254550 - protein, 183 aa, Zea mays
  unsure (1)..(183): unsure at all Xaa locations
  Clone ID: MRT4577_163729C.1.pep
MQLGNNQRISKGKKGANNKTAHPFSNKDCYDITAPSVFSVRNIDKTLVTKTQATRIASDALKHTLLDVXLAELQGDKXQAYIKTSIRAEDVQRKNVLTNFWRMXFTTVSTRXSLEKKRQTLIGCRVHVWTSDDYMLQEFCIEITKKRPNQAKTTXYAHAYQSRXTHRKMPEIMYQSMLLSVTL

SEQ ID NO: 254551 - protein, 116 aa, Zea mays
  Clone ID: MRT4577_16372C.1.pep
QHDQIWLDDGNKSQPRFPFSAPQNQWEKNSKHAATRTPIRTRIEQNLAQLVRGVFLSRSGDARPRPPPRSRDLARQLHPTATRPTRSTTRSEPWIHEENVRSTGTRRATRKRKGDG

SEQ ID NO: 254552 - protein, 528 aa, Zea mays
  unsure (1)..(528): unsure at all Xaa locations
  Clone ID: MRT4577_163730C.1.pep
HASVYDAICQARRLIYIIGWSMFHTIHLVRDGHDDMALGDLLRRKSQEGVQVLLLVWDDPTSRRLLGIKMEGYMGTRDEETRRFFKHSSVQILLCPRSAGKRHSWVKQQETGTIFTHHQKTMILDADAGNHRRKIVAFVGGHDLCGSRYDTPKHTLFRTLQTFHKEDYYXPNFAVEDARGPREPWHDLHSKIDGPEAYDVLKNFEERWLKASKRSAAKKLSKLSRSHNDSLLWINKIPDIISIDDEIYSNDDDPERWDMQIFRSIDSNSVKGFPKDPREATSKNLVCGXNVLIDMSVHTTYVNAIRGAQHFIYIENQYFLGSSFNWDSHRDVGANNLIPTEIALKIANKIYSNERFSAYIVVPMWPEGNPTGTLTQRXLYWQKMTMQIMYEIIYKAMKEVGLDGTYEPQDYLNFFCLGNREAEDTTCTSSGPFSTSNPQXYNYAAAWISNQDQARNNRRFMVYVHSKGMIVDDEYVIIGSANINQRSMEGTRDTEIAMAAYQPQHTLANMLSAPRGXIFGYRKIQCTC

SEQ ID NO: 254553 - protein, 98 aa, Zea mays
  unsure (1)..(98): unsure at all Xaa locations
  Clone ID: MRT4577_163731C.1.pep
VRLLRCGLGPCGGFSWGLGVFVWVCVVVGGAFVCSCSSGGGGGSLFGCLXSLGCRCRCPLCFRCLSCVVGLAVXRWLLLVVFCAXXVLPGSVVLXFPS

SEQ ID NO: 254554 - protein, 56 aa, Zea mays
  Clone ID: MRT4577_163732C.1.pep
GPHQGPPVLFLWRGPHPRRDQVLKNHHFAEKGFKILLRSYPRFQGFLFGLSHIRVF

SEQ ID NO: 254555 - protein, 59 aa, Zea mays
  unsure (1)..(59): unsure at all Xaa locations
  Clone ID: MRT4577_163733C.1.pep
QALQYSNFLSGVFRGALEMGFIKAEVTWGPDMFWGGNAFXMGVKLFNQGPGETPPKDDA

SEQ ID NO: 254556 - protein, 48 aa, Zea mays
  Clone ID: MRT4577_163734C.1.pep
CVFGSHSVPLVFQLLYNVHTQITASQINALVISNHFNFCCQYAMRWNN

SEQ ID NO: 254557 - protein, 182 aa, Zea mays
  Clone ID: MRT4577_163735C.1.pep
MGVQEVLSRKSGVIVGDDVLRLFEYAREHKFAIPAINVTSSSTVVAALEAARDAKAPVILQFSQGGAAYFAGKGVSNGDQAASIAGSVAAAHYVRSLAPTYGIPVVLHTDHCAKKLLPWLDGMLDADEAYFKEKGEPLFSSHMIDLSEEPVEWNIETTAKYLKRAAPMKQWLEMEIGITGGE

SEQ ID NO: 254558 - protein, 49 aa, Zea mays
  Clone ID: MRT4577_163736C.1.pep
PTTDRDVYDQATMKDSQDIQSTTELQSSAQGTNEVHSQQPNPMTTDAPA

SEQ ID NO: 254559 - protein, 68 aa, Zea mays
  Clone ID: MRT4577_163737C.1.pep
MAAIEDEEMEKKVQQYLHREGFRLTELALHEERSRLSTSDVALTRSDNNPSRYHEGYGRLLTCPHSSP

SEQ ID NO: 254560 - protein, 449 aa, Zea mays
  unsure (1)..(449): unsure at all Xaa locations
  Clone ID: MRT4577_163738C.1.pep
VLSNVAKVLGEADGVTNISQVKSGIESETDQEVEAKKAANKVYRKISEEDLNLEPLCDELVEYFATRMISAETLRRNKVMQRNWNNKISIAFTYRRDGALVGCKYRAVDKTFSQEANTEKIFYGLDDIKRAHDVIIVEGEIDKLSMDEAGYRNCVSVPDGAPPKVXLSFDLMPLYALCKARIRSIAIFGTAKTILTXEDFLQNSIITYFVRRADHFTDFVLAHGXASRIILATDNDRPGQALAEELARRLGKERCWRVNWPKKNDTDTCKDANEVLMFLGPQALRKVIEDAELYPIRGLFSFEQFFPEIDNYFLGIHGDELGIHTGWKSMDDLYKVVPGELTVVTGVPNSGKSEWIDALLCNINKQSGWKFVLCSMENKVKEHARKLLEKHIQKPFFNARYGGSAQRMTPDEFEAGKQWLNKTFHLIRCEDDSLPSINWVLDLAKAAVL

SEQ ID NO: 254561 - protein, 54 aa, Zea mays
  Clone ID: MRT4577_163739C.1.pep
DTCLSCVNKHCLLNGSHLFARVLYCSRQEFHPSMDRLNCVSPVWTFLLFLQKNY

SEQ ID NO: 254562 - protein, 325 aa, Zea mays
  unsure (1)..(325): unsure at all Xaa locations
  Clone ID: MRT4577_16373C.1.pep
LPGVCRTWAXNDGGHRALQLKPFSYDEEVFQALDFVISEARNHRMRLILSLCNNWEDYGGKAQYVRWGKEAGLDLTSDDDAFFSHATIKSYYKAFVKAVLTRKNTITNVAYMDDPTILAWELINEPRCHSDPSGDTLQAWIEEMASYVKDIDPVHLLEIGVEGFYGPSTPELLHVNPDAYSGTIGTDFIRNHHALGIDLASVHIYSDNWLTHSEEDSHLHFVKTWMQQHIDDAANLLGMPILIGEFGVSLKDGKFGHKFREAFMDTVYNIFLRSWKTGVIGGGCLVWQLFPESAEHMDDGYAVIFAKSPETTLKLLADHSRSLES

SEQ ID NO: 254563 - protein, 537 aa, Zea mays
  Clone ID: MRT4577_163740C.1.pep
MRPSDDRAQLSGFAQSDESTLDVEGHCCHQPSFPCSPSMQPIVSGCTHTENSAAYFLWPTSNLQHCAAEGRANYFANLSKGLLPKIGRRLPKGQQANSLLDLMTIRAFHSKVLRCFGLGTAVGFRIRKGVLTDIPAILCFVARKVHKKWLDPAHCLPAILAGPGGIWCDVDVVEFSYYGAPAQTPKVQIFTELVDKLCGSDECIGSGSQVASQDTFGTLGAIVKRRTGNKLVGFVTNRHVAVDLDYPNQKMYHPLPPNLGPGVYLGAVERATSFITDDVWYGIYAGTNPETFVRADGAFIPFAHDFDISTVTTTVRGVGDIGDVKVIDLQCPLNRLIGRRVCKIGRSSGHTTGTVVAYALEYNDEKGISFFTDLLVVGENRQTFDLEGDSGSLIILTGQDNEKPRPIGIIWGGTANRGRLKLRCDHGPENWTSGVDLGRLLDRLELDLIITNESLKDAVQQQRLALVAAANSAAGESSTAAAPAPEEKVEEIFEPLGIKIEQLPRHDVSASEAEEAAGINVEERQFISNFVGQVPCA

SEQ ID NO: 254564 - protein, 83 aa, Zea mays
  Clone ID: MRT4577_163741C.1.pep
GTANRGRLKLRCDHGPQNWTSGVDLGRLLDRLELDLIITSESLKGSAFSLLSVICVLLVFASLFRYWKIHCDVRFCCFLFHDR

SEQ ID NO: 254565 - protein, 127 aa, Zea mays
  Clone ID: MRT4577_163742C.1.pep
GCKSWRLLLTGRRHKQWRFPSPFSQLWIASGNRGSTAEAARPPSRPPLLPSSILSGFGEIPWDEHCSSPHSTPESRLISYKQAVDFWLLHTNSRWRFFFGAFCSCFSLSRKVTDYPTYCSSATCSAK

SEQ ID NO: 254566 - protein, 62 aa, Zea mays
  Clone ID: MRT4577_163743C.1.pep
CCIVMQGGWCYFRLVGGHACSSVWSARLSFFFGEPCVSWILGINGEFVEQEFSSVRKKQKGE

SEQ ID NO: 254567 - protein, 82 aa, Zea mays
  Clone ID: MRT4577_163744C.1.pep
EPAGQTTVTSHTRRSRVSFSPRRDGRDGMHHRTGVIPPAGSERGPGHPNDTHRNAARGATRARRGPPARAQCKLQVPGSDTT

SEQ ID NO: 254568 - protein, 80 aa, Zea mays
  Clone ID: MRT4577_163745C.1.pep
PGYLMTVHRLLRATYDDDGARSTLYIRAVLRLAPFPRPPWLHHSQVHIGSSTFREGGHEEVVVTCHPLRLHLLQHQPDHC

SEQ ID NO: 254569 - protein, 92 aa, Zea mays
  unsure (1)..(92): unsure at all Xaa locations
  Clone ID: MRT4577_163746C.1.pep
GRVGGLVGGRVGADAYLFGGPIFNDYSCVGXSLLLKREKAGIEQPDRMEVGDGQQIGXIHMPEFLRALAKRLMRNSTEYDNYRRIIVLDREP

SEQ ID NO: 254570 - protein, 152 aa, Zea mays
  unsure (1)..(152): unsure at all Xaa locations
  Clone ID: MRT4577_163747C.1.pep
FTNCYYLLQFQALXSVVQANPQILQPMLQELGKQNXKIVRLIQENQAEFVRLVNETPEGXWRVSKIKXMLISHEYINITLCCGEXNILGQLAAAMPQSVTVTPEEREAIQRLEGMGFNRELVLEVFFACNKDEELAANYLLDHGHEFDEQQQ

SEQ ID NO: 254571 - protein, 35 aa, Zea mays
  Clone ID: MRT4577_163748C.1.pep
TLFHSNLNAAPLHLRGLSHFHLTLATIHPRTYENQ

SEQ ID NO: 254572 - protein, 405 aa, Zea mays
  Clone ID: MRT4577_163749C.1.pep
MKLNVKTLKGTNFEIEASPDASVADVKRIIETTQGQSTYRADQQMLIYQGKILKDETTLESNGVAENSFLVIMLSKAKASSSGASTTTAAKAPATLAQPAAPVPPAASVARTPTQAPVATAETAPPSAQPQAAPAATVAATDDADVYSQAASNLVSGNSLEQTIQQILDMGGGTWERDTVVRALRAAYNNPERAIDYLYSGIPENVEAQPVARAPAAGQQTNQQAASPAQPAVALPVQPSPASAGPNANPLNLFPQGVPSGGSNPGVVPGAGSGALDALRQLPQFQALLQLVQANPQILQPMLQELGKQNPQILRLIQENQAEFLRLVNESPEGGPGGNILGQLAAAVPQTLTVTPEEREAIQRLEGMGFNRELVLEVFFACNKDEELTANYLLDHGHEFDEQQQ

SEQ ID NO: 254573 - protein, 66 aa, Zea mays
  Clone ID: MRT4577_16374C.1.pep
LPPSKLESLSRLLAADPYLDHVSGLAYRRRRSCYIRPEKKTSLVAHITVTPMCMSLLLLGRSGSLL

SEQ ID NO: 254574 - protein, 53 aa, Zea mays
  Clone ID: MRT4577_163750C.1.pep
IKLPSKATYASYIGHAKSFQYNKLEQRKAFQTISNRICRFLTKSYRALKLGLY

SEQ ID NO: 254575 - protein, 405 aa, Zea mays
  Clone ID: MRT4577_163751C.1.pep
MKLNVKTLKGTNFEIEASPDASVADVKRIIETTQGQSTYRADQQMLIYQGKILKDETTLESNGVAENSFLVIMLSKAKASSSGASTTTAAKAPATLAQPAAPVPPAASVARTPTQAPVATAETAPPSAQPQAAPAATVAATDDADVYSQAASNLVSGNSLEQTIQQILDMGGGTWERDTVVRALRAAYNNPERAIDYLYSGIPENVEAQPVARAPAAGQQTNQQAASPAQPAVALPVQPSPASAGPNANPLNLFPQGVPSGGSNPGVIPGAGSGALDALRQLPQFQALLQLVQANPQILQPMLQELGKQNPQILRLIQENQAEFLRLVNESPEGGPGGNILGQLAAAVPQTLTVTPEEREAIQRLEGMGFNRELVLEVFFACNKDEELTANYLLDHGHEFDEQQQ

SEQ ID NO: 254576 - protein, 102 aa, Zea mays
  unsure (1)..(102): unsure at all Xaa locations
  Clone ID: MRT4577_163752C.1.pep
MGEGVKEMLAPPIQLADEVAKQCAAARSFRAECAELKARADKLAALLRQAARARELYDRPAARILAGATQALSRASTLGARXAXGHPRLRNLFTLSPARRFP

SEQ ID NO: 254577 - protein, 580 aa, Zea mays
  Clone ID: MRT4577_163753C.1.pep
MVASRLRERDLTRAEALFGAAPAAARGLYLDTAMLDGYAKAGRVDRARELFDAMPVKNVVTWTSMVSGYFRAGRVQEARELFDVMPERNDYSWTTVVQGYARNGMLREAREMFDRMPQRNVVAWTAMVKAYVDCGQIQQAWELFDMMPERNSYSWNAMISGFLSIGKVAEAVQLFERMPHRHKNVVSWTTMVAGLANNGLACRAREFFDRMPAKDTAAWNAIITVYANNGQLNEAQRLFDSMLAKDLVTWSTIIEAYSKNERKHEALNMFLLMRHSAVSPNIRTLISILVISESTVEVKQIHGLVIALGFLSETSLGNALLTMYSRSGDLMSAWFAFKRLEQKDAITWTSIVQAFADHGCGYHALLGFAQMLRHGYKPSSTTFTAVLSACRHVGLVGKGRKMFKSIYHVYGLEPTIEHYSCLVDLLGRAGYVREAKELVDGMQQGMRDEAILATLLGACVVHNEVEVAREVGEDLVRFDPSGTGGYRLLANVFASHGMWDETANVWKVMRGSKAKRTPGFSQIEVNMRNHVFYSRDQEHPQCAEIYEMLIDTIAPQMKGSSCVGLWELTLLSDPRESTAW

SEQ ID NO: 254578 - protein, 43 aa, Zea mays
  Clone ID: MRT4577_163754C.1.pep
KYETWYNQCCYCVVNIHTRLTQLERFNLELKWGSYEFPKFLCI

SEQ ID NO: 254579 - protein, 402 aa, Zea mays
  Clone ID: MRT4577_163755C.1.pep
MKLNVKTLKGTNFEIEASPDASVAEVKRIIETTQGQSTYPADQQMLIYQGKILKDETTLESNGVAENSFLVIMLSKAKASSSGASTATAAKAPATPAQPAAPATSVARTPTQAPVATAETAPPSAQTQAAPAATAAASDDADVYSQAASNLVSGNNLEQTIQQILDMGGGTWERDTVVRALRAAYNNPERAIDYLYSGIPENVEAPPVARAPAAGQQTNQQAASPAQPAVALPVQPSPASAGPNANPLNLFPQGVPSGGSNPGVVPGAGSGALDALRQLPQFQALLQLVQANPQILQPMLQELGKQNPQILRLIQENQAEFLRLVNESPEGGPGGNILGQLAAAVPQSLTVTPEEREAIQRLEGMGFNRELVLEVFFACNKDEELAANYLLDHGHEFDEQQQ

SEQ ID NO: 254580 - protein, 239 aa, Zea mays
  Clone ID: MRT4577_163756C.1.pep
MGFWEKCDRECTWNKICCWVWAMGICGGVLAVLVVAFAVLFPPMVIAEDAVLQRFDLIMAGTSTQPAENWSISYNATVTLALLNLNIYRGISYGPLEASFFFNGSRFHRSIAMAAGFYHKPRKMVRLPLTVGGVDSLAASGALEFEAENKTGGFGLELRLETVMRYKGLNRVCAVVVICPLKLQLVHPGVPRNATDNCSENGDHNFCPTRCYNPVEKGGSGCTRVNIPYLIYHYQGFFC

SEQ ID NO: 254581 - protein, 88 aa, Zea mays
  Clone ID: MRT4577_163758C.1.pep
MVTTVSDYVHLSTVQQQVLELAGNAARDNKKTRIVPRHIQLAVRNDEELTKLLGGATIASGGVMPNIHQHLLPKKAASSKASVDDDDN

SEQ ID NO: 254582 - protein, 113 aa, Zea mays
  Clone ID: MRT4577_16375C.1.pep
SHRPYYPEIIALFEASRECVWLRKMVNHILTTCGIGSIESLTINKHIFSKLFYPQELQENADKNILQTKSCDNLADLFTKSLPYSTFQKYVEGIGMRRLKGLQGSGGVILRDI

SEQ ID NO: 254583 - protein, 46 aa, Zea mays
  unsure (1)..(46): unsure at all Xaa locations
  Clone ID: MRT4577_163760C.1.pep
VGVHANVNKNVTIRKEGIINYVMSLNGFESYYISIFTYXPLLFXFY

SEQ ID NO: 254584 - protein, 244 aa, Zea mays
  Clone ID: MRT4577_163761C.1.pep
PAGRLRARPGWARKRLRGAYELPGEGHPRIVRYLRPLESDIGVVVERLEPGPIEWHSLPALTVPLLQDLSENGRLMLSLYYRWALQVLSALQFAHSRSVFIRNFCTELVWLRSDFSLAITGFLAASAPQIEEENKQDGIASARERLQDSAYPNPMTLEEFDRRVREEGYAPWPFSDGEWIIDGSVSDAIYEGDEEHGSVKEDLYYWAIFVKYLVNNVFADASALQDGIPDEIERVSLGTIIANA

SEQ ID NO: 254585 - protein, 42 aa, Zea mays
  Clone ID: MRT4577_163762C.1.pep
MALVPAVASGLICGDGIWTFPSSLLALAKVKPPICMKFTAGS

SEQ ID NO: 254586 - protein, 143 aa, Zea mays
  Clone ID: MRT4577_163764C.1.pep
APTLSPRHSLSPAGLRSLAVSTKPGLAITFLAARVLLLLGAPSTVSVLHHRDTFLCFLPRRPNSFARCHSALPLRWPCVSFCSTSLRHPSPRPVVLCCAVGCSWSCAVNLPCELAPPRLLVFLSVVRYCCVGHPWPQAITCSA

SEQ ID NO: 254587 - protein, 99 aa, Zea mays
  Clone ID: MRT4577_163765C.1.pep
MEKVSFVKNGELRLPPGFRFHPTDEEPVLQYLKRKVFSCPLPASIIPEVDVCKSDPWDLPSDLEQERYFFSTKEAKYPNGNRSNRATNSGYWKATGLDK

SEQ ID NO: 254588 - protein, 124 aa, Zea mays
  Clone ID: MRT4577_163766C.1.pep
PPPEVPVLSFFGEGLGPQKKFLKGMPPQVGPEICEGRATSVEAFLFNKENPFPPPGGGPFLGNYKGLLKVGEPLFGFKVFSPFGHHPFFLNLFFPKKKKKKKKKKKKKKKKTKKKKKKKKTRGG

SEQ ID NO: 254589 - protein, 211 aa, Zea mays
  unsure (1)..(211): unsure at all Xaa locations
  Clone ID: MRT4577_163767C.1.pep
TTPNRHAAKKQRTGEGTGNPKKSPRKAPKKERAGQSAKPGKKRKRETAAGARGAGKGDGAPGGNPQHRREERPEKGGAKRPTKGANGGNANPKRPQRKEXPPPKRGRAQKGARGGPPXGFPGQTGEKPGQGKGKPPPKGPNGPPKRRPEPPPGGGPPPQXPQGGARPRDKLFFFFFFFFKKIFFFLKFLNFFFFFFFFSLCPSTVFHAKAA

SEQ ID NO: 254590 - protein, 52 aa, Zea mays
  Clone ID: MRT4577_163768C.1.pep
RPEHVVIDSYKTPDHCFYGDLNHNASFLMIKNTHIQTLGRLPPHWPTRDTRT

SEQ ID NO: 254591 - protein, 112 aa, Zea mays
  unsure (1)..(112): unsure at all Xaa locations
  Clone ID: MRT4577_163769C.1.pep
ARRDSLETVPPLQKLRSYSDRIRASELEKCLQKIGDDVFPQKMRRALEEVSPGLVNKVLPGPLQHLRWDGSNNRPPDXTLENKHAFNRMFSLDPEKAVLEQKIKAKVEKTQK

SEQ ID NO: 254592 - protein, 43 aa, Zea mays
  Clone ID: MRT4577_16376C.1.pep
DNRPNTGLLFGIAPKQKARQAMQIRNRTAFRGLNLVYEDAHAF

SEQ ID NO: 254593 - protein, 256 aa, Zea mays
  unsure (1)..(256): unsure at all Xaa locations
  Clone ID: MRT4577_163770C.1.pep
RPGCDRLVATASIYNEIHYPIYSILCPNTTFYLRMLLALSTCVDTTRIFPQWSQAPILYLLRPYLPXIIYYRCENPCLRPYKISQAIAYSNIPLSTLLPTQSPSLSLQSXLVXPSLCMQYVATQVXPAINQVVPTNLSPYSQNQRYLPFSALYTLNPGDYQXEQLLAXSQLATVYSHQRLLLXLNQVATLNTVCIYLQHXILLTFIELHAPKRATFLTSXAGAVFQXHMADNPATLLLVLTIVPSVQLAVTFPAAS

SEQ ID NO: 254594 - protein, 53 aa, Zea mays
  Clone ID: MRT4577_163771C.1.pep
AQLRQSLVHSTTYLVLLSLFSVSCPFLTGTEFTRIALLLQSHSCDGAPLKKKK

SEQ ID NO: 254595 - protein, 93 aa, Zea mays
  unsure (1)..(93): unsure at all Xaa locations
  Clone ID: MRT4577_163772C.1.pep
MDLLLRRRLLAVFFLXXXLAXCAFTGGEGXDLPQILGKHDEFSXXWKLXKETKLXXXMNRDRTITGLAVXNXDMGHXAGGHYWVGTMGHMLES

SEQ ID NO: 254596 - protein, 53 aa, Zea mays
  Clone ID: MRT4577_163773C.1.pep
YSCMLNETAGDHLFSRVTNETPLQYLHLAGDFSIPLWHQQVAHIFPRAQAHRG

SEQ ID NO: 254597 - protein, 70 aa, Zea mays
  Clone ID: MRT4577_163774C.1.pep
HGPTDGSREELPRTCDAYLVLHQERTDARELLIPSTRTSFRTPIGSTPPLALRRLLAQRATNSGDVMCSK

SEQ ID NO: 254598 - protein, 92 aa, Zea mays
  Clone ID: MRT4577_163775C.1.pep
PTRSPTRSKKKKKKKKKKKKKEKKKKKKKYKKKKIKKNKIIYRDSLIHPNFHTFYIVSHWYNTGVPNFNQSGRIFKIIPSGITLKVSQFISL

SEQ ID NO: 254599 - protein, 651 aa, Zea mays
  Clone ID: MRT4577_163776C.1.pep
MDDDDDNGRYPRTINEELVELGQLPDDVDDMGDVAAALFGVDSTHNPGPVSDAAGSNELDSLTSSSTGKRQSDVWDDFTEVTENRNGKKVRIAGIADTDAWDDYIQHAHNPRYVRVSRFTTARDLVKLYNDKLKNLKDVVFPTVSSICLTSDIWSGNAKEDYITVVAHFVNADWELKKCVIGFKLIQVSHNGVNIVERIACVIQYFGMIDKVFYVTLDNASSNSTAMLTLSPMLAGYLGADVDPTDTSNKTYSVLHQRCACHIINLIVKCGLKRFKDYLDVFRTAINFLNSSIQRIGSFSNYCKAKGCRPRKFGLDMDVRWNSTYLMLKHLLPYKSVFSVFINTHYGYPLLNEQHWYVAEKVLEFLELFYESTVVLSGVYYPTSPLVIHHILEFASHLHEHEHDTNLSDVVVPMKAKFMKYWKYIPMLYSFAFVLDPRAKMRGLYNVLKLLTQSNNYNYSTYFADVKTELYKLYAKYETKFGAARPSRTTHQSGMTGKRKQAWGKIFGGTGASRSSTASGSSCSSGPGVGICELTVYLDSDNVAAYEDNFDILNWWHEHKLTYPILSIMARDIMSVPASTTSSESTFSLSGRILEDRRWRWNSETVEMLVCIKDWELGQQRAQHVVVDNELEESFKDLWLDEGAGATDTLA

SEQ ID NO: 254600 - protein, 62 aa, Zea mays
  unsure (1)..(62): unsure at all Xaa locations
  Clone ID: MRT4577_163777C.1.pep
HFWXXIYIVKFRLMILTVDEMTYNLYMKAYAILYELFASFSGQFSICIYYGLNVFLTPHFNL

SEQ ID NO: 254601 - protein, 286 aa, Zea mays
  Clone ID: MRT4577_163778C.1.pep
MTSTTWEMLLLPLFGVSSSHTAIDLEGTPAKPVSDAAGSNVFDSLTSSSTGKRRFAVWDDFTKVTENCNGIADTDAWDDYIQRAHNPRYVRVYRFTTVRDLTELYKLYANYEPKFGPARPSKTTYQSDMIGKRKHAWGKVFGGTCASRSLTASGSSGSSGPGAGLCELIVYLDRDNVAAYEDDFDISNWWHEHKLTYPILSIMDRDIMSVPASTTSLESTFSLSGRILEDRRWCLNAGTMEILVCIKDWELGQQRAQHAVVDNELEESFKEIWLDKEGLEGVAAAS

SEQ ID NO: 254602 - protein, 730 aa, Zea mays
  Clone ID: MRT4577_163779C.1.pep
MDDDDDNGRYPRTINEELVELGQLPDDVDDMGDAAAALFGVDSTPNPGPVSDAAGSNELDSLTSSSTGKRRSAVWDDFTEVTENRNGKKVRIAGICKFCKARLSANSNAGTGHLLRHQKSCKKKSDHAAMVQTRLALNPDGSFRNWEYDPQVARTELCRLIARLDLPLGIADTDAWDDYIQHAHNPRYVRVSRFTTARDLVKLYNDKLKNLKDVVFPIVSSICLTSDIWSGNAKEDYITVVAHFVNADWELKKCVIGFKLIQVSHNGVNIAERIACVIQYFGMIDKVPRVRFSVTLDNAFSNSTAMLTLSPMLAGYLGADVDPTDTSNKTYSVLHQRCACHIINLIVKCGLKRLKDYLDVFRTAINFLNSSNQRIGSFSNYCKAKGCRPRKFGLDMDVRWNSTYLMLKHLLPYKSVFSVFINTHYGYPLLNEQHWYVAEKVLEFLELFYESTVVLSGVYYPTSPLVIHHILEFASHLHEHEHDTNLSDVVVPMKAKFMKYWKSIPMLYSFAFVLDPRAKMRGLYNVLELLSQSNNYNYSTYFADVKTELYKLYAKYETKFGAARPSRTTHQSGMTGKRKQAWGKIFGGTGSSRSSTASGSSGSSGPGVGICELTVYLDSDNVAAYEDDFDILNWWHEHKLTYPILSIMARDIMSVPASTTSSESTFSLSGRILEDRRRRLNSETVEMLVCIKDWELGQQRAQHAVVDNELEESFKDLWLDEAAGATDTLA

SEQ ID NO: 254603 - protein, 90 aa, Zea mays
  Clone ID: MRT4577_16377C.1.pep
TNVDFDEDHFVISEDGSYTGEEIHTLRGYHGRHEPVVPYVEAIIEDDADADAEGDASSSGSTMDTESALDVHEDAIEFESADGHECYLEN

SEQ ID NO: 254604 - protein, 130 aa, Zea mays
  Clone ID: MRT4577_163780C.1.pep
KFDKVVRSDTAGPLVPANRDGIHGYLEQFCGSPTRMCAAGRFVGEAMMIDVRHSCPRITAHASRHLSDTVHGYRFSCCLPCAHLGDYLVSKPPMATGVACHRMPVGPVATVALITLPLMTPDPKQSVLSA

SEQ ID NO: 254605 - protein, 74 aa, Zea mays
  Clone ID: MRT4577_163781C.1.pep
FFSKTPLQCGGNNHFYNIGGWKPPHFFLPTPLTPLRGPPPGKHGIRATPRPDAGLKKNFFCSLHPWCHPPPNKN

SEQ ID NO: 254606 - protein, 95 aa, Zea mays
  unsure (1)..(95): unsure at all Xaa locations
  Clone ID: MRT4577_163782C.1.pep
RVRRLVRPLVRSVAFLGSGLVAFCRSPALCRFAPLAFLPCAVAGCVRLRFLCVLVGFLSRRGPRLGVPGLSLVGXVPSLVPCWWVLAPALAGFCF

SEQ ID NO: 254607 - protein, 82 aa, Zea mays
  unsure (1)..(82): unsure at all Xaa locations
  Clone ID: MRT4577_163783C.1.pep
MVNVPKTKKTYCXIKECKKRTXLDKVTQYKNGIDSLSAHGKRRYDRKQSGYGGQTKPDFHKKAKTTMKIVLKLQCQSCKHYS

SEQ ID NO: 254608 - protein, 75 aa, Zea mays
  Clone ID: MRT4577_163784C.1.pep
KLGIRLERLDYTRAGVYSVDAPCFWGDGSSTLGLLYLKKNKKKKILSLILNLYIETTKCINHFLVGNPFITLLST

SEQ ID NO: 254609 - protein, 77 aa, Zea mays
  Clone ID: MRT4577_163785C.1.pep
ARNSARAFFSLKLKALQHELACSRASLKAKASELEDVKKTMQRRNAPVQRTQHPGPDRAVQTRDGDVVDAEPASDAS

SEQ ID NO: 254610 - protein, 125 aa, Zea mays
  unsure (1)..(125): unsure at all Xaa locations
  Clone ID: MRT4577_163786C.1.pep
HQQFLPXXHWAALNSAAYXXQQLPFSQLAAAYPQQFLPFNQLSAPPSYPIFRYNRLXPFSQVYDVSXHAFLSQHKLFXFYLVAVPNSXTSFPLALTGPFKLLVLXSATAFQXLPIIGCAIFYIGS

SEQ ID NO: 254611 - protein, 143 aa, Zea mays
  unsure (1)..(143): unsure at all Xaa locations
  Clone ID: MRT4577_163787C.1.pep
STLFWSDRWLMGHRVVDIAPRLLQNVPKRRXNERTATGALTNQTWISDIQGALAVGVISEYLALWDIVTSVQLRREVNDTHFFRLAANGKYSTKAVYEGFFXLGSTIFEPYHIIWKTRAPPKAKFFMWLVAXRLWTANRLENT

SEQ ID NO: 254612 - protein, 56 aa, Zea mays
  Clone ID: MRT4577_163788C.1.pep
AYRVVAGALLSGLFHPYEQLSLLASGHQYPVSRVQAITAYELRSAPALMRHQAIIR

SEQ ID NO: 254613 - protein, 65 aa, Zea mays
  Clone ID: MRT4577_163789C.1.pep
GLFPRDPLSGMWVPPQLLPQNGEALLLLLIVQRSCCRCGSSSSSRSRGSVGRRLLSGVMGIQFHT

SEQ ID NO: 254614 - protein, 119 aa, Zea mays
  Clone ID: MRT4577_16378C.1.pep
MSPSLLGGLTKSLAMTVLSEVGDKTFFAAAILAMRHPRKLVLAGCLSALTVMTALSASLGWVAPNLISRKWTHHITTLLFFVFGIWSLWEGFKEEGESEDLAELEAKLVCKFHSYLTSY

SEQ ID NO: 254615 - protein, 80 aa, Zea mays
  Clone ID: MRT4577_163790C.1.pep
LHDQTSVFGHCNEHTLTHHTSYYSERANGHTVESSITMKRTTTRCAYWADRISDGETRDGEYPRSKTPVPRRRGMASEAL

SEQ ID NO: 254616 - protein, 177 aa, Zea mays
  Clone ID: MRT4577_163791C.1.pep
ACLVEPIWRDLPAMVALSHPCNRLPMEATMATRTAPDILSSKISSEVTGSCEEHEAGGRGPGKARTTDGRSRSLRSRSGVKGVWTASQEPLRIYPVPPAACALATEYSCRRSGRSGASARPSARSERGGVEEMRKDTAPLSSEGARRSCSHHRCDLRAGAEQLHMHTQDLKAPLPAS

SEQ ID NO: 254617 - protein, 114 aa, Zea mays
  unsure (1)..(114): unsure at all Xaa locations
  Clone ID: MRT4577_163792C.1.pep
MDGENEPYVISDLNASLPAAAAALSAEDRAGLVNALKDKLQSLAGQHADVLKTLSPNVRKRVEFLRGIQSQHDXIDGKFFEERVALEAKYHKAXYKPLYTKRVLKLVKGENGGR

SEQ ID NO: 254618 - protein, 148 aa, Zea mays
  unsure (1)..(148): unsure at all Xaa locations
  Clone ID: MRT4577_163793C.1.pep
VIGQVALANLSPHSQQLLFLPFIFLFTLNRVVYLQHLLCPHSQLVPAYSQLPPLLLFTQLPAVNPGAFLLQQIRLPFSELAAASGASFLPXQQFLPFSRXFGAIPPTLSPFHQLLPFVHLPLPVSTTPRVLTHPRWCRCPVLFFFVNQ

SEQ ID NO: 254619 - protein, 131 aa, Zea mays
  unsure (1)..(131): unsure at all Xaa locations
  Clone ID: MRT4577_163794C.1.pep
WLVIVPWGXLHKLLNYIVKKYNNPVIYVTENGMDDEDDXSATIDQVLNDTKRVGYFKGNRSSRLHAIKDGADVRGYFAWSFLDNFEWAMGYTKRFGIVYVDYKDGLSRHPKASALWFSRLLKGEAAENSYS

SEQ ID NO: 254620 - protein, 153 aa, Zea mays
  unsure (1)..(153): unsure at all Xaa locations
  Clone ID: MRT4577_163795C.1.pep
KGPLKFFCFLTPPGSLKNQPWMGGRLFFFYFLGGGFFFGCGLQKGLVPPRGVFFFSHNPYGPPPGGLLFPLVSNFFKRGSRGTPVGPRLPPKTCCFLNAFWLEXKKKTKKQKKKTKKKQKKQKNKKKKXKKKPKKKKYKKTKTRPRPLRDSRT

SEQ ID NO: 254621 - protein, 95 aa, Zea mays
  Clone ID: MRT4577_163796C.1.pep
MIIYTTRCWGTCLSTSEHSALSICRRSCSIGRALVISGFLCAHARYNSYVAAPQMPPGAGRPPSTLSTGRGTSCGTRRPQLCACRAISQSHTQQI

SEQ ID NO: 254622 - protein, 34 aa, Zea mays
  Clone ID: MRT4577_163797C.1.pep
SFLGVSHDEQHRSYLSDRGALQRANDGANQRMGH

SEQ ID NO: 254623 - protein, 44 aa, Zea mays
  Clone ID: MRT4577_163798C.1.pep
SAGNPLPNHHSSIHPVGFPSHVGDCGEVSRGGAAQDSEGHQRLS

SEQ ID NO: 254624 - protein, 192 aa, Zea mays
  Clone ID: MRT4577_163799C.1.pep
EEQLREVAVGLQRSGHRFLWVVRAPLRGDTERLFDPRADTDLDALLPDGFLEATRDRGLVVKHWAPQVEVLNHRATGAFVTHCGWNSVLEGITAGVPMLCWPMYAEQKMNKLFMVEEAMVGVEMVGWQQGLVSAEEVEAKVRLVLEESEEGNQLRTRVAAHRNAATMARRGGGSSRAAFGQFLSDAAKLARE

SEQ ID NO: 254625 - protein, 41 aa, Zea mays
  Clone ID: MRT4577_16379C.1.pep
RQCHLCQINKAIKIKGGIIGLWPIRSIFTLPFGLGVLEIKM

SEQ ID NO: 254626 - protein, 66 aa, Zea mays
  Clone ID: MRT4577_1637C.1.pep
VPVDAQPVASLSVLFRLPSCGHYHGSECVCFQVSLGVMCFCPNTVCNLATVILCPLFRFLPAEHVL

SEQ ID NO: 254627 - protein, 84 aa, Zea mays
  Clone ID: MRT4577_163800C.1.pep
THVREPYDARGIVKQVGRCHPVLLRDEQKSEQSRTSNRSTDRASMKGLIMAESEVRDNWGDLTAAGNVYQHEGQLWGQLSQQDP

SEQ ID NO: 254628 - protein, 52 aa, Zea mays
  Clone ID: MRT4577_163801C.1.pep
QRPWTASNTDGIHMGDSCGITMINTIISISHYSLFIGPTTIHENITDSDLLA

SEQ ID NO: 254629 - protein, 103 aa, Zea mays; identical to SEQ ID NO: 235819
  Clone ID: MRT4577_163802C.1.pep

SEQ ID NO: 254630 - protein, 105 aa, Zea mays
  Clone ID: MRT4577_163803C.1.pep
MSGIIHKIEEKLHMGGDHKKEDEHHKKAEEHHKKEEGEHHKKDGGEHKEGIVEKIKDKITGEHGDKSGDHKEKKDKKKKKEKKKHGEGHDHDHDGGHSSSSSDSD

SEQ ID NO: 254631 - protein, 77 aa, Zea mays
  Clone ID: MRT4577_163804C.1.pep
HKYHNYALVCNRALGFIIFLSRLGMLLSEEQCIMILPRFCWNLKSLRTRTPPRKKTYLSSHKQIRRRTPDALTSFFL

SEQ ID NO: 254632 - protein, 398 aa, Zea mays
  Clone ID: MRT4577_163805C.1.pep
MAEGGEEARRRAAIAEYRKKLLTCRELEARVKTGRENLKNAKKNLEKTEEDLKSLQSVGQIIGEVLRPLDKERFIVKASSGPRYVVACRSKVDKEKLIAGTRVVLDMTTLTIMRILPREVDPVVYNMLHEDPGNVSYSAVGGLSDQIRELRESIELPLMNPELFLRVGIKPPKGVLLYGPPGTGKTLLARAIASNIDANFLKVVSSAIIDKYIGESARLIREMFNYAREHQPCIIFMDEIDAIGGRRFSEGTSADREIQRTLMELLNQLDGFDELGKVKMIMATNRPDVLDPALLRPGRLDRKIEIPLPNEQGRMEVLKIHAAGIAKHGEIDYEAVVKLAEGFNGADMRNLCTEAGMAAIRAERDYVIHEDFMKAVRKLNDAKKLESSAHYSADFGKD

SEQ ID NO: 254633 - protein, 178 aa, Zea mays
  Clone ID: MRT4577_163806C.1.pep
MNEQMMRPTAPLPFHQMWAAVPAMEPPVAAFKPARQAWKRAARTPWKRKAQPPAPPASVGGRWGGAAAPRNTTSFLIRAKRAGGVASLVSPCPVTPAVLPTPVLSPAREVLVEMAKEAWGVDGYGSMKGLIRLRADAGDAGGDDSGSGESEVEEHVEVERRLDHDLSRFEMVHLPAAA

SEQ ID NO: 254634 - protein, 96 aa, Zea mays
  Clone ID: MRT4577_163807C.1.pep
PWAGPAGSQRPRWLAGFLPWGGGGLTRTTEVLAHWFLNQPQEPLAELTGSFRPRGNTYCGAALSREKLNLSNNGLTQVTRSSIGGGQTPLLEYCST

SEQ ID NO: 254635 - protein, 96 aa, Zea mays
  Clone ID: MRT4577_163808C.1.pep
LAKLAGNKVVATCGGESKAELLASLGVDRVINYRNERVKDVLKKEFPRGVDIIYESVGGEMFDLCLNALAVHGHLIVIGMILQYQGEDGWKPKNYT

SEQ ID NO: 254636 - protein, 140 aa, Zea mays
  Clone ID: MRT4577_163809C.1.pep
EENSDFFSSHTHVDDEPWSRRIQHEHRDASMPKMHPGDTRRRLTCRTAPTVIRGMICVRWTTIFSSLNRCFNSLTWRCMYWNEYKHVDGNAAVASKASSDDERTNVRAEDGILCNMTLIHIERPLQDSSYSAQLVYLYQV

SEQ ID NO: 254637 - protein, 124 aa, Zea mays
  Clone ID: MRT4577_16380C.1.pep
RSFQTMSNHLPSHHEYTFVLGATISISRSSYSCSREMYSEYHLYSAFGWDPDTDYYTHADRRNLAGNSENAMPFQTLHHLIKLIIHPEPYSERCMHLLGRPLLGCSGTDPSTGRYLLSLIRRLF

SEQ ID NO: 254638 - protein, 65 aa, Zea mays
  Clone ID: MRT4577_163810C.1.pep
MCFLFISEVTTKLFAWTNMCFYYKQQSRWAGCFSGLSCFGSQKGGKRIVPAARTFDGNGSNTRGK

SEQ ID NO: 254639 - protein, 48 aa, Zea mays
  Clone ID: MRT4577_163811C.1.pep
YVLHEFISGLTFSKMNRMRLCNYGQHLKNNQLLNEISSCYTLISFFLV

SEQ ID NO: 254640 - protein, 68 aa, Zea mays
  Clone ID: MRT4577_163812C.1.pep
PCHHSSTSSTCAFPPPLFDKARQLCISHSSLLVPSHKVLMCYSSPLKFLGGCLWLSATKQKKRIKEGP

SEQ ID NO: 254641 - protein, 63 aa, Zea mays
  Clone ID: MRT4577_163813C.1.pep
VSEYTFLRQADVVAQMWYHRSPPINWRAGGPRCRSPKVYKVRWLSATSVLHLWRVSPLDFSFF

SEQ ID NO: 254642 - protein, 566 aa, Zea mays
  unsure (1)..(566): unsure at all Xaa locations
  Clone ID: MRT4577_163814C.1.pep
MELAEWQYRKYCTSEAKKALVGITGRRISDETSSKWCQQAPVKISDFLNNRAKSYARFKEDCRRKTLDKLTDQPGNLIPLDIAEVPNLSVMKQQSFVVSARRWYQRRRQTIERVGGRMFYLHDMARTKTTQRKSTGSQGVPRHRLASRHEARSSGSNDPIGDLEARVDHLRCHPGPVLMMGQVHPAAGRTLPTVSYFRVFGSKCFILIKRGRNSKFVPKAVDGFLLGYDSNTRAYRVFNKSTGLVEVSCDIVFDETNGSHVEQVDLDELDDEEALCVALRNMSIGDVCPKEFEEPIQAQDQLSSSIQASPPTQDEDKAQEEEDEEQYDEPPQEEDIDQXGDEDEQDKEDDQEIRDQRPPHPRVHQAIQRDHPVNSILGDIHNGXIKDALRDPDWVVAMQEELNNFTRNELYLMDVKSAFLNGPIKEEVYVEQPIDFEDSEYPNHVYKLSNALYGLKQAPTAWIMIQKFEMSMMGELKYFLGFQIKQLQEGTFMSQMKYIQDILKKFGMKNGKPIKTPMGINGHLDLDTGGKSVDQKKEHIRDLSVSGKIPGVFGFKETKLSSSFHR

SEQ ID NO: 254643 - protein, 102 aa, Zea mays
  Clone ID: MRT4577_163815C.1.pep
SPSSQRRTAQAMPLGRVYINLPPKTSSSSNAKATIKVHMMSLWILAHVHLGRRRSRRLRRLGGICSSHGLEAVKNGRGGLKIGEGPLRRLADQTAVTKVLVE

SEQ ID NO: 254644 - protein, 51 aa, Zea mays
  Clone ID: MRT4577_163816C.1.pep
PICPFLRSIIKTDSHCIIINARAFLISQVMSLVHSDPQYGVSVSRSDFNVV

SEQ ID NO: 254645 - protein, 328 aa, Zea mays
  Clone ID: MRT4577_163817C.1.pep
MAQEDRDQDQDDEPPQDEDIDQGGDEDEQDKEDDQEIQDQRPPHPRVHQAIQRDHPVNSILGDIHKRVTTQSRVAHFCEHYSFVYSIEPYRIEDALRDPNWVVPMQEELNNFTRNELYQMDVKSPFFNGPIKEEVYVEQPPGFEDSEYPNYVYKLSKALYGLKQAPRAWYECLRDFLITNGFKVGNDSAHFPFSKADFTLFTKTITKDLFICQIYVDDIIFGSTNKSTCEEFSRIMIQKFEMSMMGELKYFLGFQIKQLQEGTFISQTKYIQDILKKFGMKNAKPIKTPMGTNGHLDLDTGGYGTPKGSTFDLIGHHKDDRIYRSVRG

SEQ ID NO: 254646 - protein, 82 aa, Zea mays
  Clone ID: MRT4577_163818C.1.pep
LEHLGPPERLSHSAFQVPAFHLRRHTDDRLAADGSVTFLRTVSIAFPPHVGDPEGHPQELLFFESAPRELTQRGSKSELEPN

SEQ ID NO: 254647 - protein, 95 aa, Zea mays
  unsure (1)..(95): unsure at all Xaa locations
  Clone ID: MRT4577_163819C.1.pep
LPRVLPLVRKKIPHFLLHGDRVKDRAPAATISWLCKGGKCLGMGGAKRHRXVLLDNIQGITKPAIRRLARRGGVKRISGLIYEETRGVLKXIFLE

SEQ ID NO: 254648 - protein, 70 aa, Zea mays
  Clone ID: MRT4577_16381C.1.pep
ELSPISSCYFDMRMSTSYGMYDSCISQYGPHVIEFIMGSYMLPKERMSSSAHTLVLKIIQVAHVLDPIWR

SEQ ID NO: 254649 - protein, 93 aa, Zea mays
  Clone ID: MRT4577_163820C.1.pep
CIYCVYILASHPVSRPSKLTLKLSVLFLFVSFSEEAREEHVDGVRGPQLRRLTRHDRTFRSLSSSFFGSHGKNSKRESTRQTTQTICFIPSNG

SEQ ID NO: 254650 - protein, 66 aa, Zea mays
  Clone ID: MRT4577_163821C.1.pep
YACRVMIVLCVLYWVVVRTPRSRDVPNLSHSRCFGLSLRLWLVRFLTLVRATWNSVSTRSRGPLRC

SEQ ID NO: 254651 - protein, 131 aa, Zea mays
  unsure (1)..(131): unsure at all Xaa locations
  Clone ID: MRT4577_163822C.1.pep
KKSYASNIXLAVMPHKRFQTFKWDPPYLSQFGVKNKGFYKLRLQTPEQVFIHXKKAPKKVMDPFRVIKRGYFLKNKGPTFCFCSPVCFFCTPKNVHIPFFFCKGHMFPFIFPKGCFPFKKSKPPITRLVPL

SEQ ID NO: 254652 - protein, 53 aa, Zea mays
  Clone ID: MRT4577_163823C.1.pep
GRQHKCIVRYQKKPDMSSGFCIQSHVLYTALTTWYDRLFTMRKIRGIQVDSTG

SEQ ID NO: 254653 - protein, 68 aa, Zea mays
  unsure (1)..(68): unsure at all Xaa locations
  Clone ID: MRT4577_163824C.1.pep
LCSHVRCXRREXRRHEFXRCSVCGAANYCSRACQALDWKRAHKAQCVPMDRWLLAGVGGGGEVPQPQQ

SEQ ID NO: 254654 - protein, 66 aa, Zea mays
  unsure (1)..(66): unsure at all Xaa locations
  Clone ID: MRT4577_163825C.1.pep
PKNGEGGKGKMXPPGPGGGGQFQGDPPLGRFAGRDIRQTGAVGGNKRVEKKGPTGAKGPQAAAQKK

SEQ ID NO: 254655 - protein, 76 aa, Zea mays
  Clone ID: MRT4577_163826C.1.pep
SRGGRGGSITHRKLHIQESGMCLWTRSSYMDNIGSLLSQEQTEECRAKGRTGLVTDGGGKTASEVYWHEWTRGFTQ

SEQ ID NO: 254656 - protein, 85 aa, Zea mays
  Clone ID: MRT4577_163827C.1.pep
RDIKPVFLPAKQISPKTGFRPFNPRNKTRLAPLLGALETKKIWPLFGPASPHLIFGPEKPQKRFNFPIPQTGNRDKPNPPRNKVY

SEQ ID NO: 254657 - protein, 122 aa, Zea mays
  Clone ID: MRT4577_163828C.1.pep
MARIKVHELRGKNKADLQGQLKDLKAELSLLRVAKVTGGAPNKLSKIKVVRTSIARVLTVISQKQKSALREAYKNKRLPLDLRPKKTRAIRRRLTKHQLSLKTEREKKREKYFPIRKYAIKA

SEQ ID NO: 254658 - protein, 91 aa, Zea mays
  Clone ID: MRT4577_163829C.1.pep
ELLELKVHFNVPANLCFCTVARGNSTCRRCNSVFNHSYIRVQPLSCSRCASMCVHHCAHDLFRTNVFLQSISFGSVYIIAPRSRVCHVPCL

SEQ ID NO: 254659 - protein, 114 aa, Zea mays
  Clone ID: MRT4577_16382C.1.pep
KLAGVDLPWTPPDKMGQTVLRGRHKYTSLGTTPSLLPPTCKVVWAVFTLCPPIRNSYGGPRGGDGIIEPPSLWYPTNSFRNLACQGILWAGREPIEPLYFPCRYWGNRETPGTF

SEQ ID NO: 254660 - protein, 115 aa, Zea mays
  Clone ID: MRT4577_163830C.1.pep
KTAPLRGGAKLDKKTSIVPKKGFPRFPAPYYLDFPPASLVDRRAPPFSLNGFAPFSGWKGVFLGNSKYPLLKKILGVEPPLWIIISPLNLKFFFPPPQLKPQKAFFFWVFSHFFR

SEQ ID NO: 254661 - protein, 101 aa, Zea mays
  unsure (1)..(101): unsure at all Xaa locations
  Clone ID: MRT4577_163831C.1.pep
KNFDDWKTALKLGDFSDPLKYLLSSFKKLEPRLHRCFLXXSLFPKSFLYEPNKLVHLWVYLDFVGSCNLCKXTLKKVRMNTSNXKVYGFLNQLVSKKHPSP

SEQ ID NO: 254662 - protein, 70 aa, Zea mays
  Clone ID: MRT4577_163832C.1.pep
RGGFSHSNSILHERYGVKRTYIGVCEHRGKIVALATLVERAQRIARQNVPVSIVVVVSIRYPALYDLCSS

SEQ ID NO: 254663 - protein, 91 aa, Zea mays
  Clone ID: MRT4577_163833C.1.pep
CVFVGRGDLFRLFRRSPCRNGDQRILLDVFDEQWGDAATWTSSGGSEVNEHQLSGVVVFGTCGRHIHIWCVTRSRLPGMVPTLISSSSVCG

SEQ ID NO: 254664 - protein, 65 aa, Zea mays
  Clone ID: MRT4577_163834C.1.pep
QLVCDTIDYAGNCRIHASGCRLGLRSCCTHDWCAFKQDPDYMIEGVDRSELPTPEVYAKRTTRPL

SEQ ID NO: 254665 - protein, 86 aa, Zea mays
  Clone ID: MRT4577_163835C.1.pep
AGGEGISKNLGFQASYPLRPTTNLSDLSPAIEGTCEDAATVLEEQHRPHLLHETRRSVTSIKELHASCCKTPTSPLTRLISLPQRA

SEQ ID NO: 254666 - protein, 210 aa, Zea mays
  Clone ID: MRT4577_163836C.1.pep
GDAKLAELALVDPKRAKRILANRQSAARSKERKMRYIAELERKVQTLQLEATTLSAQLAMLQRDTTGMTSENSDLKIRVQTMEQQVQLQDALNDRLRDEIQQLKVATGQVNASIGKTGNSGMSSFGGNPQSYQRSHIQSLLAAQHLQRLRIHSQHQQQQTHFQQQQQPQPQLLLQEAHPFPVDLKMRGFSLSSHAQNAGASDSHAAKSEP

SEQ ID NO: 254667 - protein, 72 aa, Zea mays
  Clone ID: MRT4577_163837C.1.pep
FLTGRGETRVPMPALLGAHEWITDSLPCTITNPAKDGLRNQGKETCELDSSHFVNDWRCRIVGAFGAVNPYF

SEQ ID NO: 254668 - protein, 242 aa, Zea mays
  unsure (1)..(242): unsure at all Xaa locations
  Clone ID: MRT4577_163838C.1.pep
MDRYQRVEKPRNETPIRENEIRITALGRMRNYIGYGMSLLEENGHDEITIKAMGRAINKTVMVAELIKRRVAGLHQNTSIESVGITDTWEPLEEGLVPLETTRHVSMITLTLSKEPLDTSSPGYQPPIPAEEVKPAFDYEHEGSFPSARGRGRGGPGGGRRGRGRAISNGPPPYDWGEEWEEDGDXTTMVEAEGXRLRGRGRARGXMEVGRRGGYGYDYGYGGRGGYYEEQGGYFDGEQMSI

SEQ ID NO: 254669 - protein, 40 aa, Zea mays
  Clone ID: MRT4577_163839C.1.pep
TEFLAGDKPPCYRTIRFGDFMRMYNTVKLGSSINQTTDLK

SEQ ID NO: 254670 - protein, 75 aa, Zea mays
  Clone ID: MRT4577_16383C.1.pep
SWHMTRQMIIYFGLVHVQRCSRTCATAHRAYDGQCVGQSVPPLPLAYSCHWCRHSEREADGPAAAPSQRTFADAL

SEQ ID NO: 254671 - protein, 64 aa, Zea mays
  Clone ID: MRT4577_163840C.1.pep
SHPPFLLRFCRPMFMFKQKRPSIRFIPSLFMHICILVSCEHFRNQVHATVHPIPRYISSCARHT

SEQ ID NO: 254672 - protein, 158 aa, Zea mays
  unsure (1)..(158): unsure at all Xaa locations
  Clone ID: MRT4577_163841C.1.pep
PKAAGTGTRPRPQTRRTAKPAAPTDGAHRRTDTPKSNRTNSGTNKADNLXATXAKARTRHHSRDNDPSKGGATAHGFDEGQAATHRPGTEGKRGXQATAEAARQADTXHDEAKAKDNEDEQKQRGDQRNRTDNKDRGQRHRQRGAGNSNGXRPKEDSR

SEQ ID NO: 254673 - protein, 43 aa, Zea mays
  Clone ID: MRT4577_163842C.1.pep
NEKKKYCSKKKKKKKKKKKKKKKKKKKKKKKKKNKTPYPNRNF

SEQ ID NO: 254674 - protein, 111 aa, Zea mays
  Clone ID: MRT4577_163843C.1.pep
LLSAQSTQHSFFSVSSLHYLLGAEALHPSPLPTIGSRPICPSIRPQDSTALRKVRLSLLFFSPSVVTFHKSVMAVVGPVHPWWKVIANPPPENVAPFLLLPLRTYVTSKIH

SEQ ID NO: 254675 - protein, 224 aa, Zea mays
  unsure (1)..(224): unsure at all Xaa locations
  Clone ID: MRT4577_163844C.1.pep
MASTPPAPAVAPSLVDTLFQRSLNDLVKSLRADPSAAGEAPAVTRALSEIHREIRAPDAATKSVAVQKLTYLSSLHFAPVSSHPLAFPAIELLASPHLPHKRLAYLAASLSLHPASLSLLPLATHQLHKDLSPSAGAHQHVSALALQLLGSPAAAAAPDLPVHLVHDLVPHLTRGSPRAIAAAARVIAASPSAAVPVLFKPLAACLASPDPRAYTAGVAXFCDL

SEQ ID NO: 254676 - protein, 132 aa, Zea mays
  Clone ID: MRT4577_163845C.1.pep
GWILGGGGAPTAGAALVSGCCSCWTGGWFIVHPLCRKTVLVFHQTAFTPGLLVQHASSSRLFAVRILDSFVCLVTLFEGGMMSKLWLSREFVPVASLVVVVCVCVHRFGGRFPSQLFVALGFCLVYLNAPNE

SEQ ID NO: 254677 - protein, 55 aa, Zea mays
  Clone ID: MRT4577_163846C.1.pep
MEFIGSGKDVVKKIQLVAAGGLSTELPSSSSSRGEGDALPALLVKAPSQTVAGFD

SEQ ID NO: 254678 - protein, 41 aa, Zea mays
  Clone ID: MRT4577_163847C.1.pep
ALISKQDWHGLFKMDQMEKELGEGCTFNGWVERPITLFTNV

SEQ ID NO: 254679 - protein, 350 aa, Zea mays
  unsure (1)..(350): unsure at all Xaa locations
  Clone ID: MRT4577_163848C.1.pep
MTEPLSNGAVYQSVPESYVLPEHQRPRSSPPSSAAAIPVVDLGGDDPDRTAEQIVAAGKEFGFFQVINHGVAEDVMASMMSAAEEFFRLPTDEKMAHYSTDSTKLPRFHTSVGKEQEKVLYWRDCLKIGCYPFEEFRHRWPEKPAGLGAALEAYTAAVRSVALRVLRLAASGLGLEDEAHFEGGELTAGXVVMNVNHYVACPDPSLTLGIAPHCDPNVVTVLMXNGVRGLQARRRRGEGEGEGEGGGWVDVDPPPGALVVNFGHQMEAVTNGRVRAGEHRAVTSARAARTSLAAFVMPAMGYVVSPAPGVVAEGEALLFRSYTYQEFVSVYTAATGDRDAVLARFRNNNG

SEQ ID NO: 254680 - protein, 59 aa, Zea mays
  Clone ID: MRT4577_163849C.1.pep
WGFFFLLLLSFVLVFFLFEPTQQIQVQTDPFPYHILGGKKIPFKRILSLLFPQRGSAPF

SEQ ID NO: 254681 - protein, 53 aa, Zea mays
  Clone ID: MRT4577_16384C.1.pep
AGKYVNRLGDFFWVFDLAGTQLRGLFSALLSQPTLKGAGKSKTREIQQPRFAC

SEQ ID NO: 254682 - protein, 164 aa, Zea mays
  unsure (1)..(164): unsure at all Xaa locations
  Clone ID: MRT4577_163850C.1.pep
FDAGLYCTPSLPAPAPSRAYSRFLPLPPWRTCAPWKLAASINTLLMNHRWVDIAYKKIHLINEWKKPFAESSRAKGIXLDKIDIEAKQSNSLIRKCGRVQLVXNGKNIAAFVPNDGCLYYIEENDDVLIAGFGRKVHAVREIPAAMLKDDKVSDXSLLALFDEE

SEQ ID NO: 254683 - protein, 37 aa, Zea mays
  unsure (1)..(37): unsure at all Xaa locations
  Clone ID: MRT4577_163851C.1.pep
LFFVNLAFFLXRRESSMKDFSQHRTNFGFTSNSTSAS

SEQ ID NO: 254684 - protein, 69 aa, Zea mays
  Clone ID: MRT4577_163852C.1.pep
IRLIAQIRPIMLHFDPVALQQNVPNDWDQAVLNLTMNVNKIVSEMDHYIISTFLAKYQDQEVHPSTLKA

SEQ ID NO: 254685 - protein, 54 aa, Zea mays
  Clone ID: MRT4577_163853C.1.pep
TLQNQSNQITPTPVSFAKSTKQLHLDLTYHGLDHYINPSFLPTSNGQYYLNHSS

SEQ ID NO: 254686 - protein, 45 aa, Zea mays
  Clone ID: MRT4577_163854C.1.pep
GTSGGEGTTATCVIGLLLLHDQRDDTQVRPDRYLDAGEGADAPGR

SEQ ID NO: 254687 - protein, 110 aa, Zea mays
  unsure (1)..(110): unsure at all Xaa locations
  Clone ID: MRT4577_163855C.1.pep
VEPXTNPLEKMWDLYGKGEVIPAIDEKLRIGGFDEKQAECLMIVGLWCAHPDVNPRPSIKQAIQVLNLEAPVPHLPTKMPVATYHVSSSNTTSVSSGGATVTFSSAQHGR

SEQ ID NO: 254688 - protein, 88 aa, Zea mays
  unsure (1)..(88): unsure at all Xaa locations
  Clone ID: MRT4577_163856C.1.pep
RDQAAARSCIDIEDKNLPXFMGLMHHDIINDIPTHLQRMQYVAFASFLEPVCYLLWNVITLTTAWIKVESVNIWLSAIIYFISDDTGA

SEQ ID NO: 254689 - protein, 124 aa, Zea mays
  unsure (1)..(124): unsure at all Xaa locations
  Clone ID: MRT4577_163857C.1.pep
LNLQTIASXQQQQFLPGRSLLAFVNPAAYLQQQLLAFNPLALANVAAYQQQQRLQHFMPALIQLAMVNLVAYLLHQQLLLSNPFALGNALTYLQQQFAAXFVPSLTXLAFANPTAYFQHMLSFN

SEQ ID NO: 254690 - protein, 43 aa, Zea mays
  unsure (1)..(43): unsure at all Xaa locations
  Clone ID: MRT4577_163858C.1.pep
SLPLLHXXFPXRXXXDPGXKIDPRPMTDKATGXDQRSRKRLRL

SEQ ID NO: 254691 - protein, 845 aa, Zea mays
  Clone ID: MRT4577_163859C.1.pep
MENGDVNEDERNGKKIRVQGGGSSGPACQVEGCGADLTAAKDYHRRHKVCEMHAKATTAVVGNTVQRFCQQCSRFHLLQEFDERKRSCRRRLAGHNKRRRKTRPDTASCGTASIEDKISNYLLLSLIGICANLNSDNVQHSNGQELLSTLLKNLGSVAKSLEPKELCKLLEAYQSLQNGSNAGTSGTANATEEAAGPSNSKLPFVNGSHCGHASSSVVPVQSKATIVVTPEPASCKLKDFDLNDTCNDMEGFEDRQEGSPTPAFKTADSPNCASWMQQDSTQSPPQTSGNSDSTSTQSLSSSNGDAQCRTDKIVFKLFDKVPSDLPPVLRSQILGWLSSSPTDIESHIRPGCIILTIYLRLVESAWQELSENMSLHLDKLLSSSTDNFWASGLVFVMVRRRLAFMLNGQIMLDRPLAPSSHHYCKILCVKPVAAPYSATINFRVEGSNLLSTSSRLICSFEGRCIFQEDTDSVAENDEYEDRAIECLSFCCSVPGPRGRGFIEVEDSGFSNGFFPFIIAEKDICFEVSELESIFESSSIEHADANDNAREQALEFLNELGWLLHRANRMSKENVTDTSVATFSMWRFRNLGVFAMEREWCAVIKMLLDFLFIGLVDVGSRSPEEVVLSENLLHAAVRRKSVNMVRFLLRYRPNKNSKGTAQTYLFRPDALGPSMITPLHIAAATSDAEDVLDVLTDDPGLIGISAWSNARDGTGFTPEDYARQRGNDAYLNLVQKKIDKHLGKGRVVLGVPSSICSVITDGVKPGDVSLEICMPMSASVPGCLLCSRQARVYPNSTSRTFLYRPAMLTVMGVAVVCVCVGILLHTFPRVYAAPTFRWELLERGPM

SEQ ID NO: 254692 - protein, 61 aa, Zea mays
  Clone ID: MRT4577_16385C.1.pep
LSVIVQPETKHKKPRLDSQILYQSRLIFLNYKPAKCPVLNSLKQNHFRSNNAITREPRRDY

SEQ ID NO: 254693 - protein, 274 aa, Zea mays
  Clone ID: MRT4577_163860C.1.pep
TSETDTSLAPFNMWRFRNLGVFAMEREWCAVIKMLLDFLFIGLVDVGSRSAEEMVLSENLLHAAVRRKSVNMVRFLLRYKPNKNSKGTAQAYLFRPDALGPSKITPLHIAAATSDAEDVLDALTHDPGLIGISAWSNARDETGFTPEDYARQRGNGAYLNLVQKKIDKHLGEGHVVLGVPSSICPVITDGVKPGDVSLEICRAMSASVPGCLLCSRQARMHPSSTARTFLYRPAMLTVMGVAVVCVCVGILLHTFPRVYAAPTFRWELLERGPM

SEQ ID NO: 254694 - protein, 75 aa, Zea mays
  Clone ID: MRT4577_163861C.1.pep
FFFFFSLNNAPAGRVSFFEAKKFILLLGRHIALPSFLLMEAGSGSGTKATGYRARVKYRYRPPHYSSVATNAGCD

SEQ ID NO: 254695 - protein, 46 aa, Zea mays
  Clone ID: MRT4577_163862C.1.pep
LILTIYKLTTATGSCCKCKGTSSHGNYVPLILHLSNHSRALKLQNC

SEQ ID NO: 254696 - protein, 76 aa, Zea mays
  Clone ID: MRT4577_163863C.1.pep
PEQAFHQSLPQEQPFYLFLHMQLIKGGDGGWQLIIQPTIQETANEPAKMETISQQVLKQGPQHGRRKVRYKCQYSY

SEQ ID NO: 254697 - protein, 254 aa, Zea mays
  Clone ID: MRT4577_163864C.1.pep
MGKRFLHQLLAVALALFVSPARSDDWLPATATFYGGADGSDTMGGACGYGDLYEQGYGVNNAALSTALFNDGASCGQCYVIRCDSSKTGWCKPGSSNFVVVSATNFCPPNWELPNGGWCGPPRPHFDMSQPAWENIGIYSAGIIPVLYQRVKCWRSGGVRFTIAGFDHFYMVLVTNVAGSGSIQSMAVKGANTDWIPMYRNWGANWHCLAGGLVGQGLSFALVSTGGQNIVFQDVVPAWWQFGQTFTTYQNFDY

SEQ ID NO: 254698 - protein, 508 aa, Zea mays
  Clone ID: MRT4577_163865C.1.pep
MGSSRFRRLLLLPCPVSRLSRRRLSEPYPSFVGALPFFSSEPMDRQPQDYAAAAMAYAQGQQPPPPQYGGYHPQAPPPQYPPHPYGAPLPQYRPAPYARPMPPAYSHLLPHQQPPPPYAAHPPPPHALSTPSPPPPHHPYMHPPPFESAPPPPAAPPADPELQKRIDKLVEYIAKNGPDFEAMIRDKQHDNPDYAFVFGGEGHAYYRYMLWLLPRPPVPAPYPPASMHMMPPMGPMMRGPPIHQPGYPPFYDQHQQFAAAHGHGDYEAAAQPFKGLSGPLPADVAAELQDVLINLNGTKESIKGAKSWFMQRLPFAPALAEALKERVFVLEDSERQLHIIFLVNDILFESLQRRTSIRDLDNEAIAFKSVLGPMLARVYNNSQSKDDNQTRVEKILQFWGSKEVYDQETIANFEREMKGGLPYSLVPRHVSPDPTTFSGSAPVPSKWSSEPPEKDKPIHPVAGASQSVPTAQFPSNQLTAGVYPPVGQNAFAGSLPVQPSSTVPAVAP

SEQ ID NO: 254699 - protein, 213 aa, Zea mays
  Clone ID: MRT4577_163866C.1.pep
MATPLKGVEGTRVARNPENIYLPPMARTAQEGDEQGGTSSTRSLSGSTRKRPKHYLYLVFDDWSYGYSIRRINLFPDSRRRKQTAFSARADVQCLPPALFRLEAAHGSLEYFASAFGTRILAMHTRDPGGKRLLAGTFVPMLDVSSLSMTFCPGQEYPINPIYLSAGNKLFCLSEASFEMLQWEPLCPPPLGRRRKKEWSWQRLEDPPFRKYM

SEQ ID NO: 254700 - protein, 54 aa, Zea mays
  Clone ID: MRT4577_163867C.1.pep
AVVSLVGVKGPLCLFDKNGWYGLPVWRGLGVIFFFLVAFLGACVAIFKTWFGRL

SEQ ID NO: 254701 - protein, 70 aa, Zea mays
  Clone ID: MRT4577_163868C.1.pep
LIVEESSDQSLNSEADDVLARSRRTRNVIFGNYCKSHQNIALNSVHGDGIAPFHPSGYHNMMGSHHRPNQ

SEQ ID NO: 254702 - protein, 180 aa, Zea mays
  Clone ID: MRT4577_163869C.1.pep
MDPISMEQVRAMNKYRKSRRQPHLPTLYMAVTFVLCLLLTSPAWFPRMCSALGFFFLTTVPDLVTAFLLSPKCLFVVGNLIVAFLVGESRLAPRRGDDDDDRPSLVNGIHEEHMKKNAALTAATAAAAAQADHSAFVGAVGKRVEVKEEEEELHKRVEDFIARVKKQRKLELKSFFDVDR

SEQ ID NO: 254703 - protein, 136 aa, Zea mays
  Clone ID: MRT4577_16386C.1.pep
MVPRVAFLFLTRWNLPMAPLWDEFFRGHRGLYNVYVHSDPAFNGSDPPETSAFYRRRIPSKEVKWGEISMVEAERRLLAHALLDDHCNARFVLLSESHVPLFDLPTVHSYLVNSTRLYLESYDQPGATGRGRRLKA

SEQ ID NO: 254704 - protein, 43 aa, Zea mays
  Clone ID: MRT4577_163870C.1.pep
QREERPIAHTASPRQIPHFYCFDITHFATANGSRSAAQLMRVI

SEQ ID NO: 254705 - protein, 212 aa, Zea mays
  unsure (1)..(212): unsure at all Xaa locations
  Clone ID: MRT4577_163871C.1.pep
MLSSEDDEKAAAAAQKLAGFLLNFYAEDIHRILLDDDPSKLHFPLVISFAELTDFDPKFAGYLYLNPDKYLPYLKDAAQMAQDKVLKNLGDLKTTETKKSVHVRIDVSGSPLEPPEVSPSIGKVRVKHMKKLIALKGTVIRSGGVKMIEFERCYMCRKCKHSFKVYPELEAGDRXNLPPSCPSKDSRSCTSVSFQFVEGSTICHDYQEIKFQ

SEQ ID NO: 254706 - protein, 61 aa, Zea mays
  Clone ID: MRT4577_163872C.1.pep
EEVAVDGPVERVLGPPAASSRLNTGSCLRRTAATQVPRRRRHRQGRRSFVLSFPLSLTSRC

SEQ ID NO: 254707 - protein, 28 aa, Zea mays
  Clone ID: MRT4577_163873C.1.pep
WLESINLYSSTISSNVICFHKMCYRALR

SEQ ID NO: 254708 - protein, 59 aa, Zea mays
  Clone ID: MRT4577_163874C.1.pep
LLLAALLLLMQYIANWPHDRCIHKCAHAKNTTLLSHASCNHTPLQCIYTIYARNKGVPP

SEQ ID NO: 254709 - protein, 102 aa, Zea mays
  unsure (1)..(102): unsure at all Xaa locations
  Clone ID: MRT4577_163875C.1.pep
PRVRQSENLPEIKPNDAAGGINNFAEPATXLAPTELFVGXAKYMVIQGXTXAIIRRMKGTACITIKKTCMSLIIGIYDEPMTPQQCNMLLETLHDXLIQQGI

SEQ ID NO: 254710 - protein, 85 aa, Zea mays
  unsure (1)..(85): unsure at all Xaa locations
  Clone ID: MRT4577_163876C.1.pep
CSGLFFGPSVEAFTPTSSLKQAVKCRNTTHTVVGCLTQTPLESQEDLHASPAASFIGGSAQPAXLLLGNQRVVSLGESGMEELPK

SEQ ID NO: 254711 - protein, 92 aa, Zea mays
  Clone ID: MRT4577_163877C.1.pep
FPPNFFFFSPNLFFFLLPGIPPPPLIKFSPNLFVFFPPRFLPRAGPKGFFFPQKVGVNSPNFQLSVLGCRRGGLFEAGGRGGAIRDLASRLF

SEQ ID NO: 254712 - protein, 69 aa, Zea mays
  Clone ID: MRT4577_163878C.1.pep
RLVGIKQRPLGQVGEWRLIRLFLRVLRPLFLGCFAHGSPQPFASHVFRDAALGFQLWLGSGSLVLVVLG

SEQ ID NO: 254713 - protein, 288 aa, Zea mays
  unsure (1)..(288): unsure at all Xaa locations
  Clone ID: MRT4577_163879C.1.pep
GYLEAGRDPSWAPNLQKNISKATMGRPETPXAVVNPPKSAVASGLLQGMLEGQGEDDEDDDDEKNRADVKTTDGAKKKRKRNNKKNNKKGPATQQSFPPRVPLSDLFDGRPYPEGQIVDYAPKDDNLQRTTTEELRHEAAMSNMDGDFLKDYRKAAEIHRQVRHYAQKLAKPGVSMTYLAEEIDESVRALTGHHGLEPGDSLKAGLAFPTGLCLNHIGAHWTPNSGAKEVFLQHDDVLKVDFGVHVNGRIVDSAFTVAANQSTTPXLAAGKAXTXTXAEEAGIDARID

SEQ ID NO: 254714 - protein, 70 aa, Zea mays
  Clone ID: MRT4577_16387C.1.pep
YPSTDTLFMDKRLKIHKEKIERQKQAAKDLVFWSLSSLSVELHEQHSRSEHSESFWSCCMKRTVSISLES

SEQ ID NO: 254715 - protein, 463 aa, Zea mays
  unsure (1)..(463): unsure at all Xaa locations
  Clone ID: MRT4577_163880C.1.pep
PPSALRPTRPGRFPQPLAPASSAQRLFFAAEMDDSENNAPSTPGSPGFSTDRLPPNTTTSRGATDPPSYSDDDGEAEVDPHVLPDDEDPAAVGAPDEDEEGEDLFNDNYLDDYRRMDEHDQYESVGLDDSLEDEXRNLDEIMADRRAAEAELDAREVRTGATADRKLPRMLHDQDTDDDTNFRRPKRHRASFRQPSGPRTPRSDDDGDGATPSSPGRSHRGMSSGGDVPMTDQTDDDPYEDEFDEEDEMNMYRVQGTLREWVTRDEVRRFIAKKFKEFLLTYVHPKNDQGEFEYVRLINEMVLANKCSLEIDYKQFIYIHPNIAIWLADAPQSVLEVMEEVAKNVVFDLHKNYRNIHQKIYVRISNLPVYDQIRNIRQIHLNTMIRIGGVVTRRSGVFPQLQQVKYDCNKCGTILGPFFQNSYTEVKVGSCPECQSKGPFTDNVEQTIYRNYQKLTLQESPGI

SEQ ID NO: 254716 - protein, 74 aa, Zea mays
  Clone ID: MRT4577_163881C.1.pep
RVTLLRNLLWPLHRERCSAGSYILPPRLYLLGRNKMVLPFILTGATPTKIYPRNYPSCSRASAGKDRKEWISLN

SEQ ID NO: 254717 - protein, 175 aa, Zea mays
  unsure (1)..(175): unsure at all Xaa locations
  Clone ID: MRT4577_163882C.1.pep
KENGGTVTAGNASSISDGAAALVLVSGQKAQELGLQVLARIKXGYADAAQAPELFTTTPALAIPKAIANAGLESSRVDFYEINEAFSAVALANQKLLGIPSEKINVHGGAVSLGHPLGCSGARILVTLIGVLRAKSGKIGVAGVCNGGGGASALVXSSHKKSRPCSSQKFPEVIL

SEQ ID NO: 254718 - protein, 79 aa, Zea mays
  Clone ID: MRT4577_163883C.1.pep
RLVGEYRQSPVQYHLGQTSSVSDFQLRDIIPHRNVISPSVGKGALNIDAVYSTTVDTDVTGHIRTLNSIIPMLSIAQLI

SEQ ID NO: 254719 - protein, 55 aa, Zea mays
  unsure (1)..(55): unsure at all Xaa locations
  Clone ID: MRT4577_163884C.1.pep
NSEASKASREKKLQQLPTKLPGGRKEERPKYAPKTALSTATTGGYNFKXQSAPKQ

SEQ ID NO: 254720 - protein, 150 aa, Zea mays
  unsure (1)..(150): unsure at all Xaa locations
  Clone ID: MRT4577_163885C.1.pep
HATAQLAYMPGRGPEPPRSAASPPTWSCSTAFSTPTEPSRTGTTFTLATFAPXGATRTALASENRHVRATERAHDIYYHDTDRDRDTKGVRKTAHTPECRLSGHGSDEQRSSDRVSSTVTATTGPFLLQAQPREALHTDPRAELKGMLRL

SEQ ID NO: 254721 - protein, 158 aa, Zea mays
  Clone ID: MRT4577_163886C.1.pep
MDLCEIPVFKDVIRYAQNSMENYGKSKRSTFRLMRDEFVHGPSNRFDKSVQPWKEKYNNDDGIELMIPAYNPDLVPDIIYCLLRSEGVEDISEELHEAQVRCTCRLCHPSSRLGSKGQGGGRFGQRWGKGNILYYPLKKLQFQRFHILHHPASAGDLI

SEQ ID NO: 254722 - protein, 307 aa, Zea mays
  unsure (1)..(307): unsure at all Xaa locations
  Clone ID: MRT4577_163887C.1.pep
GLAPPPPPPAFLPPRLACPPXQPAMALLTDLLNLDLTDSTEKIIAEYIWIGGSGMDLRSKARTLPGPVTDPSKLPKWNYDGSSTGQAPGEDSEVILYPQAIFKDPFRKGNNILVMCDCYTPAGVPIPTNKRYNAAKIFSNPDVAKEEPWYGIEQEYTLLQKDINWPLGWPVGGFPGPQGPYYCSIGADKSFGRDIVDSHYKACLFAGVNISGINGEVMPGQWEFQVGPTVGISAGDQVWVARYLLERITEIAGVVVTFDPKPIPGDWXNGAGAHTNYSTESMRKDGGFKVIVDRVEKLKLKQKEHIS

SEQ ID NO: 254723 - protein, 133 aa, Zea mays
  unsure (1)..(133): unsure at all Xaa locations
  Clone ID: MRT4577_163888C.1.pep
MQLSTPRGKKKKTRGTKLKKPGLKKKKRKKIPKKKKKGDFKAGKKXQFKGKNSKPLSLGKKGLQTHKKVGQPHNLQKRRGXKKRVVEKKSREAGKKKKKFSSMFPPIKKKRIFTQRGKKNMAPKKKGTKLLPG

SEQ ID NO: 254724 - protein, 48 aa, Zea mays
  Clone ID: MRT4577_163889C.1.pep
PSGIRTITGITFGAFIVSVHEGTTTRASYARGHLLTTLSKRRSLDSDD

SEQ ID NO: 254725 - protein, 60 aa, Zea mays
  Clone ID: MRT4577_16388C.1.pep
YNYCHIIPYYQRKNHQRDYPSILYSLHLRIGQNKHSPLATPYNKLTLLDFFHYFSSLTSS

SEQ ID NO: 254726 - protein, 254 aa, Zea mays
  Clone ID: MRT4577_163890C.1.pep
FIHCDFNEFNIMIDDDEKITVIDFPQMVSVSHRNAQMFFDRDIECIYKFFNKRFNLRSVKNEEQAGSENDDEGNSRPSFLSVEKGAGSLDKELAASGFTRKEKVDMDKYIEEVVEGHDSSSDDDNDEDSSDEPDCDLTPSDSDAPGTFSEEHGTSCSGENRLEIPPSDGNGVVMAPLESGIKTFSMEDDDNDDGSSEDADEEEDAELTKQLNKQRRKAIAAAHGRRRPTSSRNAYKDKGKGTMNSKMQRQACNW

SEQ ID NO: 254727 - protein, 43 aa, Zea mays
  Clone ID: MRT4577_163891C.1.pep
HKSVSMSIGKIVIACHYTTNVKQLAYLSASGKIRSSTQDPHDT

SEQ ID NO: 254728 - protein, 30 aa, Zea mays
  Clone ID: MRT4577_163892C.1.pep
HRMIIVPDYTGVPKKNDVLLNMKTIHCRHG

SEQ ID NO: 254729 - protein, 61 aa, Zea mays
  Clone ID: MRT4577_163893C.1.pep
QSKGPTVRIKALPPCPSHACPPPCTLPPPHAPFAAHPPPPSSPTTPDPLLLSHPLPRSTCS

SEQ ID NO: 254730 - protein, 84 aa, Zea mays
  Clone ID: MRT4577_163894C.1.pep
ALFARAIALVTTAIMLNKVIHMAVSGRTGRVHDEWKSLCVPHRPSKLGFGAGRVILDRFHPVVSSPAFDTNVAFWQPRAEFRAY

SEQ ID NO: 254731 - protein, 94 aa, Zea mays
  Clone ID: MRT4577_163895C.1.pep
VREHANPVLVESAHTKKAETLDRFCKPIMTKPKPAPKPQTPPPQPETQASEPQTPEQQQSRSGGTGEPGNEGGVQQASGEQMDMDNPKSADAAA

SEQ ID NO: 254732 - protein, 213 aa, Zea mays
  Clone ID: MRT4577_163896C.1.pep
KGSNAQGTSAHASGSKGSVANDPKFLEFLEAMQPRSKAKMWANDTAATLDTAAKDSVVAAKESKGPLKNVLTSENDSSSEDTSDEKVANDLSSENASEQLKTENKQDKNMTDADFFKSKVKKNWSDSESDDEGSAHQSHTTTDDEDSSDESQDSDNQLAHTKGDPDKRNIVDKDTSVENTDLQELENLDTKRVEDLDGRPRGTEIHEESRKGR

SEQ ID NO: 254733 - protein, 178 aa, Zea mays
  unsure (1)..(178): unsure at all Xaa locations
  Clone ID: MRT4577_163897C.1.pep
NPIPNVRTDILPILALPTDEIIVHHSPRIEKEQFPQTLGFEISDGATPAVFFDMTVXDGPPXGGYGCELNANEVPKGAEIFRAVCTDVKGMGKYVKTLHYXGSTFHRVIPQFMXQGCVFFGAHGTGGKCIYAEKFPDEKCETKHTVPEVLSMCNAGPNNNGSQFLMCIXQNPCLEGKH

SEQ ID NO: 254734 - protein, 133 aa, Zea mays
  Clone ID: MRT4577_163898C.1.pep
MTINSNSSGSHVIQVTVISKAHRIHEVSMDPSFGKGSRDHPAVSLTHRTPYASFGDKHSNGCQLTHWVNKLCTTAHGFIQHVTLRPNLSRTVNGKLSLSALILQAGSVDLVFRHAFSAADKGDRLLNALQCYI

SEQ ID NO: 254735 - protein, 92 aa, Zea mays
  Clone ID: MRT4577_163899C.1.pep
SLRPNEPRTRLPVRERLQEGRRIWPRAPGNLRQPQYQLMTRLHLAPKKLKKTKVGLSLYKPNFGAPPLFWCYISQLADTCKNILSRFSCWTK

SEQ ID NO: 254736 - protein, 138 aa, Zea mays
  Clone ID: MRT4577_16389C.1.pep
ASGFLQPLARAWPPRWACASYRAHPLAAMKRRATAQGEPCLATLRCRGYGRELEYDRVEAAEGLLCMGVRQGEGSGGTPSSRLHADRKLCAGEKIGSGKFFPLFFSTAQDAPAQGKFACVHARSGASQGRAPRHALVM

SEQ ID NO: 254737 - protein, 82 aa, Zea mays
  unsure (1)..(82): unsure at all Xaa locations
  Clone ID: MRT4577_1638C.1.pep
XAPQFSKFPILNRRHGKKLPESLHFNPGTFRLRSPTESSLSSISSANIPDSATTHSLSTLASPTSTTYAXSINEQFAATTLD

SEQ ID NO: 254738 - protein, 104 aa, Zea mays
  Clone ID: MRT4577_163900C.1.pep
LQSEHAGECNGHAANNGVHSEISVADLDRHMYSAGCPDPDIVIRTSGETRLSNFLLWQTTFSHLQNPDPLWPEFSFRHLVWAILQYQRAYPYLEQNRKLAKKQL

SEQ ID NO: 254739 - protein, 76 aa, Zea mays
  Clone ID: MRT4577_163901C.1.pep
GCAILLSYLTIFTSPQSKLYAMHQSFSGTSEVIIGFKSTSEHSFTARVQKNNRCFGLIDFSSRVKRRRKREREREG

SEQ ID NO: 254740 - protein, 50 aa, Zea mays
  Clone ID: MRT4577_163902C.1.pep
TPIRRQLGLIPIKRSDCFLVVCQLSCVGLYKTKQWHPGIVMLFAIPPATC

SEQ ID NO: 254741 - protein, 151 aa, Zea mays
  unsure (1)..(151): unsure at all Xaa locations
  Clone ID: MRT4577_163903C.1.pep
MAPKAEMKPVAKNPVEEEPAAEKTTAGKKPXADKLIPIIKSAGMDGYEGNRGKKKGKKSVETYKIYIVEGRYKQVHPDICISSNAMSIINSLINDIFEKLSGEAGKLARYNKKPTITSREIQTYVRLVLPGELAKHAVSEGTKADTKFTSC

SEQ ID NO: 254742 - protein, 348 aa, Zea mays
  Clone ID: MRT4577_163904C.1.pep
MAVAGGWKQQSNRLQAHVPSWDSERALSHDVKMTRSCSIPRTARATAAPRTTRPVALTPRQGRRHLWQAKRATLHLRHDDRVKKGVPRRSILYPFPLPLSLSCYRDRERGYSERDPSLRRKWAPSPPTDQGFEGWPLGRVRQPPQSTRALRPLLIRGSKAGPSEGFDSRLRALGLRAHYWSEVRRLAPRKGSTAASGHSGSAPTTDQGFEGWPPEGFDSRLKTRRARDDSRPPARLSSPSTTGLRRDSRHRRVIHVADDPIRPPADKLTVDRRLSAVCRVAQLFHRVAVTRYCCQIGAEREEEIEVTEDRTPPPSDSQAGNCFYFDICGSEPESPVNEGKPRCICHLP

SEQ ID NO: 254743 - protein, 205 aa, Zea mays
  unsure (1)..(205): unsure at all Xaa locations
  Clone ID: MRT4577_163905C.1.pep
MAANQEEQEQEQRRRLIAAATRFPLPSGCRFSYGTAGFRADGATMAPAVCRAGILAALRSVKLAGAAVGIVITASHNPIGDNGVKIADPDGGMMAQHWEPFADALANAPDPDALLQMVLQFAKDEGIPLGGEDTAQVLLGRDTRPTGAYLLDAALQGINAIVGARAVDMGILTTPQLHWMVRSKDKGVMASEXYYFRQLIGSFRR

SEQ ID NO: 254744 - protein, 112 aa, Zea mays
  Clone ID: MRT4577_163906C.1.pep
NSARGRESIANLKGGKKERGRGGGGLPVVLEVNGTSTNGIGRPLAGRSRAEGFLRNNPKGNNLAGNPVLPGENRQKHSLFNSGWFLKFKGWPLLRKINSGGWSEGLSGKPNL

SEQ ID NO: 254745 - protein, 178 aa, Zea mays
  Clone ID: MRT4577_163907C.1.pep
GLHRQLAGGFPPPPPKTRRSLGTPGSLLPRVCLFLNSGCNVGNLPPTNAQGFPLCKTRKVRSFGPLSFTVDSPKLGNGLQSWQPRTRQWPHPVGQGFSRRSGYGGQVESGPNQLNAGSLLNDDQAQLLGQARPHPTAMVKRVGCPKVWHPDRAEGFFFFFFFFFFFFFSFFFFFFFFS

SEQ ID NO: 254746 - protein, 79 aa, Zea mays
  unsure (1)..(79): unsure at all Xaa locations
  Clone ID: MRT4577_163908C.1.pep
RETNGRSPTSARLPAVTLLLNGAQMCVAGDRLLYKVLGEXRRVDSVWCLTFGNADMETLTVYVIWHHHQXMNLWVEYHL

SEQ ID NO: 254747 - protein, 77 aa, Zea mays
  Clone ID: MRT4577_163909C.1.pep
VGKYKNARHYCVTDTPAPAETHRFETLGRLWVSRPINRTPLRLLAFCESPSLSEGAPPYPTNPLTTRLGGTRTSKTG

SEQ ID NO: 254748 - protein, 125 aa, Zea mays
  Clone ID: MRT4577_16390C.1.pep
MTFWAGVRTLTCAQHGTGFNIDHPLSNMTALLLKMPHKVPKKTKWAGASGLEREKKPNFFYKRNTGLGLIAHRVRNHLFVAPRVIKPNLGLPWLTRGKKFFALFYQNSMGLRGCPFFFATPYPIP

SEQ ID NO: 254749 - protein, 69 aa, Zea mays
  Clone ID: MRT4577_163910C.1.pep
CFNNTGLTRIFYQQTHERTRYWVTNLKGLYLSTMFRCLSGWLDPVIDTDRLIRSNKSVHMHTHTRSHHC

SEQ ID NO: 254750 - protein, 228 aa, Zea mays
  Clone ID: MRT4577_163911C.1.pep
MPSPSNSHSSSSNSSDRDDDGGGGGNGRSWAAAERVASYLRNHKSVHAVCEKLGVDTKAFTPIPAGDRRACSPPPAGSVCLYANALEAGMRVPLDPFFCELLSHFGVAPSQLAPNCWRIMAAFLALSRSAGVHPPSVPVFLHFFALRVLKVKGLYCFAPKDTAGVLFTGLPDKIKGWKEGFFFLKSSAPWPCPVLWGDPTKKSTADPMLTKEEKKRGGEAAACARRHA

SEQ ID NO: 254751 - protein, 83 aa, Zea mays
  unsure (1)..(83): unsure at all Xaa locations
  Clone ID: MRT4577_163912C.1.pep
IKPIKIPQMVRANMMTPLMIPIMMSPMVLPSMISHMMMPQXCHCYFFFQIILQQQLLFIFNPIAMIISPMFLQKPFVCASFLI

SEQ ID NO: 254752 - protein, 74 aa, Zea mays
  Clone ID: MRT4577_163913C.1.pep
LIAKSEKKKIKIITKKKNKKKGKWSPALWDPRFLTLAFYDVAFVWCYLYSLYWPDLYNLLTRKTLSLSQLNLLA

SEQ ID NO: 254753 - protein, 184 aa, Zea mays
  unsure (1)..(184): unsure at all Xaa locations
  Clone ID: MRT4577_163914C.1.pep
MGGQMPDADGKARSADSSSSYGYPPSAPPQHQYGTFGPPSGXPPXEFPQPAVGFPQPAAPPGMQHYPQPPPASYAVYPPPQQPYSAAAPYYAQGYQIAQGYIPVVEGRPVRIRPLPCCGLGMGWFLFIIGFFFAAIPWYLGAFVLICVRVRDYREKPGYVACTIAASLAAIAVLLGATKGAEVW

SEQ ID NO: 254754 - protein, 187 aa, Zea mays
  Clone ID: MRT4577_163915C.1.pep
MAHEWDEVTKITKRETIKGELDRFVLNKGEEPQAMYNQLKIMVNQVRNLGSTKWDDHEMVNVILRSLVFRNPTKVQLIHGDPRYKQMSPEEVIISKFVSFELMIKDSKHIVNLEQGATSTPEVQPVAFKATEEKKEESTPSRLPIDASKLDNEERALIIKSFRQIIKQRKGKDYKPRSKRVCYRCSA

SEQ ID NO: 254755 - protein, 57 aa, Zea mays
  Clone ID: MRT4577_163916C.1.pep
LPCTQCSIGSCYRGSLEASLLCFFIVFDPVLPVQSNPSSSASAKGTMDLERCPLWPG

SEQ ID NO: 254756 - protein, 87 aa, Zea mays
  Clone ID: MRT4577_163917C.1.pep
LILFKHNLYQAQLHISIIPLSTSSHILSAYIGRSKTCKKSNPAPKNRYSSFSIRSSTVQSNAYTTVFCLQLDQNHASFHPNYIHVTF

SEQ ID NO: 254757 - protein, 77 aa, Zea mays
  unsure (1)..(77): unsure at all Xaa locations
  Clone ID: MRT4577_163918C.1.pep
HASAAANMVGEGGYGVVFRGVLRDGTAXPIKNLHNNRGQAEKDFRMEVQTIGRVRHKNLVSLLGYCSEGACRMLVYE

SEQ ID NO: 254758 - protein, 54 aa, Zea mays
  Clone ID: MRT4577_163919C.1.pep
YKRLVLMELGKNVIVSNAGYKDLIYAVSAFGKGVAQVLIRIIRIGFYDMYTHAI

SEQ ID NO: 254759 - protein, 96 aa, Zea mays
  Clone ID: MRT4577_16391C.1.pep
EQRFLLETSEDLVLEQVEPVLNKEILVPVDNHFYDQYANAVPHVSHNSPLLFFIFWKGSGQRLASLQYITREIDNSLQKTEQNKKQKSKKTYTNSI

SEQ ID NO: 254760 - protein, 153 aa, Zea mays
  unsure (1)..(153): unsure at all Xaa locations
  Clone ID: MRT4577_163920C.1.pep
AGNFQKWALLPTSPCRQQLLLRQPHLLLRIRPLTDSHCILMTPVLGAPIRPDASPFTTQGSCAETNCLPXTVSRRDGHQTSLEPRGTXHAVSRIPGSPRGVTHSAAHGAFGPVRRTGRMSATTMIWRKCYRRAKLHLCPGATASTLAAPLVPA

SEQ ID NO: 254761 - protein, 215 aa, Zea mays
  Clone ID: MRT4577_163921C.1.pep
MGDWVPTRPPTRPQQPIGDPQAGRASPPCLLVSSVSPPCLPETQSRALFGRRRSATTTMGFISFVGRVLFASLFLLSAYQEFIEFGNDGGPAAKTLKPKFNLFVKLVSKNTGLGLPHMDIKTVIAATMFLKGFGGLLFIVSSSFGAFLLLIYLAFITPIVYDFYNHEMESTLFVDLFFKFIQNLAFMGALLFFLGMKNSIPKRRSKGRTTKTKTN

SEQ ID NO: 254762 - protein, 63 aa, Zea mays
  Clone ID: MRT4577_163922C.1.pep
YGYTGPSSILGKRAESHDLCPRARIQGEVRLHKALELGVSGIRRLNPWSSETGSSSGQSQQLD

SEQ ID NO: 254763 - protein, 180 aa, Zea mays
  unsure (1)..(180): unsure at all Xaa locations
  Clone ID: MRT4577_163923C.1.pep
MVLVFRNLFRRLLANKETRFLLVCLDAARETTILYKLKLGEYRLTILTMDYTAETDDYKTITFAVWHVCGHYKIRPLWRHYSQNTQYRIFVANSIDRDRVAGARDELHRMLNEDELLYAVLLVFANKQYLRNAMNAAXSTDKLGLHSLRXRHWYIQSTCATTGDGLNEGLNXLSSNIESN

SEQ ID NO: 254764 - protein, 92 aa, Zea mays
  Clone ID: MRT4577_163924C.1.pep
MDGAAAAGGSREPAANGSKPEEQQFDPSRMIGIVKRKASIKDLATAYHAECIASCKELLQLQRKWEEEQQVEAKMPEEPRSLVFKTSKHRKK

SEQ ID NO: 254765 - protein, 184 aa, Zea mays
  Clone ID: MRT4577_163925C.1.pep
MADPAEHRPAEEDEEAAAAGEDEDTGAQVAPIVKLEEVAVTTGEEDEDVLVDMKAKLYRFDKEANQWKERGTGTVKLLKHKETAKVRLVMRQAKTLKICANHLVVATTKMFAIRFGSVENCKKFKDIVEEIAEEQGKTEVKENEEVSIAAADLVQKLTVTEASKEGDAEEEEAPASDHKKDAKG

SEQ ID NO: 254766 - protein, 70 aa, Zea mays
  Clone ID: MRT4577_163926C.1.pep
RKEAHQYMKSFSCKIIKCSKLSYYKLSTYALGSIVAKLFNVLSTSSKHRCTGSSLTYCFPVREQRNELAS

SEQ ID NO: 254767 - protein, 81 aa, Zea mays
  unsure (1)..(81): unsure at all Xaa locations
  Clone ID: MRT4577_163927C.1.pep
IQLLSRAHNNNLVRMIRFCFDNGENILVYHSIPNGTLTKAFSGLNGIHFNCCRRLNIPLNSSXGLTYLHDHTNTPIIHRAV

SEQ ID NO: 254768 - protein, 210 aa, Zea mays
  Clone ID: MRT4577_163928C.1.pep
MADPAEHRPAEEDEEAAAAGEDEDTGAQVAPIVKLEEVAVTTGEEDEDVLVDMKAKLYRFDKEANQWKERGTGTVKLLKHKETAKVRLVMRQAKTLKICANHLVVATTKMQEHAGSDKSCVWHALDFADGELKEEMFAIRFGSVENCKKFKDTVEEIAEEQGKTEVKENEEVSIAAADLVQKLTVTEASKEGDAEEEEAPASDHKKDAKG

SEQ ID NO: 254769 - protein, 53 aa, Zea mays
  Clone ID: MRT4577_163929C.1.pep
TSRSGQGIGQSPTKGQKQQAYHPRCSRVRPSFKDLVPPAPELYAILTIYEFNP

SEQ ID NO: 254770 - protein, 86 aa, Zea mays
  unsure (1)..(86): unsure at all Xaa locations
  Clone ID: MRT4577_16392C.1.pep
KYCFSXXIPNPSQKAKRPKPNXXVGLKFFSNSVQGXKLTGPPXXGVFIRFRHXXXTPCXGXXRCPPXRASGFPDGGTXXPXXRKWR

SEQ ID NO: 254771 - protein, 209 aa, Zea mays
  Clone ID: MRT4577_163930C.1.pep
MAEPAEHRPAEEEEAAAAGEDEDTGAQVAPIVKLEEVAVTTGEEDEDALLDMKAKLYRFDKEGNQWKERGTGTVKLLKHKDTAKVRLVMRQAKTLKICANHLVVATTKMQEHAGSDKSCVWHALDFADGELKEEMFAIRFGSVENCKKFKDTVEEIAEQQGKSEEKENDEVSTAASDLAQKLTVAEPSKEENAEKEEAPASDDKKDDKE

SEQ ID NO: 254772 - protein, 203 aa, Zea mays
  unsure (1)..(203): unsure at all Xaa locations
  Clone ID: MRT4577_163931C.1.pep
NREGGKXNVQALSKEMSGLSVFHFTDXAAYTTNKIWQWQASSTSYIIAHAGSEEATRTKIERKGGGYGSERQKRLTVKSQSRPNKRKKKEKNEILRGMTPKTVAEPDKLDIAEATNSKVEDVGRRRKGGDEVVKKLGKKESSIVDGEAMGARRGNTEWMVTVEAKNKSPKRQKADLPQARNLGKKGKQTRRRKRRISSNNQSG

SEQ ID NO: 254773 - protein, 106 aa, Zea mays
  Clone ID: MRT4577_163932C.1.pep
RLTTRSELDLTSKNHVLLVGTLSILLSLVMILGCGVECQLHCEKGDLYDSCYLEEYEDLKRLVTTPENLREQEDGLLNVIGFLRGLFHFLHPQSPDSDGGGLYFEQ

SEQ ID NO: 254774 - protein, 47 aa, Zea mays
  Clone ID: MRT4577_163933C.1.pep
DLFDIHIYNQHVHLIYRTSNIDDERLNHTIDRQRETWQCDSYTPPDG

SEQ ID NO: 254775 - protein, 61 aa, Zea mays
  Clone ID: MRT4577_163934C.1.pep
MVKSLPSHGFSINIRACCCAGGGKYNSQSGAWCGIPGGYASSDQGSWITWLGIPLAEFAYR

SEQ ID NO: 254776 - protein, 225 aa, Zea mays
  unsure (1)..(225): unsure at all Xaa locations
  Clone ID: MRT4577_163935C.1.pep
MSPFQGYRGDAVLSGVRSRKRVFATVAAEPVTAAPKRQKRGDEMPLDALPDECLFEVLRRVQGTRARCASACVSHRWLALLAGIRASEAVLAPAAPAVPDLNQEYLSEDDEADLMDLDGDARERTLEGMEATDARLTAAAVAGRLAAVSVRGSHPARGVTDAGICALARGCPELRSLTLWDVPQVTXRRLAEVAXECHSLERLDISGCPMITDKGPRVVAQGCPD

SEQ ID NO: 254777 - protein, 96 aa, Zea mays
  Clone ID: MRT4577_163936C.1.pep
EETSCQAPEGFCEHQVGQQRSEVLALVPTTYPIHAPTSEPHQSADELALVATTSLVHAFVAEVTREIDCILPPPAIQKQKTKQPPPPDFIPRRSSH

SEQ ID NO: 254778 - protein, 190 aa, Zea mays
  Clone ID: MRT4577_163937C.1.pep
RRAEEPEARTPSCAGGGQADPVRTARHRPVYGDGRRQQRHRGFYYGQQLLCADPQHHQRILMELLNQMDGFDQTVNVKVIMATNRADTLDPALLRPGRLDRKIEFPLPDRRQKRLVFQVCTAKMNLSDEVDLEDYVSRPDKISAADIAAICQEAGMHAVRKNRYVILPKDFEKGYRTNVKKPETDFDFYK

SEQ ID NO: 254779 - protein, 96 aa, Zea mays
  Clone ID: MRT4577_163938C.1.pep
PSTRETLWGNRLFIYSELSSICEMEQQCYRSSCLRSCRERSLFGAAVPLCRDSVDVWREFIVCGDYLWSIVRAVQVCVVIDYVVESSIICCCVDGF

SEQ ID NO: 254780 - protein, 49 aa, Zea mays
  Clone ID: MRT4577_163939C.1.pep
ATKGEVGGAQDSQQPSVIHFPLDIDTPGGADQPARDVENRSIAICPRAE

SEQ ID NO: 254781 - protein, 136 aa, Zea mays
  unsure (1)..(136): unsure at all Xaa locations
  Clone ID: MRT4577_16393C.1.pep
MAHGATVPLGKSMRRALRTAIGIPKKNKPPTPPLLPNGSGRDPGVSMELSSSSSVAARKEAVVRVVMRGXVVEVYPGVVLACTVIRNHPPGLCLAHPDVFRNPHGAVVRPLEPLFPGQKFLLLPETTVVRLKQRIP

SEQ ID NO: 254782 - protein, 474 aa, Zea mays
  Clone ID: MRT4577_163940C.1.pep
MNAQPHAYVYITATVARPASASKPNQASAALLRIQLLPDPQNRTQVETLTSAFSMSAATTAPTPAVATPMAPPPSYPASSTISASVAASVEEEDDLYGRLKSLQRHMEFVEIQEEYVKDEQKNLKRELLRAQEEVKRIQSVPLVIGQFMEMVDGNNGIVGSTTGSNYYVRILSTINRELLKPSASVALHRHSNALVDVLPPEADSSISLLGSSEKPNVTYNDIGGCDIQKQEIREAVELPLTHHELYKQIGIDPPRGVLLYGPPGTGKTMLAKAVAHHTTAAFIRVVGSEFVQKYLGEGPRMVRDVFRLAKENAPAIIFIDEVDAIATARFDAQTGADREVQRILMELLNQMDGFDQTVNVKVIMATNRADTLDPALLRPGRLDRKIEFPLPDRRQKRLVFQVCTAKMNLSDEVDLEDYVSRPDKISAADIAAICQEAGMHAVRKNRYVILPKDFEKGYRTNVKKPETDFDFYK

SEQ ID NO: 254783 - protein, 89 aa, Zea mays
  Clone ID: MRT4577_163941C.1.pep
HTVHISKAHTEIRPARVQTSHLPGQYTYKKEDVQVQTLQELLPFCVTTAEAMLSIARAESAGSGYQNPNQLLTCYAMGSVQGGFSKTAT

SEQ ID NO: 254784 - protein, 129 aa, Zea mays
  Clone ID: MRT4577_163942C.1.pep
FTLTVIMATNRADTLDPALLRPGRLDRKIEFPLPDRRQKRLVFQVCTAKMNLIAQVHFGSANLNLSDEVDLEDYVSRPDKISAADIAAICQEAGMHAVRKNRYVILPKDFEKGYRTNVKKPETDFDFYK

SEQ ID NO: 254785 - protein, 421 aa, Zea mays
  unsure (1)..(421): unsure at all Xaa locations
  Clone ID: MRT4577_163943C.1.pep
MSAATTGPAPSVATPMAPPPSYPASSTASSSISASAEEEEDLYGRLKSLQRHMEFVEIQEEYVKDEQKNLKRELLRAQEEVKRIQSVPLVIGQFMEMVDGNNGIVGSTTGSNYYVRILSTINRELLKPSASVALHRHSNALVDVLPPEADSSISLLGSSEKPNVTYNDIXGGCDIQKKKKQVCVELPLTHHELYKQIGIDPPRGVLLYGPPGTGKTMLAKAVAHHTTAAFIRVVGSEFVQKYLGEGPRMVRDVFRLAKENAPAIIFIDEVDAIATARFDAQTGADREVQRILMELLNQMDGFDQTVNVKVIMATNRADTLDPALLRPGRLDRKIEFPLPDRRQKRLVFQVCTAKMNLSDEVDLEDYVSRPDKISAADIAAICQEAGMHAVRKNRYVILPKDFEKGYRTNVKKPETDFDFYK

SEQ ID NO: 254786 - protein, 91 aa, Zea mays
  Clone ID: MRT4577_163944C.1.pep
NSPCFWFHSLVLCLLCIIRKNVTGLVVLMIHITLLNLDTADLVSITILKATPGRLGGGPTPRRLSGSPTPCLAVPLLKTLVSITSLIYDPI

SEQ ID NO: 254787 - protein, 38 aa, Zea mays
  Clone ID: MRT4577_163945C.1.pep
PYKTFYGYLSCTYAPLYQITATLKNKDEMQKPIHKERA

SEQ ID NO: 254788 - protein, 89 aa, Zea mays
  Clone ID: MRT4577_163946C.1.pep
CFGGSQRRRRAALYSSSPLSSSPSPLGPPSSIPTSSSSTMTKSSRASSPAPPSPPRRLSLLSSSPSAYQLTRRWPGQASPTHFISRSST

SEQ ID NO: 254789 - protein, 66 aa, Zea mays
  unsure (1)..(66): unsure at all Xaa locations
  Clone ID: MRT4577_163947C.1.pep
SSTCDIFVCNLIDTSNVSMVTIVNELLHASLXHCTMFCAILVVPRPNHCISPLVVLVFEDHNTYLY

SEQ ID NO: 254790 - protein, 67 aa, Zea mays
  unsure (1)..(67): unsure at all Xaa locations
  Clone ID: MRT4577_163948C.1.pep
PIGQLGFYCXXXILPYSQGSMMNPALSWQQPIVGGAIFYITYEMFSTMVPSYRHVFPRNNQYIESTF

SEQ ID NO: 254791 - protein, 83 aa, Zea mays
  Clone ID: MRT4577_163949C.1.pep
SPGLRVPACISAVPPLPWWPFVFIRVIRPVPFFLPPLPFISMHVVWCVISFAGCLYNNQYLLEQISVAAFPKRSIKPYEHLMF

SEQ ID NO: 254792 - protein, 128 aa, Zea mays
  Clone ID: MRT4577_16394C.1.pep
LEAGRGSSLPRSSATLAPSCIPPHSRPQSRRRTRRLDSSRRIALLMLDIAKSSARLSSSTHRTCPFSACCLPAVCHASARHRPASLAIAPTCWSPSLPTLVSVASNLAELDTTKITLLVDQSLGETIS

SEQ ID NO: 254793 - protein, 305 aa, Zea mays
  Clone ID: MRT4577_163950C.1.pep
EAGRASISIMKFCPTKVQMELLKSYTGKKENLGNCEQFFMEMMKVPRVESKLRILSFKIKFVTQVADLKSNLNTINLVAEEVRSSVKLKRVMQTILSLGNALNQGTARGAAVGFRLDSLLKLSDIRARNNRMTLMHYLCKVLSDKLPEVLDFSRDLANLEPASKIQLKELAEEMQAITKGLEKVEQELATAEKDPSETEIFYRKLNLFLADAQAEGRSLASLYSSAGKSADSLAHYFGEDPVRCPFEQVVSTLLSFTKMFERAHAENVKQMELEKKRAQAEAEKEKAKLTAHKKRESLELGISGR

SEQ ID NO: 254794 - protein, 43 aa, Zea mays
  Clone ID: MRT4577_163951C.1.pep
PLILFFHPCASLGTCFLTATTCKNLCYVPVIPCCTICSASESI

SEQ ID NO: 254795 - protein, 49 aa, Zea mays
  Clone ID: MRT4577_163952C.1.pep
EVSSGGYPFKAELTIQCSVTFHNNHKKAKWACKEKFNYFQENIGPSSHK

SEQ ID NO: 254796 - protein, 215 aa, Zea mays
  unsure (1)..(215): unsure at all Xaa locations
  Clone ID: MRT4577_163953C.1.pep
MATITPPTGLTTPTTKSYHLSFRSPHDGKPWRNLEAQHDCSSDDFISAARPKRAAEQHGVWPARSGAARXQPGAPASARRSSXTAARPARGXWPARDGXAATAPARRNGPARARPENAGGGRRFRKAAPGEAGRGGAGGGGARRSSARRRPAGVGVSGAGARRGRSGAGGRRSCTAAPGSPDPATQGGHELSAGYRRTDRARVRVDPKEESEVHT

SEQ ID NO: 254797 - protein, 95 aa, Zea mays
  unsure (1)..(95): unsure at all Xaa locations
  Clone ID: MRT4577_163954C.1.pep
WVXCCSPFXCXXLXVARXVFFXXFXLPXPLXGXVFLVXCRVLXXXXXVXCVVVRAPXVWRAXPCWLPLRCGLLGFPGXCLVXFAGVSWLRXXSAL

SEQ ID NO: 254798 - protein, 85 aa, Zea mays
  unsure (1)..(85): unsure at all Xaa locations
  Clone ID: MRT4577_163955C.1.pep
CSPGSCLLVAVLLISPPSAGYWPEELSEILTSCWMEDPIHRPNLTQIIQMLLHYLSTLWSKETLXPSATFSLENTILPPESAGTS

SEQ ID NO: 254799 - protein, 69 aa, Zea mays
  Clone ID: MRT4577_163956C.1.pep
MDAVDSVVDPLREFAKDSIRLVKRCHKPDRKEFTKVAARTAIGFVVMGFVGFFVKLIFIPINNIIVGSG

SEQ ID NO: 254800 - protein, 61 aa, Zea mays
  Clone ID: MRT4577_163957C.1.pep
MPAPCFPLPFFKTPPPPLKIKYKYGLGPQVKPGYIVYPPRAPSARRALFLLGGWGKPYPPL

SEQ ID NO: 254801 - protein, 69 aa, Zea mays; identical to SEQ ID NO: 254799
  Clone ID: MRT4577_163958C.1.pep

SEQ ID NO: 254802 - protein, 38 aa, Zea mays
  Clone ID: MRT4577_163959C.1.pep
YPIRGVVFPHPLFVRLNVWGWALILWKKNTHPQVKDFV

SEQ ID NO: 254803 - protein, 90 aa, Zea mays
  unsure (1)..(90): unsure at all Xaa locations
  Clone ID: MRT4577_16395C.1.pep
EIGKMVQXPQKPKSQDEEPKKKVEAKNSLERYSXYNMRNPIKDEKIASKLPADDKKKIEDAIDAAISWLDANQLAEADEFEGKMKELESL

SEQ ID NO: 254804 - protein, 55 aa, Zea mays
  Clone ID: MRT4577_163960C.1.pep
PSLQLLRPVLSVPSQVSSSKHAVVLFTILTCTVALHLLRAFKRGVLLHLPIVGHR

SEQ ID NO: 254805 - protein, 231 aa, Zea mays
  unsure (1)..(231): unsure at all Xaa locations
  Clone ID: MRT4577_163961C.1.pep
MILSLRRSYNFSFCLKHNKRQRVIHAWINWMERTTSNXTYKAXCSAPDDEPIMYCTLTILDEATXELATHFFWDVDYRLKCYPMLVYSKSLYDFPQNAPRIVHCIYKLPFFYYDREYISAPRIXNLANTYYCVYKXVIDYPSWPKKEIPRQRALVXSSCRIRAAQSPKHAGQQSARERTLCHYEXDMRIPKDVASVADLHGMCGAVKKLQSAITAYRSLRDTENTLLHRVM

SEQ ID NO: 254806 - protein, 50 aa, Zea mays
  Clone ID: MRT4577_163962C.1.pep
CIICMMCACSHPPINTRNSPIKGRNMPLAFRKRTQKKNWIQIFFQIYVRI

SEQ ID NO: 254807 - protein, 165 aa, Zea mays
  unsure (1)..(165): unsure at all Xaa locations
  Clone ID: MRT4577_163963C.1.pep
IAPPSRRSPLDALNAKAQDPFAQVYXLILEYRAGQDIMPRHSADALKTLIWTRHHXDLLRAIACMKRSSTSALXRYPGKAIALLVTLKHMLQKXNIRCXTCKENDCWRGYMTCLPVKYNPXAKDAYLIGALXRXLWELILLHKHYDILVSWMAENILSVANLNPT

SEQ ID NO: 254808 - protein, 119 aa, Zea mays
  unsure (1)..(119): unsure at all Xaa locations
  Clone ID: MRT4577_163964C.1.pep
RRSLTTHTFHLLDICTDSPARFNSVVYITYGIKLKYXITRNLXLINFYRVLYSXFLYSHNYDHVTRTLRXHNHPIHVLLLMQXPAVTGSFLTAITIKLIPMIHQSEKYHKIIAICTNNP

SEQ ID NO: 254809 - protein, 88 aa, Zea mays
  Clone ID: MRT4577_163965C.1.pep
AELVVYARPGLVLYGGLPGVGAVLLHSGGGALLYVAGALSVVVHLSVHVSGVGRVAGGVASVACVAGSPTPLEFNRSLAFVAALVCHV

SEQ ID NO: 254810 - protein, 147 aa, Zea mays
  Clone ID: MRT4577_163966C.1.pep
GLVMDAKEKGAPFCQGSRREGPLFWPLLVDHVRPTMRVAWGEPFGPVLPGIRINPVEEGLPPCNARNFGLQGGLFSRGITKAILVSDAMGAGTGQINFAPGWGADHFPFQGLKNSGLGSPGVTTRLSMMAKVKSPVINLPSPSSPLG

SEQ ID NO: 254811 - protein, 118 aa, Zea mays
  Clone ID: MRT4577_163967C.1.pep
VANRSEHRNVQSEPNVCLSYVRYVAPVVGWPPVRSYRKLDLRMYKGYRELREALEAMFVSSGSANNNNNLSEFAVTYQDKDGDLMLVGDVPFEMFASTCRKLRIMKRSEATGLGSARQ

SEQ ID NO: 254812 - protein, 84 aa, Zea mays
  Clone ID: MRT4577_163968C.1.pep
LASLGKRNLTTGCGGGCSRRRRRRCSSSWPPSPTDPGQQPFSWGGGQGSVIKGWDEGVMTMQVGEVARIQCTPDYAYGAGGLPV

SEQ ID NO: 254813 - protein, 232 aa, Zea mays
  unsure (1)..(232): unsure at all Xaa locations
  Clone ID: MRT4577_163969C.1.pep
METVVGDLMATELRLGLPGTVDDCSQHQQQTQLKVAAPPSNPTRGKKRPAAEEEEANKRDAEAAPPAANYLSPXSCRAPVVGWPPVRSYRKSCFQQAKQQAVSSSSKAADKEDAAAPAPSCTASAAASNATASAGAGSFVKVSMDGAPYLRKLDLRMYKGYRELREALEAMFVSSGSANNNNNLSEFAVTYQDKDGDLMLVGDVPFEMFASTCRKLRIMKRSEATGLGSARQ

SEQ ID NO: 254814 - protein, 127 aa, Zea mays
  Clone ID: MRT4577_16396C.1.pep
PVRDPPGGAHEGANAGPQGGVPRGPQPGPNPGQTRALGEPGGKWESPQIPTANKPGKKRGNPGGPKEGANAQELRGAHRPVNRGETRRARCVKESAKAREKAGSELGALPPPPSRTGGARGVAGGQR

SEQ ID NO: 254815 - protein, 578 aa, Zea mays
  unsure (1)..(578): unsure at all Xaa locations
  Clone ID: MRT4577_163970C.1.pep
MHGATMSRGSAASVYLGVDVGTGSARAGLFDENGKLLGSASSPIQIWKEKDCIEQSSTDIWHAVCAAVKSACSLANVAPEDVAGLGFAATCSLVAVDADGSPVSVSLSGDTRRNIIVWMDHRAVNQAERINATNSPVLQYCGGGVSPEMQAPKLLWMKENLLDSWSMVCRWMDLSDWLAYRATGDDTRSLCTTVCKWTYLGHAHMKQWKESDSRDMEACGWDNVFWEEIGLADLLEGNCAKIGRSVAFPGHALGSGLTPTAAKELGLLPGTPVGTSLIDAHAGGVGVMESXLMQDLKLVSDEHAICHRMVLVCGTSTCHMAVSKDRLFIPGVWGPFWSAMIPEFWLTEGGQSATGALLDYIIENHVASPLLSNHAASQSISIFELLNKMLLSMSQEQNSPFLSALTQDTHVLPDFHGNRSPVPDPKSKGVIYGLTLDTSEKHLALLYLATIQGIAYGTRHIVEHCNAHGHKIDTLLACGGLAKNSLYIQEHADITGCPIILPRESESVLLGAAVLGAVAGKKFPGVRDAMKALNAAGKVVNPSSDPKVKKYHDAKYQIFRSLYEQQLSHRATMAQALQ

SEQ ID NO: 254816 - protein, 134 aa, Zea mays
  Clone ID: MRT4577_163971C.1.pep
MSRGSAASVFLGVDVGTGSARAGLFDENGKLLGSASSPIQIWKEKDCIEQSSTDIWHAVCAAVKSACSLANVAPEDVAGLGFAATCSLVAVDADGSPVSVSLSGDTRRNIIVRMDHRAVNHAQRINATNSPVLQ

SEQ ID NO: 254817 - protein, 122 aa, Zea mays
  Clone ID: MRT4577_163972C.1.pep
MRGGDRPSASLQLLSLGLVLLYFFTSGSTVGLVEGQKTWCIAKPSASNESLAQNLDYACSQVSCAVIQKGGPCYYPDSPVSRAAVAMNLYYAYSGRHPWNCYFNNSALVVQSDPSYGSCTYY

SEQ ID NO: 254818 - protein, 69 aa, Zea mays
  unsure (1)..(69): unsure at all Xaa locations
  Clone ID: MRT4577_163973C.1.pep
TLILPRVRPLYLSSDTSQHVRSALAKVIMGVAPVXGTEATFELLHPIFLSHLKVEFPNVRLIIISLLEQ

SEQ ID NO: 254819 - protein, 81 aa, Zea mays
  Clone ID: MRT4577_163974C.1.pep
KKKHGQTNKKKALFSKKEERAKVPLPGKCTLLKETTVGFKIWGEGKQKPQLKSVPKIGTNPTRKKIIHWMQNPKHMHKPKF

SEQ ID NO: 254820 - protein, 362 aa, Zea mays
  unsure (1)..(362): unsure at all Xaa locations
  Clone ID: MRT4577_163975C.1.pep
MFLTVSDEHAICHRMVLVCGTSTCHMAVSKDRLFIPGVWGPFWSAMIPEFWLTEGGQSATGALLDYIIENHVASPLLSNHAASQSISIFELLNKMLLSMSQEQNSPFLSALTQDTHVLPDFHGNRXRMMLFFSCHHNXRSTNHTTAEAESPXISMRLYITITPECGIAYSLCMMSHDIXENCRGIIXVAXSSNMFDLSANYYRSPVPDPKSKGVIYGLTLDTSEKHLALLYLATIQGIAYGTRHIVEHCNAHGHKIDTLLACGGLAKNSLYIQEHADITGCPIMLPRESESVLLGAAVLGAVAGKKFPGVRDAMKALNAAGKVVNPSSDPKVKKYHDAKYQIFRSLYEQQLSHRATMAQALQ

SEQ ID NO: 254821 - protein, 113 aa, Zea mays
  unsure (1)..(113): unsure at all Xaa locations
  Clone ID: MRT4577_163976C.1.pep
MRGGDRPSASLQLLSLGLVLLYFXSPQKTWCIAKPSASNEILAQNLDYACSQVSCAVIQKGGPCYYPDSPVSRAAVAMNLYYAYSGRHPWNCYFNNSALVVQSDPSYGSCTYY

SEQ ID NO: 254822 - protein, 209 aa, Zea mays
  unsure (1)..(209): unsure at all Xaa locations
  Clone ID: MRT4577_163977C.1.pep
MSRGSAASVFLGVDVGTGSARAGLFDENGKLLGSASSPIQIWKEKDCIEQSSTDIWHAVCAAVKSACSLANVAPEDVAGLGFAATCSLVAVDADGSPVSVSLSGDTRRNIIVWMDHRAVNQAERINATNSPVLQYCGGGVSPEMQAPKLLWMKENLLDSWSMVCRWMDLSDWLAYRATGDDTRTLCTTVXCKWTYLGHAPLQILERNSD

SEQ ID NO: 254823 - protein, 122 aa, Zea mays
  Clone ID: MRT4577_163978C.1.pep
MRGGDRPSASLQLLSLGLVLLYFFTSGSTVGLVEGQKTWCIAKPSASNEILAQNLDYACSQVSCAVIQKGGPCYYPDSPVSRAAVAMNLYYAYSGRHPWNCYFNNSALVVQSDPSYGSCTYY

SEQ ID NO: 254824 - protein, 86 aa, Zea mays
  Clone ID: MRT4577_163979C.1.pep
YPGNGGAWRCGSWATPPWPLAGKPARTTRAVRITQCRRCDHLRLSQCESRRPASSAPRIYRLMDKYQERPPLAGVPESGYSGVGNA

SEQ ID NO: 254825 - protein, 127 aa, Zea mays
  Clone ID: MRT4577_16397C.1.pep
SQIVADEQLASSSNSNKSGSAPVNTYLGRPWKEFARTVVMESVIDGFVHRQGYMPWEGKDNLGTAFFGEFRNGGDGANVTGRKEMQGFHVMGKDRALQFTVGHFLHGADWIPETGTPVSLGLSGEEE

SEQ ID NO: 254826 - protein, 134 aa, Zea mays
  Clone ID: MRT4577_163980C.1.pep
MRGGDRPSASLQLLSLGLVLLYFFTSGSTVGLVEGQVRPLALDALSIYKTWCIAKPSASNEILAQNLDYACSQVSCAVIQKGGPCYYPDSPVSRAAVAMNLYYAYSGRHPWNCYFNNSALVVQSDPSYGSCTYY

SEQ ID NO: 254827 - protein, 271 aa, Zea mays
  Clone ID: MRT4577_163981C.1.pep
RDNLIDWLGKNKLVGEAEGLYKEMEERGVNPDEYTYVLLIESCFKVDRVEDAVAYFNKMFDAGLRPNANAFNKVIDGLVKVDRLSEAQGFFDMMPEKEVKPNIASYELLLKAYIDAARLDDAIKVAKCILLDESVVFSDETKALLEEALDKEGRNGQMTKLYEDVEMEKAEAAARAAEEKARAEALAKEEEERKKAEAKAKEEAAARASRAAIEAVLGRKREAEKQEPVDGLNVEDAEVVESKSDTSDVSGEQNEGDEHKKQEPAEASSCS

SEQ ID NO: 254828 - protein, 147 aa, Zea mays
  unsure (1)..(147): unsure at all Xaa locations
  Clone ID: MRT4577_163982C.1.pep
GPLLKKGPEGDPRRVNKPQNKKGKKKKKNRNQKQEKPPPKNKPXEKNPGKKTERNQKPPPGXGQPKKKLEPKRPGGLWAKKTKAPGGKPPKRPRVFFQAGGHGFPEKPQLGPEHRADPFDEGPKNPPXKGGGGGNPPNXGKKPGPAP

SEQ ID NO: 254829 - protein, 47 aa, Zea mays
  Clone ID: MRT4577_163983C.1.pep
HRSRLQSGSRKQSLSPASGGPGNKNQPMMALWPLRHHTLPKHLELWK

SEQ ID NO: 254830 - protein, 197 aa, Zea mays
  unsure (1)..(197): unsure at all Xaa locations
  Clone ID: MRT4577_163984C.1.pep
RPGTPIHSLTDDLLLQIFLRLPSLATLVRAAXACRAWSRAVVSSPAFRRRFRELHRTPLLGFFFECPSPIQDPAIPLFPSFVPVRRREGDLSIAVRGGDFFLTCLQEHPIKSQSWDILDCRGGYVLLCNDGQAGAQAMAVVNPLARQCRLVDYRHVDALEGRRGTFFDLNGYLLCSEEDPASFRVVLLPRRVQGAGY

SEQ ID NO: 254831 - protein, 69 aa, Zea mays
  Clone ID: MRT4577_163985C.1.pep
KQDPHRGFPRIPALLVALATLLLCVKFGRSSPQKSQASLKICSMLYKKWIFDYNSPLDSPLLKSGTALK

SEQ ID NO: 254832 - protein, 61 aa, Zea mays
  Clone ID: MRT4577_163986C.1.pep
KNLNLCLIKKIPYPVNLSGFTKSSPIVPTKNKFLNAKQESKKKESSMFNGDTHYQDISTTT

SEQ ID NO: 254833 - protein, 67 aa, Zea mays
  Clone ID: MRT4577_163987C.1.pep
GDRLNWGYVTASFLTNILTIHLKLQIYTSAVGFLDHVSDYLMYAVSPVRGSSPPHQPRTTSPGSGPM

SEQ ID NO: 254834 - protein, 130 aa, Zea mays
  Clone ID: MRT4577_163988C.1.pep
KNVRNANLLVWTAEDANLLVQCAEISSAWGSETRQARQMMGNSAHTVYIKLLVQYRLRLESPSDRGVVVQGPKTNRRAGRDDNKHTYARLEEGRDEHRHCVFVFFYDNCRYPLIGRAGCSNNTLFNHHIF

SEQ ID NO: 254835 - protein, 35 aa, Zea mays
  Clone ID: MRT4577_163989C.1.pep
QVKLDTYALHGLSKLATSLSISVLRSYTQFKIYIN

SEQ ID NO: 254836 - protein, 160 aa, Zea mays
  Clone ID: MRT4577_16398C.1.pep
RGKSGLQKKASELFLLCGSPVAIVIFSPGKKVFALGTPSVDHVLRRYAPIPGEEEEDGLLPVLQDTDDVSAITDRVEVEGIVRRTEETKARSVMEKARMDAIGKTVRQTAAKAGRKFWWEADSGKLGEAELPEFAKVLRRLRVNLQRHLDSLSASTRQLQ

SEQ ID NO: 254837 - protein, 77 aa, Zea mays
  Clone ID: MRT4577_163990C.1.pep
GAPAQASSSSTQTLVGSLASLVAVRLPCREWSPLARRHVPFVPGSRVDLMRLLMITHPWHLPDIRGSCMEISYFILV

SEQ ID NO: 254838 - protein, 108 aa, Zea mays
  Clone ID: MRT4577_163991C.1.pep
FSNGRRSSLSFNLRQLPTRLTVSCAAKPETVDKVCAVVRKQLSLKEADEITAATKFAALGADSLDTVEIVMGLEEEFGIEMAEEKAQSIATVEQAAALIEELLFEKAK

SEQ ID NO: 254839 - protein, 57 aa, Zea mays
  Clone ID: MRT4577_163992C.1.pep
KEPEDQIGEVPGVCTKKVKNRCIQKWRKTLMKMSLERSRPSSPSQLGIVEDRRRHMV

SEQ ID NO: 254840 - protein, 101 aa, Zea mays
  Clone ID: MRT4577_163993C.1.pep
CRSLFSERSRTDGVRVQYCLIIELVPSSVAHHPPRRQSHAVLGTCRSRHQGLLEDGQWMRKAFEASAGEGSTGSERGGLRRDVGDSPAAALRTSCRLGGTD

SEQ ID NO: 254841 - protein, 327 aa, Zea mays
  unsure (1)..(327): unsure at all Xaa locations
  Clone ID: MRT4577_163994C.1.pep
PAPLPAPVFDRXSERDLASWNAMVLALANHGRVQDSLVRFDRMTRVEGLVPNAITFVAVLSACNHGGLVDEGRRYFAAMVSEHGIRPRIEHYGCMVDILARAGFIEEALDVVAGMNCRPDSIIWRSLLDACCKRNAGLELSEAMAKLALDVPDDAVSGVYVLLSRVYASAQRWNDVGMIRQLMSQEGFKKEPGFSSIEMDGSVHQFVAGDTSHPQSEEIYVKLDEIQQRLTSAGYKPDLSEAPMVADIDRTKGATLRLHSERLAISFGLLNATPGAPIRILKNLRVCKDCHTISKLISKLYNVEIIVRDRIRFHHFKDGSCSCKDYW

SEQ ID NO: 254842 - protein, 265 aa, Zea mays
  Clone ID: MRT4577_163995C.1.pep
SHLAVASPLARGHGETSRGAEAPLPPPPAAPTVTDLALRLPVPRLRCAPPRLLPAPGRSGRPTTPGPAPPVQGKSDSYMTVRSNGGLNQMRTGICDMVAVARLVNATLVIPQLDKRSFWQDTSTFKDIFDEPHFIKALEGDVHIVSDLPGTLQSAPRARKHFTSWSGASYYEEVKELWKNQKVVHIPKSDSRLANNGLPIDIQRLRCRCLYQALRFSDLIEDLGKKLVERLRSHGKYIALHLRYEKDMLAFTGCTYGLSDLEANE

SEQ ID NO: 254843 - protein, 167 aa, Zea mays
  unsure (1)..(167): unsure at all Xaa locations
  Clone ID: MRT4577_163996C.1.pep
APHLKVSNDQLWASNGYGYHACVTPTSRYKVQGKSDSYMTVRSNGGLNQMRTGICDMVAVARLVNATLVIPQLDKRSFWQDXGSXLGYSLAIAIYSVXCSLFFCLTTPTTIYSTFKDIFDEPHFIKALEGDVHIVSDLPGSLQSAPRARKHFTSWAXASYYEEVKEL

SEQ ID NO: 254844 - protein, 344 aa, Zea mays
  Clone ID: MRT4577_163997C.1.pep
MTGGGEEQGRSLFGVSLTNRPRWQQFMICSSGFFFGYLVNGICEEYVYNRLQFSYGWYFTFVQGFVYLALIRLQGFTVKQMVNPWRTYVRLSAVLMGSNGLTKGSLAFLNYPAQIMFKSTKVLPVMVMGAFIPGLRRKYAFQEYVSAVMLVVGLILFTLADAQTSPNFSMAGVAMVSGALVMDAFLGNLQEAIFKMNPDTTQMEMLFCSTVVGLPFLAVPMVLTGELVTAWTSCSQHLYVYAVLVLEAMATFVGQVSVLSLIALFGAATTAMVTTARKAVTLLLSYLIFTKPLTEQHATGLLLITMGIVIKLLPENKEGRPRRSPKNDDDDKPRESREAGEETA

SEQ ID NO: 254845 - protein, 126 aa, Zea mays
  Clone ID: MRT4577_163998C.1.pep
MADTRISWREGLVSRMFDMGDLDCCKWLSDDEDSPVFLHTDKALADGTNFEPCNGCCLHEGSDQQEACGFGSVELSCIGDELNNDSIKASPNPVTVAESMNAEGFELVTSDDSDWTLFYKNYLFES

SEQ ID NO: 254846 - protein, 68 aa, Zea mays
  Clone ID: MRT4577_163999C.1.pep
VPLWIVNGAQRLDCSLSADCSTSRSKAQITPSLDTLWKKYVTWSRRNSHWWSNRCSKNSMSQRGSAIL

SEQ ID NO: 254847 - protein, 40 aa, Zea mays
  Clone ID: MRT4577_16399C.1.pep
KNKNSPVDISLRKTSYFVFNTAPHVNCYCWTKKIERHSNP

SEQ ID NO: 254848 - protein, 630 aa, Zea mays
  unsure (1)..(630): unsure at all Xaa locations
  Clone ID: MRT4577_1639C.1.pep
MSEYDERYQGNADMPAAEGGYPQAEYAAAAAPAAGGSPPADSKPSGFSDHADGRSSQHQHETQSHDSGSSKSRERDRERDKGKDRERDRDRGREKGRDRDRDKDRERSDRDRDRDRHHRDHRERSEKREHRDRSDDRDRHRDGRDRHRDDRDSERRRDRDRDGHRRHRSRSPSKSRDRXNRRSRSRSRSRSKSKRXSGFXDQAPPQHALPIVAAGAIPGQLPGITAPIPXVGVLPNLYNLAAGQFNPLVIQPQAMTQQATRHARRVYVGGLPPTANEQTVAIFFNGVMAAIGGNTAGPGDAVLNVYINHDKKFAFVEMRSVEEASNAMALDGIMFECAPVKLREISDCRDAIXELASSAMALDGIMFEGAPVKVRRPTDYNPSLAAALGPSQPSPNLNLAAVGLTAGSNGGLEGPDRIFVGGLPYYFTEAQVRELLESFGPLRGFDLVKDRETGNSKGYAFCVYQDLTVTDIACAALNGIKMGDKTLTVRRANQGASQPRPEQESILLQAQQQVQLQKLVYQVGALPTKVVCLTQVVTADELKDDEEYEDIMEDMRLEAGKYGNLVKVIIPRPDPSGQPVVGVGKVFLEYADIDGAAKAKTALHGRKFGGNPVVAVCYAEDKFANGEYDG

SEQ ID NO: 254849 - protein, 97 aa, Zea mays
  Clone ID: MRT4577_163C.1.pep
MPNAATLLHRQHAVYLQQLGGTYTQFFYEYSQHEQLLSFNQLDALNPAAYLQQEILLPFSQLAATNRACLLTQDQVLAFYQQGGGKAGGLLRLRGGG

SEQ ID NO: 254850 - protein, 100 aa, Zea mays
  unsure (1)..(100): unsure at all Xaa locations
  Clone ID: MRT4577_164000C.1.pep
MLPRRLRMVCSAMITAPCSPNAFLNLLPGNFAPVELXWCMEYKGHLAWMHYDMNLGIVHTSDYIDEQCSGQLREILMRSNYVMNLRGVPLHPHIHDALGD

SEQ ID NO: 254851 - protein, 77 aa, Zea mays
  unsure (1)..(77): unsure at all Xaa locations
  Clone ID: MRT4577_164001C.1.pep
MHLAVKKRKANIILCNYLCAVGGALWLPAKNYLIPMDGAGTXCLANTLINTVMLIIGNVQQQGTRVXVSFDTVKGAI

SEQ ID NO: 254852 - protein, 172 aa, Zea mays
  Clone ID: MRT4577_164002C.1.pep
MASQGNQTVARSATKLVLPITGGSSSEPTDKKQKEVQRMVQHVGMQGPFIKSKWSHIPITFSQEDLQLKYYHHNVAMIISCVIKGFLVHNVLVDTGSATDIIFAKAFRQMQVQDDKIHDATHHLCGFRGRQIVAFGKITMPITFGYVYNTRTNQVVFDIVFWNTQESCASLY

SEQ ID NO: 254853 - protein, 40 aa, Zea mays
  Clone ID: MRT4577_164003C.1.pep
KSFYRGQKKKKKKKKKKKKKKKKKKKKKKKKKNSREAPVP

SEQ ID NO: 254854 - protein, 54 aa, Zea mays
  Clone ID: MRT4577_164004C.1.pep
DCRLEKIRKYVPDITAVLKKKQKLISSVLRDSYQNCGTVESLHFIHCILIVQVY

SEQ ID NO: 254855 - protein, 186 aa, Zea mays
  Clone ID: MRT4577_164005C.1.pep
MGKSPAKWLKSVLFGKKTSRSGSAKAKDLSTGSNRGYVAAGKEPGFSESSPVISEPVLVTPRNNDAVPEAGKGENSSSQGEAVVQHEVNHDLDKQSTVGSDVLSNDPERLKEEQAAVKAQAAFRGYLARRAFRALKGIIRLQALIRGHLVRRQAASTLRATWLIVKFQAIVRGRNVRLSSDAIQFS

SEQ ID NO: 254856 - protein, 99 aa, Zea mays
  Clone ID: MRT4577_164006C.1.pep
PTRPQLVAAYPQQFLPFNGLAALDFGGYLPEEPLLPFNPVGCGKPCCFLATPPVVAVYLDALPNGCTLLPLEQLVAFQPLGLTKLTSGLPPPIIGGALF

SEQ ID NO: 254857 - protein, 84 aa, Zea mays
  unsure (1)..(84): unsure at all Xaa locations
  Clone ID: MRT4577_164007C.1.pep
GRKKKKKNKKKKKKKKKKKKKKKKKKKKKKKKKKNPXKVAWXFGFLVFKEGGPLLWKKKTLGTPWGVSKKIRLGGKGGPIFCPP

SEQ ID NO: 254858 - protein, 516 aa, Zea mays
  Clone ID: MRT4577_164008C.1.pep
MANPLAGLQDHLKLARDYALEGLYDTSIIFFDGAIAQINKHLTTLDDALIRTKWMNCKKAISEEVEIVKQLDAQLKSLKEAPGTRRSSSPPIRSNKSFVFQPLDEYPTSSPAPFDDPDVWAPPRDTPTRRPTRGQSSARKSSQDGAWARGSSRTGTPSRSAKPNGIKGGAVKSTASNSSVRKGKQSSNKADSTSSDAEEGKSKKGQYEGPDMDLAAMLERDVLDSTPGVRWDDVAGLSEAKRLLEEAVVLPLWMPEYFQGIRRPWKGVLMFGPPGTGKTLLAKAVATECGTTFFNVSSATLASKWRGESERMVRCLFDLARAYAPSTIFIDEIDSLCTSRGASGEHESSRRVKSELLVQIDGVNNSSTTDDGQPKIVMVLAATNFPWDIDEALRRRLEKRIYIPLPDFESRKALININLRTVQIAADVNIDEVARRTEGYSGDDLTNVCRDASMNGMRRKIAGKTRDEIKNMSKDEIAKDPVAMCDFVEALVKVQKSVSPSDIEKHEKWMAEFGSA

SEQ ID NO: 254859 - protein, 414 aa, Zea mays
  Clone ID: MRT4577_164009C.1.pep
ANRRPAFRSGAQGHPDQFVVLAACAVASLYTLQGKKGVNQDAMIFWENFCSRDDTIFCGVFDGHGPYGHLVAKRVRDLLPLKLGEGLTTEDGRVTSTGNIKLNTHDVASPEHIDKGSTAISSEAQQNGEYPETFPALRTSFLKAFRVMDRDLKLHKSIDCFFSGTTAVAVIKQEHNLIIGNLGDSRAVLGTRDENNQLIAVQLTVDLKPNIPSEAQRIRQRRGRIFALPEEPEVARVWLPKYNSPGLAMARAFGDFCLKDHGVISTPDVSYHHITEKDEFVVLATDGVWDVLSNDEVVSTVCRATSQASAARFLVESAHRAWRTRFPTSKIDDCAVVCLFLNTDKASESSSSLAKNLADAVEVSSAGRATTVQVSAGASTDVAALVPVPDGNEVSIAETITKLVTLMDLPNDSS

SEQ ID NO: 254860 - protein, 87 aa, Zea mays
  Clone ID: MRT4577_16400C.1.pep
MATKPGRAAAAVLLLTLLAALHAAARNNNNNNENRNPGGGGGDPGAFFAGMPRFSGGGVPGGGGFFGGWGEGGLGYRRDAVWPPSTA

SEQ ID NO: 254861 - protein, 186 aa, Zea mays
  Clone ID: MRT4577_164010C.1.pep
VMAEDADMAEGSGSGRCNCLGDRIKENTQKAVPLAIQSVQRKRRVFLCSVFCVLFNFHLGRVEFVFLGSTNYNPTAFHYSATTYVCAACRARDGLPSSSSPRARDSMLHPSPTAVGAGGWGAGSISISTSGGSIGGVIGFTRRLSPVLRRRGHREAVRCWCGGRRLPCHASRSSRREWRLLSRPAS

SEQ ID NO: 254862 - protein, 570 aa, Zea mays
  unsure (1)..(570): unsure at all Xaa locations
  Clone ID: MRT4577_164011C.1.pep
MVEAAAGRRTGTSRRRPSGSGGEHRHLVALAVAARVAMVTTRSVGPAAVAEGDGAGAAVTDAGAAGGGGRCMEDFFDCLLGLLGALGMTWAAARPQRQPRPPLPRGAAGAGPAPTDSRRFAAELRATPGRIAGNGACAVASLYTLQGKKGVNQDAMIFWENFCSRDDTIFCGVFDGHGPYGHLVAKRVRDLLPLKLGEGLTTEDGRVTSTGNIKLNTHDVASPEHIDKGSTAISSEAQQNQSXPETFPALRTSFLKAFRVMDRDLKLHKSIDCFFSGTTAVAVIKQGHNLIIGNLGDSRAVLGTRDENNQLVAVQLTVDLKPDIPKPRHAENQILPCDVKKDCLNNLXHEPLRILSIVSMKLLRKSHRVDQIKPXETFQEPLFSPSIILTIASGESQRIRQRRGRIFALPEEPEVARVWLPRYNSPGLAMARAFGDFCLKDHGVISMPDVSYHHITEKXEFVVLATDGVWDVLSNDEVVNTVSRVTSRASAARFLVESAHRAWRTRFPTSKVDDCAAVCLFLNTNEASESSSSLANNLADAVQVSTAQCSKTIQVSAPIDGNEVSVVETR

SEQ ID NO: 254863 - protein, 47 aa, Zea mays
  unsure (1)..(47): unsure at all Xaa locations
  Clone ID: MRT4577_164012C.1.pep
GEVRHRRVRRVRVVFLLSCSDAPARVGHTPVVFPRAWXAFGNLVWLR

SEQ ID NO: 254864 - protein, 167 aa, Zea mays
  Clone ID: MRT4577_164013C.1.pep
MVEAAAGRRSGTSRRRPSGSGGEHQRLVALAVAARFAMVSTRSAGPAVAGGDGAGAAGTGAGPAAGSGRCMEDFFDCLLGLLGALGMTWATARPQRQPLPPLPRGVGAGPEPTDARRFAAALRATPGRIAGNGACAVASLYTLQGKKGVNQDAMIFWENFCSTDDTI

SEQ ID NO: 254865 - protein, 161 aa, Zea mays
  Clone ID: MRT4577_164014C.1.pep
FVYVAGEQHGGEGLAGRRVRACGFRRLDGRMERTSPRVRRRASSRRTGREAWCRVRPHPDESTAVRRPLPTWALLRRAREGAALCAATGTGAVHCAMSGRVAWRRAGHGLAAKPSHVKSSRRPWLRALLSREYPVDGVLHFENWHDLCTFSIADLLFFCSC

SEQ ID NO: 254866 - protein, 53 aa, Zea mays
  Clone ID: MRT4577_164015C.1.pep
KKLVLKKGVTLALAPTKKPRFHSLQSKGTPKHNVLGRKLKLNLAPQNRVFFEI

SEQ ID NO: 254867 - protein, 101 aa, Zea mays
  Clone ID: MRT4577_164016C.1.pep
TKRFDFVTILSQPCHRSFSNTIVFGNVCFCTFKIFTSLYSCHNNIIMRILLIEYDSTLQRLLSRVGRELSTWLELYSTWVRHYLSHFGLHLGCSSSAQVHD

SEQ ID NO: 254868 - protein, 66 aa, Zea mays
  Clone ID: MRT4577_164017C.1.pep
ITYSSALHRYRRISRIEQHPGTALSPGLSDDVLSPGVTSHIQLNYETLTRLLTLLLPRRDMPTPRP

SEQ ID NO: 254869 - protein, 189 aa, Zea mays
  Clone ID: MRT4577_164018C.1.pep
MPEVAGDDKPAKRPTAEEFFFRLYQWRLNLRTRSVSGEYLSGTDYSLEFPIISSQYTGLQHRYAYAQVVDSCGNCGKVNPKYGGFAKFYLDERSNAEIPGASLVKTQNHWLGKHEFCFGASFVPKAGGSHEDDGWVVSFVHDEETNTSQVHIVDAKRFEDAPVAKITLPRRVPYGFHGTFVSKKMNDVM

SEQ ID NO: 254870 - protein, 81 aa, Zea mays
  Clone ID: MRT4577_164019C.1.pep
LARPQENRPRSSPCWGAYQGLMLRTVPSPPHSSVWSRPLFASTSTVSWVDDIGVDDIVIKLSLDRWGRGNCTTLLKCIPPP

SEQ ID NO: 254871 - protein, 566 aa, Zea mays
  Clone ID: MRT4577_16401C.1.pep
MSLYVKDSVSFEKSLYSGFALHASAANSSFYDGLSKGIPSYSFCTDNKRGLGETHMVPDSSVYKASIRLPWLEPNRPGMQTRDDHFSSTRRDFSINDSMKSNSSLQGDIIPNSDTGGLPFSRSAVNLETGWKPRGILVAHLQEHRFSVNDIAVSNDNTFFVTASDDSSVKIWDTRKLEKDIAFRSRLTYSMGNSRALCTTMVHGTSQVIVGASDGTLHLFSVDCARSVGSVVERYAGIVDVKRNEIKEDAILSVVNCSTDSFSPTVLFSTEHCGIHKWDTRTNSESWSFKSSPEEGYISALVVGPCGNWFISGSSRGVLTLWDNRFLVPVKSWNYSTLSPIEKLCLLIPPPSSISSAGRPLVFVAAGCNEVSLWNAENGNCHQMFRTASTDNEAVMSKAPSRPVNKPVIKDIRRAGNYKYRIDELNDPPVRHPGIRSLLPLPGGDLLTGGTDLKIRYWDQARPEQSFCIAGPSAKEVRSAKGDILEKAVGNDESYDIRSSFGIQVVQEMYKQSSSVSGLTPKTQLAVAAADSAGCHRDAILALASFNLSSQRLVSGSRDGAVKVWK

SEQ ID NO: 254872 - protein, 85 aa, Zea mays
  Clone ID: MRT4577_164020C.1.pep
HTIDSVFLYHHLIITQYRGGPHAYVAAISTCVHTATMMTHCIHTLIVLPFATYLASLLDKALANPPLNHTCYSKHHLLSILPVSP

SEQ ID NO: 254873 - protein, 65 aa, Zea mays
  unsure (1)..(65): unsure at all Xaa locations
  Clone ID: MRT4577_164021C.1.pep
YACXTXXXFPXRATLTGQRLRQRLQAPVWGQRLRPAERGLWGGGVTLLMDLPPIKVAAAVFFYPS

SEQ ID NO: 254874 - protein, 81 aa, Zea mays
  unsure (1)..(81): unsure at all Xaa locations
  Clone ID: MRT4577_164022C.1.pep
MATKIFSLLMLLALSACVAYATXFPLCSXAPIASLFPXSLASMIASVCESPALQSSFFPQAIAVSHIPFXPLLVPQSPALF

SEQ ID NO: 254875 - protein, 42 aa, Zea mays
  Clone ID: MRT4577_164023C.1.pep
HAYDHTFKDKWTDARAVSLYYYAIIYHILNNPKSYRFSVSNL

SEQ ID NO: 254876 - protein, 122 aa, Zea mays
  Clone ID: MRT4577_164024C.1.pep
GGKRIRSINGIQQIKHIIQPGYHGIYINIQQMAEQYCCSMHVLRCAGHSSQMESEAWIASVHASREHAISTRSSSLSIKCTARFTMITTRACWRGNLRSLPLPLHLSLDYNIYSPHSERHRQ

SEQ ID NO: 254877 - protein, 174 aa, Zea mays
  Clone ID: MRT4577_164025C.1.pep
MDTMRGALERAKMLVGMEVDEESALPPPEEQSFFDDINRHCTLNTTQRLYGFAICLAAGLTCTFLSMLVFFNPVKFGVAFTLGNLMALGSTAFLIGPKRQFDMMLDSVRIYATAIYIASIIIALFCAIYVRSKLLTLVAIILEFGALIWYSLSYIPFARSIVSKVMTSCFDTDF

SEQ ID NO: 254878 - protein, 178 aa, Zea mays
  unsure (1)..(178): unsure at all Xaa locations
  Clone ID: MRT4577_164026C.1.pep
MAASGGNEPELAVVTDVCNASSTPQENRLAGDSNTISENAQESLSSLPEQESNDASVNTEKQEPGISKCKSVDEIPKTVTVKRCKNVDSKKVSSNNNNNPRFTGSPALKKHPTKGDHLFQLCENGMAQDTKPPSTRICINSACXAVFNSDNTXCKRCSCCICHGFDDNKDPSLWLVCS

SEQ ID NO: 254879 - protein, 97 aa, Zea mays
  Clone ID: MRT4577_164027C.1.pep
YPFVHPYVHHNTYQSGSKFHSTHHSSNTCYRTSYVKSDLKAILCHRIWHRAHIQSSIRSSVHSSQQSTLHFALPFVIWQVRGQFANQHSQSQCGNGL

SEQ ID NO: 254880 - protein, 117 aa, Zea mays
  Clone ID: MRT4577_164028C.1.pep
TYTSLPPLPLSRSLCFTRGAELASDKRDTVGGGDAGPRLDDGEDSSAVSSKAVVEELYRALERGDVDAVRRLLNPDVDWWFHGPRAHQHLVLMRLLTGTGTGTGAGAGLPFKIRSLD

SEQ ID NO: 254881 - protein, 64 aa, Zea mays
  unsure (1)..(64): unsure at all Xaa locations
  Clone ID: MRT4577_164029C.1.pep
CSXXALXARXGWVVVTAPXRDPXYTXASAXXAPXLLSLFLPFPFSRHXFAGFSXVKLLNRXAPF

SEQ ID NO: 254882 - protein, 70 aa, Zea mays
  Clone ID: MRT4577_16402C.1.pep
PDYEFYEEERISRPVYSLTGANPKTTPTDLPNHYHHRLYQPSFFYGLLTLSWAASLYPVYFLEGDPELHW

SEQ ID NO: 254883 - protein, 58 aa, Zea mays
  unsure (1)..(58): unsure at all Xaa locations
  Clone ID: MRT4577_164030C.1.pep
EHLALCTXSSRISLRVGRHHRPSPFSSHSDGRPLSPTRATPRPLRPSQSPTRRRRTSM

SEQ ID NO: 254884 - protein, 118 aa, Zea mays
  Clone ID: MRT4577_164031C.1.pep
LPLFGLAAIRPARYERLALNMPGASCELLPGCAQSHHASSGAIASVISSGSRPDSALEGLVLSDPADGAVGSPSLFSVRPPLWSYVQRAPSAILAECVRNLQRDSVCRRSERLRRLAR

SEQ ID NO: 254885 - protein, 74 aa, Zea mays
  Clone ID: MRT4577_164032C.1.pep
VICEVLILVIPLSLALALDLGLVIRSEVRRTSYPLMLVRVIVIGVLGRDAMISYWLCLWCGRYRVLVGMGFAMF

SEQ ID NO: 254886 - protein, 69 aa, Zea mays
  unsure (1)..(69): unsure at all Xaa locations
  Clone ID: MRT4577_164033C.1.pep
ARGKHLAHDILDDYDYCDDFGKKHCGFPRLEGXKKELRWSSLARRHDSTESFRDVYHDDSNLIREGFQA

SEQ ID NO: 254887 - protein, 135 aa, Zea mays
  unsure (1)..(135): unsure at all Xaa locations
  Clone ID: MRT4577_164034C.1.pep
FGSRKNMQYFFAQAICEYLPRMKGNTPAFFYAIQVDEDDLVTDVSWADAKSIMDYTYFVDVAWVDTRYCARDYGRPLLLYTGDNHNNPMIIYESALIMMTXAQYFTWQLETSNSAVGANQPNAVLTDQAAALSEA

SEQ ID NO: 254888 - protein, 61 aa, Zea mays
  Clone ID: MRT4577_164035C.1.pep
MMVFVVLGVAFSNLLVLAKKKKKKKKKKKKKKKKKKKKKKKKKFLFLYPFYKRGNRRIALY

SEQ ID NO: 254889 - protein, 146 aa, Zea mays
  unsure (1)..(146): unsure at all Xaa locations
  Clone ID: MRT4577_164036C.1.pep
MSLRPXERGQMRKGNYKQTVDAEESRRRREGQMMDMRKAKREESLQKKRCDGFPASAAGVPPMGHSTALQQKXPPIEEVISTGVVSRFIEFLTREDHPQLQFEAAWALTNIASGTSENTKVVVESGAVXVPIFVKLLNSXSEDVRE

SEQ ID NO: 254890 - protein, 75 aa, Zea mays
  unsure (1)..(75): unsure at all Xaa locations
  Clone ID: MRT4577_164037C.1.pep
LDYGRCDRILRDQRNYILAMVQDTKAAACNGLLVAKSIXRDAVTDLSLHYLAHRHILLVHDPDRNYMQCITYTRN

SEQ ID NO: 254891 - protein, 136 aa, Zea mays; identical to SEQ ID NO: 223521
  Clone ID: MRT4577_164038C.1.pep

SEQ ID NO: 254892 - protein, 136 aa, Zea mays; identical to SEQ ID NO: 223521
  Clone ID: MRT4577_164039C.1.pep

SEQ ID NO: 254893 - protein, 59 aa, Zea mays
  Clone ID: MRT4577_16403C.1.pep
IVIPPHKPGRQKNIGVPLNSSPGVMDRTLFVWGFFEKKKKKKKKKKKKKKKGGKRLVSS

SEQ ID NO: 254894 - protein, 136 aa, Zea mays; identical to SEQ ID NO: 223526
  Clone ID: MRT4577_164040C.1.pep

SEQ ID NO: 254895 - protein, 136 aa, Zea mays; identical to SEQ ID NO: 223521
  Clone ID: MRT4577_164041C.1.pep

SEQ ID NO: 254896 - protein, 89 aa, Zea mays
  Clone ID: MRT4577_164042C.1.pep
RFYRNIKKGTSLWPKVFPEGTPKTKTRHHFGEQRNVKAEHEKHDLGQDIFSWRPNGPRRPKDGAVFGSCHSLNCCSGKVLWHYRFQITL

SEQ ID NO: 254897 - protein, 136 aa, Zea mays; identical to SEQ ID NO: 223521
  Clone ID: MRT4577_164043C.1.pep

SEQ ID NO: 254898 - protein, 136 aa, Zea mays; identical to SEQ ID NO: 223521
  Clone ID: MRT4577_164045C.1.pep

SEQ ID NO: 254899 - protein, 136 aa, Zea mays; identical to SEQ ID NO: 223521
  Clone ID: MRT4577_164046C.1.pep

SEQ ID NO: 254900 - protein, 136 aa, Zea mays; identical to SEQ ID NO: 223521
  Clone ID: MRT4577_164047C.1.pep

SEQ ID NO: 254901 - protein, 70 aa, Zea mays
  Clone ID: MRT4577_164048C.1.pep
PRSSKRRNCSPLLGGKNILFGDLFLGGGPIAKTRGIGNQNPPLSRNRARGKIIASRSWHTKGPQRAKRET

SEQ ID NO: 254902 - protein, 136 aa, Zea mays; identical to SEQ ID NO: 223521
  Clone ID: MRT4577_164049C.1.pep

SEQ ID NO: 254903 - protein, 157 aa, Zea mays
  Clone ID: MRT4577_16404C.1.pep
MANAGMRPVAGLLLVLNFCMYIIVAAVGGWAINHAINYGFFIGAGLQLPAHFSPIYFPVGNAATGFFVIFAVIAGVVGAASALAGFHHVRAWNAESLPAAASAGFIAWTLTLLAMGLAVKEIELHGRNARLICMESFTIILSATQLFYLLAIYGGLR

SEQ ID NO: 254904 - protein, 92 aa, Zea mays
  Clone ID: MRT4577_164050C.1.pep
RKRRKAAFVTFYSIWGGLIRRLSAVFLLRVAVVQQQYYVKKKETAWCIVEHGVSRKERRPGHREKRPEKPQKRHPTTLVVVAVVGTVDDSTL

SEQ ID NO: 254905 - protein, 152 aa, Zea mays
  unsure (1)..(152): unsure at all Xaa locations
  Clone ID: MRT4577_164051C.1.pep
MAMSPAAGRTPNPKAAPSPSPSARRAGADSASAAAAAAASDTKARFEAYNRLQAAAVAFGEKLPIPEIVAIGGQSDGKSSLLEALLGFRFNVREVEMGTRRPLVLQMVHDPTALDPRCRFQEEDSEEYGHPMVQAAAIADLIKXCTESHLRT

SEQ ID NO: 254906 - protein, 273 aa, Zea mays
  unsure (1)..(273): unsure at all Xaa locations
  Clone ID: MRT4577_164052C.1.pep
FELDVLLESVSVTIKRVEELVVSMEGNSLKPDSSIHLDEHLTSLNMRCIEWLYGDHGLDVVDVLQKNAGVTLPVILTRLKQKQEEWSMCQSDFNKVWAEVYSKNYHKSLDYGSFYSKQQNTXNLNTKXINEISEKNRKGDDVLLAISAGNRWPLVGKKQRTAGKRWALKKHRHPPAWASGTMPPPLLASRASKNRTTSSMSGRFYGLASQPLCMMFAIGLGQQQQAAGSAHTECQAAGSGTCMFSSVCGRLPAVNPGTENKPDEQRRMIRLQS

SEQ ID NO: 254907 - protein, 29 aa, Zea mays
  Clone ID: MRT4577_164053C.1.pep
SSSSTGCIARPGTTGATRSTTHRSGCPTC

SEQ ID NO: 254908 - protein, 81 aa, Zea mays
  Clone ID: MRT4577_164054C.1.pep
GRGRYGGTSPLNSRVVVCAWTGLRGFKCRVPEVPKPSLPVATQSSSSWVEFRRGGSEREQATTTLFTSKKKKKEGEKKKSG

SEQ ID NO: 254909 - protein, 278 aa, Zea mays
  Clone ID: MRT4577_164055C.1.pep
MAAAPTSSGDSPPPAQPEYGSISSMVASSASSAAAAVADFTRWAETFGTEKADAAKAALTSATTLATSSASEAASASSKAASSAYAAASDLTLVAKEELEWFKTEYSAHEQIVFGKIKEGVVMAIMHPGIAAGSATLAGIILFKRPRSYLIQRVRHMFVSKETLLSGVQAEVNHMRQTVNLVSNERQKLLDRAATAEKRFQKGWNTLREEGRSIQHELREISDIENQAVGLKGILDQLPRAHASEFRSKMSGLASQVKKEKRVLNAALTKIVNYGVPI

SEQ ID NO: 254910 - protein, 213 aa, Zea mays
  Clone ID: MRT4577_164056C.1.pep
MAAAPTSSGDSPPPAQPEYGSISSMVASSASSAAAAVADFTRWAETFGTEKADAAKAALTSATTLATSSASEAASASSKAASSAYAAASDLTLVAKEELEWFKTEYSAHEQIVFGKIKEGVVMAIMHPGIAAGSATLAGIILFKRPRSYLIQRVRHMFVSKETLLSGVQAEVNHMRQTVNLVSNERQKLLDRAATAEKRFQKGWNTLRHPPPL

SEQ ID NO: 254911 - protein, 46 aa, Zea mays
  Clone ID: MRT4577_164057C.1.pep
LVPSPNSKIQHSFIYKLRNHRSLQKSPSSMKLISSKLHNSTGFSSS

SEQ ID NO: 254912 - protein, 80 aa, Zea mays
  Clone ID: MRT4577_164058C.1.pep
GYQWRLPQSVCRSFFFGSSGPLGVSGVMWCLSGAECVALRCCCFVQCSLVVGAGCCGRRWCLLRCGACCRWWGCTNGFCY

SEQ ID NO: 254913 - protein, 228 aa, Zea mays
  unsure (1)..(228): unsure at all Xaa locations
  Clone ID: MRT4577_164059C.1.pep
KKTQKKKKKKKKKKKKKKKKKKKKKKKKKRGPIKKNKGCMHIKCPQPCKFEFCWLCLGPWQKHGKRTGEFYAXNRFKXRREXGVYDKSERKKKRAKNSFEKYTHFYKRGAANKSWRKKALGDLKSLQNNKLERLRDIQSKPEXKLKLIIKAWLQIVKCKRVXLKGTYAYGFYLPKHELAKKQFFEYLQGEAKSGLERLHKWAKKKLKIYLDAKSPSKDLNDFRTKLAG

SEQ ID NO: 254914 - protein, 412 aa, Zea mays
  Clone ID: MRT4577_16405C.1.pep
MAWGALRSRVLPLPAPAATAAPHGLLLRLLLSTGVPHHGHHHRRRRLAPTAYAAAAAAAAEAPLPMTPRFGRATRQPGGAASVARVYADANAQRPKEYWDYESLDIQWGKQDGYEVLRKVGRGKYSEVFEGFRAGSDERCVIKILKPVKKKKIKREIKILQNLYGGPNIVKLLDIVRDDESKTPSLIFEHVNNTDFKVLYPALSDYDVRYYIFELLKALDYCHSRGIMHRDVKPHNVMIDHEKRQLRLIDWGLAEFYHPKMEYNARVASRCYKGPELLVDLLDYDYSLDLWSLGCMFAAMIFRVDPFFSGQDNYDQLVKIAEVLGTGDLYNYLEKYGLQLDPQLERLIGRHNRKPWPKFVNARNRHLATPEAIDLVDKLLRYDHQKRPTAKETMAHPYFNPVRSPESKTNSQ

SEQ ID NO: 254915 - protein, 61 aa, Zea mays
  Clone ID: MRT4577_164060C.1.pep
AVNPNITGEKVNNRTAYDGVSVPLICPVTNNATMKGPDHYTNRKKYLATTTADRQDVWLGQ

SEQ ID NO: 254916 - protein, 120 aa, Zea mays
  unsure (1)..(120): unsure at all Xaa locations
  Clone ID: MRT4577_164061C.1.pep
PYPCLYHIARHKHVSVADILXTSPLNLSWCRDLLGHKLVVWNDLTPRLADVVLSDEQDGFRCNMXRXGQFFVKSRYIGLIHLDVPNLNKKIXWKLKXPKIKIFLXFLRKGTILTKDNLAK

SEQ ID NO: 254917 - protein, 44 aa, Zea mays
  Clone ID: MRT4577_164062C.1.pep
AFEQLGQGQSSVNLEPLWQIMLSRHKQKVSRLSCKIDAMVWRIS

SEQ ID NO: 254918 - protein, 105 aa, Zea mays
  unsure (1)..(105): unsure at all Xaa locations
  Clone ID: MRT4577_164063C.1.pep
CRRLGYCGTXDDYCEGRGQSGPCDVTETNNATEASIATPDFCDALLAQAAGSREVNGIYTRVVFLAADGYYQAIRRTGTVHDSKNEIHAFLGNANDETIKFCYIN

SEQ ID NO: 254919 - protein, 50 aa, Zea mays
  Clone ID: MRT4577_164064C.1.pep
YFTRFLTPGRKPVTLLLKKGGSSSLHLHSPFHRSAPPSHVSPPLHQRQSI

SEQ ID NO: 254920 - protein, 1742 aa, Zea mays
  Clone ID: MRT4577_164065C.1.pep
MDGDRRVMYDGWRKDGAHSNEWMVVTKAFLEHAFKDATGRLVKCPCNRCENKWPQKKEEMEKHLCKSGFMPNYLVWYWHGECIRHVDAEVELDDDHDRMDDMLHDLGREVEMNAEEPGQLPRDAQEFFRLLAAGEERLHEHTQMSVLGTLTRLMAIKSKHNISNSAYNDIVQLMGEVLPENHKLPKNMYFAKKMLAGLGMTYEKIDVCPNSCMLFFEEDDKLNRCKHCEASRYVEVTNDEGELVVTKVAAKQLRRLPIIPRLSRLFLNKEIALHMTWPKNGVRLVTDPDIMVHPSDGDAWKAIDEFDPEFANDPRSVRLGLSTDGFTPFNTSASPYSCWPVFIVPYNLPPELVNKEEFMFLALVIPGPEHPGPKLNMFVRPLIEELKQLWRGVKAYDSHTEKEFTMRAAYLWSVHDLLAYGDWSGWCVHGRLCCPICMNDTDAFRLKHGGKVSFFDAHRRWTPFKHDFRNSLTAFRSGAKIRNGPPKRQTAPQIMAWHACLKQGENDRFQGYGEDHNWTHISSIWDLPYAKALIMPHNIDLMHQERNVAESIISTCFDVTDKTKDNMKARKDMAEICKRPMLELKVSDKGHESRPRADYCLKPDERKEIFKWLKNLKFPDRYAANLKRAVNLKTGKLIGLKSHDYHIIMERLMPVMFRGYFKDELWSIFAELSYFYREVCAKTVSKRLMQKFEKEIPILICKFEKVFPPGFFNVMQHLIVHLPWEALVGGPVQFRWMYPIERALKKLRASVRNKARVEGCIAEAFALKEISQFSTRYFARANNVFAPSVRLHVENESPQSTLQIFANPGKAVGKGSVRHIEGSDLNTLMLYMYSNIDSTQEAFDMFDEECWKSTSKPTAIQLENLRRDGLKGGPNFVQWFRNYVSKNSVHPDLQQMAHTSVSVRNYTRYDVNGYRFRTAKLEKSRPLAATTNSGVLASSYVDDDKVVDYYGVLQNIVELIFDGPKELKVVFFECDWFDAHSGTRVDKYGNVEVKHSSRIPSSMSDVVLANQAKQVYYLPYPHPSLRAWWVAIKVNPQVVAPESADYVSTSRDNDDAVFQPEAASNQDIAHRFHVTNGEGLENLCCNSSDLIEEPRSKRKRPVVVRRSLNMFKHRRSRRSGGSAASEDSSGSGLFQGTSQSRQRQQQLLDCLDEVQGEEGEQETPQQDAHVQGEEGEQDEEGEQDEEVDPMGAGSAGDASDGSTSFRYKKSNALGPRPAERRLIRPHGEWSWEDLTWDGTGRRPKVNAVLGSLCRFYYPGMVELNGERFAAMQWADWGLKDYVQPGESSSGGGSSEQKPRTCQVAVWDEFWGRFQLPDDIEADQAQWARVKRHFRKCADKVIKDAMYNARIAAVNYYYKKIKGQKMSKALGANEIYLTEEQYLESVVDWLAKDMEAWRWLAKRWASPEWIAESNKHRVNRGTEGPGHRYGADGHLGTARRMEAESGVAPSFMEVYVRGHRGPDPANPDVLCSEAAREKMNAYGEEMTQRHGPDFDWMHSDLDVSALYHSGGGRKHGRFAFGTGVVDYNRTIGQGKASSSGGSSRSSRSAREAQLEEETRAAQEQARAAQEQARAAQEQVGQLTQYMASYFQEMTTRLGPDMNLPAFRPPQAQGWGQWPGQAPASQPPGTGVGWTQAPPGTWTPPPPQGSQPVRGWVPPVFQPPAGSQPFQAWMAPPPTGWVPPPLGWPAQQYPWMHAGSQGSVSNAQGSEGAANVQGFHGSGGSGHLPGGGGGSGQNSHSPQE

SEQ ID NO: 254921 - protein, 295 aa, Zea mays
  unsure (1)..(295): unsure at all Xaa locations
  Clone ID: MRT4577_164066C.1.pep
MGNASRPCLSDGEKIFHLHSLMEEFTAANRGSMPIAISEPGRSYSIGHAQTRFAFGTGVVEYNRTIGQGKASSSGGSSRSSRSAREAQLEEETRAAQEQARAAQEQARAAQEQARAAQEQVGQLTQYMASYFQEMTTRLGPDMNLPAFRPPQAQGWGQWPGQAPASQPQWTGVGWTQAPPGTWTPPPQGSQPVPGWVPPVSQPPAGSQPFQAWMAPPPMGWVPPPMGWPAQQYPWMHGQPPPHHGSQGSASHAHGSEGXCQRPRLPRPWCWXGVATFLVAEEGVAKTPTARRSDQ

SEQ ID NO: 254922 - protein, 276 aa, Zea mays
  Clone ID: MRT4577_164067C.1.pep
NSYIGNANLCESYDGHSCAADTVRRSALKTVKTVILVCGVLGSVALLLVVVWILINRSRKLASQKAMSLSGACGDDFSNPWTFTPFQKLNFCIDHILACLKDENVIGKGCSGVVYRAEMPNGDIIAVKKLWRAGKDEPIDAFAAEIQIPGHIRHRNIVKLLGYCSNRSVKLLLYNYIPNGNLLELLKENRSLDWDTRYKIAVGTAHGLAYLHHDCIPAILHRDVKCNNILLDSKYEAYLADFGLDKLMNSSKYHHAMSRIAGSYGYIAPQYAYTSN

SEQ ID NO: 254923 - protein, 1753 aa, Zea mays
  Clone ID: MRT4577_164068C.1.pep
MDGDRRVMYDGWRKDGAHSNEWMGVTKAFLEHAFKDATGRLVKCPCNRCENKWPQKKEEMEKHLCKSGFMPNYLVWYRHGESIRHVDAEVELDDDHDRMDDMLHDLGRDVEMNAEEPGQLPRDAQEFFRLLAAGEERLHEHTQMSVLGTLTRLMAIKSKHNISNSAYNDIVQLMGEVLPENHKLPKNMYFAKKMLAGLGMTYEKIDVCPNSCMLFFEEDDKLDRCKHCEASRYVEVTNDEGELVVTKVAAKQLRRLPIIPRLSRLFLNKEIALHMTWPKNGVRLVTDPDIMVHPSDGDAWKAFDEFDPEFANDPRSVRLGLSTDGFTPFNTSASPYSCWPVFIVPYNLPPELVNKEEFMFLALVIPGPEHPGPKLNMFVRPLIEELKQLWRGVKAYDSHTEKEFTMRAAYLWSVHDLLAYGDWSGWCVHGRLCCPICMNDTDAFRLKHGGKVSFFDAHRRWTPFKHDFRNSLTAFRSGAKIRNGPPKRQTAPQIMAWHACLKQGENDRFQGYGEDHNWTHISSIWELPYAKALIMPHNIDLMHQERNVAESIISTCFDVTDKTKDNMKARKDMAEICKRPMLELKVSDKGHESRPRADYCLKPDERKEIFKWLKNLKFPDRYAANLKRAVNLKTGKLIGLKSHDYHIIMERLMPVMFRGYFKDELWSIFAELSYFYREVCAKTVSKRLMQKFEKEIPILICKFEKVFPPGFFNVMQHLIVHLPWEALVGGPVQFRWMYPIERALKKLRASVRNKARVEGCIAEAFALKEISQFSTRYFARANNVFAPSVRLHVENESPQSTLQIFANPGKAVGKGSVRHIEASDLNTLMLYMYSNIDSTQEAFDMFDEECWKSTSKPTAIQLENLRRDGLKGGPNFVQWFRNYVSKNSVHPDLQQMAHTSVSVRNYTRYDVNGYRFRTAKLEKSRPLAATTNSGVLASSYVDDDKVVDYYGVLQNIVELIFDGPKELKVVFFECDWFDAHSGTRVDKYGNVEVKHSSRIPSSMSDVVLANQAKQVYYLPYPHPSLRAWWVAIKVNPQVVAPESADYVSTSRDNDEAVFQPEAASNQDIAHRFHVTNGEGLENLCCNSSDLIEEPRSKRKRPVVVRRSLNMFKHRRSRRSGGSAASEDSSGSGLFQGTSQSRQRQQQLLDCLDEVQGEEGEQEAPRQDAHVQGDEGEQDEEGEQDEEVDPMGAGSAGDASDGSTSFRYKKSNALGPRPAERRLIRPHGEWSWEDLTWDGTGRRPKVNAVLGSLCRFYYPGMVELNGERFAAMQWADWGLKDYVQPGESGESSSGGGSSEQKRRTCQVAVWDEFWGRFQLPDDIEEDQAQWARVKRHFRKCADKVIKDAMYNARIAAVNYYYKKIKGQKMSKALGANEIYLTEEQYLESVVDWLAKDMEAWRWLAKRWASPEWIAESNKHRANRGTEGPGHRYGADGHLGTARRMEAESGVAPSFMEVYVRGHRGPDPANPDELCSEAAREKMNAYGEEMTQRHGPDFDWMHSDLDASALYHSGGGRKHGRFAFGTGVVEYNRTIGQGKASSSGGSSRSSRSAREAQLEEETRAAQEQARAAQEQARAAQEQVGQLTQYMASYFQEMTTRLGPDMNLPAFRPPQAQGWGQWPGQAPASQPQWTGVGWTQAPPGTWTPPPPQGSQPVPGWVPPVFQPPAGSQPFQAWMAPPPTGWVPPPQGWPAQQYPWMHAQPPPHHGSQGSASHAQGSEGAVNVQDFLVHGSGGSGHLPGGGGGSGQNSHSPPE

SEQ ID NO: 254924 - protein, 142 aa, Zea mays
  Clone ID: MRT4577_164069C.1.pep
RPACWRWRWQSWLSTSGASGARQRLFQRDDDPGPVHGLHLQQGVGAGDLLLFGAGWSRADRPPLPLPAAVPATDASRRTIIGSGGRSRHRCRCPFSKWSLKLHKLKECIELTACHLRIAGCLLISGDTTSVAMSPRRNQVFP

SEQ ID NO: 254925 - protein, 89 aa, Zea mays
  unsure (1)..(89): unsure at all Xaa locations
  Clone ID: MRT4577_16406C.1.pep
SACRCCQQHIVPASAMEMSMTWLRSLCACSLLRXHRRSSALRRLCHSSASVSSECVFIPTVFLLWSITSASALDALKLRKAIITHFWPR

SEQ ID NO: 254926 - protein, 37 aa, Zea mays
  Clone ID: MRT4577_164070C.1.pep
DLAGFWNLGQEARRLEAFLVVQFNSGGQVLLVCRTLA

SEQ ID NO: 254927 - protein, 91 aa, Zea mays
  unsure (1)..(91): unsure at all Xaa locations
  Clone ID: MRT4577_164071C.1.pep
KAPGYPKPPKSIPKFERGRFLGTRPLQISMNAPVMVELEGETAPLXIPIKELRAPKIPFPFSRFFPDGSFXAWGVAELFLGDSWKPQVGGA

SEQ ID NO: 254928 - protein, 170 aa, Zea mays
  Clone ID: MRT4577_164072C.1.pep
MGSASASVTTTSLLALALAALAFVSRAAAQGNGCSSVMMTLAPCMDFISSKASEPGISCCSVLAGVVQTDPRCLCMVLDGTATSFGIAINQTRALELPGVCKVKAPPLSQCTGVPAAPAPTPPDEPAAAAEEEEADTAADAPSANGASSSTNSKNAASLLLLICALLYAF

SEQ ID NO: 254929 - protein, 63 aa, Zea mays
  unsure (1)..(63): unsure at all Xaa locations
  Clone ID: MRT4577_164073C.1.pep
LFIIHCCFHXPERAMYFCGDKRNHKRLTFCPRSTPDKDAAVCTTSTNYFQKTMASLHLEMMRP

SEQ ID NO: 254930 - protein, 204 aa, Zea mays
  Clone ID: MRT4577_164074C.1.pep
MKNVAKCDTWCELQNPANHRVFERKLRPKPSGGGHVCLGVTPPRIKPTLSQIHRRLGSPIFAPSTESPMARTKQTARKSTGGKAPRKQLATKAARKSAPATGGVKKPHRFRPGTVALREIRKYQKSTELLIRKLPFQRLVREIAQDFKTDLRFQSSAVAALQEAAEAYLVGLFEDTNLCAIHAKRVTIMPKDIQLARRIRGERA

SEQ ID NO: 254931 - protein, 81 aa, Zea mays
  Clone ID: MRT4577_164075C.1.pep
RYGTHGTTQANASSLNLPELNDDWWRDKSLMLLRPGSLSLVGRFAGQPGGQQPERFRTGSKGWRATFHGKGLKLGIYSDAG

SEQ ID NO: 254932 - protein, 227 aa, Zea mays
  unsure (1)..(227): unsure at all Xaa locations
  Clone ID: MRT4577_164076C.1.pep
PTRPRTRGILPCADAAVTAEALRRSKEVNYQLVSKLNQLLSNVSNGNVPPQAGPPLYYNQSGPPVPLLCSPYSADLSDRPCAVGEVTAADAQQVRTVRYGTNKEPVRALLARCLTSRVRFGRNSXASHLQVWQRYVCRAAAGSGREEVCSTAGRLTPAMYSQMVAVAGLSDGLRRQSPALADVASCVTVRRAFRTVGQRGCPPLRRDSRRVYQALLAASAAGMLAAA

SEQ ID NO: 254933 - protein, 176 aa, Zea mays
  unsure (1)..(176): unsure at all Xaa locations
  Clone ID: MRT4577_164077C.1.pep
MTTIDMAGAAAAATGSGSPXCGACKFLGRRCVXSACVFAPYFNSATTTRGAARXRFAANHKVLAPXSNTSKLLSHLPVADRCETVVSITYEAQARLRDXDPVYGCVAQIFALQQQVAILQAQLMXQTKAQLACGVQGAAHSPASHHHQWPDNASISAGRREEALADMCVVRLQLGG

SEQ ID NO: 254934 - protein, 77 aa, Zea mays
  Clone ID: MRT4577_164078C.1.pep
KKRSSQMMIAMKMTTTRTHTRAAQKRRYSLCRSQSLFLSQYGYDMSVCGLMLATGGRSRGRLLHVRLFLARVPLVYA

SEQ ID NO: 254935 - protein, 130 aa, Zea mays
  Clone ID: MRT4577_164079C.1.pep
PPGGGRQLPGAEKEGRPPGKGGGGGAQEKKARAGPKERGARPPRGFRVLVQGVRQLQQDAAAPETGRWGGPVTGSFFRGGGVLVLGRLCMCRLQLQQVVVHLVNRLVKKSQAPGPACGLLGLGKKFPMNL

SEQ ID NO: 254936 - protein, 157 aa, Zea mays
  Clone ID: MRT4577_16407C.1.pep
MANAGMKPVAGLLLVLNLCMYVIVAAVGGWAINHAINYGFFIGTGLHLPAHFSPINFPIGNAATGFFVIFAVIAGVVGAGSALAGLNHVRAWSTESLPAAASAGFIAWTLTLLAMGLAVKEIELHGRNARLICMESFTIILSATQLFYLLAIHGGLR

SEQ ID NO: 254937 - protein, 73 aa, Zea mays
  Clone ID: MRT4577_164080C.1.pep
SGKGFGVLCVSRLKCLGPPSCLFPAQAFNARYTMSHDLGSSVFSVFTTAKNCAVAGSEDPRLVVHRPPLIVRP

SEQ ID NO: 254938 - protein, 75 aa, Zea mays
  Clone ID: MRT4577_164081C.1.pep
RGMSPGAGALPPTGGLLSLPSKCSIKIKFHPVQIYPQIKKMQLTYPKMRGIIYDKFIWCDNILFGLFPYVLSIQD

SEQ ID NO: 254939 - protein, 58 aa, Zea mays
  Clone ID: MRT4577_164082C.1.pep
SDAWDVPTIRGCLKIRGRINSLWAPRFRSKVSRKRLGKEGFNRQVGTLQIGMLYRSKS

SEQ ID NO: 254940 - protein, 136 aa, Zea mays
  Clone ID: MRT4577_164083C.1.pep
ETTNSKISAIKEEKDMLSKFLEEQKKSTVEAQENMEDAQNTIKRLGTERESFEVRSKKLEEELATAKGEILRLRRHISTGGSPNTQVLSEAGAAPISSRALKQQPMNDHVQNINGADAVASRSPKRIYRRKRKPAA

SEQ ID NO: 254941 - protein, 57 aa, Zea mays
  Clone ID: MRT4577_164084C.1.pep
RAVSHLEPFILSAISLNPRSVLTVGDGEVMGMYPDAVAIAYAEHYYSYVSTPTDQGW

SEQ ID NO: 254942 - protein, 174 aa, Zea mays
  unsure (1)..(174): unsure at all Xaa locations
  Clone ID: MRT4577_164085C.1.pep
MPAAPTLLPPRDASETMMAESSDRFCMIPIRFSQMREFYKKAADSFWTAEEVDLSADARHXDTXLPPYDWHFICHVLSFFAASHRIVLKNLGSRFMTNVKGAEVRPFYGFQIGIEXILSEMYSLLLQNYIHDLLDNDRLFHAIETVPSCRRKDECPSACIHVGSDIAERITDVD

SEQ ID NO: 254943 - protein, 147 aa, Zea mays
  Clone ID: MRT4577_164086C.1.pep
CAHASAISKAFLPFPFPSASIVPRGGLVALSGRLNKPHGGGHTPLSGVGRSASFDAQWARRAWRSTKWRRRVGAKTSGHGRRAVTAVGGWVRSVHACPALLPSSSRRSTGGAPSPAPARRPQGRSHGEAHREKEDELLSVLRWRKGQ

SEQ ID NO: 254944 - protein, 59 aa, Zea mays
  Clone ID: MRT4577_164087C.1.pep
HSSSWRFLPISEFHGMCMSLVSLDISIILSTVPVTKVVKARSSTWHMPQNCCGSCYDIM

SEQ ID NO: 254945 - protein, 85 aa, Zea mays
  Clone ID: MRT4577_164088C.1.pep
VLNKRYMMWSTLYHLLLADLAVYAHPKGQSLIPEWLWHSSAAAMAQQEEWRMDQDGRKREVAEEVSGATQTDRHPACCERKNGSE

SEQ ID NO: 254946 - protein, 65 aa, Zea mays
  Clone ID: MRT4577_164089C.1.pep
NNSPIDNRFKVRFQCLCISNVTRTHDPWNNISRPAMIRNQIPIRIGFHSNARTCLLVTTKKPTRP

SEQ ID NO: 254947 - protein, 146 aa, Zea mays
  Clone ID: MRT4577_16408C.1.pep
MANAGMKPVAGLLLVLNLCMYVIVAAVGGWAINHAINYGFFIGTGLHLPAHFSPINFPVGNAATGFFVIFAVIAGVVGAGSALAGLNHVRAWSTESLPAAASAGFIAWTLTLLAMGYVRYVCRVPRRRVVRVRVCVCWSINCRSIC

SEQ ID NO: 254948 - protein, 75 aa, Zea mays
  Clone ID: MRT4577_164090C.1.pep
FINSWIAGLVTAVDVDAQTDLISCLMRLVYSDLVMVHDTRSTASMSGSAVGDASSRKRRRAEEVKEGVESALEPN

SEQ ID NO: 254949 - protein, 98 aa, Zea mays
  unsure (1)..(98): unsure at all Xaa locations
  Clone ID: MRT4577_164091C.1.pep
LRPLVPRFLFGPVGVLYIFNPGGPLXEFKVINKVGGKAMAFKVFGFGWFGAFFFREPARCLFDLAEMEFNFHSDTGLVFVNLPVPEQEIYWWTLEIIV

SEQ ID NO: 254950 - protein, 91 aa, Zea mays
  unsure (1)..(91): unsure at all Xaa locations
  Clone ID: MRT4577_164092C.1.pep
SLVLCVLCMKNLNMWFVCDISGGGKRRRCVLVFWDMKIFFRCQVCGIMSWLEDELKGVGCXXGELRTLKVHXGRCXLAXKRDSCELKKKSF

SEQ ID NO: 254951 - protein, 301 aa, Zea mays
  unsure (1)..(301): unsure at all Xaa locations
  Clone ID: MRT4577_164093C.1.pep
GWHSPLFAWIXGYTCFSCICCLPLIYWRYVHRNRHLDQEPQQPPTTYPTLTPSQSSEGRNHRTSGIVLHLGCISISCPRLSVLAYHFKTGVDCFFAVWFVVGNVWIFGGRSISSDAQDAPNMYRLCLAFLALSCVGYAIPFIMCAAICCCFPCLISVLRLQEDLGQNRGATQELIDALPTYKFKPKRVKNWGIDHASSSEHLDEGGILGPGTKKERVVSAEDAVCCICLTKYGDDDELRELPCTHFFHVQCVDKWLKINAVCPLCKTEIGGVVRSFFGLPFGRRRVDRIAARGVASSRFSV

SEQ ID NO: 254952 - protein, 151 aa, Zea mays
  Clone ID: MRT4577_164094C.1.pep
PPKVFILGASKGGGPAFYKVFSPGAVKGGGGGIHWGVGSTVWFTAGGLGHPFVFFLHFIGTLVSVFPLAFRLGSGFAFSLWFLRGSFSHGWVGHLPWWVGRFFLMVYLGGLLAFSPPGFCGKPPDCFLSPLPWGVTGQPVKSQTNPIRYYS

SEQ ID NO: 254953 - protein, 415 aa, Zea mays
  Clone ID: MRT4577_164095C.1.pep
MEHASCDDVHEHAISVSHGETASTSTNHQDMYSDSDEPHQEDRPSTSTQTPSSESSPSTSPTAYSSRNLSFPRRDSIYGHGRNPWNSGLWISFEIVMYIAQVVAAIVILLFSRHEQPHAPLFAWIIGYTVGCIASLPLIYWRYVHRNRHLDQEPQQPPTTYPTLTPSQSSEGRNHRTSGIVLCLGCVTISCPRLSVLAYHFKTAVDCFFAVWFVVGNVWIFDGRSISSDAQAAPNMYRLCLAFLALSCVGYAIPFIMCAAICCCFPCLISILRLQEDLGQNRGATQELIDALPTCKFKPKRNKNWGIDHASSSEHLDEGGILGLGTKKERVVSAEDAVCCICLTKYGDDDELRELPCTHFFHVQCVDKWLKINAVCPLCKQEIGGVVRSFFGLPFGRRRVDRMAGRGVASSRFSV

SEQ ID NO: 254954 - protein, 121 aa, Zea mays
  Clone ID: MRT4577_164096C.1.pep
CPFDIRTKLDLGRSKLLMAHTSCDGVHHVISVAHGETASTSTSHQDMCSDSDEPHQEDRLSTSTQTLSSESSPSISPTAYSTRNLSFPRRDSIYGHGRSPWNSGLWISFEIVMYIAQVVAA

SEQ ID NO: 254955 - protein, 256 aa, Zea mays
  unsure (1)..(256): unsure at all Xaa locations
  Clone ID: MRT4577_164097C.1.pep
YQNERDRCSALPASPSSSTSSSWSGSGRASAPARPITPVFSVPFHPACGRYPSRGDVWVTAAAALHYVPRYSPGPSPATSTHHVVAAIVILIFSRHEHPHAPLFAWIIGYTLGCIARLPLIYWRYVHRNRHLDLEPQQPPTTYPTLTPSQSSEGRNHRTSGIVLHPGCISISCPRISVLAYHFKTGVDCFFAVWFVVGNVCIFGGRSISSDAQDAPNMYRMXLAFLALSCAGYAIPYIMCAAICCCFTCLISVLRL

SEQ ID NO: 254956 - protein, 201 aa, Zea mays
  unsure (1)..(201): unsure at all Xaa locations
  Clone ID: MRT4577_164098C.1.pep
GWPXPKSHTELRGFLGLTGYYRKFVKGYGILAKPLTVLLQQKQFGWPPSAQTAFEALKDAMITTPVLALPNFSETFVIETDACDTGIGAVLSQKGHPVAFYSKALGVKNSQLSTYEKEFLAILMAVEKWRCYLSRGPFVIRTDHRSLCHLQDQTLATDMQKKAMTKLAGLQFSVQYKKGAENKAADALSRVAHNMELSAIS

SEQ ID NO: 254957 - protein, 265 aa, Zea mays
  unsure (1)..(265): unsure at all Xaa locations
  Clone ID: MRT4577_164099C.1.pep
MEHASCDDVHEHAISVSHGETASTSTNHQDMYSDSDEPHQEDRPSTSTQTPSSESSPSTSPTAYSSRNLSFPRRDSIYGHGRNPWNSGLWISFEIVMYIAQVVAAIVILLFSRHEQPHAPLFAWIIGYTVGCIASLPLIYWRYVHRNRHLDQEPQQPPTTYPTLTPSQSSEGRNHRTSGIVLCLGCVTISCPRLSVLAYHFKTAVDCFFAVWFVVGNVWIFDGRSISSDAQAAPNMYXRLCLAFLALSCVGYAIPFXIMCAAICC

SEQ ID NO: 254958 - protein, 31 aa, Zea mays
  Clone ID: MRT4577_16409C.1.pep
SNSDINESVTHNNHGPKSVPYAIVNRHTSLT

SEQ ID NO: 254959 - protein, 97 aa, Zea mays
  unsure (1)..(97): unsure at all Xaa locations
  Clone ID: MRT4577_1640C.1.pep
GWVXAWVVWPFPCWVFLFFXAGLARRARFWCLPLLGVLSFXLGCFSALWFPXGPLALFFRVFLLFWCPRPFCVVPFRLGVXGFGFAXFCCFVXGFWV

SEQ ID NO: 254960 - protein, 159 aa, Zea mays
  unsure (1)..(159): unsure at all Xaa locations
  Clone ID: MRT4577_164100C.1.pep
TQELIDALPTYKFKPKRVKNWGIDHASSSEHLDEGGILGPGTKKERVVSAEDAXQLHVPTCVLVESSLSQTVNQFMNSGDXVCCICLTKYGDDDELRELPCTHFFHVQCVDKWLKINAVCPLCKTEIGGVVRSFFGLPFGRRRVDRIAARGVASSRFSV

SEQ ID NO: 254961 - protein, 113 aa, Zea mays
  unsure (1)..(113): unsure at all Xaa locations
  Clone ID: MRT4577_164101C.1.pep
SIKTKLPSLQAHLKFYQENDXKYNFXMGEKKPXXHKTLKLDTIIGMWQSLFAXMSWPLINYXCQYLHDRLSQAMGRDTXAHFFYSVMTIDPXLTKYDQQGAWPFPSDEYVVYF

SEQ ID NO: 254962 - protein, 83 aa, Zea mays
  Clone ID: MRT4577_164102C.1.pep
GAFFFFFFPFFFFFLGAFFFFFFAEINGFDTNCQQPRIQEAENYRKGRKEDRVREEQWREIQNCLLFSRHPLSLLSTLPLSIP

SEQ ID NO: 254963 - protein, 67 aa, Zea mays
  Clone ID: MRT4577_164103C.1.pep
HSEKQTEVGTKNASEISAAAQRNIAFSSNNSVAKPLEKTTKAAVEETSSGSPKIDKKKSPYGLWIPV

SEQ ID NO: 254964 - protein, 78 aa, Zea mays
  Clone ID: MRT4577_164104C.1.pep
FTMGEEITFGMMSKGYGCGKYKEKHNVHLPKPEIPYSCIGFHFLHFSHLRGILNGGANLNTYTNQLQQNVSPVITSEV

SEQ ID NO: 254965 - protein, 92 aa, Zea mays
  unsure (1)..(92): unsure at all Xaa locations
  Clone ID: MRT4577_164105C.1.pep
IFLIXFFFFXXFFFPVNISLSIYHILYRNRSNDRKDMSVAFSHCTTKSQKDSRAQEKAGGEGRGRGRFYYKKKGGEAPCVVGKGTPRKRGHR

SEQ ID NO: 254966 - protein, 73 aa, Zea mays
  Clone ID: MRT4577_164106C.1.pep
TFTRAYISFIGSSIVKPLVDVLELLYRENHWETHVNTLVKHLAFHTCFNSWEARKEGPSDRLCNLYWQMGRPL

SEQ ID NO: 254967 - protein, 82 aa, Zea mays
  Clone ID: MRT4577_164107C.1.pep
VIALVSPGLASCLFSFFCLLRPVRSDVKDRSKKRKKTERERVRSFPRTYSMETSSHKRAREAVHHSAGAAAVGEAAWPESDS

SEQ ID NO: 254968 - protein, 485 aa, Zea mays
  Clone ID: MRT4577_164108C.1.pep
MDPSQMMFPIWGAPPPAALKPPSDDHAAAPNAQAQPFLPPPNPNRGWKRKNPAAAAYQPPALGDLQVQNRAKARRWFKNSGGGNPNQSRKYFFPKNKNNKVAAPRNTTSFIIRAKRAGGIASLVSPCPVTPAVLPTPRLSPSREGLADMAQAQWGVDGYGSMKGLIRLRSSPQPANPNAAASDDDDEGNSSGSDVEEHVEVERRLDHDLSRFEMVYPGRGEDAGGYVLEDDDEYDQDAHVARLEEENLTLKERLFLMEQEVGDMRRRLEALEAKFSLGGGVGGGENEVEEAPPQNDAERIHTWPENSSEDDVEMVDAGSEKGRAQTQGAMTSEKSGGDDTTNQGAARSDKTGGNDAGEQDGVGVLEKTDAHNAEKQQVAAGSEKAGGNDPGEQVVVGVLDKTDAHNAEKQQGAAGSEKAGGNDVDGQDVVVGVSGKTGADSAEKQQGIVGTEKTGEHSIEMVDSLIEEKMDDDNGENEVRLAASQ

SEQ ID NO: 254969 - protein, 80 aa, Zea mays
  unsure (1)..(80): unsure at all Xaa locations
  Clone ID: MRT4577_164109C.1.pep
QLIDKIHDYLANKRXXVITDDIXWGISTWKPIRCALVDSNTGSRILITTRVREVARKARGDQYXXPLSLDDSKTLFYTRV

SEQ ID NO: 254970 - protein, 59 aa, Zea mays
  Clone ID: MRT4577_16410C.1.pep
STGLAGQLSGDIGLLSELETLDLSYNKDLTGPLPESIGELKKLATLILVGCSFKGPIPH

SEQ ID NO: 254971 - protein, 192 aa, Zea mays
  unsure (1)..(192): unsure at all Xaa locations
  Clone ID: MRT4577_164110C.1.pep
MSTGFSAEIFVQELAKLNIAQQSIETLSHWCIFHHRCCQEVVAIWNKDFHSAPQERKISLLYLANDIMQNSKKDGMRYIHEFLKVIAAALDDLXTNGDDFGRNVVKRLVDIWEDRKLFGTQGQLLKEEYTRKFKELKSKKPGGELVEKVISSYKHMLRAPVDEAKLMRECNSALSFVDNLNKEYGNSYLGSS

SEQ ID NO: 254972 - protein, 77 aa, Zea mays
  unsure (1)..(77): unsure at all Xaa locations
  Clone ID: MRT4577_164111C.1.pep
SGKNTRSWGGRLKESKLRSPCLAXHSSSIMTLKFNPLPVFYKRXNWKNLAVTHLICLAANPLFTTWRNTEKARTYRP

SEQ ID NO: 254973 - protein, 105 aa, Zea mays
  Clone ID: MRT4577_164112C.1.pep
EPGAGGAWRRLAVGEEGWLGLVLAGSASPSGAGTVSCSTSVGDPRRLVCCASSLLQRSVSATRYGPSSGGVSMSAGHGAATPSRATRGGRELETRVWCCCLTVAG

SEQ ID NO: 254974 - protein, 82 aa, Zea mays
  Clone ID: MRT4577_164113C.1.pep
SNQCLLSPHSKQSSLPPALSLSLSLILSFSSLSIEEACQVSPTAPWTRDVLLHGLNGGGGDEGGAYAGGGRRPQGSSSGDDD

SEQ ID NO: 254975 - protein, 74 aa, Zea mays
  Clone ID: MRT4577_164114C.1.pep
DIARQKRLRIKNSTCRGKSAPSIILRKILSHAGRENPGIPAKPIHSVTVAHVRTRHRPGPGLRHVLWRGTRTFF

SEQ ID NO: 254976 - protein, 163 aa, Zea mays
  unsure (1)..(163): unsure at all Xaa locations
  Clone ID: MRT4577_164115C.1.pep
SIQERDRHVRTRQEHHFRSIADAGACKTYPXQGGTVRKNGXCVIKRPCXRLTEGCTCKTGKHGXHPRCQFVDIDIFDGKKLENIVPXSHTWDIPHVNRTESQXLIEISEDGYVSLLTSDGNTKDDLRLTTDETVVAQIKEGLKSGNDIDETVQPRTVEEQICT

SEQ ID NO: 254977 - protein, 116 aa, Zea mays
  unsure (1)..(116): unsure at all Xaa locations
  Clone ID: MRT4577_164116C.1.pep
LRLQQRDHRRPQNRQLHREVHXQQQQRHPQGHHLQHQQQHQQQHQCEGQQQHHQQSQGHGQQHEQSHEQHQGQSLEQQHQQQFQGHDMQEQPQQPEQYQQAQEKSQQQQCHCREQQ

SEQ ID NO: 254978 - protein, 85 aa, Zea mays
  unsure (1)..(85): unsure at all Xaa locations
  Clone ID: MRT4577_164117C.1.pep
DAWADAWAEEVMDEVRRLMDKYKGEELSITVVGHSLGAALALLVADEVDTSIPDAPPVAVVSFGGPKVGNRXIVHRLARRGTVNV

SEQ ID NO: 254979 - protein, 61 aa, Zea mays
  Clone ID: MRT4577_164118C.1.pep
GKPSLAPPERIAWPTLVLFPYFSPLHPPSAAENPVVVSGCATWRLYANSQDRPLILAVRLL

SEQ ID NO: 254980 - protein, 65 aa, Zea mays
  Clone ID: MRT4577_164119C.1.pep
QCVLVVQQSRDLLTICSLSYVQNATARLVADKPVESADALGVAGAENRNRNDGTARPGGVAASMA

SEQ ID NO: 254981 - protein, 114 aa, Zea mays
  Clone ID: MRT4577_16411C.1.pep
IPPLPPHPSPLRPPPRSRLALAAFFSTTSVLFLHPIAKLYCLLFIFCMAMAVVLPFPSSMHACSRSVYPSPHSLCMALEKKIEEKWNSSYDVGSAHSDDVRAREIMCYAAAVSD

SEQ ID NO: 254982 - protein, 86 aa, Zea mays
  Clone ID: MRT4577_164120C.1.pep
NNPPSGCCRGQPPPPVHLSTPVHLPPAGHLPTAGHLPPTIHLPSPVHLPPSVHVPPPVHLPSSPCHYPTQPPLPQPHSQPHPFPCQ

SEQ ID NO: 254983 - protein, 64 aa, Zea mays
  Clone ID: MRT4577_164121C.1.pep
ARPGIPGLAHAPGDSNLAELTPTTPVRQGGAARPAGKCKRRKANDFEAEFREFDEDSEEEEEDD

SEQ ID NO: 254984 - protein, 83 aa, Zea mays
  Clone ID: MRT4577_164122C.1.pep
FLIMHSSSVVDRCPHRSEIQSVALAEGEDDCLILGTVDSYGHLIVSRLDIVAAGHPIQYHLVIVVLGKAVGLGYALAQCSNPW

SEQ ID NO: 254985 - protein, 75 aa, Zea mays
  Clone ID: MRT4577_164123C.1.pep
NISLPFNPLRTTENHIFLPVTPILVVLESTISLQRVDHYYAVCSHIWCDVNFSYAMFFTILSRRASDRGAQSTSG

SEQ ID NO: 254986 - protein, 162 aa, Zea mays
  Clone ID: MRT4577_164124C.1.pep
MRSTVLVARSLQKASVPPALLSDPTPGSLQPTRLAAHVNGAGSSCSVYLASGCRVYRIEIRLDASVMLCKGKESLLIPDNAQVIGSSCSYRCPHRSEIQSVALADGEDDCLILGTVDSYGHLIVSPLAIVADGHPIQYHLVIVVLGKAVGLGYALAQCSNPW

SEQ ID NO: 254987 - protein, 68 aa, Zea mays
  Clone ID: MRT4577_164125C.1.pep
KYKLQSTKNNEIFRKPCNQHERGNGPCLKGLAFTRNLLKHPHLHGGGLYLQYQECFLSEKLTHFYQTF

SEQ ID NO: 254988 - protein, 92 aa, Zea mays
  unsure (1)..(92): unsure at all Xaa locations
  Clone ID: MRT4577_164126C.1.pep
IKVKADRVESSPXGLRLPAQDVAQRCKEVGIPALPIKVGASGGNNSKPLGLGVQSALRVLPGSGIKIGRIEGVTPVPPDGSPQKVGSRVRRL

SEQ ID NO: 254989 - protein, 62 aa, Zea mays
  Clone ID: MRT4577_164127C.1.pep
KVMFMSQVVIVLVVHNSPSIIGRVQPRPQRSIETFLASSPPHPGTTPWVRQSNFSLLQPQIA

SEQ ID NO: 254990 - protein, 39 aa, Zea mays
  Clone ID: MRT4577_164128C.1.pep
SFSQTLAATRVCPLPPGRLPLSSDGQVKQEGGRRGCGSS

SEQ ID NO: 254991 - protein, 83 aa, Zea mays
  Clone ID: MRT4577_164129C.1.pep
MEAQAKAGARGARGGTKVAMVYYSKYVKTQNSPAVSIGIAQQLESTAAAVVGVAGGGGDADVDERASAFILAVRERFRNENKY

SEQ ID NO: 254992 - protein, 86 aa, Zea mays
  Clone ID: MRT4577_16412C.1.pep
QNDVAHSEGHVGQNSLLCPHLRQGLGEAQRPQGSLGKGRRDQEDVILVQQPSDHQRQHGRVIRISSIYAGRDGTACRSQGLRPERW

SEQ ID NO: 254993 - protein, 99 aa, Zea mays
  Clone ID: MRT4577_164130C.1.pep
SYRHGDYSGGFFFLLFIYKKGASQISGASCARQRVAAHSCFFHSRSKASTEVLLSRFMVMDINVLDTVCSGYFAIARIRGSAFAARISKPQEQLGCHRI

SEQ ID NO: 254994 - protein, 66 aa, Zea mays
  unsure (1)..(66): unsure at all Xaa locations
  Clone ID: MRT4577_164131C.1.pep
KMCLRDNPKFKSVTDHVSYSKIIQGVELEALTAVDHCKQQNLAANGPTEFVEDLRSCPVTPVXYVI

SEQ ID NO: 254995 - protein, 49 aa, Zea mays
  Clone ID: MRT4577_164132C.1.pep
KKKKKKKKKKKKKKKKKKKKKKKKKKKKKKKKSLYKKRKKKKKKLVHCR

SEQ ID NO: 254996 - protein, 170 aa, Zea mays
  Clone ID: MRT4577_164133C.1.pep
MQYGYADWICFDASVVRGLAYYTGIVFEAFDREGKLRAICGGGRYDRLLSTFGSEDIPACGFGFGDAVIVELLKEKGLLPDMSRQIDDIVFPLDEELEGPASSIASSLRKKGRSVDLVEDKRLKWVFKHAERINASRLILVGNSEWERGMVRVKVLSTREEFEVKTSELE

SEQ ID NO: 254997 - protein, 76 aa, Zea mays
  Clone ID: MRT4577_164134C.1.pep
LRVGSRPRNWGLLTTKCGSTEAKGRGWARKSDLASLPVPDSSLETHDCNGYLKHEKANHLTLQTVHLAHLMAEVFA

SEQ ID NO: 254998 - protein, 69 aa, Zea mays
  Clone ID: MRT4577_164135C.1.pep
RAVFGVALSANHNKWAGLKLVEPASGLQRVNPPGFTLAIWLALGSVVPILGLGIVLGLKNTGALFQIIG

SEQ ID NO: 254999 - protein, 81 aa, Zea mays
  Clone ID: MRT4577_164136C.1.pep
NKEVVPNLKERVLTTESKIAPVKKALYVVEWLKKGPTGIVATNLHCAKKTVGSFVPLLSFIPHVGDQHLIVTQNVKNYTRS

SEQ ID NO: 255000 - protein, 113 aa, Zea mays
  Clone ID: MRT4577_164137C.1.pep
MCEAPRPAPCARYATCRGLQLLIRHFSQCHRKSCARCQRMWQLLRLHSALCDRTDRCNTPLCMRFKQQEQDKAAAKGGDDGDKWGLLVKKVKTARVFSSLANRKQMSTTTTQC

SEQ ID NO: 255001 - protein, 344 aa, Zea mays
  Clone ID: MRT4577_164138C.1.pep
MCEAPRLGNRAGAGDPAAADVDVVTTGGRRRIPAHSSVLASASPVLGSILERRLRKDRESGKPGRSVVRIRGVTDDAAAAFVRLLYAGRCGEDEDDDMEEHAVQVLVLAHAYQVPWLKRACEGAIGARLTADSVVDVLQLAGLCDAPRLHLRCARLLAKEFAAVERTEAWRFLQENDPWQELHVLQRLHEADMRRRKWRRKRAEQRVYMELSEAMDCLDHICTEGCTEVGPAGRAPAPAPCARYATCRGLQLLIRHFSQCHRKSCARCQRMWQLLRLHSALCDRTDRCNTPLCMRFKQQEQDKAAAKGGDDGDKWGLLVKKVKTARVFSSLANRKQMSTTTTQC

SEQ ID NO: 255002 - protein, 76 aa, Zea mays
  Clone ID: MRT4577_164139C.1.pep
LHMTSQTDELMETLTALGATVRRCSGTRTPTQDHAAAAIERDSAAEYACKEETLEEHWRCTERCLDWGEAGGPDHI

SEQ ID NO: 255003 - protein, 137 aa, Zea mays
  Clone ID: MRT4577_16413C.1.pep
KPVEWLLDMHYTQPHTEIQRRSRQGIIRPDAWRLGSKLYTAPSSVTALISDAVFDSSSGRSQCAMSCLNIYTHTMTSTTSRSSTYNNLSSGSIFVRSTNLHLLVAHAVYDRKVYIYAIAIDPYIHANNLLVHQHFEL

SEQ ID NO: 255004 - protein, 140 aa, Zea mays
  Clone ID: MRT4577_164140C.1.pep
TQIHVFNIVICRSKTTYCRVDIITYKVVFLAHSYPSPGCVVGDRNMLGTTGICALSLSKTSLPFAEPLYHTTAWICIRYIHLYTRWMSGGQTDCRRGGWKRAREELALVSLGTIRWSMVHLAIWVDGADCRTREPHGGVG

SEQ ID NO: 255005 - protein, 141 aa, Zea mays
  Clone ID: MRT4577_164141C.1.pep
RKRTTSTTHERKHWGQSPPPFLHRGGPPPEPPPWGQAHLPWAGEHASTKPRYKLGKPPFLNPIKKGWGRAPPDLTKKTRGIILLLSPRAMHAFLARDPHRTPKLKKRGAENGGADLGPEGDPPLSGQRGGPDEEGAPPLGP

SEQ ID NO: 255006 - protein, 69 aa, Zea mays
  Clone ID: MRT4577_164142C.1.pep
RLLLRPRGAGVRSHELNLLQEYMEAKPSGGDRGHHEKAISKDLDPLFDMLDWSANSSSAGSSFEQGKRG

SEQ ID NO: 255007 - protein, 113 aa, Zea mays
  Clone ID: MRT4577_164143C.1.pep
QKGRALGTNFYGKYRGYSKKKGGQPLGLTLDKKKKFLSRGAIYLPRPRGPPRKSRPGPGGGHKFSYREAEKNLGETRGKRVPRGKWYPLKNPKKKQTRKPKKESPGGPKRGPT

SEQ ID NO: 255008 - protein, 123 aa, Zea mays
  Clone ID: MRT4577_164144C.1.pep
RRLALSPWCIEQFARPEEWSKLRLDKVRWLTCIVERREEGALSIVPLLSNCRNVEELCVSVVPSQGKWRRNSGDGGSHGVLGGKRVSVKHLKVVRMKYIDESRSGFKLVKVLLKNASALETMT

SEQ ID NO: 255009 - protein, 130 aa, Zea mays
  Clone ID: MRT4577_164145C.1.pep
MVRVSVLNDALKSMYNAEKRGKRQVMIRPSSKVIIKFLIVMQKHGYIGEFEYVDDHRSGKIVVELNGRLNKCGVISPRFDVGVKEIEGWTARLLPSRQFGYIVLTTSAGIMDHEEARRKNVGGKVLGFFY

SEQ ID NO: 255010 - protein, 87 aa, Zea mays
  Clone ID: MRT4577_164146C.1.pep
NDQDLNNDQVLAIHILWLSVYHTHFFANKYIYVLHGMLNPHYSVIVMNRRKTNNVGEELWGDSEYHLQGGYIMCRNAAQEVMGTCEH

SEQ ID NO: 255011 - protein, 79 aa, Zea mays
  Clone ID: MRT4577_164147C.1.pep
NFKKKKKKKGPPGKIKKQKTPTSHPLPYHNIPQLQNRLNKIYWPRPSQFPTEKTLCAPNLTTTPNIPSCPTAFNTKKSP

SEQ ID NO: 255012 - protein, 70 aa, Zea mays
  Clone ID: MRT4577_164148C.1.pep
GDPPQGALSVIGPGGVSPGEINFPNSKRGRGNSPCNCKDALSKGFEGCILMKCPFLWGKFCVSPKPQHSL

SEQ ID NO: 255013 - protein, 221 aa, Zea mays
  unsure (1)..(221): unsure at all Xaa locations
  Clone ID: MRT4577_164149C.1.pep
MAPTTATAAAVGTKATALGVAACERDVEKLEFIEEKTRNFDAEQVRVLAEILARNNGAEYLRRHGMEGRTDRLAFKACVPVVTYEDLRPEIERIANGDRSNIISSHPITEFLTSSGTSAGERKLMPTIEDELNRRQMLYSLLMPVMNLYVPGLDKGKGLYFLFIKSETKXTPGGLPARPVLTSYYESDHFKHRPYDPLHVYTSPTAAILCTDSFQSMYSQM

SEQ ID NO: 255014 - protein, 151 aa, Zea mays
  Clone ID: MRT4577_16414C.1.pep
MAAKDTKGKKGGNKAAQAAKAALKGTNSHKKVKARYSTSFHRPKTLITSRAPKYPRRSIPHQPRLDEHKVVIRPLNTESAMKKMEENNTLVFIVDVKANKAQIKLALKKLYDIDCLKINTLSRADGSKKAYARLTPDDDALDIDVNKVSLD

SEQ ID NO: 255015 - protein, 132 aa, Zea mays
  Clone ID: MRT4577_164150C.1.pep
PGGSFLSSMGTLLHSILFERVRKAPAYKAVPSMVPMGEKSLPCSPHDDECRFRRSRSFHLIPSPWNSLVLVVQDLPARYSKTRNPRVTVLLPHLTQSRARLREPKHCTHLSCPPPMPTNFILLRFHQSHTGS

SEQ ID NO: 255016 - protein, 256 aa, Zea mays
  Clone ID: MRT4577_164151C.1.pep
QILAKIVVGCDGVNSPIARWMGFSEPRYVGHMAFRGLAEYADGQPFEPKVNYIYGRGVRAGFVPVSATKVYWFICFNRQDPGPKITGPTALKTEALELVRGWPSDLLAVMRSTPEGAVVRTPLVDRWLWPGLAPAASRGGRVVLAGDAWHPMTPNLGQGACCALEDAVVLARRLADAGADGAQAAAAMRAYEAERWARVFPLTARAGLVGALVQWENAAVCAARDGVVIPRLVRLGPFLEHTNFECDLLEPAPESP

SEQ ID NO: 255017 - protein, 102 aa, Zea mays
  Clone ID: MRT4577_164152C.1.pep
YCTMIDPHHINHQQAPQQNHSQNLHMLLCFAHICKHFTKSFTKVLTLQVIRKSLHKSTPTSCISEQSSLFFSSKSLDLRSVTDLASSRAFSAVPEVAVDALC

SEQ ID NO: 255018 - protein, 121 aa, Zea mays
  Clone ID: MRT4577_164153C.1.pep
GGGQETTTDCRRLQQTGQQNSRIQIRFMLIEGHLLECPLGMPRCFQLPFPVVPGGPKSLARPSVRRTLRNGYRDTAHLDSGDKNGTLVKLAWECVRISRSQSPQITRHRACNHYVWVPCAL

SEQ ID NO: 255019 - protein, 132 aa, Zea mays
  Clone ID: MRT4577_164154C.1.pep
VVLCIAFFVDRENLSFNRSAGVFREPVYVAHLAFGLGILVVQAHLMFFCESLMWSGICNGVGNLKIVVWVMRRKGSRSRISGFRPPVVRSSGAVRVGWARAGRAAEEVQRRCNERRREDDWEDIPAGLEVPN

SEQ ID NO: 255020 - protein, 32 aa, Zea mays
  Clone ID: MRT4577_164155C.1.pep
PHLLQCALSLDMLYQCIVLIIKFFEGTFVASQ

SEQ ID NO: 255021 - protein, 134 aa, Zea mays
  Clone ID: MRT4577_164156C.1.pep
RARGQPKAALPMSLWWMVPQYVLFGLSDVFAMIGLQEFFYDQVPDALRSLGLAFFFSIFGVGHLFSSFIISAIDGATKKSGASWFSNNLNRAHLDYFYWLLAGLCAVELAAFIIVSRVYVYKKRMSHDNNAAAM

SEQ ID NO: 255022 - protein, 444 aa, Zea mays
  Clone ID: MRT4577_164157C.1.pep
MGSMEASTAPENGSSAAGGGAGGTACNGAGAASNGGGMERRLRSSAASASWAAHLPLEVGTRVMCRWRDQKLHPVKVIERRKGSACSSPADYEYYVHYTEFNRRLDEWVKLDQLDLDTVETVVDEKVEDKATSLKMTRHQKRKIDETHVEQGHEELDAASLREHEEFTKVKNIAKIELGRYEIDTWYFSPFPPEYNDCPKLFFCEFCLNFMKRKEQLQRHMKKCDLKHPPGDEIYRSGTLSMFEVDGKKNKVYGQNLCYLAKLFLDHKTLYYDVDLFLFYVLCECDDRGCHMVGYFSKEKHSEESYNLACILTLPPYQRKGYGKFLIAFSYELSKKEGKVGTPERPLSDLGLLSYRGYWTRVLLEILKKHKGNISIKELSDMTAIKADDILSTLQSLDLIQYRKGQHVICADPKVLDRHLKAAGRGGLDVDVSKLIWTPYKEQG

SEQ ID NO: 255023 - protein, 89 aa, Zea mays
  Clone ID: MRT4577_164158C.1.pep
HRIAFSRLLVPEIGLGFLSASRKTIGVENPGRLLDGSVCVYPRIGRPFWGLCFRRAHMPQDSRTNSPVLVLPHAPNEVEGGQYTGSELT

SEQ ID NO: 255024 - protein, 440 aa, Zea mays
  unsure (1)..(440): unsure at all Xaa locations
  Clone ID: MRT4577_164159C.1.pep
MGSMEASTAPENGSAAGGGAGNGAGAASNGGGVERRLRSSAAPASWAAQLPLEVGTRVMCRWRDQKLHPVKVIERRKGSASSSPADYEYYVHYTEFNRRLDEWVKLEQLDLATVETDVDEKVEDKATSLKMTRHQKRKIDETHVEQGHEELDAASLREHEEFTKVKNIAKIELGRYEIDTWYFSPFPPEYNDCPKLFFCEFCLNFMKRKEQLQRHXXKKCDLKHPPADEIYRSGTLSMFEVDGKKNKVYGQNLCYLAKLFLDHKTLYYDVDLFLFYVLCECDDRGCHMVGYFSKEKHSEESYNLACILTLPPYQRKGYGKFLIAFSYELSKKEGKVGTPERPLSDLGLLSYRGYWTRVLLEILKKHKGNISIKELSDMTAIKADDILSTLQSLDLIQYRKGQHVICADPKVLDRHLKAAGRGGLDVDVSKLIWTPYKEQG

SEQ ID NO: 255025 - protein, 45 aa, Zea mays
  Clone ID: MRT4577_16415C.1.pep
TSLISVRVDTWQKLHHYRTICHNRSYRGLHQRRGRGQNTDGGPQA

SEQ ID NO: 255026 - protein, 57 aa, Zea mays
  Clone ID: MRT4577_164160C.1.pep
LVRYGRLDIVRMEGDRKSFEALNVEFERGGVQKLHGEVPCQLRTKSKHAKSEINRDQ

SEQ ID NO: 255027 - protein, 116 aa, Zea mays
  Clone ID: MRT4577_164161C.1.pep
MGNSVARLATPCFAPPDTAGAADDDGTTGVCHVLSFDGRIHGVLLPSNQSTAGGSVLLTDRASFSGSSSFDSSNSFSFRTLQPSQYSGPLDGGSSSASTSATNSGVSSGPRRTDDQ

SEQ ID NO: 255028 - protein, 41 aa, Zea mays
  Clone ID: MRT4577_164162C.1.pep
LVACRERNSVILYSSCLLRGFVDTLVIIDILRGFVNYFINQ

SEQ ID NO: 255029 - protein, 138 aa, Zea mays
  unsure (1)..(138): unsure at all Xaa locations
  Clone ID: MRT4577_164163C.1.pep
YSSIINLKEVTTKDCLLMLGGFSAWAATATMIQQCIXAAITTLLPPYLLSAMSSLXXNLIIQPYRIQQAVTAGILPSSPLFLLQPSSVLHQLPLVHLLSQHIMTQLLLQLVLANLAAYYHQQQHITFNQLAALNSASY

SEQ ID NO: 255030 - protein, 93 aa, Zea mays
  unsure (1)..(93): unsure at all Xaa locations
  Clone ID: MRT4577_164164C.1.pep
NATLRFAVPATCAGSLLVLLLAERSLCDRHVGEVHIPLSELLSVSPDGPFPAKFVVYQVLKIFSGXPQGVLNLSYKLGEVANGYAPASAVQSV

SEQ ID NO: 255031 - protein, 99 aa, Zea mays
  Clone ID: MRT4577_164165C.1.pep
PPPGGRARTFLPSGVMAQIVVFKVGISFKGCFELVKGVLGKMKGVNSSPVDFMEQRVPVKGNVTPDPVLQIVSKTGKKIFFWEVKPVTSESPTPAGAPP

SEQ ID NO: 255032 - protein, 89 aa, Zea mays
  Clone ID: MRT4577_164166C.1.pep
MGYWRHRVELTVRRTWLGVTYRFGVRQTGLRMLLQEVSTCDYEDPHVMWEMLNRTTGPAPAPTMRDHSRVRPQPQAEAEDDQDLLCRGV

SEQ ID NO: 255033 - protein, 65 aa, Zea mays
  Clone ID: MRT4577_164167C.1.pep
KLPLGGLRAWLTNQNHTPPFIGYFFHPSSRVGQTTFLQTKRLIKIAGAIPADHQIENLSRNFFPL

SEQ ID NO: 255034 - protein, 52 aa, Zea mays
  Clone ID: MRT4577_164168C.1.pep
EHAEPSLAAGCTGLCHELKTVSCITKLNYKMHYSTLTVLIRFNECRTKSSTC

SEQ ID NO: 255035 - protein, 155 aa, Zea mays
  unsure (1)..(155): unsure at all Xaa locations
  Clone ID: MRT4577_164169C.1.pep
PFVPLGGLFLEPLTHSLGGGGELVLQATTGGSLAATPPAPIACPTCFCVTLLSCRAPAVAPPPRXPPPAPRAXPPXPXPPPPPPXRAPPPPLPPPPPPPXRLPPPPXPPPPXSPPPPPXPPPXPPPXXAPXPPAPPPAXPPPPXPSAPPPPPXPP

SEQ ID NO: 255036 - protein, 100 aa, Zea mays
  Clone ID: MRT4577_16416C.1.pep
LGLGDTHAPSELPGGKRRPALPNGGVNSVVTPALPVPLNPPLVVGAVHNFLPFLIQNWTNLFPLACIKTVFVQYQNVSVDMFLKSPGFPPPLFLSMCGCN

SEQ ID NO: 255037 - protein, 382 aa, Zea mays
  Clone ID: MRT4577_164170C.1.pep
MEYPATAAGSGSHKYYYPQQHSHSQPQALRRPPRPAARWVKQWIPQDLASSGGKCSLFKWVREDGYRNSKDNPRVLDVEAPKPEPTTEILFLCSYENCGKTFVDVSALRKHASVHNEKQYICNEPNCGKKFVDSSKLKRHYLTHTGQKDFVCPHPGCGKAFSLDFNLRSHLKTHALENYHICPFPACGKRFTSDFKLGAHVKSHEKTGTPIAVQHAPAPPAEKPRVAPKPPTPATTSYADRPYVCPYEGCDKAYIHSYKLNLHLKTQHPEHGQEENGKVGASGGQHAANEHTYQYNYAEVGEIAPNPKRSKTNHGHKVHSSKAYNAKVSRAMPSDIGVRNQWPGKATYQDDSEETEEDGGNNIEDGWRYGNNDDDEETPDED

SEQ ID NO: 255038 - protein, 91 aa, Zea mays
  Clone ID: MRT4577_164171C.1.pep
ANPLRAVAIGFGCASFPRIPQDLASSGGKCSLFKWVREDGYRNSKDNPRVLDVEAPKPEPTTEILFLCSYENCGKTFVDVSALRKHASVHN

SEQ ID NO: 255039 - protein, 89 aa, Zea mays
  Clone ID: MRT4577_164172C.1.pep
QQGARCCVQYNQSLNIMVMTVPQMSLVVMLVTVPLMVLVSGVSSSILVHPVLLSRMIIVSRRHSSAEVRERRVRNKGRTDRGRGLEDEL

SEQ ID NO: 255040 - protein, 169 aa, Zea mays
  Clone ID: MRT4577_164173C.1.pep
MRTIMAKSPHDSSFSRRNFKWPVLVKSSSHGAAAGGGEDSSGKGAEDADEDEATMAFSSSCPSFHSEDFVSPPPNPKAPPPPKQRGKRCRAAVSRLRAALAAAIAGRHRQVGLGARITGTLYGRRRGHVHLAFQVDPRACPALLLELAAPTASLVREMASGLDRIALEC

SEQ ID NO: 255041 - protein, 113 aa, Zea mays
  Clone ID: MRT4577_164174C.1.pep
MKHLAAYLLLGLGGNTSPSAADVKAVLESVGIEADSDRLDKLISELEGKDINELIASGSEKLASVPSGGAGGAAASGGAAAAGGSAEAEAAPEAAKEEEKEESDEDMGFGLFD

SEQ ID NO: 255042 - protein, 61 aa, Zea mays
  Clone ID: MRT4577_164175C.1.pep
NITPPKYNSLSPYYTTTHTTKTLSLPNLIPFHHILLYTAFLITQTPKPNSLFNISPTTISN

SEQ ID NO: 255043 - protein, 175 aa, Zea mays
  Clone ID: MRT4577_164176C.1.pep
VQRHAEDHAAVLAAYTAHARHLSAASASQTDAFLSISSRLSALAARLSVSTVAALEKEIKAQVKRARSLAGGAKEAFDTQSKTQKLSDTVFAVGQQLLRARRAGVLNSRIAAWSTPKSLHCLAMRLLEARLANASAIPDEPPVAPPQLADPSLYHYAVFSDNVLAVSVVVASAAR

SEQ ID NO: 255044 - protein, 220 aa, Zea mays
  Clone ID: MRT4577_164177C.1.pep
MMGTAVDLGRRQGDSRFYDAARARRGHHHGLPKSRCAAAAVTQEKAPEEPSRLPASPVGVAGNLKRFVAAVTLSVPAEYPSERGEWRGCGVDANRERPYFVLDDLWEAYKEWSAYGAGVPLVLDGCDGVVQYYVPYLSAIELYGDSSVLQSSSNPRLHMMDDSDEDFRDSSSDGGSDYEHVRAKHFAQEGFSRDVGESGVTHGRLLFQYLEFDSPFCREP

SEQ ID NO: 255045 - protein, 152 aa, Zea mays
  Clone ID: MRT4577_164178C.1.pep
RHEIHSDNSCSGPMEAADNPSRGGAPLLLASNDLGHGSAADAFLLHLASRAAALPSGDLEQQSLDEERTTTVTCGRVDLDLAGDGDASHMEELSASLVRWTATTGTHARARRPGQLDGEVLLPDHHDSPENMKVYLANPCRQQQPLLQRDHL

SEQ ID NO: 255046 - protein, 127 aa, Zea mays
  unsure (1)..(127): unsure at all Xaa locations
  Clone ID: MRT4577_164179C.1.pep
IRSHAAXKXPPAPREQQQRTRAPPPPPQXXQAGHXPPPPPQGNQAGPPPPAKGGQPPPQAAAAPAPAGGGAGDEARTXXNGDXQXXXDENXPXSGAXQAGEDXXAKKXRNKQTGQXEXXGPKENSNQ

SEQ ID NO: 255047 - protein, 43 aa, Zea mays
  Clone ID: MRT4577_16417C.1.pep
CLLRRKDVAHNMIGEHNYVPDCIDEDLTYLQHFLLIISSPQCS

SEQ ID NO: 255048 - protein, 62 aa, Zea mays
  Clone ID: MRT4577_164180C.1.pep
HRGGGRPFFFFLAVYKCMHPFMTGSYITNHQTQAAAHRINEDLTTTGRSILPRTIHPICHKT

SEQ ID NO: 255049 - protein, 84 aa, Zea mays
  unsure (1)..(84): unsure at all Xaa locations
  Clone ID: MRT4577_164181C.1.pep
RGRXGSFFLPGSLWCYVSAGLSLYLTLLRQVETSVVSAFDGWRTTSWHSIIPPAGVAYVGQTLLRHYHHHMASLTYATWLLSDL

SEQ ID NO: 255050 - protein, 131 aa, Zea mays
  Clone ID: MRT4577_164182C.1.pep
MSSLPGDEIYVHPRTLCAVANGPPPYCGWSGALPRMVRRPITNSLAPHREVPKVSTPRELDLGIINVWPKKGTNTPFDNIAGDNEIKSIRSAVMAGSKHNSNVSKDNILKPGLESLSANEQQQFQDYMNNM

SEQ ID NO: 255051 - protein, 73 aa, Zea mays
  Clone ID: MRT4577_164183C.1.pep
MGNTTSVQAEASDSAQKPATTAPAPGSKPKKICCACPDTKKLRDDCIVQNGEDACGKLIEAHLKCLRAEGFSV

SEQ ID NO: 255052 - protein, 73 aa, Zea mays; identical to SEQ ID NO: 255051
  Clone ID: MRT4577_164184C.1.pep

SEQ ID NO: 255053 - protein, 182 aa, Zea mays
  unsure (1)..(182): unsure at all Xaa locations
  Clone ID: MRT4577_164185C.1.pep
FPDRLPEFRKYVLVILDGNPNFGKPAPAPGPGGNSNDTKPGDGSGGSNKASSSTGVIVGSVVGAVAVLGLIAALGFYCYKRKQKPSGRVQSPHAMVIHPRHSGSDPDMVKITVAGGNANGGAXTSEPYSQASSAPRDIHVVEAGNMVISIQVLRNVTNNFSQENILGRGGFGIGYKGEFPDG

SEQ ID NO: 255054 - protein, 191 aa, Zea mays
  unsure (1)..(191): unsure at all Xaa locations
  Clone ID: MRT4577_164186C.1.pep
MLVYHXLLSGVELLSDSFAYDEFXNGVLWXRPSEGAIXGAVDVDTDGHPSAVGAEDASVDDTVVXWPDIADSYHQREQPLFSTKSCCRLRFDHTFRIXTAVYHPKKRDDLKYAVKGAIKFLLTSCXDLQLFVGALMTYESXLVIPLLXDVATNPTFLYFFHALKEIKCYISYPCWGLYMLYCYSHNYICPA

SEQ ID NO: 255055 - protein, 115 aa, Zea mays
  Clone ID: MRT4577_164187C.1.pep
TVTCTASPRRRGAPIGSSSEKSPHRCVPRRTYLRVLLASVQLPLGFGHFLLVRRPHRLRGEGSGAAERHMGRATPRCPTRKAGSCGLPTPPDGTGGVRSVGVVEEGKSRKPDPAG

SEQ ID NO: 255056 - protein, 60 aa, Zea mays
  Clone ID: MRT4577_164188C.1.pep
PIQLIFSSLVFEMCSECEWTVCSKWRKMWRKRASAICNVFQAKIKEKNVTEFDYIEILLL

SEQ ID NO: 255057 - protein, 52 aa, Zea mays
  Clone ID: MRT4577_164189C.1.pep
LEYMAADGDKTIMVLLLQPRKLAEGLKDIADIYKKHKLTINDVRIEYQRKSS

SEQ ID NO: 255058 - protein, 45 aa, Zea mays
  unsure (1)..(45): unsure at all Xaa locations
  Clone ID: MRT4577_16418C.1.pep
PNNXIPRFDANMHSFLPIIDNKQTSFSINNTLTHYYDSFHTPSAL

SEQ ID NO: 255059 - protein, 103 aa, Zea mays
  Clone ID: MRT4577_164190C.1.pep
IPKTLARGIGSGVDLNSRTVGIHEYMMLPVPARKPRPKCMLPFPCSWFSWRNGTWQIKYLYIAPRSHSFLPGGCNCRMLSSSLHGKKNMPALVSHPPTLERQA

SEQ ID NO: 255060 - protein, 89 aa, Zea mays
  Clone ID: MRT4577_164191C.1.pep
NELCTAVAATQRRSRQLLSAAARCVLSSSRLRSSTGSQRAWTRTKQQDKLNWSTTTTTSIIVIAAGAAQSEEHGRQRLQERSRQRFPDT

SEQ ID NO: 255061 - protein, 83 aa, Zea mays
  Clone ID: MRT4577_164192C.1.pep
LYSFWGLLKARIGGRKPANANKRPATYYQRRTHELQVRARTKPHHEQLKMKATLQNKVVDRLKHNRAHPLKSGRTSRQHHRFL

SEQ ID NO: 255062 - protein, 29 aa, Zea mays
  Clone ID: MRT4577_164193C.1.pep
ECANRICEKSEPECPVCHTAVTQAIRIFS

SEQ ID NO: 255063 - protein, 257 aa, Zea mays
  Clone ID: MRT4577_164194C.1.pep
MADSATSRPTVLVTGAGGRTGQIVYNKLKERSEQFVARGLVRTEESKQKIGAAGDVYVADIRDADRLAPAVQGVDALIILTSAAPKMKPGFDPSKGGRPEFYYEDGMYPEQVDWVGQKNQIDAAKAAGVKHIVLVGSMGGTNPNHPLNSMGNGNILVWKRKAEQYLADSGIPYTIIRPGGLQDKDGGVRELLVGKDDELLQTDTKSIPRADVAEVCVQALQYEEAKFKAFDLASKPEGVGTPTKDFRALFSQITARF

SEQ ID NO: 255064 - protein, 229 aa, Zea mays
  Clone ID: MRT4577_164195C.1.pep
MQPRSPPPSEAPAPSDAIMMPGVGGVEPAVTLGQVPRWSDPDQRIFLASTSEEASAEDDGSGTTSASGFISFSDPLTVDDGAVGGGHAGGASRFPVDQEINSRIYLWRGQPWNLEVDAVVNSTNESLDEAHSSPGLHAAAGSGLAEECATLGGCRTGMAKMTNAYDLPARKVIHTVGPKYAVKYHTAAENALSHCYRSCLELLIENGLESIAMGCIYTEAKNYPREPAA

SEQ ID NO: 255065 - protein, 115 aa, Zea mays
  Clone ID: MRT4577_164196C.1.pep
LVQNQLRSFRFFQRRCPRTRLKYQEFVLLHFCALLKFRFRDCRIDGVLRLSWPPFSTHISPLSTSICRQRSCLELLLGICRIAILVHDALALFHARLLVKQPHWLKYAPPGCGWL

SEQ ID NO: 255066 - protein, 142 aa, Zea mays
  unsure (1)..(142): unsure at all Xaa locations
  Clone ID: MRT4577_164197C.1.pep
SARAPIWRWFTTEGEEQEAAYEAAVEQLLVLEKELAVSWKPFFGGDKVGFVDLSLGPLAYVLPIXYEEVIGGGVSVTTNNKMVAEEKMPCLAAWMGRFLSSPAVRAHLPPLEKLRPRYQAMRESLLVSARAQVVEKERGSSS

SEQ ID NO: 255067 - protein, 92 aa, Zea mays
  unsure (1)..(92): unsure at all Xaa locations
  Clone ID: MRT4577_164198C.1.pep
VITRAYHRTPEASGARISQDNGCIFWMCHNFDMLDSARDTICVRAXNNLYARNQAXSHQXHVDFVVYITGFIGESMQSEWDMFHNLDSGAQY

SEQ ID NO: 255068 - protein, 44 aa, Zea mays
  Clone ID: MRT4577_164199C.1.pep
PTAILPHIVSSGGDTPRSSVGAWSPLFKAPHPRQLLGYLRRPQP

SEQ ID NO: 255069 - protein, 65 aa, Zea mays
  unsure (1)..(65): unsure at all Xaa locations
  Clone ID: MRT4577_16419C.1.pep
LCIPLLVGKGVFLSALSPQNNSVHFCVISLCTPALVIVMGKEGVYGGSLNKKAYEFAFXLRMSDV

SEQ ID NO: 255070 - protein, 49 aa, Zea mays
  Clone ID: MRT4577_1641C.1.pep
LERSYVSSPSIDCNNKKMKRSSQVHAHLVLRGFTKGYTRWTKHGEDHQS

SEQ ID NO: 255071 - protein, 39 aa, Zea mays
  Clone ID: MRT4577_164200C.1.pep
QSHSLFKLHDYSSHQFVQPCSLYCHYGDTIIYYNLSKLA

SEQ ID NO: 255072 - protein, 110 aa, Zea mays
  unsure (1)..(110): unsure at all Xaa locations
  Clone ID: MRT4577_164201C.1.pep
ANRPPPDRRLPTASLIGPCSYISATTIGPGXXXCXXXRXTSTPTTTVPPQLARAPARSAVQCRCTSSTGRAGMHAAAGVGVGRRRLYLGGGVMTVRGGLQLDSLGLLSRI

SEQ ID NO: 255073 - protein, 54 aa, Zea mays
  Clone ID: MRT4577_164202C.1.pep
ALSMVQHNKLVKYIWAYLEAVIVVVTELLVGGSLRKYLVSLRPMSLEPRVAVVF

SEQ ID NO: 255074 - protein, 144 aa, Zea mays
  unsure (1)..(144): unsure at all Xaa locations
  Clone ID: MRT4577_164203C.1.pep
MAASLLVLAVAFLVGSGSGGIDGGAAAPVEVEGTEVAYGSVIKLMHEKTKHRLHSHDVPYGSGSGQQSVTGFPEGDDSNSYWIIRPTPDSXIRLQHMRTRRWLHSHLHASPLSGNLEVSCFGGDELSDSGDHWRLEIEGSGKVW

SEQ ID NO: 255075 - protein, 88 aa, Zea mays
  Clone ID: MRT4577_164204C.1.pep
VRGAPRSALQGDHMCQCMRHREAGPRTGGDCEEIMGPFLLPERKPCPRPHQCSQIREPLKAPPTNWEMTKPDRSPDGNHCPLIVRILI

SEQ ID NO: 255076 - protein, 57 aa, Zea mays
  Clone ID: MRT4577_164205C.1.pep
VPTGWGIKQGKCSQIFHYTIQMIPVFNSLLNQPIYSHPMLSYLLTGCFFKTLAYVRL

SEQ ID NO: 255077 - protein, 216 aa, Zea mays
  Clone ID: MRT4577_164206C.1.pep
MAASLLVLAVAFLVGSGSGGIDGGAAAPVEVEGTEVAYGSVIKLMHEKTKHRLHSHDVPYGSGSGQQSVTGFPEGDDSNSYWIIRPTPDSSSKQGDAIETGGIIRLQHMRTRRWLHSHLHASPLSGNLEVSCFGGDELSDSGDHWRLEIEGSGKVWKRDQKVRLRHVDTGGYLHSHNKKYNRLGGGQQEVCGVREKRAENIWLTAEGVYLPVNGSK

SEQ ID NO: 255078 - protein, 216 aa, Zea mays
  Clone ID: MRT4577_164207C.1.pep
MAASLLVLAVAFLVGAGHGGIDGGAAAHMEVEGSEVTYGSVIKLLHEKTKHRLHSHDVPYGSGSGQQSVTGFPEGDDSNSYWIIKPTPDSSSKQGDSIQTGGIIKLQHMKTRRWLHSHLHASPLSGNLEVSCFGGDELSDTGDYWRLEIEGSGKVWKRDQKVRLRHVDTGGYLHSHSKKYNRLGGGQQEVCGVREKRAENIWLAAEGVYLPVNGSK

SEQ ID NO: 255079 - protein, 186 aa, Zea mays
  unsure (1)..(186): unsure at all Xaa locations
  Clone ID: MRT4577_164208C.1.pep
PPGNPAAXAPGPPPGGVGGPPGPPSATGPEXAGFPGGGGGEGRPTAGGGAPAPAGGAGVLKAARPRPVSPHGEGAPTAPTPXGGGGPPKEPPPGCPLFFPVKSVRGIVAPFIFSPGPPFSPGFPPFGSRLGSPGNLPPVHLFFTLLPLPPGGALFLGPFRPPFKKPPLFCPPPFKHNPGTNFFCGQ

SEQ ID NO: 255080 - protein, 151 aa, Zea mays
  Clone ID: MRT4577_164209C.1.pep
MDPALRRRSRLPIHLLLVAVTLLAALAARSDAEVITLTEETFSDKIKEKDTVWFVQFCVPWCKHCKSLGTLWEDLGKVIEGTDEIEIGEVDCGASKPVCSKVDIHSYPTFKVFYDGEEVAKYKGPRDVESLKTFVLNEAEKAGEVRLEDEL

SEQ ID NO: 255081 - protein, 158 aa, Zea mays
  Clone ID: MRT4577_16420C.1.pep
SITLAMLGPETNLALALIQDPEITQGIKQVVVMDGAHFNGGNITPVAEFNMFADPQAAEVVLKSGVKLTYLPLDVTHKILTSDERLKQIAALNNNASKVVSDILNEYVKGDMEHYGIPGGPVHDATVIAYLLKPELFSGRQVNLVIDSREGPTFGQTI

SEQ ID NO: 255082 - protein, 94 aa, Zea mays
  Clone ID: MRT4577_164210C.1.pep
EAAMDPPCAAPSACDVLQQRRPLLRHARQVGPLAVDLRSPCTSSSKSAPSVDVVLVLCLCDEMLAGGQHMRLSDPARLLLFYLRFKQKNKNIIV

SEQ ID NO: 255083 - protein, 97 aa, Zea mays
  Clone ID: MRT4577_164211C.1.pep
VGLLNGFCPGSGPGAGADAQFKRGRWPKLGARLLFFAITKDRGRFNFSNKFCPSKKYDGVFSPNGKCLTGVWPKPKSQGLRDLWFLSCTPQSAIKLG

SEQ ID NO: 255084 - protein, 134 aa, Zea mays
  unsure (1)..(134): unsure at all Xaa locations
  Clone ID: MRT4577_164212C.1.pep
GDPHVQTTYKFEFNFNNRATIASSIFSLLMLLTLSACIANSTFFPQYSQTPIASLLPPYLPLIISLLCENPSLQPYILQQAILSSNIPLSPFLQQSPSLSLMHSFLQTIISHXLYQLLLLLINQISLTNSFFST

SEQ ID NO: 255085 - protein, 194 aa, Zea mays
  Clone ID: MRT4577_164213C.1.pep
MSASDLPDELWARVLELGAASSALGFRDLCSIAIASRRLGRLSVYPALWSELLSRDFPSQSEPSTSSASTSQPPPQRLHPKSLYKTKFERHKVRMAEARRRAVFEAEARVLVSRRRLVELEESIREEGERMETAAQELDNLERVRRASVALNVWQPQVVRGRQKQLVQQCTVPVDSRLSDLNMELKVCKQQIAT

SEQ ID NO: 255086 - protein, 67 aa, Zea mays
  Clone ID: MRT4577_164215C.1.pep
SPYIFFFLSPFNKITKISSPISLSNNFSSLITIFTHSFIFSLYIFIFFIILFFYIFFFFLIIYFFPL

SEQ ID NO: 255087 - protein, 174 aa, Zea mays
  Clone ID: MRT4577_164216C.1.pep
MAQDLVAHNKKKKKKRKKVNTEKKKKTSLLRPPLAQTHPHPHTHSATDTRELPAGRGARAAEVGVRGAAQAAGLSSIQQGRGRKEGGARTGTGGMNAGTSISPRPGTDWGPIIVAVILFVVLSPGLLFQLPSRTRVVEFGNMGTSAIAILVHAVIFFCLLTIFVVAIGIHVYAA

SEQ ID NO: 255088 - protein, 122 aa, Zea mays
  unsure (1)..(122): unsure at all Xaa locations
  Clone ID: MRT4577_164217C.1.pep
AGTGLPPAHPGLVLVEPKARVLVAGGGIGGLAFALAARRRXFEVLVLERDLSTXRXEGEYRSPIQLQSNALAALEGSGAPPRSLPSCLWLLHRRRGRHNRPPSSGGLRRPCVPGEPVATPGD

SEQ ID NO: 255089 - protein, 67 aa, Zea mays
  Clone ID: MRT4577_164218C.1.pep
KKKKKKKKKKKKKKKKKKKKKKKKKKKKKKKKFKKKNLKKKKKGPPFLRIQFFFPLLSKFLFFFWAP

SEQ ID NO: 255090 - protein, 61 aa, Zea mays
  Clone ID: MRT4577_164219C.1.pep
GKRAPHNKQGWERENASDNRLKGFPTQPDRGSRPPGKKEGGHRGLSREDFIRGGPKFYCRQ

SEQ ID NO: 255091 - protein, 40 aa, Zea mays
  Clone ID: MRT4577_16421C.1.pep
RRASILSIIPHHSLQRVTTYRRTPLACKYQTLNKPTCFAP

SEQ ID NO: 255092 - protein, 106 aa, Zea mays
  unsure (1)..(106): unsure at all Xaa locations
  Clone ID: MRT4577_164220C.1.pep
KPKIPPPPTQPXKNPSPPPPFFKPKDPKPPPPLPPQRFSPPQKPPNRAWPXRPLPPKFFFFFFFFFFFFFFFFFFFFFFFFFFWTPNSTIHFFILQKCGKKGNTKK

SEQ ID NO: 255093 - protein, 45 aa, Zea mays
  Clone ID: MRT4577_164221C.1.pep
RTLGVRSMPSQEVGLLPSSGGKIGKTPVRIKAVVYSLFAFHHKVI

SEQ ID NO: 255094 - protein, 75 aa, Zea mays
  Clone ID: MRT4577_164222C.1.pep
PEGKISDSLHWRYYMTNVQCFLSSGGMSQSRYQQFPLWLIMPNFASRCSIWQQTGLLSSTSWSAYQPSCRCNTIV

SEQ ID NO: 255095 - protein, 153 aa, Zea mays
  unsure (1)..(153): unsure at all Xaa locations
  Clone ID: MRT4577_164223C.1.pep
VWHHWIGHAKFKILRVLQNSXAILVNKSSTXSSVCEPCXMGKSDKLPFSFSICSVKEPLDRLHCDVWGPSPVVSVQGFGYYAVSVDDFSRYSWIFPLKSXSHFCDVYMVFQKQVETQFSKKIKVFQSHGAGEFISTRKKKNLQGHGIQHLISC

SEQ ID NO: 255096 - protein, 76 aa, Zea mays
  Clone ID: MRT4577_164224C.1.pep
MSSLGTSKGILEIAKFGVYVSVPVALTYLVATDSKTLKKLMGLRPYVVYPPEGPRPPPPEELRERAREIARKRQQS

SEQ ID NO: 255097 - protein, 127 aa, Zea mays
  Clone ID: MRT4577_164225C.1.pep
CNGHTYGRRRRDHLTVASGCGSTSASGRICTKEQIQEHGVRRRTARQLASRSQMEDIRKDKREESINNKRHDERPISASGMAAMVHYNVLQQNLNGLPATWRERTVQRPITSSDEEHTHRSWKDASL

SEQ ID NO: 255098 - protein, 76 aa, Zea mays
  Clone ID: MRT4577_164226C.1.pep
MSSLGTSKGILEIAKFGVYVSVPVALTYLVATDSKTLKKLMGLRPYVAYPPEGPRPPPPEELRERAREIARKRQQS

SEQ ID NO: 255099 - protein, 76 aa, Zea mays; identical to SEQ ID NO: 255096
  Clone ID: MRT4577_164227C.1.pep

SEQ ID NO: 255100 - protein, 81 aa, Zea mays
  Clone ID: MRT4577_164228C.1.pep
REDASANNGRMNTLATDGGDRIIQLTGQTNSGPVALSIHGALLSRVGEAKARDHEALPIYGSDLLVHGGPDRNLVIRWQWL

SEQ ID NO: 255101 - protein, 76 aa, Zea mays; identical to SEQ ID NO: 255096
  Clone ID: MRT4577_164229C.1.pep

SEQ ID NO: 255102 - protein, 341 aa, Zea mays
  Clone ID: MRT4577_16422C.1.pep
MAKQAVLLPMAALALVLGALATIPAGVRSIGVCYGMNGDDLPSASDVVQLYKDNGIDSMRIYSPDTDVLQALSGSGIAVTVGVPNADVGGLASRPSAAAAWVQSYVLAFPAVQFRYIAVGNEVVAGGRVLLPAMRNLDRALSAAGLADDIKVSTAVATDVVGSSFPPSAGTFAPSAGYMPHVARYLQSTGAPLLANLYPYYSYISDPSAVDINYALLAMPAGTVVVQDGGYSYDSLFDAMVDCFYSALENAGAGNVTVVVSESGWPSAGSDAANTTNSQAYSQNLINHVGQGTPKRPGPIEAYIFATFNEDQKLGDDETRRHFGLFNKDRSLAYPIDFVNP

SEQ ID NO: 255103 - protein, 183 aa, Zea mays
  unsure (1)..(183): unsure at all Xaa locations
  Clone ID: MRT4577_164230C.1.pep
NSARGGIYRCSSSXGCAARKQVERSRADPNTFILTFTGEHNHAAPTHRNSLAGTTRHKFPSSAAPQPPPPSVVVGGDAQDRQPSPSPTSTSTAGLSPTTPLRTPSMEEEEEEEEEEEXGAAGGHGDWRGRAPVPQHRRRRRGTDVLALRRRRRALPKPSLGDSRQQRRRASHRGSRRWELTSS

SEQ ID NO: 255104 - protein, 76 aa, Zea mays
  unsure (1)..(76): unsure at all Xaa locations
  Clone ID: MRT4577_164231C.1.pep
MSSLGTSKGILEIAKFGVYVSVPVALTYLVATDSKTLKKLMGLRPYVVYPPEGPRPPPPEELRXRAREIARKRQQS

SEQ ID NO: 255105 - protein, 254 aa, Zea mays
  unsure (1)..(254): unsure at all Xaa locations
  Clone ID: MRT4577_164232C.1.pep
KQTKTTSKRGIRKKKEGMQKETTKPLKTLGTKLKEQRQWENKRKRXKQKKRNKKKGGQSQQTGELKQKERXRKREKLTLKKRDKRRKTTKKKKTPSRGDTQKETAEPKHRENKXGRKKKKEKIEKNQKETQQPKEPPKGKLEQGKKEEQXNLNKEKKKQDTKKKHKRXTKKASEKKKKARKKKKGKEKKTNGTKKPGNKSKKKKKKEKKQNKKNEKKRKKKQKKKKKRKENETHQRKDKRHTKKTKNTKKKQQK

SEQ ID NO: 255106 - protein, 56 aa, Zea mays
  Clone ID: MRT4577_164233C.1.pep
LPLTPHTSLLNLMQTADYEHGLRHRRGEPKRRTALIIALFIRAPKTVQDEELTCPT

SEQ ID NO: 255107 - protein, 29 aa, Zea mays
  Clone ID: MRT4577_164234C.1.pep
GFIIISPTIACLNPIYKRRHSQILLIPTV

SEQ ID NO: 255108 - protein, 407 aa, Zea mays
  unsure (1)..(407): unsure at all Xaa locations
  Clone ID: MRT4577_164235C.1.pep
SRPPPAMASNGIAPRDVCVVGVARTPLGGFLGALSSLPATKLGSIAIEAALKRANVDPALVQEVFFGNVLSANLGQAPARQAALGAGIPNTVVCTTVNKVCASGMKATMFAAQSIQLGINDIVVAGGMESMSNAPKYIAEARKGSRFGHDTLVDAMLKDGLWDVYNDCAMGMCAELCADNHALTREDQDAFAIQSNQRGIAARDSGAFAWEIVPIEVPVGRGKPPVFIEKDESLDKFDPAKLKKLRPSFNGGTVTAGNASSISDGAAALVLVSGQKAQELGLQVLARIKGYADAAQAPELFTTTPALAXIPKAIXSNAGLESSHVDFFEINEAFSAVALANQKLLGIPSEKINVHGGAVSLGHPLGCSGARILVTLLGVLREKGGKIGVAGVCNGGGGASALVLELA

SEQ ID NO: 255109 - protein, 439 aa, Zea mays
  unsure (1)..(439): unsure at all Xaa locations
  Clone ID: MRT4577_164236C.1.pep
RRAGAAIRSVFVGRFAGDSIFQVGWFWHFGPAAMASDGIGPRDVCVVGVARTPMGGFLGALSPLPATKLGSIVIQAALERANVDPALVQEVYFGNVLSANLGQAPARQAALGAGIPNSVVCTTVNKVCASGMKATMFAAQSIQLGINDIVVAGGMESMSNAPKYIAEARKGSRFGHDTLVDAMLKDGLWDVYNDCAMGMCAELCADNHALTREDQDAFAIQSNERGIAARIRHAFAWEIVPIEVPVGRGKPPVLIEKDESLDNFDPAKLKKLRPSFKENGGTVTAGNASSISDGAAALVLVSGQKAQELGLQVLARIRGYADAAQAPELFTTTPALAIPKAISNAGLESSHVDFFEINEAFSAVALANQKLLGIPSXVGLQEKINVHGGAVSLGHPLGCSGARILVTLLGVLREKGGKIGVAGVCNGGGGASALVLELA

SEQ ID NO: 255110 - protein, 55 aa, Zea mays
  Clone ID: MRT4577_164237C.1.pep
KKILAAVGALPVRRRNPAPDLHSHRVAWGLLVRAQPFVAPPPPPQQWPGVWGFSR

SEQ ID NO: 255111 - protein, 60 aa, Zea mays
  unsure (1)..(60): unsure at all Xaa locations
  Clone ID: MRT4577_164238C.1.pep
AFSICSLHIQVTNDIFTKEDGEFLIKHGALPEERIRAVETGGCPHAVIRXDISIYLGSLE

SEQ ID NO: 255112 - protein, 60 aa, Zea mays
  Clone ID: MRT4577_164239C.1.pep
IKNKMFKQYEYTLMHQYRQVINESLKVENLSRPNHPRYSTPYVRLLGAAFFIHAYLYLVL

SEQ ID NO: 255113 - protein, 84 aa, Zea mays
  Clone ID: MRT4577_16423C.1.pep
QSRRSLRRGRTLRLWSRDMEPRRRRFISFFFYMYGDAVGGDVDSRLARNRDAGRSQWRMLRASRFCGYFREARGRVDMRWDCRR

SEQ ID NO: 255114 - protein, 107 aa, Zea mays
  Clone ID: MRT4577_164240C.1.pep
IRLERSTSSEAVLPGAELHTIEALLRTNDHGMISVKDQETHLLRAAPVGATACARAYPQRQCSYFHGMILAVDARDARHFMGRPAIRDDRQVWHDSLHPSSVLSQLR

SEQ ID NO: 255115 - protein, 66 aa, Zea mays
  Clone ID: MRT4577_164241C.1.pep
MMSYVFFSTKNPITRHWERSHRGKEFHCVASGRLAARCVSNRCRVEKRLSCKTKLDLNLRLEYSFS

SEQ ID NO: 255116 - protein, 79 aa, Zea mays
  Clone ID: MRT4577_164242C.1.pep
GGPCHARTESSRLPQARSSPREGQCCPFQGIAVAEASKTASLPVGRSVSCAAKQQFPESAASRSSSVTSTRTCPSGPPI

SEQ ID NO: 255117 - protein, 121 aa, Zea mays
  Clone ID: MRT4577_164243C.1.pep
GWQAPGFFLVKPIGVPFFLWGGNIMGIFGGLLFIISPLITNWGKKHTFFSQTKKWGGPVGPALDFGTLAGHTGAWLGRAILRAEGDPVVAVAAAGMGLGVVAGKPGGGGAAGPPAVEGHPG

SEQ ID NO: 255118 - protein, 39 aa, Zea mays
  Clone ID: MRT4577_164244C.1.pep
VIRNNTFFFSFQLGIQVIAHTDTATHGVGATHLLLTHCR

SEQ ID NO: 255119 - protein, 102 aa, Zea mays
  unsure (1)..(102): unsure at all Xaa locations
  Clone ID: MRT4577_164245C.1.pep
AVLHFLFFFIYILYFFAFIFYLFFFLFFFFLFFLLLFYFLLIFFLFSSFVFFFYFFYFXLFSFLIIFFFNIFSLFFYFFYXFFLFSFLLFIFYILFSILFFF

SEQ ID NO: 255120 - protein, 61 aa, Zea mays
  Clone ID: MRT4577_164246C.1.pep
MLNFRYFVSIKNSNHVMELFWNSTNYRLASSRISKLSHMGSSPFSNPRVLGQSLLIINPLA

SEQ ID NO: 255121 - protein, 145 aa, Zea mays
  Clone ID: MRT4577_164247C.1.pep
IGYLEAGRVESPDLVLTEDFGGVNAGVFFVRRSKWSEKFLDTWWNQTSFIQFGSTRSGDNAALKHLIDHLSAEEMQEHVRIVKMQCLFNSYPWILTLKSVHRLIFHLPTTWKGVYSDGDFMIHFAGLDDKQGWTNKILRERENQR

SEQ ID NO: 255122 - protein, 102 aa, Zea mays
  Clone ID: MRT4577_164248C.1.pep
NPALLCRSFLIRRSKWSEKFLDTWWNQTSFIQFGSTRSGDNAALKHLIDHLSAEEMQEHVRIVKMQCLFNSYPWILTLKSVHRLIFHLPTTWKGSTFSRSLY

SEQ ID NO: 255123 - protein, 117 aa, Zea mays
  Clone ID: MRT4577_16424C.1.pep
APCEDDPHVPPQAQLQGYVQRRLAWGHVPSAVPAGVEFAALGPGAAASISPVPPPAFLVPPTHAGLAVTLVSLFLSLIELESSLVCLSRIQHLSLFLVYTTALLDKDVSKYYAELLI

SEQ ID NO: 255124 - protein, 158 aa, Zea mays
  unsure (1)..(158): unsure at all Xaa locations
  Clone ID: MRT4577_164250C.1.pep
MMVVEDVVGPPSMSMEDDLAACALPPLMDVSGGGGANMAAASIELLAPPAPHVTCFSNALEGQFFLNPPCLHPSTSPLRLASMVQAQAQAQYDGDAGMVXAPAGGRRVVQQAGRGGAAERXGASQDTGVTSEVNVNPAEISSTRHHIMDPEAASFWGF

SEQ ID NO: 255125 - protein, 66 aa, Zea mays
  Clone ID: MRT4577_164251C.1.pep
KLLGSASPSPWHAPCRSAAGVAGREREEAAMGSAQGLIFVSQARKRTLHDHTGDRGKGKTNPIEAV

SEQ ID NO: 255126 - protein, 143 aa, Zea mays
  unsure (1)..(143): unsure at all Xaa locations
  Clone ID: MRT4577_164252C.1.pep
KKKKKKKKKRRKNEKEKKKKEKKKKKKKEGKKKKKKKXKKKKKKKKRKKKKKKKKGKKXXXXXXXKNKXXKXKKXKXXEKEKKKKKKKKKKKKXKKKKXKKKKKKKKXKKXKXXKKXKXKKKKRXPRXRQNQQEWYSQQTRTL

SEQ ID NO: 255127 - protein, 56 aa, Zea mays
  Clone ID: MRT4577_164253C.1.pep
LQRPSHPDLNGCLFIAKMHSTIIHLQHYHSISTSYSCTARMPVFLTLMLSPSVYSS

SEQ ID NO: 255128 - protein, 56 aa, Zea mays
  Clone ID: MRT4577_164255C.1.pep
DRGEHVRANEETISPRITTWQHSSVHPSLQHSLLHFSGCAASRKISLLLIKAKKTK

SEQ ID NO: 255129 - protein, 95 aa, Zea mays
  unsure (1)..(95): unsure at all Xaa locations
  Clone ID: MRT4577_164256C.1.pep
DFLKSKPHDISRIINFLGHQTIDATNQVKWWLECVALLEDTASLIVYXYQARLQLPPDQPPGYKATYHLSKKADEAREEAVDLKDKADFHKVAHE

SEQ ID NO: 255130 - protein, 248 aa, Zea mays
  unsure (1)..(248): unsure at all Xaa locations
  Clone ID: MRT4577_164257C.1.pep
MPPPVLRLFAAAPPRALGGRARAHRGDGGFARLRLRVRAAAGEAAPAPSRTQMIMDKISAGEGVGGAGGAYSYSALKRLDQIWSSICEAQADSKVPEVVTRVEGLLADSDLGSGSEIFDVIVCGGTLGIFVATALSSKGLRIGIIERNIIKGREHEWNISRKELMEIVEIGILSEAELEQIISSDFNPNRCGFEDKGEIWVENILNLGVSPAKLVENMKXRFISSGGAIFEEKSLSXIYVYDDLAVLK

SEQ ID NO: 255131 - protein, 268 aa, Zea mays
  unsure (1)..(268): unsure at all Xaa locations
  Clone ID: MRT4577_164258C.1.pep
CSSIDEKNIWRGSFSKAPGLNWHHRGRRIQICRKPVSSSSIKGKFCCCEFGDXTSKSKQGPEHLLVLVHGIMASPKDWTYGEAVLKRRLGDDFFIYASTVPVYEXMDVAGRRLANEVRPLKFVLEKRFQAFSLLETDISCSWILMNCFRSSDNCAYGNRSXVVNKMPSLRNISFLAHSLGXGLFARYAIAILHSVSVETKNAGQSSALTVXQQEGQQNQDVLSGLGSIAGLQPINFITLATPHLXVRGRNQVHHQNGGLRLQNILHII

SEQ ID NO: 255132 - protein, 55 aa, Zea mays
  Clone ID: MRT4577_164259C.1.pep
DRTNQSSRVFHMGWVTLWREDIKQEPFNQEHFLRKRNLTLGGKRIMASFMKTTSL

SEQ ID NO: 255133 - protein, 129 aa, Zea mays
  Clone ID: MRT4577_16425C.1.pep
LKALIWKPWGPSKCKLFAWLIIRNRVWTSDRLAARGWPHSPSCPLCKRHPETAHHIIAGCRYSRRIWDALASWLSIGPLAPATWPDSTSIKQWWFMVGSVAVPKKGTRSLLLLVVWHIWLERNNRTFQR

SEQ ID NO: 255134 - protein, 114 aa, Zea mays
  Clone ID: MRT4577_164260C.1.pep
VQVMQRRSKKKTHTTESDTVKHIAFMWPYDQWCLQGTSGQMLEQRKKNQREEIVLGGEAGRRLIFFSAVGRGNKAVESSLAEPEKQTRKEKPGAVGQASVIPDGRRAVWQKEVS

SEQ ID NO: 255135 - protein, 60 aa, Zea mays
  Clone ID: MRT4577_164261C.1.pep
EARPVAWPHSKSFSSSSSSSSFIRGFGSFCLDQIMTSWSWWSGVACDTSCCHVVCPASEG

SEQ ID NO: 255136 - protein, 45 aa, Zea mays
  Clone ID: MRT4577_164262C.1.pep
SGLYSGISFPTCRRSLFVFLPVFLHHTIRKVGNPLGSNIKLPTIK

SEQ ID NO: 255137 - protein, 43 aa, Zea mays
  Clone ID: MRT4577_164263C.1.pep
YSVNDNINSYPPNTNNKIPQACYAMLEATTMTLQHPTCNSTTT

SEQ ID NO: 255138 - protein, 49 aa, Zea mays
  Clone ID: MRT4577_164264C.1.pep
AEGRLNVRLMQKIGRGMPKVVNWVCLVTPPSHDLRSKVGQSQWRLLSPS

SEQ ID NO: 255139 - protein, 179 aa, Zea mays
  unsure (1)..(179): unsure at all Xaa locations
  Clone ID: MRT4577_164265C.1.pep
MSSPSPLCAASCSTALRAPPPPLLRFRRSYAPVAASVPRTAPAVSDDLVLRIAEQLEDSVTSTSPLLDPLRSASALSLLSTRWPTRRSSEAFRSTDISYLRSLPISLPSREPDLKLPSSPFSSHVLFSDGILVSSSGAHVSALADLPPGRARDRAAAALAXXAEFAHKDLFYDFNAVGA

SEQ ID NO: 255140 - protein, 111 aa, Zea mays
  unsure (1)..(111): unsure at all Xaa locations
  Clone ID: MRT4577_164266C.1.pep
GLEPPGRPHACAYSWVAEYLGFQSSQLAIRICLYLICSKPDYHKHVRNAVVNQLKEFMIHYKGYVPIXYNVHLQKTKRPEEIGYHVTLHACSDRLAAKIYLLTIFHIHMPI

SEQ ID NO: 255141 - protein, 59 aa, Zea mays
  Clone ID: MRT4577_164267C.1.pep
NRAGIPASAQTFDLYERALYDVPVTNPWGSSAKTIDTQSGYTTCFPAHHKVALPLFDLV

SEQ ID NO: 255142 - protein, 136 aa, Zea mays
  unsure (1)..(136): unsure at all Xaa locations
  Clone ID: MRT4577_164268C.1.pep
TTSCRYSKVFVLGTLLSSYGRVLLVVKPYWEYRLVPLIVTYEVYETVVVVVRRTVAFLGSRRRTRSAKVKVSVISSSHVQFRTRFVSFLRRFRKLEWPSKCQWDPLVEGEGFYCRVEVPPPPPPPPPRSLXSSINI

SEQ ID NO: 255143 - protein, 152 aa, Zea mays
  Clone ID: MRT4577_164269C.1.pep
FLLRSYGEARVGFCAGYNIQSAIKQAVFHCPFLRGGIKDLNNVVFLSLTTARVLSESDLISILHIFRRVTGFTKDIIFSRNSESDLEPKLIVVSLLTIRNHYDGSVSTVQEGFLSSLALHFPFISSLMGGDTPEQKQIRSKHSLIDCLTTRF

SEQ ID NO: 255144 - protein, 39 aa, Zea mays
  Clone ID: MRT4577_16426C.1.pep
PKGMLARGTYHNKSFFTDDDKQDHLSWEWNLSIKKEWTE

SEQ ID NO: 255145 - protein, 61 aa, Zea mays
  Clone ID: MRT4577_164270C.1.pep
VIQGTLCTSLTYRAEYVTGICMSPFRAMALLNMYNLSHHENTELLLMGHILSALPCKLRYC

SEQ ID NO: 255146 - protein, 69 aa, Zea mays
  Clone ID: MRT4577_164271C.1.pep
NKGSGAGKLWCHLVSRTIEKFMGDFTLCYGMGCSSLSKGQLIFLVKLCPNKLICRGSLLLEFYGFFSPL

SEQ ID NO: 255147 - protein, 64 aa, Zea mays
  Clone ID: MRT4577_164272C.1.pep
YSSRRFAVVSWTAASHDGVTAASACARAFERQRCRGRREVDVMGQNFYGGGMLRLSVCWIGSAE

SEQ ID NO: 255148 - protein, 73 aa, Zea mays
  Clone ID: MRT4577_164273C.1.pep
AHPYLGGAKDERERERERERKLESYTLSHKLIQICRNLWNAPTLTDLSGIKKVAMHIQYIHRMQTFLSMFIPF

SEQ ID NO: 255149 - protein, 58 aa, Zea mays
  Clone ID: MRT4577_164274C.1.pep
RTLKRIILLKFTDDGTFCNTVNIKDASVYTYAGESTHSCQMTTSSYCLIFSGGTEAAS

SEQ ID NO: 255150 - protein, 62 aa, Zea mays
  Clone ID: MRT4577_164275C.1.pep
SVAQKSPLTKHWYSTSEAACLFDQPKPSPADLKTPPEPEGEKKKYVGEGWGSVGPPGIGGVP

SEQ ID NO: 255151 - protein, 699 aa, Zea mays
  unsure (1)..(699): unsure at all Xaa locations
  Clone ID: MRT4577_164276C.1.pep
MPRPMASSSARGRAKDSDPSSSSAAADSSMASLIERATSTTAHAVDPVLLRAIKSSARASDAAIRDAFRLILSLMSKPHSHVRLLAFSIADELFMRSKLFRSLLADSLDGFLPLAVGFRRANPLPPPTTSAALLRKAAVQALERWHHLFGAHYRQLRLAVEYLKESARVQFSGLRATVDARAAREARMQEIYAGKVEQLRENLASIKAEIRSTIDEIRNGLEIIRAEHKKFEGYYVDDEEEIASLSMRSIRTASLMAGEWVPETQENEAVFDALREAHRLLVSKHLVTVQEWITVLVRVNLPDNRFRDSALKDFIDVKNEIRAVRDHCSELGLDLDNFHRRKGDQEEEDNEFWVEGNIEAPNRARVQSSLDVASTSKDTEKGKWVVGGVSHIGKAPVAANGTRNLDPEKSKLLAEAPVLPWSSVLDRWGSSGDVHVNQRGLEVESHWGRVDNDATIPAAKIAELNVHCSIYREDPVEILPCHAPLKKGGLCQRRDLRVCPFHGPIVPRDAEGNPIEQNSGSSDAEVNPVEHLDIGGHSNELNGISDDDCMEGTSSRMAGVNNDYGDIAGTCDLGKITAEQLARQSVKNVRXKEKWIARHRXRAQRARIRQHNEDVLRNAALASTSYSAAAYEQPTEAHGRRGRRGKAKAPTLASMLKKKVTTKDRIAERLLNARATDATVRDVSHNEDMSYREAFPNQW

SEQ ID NO: 255152 - protein, 61 aa, Zea mays
  Clone ID: MRT4577_164277C.1.pep
KSITLGRSIKLACRGPILPYGRVVLHIDWPLHLHSAGLVKTLGLTKPHIVCQHNTPLRQHG

SEQ ID NO: 255153 - protein, 180 aa, Zea mays
  Clone ID: MRT4577_164278C.1.pep
MTHMFPNGGASSSSTSMSSQRSETDDDKMIAMVLEEEYAKLDGAMAKRLTNLTSIPHVPRINTYFPTYSDATMDHHRLHDRLDAYGLFEVRVSGDGNCQFRALSDQLYRSPEYHKHVRKEIVKQLKACNSLYEGHVPMKYKHYCKKMKKSGEWGDHVTLQAAADKFAAKICLLTSFRDTC

SEQ ID NO: 255154 - protein, 69 aa, Zea mays
  Clone ID: MRT4577_164279C.1.pep
QKFLGLVLNTIPFRICGVCLHSYKAVVGYMMSVFLGCNNGFSAPSCSCLMYIHRCLEPSNLVVTLFFHC

SEQ ID NO: 255155 - protein, 82 aa, Zea mays
  Clone ID: MRT4577_16427C.1.pep
EHVHKHKTHGPPIMNYYLYHILHAHYFYPRHLCSLKLRTQSYVGFGNILLAANTSFICQMEQRRYSGQHHEHRPMIQRHTRL

SEQ ID NO: 255156 - protein, 134 aa, Zea mays
  Clone ID: MRT4577_164280C.1.pep
KYIFFFFFFFLLVFFFFFFFFFFFFFFFGGPPNQKRNIWVKKKPRGGAQFTQKKKQGSRDLKKRVPQKGRIQLLKKASPARGSMGNLPPPRNQLKTGKMRVRGPKGTGSAGFFLGGGGRNPLGGKTNTWDWPPF

SEQ ID NO: 255157 - protein, 133 aa, Zea mays
  unsure (1)..(133): unsure at all Xaa locations
  Clone ID: MRT4577_164281C.1.pep
PRVRGRVGGDILQQIVRSGGSNAAIWGLYARWHNTKGNLIACSXALLKQVRSLQGSGLLHDQMKFAKYAQASLKLCKVYMEISSSTGSRRELLTAEMHLKSTLKQTMDFSDTEEYKALDNCLEEIKNLIAATA

SEQ ID NO: 255158 - protein, 165 aa, Zea mays
  Clone ID: MRT4577_164282C.1.pep
AALPLSYSQFQFQAKKDPKSKAQAKTKGFFRGFYLKQVGNAFSSGASSKKKAPEPKPSFPILSKPGWVVSAPEKFLKFLEKNRVQPVKGAPPGFVLLQGLQPPEGEEVPLTNGPLTPSPSNPPAFNAGEPAGMAFYYKPPPPPAFEVTLLIKGVVQIQKFGVGFL

SEQ ID NO: 255159 - protein, 98 aa, Zea mays
  Clone ID: MRT4577_164283C.1.pep
SVSQSDPPHTTHHSSSAARSSTRRPASSRPLKESSKRHKVLSTQSTMTIIMMRQVLVLLILVLVIIQVQIMETRIINKIQIKVHCTTNVVSEFAVFDK

SEQ ID NO: 255160 - protein, 236 aa, Zea mays
  unsure (1)..(236): unsure at all Xaa locations
  Clone ID: MRT4577_164284C.1.pep
MRPLPKKPNAALPVPKQLKVHHPENESLSRFFLEKWRAMMQEPDGLSQNNYLAFANANRSLCSSKEPIRTLKDFSNVKGVGTXLINHMKSFFEKSSQDLSPAKGKKAKGTKSYLPRKNTAAYAILITLHRAKTSGKDFMMKQELIDAAEASGLSRDAIGPNKSKAKQSYGKDWYTGWSCMKTLLSNRLVTKWSNPAKYMLTQEGEGTARDCLSRSGLDDSARALTIIGAHTHLLWI

SEQ ID NO: 255161 - protein, 67 aa, Zea mays
  Clone ID: MRT4577_164285C.1.pep
MFFFFVGGVEQGAARVLKEAAGRCVRCGGAADLVETEKVLKLFFVPAWRWPGKDPAYLCRDCGLLAP

SEQ ID NO: 255162 - protein, 76 aa, Zea mays
  unsure (1)..(76): unsure at all Xaa locations
  Clone ID: MRT4577_164286C.1.pep
MAVMGKEEEEQQHLHKEEEVVQGDVRVVVHHETVVDEXADSALVRKISGLTDAIGSLVYMNPPSEVNALFIDLFTV

SEQ ID NO: 255163 - protein, 91 aa, Zea mays
  Clone ID: MRT4577_164287C.1.pep
MFRRKTREPKEENVTLGPTVREGEFDFGVAHIFGSFNDTFIHATDLSARQTLSRITAGMTAKADRDEPPPYAGTLAAQDAAQFFFFPPPPP

SEQ ID NO: 255164 - protein, 86 aa, Zea mays
  Clone ID: MRT4577_164288C.1.pep
DNLPVNFELCDPDSQLPHRFICKCKIGQTTYGTGFGANKKEAKQLAAKNAYQKLSEKSPSKTGFVISLSSDFSSSSSITSNSASQS

SEQ ID NO: 255165 - protein, 404 aa, Zea mays
  Clone ID: MRT4577_164289C.1.pep
MAGYAQPASRAVVLRLDDLALPPRHLTVPPHLPVSDLLRSIPLPSPSCYYLTADGRPLPASSPVAALPPSASVQLRLRALRGGGGDGGATGAESRDCYLSMYLAKKPDKADPNEARLSRFTCCALSGEPLAAPAVADRLGNLYNKEPLVEALLHKRLPRALSHIRGLRDMVPIHLHPRPGADAAGDEVRFQCPVTGLEFNGKYQFLALRGCGHVLSVKALKEVKTSACLVCHEEFGEADKMPINGTEEEVAELRKRMEEERGKAKERKDKKVLSGNKHAATVVAPVVAAAGAENGKKGEAASAKRFKAADHAPAHANKEVYASIFTSSRKSDFKETYSCRSLPRRVGDLMPRAIALHGGGDPIVLICLARVTNFNVGSFIWWCYLCLIGDPERILAVRAALNST

SEQ ID NO: 255166 - protein, 144 aa, Zea mays
  Clone ID: MRT4577_16428C.1.pep
HSIGRLGSSRPAGKKYDRLRPLSYPQTDVFLVCFSVTSPASFENVREKWFPEVRHHCPGVPCLIVGTQVDLRDDPSVREKLSKQKMQPVRREDGERMAKDLGAVKYVECSALTQYKLKDVFDEAIVAALEPPAPKKKSHKCLVL

SEQ ID NO: 255167 - protein, 51 aa, Zea mays
  Clone ID: MRT4577_164290C.1.pep
ERLLWGQDNLQRKGTRASIGRYPKLEINMTIKTTKLNMGENYYYKCLETGT

SEQ ID NO: 255168 - protein, 81 aa, Zea mays
  Clone ID: MRT4577_164291C.1.pep
ESERSPGFFLKKGGKRDPSGKKIFGKGFLSRENPFISPGLYSRFVSREGSPFFAGCVVLGGYKKCAGFAFIRTWGLCIFRT

SEQ ID NO: 255169 - protein, 165 aa, Zea mays
  Clone ID: MRT4577_164292C.1.pep
DEAADKGSETFEQADNAHAASGNDTFVDNDTLGAAILVNDDIPGERVVVHDPDNPCMDIGTVYPSMREFRLAMRQFAINEEFELQIVKTDPSRFIGDCKGEDCPWHIVGRRQPDGKTVMVTVLLDEHNCTSSARRKTTTPTSACVASKAIHLLKNSAMGTKDADM

SEQ ID NO: 255170 - protein, 72 aa, Zea mays
  Clone ID: MRT4577_164293C.1.pep
YRIPGVWSIRPCRSIRGMACSYISLYDVFSTEADPRAQVNQMIIPRAIPIPQLQRLCRQKCSYIDCDHVVSD

SEQ ID NO: 255171 - protein, 104 aa, Zea mays
  Clone ID: MRT4577_164294C.1.pep
NYSKANPPISIIDHSFLTKSESKVFHYPPPPGFVGSHVLIWCPLQVTPMITLSAIRFSPIKIGCFMCITSSHQTNILKNLKSFYIKIRSTPPDLDLGQASAHAS

SEQ ID NO: 255172 - protein, 58 aa, Zea mays
  Clone ID: MRT4577_164295C.1.pep
ACYFCFQLHFILEHSYTISLLSYLKLGIERLLDLHKKKYIIYNAKKTLYTEGCGNMAE

SEQ ID NO: 255173 - protein, 63 aa, Zea mays
  Clone ID: MRT4577_164296C.1.pep
RGGVKGFSGFFYEETRGVLKFFLEKVIRDAVPYIGHAGRKPVPPLEVVYALKRQGRPLLGLGG

SEQ ID NO: 255174 - protein, 75 aa, Zea mays
  Clone ID: MRT4577_164297C.1.pep
LTISYTGACITNLKLLIGYSLDLQKVSLHGHWRSFILEVVSFFSQSSSLVQLCLHGDTLLPLFRYGVELWHYFVP

SEQ ID NO: 255175 - protein, 43 aa, Zea mays
  Clone ID: MRT4577_164298C.1.pep
QIISPTTVPKTINHPRQQPPEQLHEHEEDPQHRPQRQNTLCHR

SEQ ID NO: 255176 - protein, 66 aa, Zea mays
  unsure (1)..(66): unsure at all Xaa locations
  Clone ID: MRT4577_164299C.1.pep
QLRQVDPQPRYQPFFGLVLQSILQHQPQSGQFLGLLSAQIAQHLTAMCGLQHPIPCPCAAGXGVPH

SEQ ID NO: 255177 - protein, 102 aa, Zea mays
  Clone ID: MRT4577_16429C.1.pep
IFPPSLFDVMLHLSVHLPDEAILRGPVQYGWMYPVERRLYTLKHSVRNMARPEGSIAEAYVANECLHTCSRYFDDLETRHNYEGRNREHVDMSKGDLSVFQH

SEQ ID NO: 255178 - protein, 97 aa, Zea mays
  Clone ID: MRT4577_1642C.1.pep
LLFLFFFFFFGGFFFFLGVFLLSLPLQKATQEMGDTDTAPHGEAGHKITQQSPLKNQTSHLGSKSTAPLHHYHSPYFPQKKTPPAVAFQGEGPACCN

SEQ ID NO: 255179 - protein, 224 aa, Zea mays
  Clone ID: MRT4577_164300C.1.pep
FYGKTFGFDTAVEEAQRAINSAYIEARSAYHGIGLVKLMGRSSGFIAMHASLSSGQIDVCLIPEVSFTLDGEHGVLRHLEHLLNTKGFCVVCVAEGAGQDLLQKSNATDASGNVILSDFGVHMQQKIKKHFKDIGVPADLKYIDPTYMVRACRANASDAILCTVLGQNAVHGAFAGFSGITSGVCNTHYVYLPITEVITTPKHVNPNSRMWHRCLTSTGQPDFH

SEQ ID NO: 255180 - protein, 91 aa, Zea mays
  Clone ID: MRT4577_164301C.1.pep
NCGPFFQIKVHPNNNLWQAGPRSLSLILQTAQPIYIIIISMVVDRCDQQLQGSHFHSAFKASRPFYQKHFVVQQTHKRAILPPHPHQRSGQ

SEQ ID NO: 255181 - protein, 80 aa, Zea mays
  unsure (1)..(80): unsure at all Xaa locations
  Clone ID: MRT4577_164302C.1.pep
SAAALXFFFFFFFFFFFFXEKKTHLDEKGRVRVPYKVLHSGYENSSYDKVRVYRKAKFPSHLNITDLLTNDWNLTQTHRG

SEQ ID NO: 255182 - protein, 58 aa, Zea mays
  unsure (1)..(58): unsure at all Xaa locations
  Clone ID: MRT4577_164303C.1.pep
GNXKGPRGCNPKKIGKHFFYRLEAGDPLFLYAPKPTSKAKGPLRSCFKKKGGKFFRPG

SEQ ID NO: 255183 - protein, 70 aa, Zea mays
  Clone ID: MRT4577_164304C.1.pep
QQAAAEQVQEDARSVSSFRARNQEPCVKRGSFFLFLLLCALVLLAVAGAERELCRLDDHGAALFRCNASI

SEQ ID NO: 255184 - protein, 85 aa, Zea mays
  Clone ID: MRT4577_164305C.1.pep
KTKVSQKARPLVLGLNMGEGNCRGPKNVKKKVLGCPPFGPQGYSPQKFFNFSKVGDGGFFKTANLRGVKPWQAFPTFLGNKPGAF

SEQ ID NO: 255185 - protein, 59 aa, Zea mays
  Clone ID: MRT4577_164306C.1.pep
HRRHLLYLTTQLKRRHKYVEPCSLTPGRLLKQPSTLPDLPIITLPHIPLRLFPKSNDHQ

SEQ ID NO: 255186 - protein, 88 aa, Zea mays
  Clone ID: MRT4577_164307C.1.pep
RSARKTRFMFRTFKPTLGKSRRVLAPPTVKSLKNTHNSIGRRALKRQGKNKAFPGGDRCRRWGSTHHKLLMVFLEPQGDYQSPDKKTL

SEQ ID NO: 255187 - protein, 158 aa, Zea mays
  Clone ID: MRT4577_164308C.1.pep
TRGTLVRIYNAAEGNLLQEVRRGADRAEIYSLAFSNDLQYLAVSGDKGTIHVFNLKINVGSTANDKPMPSPDPEVPHIRPSLSFIKGVLPKYFHSEWSVAQFRLQEGEHYIVAFGHEKNTVAVVGMDGSFYRCRFDPVNGGEMLQLDCYSFLKPSGQP

SEQ ID NO: 255188 - protein, 321 aa, Zea mays
  Clone ID: MRT4577_164309C.1.pep
MEVPEISPMSEYLSTHDVILSVDGLKITRTDDWIKILNQGTTAKSRDPEFLEGSHRYVATSSTKGYCVPDSWIDASKNLWQIRDKLPCPDELIAFEKVICNVSTILTEKTSIGSDQKEVEGKYCLIAKDVVKLRRCGNGWHMTEDDESSCACFEDEHCLVPVLNPGFSWIEVSYARPYSLRCLQKGGNLLSSHTANSNFGQSPCEGSFVYVGDLSSAARSVRLSRYRPRWALLLFIADIPYILENGLSSLLHASAALAVINCLPVYFLDGEAILETTLSYVAWFTPRLQRRILKVCSVVWTGLLVITFSSICYSTVLHYGV

SEQ ID NO: 255189 - protein, 223 aa, Zea mays
  unsure (1)..(223): unsure at all Xaa locations
  Clone ID: MRT4577_16430C.1.pep
ITFXQEDLQLKDYPHNDAMVISCVIKGFLVHNILVDTGSATDIIFSKAFRQMQEPDDKIHDATHPLYGFGGRQIVALGKITMPVTFGYVHNTRTEQVVFDIVGMEXPYNAIVGRGTLNAFEAILHPTYLCMKIPSEQGPIAIHGSQEAARKAEGNWTYSKAIPNIDRAEACEQSKYRREKAASADQPKPMLLCEDIAEQKVLLGFQLSEEQEKTLIMFLFSSK

SEQ ID NO: 255190 - protein, 255 aa, Zea mays
  Clone ID: MRT4577_164310C.1.pep
SHDQQQSASRTPLHRPQPQAQIPSHPTPPSRSLQPSPRPHSPATASTGCIQPPRRVTAGHLWPESKKPRRAAAGRRRAPVEQEQEEDFEADFEEFEVESGESELESEDEPKPKSFAAPSSALARGGLNTGAAGVDGPAANSVKRKRKNQFRGIRRRPWGKWAAEIRDPRKGVRVWLGTFNSPEEAARAYDAEARRIRGKKAKVNFPDEVPTAVSQKRRAAELASLKAPKMDVEEEKPIIKPAVNNMTNSNAYLYP

SEQ ID NO: 255191 - protein, 144 aa, Zea mays
  Clone ID: MRT4577_164311C.1.pep
SVQQLHSVEVIQPPHQVRRTSSTPPQTGSCGACRTDRWWMISPDTLLFIWCSRGMYYMETSSLVSMFLMSHPTLKLGGRRCPSTSSSVCHDSEFASGAGRARSAVCSIAPGARWGWVGFGSFAGVGTGKGRRRRGRESAEGPGR

SEQ ID NO: 255192 - protein, 364 aa, Zea mays
  Clone ID: MRT4577_164312C.1.pep
MCGGAILSDIIPPPPPRRVTAGHLWPESKKPRRAAAGRRRAPVEQEQEEDFEADFEEFEVESGESELESEDEPKPKPFAAPSSALARGGLNTGAAGVDGPAANSVKRKRKNQFRGIRRRPWGKWAAEIRDPRKGVRVWLGTFNSPEEAARAYDAEARRIRGKKAKVNFPDEVPTAVSQKRRAAGLASLKAPKMDVEEEKPIIKPAVNNMTNSNAYHYPAVVGHNIIPEPFMQTQNMPFAPLVNYAALVNLSSDQGSNSFGCSDFSLENDSRTPDITSVPAPVATLAAVGESAFVQNTAGHAVAPPATGNAGVDLAELEPYMNFLMDGGSDGSISTLLSCDGSQDVVSNMDLWSFDDMPMSAGFY

SEQ ID NO: 255193 - protein, 123 aa, Zea mays
  unsure (1)..(123): unsure at all Xaa locations
  Clone ID: MRT4577_164313C.1.pep
IIYCISYFFYFFFLYYYYFIYIIIFFIFVLFFYLFLCLYILFFNYFYYCFILFFYLYFLFFYYIYHYYLYLYYFLFLFFLSFLXYLFNFFLYFFFXFCYYLVKFTFGIVIPSFILLFMFSPVN

SEQ ID NO: 255194 - protein, 363 aa, Zea mays
  Clone ID: MRT4577_164314C.1.pep
MCGGAILSDIIPPPPPRRVTAGHLWPESKKPRRAASGRRGAPVEQHEQEEDFEADFEEFEVESGESELESEAEPKPFAAPRSALARGGLNTGAAGVDGPAANSVKRKRKNQFRGIRRRPWGKWAAEIRDPRKGVRVWLGTFNSPEEAARAYDAEARRIRGKKAKVNFPDEVPTAVSQKRRAAGPASLKAPKMDVEEEKPIIKLAVNNMTNSNAYHYPAVVGHNIIPEPFMQTQNMPFAPLVNYAALVNLSSDQGSNSFGCSDFSLENDSRTPDITSVPAPVATLAAVGESVFVQNTAGHAVASPATGNTGVDLAELEPYMNFLMDGGSDDSISTLLSCDGSQDVVSNMDLWSFEDMPMSAGFY

SEQ ID NO: 255195 - protein, 135 aa, Zea mays
  Clone ID: MRT4577_164315C.1.pep
MSSSRRSSSPDSNDTTDERKRKRMLSNRESARRSRARKQQRLEELVAEVARLQAENAATQARTAALERDLGRVDGDNAVLRARHAELAGRLQSLGGVLEVLQMAGAAVDIPEMVTDDPMLRPWQPSFPPMQPIGF

SEQ ID NO: 255196 - protein, 365 aa, Zea mays
  Clone ID: MRT4577_164316C.1.pep
MCGGAILSDIIPPPPPRRVTAGHLWPESKKPRRAAAGRRRAPVEQEQEEDFEADFEEFEVESGESELESEDEPKPKPFAAPSSALARGGLNTGAAGVDGPAANSVKRKRKNQFRGIRRRPWGKWAAEIRDPRKGVRVWLGTFNSPEEAARAYDAEARRIRGKKAKVNFPDEVPTAVSQKRRAAGLASLKAPKMDVEEEKPIIKLAVNNMTNSNAYHYPAVVGHHNIIPEPFMQTQNMPFAPLVNYAALVNLSSDQGSNSFGCSDFSLENDSRTPDITSVPAPVATLAAVGESAFVQNTAGHAVAPPATGNTGVDLAELEPYMDFLMDGGSDDSISTLLSCDGSQDVVSNMDLWSFDDMPMSAGFY

SEQ ID NO: 255197 - protein, 73 aa, Zea mays
  Clone ID: MRT4577_164317C.1.pep
PPLPPLLALGTQATPAVVRLGLRATASVSSPPTSRQSPRALASGPPCTSRLLCAELILPFNRDSDGHSYHTQH

SEQ ID NO: 255198 - protein, 135 aa, Zea mays
  Clone ID: MRT4577_164318C.1.pep
MSSSRRSSSPDSNDTTDERKRKRMLSNRESARRSRARKQQRLEELVAEVARLQAENAATQARTAALERDLGRVDGDNAVLRARHAELAGRLQSLGGVLEVLQMAGAAVDIPGGVTDDPMLRPWQPSFPPMQPIGF

SEQ ID NO: 255199 - protein, 685 aa, Zea mays
  Clone ID: MRT4577_164319C.1.pep
METVGPSRRAGRDTRARRALRRECLCFRAESLRLREIEVMMALQAQGTRVPLVLALFLLLAGCGSEAQPLVPALFTFGDSSVDVGNNDYLHTIIKANFPPYGRDFANHVATGRFCNGKLATDITADTLGFTTYPAAYLSPQASGQNLLIGANFASAGSGYYDHTALMYHAIPLSQQLEYFREYQTKLAGGGRRRAGALHPQRRAVHRQCRRQRLRAELLHKPAAVQDADGRPVLRPPRGHLRPHRAGALRHGGRPRGRAGSPTHSAIPHHAEAERPTQNPTPPPATASSDSLPTPPHPTVPLTPAQPASPQPSDSGHRRHPAMCGGAILSDIIPPPPPRRVTAGHLWPESKKPRRAASGRRGAPVEQHEQEEDFEADFEEFEVESGESELESEDEPKPFAAPRSALARGGLNTGAAGVDGPAANSVKRKRKNQFRGIRRRPWGKWAAEIRDPRKGVRVWLGTFNSPEEAARAYDAEARRIRGKKAKVNFPDEVPTAVSQKRRAAGPASLKAPKMDVEEEKPIIKLAVNNMTNSNAYHYPAVVGHNIIPEPFMQTQNMPFAPLVNYAALVNLSSDQGSNSFGCSDFSLENDSRTPDITSVPAPVATLAAVGESVFVQNTAGHAVAPPATGNTGVDLAELEPYMNFLMDGGSDDSISTLLSCDGSQDVVSNMDLWSFEDMPMSAGFY

SEQ ID NO: 255200 - protein, 102 aa, Zea mays
  unsure (1)..(102): unsure at all Xaa locations
  Clone ID: MRT4577_16431C.1.pep
RYEIIKGICEGLQYIHRDRXFHLDLKPANILLDENMVPKITDFGLSRCFEEKQSQASYHFKTIRIYESWYQALIDEHRLQTFFSWYLGEPCCPAASDLVWRG

SEQ ID NO: 255201 - protein, 59 aa, Zea mays
  unsure (1)..(59): unsure at all Xaa locations
  Clone ID: MRT4577_164320C.1.pep
PSAHGXPAGDTGNPXCRHFXVHHSPQTLGGRRDXEAAVVGEGAPLGSGAARRLGFLFXR

SEQ ID NO: 255202 - protein, 77 aa, Zea mays
  Clone ID: MRT4577_164321C.1.pep
RVDDHFFALIFTPVLTLETFEHLGLLVQFSEGTYLSQAATFFANSDPDMPAVPVPAAQVLDWMSQNIAFSLEYSSER

SEQ ID NO: 255203 - protein, 84 aa, Zea mays
  Clone ID: MRT4577_164322C.1.pep
GRFFFFFFVRDQDSLLFFFFLGSFFFFFFLYIGIFDFISKIRYYNSKQDITTTNTSFPMAKFITLTRSKFITLTRRANHDKDDL

SEQ ID NO: 255204 - protein, 135 aa, Zea mays; identical to SEQ ID NO: 255195
  Clone ID: MRT4577_164323C.1.pep

SEQ ID NO: 255205 - protein, 368 aa, Zea mays
  unsure (1)..(368): unsure at all Xaa locations
  Clone ID: MRT4577_164324C.1.pep
VDAILQKEVQVIYSKLQDIIGTPSGNALKKYLDGFQWVYVGDRFVAPQALAFDSPVKYHPYLYTVPSELSEFKKLLSELGVRQTFDAMDYLNALRRLEGNVKGEPLSTDQLSFVHCVLEAFVDCYPDSQAPDVLLNSLAIPDSLGVLTPARNLVYNDAPWMNANPTSKNFIHLSIGNELANRLGVRSLRGSSLLDDELMRNLPCMEYAKISELLALYGESDFLLFDLIELADYCNAKKVHLIYDKREHPKQSLLQQSLGDLQGSSLTVVFEGTIMNREEVCSFQLPPPWKLRGNILNYGLGLLSSYFVCDALTILSGGYFYIFDPLGLTGGTTSTATSSARYFSLLGXNIITQFICISNRITSSTVNT

SEQ ID NO: 255206 - protein, 58 aa, Zea mays
  Clone ID: MRT4577_164325C.1.pep
SGQSVYAEEESRGISIVGRVEERGGSVVGSLVPFLMYLLVLCSNGGGKKQLGGCIYLV

SEQ ID NO: 255207 - protein, 125 aa, Zea mays
  Clone ID: MRT4577_164326C.1.pep
NGCCWCCFSTPPLGRRAFSFLPWTTPAFFHSCSSSWIMSCACLDEQACGVRGLKLFFTGWLFSCRFGWPPARLAAISFCVLVETCCFCCPVSSAFSSQICLYVLVLLLRVGLRPAISHKTFYVLF

SEQ ID NO: 255208 - protein, 91 aa, Zea mays
  Clone ID: MRT4577_164327C.1.pep
SFMQFITEKNNYLLSFLVFYCELVMHQLHHQRPVASPETSVFTFLWLKSRCDEDVVTVHVSSTSLSCRHGYYLHQHYVFFSNTQESCVSLY

SEQ ID NO: 255209 - protein, 74 aa, Zea mays
  Clone ID: MRT4577_164328C.1.pep
AAAEETKKSTHVPRKLEKPKEGRTLAPPIEEQFGSGRLLACISSRPGQCGRADGSILEGKKLEFSMKKLQRKKG

SEQ ID NO: 255210 - protein, 111 aa, Zea mays
  unsure (1)..(111): unsure at all Xaa locations
  Clone ID: MRT4577_164329C.1.pep
IXRNLHGSEVCHARLHAACGAWRNHEAAPVLPSPAAVRVADAGAECVQRVGAASSSCRVKNRAARRSSLKTSAHLQNSCCWSSLLLCRMYWSAARGGFPTLLLVHTTSDCG

SEQ ID NO: 255211 - protein, 111 aa, Zea mays
  unsure (1)..(111): unsure at all Xaa locations
  Clone ID: MRT4577_16432C.1.pep
KTGKILETLKKWEGVKIMENVFPFFQWPKLXRIPVSFYNFFKNLPGVSPKKLGPKNAFFPKTPNPMGERNNFXKGHGAQKEKFGSLHFSPKAFKNCLEGGFYSFKFSLGNP

SEQ ID NO: 255212 - protein, 66 aa, Zea mays
  Clone ID: MRT4577_164330C.1.pep
VQHSLQLGHPNYSMHQHETGAVMLHLVRVLAKAWSTCGLLAHTNPLAQKTLNGRHKGSYSRDSFLP

SEQ ID NO: 255213 - protein, 579 aa, Zea mays
  Clone ID: MRT4577_164331C.1.pep
ELTKYDVVLTTYSIVSMEVPKQSNPDSDGEEKGKPDPYGAPVSSSGSKKRKASSSKKTKNKSVAESCLPEKPLAKVAWFRVILDEAQSIKNYRTQVARACWGLRAKRRWCLSGTPIQNAVEDLYSYFRFLRYNPYAVYKQFCTLIKIPISRNPNNGYKKLQAVLKPVMLRRTKATMLDGEPIISLPPKTVSLKTVDFTSEERGFYNTLEVESREQFKEYAAAGTVKQNYVNILLMLLRLRQACDHPHLVRGYDSCSSWMSSLEMVKKLPMERQHKLLICLQSCSAFCALCNDAPEDPVVTLCGHVFCNQCILEQLTGDDSVCPVSNCRVRLNTSSLFSRGTLECSLSKLASDFKSDDTCMEMIHAEKRPGMDSSYASSKLRAALDILLSLPKIDPTIDSKCSIGIESEKFDGKGISEQTDTKLTEKAIVFSQWTRMLDLLEVHLKASHVTYRRLDGTMSVAARDKAVNDFNMVPEVTVMIMSLKAASLGLNMVAACHVLMLDLWWNPTTEDQAVDRAHRIGQKRPVTVSRLTIKDTVEDRILALQEKKREMVASAFGEDKSGSRQTRLTVEDLNYLFMV

SEQ ID NO: 255214 - protein, 83 aa, Zea mays
  Clone ID: MRT4577_164332C.1.pep
KCAWHYKRAPFLQESHFPQAEHPFFDAPEGLRLLHFSIKPALLIISPSAPALNFSCCDPKCAPFLHHRLVVFNNKAHPVHMTL

SEQ ID NO: 255215 - protein, 85 aa, Zea mays
  Clone ID: MRT4577_164333C.1.pep
PLHTPHRPPAEAPSGPHAPARALLRLPTRSHGPANSNRPRRESDRRPQGPADGQETEWLLPQPPSRQFSERAPTTTTPLCPGSRL

SEQ ID NO: 255216 - protein, 118 aa, Zea mays
  Clone ID: MRT4577_164334C.1.pep
WQRDGGGGEERWVVRCCVPGGGGGSAWDDEERREKAVDAESSSEQSIKQDEQLVVVEAEQAEQNIKDVVVEVEVEQAGDVDDVDDDGSGNVDDPAHSHSDSWDSDSSSDLFDLDLEHR

SEQ ID NO: 255217 - protein, 57 aa, Zea mays
  Clone ID: MRT4577_164335C.1.pep
STMCTNPESYIAMPHYPHSPIPTSLPTRAELKSVCCGPLHRPKLMEIEAQPGTQQGR

SEQ ID NO: 255218 - protein, 141 aa, Zea mays
  Clone ID: MRT4577_164336C.1.pep
AQTSHRCDLSLHEWTLYVPHWQPKSLQFHGHVARQLLEARGESDMFCALNCTRLRARARRCVYIGIHGGQILDRSAAARSAQGCGAYSVIATVVESHTSFILFRRVSIHHILQRGAEVHCPGRRRLSRRGVGCLAELPLGR

SEQ ID NO: 255219 - protein, 55 aa, Zea mays
  Clone ID: MRT4577_164337C.1.pep
LGHPFEWSKSFIKAWFSHPKKKMLQSYINKEFFKVLFPVLQGTQDPPENLNPPFF

SEQ ID NO: 255220 - protein, 48 aa, Zea mays
  Clone ID: MRT4577_164338C.1.pep
FSLFLGRLRLSVLFIAIAHTYGEEHSPKENALSGLRTHVWRRIPSMRG

SEQ ID NO: 255221 - protein, 86 aa, Zea mays
  Clone ID: MRT4577_164339C.1.pep
VRMSLYRIIYELSPFSFSGLFSNFWGGHLGDLSDPETFDYLQHAQARHGGQQAATSWFLLVHPSHTSLFLFLILVVCLPKKESIQQ

SEQ ID NO: 255222 - protein, 474 aa, Zea mays
  unsure (1)..(474): unsure at all Xaa locations
  Clone ID: MRT4577_16433C.1.pep
TRWYYVFKVVLIRRLGGWQVSDPSSLPPQPVQSLGTSRPAXTTVVSEWALKCAGPALVSLPASSFFAGCLAGGFLLTTLADSLLGRRKMLLTSLVSMSVAGVLTAFAPNVWAYAALRFVCGFGRSMVGTCTLVLSTELVGKRWRETVSMAGFIFFTVGFLSLPALGYTLREASWRNMYLWTSVPSLCYSVLLYFLAQESPRWLLVRGRKQDAMETLRQIASLNGNSITSSFSMLHACNMQEDDGAAGGAAGVFSTMRAMWERPWALRRLAAIMTASFGVGMVYYGMPLNVGSLGTNLYLSVTYNALAELPSAILSLIFIGRVNRRSSVVALTVAAGAFSLACVVIPEGSAARMAAELLSFFSTITAFNLILIYSIELFPTSVRNSAVGLVRQALVLGGVVAPVLVALGRERSFWSFGVFGLCIGCLGLFAACLPETRGRSMSDTMEEEEHKEAAAAACTGATDIATKDDTDLLV

SEQ ID NO: 255223 - protein, 105 aa, Zea mays
  Clone ID: MRT4577_164340C.1.pep
KRFAFNFQVGILDHFFFLLWNDLKAKMADFIFFFEALDMPARLHSPFFLGTFGFLALEWDPFFLSGFLFFFLSWASQRWGGFFQLVFDLFPKVGWCLFISGNPTP

SEQ ID NO: 255224 - protein, 61 aa, Zea mays
  Clone ID: MRT4577_164341C.1.pep
PRVRFEHSYTHHAKHISNGLGTMATMILSLLALLALFASATHAIIIPHCSLASIYGIPQTV

SEQ ID NO: 255225 - protein, 123 aa, Zea mays
  unsure (1)..(123): unsure at all Xaa locations
  Clone ID: MRT4577_164342C.1.pep
MDKCSANNVGSGNVHKADMVMNGLPISVYALETLGCAAATSTDXLMSKMLERIGDSPLIRFDTYTCGVCAVSCTLKWDVATVMEYKGLPLQQVVDYYVRGTMENIRRQLLSIISQYKLFTNLY

SEQ ID NO: 255226 - protein, 88 aa, Zea mays
  Clone ID: MRT4577_164343C.1.pep
MLIINKMTYLNVLYRFIAPTPWFPGALMTCSTNSTKFSGAVAVPNTPLMSLHCKSFLESILCHSYLFFFQYLMVLWIFILLLEVLFLY

SEQ ID NO: 255227 - protein, 152 aa, Zea mays
  unsure (1)..(152): unsure at all Xaa locations
  Clone ID: MRT4577_164344C.1.pep
MLKLVKETSXSNILFDYLIPPMGMDKCSXMDKCSANNVGSGNVHKADMVMNGLPISVYALEXVGCAAATSTDXLMSKMLERIGDSPLIRFDTYTCGVCAVSCMFKWDVSTIMEYKGLPLQQAVDCYVRDTLQNIRRQLLSIISQYKLFINLY

SEQ ID NO: 255228 - protein, 143 aa, Zea mays
  unsure (1)..(143): unsure at all Xaa locations
  Clone ID: MRT4577_164345C.1.pep
MLKLVTEASXGNILFDYLIPPIGMDKCSTNRXCSTNNVGSDNIHKAGMVMNRLPISVYTLEXVGCAATTSTDGXMSKMLGRIEDSPLIRFDTYTCGVCAVSCMFKWDVSTIMEYKGLPLQQAVDCYVRDTLQISETLLSILAI

SEQ ID NO: 255229 - protein, 96 aa, Zea mays
  Clone ID: MRT4577_164346C.1.pep
VSHRHSCTYLSGPLKSHSGTEVTQLLPVARWMPSTKWSFFTLSQLSSTEAHPYGPSQRSQVSVRKRNSQVLISGGSDGQSDPCLGGRSSETVCGGK

SEQ ID NO: 255230 - protein, 93 aa, Zea mays
  Clone ID: MRT4577_164347C.1.pep
KAPRHHKQRHYNTTKTKLPPQQGKKTNFFPRKLQGGNQENPRGGHLKQWGGGIRVYTTKGGNQTQFNRTNRTGYGTWKKGTRLKAKTGQGRPP

SEQ ID NO: 255231 - protein, 52 aa, Zea mays
  Clone ID: MRT4577_164348C.1.pep
EISKITLVARSILPEVTVPAYFNDSQRQATNDARSRSLALNSARKSSIEPTA

SEQ ID NO: 255232 - protein, 128 aa, Zea mays
  unsure (1)..(128): unsure at all Xaa locations
  Clone ID: MRT4577_164349C.1.pep
MGMEKKKSSSLAYLHXAGAHAMLVQGLLATANVERVAEAHVRVYEELSGTAGGRYICYDHVVRRGEEFAELQRQLGLXSPRPRRPTAMAAXDDDGRAPRFQLCNRKLAALMSARRRCTYDAYFPMPQE

SEQ ID NO: 255233 - protein, 508 aa, Zea mays
  unsure (1)..(508): unsure at all Xaa locations
  Clone ID: MRT4577_16434C.1.pep
MLKNLTFVSTFASGILAPKGYIWPHSPDNYLQQYTSVVDDAHKAGLEIYAADFANDFVVSYNHSYDPLAEYLSFIDNDVFSVDGVLTDFPITASEAIGCFTNLNKSNTDHGKPLIISHNGASGDYPGCTDLAYQKAVDDGADVIDCPVQVTKDGIPICMSSIDLMNDTTVARSQFISQTATIKDIQIAQGVFTFNLTWDDIVNNLQPKISTPWYSFRLDRNPRYRNAGKFMRLSDFLDFTKDKDLYGIMISVEHAAFMAGELGFDMVDKVIKALDDXGYHDQTAQKVMVQSTDSSVLEKFKEQTKYDLVYMVNKKVGDAASSSLVDIKRFASAVSVDTGSVFPETHYFTVYETNLVQTLQTAGLSVYVYTLMNEFLSQPYDFFSDATAQINAYVKGALVDGLITDFPATARRYKVNSCMNMGNSTPNFMAPARPGDLMQSISKSAQPPALAPVPPLTGSDVAEPPLPPARSNSSTAPTQSLASRTRACAAHIPALASLAMLCAWLSLV

SEQ ID NO: 255234 - protein, 42 aa, Zea mays
  unsure (1)..(42): unsure at all Xaa locations
  Clone ID: MRT4577_164350C.1.pep
TKHNAAISTLADQHSQIKCSAHIIKCNSXIRTXPLSLTTSGE

SEQ ID NO: 255235 - protein, 68 aa, Zea mays
  Clone ID: MRT4577_164351C.1.pep
HKVTANKFAIYHKHRSSMADTVQLRRPAATTSNINADIVRTSTLQSASLPKQEYLTITFKIYTLRKRD

SEQ ID NO: 255236 - protein, 127 aa, Zea mays
  Clone ID: MRT4577_164352C.1.pep
MASSSSAGEGARQNTAADKDKLVTVLSIDGGGVRGIIPATILAFLGEEFKKLDGPEARIADYFDVIAGTSTGGLLTVMLTAPDKDGRPLFDAKELAQFYIDESPKIFPQKNSFFGKIATALSMVRGP

SEQ ID NO: 255237 - protein, 37 aa, Zea mays
  unsure (1)..(37): unsure at all Xaa locations
  Clone ID: MRT4577_164354C.1.pep
VGQXRFEAXFXQDVGGLDVPVHDASVAVVVEVRQPLR

SEQ ID NO: 255238 - protein, 171 aa, Zea mays
  unsure (1)..(171): unsure at all Xaa locations
  Clone ID: MRT4577_164355C.1.pep
MAAKRELVVSFGEMLIDFVPTVAGVSLAEAPAFVKAPGGAPANVAIAVARLGGGAAFVGKLGDDEFGRMLAKILRDNGVDAGGVVFDSGARTALAFVTLRADGEREFMFYRNPSADMLLTADELKVDVIKRAAVFHYGSISLIAEPCRTAHLHAMKVAKERXRLLSYEPNL

SEQ ID NO: 255239 - protein, 127 aa, Zea mays
  unsure (1)..(127): unsure at all Xaa locations
  Clone ID: MRT4577_164356C.1.pep
ASSSATNEKSHIXIAXIGHXDSGKXTTTGHLIYXLGRIDXRXIXRXEKEAAEMNKXXFTYARALDKLXAEREXXITIDIAPXKFETTTYYCTVIDAPGHRDFIKNTITGTSQADCADLIIDSTTGGF

SEQ ID NO: 255240 - protein, 133 aa, Zea mays
  Clone ID: MRT4577_164357C.1.pep
MAAGRELVVSFGEMLIDFVPTVAGVSLAEAPAFLKAPGGAPANVAIAVSRLGGGAAFVGKLGDDEFGRMLAAILRDNGVDDGGVVFDSGARTALAFVTLRADGEREFMFYRNPSADMLLTADELNVELIKRVS

SEQ ID NO: 255241 - protein, 557 aa, Zea mays
  Clone ID: MRT4577_164358C.1.pep
MAPSNIVVQSSSTPPVAGGDEEFAPSVWGDFFVTYAPPVSQASEQRMSERAELLKAQVRQAFDAASMDVAGLITYVDTLERLGLDNHFRDLIGAALERIGAEELPEHGGGLHIVALRFRLLRQHGIWVSTDVFDAFREDAGGFCSSLCSDDPRGLLSLYNAAHMAVPGEVVLDDAIAFARGRLLDIISKGEVRSPVSEQITRALDIPLPRFTRRLETMHYIAEYEHEEAHDGLLLELARLNFVLVRALHLRELKDLSLWWRELYNTVKLPYARDRMVEIYFWTCGMLHEEEYSLARMFFAKTFGMVSLMDDTFDVHATLDECHKLKEAMQRWDESEVSILPEYLRLLYIKTLSNFKEFEEILEPNKKYRMAYTKEAYKLCSKNYLKEAIWSNQKYQPSFKEHEELSIMTSGLPMLTILTLMGFGDEATPEAFEWVSSVPEMVRAGSQVTRFLNDLSSYKLGKNKKDMPGSVETYMVENGLTGDEAAAAIAALLENRWRILNQTRMEIDHTLLPAAQVVLNMARANEIIYLHGRDAYTFGADLKDLVTTLFLKQVLPL

SEQ ID NO: 255242 - protein, 79 aa, Zea mays
  Clone ID: MRT4577_164359C.1.pep
EIRFFSFFKKFLWSPPLLFLDNKIFFLFSPFFFPPPPPPPPTPLLGAPFFFFFFFFFPKPPFFFFFLPPPKKKVPFSFF

SEQ ID NO: 255243 - protein, 84 aa, Zea mays
  unsure (1)..(84): unsure at all Xaa locations
  Clone ID: MRT4577_16435C.1.pep
NPNFSVTXQTLXKIKKDSLKTDSFSLTNHQFSTESNNQNTYLNYPQKIKKKPKKPASEIKNPSTLQLNPEPNLQTHQLIKKKHS

SEQ ID NO: 255244 - protein, 236 aa, Zea mays
  unsure (1)..(236): unsure at all Xaa locations
  Clone ID: MRT4577_164360C.1.pep
MFRNQYDTDVTTWSPQGRLFQVEYAMEAVKQGSACVGLRSATHAVLAAANKSANELSSHQRKVFRVADHAGVALAGLTADGRVLSRFLRNECINHAFVYDAPLPVSRLALRLADKAQVCTQRSWKRPYGVGLLVAGLDESGAHLYYNCPSGNYFEYQAFAIGSRSQAAKTYLERRFEKFNAYTPDELIKDALSAIKETLQGEKLTSSNCTIAIVGRXEDGTVEPFSMIDSKRIQEI

SEQ ID NO: 255245 - protein, 132 aa, Zea mays
  unsure (1)..(132): unsure at all Xaa locations
  Clone ID: MRT4577_164361C.1.pep
NDHPNLIIKNQDLDDNRKQPPPPRLGKRGPQXPGGPKXKPPRRPPGSGTASPSPEGGKRTPATPPGRGPSTPRFPPPGGXEPRVRGGXMGNPPPPGXRGGLGPPPGXGPEEKGPPLEGGPQHPPPGGPTPGP

SEQ ID NO: 255246 - protein, 79 aa, Zea mays
  Clone ID: MRT4577_164362C.1.pep
MYRRNPGRRPSEHLVSKLRRHEALQRRCGPGTAAYSSALEQLKSGKNTGVSPADPECRYLVSISYRGLGNRILAAASAF

SEQ ID NO: 255247 - protein, 29 aa, Zea mays
  Clone ID: MRT4577_164363C.1.pep
THTSQSSPKITLFLSRFLTKQINHTTPFN

SEQ ID NO: 255248 - protein, 85 aa, Zea mays
  Clone ID: MRT4577_164364C.1.pep
WACPRGALPPGGAVLCIPLLVEGGHALPPLNRVGRDAVRSWVCMRPFSYSLYPSIGFLGRSRISCSYQYQSFGVYYFPFFKTLFS

SEQ ID NO: 255249 - protein, 69 aa, Zea mays
  Clone ID: MRT4577_164365C.1.pep
GWCLLCFFFFFFFFFFLVPSFVASVSYSMADPVACSRWSPGFVRGLALVLSDEIWGAPVSFPVFPLRPL

SEQ ID NO: 255250 - protein, 108 aa, Zea mays
  unsure (1)..(108): unsure at all Xaa locations
  Clone ID: MRT4577_164366C.1.pep
FIQCNAELLXFKISQTTFGAEFSLAKARILLEVSCIKPMALSASFIGEFVLVNSVVEGHQLELDLWRSTYAGKYERGSLGVHRLESDELDPKTSIHYDKSWITNANYR

SEQ ID NO: 255251 - protein, 341 aa, Zea mays
  Clone ID: MRT4577_164367C.1.pep
ARESVKIEHEKKLSTLQSLEYKGRDSAKLDKTKASINKLQSLIVVTSQAATTTSSAIVRVRDNELAPQLVQLCFALLGMWRSMNHFHEIQNEIVQQVRGLVDSSMAESTSDLHRLATRDLEAAVAAWHSNFDRLIKYQRDYIRSLYGWLKLTLCQVDSCVPQGAHASMISRELTSFCDEWKQALDRLPDAVASEAIKSFVNVVHVIYAKQAEEMKVKKRAEAYSKELEKKTNSLRSVEKKYYQSYSMVGLGLPGSGGHGGIDSHAYDARDPLAEKKTEIAQCRRKVEDEMARHAKAIEVTRSMTLNNIQTGLPGIFQAIAGFSGTVVEALDVVCRRAGSVR

SEQ ID NO: 255252 - protein, 94 aa, Zea mays
  Clone ID: MRT4577_164368C.1.pep
STVTFLGITSGQHAVSVLVSMLMMNSRLHSVRCIYPVHSSSGAPAGSPRYLYHRQPRLQHSAGVEARLWHQPGSSGLTLVGIEMQIAPPSDQGM

SEQ ID NO: 255253 - protein, 95 aa, Zea mays
  Clone ID: MRT4577_164369C.1.pep
ALCFWVLSPPVFSRVVVAPGFWPSPPFFFPPYQCPFFNLTGPIFLGFFSLLLVQLLYACPCEKALRGFATSPPPPFQSLPFSVRCFLAFLKAFFF

SEQ ID NO: 255254 - protein, 65 aa, Zea mays
  Clone ID: MRT4577_16436C.1.pep
KKSFSRKILVRVFLKSNGGFCMSTGVITPKKLFGTRFLSWVTLFKLNEAQWQMVQKKKKKKQKKP

SEQ ID NO: 255255 - protein, 174 aa, Zea mays
  Clone ID: MRT4577_164370C.1.pep
MERMVMRLVRNKQSLRQLQGAAAGGLASSSSASSTAGAAASSFSTLQQQQEDHPGVLNIRDTAAHLIGRTPLVYLNKVTEGCGTRVAAKLEFLQPSFSVKDRPAISMIEDAEKKGLITPGKTTLIEPTSGNMGIGLAFMAALKGYELVLTMPSYTSLERRVVMKAFGAQLVLTD

SEQ ID NO: 255256 - protein, 65 aa, Zea mays
  Clone ID: MRT4577_164371C.1.pep
FISFFFFFFFFFFFFFFFFFFFFFFFATWPKGGFKKGGSFLIPSPWGGPFFNELPPTVFHGLSPN

SEQ ID NO: 255257 - protein, 82 aa, Zea mays
  Clone ID: MRT4577_164372C.1.pep
TVEHEVSNSAQILVNQLHMYNTHRSSPNVLNLLHMCTIRAFSSISNLYPTVASLYCNEQCCTIVAIGDHRIHIRHGSMYRIC

SEQ ID NO: 255258 - protein, 74 aa, Zea mays
  Clone ID: MRT4577_164373C.1.pep
VSVAARTGGKGRGRGAMEGGRGIKGEGGASRRRGESGGGGRDWGRAGGSRARQGCGPSWDELVRDSQRVRGRVG

SEQ ID NO: 255259 - protein, 73 aa, Zea mays
  Clone ID: MRT4577_164374C.1.pep
NLISIKTMRSNRGNVGLSGTIHVIGEYHRRIILHELTNRTLEVLQLAKEKIDCTLDTLYVLIHFPDGWVDPKI

SEQ ID NO: 255260 - protein, 84 aa, Zea mays
  Clone ID: MRT4577_164375C.1.pep
FGTGERTSLSFFFFFFFFFFFFFFFFFFFFGRGSGFISPKKKEKARHHRDPGAKNTTILPLRPIKLDPTHQGRTGPDPIYRGGR

SEQ ID NO: 255261 - protein, 163 aa, Zea mays
  Clone ID: MRT4577_164376C.1.pep
MQEEKRAIVASAVEPVQHVPRAGSEINVAGPSVGSETNVDGLMLDQEACEVQSPPSVTSVYRSGKKRKKSQVASVLDDYLEHKKKQTQKIMEVLLEKKSREEEYSIERCLDTVDVMEELTDEEKALAAEVFKNELNREMFVMQKNVNVRLIWLRRKISRIAST

SEQ ID NO: 255262 - protein, 125 aa, Zea mays
  Clone ID: MRT4577_164377C.1.pep
TASSLITSSWEEEARRFLLEEEEEDDELFLALVPAILSAMQEEKRAIVASAVEPVQHVPRAGSEINVAGPSVGSETNVDGLMLDQEACEVQSPPSVTSVYRKWEKAGEKSSCQCSWMTIWSTRRS

SEQ ID NO: 255263 - protein, 46 aa, Zea mays
  Clone ID: MRT4577_164378C.1.pep
GVNLLPSNSSSNESSYANSILSINDLPTEAAFQYLAKVQIGAGKKA

SEQ ID NO: 255264 - protein, 533 aa, Zea mays
  Clone ID: MRT4577_164379C.1.pep
MNLLEELIRAIELWLRIVKEQVPLIDPTLDPVLLVPGIAGSILEAVDDEGNKERVWVRILAAEHEFREKLWSKFDASTGKTVSVNEKTRITVPEDRYGLYAIDTLDPDMIIGDDTVYYYHDMIVEMIKWGYQEGKTLFGFGYDFRQSNRLSETLDRFSKKLESVYTASGGKKINLITHSMGGLLVKCFISLHSDIFEKYVKSWIAIAAPFQGAPGYITTSLLNGMSFVEGWESRFFISKWCMQQLLLECPSIYELLANPNFQWKDIPLLQIWRENLDNSGKKSALLESYEPEEAIKMIKEALSSNEIIADGMHIPVPLNLDILNWAKETYDLLCSTKLPESVKFYNIYGIDYDTPHTVCYGSEQQPVSSLSSLLYAQGKYVYVDGDGSVPAESAKADGFNAVARVGVAADHRGIVCSRRVFRIVQHWLHAGEPDPFYDPLSDYVILPTLYEIEKHREKHGDVTSVAEDWEIISPNDGKTMRPGELPPMVSTLTTSREGKEGALEEAQATVVVHPEKKGRQHVQVRAVGVSHGG

SEQ ID NO: 255265 - protein, 31 aa, Zea mays
  Clone ID: MRT4577_16437C.1.pep
SQGFSNFKVVKPRPINLIHPPPIKKLLRRKQ

SEQ ID NO: 255266 - protein, 69 aa, Zea mays
  unsure (1)..(69): unsure at all Xaa locations
  Clone ID: MRT4577_164380C.1.pep
PAAARRWSGCNPNCQHSSXCLGRLVGRLRRLPSQLPGWNRPEWAKKIGLNPLPFFLIFCNYNQTNIVFI

SEQ ID NO: 255267 - protein, 93 aa, Zea mays
  Clone ID: MRT4577_164381C.1.pep
RRRCCCRVHSNGGFRGYSYDPCVFQTFSSEIQVEGGLALPTTGPWSRLLTNTKAGSSVPHSRFSVRCSKLGHHCPMPLWFARGWYAFCFWLLP

SEQ ID NO: 255268 - protein, 358 aa, Zea mays
  unsure (1)..(358): unsure at all Xaa locations
  Clone ID: MRT4577_164382C.1.pep
DRYGLYAIDTLDPDMIIGDDTVYYYHDMIVEMIKWGYQEGKTLFGFGYDFRQSNRLSETLDRFSKKLESVYTASGGKKINLITHSMGGLLVKCFISLHSDXYLKNMSRVGSQLLHHXQGAPGYITTSLLNGMSFVEGWESRFFISKWEXENLDNSGKKSALLESYEPEEAIKMIISVHKWLXTDAMNVLINMCFPLYSIVHTGIENMXTIPCELLIYVCLWQLWQXQHPVSSLSSLLYAQGKYVYVDGDGSVPAESAXLXHWRFTFITIWAFEAKLCREEVREMFSFSFSQADGFNAVARVGVAADHRGIVCSRRVFRIVQHWLHAGEPDPFYDPLSDYVILPTLYEIEKHREKHDVT

SEQ ID NO: 255269 - protein, 194 aa, Zea mays
  Clone ID: MRT4577_164383C.1.pep
AASRRPGFGKKKKKKKKKKKKKKKKKKKKKKKKKKKKKKKKKKKKKKKRGEQKGGTPKRGLIKRLRGAGGGGGGALNKGKQKHSPQRGAQFGHFGRVGGEPREKFSVAGARNFGVGVGVGVFFPGGGAQEPPPRPRKKGQGEAPVVWGTQGNGGKKAPEPRGSPAGVVRFARPETPPEGMERTLYPYLLQGAPV

SEQ ID NO: 255270 - protein, 238 aa, Zea mays
  unsure (1)..(238): unsure at all Xaa locations
  Clone ID: MRT4577_164384C.1.pep
MALLAAATAPHSDLGDLRRESTVPSIQQGSPPSAPPSCPARSGARVLQRHPRSSPVARVSAGVVRRLRSRMPWAGWPLPPLPRHHGVAVGREPSHLLAATSSGSGQRQRRSWRLKRSRRDRTRPRARGRTRTADASIQATSTPPYPSAARITDSSCFPQYTVSLKCLETNQDKSKXQQQFDDYKECKKREAPQHGNPPAPSPIKHPQRRWARRPVASALQRARRASCSPALRSGHQGS

SEQ ID NO: 255271 - protein, 77 aa, Zea mays
  unsure (1)..(77): unsure at all Xaa locations
  Clone ID: MRT4577_164385C.1.pep
ERAGCHPPPTPNCGACLGGPRDQYARMNGXTVCVSATNRTFPGRMGPKKGQIYLGSPSTXAASALGGSSSDPRHFPR

SEQ ID NO: 255272 - protein, 123 aa, Zea mays
  Clone ID: MRT4577_164386C.1.pep
MRRDAVPPPTAPSASSSSSLFSGGGGGERLFESGPSPLVFLPLLLIQGGGMDLSRVGEKLLSSVRSARSLGLPPIPTAPPPRPEVPERAAAAAAAARAIAGLPPHERINLPSNSEDLVSIYGS

SEQ ID NO: 255273 - protein, 84 aa, Zea mays
  Clone ID: MRT4577_164387C.1.pep
GPPKKTKFRGLKNQVAPPQALIGKVSPQWGLEKNPSPFFFWEQGIKKNPFPYPIFIWGPKKRVKNHGGGGGKKTPGLDKNKKKI

SEQ ID NO: 255274 - protein, 53 aa, Zea mays
  Clone ID: MRT4577_164388C.1.pep
RYHGARTNYNRVKSMIRGIWSATPSTYSQTLTTYDGSAASESRATEYGASSSP

SEQ ID NO: 255275 - protein, 51 aa, Zea mays
  Clone ID: MRT4577_164389C.1.pep
LNCPNQACFLGQKQHRDHLFIVYEHFTQGQQTDKLKPFSGNMWSTGKRVPF

SEQ ID NO: 255276 - protein, 166 aa, Zea mays
  Clone ID: MRT4577_16438C.1.pep
ARILEEADLPNLPYLGCIIKETLRLHPVGPLLAPHESASDCSVGGYDIPAGTMLLVNVHAMHRDARVWEEPERFSPERFEGGNSDGKWMLPFGMGRRRCPGEGLAVKMVGLALGTLLQCFEWRRTGDEEVDMTEASGLTMPKSVPLEAFYWPRTEMMSPLTALHGC

SEQ ID NO: 255277 - protein, 91 aa, Zea mays
  Clone ID: MRT4577_164390C.1.pep
IRLDAQPRSQEVAYLTDDEWVEHSTIFGRLIRGFVVGKLSMVWKTGRFRRLIHVHLMLFIDRVMGLIVVRVCPLGLVMKQGHQEREDGCVV

SEQ ID NO: 255278 - protein, 138 aa, Zea mays
  unsure (1)..(138): unsure at all Xaa locations
  Clone ID: MRT4577_164391C.1.pep
WKRXMAWQMEASRTQMIQVDVGTPEGEMIFHSAASKLDFKGYQSVYEDTEGDSVHEDNFEALSKLMVKDLVSPVNVHLGQHFTKPPSRYSEGALIKKLEELGIGRPSTYASIMKVLQDRKYVTAKSRVLHPEFRGRMV

SEQ ID NO: 255279 - protein, 200 aa, Zea mays
  unsure (1)..(200): unsure at all Xaa locations
  Clone ID: MRT4577_164392C.1.pep
SRRLLHPAQTPESQSGIGIISDRRRHGCAAPATPRSSLILPRASSHSQPSAVGLTSDCVAASRRRRVDFVFVVNPSGANGRTGKQWKQLLSLLRIRLADQCNICECITRDIHKGGARVFXVTREAIKDEADAVIAVGGDGTLHEVPXGFFWKGTLVRALDRGPDHSAALGLIPLGTGSDFAWTFGWTNDPRDAIDRIVTE

SEQ ID NO: 255280 - protein, 245 aa, Zea mays
  Clone ID: MRT4577_164393C.1.pep
MDAPAAAAQGCGGKHIVLVHGACLGGWSWFKVAPALREVPTFRDYTGPLLELLASLPDGDRVVLVGHSLGGLSVALAAETFPDKVAAVVFLCAFMPDCAARPSHVLEKFVEGKWLEWMDTELKPQDGEGKLPTSMLFGPRIIREKFTQLCSPEDVTLMTSLLRPSSMFVEDLVLQQPYTKERYGSARKVYVVCTEDHAIAEGFQRWMVENSPVDEVREIVADHLVMLSRPSDLVRCLADIADKYA

SEQ ID NO: 255281 - protein, 222 aa, Zea mays
  Clone ID: MRT4577_164394C.1.pep
MDAPAAAAQGCGGKHIVLVHGACLGGWSWFKVAPALRAAGYRTDTPDLAASGVDPRALREVPTFRDYTGPLLELLASLPDGERVVLVGHSLGGVSVALAAETFPDKVAAVVFLCAFMPDCAARPSHVLEKDVTLMTSLLRPSSMFVEDLVLQQPYTKERYGSARKVYVVCTEDHAIAEGFQRWMVENSPVDEVREIVADHLVMLSRPSDLVPCLADIADKYA

SEQ ID NO: 255282 - protein, 136 aa, Zea mays
  Clone ID: MRT4577_164395C.1.pep
ESTFLGKTKEEDPERTEKKKPSPKKPKEEGRRNDTKLKQKSRKLRRKRRSGCCCTTRGTRRRTTRPCRGGAKTGCSESTGSSWAGTFAASVSSAWAPSYGPVFPDELYEGGSPRLKKHMHNEPRFSPADSPWYLHY

SEQ ID NO: 255283 - protein, 86 aa, Zea mays
  unsure (1)..(86): unsure at all Xaa locations
  Clone ID: MRT4577_164396C.1.pep
KIILTSRSDKIVKFGTRPALRLSYVSSEXXWYFFKTITFGSTDPKVHPRLLHLAMDIAKMLDRSLIGANITACLLRENFDVHYWSK

SEQ ID NO: 255284 - protein, 209 aa, Zea mays
  Clone ID: MRT4577_164397C.1.pep
MASSTGSEMSEEIDVQLSPEEKESLDEIIKEAESDLESEEVLDQSLAIVAENEGLDKDAAAKLTIYTVGGVLKNLTEGPLSVMDKHIYAGHTVKPFPSLIGAGKSGCFVISNIFAKGVEAGVVYTGNNKNKVPCAWLLCFIENKANVRIYGECGNKNKFINVDWKLVEKKLLTAGKTVKFHDNVTGTSLIATIRVITAGKAVVAAAFFG

SEQ ID NO: 255285 - protein, 228 aa, Zea mays
  unsure (1)..(228): unsure at all Xaa locations
  Clone ID: MRT4577_164398C.1.pep
MAALVETSMGVVREVLGDSVVDEVDEPIVSYIANVLADQDFDFGPPDGHGIFDALGDLLIDARCVYDREHCLEVCTKLCEKLGSHGIVKPKAAVRSLATPLRMNAGMEEQVAPKKPENIFDAPLLSSRDKAKLERNKRKEDRQREAQYQMHVAEMEALRAGMPPVYVNHSNVGGTTIRDIHMENFSVXVGGRDLIQDVTLTLAFGRHYGLVGRNGTGKTSLLRAMAQH

SEQ ID NO: 255286 - protein, 93 aa, Zea mays
  Clone ID: MRT4577_164399C.1.pep
CSRIMRIRWRHIHGQNRAASHVISLTRWHPACATNQIILGIAKHVKILTVRRLRHHSISFFHCSKISYQEPVSITLHHYIIIDVSPLSFVPSF

SEQ ID NO: 255287 - protein, 77 aa, Zea mays
  Clone ID: MRT4577_16439C.1.pep
VEFLRHQCRPTATPYCSTKWQSLPQQCFQQIRHVEPKHRYQAIFCLVLQSILHQQPQSVQVAALLAAQIAHQLTAMC

SEQ ID NO: 255288 - protein, 69 aa, Zea mays
  Clone ID: MRT4577_1643C.1.pep
GSHSYRNQARLLAQHVVDVQSRCAVTILECKAFSVIHPQDCLLTGLIKVSWQATPLHGTCSVRALGIRQ

SEQ ID NO: 255289 - protein, 56 aa, Zea mays
  Clone ID: MRT4577_164400C.1.pep
TTMEHLASSSKSLQSLVWPPIVRSHATLSKVVAPIVLLRTQRFSVALLVKNPVSVR

SEQ ID NO: 255290 - protein, 240 aa, Zea mays
  Clone ID: MRT4577_164401C.1.pep
MSIPSMSSSSPSVGSPLPPAHDGGPGPLVWRQKEQPHPQPQHPDYSFTGRVLLTAVVILAILTVVFVLIRLLLYQFVARGRGRLAVGVRRSFGSFGMRSARHGLAASALAALPVTTYRVRGADDDGPSSASGGAGTGTADCAVCLSELADGEKVRALPGCSHVFHVDCIDAWLRSRTTCPVCRAEVRPKATADTRPSPPPALIDAAGGTLVVTVVGGAAETGDAHRTSVLGSGQPAGAVG

SEQ ID NO: 255291 - protein, 145 aa, Zea mays
  Clone ID: MRT4577_164402C.1.pep
TRSPQPNGPVHGVSEGGPVRGPLFPGGCPRALAGWLNRLAPRVSGLESGPFALRYFFQLAPPVGPPGFPLFVLGGYGGGKCFRTGISPGQQFCPFGPQAGSPGGGPQGGGPGPWKSPLGGRPGRKVWNPFCLPIWFVFWWVFFRV

SEQ ID NO: 255292 - protein, 59 aa, Zea mays
  Clone ID: MRT4577_164403C.1.pep
QCIKELLQHHTDKLLLINMISLEPNPTEASLFTCQLKKKLPIYIAFAKNICHALQIRVF

SEQ ID NO: 255293 - protein, 56 aa, Zea mays
  Clone ID: MRT4577_164404C.1.pep
MPPPEYICSKFRSPGPLILRSPSIGDPKFGPKKVSGSFGPVVTPDHGIWDYLVPSA

SEQ ID NO: 255294 - protein, 118 aa, Zea mays
  Clone ID: MRT4577_164405C.1.pep
EKGPPRGSYAQRGPKEWPTPRGPRQGARRGGPSRPKAPINHPEEGEAHPGTRKGGSSRRTRVSAHRHGLSHTNFGARTAKRGGPPPLPGVWRPFKPPLGERTRPLGLPKGGGPQRQPS

SEQ ID NO: 255295 - protein, 74 aa, Zea mays
  Clone ID: MRT4577_164406C.1.pep
SSVECSFSSKFPFIAWRNYMCVWCCNMLIIIFFIMAPITLLDIDNGFDKPKYILGRLHFQTKRAIWNYGFVHSP

SEQ ID NO: 255296 - protein, 404 aa, Zea mays
  Clone ID: MRT4577_164407C.1.pep
MAASSRPLVSVKALEGDMVTDAPGIALPPVFGAPIRPDVVRFTHKLLSCNKRQPYAVSRRAGHQTSAESWGTGRAVSRIPRVPGGGTHRAGQGAFGNMCRGGRMFAPTKIWRKWHRRVNVNLRRVAVASALAATAVPALVQARGHRIETVPEMPLVISDSAESIEKTSQALKILKQVGAYADAEKAKDSVGIRPGKGKMRNRRYINRKGPLVVYGTEGSKVVKAFRNLPGVDVANVERLNLLDLAPGGHLGRFVIWTESAFKKLEEVYGSFDAPSQKKKGFVLPRPKMANADLGRIINSDEVQSVVKPLNKEVKRREKRKNPLTNMAAVLKLNPYLGTARKMATLAEAARVKARKEKLDSKRTKLTSEETAKVKAAGKAWYKTMISDSDYTEFENFTKWLGVTQ

SEQ ID NO: 255297 - protein, 407 aa, Zea mays
  unsure (1)..(407): unsure at all Xaa locations
  Clone ID: MRT4577_164408C.1.pep
MKDSTRARRNKSSKRRRKKRYFYSESDSSSESETESSDSESDSDTYSSDSSDVSSSSDDRRRRRKRHSKKNKRKRSRRKHDQRRERRRRKRDRKSKQKSKRIKGDSEAESSSDSSSEDARSKRHRXGRKSKASSQVFEENIAAVSALKDATSPQQKSGIPNSPAQDVSPLQNGENYTNGVNESKIERNAAVMPVLTGNQSKSRFPILLHTSFFVLTASGSGVSSDXISRSQSMSVNHSMSKSMSISPRRSPMKRSITTTKRSVSRSPVHHNRSGSPVGAPQKSVSRSSARRQSISRSPARSLSKSPPRDASRSPHISRTPVKAHRRSISRSSARSMEQVXSRSLERNVRKSVSXEPLANVSRSPVRGGRPRREHYHMSQSTSHGCYHHQTMERCPFRKWFSWWVTKT

SEQ ID NO: 255298 - protein, 96 aa, Zea mays
  Clone ID: MRT4577_164409C.1.pep
MLGSLLVWIDCISSDPPSLLCNYLQGFQTLLDGFEAVLIQNIELLGVGILSATNSSIESSDSLGIDGTMLLEKKAQDNEEQTLMKSVTYCENDGNH

SEQ ID NO: 255299 - protein, 71 aa, Zea mays
  Clone ID: MRT4577_16440C.1.pep
PNHPPRRPKGSTPRNLHPTKGGPFPLKGPPTPPLGGAQMTTMRMTSKFWSHRSSAILCGDQYLCYGIYRYL

SEQ ID NO: 255300 - protein, 129 aa, Zea mays
  Clone ID: MRT4577_164410C.1.pep
APHLKLARETPRACQERKEREEKGRGVRGRQVKRSRERETPLPPELMARRRAPPPFQPWLPGGRQGPSGLASFAKKPTRRKRDRPSSQIKERARTGFIPAQGGINPRPTEFNMRGHKKTRHHIGRRRGK

SEQ ID NO: 255301 - protein, 230 aa, Zea mays
  Clone ID: MRT4577_164411C.1.pep
MQVAMAGETKKGLVLLDFWVSPFGQRCRIALAEKGIAYEYSEQELLGGAKSDILLRSNPVHKKIPVLLHDGRPVCESLVILEYLEEAFPEASSPRLLPDAAYARAQARFWAAYSDKVYEAGTRLWKLRGDARAQARAEIVQVVRNLDGELGDKAFFGGEAFGFVDVALVPFVPWLPSYERYGDFSVAEIAPRLAAWARRCAQRESVARTLHPPEKVDEFINLLKKTYGIE

SEQ ID NO: 255302 - protein, 83 aa, Zea mays
  Clone ID: MRT4577_164412C.1.pep
CVTMASCRICSRHRELSHGRQTEDQVTLFVHFMHDLYFITGSLYRQSSAFPSAFSKITPLAERTSFAKGPAIQKHCSGLQMSI

SEQ ID NO: 255303 - protein, 86 aa, Zea mays
  Clone ID: MRT4577_164413C.1.pep
RSAQGWCRRLQKRWRFPRSAQGWWCRIRRRRRRLKEIMCGPILASAGVFYLSKEWGARSLLSPGKGPFPPWIRGGDPRCSLCLPPL

SEQ ID NO: 255304 - protein, 58 aa, Zea mays
  Clone ID: MRT4577_164414C.1.pep
QPHILPPQKNQNNPPVLRFTFAGPPKGGGRLLQTLIKNKPRAGKKPFLGYKDPPWAGF

SEQ ID NO: 255305 - protein, 268 aa, Zea mays
  unsure (1)..(268): unsure at all Xaa locations
  Clone ID: MRT4577_164415C.1.pep
GRPRSLTPTQANPTPPPPLRLLSPTSTAPLRRPRDPRPRPRPRPRPRPRTXRPPXQSPRAPPWATPSPSGTPPLPPSLTALLRRPSASRTPTPXPPHHPPPHHHYPYPPPPXPPPPLRSPPXPPPPSXAPPPRXPSSAPSSSLAPPPSXLAPAPPTRPXPSPSPPSPCPVSPTPLPTPSPPPSTPPSSPQTPTASSPSPTSRPSPPSSSRPPPRSPSPRSRPSARAPAMPPRSPSVSSSRTPTSGPTPPPLSRGARFDVQVRLMRRLR

SEQ ID NO: 255306 - protein, 143 aa, Zea mays
  Clone ID: MRT4577_164416C.1.pep
LFGETCRARTLTGDREASRSVTTPSPRISASPWTPWYHSRPPCSPSTAIRYWPLRHCPHPLISHFSRPASIRSTSPTARHQSPRERCSTSTSRGHPRPAQRAQRRRRPRVPSADAQLRPSPRAMPCAAMTSGWIQPRLFSRTK

SEQ ID NO: 255307 - protein, 194 aa, Zea mays
  Clone ID: MRT4577_164417C.1.pep
PAAIAPIKSSKTYKVPRRPFESARLDAELKTVGEFGLRNKREVWRVQLTLSKIRRAARELLTLDEKDPKRLFEGNALIRRLVRVGVLDESRMKLDYVLALKVEDFLERRLQTCVYKLGLAKSIHHARVLIRQRHIRVGKQIVNVPSFIVRLDSQKHIDFALTSPFGGGRPGRVRRKKAKAAEAKEGGDEEEEEE

SEQ ID NO: 255308 - protein, 63 aa, Zea mays
  Clone ID: MRT4577_164418C.1.pep
CPRARGLSKRVTCGRTGASPHAKCQSHNIHRGWETQHERHLYEEEHSEQTRGGWLTRQNNHGC

SEQ ID NO: 255309 - protein, 137 aa, Zea mays
  unsure (1)..(137): unsure at all Xaa locations
  Clone ID: MRT4577_164419C.1.pep
HLWAXPMLTYIPRSPGDALVRLYMEYIAGGGVRTLSYLMHAIATAQVLXKGNGKNILRIXPYWYINCMHXYAYNTSRKQLCKWAGYEQSKIYXRCIGWAFTGDTAPTFGFPMDTIGTYMGATGREAQWGGIGVDPHM

SEQ ID NO: 255310 - protein, 113 aa, Zea mays
  unsure (1)..(113): unsure at all Xaa locations
  Clone ID: MRT4577_16441C.1.pep
PXRVXVGAVVAXXGXGRXRXAGGLXXXAXXRXGAXPRGRGVXXGAPLPXXRRXXRLLGALXXXRXVXXXXRPPLLRRRXXSSGXCXLSLSPLLFXLPAAXLRLGLSLRSXWPP

SEQ ID NO: 255311 - protein, 263 aa, Zea mays
  Clone ID: MRT4577_164420C.1.pep
MAWGVSPRRQPSFPVQALYELCKRSFPSPSAASSSPPPADVVRSISSLMDTITPADVGLRDYNLEDDRGHGFFDSNLLKGSGRLPRWARPIKYLHIYSCDAFSIGIFCLPTSSVIPLHDHPGMTVLSKILYGSMHVKSYDWIEPTVLASSQPARLAKLHTDDVRTAPCPTSILYPQSGGNLHCFTSVSSCAVLDVLAPPYNDDAGRICTYFHDYPFSSLSAAGRTKVAGNPDNYAWLEAINTPVNINMHTGMYTGPTVQELQT

SEQ ID NO: 255312 - protein, 49 aa, Zea mays
  Clone ID: MRT4577_164421C.1.pep
LYSFKRAPPQILYYKILIFLFFIINIFYIYFNNYYYFFFFFFFFKGGRF

SEQ ID NO: 255313 - protein, 77 aa, Zea mays
  Clone ID: MRT4577_164422C.1.pep
TDPTWGNVGSSHAYQPQIFITIAWLGWFPELPNAPPQIGTILNKQLKSKLPPKARFTYKALPPFSPWDPVSPPNIKK

SEQ ID NO: 255314 - protein, 131 aa, Zea mays
  Clone ID: MRT4577_164423C.1.pep
MLEVACGRKPVVQDERDTRLVLVDWVLDRWRAGSVTDTVDPRLQGDFLEREASLVLRLGLLCSHPAGSARPAMRQIVQYLDGDAPLPELSPTYQGFNMLSLMQDQGFDPYIMSFPMSSTGISTISDLSGGR

SEQ ID NO: 255315 - protein, 174 aa, Zea mays
  Clone ID: MRT4577_164424C.1.pep
MSSTLAKIAEIEAEMARTQKNKATAHHLGLLKARLAKLRRELITPKGGGGGGPGEGFDVAKTGDARIGFVGFPSVGKSTLLSNLAGVYSEVAAYEFTTLTTVPGVIRYKGAKIQLLDLPGIIEGAKDGKGRGRQVIAVARTCNLILIVLDVLKPLGHKKIIENELEGLGIRLNS

SEQ ID NO: 255316 - protein, 783 aa, Zea mays
  Clone ID: MRT4577_164425C.1.pep
MERISGPRLAVLLALAVLTAVAAATTDEVRAQSTYIIHVAPGHPALSAARDNGGGEAALRRLLPRRLRAPRPRVLYSYQHAATGIAARLTPQQAAHAAAGEGVLAVYPDQVRQLHTTHTPAFLRLTEAAGLLPAATGGASSSAVVGVLDTGLYPIGRSSFAAADGLGPAPASFCGGCVSAGSFNASAYCNSKLIGAKFFYQGYEAALGHPIDETKESKSPLDTEGHGTHTASTAAGSPVAGAGFFDYAEGQAVGMDPGARIAAYKICWTSGCYDSDILAAMDEAVADGVDVISLSVGANGYAPSFFTDSIAIGAFHAVSKGIVVSCSAGNSGPGEYTAVNIAPWILTVGASTIDREFPADVVLGDGRVFGGVSLYAGDPLDSTQLPLVFAGDCGSPLCLMGELDSKKVAGKMVLCLRGNNARVEKGAAVKLAGGVGMILANTEESGEELIADSHLVPATMVGQKFGDKIRYYVQTDPSPTATIVFRGTVIGKSPSAPRVAAFSSRGPNYRAPEILKPDVIAPGVNILAAWTGAASPTDLDIDSRRVEFNIISGTSMSCPHVSGLAALLRQAHPEWSPAAIKSALMTTAYNLDNSGETIKDLATGVESTPFVRGAGHVDPNAALDPGLVYDAGSDDYVAFLCTLGYSPSLISIFTQDASVADCSTKFARPGDLNYPAFAAVFSSYQDSVTYRRVVRNVGSNSSAVYQPTIASPYGVDVTVTPSKLAFDGKQQSLGYEITIAVSGNPVIVDSSYSFGSITWSDGAHDVTSPIAVTWPSNGGAAAM

SEQ ID NO: 255317 - protein, 160 aa, Zea mays
  unsure (1)..(160): unsure at all Xaa locations
  Clone ID: MRT4577_164426C.1.pep
ADEEGLVQADAARGRRLTRAASPAGAGGVAAAGVEARGGGLRLGWVALPERSDGSGDSRGEARARSLSDDDLEELKECVDLGFGFSYREILELCGTLPALDLCYFMSQXYLDEHHHRSXGTAEEAPPLAPDSWAQPCDTSNWKSYTPGDSPDEEKAKFKY

SEQ ID NO: 255318 - protein, 99 aa, Zea mays
  Clone ID: MRT4577_164427C.1.pep
PGKKPGKRIPIMAQGTRDVGFWNKFWNSGGVFNKTIGGFAIRVLIPKGLGLGFFLKKKGGGRGFFSPFRPPKKGVGWGLFFPLRKAWPLATWQGWPLFS

SEQ ID NO: 255319 - protein, 62 aa, Zea mays
  Clone ID: MRT4577_164428C.1.pep
MQLSLEFHTSSMTAETLSAAIRLLERAGANVVECACLIGLPKFKDFYKLNGKPVYILVESRK

SEQ ID NO: 255320 - protein, 746 aa, Zea mays
  unsure (1)..(746): unsure at all Xaa locations
  Clone ID: MRT4577_164429C.1.pep
MAFLARALRQSNWRLSSRCPAVAASCRWISPTAAAGSPEAGAAVAPADPELPPPREPVGGARVELPPNPEDALEVFVDGHAVRIPKGFTVLQACEVAGVDIPRFCYHSRLSIAGNCRMCXLVEVEKSPKPVASCAMPALPGMKIKTNTPVAKKXAREGVMEFLLMNHPLDCPICDQGGECDLQDQSMAFGADRGRFTEMKRSVVDKNLGPLVKTVMTRCIQCTRCVRFATEVAGVQDLGMLGRGSGEEIGTYVEKLMTSELSGNVIDICPVGALTSKPFAFKARNWELKGTETIDVTDAVGSNIRIDSRGPEVMRVVPRLNEDINEEWISDKTRFCYDGLKRQRLNDPMIRGPDGRFKAVTWRDALAVVAEVLHQVKPEEITGVAGKLSDAESMMALKDFVNRMGSDKVLCEGNGPNPPADLRSNYLMNTSIAGLEKADVFLLVGTQPRVEAAMVNARIRKTVKATQAKVGYIGPPADFNYDHEHLGTGPQTLVEIAEGSHPFCSVLQSAKNPVIIAGAGLFEREDQVALFSTIETVAKKFNVIRPDWNGLNVLLLHAAQAAALDLGLVANPAESIKSAKFLYLMGADDISLDKLPDDAFVVYQGHHGDKGVYRANVILPSSAFSEKEGTYENTEGCTQWTIPAVPTVGDARDDWKIIRALSEVAGAQLPYDSLSAVRDRISTVAPNLVHVDERETPTISAEVKPPVKQQVSSTPFKAVVENFYMTDAITRASKIMAQCSATLLKK

SEQ ID NO: 255321 - protein, 89 aa, Zea mays
  Clone ID: MRT4577_164430C.1.pep
GLILSKSLRAQKEEDDESCQIALGNLRSEVITLRNEALEKDRILFSLVDRLKTSEAKLNAQTEAHKVEVEDLKLEPNIPMHYVRGAMPR

SEQ ID NO: 255322 - protein, 79 aa, Zea mays
  Clone ID: MRT4577_164431C.1.pep
MVPAAIRRLISGIMIRSESGEYATAIARDLSAIPCRLLELNAAAGFTTCTRSNSVIYLEADGNTCHQLLSRYIHAGTDY

SEQ ID NO: 255323 - protein, 258 aa, Zea mays
  Clone ID: MRT4577_164432C.1.pep
PRDSRCVRFATEVAGVQDLGMLGRGSGEEIGTYVEKLMTSELSGNVIDICPVGALTSKPFAFKARNWELKGTETIDVTDAVGSNIRVDSRGPEVMRVVPRLNEDINEEWISDKTRFCYDGLKRQRLNDPMIRGPDGRFKAVTWRDALAVVAEVLHQVKPEEITGVAGKLSDAESMMALKDFVNRMGSDKVLCEGNGPNPPADFNYDHEHLGTGPQTLVEIAEGSHPFCSVLQSAKNPVIIAGAGLFEREDQVALFSTI

SEQ ID NO: 255324 - protein, 294 aa, Zea mays
  unsure (1)..(294): unsure at all Xaa locations
  Clone ID: MRT4577_164433C.1.pep
PSRLAGLLLPKKKKKILQSAKNPVXIAGAGLFEREDQDALFSLIETVAKTFNVTRPDWNGLNVLLLHAAQAAALDLGLVANPAESIKSAKFLYLMGADDISLDKLPDDAFVVYQGHHGDKAVYRANVILPSSAFSEKEGTYENTEGCTQWTIPAVPTVGDARDDWKIIRALSEVAGALLPYDSLLVWTGSVRPFQPFLRLVMRDEEDPCFSEVGGXPYDSFSAVRDRISTVAPNLVHVDEREPSTISAEVKPPVKQKVSSTPFKTMVENFXYMTDAITRASKIMAQCSATLLKK

SEQ ID NO: 255325 - protein, 348 aa, Zea mays
  Clone ID: MRT4577_164434C.1.pep
PTRPRMGSDKVLCEGNGPNPPADLRSNYLMNTSIAGLEKADVFLLVGTQPRVEAAMVNARIRKTVKATQAKVGYIGPPADFNYDHEHLGTGPQTLVEITEGRHPFCSVLQSAKNPVIIAGAGLFEREDQDALFSMIETVAKRFNVTRPDWNGLNVLLLHAAQAAALDLGLVANPAESIKSAKFLYLMGADDISLDKLPDDAFVVYQGHHGDKAVYRANVILPSSAFSEKEGTYENTEGCTQWTIPAVPTVGDARDDWKIIRALSEVAGALLPYDSLSAVRDRISTVAPNLVHVDEREPSTISVEVKPPVKQKVSSTPFKTVVENFYMTDAITRASKIMAQCSATLLKK

SEQ ID NO: 255326 - protein, 214 aa, Zea mays
  unsure (1)..(214): unsure at all Xaa locations
  Clone ID: MRT4577_164435C.1.pep
HSAATGMWECPDFYPVGAPGRRAGVETETSAASDGDGGSPRRREQSKYVLKNSLDLRRYDYYTVGTYDRAAERYVPDDPAGDERHLRYDYGNFYASKTFFDPVKRRRVLWGWANESDTAADDVAKGWAGIQAIPRTVWLDPSGKQLLQWPIEEVEALRGRSVALKNRVIKPGQHVEVTGIQTAQADVEVSFEVSSLAGAEALLDXXAASDAQRL

SEQ ID NO: 255327 - protein, 54 aa, Zea mays
  Clone ID: MRT4577_164436C.1.pep
LVAPRPLFPPGCELLLFRRCRGQPRSYVYVPTHVALEPSLKSWMLHVSAEYAPC

SEQ ID NO: 255328 - protein, 146 aa, Zea mays
  unsure (1)..(146): unsure at all Xaa locations
  Clone ID: MRT4577_164437C.1.pep
AGRDADPIGCFPIYFTLYRTSNAADYDRNGCLSDYKGLSXYHNXLLLRSLPGLSKTYPDARIMYSYFYTHVTDMIRVPHNFRLKYGLKVCCGAGGQGQHGYNNKARSGMDAVSDCVDSRNYLIXDLIHLTEGVYRSIVDSWLNGPY

SEQ ID NO: 255329 - protein, 98 aa, Zea mays
  Clone ID: MRT4577_164438C.1.pep
MAPSHRPAHHHLKLNLQSSVYGGAYLMTDNVRGNFYRQVCSSRQPKVAKWQNKSEQAPGGANRHAGRCGGLQLALPGTSKGPGHRGTEVVVWMEDEGR

SEQ ID NO: 255330 - protein, 65 aa, Zea mays
  Clone ID: MRT4577_164439C.1.pep
VVVPTSINLLLLLVILPRIRDTSIRTNGLPHHIHLCTFRISSKLTSFTYQIPTLLSHSDAPSSLS

SEQ ID NO: 255331 - protein, 140 aa, Zea mays
  unsure (1)..(140): unsure at all Xaa locations
  Clone ID: MRT4577_16443C.1.pep
MPLLRDWSNRYSMLPLRHPLXWXPYNKAGGNIWTGEQVYLCAGAHHCDAALMHNXRHCIXHVLAFFSDSDEMVLXNLPCRFMRYDQDVEGHAFHRSNIDKWNIHCKMYSLLLRTYIRDGTNTDRLLRAIETVPVVHRKAD

SEQ ID NO: 255332 - protein, 55 aa, Zea mays
  Clone ID: MRT4577_164440C.1.pep
LHFRRPTIKLTMGNFNHMRRLIPRPEDYDLRHAATGVEAGPLMTPPQPGGTLPLY

SEQ ID NO: 255333 - protein, 59 aa, Zea mays
  Clone ID: MRT4577_164441C.1.pep
GPREMLLVRIDLTVSVSPPEVMMDEKKHHQMTSHTLPISILLGENSSRVIVTGVLWLYF

SEQ ID NO: 255334 - protein, 68 aa, Zea mays
  Clone ID: MRT4577_164442C.1.pep
IHCSLAECYSYRYLFLLYNFLTYISGLILVILKANAYSCFPPYWINFGYLFAINLEQCYGIASFKTMW

SEQ ID NO: 255335 - protein, 79 aa, Zea mays
  Clone ID: MRT4577_164443C.1.pep
LILCAYCNSDHNCSILSWYRYSVIQKCSKVLFLSKDKQSYRILLKYKKTSYYNMWLIIIGLLHIENNPNTFVEPNAYRQ

SEQ ID NO: 255336 - protein, 99 aa, Zea mays
  Clone ID: MRT4577_164444C.1.pep
QWIPSLIGLCPVIFPVPERPLHSWQVSELRSSVICLAGNAQHGLIWVHSRSLGRPPFGSQRRNTYSSCDGSSSADRAATVGSRSSSHRTKGVVVRSRPG

SEQ ID NO: 255337 - protein, 59 aa, Zea mays
  Clone ID: MRT4577_164445C.1.pep
RKKQLFLLLDTGGVYDDMLYKSSRQARTPAFNYLSTAAVLEPMETTSYSSLAIGTRSIE

SEQ ID NO: 255338 - protein, 141 aa, Zea mays
  unsure (1)..(141): unsure at all Xaa locations
  Clone ID: MRT4577_164446C.1.pep
PRARARVKIAGFDIPXKGANVVVNXWAVARAPQXWASPLEFRPERFLRENIDIKGADFRVFPFGPGPRVCPGAQLGITLVGSMIGPMLPPFPWALPSGACPEDVGLMGSPGLVPFLAPPLQAVPPPRLDKEELYRGVPSDV

SEQ ID NO: 255339 - protein, 272 aa, Zea mays
  Clone ID: MRT4577_164447C.1.pep
LPTKTRRQWPRRLCCLCRCSCTSSSPPPFRPRARRRVAPKTSRPSRPRSAPARPSCSATPPPTTRRSPSTCCPSRATSSGAGVRAWALRVSSNALWADGVNAAGFVVPPRVVPAPFARCLTIVFERFTGGSAAAFAAPRLYALAAPVAGFFAYDAAAGPDARVSLRALGAPVRVEFDDELSAAALDKGFDAAAALCVTFAASGEVVATYAVTSGSASTCAVTGTGHFGIVVRLPETPPPASAGWWAWTVGVGAGGVLGASVLALSVAGAISW

SEQ ID NO: 255340 - protein, 103 aa, Zea mays
  unsure (1)..(103): unsure at all Xaa locations
  Clone ID: MRT4577_164448C.1.pep
LFLSVCVCVWGGFSSVFGCGLFCSGLFVAGSACVFGAGFGLWVVLLFFPRFSSLGFFRFPVLAVGFWFYFSVLPSVGCRSVPGVLFGVRPLYVFLAXVRGVFR

SEQ ID NO: 255341 - protein, 81 aa, Zea mays
  unsure (1)..(81): unsure at all Xaa locations
  Clone ID: MRT4577_164449C.1.pep
MGGGGAYNNLNWEKPXGGGGVNRLAGDPLFTSWGISKGARTDRLFQHLAPLNGEWNAPCXGQLTAVGGVVPPXLTVPFAGG

SEQ ID NO: 255342 - protein, 68 aa, Zea mays
  Clone ID: MRT4577_16444C.1.pep
SLDRAKLSAGGFYKILGGSYTYIKCIGPAPHRRIAVRSAEGETMNFAKELLILLDSSSCNWRLQTSDV

SEQ ID NO: 255343 - protein, 64 aa, Zea mays
  Clone ID: MRT4577_164450C.1.pep
CNTSTRLAERNRGGIEAGEESYALDTFRLCMIANIQQKFGVSKSRGECTSTIVFNFLSSPINNN

SEQ ID NO: 255344 - protein, 526 aa, Zea mays
  unsure (1)..(526): unsure at all Xaa locations
  Clone ID: MRT4577_164451C.1.pep
FGSRKFESKSTMLNITNWSKSQPCYVNREIISLLSTLGIKDEVFESMQQDDMHESDGMLTNKEAALSVLGKIGGGDTKTAADMLLQGYEPSSEPYLLMILKAHRANRLTDIRTRCKIHVQKGRVLIGCLDETCKLEYGQVYIRITKNHKEQKYSEQPFFCNDDGKTAVIVGKVAITKNPCLHPGDVRVLEAVYDPGLDARGLIDCVVFPQRGERPHPNECSGGDLDGDLFFITWDDKLIPEKVDAPMDYTATRPRIMDHAVTLEEIQKHFVSYMINDTLGAISTAHLIHADRDPLKARSPECVQLAALHSMAVDFAKTGAPAEMPLALRPREFPDFMERWERPMYVSNGVLGKLYRAAXARGGRRSAPAXGPPSCVYDPDLEVAGFDEFLDAAEERYEAYAERLGALMTYYSAEREDEILTGNIRNKLVYLRRDNKRYFEMKDRIIAAVDALHAEVRGWLRACKEDDASRVASAWYHVTYHPDRRGEKRFWSFPWIICDTLLAIKAARRCRKRVEDAAVPMDCDGS

SEQ ID NO: 255345 - protein, 369 aa, Zea mays
  Clone ID: MRT4577_164452C.1.pep
MGMRVLLVVVLISFAPLITTNAAAGVNATRSAGRQQKQKQKPLAPALIVFGDSIVDPGNNNDIRTIIKADFPPYGTDFQNHRATGRFCNGRIPTDFIASRLGIKELLPPYLSSEPLDKHDLVTGVSFASGGTGFDPLTPQLASVISLPDQLTMFHDYLGKVRDAAGDARVSDILSRGVFAICAGSDDVANTYFTLRARSSYDHASYARLLVQHATAFVEDLIRVGARRVAFIGIPPIGCVPSQRTMSGGLDRGCSQGHNEIAVAYNAGMVQQLAALRAKYPDTLLVFMDIYGFLYDMMMHPRSYGFTQSTRGCCGTGLLEVSVLCNGVTSAVCQDVGDYLFWDSYHPTEKAYKILADFVFDNYVKLILV

SEQ ID NO: 255346 - protein, 163 aa, Zea mays
  Clone ID: MRT4577_164453C.1.pep
DNARLNRRVVRNRNHHERRRTRFLLSVPKELATPAALVNRFVAASRSVGEFPGLLHGAGTCANNNGDAISKQARLWRKYPIKKNLWRTILLAGPGGGDPGNSFPGVIKPPDALDAPIQFPRSGLSAVCRAAHPVFFFFFFFFFFFFFFFIFFFFFFFFCFFFF

SEQ ID NO: 255347 - protein, 144 aa, Zea mays
  unsure (1)..(144): unsure at all Xaa locations
  Clone ID: MRT4577_164454C.1.pep
MNNWVWHLFRSIADCAGLLTHPRQDDPGRDIGSIVMYKRHCXLGLVSTSXTLNYRHTKXHFVAVEVFNSXKLDGIVPASHSCDFPDECRTVYFLSDISEDGYXVSRPTPDGNAKDXPTLPTDYTLEDQMYGVIXSGKDLATTAQ

SEQ ID NO: 255348 - protein, 61 aa, Zea mays
  unsure (1)..(61): unsure at all Xaa locations
  Clone ID: MRT4577_164455C.1.pep
LEERQRKHYSFKDKSYSEEXDRGKSSSQLLLYCSKRDAHVMILPRETXTDDSYVEPKSYDE

SEQ ID NO: 255349 - protein, 71 aa, Zea mays
  Clone ID: MRT4577_164456C.1.pep
AAAPPFFLVCFYRLWGETRVHKTGPDVLKMRTLVLAIPGQKFLLSNAEGGRPKTFKIIGTLISVRNCAQHY

SEQ ID NO: 255350 - protein, 85 aa, Zea mays
  Clone ID: MRT4577_164457C.1.pep
LTATPRARGHASLGARVAATPLRRPTAPETSNLGSRYSEPPQKKKKRVVVSEDLSPCMCVRDATVSSQRYSNLTYRLLPHNAAIG

SEQ ID NO: 255351 - protein, 58 aa, Zea mays
  Clone ID: MRT4577_164458C.1.pep
CMRTFTHSTAIALLLLMMRTRVDKLLRQAAGIIWLADDYLMDPIDYPMEGLSNLGTLP

SEQ ID NO: 255352 - protein, 249 aa, Zea mays
  Clone ID: MRT4577_164459C.1.pep
MPSADAGDADAMPAPPPQTRAAISHVIFDMDGLLLDTEGFYTTVQEKILMRFGKVFDWSVKAKMMGKTTAESTRILFEEFGLAGLLTPEQFLEERETMLKKLLPTCVAMPGLLRLINLLHTNGIPIAVATGTHKHHFALKTQNHEDIFSLMHHIVTGDDPEVKAGKPSPDIFLAAMRRFEANVEPSNCLVFEDAPLGVAAAKTSGMVFLHVVMVPDPRLDVSHHKGADQVLTSLLEFNPSEWGLPPFVD

SEQ ID NO: 255353 - protein, 87 aa, Zea mays
  unsure (1)..(87): unsure at all Xaa locations
  Clone ID: MRT4577_16445C.1.pep
MPPKSVVQIGCANVTNYWSDYALTWVIADVEHQNRALADTXYLEAVXQIILKTVSLTDMIIDLTRXDQLXIIMNAMAEADDYTKWEI

SEQ ID NO: 255354 - protein, 65 aa, Zea mays
  unsure (1)..(65): unsure at all Xaa locations
  Clone ID: MRT4577_164460C.1.pep
YMSNVGIQSMVSGXTHSLLRLEHLCICSGIVNGESVPASEFLLCQLRRLVCRQLISPVIQHLPYP

SEQ ID NO: 255355 - protein, 87 aa, Zea mays
  Clone ID: MRT4577_164461C.1.pep
HISHKKPPIAITLLFQTRASVAQYFTTSYQSHISIIPKSFKKSFANNPMAINPYSLNSYNATTVNKSIYLLNSFSMTSSSLAITIYS

SEQ ID NO: 255356 - protein, 46 aa, Zea mays
  Clone ID: MRT4577_164462C.1.pep
SSFLLGATASYRLAFETPSCYLVSRRRRYDCKLVSYEEKKMLRHIR

SEQ ID NO: 255357 - protein, 115 aa, Zea mays
  Clone ID: MRT4577_164463C.1.pep
PSSSRARSNMGLAATTGSSWRAASWGASASASAHDRPRLHRRGSPTPRVGGLTSFPEFFNNFGILPPPHRELRQKKYPSTSAGGHVPARSRDAVFLGVAHSPYPTRRDGSSCGVA

SEQ ID NO: 255358 - protein, 54 aa, Zea mays
  Clone ID: MRT4577_164464C.1.pep
LFRGSLGAQGLFTPKKGPKGGIPLSLFKKKKKKKKKKKKKKKKKKKKKKKKKKK

SEQ ID NO: 255359 - protein, 105 aa, Zea mays
  Clone ID: MRT4577_164465C.1.pep
VVPPRVLSVRVYSVLERSSVVRERPHGCPCLMCTCGTLRNLWYVDARVCPCPCNGVARGAGGSFRPPWIITPTSLRITTDNNKGRPPKTKLVDPALYSGPAPAGG

SEQ ID NO: 255360 - protein, 45 aa, Zea mays
  Clone ID: MRT4577_164466C.1.pep
LAYLHLCYRGLSDFWSHLQGTILLMFALASMLYVMLISSCIIISY

SEQ ID NO: 255361 - protein, 94 aa, Zea mays
  Clone ID: MRT4577_164468C.1.pep
VQRSNWGGGGRPFRPPSPPQKTGNGDSGGDNPTPTQPCPTKTPRFGPPGPKEAKNPPPKEGGGPQAAAEGKTLAQKPPPPPSVKGRIRTKPPAL

SEQ ID NO: 255362 - protein, 172 aa, Zea mays
  unsure (1)..(172): unsure at all Xaa locations
  Clone ID: MRT4577_164469C.1.pep
EHHFKSKADAGVSDTYPQQAATVRKNGFIAIKNRPCKGVQVSTSKTDKHGHAKCHFVSHYTYSYWKKLEDIVPSSHDCDIPHVNRTEYQLIDISEDGSLLSLLTSDGNTKDDLRLPTDETLVSQISEGIESVKDLAVTVQXAMGEEHICAMKDVAPKNTSLALETEPYSIST

SEQ ID NO: 255363 - protein, 186 aa, Zea mays
  Clone ID: MRT4577_16446C.1.pep
MSASANNNANKTAKRNPIVFFDVKIGSQDIGRIKIELFANVVPKTTENFRQFCTGEHKVNNKPVGYKESQFHRVIKGFMIQGGDFIKGDGTGSLTIYGKESFEDESFTLSHNRAGLVSMANSGPNTNGSQFFVTTDACEWLDGKHVVFGQVVEGMKIVRAIENTPVHPNSNKPKIPVTIAQCGQFC

SEQ ID NO: 255364 - protein, 71 aa, Zea mays
  unsure (1)..(71): unsure at all Xaa locations
  Clone ID: MRT4577_164470C.1.pep
GNTKNERKGESNCLSCIEPFSRKIKVLKDVEKVILLGWEIGRKRRSKRELRKVLRFYXXXKXKKEKEKKIN

SEQ ID NO: 255365 - protein, 271 aa, Zea mays
  Clone ID: MRT4577_164471C.1.pep
MDPWISSQPSLSLDLRVGLPPLSLHQAPVAVALARPKVLVEENFLLPPKKEPEVAALETELRRMSEENRRLAEALAAVASKYEALRSQHKEMVSAAPAGGNASSASEGGSVSPSRKRKSESADTAPAPAQRPHPAADLSECTSGGEPPCKRVVRDRAEEVEEEEECRPRVTKLYVRADPADLSLAVRDGYQWRKYGQKVTKDNPCPRAYFRCSFAPACPVKKKVQRSAHDASVLVATYEGDHTHAPPPSGSGKNAAKPPSPARRQEAAVAV

SEQ ID NO: 255366 - protein, 39 aa, Zea mays
  Clone ID: MRT4577_164473C.1.pep
RTRGRTRGRTRGRTCANVTLSCVLLTSRCVLVLVSLFTC

SEQ ID NO: 255367 - protein, 47 aa, Zea mays
  Clone ID: MRT4577_164474C.1.pep
RRFPFCCFKAYDQQLVVSSNCLYSHQFSGVTWLLLGLKMIMQKGLQR

SEQ ID NO: 255368 - protein, 322 aa, Zea mays
  unsure (1)..(322): unsure at all Xaa locations
  Clone ID: MRT4577_164475C.1.pep
MDPWISSQPSLSLDLRVGLPPLSLHQAPVAVALARPKVLVEENFLLPPKKEPEVAAALESELRRMSEENRRLAEALAAVVSKYEALRSQHTEMVAASSASEGGSVSPSRKRKSESADTAPVQRLHQQHAAADLSECTSGGEPPCKRVVRDRAEEVEEEEECRPRVSKLYVRADPADLSLAVRDGYQWRKYGQKVTKDNPCPRAYFRCSFAPACPVKKKVQRSAHDASVLVATYEGDHTHGPPPSGSGSGSGASSKNAAKPPSPPRRQEAAVAVTAAAAASEMVRRXNLAEQMAVTLARDPSFKAALVSALSGRILELSPTKD

SEQ ID NO: 255369 - protein, 180 aa, Zea mays
  unsure (1)..(180): unsure at all Xaa locations
  Clone ID: MRT4577_164478C.1.pep
FLLSLLLRLRLIHPRQGIASVATLEEDHFESKDDAGASKTYPQXAGTARKNGFIDIKNRPCRXVEVSTSNTGKHGHGICHFVAINIFNGKNLEDIVPSSHNCDIPHVNHTEYHLTDISEDGFVSPLTSDWHTKDDLTLPTDDTLVAQINEGFXSGKDLAATVPSAMGEEQICALKECGPK

SEQ ID NO: 255370 - protein, 76 aa, Zea mays
  Clone ID: MRT4577_16447C.1.pep
GPKFRGSPKSQLFGQHFSHHFSRVDPHPRYQGILGLVPQSIFKKNPKKAQVRGFLGAQKTHHLGGIWGLKKPIPCP

SEQ ID NO: 255371 - protein, 161 aa, Zea mays
  unsure (1)..(161): unsure at all Xaa locations
  Clone ID: MRT4577_164480C.1.pep
MSDSEEHHFQSKADAGAPKTYPQHAGTXRKNGFVVIKNRPCRXVEVSTSKTDKHGHAKCHYXVAIDIFNGKKLAYIVPASHHWDIPHVNRTEYHVIDISEDGFXSLLTSRWDTKDDLRLPSDETLAALIIVGIESVKDLVVTVQSAMEEEQICTLKDVGPK

SEQ ID NO: 255372 - protein, 161 aa, Zea mays
  unsure (1)..(161): unsure at all Xaa locations
  Clone ID: MRT4577_164481C.1.pep
MSDSDVLHFESKADAGASKTYPQHAGTVRKNGFIVIKNRPCKVVEVSTSNTGKHVHGICHFVVIDIFNGKMLEDIVPSSHNCDIPHVNRTEYQLIDVPADGFASLLSSNGNTKVDLRLPIDETLVVQIKERIESVKDLVATVPSAMXGIDXICTLKDVCTQ

SEQ ID NO: 255373 - protein, 253 aa, Zea mays
  unsure (1)..(253): unsure at all Xaa locations
  Clone ID: MRT4577_164483C.1.pep
AYRRVFQETEELRNQLVEKESNIQRRSRELNELVAQTDMERRKLEEERKKNADQNDSLNMARIEQQRADERALQLLEKHKKEKEDALNRILQLERQVDEKQKLELDIEQLKGKLEVVKHMAGEGVDVKKRSEELTAELNERIEEMEDLEALNQTLVVKHRMTNDEIQDAKKELIXXFXICLXPRSNIGIKRMGXEXDENPFVLSCRQRYGQDAEMKAAELVSLGQDPLEDPNWHPFKKVPPGFTKDPILLAQV

SEQ ID NO: 255374 - protein, 47 aa, Zea mays
  Clone ID: MRT4577_164484C.1.pep
GGVKKYRPLFMGPGHSSWGITIIPLIKVYNNDSNLYGLKGHSIFKWV

SEQ ID NO: 255375 - protein, 47 aa, Zea mays
  Clone ID: MRT4577_164485C.1.pep
CSRIFCFLAPLRLPASSGGLAQGARRLPFPQSRHSRVIFALDRQAKS

SEQ ID NO: 255376 - protein, 280 aa, Zea mays
  unsure (1)..(280): unsure at all Xaa locations
  Clone ID: MRT4577_164486C.1.pep
QNLVSWARPLFNDRRKLPKMADPRLEGRYPMRGLYQALAVASMCIQSGAASRPLIADVVTALSYLASQPYDPNAALASRKPGGDQRSKPGENGRAVSRNDETGSSGHKTPAKDREDSPRDLPAILNKDLDRERMVAEAKMWGDRXAWWPRLRCGATESAWWLRRRCGVKIGVTSGVQRLGRGAWIRLLGTARGQLSEQKRDIHPCISFVYFQVHFRSGGGRQAPGLYISRSGKSGKAAALYWTVNACGCTCKFSEKFCENERTYLSSTCKKKKPRAEFSR

SEQ ID NO: 255377 - protein, 105 aa, Zea mays
  Clone ID: MRT4577_164487C.1.pep
SGTPGFDLDGHSCELSPAPCFRILADIRCRMHQSGRSVYGRSRIFSRIRDLHRGMFIAQPSLSDFLLISAHVLLTDIARAAAYRTARQSAPPLELLSAHKGLAVR

SEQ ID NO: 255378 - protein, 59 aa, Zea mays
  Clone ID: MRT4577_164488C.1.pep
ETTLTSASTVYCTFQNFADLQHKMNNNEQNKLSSEVELPRQKVPMTNHVNGSGGEMHSA

SEQ ID NO: 255379 - protein, 49 aa, Zea mays
  Clone ID: MRT4577_164489C.1.pep
EALVLPTDGFTHYFDMTGPRHLCPLEEPVLRDEFVDSSLRLDRWRVLSS

SEQ ID NO: 255380 - protein, 66 aa, Zea mays
  Clone ID: MRT4577_16448C.1.pep
TIQKPAYLILQGTQKKFQSLKQPTPIMCNTRWLWYTTTYTIYRKPLTFYPHSHSFFTNCVKNVQLF

SEQ ID NO: 255381 - protein, 150 aa, Zea mays
  Clone ID: MRT4577_164490C.1.pep
MEEVRILKRGEEPPAPAPAPAPTPVIAAPPAAQAAAVDQRALCSTGRIGPQAPAVVPTKKMVSLPAASPANAPVFARRVFSAAVPAVVPTKKTATVPAPSSAKAPVYAGLAFSTAAPEPSSLPMPSFVLLPAESEATRGLRCLLRIGDLA

SEQ ID NO: 255382 - protein, 131 aa, Zea mays
  Clone ID: MRT4577_164491C.1.pep
KKKKNSPFSPPVPSAATTPPISPRPLHAGAAAEQALPVPIHRCPLFSPLYASPRPHLSHRYGHQPVPPTPFQITPSSCGDSGGSGSNCCGWTTVDAVCADQFAFLGRSQAEHVPRRSTLPILTRSTLMRGL

SEQ ID NO: 255383 - protein, 69 aa, Zea mays
  unsure (1)..(69): unsure at all Xaa locations
  Clone ID: MRT4577_164492C.1.pep
SRQNMQSTPIVYLVLKGYTCHILLILALTTLKYKTLMLHETPPLTLPSTKRDLSRGRLIQLGEXEDASP

SEQ ID NO: 255384 - protein, 219 aa, Zea mays
  Clone ID: MRT4577_164493C.1.pep
MATAVLRSHDALNNRLHLDAYTPSPPKPAAAQKTATPVKGPAASGRRSPPARPAASARKQLSPVKENPKRRLVMEEVRILKRGEEPPAPAPAPAPTPVIAAPPAAQAAAVDQRALCSTGRIGPQAPAVVPTKKMVSLPAASPANAPVFARRVFSAAVPAVVPTKKTATVPAPSSAKAPVYAGLAFSTAAPEPSSLPMPSFVLLPAESEDTRGLRCLLRI

SEQ ID NO: 255385 - protein, 98 aa, Zea mays
  Clone ID: MRT4577_164494C.1.pep
SEARERHRRRDRPAHTSKSCGFAESILSSSTRSKYVVAEAIAKPTGAIRSEAASVFSCLPCVAQRVRQHCHFGRCGEGNMRRAFARRAGDSCPSVDLP

SEQ ID NO: 255386 - protein, 71 aa, Zea mays
  Clone ID: MRT4577_164495C.1.pep
RQILFSVSFPVTGGRRFVSVFLKSLRPAYGVKLTQQCTGASAVNNTGGQSNPKKAPRVRTFNCRQGRILQP

SEQ ID NO: 255387 - protein, 38 aa, Zea mays
  unsure (1)..(38): unsure at all Xaa locations
  Clone ID: MRT4577_164496C.1.pep
LRXXTXXEVASGKEAAPFPEWRRPRRARGGDTGSNGRR

SEQ ID NO: 255388 - protein, 308 aa, Zea mays
  unsure (1)..(308): unsure at all Xaa locations
  Clone ID: MRT4577_164497C.1.pep
RLGLARQRPPSRILXPPWPRRFSDPTMRSTXPPASRRVXPSPAKPRRRRSPKPAAASSPPARAAAPIASTSPPKPAAAQKTATPVKGPAASGRRSPVARPAASARKQLSPVKENPXPAACHGGGPXLKRGEEPPAPAPAPAPTPVIAAPPAAQAAGRLYWSDSPTDRAPSPCPPSYSLPRSPRPLVAFGASSASATSPDTAAVSQSASLHPSAWSLLPSLFWLFPMDGWRLKGGWIRWKASFSGSGQIISPGNPFRSTSSGIFSEERLANGVPVVGFVFGGGGLRLCPLIACCSVRLSGKADVFRLEE

SEQ ID NO: 255389 - protein, 64 aa, Zea mays
  Clone ID: MRT4577_164498C.1.pep
NPDFDWLGLGLKIRFGLENFGGLVFPPLVPKSWGFFQVCWENWLTLGLFFSPLAPGDYSTQVFF

SEQ ID NO: 255390 - protein, 151 aa, Zea mays
  Clone ID: MRT4577_164499C.1.pep
TGGGREKNWGGPLLNCWGGPKRPFFFPSGAGGPLIKETDLLASPGGGEVKKLSPPGPRELAHVKSPGQDLSNHPHRNRVTLEPKKHPGEGFKGKKFLHPPFFVQPHLNKGRLPWGEKTRVFFKGPAGFLGQGQKFFNQPWGQFGGPFGRLK

SEQ ID NO: 255391 - protein, 44 aa, Zea mays
  unsure (1)..(44): unsure at all Xaa locations
  Clone ID: MRT4577_16449C.1.pep
DYKHLYFESDAATVNMPXNYILESRASTARADYFAQKQRKLNRR

SEQ ID NO: 255392 - protein, 169 aa, Zea mays
  unsure (1)..(169): unsure at all Xaa locations
  Clone ID: MRT4577_1644C.1.pep
MVHVNFYRNYGKTFKKPRRPYEKERLDAELKLVGXLLTLDEKNPRRIFEGEALLRRMNRYGLLAEGQNKLDYVLALTAENFLARRLQTLVFKAGMAKSIHHARVLIKQRHIRVGRQIVNVPSFMVRVESEKHIDFSLSSPFGGGPAGRVKRKNQKKASGGGDAGDEDEE

SEQ ID NO: 255393 - protein, 89 aa, Zea mays
  Clone ID: MRT4577_164500C.1.pep
RLGYQQVLALGLRYVRVLPDMENIYSSMGLYQYSIPSYVRAVTMPSVAVVSWQVWSMSLGAAFIPDIVPASLDPNVHGWQKELPSCSPP

SEQ ID NO: 255394 - protein, 150 aa, Zea mays
  Clone ID: MRT4577_164501C.1.pep
MAPKAEKKPAAKKPAEEEPATEKAEKAPAGKKPKAEKRLPAGKSGAGEGKKGKKKAKKSVETYKIYIFKVLKQVHPDIGISSKAMSIMNSFINDIFEKLAAEAAKLARYNKKPTITSREIQTSVRLVLPGELAKHAVSEGTKAVTKFTSS

SEQ ID NO: 255395 - protein, 111 aa, Zea mays
  Clone ID: MRT4577_164502C.1.pep
RIPRDARVRVGGTTVEELRYRRRSAVPCRVQPAPLRPLSRPRVRRAPSESQLLYVKIRFQDGRRVFNSPSLHWNYFRYIAAVTFLVPWNFFSTTELRHYPKFMRARALRRE

SEQ ID NO: 255396 - protein, 88 aa, Zea mays
  Clone ID: MRT4577_164503C.1.pep
PPNSSPHSSSRSLRIRNSTVSGGQRDCGACGEEPGDNGHSSGADGDGPIHTLSFLSCFHRFSFHTHTRIAQVPPQTSSHGSRADSCTC

SEQ ID NO: 255397 - protein, 70 aa, Zea mays
  Clone ID: MRT4577_164504C.1.pep
PQPMGKVGMGFPPVQNRIIPVRECVRSQGFPNKYEFAGNIQNKPRQIGNSGPPPFAYALGKKLKKTLFKG

SEQ ID NO: 255398 - protein, 150 aa, Zea mays
  Clone ID: MRT4577_164505C.1.pep
MAPKAEKKPAAKKPVEEEPATEKAEKAPAGKKPKAEKRLPAGKSGAGEGKKGKKKAKKSVETYKIYIFKVLKQVHPDIGISSKAMSIMNSFINDIFEKLAAEAAKLARYNKKPTITSREIQTSVRLVLPGELAKHAVSEGTKAVTKFTSS

SEQ ID NO: 255399 - protein, 150 aa, Zea mays; identical to SEQ ID NO: 255394
  Clone ID: MRT4577_164506C.1.pep

SEQ ID NO: 255400 - protein, 86 aa, Zea mays
  Clone ID: MRT4577_164507C.1.pep
MTGDKELFMNLLYYIMVKRRGTCIMQNFPPPPHLKVNPPTQRAGRSRYSVEPHNWVNEQHIFVIGEFVSEALLLRIWGPTVGGCTP

SEQ ID NO: 255401 - protein, 62 aa, Zea mays
  Clone ID: MRT4577_164508C.1.pep
MGGAVMVAIAASIGNLLQGWDNATIAGAVLYIKMGKRKVASSVFTCMRRGVQGNRGSILALP

SEQ ID NO: 255402 - protein, 142 aa, Zea mays
  unsure (1)..(142): unsure at all Xaa locations
  Clone ID: MRT4577_164509C.1.pep
PTRPIEDNLLSPLISRQATSVEGKEXVSSMGIGGGWQLAWKWTEREGEDGQKEGGFQRIYLHEEGVQGNRGSILSLPGGDVPTGGEFIQAAALVSQPALYSKELLEQRAAGPAMMHPSEAVTKGPRWADLFEPGVKHALFGG

SEQ ID NO: 255403 - protein, 50 aa, Zea mays
  Clone ID: MRT4577_16450C.1.pep
GRLHILGKRENSNKNEKKLCSQTPPKFPNMALDQKLKHIFKGLNILSPWA

SEQ ID NO: 255404 - protein, 169 aa, Zea mays
  unsure (1)..(169): unsure at all Xaa locations
  Clone ID: MRT4577_164512C.1.pep
CIQDRNRHDRTTEEHHFESKVEAVLLKTYPHQVVTARKNGFVVIKNRPCKAVEVATTKTXGKHDLSKCHFVAIDIFNGKKLEYIVPSSHNCDIPHENRTEYQLIDISEDGFVSLLTSYVNTNDDLRLPADETLVAHIKEGFESGKDLVVTVQSAMGEEQICAVKDVDPK

SEQ ID NO: 255405 - protein, 747 aa, Zea mays
  Clone ID: MRT4577_164513C.1.pep
MGGAVMVAIAASIGNLLQGWDNATIAGAVLYIKKEFNLQSEPLIEGLIVAMSLIGATVITTFSGAAADCVGRRPMLVASAVLYFVSGLVMLWAPSVYILLLARLIDGFGIGLAVTLVPLYISETAPTDIRGLLNTLPQFSGSGGMFLSYCMVFGMSLMPKPDWRLMLGVLSIPSLIYFGLTVFYLPESPRWLVSKGRMAEAKRVLQRLRGREDVSGEMALLVEGLGVGKDTRIEEYIIGPDDELADEGLAPDPEKIKLYGPEEGLSWVARPVRGQSALGSALGLISRHGSMAASQGKPLVDPMVTLFGSVHEKMPEIMGSMRSTLFPNFGSMFSVADQQQVKADWDAESQREGEDYASDHGGDDIEDNLQSPLISRQATSVEGKEIAAPHGSILGAVGRSSSLQGGEAVSSMGIGGGWQLAWKWTEREGEDGQKEGGFQRIYLHEEGVQGNRGSILSLPGGDVPPGGEFIQAAALVSQPALYSKELLEQRAAGPAMMHPSEAVTKGPRWADLFEPGVKHALFVGIGIQILQQFAGINGVLYYTPQILEQAGVGVLLSNLGLNASSASILISALTTLLMLPSIGIAMRLMDMSGRRFLLLATIPVLIVALLVLVVSNIVDVGDVAHAALSTASVIVYFCFFVMGFGPVPNILCAEIFPTTVRGVCIAICALAFWVGDIIVTYTLPVMLNVVGLAGVFGVYAVVCVLALAFVFVKVPETKGMPLEVITEFFSVGAKQAKEEEEEEAREG

SEQ ID NO: 255406 - protein, 109 aa, Zea mays
  Clone ID: MRT4577_164514C.1.pep
PKYRYKRKNKKQLHKILYDCNEQLKQFSHVNQKALDQYVNFTEQREQLQRRRAELDAGDVKIMELISVLDQRKDESIERTFKGVARHFREVFSELVQGGHGYLVMMKKK

SEQ ID NO: 255407 - protein, 90 aa, Zea mays
  Clone ID: MRT4577_164515C.1.pep
TFVTRFHRKTQKKIFFFALNEKGGLPLSKGQPSRQRSETAKLWWLCFPSVEQKTPKNEVKRGTNSSSGQNSPSVEGNRSSGGLYLLVPDF

SEQ ID NO: 255408 - protein, 175 aa, Zea mays
  unsure (1)..(175): unsure at all Xaa locations
  Clone ID: MRT4577_164516C.1.pep
MSDSEEHHFKSRPFLGXSKTYRRGGWTGPKNGVIFIKNRPCKGGGVSTSKTGKHGHPKCHFVAIDIFNGKRVEDIVPSSHNCDIPHVNRTEDQLIDISEEGFVSLLTSHGNTKEELRLPTDETLVAHIKEGFXSGKDLVVTVHSPMGGEQICPLKDVGPKKLPWFWGRNPTLSHL

SEQ ID NO: 255409 - protein, 82 aa, Zea mays
  Clone ID: MRT4577_164517C.1.pep
LFPGGSPEGFPVPFPGPPGVFPPRGFPRGDPPAGPNFFCGPQGGARRVGPRVWGVPVWGPSLGLPNNPVSPRFVLNRGGLFF

SEQ ID NO: 255410 - protein, 161 aa, Zea mays
  unsure (1)..(161): unsure at all Xaa locations
  Clone ID: MRT4577_164519C.1.pep
MSDSEEHDFESKADAGASKSYPQHDDTGRNNGFIVINNRPCKGVEVSTSXTAKHAHAECHFVPIQIFNVKKLEYIVPSSHHCDIPHVNRTDYQLIDISEDGFESLLTSDGNTNDDRRLPTDETLVDQIKEGVKSGQXDLAETAQSAMSQEHICALKDVGPK

SEQ ID NO: 255411 - protein, 191 aa, Zea mays
  unsure (1)..(191): unsure at all Xaa locations
  Clone ID: MRT4577_16451C.1.pep
TTHASAHPIAGLDVTMSIAWTGERTFNRRCLHDCVHAPDPSEHAIYIIVRTLARSVEDNEDHCLGSGDASADDQDEDNYDPKNRPCNRSCEALDKDLDIDPTLGSTRPTSXPTMIDTAIETADGTGGQYDGLQIVADGQATRQVNTQAGXLTAQERATVRATIRASQLPLPIALAGVGDGPCDMTRHMEDH

SEQ ID NO: 255412 - protein, 150 aa, Zea mays
  unsure (1)..(150): unsure at all Xaa locations
  Clone ID: MRT4577_164520C.1.pep
LYATYEGTSAEDIAVARANARAIELGKLIGRHTVRSTLGALVYELRYKEIXNEFKRCKEVSKKKKRXTDEDIEALXLSDEILHPIVLPTVVDVHATCQTLCLSTGSSTLTAPHGEERIACTIGTGPGAAAYNAIDQVIHILTDIPEYGMN

SEQ ID NO: 255413 - protein, 155 aa, Zea mays
  unsure (1)..(155): unsure at all Xaa locations
  Clone ID: MRT4577_164522C.1.pep
GWWFFFFFFFFFFFFFFFFFFFFFFFFFFFFFFFPRPKGPKKGKPPQNPRGRGGETNGGEPPPGRPAPQLTRPWGPGPGPPGNPSRPNPPGPQRGAPPAPGXAWAPPGRPAVPRPFGAEGPPPGAQTPPGXNPPPPREPPPGPLKPAMGGPDFQG

SEQ ID NO: 255414 - protein, 124 aa, Zea mays
  Clone ID: MRT4577_164525C.1.pep
SHGVMPCLLFESHSPSCSLPGAAGKRLQFPHGKRESSRNRQHLHHKTHGAPPFGSRPPAPASGVEEHPLAPVPTAEAGCWTTLTSQRTGLLPARGLTAPLGLTPGAAAEPAPAAPEAPATKDRG

SEQ ID NO: 255415 - protein, 142 aa, Zea mays
  Clone ID: MRT4577_164526C.1.pep
NRLTALSCSTTRACRSDATRTAGADVDHPPSAFLLLLVLLGCASLASGGAPMAGHVLGGVKENPATANSGEYDGLGRFSGDEHNRRENALLESELVMEANEQVEVGTLHHLTLEDLEAGRKKLYEALDWVKPWLDFQELQEF

SEQ ID NO: 255416 - protein, 186 aa, Zea mays
  unsure (1)..(186): unsure at all Xaa locations
  Clone ID: MRT4577_164527C.1.pep
MPDSHEHHFQSNADAVAINTYPHHAGTGRKNDFIFIENRPCKVVEVSTSNTVKHGHAKCHFDVIHIFNAKKLEHIVPSSHNCDIPHANRTEHQLIDITEDGFVSLLTSDGKTNDDLILPTDETLVAHIKEGVESGXKDLVETVHSAMAEDQICXAMNDAGPKQLPWLWRRNSTVSQLKSEKKCITI

SEQ ID NO: 255417 - protein, 92 aa, Zea mays
  Clone ID: MRT4577_164529C.1.pep
TLEQPAAAIVSALPKEPAPPKQPEEPKQSALRAHVPPQKNGGFCEVGKKLVIYLEHNLEKNSTKEEILAALEKGCSVLPDPYQKQCDELVAE

SEQ ID NO: 255418 - protein, 75 aa, Zea mays
  Clone ID: MRT4577_16452C.1.pep
PAGCSGPALWSRRRNKVITVPQRQRPGECDRACDIFLLLSFKSCAYRADTYTNSGLVKGLDGGREKIKRDVVRSF

SEQ ID NO: 255419 - protein, 156 aa, Zea mays
  unsure (1)..(156): unsure at all Xaa locations
  Clone ID: MRT4577_164530C.1.pep
MRVLLADVALLVLVGSATXTHTIGVXGCHPSPSSHIPSMKDRSTMGKLTPSMLLAPTGHLTTPVNLITPVHVTXASHMSAAPCNYHNQATRAEANPRSHRXPSQQXYHFCVHLKGTCGVIRTTVLIQRCWLLRPTSTIEATSYCLPQGESLMQPSG

SEQ ID NO: 255420 - protein, 235 aa, Zea mays
  Clone ID: MRT4577_164531C.1.pep
MDPEKQLQQDGGSVEADIERLPVDLLAHILSLLSPFRDLSMAEGVSRRWRWAVERSLASRRRLSFAGQRTGDDTAARLVRAAVNLGDLDICWGCRITDDGLIKISSADCVGNLTSISLWGLAGITDKGVVRLVSRAYSLQHLNIGGTFITDESLYAVANSCANLKSIILWSCRHVTEGGLVALVNKCRRLECINVGGMRVPPESLVGLLSISPALEIRSTARILNLNLNAGVQVS

SEQ ID NO: 255421 - protein, 83 aa, Zea mays
  Clone ID: MRT4577_164532C.1.pep
SHSLLYYCLLSTSGNRIRPLTNILPGNHQNPLCTLWAHLAFLGHHLALMGSWADCFSALPLRLLVVPTQSLLARSKGNSARAV

SEQ ID NO: 255422 - protein, 88 aa, Zea mays
  Clone ID: MRT4577_164533C.1.pep
ERLKLLCVTAKHPGRFGARSWKLNPRAGRQLRRAGPRTCRFKGFFMPPSKARGPPENYAPKVPSGGSVPPPSQGGQVFCYEVPGFKAR

SEQ ID NO: 255423 - protein, 85 aa, Zea mays
  Clone ID: MRT4577_164534C.1.pep
NTNEIQCILSMAMRLIYIIIYQGNAQLPEPMPNQTTMVFYLQDITKGSRATVTPVAGIKGSDRTYTTFGSIFVVDDPVTLSISPT

SEQ ID NO: 255424 - protein, 92 aa, Zea mays
  Clone ID: MRT4577_164535C.1.pep
HKNCRGPQQGVKLPFVGVQHGFFWVQFNGSKPGPKRHPPPGCNFVKPPLFPMTSKGLGPCKLFVGVCVQLKRFFPGLTLPVKQSPCSPVMEL

SEQ ID NO: 255425 - protein, 113 aa, Zea mays
  unsure (1)..(113): unsure at all Xaa locations
  Clone ID: MRT4577_164536C.1.pep
MRESISSHIGQNAMQPPNARWQLDCPNHAIQADGQMPGDNTIETGDDAFNNFVKDTDAGNHAPRDCVVDLDSTVIXDRKTDTYRQVCHPDQLIIDEKNANCNLARVDYTIAKD

SEQ ID NO: 255426 - protein, 92 aa, Zea mays
  Clone ID: MRT4577_164537C.1.pep
VPKISPPRGDQRFFFPRGPVLKCGGKKKAPVFPKNKKDKPANPNSPQGPFKPSQKLQGFFLPHGFVKFGFNAGELRGFYFKNHQLSKKIVFG

SEQ ID NO: 255427 - protein, 62 aa, Zea mays
  Clone ID: MRT4577_164538C.1.pep
LIKYKYIRFHFVSLFLLLLLSFVSFLFISAKALFFLNKRRDINVELFKKKKKKKKKKKKKKK

SEQ ID NO: 255428 - protein, 160 aa, Zea mays
  unsure (1)..(160): unsure at all Xaa locations
  Clone ID: MRT4577_164539C.1.pep
MAESEEHHLESKAEAAAPKTYPQQADTVRKNGFIVINNRPCKDVEVSTSKTGKDGHAKCHFAIIDIFNGKKRADIVPSSHXCDIPHANRTDYQLIDISEDGFVSLLTSHGNTNDDLRLPTDETLGAQINEGIKSGKDLVVTVQSAMGEEHICALKDVGPK

SEQ ID NO: 255429 - protein, 38 aa, Zea mays
  Clone ID: MRT4577_16453C.1.pep
LGYHLRMFALMTTLTFNFKHSTYTFLININTYYLLNTL

SEQ ID NO: 255430 - protein, 174 aa, Zea mays
  Clone ID: MRT4577_164540C.1.pep
MARAEQESLAAPPLESTATARQRVPSVEVHLYRRGAGPVAIFRSDLAGPRRDRLDVRRIQASHGLRALFAFRPEGSRRGRGLRIRCDPAAGYSALPFRDGAAIALDGEPGESWTKPVSVIVAGLLVPAVMAAVAANGVPEPLRSSRLANGIFAPWILFSAVIIFARARTRPRAP

SEQ ID NO: 255431 - protein, 164 aa, Zea mays
  unsure (1)..(164): unsure at all Xaa locations
  Clone ID: MRT4577_164541C.1.pep
MSDSEEHHFKSNADAGXASKTYPQQAATGRKNGFIDIKNRPCKVVEVSTSNTGKHGHAXCHFAAIDVFNDKKLEDIVPSSHDCDIPDVNRTEHQVIDISDDGCVSLLTSHGNTTDDLILPTDETRVVQIKEWCESGKDLVVTVQPAMGEEPICAMNDVGPKKLP

SEQ ID NO: 255432 - protein, 380 aa, Zea mays
  Clone ID: MRT4577_164543C.1.pep
MEALKKQASKLREHVAKQQQAVLKQFSTRYSQDPSLVDEAELECHQNLQRLYSTTRAAKHFQRNIVRGVEGFIAVSTKQMEIVKKLAGDCCKYGDDNQHFGFALARASEEFGKSHKQIEKEREDLLKILGEQIFEPLRRMIMSAPLEDARLLTYRYQRIRQDMESQIADVMRKQLKSKESSGNTDNSVKLQHAESKLSDLRTTLAALGREATAAMEAVEAQQQQVTYERLLAMVDAERTYHQNAADILNKLHDEMLYAKHHNESANHYDEQSSEPESDAGPAQVHSRSTSEDPVLTKPSESTGNSQEVQFLGEVIHPFDAQADGELSLAVGEYVVVRQVAANGWSEGECKGKAGWFPSAYVEQRDRAPASKVIEPGLLTT

SEQ ID NO: 255433 - protein, 259 aa, Zea mays
  Clone ID: MRT4577_164544C.1.pep
MGAAPSSDDSSRAGDGRAVASSAASGTGTGSNSNQAQSKRAPPPHKFHEIVAQEATTAGGGGGGGTAAAADLEDQACSTGVYLAGKTKKYWVDEKTRCNCFVLFARALSITWGDDPRYWIWHPVRETNDAEIVEAASLQNVCWLEVHGRLELSHLTPGCSYDVAFQVMLTEPAYGWSVPVNLRLRFPDGTVQARKEKLQGMPTKQWLELRAGEVKAPAQPGGAGRSGELEISLFEYDGGLWKKGLLIKGIKIVPKESDY

SEQ ID NO: 255434 - protein, 98 aa, Zea mays
  Clone ID: MRT4577_164546C.1.pep
RRKHLKLAAPKKLNRFPYQPHLNPGKKGNNPLAHPDQKRKGQIFPKSKKTIRGTLSGTQNHGPEGGTKPGGLMGTTGSLPLTNNGSKKTPLWSSKGGT

SEQ ID NO: 255435 - protein, 203 aa, Zea mays
  Clone ID: MRT4577_164547C.1.pep
MGAAPSSDDSSRAGDGRAVASSAASGTGSNSHQAQSKRAPPPHKFHEIVAQEATTAGGGGGTAAAAELEDQACSTGVYLAGKTKKYWVDEKTRCNCFVLFARALSITWGDDPRYWIWHPVRETKYVLSIRSACSSNYIYMHAQFSAQLDSSHVCTCTLSPSTLYSDAEIVEAASLQNVCAGGAREGWSCRTSRCSYDVALPGD

SEQ ID NO: 255436 - protein, 254 aa, Zea mays
  Clone ID: MRT4577_164548C.1.pep
VNLLNCLVVPRWRPDAYLQGGVRAAPFPASARGELGRRRREERDGRGEGAPARRRGAVEADIERLPVDLLAHILSLLSPFRDLSMAGGVSRRWRWAVERSLASRRRLSFAGQRTGDDTAARLVRAAVNLRDLDISRSCWGCRITDDGLIKISSADCVGNLTSISLWGLAGITDKGVVRLVSRAYSLQHLNIGGTFITDESLYAVANSCANLKVCLYCFFLLLNLKYFSSWQSVMFTHTISRIRCSESQARSLRA

SEQ ID NO: 255437 - protein, 70 aa, Zea mays
  Clone ID: MRT4577_16454C.1.pep
VGEGFKKSKIKMGFPRGPPKLIFKPGFQLTCPLLKKPLFYGWCQTRDFENVLFVWVQNFNNFFWFDSNNN

SEQ ID NO: 255438 - protein, 112 aa, Zea mays
  unsure (1)..(112): unsure at all Xaa locations
  Clone ID: MRT4577_164550C.1.pep
WGRVGSATGRWLRRCCCSDAHVYKVDSLSGRTVLHVAAAGGHVRCARLLLAGAGSGRSKLGNRAASGGGGGVTALHLAALHGHSCXVHLLVDXRAFVVSRTLSCAVPTMAFV

SEQ ID NO: 255439 - protein, 162 aa, Zea mays
  unsure (1)..(162): unsure at all Xaa locations
  Clone ID: MRT4577_164551C.1.pep
MGMGDSEEHHLESEGRRSGANMNYLKKAGTGRMNGXVGIKNQSLADVEETTXKTXDLGHDKAVSRILHIERKKHEHIGPVRHICDIAHVNRTEHHLIDIXDDGFVSLVTXDGNTKEDLKLPTGETLVAQIKEGFESGKDLVVTVQSAMGEEQICALKDVGPK

SEQ ID NO: 255440 - protein, 91 aa, Zea mays
  unsure (1)..(91): unsure at all Xaa locations
  Clone ID: MRT4577_164552C.1.pep
MGFPRAWLGRXLKVFGFGVYGLKGXSRVPPIKGNTLGGFFFSSMGREVALFPGPPPVPSNFWFWKIKGPLGFFFVFPFPQMGFKGGPGVFF

SEQ ID NO: 255441 - protein, 204 aa, Zea mays
  unsure (1)..(204): unsure at all Xaa locations
  Clone ID: MRT4577_164553C.1.pep
MARSSRNASRRSTWSIAFYLLLVLVGGLMLAKTAHAKDNDSAKDDGNAVSGPVIGIDLGTTXXSCVGVMKNGQVEIIANDQGNRITPSWVAFTDEERLVGDAAKNQFASNPHRTIFDIKRLIGQKFNDKSVQSDIKHFPFKVLNKSGQPRVKXVEVHGEEKTFTPXEEVSXAMVLGKMKEVAESYLGEPVKNAVVTGPXYFTDA

SEQ ID NO: 255442 - protein, 133 aa, Zea mays
  unsure (1)..(133): unsure at all Xaa locations
  Clone ID: MRT4577_164555C.1.pep
KKRTKKQYTGQSTWTLLGRTEPINPGVSRLSPQGPNPSTITFPFPPFLTVASATAGSSTSDVQLSNSSSRNCPDAAASICTAVSSTRVHPWPMALASLARMEAVAXPSPSSLSRVTTRAARGLERPWGCPCSL
